United States Patent Application Publication US 2007/0048756 A1 - sequence listing, part 27

SEQ ID NO: 945286 - DNA, 33 bp, Homo sapien
agatgaaaatggatgagattaataacaaaatat

SEQ ID NO: 945287 - DNA, 33 bp, Homo sapien
taattggaagaaatcacattccagttatgaccc

SEQ ID NO: 945288 - DNA, 33 bp, Homo sapien
taattggaagaaatcagattccagttatgaccc

SEQ ID NO: 945289 - DNA, 33 bp, Homo sapien
agtaaatgaaattctacagcaactatgccaggg

SEQ ID NO: 945290 - DNA, 33 bp, Homo sapien
agtaaatgaaattctatagcaactatgccaggg

SEQ ID NO: 945291 - DNA, 33 bp, Homo sapien
taaaaaagtggccaaacctctggaatccaagaa

SEQ ID NO: 945292 - DNA, 33 bp, Homo sapien
taaaaaagtggccaaagctctggaatccaagaa

SEQ ID NO: 945293 - DNA, 33 bp, Homo sapien
ctggaatccaagaacacatgcatttaggagaaa

SEQ ID NO: 945294 - DNA, 33 bp, Homo sapien
ctggaatccaagaacagatgcatttaggagaaa

SEQ ID NO: 945295 - DNA, 33 bp, Homo sapien
tcttgtcaccattacaaaaaggaatttagtttt

SEQ ID NO: 945296 - DNA, 33 bp, Homo sapien
tcttgtcaccattacagaaaggaatttagtttt

SEQ ID NO: 945297 - DNA, 33 bp, Homo sapien
atggtggtgccactcaagtaaatattgtcccct

SEQ ID NO: 945298 - DNA, 33 bp, Homo sapien
atggtggtgccactcatgtaaatattgtcccct

SEQ ID NO: 945299 - DNA, 33 bp, Homo sapien
cacgtcaatgttcgtcaaaagggtctgctggca

SEQ ID NO: 945300 - DNA, 33 bp, Homo sapien
cacgtcaatgttcgtcgaaagggtctgctggca

SEQ ID NO: 945301 - DNA, 33 bp, Homo sapien
ttttatgataagattacggcctctattaagttg

SEQ ID NO: 945302 - DNA, 33 bp, Homo sapien
ttttatgataagattatggcctctattaagttg

SEQ ID NO: 945303 - DNA, 33 bp, Homo sapien
atgaactatcatagcagaaatgtttgtaaagca

SEQ ID NO: 945304 - DNA, 33 bp, Homo sapien
atgaactatcatagcataaatgtttgtaaagca

SEQ ID NO: 945305 - DNA, 33 bp, Homo sapien
accttgtacattttaacattgctaacactactg

SEQ ID NO: 945306 - DNA, 33 bp, Homo sapien
accttgtacattttaagattgctaacactactg

SEQ ID NO: 945307 - DNA, 33 bp, Homo sapien
tcatgatcaaagtgaccctttcatttgcatttg

SEQ ID NO: 945308 - DNA, 33 bp, Homo sapien
tcatgatcaaagtgactctttcatttgcatttg

SEQ ID NO: 945309 - DNA, 33 bp, Homo sapien
atcgctttataaaacaaactccatctagtcatt

SEQ ID NO: 945310 - DNA, 33 bp, Homo sapien
atcgctttataaaacacactccatctagtcatt

SEQ ID NO: 945311 - DNA, 33 bp, Homo sapien
tgtttttctggtaacgaaccagattctataagg

SEQ ID NO: 945312 - DNA, 33 bp, Homo sapien
tgtttttctggtaacggaccagattctataagg

SEQ ID NO: 945313 - DNA, 33 bp, Homo sapien
ataacgggaaccacacaatattcttcaaatgca

SEQ ID NO: 945314 - DNA, 33 bp, Homo sapien
ataacgggaaccacacgatattcttcaaatgca

SEQ ID NO: 945315 - DNA, 33 bp, Homo sapien
aagcggctcatcagctaacttcgagataggaag

SEQ ID NO: 945316 - DNA, 33 bp, Homo sapien
aagcggctcatcagctgacttcgagataggaag

SEQ ID NO: 945317 - DNA, 33 bp, Homo sapien
tatccccagcctcgtccgaaactaaacacgcag

SEQ ID NO: 945318 - DNA, 33 bp, Homo sapien
tatccccagcctcgtctgaaactaaacacgcag

SEQ ID NO: 945319 - DNA, 33 bp, Homo sapien
tccactgaggttacacaatgtgcacaactgagg

SEQ ID NO: 945320 - DNA, 33 bp, Homo sapien
tccactgaggttacacgatgtgcacaactgagg

SEQ ID NO: 945321 - DNA, 33 bp, Homo sapien
aatggttcatataaagactagcgctgaaaaatg

SEQ ID NO: 945322 - DNA, 33 bp, Homo sapien
aatggttcatataaagcctagcgctgaaaaatg

SEQ ID NO: 945323 - DNA, 33 bp, Homo sapien
cccagagttggttctcaaatatcctaggctgcc

SEQ ID NO: 945324 - DNA, 33 bp, Homo sapien
cccagagttggttctcgaatatcctaggctgcc

SEQ ID NO: 945325 - DNA, 33 bp, Homo sapien
tgaggttactttcaaacaaggtcaagctccttg

SEQ ID NO: 945326 - DNA, 33 bp, Homo sapien
tgaggttactttcaaagaaggtcaagctccttg

SEQ ID NO: 945327 - DNA, 33 bp, Homo sapien
aacctcagcagcaagaacggttgtcatgatgct

SEQ ID NO: 945328 - DNA, 33 bp, Homo sapien
aacctcagcagcaagagcggttgtcatgatgct

SEQ ID NO: 945329 - DNA, 33 bp, Homo sapien
tcctttgtcttgcaaacagggtatcttcaggtc

SEQ ID NO: 945330 - DNA, 33 bp, Homo sapien
tcctttgtcttgcaaatagggtatcttcaggtc

SEQ ID NO: 945331 - DNA, 33 bp, Homo sapien
accctcaccattggaacggcaggacctgaagat

SEQ ID NO: 945332 - DNA, 33 bp, Homo sapien
accctcaccattggaatggcaggacctgaagat

SEQ ID NO: 945333 - DNA, 33 bp, Homo sapien
aaatcaatcatctgaacgaaagtttaagatgat

SEQ ID NO: 945334 - DNA, 33 bp, Homo sapien
aaatcaatcatctgaatgaaagtttaagatgat

SEQ ID NO: 945335 - DNA, 33 bp, Homo sapien
atatacttgatgaccacattaaattttcataaa

SEQ ID NO: 945336 - DNA, 33 bp, Homo sapien
atatacttgatgaccatattaaattttcataaa

SEQ ID NO: 945337 - DNA, 33 bp, Homo sapien
ttttcattgaagttgacggtgactagagagttt

SEQ ID NO: 945338 - DNA, 33 bp, Homo sapien
ttttcattgaagttgagggtgactagagagttt

SEQ ID NO: 945339 - DNA, 33 bp, Homo sapien
tatgaaaattcctgaactgaccctcattctgtc

SEQ ID NO: 945340 - DNA, 33 bp, Homo sapien
tatgaaaattcctgaagtgaccctcattctgtc

SEQ ID NO: 945341 - DNA, 33 bp, Homo sapien
gttgaggtaacttccactgagctcaccaaaaca

SEQ ID NO: 945342 - DNA, 33 bp, Homo sapien
gttgaggtaacttccattgagctcaccaaaaca

SEQ ID NO: 945343 - DNA, 33 bp, Homo sapien
tcccgaagcttccaaaaattatactgaagatca

SEQ ID NO: 945344 - DNA, 33 bp, Homo sapien
tcccgaagcttccaaatattatactgaagatca

SEQ ID NO: 945345 - DNA, 33 bp, Homo sapien
ctatggaagaatggtcagaaaaatgcaatgttg

SEQ ID NO: 945346 - DNA, 33 bp, Homo sapien
ctatggaagaatggtcggaaaaatgcaatgttg

SEQ ID NO: 945347 - DNA, 33 bp, Homo sapien
agcagctaccatgaagcccttttaggacgaatg

SEQ ID NO: 945348 - DNA, 33 bp, Homo sapien
agcagctaccatgaaggccttttaggacgaatg

SEQ ID NO: 945349 - DNA, 33 bp, Homo sapien
gtgatatcctacaacacaaaatcttctccacct

SEQ ID NO: 945350 - DNA, 33 bp, Homo sapien
gtgatatcctacaacataaaatcttctccacct

SEQ ID NO: 945351 - DNA, 33 bp, Homo sapien
ccctctttgtccttccacttgcaaatattcaga

SEQ ID NO: 945352 - DNA, 33 bp, Homo sapien
ccctctttgtccttccgcttgcaaatattcaga

SEQ ID NO: 945353 - DNA, 33 bp, Homo sapien
gctccaggtttcccacagatgccttcagtgacc

SEQ ID NO: 945354 - DNA, 33 bp, Homo sapien
gctccaggtttcccacggatgccttcagtgacc

SEQ ID NO: 945355 - DNA, 33 bp, Homo sapien
gcagtgactgcagtgacggaacagctaagagtc

SEQ ID NO: 945356 - DNA, 33 bp, Homo sapien
gcagtgactgcagtgagggaacagctaagagtc

SEQ ID NO: 945357 - DNA, 33 bp, Homo sapien
ttatgtacctgccgtgaaacataatcccatata

SEQ ID NO: 945358 - DNA, 33 bp, Homo sapien
ttatgtacctgccgtgcaacataatcccatata

SEQ ID NO: 945359 - DNA, 33 bp, Homo sapien
tatagttagaggaaaacacatatattagaagat

SEQ ID NO: 945360 - DNA, 33 bp, Homo sapien
tatagttagaggaaaagacatatattagaagat

SEQ ID NO: 945361 - DNA, 33 bp, Homo sapien
acaaaattcaacaagcaaaaattcatgtgcatc

SEQ ID NO: 945362 - DNA, 33 bp, Homo sapien
acaaaattcaacaagcgaaaattcatgtgcatc

SEQ ID NO: 945363 - DNA, 33 bp, Homo sapien
taagacattgaggtgaccttcagccctggtctg

SEQ ID NO: 945364 - DNA, 33 bp, Homo sapien
taagacattgaggtgatcttcagccctggtctg

SEQ ID NO: 945365 - DNA, 33 bp, Homo sapien
tgaattgtctaaaccactgccattgtcttggaa

SEQ ID NO: 945366 - DNA, 33 bp, Homo sapien
tgaattgtctaaaccattgccattgtcttggaa

SEQ ID NO: 945367 - DNA, 33 bp, Homo sapien
cacctttgtacaattacagcgcagtagttgtaa

SEQ ID NO: 945368 - DNA, 33 bp, Homo sapien
cacctttgtacaattagagcgcagtagttgtaa

SEQ ID NO: 945369 - DNA, 33 bp, Homo sapien
atccaagattccttgaccgaaaacctccaggag

SEQ ID NO: 945370 - DNA, 33 bp, Homo sapien
atccaagattccttgagcgaaaacctccaggag

SEQ ID NO: 945371 - DNA, 33 bp, Homo sapien
gcagaaatatcatgggcaattgaaatccaaaag

SEQ ID NO: 945372 - DNA, 33 bp, Homo sapien
gcagaaatatcatgggtaattgaaatccaaaag

SEQ ID NO: 945373 - DNA, 33 bp, Homo sapien
atttattcaattctaaaaaggcagagagaggta

SEQ ID NO: 945374 - DNA, 33 bp, Homo sapien
atttattcaattctaagaaggcagagagaggta

SEQ ID NO: 945375 - DNA, 33 bp, Homo sapien
cagccttatattggaacatgatgctgtccagga

SEQ ID NO: 945376 - DNA, 33 bp, Homo sapien
cagccttatattggaagatgatgctgtccagga

SEQ ID NO: 945377 - DNA, 33 bp, Homo sapien
acttattcaaggttacacagcccacagctgaca

SEQ ID NO: 945378 - DNA, 33 bp, Homo sapien
acttattcaaggttacgcagcccacagctgaca

SEQ ID NO: 945379 - DNA, 33 bp, Homo sapien
agtagcatttaaaacaggattacctgatcttgg

SEQ ID NO: 945380 - DNA, 33 bp, Homo sapien
agtagcatttaaaacatgattacctgatcttgg

SEQ ID NO: 945381 - DNA, 33 bp, Homo sapien
agataaagacaacacaatggattttaatttata

SEQ ID NO: 945382 - DNA, 33 bp, Homo sapien
agataaagacaacacactggattttaatttata

SEQ ID NO: 945383 - DNA, 33 bp, Homo sapien
caagaactaatgaaggcattgcagataaagaca

SEQ ID NO: 945384 - DNA, 33 bp, Homo sapien
caagaactaatgaagggattgcagataaagaca

SEQ ID NO: 945385 - DNA, 33 bp, Homo sapien
tgtgtcgtctaaagatgagtgctgataactgga

SEQ ID NO: 945386 - DNA, 33 bp, Homo sapien
tgtgtcgtctaaagattagtgctgataactgga

SEQ ID NO: 945387 - DNA, 33 bp, Homo sapien
gttcccaatgtaattcccatgcttgtaattcca

SEQ ID NO: 945388 - DNA, 33 bp, Homo sapien
gttcccaatgtaattctcatgcttgtaattcca

SEQ ID NO: 945389 - DNA, 33 bp, Homo sapien
tacagcaaggattggtcaaattccttcagtatt

SEQ ID NO: 945390 - DNA, 33 bp, Homo sapien
tacagcaaggattggttaaattccttcagtatt

SEQ ID NO: 945391 - DNA, 33 bp, Homo sapien
ctatctcttcaacgggaaaagtgaatgatccag

SEQ ID NO: 945392 - DNA, 33 bp, Homo sapien
ctatctcttcaacgggcaaagtgaatgatccag

SEQ ID NO: 945393 - DNA, 33 bp, Homo sapien
gagtctgccctcgttgaacatcctcttctgctt

SEQ ID NO: 945394 - DNA, 33 bp, Homo sapien
gagtctgccctcgttggacatcctcttctgctt

SEQ ID NO: 945395 - DNA, 33 bp, Homo sapien
ggatataaactgggggaagatacacagaagtga

SEQ ID NO: 945396 - DNA, 33 bp, Homo sapien
ggatataaactggggggagatacacagaagtga

SEQ ID NO: 945397 - DNA, 33 bp, Homo sapien
tattctccttcccatcactttgtggctatcctg

SEQ ID NO: 945398 - DNA, 33 bp, Homo sapien
tattctccttcccatctctttgtggctatcctg

SEQ ID NO: 945399 - DNA, 33 bp, Homo sapien
gtgtggggcaaatgaagggttgatagcactgaa

SEQ ID NO: 945400 - DNA, 33 bp, Homo sapien
gtgtggggcaaatgaatggttgatagcactgaa

SEQ ID NO: 945401 - DNA, 33 bp, Homo sapien
aaggaccttccattggcacaaatacagggcata

SEQ ID NO: 945402 - DNA, 33 bp, Homo sapien
aaggaccttccattgggacaaatacagggcata

SEQ ID NO: 945403 - DNA, 33 bp, Homo sapien
gtgaaacctcttttgacctaaaatgatggcctt

SEQ ID NO: 945404 - DNA, 33 bp, Homo sapien
gtgaaacctcttttgagctaaaatgatggcctt

SEQ ID NO: 945405 - DNA, 33 bp, Homo sapien
tcttcaatcggccagacggacgtggctgcttgt

SEQ ID NO: 945406 - DNA, 33 bp, Homo sapien
tcttcaatcggccagatggacgtggctgcttgt

SEQ ID NO: 945407 - DNA, 33 bp, Homo sapien
gtgaaaggctccctaccgactcttcacaatcat

SEQ ID NO: 945408 - DNA, 33 bp, Homo sapien
gtgaaaggctccctacggactcttcacaatcat

SEQ ID NO: 945409 - DNA, 33 bp, Homo sapien
tggcaaggaaatgcagcctatagatttgatgtc

SEQ ID NO: 945410 - DNA, 33 bp, Homo sapien
tggcaaggaaatgcagtctatagatttgatgtc

SEQ ID NO: 945411 - DNA, 33 bp, Homo sapien
atataggaaggtttcacgaatgtagctcttgtt

SEQ ID NO: 945412 - DNA, 33 bp, Homo sapien
atataggaaggtttcatgaatgtagctcttgtt

SEQ ID NO: 945413 - DNA, 33 bp, Homo sapien
gaaacacaacatgggaacatagagaaatcctca

SEQ ID NO: 945414 - DNA, 33 bp, Homo sapien
gaaacacaacatgggagcatagagaaatcctca

SEQ ID NO: 945415 - DNA, 33 bp, Homo sapien
acattctactcttaccaaattttcagtatacaa

SEQ ID NO: 945416 - DNA, 33 bp, Homo sapien
acattctactcttacccaattttcagtatacaa

SEQ ID NO: 945417 - DNA, 33 bp, Homo sapien
taccagaatttcacgacaggtcatgaagtgtgt

SEQ ID NO: 945418 - DNA, 33 bp, Homo sapien
taccagaatttcacgagaggtcatgaagtgtgt

SEQ ID NO: 945419 - DNA, 33 bp, Homo sapien
catcgatgtatctatccatgcaatcatgaacca

SEQ ID NO: 945420 - DNA, 33 bp, Homo sapien
catcgatgtatctatctatgcaatcatgaacca

SEQ ID NO: 945421 - DNA, 33 bp, Homo sapien
ggatggatcgtctccacatttaaaggcctcaat

SEQ ID NO: 945422 - DNA, 33 bp, Homo sapien
ggatggatcgtctccagatttaaaggcctcaat

SEQ ID NO: 945423 - DNA, 33 bp, Homo sapien
cgtttcagtcggaagaagtaaatggtgaatgga

SEQ ID NO: 945424 - DNA, 33 bp, Homo sapien
cgtttcagtcggaagaggtaaatggtgaatgga

SEQ ID NO: 945425 - DNA, 33 bp, Homo sapien
taatgaattttggccacgatgtcaaaagcttct

SEQ ID NO: 945426 - DNA, 33 bp, Homo sapien
taatgaattttggccatgatgtcaaaagcttct

SEQ ID NO: 945427 - DNA, 33 bp, Homo sapien
aattgtccttataatcaatatacctccttcaat

SEQ ID NO: 945428 - DNA, 33 bp, Homo sapien
aattgtccttataatccatatacctccttcaat

SEQ ID NO: 945429 - DNA, 33 bp, Homo sapien
attttaatcttgaatccctacatcatatctgct

SEQ ID NO: 945430 - DNA, 33 bp, Homo sapien
attttaatcttgaatctctacatcatatctgct

SEQ ID NO: 945431 - DNA, 33 bp, Homo sapien
ttgcaaatctcttctcccaatcaattacctcca

SEQ ID NO: 945432 - DNA, 33 bp, Homo sapien
ttgcaaatctcttctcgcaatcaattacctcca

SEQ ID NO: 945433 - DNA, 33 bp, Homo sapien
atcttcctgtggctcacgatagcctctggtgtt

SEQ ID NO: 945434 - DNA, 33 bp, Homo sapien
atcttcctgtggctcatgatagcctctggtgtt

SEQ ID NO: 945435 - DNA, 33 bp, Homo sapien
gtaagtaaatcgacccaagaagataggtgctat

SEQ ID NO: 945436 - DNA, 33 bp, Homo sapien
gtaagtaaatcgacccgagaagataggtgctat

SEQ ID NO: 945437 - DNA, 33 bp, Homo sapien
caagcatgagccaccacatggcccggtacacca

SEQ ID NO: 945438 - DNA, 33 bp, Homo sapien
caagcatgagccaccagatggcccggtacacca

SEQ ID NO: 945439 - DNA, 33 bp, Homo sapien
atgtgtcattatcttaaatttgcaattccctga

SEQ ID NO: 945440 - DNA, 33 bp, Homo sapien
atgtgtcattatcttacatttgcaattccctga

SEQ ID NO: 945441 - DNA, 33 bp, Homo sapien
gaataagcaaaacctcacctgacttatatgttt

SEQ ID NO: 945442 - DNA, 33 bp, Homo sapien
gaataagcaaaacctcgcctgacttatatgttt

SEQ ID NO: 945443 - DNA, 33 bp, Homo sapien
caaaatacatgagggacaatcaaaaaagacaaa

SEQ ID NO: 945444 - DNA, 33 bp, Homo sapien
caaaatacatgagggagaatcaaaaaagacaaa

SEQ ID NO: 945445 - DNA, 33 bp, Homo sapien
tatctgaaatttaaaactatcctgttgtcttgt

SEQ ID NO: 945446 - DNA, 33 bp, Homo sapien
tatctgaaatttaaaattatcctgttgtcttgt

SEQ ID NO: 945447 - DNA, 33 bp, Homo sapien
taatatgcatacaaatcactagacgttctcatt

SEQ ID NO: 945448 - DNA, 33 bp, Homo sapien
taatatgcatacaaattactagacgttctcatt

SEQ ID NO: 945449 - DNA, 33 bp, Homo sapien
ccaagctaattgtagcacttggcatcaatcagt

SEQ ID NO: 945450 - DNA, 33 bp, Homo sapien
ccaagctaattgtagcgcttggcatcaatcagt

SEQ ID NO: 945451 - DNA, 33 bp, Homo sapien
gtgatcattagggaaacgaaagcctgacagcac

SEQ ID NO: 945452 - DNA, 33 bp, Homo sapien
gtgatcattagggaaatgaaagcctgacagcac

SEQ ID NO: 945453 - DNA, 33 bp, Homo sapien
ataaatcattcatgacacttccatttaaacaat

SEQ ID NO: 945454 - DNA, 33 bp, Homo sapien
ataaatcattcatgactcttccatttaaacaat

SEQ ID NO: 945455 - DNA, 33 bp, Homo sapien
ttagcatttgaatccacagaatttgagaaaaga

SEQ ID NO: 945456 - DNA, 33 bp, Homo sapien
ttagcatttgaatccatagaatttgagaaaaga

SEQ ID NO: 945457 - DNA, 33 bp, Homo sapien
aggaagtaagaattgaggttgctacagacacat

SEQ ID NO: 945458 - DNA, 33 bp, Homo sapien
aggaagtaagaattgatgttgctacagacacat

SEQ ID NO: 945459 - DNA, 33 bp, Homo sapien
ccactgcacatatagacagcctcaagggaagaa

SEQ ID NO: 945460 - DNA, 33 bp, Homo sapien
ccactgcacatatagagagcctcaagggaagaa

SEQ ID NO: 945461 - DNA, 33 bp, Homo sapien
caacctcagtggaaatcaccattactgaggcct

SEQ ID NO: 945462 - DNA, 33 bp, Homo sapien
caacctcagtggaaatgaccattactgaggcct

SEQ ID NO: 945463 - DNA, 33 bp, Homo sapien
ggcaggctctgcaagacggagaaaaatattccc

SEQ ID NO: 945464 - DNA, 33 bp, Homo sapien
ggcaggctctgcaagatggagaaaaatattccc

SEQ ID NO: 945465 - DNA, 33 bp, Homo sapien
cattggattttaatccaagtggtgcatcctggg

SEQ ID NO: 945466 - DNA, 33 bp, Homo sapien
cattggattttaatcctagtggtgcatcctggg

SEQ ID NO: 945467 - DNA, 33 bp, Homo sapien
ggtgaaaatgccttggaaagtactctctgctgc

SEQ ID NO: 945468 - DNA, 33 bp, Homo sapien
ggtgaaaatgccttgggaagtactctctgctgc

SEQ ID NO: 945469 - DNA, 33 bp, Homo sapien
aaaacttcaacaattacatacatccacatatat

SEQ ID NO: 945470 - DNA, 33 bp, Homo sapien
aaaacttcaacaattatatacatccacatatat

SEQ ID NO: 945471 - DNA, 33 bp, Homo sapien
tgattttcttaaaatggcagtgagtcaaaattt

SEQ ID NO: 945472 - DNA, 33 bp, Homo sapien
tgattttcttaaaatgtcagtgagtcaaaattt

SEQ ID NO: 945473 - DNA, 33 bp, Homo sapien
ctatggccaccacataagaaaagagaagtgaac

SEQ ID NO: 945474 - DNA, 33 bp, Homo sapien
ctatggccaccacatatgaaaagagaagtgaac

SEQ ID NO: 945475 - DNA, 33 bp, Homo sapien
caaccagtgttgctgacaaaagtgaatgagtgg

SEQ ID NO: 945476 - DNA, 33 bp, Homo sapien
caaccagtgttgctgagaaaagtgaatgagtgg

SEQ ID NO: 945477 - DNA, 33 bp, Homo sapien
acactgaatggcccccgaatgatgaatttttaa

SEQ ID NO: 945478 - DNA, 33 bp, Homo sapien
acactgaatggccccctaatgatgaatttttaa

SEQ ID NO: 945479 - DNA, 33 bp, Homo sapien
gtctatagttttatgacatttggtcgcctatgc

SEQ ID NO: 945480 - DNA, 33 bp, Homo sapien
gtctatagttttatgatatttggtcgcctatgc

SEQ ID NO: 945481 - DNA, 33 bp, Homo sapien
aaaagtagaaaaagagaagcttaacaacaataa

SEQ ID NO: 945482 - DNA, 33 bp, Homo sapien
aaaagtagaaaaagagtagcttaacaacaataa

SEQ ID NO: 945483 - DNA, 33 bp, Homo sapien
atttgaatactggccaacagtcatcatccaggt

SEQ ID NO: 945484 - DNA, 33 bp, Homo sapien
atttgaatactggccatcagtcatcatccaggt

SEQ ID NO: 945485 - DNA, 33 bp, Homo sapien
gtcccacaggaaattacagtcctgattcaacca

SEQ ID NO: 945486 - DNA, 33 bp, Homo sapien
gtcccacaggaaattagagtcctgattcaacca

SEQ ID NO: 945487 - DNA, 33 bp, Homo sapien
caaccacagattcaaaccagacattccctctac

SEQ ID NO: 945488 - DNA, 33 bp, Homo sapien
caaccacagattcaaagcagacattccctctac

SEQ ID NO: 945489 - DNA, 33 bp, Homo sapien
attgttttatttatcacgtgagcactattattt

SEQ ID NO: 945490 - DNA, 33 bp, Homo sapien
attgttttatttatcatgtgagcactattattt

SEQ ID NO: 945491 - DNA, 33 bp, Homo sapien
agtgaaggcttacagactctacagttgagattt

SEQ ID NO: 945492 - DNA, 33 bp, Homo sapien
agtgaaggcttacagattctacagttgagattt

SEQ ID NO: 945493 - DNA, 33 bp, Homo sapien
gacagctataattccaaagggaacaggacactg

SEQ ID NO: 945494 - DNA, 33 bp, Homo sapien
gacagctataattccagagggaacaggacactg

SEQ ID NO: 945495 - DNA, 33 bp, Homo sapien
catcagcttccagtaaaatgtaagtataccatt

SEQ ID NO: 945496 - DNA, 33 bp, Homo sapien
catcagcttccagtaagatgtaagtataccatt

SEQ ID NO: 945497 - DNA, 33 bp, Homo sapien
agagaaaaaatagtgaagcgttattgaaaggta

SEQ ID NO: 945498 - DNA, 33 bp, Homo sapien
agagaaaaaatagtgacgcgttattgaaaggta

SEQ ID NO: 945499 - DNA, 33 bp, Homo sapien
caagagccatatggagcatcattgcacagaatg

SEQ ID NO: 945500 - DNA, 33 bp, Homo sapien
caagagccatatggaggatcattgcacagaatg

SEQ ID NO: 945501 - DNA, 33 bp, Homo sapien
tgtaaaaagtggcagaccatttcctttctgttt

SEQ ID NO: 945502 - DNA, 33 bp, Homo sapien
tgtaaaaagtggcagatcatttcctttctgttt

SEQ ID NO: 945503 - DNA, 33 bp, Homo sapien
atagattctgctgtccaagacaaacagaaacac

SEQ ID NO: 945504 - DNA, 33 bp, Homo sapien
atagattctgctgtccgagacaaacagaaacac

SEQ ID NO: 945505 - DNA, 33 bp, Homo sapien
ttcttgaaaggccaaagacttgactgatcctag

SEQ ID NO: 945506 - DNA, 33 bp, Homo sapien
ttcttgaaaggccaaatacttgactgatcctag

SEQ ID NO: 945507 - DNA, 33 bp, Homo sapien
ctggcacacaacagtcaaggagtcgaggtgcct

SEQ ID NO: 945508 - DNA, 33 bp, Homo sapien
ctggcacacaacagtcgaggagtcgaggtgcct

SEQ ID NO: 945509 - DNA, 33 bp, Homo sapien
tcataaaggtagtgtacgcacaaagagtgagca

SEQ ID NO: 945510 - DNA, 33 bp, Homo sapien
tcataaaggtagtgtaggcacaaagagtgagca

SEQ ID NO: 945511 - DNA, 33 bp, Homo sapien
ccatctgtgcctacctaaaggattctaaacgca

SEQ ID NO: 945512 - DNA, 33 bp, Homo sapien
ccatctgtgcctacctgaaggattctaaacgca

SEQ ID NO: 945513 - DNA, 33 bp, Homo sapien
ggtgctgttctcacaacagtgagtgatttccca

SEQ ID NO: 945514 - DNA, 33 bp, Homo sapien
ggtgctgttctcacaagagtgagtgatttccca

SEQ ID NO: 945515 - DNA, 33 bp, Homo sapien
tacattatgaagaaaagaaactgaattggctca

SEQ ID NO: 945516 - DNA, 33 bp, Homo sapien
tacattatgaagaaaataaactgaattggctca

SEQ ID NO: 945517 - DNA, 33 bp, Homo sapien
tgcttgtccttggtcaaaaaagtgacatagatc

SEQ ID NO: 945518 - DNA, 33 bp, Homo sapien
tgcttgtccttggtcagaaaagtgacatagatc

SEQ ID NO: 945519 - DNA, 33 bp, Homo sapien
ggtctgtactgtgaaaatcaaaggcaaacacca

SEQ ID NO: 945520 - DNA, 33 bp, Homo sapien
ggtctgtactgtgaaagtcaaaggcaaacacca

SEQ ID NO: 945521 - DNA, 33 bp, Homo sapien
tttgttagcattaaaactaagttgtagaaataa

SEQ ID NO: 945522 - DNA, 33 bp, Homo sapien
tttgttagcattaaaattaagttgtagaaataa

SEQ ID NO: 945523 - DNA, 33 bp, Homo sapien
aataattctcatcaaaattcaaatagctccttt

SEQ ID NO: 945524 - DNA, 33 bp, Homo sapien
aataattctcatcaaagttcaaatagctccttt

SEQ ID NO: 945525 - DNA, 33 bp, Homo sapien
gatcaaaacctctcatcactcatcattagcaag

SEQ ID NO: 945526 - DNA, 33 bp, Homo sapien
gatcaaaacctctcatgactcatcattagcaag

SEQ ID NO: 945527 - DNA, 33 bp, Homo sapien
ctctcacctgttttaagggcatacctctcatcc

SEQ ID NO: 945528 - DNA, 33 bp, Homo sapien
ctctcacctgttttaatggcatacctctcatcc

SEQ ID NO: 945529 - DNA, 33 bp, Homo sapien
tgtcttgtgaggacagaatcactaaaattctac

SEQ ID NO: 945530 - DNA, 33 bp, Homo sapien
tgtcttgtgaggacaggatcactaaaattctac

SEQ ID NO: 945531 - DNA, 33 bp, Homo sapien
ctcactgcatcatggccattcggtagtattcag

SEQ ID NO: 945532 - DNA, 33 bp, Homo sapien
ctcactgcatcatggctattcggtagtattcag

SEQ ID NO: 945533 - DNA, 33 bp, Homo sapien
cgtagttgaaattgccaaaaactgaatactacc

SEQ ID NO: 945534 - DNA, 33 bp, Homo sapien
cgtagttgaaattgccgaaaactgaatactacc

SEQ ID NO: 945535 - DNA, 33 bp, Homo sapien
tgcaattgtcatatagaccttttatcagctata

SEQ ID NO: 945536 - DNA, 33 bp, Homo sapien
tgcaattgtcatataggccttttatcagctata

SEQ ID NO: 945537 - DNA, 33 bp, Homo sapien
ctgagttttaccacttcaaacgcttagaaataa

SEQ ID NO: 945538 - DNA, 33 bp, Homo sapien
ctgagttttaccacttgaaacgcttagaaataa

SEQ ID NO: 945539 - DNA, 33 bp, Homo sapien
caaccaagccatatcaccatttaaaaagtaaac

SEQ ID NO: 945540 - DNA, 33 bp, Homo sapien
caaccaagccatatcagcatttaaaaagtaaac

SEQ ID NO: 945541 - DNA, 33 bp, Homo sapien
gatgcttctctgtagaccttgtgtgtttaatat

SEQ ID NO: 945542 - DNA, 33 bp, Homo sapien
gatgcttctctgtagatcttgtgtgtttaatat

SEQ ID NO: 945543 - DNA, 33 bp, Homo sapien
atgtcttagctattgtcaattaccctggaacga

SEQ ID NO: 945544 - DNA, 33 bp, Homo sapien
atgtcttagctattgtgaattaccctggaacga

SEQ ID NO: 945545 - DNA, 33 bp, Homo sapien
atgaacatccctaccaatattttacaagggttc

SEQ ID NO: 945546 - DNA, 33 bp, Homo sapien
atgaacatccctaccagtattttacaagggttc

SEQ ID NO: 945547 - DNA, 33 bp, Homo sapien
gcaatgtggtaacatgacatccgaggcattttc

SEQ ID NO: 945548 - DNA, 33 bp, Homo sapien
gcaatgtggtaacatggcatccgaggcattttc

SEQ ID NO: 945549 - DNA, 33 bp, Homo sapien
ttgagtctatatagcacctcacagttcagatcc

SEQ ID NO: 945550 - DNA, 33 bp, Homo sapien
ttgagtctatatagcatctcacagttcagatcc

SEQ ID NO: 945551 - DNA, 33 bp, Homo sapien
gagctaaatggttaaacgcacaatgggcttttt

SEQ ID NO: 945552 - DNA, 33 bp, Homo sapien
gagctaaatggttaaatgcacaatgggcttttt

SEQ ID NO: 945553 - DNA, 33 bp, Homo sapien
cgcatagatgaacaacggtcaaataattgtttg

SEQ ID NO: 945554 - DNA, 33 bp, Homo sapien
cgcatagatgaacaactgtcaaataattgtttg

SEQ ID NO: 945555 - DNA, 33 bp, Homo sapien
gttttgtgaagattccaattcctagtttaccac

SEQ ID NO: 945556 - DNA, 33 bp, Homo sapien
gttttgtgaagattcccattcctagtttaccac

SEQ ID NO: 945557 - DNA, 33 bp, Homo sapien
gaacactgttttgaaacgcacaaaaaatacatg

SEQ ID NO: 945558 - DNA, 33 bp, Homo sapien
gaacactgttttgaaatgcacaaaaaatacatg

SEQ ID NO: 945559 - DNA, 33 bp, Homo sapien
atgtgggcttgagaataagtacaagattttttt

SEQ ID NO: 945560 - DNA, 33 bp, Homo sapien
atgtgggcttgagaatgagtacaagattttttt

SEQ ID NO: 945561 - DNA, 33 bp, Homo sapien
aagtgatagaagattacaaagagcatagtctaa

SEQ ID NO: 945562 - DNA, 33 bp, Homo sapien
aagtgatagaagattataaagagcatagtctaa

SEQ ID NO: 945563 - DNA, 33 bp, Homo sapien
ctattttgtgacattacagtgcttcataatata

SEQ ID NO: 945564 - DNA, 33 bp, Homo sapien
ctattttgtgacattagagtgcttcataatata

SEQ ID NO: 945565 - DNA, 33 bp, Homo sapien
cttgtgtggttatatactaatttttgtgtatgt

SEQ ID NO: 945566 - DNA, 33 bp, Homo sapien
cttgtgtggttatatattaatttttgtgtatgt

SEQ ID NO: 945567 - DNA, 33 bp, Homo sapien
ttaattatgttggagcacaagtagtcagaaagt

SEQ ID NO: 945568 - DNA, 33 bp, Homo sapien
ttaattatgttggagcccaagtagtcagaaagt

SEQ ID NO: 945569 - DNA, 33 bp, Homo sapien
agaagttttcaaccctcactgcctggaaatttc

SEQ ID NO: 945570 - DNA, 33 bp, Homo sapien
agaagttttcaaccctgactgcctggaaatttc

SEQ ID NO: 945571 - DNA, 33 bp, Homo sapien
acttctggcagtgataagttgaaatttccaggc

SEQ ID NO: 945572 - DNA, 33 bp, Homo sapien
acttctggcagtgatatgttgaaatttccaggc

SEQ ID NO: 945573 - DNA, 33 bp, Homo sapien
aatgatccttatcagactaactcagcttctttt

SEQ ID NO: 945574 - DNA, 33 bp, Homo sapien
aatgatccttatcagattaactcagcttctttt

SEQ ID NO: 945575 - DNA, 33 bp, Homo sapien
aagacaccaagagaaaatgcaggtacagtaagt

SEQ ID NO: 945576 - DNA, 33 bp, Homo sapien
aagacaccaagagaaactgcaggtacagtaagt

SEQ ID NO: 945577 - DNA, 33 bp, Homo sapien
aacttctgacattttcccttatatcacacattt

SEQ ID NO: 945578 - DNA, 33 bp, Homo sapien
aacttctgacattttcgcttatatcacacattt

SEQ ID NO: 945579 - DNA, 33 bp, Homo sapien
ttatgtctgtaattaactgttacacctgtagaa

SEQ ID NO: 945580 - DNA, 33 bp, Homo sapien
ttatgtctgtaattaattgttacacctgtagaa

SEQ ID NO: 945581 - DNA, 33 bp, Homo sapien
ttgaagttgacgtacaagtattcatgacattgc

SEQ ID NO: 945582 - DNA, 33 bp, Homo sapien
ttgaagttgacgtacaggtattcatgacattgc

SEQ ID NO: 945583 - DNA, 33 bp, Homo sapien
tgaaggaatcgtgtccccacacttacctccaac

SEQ ID NO: 945584 - DNA, 33 bp, Homo sapien
tgaaggaatcgtgtcctcacacttacctccaac

SEQ ID NO: 945585 - DNA, 33 bp, Homo sapien
ttctcttcagatctataaataaaagtgcatcta

SEQ ID NO: 945586 - DNA, 33 bp, Homo sapien
ttctcttcagatctatgaataaaagtgcatcta

SEQ ID NO: 945587 - DNA, 33 bp, Homo sapien
aactactaaagccatgaaatagataaaccgccc

SEQ ID NO: 945588 - DNA, 33 bp, Homo sapien
aactactaaagccatggaatagataaaccgccc

SEQ ID NO: 945589 - DNA, 33 bp, Homo sapien
taataccaccataggaccaaaatctgtagaatt

SEQ ID NO: 945590 - DNA, 33 bp, Homo sapien
taataccaccataggagcaaaatctgtagaatt

SEQ ID NO: 945591 - DNA, 33 bp, Homo sapien
ttaactctatgtcttcccatgactcaagttttg

SEQ ID NO: 945592 - DNA, 33 bp, Homo sapien
ttaactctatgtcttcgcatgactcaagttttg

SEQ ID NO: 945593 - DNA, 33 bp, Homo sapien
aaagcattagagaaaacagaggcactagtccac

SEQ ID NO: 945594 - DNA, 33 bp, Homo sapien
aaagcattagagaaaatagaggcactagtccac

SEQ ID NO: 945595 - DNA, 33 bp, Homo sapien
agaaaaagagaagtagaccctaaaaatgtgggt

SEQ ID NO: 945596 - DNA, 33 bp, Homo sapien
agaaaaagagaagtaggccctaaaaatgtgggt

SEQ ID NO: 945597 - DNA, 33 bp, Homo sapien
ttcttctcaggatcccagagcactctagtcacc

SEQ ID NO: 945598 - DNA, 33 bp, Homo sapien
ttcttctcaggatcccggagcactctagtcacc

SEQ ID NO: 945599 - DNA, 33 bp, Homo sapien
gtgtaatgcaagggaaactatatcaaacatgtt

SEQ ID NO: 945600 - DNA, 33 bp, Homo sapien
gtgtaatgcaagggaagctatatcaaacatgtt

SEQ ID NO: 945601 - DNA, 33 bp, Homo sapien
aagctcacagatgtcaaattatgctggaaaaca

SEQ ID NO: 945602 - DNA, 33 bp, Homo sapien
aagctcacagatgtcagattatgctggaaaaca

SEQ ID NO: 945603 - DNA, 33 bp, Homo sapien
gaacctttcatgacaagtcaacagcagatgtaa

SEQ ID NO: 945604 - DNA, 33 bp, Homo sapien
gaacctttcatgacaattcaacagcagatgtaa

SEQ ID NO: 945605 - DNA, 33 bp, Homo sapien
atcttaaagggcaataaaaccctagattctccc

SEQ ID NO: 945606 - DNA, 33 bp, Homo sapien
atcttaaagggcaatacaaccctagattctccc

SEQ ID NO: 945607 - DNA, 33 bp, Homo sapien
tattgcatataactaaaagggactgtatctaga

SEQ ID NO: 945608 - DNA, 33 bp, Homo sapien
tattgcatataactaacagggactgtatctaga

SEQ ID NO: 945609 - DNA, 33 bp, Homo sapien
ttactctaagatagcaacgctaaaaataggaca

SEQ ID NO: 945610 - DNA, 33 bp, Homo sapien
ttactctaagatagcagcgctaaaaataggaca

SEQ ID NO: 945611 - DNA, 33 bp, Homo sapien
ctgcagagactggaaacgtatggccttgtgatg

SEQ ID NO: 945612 - DNA, 33 bp, Homo sapien
ctgcagagactggaaatgtatggccttgtgatg

SEQ ID NO: 945613 - DNA, 33 bp, Homo sapien
agagaaaaattctgaactcagagctgctgcagt

SEQ ID NO: 945614 - DNA, 33 bp, Homo sapien
agagaaaaattctgaagtcagagctgctgcagt

SEQ ID NO: 945615 - DNA, 33 bp, Homo sapien
aagcaggaaatgttcaccgtgttattacttctt

SEQ ID NO: 945616 - DNA, 33 bp, Homo sapien
aagcaggaaatgttcatcgtgttattacttctt

SEQ ID NO: 945617 - DNA, 33 bp, Homo sapien
tatgaggaaccatttgaaatacattactattgt

SEQ ID NO: 945618 - DNA, 33 bp, Homo sapien
tatgaggaaccatttggaatacattactattgt

SEQ ID NO: 945619 - DNA, 33 bp, Homo sapien
catataaacgtgtgagaaggaaatctgagtcca

SEQ ID NO: 945620 - DNA, 33 bp, Homo sapien
catataaacgtgtgaggaggaaatctgagtcca

SEQ ID NO: 945621 - DNA, 33 bp, Homo sapien
catttcctattagcaccatggccaattgttttc

SEQ ID NO: 945622 - DNA, 33 bp, Homo sapien
catttcctattagcactatggccaattgttttc

SEQ ID NO: 945623 - DNA, 33 bp, Homo sapien
actttaactattaaacgagcgagcgtttgatgt

SEQ ID NO: 945624 - DNA, 33 bp, Homo sapien
actttaactattaaactagcgagcgtttgatgt

SEQ ID NO: 945625 - DNA, 33 bp, Homo sapien
cactgagcttgtaaaaagtcatcatttcctgaa

SEQ ID NO: 945626 - DNA, 33 bp, Homo sapien
cactgagcttgtaaaacgtcatcatttcctgaa

SEQ ID NO: 945627 - DNA, 33 bp, Homo sapien
actgtaactgttaatacgtatagattcataccc

SEQ ID NO: 945628 - DNA, 33 bp, Homo sapien
actgtaactgttaatatgtatagattcataccc

SEQ ID NO: 945629 - DNA, 33 bp, Homo sapien
aatttaaggatatatacgaggtcctaacatctc

SEQ ID NO: 945630 - DNA, 33 bp, Homo sapien
aatttaaggatatatatgaggtcctaacatctc

SEQ ID NO: 945631 - DNA, 33 bp, Homo sapien
agagaagctatttgtacggctgagtagtaaagt

SEQ ID NO: 945632 - DNA, 33 bp, Homo sapien
agagaagctatttgtatggctgagtagtaaagt

SEQ ID NO: 945633 - DNA, 33 bp, Homo sapien
agctattctttcccccactaactaatatgattc

SEQ ID NO: 945634 - DNA, 33 bp, Homo sapien
agctattctttccccctctaactaatatgattc

SEQ ID NO: 945635 - DNA, 33 bp, Homo sapien
ctttggctgaactagacggaaagaattagatac

SEQ ID NO: 945636 - DNA, 33 bp, Homo sapien
ctttggctgaactagagggaaagaattagatac

SEQ ID NO: 945637 - DNA, 33 bp, Homo sapien
tttaaaaaatgtttcccagtgaattgtgttttc

SEQ ID NO: 945638 - DNA, 33 bp, Homo sapien
tttaaaaaatgtttcctagtgaattgtgttttc

SEQ ID NO: 945639 - DNA, 33 bp, Homo sapien
cagatccctattttgaccatatcactatacaag

SEQ ID NO: 945640 - DNA, 33 bp, Homo sapien
cagatccctattttgagcatatcactatacaag

SEQ ID NO: 945641 - DNA, 33 bp, Homo sapien
taactcattcagttgcactaataacctcctgaa

SEQ ID NO: 945642 - DNA, 33 bp, Homo sapien
taactcattcagttgccctaataacctcctgaa

SEQ ID NO: 945643 - DNA, 33 bp, Homo sapien
attggtgcagccactacgataaacagtctagag

SEQ ID NO: 945644 - DNA, 33 bp, Homo sapien
attggtgcagccactatgataaacagtctagag

SEQ ID NO: 945645 - DNA, 33 bp, Homo sapien
tgagcatcctaataaaaagtctgaaatccaaaa

SEQ ID NO: 945646 - DNA, 33 bp, Homo sapien
tgagcatcctaataaacagtctgaaatccaaaa

SEQ ID NO: 945647 - DNA, 33 bp, Homo sapien
agagtattagtgatctcaaatattggttgtcag

SEQ ID NO: 945648 - DNA, 33 bp, Homo sapien
agagtattagtgatctgaaatattggttgtcag

SEQ ID NO: 945649 - DNA, 33 bp, Homo sapien
gaagacaaagaaaaaacgtgaaaacatacacag

SEQ ID NO: 945650 - DNA, 33 bp, Homo sapien
gaagacaaagaaaaaaggtgaaaacatacacag

SEQ ID NO: 945651 - DNA, 33 bp, Homo sapien
agcgaattcatccaaacttccaagtaagaaata

SEQ ID NO: 945652 - DNA, 33 bp, Homo sapien
agcgaattcatccaaatttccaagtaagaaata

SEQ ID NO: 945653 - DNA, 33 bp, Homo sapien
tagcttattgctaaaaatggatgagagcacaat

SEQ ID NO: 945654 - DNA, 33 bp, Homo sapien
tagcttattgctaaaattggatgagagcacaat

SEQ ID NO: 945655 - DNA, 33 bp, Homo sapien
ttcaaaatacattagacgtcttacagtgcaatg

SEQ ID NO: 945656 - DNA, 33 bp, Homo sapien
ttcaaaatacattagatgtcttacagtgcaatg

SEQ ID NO: 945657 - DNA, 33 bp, Homo sapien
tttttgcacaggggaaactggacaattctgctt

SEQ ID NO: 945658 - DNA, 33 bp, Homo sapien
tttttgcacaggggaatctggacaattctgctt

SEQ ID NO: 945659 - DNA, 33 bp, Homo sapien
ctggagcaaatgcatacacaaggagaaaaataa

SEQ ID NO: 945660 - DNA, 33 bp, Homo sapien
ctggagcaaatgcatatacaaggagaaaaataa

SEQ ID NO: 945661 - DNA, 33 bp, Homo sapien
gtagcaggttctaagcacatttcaatgatgtta

SEQ ID NO: 945662 - DNA, 33 bp, Homo sapien
gtagcaggttctaagcccatttcaatgatgtta

SEQ ID NO: 945663 - DNA, 33 bp, Homo sapien
tcgaaatcctgtgatacgaatattaagcaagtt

SEQ ID NO: 945664 - DNA, 33 bp, Homo sapien
tcgaaatcctgtgatatgaatattaagcaagtt

SEQ ID NO: 945665 - DNA, 33 bp, Homo sapien
gtcacttccatacatcacaagactacacagaga

SEQ ID NO: 945666 - DNA, 33 bp, Homo sapien
gtcacttccatacatcgcaagactacacagaga

SEQ ID NO: 945667 - DNA, 33 bp, Homo sapien
tctccacccagaggacacagtgtagcagataca

SEQ ID NO: 945668 - DNA, 33 bp, Homo sapien
tctccacccagaggactcagtgtagcagataca

SEQ ID NO: 945669 - DNA, 33 bp, Homo sapien
cttaggaaagtatcccagactaatgcatctagc

SEQ ID NO: 945670 - DNA, 33 bp, Homo sapien
cttaggaaagtatcccggactaatgcatctagc

SEQ ID NO: 945671 - DNA, 33 bp, Homo sapien
tgcctcacagtaagaacgtgctgctgtacgact

SEQ ID NO: 945672 - DNA, 33 bp, Homo sapien
tgcctcacagtaagaatgtgctgctgtacgact

SEQ ID NO: 945673 - DNA, 33 bp, Homo sapien
ccttcggcccaatggcaaaacttagccagtgcc

SEQ ID NO: 945674 - DNA, 33 bp, Homo sapien
ccttcggcccaatggccaaacttagccagtgcc

SEQ ID NO: 945675 - DNA, 33 bp, Homo sapien
ataaaaggactgatgactagcacacaatgccat

SEQ ID NO: 945676 - DNA, 33 bp, Homo sapien
ataaaaggactgatgagtagcacacaatgccat

SEQ ID NO: 945677 - DNA, 33 bp, Homo sapien
cttttcagatgagtaacagccagtactggttta

SEQ ID NO: 945678 - DNA, 33 bp, Homo sapien
cttttcagatgagtaagagccagtactggttta

SEQ ID NO: 945679 - DNA, 33 bp, Homo sapien
ggaactttgaatatggcatgctctacagaatct

SEQ ID NO: 945680 - DNA, 33 bp, Homo sapien
ggaactttgaatatggtatgctctacagaatct

SEQ ID NO: 945681 - DNA, 33 bp, Homo sapien
aagttctattcacaagaaaatcatgaccaggta

SEQ ID NO: 945682 - DNA, 33 bp, Homo sapien
aagttctattcacaaggaaatcatgaccaggta

SEQ ID NO: 945683 - DNA, 33 bp, Homo sapien
tattctgtcccgagtaagtggtaccacaggggt

SEQ ID NO: 945684 - DNA, 33 bp, Homo sapien
tattctgtcccgagtacgtggtaccacaggggt

SEQ ID NO: 945685 - DNA, 33 bp, Homo sapien
gtcatgttgctaattccagtcaatgagagcaga

SEQ ID NO: 945686 - DNA, 33 bp, Homo sapien
gtcatgttgctaattctagtcaatgagagcaga

SEQ ID NO: 945687 - DNA, 33 bp, Homo sapien
gagatgtgaaaacaatgaaacctatctcaatta

SEQ ID NO: 945688 - DNA, 33 bp, Homo sapien
gagatgtgaaaacaattaaacctatctcaatta

SEQ ID NO: 945689 - DNA, 33 bp, Homo sapien
taaagcagtgcctaaaataaacaatgtgacact

SEQ ID NO: 945690 - DNA, 33 bp, Homo sapien
taaagcagtgcctaaagtaaacaatgtgacact

SEQ ID NO: 945691 - DNA, 33 bp, Homo sapien
gtgacactgaaaatcaatagacagatcaatgaa

SEQ ID NO: 945692 - DNA, 33 bp, Homo sapien
gtgacactgaaaatcagtagacagatcaatgaa

SEQ ID NO: 945693 - DNA, 33 bp, Homo sapien
atgttggaaaaaatgactatcgattgcactact

SEQ ID NO: 945694 - DNA, 33 bp, Homo sapien
atgttggaaaaaatgagtatcgattgcactact

SEQ ID NO: 945695 - DNA, 33 bp, Homo sapien
ttacagggtcatgggaagaagagtatcaactat

SEQ ID NO: 945696 - DNA, 33 bp, Homo sapien
ttacagggtcatgggacgaagagtatcaactat

SEQ ID NO: 945697 - DNA, 33 bp, Homo sapien
ccatcttcacataaccaatgacatattctctgt

SEQ ID NO: 945698 - DNA, 33 bp, Homo sapien
ccatcttcacataaccgatgacatattctctgt

SEQ ID NO: 945699 - DNA, 33 bp, Homo sapien
agatctgactatcgaaaagagctggaaccttcc

SEQ ID NO: 945700 - DNA, 33 bp, Homo sapien
agatctgactatcgaagagagctggaaccttcc

SEQ ID NO: 945701 - DNA, 33 bp, Homo sapien
tatttgtctcctccaaatcccacgttgaaatgt

SEQ ID NO: 945702 - DNA, 33 bp, Homo sapien
tatttgtctcctccaagtcccacgttgaaatgt

SEQ ID NO: 945703 - DNA, 33 bp, Homo sapien
cctgagggtactcaacactgtactctaggtcca

SEQ ID NO: 945704 - DNA, 33 bp, Homo sapien
cctgagggtactcaacgctgtactctaggtcca

SEQ ID NO: 945705 - DNA, 33 bp, Homo sapien
tgagtaccctcaggccagaagatgtcagtaaga

SEQ ID NO: 945706 - DNA, 33 bp, Homo sapien
tgagtaccctcaggccggaagatgtcagtaaga

SEQ ID NO: 945707 - DNA, 33 bp, Homo sapien
ctcttagaacttaccaatgaatttagtacctga

SEQ ID NO: 945708 - DNA, 33 bp, Homo sapien
ctcttagaacttaccagtgaatttagtacctga

SEQ ID NO: 945709 - DNA, 33 bp, Homo sapien
ccaatctatgcacccaatatgaacacagcctgt

SEQ ID NO: 945710 - DNA, 33 bp, Homo sapien
ccaatctatgcacccagtatgaacacagcctgt

SEQ ID NO: 945711 - DNA, 33 bp, Homo sapien
gagcatatatatgttaactaaggtcatagagca

SEQ ID NO: 945712 - DNA, 33 bp, Homo sapien
gagcatatatatgttacctaaggtcatagagca

SEQ ID NO: 945713 - DNA, 33 bp, Homo sapien
acgaattcgtcagtgaaacaattagcaagggtg

SEQ ID NO: 945714 - DNA, 33 bp, Homo sapien
acgaattcgtcagtgatacaattagcaagggtg

SEQ ID NO: 945715 - DNA, 33 bp, Homo sapien
ttgtgagagtaaccaaagtgtgataaagcaact

SEQ ID NO: 945716 - DNA, 33 bp, Homo sapien
ttgtgagagtaaccaaggtgtgataaagcaact

SEQ ID NO: 945717 - DNA, 33 bp, Homo sapien
gcctcatttctgataacggagaaagttttagtc

SEQ ID NO: 945718 - DNA, 33 bp, Homo sapien
gcctcatttctgataatggagaaagttttagtc

SEQ ID NO: 945719 - DNA, 33 bp, Homo sapien
gagtactttttgtccaatatatccattttgtat

SEQ ID NO: 945720 - DNA, 33 bp, Homo sapien
gagtactttttgtccagtatatccattttgtat

SEQ ID NO: 945721 - DNA, 33 bp, Homo sapien
atctgagcctcatgtaacttgatattaccaaat

SEQ ID NO: 945722 - DNA, 33 bp, Homo sapien
atctgagcctcatgtagcttgatattaccaaat

SEQ ID NO: 945723 - DNA, 33 bp, Homo sapien
cttaatcttcttggaccatatgacttcaccttt

SEQ ID NO: 945724 - DNA, 33 bp, Homo sapien
cttaatcttcttggactatatgacttcaccttt

SEQ ID NO: 945725 - DNA, 33 bp, Homo sapien
aaacttgctataggtcacaagttagggtctgaa

SEQ ID NO: 945726 - DNA, 33 bp, Homo sapien
aaacttgctataggtcgcaagttagggtctgaa

SEQ ID NO: 945727 - DNA, 33 bp, Homo sapien
actattcctcagtgagcatctaaattacaccag

SEQ ID NO: 945728 - DNA, 33 bp, Homo sapien
actattcctcagtgagtatctaaattacaccag

SEQ ID NO: 945729 - DNA, 33 bp, Homo sapien
ctaactcctacaatagacatgagaggcaacaga

SEQ ID NO: 945730 - DNA, 33 bp, Homo sapien
ctaactcctacaatagccatgagaggcaacaga

SEQ ID NO: 945731 - DNA, 33 bp, Homo sapien
ccaagtgaagaaggcacaagaaagtggacttgg

SEQ ID NO: 945732 - DNA, 33 bp, Homo sapien
ccaagtgaagaaggcagaagaaagtggacttgg

SEQ ID NO: 945733 - DNA, 33 bp, Homo sapien
gtagtatcagtgtaaaataaatgcaagctggaa

SEQ ID NO: 945734 - DNA, 33 bp, Homo sapien
gtagtatcagtgtaaactaaatgcaagctggaa

SEQ ID NO: 945735 - DNA, 33 bp, Homo sapien
gttaaaatgcctgagagaaacaatagcgtgaag

SEQ ID NO: 945736 - DNA, 33 bp, Homo sapien
gttaaaatgcctgagataaacaatagcgtgaag

SEQ ID NO: 945737 - DNA, 33 bp, Homo sapien
gggcaaaatccagagccaaacggcaacacagag

SEQ ID NO: 945738 - DNA, 33 bp, Homo sapien
gggcaaaatccagagctaaacggcaacacagag

SEQ ID NO: 945739 - DNA, 33 bp, Homo sapien
tgagtcctcttttccaccagtgctgaaatcaag

SEQ ID NO: 945740 - DNA, 33 bp, Homo sapien
tgagtcctcttttccatcagtgctgaaatcaag

SEQ ID NO: 945741 - DNA, 33 bp, Homo sapien
tagccaggcttcgttgaactccttctttgcccc

SEQ ID NO: 945742 - DNA, 33 bp, Homo sapien
tagccaggcttcgttgcactccttctttgcccc

SEQ ID NO: 945743 - DNA, 33 bp, Homo sapien
gggaaacaatcaaataggacaggatttcacaga

SEQ ID NO: 945744 - DNA, 33 bp, Homo sapien
gggaaacaatcaaatatgacaggatttcacaga

SEQ ID NO: 945745 - DNA, 33 bp, Homo sapien
gctttctaaactgtaagatctgcgtcctgcttt

SEQ ID NO: 945746 - DNA, 33 bp, Homo sapien
gctttctaaactgtaatatctgcgtcctgcttt

SEQ ID NO: 945747 - DNA, 33 bp, Homo sapien
ggctcatttcctgataccaaatggactcaatgt

SEQ ID NO: 945748 - DNA, 33 bp, Homo sapien
ggctcatttcctgatatcaaatggactcaatgt

SEQ ID NO: 945749 - DNA, 33 bp, Homo sapien
caagccctcatttctacacggaatttttggtag

SEQ ID NO: 945750 - DNA, 33 bp, Homo sapien
caagccctcatttctagacggaatttttggtag

SEQ ID NO: 945751 - DNA, 33 bp, Homo sapien
taataggaaatgcacccctattcaggcttcgta

SEQ ID NO: 945752 - DNA, 33 bp, Homo sapien
taataggaaatgcacctctattcaggcttcgta

SEQ ID NO: 945753 - DNA, 33 bp, Homo sapien
agtgctggcatagttacaggcttagttatgagt

SEQ ID NO: 945754 - DNA, 33 bp, Homo sapien
agtgctggcatagttagaggcttagttatgagt

SEQ ID NO: 945755 - DNA, 33 bp, Homo sapien
tgcattatgctcctataagttttctccaacaat

SEQ ID NO: 945756 - DNA, 33 bp, Homo sapien
tgcattatgctcctatcagttttctccaacaat

SEQ ID NO: 945757 - DNA, 33 bp, Homo sapien
atattatatctgcaccaaatagtgtattgttaa

SEQ ID NO: 945758 - DNA, 33 bp, Homo sapien
atattatatctgcaccgaatagtgtattgttaa

SEQ ID NO: 945759 - DNA, 33 bp, Homo sapien
gttagcataaactacaacttactcagcatcctc

SEQ ID NO: 945760 - DNA, 33 bp, Homo sapien
gttagcataaactacagcttactcagcatcctc

SEQ ID NO: 945761 - DNA, 33 bp, Homo sapien
ctgctatgtagcaagtcacctgccatttgacct

SEQ ID NO: 945762 - DNA, 33 bp, Homo sapien
ctgctatgtagcaagttacctgccatttgacct

SEQ ID NO: 945763 - DNA, 33 bp, Homo sapien
cctttggttaatgctaagagtccagaaaaagtt

SEQ ID NO: 945764 - DNA, 33 bp, Homo sapien
cctttggttaatgctacgagtccagaaaaagtt

SEQ ID NO: 945765 - DNA, 33 bp, Homo sapien
aatctcagtaagcataaggaatttctgtggcat

SEQ ID NO: 945766 - DNA, 33 bp, Homo sapien
aatctcagtaagcatagggaatttctgtggcat

SEQ ID NO: 945767 - DNA, 33 bp, Homo sapien
aacagctcacaatcaacgtgaaaaacagcagcc

SEQ ID NO: 945768 - DNA, 33 bp, Homo sapien
aacagctcacaatcaaggtgaaaaacagcagcc

SEQ ID NO: 945769 - DNA, 33 bp, Homo sapien
ttaatcagagaatgtgcaactgcttggactttt

SEQ ID NO: 945770 - DNA, 33 bp, Homo sapien
ttaatcagagaatgtggaactgcttggactttt

SEQ ID NO: 945771 - DNA, 33 bp, Homo sapien
ccggcaggttaaagtaaggtcagaagtcgaagg

SEQ ID NO: 945772 - DNA, 33 bp, Homo sapien
ccggcaggttaaagtatggtcagaagtcgaagg

SEQ ID NO: 945773 - DNA, 33 bp, Homo sapien
tagttctgctcctcagaccactgttcgttgtgc

SEQ ID NO: 945774 - DNA, 33 bp, Homo sapien
tagttctgctcctcaggccactgttcgttgtgc

SEQ ID NO: 945775 - DNA, 33 bp, Homo sapien
tcagctccaacagtcacgaaactcaaagagaag

SEQ ID NO: 945776 - DNA, 33 bp, Homo sapien
tcagctccaacagtcatgaaactcaaagagaag

SEQ ID NO: 945777 - DNA, 33 bp, Homo sapien
tctgcccaagttgaccaaaacctgcaatgtaat

SEQ ID NO: 945778 - DNA, 33 bp, Homo sapien
tctgcccaagttgaccgaaacctgcaatgtaat

SEQ ID NO: 945779 - DNA, 33 bp, Homo sapien
gcaaagaatgtggaataaccaagaaaatcttga

SEQ ID NO: 945780 - DNA, 33 bp, Homo sapien
gcaaagaatgtggaatgaccaagaaaatcttga

SEQ ID NO: 945781 - DNA, 33 bp, Homo sapien
gcacagaatacttcaccgatattcctattagta

SEQ ID NO: 945782 - DNA, 33 bp, Homo sapien
gcacagaatacttcactgatattcctattagta

SEQ ID NO: 945783 - DNA, 33 bp, Homo sapien
ctttcaagtgcacatggaaactaaaataaccta

SEQ ID NO: 945784 - DNA, 33 bp, Homo sapien
ctttcaagtgcacatgtaaactaaaataaccta

SEQ ID NO: 945785 - DNA, 33 bp, Homo sapien
aatttctaaacaaataccaatttagccacatct

SEQ ID NO: 945786 - DNA, 33 bp, Homo sapien
aatttctaaacaaatagcaatttagccacatct

SEQ ID NO: 945787 - DNA, 33 bp, Homo sapien
catttacaaagatcgaatatctactaagtcgca

SEQ ID NO: 945788 - DNA, 33 bp, Homo sapien
catttacaaagatcgattatctactaagtcgca

SEQ ID NO: 945789 - DNA, 33 bp, Homo sapien
aaaacaagggaaatcaaaattctcaacagcagg

SEQ ID NO: 945790 - DNA, 33 bp, Homo sapien
aaaacaagggaaatcacaattctcaacagcagg

SEQ ID NO: 945791 - DNA, 33 bp, Homo sapien
atgtatgcaaaagaccactttcctagagatttc

SEQ ID NO: 945792 - DNA, 33 bp, Homo sapien
atgtatgcaaaagaccgctttcctagagatttc

SEQ ID NO: 945793 - DNA, 33 bp, Homo sapien
tgatgaggttctgaaggaaaaaggctcaatttg

SEQ ID NO: 945794 - DNA, 33 bp, Homo sapien
tgatgaggttctgaagtaaaaaggctcaatttg

SEQ ID NO: 945795 - DNA, 33 bp, Homo sapien
aatatagtgcaaaactgagtaaactagaaaaca

SEQ ID NO: 945796 - DNA, 33 bp, Homo sapien
aatatagtgcaaaacttagtaaactagaaaaca

SEQ ID NO: 945797 - DNA, 33 bp, Homo sapien
aaatagctatgattatgaatgcagtcattggta

SEQ ID NO: 945798 - DNA, 33 bp, Homo sapien
aaatagctatgattattaatgcagtcattggta

SEQ ID NO: 945799 - DNA, 33 bp, Homo sapien
aatgcatgagaaatggcctctccgtgagctagt

SEQ ID NO: 945800 - DNA, 33 bp, Homo sapien
aatgcatgagaaatggtctctccgtgagctagt

SEQ ID NO: 945801 - DNA, 33 bp, Homo sapien
cagagcatggcacaagaatgtacttgtctctca

SEQ ID NO: 945802 - DNA, 33 bp, Homo sapien
cagagcatggcacaaggatgtacttgtctctca

SEQ ID NO: 945803 - DNA, 33 bp, Homo sapien
tccagatctcgtgctaaaatgtggcctccagca

SEQ ID NO: 945804 - DNA, 33 bp, Homo sapien
tccagatctcgtgctacaatgtggcctccagca

SEQ ID NO: 945805 - DNA, 33 bp, Homo sapien
aacatcctcaaatcataaagttagaaagaaaag

SEQ ID NO: 945806 - DNA, 33 bp, Homo sapien
aacatcctcaaatcatgaagttagaaagaaaag

SEQ ID NO: 945807 - DNA, 33 bp, Homo sapien
gtggtatcttgctatggcaacctccacaggcca

SEQ ID NO: 945808 - DNA, 33 bp, Homo sapien
gtggtatcttgctatgtcaacctccacaggcca

SEQ ID NO: 945809 - DNA, 33 bp, Homo sapien
tgaggacagatctaaagatgcaaaagagccagg

SEQ ID NO: 945810 - DNA, 33 bp, Homo sapien
tgaggacagatctaaatatgcaaaagagccagg

SEQ ID NO: 945811 - DNA, 33 bp, Homo sapien
ggcacctagtgagtaacggccaggaatgctact

SEQ ID NO: 945812 - DNA, 33 bp, Homo sapien
ggcacctagtgagtaatggccaggaatgctact

SEQ ID NO: 945813 - DNA, 33 bp, Homo sapien
ctggttgaatgaacaaagacatggatatgaaag

SEQ ID NO: 945814 - DNA, 33 bp, Homo sapien
ctggttgaatgaacaaggacatggatatgaaag

SEQ ID NO: 945815 - DNA, 33 bp, Homo sapien
taaagcttaatcaagaacaaaatatccagctat

SEQ ID NO: 945816 - DNA, 33 bp, Homo sapien
taaagcttaatcaagatcaaaatatccagctat

SEQ ID NO: 945817 - DNA, 33 bp, Homo sapien
aaaatcccaacattgcaatatagcaactgcttg

SEQ ID NO: 945818 - DNA, 33 bp, Homo sapien
aaaatcccaacattgcgatatagcaactgcttg

SEQ ID NO: 945819 - DNA, 33 bp, Homo sapien
tgtgctgtgggaagtgaatttagagtaacaatc

SEQ ID NO: 945820 - DNA, 33 bp, Homo sapien
tgtgctgtgggaagtggatttagagtaacaatc

SEQ ID NO: 945821 - DNA, 33 bp, Homo sapien
ggacaaacagacccatcatggacgtagagagtg

SEQ ID NO: 945822 - DNA, 33 bp, Homo sapien
ggacaaacagacccatgatggacgtagagagtg

SEQ ID NO: 945823 - DNA, 33 bp, Homo sapien
taagtatgggttacaaagaacaagcttctgggg

SEQ ID NO: 945824 - DNA, 33 bp, Homo sapien
taagtatgggttacaaggaacaagcttctgggg

SEQ ID NO: 945825 - DNA, 33 bp, Homo sapien
ggagtcaaaatccccgaagtatgtaagggtcag

SEQ ID NO: 945826 - DNA, 33 bp, Homo sapien
ggagtcaaaatccccggagtatgtaagggtcag

SEQ ID NO: 945827 - DNA, 33 bp, Homo sapien
atatggtaattgtaagcatatgtaatataacat

SEQ ID NO: 945828 - DNA, 33 bp, Homo sapien
atatggtaattgtaaggatatgtaatataacat

SEQ ID NO: 945829 - DNA, 33 bp, Homo sapien
tcccgtgatactgccacgttctgtttattttta

SEQ ID NO: 945830 - DNA, 33 bp, Homo sapien
tcccgtgatactgccatgttctgtttattttta

SEQ ID NO: 945831 - DNA, 33 bp, Homo sapien
tttattgtgagatcaaagacataatgtacaaag

SEQ ID NO: 945832 - DNA, 33 bp, Homo sapien
tttattgtgagatcaaggacataatgtacaaag

SEQ ID NO: 945833 - DNA, 33 bp, Homo sapien
atctggattacagggaaaaagaaagcatctcct

SEQ ID NO: 945834 - DNA, 33 bp, Homo sapien
atctggattacagggagaaagaaagcatctcct

SEQ ID NO: 945835 - DNA, 33 bp, Homo sapien
acagccattcatccaagttcatacagtaattat

SEQ ID NO: 945836 - DNA, 33 bp, Homo sapien
acagccattcatccaatttcatacagtaattat

SEQ ID NO: 945837 - DNA, 33 bp, Homo sapien
tcctgagaagctagagaacttgcttgaggacag

SEQ ID NO: 945838 - DNA, 33 bp, Homo sapien
tcctgagaagctagaggacttgcttgaggacag

SEQ ID NO: 945839 - DNA, 33 bp, Homo sapien
tgggtaatcacgattccacgctgaatagcagac

SEQ ID NO: 945840 - DNA, 33 bp, Homo sapien
tgggtaatcacgattctacgctgaatagcagac

SEQ ID NO: 945841 - DNA, 33 bp, Homo sapien
taatagcacagttgctgacagataggagatgat

SEQ ID NO: 945842 - DNA, 33 bp, Homo sapien
taatagcacagttgcttacagataggagatgat

SEQ ID NO: 945843 - DNA, 33 bp, Homo sapien
aataggctggccagaccatgcaaggaatgttgc

SEQ ID NO: 945844 - DNA, 33 bp, Homo sapien
aataggctggccagactatgcaaggaatgttgc

SEQ ID NO: 945845 - DNA, 33 bp, Homo sapien
taaggacgctcgttacacaggagagagtgatgg

SEQ ID NO: 945846 - DNA, 33 bp, Homo sapien
taaggacgctcgttacgcaggagagagtgatgg

SEQ ID NO: 945847 - DNA, 33 bp, Homo sapien
acagaggcgaatgtgactatcagctcccggagc

SEQ ID NO: 945848 - DNA, 33 bp, Homo sapien
acagaggcgaatgtgagtatcagctcccggagc

SEQ ID NO: 945849 - DNA, 33 bp, Homo sapien
caattaacctttcccaagaatgcataggggccc

SEQ ID NO: 945850 - DNA, 33 bp, Homo sapien
caattaacctttcccatgaatgcataggggccc

SEQ ID NO: 945851 - DNA, 33 bp, Homo sapien
ctaaagaaaagaatcaaaaatggcccacttggc

SEQ ID NO: 945852 - DNA, 33 bp, Homo sapien
ctaaagaaaagaatcacaaatggcccacttggc

SEQ ID NO: 945853 - DNA, 33 bp, Homo sapien
tgtattttgcaggtaaagaaatcaagattaatc

SEQ ID NO: 945854 - DNA, 33 bp, Homo sapien
tgtattttgcaggtaaggaaatcaagattaatc

SEQ ID NO: 945855 - DNA, 33 bp, Homo sapien
gagcacatttggagaaactgcagaggtaggcta

SEQ ID NO: 945856 - DNA, 33 bp, Homo sapien
gagcacatttggagaacctgcagaggtaggcta

SEQ ID NO: 945857 - DNA, 33 bp, Homo sapien
cagcattttgagaggccaagaccagtggatcac

SEQ ID NO: 945858 - DNA, 33 bp, Homo sapien
cagcattttgagaggcgaagaccagtggatcac

SEQ ID NO: 945859 - DNA, 33 bp, Homo sapien
gttcaaaagctgaaaaaccttgagtctgatgtc

SEQ ID NO: 945860 - DNA, 33 bp, Homo sapien
gttcaaaagctgaaaagccttgagtctgatgtc

SEQ ID NO: 945861 - DNA, 33 bp, Homo sapien
acttccctagtacacaagttttgggcttgacct

SEQ ID NO: 945862 - DNA, 33 bp, Homo sapien
acttccctagtacacaggttttgggcttgacct

SEQ ID NO: 945863 - DNA, 33 bp, Homo sapien
cagaatcagagaagccaatagcctggctgaggt

SEQ ID NO: 945864 - DNA, 33 bp, Homo sapien
cagaatcagagaagccgatagcctggctgaggt

SEQ ID NO: 945865 - DNA, 33 bp, Homo sapien
tgtctctctggagaaaactaacacagtttgatg

SEQ ID NO: 945866 - DNA, 33 bp, Homo sapien
tgtctctctggagaaacctaacacagtttgatg

SEQ ID NO: 945867 - DNA, 33 bp, Homo sapien
ggagcttcaaacaaagactccaacagttttatg

SEQ ID NO: 945868 - DNA, 33 bp, Homo sapien
ggagcttcaaacaaaggctccaacagttttatg

SEQ ID NO: 945869 - DNA, 33 bp, Homo sapien
tctgccatctgaaaaggcacgggatagttctca

SEQ ID NO: 945870 - DNA, 33 bp, Homo sapien
tctgccatctgaaaagtcacgggatagttctca

SEQ ID NO: 945871 - DNA, 33 bp, Homo sapien
attagacccagttaaaatatctctttgagaact

SEQ ID NO: 945872 - DNA, 33 bp, Homo sapien
attagacccagttaaagtatctctttgagaact

SEQ ID NO: 945873 - DNA, 33 bp, Homo sapien
tggtccaagctccttaacaccacaggacctctc

SEQ ID NO: 945874 - DNA, 33 bp, Homo sapien
tggtccaagctccttaccaccacaggacctctc

SEQ ID NO: 945875 - DNA, 33 bp, Homo sapien
ctctcaggccctccagaacacctggctgattct

SEQ ID NO: 945876 - DNA, 33 bp, Homo sapien
ctctcaggccctccaggacacctggctgattct

SEQ ID NO: 945877 - DNA, 33 bp, Homo sapien
cagtgtctaattcataccttgctaatggcaaca

SEQ ID NO: 945878 - DNA, 33 bp, Homo sapien
cagtgtctaattcatatcttgctaatggcaaca

SEQ ID NO: 945879 - DNA, 33 bp, Homo sapien
aaagaaaaggatgatacggtgaccacttatgct

SEQ ID NO: 945880 - DNA, 33 bp, Homo sapien
aaagaaaaggatgatatggtgaccacttatgct

SEQ ID NO: 945881 - DNA, 33 bp, Homo sapien
aaacagaggatttaagactgaccacttccttcc

SEQ ID NO: 945882 - DNA, 33 bp, Homo sapien
aaacagaggatttaagcctgaccacttccttcc

SEQ ID NO: 945883 - DNA, 33 bp, Homo sapien
gatggcttgcagatgacgtatttgcagtgtact

SEQ ID NO: 945884 - DNA, 33 bp, Homo sapien
gatggcttgcagatgaggtatttgcagtgtact

SEQ ID NO: 945885 - DNA, 33 bp, Homo sapien
aaaaacaatttagatacaagagttagcaggtag

SEQ ID NO: 945886 - DNA, 33 bp, Homo sapien
aaaaacaatttagatataagagttagcaggtag

SEQ ID NO: 945887 - DNA, 33 bp, Homo sapien
tctttcgtctattaaaactctacttaacctcac

SEQ ID NO: 945888 - DNA, 33 bp, Homo sapien
tctttcgtctattaaacctctacttaacctcac

SEQ ID NO: 945889 - DNA, 33 bp, Homo sapien
aatctcttgtgtcctacgtaaatcagacactgc

SEQ ID NO: 945890 - DNA, 33 bp, Homo sapien
aatctcttgtgtcctatgtaaatcagacactgc

SEQ ID NO: 945891 - DNA, 33 bp, Homo sapien
agggcttactgagaggaaagagttattatgagc

SEQ ID NO: 945892 - DNA, 33 bp, Homo sapien
agggcttactgagagggaagagttattatgagc

SEQ ID NO: 945893 - DNA, 33 bp, Homo sapien
gttctcagtctaagcaaataaatatagttgatt

SEQ ID NO: 945894 - DNA, 33 bp, Homo sapien
gttctcagtctaagcagataaatatagttgatt

SEQ ID NO: 945895 - DNA, 33 bp, Homo sapien
ggcaccaacttcattgcaataatcattgaaata

SEQ ID NO: 945896 - DNA, 33 bp, Homo sapien
ggcaccaacttcattgtaataatcattgaaata

SEQ ID NO: 945897 - DNA, 33 bp, Homo sapien
aagcctgctttctgaagaggtgaatgggcagct

SEQ ID NO: 945898 - DNA, 33 bp, Homo sapien
aagcctgctttctgaataggtgaatgggcagct

SEQ ID NO: 945899 - DNA, 33 bp, Homo sapien
tgagatttcagccaaccaggttgtaagatttgt

SEQ ID NO: 945900 - DNA, 33 bp, Homo sapien
tgagatttcagccaactaggttgtaagatttgt

SEQ ID NO: 945901 - DNA, 33 bp, Homo sapien
gagagatgttcagatacacgaataattaacatc

SEQ ID NO: 945902 - DNA, 33 bp, Homo sapien
gagagatgttcagatatacgaataattaacatc

SEQ ID NO: 945903 - DNA, 33 bp, Homo sapien
ggtcatgagatactgaggtagactggattaatc

SEQ ID NO: 945904 - DNA, 33 bp, Homo sapien
ggtcatgagatactgatgtagactggattaatc

SEQ ID NO: 945905 - DNA, 33 bp, Homo sapien
acttctttacggctaacaaaatggtcttcaggg

SEQ ID NO: 945906 - DNA, 33 bp, Homo sapien
acttctttacggctaataaaatggtcttcaggg

SEQ ID NO: 945907 - DNA, 33 bp, Homo sapien
gtgcagtggctcttcacaggttccttcatagtg

SEQ ID NO: 945908 - DNA, 33 bp, Homo sapien
gtgcagtggctcttcataggttccttcatagtg

SEQ ID NO: 945909 - DNA, 33 bp, Homo sapien
gttcatcaaggcagaactcttcacttccactga

SEQ ID NO: 945910 - DNA, 33 bp, Homo sapien
gttcatcaaggcagaattcttcacttccactga

SEQ ID NO: 945911 - DNA, 33 bp, Homo sapien
atcaagatttgagacacaaagttcctgctcact

SEQ ID NO: 945912 - DNA, 33 bp, Homo sapien
atcaagatttgagacataaagttcctgctcact

SEQ ID NO: 945913 - DNA, 33 bp, Homo sapien
acacgagcctccacctaaatgtaacagtgagca

SEQ ID NO: 945914 - DNA, 33 bp, Homo sapien
acacgagcctccacctcaatgtaacagtgagca

SEQ ID NO: 945915 - DNA, 33 bp, Homo sapien
gctaattagataacctcactgatcctcccactc

SEQ ID NO: 945916 - DNA, 33 bp, Homo sapien
gctaattagataacctgactgatcctcccactc

SEQ ID NO: 945917 - DNA, 33 bp, Homo sapien
taattttactgccataacccattcaacctcttg

SEQ ID NO: 945918 - DNA, 33 bp, Homo sapien
taattttactgccatagcccattcaacctcttg

SEQ ID NO: 945919 - DNA, 33 bp, Homo sapien
taatgtagaatcaatacgagacttgagcttgtt

SEQ ID NO: 945920 - DNA, 33 bp, Homo sapien
taatgtagaatcaataggagacttgagcttgtt

SEQ ID NO: 945921 - DNA, 33 bp, Homo sapien
gtcaaaaatgcatgtacccggaaagtctttacc

SEQ ID NO: 945922 - DNA, 33 bp, Homo sapien
gtcaaaaatgcatgtatccggaaagtctttacc

SEQ ID NO: 945923 - DNA, 33 bp, Homo sapien
gacaataagtttcccacccaagttgacacactg

SEQ ID NO: 945924 - DNA, 33 bp, Homo sapien
gacaataagtttcccatccaagttgacacactg

SEQ ID NO: 945925 - DNA, 33 bp, Homo sapien
tatgtcccacaagctacgtcaaaatgagcttct

SEQ ID NO: 945926 - DNA, 33 bp, Homo sapien
tatgtcccacaagctatgtcaaaatgagcttct

SEQ ID NO: 945927 - DNA, 33 bp, Homo sapien
cacacagaatcaacagaaagtctgcagttcatt

SEQ ID NO: 945928 - DNA, 33 bp, Homo sapien
cacacagaatcaacagcaagtctgcagttcatt

SEQ ID NO: 945929 - DNA, 33 bp, Homo sapien
aaaccaccctgagaaacggatcattgtggacct

SEQ ID NO: 945930 - DNA, 33 bp, Homo sapien
aaaccaccctgagaaatggatcattgtggacct

SEQ ID NO: 945931 - DNA, 33 bp, Homo sapien
gcaaaattacaacagactctagctcaaagcaaa

SEQ ID NO: 945932 - DNA, 33 bp, Homo sapien
gcaaaattacaacagagtctagctcaaagcaaa

SEQ ID NO: 945933 - DNA, 33 bp, Homo sapien
acaaaactcagaagacaatttagcaaactgcaa

SEQ ID NO: 945934 - DNA, 33 bp, Homo sapien
acaaaactcagaagacgatttagcaaactgcaa

SEQ ID NO: 945935 - DNA, 33 bp, Homo sapien
atcctgcagaaatatggaacaagaaaagcaacg

SEQ ID NO: 945936 - DNA, 33 bp, Homo sapien
atcctgcagaaatatgtaacaagaaaagcaacg

SEQ ID NO: 945937 - DNA, 33 bp, Homo sapien
caaatttaacagtgaaactatctggacacgaaa

SEQ ID NO: 945938 - DNA, 33 bp, Homo sapien
caaatttaacagtgaagctatctggacacgaaa

SEQ ID NO: 945939 - DNA, 33 bp, Homo sapien
tttgtctgtcttctccactaagctgtaagttga

SEQ ID NO: 945940 - DNA, 33 bp, Homo sapien
tttgtctgtcttctcctctaagctgtaagttga

SEQ ID NO: 945941 - DNA, 33 bp, Homo sapien
cacagcagatagaacacaagtaatgaacacgta

SEQ ID NO: 945942 - DNA, 33 bp, Homo sapien
cacagcagatagaacataagtaatgaacacgta

SEQ ID NO: 945943 - DNA, 33 bp, Homo sapien
aactctccggtatgtacgtagttcactcacatt

SEQ ID NO: 945944 - DNA, 33 bp, Homo sapien
aactctccggtatgtatgtagttcactcacatt

SEQ ID NO: 945945 - DNA, 33 bp, Homo sapien
cagttcccccagctgaaaggctccaactatctt

SEQ ID NO: 945946 - DNA, 33 bp, Homo sapien
cagttcccccagctgagaggctccaactatctt

SEQ ID NO: 945947 - DNA, 33 bp, Homo sapien
tggaccaaacgaaatccagccttctaggttttt

SEQ ID NO: 945948 - DNA, 33 bp, Homo sapien
tggaccaaacgaaatctagccttctaggttttt

SEQ ID NO: 945949 - DNA, 33 bp, Homo sapien
atcatcaaagcatcaaagcagctggccagagaa

SEQ ID NO: 945950 - DNA, 33 bp, Homo sapien
atcatcaaagcatcaacgcagctggccagagaa

SEQ ID NO: 945951 - DNA, 33 bp, Homo sapien
gagaagtggcagagaacagcaaagtaagaaagg

SEQ ID NO: 945952 - DNA, 33 bp, Homo sapien
gagaagtggcagagaagagcaaagtaagaaagg

SEQ ID NO: 945953 - DNA, 33 bp, Homo sapien
gaaaaccatagatcatcataattaggaaataca

SEQ ID NO: 945954 - DNA, 33 bp, Homo sapien
gaaaaccatagatcatgataattaggaaataca

SEQ ID NO: 945955 - DNA, 33 bp, Homo sapien
cctctgaaagtgcctacgcaagtgaggaacctt

SEQ ID NO: 945956 - DNA, 33 bp, Homo sapien
cctctgaaagtgcctatgcaagtgaggaacctt

SEQ ID NO: 945957 - DNA, 33 bp, Homo sapien
cgacaagttacattcactcttggatacatgatc

SEQ ID NO: 945958 - DNA, 33 bp, Homo sapien
cgacaagttacattcattcttggatacatgatc

SEQ ID NO: 945959 - DNA, 33 bp, Homo sapien
aaccaggcatcagcacaaattctattcctattt

SEQ ID NO: 945960 - DNA, 33 bp, Homo sapien
aaccaggcatcagcaccaattctattcctattt

SEQ ID NO: 945961 - DNA, 33 bp, Homo sapien
ttagtgggatgtcagacgaggcacctctgaggt

SEQ ID NO: 945962 - DNA, 33 bp, Homo sapien
ttagtgggatgtcagatgaggcacctctgaggt

SEQ ID NO: 945963 - DNA, 33 bp, Homo sapien
atcagtaaatgtgccaaaaacaggattgatgaa

SEQ ID NO: 945964 - DNA, 33 bp, Homo sapien
atcagtaaatgtgccacaaacaggattgatgaa

SEQ ID NO: 945965 - DNA, 33 bp, Homo sapien
ggagtgcccaccaacactgagtttcaattgggc

SEQ ID NO: 945966 - DNA, 33 bp, Homo sapien
ggagtgcccaccaacagtgagtttcaattgggc

SEQ ID NO: 945967 - DNA, 33 bp, Homo sapien
aagtccataatctcataatctgcatcagggaca

SEQ ID NO: 945968 - DNA, 33 bp, Homo sapien
aagtccataatctcatgatctgcatcagggaca

SEQ ID NO: 945969 - DNA, 33 bp, Homo sapien
agtctagctaggctggaaggaaaggaagagtac

SEQ ID NO: 945970 - DNA, 33 bp, Homo sapien
agtctagctaggctggcaggaaaggaagagtac

SEQ ID NO: 945971 - DNA, 33 bp, Homo sapien
ggtaagtctgagtagcaccagtgtggccacttc

SEQ ID NO: 945972 - DNA, 33 bp, Homo sapien
ggtaagtctgagtagccccagtgtggccacttc

SEQ ID NO: 945973 - DNA, 33 bp, Homo sapien
agcgcttgtctgatgacgaaaaagagagaaact

SEQ ID NO: 945974 - DNA, 33 bp, Homo sapien
agcgcttgtctgatgaggaaaaagagagaaact

SEQ ID NO: 945975 - DNA, 33 bp, Homo sapien
ccagctaatggctaataagcagcctcactatta

SEQ ID NO: 945976 - DNA, 33 bp, Homo sapien
ccagctaatggctaatgagcagcctcactatta

SEQ ID NO: 945977 - DNA, 33 bp, Homo sapien
tgttttgggatcttcacggagctcttcccctgc

SEQ ID NO: 945978 - DNA, 33 bp, Homo sapien
tgttttgggatcttcatggagctcttcccctgc

SEQ ID NO: 945979 - DNA, 33 bp, Homo sapien
gaaaggtgctgtgcaaataactggtattaccgt

SEQ ID NO: 945980 - DNA, 33 bp, Homo sapien
gaaaggtgctgtgcaagtaactggtattaccgt

SEQ ID NO: 945981 - DNA, 33 bp, Homo sapien
cacgtatactctaactcacttatagcaagtgta

SEQ ID NO: 945982 - DNA, 33 bp, Homo sapien
cacgtatactctaactgacttatagcaagtgta

SEQ ID NO: 945983 - DNA, 33 bp, Homo sapien
gagtgcattgtttccactcctggcgtcataatt

SEQ ID NO: 945984 - DNA, 33 bp, Homo sapien
gagtgcattgtttccagtcctggcgtcataatt

SEQ ID NO: 945985 - DNA, 33 bp, Homo sapien
tatattcttattagatcactttgcagtacattt

SEQ ID NO: 945986 - DNA, 33 bp, Homo sapien
tatattcttattagatgactttgcagtacattt

SEQ ID NO: 945987 - DNA, 33 bp, Homo sapien
gtattccgttactcacaatggtatattgagcac

SEQ ID NO: 945988 - DNA, 33 bp, Homo sapien
gtattccgttactcacgatggtatattgagcac

SEQ ID NO: 945989 - DNA, 33 bp, Homo sapien
ctcaattgtgagatggcaatcatgacaaagccc

SEQ ID NO: 945990 - DNA, 33 bp, Homo sapien
ctcaattgtgagatgggaatcatgacaaagccc

SEQ ID NO: 945991 - DNA, 33 bp, Homo sapien
accacagtgagaaagacgttttgcattacaaca

SEQ ID NO: 945992 - DNA, 33 bp, Homo sapien
accacagtgagaaagatgttttgcattacaaca

SEQ ID NO: 945993 - DNA, 33 bp, Homo sapien
tgacttgccaatttaaaacatctcactatttat

SEQ ID NO: 945994 - DNA, 33 bp, Homo sapien
tgacttgccaatttaacacatctcactatttat

SEQ ID NO: 945995 - DNA, 33 bp, Homo sapien
gaaatactaagtgaacgcagaaacctacatcca

SEQ ID NO: 945996 - DNA, 33 bp, Homo sapien
gaaatactaagtgaactcagaaacctacatcca

SEQ ID NO: 945997 - DNA, 33 bp, Homo sapien
gaagaaactgagtccaaaatgatttcaggactt

SEQ ID NO: 945998 - DNA, 33 bp, Homo sapien
gaagaaactgagtccacaatgatttcaggactt

SEQ ID NO: 945999 - DNA, 33 bp, Homo sapien
tctgtgcctggcttaactcacttatcataagga

SEQ ID NO: 946000 - DNA, 33 bp, Homo sapien
tctgtgcctggcttaattcacttatcataagga

SEQ ID NO: 946001 - DNA, 33 bp, Homo sapien
aaacaaattggatccacggccatctgttttagc

SEQ ID NO: 946002 - DNA, 33 bp, Homo sapien
aaacaaattggatccatggccatctgttttagc

SEQ ID NO: 946003 - DNA, 33 bp, Homo sapien
tattccacttacggtagcagtaatttattctaa

SEQ ID NO: 946004 - DNA, 33 bp, Homo sapien
tattccacttacggtatcagtaatttattctaa

SEQ ID NO: 946005 - DNA, 33 bp, Homo sapien
atacagacacacaaaacatctgcattagattct

SEQ ID NO: 946006 - DNA, 33 bp, Homo sapien
atacagacacacaaaatatctgcattagattct

SEQ ID NO: 946007 - DNA, 33 bp, Homo sapien
aatgaacagagaagtacggaaccaaataaccac

SEQ ID NO: 946008 - DNA, 33 bp, Homo sapien
aatgaacagagaagtagggaaccaaataaccac

SEQ ID NO: 946009 - DNA, 33 bp, Homo sapien
gggcaatgtttccatcaacaagagatgggcgca

SEQ ID NO: 946010 - DNA, 33 bp, Homo sapien
gggcaatgtttccatccacaagagatgggcgca

SEQ ID NO: 946011 - DNA, 33 bp, Homo sapien
caattccaaatctctacatcgtaatttccttga

SEQ ID NO: 946012 - DNA, 33 bp, Homo sapien
caattccaaatctctagatcgtaatttccttga

SEQ ID NO: 946013 - DNA, 33 bp, Homo sapien
acctcctctaacataactcattcttgtcctgca

SEQ ID NO: 946014 - DNA, 33 bp, Homo sapien
acctcctctaacataattcattcttgtcctgca

SEQ ID NO: 946015 - DNA, 33 bp, Homo sapien
acactggccacgtgcacggcaccatgcctgtaa

SEQ ID NO: 946016 - DNA, 33 bp, Homo sapien
acactggccacgtgcagggcaccatgcctgtaa

SEQ ID NO: 946017 - DNA, 33 bp, Homo sapien
ggctcactgaaatctcagactattgggctgaag

SEQ ID NO: 946018 - DNA, 33 bp, Homo sapien
ggctcactgaaatctcggactattgggctgaag

SEQ ID NO: 946019 - DNA, 33 bp, Homo sapien
agggataatcatgtccaccagaaatcactagtt

SEQ ID NO: 946020 - DNA, 33 bp, Homo sapien
agggataatcatgtccgccagaaatcactagtt

SEQ ID NO: 946021 - DNA, 33 bp, Homo sapien
cacagggcttggtggaaaccaataatttcctca

SEQ ID NO: 946022 - DNA, 33 bp, Homo sapien
cacagggcttggtggataccaataatttcctca

SEQ ID NO: 946023 - DNA, 33 bp, Homo sapien
ctaaatcattatctaacaaatgttcaaaccagc

SEQ ID NO: 946024 - DNA, 33 bp, Homo sapien
ctaaatcattatctaagaaatgttcaaaccagc

SEQ ID NO: 946025 - DNA, 33 bp, Homo sapien
tagggctagtatccacaaatgttatgttattat

SEQ ID NO: 946026 - DNA, 33 bp, Homo sapien
tagggctagtatccacgaatgttatgttattat

SEQ ID NO: 946027 - DNA, 33 bp, Homo sapien
tttgaatagatcctgaaacacagagtcacctct

SEQ ID NO: 946028 - DNA, 33 bp, Homo sapien
tttgaatagatcctgagacacagagtcacctct

SEQ ID NO: 946029 - DNA, 33 bp, Homo sapien
agtcacctcttatacacggttgaaatatccagc

SEQ ID NO: 946030 - DNA, 33 bp, Homo sapien
agtcacctcttatacagggttgaaatatccagc

SEQ ID NO: 946031 - DNA, 33 bp, Homo sapien
cagccacgcctgcgaggattccaatggtccggc

SEQ ID NO: 946032 - DNA, 33 bp, Homo sapien
cagccacgcctgcgagtattccaatggtccggc

SEQ ID NO: 946033 - DNA, 33 bp, Homo sapien
agcctggccaacataactaaatcacatctgtac

SEQ ID NO: 946034 - DNA, 33 bp, Homo sapien
agcctggccaacataagtaaatcacatctgtac

SEQ ID NO: 946035 - DNA, 33 bp, Homo sapien
atgtaccaccagagagacaagctcagcatttgg

SEQ ID NO: 946036 - DNA, 33 bp, Homo sapien
atgtaccaccagagaggcaagctcagcatttgg

SEQ ID NO: 946037 - DNA, 33 bp, Homo sapien
gctcacagccgtctacacccatctttttccaca

SEQ ID NO: 946038 - DNA, 33 bp, Homo sapien
gctcacagccgtctacgcccatctttttccaca

SEQ ID NO: 946039 - DNA, 33 bp, Homo sapien
ggtgtaacaaatcagaaagtttccaattaaagt

SEQ ID NO: 946040 - DNA, 33 bp, Homo sapien
ggtgtaacaaatcagagagtttccaattaaagt

SEQ ID NO: 946041 - DNA, 33 bp, Homo sapien
tcatgggaaaaaccaaataaagtgcttagaaat

SEQ ID NO: 946042 - DNA, 33 bp, Homo sapien
tcatgggaaaaaccaagtaaagtgcttagaaat

SEQ ID NO: 946043 - DNA, 33 bp, Homo sapien
atgacattaagtgtaccctgaaattgtcatggg

SEQ ID NO: 946044 - DNA, 33 bp, Homo sapien
atgacattaagtgtacgctgaaattgtcatggg

SEQ ID NO: 946045 - DNA, 33 bp, Homo sapien
cacgagggaaatatacagccacataatcaaaca

SEQ ID NO: 946046 - DNA, 33 bp, Homo sapien
cacgagggaaatatacggccacataatcaaaca

SEQ ID NO: 946047 - DNA, 33 bp, Homo sapien
taagcagctcaaagacaagaccttaactggaac

SEQ ID NO: 946048 - DNA, 33 bp, Homo sapien
taagcagctcaaagacgagaccttaactggaac

SEQ ID NO: 946049 - DNA, 33 bp, Homo sapien
tgcttcatctgagaaagtcacaagtcattttat

SEQ ID NO: 946050 - DNA, 33 bp, Homo sapien
tgcttcatctgagaaattcacaagtcattttat

SEQ ID NO: 946051 - DNA, 33 bp, Homo sapien
atttggattagattctcactaaaagtaacaacc

SEQ ID NO: 946052 - DNA, 33 bp, Homo sapien
atttggattagattctgactaaaagtaacaacc

SEQ ID NO: 946053 - DNA, 33 bp, Homo sapien
tttggacaactaagaaatctctgccaggcgcag

SEQ ID NO: 946054 - DNA, 33 bp, Homo sapien
tttggacaactaagaagtctctgccaggcgcag

SEQ ID NO: 946055 - DNA, 33 bp, Homo sapien
caaactggtctgggcactagttaggctcccagg

SEQ ID NO: 946056 - DNA, 33 bp, Homo sapien
caaactggtctgggcagtagttaggctcccagg

SEQ ID NO: 946057 - DNA, 33 bp, Homo sapien
catgaatcctaatcagcatttccaagagtccct

SEQ ID NO: 946058 - DNA, 33 bp, Homo sapien
catgaatcctaatcagtatttccaagagtccct

SEQ ID NO: 946059 - DNA, 33 bp, Homo sapien
aatccagaaaggtgagacaacttgaagtgtggt

SEQ ID NO: 946060 - DNA, 33 bp, Homo sapien
aatccagaaaggtgaggcaacttgaagtgtggt

SEQ ID NO: 946061 - DNA, 33 bp, Homo sapien
aggcatagtcattgacaccttagtctgaggcag

SEQ ID NO: 946062 - DNA, 33 bp, Homo sapien
aggcatagtcattgacgccttagtctgaggcag

SEQ ID NO: 946063 - DNA, 33 bp, Homo sapien
gcaggcggaacacaaactcaggagatcgagacc

SEQ ID NO: 946064 - DNA, 33 bp, Homo sapien
gcaggcggaacacaaagtcaggagatcgagacc

SEQ ID NO: 946065 - DNA, 33 bp, Homo sapien
tgctgtgatatgcaaactggaaattatggccaa

SEQ ID NO: 946066 - DNA, 33 bp, Homo sapien
tgctgtgatatgcaaattggaaattatggccaa

SEQ ID NO: 946067 - DNA, 33 bp, Homo sapien
agtcaaattgcgatttaaaagataaaactcaca

SEQ ID NO: 946068 - DNA, 33 bp, Homo sapien
agtcaaattgcgatttcaaagataaaactcaca

SEQ ID NO: 946069 - DNA, 33 bp, Homo sapien
tcttggaaaatagagacaacccaaggatttcag

SEQ ID NO: 946070 - DNA, 33 bp, Homo sapien
tcttggaaaatagagagaacccaaggatttcag

SEQ ID NO: 946071 - DNA, 33 bp, Homo sapien
gggtattttctggtcaaactatcatggttattt

SEQ ID NO: 946072 - DNA, 33 bp, Homo sapien
gggtattttctggtcagactatcatggttattt

SEQ ID NO: 946073 - DNA, 33 bp, Homo sapien
atgatgtgaggctacacgacgcttgtgaagttt

SEQ ID NO: 946074 - DNA, 33 bp, Homo sapien
atgatgtgaggctacatgacgcttgtgaagttt

SEQ ID NO: 946075 - DNA, 33 bp, Homo sapien
taatacagtgaagaaaggaagtgttgagggtca

SEQ ID NO: 946076 - DNA, 33 bp, Homo sapien
taatacagtgaagaaatgaagtgttgagggtca

SEQ ID NO: 946077 - DNA, 33 bp, Homo sapien
aaatttatcctggtaacggttgcagaacatcat

SEQ ID NO: 946078 - DNA, 33 bp, Homo sapien
aaatttatcctggtaatggttgcagaacatcat

SEQ ID NO: 946079 - DNA, 33 bp, Homo sapien
cagcacgggagcatcacggtgtcctggttccta

SEQ ID NO: 946080 - DNA, 33 bp, Homo sapien
cagcacgggagcatcatggtgtcctggttccta

SEQ ID NO: 946081 - DNA, 33 bp, Homo sapien
tatttgtcaaaaaatgaatatagagtggcctta

SEQ ID NO: 946082 - DNA, 33 bp, Homo sapien
tatttgtcaaaaaatgcatatagagtggcctta

SEQ ID NO: 946083 - DNA, 33 bp, Homo sapien
aaggtgaggggaggaacgtgacagtaaaatttg

SEQ ID NO: 946084 - DNA, 33 bp, Homo sapien
aaggtgaggggaggaatgtgacagtaaaatttg

SEQ ID NO: 946085 - DNA, 33 bp, Homo sapien
aatacataaatcagaaatggtatgctgatgaaa

SEQ ID NO: 946086 - DNA, 33 bp, Homo sapien
aatacataaatcagaagtggtatgctgatgaaa

SEQ ID NO: 946087 - DNA, 33 bp, Homo sapien
ctgtgtgtttggatcaccctgagaggcacagag

SEQ ID NO: 946088 - DNA, 33 bp, Homo sapien
ctgtgtgtttggatcagcctgagaggcacagag

SEQ ID NO: 946089 - DNA, 33 bp, Homo sapien
cattgcttttgtgaataactaaccatttatgat

SEQ ID NO: 946090 - DNA, 33 bp, Homo sapien
cattgcttttgtgaatgactaaccatttatgat

SEQ ID NO: 946091 - DNA, 33 bp, Homo sapien
tagttttatgtgtcaacttagaggatgttttgg

SEQ ID NO: 946092 - DNA, 33 bp, Homo sapien
tagttttatgtgtcaagttagaggatgttttgg

SEQ ID NO: 946093 - DNA, 33 bp, Homo sapien
tctaacacacaggcaaaaaaagagtctattttt

SEQ ID NO: 946094 - DNA, 33 bp, Homo sapien
tctaacacacaggcaagaaaagagtctattttt

SEQ ID NO: 946095 - DNA, 33 bp, Homo sapien
cagagagagggtaagacaaactcacagccctta

SEQ ID NO: 946096 - DNA, 33 bp, Homo sapien
cagagagagggtaagagaaactcacagccctta

SEQ ID NO: 946097 - DNA, 33 bp, Homo sapien
ctcacagcccttaaagaaaactctgtggaaact

SEQ ID NO: 946098 - DNA, 33 bp, Homo sapien
ctcacagcccttaaaggaaactctgtggaaact

SEQ ID NO: 946099 - DNA, 33 bp, Homo sapien
gaacattatgaaataacccagtcaaaaaggcaa

SEQ ID NO: 946100 - DNA, 33 bp, Homo sapien
gaacattatgaaataagccagtcaaaaaggcaa

SEQ ID NO: 946101 - DNA, 33 bp, Homo sapien
tttagatttctggtgacggatattctttaacaa

SEQ ID NO: 946102 - DNA, 33 bp, Homo sapien
tttagatttctggtgatggatattctttaacaa

SEQ ID NO: 946103 - DNA, 33 bp, Homo sapien
caatgggtacatctgcaaagagcgagtccaggc

SEQ ID NO: 946104 - DNA, 33 bp, Homo sapien
caatgggtacatctgcgaagagcgagtccaggc

SEQ ID NO: 946105 - DNA, 33 bp, Homo sapien
agctgtattttagaaccggctattttggattaa

SEQ ID NO: 946106 - DNA, 33 bp, Homo sapien
agctgtattttagaactggctattttggattaa

SEQ ID NO: 946107 - DNA, 33 bp, Homo sapien
aggcaaagctatagagacaggaaaaagaccagt

SEQ ID NO: 946108 - DNA, 33 bp, Homo sapien
aggcaaagctatagagtcaggaaaaagaccagt

SEQ ID NO: 946109 - DNA, 33 bp, Homo sapien
gatatttctcttcgtgaactaagtgtggtagca

SEQ ID NO: 946110 - DNA, 33 bp, Homo sapien
gatatttctcttcgtggactaagtgtggtagca

SEQ ID NO: 946111 - DNA, 33 bp, Homo sapien
taaggacagtgaaataccagtgatttcttatat

SEQ ID NO: 946112 - DNA, 33 bp, Homo sapien
taaggacagtgaaatatcagtgatttcttatat

SEQ ID NO: 946113 - DNA, 33 bp, Homo sapien
ataagtagtttattaaaggcagcaagtgtcaac

SEQ ID NO: 946114 - DNA, 33 bp, Homo sapien
ataagtagtttattaagggcagcaagtgtcaac

SEQ ID NO: 946115 - DNA, 33 bp, Homo sapien
cctaaaattaaagcaaattcagatgtattacta

SEQ ID NO: 946116 - DNA, 33 bp, Homo sapien
cctaaaattaaagcaagttcagatgtattacta

SEQ ID NO: 946117 - DNA, 33 bp, Homo sapien
ctacccagcagtggaaagcctccactcccagcc

SEQ ID NO: 946118 - DNA, 33 bp, Homo sapien
ctacccagcagtggaacgcctccactcccagcc

SEQ ID NO: 946119 - DNA, 33 bp, Homo sapien
agcctctaaatgtagcaccttaacaaaacatct

SEQ ID NO: 946120 - DNA, 33 bp, Homo sapien
agcctctaaatgtagccccttaacaaaacatct

SEQ ID NO: 946121 - DNA, 33 bp, Homo sapien
gcagtttatcctccccacttaggacgctgcctg

SEQ ID NO: 946122 - DNA, 33 bp, Homo sapien
gcagtttatcctccccgcttaggacgctgcctg

SEQ ID NO: 946123 - DNA, 33 bp, Homo sapien
gactcaaagggcctagaagttgctcaaaaaatg

SEQ ID NO: 946124 - DNA, 33 bp, Homo sapien
gactcaaagggcctagcagttgctcaaaaaatg

SEQ ID NO: 946125 - DNA, 33 bp, Homo sapien
tatgattcccaatgccacttgctcacccagtta

SEQ ID NO: 946126 - DNA, 33 bp, Homo sapien
tatgattcccaatgccgcttgctcacccagtta

SEQ ID NO: 946127 - DNA, 33 bp, Homo sapien
attaataattggtgaacaggtaaataaacacaa

SEQ ID NO: 946128 - DNA, 33 bp, Homo sapien
attaataattggtgaagaggtaaataaacacaa

SEQ ID NO: 946129 - DNA, 33 bp, Homo sapien
agtgagtgagaaggggcacctttgtagtgagac

SEQ ID NO: 946130 - DNA, 33 bp, Homo sapien
agtgagtgagaagggggacctttgtagtgagac

SEQ ID NO: 946131 - DNA, 33 bp, Homo sapien
aatgagcaatgttggcgctttgcccagtgaacg

SEQ ID NO: 946132 - DNA, 33 bp, Homo sapien
aatgagcaatgttggctctttgcccagtgaacg

SEQ ID NO: 946133 - DNA, 33 bp, Homo sapien
gttgtcttccacaaaaacggtcccttggtgcca

SEQ ID NO: 946134 - DNA, 33 bp, Homo sapien
gttgtcttccacaaaaccggtcccttggtgcca

SEQ ID NO: 946135 - DNA, 33 bp, Homo sapien
attatggttcaatgtgacaagtgaacagagcag

SEQ ID NO: 946136 - DNA, 33 bp, Homo sapien
attatggttcaatgtggcaagtgaacagagcag

SEQ ID NO: 946137 - DNA, 33 bp, Homo sapien
aaggatgtgccactcacctttttgctttgtatc

SEQ ID NO: 946138 - DNA, 33 bp, Homo sapien
aaggatgtgccactcagctttttgctttgtatc

SEQ ID NO: 946139 - DNA, 33 bp, Homo sapien
tctttcagggttttgaatacatcatcccactgc

SEQ ID NO: 946140 - DNA, 33 bp, Homo sapien
tctttcagggttttgagtacatcatcccactgc

SEQ ID NO: 946141 - DNA, 33 bp, Homo sapien
gctgaaacataatggacaaaacaaaaattctgg

SEQ ID NO: 946142 - DNA, 33 bp, Homo sapien
gctgaaacataatggagaaaacaaaaattctgg

SEQ ID NO: 946143 - DNA, 33 bp, Homo sapien
agctcttccctgaaaccattgcgggattgcctg

SEQ ID NO: 946144 - DNA, 33 bp, Homo sapien
agctcttccctgaaactattgcgggattgcctg

SEQ ID NO: 946145 - DNA, 33 bp, Homo sapien
tcaaataatctcattgcagaacgtaaaaagcat

SEQ ID NO: 946146 - DNA, 33 bp, Homo sapien
tcaaataatctcattgtagaacgtaaaaagcat

SEQ ID NO: 946147 - DNA, 33 bp, Homo sapien
ctatgacaaaaaaatactagaccatattagtgc

SEQ ID NO: 946148 - DNA, 33 bp, Homo sapien
ctatgacaaaaaaatagtagaccatattagtgc

SEQ ID NO: 946149 - DNA, 33 bp, Homo sapien
ttttaataggatccaaggagccctctgtggttc

SEQ ID NO: 946150 - DNA, 33 bp, Homo sapien
ttttaataggatccaatgagccctctgtggttc

SEQ ID NO: 946151 - DNA, 33 bp, Homo sapien
aggtagaatacatgtaaaagaatatcgactacc

SEQ ID NO: 946152 - DNA, 33 bp, Homo sapien
aggtagaatacatgtacaagaatatcgactacc

SEQ ID NO: 946153 - DNA, 33 bp, Homo sapien
tgccagacaaggacataaacaggatttgttcat

SEQ ID NO: 946154 - DNA, 33 bp, Homo sapien
tgccagacaaggacatcaacaggatttgttcat

SEQ ID NO: 946155 - DNA, 33 bp, Homo sapien
cttaagaggcgctcacaaccaggcaaagagtgg

SEQ ID NO: 946156 - DNA, 33 bp, Homo sapien
cttaagaggcgctcaccaccaggcaaagagtgg

SEQ ID NO: 946157 - DNA, 33 bp, Homo sapien
agctgcatctagattaagggtgaatcagaagtt

SEQ ID NO: 946158 - DNA, 33 bp, Homo sapien
agctgcatctagattacgggtgaatcagaagtt

SEQ ID NO: 946159 - DNA, 33 bp, Homo sapien
tacacactaaacaggacgaaaattgagaagcct

SEQ ID NO: 946160 - DNA, 33 bp, Homo sapien
tacacactaaacaggatgaaaattgagaagcct

SEQ ID NO: 946161 - DNA, 33 bp, Homo sapien
gtaactggaacagatacgttttaagcagcgtta

SEQ ID NO: 946162 - DNA, 33 bp, Homo sapien
gtaactggaacagatatgttttaagcagcgtta

SEQ ID NO: 946163 - DNA, 33 bp, Homo sapien
aacactcaaaggaatgcataacgctgcttaaaa

SEQ ID NO: 946164 - DNA, 33 bp, Homo sapien
aacactcaaaggaatgtataacgctgcttaaaa

SEQ ID NO: 946165 - DNA, 33 bp, Homo sapien
caattctgtttctcaaaatctgacagagaaaca

SEQ ID NO: 946166 - DNA, 33 bp, Homo sapien
caattctgtttctcaacatctgacagagaaaca

SEQ ID NO: 946167 - DNA, 33 bp, Homo sapien
tcattcacaacttaaccacaactgatcaaaaaa

SEQ ID NO: 946168 - DNA, 33 bp, Homo sapien
tcattcacaacttaactacaactgatcaaaaaa

SEQ ID NO: 946169 - DNA, 33 bp, Homo sapien
ccattttcatggactgaaagattaaatattatg

SEQ ID NO: 946170 - DNA, 33 bp, Homo sapien
ccattttcatggactggaagattaaatattatg

SEQ ID NO: 946171 - DNA, 33 bp, Homo sapien
aaatttccttcagtgacactttctagttttcag

SEQ ID NO: 946172 - DNA, 33 bp, Homo sapien
aaatttccttcagtgatactttctagttttcag

SEQ ID NO: 946173 - DNA, 33 bp, Homo sapien
ccatgtgttgaagtatcacaggtagttaggcat

SEQ ID NO: 946174 - DNA, 33 bp, Homo sapien
ccatgtgttgaagtattacaggtagttaggcat

SEQ ID NO: 946175 - DNA, 33 bp, Homo sapien
accactgaactctaagccattttgtcagaagga

SEQ ID NO: 946176 - DNA, 33 bp, Homo sapien
accactgaactctaagtcattttgtcagaagga

SEQ ID NO: 946177 - DNA, 33 bp, Homo sapien
ccagtaatttatgtaaccagtgtcctattggtg

SEQ ID NO: 946178 - DNA, 33 bp, Homo sapien
ccagtaatttatgtaagcagtgtcctattggtg

SEQ ID NO: 946179 - DNA, 33 bp, Homo sapien
cccaacattgttttaacatctaattcatatgct

SEQ ID NO: 946180 - DNA, 33 bp, Homo sapien
cccaacattgttttaagatctaattcatatgct

SEQ ID NO: 946181 - DNA, 33 bp, Homo sapien
tttgttatatctgtagccaaaatacctgcattc

SEQ ID NO: 946182 - DNA, 33 bp, Homo sapien
tttgttatatctgtagtcaaaatacctgcattc

SEQ ID NO: 946183 - DNA, 33 bp, Homo sapien
cgactggttgaatccacagatctggaacttgca

SEQ ID NO: 946184 - DNA, 33 bp, Homo sapien
cgactggttgaatccatagatctggaacttgca

SEQ ID NO: 946185 - DNA, 33 bp, Homo sapien
tattttaaatctgtgacgataatgcgacagaac

SEQ ID NO: 946186 - DNA, 33 bp, Homo sapien
tattttaaatctgtgatgataatgcgacagaac

SEQ ID NO: 946187 - DNA, 33 bp, Homo sapien
tgtaagaaatttggtacgaagaagatatgacca

SEQ ID NO: 946188 - DNA, 33 bp, Homo sapien
tgtaagaaatttggtaggaagaagatatgacca

SEQ ID NO: 946189 - DNA, 33 bp, Homo sapien
tatatcttattcagcacctaaaattgttttatg

SEQ ID NO: 946190 - DNA, 33 bp, Homo sapien
tatatcttattcagcatctaaaattgttttatg

SEQ ID NO: 946191 - DNA, 33 bp, Homo sapien
gtgaccttatttccaactactgccttgaagaca

SEQ ID NO: 946192 - DNA, 33 bp, Homo sapien
gtgaccttatttccaattactgccttgaagaca

SEQ ID NO: 946193 - DNA, 33 bp, Homo sapien
ccttccctgtcttccactaaagtcctcgtatta

SEQ ID NO: 946194 - DNA, 33 bp, Homo sapien
ccttccctgtcttccagtaaagtcctcgtatta

SEQ ID NO: 946195 - DNA, 33 bp, Homo sapien
tctagaactttccctaaatcttacaacagtagt

SEQ ID NO: 946196 - DNA, 33 bp, Homo sapien
tctagaactttccctagatcttacaacagtagt

SEQ ID NO: 946197 - DNA, 33 bp, Homo sapien
ccttctcttctgtagacgtctccatgttacagt

SEQ ID NO: 946198 - DNA, 33 bp, Homo sapien
ccttctcttctgtagatgtctccatgttacagt

SEQ ID NO: 946199 - DNA, 33 bp, Homo sapien
tcgtatacatctttacacacgctgcagcgccaa

SEQ ID NO: 946200 - DNA, 33 bp, Homo sapien
tcgtatacatctttacccacgctgcagcgccaa

SEQ ID NO: 946201 - DNA, 33 bp, Homo sapien
gccatcgattgtatcaaagagaaagtgtgaaaa

SEQ ID NO: 946202 - DNA, 33 bp, Homo sapien
gccatcgattgtatcatagagaaagtgtgaaaa

SEQ ID NO: 946203 - DNA, 33 bp, Homo sapien
gcttttgaacaggggaacaaccaaatctgattt

SEQ ID NO: 946204 - DNA, 33 bp, Homo sapien
gcttttgaacaggggagcaaccaaatctgattt

SEQ ID NO: 946205 - DNA, 33 bp, Homo sapien
ttaaatgtaaccatggacactgaagaacagact

SEQ ID NO: 946206 - DNA, 33 bp, Homo sapien
ttaaatgtaaccatggtcactgaagaacagact

SEQ ID NO: 946207 - DNA, 33 bp, Homo sapien
actgacatcgaatcagcagtatctgtctgtgtg

SEQ ID NO: 946208 - DNA, 33 bp, Homo sapien
actgacatcgaatcaggagtatctgtctgtgtg

SEQ ID NO: 946209 - DNA, 33 bp, Homo sapien
ggtggaagctcctcaactgtgcagttaaatggg

SEQ ID NO: 946210 - DNA, 33 bp, Homo sapien
ggtggaagctcctcaattgtgcagttaaatggg

SEQ ID NO: 946211 - DNA, 33 bp, Homo sapien
ctgtgattggcagtgccaagggtcaggtgggac

SEQ ID NO: 946212 - DNA, 33 bp, Homo sapien
ctgtgattggcagtgctaagggtcaggtgggac

SEQ ID NO: 946213 - DNA, 33 bp, Homo sapien
gtggaccacttcctaactgcttgccaataaatg

SEQ ID NO: 946214 - DNA, 33 bp, Homo sapien
gtggaccacttcctaattgcttgccaataaatg

SEQ ID NO: 946215 - DNA, 33 bp, Homo sapien
tccaacgaacatgcaccctttagctgctcttcc

SEQ ID NO: 946216 - DNA, 33 bp, Homo sapien
tccaacgaacatgcactctttagctgctcttcc

SEQ ID NO: 946217 - DNA, 33 bp, Homo sapien
aactaatctttccacaaatgttttcagaagtac

SEQ ID NO: 946218 - DNA, 33 bp, Homo sapien
aactaatctttccacagatgttttcagaagtac

SEQ ID NO: 946219 - DNA, 33 bp, Homo sapien
caaactgaccccaaaacttagattaattattgc

SEQ ID NO: 946220 - DNA, 33 bp, Homo sapien
caaactgaccccaaaagttagattaattattgc

SEQ ID NO: 946221 - DNA, 33 bp, Homo sapien
tgcaagtgctacttcacatttaaaactaaaaag

SEQ ID NO: 946222 - DNA, 33 bp, Homo sapien
tgcaagtgctacttcagatttaaaactaaaaag

SEQ ID NO: 946223 - DNA, 33 bp, Homo sapien
tatttctccctctgaaaagatgtataactatca

SEQ ID NO: 946224 - DNA, 33 bp, Homo sapien
tatttctccctctgaagagatgtataactatca

SEQ ID NO: 946225 - DNA, 33 bp, Homo sapien
tgaatattgtcagacacagaacccaaagaagct

SEQ ID NO: 946226 - DNA, 33 bp, Homo sapien
tgaatattgtcagacagagaacccaaagaagct

SEQ ID NO: 946227 - DNA, 33 bp, Homo sapien
atgagattctacaactgagccacttacaaaaag

SEQ ID NO: 946228 - DNA, 33 bp, Homo sapien
atgagattctacaacttagccacttacaaaaag

SEQ ID NO: 946229 - DNA, 33 bp, Homo sapien
tctatttgttccttcaaatctctccaggcctcc

SEQ ID NO: 946230 - DNA, 33 bp, Homo sapien
tctatttgttccttcacatctctccaggcctcc

SEQ ID NO: 946231 - DNA, 33 bp, Homo sapien
tagggtgcaaaacaaacaatagcttgcatatgc

SEQ ID NO: 946232 - DNA, 33 bp, Homo sapien
tagggtgcaaaacaaataatagcttgcatatgc

SEQ ID NO: 946233 - DNA, 33 bp, Homo sapien
gagcacttctatatatcaggtactatcttaaac

SEQ ID NO: 946234 - DNA, 33 bp, Homo sapien
gagcacttctatatatgaggtactatcttaaac

SEQ ID NO: 946235 - DNA, 33 bp, Homo sapien
aatcgaaattaccctgcattaatatcaaataat

SEQ ID NO: 946236 - DNA, 33 bp, Homo sapien
aatcgaaattaccctggattaatatcaaataat

SEQ ID NO: 946237 - DNA, 33 bp, Homo sapien
acacacctctaccttccaactccacaagaatta

SEQ ID NO: 946238 - DNA, 33 bp, Homo sapien
acacacctctaccttcgaactccacaagaatta

SEQ ID NO: 946239 - DNA, 33 bp, Homo sapien
gatgatgtgaaaataagatctaacattggggct

SEQ ID NO: 946240 - DNA, 33 bp, Homo sapien
gatgatgtgaaaataatatctaacattggggct

SEQ ID NO: 946241 - DNA, 33 bp, Homo sapien
gtctcaattttctacactgaacccatctttaga

SEQ ID NO: 946242 - DNA, 33 bp, Homo sapien
gtctcaattttctacattgaacccatctttaga

SEQ ID NO: 946243 - DNA, 33 bp, Homo sapien
accaaagataggtcaacttaaacagatataccc

SEQ ID NO: 946244 - DNA, 33 bp, Homo sapien
accaaagataggtcaagttaaacagatataccc

SEQ ID NO: 946245 - DNA, 33 bp, Homo sapien
aaaacagagtcaacccaaaaaagttctagatac

SEQ ID NO: 946246 - DNA, 33 bp, Homo sapien
aaaacagagtcaacccgaaaaagttctagatac

SEQ ID NO: 946247 - DNA, 33 bp, Homo sapien
atagtcttaaactttacgagtaacgttcactta

SEQ ID NO: 946248 - DNA, 33 bp, Homo sapien
atagtcttaaactttaggagtaacgttcactta

SEQ ID NO: 946249 - DNA, 33 bp, Homo sapien
cattttgtggaagggtcaatagcttgttggcat

SEQ ID NO: 946250 - DNA, 33 bp, Homo sapien
cattttgtggaagggttaatagcttgttggcat

SEQ ID NO: 946251 - DNA, 33 bp, Homo sapien
ccagacgtctgtgagaacacgactcacgtgctt

SEQ ID NO: 946252 - DNA, 33 bp, Homo sapien
ccagacgtctgtgagaccacgactcacgtgctt

SEQ ID NO: 946253 - DNA, 33 bp, Homo sapien
aacctctgtcacaacacggaaaaaagacgacgg

SEQ ID NO: 946254 - DNA, 33 bp, Homo sapien
aacctctgtcacaacatggaaaaaagacgacgg

SEQ ID NO: 946255 - DNA, 33 bp, Homo sapien
tattagtactgctttacgtttatttggatgaaa

SEQ ID NO: 946256 - DNA, 33 bp, Homo sapien
tattagtactgctttatgtttatttggatgaaa

SEQ ID NO: 946257 - DNA, 33 bp, Homo sapien
gatgttaaagtttgaaagagtcaaagtgatttt

SEQ ID NO: 946258 - DNA, 33 bp, Homo sapien
gatgttaaagtttgaaggagtcaaagtgatttt

SEQ ID NO: 946259 - DNA, 33 bp, Homo sapien
gaaaatggtgatcaaactttatttctaatcaag

SEQ ID NO: 946260 - DNA, 33 bp, Homo sapien
gaaaatggtgatcaaagtttatttctaatcaag

SEQ ID NO: 946261 - DNA, 33 bp, Homo sapien
cctttgcaagaaagagaaatacctgaggcaccg

SEQ ID NO: 946262 - DNA, 33 bp, Homo sapien
cctttgcaagaaagagcaatacctgaggcaccg

SEQ ID NO: 946263 - DNA, 33 bp, Homo sapien
ttatgtgtaatggtgccatttgctgagttaggg

SEQ ID NO: 946264 - DNA, 33 bp, Homo sapien
ttatgtgtaatggtgcgatttgctgagttaggg

SEQ ID NO: 946265 - DNA, 33 bp, Homo sapien
cacacttcacagtgccccattcgctgccaacca

SEQ ID NO: 946266 - DNA, 33 bp, Homo sapien
cacacttcacagtgcctcattcgctgccaacca

SEQ ID NO: 946267 - DNA, 33 bp, Homo sapien
caggaagctaaatatccaacacagcctattcaa

SEQ ID NO: 946268 - DNA, 33 bp, Homo sapien
caggaagctaaatatctaacacagcctattcaa

SEQ ID NO: 946269 - DNA, 33 bp, Homo sapien
tccttggttattaatgaaattctcctactctcc

SEQ ID NO: 946270 - DNA, 33 bp, Homo sapien
tccttggttattaatgcaattctcctactctcc

SEQ ID NO: 946271 - DNA, 33 bp, Homo sapien
tctgccaatagtgcaaaatgaatgtaaagaata

SEQ ID NO: 946272 - DNA, 33 bp, Homo sapien
tctgccaatagtgcaagatgaatgtaaagaata

SEQ ID NO: 946273 - DNA, 33 bp, Homo sapien
taggagcaacacttacagaactccacatcacat

SEQ ID NO: 946274 - DNA, 33 bp, Homo sapien
taggagcaacacttacggaactccacatcacat

SEQ ID NO: 946275 - DNA, 33 bp, Homo sapien
ggtcattacccttgtacgctgacattataaaaa

SEQ ID NO: 946276 - DNA, 33 bp, Homo sapien
ggtcattacccttgtatgctgacattataaaaa

SEQ ID NO: 946277 - DNA, 33 bp, Homo sapien
attaatgagatgaagacgagactgtaggtcaga

SEQ ID NO: 946278 - DNA, 33 bp, Homo sapien
attaatgagatgaagatgagactgtaggtcaga

SEQ ID NO: 946279 - DNA, 33 bp, Homo sapien
cttaggtttgttgtaactggagtggtaaggtct

SEQ ID NO: 946280 - DNA, 33 bp, Homo sapien
cttaggtttgttgtaattggagtggtaaggtct

SEQ ID NO: 946281 - DNA, 33 bp, Homo sapien
aaaacatcaagctttacagaaagatatcaggtt

SEQ ID NO: 946282 - DNA, 33 bp, Homo sapien
aaaacatcaagctttatagaaagatatcaggtt

SEQ ID NO: 946283 - DNA, 33 bp, Homo sapien
caaaccatagagacaaacgttaggagtcaggtg

SEQ ID NO: 946284 - DNA, 33 bp, Homo sapien
caaaccatagagacaaccgttaggagtcaggtg

SEQ ID NO: 946285 - DNA, 33 bp, Homo sapien
aattggtctttgagcacatcttttcctgaaagg

SEQ ID NO: 946286 - DNA, 33 bp, Homo sapien
aattggtctttgagcagatcttttcctgaaagg

SEQ ID NO: 946287 - DNA, 33 bp, Homo sapien
gtgaagtgttatgtaactactggataactgtat

SEQ ID NO: 946288 - DNA, 33 bp, Homo sapien
gtgaagtgttatgtaattactggataactgtat

SEQ ID NO: 946289 - DNA, 33 bp, Homo sapien
atcttatcttcggcaacaaatacattctccttg

SEQ ID NO: 946290 - DNA, 33 bp, Homo sapien
atcttatcttcggcaagaaatacattctccttg

SEQ ID NO: 946291 - DNA, 33 bp, Homo sapien
tttcttctgagcgctgcagcatctaatacaaaa

SEQ ID NO: 946292 - DNA, 33 bp, Homo sapien
tttcttctgagcgctgtagcatctaatacaaaa

SEQ ID NO: 946293 - DNA, 33 bp, Homo sapien
taagtgcaaagtgactcaggaggcttcagataa

SEQ ID NO: 946294 - DNA, 33 bp, Homo sapien
taagtgcaaagtgactgaggaggcttcagataa

SEQ ID NO: 946295 - DNA, 33 bp, Homo sapien
ttcaggtgaaaggaaggagccttaggctgggaa

SEQ ID NO: 946296 - DNA, 33 bp, Homo sapien
ttcaggtgaaaggaagtagccttaggctgggaa

SEQ ID NO: 946297 - DNA, 33 bp, Homo sapien
atttttttgtcacagaaatgaaaggaaataaaa

SEQ ID NO: 946298 - DNA, 33 bp, Homo sapien
atttttttgtcacagatatgaaaggaaataaaa

SEQ ID NO: 946299 - DNA, 33 bp, Homo sapien
caatatgattggaaaaatatttgcaaagatgat

SEQ ID NO: 946300 - DNA, 33 bp, Homo sapien
caatatgattggaaaactatttgcaaagatgat

SEQ ID NO: 946301 - DNA, 33 bp, Homo sapien
cttaaacttggtatccaaaggacagaaagaatt

SEQ ID NO: 946302 - DNA, 33 bp, Homo sapien
cttaaacttggtatcctaaggacagaaagaatt

SEQ ID NO: 946303 - DNA, 33 bp, Homo sapien
atatcacaacagttcaagaaaaacatacataaa

SEQ ID NO: 946304 - DNA, 33 bp, Homo sapien
atatcacaacagttcaggaaaaacatacataaa

SEQ ID NO: 946305 - DNA, 33 bp, Homo sapien
ataacaaattacttgactaccaggtctttccac

SEQ ID NO: 946306 - DNA, 33 bp, Homo sapien
ataacaaattacttgattaccaggtctttccac

SEQ ID NO: 946307 - DNA, 33 bp, Homo sapien
gttaatctatcatttcactactgttttctctga

SEQ ID NO: 946308 - DNA, 33 bp, Homo sapien
gttaatctatcatttcgctactgttttctctga

SEQ ID NO: 946309 - DNA, 33 bp, Homo sapien
taaatgctacttcagcaaaaaggatcaagaaat

SEQ ID NO: 946310 - DNA, 33 bp, Homo sapien
taaatgctacttcagctaaaaggatcaagaaat

SEQ ID NO: 946311 - DNA, 33 bp, Homo sapien
gacgctccaagctcaaagccgtggtcgtgactc

SEQ ID NO: 946312 - DNA, 33 bp, Homo sapien
gacgctccaagctcaaggccgtggtcgtgactc

SEQ ID NO: 946313 - DNA, 33 bp, Homo sapien
agaagactgaaatagtaaactagtggccaggcg

SEQ ID NO: 946314 - DNA, 33 bp, Homo sapien
agaagactgaaatagtcaactagtggccaggcg

SEQ ID NO: 946315 - DNA, 33 bp, Homo sapien
gtctccttctccataaactcattccacaggctg

SEQ ID NO: 946316 - DNA, 33 bp, Homo sapien
gtctccttctccataatctcattccacaggctg

SEQ ID NO: 946317 - DNA, 33 bp, Homo sapien
actcttgagttaagataaaacctgaatctcaac

SEQ ID NO: 946318 - DNA, 33 bp, Homo sapien
actcttgagttaagatgaaacctgaatctcaac

SEQ ID NO: 946319 - DNA, 33 bp, Homo sapien
aatgaattgataagaaattaaggatgtatggct

SEQ ID NO: 946320 - DNA, 33 bp, Homo sapien
aatgaattgataagaagttaaggatgtatggct

SEQ ID NO: 946321 - DNA, 33 bp, Homo sapien
agaattctttatagagaaaccattcgtggagtc

SEQ ID NO: 946322 - DNA, 33 bp, Homo sapien
agaattctttatagaggaaccattcgtggagtc

SEQ ID NO: 946323 - DNA, 33 bp, Homo sapien
gtgagaaatcaacatcagaatctccaagttggg

SEQ ID NO: 946324 - DNA, 33 bp, Homo sapien
gtgagaaatcaacatcggaatctccaagttggg

SEQ ID NO: 946325 - DNA, 33 bp, Homo sapien
cattctacatatacaccctagtaacaacaagca

SEQ ID NO: 946326 - DNA, 33 bp, Homo sapien
cattctacatatacactctagtaacaacaagca

SEQ ID NO: 946327 - DNA, 33 bp, Homo sapien
ctagtaacaacaagcaaaacatccactcttaga

SEQ ID NO: 946328 - DNA, 33 bp, Homo sapien
ctagtaacaacaagcagaacatccactcttaga

SEQ ID NO: 946329 - DNA, 33 bp, Homo sapien
agttacagcagcttacaatgacaaaatgcttct

SEQ ID NO: 946330 - DNA, 33 bp, Homo sapien
agttacagcagcttacgatgacaaaatgcttct

SEQ ID NO: 946331 - DNA, 33 bp, Homo sapien
ctcagcgtattttctgaagagtggatttcatta

SEQ ID NO: 946332 - DNA, 33 bp, Homo sapien
ctcagcgtattttctgcagagtggatttcatta

SEQ ID NO: 946333 - DNA, 33 bp, Homo sapien
attagcttgtggttggaatttgatggttttctg

SEQ ID NO: 946334 - DNA, 33 bp, Homo sapien
attagcttgtggttgggatttgatggttttctg

SEQ ID NO: 946335 - DNA, 33 bp, Homo sapien
cttttcgacaatgaaaaggaccatcgtaagtgt

SEQ ID NO: 946336 - DNA, 33 bp, Homo sapien
cttttcgacaatgaaagggaccatcgtaagtgt

SEQ ID NO: 946337 - DNA, 33 bp, Homo sapien
actaatagtagtcttaccaccagattaaaccac

SEQ ID NO: 946338 - DNA, 33 bp, Homo sapien
actaatagtagtcttatcaccagattaaaccac

SEQ ID NO: 946339 - DNA, 33 bp, Homo sapien
gtagtggtttagaataacagtatgaaccatttg

SEQ ID NO: 946340 - DNA, 33 bp, Homo sapien
gtagtggtttagaataccagtatgaaccatttg

SEQ ID NO: 946341 - DNA, 33 bp, Homo sapien
aattagaactatttctcaatggttgctattcct

SEQ ID NO: 946342 - DNA, 33 bp, Homo sapien
aattagaactatttctgaatggttgctattcct

SEQ ID NO: 946343 - DNA, 33 bp, Homo sapien
cttcccagccccacggaaaattctgcttttgtc

SEQ ID NO: 946344 - DNA, 33 bp, Homo sapien
cttcccagccccacggcaaattctgcttttgtc

SEQ ID NO: 946345 - DNA, 33 bp, Homo sapien
ccagcagcttagcaaacttgagggcaaacacac

SEQ ID NO: 946346 - DNA, 33 bp, Homo sapien
ccagcagcttagcaaagttgagggcaaacacac

SEQ ID NO: 946347 - DNA, 33 bp, Homo sapien
cgagctgctgccgtctaaaacgcagggctgcta

SEQ ID NO: 946348 - DNA, 33 bp, Homo sapien
cgagctgctgccgtctgaaacgcagggctgcta

SEQ ID NO: 946349 - DNA, 33 bp, Homo sapien
atggctgggtccgtcaatgaaagtcttctcttt

SEQ ID NO: 946350 - DNA, 33 bp, Homo sapien
atggctgggtccgtcagtgaaagtcttctcttt

SEQ ID NO: 946351 - DNA, 33 bp, Homo sapien
ttagttgattcttgaaccactagccaagttaca

SEQ ID NO: 946352 - DNA, 33 bp, Homo sapien
ttagttgattcttgaagcactagccaagttaca

SEQ ID NO: 946353 - DNA, 33 bp, Homo sapien
ggccttgctgaccacaaacggtggttgctgcac

SEQ ID NO: 946354 - DNA, 33 bp, Homo sapien
ggccttgctgaccacacacggtggttgctgcac

SEQ ID NO: 946355 - DNA, 33 bp, Homo sapien
cccttcaagttaccgtaaagacagaagaaaagg

SEQ ID NO: 946356 - DNA, 33 bp, Homo sapien
cccttcaagttaccgttaagacagaagaaaagg

SEQ ID NO: 946357 - DNA, 33 bp, Homo sapien
gtgtgtctgtcttttacgttaatggttatgaat

SEQ ID NO: 946358 - DNA, 33 bp, Homo sapien
gtgtgtctgtcttttatgttaatggttatgaat

SEQ ID NO: 946359 - DNA, 33 bp, Homo sapien
ggctccagctcaagagaactgaaggccgctaag

SEQ ID NO: 946360 - DNA, 33 bp, Homo sapien
ggctccagctcaagaggactgaaggccgctaag

SEQ ID NO: 946361 - DNA, 33 bp, Homo sapien
ccagatcattaatgcaaagctgaattcaaattg

SEQ ID NO: 946362 - DNA, 33 bp, Homo sapien
ccagatcattaatgcagagctgaattcaaattg

SEQ ID NO: 946363 - DNA, 33 bp, Homo sapien
gaagacttgtatttaagggatgcactaactacc

SEQ ID NO: 946364 - DNA, 33 bp, Homo sapien
gaagacttgtatttaatggatgcactaactacc

SEQ ID NO: 946365 - DNA, 33 bp, Homo sapien
gttatttacaggaataagaagcagaagacttgt

SEQ ID NO: 946366 - DNA, 33 bp, Homo sapien
gttatttacaggaataggaagcagaagacttgt

SEQ ID NO: 946367 - DNA, 33 bp, Homo sapien
aagtgatgcctgatgtaacaaataaatttcagt

SEQ ID NO: 946368 - DNA, 33 bp, Homo sapien
aagtgatgcctgatgtcacaaataaatttcagt

SEQ ID NO: 946369 - DNA, 33 bp, Homo sapien
ttctatcgagatggaaaatgaaaatgcctggca

SEQ ID NO: 946370 - DNA, 33 bp, Homo sapien
ttctatcgagatggaagatgaaaatgcctggca

SEQ ID NO: 946371 - DNA, 33 bp, Homo sapien
gcaaccaaatacattaagtgtaaattgccaaag

SEQ ID NO: 946372 - DNA, 33 bp, Homo sapien
gcaaccaaatacattatgtgtaaattgccaaag

SEQ ID NO: 946373 - DNA, 33 bp, Homo sapien
ggcactgtccccgaaacgatcttgctgtgttgc

SEQ ID NO: 946374 - DNA, 33 bp, Homo sapien
ggcactgtccccgaaatgatcttgctgtgttgc

SEQ ID NO: 946375 - DNA, 33 bp, Homo sapien
tctgctgaacattcctaacacaaagaacccttt

SEQ ID NO: 946376 - DNA, 33 bp, Homo sapien
tctgctgaacattccttacacaaagaacccttt

SEQ ID NO: 946377 - DNA, 33 bp, Homo sapien
tatagttgtcaaagacaggcaacttgaggttga

SEQ ID NO: 946378 - DNA, 33 bp, Homo sapien
tatagttgtcaaagacgggcaacttgaggttga

SEQ ID NO: 946379 - DNA, 33 bp, Homo sapien
acaattgggcaggcaacggccctttacagatga

SEQ ID NO: 946380 - DNA, 33 bp, Homo sapien
acaattgggcaggcaatggccctttacagatga

SEQ ID NO: 946381 - DNA, 33 bp, Homo sapien
aaattcttcatctgacgctcacaggctcctttt

SEQ ID NO: 946382 - DNA, 33 bp, Homo sapien
aaattcttcatctgactctcacaggctcctttt

SEQ ID NO: 946383 - DNA, 33 bp, Homo sapien
cttccaggggagcaaacgcaaacccaaagggat

SEQ ID NO: 946384 - DNA, 33 bp, Homo sapien
cttccaggggagcaaatgcaaacccaaagggat

SEQ ID NO: 946385 - DNA, 33 bp, Homo sapien
tgcagctgcagcagaggctaagaagaacgccag

SEQ ID NO: 946386 - DNA, 33 bp, Homo sapien
tgcagctgcagcagagtctaagaagaacgccag

SEQ ID NO: 946387 - DNA, 33 bp, Homo sapien
taccttcattgaggctcagataaggtacaagaa

SEQ ID NO: 946388 - DNA, 33 bp, Homo sapien
taccttcattgaggcttagataaggtacaagaa

SEQ ID NO: 946389 - DNA, 33 bp, Homo sapien
atcatcactgtcgacccggagccaatggtgaaa

SEQ ID NO: 946390 - DNA, 33 bp, Homo sapien
atcatcactgtcgacctggagccaatggtgaaa

SEQ ID NO: 946391 - DNA, 33 bp, Homo sapien
caaaggcggtcaatcagagtgagcaccagagac

SEQ ID NO: 946392 - DNA, 33 bp, Homo sapien
caaaggcggtcaatcatagtgagcaccagagac

SEQ ID NO: 946393 - DNA, 33 bp, Homo sapien
ataacactgaacaaaacgattctactatgaaac

SEQ ID NO: 946394 - DNA, 33 bp, Homo sapien
ataacactgaacaaaatgattctactatgaaac

SEQ ID NO: 946395 - DNA, 33 bp, Homo sapien
acgggagcatggtactcaacacacttccatgca

SEQ ID NO: 946396 - DNA, 33 bp, Homo sapien
acgggagcatggtacttaacacacttccatgca

SEQ ID NO: 946397 - DNA, 33 bp, Homo sapien
gtgggtatatgtggtacgtgattgggtgtgtgt

SEQ ID NO: 946398 - DNA, 33 bp, Homo sapien
gtgggtatatgtggtatgtgattgggtgtgtgt

SEQ ID NO: 946399 - DNA, 33 bp, Homo sapien
tccgcacagaatgcaacgacggtccctctcctg

SEQ ID NO: 946400 - DNA, 33 bp, Homo sapien
tccgcacagaatgcaaggacggtccctctcctg

SEQ ID NO: 946401 - DNA, 33 bp, Homo sapien
aaacaacaaggaaagcaacaaacccaaccagcc

SEQ ID NO: 946402 - DNA, 33 bp, Homo sapien
aaacaacaaggaaagcgacaaacccaaccagcc

SEQ ID NO: 946403 - DNA, 33 bp, Homo sapien
gaccccagtttatcaccattagctcactcccag

SEQ ID NO: 946404 - DNA, 33 bp, Homo sapien
gaccccagtttatcactattagctcactcccag

SEQ ID NO: 946405 - DNA, 33 bp, Homo sapien
aatttgtaaaccttataataacacgaaagcagg

SEQ ID NO: 946406 - DNA, 33 bp, Homo sapien
aatttgtaaaccttatgataacacgaaagcagg

SEQ ID NO: 946407 - DNA, 33 bp, Homo sapien
atcagaccattttttaaggatgaaatcaaagtt

SEQ ID NO: 946408 - DNA, 33 bp, Homo sapien
atcagaccattttttatggatgaaatcaaagtt

SEQ ID NO: 946409 - DNA, 33 bp, Homo sapien
aaaaatggaaagtagaccaatgtaagcgttaaa

SEQ ID NO: 946410 - DNA, 33 bp, Homo sapien
aaaaatggaaagtagatcaatgtaagcgttaaa

SEQ ID NO: 946411 - DNA, 33 bp, Homo sapien
gcattaaggaatgatacggcatatttgggggac

SEQ ID NO: 946412 - DNA, 33 bp, Homo sapien
gcattaaggaatgatatggcatatttgggggac

SEQ ID NO: 946413 - DNA, 33 bp, Homo sapien
tttcccatctcaacaacgatacaggacgtgtct

SEQ ID NO: 946414 - DNA, 33 bp, Homo sapien
tttcccatctcaacaatgatacaggacgtgtct

SEQ ID NO: 946415 - DNA, 33 bp, Homo sapien
tccttggcctgctaaccgtcttaagatgcactt

SEQ ID NO: 946416 - DNA, 33 bp, Homo sapien
tccttggcctgctaactgtcttaagatgcactt

SEQ ID NO: 946417 - DNA, 33 bp, Homo sapien
acagaaaccgctaaaaccaggcagaagctgtct

SEQ ID NO: 946418 - DNA, 33 bp, Homo sapien
acagaaaccgctaaaatcaggcagaagctgtct

SEQ ID NO: 946419 - DNA, 33 bp, Homo sapien
accaccaaatgcatacagcaaccaggcaaatgc

SEQ ID NO: 946420 - DNA, 33 bp, Homo sapien
accaccaaatgcatacggcaaccaggcaaatgc

SEQ ID NO: 946421 - DNA, 33 bp, Homo sapien
ggaagcagagaaagcaatctcggacctttgcag

SEQ ID NO: 946422 - DNA, 33 bp, Homo sapien
ggaagcagagaaagcagtctcggacctttgcag

SEQ ID NO: 946423 - DNA, 33 bp, Homo sapien
ggtgcactcgctgatacattggatgtggcatat

SEQ ID NO: 946424 - DNA, 33 bp, Homo sapien
ggtgcactcgctgatagattggatgtggcatat

SEQ ID NO: 946425 - DNA, 33 bp, Homo sapien
tatggtgtcttaagtactaccaagtttttaatt

SEQ ID NO: 946426 - DNA, 33 bp, Homo sapien
tatggtgtcttaagtattaccaagtttttaatt

SEQ ID NO: 946427 - DNA, 33 bp, Homo sapien
aaaaaaataaattacactcttctttgccttaat

SEQ ID NO: 946428 - DNA, 33 bp, Homo sapien
aaaaaaataaattacattcttctttgccttaat

SEQ ID NO: 946429 - DNA, 33 bp, Homo sapien
gagcactgtgttctgcaccttaacatttcttgt

SEQ ID NO: 946430 - DNA, 33 bp, Homo sapien
gagcactgtgttctgcgccttaacatttcttgt

SEQ ID NO: 946431 - DNA, 33 bp, Homo sapien
tttccatgagagcttacgatggtatttgactgt

SEQ ID NO: 946432 - DNA, 33 bp, Homo sapien
tttccatgagagcttaggatggtatttgactgt

SEQ ID NO: 946433 - DNA, 33 bp, Homo sapien
aaagaggacaattaaacggaaggaacagttcct

SEQ ID NO: 946434 - DNA, 33 bp, Homo sapien
aaagaggacaattaaatggaaggaacagttcct

SEQ ID NO: 946435 - DNA, 33 bp, Homo sapien
agaagacaaccgataactcagttaaaattttgg

SEQ ID NO: 946436 - DNA, 33 bp, Homo sapien
agaagacaaccgataagtcagttaaaattttgg

SEQ ID NO: 946437 - DNA, 33 bp, Homo sapien
tggattatctgccaaacaaattatctgccaaaa

SEQ ID NO: 946438 - DNA, 33 bp, Homo sapien
tggattatctgccaaagaaattatctgccaaaa

SEQ ID NO: 946439 - DNA, 33 bp, Homo sapien
tgacttccgcttcacaatattttgcgtcccgta

SEQ ID NO: 946440 - DNA, 33 bp, Homo sapien
tgacttccgcttcacagtattttgcgtcccgta

SEQ ID NO: 946441 - DNA, 33 bp, Homo sapien
ttttatcgtaaacattcaagcaccgtgtataat

SEQ ID NO: 946442 - DNA, 33 bp, Homo sapien
ttttatcgtaaacatttaagcaccgtgtataat

SEQ ID NO: 946443 - DNA, 33 bp, Homo sapien
aaggacagaagatcaccggctgaatcacttgtt

SEQ ID NO: 946444 - DNA, 33 bp, Homo sapien
aaggacagaagatcactggctgaatcacttgtt

SEQ ID NO: 946445 - DNA, 33 bp, Homo sapien
ttagttcatgtgcctcaagtacaatgtagtcct

SEQ ID NO: 946446 - DNA, 33 bp, Homo sapien
ttagttcatgtgcctcgagtacaatgtagtcct

SEQ ID NO: 946447 - DNA, 33 bp, Homo sapien
gatttgcagataactcaaaaacataagaaaccc

SEQ ID NO: 946448 - DNA, 33 bp, Homo sapien
gatttgcagataactcgaaaacataagaaaccc

SEQ ID NO: 946449 - DNA, 33 bp, Homo sapien
attcataagacagagacacaaagagatacaaag

SEQ ID NO: 946450 - DNA, 33 bp, Homo sapien
attcataagacagagatacaaagagatacaaag

SEQ ID NO: 946451 - DNA, 33 bp, Homo sapien
atagcaaacgactccaactaggtgtgaatgagg

SEQ ID NO: 946452 - DNA, 33 bp, Homo sapien
atagcaaacgactccagctaggtgtgaatgagg

SEQ ID NO: 946453 - DNA, 33 bp, Homo sapien
aacccaaaaccacatacatgttaatgctttggg

SEQ ID NO: 946454 - DNA, 33 bp, Homo sapien
aacccaaaaccacatagatgttaatgctttggg

SEQ ID NO: 946455 - DNA, 33 bp, Homo sapien
atacactccaattagcagcgattacaagtggat

SEQ ID NO: 946456 - DNA, 33 bp, Homo sapien
atacactccaattagcggcgattacaagtggat

SEQ ID NO: 946457 - DNA, 33 bp, Homo sapien
taccatgagctgcttccctgacctcagtacaca

SEQ ID NO: 946458 - DNA, 33 bp, Homo sapien
taccatgagctgcttctctgacctcagtacaca

SEQ ID NO: 946459 - DNA, 33 bp, Homo sapien
acagtgccaagagggacggtgatacctattcat

SEQ ID NO: 946460 - DNA, 33 bp, Homo sapien
acagtgccaagagggatggtgatacctattcat

SEQ ID NO: 946461 - DNA, 33 bp, Homo sapien
tagaagagttgggatccgaaaactgaatccctt

SEQ ID NO: 946462 - DNA, 33 bp, Homo sapien
tagaagagttgggatctgaaaactgaatccctt

SEQ ID NO: 946463 - DNA, 33 bp, Homo sapien
tgatacagtctgatcaataaaaaactttgaagg

SEQ ID NO: 946464 - DNA, 33 bp, Homo sapien
tgatacagtctgatcagtaaaaaactttgaagg

SEQ ID NO: 946465 - DNA, 33 bp, Homo sapien
taaatttaagtagttacgaagttctgatgagtt

SEQ ID NO: 946466 - DNA, 33 bp, Homo sapien
taaatttaagtagttatgaagttctgatgagtt

SEQ ID NO: 946467 - DNA, 33 bp, Homo sapien
tattgaatggtccaaccactaacatcaacctct

SEQ ID NO: 946468 - DNA, 33 bp, Homo sapien
tattgaatggtccaactactaacatcaacctct

SEQ ID NO: 946469 - DNA, 33 bp, Homo sapien
cactttgaatatcaaccacggaattacaaggag

SEQ ID NO: 946470 - DNA, 33 bp, Homo sapien
cactttgaatatcaactacggaattacaaggag

SEQ ID NO: 946471 - DNA, 33 bp, Homo sapien
ccgtatgtcatctggagtaagtgtcaacttctc

SEQ ID NO: 946472 - DNA, 33 bp, Homo sapien
ccgtatgtcatctggattaagtgtcaacttctc

SEQ ID NO: 946473 - DNA, 33 bp, Homo sapien
aaataagaacagtaccaaaagacaggatgtaaa

SEQ ID NO: 946474 - DNA, 33 bp, Homo sapien
aaataagaacagtaccgaaagacaggatgtaaa

SEQ ID NO: 946475 - DNA, 33 bp, Homo sapien
gcatgtctgctctaccacccacagcaaccacgt

SEQ ID NO: 946476 - DNA, 33 bp, Homo sapien
gcatgtctgctctaccgcccacagcaaccacgt

SEQ ID NO: 946477 - DNA, 33 bp, Homo sapien
acttgctgtgtttaggcaattaactgctgcttc

SEQ ID NO: 946478 - DNA, 33 bp, Homo sapien
acttgctgtgtttaggtaattaactgctgcttc

SEQ ID NO: 946479 - DNA, 33 bp, Homo sapien
gctgataaattgtgaaaaagtgactagtcaaag

SEQ ID NO: 946480 - DNA, 33 bp, Homo sapien
gctgataaattgtgaagaagtgactagtcaaag

SEQ ID NO: 946481 - DNA, 33 bp, Homo sapien
gtcacaggcactcggacgtagggtgaagggaag

SEQ ID NO: 946482 - DNA, 33 bp, Homo sapien
gtcacaggcactcggaggtagggtgaagggaag

SEQ ID NO: 946483 - DNA, 33 bp, Homo sapien
taattagcggaaagaacatttcaaagactgttg

SEQ ID NO: 946484 - DNA, 33 bp, Homo sapien
taattagcggaaagaatatttcaaagactgttg

SEQ ID NO: 946485 - DNA, 33 bp, Homo sapien
ccccttatccttcaacgatctacttttgacaac

SEQ ID NO: 946486 - DNA, 33 bp, Homo sapien
ccccttatccttcaactatctacttttgacaac

SEQ ID NO: 946487 - DNA, 33 bp, Homo sapien
ccaaatttaacgagaaagagatgcgaaacaagt

SEQ ID NO: 946488 - DNA, 33 bp, Homo sapien
ccaaatttaacgagaaggagatgcgaaacaagt

SEQ ID NO: 946489 - DNA, 33 bp, Homo sapien
gacaaagcaccatgatcaccggggcgacttggg

SEQ ID NO: 946490 - DNA, 33 bp, Homo sapien
gacaaagcaccatgatgaccggggcgacttggg

SEQ ID NO: 946491 - DNA, 33 bp, Homo sapien
gagttctttcaaaacaggagaacaaagggaata

SEQ ID NO: 946492 - DNA, 33 bp, Homo sapien
gagttctttcaaaacatgagaacaaagggaata

SEQ ID NO: 946493 - DNA, 33 bp, Homo sapien
acctatttttgcatttcaaaacagacagttcat

SEQ ID NO: 946494 - DNA, 33 bp, Homo sapien
acctatttttgcatttgaaaacagacagttcat

SEQ ID NO: 946495 - DNA, 33 bp, Homo sapien
tctatgatctaggttgcaaataatttcccagtt

SEQ ID NO: 946496 - DNA, 33 bp, Homo sapien
tctatgatctaggttgtaaataatttcccagtt

SEQ ID NO: 946497 - DNA, 33 bp, Homo sapien
taaagtatactgatacacttgggtaatagagaa

SEQ ID NO: 946498 - DNA, 33 bp, Homo sapien
taaagtatactgatacgcttgggtaatagagaa

SEQ ID NO: 946499 - DNA, 33 bp, Homo sapien
ctactttatagacttgcacccttaggcacagag

SEQ ID NO: 946500 - DNA, 33 bp, Homo sapien
ctactttatagacttggacccttaggcacagag

SEQ ID NO: 946501 - DNA, 33 bp, Homo sapien
ccatactcacctctctaaagggacccgcaaatg

SEQ ID NO: 946502 - DNA, 33 bp, Homo sapien
ccatactcacctctctgaagggacccgcaaatg

SEQ ID NO: 946503 - DNA, 33 bp, Homo sapien
acagccagacctcacaaagtaacaccactttat

SEQ ID NO: 946504 - DNA, 33 bp, Homo sapien
acagccagacctcacacagtaacaccactttat

SEQ ID NO: 946505 - DNA, 33 bp, Homo sapien
ttgactcttaactgtacatgatgtaatgtattc

SEQ ID NO: 946506 - DNA, 33 bp, Homo sapien
ttgactcttaactgtatatgatgtaatgtattc

SEQ ID NO: 946507 - DNA, 33 bp, Homo sapien
ctcagcggcttgcacgcagacttgctaggaaga

SEQ ID NO: 946508 - DNA, 33 bp, Homo sapien
ctcagcggcttgcacgtagacttgctaggaaga

SEQ ID NO: 946509 - DNA, 33 bp, Homo sapien
acaaatgcaaaatgcccctgcagtagctggtga

SEQ ID NO: 946510 - DNA, 33 bp, Homo sapien
acaaatgcaaaatgcctctgcagtagctggtga

SEQ ID NO: 946511 - DNA, 33 bp, Homo sapien
ttcgttcagtcatgacaaattaagtctgtattt

SEQ ID NO: 946512 - DNA, 33 bp, Homo sapien
ttcgttcagtcatgacgaattaagtctgtattt

SEQ ID NO: 946513 - DNA, 33 bp, Homo sapien
gtagctccactaaaccgaatgggaaataaacaa

SEQ ID NO: 946514 - DNA, 33 bp, Homo sapien
gtagctccactaaacctaatgggaaataaacaa

SEQ ID NO: 946515 - DNA, 33 bp, Homo sapien
gactcttcaaagatgacgcttgaaagagtttat

SEQ ID NO: 946516 - DNA, 33 bp, Homo sapien
gactcttcaaagatgatgcttgaaagagtttat

SEQ ID NO: 946517 - DNA, 33 bp, Homo sapien
tttttagtagtgtttacattgaagattgagtga

SEQ ID NO: 946518 - DNA, 33 bp, Homo sapien
tttttagtagtgtttagattgaagattgagtga

SEQ ID NO: 946519 - DNA, 33 bp, Homo sapien
ctttatcacatatacaagaaataactttttatc

SEQ ID NO: 946520 - DNA, 33 bp, Homo sapien
ctttatcacatatacatgaaataactttttatc

SEQ ID NO: 946521 - DNA, 33 bp, Homo sapien
ccctcttcttgtgtacgaacatctttatccttt

SEQ ID NO: 946522 - DNA, 33 bp, Homo sapien
ccctcttcttgtgtactaacatctttatccttt

SEQ ID NO: 946523 - DNA, 33 bp, Homo sapien
gagacccactgctacacacttgggacccgaccg

SEQ ID NO: 946524 - DNA, 33 bp, Homo sapien
gagacccactgctacatacttgggacccgaccg

SEQ ID NO: 946525 - DNA, 33 bp, Homo sapien
atcgcccctccacaagaacatagacaaggccag

SEQ ID NO: 946526 - DNA, 33 bp, Homo sapien
atcgcccctccacaaggacatagacaaggccag

SEQ ID NO: 946527 - DNA, 33 bp, Homo sapien
acagatgaactagcagcaagggtcactgcaggc

SEQ ID NO: 946528 - DNA, 33 bp, Homo sapien
acagatgaactagcaggaagggtcactgcaggc

SEQ ID NO: 946529 - DNA, 33 bp, Homo sapien
agtgacaactcactcactatcacaaagacggca

SEQ ID NO: 946530 - DNA, 33 bp, Homo sapien
agtgacaactcactcattatcacaaagacggca

SEQ ID NO: 946531 - DNA, 33 bp, Homo sapien
acacaaaccaaaaagacggtgtccaagagctgc

SEQ ID NO: 946532 - DNA, 33 bp, Homo sapien
acacaaaccaaaaagatggtgtccaagagctgc

SEQ ID NO: 946533 - DNA, 33 bp, Homo sapien
cctgtgaaagcaaaggaatgactggaaagagag

SEQ ID NO: 946534 - DNA, 33 bp, Homo sapien
cctgtgaaagcaaagggatgactggaaagagag

SEQ ID NO: 946535 - DNA, 33 bp, Homo sapien
tgctgtggaatgttatcaaaacgtggtttgagc

SEQ ID NO: 946536 - DNA, 33 bp, Homo sapien
tgctgtggaatgttattaaaacgtggtttgagc

SEQ ID NO: 946537 - DNA, 33 bp, Homo sapien
ttggaaaaatcaagtgaaagagtgtatcatgtc

SEQ ID NO: 946538 - DNA, 33 bp, Homo sapien
ttggaaaaatcaagtggaagagtgtatcatgtc

SEQ ID NO: 946539 - DNA, 33 bp, Homo sapien
atccacagatgcaggaaagaagttggatagaac

SEQ ID NO: 946540 - DNA, 33 bp, Homo sapien
atccacagatgcaggagagaagttggatagaac

SEQ ID NO: 946541 - DNA, 33 bp, Homo sapien
agcactttgctcttccgcaccaatgcagtacag

SEQ ID NO: 946542 - DNA, 33 bp, Homo sapien
agcactttgctcttcctcaccaatgcagtacag

SEQ ID NO: 946543 - DNA, 33 bp, Homo sapien
tttgctaaaagtcttcaaaagatttgccaagtt

SEQ ID NO: 946544 - DNA, 33 bp, Homo sapien
tttgctaaaagtcttcgaaagatttgccaagtt

SEQ ID NO: 946545 - DNA, 33 bp, Homo sapien
gccgaacccaaatgcacacacaaatcacctctt

SEQ ID NO: 946546 - DNA, 33 bp, Homo sapien
gccgaacccaaatgcagacacaaatcacctctt

SEQ ID NO: 946547 - DNA, 33 bp, Homo sapien
gcagctttgtgcactcactgtctttgcaaagtg

SEQ ID NO: 946548 - DNA, 33 bp, Homo sapien
gcagctttgtgcactcgctgtctttgcaaagtg

SEQ ID NO: 946549 - DNA, 33 bp, Homo sapien
tgttcaacttggcacactgacagctccttgtag

SEQ ID NO: 946550 - DNA, 33 bp, Homo sapien
tgttcaacttggcacagtgacagctccttgtag

SEQ ID NO: 946551 - DNA, 33 bp, Homo sapien
tggctcatactcaccaagctgtgtccagagtct

SEQ ID NO: 946552 - DNA, 33 bp, Homo sapien
tggctcatactcaccaggctgtgtccagagtct

SEQ ID NO: 946553 - DNA, 33 bp, Homo sapien
ggcctcgcggatactcacagcagcccgtgggaa

SEQ ID NO: 946554 - DNA, 33 bp, Homo sapien
ggcctcgcggatactcgcagcagcccgtgggaa

SEQ ID NO: 946555 - DNA, 33 bp, Homo sapien
gaaaccagaaaagccaaaaggaggctcctacca

SEQ ID NO: 946556 - DNA, 33 bp, Homo sapien
gaaaccagaaaagccacaaggaggctcctacca

SEQ ID NO: 946557 - DNA, 33 bp, Homo sapien
tttttttaaccaggaaatactgtctttcttttc

SEQ ID NO: 946558 - DNA, 33 bp, Homo sapien
tttttttaaccaggaagtactgtctttcttttc

SEQ ID NO: 946559 - DNA, 33 bp, Homo sapien
attcctaaaagtcggccattttcacagtacttg

SEQ ID NO: 946560 - DNA, 33 bp, Homo sapien
attcctaaaagtcggctattttcacagtacttg

SEQ ID NO: 946561 - DNA, 33 bp, Homo sapien
gttgtcaagttcatcaactggtgtttttggcca

SEQ ID NO: 946562 - DNA, 33 bp, Homo sapien
gttgtcaagttcatcagctggtgtttttggcca

SEQ ID NO: 946563 - DNA, 33 bp, Homo sapien
gggacagccttgtccacctttgggtaactctgt

SEQ ID NO: 946564 - DNA, 33 bp, Homo sapien
gggacagccttgtccatctttgggtaactctgt

SEQ ID NO: 946565 - DNA, 33 bp, Homo sapien
tggaactggaaggaaaacaggcatccactctca

SEQ ID NO: 946566 - DNA, 33 bp, Homo sapien
tggaactggaaggaaaccaggcatccactctca

SEQ ID NO: 946567 - DNA, 33 bp, Homo sapien
tgatttctgcttttcccatttaatcgctcttga

SEQ ID NO: 946568 - DNA, 33 bp, Homo sapien
tgatttctgcttttcctatttaatcgctcttga

SEQ ID NO: 946569 - DNA, 33 bp, Homo sapien
taatttgaatatgacacaagaaagagtagcttc

SEQ ID NO: 946570 - DNA, 33 bp, Homo sapien
taatttgaatatgacagaagaaagagtagcttc

SEQ ID NO: 946571 - DNA, 33 bp, Homo sapien
tctcctctgttgcaaaaaggacagctccactaa

SEQ ID NO: 946572 - DNA, 33 bp, Homo sapien
tctcctctgttgcaaataggacagctccactaa

SEQ ID NO: 946573 - DNA, 33 bp, Homo sapien
cagttccttgccattgcaattctcagctgctaa

SEQ ID NO: 946574 - DNA, 33 bp, Homo sapien
cagttccttgccattggaattctcagctgctaa

SEQ ID NO: 946575 - DNA, 33 bp, Homo sapien
ggagtgctggattggccacgatatgaatttctt

SEQ ID NO: 946576 - DNA, 33 bp, Homo sapien
ggagtgctggattggctacgatatgaatttctt

SEQ ID NO: 946577 - DNA, 33 bp, Homo sapien
gtcacctgcaaaactccctgtagagacccctaa

SEQ ID NO: 946578 - DNA, 33 bp, Homo sapien
gtcacctgcaaaactcgctgtagagacccctaa

SEQ ID NO: 946579 - DNA, 33 bp, Homo sapien
gcagcatgagatgacaaaagaaggcctatctca

SEQ ID NO: 946580 - DNA, 33 bp, Homo sapien
gcagcatgagatgacagaagaaggcctatctca

SEQ ID NO: 946581 - DNA, 33 bp, Homo sapien
gagtcagacttaaaatgaacatagtatgtatta

SEQ ID NO: 946582 - DNA, 33 bp, Homo sapien
gagtcagacttaaaattaacatagtatgtatta

SEQ ID NO: 946583 - DNA, 33 bp, Homo sapien
acagaatccacatggacagaagattcctctcac

SEQ ID NO: 946584 - DNA, 33 bp, Homo sapien
acagaatccacatggagagaagattcctctcac

SEQ ID NO: 946585 - DNA, 33 bp, Homo sapien
gcaattgtgctccagacgtgaaagaggcagctg

SEQ ID NO: 946586 - DNA, 33 bp, Homo sapien
gcaattgtgctccagaggtgaaagaggcagctg

SEQ ID NO: 946587 - DNA, 33 bp, Homo sapien
aggaggtgcagcatcaccaaggagcaatgccct

SEQ ID NO: 946588 - DNA, 33 bp, Homo sapien
aggaggtgcagcatcatcaaggagcaatgccct

SEQ ID NO: 946589 - DNA, 33 bp, Homo sapien
ctctgcaggaacagagaaaggaatgcccaggtt

SEQ ID NO: 946590 - DNA, 33 bp, Homo sapien
ctctgcaggaacagaggaaggaatgcccaggtt

SEQ ID NO: 946591 - DNA, 33 bp, Homo sapien
gaattaatctgtaaaactacctagacctgaata

SEQ ID NO: 946592 - DNA, 33 bp, Homo sapien
gaattaatctgtaaaagtacctagacctgaata

SEQ ID NO: 946593 - DNA, 33 bp, Homo sapien
tgtatctagacgcagaaaaggaaggaatactgt

SEQ ID NO: 946594 - DNA, 33 bp, Homo sapien
tgtatctagacgcagagaaggaaggaatactgt

SEQ ID NO: 946595 - DNA, 33 bp, Homo sapien
agaatggcggccaatgcatattttcttgcacaa

SEQ ID NO: 946596 - DNA, 33 bp, Homo sapien
agaatggcggccaatgtatattttcttgcacaa

SEQ ID NO: 946597 - DNA, 33 bp, Homo sapien
ggactccctgcggtcaagtcctgaaagctttgt

SEQ ID NO: 946598 - DNA, 33 bp, Homo sapien
ggactccctgcggtcaggtcctgaaagctttgt

SEQ ID NO: 946599 - DNA, 33 bp, Homo sapien
attttaaagccagcaaaactctgattctatcac

SEQ ID NO: 946600 - DNA, 33 bp, Homo sapien
attttaaagccagcaagactctgattctatcac

SEQ ID NO: 946601 - DNA, 33 bp, Homo sapien
agttgagcttatctagccaggtatattagccag

SEQ ID NO: 946602 - DNA, 33 bp, Homo sapien
agttgagcttatctaggcaggtatattagccag

SEQ ID NO: 946603 - DNA, 33 bp, Homo sapien
aggcaggggagaaccaagtaaggtgaggctgag

SEQ ID NO: 946604 - DNA, 33 bp, Homo sapien
aggcaggggagaaccaggtaaggtgaggctgag

SEQ ID NO: 946605 - DNA, 33 bp, Homo sapien
atcaggtttcacttgtaaagaatggcgggtgct

SEQ ID NO: 946606 - DNA, 33 bp, Homo sapien
atcaggtttcacttgtgaagaatggcgggtgct

SEQ ID NO: 946607 - DNA, 33 bp, Homo sapien
taaccaaatgtgtgcaaactaaagaccctgttg

SEQ ID NO: 946608 - DNA, 33 bp, Homo sapien
taaccaaatgtgtgcagactaaagaccctgttg

SEQ ID NO: 946609 - DNA, 33 bp, Homo sapien
tcccatgtggcaaccactggcggtacatctgtg

SEQ ID NO: 946610 - DNA, 33 bp, Homo sapien
tcccatgtggcaaccagtggcggtacatctgtg

SEQ ID NO: 946611 - DNA, 33 bp, Homo sapien
gaatcttgtgtctcaactggaagaggtaaagaa

SEQ ID NO: 946612 - DNA, 33 bp, Homo sapien
gaatcttgtgtctcaattggaagaggtaaagaa

SEQ ID NO: 946613 - DNA, 33 bp, Homo sapien
tggcccaaaggaggtacacttcaaaagcaattt

SEQ ID NO: 946614 - DNA, 33 bp, Homo sapien
tggcccaaaggaggtatacttcaaaagcaattt

SEQ ID NO: 946615 - DNA, 33 bp, Homo sapien
tgccctccactgctgacgcaattgtaatgatca

SEQ ID NO: 946616 - DNA, 33 bp, Homo sapien
tgccctccactgctgatgcaattgtaatgatca

SEQ ID NO: 946617 - DNA, 33 bp, Homo sapien
aaatgaggtgtctgaacagcttactcagtctgg

SEQ ID NO: 946618 - DNA, 33 bp, Homo sapien
aaatgaggtgtctgaagagcttactcagtctgg

SEQ ID NO: 946619 - DNA, 33 bp, Homo sapien
tactgtctctatttatcagatctgggatactgg

SEQ ID NO: 946620 - DNA, 33 bp, Homo sapien
tactgtctctatttatgagatctgggatactgg

SEQ ID NO: 946621 - DNA, 33 bp, Homo sapien
ggtttctggtcccttcccaaacctcttcattct

SEQ ID NO: 946622 - DNA, 33 bp, Homo sapien
ggtttctggtcccttctcaaacctcttcattct

SEQ ID NO: 946623 - DNA, 33 bp, Homo sapien
gcctactccaacccacactgcgaaagatggaac

SEQ ID NO: 946624 - DNA, 33 bp, Homo sapien
gcctactccaacccacgctgcgaaagatggaac

SEQ ID NO: 946625 - DNA, 33 bp, Homo sapien
gagaagctgctgcctacagaggttgagtggttt

SEQ ID NO: 946626 - DNA, 33 bp, Homo sapien
gagaagctgctgcctagagaggttgagtggttt

SEQ ID NO: 946627 - DNA, 33 bp, Homo sapien
acaggaaggaacctcaatattccagaccaaagg

SEQ ID NO: 946628 - DNA, 33 bp, Homo sapien
acaggaaggaacctcattattccagaccaaagg

SEQ ID NO: 946629 - DNA, 33 bp, Homo sapien
tagactgaaagcagcaaagactgctccaacagg

SEQ ID NO: 946630 - DNA, 33 bp, Homo sapien
tagactgaaagcagcatagactgctccaacagg

SEQ ID NO: 946631 - DNA, 33 bp, Homo sapien
taagaagcacgtaagacaaacagacacaggcac

SEQ ID NO: 946632 - DNA, 33 bp, Homo sapien
taagaagcacgtaagagaaacagacacaggcac

SEQ ID NO: 946633 - DNA, 33 bp, Homo sapien
gatttgagagaaagacagaaacaaaagcaggaa

SEQ ID NO: 946634 - DNA, 33 bp, Homo sapien
gatttgagagaaagaccgaaacaaaagcaggaa

SEQ ID NO: 946635 - DNA, 33 bp, Homo sapien
atttcaaaatgtttcaggccttcataataactt

SEQ ID NO: 946636 - DNA, 33 bp, Homo sapien
atttcaaaatgtttcatgccttcataataactt

SEQ ID NO: 946637 - DNA, 33 bp, Homo sapien
ccattgtagcaactggcagcatgaaaagttctg

SEQ ID NO: 946638 - DNA, 33 bp, Homo sapien
ccattgtagcaactggtagcatgaaaagttctg

SEQ ID NO: 946639 - DNA, 33 bp, Homo sapien
agacagtagagagacaaagagaaacagagagat

SEQ ID NO: 946640 - DNA, 33 bp, Homo sapien
agacagtagagagacacagagaaacagagagat

SEQ ID NO: 946641 - DNA, 33 bp, Homo sapien
gctttccaggccattacaccagttttccattta

SEQ ID NO: 946642 - DNA, 33 bp, Homo sapien
gctttccaggccattataccagttttccattta

SEQ ID NO: 946643 - DNA, 33 bp, Homo sapien
ccagcttgaaggtgcccgagatatttttctttc

SEQ ID NO: 946644 - DNA, 33 bp, Homo sapien
ccagcttgaaggtgcctgagatatttttctttc

SEQ ID NO: 946645 - DNA, 33 bp, Homo sapien
caaaaagatgacttgaatagaaaaagaggcaga

SEQ ID NO: 946646 - DNA, 33 bp, Homo sapien
caaaaagatgacttgagtagaaaaagaggcaga

SEQ ID NO: 946647 - DNA, 33 bp, Homo sapien
agaattgcttgaaaccaggacacattggttgta

SEQ ID NO: 946648 - DNA, 33 bp, Homo sapien
agaattgcttgaaaccgggacacattggttgta

SEQ ID NO: 946649 - DNA, 33 bp, Homo sapien
tttggaagaggaattacatgagcctgttgccat

SEQ ID NO: 946650 - DNA, 33 bp, Homo sapien
tttggaagaggaattatatgagcctgttgccat

SEQ ID NO: 946651 - DNA, 33 bp, Homo sapien
tccctcctaagctgcaacagcaaaagtgtctcc

SEQ ID NO: 946652 - DNA, 33 bp, Homo sapien
tccctcctaagctgcagcagcaaaagtgtctcc

SEQ ID NO: 946653 - DNA, 33 bp, Homo sapien
acttaaaaataccgccacatataagattcacaa

SEQ ID NO: 946654 - DNA, 33 bp, Homo sapien
acttaaaaataccgccgcatataagattcacaa

SEQ ID NO: 946655 - DNA, 33 bp, Homo sapien
tctctcctctgaagaacggagggctgttgttgg

SEQ ID NO: 946656 - DNA, 33 bp, Homo sapien
tctctcctctgaagaatggagggctgttgttgg

SEQ ID NO: 946657 - DNA, 33 bp, Homo sapien
gcaccagggcagtctacggagaaaatcctgatc

SEQ ID NO: 946658 - DNA, 33 bp, Homo sapien
gcaccagggcagtctatggagaaaatcctgatc

SEQ ID NO: 946659 - DNA, 33 bp, Homo sapien
tgtgttgctgaaaccactgagcgctctttcagt

SEQ ID NO: 946660 - DNA, 33 bp, Homo sapien
tgtgttgctgaaaccagtgagcgctctttcagt

SEQ ID NO: 946661 - DNA, 33 bp, Homo sapien
tgcagaagctgagacaatcgatggttaccagct

SEQ ID NO: 946662 - DNA, 33 bp, Homo sapien
tgcagaagctgagacattcgatggttaccagct

SEQ ID NO: 946663 - DNA, 33 bp, Homo sapien
atttgtgaggtggtgacaataaccagtatctac

SEQ ID NO: 946664 - DNA, 33 bp, Homo sapien
atttgtgaggtggtgagaataaccagtatctac

SEQ ID NO: 946665 - DNA, 33 bp, Homo sapien
ttgttcatctatttaacaatattgcacggcata

SEQ ID NO: 946666 - DNA, 33 bp, Homo sapien
ttgttcatctatttaagaatattgcacggcata

SEQ ID NO: 946667 - DNA, 33 bp, Homo sapien
tggcctgcacttcaccaaaactgtccaaatccc

SEQ ID NO: 946668 - DNA, 33 bp, Homo sapien
tggcctgcacttcaccgaaactgtccaaatccc

SEQ ID NO: 946669 - DNA, 33 bp, Homo sapien
attttgaactcaaataagaaaattgctcaaatt

SEQ ID NO: 946670 - DNA, 33 bp, Homo sapien
attttgaactcaaatacgaaaattgctcaaatt

SEQ ID NO: 946671 - DNA, 33 bp, Homo sapien
ggcagaatcttttccacggcaggatcttttaag

SEQ ID NO: 946672 - DNA, 33 bp, Homo sapien
ggcagaatcttttccatggcaggatcttttaag

SEQ ID NO: 946673 - DNA, 33 bp, Homo sapien
atctttttcagtgaagaagccactaaaagtgat

SEQ ID NO: 946674 - DNA, 33 bp, Homo sapien
atctttttcagtgaagtagccactaaaagtgat

SEQ ID NO: 946675 - DNA, 33 bp, Homo sapien
ccaagatcctcgcaggccacctatgctgaccca

SEQ ID NO: 946676 - DNA, 33 bp, Homo sapien
ccaagatcctcgcaggtcacctatgctgaccca

SEQ ID NO: 946677 - DNA, 33 bp, Homo sapien
tgattatttcagcagcacttggctgggtaaagg

SEQ ID NO: 946678 - DNA, 33 bp, Homo sapien
tgattatttcagcagcgcttggctgggtaaagg

SEQ ID NO: 946679 - DNA, 33 bp, Homo sapien
aaggtggcagaataaacggaacagacaggatga

SEQ ID NO: 946680 - DNA, 33 bp, Homo sapien
aaggtggcagaataaatggaacagacaggatga

SEQ ID NO: 946681 - DNA, 33 bp, Homo sapien
tgtaggttcccctgtcaatctggcttaatcggg

SEQ ID NO: 946682 - DNA, 33 bp, Homo sapien
tgtaggttcccctgtccatctggcttaatcggg

SEQ ID NO: 946683 - DNA, 33 bp, Homo sapien
attacacattgaacaactgggcttagagaaaat

SEQ ID NO: 946684 - DNA, 33 bp, Homo sapien
attacacattgaacaagtgggcttagagaaaat

SEQ ID NO: 946685 - DNA, 33 bp, Homo sapien
gccgacatccttaatcaatcccagcatgactga

SEQ ID NO: 946686 - DNA, 33 bp, Homo sapien
gccgacatccttaatccatcccagcatgactga

SEQ ID NO: 946687 - DNA, 33 bp, Homo sapien
tgaggctggaaaacaacgacagagaggagaccc

SEQ ID NO: 946688 - DNA, 33 bp, Homo sapien
tgaggctggaaaacaatgacagagaggagaccc

SEQ ID NO: 946689 - DNA, 33 bp, Homo sapien
caccacaccacacagtgaaggaattggttctgc

SEQ ID NO: 946690 - DNA, 33 bp, Homo sapien
caccacaccacacagttaaggaattggttctgc

SEQ ID NO: 946691 - DNA, 33 bp, Homo sapien
ccctggcaataagcaaatagagaaaacactctc

SEQ ID NO: 946692 - DNA, 33 bp, Homo sapien
ccctggcaataagcaattagagaaaacactctc

SEQ ID NO: 946693 - DNA, 33 bp, Homo sapien
aaactgtcgtgtgtcccatacattgccatcaac

SEQ ID NO: 946694 - DNA, 33 bp, Homo sapien
aaactgtcgtgtgtcctatacattgccatcaac

SEQ ID NO: 946695 - DNA, 33 bp, Homo sapien
gatctgaatgtatcaactaaaatatgtactagg

SEQ ID NO: 946696 - DNA, 33 bp, Homo sapien
gatctgaatgtatcaagtaaaatatgtactagg

SEQ ID NO: 946697 - DNA, 33 bp, Homo sapien
tgtccattgtgacttacagctgtctatgcctct

SEQ ID NO: 946698 - DNA, 33 bp, Homo sapien
tgtccattgtgacttatagctgtctatgcctct

SEQ ID NO: 946699 - DNA, 33 bp, Homo sapien
ccagttctctgtaaggccaggttcttctttact

SEQ ID NO: 946700 - DNA, 33 bp, Homo sapien
ccagttctctgtaagggcaggttcttctttact

SEQ ID NO: 946701 - DNA, 33 bp, Homo sapien
agggggcacagaatacactgctgctggttccgt

SEQ ID NO: 946702 - DNA, 33 bp, Homo sapien
agggggcacagaatacgctgctgctggttccgt

SEQ ID NO: 946703 - DNA, 33 bp, Homo sapien
attttttgcttaaaccactgatttctgccaagg

SEQ ID NO: 946704 - DNA, 33 bp, Homo sapien
attttttgcttaaaccgctgatttctgccaagg

SEQ ID NO: 946705 - DNA, 33 bp, Homo sapien
ctttctgggaaaaaccaaaactctgatttacag

SEQ ID NO: 946706 - DNA, 33 bp, Homo sapien
ctttctgggaaaaaccgaaactctgatttacag

SEQ ID NO: 946707 - DNA, 33 bp, Homo sapien
tccactatgtttgggacatctttccacacagca

SEQ ID NO: 946708 - DNA, 33 bp, Homo sapien
tccactatgtttgggatatctttccacacagca

SEQ ID NO: 946709 - DNA, 33 bp, Homo sapien
agcttgacctgatttccaatgttttactccaag

SEQ ID NO: 946710 - DNA, 33 bp, Homo sapien
agcttgacctgatttctaatgttttactccaag

SEQ ID NO: 946711 - DNA, 33 bp, Homo sapien
ggtgaccggccaggtaacattacagtgaaagac

SEQ ID NO: 946712 - DNA, 33 bp, Homo sapien
ggtgaccggccaggtatcattacagtgaaagac

SEQ ID NO: 946713 - DNA, 33 bp, Homo sapien; identical to SEQ ID NO: 946711

SEQ ID NO: 946714 - DNA, 33 bp, Homo sapien; identical to SEQ ID NO: 946712

SEQ ID NO: 946715 - DNA, 33 bp, Homo sapien
actcagaaacttaagactacgggaaacggtctt

SEQ ID NO: 946716 - DNA, 33 bp, Homo sapien
actcagaaacttaagattacgggaaacggtctt

SEQ ID NO: 946717 - DNA, 33 bp, Homo sapien
tgggaagtgcagaaaccgcgtgatggagtcagc

SEQ ID NO: 946718 - DNA, 33 bp, Homo sapien
tgggaagtgcagaaactgcgtgatggagtcagc

SEQ ID NO: 946719 - DNA, 33 bp, Homo sapien
tgtcaccttcaccttcaatacaaggggaagacc

SEQ ID NO: 946720 - DNA, 33 bp, Homo sapien
tgtcaccttcaccttcgatacaaggggaagacc

SEQ ID NO: 946721 - DNA, 33 bp, Homo sapien
accaccatcctctgcgacaaaatattggagttt

SEQ ID NO: 946722 - DNA, 33 bp, Homo sapien
accaccatcctctgcgtcaaaatattggagttt

SEQ ID NO: 946723 - DNA, 33 bp, Homo sapien
taggcaaaagaatcaacgtcagcttccagttta

SEQ ID NO: 946724 - DNA, 33 bp, Homo sapien
taggcaaaagaatcaatgtcagcttccagttta

SEQ ID NO: 946725 - DNA, 33 bp, Homo sapien
gacacatatcaaatttcaaagaggtgtaaacaa

SEQ ID NO: 946726 - DNA, 33 bp, Homo sapien
gacacatatcaaattttaaagaggtgtaaacaa

SEQ ID NO: 946727 - DNA, 33 bp, Homo sapien
tatatttaggatcaagaaagatgttaaggacaa

SEQ ID NO: 946728 - DNA, 33 bp, Homo sapien
tatatttaggatcaaggaagatgttaaggacaa

SEQ ID NO: 946729 - DNA, 33 bp, Homo sapien
ctcttggacagcagaacgttaatcgacacgcgt

SEQ ID NO: 946730 - DNA, 33 bp, Homo sapien
ctcttggacagcagaatgttaatcgacacgcgt

SEQ ID NO: 946731 - DNA, 33 bp, Homo sapien
atgtgaaactcacaccaccaatgaggcagttcc

SEQ ID NO: 946732 - DNA, 33 bp, Homo sapien
atgtgaaactcacaccgccaatgaggcagttcc

SEQ ID NO: 946733 - DNA, 33 bp, Homo sapien
cgctagggttaagatacggagagacagattgac

SEQ ID NO: 946734 - DNA, 33 bp, Homo sapien
cgctagggttaagatatggagagacagattgac

SEQ ID NO: 946735 - DNA, 33 bp, Homo sapien
ctaaagtcatgcttatgaaagttgtggcatgag

SEQ ID NO: 946736 - DNA, 33 bp, Homo sapien
ctaaagtcatgcttattaaagttgtggcatgag

SEQ ID NO: 946737 - DNA, 33 bp, Homo sapien
catatagaggccctcaataccaccaatcatgac

SEQ ID NO: 946738 - DNA, 33 bp, Homo sapien
catatagaggccctcagtaccaccaatcatgac

SEQ ID NO: 946739 - DNA, 33 bp, Homo sapien
tgtctcctccactaaaatataagacggaaacag

SEQ ID NO: 946740 - DNA, 33 bp, Homo sapien
tgtctcctccactaaagtataagacggaaacag

SEQ ID NO: 946741 - DNA, 33 bp, Homo sapien
tgggtatgatacactacgcagccagtggttatt

SEQ ID NO: 946742 - DNA, 33 bp, Homo sapien
tgggtatgatacactatgcagccagtggttatt

SEQ ID NO: 946743 - DNA, 33 bp, Homo sapien
gcctcattgtggagagaacatcagagcagaggc

SEQ ID NO: 946744 - DNA, 33 bp, Homo sapien
gcctcattgtggagagcacatcagagcagaggc

SEQ ID NO: 946745 - DNA, 33 bp, Homo sapien
agacacagagacagcaaccaaaattgagcacca

SEQ ID NO: 946746 - DNA, 33 bp, Homo sapien
agacacagagacagcatccaaaattgagcacca

SEQ ID NO: 946747 - DNA, 33 bp, Homo sapien
ggatggaaacgtcctacaccactaaggaaaaca

SEQ ID NO: 946748 - DNA, 33 bp, Homo sapien
ggatggaaacgtcctataccactaaggaaaaca

SEQ ID NO: 946749 - DNA, 33 bp, Homo sapien
aaatgatcacaggctcaaggatatgcatgtgct

SEQ ID NO: 946750 - DNA, 33 bp, Homo sapien
aaatgatcacaggctccaggatatgcatgtgct

SEQ ID NO: 946751 - DNA, 33 bp, Homo sapien
cttcctcttgttgagacagtgacggaaacatat

SEQ ID NO: 946752 - DNA, 33 bp, Homo sapien
cttcctcttgttgagatagtgacggaaacatat

SEQ ID NO: 946753 - DNA, 33 bp, Homo sapien
gtcagaaatggtgaataacccacttgagacacc

SEQ ID NO: 946754 - DNA, 33 bp, Homo sapien
gtcagaaatggtgaatcacccacttgagacacc

SEQ ID NO: 946755 - DNA, 33 bp, Homo sapien
attggattcatgcaaacataatgcttacgtgtt

SEQ ID NO: 946756 - DNA, 33 bp, Homo sapien
attggattcatgcaaagataatgcttacgtgtt

SEQ ID NO: 946757 - DNA, 33 bp, Homo sapien
ctcatctctcgtaaagcccttgtagcaagtttt

SEQ ID NO: 946758 - DNA, 33 bp, Homo sapien
ctcatctctcgtaaagtccttgtagcaagtttt

SEQ ID NO: 946759 - DNA, 33 bp, Homo sapien
ttctgttccacaagctaagaggaagcagaattt

SEQ ID NO: 946760 - DNA, 33 bp, Homo sapien
ttctgttccacaagctcagaggaagcagaattt

SEQ ID NO: 946761 - DNA, 33 bp, Homo sapien
gaaagagatgtaaagacagaaatcttgcgataa

SEQ ID NO: 946762 - DNA, 33 bp, Homo sapien
gaaagagatgtaaagagagaaatcttgcgataa

SEQ ID NO: 946763 - DNA, 33 bp, Homo sapien
actcattctcatttgcgctcatttttgtgcttc

SEQ ID NO: 946764 - DNA, 33 bp, Homo sapien
actcattctcatttgctctcatttttgtgcttc

SEQ ID NO: 946765 - DNA, 33 bp, Homo sapien
gcttggctctacttttaaaaaaccattctatag

SEQ ID NO: 946766 - DNA, 33 bp, Homo sapien
gcttggctctactttttaaaaaccattctatag

SEQ ID NO: 946767 - DNA, 33 bp, Homo sapien
ttctccttataatgaaatctacttgtttagatc

SEQ ID NO: 946768 - DNA, 33 bp, Homo sapien
ttctccttataatgaagtctacttgtttagatc

SEQ ID NO: 946769 - DNA, 33 bp, Homo sapien
taaaagagtaaaataacggctgctctccatgca

SEQ ID NO: 946770 - DNA, 33 bp, Homo sapien
taaaagagtaaaataatggctgctctccatgca

SEQ ID NO: 946771 - DNA, 33 bp, Homo sapien
tctttaaagacagaaaacctgttagatttattg

SEQ ID NO: 946772 - DNA, 33 bp, Homo sapien
tctttaaagacagaaagcctgttagatttattg

SEQ ID NO: 946773 - DNA, 33 bp, Homo sapien
catggggttagtagtcccttgtaggagccagtg

SEQ ID NO: 946774 - DNA, 33 bp, Homo sapien
catggggttagtagtctcttgtaggagccagtg

SEQ ID NO: 946775 - DNA, 33 bp, Homo sapien
gaggtagatgtgataaggtttctggaaatgaga

SEQ ID NO: 946776 - DNA, 33 bp, Homo sapien
gaggtagatgtgataatgtttctggaaatgaga

SEQ ID NO: 946777 - DNA, 33 bp, Homo sapien
atgagccattcatgcgacaggacaaggaaataa

SEQ ID NO: 946778 - DNA, 33 bp, Homo sapien
atgagccattcatgcggcaggacaaggaaataa

SEQ ID NO: 946779 - DNA, 33 bp, Homo sapien
gcccaggtagcactcagtctcacctgggtgttc

SEQ ID NO: 946780 - DNA, 33 bp, Homo sapien
gcccaggtagcactcattctcacctgggtgttc

SEQ ID NO: 946781 - DNA, 33 bp, Homo sapien
acatgaaaaaacatcacgggtactatttggcat

SEQ ID NO: 946782 - DNA, 33 bp, Homo sapien
acatgaaaaaacatcatgggtactatttggcat

SEQ ID NO: 946783 - DNA, 33 bp, Homo sapien
acacctaggcattgtcaccatcctcccgcaggt

SEQ ID NO: 946784 - DNA, 33 bp, Homo sapien
acacctaggcattgtcgccatcctcccgcaggt

SEQ ID NO: 946785 - DNA, 33 bp, Homo sapien
ttaggtctaggatgggcaacattttgaccaaca

SEQ ID NO: 946786 - DNA, 33 bp, Homo sapien
ttaggtctaggatgggtaacattttgaccaaca

SEQ ID NO: 946787 - DNA, 33 bp, Homo sapien
catccaaagagagataaaaaaagacaccagttc

SEQ ID NO: 946788 - DNA, 33 bp, Homo sapien
catccaaagagagatagaaaaagacaccagttc

SEQ ID NO: 946789 - DNA, 33 bp, Homo sapien
ctgcatagcaaaggaaatcattaactgagcaaa

SEQ ID NO: 946790 - DNA, 33 bp, Homo sapien
ctgcatagcaaaggaagtcattaactgagcaaa

SEQ ID NO: 946791 - DNA, 33 bp, Homo sapien
ttctccacatcctcgacaggttttgtctattat

SEQ ID NO: 946792 - DNA, 33 bp, Homo sapien
ttctccacatcctcgagaggttttgtctattat

SEQ ID NO: 946793 - DNA, 33 bp, Homo sapien
gaatgtggagaacaccagctcccttctcctgag

SEQ ID NO: 946794 - DNA, 33 bp, Homo sapien
gaatgtggagaacaccggctcccttctcctgag

SEQ ID NO: 946795 - DNA, 33 bp, Homo sapien
actaaaataattcaacaggcccacatactgctg

SEQ ID NO: 946796 - DNA, 33 bp, Homo sapien
actaaaataattcaacgggcccacatactgctg

SEQ ID NO: 946797 - DNA, 33 bp, Homo sapien
ctactaagcttgcagaatagagaaaaagagttc

SEQ ID NO: 946798 - DNA, 33 bp, Homo sapien
ctactaagcttgcagactagagaaaaagagttc

SEQ ID NO: 946799 - DNA, 33 bp, Homo sapien
cttaggtggctatactaaacatctctggtcctg

SEQ ID NO: 946800 - DNA, 33 bp, Homo sapien
cttaggtggctatacttaacatctctggtcctg

SEQ ID NO: 946801 - DNA, 33 bp, Homo sapien
taataaatgaaaactcaatgggccaagaacatg

SEQ ID NO: 946802 - DNA, 33 bp, Homo sapien
taataaatgaaaactccatgggccaagaacatg

SEQ ID NO: 946803 - DNA, 33 bp, Homo sapien
actcactgcttcctcagaggggcagccgacttc

SEQ ID NO: 946804 - DNA, 33 bp, Homo sapien
actcactgcttcctcataggggcagccgacttc

SEQ ID NO: 946805 - DNA, 33 bp, Homo sapien
agttcctgatctgtagcagcccagcaatttcac

SEQ ID NO: 946806 - DNA, 33 bp, Homo sapien
agttcctgatctgtaggagcccagcaatttcac

SEQ ID NO: 946807 - DNA, 33 bp, Homo sapien
gggcccttcaggcaccgactaatgccctagaac

SEQ ID NO: 946808 - DNA, 33 bp, Homo sapien
gggcccttcaggcacctactaatgccctagaac

SEQ ID NO: 946809 - DNA, 33 bp, Homo sapien
gctaatggggttacataaagacaaatggtgttc

SEQ ID NO: 946810 - DNA, 33 bp, Homo sapien
gctaatggggttacatgaagacaaatggtgttc

SEQ ID NO: 946811 - DNA, 33 bp, Homo sapien
tgctggctcacatccagtacctggacccctgct

SEQ ID NO: 946812 - DNA, 33 bp, Homo sapien
tgctggctcacatccattacctggacccctgct

SEQ ID NO: 946813 - DNA, 33 bp, Homo sapien
gatggtgaggtcaccaataaaccagcctctcct

SEQ ID NO: 946814 - DNA, 33 bp, Homo sapien
gatggtgaggtcaccactaaaccagcctctcct

SEQ ID NO: 946815 - DNA, 33 bp, Homo sapien
cagccacaaagcagtccatatatcaagtttctg

SEQ ID NO: 946816 - DNA, 33 bp, Homo sapien
cagccacaaagcagtctatatatcaagtttctg

SEQ ID NO: 946817 - DNA, 33 bp, Homo sapien
tccttgtgtcattttaccagtgaccacctaaga

SEQ ID NO: 946818 - DNA, 33 bp, Homo sapien
tccttgtgtcattttatcagtgaccacctaaga

SEQ ID NO: 946819 - DNA, 33 bp, Homo sapien
taccaaaacctatattcaagccacagttactct

SEQ ID NO: 946820 - DNA, 33 bp, Homo sapien
taccaaaacctatattgaagccacagttactct

SEQ ID NO: 946821 - DNA, 33 bp, Homo sapien
acatcaaaaagaaaggccagagaccaaccgact

SEQ ID NO: 946822 - DNA, 33 bp, Homo sapien
acatcaaaaagaaagggcagagaccaaccgact

SEQ ID NO: 946823 - DNA, 33 bp, Homo sapien
atagaggagcatcacaatgacttttaggcaacc

SEQ ID NO: 946824 - DNA, 33 bp, Homo sapien
atagaggagcatcacagtgacttttaggcaacc

SEQ ID NO: 946825 - DNA, 33 bp, Homo sapien
tctggttattaattgaaatcactgatgcttgtc

SEQ ID NO: 946826 - DNA, 33 bp, Homo sapien
tctggttattaattgagatcactgatgcttgtc

SEQ ID NO: 946827 - DNA, 33 bp, Homo sapien
cctctattataaaaccagattctgttgctatct

SEQ ID NO: 946828 - DNA, 33 bp, Homo sapien
cctctattataaaaccggattctgttgctatct

SEQ ID NO: 946829 - DNA, 33 bp, Homo sapien; identical to SEQ ID NO: 946827

SEQ ID NO: 946830 - DNA, 33 bp, Homo sapien; identical to SEQ ID NO: 946828

SEQ ID NO: 946831 - DNA, 33 bp, Homo sapien
ccaattgtcttgcacactactttgtaacacagt

SEQ ID NO: 946832 - DNA, 33 bp, Homo sapien
ccaattgtcttgcacattactttgtaacacagt

SEQ ID NO: 946833 - DNA, 33 bp, Homo sapien
gctcaatgtatttgggccatgtagtcccccctt

SEQ ID NO: 946834 - DNA, 33 bp, Homo sapien
gctcaatgtatttgggtcatgtagtcccccctt

SEQ ID NO: 946835 - DNA, 33 bp, Homo sapien
ataaaacccgattgtacgtttgttcaattctga

SEQ ID NO: 946836 - DNA, 33 bp, Homo sapien
ataaaacccgattgtatgtttgttcaattctga

SEQ ID NO: 946837 - DNA, 33 bp, Homo sapien
acctcctggctgtttacgtctctgcaagagctc

SEQ ID NO: 946838 - DNA, 33 bp, Homo sapien
acctcctggctgtttatgtctctgcaagagctc

SEQ ID NO: 946839 - DNA, 33 bp, Homo sapien; identical to SEQ ID NO: 946837

SEQ ID NO: 946840 - DNA, 33 bp, Homo sapien; identical to SEQ ID NO: 946838

SEQ ID NO: 946841 - DNA, 33 bp, Homo sapien
aaaaaaataatgacacagaatttgctaaagggg

SEQ ID NO: 946842 - DNA, 33 bp, Homo sapien
aaaaaaataatgacacggaatttgctaaagggg

SEQ ID NO: 946843 - DNA, 33 bp, Homo sapien
gcaggatgaagccgatcaaggtccttgcccagc

SEQ ID NO: 946844 - DNA, 33 bp, Homo sapien
gcaggatgaagccgatgaaggtccttgcccagc

SEQ ID NO: 946845 - DNA, 33 bp, Homo sapien
actcttggctaagaacggactttcctgtacttg

SEQ ID NO: 946846 - DNA, 33 bp, Homo sapien
actcttggctaagaactgactttcctgtacttg

SEQ ID NO: 946847 - DNA, 33 bp, Homo sapien
ctgtacaatttgtgtacgtaacgcaattattac

SEQ ID NO: 946848 - DNA, 33 bp, Homo sapien
ctgtacaatttgtgtatgtaacgcaattattac

SEQ ID NO: 946849 - DNA, 33 bp, Homo sapien
tcgcgacaggcctacacgcacagtgtgatactg

SEQ ID NO: 946850 - DNA, 33 bp, Homo sapien
tcgcgacaggcctacatgcacagtgtgatactg

SEQ ID NO: 946851 - DNA, 33 bp, Homo sapien
ggacaagaaatcggaaatgtgctttctgacctg

SEQ ID NO: 946852 - DNA, 33 bp, Homo sapien
ggacaagaaatcggaagtgtgctttctgacctg

SEQ ID NO: 946853 - DNA, 33 bp, Homo sapien
aaatggtcatctcagacattttcagtagaactg

SEQ ID NO: 946854 - DNA, 33 bp, Homo sapien
aaatggtcatctcagagattttcagtagaactg

SEQ ID NO: 946855 - DNA, 33 bp, Homo sapien
agaagaggcagcgacacgcagaatataattaaa

SEQ ID NO: 946856 - DNA, 33 bp, Homo sapien
agaagaggcagcgacaggcagaatataattaaa

SEQ ID NO: 946857 - DNA, 33 bp, Homo sapien
tgtgaattgttacttcacattctcatattctgt

SEQ ID NO: 946858 - DNA, 33 bp, Homo sapien
tgtgaattgttacttcgcattctcatattctgt

SEQ ID NO: 946859 - DNA, 33 bp, Homo sapien
agaattcgaccgaaggacatacagtggaaaaag

SEQ ID NO: 946860 - DNA, 33 bp, Homo sapien
agaattcgaccgaagggcatacagtggaaaaag

SEQ ID NO: 946861 - DNA, 33 bp, Homo sapien
gagctcttagttgaaaatgacatacagcagggt

SEQ ID NO: 946862 - DNA, 33 bp, Homo sapien
gagctcttagttgaaattgacatacagcagggt

SEQ ID NO: 946863 - DNA, 33 bp, Homo sapien
ttagtgcttgcaaccaacaaatgagaagttaag

SEQ ID NO: 946864 - DNA, 33 bp, Homo sapien
ttagtgcttgcaaccaccaaatgagaagttaag

SEQ ID NO: 946865 - DNA, 33 bp, Homo sapien
cattcttaatgactaccatgcttaacattatta

SEQ ID NO: 946866 - DNA, 33 bp, Homo sapien
cattcttaatgactactatgcttaacattatta

SEQ ID NO: 946867 - DNA, 33 bp, Homo sapien
gtgaatttttcctacaaacctgttccaatccca

SEQ ID NO: 946868 - DNA, 33 bp, Homo sapien
gtgaatttttcctacacacctgttccaatccca

SEQ ID NO: 946869 - DNA, 33 bp, Homo sapien
tattttttcaaacagcgctgagaacactgaaat

SEQ ID NO: 946870 - DNA, 33 bp, Homo sapien
tattttttcaaacagctctgagaacactgaaat

SEQ ID NO: 946871 - DNA, 33 bp, Homo sapien
tttgctgagtccttataaagtatttcagagttc

SEQ ID NO: 946872 - DNA, 33 bp, Homo sapien
tttgctgagtccttatgaagtatttcagagttc

SEQ ID NO: 946873 - DNA, 33 bp, Homo sapien
ttcaagactcgtggtacgtgataggtgttcaag

SEQ ID NO: 946874 - DNA, 33 bp, Homo sapien
ttcaagactcgtggtatgtgataggtgttcaag

SEQ ID NO: 946875 - DNA, 33 bp, Homo sapien
tttggattgccaacaaatcaagaaatgttcaag

SEQ ID NO: 946876 - DNA, 33 bp, Homo sapien
tttggattgccaacaagtcaagaaatgttcaag

SEQ ID NO: 946877 - DNA, 33 bp, Homo sapien
cgcctcttgcagttcaaatggaggaaggccact

SEQ ID NO: 946878 - DNA, 33 bp, Homo sapien
cgcctcttgcagttcagatggaggaaggccact

SEQ ID NO: 946879 - DNA, 33 bp, Homo sapien; identical to SEQ ID NO: 946877

SEQ ID NO: 946880 - DNA, 33 bp, Homo sapien; identical to SEQ ID NO: 946878

SEQ ID NO: 946881 - DNA, 33 bp, Homo sapien
aaacaagcgattttccaattgcttttgctgctg

SEQ ID NO: 946882 - DNA, 33 bp, Homo sapien
aaacaagcgattttcccattgcttttgctgctg

SEQ ID NO: 946883 - DNA, 33 bp, Homo sapien
ctcatcaccagattacactttccctttgactta

SEQ ID NO: 946884 - DNA, 33 bp, Homo sapien
ctcatcaccagattactctttccctttgactta

SEQ ID NO: 946885 - DNA, 33 bp, Homo sapien
aggatataactgaagaaaccataggagtggagc

SEQ ID NO: 946886 - DNA, 33 bp, Homo sapien
aggatataactgaagataccataggagtggagc

SEQ ID NO: 946887 - DNA, 33 bp, Homo sapien
caacaaagctagcccaatgcttgaggactttac

SEQ ID NO: 946888 - DNA, 33 bp, Homo sapien
caacaaagctagcccagtgcttgaggactttac

SEQ ID NO: 946889 - DNA, 33 bp, Homo sapien
cggtccctttacctaacgtctccttcagctccc

SEQ ID NO: 946890 - DNA, 33 bp, Homo sapien
cggtccctttacctaatgtctccttcagctccc

SEQ ID NO: 946891 - DNA, 33 bp, Homo sapien
agtagaggagcttttgcaataacagatgtgtga

SEQ ID NO: 946892 - DNA, 33 bp, Homo sapien
agtagaggagcttttgtaataacagatgtgtga

SEQ ID NO: 946893 - DNA, 33 bp, Homo sapien
ttgcctgggatcattggagcaactgcatttagt

SEQ ID NO: 946894 - DNA, 33 bp, Homo sapien
ttgcctgggatcattgtagcaactgcatttagt

SEQ ID NO: 946895 - DNA, 33 bp, Homo sapien
catgtacatagtccaactactctgaggtcaata

SEQ ID NO: 946896 - DNA, 33 bp, Homo sapien
catgtacatagtccaagtactctgaggtcaata

SEQ ID NO: 946897 - DNA, 33 bp, Homo sapien
gaataagggaaataaacctgtctgaaatactgt

SEQ ID NO: 946898 - DNA, 33 bp, Homo sapien
gaataagggaaataaagctgtctgaaatactgt

SEQ ID NO: 946899 - DNA, 33 bp, Homo sapien
tggcatctcactggaaagctaactaaagagaga

SEQ ID NO: 946900 - DNA, 33 bp, Homo sapien
tggcatctcactggaaggctaactaaagagaga

SEQ ID NO: 946901 - DNA, 33 bp, Homo sapien
acaaattcaacagagacaagaaaaacataagaa

SEQ ID NO: 946902 - DNA, 33 bp, Homo sapien
acaaattcaacagagataagaaaaacataagaa

SEQ ID NO: 946903 - DNA, 33 bp, Homo sapien
aattcttattggaaaacgctttgagagttccta

SEQ ID NO: 946904 - DNA, 33 bp, Homo sapien
aattcttattggaaaatgctttgagagttccta

SEQ ID NO: 946905 - DNA, 33 bp, Homo sapien
gtaaagacaggaaatcaaagaagatcaaagata

SEQ ID NO: 946906 - DNA, 33 bp, Homo sapien
gtaaagacaggaaatcgaagaagatcaaagata

SEQ ID NO: 946907 - DNA, 33 bp, Homo sapien
gttgtggcagttaagacgatttgactgcagcag

SEQ ID NO: 946908 - DNA, 33 bp, Homo sapien
gttgtggcagttaagatgatttgactgcagcag

SEQ ID NO: 946909 - DNA, 33 bp, Homo sapien
gaggttgaaacctacaaaaggagaaagatggac

SEQ ID NO: 946910 - DNA, 33 bp, Homo sapien
gaggttgaaacctacacaaggagaaagatggac

SEQ ID NO: 946911 - DNA, 33 bp, Homo sapien
actaagtggagacaatcaactagttattttggt

SEQ ID NO: 946912 - DNA, 33 bp, Homo sapien
actaagtggagacaatgaactagttattttggt

SEQ ID NO: 946913 - DNA, 33 bp, Homo sapien
ttcaatgtataagaccacaaaaattaagatatg

SEQ ID NO: 946914 - DNA, 33 bp, Homo sapien
ttcaatgtataagaccgcaaaaattaagatatg

SEQ ID NO: 946915 - DNA, 33 bp, Homo sapien
gttgtggtgagactagaagaaggtaggagaaaa

SEQ ID NO: 946916 - DNA, 33 bp, Homo sapien
gttgtggtgagactaggagaaggtaggagaaaa

SEQ ID NO: 946917 - DNA, 33 bp, Homo sapien
ttgcctcttggattcaatatttcttgtcatttc

SEQ ID NO: 946918 - DNA, 33 bp, Homo sapien
ttgcctcttggattcagtatttcttgtcatttc

SEQ ID NO: 946919 - DNA, 33 bp, Homo sapien
actctccattaacaaacttggagatatggaaaa

SEQ ID NO: 946920 - DNA, 33 bp, Homo sapien
actctccattaacaaatttggagatatggaaaa

SEQ ID NO: 946921 - DNA, 33 bp, Homo sapien
aaagtattagctaagaaagcaagatgacaatta

SEQ ID NO: 946922 - DNA, 33 bp, Homo sapien
aaagtattagctaagagagcaagatgacaatta

SEQ ID NO: 946923 - DNA, 33 bp, Homo sapien
taatactttggcttgcaacaagacattcctttt

SEQ ID NO: 946924 - DNA, 33 bp, Homo sapien
taatactttggcttgcgacaagacattcctttt

SEQ ID NO: 946925 - DNA, 33 bp, Homo sapien
aaagggcagtgctctcaatgtcaaataataaga

SEQ ID NO: 946926 - DNA, 33 bp, Homo sapien
aaagggcagtgctctccatgtcaaataataaga

SEQ ID NO: 946927 - DNA, 33 bp, Homo sapien
catgagtcctaagacacgctgtgatttttgctt

SEQ ID NO: 946928 - DNA, 33 bp, Homo sapien
catgagtcctaagacaggctgtgatttttgctt

SEQ ID NO: 946929 - DNA, 33 bp, Homo sapien
caacgacaacagcaacaaaaagcaaaaatcaca

SEQ ID NO: 946930 - DNA, 33 bp, Homo sapien
caacgacaacagcaacgaaaagcaaaaatcaca

SEQ ID NO: 946931 - DNA, 33 bp, Homo sapien
tgggatgccggtgaagaccagcgtagtgagatc

SEQ ID NO: 946932 - DNA, 33 bp, Homo sapien
tgggatgccggtgaagtccagcgtagtgagatc

SEQ ID NO: 946933 - DNA, 33 bp, Homo sapien
gaggaaagccattgaagtccgccttcccattgc

SEQ ID NO: 946934 - DNA, 33 bp, Homo sapien
gaggaaagccattgaattccgccttcccattgc

SEQ ID NO: 946935 - DNA, 33 bp, Homo sapien
ctttgattctcacagtcactgctttttgttcaa

SEQ ID NO: 946936 - DNA, 33 bp, Homo sapien
ctttgattctcacagttactgctttttgttcaa

SEQ ID NO: 946937 - DNA, 33 bp, Homo sapien
atgttcttcttaccaccatccttctgaaatata

SEQ ID NO: 946938 - DNA, 33 bp, Homo sapien
atgttcttcttaccactatccttctgaaatata

SEQ ID NO: 946939 - DNA, 33 bp, Homo sapien
ctccccatacgaggaaagctaatgggctaaaac

SEQ ID NO: 946940 - DNA, 33 bp, Homo sapien
ctccccatacgaggaatgctaatgggctaaaac

SEQ ID NO: 946941 - DNA, 33 bp, Homo sapien
actgccatcggtcacaaatcagagtttgcaatc

SEQ ID NO: 946942 - DNA, 33 bp, Homo sapien
actgccatcggtcacagatcagagtttgcaatc

SEQ ID NO: 946943 - DNA, 33 bp, Homo sapien
gacaggtggacaaaagacgtagtaccgttctgc

SEQ ID NO: 946944 - DNA, 33 bp, Homo sapien
gacaggtggacaaaaggcgtagtaccgttctgc

SEQ ID NO: 946945 - DNA, 33 bp, Homo sapien
tcagggacttttgtacaaggacagttgcaggat

SEQ ID NO: 946946 - DNA, 33 bp, Homo sapien
tcagggacttttgtacgaggacagttgcaggat

SEQ ID NO: 946947 - DNA, 33 bp, Homo sapien
taccattggtgaagttcaaatatggagtgttaa

SEQ ID NO: 946948 - DNA, 33 bp, Homo sapien
taccattggtgaagtttaaatatggagtgttaa

SEQ ID NO: 946949 - DNA, 33 bp, Homo sapien
tttatctgattggatgcaatctttatctttttt

SEQ ID NO: 946950 - DNA, 33 bp, Homo sapien
tttatctgattggatgtaatctttatctttttt

SEQ ID NO: 946951 - DNA, 33 bp, Homo sapien
gaaggactatccctgcccctgtcattcagagga

SEQ ID NO: 946952 - DNA, 33 bp, Homo sapien
gaaggactatccctgcgcctgtcattcagagga

SEQ ID NO: 946953 - DNA, 33 bp, Homo sapien
gaagacttagttgtcaatctataccttttctgc

SEQ ID NO: 946954 - DNA, 33 bp, Homo sapien
gaagacttagttgtcagtctataccttttctgc

SEQ ID NO: 946955 - DNA, 33 bp, Homo sapien
agaaaccgtcaccagcaaggcgtctgattctca

SEQ ID NO: 946956 - DNA, 33 bp, Homo sapien
agaaaccgtcaccagcgaggcgtctgattctca

SEQ ID NO: 946957 - DNA, 33 bp, Homo sapien
gacaaggaagacaaaaccaataaacatggagaa

SEQ ID NO: 946958 - DNA, 33 bp, Homo sapien
gacaaggaagacaaaatcaataaacatggagaa

SEQ ID NO: 946959 - DNA, 33 bp, Homo sapien
gcctgtgaactcggaactattttaggtgtcagg

SEQ ID NO: 946960 - DNA, 33 bp, Homo sapien
gcctgtgaactcggaagtattttaggtgtcagg

SEQ ID NO: 946961 - DNA, 33 bp, Homo sapien
actttagccaacagccaatattctccagacttg

SEQ ID NO: 946962 - DNA, 33 bp, Homo sapien
actttagccaacagccgatattctccagacttg

SEQ ID NO: 946963 - DNA, 33 bp, Homo sapien
ggagattgaaagatcagaattccaggaccacat

SEQ ID NO: 946964 - DNA, 33 bp, Homo sapien
ggagattgaaagatcataattccaggaccacat

SEQ ID NO: 946965 - DNA, 33 bp, Homo sapien
ttggtctgggagtctaagttttgaaatgcattt

SEQ ID NO: 946966 - DNA, 33 bp, Homo sapien
ttggtctgggagtctacgttttgaaatgcattt

SEQ ID NO: 946967 - DNA, 33 bp, Homo sapien
ttaattttcatagtcacgggaatcccctgtgta

SEQ ID NO: 946968 - DNA, 33 bp, Homo sapien
ttaattttcatagtcatgggaatcccctgtgta

SEQ ID NO: 946969 - DNA, 33 bp, Homo sapien
tttaaactgtgttaaagctgtcaaaaaaaaaaa

SEQ ID NO: 946970 - DNA, 33 bp, Homo sapien
tttaaactgtgttaaatctgtcaaaaaaaaaaa

SEQ ID NO: 946971 - DNA, 33 bp, Homo sapien
ttggctgttactttaaataagtatgtgtgtgtg

SEQ ID NO: 946972 - DNA, 33 bp, Homo sapien
ttggctgttactttaagtaagtatgtgtgtgtg

SEQ ID NO: 946973 - DNA, 33 bp, Homo sapien
tgaccagccttgtccaatagaattataatgcaa

SEQ ID NO: 946974 - DNA, 33 bp, Homo sapien
tgaccagccttgtccagtagaattataatgcaa

SEQ ID NO: 946975 - DNA, 33 bp, Homo sapien
acccaaaagtcattaactcatttaaaaccgggt

SEQ ID NO: 946976 - DNA, 33 bp, Homo sapien
acccaaaagtcattaagtcatttaaaaccgggt

SEQ ID NO: 946977 - DNA, 33 bp, Homo sapien
gtgagtggcttatacaaggtcactccatttgtg

SEQ ID NO: 946978 - DNA, 33 bp, Homo sapien
gtgagtggcttatacacggtcactccatttgtg

SEQ ID NO: 946979 - DNA, 33 bp, Homo sapien
cttccatttatatggcactcactatgggccagg

SEQ ID NO: 946980 - DNA, 33 bp, Homo sapien
cttccatttatatggcgctcactatgggccagg

SEQ ID NO: 946981 - DNA, 33 bp, Homo sapien
ttctctcgattagagcaaaactgatttctgtta

SEQ ID NO: 946982 - DNA, 33 bp, Homo sapien
ttctctcgattagagcgaaactgatttctgtta

SEQ ID NO: 946983 - DNA, 33 bp, Homo sapien
atgggtcactgatagcaacaccgttggtccggc

SEQ ID NO: 946984 - DNA, 33 bp, Homo sapien
atgggtcactgatagcgacaccgttggtccggc

SEQ ID NO: 946985 - DNA, 33 bp, Homo sapien
ttgagccacaagaaatcatgtgacaatttttca

SEQ ID NO: 946986 - DNA, 33 bp, Homo sapien
ttgagccacaagaaattatgtgacaatttttca

SEQ ID NO: 946987 - DNA, 33 bp, Homo sapien
cacttgcaagatcccacagagctagtgtccaaa

SEQ ID NO: 946988 - DNA, 33 bp, Homo sapien
cacttgcaagatcccatagagctagtgtccaaa

SEQ ID NO: 946989 - DNA, 33 bp, Homo sapien
gagggttgttttggaaattacataagctaagtt

SEQ ID NO: 946990 - DNA, 33 bp, Homo sapien
gagggttgttttggaagttacataagctaagtt

SEQ ID NO: 946991 - DNA, 33 bp, Homo sapien
attgagatataatggaagagattcctacattgc

SEQ ID NO: 946992 - DNA, 33 bp, Homo sapien
attgagatataatggacgagattcctacattgc

SEQ ID NO: 946993 - DNA, 33 bp, Homo sapien
atcctaaatatgcaaacgaaactcgttaatatt

SEQ ID NO: 946994 - DNA, 33 bp, Homo sapien
atcctaaatatgcaaatgaaactcgttaatatt

SEQ ID NO: 946995 - DNA, 33 bp, Homo sapien
ttcactactgagagaacagaatgagttccacag

SEQ ID NO: 946996 - DNA, 33 bp, Homo sapien
ttcactactgagagaatagaatgagttccacag

SEQ ID NO: 946997 - DNA, 33 bp, Homo sapien
aatggagacgaggaacaaatttaaaataaaagt

SEQ ID NO: 946998 - DNA, 33 bp, Homo sapien
aatggagacgaggaaccaatttaaaataaaagt

SEQ ID NO: 946999 - DNA, 33 bp, Homo sapien
atttttgctcgtgagaagtatgtgtactttgtt

SEQ ID NO: 947000 - DNA, 33 bp, Homo sapien
atttttgctcgtgagaggtatgtgtactttgtt

SEQ ID NO: 947001 - DNA, 33 bp, Homo sapien
taaagcattaattctacatacccaaaccaacac

SEQ ID NO: 947002 - DNA, 33 bp, Homo sapien
taaagcattaattctagatacccaaaccaacac

SEQ ID NO: 947003 - DNA, 33 bp, Homo sapien
aataaactttccataaacaattcagagagcttt

SEQ ID NO: 947004 - DNA, 33 bp, Homo sapien
aataaactttccataagcaattcagagagcttt

SEQ ID NO: 947005 - DNA, 33 bp, Homo sapien
ctgctggaacgatcaacgtaattagctggacta

SEQ ID NO: 947006 - DNA, 33 bp, Homo sapien
ctgctggaacgatcaatgtaattagctggacta

SEQ ID NO: 947007 - DNA, 33 bp, Homo sapien
tgagtccaccttgctcaatattcctgcttgatt

SEQ ID NO: 947008 - DNA, 33 bp, Homo sapien
tgagtccaccttgctcgatattcctgcttgatt

SEQ ID NO: 947009 - DNA, 33 bp, Homo sapien
ttgagatggagatgaaggagtttacaggcacag

SEQ ID NO: 947010 - DNA, 33 bp, Homo sapien
ttgagatggagatgaatgagtttacaggcacag

SEQ ID NO: 947011 - DNA, 33 bp, Homo sapien
aaaggaaggatgaagacagcagttgcagtggga

SEQ ID NO: 947012 - DNA, 33 bp, Homo sapien
aaaggaaggatgaagatagcagttgcagtggga

SEQ ID NO: 947013 - DNA, 33 bp, Homo sapien
tcacgaggcagcaggaagaggaaagaatctccc

SEQ ID NO: 947014 - DNA, 33 bp, Homo sapien
tcacgaggcagcaggaggaggaaagaatctccc

SEQ ID NO: 947015 - DNA, 33 bp, Homo sapien
gattcacaatccaaaaggtcccggaagggagag

SEQ ID NO: 947016 - DNA, 33 bp, Homo sapien
gattcacaatccaaaatgtcccggaagggagag

SEQ ID NO: 947017 - DNA, 33 bp, Homo sapien
agtgtttgttaaatgaagaatatctgatggagt

SEQ ID NO: 947018 - DNA, 33 bp, Homo sapien
agtgtttgttaaatgaggaatatctgatggagt

SEQ ID NO: 947019 - DNA, 33 bp, Homo sapien
aacataactatggcaactaatgagaattgattg

SEQ ID NO: 947020 - DNA, 33 bp, Homo sapien
aacataactatggcaagtaatgagaattgattg

SEQ ID NO: 947021 - DNA, 33 bp, Homo sapien
actactatggacggtgaataagataaagaatgc

SEQ ID NO: 947022 - DNA, 33 bp, Homo sapien
actactatggacggtgtataagataaagaatgc

SEQ ID NO: 947023 - DNA, 33 bp, Homo sapien
ctggtttaatagcttcactctctcctgtcctca

SEQ ID NO: 947024 - DNA, 33 bp, Homo sapien
ctggtttaatagcttcgctctctcctgtcctca

SEQ ID NO: 947025 - DNA, 33 bp, Homo sapien
cccaaacaaggtctcaaaatcctcacatggcat

SEQ ID NO: 947026 - DNA, 33 bp, Homo sapien
cccaaacaaggtctcagaatcctcacatggcat

SEQ ID NO: 947027 - DNA, 33 bp, Homo sapien
cctgcaattatacacaaaaaagagtagtcttga

SEQ ID NO: 947028 - DNA, 33 bp, Homo sapien
cctgcaattatacacagaaaagagtagtcttga

SEQ ID NO: 947029 - DNA, 33 bp, Homo sapien
gaaaggatgagtctatcacaagaaataccactg

SEQ ID NO: 947030 - DNA, 33 bp, Homo sapien
gaaaggatgagtctattacaagaaataccactg

SEQ ID NO: 947031 - DNA, 33 bp, Homo sapien
attgctttcttccccacgaaaactgattctgca

SEQ ID NO: 947032 - DNA, 33 bp, Homo sapien
attgctttcttccccatgaaaactgattctgca

SEQ ID NO: 947033 - DNA, 33 bp, Homo sapien
cagtaattacctcctgcaggattccaagtctag

SEQ ID NO: 947034 - DNA, 33 bp, Homo sapien
cagtaattacctcctgtaggattccaagtctag

SEQ ID NO: 947035 - DNA, 33 bp, Homo sapien
cctcaaacaaagcagacagcagatgggagccca

SEQ ID NO: 947036 - DNA, 33 bp, Homo sapien
cctcaaacaaagcagagagcagatgggagccca

SEQ ID NO: 947037 - DNA, 33 bp, Homo sapien
cagacttttcagactacgcaacaagatagtatg

SEQ ID NO: 947038 - DNA, 33 bp, Homo sapien
cagacttttcagactatgcaacaagatagtatg

SEQ ID NO: 947039 - DNA, 33 bp, Homo sapien
tcctggcccgcagcaacaagcattgtcaccgtc

SEQ ID NO: 947040 - DNA, 33 bp, Homo sapien
tcctggcccgcagcaataagcattgtcaccgtc

SEQ ID NO: 947041 - DNA, 33 bp, Homo sapien
ttttttgtgagtgacacgatctgaaaaatgtgc

SEQ ID NO: 947042 - DNA, 33 bp, Homo sapien
ttttttgtgagtgacatgatctgaaaaatgtgc

SEQ ID NO: 947043 - DNA, 33 bp, Homo sapien
ctgcttccatctggtcaatctctcatcctttcc

SEQ ID NO: 947044 - DNA, 33 bp, Homo sapien
ctgcttccatctggtccatctctcatcctttcc

SEQ ID NO: 947045 - DNA, 33 bp, Homo sapien
gtgttttgaatgtgcaacgtcttcctaacaagt

SEQ ID NO: 947046 - DNA, 33 bp, Homo sapien
gtgttttgaatgtgcaccgtcttcctaacaagt

SEQ ID NO: 947047 - DNA, 33 bp, Homo sapien
tggaggcaaattcggccaatctgactgacaact

SEQ ID NO: 947048 - DNA, 33 bp, Homo sapien
tggaggcaaattcggctaatctgactgacaact

SEQ ID NO: 947049 - DNA, 33 bp, Homo sapien
tggtggctgcctctacaacatgattgggagttg

SEQ ID NO: 947050 - DNA, 33 bp, Homo sapien
tggtggctgcctctacgacatgattgggagttg

SEQ ID NO: 947051 - DNA, 33 bp, Homo sapien
tgtctctctcctcggaagacttgcctgggactc

SEQ ID NO: 947052 - DNA, 33 bp, Homo sapien
tgtctctctcctcggacgacttgcctgggactc

SEQ ID NO: 947053 - DNA, 33 bp, Homo sapien
ggtcttattcagtcaacgctaggcacgtccatg

SEQ ID NO: 947054 - DNA, 33 bp, Homo sapien
ggtcttattcagtcaatgctaggcacgtccatg

SEQ ID NO: 947055 - DNA, 33 bp, Homo sapien
ccctagtcaagctccaatctggtctttctagtg

SEQ ID NO: 947056 - DNA, 33 bp, Homo sapien
ccctagtcaagctccagtctggtctttctagtg

SEQ ID NO: 947057 - DNA, 33 bp, Homo sapien
gatggttgttgctacaaggtagaagccaacctg

SEQ ID NO: 947058 - DNA, 33 bp, Homo sapien
gatggttgttgctacagggtagaagccaacctg

SEQ ID NO: 947059 - DNA, 33 bp, Homo sapien
cataagtttattattacgtagaaatgtgcacaa

SEQ ID NO: 947060 - DNA, 33 bp, Homo sapien
cataagtttattattatgtagaaatgtgcacaa

SEQ ID NO: 947061 - DNA, 33 bp, Homo sapien
aacgagcctctttagacgtttctttcctaattg

SEQ ID NO: 947062 - DNA, 33 bp, Homo sapien
aacgagcctctttagatgtttctttcctaattg

SEQ ID NO: 947063 - DNA, 33 bp, Homo sapien
cccctggtctagaatgaaagtcgaggaaatcag

SEQ ID NO: 947064 - DNA, 33 bp, Homo sapien
cccctggtctagaatggaagtcgaggaaatcag

SEQ ID NO: 947065 - DNA, 33 bp, Homo sapien
catgagttcagagtcacatccagcgataccatg

SEQ ID NO: 947066 - DNA, 33 bp, Homo sapien
catgagttcagagtcagatccagcgataccatg

SEQ ID NO: 947067 - DNA, 33 bp, Homo sapien
ttcaacaggaaaatataaggttgcactgtccat

SEQ ID NO: 947068 - DNA, 33 bp, Homo sapien
ttcaacaggaaaatatgaggttgcactgtccat

SEQ ID NO: 947069 - DNA, 33 bp, Homo sapien
taccacacagcaaccaactagttaattaggcaa

SEQ ID NO: 947070 - DNA, 33 bp, Homo sapien
taccacacagcaaccagctagttaattaggcaa

SEQ ID NO: 947071 - DNA, 33 bp, Homo sapien
aatggtaaaggcaagactagctacattttttct

SEQ ID NO: 947072 - DNA, 33 bp, Homo sapien
aatggtaaaggcaagagtagctacattttttct

SEQ ID NO: 947073 - DNA, 33 bp, Homo sapien
acgcttctatggtaaagacctactttgaatttt

SEQ ID NO: 947074 - DNA, 33 bp, Homo sapien
acgcttctatggtaaatacctactttgaatttt

SEQ ID NO: 947075 - DNA, 33 bp, Homo sapien
cttccgcctccattcacgaaactctccaagatc

SEQ ID NO: 947076 - DNA, 33 bp, Homo sapien
cttccgcctccattcatgaaactctccaagatc

SEQ ID NO: 947077 - DNA, 33 bp, Homo sapien
ctgagttcgtcttctgcacatgacctttgatct

SEQ ID NO: 947078 - DNA, 33 bp, Homo sapien
ctgagttcgtcttctggacatgacctttgatct

SEQ ID NO: 947079 - DNA, 33 bp, Homo sapien
cgatcactgcagaaaactcttcaaatattggaa

SEQ ID NO: 947080 - DNA, 33 bp, Homo sapien
cgatcactgcagaaaagtcttcaaatattggaa

SEQ ID NO: 947081 - DNA, 33 bp, Homo sapien
cacaggatttgaagtcggaagagttgtttttac

SEQ ID NO: 947082 - DNA, 33 bp, Homo sapien
cacaggatttgaagtctgaagagttgtttttac

SEQ ID NO: 947083 - DNA, 33 bp, Homo sapien
tccttagctccaatcacaaatagaataaatatg

SEQ ID NO: 947084 - DNA, 33 bp, Homo sapien
tccttagctccaatcagaaatagaataaatatg

SEQ ID NO: 947085 - DNA, 33 bp, Homo sapien
agttgactgagtttgcaaagtacagcaaggtta

SEQ ID NO: 947086 - DNA, 33 bp, Homo sapien
agttgactgagtttgcgaagtacagcaaggtta

SEQ ID NO: 947087 - DNA, 33 bp, Homo sapien
taaatgaaatcaatcgcaggctgttcatgtctg

SEQ ID NO: 947088 - DNA, 33 bp, Homo sapien
taaatgaaatcaatcgtaggctgttcatgtctg

SEQ ID NO: 947089 - DNA, 33 bp, Homo sapien
ctgttagtcagttgcaatctcggtctctgtttc

SEQ ID NO: 947090 - DNA, 33 bp, Homo sapien
ctgttagtcagttgcagtctcggtctctgtttc

SEQ ID NO: 947091 - DNA, 33 bp, Homo sapien
agaacctgcaaccaatcagaatgacttttcatc

SEQ ID NO: 947092 - DNA, 33 bp, Homo sapien
agaacctgcaaccaatgagaatgacttttcatc

SEQ ID NO: 947093 - DNA, 33 bp, Homo sapien
tgggttgcattgccagaaatacagctaatgtga

SEQ ID NO: 947094 - DNA, 33 bp, Homo sapien
tgggttgcattgccagtaatacagctaatgtga

SEQ ID NO: 947095 - DNA, 33 bp, Homo sapien
gatcaaagaggataaactgatgttaagaaatgt

SEQ ID NO: 947096 - DNA, 33 bp, Homo sapien
gatcaaagaggataaattgatgttaagaaatgt

SEQ ID NO: 947097 - DNA, 33 bp, Homo sapien
tttaccctcaatcagacaggtagcattgtgtgt

SEQ ID NO: 947098 - DNA, 33 bp, Homo sapien
tttaccctcaatcagataggtagcattgtgtgt

SEQ ID NO: 947099 - DNA, 33 bp, Homo sapien
gcagctgatgacactcagaagtcttggtgatag

SEQ ID NO: 947100 - DNA, 33 bp, Homo sapien
gcagctgatgacactcggaagtcttggtgatag

SEQ ID NO: 947101 - DNA, 33 bp, Homo sapien
gtagaatcatctatcaaaatatatctggaggtg

SEQ ID NO: 947102 - DNA, 33 bp, Homo sapien
gtagaatcatctatcagaatatatctggaggtg

SEQ ID NO: 947103 - DNA, 33 bp, Homo sapien
ccccttttttgcggtcagaatatagacaggagg

SEQ ID NO: 947104 - DNA, 33 bp, Homo sapien
ccccttttttgcggtcggaatatagacaggagg

SEQ ID NO: 947105 - DNA, 33 bp, Homo sapien
tttatgttaagtggtacgtatcgttgtttcagc

SEQ ID NO: 947106 - DNA, 33 bp, Homo sapien
tttatgttaagtggtatgtatcgttgtttcagc

SEQ ID NO: 947107 - DNA, 33 bp, Homo sapien
ccagctcagatcaccacatttccatatcaccac

SEQ ID NO: 947108 - DNA, 33 bp, Homo sapien
ccagctcagatcaccagatttccatatcaccac

SEQ ID NO: 947109 - DNA, 33 bp, Homo sapien
gttaaacctacaccaaccttataatccagtgag

SEQ ID NO: 947110 - DNA, 33 bp, Homo sapien
gttaaacctacaccaatcttataatccagtgag

SEQ ID NO: 947111 - DNA, 33 bp, Homo sapien
gaaggtattttcaatacgttaatcgccataagg

SEQ ID NO: 947112 - DNA, 33 bp, Homo sapien
gaaggtattttcaatatgttaatcgccataagg

SEQ ID NO: 947113 - DNA, 33 bp, Homo sapien
tatactactacgactacgaccgttactactgct

SEQ ID NO: 947114 - DNA, 33 bp, Homo sapien
tatactactacgactatgaccgttactactgct

SEQ ID NO: 947115 - DNA, 33 bp, Homo sapien
aaataccctgtcctaacgtggaaactaggtagg

SEQ ID NO: 947116 - DNA, 33 bp, Homo sapien
aaataccctgtcctaatgtggaaactaggtagg

SEQ ID NO: 947117 - DNA, 33 bp, Homo sapien
caccgaaagggagaacgcttgggcttggacttt

SEQ ID NO: 947118 - DNA, 33 bp, Homo sapien
caccgaaagggagaactcttgggcttggacttt

SEQ ID NO: 947119 - DNA, 33 bp, Homo sapien
aacacttatcaagtataaaataaccacaactat

SEQ ID NO: 947120 - DNA, 33 bp, Homo sapien
aacacttatcaagtattaaataaccacaactat

SEQ ID NO: 947121 - DNA, 33 bp, Homo sapien
tatcagtttcggaagacaatcaagactcactcc

SEQ ID NO: 947122 - DNA, 33 bp, Homo sapien
tatcagtttcggaagataatcaagactcactcc

SEQ ID NO: 947123 - DNA, 33 bp, Homo sapien
aagggcaggacaattacagcctcaagtgtcaca

SEQ ID NO: 947124 - DNA, 33 bp, Homo sapien
aagggcaggacaattatagcctcaagtgtcaca

SEQ ID NO: 947125 - DNA, 33 bp, Homo sapien
agtaaagtctaagagacgaggaaataacacttc

SEQ ID NO: 947126 - DNA, 33 bp, Homo sapien
agtaaagtctaagagatgaggaaataacacttc

SEQ ID NO: 947127 - DNA, 33 bp, Homo sapien
tcactgcccgagttgacgctaagttcctttcca

SEQ ID NO: 947128 - DNA, 33 bp, Homo sapien
tcactgcccgagttgatgctaagttcctttcca

SEQ ID NO: 947129 - DNA, 33 bp, Homo sapien
gcaaattttggctttagatgatactaatgcata

SEQ ID NO: 947130 - DNA, 33 bp, Homo sapien
gcaaattttggctttatatgatactaatgcata

SEQ ID NO: 947131 - DNA, 33 bp, Homo sapien
ttataggtagtctagcaatggtttaacgtatat

SEQ ID NO: 947132 - DNA, 33 bp, Homo sapien
ttataggtagtctagcgatggtttaacgtatat

SEQ ID NO: 947133 - DNA, 33 bp, Homo sapien
cagtgaagctaggtaaacaaggcgcgagtctta

SEQ ID NO: 947134 - DNA, 33 bp, Homo sapien
cagtgaagctaggtaagcaaggcgcgagtctta

SEQ ID NO: 947135 - DNA, 33 bp, Homo sapien
tggatactttagttcaagttgagagatgtgttg

SEQ ID NO: 947136 - DNA, 33 bp, Homo sapien
tggatactttagttcaggttgagagatgtgttg

SEQ ID NO: 947137 - DNA, 33 bp, Homo sapien
gaaggggaattcaaacccatcactttgaggtct

SEQ ID NO: 947138 - DNA, 33 bp, Homo sapien
gaaggggaattcaaacgcatcactttgaggtct

SEQ ID NO: 947139 - DNA, 33 bp, Homo sapien
gcttctttactggccaacaacagtgtttctcac

SEQ ID NO: 947140 - DNA, 33 bp, Homo sapien
gcttctttactggccatcaacagtgtttctcac

SEQ ID NO: 947141 - DNA, 33 bp, Homo sapien
ttatggttggcattgaaataggtgttttggggt

SEQ ID NO: 947142 - DNA, 33 bp, Homo sapien
ttatggttggcattgagataggtgttttggggt

SEQ ID NO: 947143 - DNA, 33 bp, Homo sapien
atggccctgaggattaaaggaccagccaaccct

SEQ ID NO: 947144 - DNA, 33 bp, Homo sapien
atggccctgaggattataggaccagccaaccct

SEQ ID NO: 947145 - DNA, 33 bp, Homo sapien
taggtcagtctaacaccaggaatcataggagtt

SEQ ID NO: 947146 - DNA, 33 bp, Homo sapien
taggtcagtctaacactaggaatcataggagtt

SEQ ID NO: 947147 - DNA, 33 bp, Homo sapien
aaaattccagagggaacagaagaaaacaaatta

SEQ ID NO: 947148 - DNA, 33 bp, Homo sapien
aaaattccagagggaagagaagaaaacaaatta

SEQ ID NO: 947149 - DNA, 33 bp, Homo sapien
ctggaagtaaggactcaagatatttatataccc

SEQ ID NO: 947150 - DNA, 33 bp, Homo sapien
ctggaagtaaggactcgagatatttatataccc

SEQ ID NO: 947151 - DNA, 33 bp, Homo sapien
cttcttgtctatgacaatacctaatttctctcc

SEQ ID NO: 947152 - DNA, 33 bp, Homo sapien
cttcttgtctatgacagtacctaatttctctcc

SEQ ID NO: 947153 - DNA, 33 bp, Homo sapien
ttgcttttggttctaagaagggtcagtttggat

SEQ ID NO: 947154 - DNA, 33 bp, Homo sapien
ttgcttttggttctaataagggtcagtttggat

SEQ ID NO: 947155 - DNA, 33 bp, Homo sapien
agggttgagcatggaaatcccagtggggttctg

SEQ ID NO: 947156 - DNA, 33 bp, Homo sapien
agggttgagcatggaagtcccagtggggttctg

SEQ ID NO: 947157 - DNA, 33 bp, Homo sapien
tatataaagatgcaataaatttgtccctagcct

SEQ ID NO: 947158 - DNA, 33 bp, Homo sapien
tatataaagatgcaatcaatttgtccctagcct

SEQ ID NO: 947159 - DNA, 33 bp, Homo sapien
aggtaaaaatccatgcaaatagcagtgatgaga

SEQ ID NO: 947160 - DNA, 33 bp, Homo sapien
aggtaaaaatccatgcgaatagcagtgatgaga

SEQ ID NO: 947161 - DNA, 33 bp, Homo sapien
ctatcttaggcctgagaaaagtttcaaaacaat

SEQ ID NO: 947162 - DNA, 33 bp, Homo sapien
ctatcttaggcctgaggaaagtttcaaaacaat

SEQ ID NO: 947163 - DNA, 33 bp, Homo sapien
aacgaagacaccagcacggaggcaaatggtaaa

SEQ ID NO: 947164 - DNA, 33 bp, Homo sapien
aacgaagacaccagcagggaggcaaatggtaaa

SEQ ID NO: 947165 - DNA, 33 bp, Homo sapien
ctacagggagcccaaacatgaggatgctacact

SEQ ID NO: 947166 - DNA, 33 bp, Homo sapien
ctacagggagcccaaagatgaggatgctacact

SEQ ID NO: 947167 - DNA, 33 bp, Homo sapien
tgcagatgacaaatgcaaaacaccatccataag

SEQ ID NO: 947168 - DNA, 33 bp, Homo sapien
tgcagatgacaaatgcgaaacaccatccataag

SEQ ID NO: 947169 - DNA, 33 bp, Homo sapien
tttcattatcctcttcaccaagtcagaaatcca

SEQ ID NO: 947170 - DNA, 33 bp, Homo sapien
tttcattatcctcttcgccaagtcagaaatcca

SEQ ID NO: 947171 - DNA, 33 bp, Homo sapien
aaactttcaagactctaaaaaaacaagctgcaa

SEQ ID NO: 947172 - DNA, 33 bp, Homo sapien
aaactttcaagactctgaaaaaacaagctgcaa

SEQ ID NO: 947173 - DNA, 33 bp, Homo sapien
ccatgctcatgacgcacccttctgattaatgtc

SEQ ID NO: 947174 - DNA, 33 bp, Homo sapien
ccatgctcatgacgcatccttctgattaatgtc

SEQ ID NO: 947175 - DNA, 33 bp, Homo sapien
tcaggcagcagtgaacaaggaatacaggctctt

SEQ ID NO: 947176 - DNA, 33 bp, Homo sapien
tcaggcagcagtgaacgaggaatacaggctctt

SEQ ID NO: 947177 - DNA, 33 bp, Homo sapien
tgcacatctaataaataagtaaattcgtgccac

SEQ ID NO: 947178 - DNA, 33 bp, Homo sapien
tgcacatctaataaatgagtaaattcgtgccac

SEQ ID NO: 947179 - DNA, 33 bp, Homo sapien
tggaattgggggaaaaaaatcaactcattccat

SEQ ID NO: 947180 - DNA, 33 bp, Homo sapien
tggaattgggggaaaagaatcaactcattccat

SEQ ID NO: 947181 - DNA, 33 bp, Homo sapien
ataaaccaagaagaaccatcaggccttaaagac

SEQ ID NO: 947182 - DNA, 33 bp, Homo sapien
ataaaccaagaagaacgatcaggccttaaagac

SEQ ID NO: 947183 - DNA, 33 bp, Homo sapien
tcctggaaaaagcaaacgccctcaagaccatct

SEQ ID NO: 947184 - DNA, 33 bp, Homo sapien
tcctggaaaaagcaaaggccctcaagaccatct

SEQ ID NO: 947185 - DNA, 33 bp, Homo sapien
tagttctacatccattcaacatatctgcttttg

SEQ ID NO: 947186 - DNA, 33 bp, Homo sapien
tagttctacatccatttaacatatctgcttttg

SEQ ID NO: 947187 - DNA, 33 bp, Homo sapien
cttttcgtgtctttgcaagagaagttttagtag

SEQ ID NO: 947188 - DNA, 33 bp, Homo sapien
cttttcgtgtctttgcgagagaagttttagtag

SEQ ID NO: 947189 - DNA, 33 bp, Homo sapien
catcttcattttactacagacagaatggatgct

SEQ ID NO: 947190 - DNA, 33 bp, Homo sapien
catcttcattttactatagacagaatggatgct

SEQ ID NO: 947191 - DNA, 33 bp, Homo sapien
attacggaaatgaaaactgtgactaacaaactc

SEQ ID NO: 947192 - DNA, 33 bp, Homo sapien
attacggaaatgaaaattgtgactaacaaactc

SEQ ID NO: 947193 - DNA, 33 bp, Homo sapien
tgatggccttgccttacaacaaagggatactgg

SEQ ID NO: 947194 - DNA, 33 bp, Homo sapien
tgatggccttgccttataacaaagggatactgg

SEQ ID NO: 947195 - DNA, 33 bp, Homo sapien
aagtcacgtggtcaaacccagagaagaggggat

SEQ ID NO: 947196 - DNA, 33 bp, Homo sapien
aagtcacgtggtcaaatccagagaagaggggat

SEQ ID NO: 947197 - DNA, 33 bp, Homo sapien
gtttcttatttctttccattctctggctgggct

SEQ ID NO: 947198 - DNA, 33 bp, Homo sapien
gtttcttatttctttcgattctctggctgggct

SEQ ID NO: 947199 - DNA, 33 bp, Homo sapien
aaaattttacacatcagtcagcttcctcaggct

SEQ ID NO: 947200 - DNA, 33 bp, Homo sapien
aaaattttacacatcattcagcttcctcaggct

SEQ ID NO: 947201 - DNA, 33 bp, Homo sapien
cttcactagctagacgaccaagcagttatgacc

SEQ ID NO: 947202 - DNA, 33 bp, Homo sapien
cttcactagctagacgtccaagcagttatgacc

SEQ ID NO: 947203 - DNA, 33 bp, Homo sapien
gtgtatgaagcatggagaggacttctgttgagg

SEQ ID NO: 947204 - DNA, 33 bp, Homo sapien
gtgtatgaagcatggataggacttctgttgagg

SEQ ID NO: 947205 - DNA, 33 bp, Homo sapien
tggccagagtgtaactcagaatgacaaatgtta

SEQ ID NO: 947206 - DNA, 33 bp, Homo sapien
tggccagagtgtaactgagaatgacaaatgtta

SEQ ID NO: 947207 - DNA, 33 bp, Homo sapien
atttctcaaagctcgacggcagggaccctttag

SEQ ID NO: 947208 - DNA, 33 bp, Homo sapien
atttctcaaagctcgatggcagggaccctttag

SEQ ID NO: 947209 - DNA, 33 bp, Homo sapien
gtctttgcaaatttaaccaaattcatagaatgt

SEQ ID NO: 947210 - DNA, 33 bp, Homo sapien
gtctttgcaaatttaatcaaattcatagaatgt

SEQ ID NO: 947211 - DNA, 33 bp, Homo sapien
ggaatttagctaaggaaacatatgaacctctga

SEQ ID NO: 947212 - DNA, 33 bp, Homo sapien
ggaatttagctaaggacacatatgaacctctga

SEQ ID NO: 947213 - DNA, 33 bp, Homo sapien
cagttagatagaagtaataagagctggtgttta

SEQ ID NO: 947214 - DNA, 33 bp, Homo sapien
cagttagatagaagtagtaagagctggtgttta

SEQ ID NO: 947215 - DNA, 33 bp, Homo sapien
tgctattattcgcaaaattaaactccaggctag

SEQ ID NO: 947216 - DNA, 33 bp, Homo sapien
tgctattattcgcaaagttaaactccaggctag

SEQ ID NO: 947217 - DNA, 33 bp, Homo sapien
gcagtatctaatgaaactgtactttttacaaga

SEQ ID NO: 947218 - DNA, 33 bp, Homo sapien
gcagtatctaatgaaattgtactttttacaaga

SEQ ID NO: 947219 - DNA, 33 bp, Homo sapien
cctcagtgtctgaacccagtggtagccagagga

SEQ ID NO: 947220 - DNA, 33 bp, Homo sapien
cctcagtgtctgaacctagtggtagccagagga

SEQ ID NO: 947221 - DNA, 33 bp, Homo sapien
ttcattcaccatctggaaaagtctcccgggctg

SEQ ID NO: 947222 - DNA, 33 bp, Homo sapien
ttcattcaccatctggcaaagtctcccgggctg

SEQ ID NO: 947223 - DNA, 33 bp, Homo sapien
ttcccaattttggcagcctctcccgcactctgt

SEQ ID NO: 947224 - DNA, 33 bp, Homo sapien
ttcccaattttggcagtctctcccgcactctgt

SEQ ID NO: 947225 - DNA, 33 bp, Homo sapien
tatgtgcacctttcgccatggtcatgacatgaa

SEQ ID NO: 947226 - DNA, 33 bp, Homo sapien
tatgtgcacctttcgctatggtcatgacatgaa

SEQ ID NO: 947227 - DNA, 33 bp, Homo sapien
tttgctctgtgctttgcatgtattacctcaatt

SEQ ID NO: 947228 - DNA, 33 bp, Homo sapien
tttgctctgtgctttgtatgtattacctcaatt

SEQ ID NO: 947229 - DNA, 33 bp, Homo sapien
atgctgaggtttgaggcatgaatgatcccatca

SEQ ID NO: 947230 - DNA, 33 bp, Homo sapien
atgctgaggtttgaggtatgaatgatcccatca

SEQ ID NO: 947231 - DNA, 33 bp, Homo sapien
ttcttcttttcaaaaacacttggttgcttctcc

SEQ ID NO: 947232 - DNA, 33 bp, Homo sapien
ttcttcttttcaaaaatacttggttgcttctcc

SEQ ID NO: 947233 - DNA, 33 bp, Homo sapien
gcatcagaatcatctgcagggctttttaaatca

SEQ ID NO: 947234 - DNA, 33 bp, Homo sapien
gcatcagaatcatctggagggctttttaaatca

SEQ ID NO: 947235 - DNA, 33 bp, Homo sapien
aatattgtatgcaaaactcacaacctcatttct

SEQ ID NO: 947236 - DNA, 33 bp, Homo sapien
aatattgtatgcaaaattcacaacctcatttct

SEQ ID NO: 947237 - DNA, 33 bp, Homo sapien
aatgatgcttctgaagactgttctaataatata

SEQ ID NO: 947238 - DNA, 33 bp, Homo sapien
aatgatgcttctgaagtctgttctaataatata

SEQ ID NO: 947239 - DNA, 33 bp, Homo sapien
taaaagatgtttccaacaaaaattaaaagcaac

SEQ ID NO: 947240 - DNA, 33 bp, Homo sapien
taaaagatgtttccaataaaaattaaaagcaac

SEQ ID NO: 947241 - DNA, 33 bp, Homo sapien
gtatccctcatccaacagcttaagaacttgaac

SEQ ID NO: 947242 - DNA, 33 bp, Homo sapien
gtatccctcatccaacggcttaagaacttgaac

SEQ ID NO: 947243 - DNA, 33 bp, Homo sapien
aaaggagttgcctaacaaaagttaaacataaac

SEQ ID NO: 947244 - DNA, 33 bp, Homo sapien
aaaggagttgcctaacgaaagttaaacataaac

SEQ ID NO: 947245 - DNA, 33 bp, Homo sapien
tgcaacagattactggacatacctgaaaactca

SEQ ID NO: 947246 - DNA, 33 bp, Homo sapien
tgcaacagattactggccatacctgaaaactca

SEQ ID NO: 947247 - DNA, 33 bp, Homo sapien
ctgaactacacacataaccaacagtaaaggatg

SEQ ID NO: 947248 - DNA, 33 bp, Homo sapien
ctgaactacacacatatccaacagtaaaggatg

SEQ ID NO: 947249 - DNA, 33 bp, Homo sapien
tcaaaaccacttcctgaaattgtcaaagcactg

SEQ ID NO: 947250 - DNA, 33 bp, Homo sapien
tcaaaaccacttcctggaattgtcaaagcactg

SEQ ID NO: 947251 - DNA, 33 bp, Homo sapien
gaagtggttttgataccacaagttgcaggaata

SEQ ID NO: 947252 - DNA, 33 bp, Homo sapien
gaagtggttttgatactacaagttgcaggaata

SEQ ID NO: 947253 - DNA, 33 bp, Homo sapien
agacacagcagcccaccgaggcgataggtgatt

SEQ ID NO: 947254 - DNA, 33 bp, Homo sapien
agacacagcagcccactgaggcgataggtgatt

SEQ ID NO: 947255 - DNA, 33 bp, Homo sapien
ttgtagggtgtgtcacacaaaggagcatttttg

SEQ ID NO: 947256 - DNA, 33 bp, Homo sapien
ttgtagggtgtgtcacccaaaggagcatttttg

SEQ ID NO: 947257 - DNA, 33 bp, Homo sapien
cctaattcatatcacgccactgctttttaaaaa

SEQ ID NO: 947258 - DNA, 33 bp, Homo sapien
cctaattcatatcacgtcactgctttttaaaaa

SEQ ID NO: 947259 - DNA, 33 bp, Homo sapien
aaatagaaaagcttggaattcatttaaaaaagg

SEQ ID NO: 947260 - DNA, 33 bp, Homo sapien
aaatagaaaagcttgggattcatttaaaaaagg

SEQ ID NO: 947261 - DNA, 33 bp, Homo sapien
aaccagccaaagaagaacttggaatgtcttttt

SEQ ID NO: 947262 - DNA, 33 bp, Homo sapien
aaccagccaaagaagagcttggaatgtcttttt

SEQ ID NO: 947263 - DNA, 33 bp, Homo sapien
tggttatggcaggaagacccacactagacaaag

SEQ ID NO: 947264 - DNA, 33 bp, Homo sapien
tggttatggcaggaaggcccacactagacaaag

SEQ ID NO: 947265 - DNA, 33 bp, Homo sapien
gtccccagagcccaccaaagcaagggctgccaa

SEQ ID NO: 947266 - DNA, 33 bp, Homo sapien
gtccccagagcccaccgaagcaagggctgccaa

SEQ ID NO: 947267 - DNA, 33 bp, Homo sapien
aacattaatttcctgacgtgtacatttttatat

SEQ ID NO: 947268 - DNA, 33 bp, Homo sapien
aacattaatttcctgatgtgtacatttttatat

SEQ ID NO: 947269 - DNA, 33 bp, Homo sapien
gtagtaggttgttggaatatacaaacatgctgg

SEQ ID NO: 947270 - DNA, 33 bp, Homo sapien
gtagtaggttgttggagtatacaaacatgctgg

SEQ ID NO: 947271 - DNA, 33 bp, Homo sapien
ctgcaaaataagcctaagttaatccaggaagaa

SEQ ID NO: 947272 - DNA, 33 bp, Homo sapien
ctgcaaaataagcctaggttaatccaggaagaa

SEQ ID NO: 947273 - DNA, 33 bp, Homo sapien
actgacattgagcgagcactttttactggctta

SEQ ID NO: 947274 - DNA, 33 bp, Homo sapien
actgacattgagcgagtactttttactggctta

SEQ ID NO: 947275 - DNA, 33 bp, Homo sapien
atacacgaaacatactaaacactgtatctggca

SEQ ID NO: 947276 - DNA, 33 bp, Homo sapien
atacacgaaacatactgaacactgtatctggca

SEQ ID NO: 947277 - DNA, 33 bp, Homo sapien
actgcctctcaaaagaactgtctacattctcat

SEQ ID NO: 947278 - DNA, 33 bp, Homo sapien
actgcctctcaaaagagctgtctacattctcat

SEQ ID NO: 947279 - DNA, 33 bp, Homo sapien
cctacaatgaaaagaaagcattcgcgtggatgg

SEQ ID NO: 947280 - DNA, 33 bp, Homo sapien
cctacaatgaaaagaaggcattcgcgtggatgg

SEQ ID NO: 947281 - DNA, 33 bp, Homo sapien
aacccacaggcttgcaatcggacccacagcacc

SEQ ID NO: 947282 - DNA, 33 bp, Homo sapien
aacccacaggcttgcagtcggacccacagcacc

SEQ ID NO: 947283 - DNA, 33 bp, Homo sapien
ccatgtgcggcgactccaatgccaacctcttag

SEQ ID NO: 947284 - DNA, 33 bp, Homo sapien
ccatgtgcggcgactctaatgccaacctcttag

SEQ ID NO: 947285 - DNA, 33 bp, Homo sapien
ggaaagggcagagatacgaagaatcatttagtg

SEQ ID NO: 947286 - DNA, 33 bp, Homo sapien
ggaaagggcagagataggaagaatcatttagtg

SEQ ID NO: 947287 - DNA, 33 bp, Homo sapien
gatgctcatggtcttgcaaatcattacttctta

SEQ ID NO: 947288 - DNA, 33 bp, Homo sapien
gatgctcatggtcttggaaatcattacttctta

SEQ ID NO: 947289 - DNA, 33 bp, Homo sapien
gtgtaagaatgggctaatacacaattcgaccaa

SEQ ID NO: 947290 - DNA, 33 bp, Homo sapien
gtgtaagaatgggctactacacaattcgaccaa

SEQ ID NO: 947291 - DNA, 33 bp, Homo sapien
caacaaaaagaaacagcctacactttgggaagc

SEQ ID NO: 947292 - DNA, 33 bp, Homo sapien
caacaaaaagaaacaggctacactttgggaagc

SEQ ID NO: 947293 - DNA, 33 bp, Homo sapien
gaatggataaataaaccggcatattcagcaata

SEQ ID NO: 947294 - DNA, 33 bp, Homo sapien
gaatggataaataaactggcatattcagcaata

SEQ ID NO: 947295 - DNA, 33 bp, Homo sapien
tggtaaggccaaaaggaagttaagtagctcctt

SEQ ID NO: 947296 - DNA, 33 bp, Homo sapien
tggtaaggccaaaagggagttaagtagctcctt

SEQ ID NO: 947297 - DNA, 33 bp, Homo sapien
gaataagaagccagcccctggttatactcttcc

SEQ ID NO: 947298 - DNA, 33 bp, Homo sapien
gaataagaagccagcctctggttatactcttcc

SEQ ID NO: 947299 - DNA, 33 bp, Homo sapien
tgtgtttttccctttacagttacgaacagaaat

SEQ ID NO: 947300 - DNA, 33 bp, Homo sapien
tgtgtttttccctttagagttacgaacagaaat

SEQ ID NO: 947301 - DNA, 33 bp, Homo sapien
aaaatcagtgtgtatacctttaaatcccgaggc

SEQ ID NO: 947302 - DNA, 33 bp, Homo sapien
aaaatcagtgtgtatagctttaaatcccgaggc

SEQ ID NO: 947303 - DNA, 33 bp, Homo sapien
ttatataacatggtgccgaaattgtctcatcca

SEQ ID NO: 947304 - DNA, 33 bp, Homo sapien
ttatataacatggtgctgaaattgtctcatcca

SEQ ID NO: 947305 - DNA, 33 bp, Homo sapien
gtggaaaagtagttaacagctatgcaaagcagg

SEQ ID NO: 947306 - DNA, 33 bp, Homo sapien
gtggaaaagtagttaagagctatgcaaagcagg

SEQ ID NO: 947307 - DNA, 33 bp, Homo sapien
gtagtgcttgtaaaagaagaggtcaaagcagat

SEQ ID NO: 947308 - DNA, 33 bp, Homo sapien
gtagtgcttgtaaaagcagaggtcaaagcagat

SEQ ID NO: 947309 - DNA, 33 bp, Homo sapien
cttttctaacaaagagcaatgtacaccgttcta

SEQ ID NO: 947310 - DNA, 33 bp, Homo sapien
cttttctaacaaagaggaatgtacaccgttcta

SEQ ID NO: 947311 - DNA, 33 bp, Homo sapien
gggactttgttagcttcaaataaatatatacgt

SEQ ID NO: 947312 - DNA, 33 bp, Homo sapien
gggactttgttagcttgaaataaatatatacgt

SEQ ID NO: 947313 - DNA, 33 bp, Homo sapien
agtagagggagaagaggagcattggttattcat

SEQ ID NO: 947314 - DNA, 33 bp, Homo sapien
agtagagggagaagagtagcattggttattcat

SEQ ID NO: 947315 - DNA, 33 bp, Homo sapien
atgagtctgagcaaataatgtgaaactaccctt

SEQ ID NO: 947316 - DNA, 33 bp, Homo sapien
atgagtctgagcaaatcatgtgaaactaccctt

SEQ ID NO: 947317 - DNA, 33 bp, Homo sapien
ctgccttccatatctaccgcctaattcttacag

SEQ ID NO: 947318 - DNA, 33 bp, Homo sapien
ctgccttccatatctatcgcctaattcttacag

SEQ ID NO: 947319 - DNA, 33 bp, Homo sapien
atcggacactgtccagaatctatctgttcaacc

SEQ ID NO: 947320 - DNA, 33 bp, Homo sapien
atcggacactgtccaggatctatctgttcaacc

SEQ ID NO: 947321 - DNA, 33 bp, Homo sapien
gcgtgcaaacaacccaagtggaaaagtaaaagg

SEQ ID NO: 947322 - DNA, 33 bp, Homo sapien
gcgtgcaaacaacccaggtggaaaagtaaaagg

SEQ ID NO: 947323 - DNA, 33 bp, Homo sapien
tataatgagatgcagtcacagtgagataaatgg

SEQ ID NO: 947324 - DNA, 33 bp, Homo sapien
tataatgagatgcagttacagtgagataaatgg

SEQ ID NO: 947325 - DNA, 33 bp, Homo sapien
agtccttgaaataatgccataagggactatggt

SEQ ID NO: 947326 - DNA, 33 bp, Homo sapien
agtccttgaaataatgtcataagggactatggt

SEQ ID NO: 947327 - DNA, 33 bp, Homo sapien
attactaaccccacaaatatttatgtaaggccc

SEQ ID NO: 947328 - DNA, 33 bp, Homo sapien
attactaaccccacaagtatttatgtaaggccc

SEQ ID NO: 947329 - DNA, 33 bp, Homo sapien
tctctcttgggttcataaattgagaatctgatg

SEQ ID NO: 947330 - DNA, 33 bp, Homo sapien
tctctcttgggttcatgaattgagaatctgatg

SEQ ID NO: 947331 - DNA, 33 bp, Homo sapien
ccaaaatatgcatcaacggagaatcctggaatg

SEQ ID NO: 947332 - DNA, 33 bp, Homo sapien
ccaaaatatgcatcaatggagaatcctggaatg

SEQ ID NO: 947333 - DNA, 33 bp, Homo sapien
cttcctctgtagcccaacctactctgtaaaaat

SEQ ID NO: 947334 - DNA, 33 bp, Homo sapien
cttcctctgtagcccagcctactctgtaaaaat

SEQ ID NO: 947335 - DNA, 33 bp, Homo sapien
agttacagttctataacattcccccatatcctt

SEQ ID NO: 947336 - DNA, 33 bp, Homo sapien
agttacagttctataatattcccccatatcctt

SEQ ID NO: 947337 - DNA, 33 bp, Homo sapien
atctctagctagtgtccaaagccgcaagatgct

SEQ ID NO: 947338 - DNA, 33 bp, Homo sapien
atctctagctagtgtctaaagccgcaagatgct

SEQ ID NO: 947339 - DNA, 33 bp, Homo sapien
tggcccctagcaaaaacgctcccagagtgctcc

SEQ ID NO: 947340 - DNA, 33 bp, Homo sapien
tggcccctagcaaaaaggctcccagagtgctcc

SEQ ID NO: 947341 - DNA, 33 bp, Homo sapien
atagcaatgcgagaaccggctaacacggaaaat

SEQ ID NO: 947342 - DNA, 33 bp, Homo sapien
atagcaatgcgagaactggctaacacggaaaat

SEQ ID NO: 947343 - DNA, 33 bp, Homo sapien
acggaaaattggtaccagggatcaataggatcc

SEQ ID NO: 947344 - DNA, 33 bp, Homo sapien
acggaaaattggtaccggggatcaataggatcc

SEQ ID NO: 947345 - DNA, 33 bp, Homo sapien
tgctgcattttatagacgggaaaactaaagcat

SEQ ID NO: 947346 - DNA, 33 bp, Homo sapien
tgctgcattttatagatgggaaaactaaagcat

SEQ ID NO: 947347 - DNA, 33 bp, Homo sapien
tccctaaagatcaatgaatgagtcaacgtcaga

SEQ ID NO: 947348 - DNA, 33 bp, Homo sapien
tccctaaagatcaatgcatgagtcaacgtcaga

SEQ ID NO: 947349 - DNA, 33 bp, Homo sapien
tgctgtcacaacaaaccaattcctcacttgaaa

SEQ ID NO: 947350 - DNA, 33 bp, Homo sapien
tgctgtcacaacaaacgaattcctcacttgaaa

SEQ ID NO: 947351 - DNA, 33 bp, Homo sapien
ccatccaatttctacacattcagcatacgtgat

SEQ ID NO: 947352 - DNA, 33 bp, Homo sapien
ccatccaatttctacatattcagcatacgtgat

SEQ ID NO: 947353 - DNA, 33 bp, Homo sapien
aaatgtaaagacttaacgcagtagccttctttt

SEQ ID NO: 947354 - DNA, 33 bp, Homo sapien
aaatgtaaagacttaatgcagtagccttctttt

SEQ ID NO: 947355 - DNA, 33 bp, Homo sapien
attttagaatcgtgatcagtttatcttggctga

SEQ ID NO: 947356 - DNA, 33 bp, Homo sapien
attttagaatcgtgattagtttatcttggctga

SEQ ID NO: 947357 - DNA, 33 bp, Homo sapien
cgcagcctgtttcttaaatgggttgctctaagg

SEQ ID NO: 947358 - DNA, 33 bp, Homo sapien
cgcagcctgtttcttatatgggttgctctaagg

SEQ ID NO: 947359 - DNA, 33 bp, Homo sapien; identical to SEQ ID NO: 947357

SEQ ID NO: 947360 - DNA, 33 bp, Homo sapien; identical to SEQ ID NO: 947358

SEQ ID NO: 947361 - DNA, 33 bp, Homo sapien
attagatagtcgtagagaatgcggcattatttc

SEQ ID NO: 947362 - DNA, 33 bp, Homo sapien
attagatagtcgtagataatgcggcattatttc

SEQ ID NO: 947363 - DNA, 33 bp, Homo sapien
gtcacctcactcggccgatctgaagttcttata

SEQ ID NO: 947364 - DNA, 33 bp, Homo sapien
gtcacctcactcggcctatctgaagttcttata

SEQ ID NO: 947365 - DNA, 33 bp, Homo sapien
ccatagtaggtattaccgaaaaatttgcttata

SEQ ID NO: 947366 - DNA, 33 bp, Homo sapien
ccatagtaggtattactgaaaaatttgcttata

SEQ ID NO: 947367 - DNA, 33 bp, Homo sapien
ctgatcccccaattgccccatatggttagttgg

SEQ ID NO: 947368 - DNA, 33 bp, Homo sapien
ctgatcccccaattgctccatatggttagttgg

SEQ ID NO: 947369 - DNA, 33 bp, Homo sapien
ttttgttgtgctaaataacacttttgttgagat

SEQ ID NO: 947370 - DNA, 33 bp, Homo sapien
ttttgttgtgctaaattacacttttgttgagat

SEQ ID NO: 947371 - DNA, 33 bp, Homo sapien
tgccctcagctcctggaagataatctctaaacc

SEQ ID NO: 947372 - DNA, 33 bp, Homo sapien
tgccctcagctcctgggagataatctctaaacc

SEQ ID NO: 947373 - DNA, 33 bp, Homo sapien
aatgtcttttccagacggcccttctctcttgac

SEQ ID NO: 947374 - DNA, 33 bp, Homo sapien
aatgtcttttccagactgcccttctctcttgac

SEQ ID NO: 947375 - DNA, 33 bp, Homo sapien
agtcaacctatttagaaatacagcaactatcat

SEQ ID NO: 947376 - DNA, 33 bp, Homo sapien
agtcaacctatttagatatacagcaactatcat

SEQ ID NO: 947377 - DNA, 33 bp, Homo sapien
tcactttcttattccacaaagtgggatccacag

SEQ ID NO: 947378 - DNA, 33 bp, Homo sapien
tcactttcttattccataaagtgggatccacag

SEQ ID NO: 947379 - DNA, 33 bp, Homo sapien
tcactgaagccacatacatttaaggcctatttt

SEQ ID NO: 947380 - DNA, 33 bp, Homo sapien
tcactgaagccacatatatttaaggcctatttt

SEQ ID NO: 947381 - DNA, 33 bp, Homo sapien
agaggagggaattacacggaaaaagagcttcag

SEQ ID NO: 947382 - DNA, 33 bp, Homo sapien
agaggagggaattacatggaaaaagagcttcag

SEQ ID NO: 947383 - DNA, 33 bp, Homo sapien
cataaagccttgcaaactacccataacggctac

SEQ ID NO: 947384 - DNA, 33 bp, Homo sapien
cataaagccttgcaaattacccataacggctac

SEQ ID NO: 947385 - DNA, 33 bp, Homo sapien
tagttacagtggcaaacttgtagaacagtctta

SEQ ID NO: 947386 - DNA, 33 bp, Homo sapien
tagttacagtggcaaagttgtagaacagtctta

SEQ ID NO: 947387 - DNA, 33 bp, Homo sapien
gctccttccgtccacaatcagtttccatctggc

SEQ ID NO: 947388 - DNA, 33 bp, Homo sapien
gctccttccgtccacagtcagtttccatctggc

SEQ ID NO: 947389 - DNA, 33 bp, Homo sapien
acaaaaaactttggcccagattgaaaaacactg

SEQ ID NO: 947390 - DNA, 33 bp, Homo sapien
acaaaaaactttggccgagattgaaaaacactg

SEQ ID NO: 947391 - DNA, 33 bp, Homo sapien
ctataatatatgccagcatttgtatatatcttt

SEQ ID NO: 947392 - DNA, 33 bp, Homo sapien
ctataatatatgccaggatttgtatatatcttt

SEQ ID NO: 947393 - DNA, 33 bp, Homo sapien
agttcatcaacttgagaatgtttttccccagga

SEQ ID NO: 947394 - DNA, 33 bp, Homo sapien
agttcatcaacttgaggatgtttttccccagga

SEQ ID NO: 947395 - DNA, 33 bp, Homo sapien
agttcaggatggttcaaatgtgtatggactgtt

SEQ ID NO: 947396 - DNA, 33 bp, Homo sapien
agttcaggatggttcagatgtgtatggactgtt

SEQ ID NO: 947397 - DNA, 33 bp, Homo sapien
gcaggaattcaatagaccgcaaactgaaaagtc

SEQ ID NO: 947398 - DNA, 33 bp, Homo sapien
gcaggaattcaatagatcgcaaactgaaaagtc

SEQ ID NO: 947399 - DNA, 33 bp, Homo sapien
gattaagaatgaaagacgatgtggtgtggtatt

SEQ ID NO: 947400 - DNA, 33 bp, Homo sapien
gattaagaatgaaagatgatgtggtgtggtatt

SEQ ID NO: 947401 - DNA, 33 bp, Homo sapien
tgtgtttttttgtttcaatccaggcagaaactt

SEQ ID NO: 947402 - DNA, 33 bp, Homo sapien
tgtgtttttttgtttcgatccaggcagaaactt

SEQ ID NO: 947403 - DNA, 33 bp, Homo sapien
gtaacatgcttgtgacacctgtgtttttttgtt

SEQ ID NO: 947404 - DNA, 33 bp, Homo sapien
gtaacatgcttgtgacgcctgtgtttttttgtt

SEQ ID NO: 947405 - DNA, 33 bp, Homo sapien
tcctaccacccggaaagtctcaagtcagcttaa

SEQ ID NO: 947406 - DNA, 33 bp, Homo sapien
tcctaccacccggaaattctcaagtcagcttaa

SEQ ID NO: 947407 - DNA, 33 bp, Homo sapien
agaatcatccctaatacgttgttgcttggaatt

SEQ ID NO: 947408 - DNA, 33 bp, Homo sapien
agaatcatccctaatatgttgttgcttggaatt

SEQ ID NO: 947409 - DNA, 33 bp, Homo sapien
agccctcccaaaggccagatgggatttctgcat

SEQ ID NO: 947410 - DNA, 33 bp, Homo sapien
agccctcccaaaggccggatgggatttctgcat

SEQ ID NO: 947411 - DNA, 33 bp, Homo sapien
ccatacctcgtcctacacgtctcttccatttgg

SEQ ID NO: 947412 - DNA, 33 bp, Homo sapien
ccatacctcgtcctacgcgtctcttccatttgg

SEQ ID NO: 947413 - DNA, 33 bp, Homo sapien
tcctccaaagttcttagggtttcaacatcaatt

SEQ ID NO: 947414 - DNA, 33 bp, Homo sapien
tcctccaaagttcttatggtttcaacatcaatt

SEQ ID NO: 947415 - DNA, 33 bp, Homo sapien
caggttgtttggaagtaaaaggaaatatgtctg

SEQ ID NO: 947416 - DNA, 33 bp, Homo sapien
caggttgtttggaagtgaaaggaaatatgtctg

SEQ ID NO: 947417 - DNA, 33 bp, Homo sapien
caaacactaacctataaccaatctgcctgtttc

SEQ ID NO: 947418 - DNA, 33 bp, Homo sapien
caaacactaacctatacccaatctgcctgtttc

SEQ ID NO: 947419 - DNA, 33 bp, Homo sapien
ttatttatctttgcagaaggcagtatcttaacc

SEQ ID NO: 947420 - DNA, 33 bp, Homo sapien
ttatttatctttgcaggaggcagtatcttaacc

SEQ ID NO: 947421 - DNA, 33 bp, Homo sapien
ctttctgtggttttacacttcttttccagccat

SEQ ID NO: 947422 - DNA, 33 bp, Homo sapien
ctttctgtggttttactcttcttttccagccat

SEQ ID NO: 947423 - DNA, 33 bp, Homo sapien
atacagttgagaaaataaatggactttgatctg

SEQ ID NO: 947424 - DNA, 33 bp, Homo sapien
atacagttgagaaaatcaatggactttgatctg

SEQ ID NO: 947425 - DNA, 33 bp, Homo sapien
tctccttgcagcctggcagtaagaaccagttag

SEQ ID NO: 947426 - DNA, 33 bp, Homo sapien
tctccttgcagcctggtagtaagaaccagttag

SEQ ID NO: 947427 - DNA, 33 bp, Homo sapien
tctcacactgctataaagatactacttgagact

SEQ ID NO: 947428 - DNA, 33 bp, Homo sapien
tctcacactgctataaggatactacttgagact

SEQ ID NO: 947429 - DNA, 33 bp, Homo sapien
ttaggtagggaagacaagaattctgagagccat

SEQ ID NO: 947430 - DNA, 33 bp, Homo sapien
ttaggtagggaagacacgaattctgagagccat

SEQ ID NO: 947431 - DNA, 33 bp, Homo sapien
gtcagtggaatctctccagctagtgtgtaaagg

SEQ ID NO: 947432 - DNA, 33 bp, Homo sapien
gtcagtggaatctctctagctagtgtgtaaagg

SEQ ID NO: 947433 - DNA, 33 bp, Homo sapien
ttcaatattatagcaacaagcctgttggtttca

SEQ ID NO: 947434 - DNA, 33 bp, Homo sapien
ttcaatattatagcaagaagcctgttggtttca

SEQ ID NO: 947435 - DNA, 33 bp, Homo sapien
tttctctttaatgataataagaatgtcgagagc

SEQ ID NO: 947436 - DNA, 33 bp, Homo sapien
tttctctttaatgatagtaagaatgtcgagagc

SEQ ID NO: 947437 - DNA, 33 bp, Homo sapien
tttgcatcatctagggaaccacagtgaaccacc

SEQ ID NO: 947438 - DNA, 33 bp, Homo sapien
tttgcatcatctaggggaccacagtgaaccacc

SEQ ID NO: 947439 - DNA, 33 bp, Homo sapien
aagttcagaattcagcaagggacaccaatgatc

SEQ ID NO: 947440 - DNA, 33 bp, Homo sapien
aagttcagaattcagcgagggacaccaatgatc

SEQ ID NO: 947441 - DNA, 33 bp, Homo sapien
cttttgcaccaacctaataatagcgtgataaca

SEQ ID NO: 947442 - DNA, 33 bp, Homo sapien
cttttgcaccaacctagtaatagcgtgataaca

SEQ ID NO: 947443 - DNA, 33 bp, Homo sapien
tctcctttctctctgacgtgtcatctccataca

SEQ ID NO: 947444 - DNA, 33 bp, Homo sapien
tctcctttctctctgatgtgtcatctccataca

SEQ ID NO: 947445 - DNA, 33 bp, Homo sapien
tagtgtcttccactcaccaatccctgatccctt

SEQ ID NO: 947446 - DNA, 33 bp, Homo sapien
tagtgtcttccactcatcaatccctgatccctt

SEQ ID NO: 947447 - DNA, 33 bp, Homo sapien
attttgatcactaatagatgctttttgctgttc

SEQ ID NO: 947448 - DNA, 33 bp, Homo sapien
attttgatcactaatatatgctttttgctgttc

SEQ ID NO: 947449 - DNA, 33 bp, Homo sapien
cattggaatcttaatcaaaaacaacatgacaat

SEQ ID NO: 947450 - DNA, 33 bp, Homo sapien
cattggaatcttaatcgaaaacaacatgacaat

SEQ ID NO: 947451 - DNA, 33 bp, Homo sapien
atcttagcaagacttagagatgactcctgtgta

SEQ ID NO: 947452 - DNA, 33 bp, Homo sapien
atcttagcaagacttatagatgactcctgtgta

SEQ ID NO: 947453 - DNA, 33 bp, Homo sapien
cagtttgagaagcaccacccgggtcacatgttt

SEQ ID NO: 947454 - DNA, 33 bp, Homo sapien
cagtttgagaagcaccgcccgggtcacatgttt

SEQ ID NO: 947455 - DNA, 33 bp, Homo sapien
gtgagcaaaagaagacaatgatcttgatgatct

SEQ ID NO: 947456 - DNA, 33 bp, Homo sapien
gtgagcaaaagaagactatgatcttgatgatct

SEQ ID NO: 947457 - DNA, 33 bp, Homo sapien
ttccagaaggggaacacgtaactggatgtcaat

SEQ ID NO: 947458 - DNA, 33 bp, Homo sapien
ttccagaaggggaacaggtaactggatgtcaat

SEQ ID NO: 947459 - DNA, 33 bp, Homo sapien
cctaggatcattaaaaatgggtgcagaataaca

SEQ ID NO: 947460 - DNA, 33 bp, Homo sapien
cctaggatcattaaaattgggtgcagaataaca

SEQ ID NO: 947461 - DNA, 33 bp, Homo sapien
tcccttacagtagaaactcccaaatgccatatt

SEQ ID NO: 947462 - DNA, 33 bp, Homo sapien
tcccttacagtagaaattcccaaatgccatatt

SEQ ID NO: 947463 - DNA, 33 bp, Homo sapien
gtatcattttgttaaggaggaagctgagctcca

SEQ ID NO: 947464 - DNA, 33 bp, Homo sapien
gtatcattttgttaagtaggaagctgagctcca

SEQ ID NO: 947465 - DNA, 33 bp, Homo sapien
aatgttagagaccactcaggctttattttatta

SEQ ID NO: 947466 - DNA, 33 bp, Homo sapien
aatgttagagaccacttaggctttattttatta

SEQ ID NO: 947467 - DNA, 33 bp, Homo sapien
ccccaggatttcagacaaagcttcactttccta

SEQ ID NO: 947468 - DNA, 33 bp, Homo sapien
ccccaggatttcagacgaagcttcactttccta

SEQ ID NO: 947469 - DNA, 33 bp, Homo sapien
agtataggctcccgataataggtctaagttgag

SEQ ID NO: 947470 - DNA, 33 bp, Homo sapien
agtataggctcccgatgataggtctaagttgag

SEQ ID NO: 947471 - DNA, 33 bp, Homo sapien
ggaagcagtgcacatcagaatctaaaggataca

SEQ ID NO: 947472 - DNA, 33 bp, Homo sapien
ggaagcagtgcacatcggaatctaaaggataca

SEQ ID NO: 947473 - DNA, 33 bp, Homo sapien
ttggccaggtttatcaacggtttgtttctcttg

SEQ ID NO: 947474 - DNA, 33 bp, Homo sapien
ttggccaggtttatcagcggtttgtttctcttg

SEQ ID NO: 947475 - DNA, 33 bp, Homo sapien
aaacgttatgatcaagcaacttttgagaattta

SEQ ID NO: 947476 - DNA, 33 bp, Homo sapien
aaacgttatgatcaaggaacttttgagaattta

SEQ ID NO: 947477 - DNA, 33 bp, Homo sapien
acgtccttgaaaatctcaaattaagaagaaggt

SEQ ID NO: 947478 - DNA, 33 bp, Homo sapien
acgtccttgaaaatctgaaattaagaagaaggt

SEQ ID NO: 947479 - DNA, 33 bp, Homo sapien
ccttacaatcctagcaaccctgttttacaaata

SEQ ID NO: 947480 - DNA, 33 bp, Homo sapien
ccttacaatcctagcatccctgttttacaaata

SEQ ID NO: 947481 - DNA, 33 bp, Homo sapien
gaaaaagatatggaagccccagaatctggacgt

SEQ ID NO: 947482 - DNA, 33 bp, Homo sapien
gaaaaagatatggaagtcccagaatctggacgt

SEQ ID NO: 947483 - DNA, 33 bp, Homo sapien
tctagttaaaaaacacggcaatacagagttacg

SEQ ID NO: 947484 - DNA, 33 bp, Homo sapien
tctagttaaaaaacactgcaatacagagttacg

SEQ ID NO: 947485 - DNA, 33 bp, Homo sapien
catttgtttgtttttcactgatttgcacttatc

SEQ ID NO: 947486 - DNA, 33 bp, Homo sapien
catttgtttgtttttcgctgatttgcacttatc

SEQ ID NO: 947487 - DNA, 33 bp, Homo sapien
aaggttctcagaaacaatctactctgctagagg

SEQ ID NO: 947488 - DNA, 33 bp, Homo sapien
aaggttctcagaaacagtctactctgctagagg

SEQ ID NO: 947489 - DNA, 33 bp, Homo sapien
ttgtaggataagtcaaagaactgggagattcat

SEQ ID NO: 947490 - DNA, 33 bp, Homo sapien
ttgtaggataagtcaaggaactgggagattcat

SEQ ID NO: 947491 - DNA, 33 bp, Homo sapien
tcttggtgctcttgaactgtagacatctgttta

SEQ ID NO: 947492 - DNA, 33 bp, Homo sapien
tcttggtgctcttgaattgtagacatctgttta

SEQ ID NO: 947493 - DNA, 33 bp, Homo sapien
aaagaatccgtgaagaagcaataagacatggcc

SEQ ID NO: 947494 - DNA, 33 bp, Homo sapien
aaagaatccgtgaagacgcaataagacatggcc

SEQ ID NO: 947495 - DNA, 33 bp, Homo sapien
aggcctgatcatataccctgtttggttctatac

SEQ ID NO: 947496 - DNA, 33 bp, Homo sapien
aggcctgatcatatactctgtttggttctatac

SEQ ID NO: 947497 - DNA, 33 bp, Homo sapien
cacagtggtcctcagtaacataggaaccaaacg

SEQ ID NO: 947498 - DNA, 33 bp, Homo sapien
cacagtggtcctcagtgacataggaaccaaacg

SEQ ID NO: 947499 - DNA, 33 bp, Homo sapien
gccactgtcaccaagccctgaccctagaacaag

SEQ ID NO: 947500 - DNA, 33 bp, Homo sapien
gccactgtcaccaagctctgaccctagaacaag

SEQ ID NO: 947501 - DNA, 33 bp, Homo sapien
ccaccaaatgagtgtacgccccccagtgagtga

SEQ ID NO: 947502 - DNA, 33 bp, Homo sapien
ccaccaaatgagtgtatgccccccagtgagtga

SEQ ID NO: 947503 - DNA, 33 bp, Homo sapien
tgatctgaattcgatacggaagaaaaagatgag

SEQ ID NO: 947504 - DNA, 33 bp, Homo sapien
tgatctgaattcgatatggaagaaaaagatgag

SEQ ID NO: 947505 - DNA, 33 bp, Homo sapien
tagcatctggcacatagtagccgtccaataaac

SEQ ID NO: 947506 - DNA, 33 bp, Homo sapien
tagcatctggcacatattagccgtccaataaac

SEQ ID NO: 947507 - DNA, 33 bp, Homo sapien
tctccctgtctataacccttgttcccatagtca

SEQ ID NO: 947508 - DNA, 33 bp, Homo sapien
tctccctgtctataacgcttgttcccatagtca

SEQ ID NO: 947509 - DNA, 33 bp, Homo sapien
ctctggttacaagatgcagcatggatgcaagcg

SEQ ID NO: 947510 - DNA, 33 bp, Homo sapien
ctctggttacaagatggagcatggatgcaagcg

SEQ ID NO: 947511 - DNA, 33 bp, Homo sapien
cacaagagaaagttcccagcacagagaactgca

SEQ ID NO: 947512 - DNA, 33 bp, Homo sapien
cacaagagaaagttccgagcacagagaactgca

SEQ ID NO: 947513 - DNA, 33 bp, Homo sapien
cacaccgtttgtagcacagcaatcattagctat

SEQ ID NO: 947514 - DNA, 33 bp, Homo sapien
cacaccgtttgtagcatagcaatcattagctat

SEQ ID NO: 947515 - DNA, 33 bp, Homo sapien
caaggatcttctgaacacctttaatggcctcat

SEQ ID NO: 947516 - DNA, 33 bp, Homo sapien
caaggatcttctgaacgcctttaatggcctcat

SEQ ID NO: 947517 - DNA, 33 bp, Homo sapien
agctttctgttcttcacgtttttcatcttgtct

SEQ ID NO: 947518 - DNA, 33 bp, Homo sapien
agctttctgttcttcatgtttttcatcttgtct

SEQ ID NO: 947519 - DNA, 33 bp, Homo sapien
agttccctctttatgaaattattcccaacagat

SEQ ID NO: 947520 - DNA, 33 bp, Homo sapien
agttccctctttatgagattattcccaacagat

SEQ ID NO: 947521 - DNA, 33 bp, Homo sapien
cctgttggaaaggcgcacagtgtataaaggagg

SEQ ID NO: 947522 - DNA, 33 bp, Homo sapien
cctgttggaaaggcgcgcagtgtataaaggagg

SEQ ID NO: 947523 - DNA, 33 bp, Homo sapien
atttgcaggaaccaaactagggtgtagttaggg

SEQ ID NO: 947524 - DNA, 33 bp, Homo sapien
atttgcaggaaccaaattagggtgtagttaggg

SEQ ID NO: 947525 - DNA, 33 bp, Homo sapien
ttatagataagagtcaacatttgcaaagttaat

SEQ ID NO: 947526 - DNA, 33 bp, Homo sapien
ttatagataagagtcagcatttgcaaagttaat

SEQ ID NO: 947527 - DNA, 33 bp, Homo sapien
ttagggaaatagaaaacaacctacgtgaaatac

SEQ ID NO: 947528 - DNA, 33 bp, Homo sapien
ttagggaaatagaaaagaacctacgtgaaatac

SEQ ID NO: 947529 - DNA, 33 bp, Homo sapien
tgcatgcacagtgggaagtggaagttcattagt

SEQ ID NO: 947530 - DNA, 33 bp, Homo sapien
tgcatgcacagtgggacgtggaagttcattagt

SEQ ID NO: 947531 - DNA, 33 bp, Homo sapien
cacatttgttaaaatcaatgaacctatattgac

SEQ ID NO: 947532 - DNA, 33 bp, Homo sapien
cacatttgttaaaatcgatgaacctatattgac

SEQ ID NO: 947533 - DNA, 33 bp, Homo sapien
cactagtaaactaggcaatgttcatggatagac

SEQ ID NO: 947534 - DNA, 33 bp, Homo sapien
cactagtaaactaggccatgttcatggatagac

SEQ ID NO: 947535 - DNA, 33 bp, Homo sapien
aaaaatgttctacaaaccactgttctccataaa

SEQ ID NO: 947536 - DNA, 33 bp, Homo sapien
aaaaatgttctacaaagcactgttctccataaa

SEQ ID NO: 947537 - DNA, 33 bp, Homo sapien
tacacagagtgcaacaaaagggtctggaacatg

SEQ ID NO: 947538 - DNA, 33 bp, Homo sapien
tacacagagtgcaacacaagggtctggaacatg

SEQ ID NO: 947539 - DNA, 33 bp, Homo sapien
cctggtgtgtggcaaaggcttcaagtttgtgga

SEQ ID NO: 947540 - DNA, 33 bp, Homo sapien
cctggtgtgtggcaaatgcttcaagtttgtgga

SEQ ID NO: 947541 - DNA, 33 bp, Homo sapien
ttcactaaaatgcaaaacctcagacattccctg

SEQ ID NO: 947542 - DNA, 33 bp, Homo sapien
ttcactaaaatgcaaaccctcagacattccctg

SEQ ID NO: 947543 - DNA, 33 bp, Homo sapien
gctgtgagagaagtacgggttttgaacatgcag

SEQ ID NO: 947544 - DNA, 33 bp, Homo sapien
gctgtgagagaagtactggttttgaacatgcag

SEQ ID NO: 947545 - DNA, 33 bp, Homo sapien
atatgtgctgctgaagcaagaactggaaccatt

SEQ ID NO: 947546 - DNA, 33 bp, Homo sapien
atatgtgctgctgaagtaagaactggaaccatt

SEQ ID NO: 947547 - DNA, 33 bp, Homo sapien
aaaacatcatttctagcaaaactacaaaaaaat

SEQ ID NO: 947548 - DNA, 33 bp, Homo sapien
aaaacatcatttctaggaaaactacaaaaaaat

SEQ ID NO: 947549 - DNA, 33 bp, Homo sapien
gtattgctgttgcaagacttagtttacggaccc

SEQ ID NO: 947550 - DNA, 33 bp, Homo sapien
gtattgctgttgcaaggcttagtttacggaccc

SEQ ID NO: 947551 - DNA, 33 bp, Homo sapien
cttctgcagaaaccccagagctctcagtactca

SEQ ID NO: 947552 - DNA, 33 bp, Homo sapien
cttctgcagaaaccccggagctctcagtactca

SEQ ID NO: 947553 - DNA, 33 bp, Homo sapien
ctagcacacgaaatggacaagattgtggaacca

SEQ ID NO: 947554 - DNA, 33 bp, Homo sapien
ctagcacacgaaatggccaagattgtggaacca

SEQ ID NO: 947555 - DNA, 33 bp, Homo sapien
gggtgctaggtgatgacccccagagtatgcagt

SEQ ID NO: 947556 - DNA, 33 bp, Homo sapien
gggtgctaggtgatgatccccagagtatgcagt

SEQ ID NO: 947557 - DNA, 33 bp, Homo sapien
aaggttgctatcctatcagttaaactataaaac

SEQ ID NO: 947558 - DNA, 33 bp, Homo sapien
aaggttgctatcctatgagttaaactataaaac

SEQ ID NO: 947559 - DNA, 33 bp, Homo sapien
tatcagggtctgaatcaaacagtcttcagccag

SEQ ID NO: 947560 - DNA, 33 bp, Homo sapien
tatcagggtctgaatccaacagtcttcagccag

SEQ ID NO: 947561 - DNA, 33 bp, Homo sapien
acttcagaggcgtcaccgtaggaaacacctcct

SEQ ID NO: 947562 - DNA, 33 bp, Homo sapien
acttcagaggcgtcactgtaggaaacacctcct

SEQ ID NO: 947563 - DNA, 33 bp, Homo sapien
cacttggtcaaggtcacgtgatgtgattacaga

SEQ ID NO: 947564 - DNA, 33 bp, Homo sapien
cacttggtcaaggtcatgtgatgtgattacaga

SEQ ID NO: 947565 - DNA, 33 bp, Homo sapien
gaggaagaactaaaaacgcaacccagactgaat

SEQ ID NO: 947566 - DNA, 33 bp, Homo sapien
gaggaagaactaaaaatgcaacccagactgaat

SEQ ID NO: 947567 - DNA, 33 bp, Homo sapien
gtgacatgtgatgaaaaacatgggcgccatagt

SEQ ID NO: 947568 - DNA, 33 bp, Homo sapien
gtgacatgtgatgaaagacatgggcgccatagt

SEQ ID NO: 947569 - DNA, 33 bp, Homo sapien
gacagcaggtaagcacaggcagggaggctgagg

SEQ ID NO: 947570 - DNA, 33 bp, Homo sapien
gacagcaggtaagcacgggcagggaggctgagg

SEQ ID NO: 947571 - DNA, 33 bp, Homo sapien
agtgcagaaaaaatccaaaactgtatttgtcag

SEQ ID NO: 947572 - DNA, 33 bp, Homo sapien
agtgcagaaaaaatccgaaactgtatttgtcag

SEQ ID NO: 947573 - DNA, 33 bp, Homo sapien
cctctgcagttttttacattgttgaaatcatgc

SEQ ID NO: 947574 - DNA, 33 bp, Homo sapien
cctctgcagttttttatattgttgaaatcatgc

SEQ ID NO: 947575 - DNA, 33 bp, Homo sapien
tcatcctaccttgactcagaatggacaagatca

SEQ ID NO: 947576 - DNA, 33 bp, Homo sapien
tcatcctaccttgactgagaatggacaagatca

SEQ ID NO: 947577 - DNA, 33 bp, Homo sapien
ggtgctaacaaggagcgcaaataaacagaaaaa

SEQ ID NO: 947578 - DNA, 33 bp, Homo sapien
ggtgctaacaaggagctcaaataaacagaaaaa

SEQ ID NO: 947579 - DNA, 33 bp, Homo sapien
ttataaataattgttcactctctgtcttctctt

SEQ ID NO: 947580 - DNA, 33 bp, Homo sapien
ttataaataattgttccctctctgtcttctctt

SEQ ID NO: 947581 - DNA, 33 bp, Homo sapien
ccctaatgtttatcatcagcattgtaagaagaa

SEQ ID NO: 947582 - DNA, 33 bp, Homo sapien
ccctaatgtttatcatgagcattgtaagaagaa

SEQ ID NO: 947583 - DNA, 33 bp, Homo sapien
taaatgagagcttgtacataaaagtccttgcat

SEQ ID NO: 947584 - DNA, 33 bp, Homo sapien
taaatgagagcttgtatataaaagtccttgcat

SEQ ID NO: 947585 - DNA, 33 bp, Homo sapien
atataatgcaagtagacaataaggaatgcttaa

SEQ ID NO: 947586 - DNA, 33 bp, Homo sapien
atataatgcaagtagagaataaggaatgcttaa

SEQ ID NO: 947587 - DNA, 33 bp, Homo sapien
tctgccaatacaaacacgtccaatgacggggga

SEQ ID NO: 947588 - DNA, 33 bp, Homo sapien
tctgccaatacaaacatgtccaatgacggggga

SEQ ID NO: 947589 - DNA, 33 bp, Homo sapien
acttatctacagtaacgaaagcagctagatttc

SEQ ID NO: 947590 - DNA, 33 bp, Homo sapien
acttatctacagtaactaaagcagctagatttc

SEQ ID NO: 947591 - DNA, 33 bp, Homo sapien
tagatttcagatatacacatacaagaggaagtg

SEQ ID NO: 947592 - DNA, 33 bp, Homo sapien
tagatttcagatatacgcatacaagaggaagtg

SEQ ID NO: 947593 - DNA, 33 bp, Homo sapien
cttgcccaggttgtcactaccttgctggtcaca

SEQ ID NO: 947594 - DNA, 33 bp, Homo sapien
cttgcccaggttgtcagtaccttgctggtcaca

SEQ ID NO: 947595 - DNA, 33 bp, Homo sapien
tgtgcaattcctcttccaaaaagcttcacctca

SEQ ID NO: 947596 - DNA, 33 bp, Homo sapien
tgtgcaattcctcttctaaaaagcttcacctca

SEQ ID NO: 947597 - DNA, 33 bp, Homo sapien
cagggtgggagacaccactatccatcttctacg

SEQ ID NO: 947598 - DNA, 33 bp, Homo sapien
cagggtgggagacaccgctatccatcttctacg

SEQ ID NO: 947599 - DNA, 33 bp, Homo sapien
ccaagcatctagcaaaatcagctttctgttctt

SEQ ID NO: 947600 - DNA, 33 bp, Homo sapien
ccaagcatctagcaaagtcagctttctgttctt

SEQ ID NO: 947601 - DNA, 33 bp, Homo sapien
ctctactatttcttgactatcttggagggcctc

SEQ ID NO: 947602 - DNA, 33 bp, Homo sapien
ctctactatttcttgagtatcttggagggcctc

SEQ ID NO: 947603 - DNA, 33 bp, Homo sapien
ccagagagattttttcaaaaagtagctggaaat

SEQ ID NO: 947604 - DNA, 33 bp, Homo sapien
ccagagagattttttccaaaagtagctggaaat

SEQ ID NO: 947605 - DNA, 33 bp, Homo sapien
actttgccctactggaaaggatctgatgccaga

SEQ ID NO: 947606 - DNA, 33 bp, Homo sapien
actttgccctactggagaggatctgatgccaga

SEQ ID NO: 947607 - DNA, 33 bp, Homo sapien
tgtcaacctcttataggccataacaaatatttc

SEQ ID NO: 947608 - DNA, 33 bp, Homo sapien
tgtcaacctcttatagtccataacaaatatttc

SEQ ID NO: 947609 - DNA, 33 bp, Homo sapien
tgtcttcagacatttaagatcattgacaatgac

SEQ ID NO: 947610 - DNA, 33 bp, Homo sapien
tgtcttcagacatttaggatcattgacaatgac

SEQ ID NO: 947611 - DNA, 33 bp, Homo sapien
ctcaagtcttcactccaaataggtcttcaatca

SEQ ID NO: 947612 - DNA, 33 bp, Homo sapien
ctcaagtcttcactcccaataggtcttcaatca

SEQ ID NO: 947613 - DNA, 33 bp, Homo sapien
attataggttgcaacaatggagtgattttgaag

SEQ ID NO: 947614 - DNA, 33 bp, Homo sapien
attataggttgcaacagtggagtgattttgaag

SEQ ID NO: 947615 - DNA, 33 bp, Homo sapien
tggtgctcttatcaacagaaccccagatagctc

SEQ ID NO: 947616 - DNA, 33 bp, Homo sapien
tggtgctcttatcaacggaaccccagatagctc

SEQ ID NO: 947617 - DNA, 33 bp, Homo sapien
gacagatgaggaaaccaagttatggtctactaa

SEQ ID NO: 947618 - DNA, 33 bp, Homo sapien
gacagatgaggaaaccgagttatggtctactaa

SEQ ID NO: 947619 - DNA, 33 bp, Homo sapien
gtgctgaggtttgggaaatgaaatggaaaaaga

SEQ ID NO: 947620 - DNA, 33 bp, Homo sapien
gtgctgaggtttgggacatgaaatggaaaaaga

SEQ ID NO: 947621 - DNA, 33 bp, Homo sapien
ttacccttctagactcaattttaattagctgtt

SEQ ID NO: 947622 - DNA, 33 bp, Homo sapien
ttacccttctagactccattttaattagctgtt

SEQ ID NO: 947623 - DNA, 33 bp, Homo sapien
agaataaaaagctccacaaaagaaggaggcgtc

SEQ ID NO: 947624 - DNA, 33 bp, Homo sapien
agaataaaaagctccagaaaagaaggaggcgtc

SEQ ID NO: 947625 - DNA, 33 bp, Homo sapien
gtaaatctaccatatcactcccttgcataaatc

SEQ ID NO: 947626 - DNA, 33 bp, Homo sapien
gtaaatctaccatatcgctcccttgcataaatc

SEQ ID NO: 947627 - DNA, 33 bp, Homo sapien
atttactcacacggcaaatattactgagcatct

SEQ ID NO: 947628 - DNA, 33 bp, Homo sapien
atttactcacacggcagatattactgagcatct

SEQ ID NO: 947629 - DNA, 33 bp, Homo sapien
atatatagtaaatgcaagatagttatgaaagaa

SEQ ID NO: 947630 - DNA, 33 bp, Homo sapien
atatatagtaaatgcaggatagttatgaaagaa

SEQ ID NO: 947631 - DNA, 33 bp, Homo sapien
tgtaccctgggaaaaactttaatgttgctttta

SEQ ID NO: 947632 - DNA, 33 bp, Homo sapien
tgtaccctgggaaaaagtttaatgttgctttta

SEQ ID NO: 947633 - DNA, 33 bp, Homo sapien
tcactctgttgaaaggaaagatttgtctagcta

SEQ ID NO: 947634 - DNA, 33 bp, Homo sapien
tcactctgttgaaagggaagatttgtctagcta

SEQ ID NO: 947635 - DNA, 33 bp, Homo sapien
gtctctgaagcccccaatgcttgtgtgagggtg

SEQ ID NO: 947636 - DNA, 33 bp, Homo sapien
gtctctgaagcccccattgcttgtgtgagggtg

SEQ ID NO: 947637 - DNA, 33 bp, Homo sapien
gtttattttttcacagaagcgtgtgagaaatgg

SEQ ID NO: 947638 - DNA, 33 bp, Homo sapien
gtttattttttcacaggagcgtgtgagaaatgg

SEQ ID NO: 947639 - DNA, 33 bp, Homo sapien
aactacggcttcgacacagctaagaatcaacaa

SEQ ID NO: 947640 - DNA, 33 bp, Homo sapien
aactacggcttcgacagagctaagaatcaacaa

SEQ ID NO: 947641 - DNA, 33 bp, Homo sapien
aaagagagtcggaaggaaatctaggagttgatg

SEQ ID NO: 947642 - DNA, 33 bp, Homo sapien
aaagagagtcggaagggaatctaggagttgatg

SEQ ID NO: 947643 - DNA, 33 bp, Homo sapien
tcgattgtgttgcatgaatttgtgcaatataaa

SEQ ID NO: 947644 - DNA, 33 bp, Homo sapien
tcgattgtgttgcatggatttgtgcaatataaa

SEQ ID NO: 947645 - DNA, 33 bp, Homo sapien
ttgtaggttatacaccccatcttgatgacaatg

SEQ ID NO: 947646 - DNA, 33 bp, Homo sapien
ttgtaggttatacaccgcatcttgatgacaatg

SEQ ID NO: 947647 - DNA, 33 bp, Homo sapien
tctgccaaagtaagcacggatttaggatctttg

SEQ ID NO: 947648 - DNA, 33 bp, Homo sapien
tctgccaaagtaagcatggatttaggatctttg

SEQ ID NO: 947649 - DNA, 33 bp, Homo sapien
tgatcccaaaaagatagacattgcagtgctttt

SEQ ID NO: 947650 - DNA, 33 bp, Homo sapien
tgatcccaaaaagatatacattgcagtgctttt

SEQ ID NO: 947651 - DNA, 33 bp, Homo sapien
tccatgcctcttcccaatgacctgaggaatgac

SEQ ID NO: 947652 - DNA, 33 bp, Homo sapien
tccatgcctcttcccagtgacctgaggaatgac

SEQ ID NO: 947653 - DNA, 33 bp, Homo sapien
gcctgtagttaatgacactgtatcatatcaatt

SEQ ID NO: 947654 - DNA, 33 bp, Homo sapien
gcctgtagttaatgaccctgtatcatatcaatt

SEQ ID NO: 947655 - DNA, 33 bp, Homo sapien
tctatcagattttaaaagaagatggccaatctg

SEQ ID NO: 947656 - DNA, 33 bp, Homo sapien
tctatcagattttaaatgaagatggccaatctg

SEQ ID NO: 947657 - DNA, 33 bp, Homo sapien
aacactctccaaatgcactttgtacattcattg

SEQ ID NO: 947658 - DNA, 33 bp, Homo sapien
aacactctccaaatgcgctttgtacattcattg

SEQ ID NO: 947659 - DNA, 33 bp, Homo sapien
atttataattctgaaaagttgtaaacaacctgt

SEQ ID NO: 947660 - DNA, 33 bp, Homo sapien
atttataattctgaaatgttgtaaacaacctgt

SEQ ID NO: 947661 - DNA, 33 bp, Homo sapien
atccctgtagcctgcaactctacaacctcttgc

SEQ ID NO: 947662 - DNA, 33 bp, Homo sapien
atccctgtagcctgcatctctacaacctcttgc

SEQ ID NO: 947663 - DNA, 33 bp, Homo sapien
tgtgattccaatcctacgatgtgctgggctctt

SEQ ID NO: 947664 - DNA, 33 bp, Homo sapien
tgtgattccaatcctatgatgtgctgggctctt

SEQ ID NO: 947665 - DNA, 33 bp, Homo sapien
gaaaaggagagcttcaaaaagatacaggagccc

SEQ ID NO: 947666 - DNA, 33 bp, Homo sapien
gaaaaggagagcttcacaaagatacaggagccc

SEQ ID NO: 947667 - DNA, 33 bp, Homo sapien
ctgaggaatattacaaatgatgaatgcgtaagc

SEQ ID NO: 947668 - DNA, 33 bp, Homo sapien
ctgaggaatattacaattgatgaatgcgtaagc

SEQ ID NO: 947669 - DNA, 33 bp, Homo sapien
agtaggagttgtccagcaggaaaaatccggggc

SEQ ID NO: 947670 - DNA, 33 bp, Homo sapien
agtaggagttgtccaggaggaaaaatccggggc

SEQ ID NO: 947671 - DNA, 33 bp, Homo sapien
aataataataacacaagtagaattttcacataa

SEQ ID NO: 947672 - DNA, 33 bp, Homo sapien
aataataataacacaattagaattttcacataa

SEQ ID NO: 947673 - DNA, 33 bp, Homo sapien
ttcatggaaacttgtcaataccacagattagat

SEQ ID NO: 947674 - DNA, 33 bp, Homo sapien
ttcatggaaacttgtcgataccacagattagat

SEQ ID NO: 947675 - DNA, 33 bp, Homo sapien
tgctttctaaaacatgacagataaaaccatcag

SEQ ID NO: 947676 - DNA, 33 bp, Homo sapien
tgctttctaaaacatggcagataaaaccatcag

SEQ ID NO: 947677 - DNA, 33 bp, Homo sapien
catttgtgtatggtacaatttgtgagtgcaatg

SEQ ID NO: 947678 - DNA, 33 bp, Homo sapien
catttgtgtatggtacgatttgtgagtgcaatg

SEQ ID NO: 947679 - DNA, 33 bp, Homo sapien
cagagtctcattctaaatgcaagcaagacagag

SEQ ID NO: 947680 - DNA, 33 bp, Homo sapien
cagagtctcattctaagtgcaagcaagacagag

SEQ ID NO: 947681 - DNA, 33 bp, Homo sapien
ctttattttttctctaaggcttcatcatctttc

SEQ ID NO: 947682 - DNA, 33 bp, Homo sapien
ctttattttttctctacggcttcatcatctttc

SEQ ID NO: 947683 - DNA, 33 bp, Homo sapien
gggctgcaagaattgacaaatgaacgcattaca

SEQ ID NO: 947684 - DNA, 33 bp, Homo sapien
gggctgcaagaattgataaatgaacgcattaca

SEQ ID NO: 947685 - DNA, 33 bp, Homo sapien
tctgcctctgtcttacaagggagaaagatgaag

SEQ ID NO: 947686 - DNA, 33 bp, Homo sapien
tctgcctctgtcttactagggagaaagatgaag

SEQ ID NO: 947687 - DNA, 33 bp, Homo sapien
agaagaaatggatttccaagcagtgaaacagcc

SEQ ID NO: 947688 - DNA, 33 bp, Homo sapien
agaagaaatggatttctaagcagtgaaacagcc

SEQ ID NO: 947689 - DNA, 33 bp, Homo sapien
tcaggaaattcctatgaaaaaacactgagagag

SEQ ID NO: 947690 - DNA, 33 bp, Homo sapien
tcaggaaattcctatggaaaaacactgagagag

SEQ ID NO: 947691 - DNA, 33 bp, Homo sapien
aaaggttaccaggtacaaactccataaggttgc

SEQ ID NO: 947692 - DNA, 33 bp, Homo sapien
aaaggttaccaggtacgaactccataaggttgc

SEQ ID NO: 947693 - DNA, 33 bp, Homo sapien
aaggaaagggcggaaacagatgagagatgaaag

SEQ ID NO: 947694 - DNA, 33 bp, Homo sapien
aaggaaagggcggaaagagatgagagatgaaag

SEQ ID NO: 947695 - DNA, 33 bp, Homo sapien
atcctccatgtgcagactatctctttggaaaaa

SEQ ID NO: 947696 - DNA, 33 bp, Homo sapien
atcctccatgtgcagagtatctctttggaaaaa

SEQ ID NO: 947697 - DNA, 33 bp, Homo sapien
taacaccctgtttaaccaaagtatggatccaat

SEQ ID NO: 947698 - DNA, 33 bp, Homo sapien
taacaccctgtttaactaaagtatggatccaat

SEQ ID NO: 947699 - DNA, 33 bp, Homo sapien
cacatcctgtttcaagcacgttctctccctgtg

SEQ ID NO: 947700 - DNA, 33 bp, Homo sapien
cacatcctgtttcaagtacgttctctccctgtg

SEQ ID NO: 947701 - DNA, 33 bp, Homo sapien
ccttggtgatttcaccacagtctaagggctggc

SEQ ID NO: 947702 - DNA, 33 bp, Homo sapien
ccttggtgatttcaccgcagtctaagggctggc

SEQ ID NO: 947703 - DNA, 33 bp, Homo sapien
catgctcagggtgaaaaagccccatgctgcaca

SEQ ID NO: 947704 - DNA, 33 bp, Homo sapien
catgctcagggtgaaagagccccatgctgcaca

SEQ ID NO: 947705 - DNA, 33 bp, Homo sapien
aatctggtgtacttagcatctgctcacagatgt

SEQ ID NO: 947706 - DNA, 33 bp, Homo sapien
aatctggtgtacttagtatctgctcacagatgt

SEQ ID NO: 947707 - DNA, 33 bp, Homo sapien
tgctcaagatccaccacatatacctcattgtct

SEQ ID NO: 947708 - DNA, 33 bp, Homo sapien
tgctcaagatccaccatatatacctcattgtct

SEQ ID NO: 947709 - DNA, 33 bp, Homo sapien
agattgccacaaaacacggagcactgagatatg

SEQ ID NO: 947710 - DNA, 33 bp, Homo sapien
agattgccacaaaacatggagcactgagatatg

SEQ ID NO: 947711 - DNA, 33 bp, Homo sapien
gaggatgcaaaatatgcattttctgtagactgg

SEQ ID NO: 947712 - DNA, 33 bp, Homo sapien
gaggatgcaaaatatgtattttctgtagactgg

SEQ ID NO: 947713 - DNA, 33 bp, Homo sapien
ctcttttcaagtcagacaaggcaatcttgcatc

SEQ ID NO: 947714 - DNA, 33 bp, Homo sapien
ctcttttcaagtcagataaggcaatcttgcatc

SEQ ID NO: 947715 - DNA, 33 bp, Homo sapien
taaagcactggaatcaaacaaacaggttcactt

SEQ ID NO: 947716 - DNA, 33 bp, Homo sapien
taaagcactggaatcacacaaacaggttcactt

SEQ ID NO: 947717 - DNA, 33 bp, Homo sapien
ctcatgaggaaagtgaagttcagagaaacaaaa

SEQ ID NO: 947718 - DNA, 33 bp, Homo sapien
ctcatgaggaaagtgaggttcagagaaacaaaa

SEQ ID NO: 947719 - DNA, 33 bp, Homo sapien
tagagaatgcatataaaaggactataaacatat

SEQ ID NO: 947720 - DNA, 33 bp, Homo sapien
tagagaatgcatataagaggactataaacatat

SEQ ID NO: 947721 - DNA, 33 bp, Homo sapien
ttgaatgaatgcaatacagtacaaagagcagac

SEQ ID NO: 947722 - DNA, 33 bp, Homo sapien
ttgaatgaatgcaatatagtacaaagagcagac

SEQ ID NO: 947723 - DNA, 33 bp, Homo sapien
tatctgttttgaagaacctttccttcatctgag

SEQ ID NO: 947724 - DNA, 33 bp, Homo sapien
tatctgttttgaagaatctttccttcatctgag

SEQ ID NO: 947725 - DNA, 33 bp, Homo sapien
tttcctttgaacaggagcttgtagaagaactta

SEQ ID NO: 947726 - DNA, 33 bp, Homo sapien
tttcctttgaacaggatcttgtagaagaactta

SEQ ID NO: 947727 - DNA, 33 bp, Homo sapien
accaggcctatcttcaagtggccagcaagagag

SEQ ID NO: 947728 - DNA, 33 bp, Homo sapien
accaggcctatcttcacgtggccagcaagagag

SEQ ID NO: 947729 - DNA, 33 bp, Homo sapien
ctggttattgggcagaagttgaaaccatttgga

SEQ ID NO: 947730 - DNA, 33 bp, Homo sapien
ctggttattgggcagaggttgaaaccatttgga

SEQ ID NO: 947731 - DNA, 33 bp, Homo sapien
aacacccagaggaccacgatcaattgttcaaag

SEQ ID NO: 947732 - DNA, 33 bp, Homo sapien
aacacccagaggaccatgatcaattgttcaaag

SEQ ID NO: 947733 - DNA, 33 bp, Homo sapien
tcattgaaaccatgaacagttatgagaggagta

SEQ ID NO: 947734 - DNA, 33 bp, Homo sapien
tcattgaaaccatgaagagttatgagaggagta

SEQ ID NO: 947735 - DNA, 33 bp, Homo sapien
tcaatcagcccaagaaccattccataaaatctc

SEQ ID NO: 947736 - DNA, 33 bp, Homo sapien
tcaatcagcccaagaagcattccataaaatctc

SEQ ID NO: 947737 - DNA, 33 bp, Homo sapien
taggaaaacttccaagcactgcgtcaaaacata

SEQ ID NO: 947738 - DNA, 33 bp, Homo sapien
taggaaaacttccaagtactgcgtcaaaacata

SEQ ID NO: 947739 - DNA, 33 bp, Homo sapien
tttggtgacaattcataaggaactcaccatatc

SEQ ID NO: 947740 - DNA, 33 bp, Homo sapien
tttggtgacaattcatgaggaactcaccatatc

SEQ ID NO: 947741 - DNA, 33 bp, Homo sapien
tatctctgctacatcacctgaagatttatattt

SEQ ID NO: 947742 - DNA, 33 bp, Homo sapien
tatctctgctacatcatctgaagatttatattt

SEQ ID NO: 947743 - DNA, 33 bp, Homo sapien
catgatttcatgcaacgcttaggggagtgatcc

SEQ ID NO: 947744 - DNA, 33 bp, Homo sapien
catgatttcatgcaactcttaggggagtgatcc

SEQ ID NO: 947745 - DNA, 33 bp, Homo sapien
ggaatatcctagtcagaattttggattattcgt

SEQ ID NO: 947746 - DNA, 33 bp, Homo sapien
ggaatatcctagtcaggattttggattattcgt

SEQ ID NO: 947747 - DNA, 33 bp, Homo sapien
gcaaaaacaccttaggcaagccatcgcctggca

SEQ ID NO: 947748 - DNA, 33 bp, Homo sapien
gcaaaaacaccttagggaagccatcgcctggca

SEQ ID NO: 947749 - DNA, 33 bp, Homo sapien
ttgtccaaggccaataccacggtgctcaagttg

SEQ ID NO: 947750 - DNA, 33 bp, Homo sapien
ttgtccaaggccaatagcacggtgctcaagttg

SEQ ID NO: 947751 - DNA, 33 bp, Homo sapien
caaaggaagaacttcaaagcagaaaaggcaatc

SEQ ID NO: 947752 - DNA, 33 bp, Homo sapien
caaaggaagaacttcatagcagaaaaggcaatc

SEQ ID NO: 947753 - DNA, 33 bp, Homo sapien
gccctctggacacaagaaattcactctggttta

SEQ ID NO: 947754 - DNA, 33 bp, Homo sapien
gccctctggacacaaggaattcactctggttta

SEQ ID NO: 947755 - DNA, 33 bp, Homo sapien
ctctggcataatgttacgagacaaggaagaaaa

SEQ ID NO: 947756 - DNA, 33 bp, Homo sapien
ctctggcataatgttatgagacaaggaagaaaa

SEQ ID NO: 947757 - DNA, 33 bp, Homo sapien
aacccctttccttgataaattcaccagtctcaa

SEQ ID NO: 947758 - DNA, 33 bp, Homo sapien
aacccctttccttgatgaattcaccagtctcaa

SEQ ID NO: 947759 - DNA, 33 bp, Homo sapien
agtgggtgctatggaccgaacgtctctcctcaa

SEQ ID NO: 947760 - DNA, 33 bp, Homo sapien
agtgggtgctatggactgaacgtctctcctcaa

SEQ ID NO: 947761 - DNA, 33 bp, Homo sapien
aagttaaatgtaagacacttctggacactgaag

SEQ ID NO: 947762 - DNA, 33 bp, Homo sapien
aagttaaatgtaagacgcttctggacactgaag

SEQ ID NO: 947763 - DNA, 33 bp, Homo sapien
gtggggccttcattacaggattagggcctgtct

SEQ ID NO: 947764 - DNA, 33 bp, Homo sapien
gtggggccttcattacgggattagggcctgtct

SEQ ID NO: 947765 - DNA, 33 bp, Homo sapien
gatcactacacaggcaatcaactacaatcttct

SEQ ID NO: 947766 - DNA, 33 bp, Homo sapien
gatcactacacaggcagtcaactacaatcttct

SEQ ID NO: 947767 - DNA, 33 bp, Homo sapien
tgaattaacaggtaaacaagggagttagtatac

SEQ ID NO: 947768 - DNA, 33 bp, Homo sapien
tgaattaacaggtaaagaagggagttagtatac

SEQ ID NO: 947769 - DNA, 33 bp, Homo sapien
gggatggaaccagagacgagtgatgtgctttta

SEQ ID NO: 947770 - DNA, 33 bp, Homo sapien
gggatggaaccagagatgagtgatgtgctttta

SEQ ID NO: 947771 - DNA, 33 bp, Homo sapien
cttagtgccttgaaacagtacaatacaaatgta

SEQ ID NO: 947772 - DNA, 33 bp, Homo sapien
cttagtgccttgaaacggtacaatacaaatgta

SEQ ID NO: 947773 - DNA, 33 bp, Homo sapien
gttatacccttccatagccatgcatttcaggac

SEQ ID NO: 947774 - DNA, 33 bp, Homo sapien
gttatacccttccatatccatgcatttcaggac

SEQ ID NO: 947775 - DNA, 33 bp, Homo sapien
atatcctttaatcatacgaagctagttagtgac

SEQ ID NO: 947776 - DNA, 33 bp, Homo sapien
atatcctttaatcatatgaagctagttagtgac

SEQ ID NO: 947777 - DNA, 33 bp, Homo sapien
aatgacacaccaattccagttgaaatatggaac

SEQ ID NO: 947778 - DNA, 33 bp, Homo sapien
aatgacacaccaattctagttgaaatatggaac

SEQ ID NO: 947779 - DNA, 33 bp, Homo sapien
agaagtttgcagtctaaacggggagaccaaaat

SEQ ID NO: 947780 - DNA, 33 bp, Homo sapien
agaagtttgcagtctagacggggagaccaaaat

SEQ ID NO: 947781 - DNA, 33 bp, Homo sapien
attcaaactcaatttccactatttcctgactga

SEQ ID NO: 947782 - DNA, 33 bp, Homo sapien
attcaaactcaatttctactatttcctgactga

SEQ ID NO: 947783 - DNA, 33 bp, Homo sapien
agaccaaatgattttacgacaaccagattgggt

SEQ ID NO: 947784 - DNA, 33 bp, Homo sapien
agaccaaatgattttaggacaaccagattgggt

SEQ ID NO: 947785 - DNA, 33 bp, Homo sapien
agtatcctcaacataactgcagagattcagtct

SEQ ID NO: 947786 - DNA, 33 bp, Homo sapien
agtatcctcaacataattgcagagattcagtct

SEQ ID NO: 947787 - DNA, 33 bp, Homo sapien
ttttctttaattctctaacttcgacttccttcc

SEQ ID NO: 947788 - DNA, 33 bp, Homo sapien
ttttctttaattctctgacttcgacttccttcc

SEQ ID NO: 947789 - DNA, 33 bp, Homo sapien
ttatgaaacccaaatacagatcaagtattgatc

SEQ ID NO: 947790 - DNA, 33 bp, Homo sapien
ttatgaaacccaaatatagatcaagtattgatc

SEQ ID NO: 947791 - DNA, 33 bp, Homo sapien
tgagtatacattttaacgaggtttgacaaatgt

SEQ ID NO: 947792 - DNA, 33 bp, Homo sapien
tgagtatacattttaatgaggtttgacaaatgt

SEQ ID NO: 947793 - DNA, 33 bp, Homo sapien
ctaaaccagatgctgacaacaaaattcacatta

SEQ ID NO: 947794 - DNA, 33 bp, Homo sapien
ctaaaccagatgctgataacaaaattcacatta

SEQ ID NO: 947795 - DNA, 33 bp, Homo sapien
gaaataatagctaccaagaaaagcagagtttaa

SEQ ID NO: 947796 - DNA, 33 bp, Homo sapien
gaaataatagctaccatgaaaagcagagtttaa

SEQ ID NO: 947797 - DNA, 33 bp, Homo sapien
aagtcctcactggttacgctaaagatgttggtc

SEQ ID NO: 947798 - DNA, 33 bp, Homo sapien
aagtcctcactggttatgctaaagatgttggtc

SEQ ID NO: 947799 - DNA, 33 bp, Homo sapien
gttatagtatagctaacgtgcaaaacagcaaac

SEQ ID NO: 947800 - DNA, 33 bp, Homo sapien
gttatagtatagctaatgtgcaaaacagcaaac

SEQ ID NO: 947801 - DNA, 33 bp, Homo sapien
tcagagtatacactaacaagttatcatgcttca

SEQ ID NO: 947802 - DNA, 33 bp, Homo sapien
tcagagtatacactaagaagttatcatgcttca

SEQ ID NO: 947803 - DNA, 33 bp, Homo sapien
aagaccctggatcttacgtgaatttgttttagc

SEQ ID NO: 947804 - DNA, 33 bp, Homo sapien
aagaccctggatcttatgtgaatttgttttagc

SEQ ID NO: 947805 - DNA, 33 bp, Homo sapien
catttacttatttgctgaatcctacaacataca

SEQ ID NO: 947806 - DNA, 33 bp, Homo sapien
catttacttatttgcttaatcctacaacataca

SEQ ID NO: 947807 - DNA, 33 bp, Homo sapien
tagagtgtgatgattaaccagaagtggagcaag

SEQ ID NO: 947808 - DNA, 33 bp, Homo sapien
tagagtgtgatgattagccagaagtggagcaag

SEQ ID NO: 947809 - DNA, 33 bp, Homo sapien
cagaatcacaagatctcaatagaggagagcaat

SEQ ID NO: 947810 - DNA, 33 bp, Homo sapien
cagaatcacaagatctgaatagaggagagcaat

SEQ ID NO: 947811 - DNA, 33 bp, Homo sapien
acaacctactactagcaagtagcctctaaagtg

SEQ ID NO: 947812 - DNA, 33 bp, Homo sapien
acaacctactactagcgagtagcctctaaagtg

SEQ ID NO: 947813 - DNA, 33 bp, Homo sapien
agaactcaggaagataggtttaccagtttatta

SEQ ID NO: 947814 - DNA, 33 bp, Homo sapien
agaactcaggaagatatgtttaccagtttatta

SEQ ID NO: 947815 - DNA, 33 bp, Homo sapien
ttgcagtaaagccacaaggtgttaaatgttctg

SEQ ID NO: 947816 - DNA, 33 bp, Homo sapien
ttgcagtaaagccacagggtgttaaatgttctg

SEQ ID NO: 947817 - DNA, 33 bp, Homo sapien
taattcaaagcaaaaaccagtcccatcaaaaag

SEQ ID NO: 947818 - DNA, 33 bp, Homo sapien
taattcaaagcaaaaatcagtcccatcaaaaag

SEQ ID NO: 947819 - DNA, 33 bp, Homo sapien
aagcaaaaaaatcacacaccctaggactaaacc

SEQ ID NO: 947820 - DNA, 33 bp, Homo sapien
aagcaaaaaaatcacataccctaggactaaacc

SEQ ID NO: 947821 - DNA, 33 bp, Homo sapien
aattagtctgcttgtaagaatggaaggttatta

SEQ ID NO: 947822 - DNA, 33 bp, Homo sapien
aattagtctgcttgtaggaatggaaggttatta

SEQ ID NO: 947823 - DNA, 33 bp, Homo sapien
tgcagatactgacaaacgtttgatcttttgtgt

SEQ ID NO: 947824 - DNA, 33 bp, Homo sapien
tgcagatactgacaaaggtttgatcttttgtgt

SEQ ID NO: 947825 - DNA, 33 bp, Homo sapien
tgctgcttgttcagaaagtgtgttcagaatcaa

SEQ ID NO: 947826 - DNA, 33 bp, Homo sapien
tgctgcttgttcagaaggtgtgttcagaatcaa

SEQ ID NO: 947827 - DNA, 33 bp, Homo sapien
ttggcttataaaaataccactaagttctgtcaa

SEQ ID NO: 947828 - DNA, 33 bp, Homo sapien
ttggcttataaaaatatcactaagttctgtcaa

SEQ ID NO: 947829 - DNA, 33 bp, Homo sapien
aagactactgggttataaaacagaagaggaaag

SEQ ID NO: 947830 - DNA, 33 bp, Homo sapien
aagactactgggttatgaaacagaagaggaaag

SEQ ID NO: 947831 - DNA, 33 bp, Homo sapien
tattatataaagaacaacgacacagtaaggcac

SEQ ID NO: 947832 - DNA, 33 bp, Homo sapien
tattatataaagaacaccgacacagtaaggcac

SEQ ID NO: 947833 - DNA, 33 bp, Homo sapien
ttgaaacagtttgttacgcagcaatcaataaat

SEQ ID NO: 947834 - DNA, 33 bp, Homo sapien
ttgaaacagtttgttatgcagcaatcaataaat

SEQ ID NO: 947835 - DNA, 33 bp, Homo sapien
cctcttttgcttcttacgagctattcttaaacc

SEQ ID NO: 947836 - DNA, 33 bp, Homo sapien
cctcttttgcttcttatgagctattcttaaacc

SEQ ID NO: 947837 - DNA, 33 bp, Homo sapien
ctatgaacataggtagaaacactttttatatgg

SEQ ID NO: 947838 - DNA, 33 bp, Homo sapien
ctatgaacataggtaggaacactttttatatgg

SEQ ID NO: 947839 - DNA, 33 bp, Homo sapien
agatgcaggttgacacaggcttgagttccaagg

SEQ ID NO: 947840 - DNA, 33 bp, Homo sapien
agatgcaggttgacacgggcttgagttccaagg

SEQ ID NO: 947841 - DNA, 33 bp, Homo sapien
tttgttgctctgacaagccctctggcaaaaaag

SEQ ID NO: 947842 - DNA, 33 bp, Homo sapien
tttgttgctctgacaatccctctggcaaaaaag

SEQ ID NO: 947843 - DNA, 33 bp, Homo sapien
tactgacataaaatcacgtggtagagtcaagtc

SEQ ID NO: 947844 - DNA, 33 bp, Homo sapien
tactgacataaaatcatgtggtagagtcaagtc

SEQ ID NO: 947845 - DNA, 33 bp, Homo sapien
atctttcatattgtccaatgcaaagttgtttta

SEQ ID NO: 947846 - DNA, 33 bp, Homo sapien
atctttcatattgtccgatgcaaagttgtttta

SEQ ID NO: 947847 - DNA, 33 bp, Homo sapien
tactgggtattgtgaacggtaacacaatccact

SEQ ID NO: 947848 - DNA, 33 bp, Homo sapien
tactgggtattgtgaatggtaacacaatccact

SEQ ID NO: 947849 - DNA, 33 bp, Homo sapien
aatacatataattcaccgagctctacacttttt

SEQ ID NO: 947850 - DNA, 33 bp, Homo sapien
aatacatataattcactgagctctacacttttt

SEQ ID NO: 947851 - DNA, 33 bp, Homo sapien
tggaggactggaggaccgacactatctgacttc

SEQ ID NO: 947852 - DNA, 33 bp, Homo sapien
tggaggactggaggacggacactatctgacttc

SEQ ID NO: 947853 - DNA, 33 bp, Homo sapien
gtatgacctctccccaacttctccttgtcgtcc

SEQ ID NO: 947854 - DNA, 33 bp, Homo sapien
gtatgacctctccccatcttctccttgtcgtcc

SEQ ID NO: 947855 - DNA, 33 bp, Homo sapien
acacaggactgctctccactcggggggtcaaca

SEQ ID NO: 947856 - DNA, 33 bp, Homo sapien
acacaggactgctctctactcggggggtcaaca

SEQ ID NO: 947857 - DNA, 33 bp, Homo sapien
ctttggaatacaaaagcatttcaaaagattcag

SEQ ID NO: 947858 - DNA, 33 bp, Homo sapien
ctttggaatacaaaaggatttcaaaagattcag

SEQ ID NO: 947859 - DNA, 33 bp, Homo sapien
cataaaggtctttgaagccacacatttcaggcc

SEQ ID NO: 947860 - DNA, 33 bp, Homo sapien
cataaaggtctttgaatccacacatttcaggcc

SEQ ID NO: 947861 - DNA, 33 bp, Homo sapien
ccctgcgggctctcccaattctgcaagagaggc

SEQ ID NO: 947862 - DNA, 33 bp, Homo sapien
ccctgcgggctctccccattctgcaagagaggc

SEQ ID NO: 947863 - DNA, 33 bp, Homo sapien
ctttaaatcagccaaacatttttttaatctctc

SEQ ID NO: 947864 - DNA, 33 bp, Homo sapien
ctttaaatcagccaaatatttttttaatctctc

SEQ ID NO: 947865 - DNA, 33 bp, Homo sapien
catcaggaataatagcgcccatcatagggttgt

SEQ ID NO: 947866 - DNA, 33 bp, Homo sapien
catcaggaataatagctcccatcatagggttgt

SEQ ID NO: 947867 - DNA, 33 bp, Homo sapien
caatacagctctacacagaagtaggtgctgacc

SEQ ID NO: 947868 - DNA, 33 bp, Homo sapien
caatacagctctacacggaagtaggtgctgacc

SEQ ID NO: 947869 - DNA, 33 bp, Homo sapien
ggactaagacaaggagccacaaatctgcaattc

SEQ ID NO: 947870 - DNA, 33 bp, Homo sapien
ggactaagacaaggaggcacaaatctgcaattc

SEQ ID NO: 947871 - DNA, 33 bp, Homo sapien
gccctagctggtcacaatgaagagaaatttctc

SEQ ID NO: 947872 - DNA, 33 bp, Homo sapien
gccctagctggtcacagtgaagagaaatttctc

SEQ ID NO: 947873 - DNA, 33 bp, Homo sapien
tgctcaaatgaccatacggcactaggaaagtct

SEQ ID NO: 947874 - DNA, 33 bp, Homo sapien
tgctcaaatgaccatagggcactaggaaagtct

SEQ ID NO: 947875 - DNA, 33 bp, Homo sapien
tttctcaaggaaactgaaatagcatattgtttt

SEQ ID NO: 947876 - DNA, 33 bp, Homo sapien
tttctcaaggaaactggaatagcatattgtttt

SEQ ID NO: 947877 - DNA, 33 bp, Homo sapien
gttatgtagccaaggggaattaaggttgcagat

SEQ ID NO: 947878 - DNA, 33 bp, Homo sapien
gttatgtagccaagggtaattaaggttgcagat

SEQ ID NO: 947879 - DNA, 33 bp, Homo sapien
aggggggctatccatacatggtaaaagataaag

SEQ ID NO: 947880 - DNA, 33 bp, Homo sapien
aggggggctatccatagatggtaaaagataaag

SEQ ID NO: 947881 - DNA, 33 bp, Homo sapien
ttaggaatttatcgtacgtatcactgtttgaga

SEQ ID NO: 947882 - DNA, 33 bp, Homo sapien
ttaggaatttatcgtatgtatcactgtttgaga

SEQ ID NO: 947883 - DNA, 33 bp, Homo sapien
ggagggtctgacccagaaaggcaaatctcatct

SEQ ID NO: 947884 - DNA, 33 bp, Homo sapien
ggagggtctgacccaggaaggcaaatctcatct

SEQ ID NO: 947885 - DNA, 33 bp, Homo sapien
ggaagacaaagtgacaatcgtgaccagaagctt

SEQ ID NO: 947886 - DNA, 33 bp, Homo sapien
ggaagacaaagtgacactcgtgaccagaagctt

SEQ ID NO: 947887 - DNA, 33 bp, Homo sapien
aagaaaaagtataaaaaagacatgcacctttgc

SEQ ID NO: 947888 - DNA, 33 bp, Homo sapien
aagaaaaagtataaaagagacatgcacctttgc

SEQ ID NO: 947889 - DNA, 33 bp, Homo sapien
gtggcggggtcacagaagacttgggttttggaa

SEQ ID NO: 947890 - DNA, 33 bp, Homo sapien
gtggcggggtcacagaggacttgggttttggaa

SEQ ID NO: 947891 - DNA, 33 bp, Homo sapien
ggggcccagaggcaaggcttctcaggtggcctg

SEQ ID NO: 947892 - DNA, 33 bp, Homo sapien
ggggcccagaggcaagtcttctcaggtggcctg

SEQ ID NO: 947893 - DNA, 33 bp, Homo sapien
ggtctagaaaaaagaacgtatgactctaagatg

SEQ ID NO: 947894 - DNA, 33 bp, Homo sapien
ggtctagaaaaaagaaggtatgactctaagatg

SEQ ID NO: 947895 - DNA, 33 bp, Homo sapien
cacaatgataccacccagaggtaaccacggtga

SEQ ID NO: 947896 - DNA, 33 bp, Homo sapien
cacaatgataccaccccgaggtaaccacggtga

SEQ ID NO: 947897 - DNA, 33 bp, Homo sapien
taagctatataagcaactagtgcagactccctt

SEQ ID NO: 947898 - DNA, 33 bp, Homo sapien
taagctatataagcaagtagtgcagactccctt

SEQ ID NO: 947899 - DNA, 33 bp, Homo sapien
tatttccctatgcaaaaggttgatgacacggtg

SEQ ID NO: 947900 - DNA, 33 bp, Homo sapien
tatttccctatgcaaagggttgatgacacggtg

SEQ ID NO: 947901 - DNA, 33 bp, Homo sapien
caggaacacgaacagacagatggctgaggtgtg

SEQ ID NO: 947902 - DNA, 33 bp, Homo sapien
caggaacacgaacagatagatggctgaggtgtg

SEQ ID NO: 947903 - DNA, 33 bp, Homo sapien
ggctataagaggtcaacggcatggctccggctt

SEQ ID NO: 947904 - DNA, 33 bp, Homo sapien
ggctataagaggtcaatggcatggctccggctt

SEQ ID NO: 947905 - DNA, 33 bp, Homo sapien
tggctccggcttaccaatctagccactgtgcct

SEQ ID NO: 947906 - DNA, 33 bp, Homo sapien
tggctccggcttaccagtctagccactgtgcct

SEQ ID NO: 947907 - DNA, 33 bp, Homo sapien
ctgaatgtcagcagcacagttgcgcctgctacg

SEQ ID NO: 947908 - DNA, 33 bp, Homo sapien
ctgaatgtcagcagcagagttgcgcctgctacg

SEQ ID NO: 947909 - DNA, 33 bp, Homo sapien
ccctcacccacttgtaactgtgaatacgcaggt

SEQ ID NO: 947910 - DNA, 33 bp, Homo sapien
ccctcacccacttgtatctgtgaatacgcaggt

SEQ ID NO: 947911 - DNA, 33 bp, Homo sapien
tcagctatcaggtcagcaggtgtcggtagctta

SEQ ID NO: 947912 - DNA, 33 bp, Homo sapien
tcagctatcaggtcagtaggtgtcggtagctta

SEQ ID NO: 947913 - DNA, 33 bp, Homo sapien
tgtccgaaacaccgaacagatatttcaagcacc

SEQ ID NO: 947914 - DNA, 33 bp, Homo sapien
tgtccgaaacaccgaagagatatttcaagcacc

SEQ ID NO: 947915 - DNA, 33 bp, Homo sapien
agtccttaatgacatacccacagttctagtcat

SEQ ID NO: 947916 - DNA, 33 bp, Homo sapien
agtccttaatgacatatccacagttctagtcat

SEQ ID NO: 947917 - DNA, 33 bp, Homo sapien
agcagaggcatttacacggtcagagtgctgctt

SEQ ID NO: 947918 - DNA, 33 bp, Homo sapien
agcagaggcatttacatggtcagagtgctgctt

SEQ ID NO: 947919 - DNA, 33 bp, Homo sapien
ggcagatatctttacgccaggatttaccaatgt

SEQ ID NO: 947920 - DNA, 33 bp, Homo sapien
ggcagatatctttacgtcaggatttaccaatgt

SEQ ID NO: 947921 - DNA, 33 bp, Homo sapien
ttgtgcaataagcaagccgtgtgatgctggtct

SEQ ID NO: 947922 - DNA, 33 bp, Homo sapien
ttgtgcaataagcaagtcgtgtgatgctggtct

SEQ ID NO: 947923 - DNA, 33 bp, Homo sapien
ctgtgcatggcctgtgaaatggatgagtccagg

SEQ ID NO: 947924 - DNA, 33 bp, Homo sapien
ctgtgcatggcctgtgtaatggatgagtccagg

SEQ ID NO: 947925 - DNA, 33 bp, Homo sapien
ccttgtgtaattattaactcttaggctcttcat

SEQ ID NO: 947926 - DNA, 33 bp, Homo sapien
ccttgtgtaattattacctcttaggctcttcat

SEQ ID NO: 947927 - DNA, 33 bp, Homo sapien
ccagctctgtattaaccaccaagctgcaggccc

SEQ ID NO: 947928 - DNA, 33 bp, Homo sapien
ccagctctgtattaactaccaagctgcaggccc

SEQ ID NO: 947929 - DNA, 33 bp, Homo sapien
ggcttagagatgcaaacagactcagggagagaa

SEQ ID NO: 947930 - DNA, 33 bp, Homo sapien
ggcttagagatgcaaagagactcagggagagaa

SEQ ID NO: 947931 - DNA, 33 bp, Homo sapien
tcccaagtctgggagagtccgaaatcacttcca

SEQ ID NO: 947932 - DNA, 33 bp, Homo sapien
tcccaagtctgggagattccgaaatcacttcca

SEQ ID NO: 947933 - DNA, 33 bp, Homo sapien
tgtcaggattaaatgacgtaatgcatgaaaact

SEQ ID NO: 947934 - DNA, 33 bp, Homo sapien
tgtcaggattaaatgatgtaatgcatgaaaact

SEQ ID NO: 947935 - DNA, 33 bp, Homo sapien
aaatacagcacgataaaaacacactactctatt

SEQ ID NO: 947936 - DNA, 33 bp, Homo sapien
aaatacagcacgataagaacacactactctatt

SEQ ID NO: 947937 - DNA, 33 bp, Homo sapien
gactgcctgataaaccaatggtgtcagtgtgag

SEQ ID NO: 947938 - DNA, 33 bp, Homo sapien
gactgcctgataaaccgatggtgtcagtgtgag

SEQ ID NO: 947939 - DNA, 33 bp, Homo sapien
taaaggaaagtcaaatcatcccaaagatgtgac

SEQ ID NO: 947940 - DNA, 33 bp, Homo sapien
taaaggaaagtcaaattatcccaaagatgtgac

SEQ ID NO: 947941 - DNA, 33 bp, Homo sapien
ggcttaccctcctttcaaggcaacacaaggcag

SEQ ID NO: 947942 - DNA, 33 bp, Homo sapien
ggcttaccctcctttcgaggcaacacaaggcag

SEQ ID NO: 947943 - DNA, 33 bp, Homo sapien
acctgatgatgccgtaggtgggcaataattatt

SEQ ID NO: 947944 - DNA, 33 bp, Homo sapien
acctgatgatgccgtatgtgggcaataattatt

SEQ ID NO: 947945 - DNA, 33 bp, Homo sapien
cagtccagtcgtttaccaactttccattttgtt

SEQ ID NO: 947946 - DNA, 33 bp, Homo sapien
cagtccagtcgtttactaactttccattttgtt

SEQ ID NO: 947947 - DNA, 33 bp, Homo sapien
tgaaggaacagcaataactgtaaggatcaccgg

SEQ ID NO: 947948 - DNA, 33 bp, Homo sapien
tgaaggaacagcaatatctgtaaggatcaccgg

SEQ ID NO: 947949 - DNA, 33 bp, Homo sapien
ttagagttgtatggtcacagaattatacagtct

SEQ ID NO: 947950 - DNA, 33 bp, Homo sapien
ttagagttgtatggtcccagaattatacagtct

SEQ ID NO: 947951 - DNA, 33 bp, Homo sapien
aaagtcttaagcataaactccaaagtcctctga

SEQ ID NO: 947952 - DNA, 33 bp, Homo sapien
aaagtcttaagcataagctccaaagtcctctga

SEQ ID NO: 947953 - DNA, 33 bp, Homo sapien
atccaaaatgcaatccacacgtattctgggagg

SEQ ID NO: 947954 - DNA, 33 bp, Homo sapien
atccaaaatgcaatcctcacgtattctgggagg

SEQ ID NO: 947955 - DNA, 33 bp, Homo sapien
agtagcaaattcaaaaaagcatgtaccaggcac

SEQ ID NO: 947956 - DNA, 33 bp, Homo sapien
agtagcaaattcaaaatagcatgtaccaggcac

SEQ ID NO: 947957 - DNA, 33 bp, Homo sapien
tgggaggctagggcgacaagatccctagagccc

SEQ ID NO: 947958 - DNA, 33 bp, Homo sapien
tgggaggctagggcgagaagatccctagagccc

SEQ ID NO: 947959 - DNA, 33 bp, Homo sapien
ctagggacttctcagcccttgtcctgggatcta

SEQ ID NO: 947960 - DNA, 33 bp, Homo sapien
ctagggacttctcagcgcttgtcctgggatcta

SEQ ID NO: 947961 - DNA, 33 bp, Homo sapien
taatcaacttgattcccctggtgctaaagggaa

SEQ ID NO: 947962 - DNA, 33 bp, Homo sapien
taatcaacttgattcctctggtgctaaagggaa

SEQ ID NO: 947963 - DNA, 33 bp, Homo sapien
tcagtgaagtcaaataacttgttcaagaccatg

SEQ ID NO: 947964 - DNA, 33 bp, Homo sapien
tcagtgaagtcaaatagcttgttcaagaccatg

SEQ ID NO: 947965 - DNA, 33 bp, Homo sapien
tagcaatctctgtttacacttcctgctagcagt

SEQ ID NO: 947966 - DNA, 33 bp, Homo sapien
tagcaatctctgtttatacttcctgctagcagt

SEQ ID NO: 947967 - DNA, 33 bp, Homo sapien
aatgttcagtggggcggacaggcacgtaactgg

SEQ ID NO: 947968 - DNA, 33 bp, Homo sapien
aatgttcagtggggcgtacaggcacgtaactgg

SEQ ID NO: 947969 - DNA, 33 bp, Homo sapien
tttttttgagatctgaaaaaaagacttaaaagg

SEQ ID NO: 947970 - DNA, 33 bp, Homo sapien
tttttttgagatctgataaaaagacttaaaagg

SEQ ID NO: 947971 - DNA, 33 bp, Homo sapien
ctctagaggatcagcacggaatttggccaaaac

SEQ ID NO: 947972 - DNA, 33 bp, Homo sapien
ctctagaggatcagcatggaatttggccaaaac

SEQ ID NO: 947973 - DNA, 33 bp, Homo sapien
gtttcttgaatgacaacgactgacacctgggtc

SEQ ID NO: 947974 - DNA, 33 bp, Homo sapien
gtttcttgaatgacaatgactgacacctgggtc

SEQ ID NO: 947975 - DNA, 33 bp, Homo sapien
tagtttagggttggaacgaaacttacactttaa

SEQ ID NO: 947976 - DNA, 33 bp, Homo sapien
tagtttagggttggaatgaaacttacactttaa

SEQ ID NO: 947977 - DNA, 33 bp, Homo sapien
tcatactccaaaagccaattcaattatcagccg

SEQ ID NO: 947978 - DNA, 33 bp, Homo sapien
tcatactccaaaagccgattcaattatcagccg

SEQ ID NO: 947979 - DNA, 33 bp, Homo sapien
tgaccctatgctctaacaagagtgtgtgttcag

SEQ ID NO: 947980 - DNA, 33 bp, Homo sapien
tgaccctatgctctaagaagagtgtgtgttcag

SEQ ID NO: 947981 - DNA, 33 bp, Homo sapien
agattctggaaggtcacagactgtcgaatactt

SEQ ID NO: 947982 - DNA, 33 bp, Homo sapien
agattctggaaggtcagagactgtcgaatactt

SEQ ID NO: 947983 - DNA, 33 bp, Homo sapien
ggactatatttctagaccagccacatgatgcaa

SEQ ID NO: 947984 - DNA, 33 bp, Homo sapien
ggactatatttctagagcagccacatgatgcaa

SEQ ID NO: 947985 - DNA, 33 bp, Homo sapien
atggcagagtctttcaagcagcatttggaatta

SEQ ID NO: 947986 - DNA, 33 bp, Homo sapien
atggcagagtctttcaggcagcatttggaatta

SEQ ID NO: 947987 - DNA, 33 bp, Homo sapien
gactctttccatttcccacacgcacttccaaag

SEQ ID NO: 947988 - DNA, 33 bp, Homo sapien
gactctttccatttcctacacgcacttccaaag

SEQ ID NO: 947989 - DNA, 33 bp, Homo sapien
ctcatccccagtgcctcagaacgtggccttgtt

SEQ ID NO: 947990 - DNA, 33 bp, Homo sapien
ctcatccccagtgcctgagaacgtggccttgtt

SEQ ID NO: 947991 - DNA, 33 bp, Homo sapien
ttggagaacacagttccagccgtaacagggaga

SEQ ID NO: 947992 - DNA, 33 bp, Homo sapien
ttggagaacacagttcgagccgtaacagggaga

SEQ ID NO: 947993 - DNA, 33 bp, Homo sapien
gaatcagcgtgtaaaacacagattaactggaga

SEQ ID NO: 947994 - DNA, 33 bp, Homo sapien
gaatcagcgtgtaaaagacagattaactggaga

SEQ ID NO: 947995 - DNA, 33 bp, Homo sapien
ccagcatcaactgaaaactctgaagtccagagt

SEQ ID NO: 947996 - DNA, 33 bp, Homo sapien
ccagcatcaactgaaacctctgaagtccagagt

SEQ ID NO: 947997 - DNA, 33 bp, Homo sapien
taatttcctcatcaaaaagtcacttggctacac

SEQ ID NO: 947998 - DNA, 33 bp, Homo sapien
taatttcctcatcaaatagtcacttggctacac

SEQ ID NO: 947999 - DNA, 33 bp, Homo sapien
tcttccacagctttaccaaaatcacatttaaag

SEQ ID NO: 948000 - DNA, 33 bp, Homo sapien
tcttccacagctttacgaaaatcacatttaaag

SEQ ID NO: 948001 - DNA, 33 bp, Homo sapien
ggggttttgactggaaccatcttgtagctatgt

SEQ ID NO: 948002 - DNA, 33 bp, Homo sapien
ggggttttgactggaatcatcttgtagctatgt

SEQ ID NO: 948003 - DNA, 33 bp, Homo sapien
aaaatgacagaacccacgtgtattcggcatata

SEQ ID NO: 948004 - DNA, 33 bp, Homo sapien
aaaatgacagaacccatgtgtattcggcatata

SEQ ID NO: 948005 - DNA, 33 bp, Homo sapien
aacttcaaaactgaccaatcaaagtcaataggg

SEQ ID NO: 948006 - DNA, 33 bp, Homo sapien
aacttcaaaactgacccatcaaagtcaataggg

SEQ ID NO: 948007 - DNA, 33 bp, Homo sapien
catgtatacacgcacactgcatttgttttactt

SEQ ID NO: 948008 - DNA, 33 bp, Homo sapien
catgtatacacgcacattgcatttgttttactt

SEQ ID NO: 948009 - DNA, 33 bp, Homo sapien
caggggctcacaataactcctgagcctgaagat

SEQ ID NO: 948010 - DNA, 33 bp, Homo sapien
caggggctcacaataagtcctgagcctgaagat

SEQ ID NO: 948011 - DNA, 33 bp, Homo sapien
tgcagccagatgaaaacgtatgtgataggagtg

SEQ ID NO: 948012 - DNA, 33 bp, Homo sapien
tgcagccagatgaaaatgtatgtgataggagtg

SEQ ID NO: 948013 - DNA, 33 bp, Homo sapien
ttctgtttccaaatacaagatgctgtaagcctg

SEQ ID NO: 948014 - DNA, 33 bp, Homo sapien
ttctgtttccaaatacgagatgctgtaagcctg

SEQ ID NO: 948015 - DNA, 33 bp, Homo sapien
ttgttagttctggaaacttagtcaatttgcatc

SEQ ID NO: 948016 - DNA, 33 bp, Homo sapien
ttgttagttctggaaatttagtcaatttgcatc

SEQ ID NO: 948017 - DNA, 33 bp, Homo sapien
aaagtttgttgctttcactgaaaagagtgggat

SEQ ID NO: 948018 - DNA, 33 bp, Homo sapien
aaagtttgttgctttcgctgaaaagagtgggat

SEQ ID NO: 948019 - DNA, 33 bp, Homo sapien
cacttatttcctaactcagagactcaggtcata

SEQ ID NO: 948020 - DNA, 33 bp, Homo sapien
cacttatttcctaacttagagactcaggtcata

SEQ ID NO: 948021 - DNA, 33 bp, Homo sapien
ttgcaatgccattatacagaaaacagaaataca

SEQ ID NO: 948022 - DNA, 33 bp, Homo sapien
ttgcaatgccattatagagaaaacagaaataca

SEQ ID NO: 948023 - DNA, 33 bp, Homo sapien
acacaacttccaaatacgatactacagaatata

SEQ ID NO: 948024 - DNA, 33 bp, Homo sapien
acacaacttccaaatatgatactacagaatata

SEQ ID NO: 948025 - DNA, 33 bp, Homo sapien
catatcttggtattagaaaaagagaggaaagtg

SEQ ID NO: 948026 - DNA, 33 bp, Homo sapien
catatcttggtattaggaaaagagaggaaagtg

SEQ ID NO: 948027 - DNA, 33 bp, Homo sapien
tgttctctagtgaaggacatgttggcttggtgg

SEQ ID NO: 948028 - DNA, 33 bp, Homo sapien
tgttctctagtgaagggcatgttggcttggtgg

SEQ ID NO: 948029 - DNA, 33 bp, Homo sapien
agaagcgatgggaatgaaagctgcgtaaatgca

SEQ ID NO: 948030 - DNA, 33 bp, Homo sapien
agaagcgatgggaatggaagctgcgtaaatgca

SEQ ID NO: 948031 - DNA, 33 bp, Homo sapien
accacagcaaccatgtaaacggggctgcgccaa

SEQ ID NO: 948032 - DNA, 33 bp, Homo sapien
accacagcaaccatgtgaacggggctgcgccaa

SEQ ID NO: 948033 - DNA, 33 bp, Homo sapien
atgactggatagccaagagcgctgtaatgctta

SEQ ID NO: 948034 - DNA, 33 bp, Homo sapien
atgactggatagccaatagcgctgtaatgctta

SEQ ID NO: 948035 - DNA, 33 bp, Homo sapien
tggaggcctagcagacgggttgctaatacagtt

SEQ ID NO: 948036 - DNA, 33 bp, Homo sapien
tggaggcctagcagactggttgctaatacagtt

SEQ ID NO: 948037 - DNA, 33 bp, Homo sapien
agtctttagcaagaaaagctgtaaacaaatttc

SEQ ID NO: 948038 - DNA, 33 bp, Homo sapien
agtctttagcaagaaaggctgtaaacaaatttc

SEQ ID NO: 948039 - DNA, 33 bp, Homo sapien
atttttggcttcctgaatagactataaactcct

SEQ ID NO: 948040 - DNA, 33 bp, Homo sapien
atttttggcttcctgactagactataaactcct

SEQ ID NO: 948041 - DNA, 33 bp, Homo sapien
tcagcagctgatgaacggatacaatgttgttgg

SEQ ID NO: 948042 - DNA, 33 bp, Homo sapien
tcagcagctgatgaactgatacaatgttgttgg

SEQ ID NO: 948043 - DNA, 33 bp, Homo sapien
acccaaatcctggcaccaacagcatcgacttct

SEQ ID NO: 948044 - DNA, 33 bp, Homo sapien
acccaaatcctggcacgaacagcatcgacttct

SEQ ID NO: 948045 - DNA, 33 bp, Homo sapien
atggaatttaataatacgtatcaagtagcagtt

SEQ ID NO: 948046 - DNA, 33 bp, Homo sapien
atggaatttaataataggtatcaagtagcagtt

SEQ ID NO: 948047 - DNA, 33 bp, Homo sapien
ttgtatcagagaacaactgcatggaataaactt

SEQ ID NO: 948048 - DNA, 33 bp, Homo sapien
ttgtatcagagaacaagtgcatggaataaactt

SEQ ID NO: 948049 - DNA, 33 bp, Homo sapien
tacaagtacatctcctcagatcacgtgactttt

SEQ ID NO: 948050 - DNA, 33 bp, Homo sapien
tacaagtacatctccttagatcacgtgactttt

SEQ ID NO: 948051 - DNA, 33 bp, Homo sapien
aggttctgggcagatactaacagctgagggaag

SEQ ID NO: 948052 - DNA, 33 bp, Homo sapien
aggttctgggcagatattaacagctgagggaag

SEQ ID NO: 948053 - DNA, 33 bp, Homo sapien
ctggattctttgtccacgctaacaccatcacat

SEQ ID NO: 948054 - DNA, 33 bp, Homo sapien
ctggattctttgtccatgctaacaccatcacat

SEQ ID NO: 948055 - DNA, 33 bp, Homo sapien
gctatcaaaaagacccggaaatgtatttgcttg

SEQ ID NO: 948056 - DNA, 33 bp, Homo sapien
gctatcaaaaagaccctgaaatgtatttgcttg

SEQ ID NO: 948057 - DNA, 33 bp, Homo sapien
gcatgattattggagaacaccaggttgtcagtg

SEQ ID NO: 948058 - DNA, 33 bp, Homo sapien
gcatgattattggagagcaccaggttgtcagtg

SEQ ID NO: 948059 - DNA, 33 bp, Homo sapien
tagggtgccagtgtcaaaaaccagacacggatg

SEQ ID NO: 948060 - DNA, 33 bp, Homo sapien
tagggtgccagtgtcagaaaccagacacggatg

SEQ ID NO: 948061 - DNA, 33 bp, Homo sapien
ctgaggaccgtgaagacagcttgaaatagataa

SEQ ID NO: 948062 - DNA, 33 bp, Homo sapien
ctgaggaccgtgaagatagcttgaaatagataa

SEQ ID NO: 948063 - DNA, 33 bp, Homo sapien
acctaaacaactgtgcaactttcttttgcagtg

SEQ ID NO: 948064 - DNA, 33 bp, Homo sapien
acctaaacaactgtgcgactttcttttgcagtg

SEQ ID NO: 948065 - DNA, 33 bp, Homo sapien
gtactctggatccactcacattcctaatcagac

SEQ ID NO: 948066 - DNA, 33 bp, Homo sapien
gtactctggatccacttacattcctaatcagac

SEQ ID NO: 948067 - DNA, 33 bp, Homo sapien
atttgtatcctactcaaggtcatcgccaaggtc

SEQ ID NO: 948068 - DNA, 33 bp, Homo sapien
atttgtatcctactcagggtcatcgccaaggtc

SEQ ID NO: 948069 - DNA, 33 bp, Homo sapien
aacagagtctccgtcactcagaagctagaggca

SEQ ID NO: 948070 - DNA, 33 bp, Homo sapien
aacagagtctccgtcagtcagaagctagaggca

SEQ ID NO: 948071 - DNA, 33 bp, Homo sapien
gtgcagagagtgaacacaggaggtcggatggca

SEQ ID NO: 948072 - DNA, 33 bp, Homo sapien
gtgcagagagtgaacagaggaggtcggatggca

SEQ ID NO: 948073 - DNA, 33 bp, Homo sapien
aggtcagatattacacaaaatgttaatgtgatt

SEQ ID NO: 948074 - DNA, 33 bp, Homo sapien
aggtcagatattacacgaaatgttaatgtgatt

SEQ ID NO: 948075 - DNA, 33 bp, Homo sapien
gagaactgttaagccacgcttgttaatagcctc

SEQ ID NO: 948076 - DNA, 33 bp, Homo sapien
gagaactgttaagccatgcttgttaatagcctc

SEQ ID NO: 948077 - DNA, 33 bp, Homo sapien
tagcctgaagagtgtaccatctgattttttagg

SEQ ID NO: 948078 - DNA, 33 bp, Homo sapien
tagcctgaagagtgtagcatctgattttttagg

SEQ ID NO: 948079 - DNA, 33 bp, Homo sapien
tacacatttcagggaaaccacttgccaagaata

SEQ ID NO: 948080 - DNA, 33 bp, Homo sapien
tacacatttcagggaatccacttgccaagaata

SEQ ID NO: 948081 - DNA, 33 bp, Homo sapien
gagttcaccgcccttcaactctgagcagtgcag

SEQ ID NO: 948082 - DNA, 33 bp, Homo sapien
gagttcaccgcccttcgactctgagcagtgcag

SEQ ID NO: 948083 - DNA, 33 bp, Homo sapien
actgctgtcgctttggcaaatgaccaatgtcaa

SEQ ID NO: 948084 - DNA, 33 bp, Homo sapien
actgctgtcgctttgggaaatgaccaatgtcaa

SEQ ID NO: 948085 - DNA, 33 bp, Homo sapien
ttgccaggacattggccgacatggtctctcact

SEQ ID NO: 948086 - DNA, 33 bp, Homo sapien
ttgccaggacattggctgacatggtctctcact

SEQ ID NO: 948087 - DNA, 33 bp, Homo sapien
accctaagtaatccaaaaggcatctctcaagaa

SEQ ID NO: 948088 - DNA, 33 bp, Homo sapien
accctaagtaatccaacaggcatctctcaagaa

SEQ ID NO: 948089 - DNA, 33 bp, Homo sapien
cagaaactatttcccacatgccatcctagcacc

SEQ ID NO: 948090 - DNA, 33 bp, Homo sapien
cagaaactatttcccagatgccatcctagcacc

SEQ ID NO: 948091 - DNA, 33 bp, Homo sapien
atacagaaccagaaggaaataagtacaactgca

SEQ ID NO: 948092 - DNA, 33 bp, Homo sapien
atacagaaccagaaggcaataagtacaactgca

SEQ ID NO: 948093 - DNA, 33 bp, Homo sapien
tcagcacacctgcttcaaatcctacagcgtggt

SEQ ID NO: 948094 - DNA, 33 bp, Homo sapien
tcagcacacctgcttccaatcctacagcgtggt

SEQ ID NO: 948095 - DNA, 33 bp, Homo sapien
cctctctaggactcctcaataggccgaagaaaa

SEQ ID NO: 948096 - DNA, 33 bp, Homo sapien
cctctctaggactcctgaataggccgaagaaaa

SEQ ID NO: 948097 - DNA, 33 bp, Homo sapien
gcatgaatgctgatccactttctctcatagtga

SEQ ID NO: 948098 - DNA, 33 bp, Homo sapien
gcatgaatgctgatccgctttctctcatagtga

SEQ ID NO: 948099 - DNA, 33 bp, Homo sapien
attgctaattttataacgcggaaactaccacag

SEQ ID NO: 948100 - DNA, 33 bp, Homo sapien
attgctaattttataatgcggaaactaccacag

SEQ ID NO: 948101 - DNA, 33 bp, Homo sapien
ctagtaaaacattccaaagtatctcaacctagt

SEQ ID NO: 948102 - DNA, 33 bp, Homo sapien
ctagtaaaacattccacagtatctcaacctagt

SEQ ID NO: 948103 - DNA, 33 bp, Homo sapien
cttccaagcactgttaggacctcctagttgtag

SEQ ID NO: 948104 - DNA, 33 bp, Homo sapien
cttccaagcactgttatgacctcctagttgtag

SEQ ID NO: 948105 - DNA, 33 bp, Homo sapien
tgagaacttcgggaaaaggtacgaccagccgct

SEQ ID NO: 948106 - DNA, 33 bp, Homo sapien
tgagaacttcgggaaatggtacgaccagccgct

SEQ ID NO: 948107 - DNA, 33 bp, Homo sapien
agacataattctcctcaaaatcagatttactgc

SEQ ID NO: 948108 - DNA, 33 bp, Homo sapien
agacataattctcctcgaaatcagatttactgc

SEQ ID NO: 948109 - DNA, 33 bp, Homo sapien
ttgcacattctagcaagggacacttctttgatg

SEQ ID NO: 948110 - DNA, 33 bp, Homo sapien
ttgcacattctagcaatggacacttctttgatg

SEQ ID NO: 948111 - DNA, 33 bp, Homo sapien
attttaagaggatcaaccatgcaaaattttgga

SEQ ID NO: 948112 - DNA, 33 bp, Homo sapien
attttaagaggatcaagcatgcaaaattttgga

SEQ ID NO: 948113 - DNA, 33 bp, Homo sapien
gatgtaattaaggcataaggcccaccgaggaac

SEQ ID NO: 948114 - DNA, 33 bp, Homo sapien
gatgtaattaaggcatgaggcccaccgaggaac

SEQ ID NO: 948115 - DNA, 33 bp, Homo sapien
actgcctgcagctctcaaagcatcctgcatctc

SEQ ID NO: 948116 - DNA, 33 bp, Homo sapien
actgcctgcagctctccaagcatcctgcatctc

SEQ ID NO: 948117 - DNA, 33 bp, Homo sapien
tctcctatggtaacaacgtctccttctggacac

SEQ ID NO: 948118 - DNA, 33 bp, Homo sapien
tctcctatggtaacaatgtctccttctggacac

SEQ ID NO: 948119 - DNA, 33 bp, Homo sapien
tggtcaaatggaaaagcatgatagccgtaggag

SEQ ID NO: 948120 - DNA, 33 bp, Homo sapien
tggtcaaatggaaaagtatgatagccgtaggag

SEQ ID NO: 948121 - DNA, 33 bp, Homo sapien
aggctactaggagcctaaaaactcacgacaacc

SEQ ID NO: 948122 - DNA, 33 bp, Homo sapien
aggctactaggagcctgaaaactcacgacaacc

SEQ ID NO: 948123 - DNA, 33 bp, Homo sapien
aacagttttcttgtcacgttacagatgagagat

SEQ ID NO: 948124 - DNA, 33 bp, Homo sapien
aacagttttcttgtcatgttacagatgagagat

SEQ ID NO: 948125 - DNA, 33 bp, Homo sapien
tttaatctaccttgcaatgaagaggctgttaaa

SEQ ID NO: 948126 - DNA, 33 bp, Homo sapien
tttaatctaccttgcagtgaagaggctgttaaa

SEQ ID NO: 948127 - DNA, 33 bp, Homo sapien
ctctctctgatggggaagtaataatcagatttc

SEQ ID NO: 948128 - DNA, 33 bp, Homo sapien
ctctctctgatggggaggtaataatcagatttc

SEQ ID NO: 948129 - DNA, 33 bp, Homo sapien
tatggcatgccacacactcatttacaccttacg

SEQ ID NO: 948130 - DNA, 33 bp, Homo sapien
tatggcatgccacacagtcatttacaccttacg

SEQ ID NO: 948131 - DNA, 33 bp, Homo sapien
atcgttttctaggaaacagtatgaagaaaaagg

SEQ ID NO: 948132 - DNA, 33 bp, Homo sapien
atcgttttctaggaaagagtatgaagaaaaagg

SEQ ID NO: 948133 - DNA, 33 bp, Homo sapien
tctctgttgtgccacacccttgcaagcatttgg

SEQ ID NO: 948134 - DNA, 33 bp, Homo sapien
tctctgttgtgccacagccttgcaagcatttgg

SEQ ID NO: 948135 - DNA, 33 bp, Homo sapien
agctacaaagtctcccaatgggtccctgagata

SEQ ID NO: 948136 - DNA, 33 bp, Homo sapien
agctacaaagtctcccgatgggtccctgagata

SEQ ID NO: 948137 - DNA, 33 bp, Homo sapien
taccagctgtttgcatgaactggcttggccctt

SEQ ID NO: 948138 - DNA, 33 bp, Homo sapien
taccagctgtttgcattaactggcttggccctt

SEQ ID NO: 948139 - DNA, 33 bp, Homo sapien
agcaagtggtaaagtacggaaaccacagagact

SEQ ID NO: 948140 - DNA, 33 bp, Homo sapien
agcaagtggtaaagtatggaaaccacagagact

SEQ ID NO: 948141 - DNA, 33 bp, Homo sapien
actagtatttctcccacaatggacctcagcaat

SEQ ID NO: 948142 - DNA, 33 bp, Homo sapien
actagtatttctcccataatggacctcagcaat

SEQ ID NO: 948143 - DNA, 33 bp, Homo sapien
agaaataccattcggacatgaatccacaccctc

SEQ ID NO: 948144 - DNA, 33 bp, Homo sapien
agaaataccattcggatatgaatccacaccctc

SEQ ID NO: 948145 - DNA, 33 bp, Homo sapien
tccttttacacagtcaaggcattccactaggtt

SEQ ID NO: 948146 - DNA, 33 bp, Homo sapien
tccttttacacagtcagggcattccactaggtt

SEQ ID NO: 948147 - DNA, 33 bp, Homo sapien
aaatgatgtccaaagagtcatccatccatttct

SEQ ID NO: 948148 - DNA, 33 bp, Homo sapien
aaatgatgtccaaagattcatccatccatttct

SEQ ID NO: 948149 - DNA, 33 bp, Homo sapien
ctatagaaaatcctcaccctctctgatgtctaa

SEQ ID NO: 948150 - DNA, 33 bp, Homo sapien
ctatagaaaatcctcatcctctctgatgtctaa

SEQ ID NO: 948151 - DNA, 33 bp, Homo sapien
ctgaaacacgcagtaaaatgagaaggccttcca

SEQ ID NO: 948152 - DNA, 33 bp, Homo sapien
ctgaaacacgcagtaacatgagaaggccttcca

SEQ ID NO: 948153 - DNA, 33 bp, Homo sapien
tgtacagagtaatttcactgccctaaaattctc

SEQ ID NO: 948154 - DNA, 33 bp, Homo sapien
tgtacagagtaatttcgctgccctaaaattctc

SEQ ID NO: 948155 - DNA, 33 bp, Homo sapien
gtctgtagtttgtttaacttctaggctttttat

SEQ ID NO: 948156 - DNA, 33 bp, Homo sapien
gtctgtagtttgtttatcttctaggctttttat

SEQ ID NO: 948157 - DNA, 33 bp, Homo sapien
tccctcagttttgccaaagagtggccatagatc

SEQ ID NO: 948158 - DNA, 33 bp, Homo sapien
tccctcagttttgccagagagtggccatagatc

SEQ ID NO: 948159 - DNA, 33 bp, Homo sapien
agtgccccagaggctaaataaatgcaattttgt

SEQ ID NO: 948160 - DNA, 33 bp, Homo sapien
agtgccccagaggctacataaatgcaattttgt

SEQ ID NO: 948161 - DNA, 33 bp, Homo sapien
gggacagaataccccacgactctagcggcacac

SEQ ID NO: 948162 - DNA, 33 bp, Homo sapien
gggacagaataccccatgactctagcggcacac

SEQ ID NO: 948163 - DNA, 33 bp, Homo sapien
tatttcaagagctgaagagataaaataacctat

SEQ ID NO: 948164 - DNA, 33 bp, Homo sapien
tatttcaagagctgaatagataaaataacctat

SEQ ID NO: 948165 - DNA, 33 bp, Homo sapien
taggctgacctctatagatacagcacaactcac

SEQ ID NO: 948166 - DNA, 33 bp, Homo sapien
taggctgacctctatatatacagcacaactcac

SEQ ID NO: 948167 - DNA, 33 bp, Homo sapien
aggaaagccacccaccaaagtgtgtttttggtt

SEQ ID NO: 948168 - DNA, 33 bp, Homo sapien
aggaaagccacccaccgaagtgtgtttttggtt

SEQ ID NO: 948169 - DNA, 33 bp, Homo sapien
gtggcaattcagggggccatacagctttccttc

SEQ ID NO: 948170 - DNA, 33 bp, Homo sapien
gtggcaattcagggggtcatacagctttccttc

SEQ ID NO: 948171 - DNA, 33 bp, Homo sapien
atttcaaaggacctggacatctctacattcccg

SEQ ID NO: 948172 - DNA, 33 bp, Homo sapien
atttcaaaggacctgggcatctctacattcccg

SEQ ID NO: 948173 - DNA, 33 bp, Homo sapien
tgtctccattaaaccaaagcacttgtctgtgcc

SEQ ID NO: 948174 - DNA, 33 bp, Homo sapien
tgtctccattaaaccagagcacttgtctgtgcc

SEQ ID NO: 948175 - DNA, 33 bp, Homo sapien
cagtgggctacacaagaagagtggttcacaatt

SEQ ID NO: 948176 - DNA, 33 bp, Homo sapien
cagtgggctacacaaggagagtggttcacaatt

SEQ ID NO: 948177 - DNA, 33 bp, Homo sapien
gtctagaaaatgggcacaggtccttttgtaccc

SEQ ID NO: 948178 - DNA, 33 bp, Homo sapien
gtctagaaaatgggcagaggtccttttgtaccc

SEQ ID NO: 948179 - DNA, 33 bp, Homo sapien
actggcccacgcagtacataagaacagaagaga

SEQ ID NO: 948180 - DNA, 33 bp, Homo sapien
actggcccacgcagtagataagaacagaagaga

SEQ ID NO: 948181 - DNA, 33 bp, Homo sapien
aaacattgctcacaacgattttgccagagacat

SEQ ID NO: 948182 - DNA, 33 bp, Homo sapien
aaacattgctcacaactattttgccagagacat

SEQ ID NO: 948183 - DNA, 33 bp, Homo sapien
tttttaaccccagagacgccaccattacaaaca

SEQ ID NO: 948184 - DNA, 33 bp, Homo sapien
tttttaaccccagagatgccaccattacaaaca

SEQ ID NO: 948185 - DNA, 33 bp, Homo sapien
actccagcttgagcaaaggattaagactcagtc

SEQ ID NO: 948186 - DNA, 33 bp, Homo sapien
actccagcttgagcaacggattaagactcagtc

SEQ ID NO: 948187 - DNA, 33 bp, Homo sapien
acctggagtggactacggcctcacagatcagaa

SEQ ID NO: 948188 - DNA, 33 bp, Homo sapien
acctggagtggactactgcctcacagatcagaa

SEQ ID NO: 948189 - DNA, 33 bp, Homo sapien
atcatgtttcctgggcacatcttcacatcaaat

SEQ ID NO: 948190 - DNA, 33 bp, Homo sapien
atcatgtttcctgggcgcatcttcacatcaaat

SEQ ID NO: 948191 - DNA, 33 bp, Homo sapien
gccacaaaagctccacacatccaactgtgcagc

SEQ ID NO: 948192 - DNA, 33 bp, Homo sapien
gccacaaaagctccacgcatccaactgtgcagc

SEQ ID NO: 948193 - DNA, 33 bp, Homo sapien
ttatgagaaagtgttacgggttgaatcgtgtct

SEQ ID NO: 948194 - DNA, 33 bp, Homo sapien
ttatgagaaagtgttatgggttgaatcgtgtct

SEQ ID NO: 948195 - DNA, 33 bp, Homo sapien
tatgcagtaatgtgagcagcaatggctatcggg

SEQ ID NO: 948196 - DNA, 33 bp, Homo sapien
tatgcagtaatgtgaggagcaatggctatcggg

SEQ ID NO: 948197 - DNA, 33 bp, Homo sapien
taagctaagctaagataaaaatcacagtggtca

SEQ ID NO: 948198 - DNA, 33 bp, Homo sapien
taagctaagctaagatgaaaatcacagtggtca

SEQ ID NO: 948199 - DNA, 33 bp, Homo sapien
cttctctctttttcgcaagagaaatacccagag

SEQ ID NO: 948200 - DNA, 33 bp, Homo sapien
cttctctctttttcgcgagagaaatacccagag

SEQ ID NO: 948201 - DNA, 33 bp, Homo sapien
ccaaatgagagaaattaaatatactcaatgaat

SEQ ID NO: 948202 - DNA, 33 bp, Homo sapien
ccaaatgagagaaatttaatatactcaatgaat

SEQ ID NO: 948203 - DNA, 33 bp, Homo sapien
tttgaggttaaaattacgggtgttattatgaac

SEQ ID NO: 948204 - DNA, 33 bp, Homo sapien
tttgaggttaaaattatgggtgttattatgaac

SEQ ID NO: 948205 - DNA, 33 bp, Homo sapien
gacggcagtggaaagacgctcctagatgaggac

SEQ ID NO: 948206 - DNA, 33 bp, Homo sapien
gacggcagtggaaagatgctcctagatgaggac

SEQ ID NO: 948207 - DNA, 33 bp, Homo sapien
ttattcaactgcaataatactattcaccgcttc

SEQ ID NO: 948208 - DNA, 33 bp, Homo sapien
ttattcaactgcaatactactattcaccgcttc

SEQ ID NO: 948209 - DNA, 33 bp, Homo sapien
gaactatgattctgtaggtaggctgtaggtttc

SEQ ID NO: 948210 - DNA, 33 bp, Homo sapien
gaactatgattctgtatgtaggctgtaggtttc

SEQ ID NO: 948211 - DNA, 33 bp, Homo sapien
gaggtgaaccctcgctaaaggttacagtttgcc

SEQ ID NO: 948212 - DNA, 33 bp, Homo sapien
gaggtgaaccctcgctgaaggttacagtttgcc

SEQ ID NO: 948213 - DNA, 33 bp, Homo sapien
gttcttgctggcttccaaaggcatttagatctg

SEQ ID NO: 948214 - DNA, 33 bp, Homo sapien
gttcttgctggcttccgaaggcatttagatctg

SEQ ID NO: 948215 - DNA, 33 bp, Homo sapien
gtgttgactttccccacgtcacactgcgagtga

SEQ ID NO: 948216 - DNA, 33 bp, Homo sapien
gtgttgactttccccatgtcacactgcgagtga

SEQ ID NO: 948217 - DNA, 33 bp, Homo sapien
cctgatattccaggtacgtaacgtggcctggag

SEQ ID NO: 948218 - DNA, 33 bp, Homo sapien
cctgatattccaggtatgtaacgtggcctggag

SEQ ID NO: 948219 - DNA, 33 bp, Homo sapien
cctaatcatctatcatcacactgagagctctgc

SEQ ID NO: 948220 - DNA, 33 bp, Homo sapien
cctaatcatctatcatgacactgagagctctgc

SEQ ID NO: 948221 - DNA, 33 bp, Homo sapien
gaacacagtggttgtaaaagtgagactctctga

SEQ ID NO: 948222 - DNA, 33 bp, Homo sapien
gaacacagtggttgtataagtgagactctctga

SEQ ID NO: 948223 - DNA, 33 bp, Homo sapien
attcagagttagcagaggacaaaggactcgaat

SEQ ID NO: 948224 - DNA, 33 bp, Homo sapien
attcagagttagcagatgacaaaggactcgaat

SEQ ID NO: 948225 - DNA, 33 bp, Homo sapien
cagcacgtggttgttacacaggtacagttacat

SEQ ID NO: 948226 - DNA, 33 bp, Homo sapien
cagcacgtggttgttatacaggtacagttacat

SEQ ID NO: 948227 - DNA, 33 bp, Homo sapien
tgttcactaaggggatcataggatgtgtgtaga

SEQ ID NO: 948228 - DNA, 33 bp, Homo sapien
tgttcactaaggggattataggatgtgtgtaga

SEQ ID NO: 948229 - DNA, 33 bp, Homo sapien
ggtactgaggctggaaagtttggttgaggccaa

SEQ ID NO: 948230 - DNA, 33 bp, Homo sapien
ggtactgaggctggaaggtttggttgaggccaa

SEQ ID NO: 948231 - DNA, 33 bp, Homo sapien
tctaccaatctttgcacggccctacaagtgcag

SEQ ID NO: 948232 - DNA, 33 bp, Homo sapien
tctaccaatctttgcatggccctacaagtgcag

SEQ ID NO: 948233 - DNA, 33 bp, Homo sapien
ggagctgccttagagacgggcaattccaacaga

SEQ ID NO: 948234 - DNA, 33 bp, Homo sapien
ggagctgccttagagatgggcaattccaacaga

SEQ ID NO: 948235 - DNA, 33 bp, Homo sapien
taacttcttagagttgaaaaggctactagagag

SEQ ID NO: 948236 - DNA, 33 bp, Homo sapien
taacttcttagagttggaaaggctactagagag

SEQ ID NO: 948237 - DNA, 33 bp, Homo sapien
caaagtcagacttgcacgttacgtgatcactct

SEQ ID NO: 948238 - DNA, 33 bp, Homo sapien
caaagtcagacttgcatgttacgtgatcactct

SEQ ID NO: 948239 - DNA, 33 bp, Homo sapien
acccagccaacgagaaaaagccctgtcgtgctg

SEQ ID NO: 948240 - DNA, 33 bp, Homo sapien
acccagccaacgagaagaagccctgtcgtgctg

SEQ ID NO: 948241 - DNA, 33 bp, Homo sapien
aggtggtccgcggcaccgaagaggaaggcaggc

SEQ ID NO: 948242 - DNA, 33 bp, Homo sapien
aggtggtccgcggcactgaagaggaaggcaggc

SEQ ID NO: 948243 - DNA, 33 bp, Homo sapien
gcaaggagactggggacgatgccgtgcttggga

SEQ ID NO: 948244 - DNA, 33 bp, Homo sapien
gcaaggagactggggaggatgccgtgcttggga

SEQ ID NO: 948245 - DNA, 33 bp, Homo sapien
actttctgcgagaccactgctgtgaacacacac

SEQ ID NO: 948246 - DNA, 33 bp, Homo sapien
actttctgcgagaccattgctgtgaacacacac

SEQ ID NO: 948247 - DNA, 33 bp, Homo sapien
gttctcaaccactcaccaaatctgccatcttaa

SEQ ID NO: 948248 - DNA, 33 bp, Homo sapien
gttctcaaccactcacgaaatctgccatcttaa

SEQ ID NO: 948249 - DNA, 33 bp, Homo sapien
cctttgacttgctctacgaagaaatatctttaa

SEQ ID NO: 948250 - DNA, 33 bp, Homo sapien
cctttgacttgctctatgaagaaatatctttaa

SEQ ID NO: 948251 - DNA, 33 bp, Homo sapien
gcccctgtgagtcatcaatcactgctggcacat

SEQ ID NO: 948252 - DNA, 33 bp, Homo sapien
gcccctgtgagtcatccatcactgctggcacat

SEQ ID NO: 948253 - DNA, 33 bp, Homo sapien
tcttcaacaccaaagaagaccccggagcaacag

SEQ ID NO: 948254 - DNA, 33 bp, Homo sapien
tcttcaacaccaaagaggaccccggagcaacag

SEQ ID NO: 948255 - DNA, 33 bp, Homo sapien
ttaaataaagccactaataagaaaacatcatct

SEQ ID NO: 948256 - DNA, 33 bp, Homo sapien
ttaaataaagccactagtaagaaaacatcatct

SEQ ID NO: 948257 - DNA, 33 bp, Homo sapien
caccaggtacagtgtcaattttctaatggatgt

SEQ ID NO: 948258 - DNA, 33 bp, Homo sapien
caccaggtacagtgtccattttctaatggatgt

SEQ ID NO: 948259 - DNA, 33 bp, Homo sapien
atcccagtggccatgacgccattataaagacag

SEQ ID NO: 948260 - DNA, 33 bp, Homo sapien
atcccagtggccatgatgccattataaagacag

SEQ ID NO: 948261 - DNA, 33 bp, Homo sapien
ttttaactactgcagactactggctccatttcc

SEQ ID NO: 948262 - DNA, 33 bp, Homo sapien
ttttaactactgcagagtactggctccatttcc

SEQ ID NO: 948263 - DNA, 33 bp, Homo sapien
gcaggctacgtaaaagaagaagctattctttgc

SEQ ID NO: 948264 - DNA, 33 bp, Homo sapien
gcaggctacgtaaaaggagaagctattctttgc

SEQ ID NO: 948265 - DNA, 33 bp, Homo sapien
gttgctccggttaaaaataaatgagggagaaag

SEQ ID NO: 948266 - DNA, 33 bp, Homo sapien
gttgctccggttaaaactaaatgagggagaaag

SEQ ID NO: 948267 - DNA, 33 bp, Homo sapien
acttccatgttcaaagcagagcgaactaaaact

SEQ ID NO: 948268 - DNA, 33 bp, Homo sapien
acttccatgttcaaagtagagcgaactaaaact

SEQ ID NO: 948269 - DNA, 33 bp, Homo sapien
tactccatggatcaggaagctaaaatggcgatt

SEQ ID NO: 948270 - DNA, 33 bp, Homo sapien
tactccatggatcagggagctaaaatggcgatt

SEQ ID NO: 948271 - DNA, 33 bp, Homo sapien
gttcatacaaagattaaaacatgaactccatag

SEQ ID NO: 948272 - DNA, 33 bp, Homo sapien
gttcatacaaagattacaacatgaactccatag

SEQ ID NO: 948273 - DNA, 33 bp, Homo sapien
tgttgtcctttctgcaaaactttcacacgtatc

SEQ ID NO: 948274 - DNA, 33 bp, Homo sapien
tgttgtcctttctgcacaactttcacacgtatc

SEQ ID NO: 948275 - DNA, 33 bp, Homo sapien
agagaggggcgtattaaagtcacagaaggatac

SEQ ID NO: 948276 - DNA, 33 bp, Homo sapien
agagaggggcgtattagagtcacagaaggatac

SEQ ID NO: 948277 - DNA, 33 bp, Homo sapien
acgaagtgaggacgcggatgatgtagcctgagg

SEQ ID NO: 948278 - DNA, 33 bp, Homo sapien
acgaagtgaggacgcgtatgatgtagcctgagg

SEQ ID NO: 948279 - DNA, 33 bp, Homo sapien
gagaccaagagaaataacgacttgcccagtgta

SEQ ID NO: 948280 - DNA, 33 bp, Homo sapien
gagaccaagagaaatagcgacttgcccagtgta

SEQ ID NO: 948281 - DNA, 33 bp, Homo sapien
aactttacgatctagacattaacaatgcctgta

SEQ ID NO: 948282 - DNA, 33 bp, Homo sapien
aactttacgatctagatattaacaatgcctgta

SEQ ID NO: 948283 - DNA, 33 bp, Homo sapien
atccttaactggaggaagaatctgtttccaaac

SEQ ID NO: 948284 - DNA, 33 bp, Homo sapien
atccttaactggaggaggaatctgtttccaaac

SEQ ID NO: 948285 - DNA, 33 bp, Homo sapien
ttgtgatgtgtacttgcattcctggtgtttctc

SEQ ID NO: 948286 - DNA, 33 bp, Homo sapien
ttgtgatgtgtacttgtattcctggtgtttctc

SEQ ID NO: 948287 - DNA, 33 bp, Homo sapien
tctcaaaatcaactgacgagaaacctaaatttc

SEQ ID NO: 948288 - DNA, 33 bp, Homo sapien
tctcaaaatcaactgatgagaaacctaaatttc

SEQ ID NO: 948289 - DNA, 33 bp, Homo sapien
agaagaacgcagcagacattcatgcacgattca

SEQ ID NO: 948290 - DNA, 33 bp, Homo sapien
agaagaacgcagcagagattcatgcacgattca

SEQ ID NO: 948291 - DNA, 33 bp, Homo sapien
agaaagctaatgaaggccaggctaaaggaactg

SEQ ID NO: 948292 - DNA, 33 bp, Homo sapien
agaaagctaatgaagggcaggctaaaggaactg

SEQ ID NO: 948293 - DNA, 33 bp, Homo sapien
atccagatggcccgaaaggtgcccttggtgtcc

SEQ ID NO: 948294 - DNA, 33 bp, Homo sapien
atccagatggcccgaatggtgcccttggtgtcc

SEQ ID NO: 948295 - DNA, 33 bp, Homo sapien
agctccaatcgaagctgaaaaggatgtcggtgg

SEQ ID NO: 948296 - DNA, 33 bp, Homo sapien
agctccaatcgaagcttaaaaggatgtcggtgg

SEQ ID NO: 948297 - DNA, 33 bp, Homo sapien
acgctaagattcaggacgagaagtcattgaagc

SEQ ID NO: 948298 - DNA, 33 bp, Homo sapien
acgctaagattcaggatgagaagtcattgaagc

SEQ ID NO: 948299 - DNA, 33 bp, Homo sapien
tctctggacgaatacaatagatacacaaactga

SEQ ID NO: 948300 - DNA, 33 bp, Homo sapien
tctctggacgaatacagtagatacacaaactga

SEQ ID NO: 948301 - DNA, 33 bp, Homo sapien
ggcacatccacaaggactcccagagacccacgt

SEQ ID NO: 948302 - DNA, 33 bp, Homo sapien
ggcacatccacaaggagtcccagagacccacgt

SEQ ID NO: 948303 - DNA, 33 bp, Homo sapien
cagtcctgttttgattaaaatgtgaactcgtct

SEQ ID NO: 948304 - DNA, 33 bp, Homo sapien
cagtcctgttttgattgaaatgtgaactcgtct

SEQ ID NO: 948305 - DNA, 33 bp, Homo sapien
gtggactgatcaacacacatttctttcccacag

SEQ ID NO: 948306 - DNA, 33 bp, Homo sapien
gtggactgatcaacacgcatttctttcccacag

SEQ ID NO: 948307 - DNA, 33 bp, Homo sapien
aatcagtggaaaactacagcaacgccatacagg

SEQ ID NO: 948308 - DNA, 33 bp, Homo sapien
aatcagtggaaaactatagcaacgccatacagg

SEQ ID NO: 948309 - DNA, 33 bp, Homo sapien
ccattcatttctgagcacttgatggtttttcct

SEQ ID NO: 948310 - DNA, 33 bp, Homo sapien
ccattcatttctgagcgcttgatggtttttcct

SEQ ID NO: 948311 - DNA, 33 bp, Homo sapien
tacagacacgtgcatacatacataggtaagtat

SEQ ID NO: 948312 - DNA, 33 bp, Homo sapien
tacagacacgtgcatatatacataggtaagtat

SEQ ID NO: 948313 - DNA, 33 bp, Homo sapien
ctggacagctggtttaccctcttggcacattct

SEQ ID NO: 948314 - DNA, 33 bp, Homo sapien
ctggacagctggtttatcctcttggcacattct

SEQ ID NO: 948315 - DNA, 33 bp, Homo sapien
ggtcattattcacaaagattacaaaccgcccca

SEQ ID NO: 948316 - DNA, 33 bp, Homo sapien
ggtcattattcacaaatattacaaaccgcccca

SEQ ID NO: 948317 - DNA, 33 bp, Homo sapien
agggaaactctcctgaacaaaagaagaggaatg

SEQ ID NO: 948318 - DNA, 33 bp, Homo sapien
agggaaactctcctgaccaaaagaagaggaatg

SEQ ID NO: 948319 - DNA, 33 bp, Homo sapien
ttcaatatcttgtctaaaagtgaggttaacatg

SEQ ID NO: 948320 - DNA, 33 bp, Homo sapien
ttcaatatcttgtctacaagtgaggttaacatg

SEQ ID NO: 948321 - DNA, 33 bp, Homo sapien
accaatatgatggaacaaactgctaggcacttg

SEQ ID NO: 948322 - DNA, 33 bp, Homo sapien
accaatatgatggaactaactgctaggcacttg

SEQ ID NO: 948323 - DNA, 33 bp, Homo sapien
atgggcaagtcccctgacacaggcaggcagatg

SEQ ID NO: 948324 - DNA, 33 bp, Homo sapien
atgggcaagtcccctggcacaggcaggcagatg

SEQ ID NO: 948325 - DNA, 33 bp, Homo sapien
tctggctgaagcctcacgattcctccatgtaca

SEQ ID NO: 948326 - DNA, 33 bp, Homo sapien
tctggctgaagcctcatgattcctccatgtaca

SEQ ID NO: 948327 - DNA, 33 bp, Homo sapien
tttggacccaggtgaccgcaggactattaccta

SEQ ID NO: 948328 - DNA, 33 bp, Homo sapien
tttggacccaggtgactgcaggactattaccta

SEQ ID NO: 948329 - DNA, 33 bp, Homo sapien
gttcttgggagggatggagactctacagtgtgg

SEQ ID NO: 948330 - DNA, 33 bp, Homo sapien
gttcttgggagggatgtagactctacagtgtgg

SEQ ID NO: 948331 - DNA, 33 bp, Homo sapien
aaaatgtttgtgacataaaattgagtgaaaaag

SEQ ID NO: 948332 - DNA, 33 bp, Homo sapien
aaaatgtttgtgacattaaattgagtgaaaaag

SEQ ID NO: 948333 - DNA, 33 bp, Homo sapien
catgatgaccattggcactttcatcagatccgt

SEQ ID NO: 948334 - DNA, 33 bp, Homo sapien
catgatgaccattggcgctttcatcagatccgt

SEQ ID NO: 948335 - DNA, 33 bp, Homo sapien
tgtggttttataccaacgacaaggtccactgcc

SEQ ID NO: 948336 - DNA, 33 bp, Homo sapien
tgtggttttataccaatgacaaggtccactgcc

SEQ ID NO: 948337 - DNA, 33 bp, Homo sapien
tggagaggctgccccacggaaaagaaagatatt

SEQ ID NO: 948338 - DNA, 33 bp, Homo sapien
tggagaggctgccccatggaaaagaaagatatt

SEQ ID NO: 948339 - DNA, 33 bp, Homo sapien
tataagtgagaatatgaattgtctttctgtacc

SEQ ID NO: 948340 - DNA, 33 bp, Homo sapien
tataagtgagaatatgcattgtctttctgtacc

SEQ ID NO: 948341 - DNA, 33 bp, Homo sapien
gcctgcaggaggagaaagggcttgctgagggtt

SEQ ID NO: 948342 - DNA, 33 bp, Homo sapien
gcctgcaggaggagaacgggcttgctgagggtt

SEQ ID NO: 948343 - DNA, 33 bp, Homo sapien
accaggtgggcatcataagctggggaaagagct

SEQ ID NO: 948344 - DNA, 33 bp, Homo sapien
accaggtgggcatcatcagctggggaaagagct

SEQ ID NO: 948345 - DNA, 33 bp, Homo sapien
tatgatgaggtgactacccgtttacatccatct

SEQ ID NO: 948346 - DNA, 33 bp, Homo sapien
tatgatgaggtgactatccgtttacatccatct

SEQ ID NO: 948347 - DNA, 33 bp, Homo sapien
cctcataagcctgtaccagtcctggctctggtg

SEQ ID NO: 948348 - DNA, 33 bp, Homo sapien
cctcataagcctgtactagtcctggctctggtg

SEQ ID NO: 948349 - DNA, 33 bp, Homo sapien
tccaattttctccagtcaactcaacaaaacggc

SEQ ID NO: 948350 - DNA, 33 bp, Homo sapien
tccaattttctccagtgaactcaacaaaacggc

SEQ ID NO: 948351 - DNA, 33 bp, Homo sapien
atggaacagtagcttacactgcagaactttcca

SEQ ID NO: 948352 - DNA, 33 bp, Homo sapien
atggaacagtagcttatactgcagaactttcca

SEQ ID NO: 948353 - DNA, 33 bp, Homo sapien
aagaataataacacaacttgtgcctataaaatg

SEQ ID NO: 948354 - DNA, 33 bp, Homo sapien
aagaataataacacaagttgtgcctataaaatg

SEQ ID NO: 948355 - DNA, 33 bp, Homo sapien
tcttagaactgtgtcaacactaggatacaggac

SEQ ID NO: 948356 - DNA, 33 bp, Homo sapien
tcttagaactgtgtcagcactaggatacaggac

SEQ ID NO: 948357 - DNA, 33 bp, Homo sapien
cgtgtcttaaggatcaaactctcatgtgcacct

SEQ ID NO: 948358 - DNA, 33 bp, Homo sapien
cgtgtcttaaggatcagactctcatgtgcacct

SEQ ID NO: 948359 - DNA, 33 bp, Homo sapien
ttagggacatttttccaagaagcatagcctggt

SEQ ID NO: 948360 - DNA, 33 bp, Homo sapien
ttagggacatttttcctagaagcatagcctggt

SEQ ID NO: 948361 - DNA, 33 bp, Homo sapien
aagctcccacactataccttacactaaggccaa

SEQ ID NO: 948362 - DNA, 33 bp, Homo sapien
aagctcccacactatatcttacactaaggccaa

SEQ ID NO: 948363 - DNA, 33 bp, Homo sapien
catgtctacaccaggaaagttatcgacgcttac

SEQ ID NO: 948364 - DNA, 33 bp, Homo sapien
catgtctacaccaggacagttatcgacgcttac

SEQ ID NO: 948365 - DNA, 33 bp, Homo sapien
ggtctggaatgctgcaaggaggtctttgggatg

SEQ ID NO: 948366 - DNA, 33 bp, Homo sapien
ggtctggaatgctgcagggaggtctttgggatg

SEQ ID NO: 948367 - DNA, 33 bp, Homo sapien
aattcaaatttaactacgtgtcttgtatttttt

SEQ ID NO: 948368 - DNA, 33 bp, Homo sapien
aattcaaatttaactaggtgtcttgtatttttt

SEQ ID NO: 948369 - DNA, 33 bp, Homo sapien
aggcaggggcagcacaaggacggccggtcagga

SEQ ID NO: 948370 - DNA, 33 bp, Homo sapien
aggcaggggcagcacagggacggccggtcagga

SEQ ID NO: 948371 - DNA, 33 bp, Homo sapien
cactgtctaccatccaagtgtccagccctctgc

SEQ ID NO: 948372 - DNA, 33 bp, Homo sapien
cactgtctaccatccacgtgtccagccctctgc

SEQ ID NO: 948373 - DNA, 33 bp, Homo sapien
aacaaattccatctcccgagccaacatgtggca

SEQ ID NO: 948374 - DNA, 33 bp, Homo sapien
aacaaattccatctcctgagccaacatgtggca

SEQ ID NO: 948375 - DNA, 33 bp, Homo sapien
tttagagaatgagaaaaaacatgctctgtgctt

SEQ ID NO: 948376 - DNA, 33 bp, Homo sapien
tttagagaatgagaaagaacatgctctgtgctt

SEQ ID NO: 948377 - DNA, 33 bp, Homo sapien
ttaccaaaggcgttcactcttaaaattgtctag

SEQ ID NO: 948378 - DNA, 33 bp, Homo sapien
ttaccaaaggcgttcattcttaaaattgtctag

SEQ ID NO: 948379 - DNA, 33 bp, Homo sapien
ggacaggtcctgtcgacgaagcaaagagcacaa

SEQ ID NO: 948380 - DNA, 33 bp, Homo sapien
ggacaggtcctgtcgaggaagcaaagagcacaa

SEQ ID NO: 948381 - DNA, 33 bp, Homo sapien
cagggtcttaagcccacataaaagtcagagaat

SEQ ID NO: 948382 - DNA, 33 bp, Homo sapien
cagggtcttaagcccatataaaagtcagagaat

SEQ ID NO: 948383 - DNA, 33 bp, Homo sapien
ggggaatcagacataacgttccccgttcccagc

SEQ ID NO: 948384 - DNA, 33 bp, Homo sapien
ggggaatcagacataatgttccccgttcccagc

SEQ ID NO: 948385 - DNA, 33 bp, Homo sapien
accctgcctcagacccagagttgatttgtctaa

SEQ ID NO: 948386 - DNA, 33 bp, Homo sapien
accctgcctcagacccggagttgatttgtctaa

SEQ ID NO: 948387 - DNA, 33 bp, Homo sapien
ccaaaatatttgcagaagaagaactccaaaaat

SEQ ID NO: 948388 - DNA, 33 bp, Homo sapien
ccaaaatatttgcagaggaagaactccaaaaat

SEQ ID NO: 948389 - DNA, 33 bp, Homo sapien
ggtttcctcatatcggaagtggtataataatac

SEQ ID NO: 948390 - DNA, 33 bp, Homo sapien
ggtttcctcatatcgggagtggtataataatac

SEQ ID NO: 948391 - DNA, 33 bp, Homo sapien
ccaggtgatgtggagcccgctgtagttcttact

SEQ ID NO: 948392 - DNA, 33 bp, Homo sapien
ccaggtgatgtggagctcgctgtagttcttact

SEQ ID NO: 948393 - DNA, 33 bp, Homo sapien
gcccttttcaagacacagtcaacctaagcatgc

SEQ ID NO: 948394 - DNA, 33 bp, Homo sapien
gcccttttcaagacacggtcaacctaagcatgc

SEQ ID NO: 948395 - DNA, 33 bp, Homo sapien
ttctggctgctacttccccagggaaatgaaggt

SEQ ID NO: 948396 - DNA, 33 bp, Homo sapien
ttctggctgctacttctccagggaaatgaaggt

SEQ ID NO: 948397 - DNA, 33 bp, Homo sapien
tagaactatctactaacgaaaaacactcttcac

SEQ ID NO: 948398 - DNA, 33 bp, Homo sapien
tagaactatctactaatgaaaaacactcttcac

SEQ ID NO: 948399 - DNA, 33 bp, Homo sapien
agaatgctcacttcctaaaggagaacaggttat

SEQ ID NO: 948400 - DNA, 33 bp, Homo sapien
agaatgctcacttcctgaaggagaacaggttat

SEQ ID NO: 948401 - DNA, 33 bp, Homo sapien
tccgtctatgaggaacacagagtagtcaaattc

SEQ ID NO: 948402 - DNA, 33 bp, Homo sapien
tccgtctatgaggaacccagagtagtcaaattc

SEQ ID NO: 948403 - DNA, 33 bp, Homo sapien
ggggacactgagtcacagagcagaagaggcttg

SEQ ID NO: 948404 - DNA, 33 bp, Homo sapien
ggggacactgagtcacggagcagaagaggcttg

SEQ ID NO: 948405 - DNA, 33 bp, Homo sapien
aaggaggaaaataacccactcgaagtcacacag

SEQ ID NO: 948406 - DNA, 33 bp, Homo sapien
aaggaggaaaataacctactcgaagtcacacag

SEQ ID NO: 948407 - DNA, 33 bp, Homo sapien
gcttctacccaagccacgtgccagagacccact

SEQ ID NO: 948408 - DNA, 33 bp, Homo sapien
gcttctacccaagccatgtgccagagacccact

SEQ ID NO: 948409 - DNA, 33 bp, Homo sapien
cccagagaatgcagaacgtatggtccctttatc

SEQ ID NO: 948410 - DNA, 33 bp, Homo sapien
cccagagaatgcagaatgtatggtccctttatc

SEQ ID NO: 948411 - DNA, 33 bp, Homo sapien
gaggaagaagagttcacggaggggagtccccat

SEQ ID NO: 948412 - DNA, 33 bp, Homo sapien
gaggaagaagagttcatggaggggagtccccat

SEQ ID NO: 948413 - DNA, 33 bp, Homo sapien
accacagcaatgccaccgactaccgagaaatct

SEQ ID NO: 948414 - DNA, 33 bp, Homo sapien
accacagcaatgccactgactaccgagaaatct

SEQ ID NO: 948415 - DNA, 33 bp, Homo sapien
gcaggaagcactaaccagcgagtggcaactgcc

SEQ ID NO: 948416 - DNA, 33 bp, Homo sapien
gcaggaagcactaaccggcgagtggcaactgcc

SEQ ID NO: 948417 - DNA, 33 bp, Homo sapien
accttccctcaacccaaatagtcactactactc

SEQ ID NO: 948418 - DNA, 33 bp, Homo sapien
accttccctcaacccacatagtcactactactc

SEQ ID NO: 948419 - DNA, 33 bp, Homo sapien
agaccctgtgttgcaacctgcactgccaataac

SEQ ID NO: 948420 - DNA, 33 bp, Homo sapien
agaccctgtgttgcaatctgcactgccaataac

SEQ ID NO: 948421 - DNA, 33 bp, Homo sapien
ctttaactaccttccaatctccttctgcagtca

SEQ ID NO: 948422 - DNA, 33 bp, Homo sapien
ctttaactaccttccagtctccttctgcagtca

SEQ ID NO: 948423 - DNA, 33 bp, Homo sapien
tgaccacagtgtgaaagtcattgcacctctcca

SEQ ID NO: 948424 - DNA, 33 bp, Homo sapien
tgaccacagtgtgaaattcattgcacctctcca

SEQ ID NO: 948425 - DNA, 33 bp, Homo sapien
actagggaattcagtgaacaaacatgagtgtgt

SEQ ID NO: 948426 - DNA, 33 bp, Homo sapien
actagggaattcagtgtacaaacatgagtgtgt

SEQ ID NO: 948427 - DNA, 33 bp, Homo sapien
actccctgtttctaatcaccaaagacccagggt

SEQ ID NO: 948428 - DNA, 33 bp, Homo sapien
actccctgtttctaatgaccaaagacccagggt

SEQ ID NO: 948429 - DNA, 33 bp, Homo sapien
catcttccctcatctaccagtgtgcactgcaca

SEQ ID NO: 948430 - DNA, 33 bp, Homo sapien
catcttccctcatctatcagtgtgcactgcaca

SEQ ID NO: 948431 - DNA, 33 bp, Homo sapien
aacatcacctctaaccaatatttgtcggtcaaa

SEQ ID NO: 948432 - DNA, 33 bp, Homo sapien
aacatcacctctaacccatatttgtcggtcaaa

SEQ ID NO: 948433 - DNA, 33 bp, Homo sapien
tacatcttgtgcctcaacattctccgtctcaaa

SEQ ID NO: 948434 - DNA, 33 bp, Homo sapien
tacatcttgtgcctcagcattctccgtctcaaa

SEQ ID NO: 948435 - DNA, 33 bp, Homo sapien
atacatatcctattcaggtcgtattaggtgtaa

SEQ ID NO: 948436 - DNA, 33 bp, Homo sapien
atacatatcctattcatgtcgtattaggtgtaa

SEQ ID NO: 948437 - DNA, 33 bp, Homo sapien
gattcagcaatgtccacggtttttattgctagc

SEQ ID NO: 948438 - DNA, 33 bp, Homo sapien
gattcagcaatgtccatggtttttattgctagc

SEQ ID NO: 948439 - DNA, 33 bp, Homo sapien
ggaatgagtccgctgacatcccagtggccaggg

SEQ ID NO: 948440 - DNA, 33 bp, Homo sapien
ggaatgagtccgctgagatcccagtggccaggg

SEQ ID NO: 948441 - DNA, 33 bp, Homo sapien
gattcttaaatgaatacaaatgagcagaccaca

SEQ ID NO: 948442 - DNA, 33 bp, Homo sapien
gattcttaaatgaatagaaatgagcagaccaca

SEQ ID NO: 948443 - DNA, 33 bp, Homo sapien
tcagcctttttataaccagactgatgctcttcc

SEQ ID NO: 948444 - DNA, 33 bp, Homo sapien
tcagcctttttataactagactgatgctcttcc

SEQ ID NO: 948445 - DNA, 33 bp, Homo sapien
atgcttgatactttaaaaatgagtagcatatga

SEQ ID NO: 948446 - DNA, 33 bp, Homo sapien
atgcttgatactttaagaatgagtagcatatga

SEQ ID NO: 948447 - DNA, 33 bp, Homo sapien
acagaaaaatgaaagccgagggtacctagagaa

SEQ ID NO: 948448 - DNA, 33 bp, Homo sapien
acagaaaaatgaaagctgagggtacctagagaa

SEQ ID NO: 948449 - DNA, 33 bp, Homo sapien
aattgagtgggcagccagagaaggagtcacatg

SEQ ID NO: 948450 - DNA, 33 bp, Homo sapien
aattgagtgggcagccggagaaggagtcacatg

SEQ ID NO: 948451 - DNA, 33 bp, Homo sapien
ctgtgtgtcacgattacagctggagaatcttaa

SEQ ID NO: 948452 - DNA, 33 bp, Homo sapien
ctgtgtgtcacgattagagctggagaatcttaa

SEQ ID NO: 948453 - DNA, 33 bp, Homo sapien
attgtaattgatacccacagggactctctgcag

SEQ ID NO: 948454 - DNA, 33 bp, Homo sapien
attgtaattgatacccgcagggactctctgcag

SEQ ID NO: 948455 - DNA, 33 bp, Homo sapien
gggcaggctttccaaccaacggccgtgaatcac

SEQ ID NO: 948456 - DNA, 33 bp, Homo sapien
gggcaggctttccaacgaacggccgtgaatcac

SEQ ID NO: 948457 - DNA, 33 bp, Homo sapien
gctctgtgactgtgaacacaatacggctgactt

SEQ ID NO: 948458 - DNA, 33 bp, Homo sapien
gctctgtgactgtgaatacaatacggctgactt

SEQ ID NO: 948459 - DNA, 33 bp, Homo sapien
aaaaaggcaatataccagcacaacttattttta

SEQ ID NO: 948460 - DNA, 33 bp, Homo sapien
aaaaaggcaatataccggcacaacttattttta

SEQ ID NO: 948461 - DNA, 33 bp, Homo sapien
gaaaacttaagtgaaaaagtacaagaaagactg

SEQ ID NO: 948462 - DNA, 33 bp, Homo sapien
gaaaacttaagtgaaagagtacaagaaagactg

SEQ ID NO: 948463 - DNA, 33 bp, Homo sapien
accattttaagatacacgaagaacctcttctct

SEQ ID NO: 948464 - DNA, 33 bp, Homo sapien
accattttaagatacatgaagaacctcttctct

SEQ ID NO: 948465 - DNA, 33 bp, Homo sapien
ggatgttcaacctggaatatcaatttagcatat

SEQ ID NO: 948466 - DNA, 33 bp, Homo sapien
ggatgttcaacctggagtatcaatttagcatat

SEQ ID NO: 948467 - DNA, 33 bp, Homo sapien
atgttcaaagacagtccaatagacatgctcccc

SEQ ID NO: 948468 - DNA, 33 bp, Homo sapien
atgttcaaagacagtcgaatagacatgctcccc

SEQ ID NO: 948469 - DNA, 33 bp, Homo sapien
gtaagagtcaaactgtaaaaatgtatgtcgttt

SEQ ID NO: 948470 - DNA, 33 bp, Homo sapien
gtaagagtcaaactgttaaaatgtatgtcgttt

SEQ ID NO: 948471 - DNA, 33 bp, Homo sapien
aatggttcttgccatcacatagcttacagtgta

SEQ ID NO: 948472 - DNA, 33 bp, Homo sapien
aatggttcttgccatctcatagcttacagtgta

SEQ ID NO: 948473 - DNA, 33 bp, Homo sapien
ctttacatgtgtataaaagtagagagaataata

SEQ ID NO: 948474 - DNA, 33 bp, Homo sapien
ctttacatgtgtataagagtagagagaataata

SEQ ID NO: 948475 - DNA, 33 bp, Homo sapien
gtgttcaaatgagaacaaaagaggcttttcagg

SEQ ID NO: 948476 - DNA, 33 bp, Homo sapien
gtgttcaaatgagaaccaaagaggcttttcagg

SEQ ID NO: 948477 - DNA, 33 bp, Homo sapien
accacaggccaaatgcaagtcctttgcctcgcg

SEQ ID NO: 948478 - DNA, 33 bp, Homo sapien
accacaggccaaatgcgagtcctttgcctcgcg

SEQ ID NO: 948479 - DNA, 33 bp, Homo sapien
aatgtgggcagagtaacggattcttatcacctg

SEQ ID NO: 948480 - DNA, 33 bp, Homo sapien
aatgtgggcagagtaatggattcttatcacctg

SEQ ID NO: 948481 - DNA, 33 bp, Homo sapien
gtgtagctttcctcaacttatactaagagctgt

SEQ ID NO: 948482 - DNA, 33 bp, Homo sapien
gtgtagctttcctcaagttatactaagagctgt

SEQ ID NO: 948483 - DNA, 33 bp, Homo sapien
caaaaatttgaattagcaaatggtacagcagga

SEQ ID NO: 948484 - DNA, 33 bp, Homo sapien
caaaaatttgaattaggaaatggtacagcagga

SEQ ID NO: 948485 - DNA, 33 bp, Homo sapien
gcattggtagatggctcagattctcctgacatg

SEQ ID NO: 948486 - DNA, 33 bp, Homo sapien
gcattggtagatggctgagattctcctgacatg

SEQ ID NO: 948487 - DNA, 33 bp, Homo sapien
agagtgaagtagtaagcactgtttagctcatca

SEQ ID NO: 948488 - DNA, 33 bp, Homo sapien
agagtgaagtagtaaggactgtttagctcatca

SEQ ID NO: 948489 - DNA, 33 bp, Homo sapien
aacatgttctcaaccacggtctgagttagtcct

SEQ ID NO: 948490 - DNA, 33 bp, Homo sapien
aacatgttctcaaccagggtctgagttagtcct

SEQ ID NO: 948491 - DNA, 33 bp, Homo sapien
cattctgaaactcctacctctttgccagaatcc

SEQ ID NO: 948492 - DNA, 33 bp, Homo sapien
cattctgaaactcctatctctttgccagaatcc

SEQ ID NO: 948493 - DNA, 33 bp, Homo sapien
gggaaatcaaggttgacagtagcaagcagttag

SEQ ID NO: 948494 - DNA, 33 bp, Homo sapien
gggaaatcaaggttgagagtagcaagcagttag

SEQ ID NO: 948495 - DNA, 33 bp, Homo sapien
tgctcttcagaaacaggaaggctactctttcgc

SEQ ID NO: 948496 - DNA, 33 bp, Homo sapien
tgctcttcagaaacagtaaggctactctttcgc

SEQ ID NO: 948497 - DNA, 33 bp, Homo sapien
tatctgttgatttacaaaccactgacagaacag

SEQ ID NO: 948498 - DNA, 33 bp, Homo sapien
tatctgttgatttacagaccactgacagaacag

SEQ ID NO: 948499 - DNA, 33 bp, Homo sapien
ctcttcttccttttatcaaaagctgtgctcaat

SEQ ID NO: 948500 - DNA, 33 bp, Homo sapien
ctcttcttccttttatgaaaagctgtgctcaat

SEQ ID NO: 948501 - DNA, 33 bp, Homo sapien
tcaataaggttcttgccgaattgaattcatctg

SEQ ID NO: 948502 - DNA, 33 bp, Homo sapien
tcaataaggttcttgctgaattgaattcatctg

SEQ ID NO: 948503 - DNA, 33 bp, Homo sapien
tttctttgtgcgcatagtaggaatgaactttgt

SEQ ID NO: 948504 - DNA, 33 bp, Homo sapien
tttctttgtgcgcatattaggaatgaactttgt

SEQ ID NO: 948505 - DNA, 33 bp, Homo sapien
cagattagctgagtaacagtggtcacaaccata

SEQ ID NO: 948506 - DNA, 33 bp, Homo sapien
cagattagctgagtaatagtggtcacaaccata

SEQ ID NO: 948507 - DNA, 33 bp, Homo sapien
gcagtctggcatcaaaagaaaattagaagattc

SEQ ID NO: 948508 - DNA, 33 bp, Homo sapien
gcagtctggcatcaaaggaaaattagaagattc

SEQ ID NO: 948509 - DNA, 33 bp, Homo sapien
tgggctcctggccctaaatgaaaagcatcatca

SEQ ID NO: 948510 - DNA, 33 bp, Homo sapien
tgggctcctggccctacatgaaaagcatcatca

SEQ ID NO: 948511 - DNA, 33 bp, Homo sapien
agcaatgccctgatacacatgacattcctagaa

SEQ ID NO: 948512 - DNA, 33 bp, Homo sapien
agcaatgccctgatacgcatgacattcctagaa

SEQ ID NO: 948513 - DNA, 33 bp, Homo sapien
ttgcagtcggtaggagccgctttaagctgataa

SEQ ID NO: 948514 - DNA, 33 bp, Homo sapien
ttgcagtcggtaggagtcgctttaagctgataa

SEQ ID NO: 948515 - DNA, 33 bp, Homo sapien
gtatgagggacgaggcactggactggaggcttt

SEQ ID NO: 948516 - DNA, 33 bp, Homo sapien
gtatgagggacgaggcgctggactggaggcttt

SEQ ID NO: 948517 - DNA, 33 bp, Homo sapien
ttccttgattgttgtcaccttagctcagtgaga

SEQ ID NO: 948518 - DNA, 33 bp, Homo sapien
ttccttgattgttgtcgccttagctcagtgaga

SEQ ID NO: 948519 - DNA, 33 bp, Homo sapien
gagagcttcgactacccatgatttcgtctccaa

SEQ ID NO: 948520 - DNA, 33 bp, Homo sapien
gagagcttcgactacctatgatttcgtctccaa

SEQ ID NO: 948521 - DNA, 33 bp, Homo sapien
ttgggatgctcacacacaaaaagatgccacagg

SEQ ID NO: 948522 - DNA, 33 bp, Homo sapien
ttgggatgctcacacataaaaagatgccacagg

SEQ ID NO: 948523 - DNA, 33 bp, Homo sapien
caggccttttacgacacgatgataggactgtca

SEQ ID NO: 948524 - DNA, 33 bp, Homo sapien
caggccttttacgacatgatgataggactgtca

SEQ ID NO: 948525 - DNA, 33 bp, Homo sapien
tgtgaagaaaagaagacgctatattaatcacag

SEQ ID NO: 948526 - DNA, 33 bp, Homo sapien
tgtgaagaaaagaagatgctatattaatcacag

SEQ ID NO: 948527 - DNA, 33 bp, Homo sapien
cccttcagaatcgtgacctgttacatcactagc

SEQ ID NO: 948528 - DNA, 33 bp, Homo sapien
cccttcagaatcgtgatctgttacatcactagc

SEQ ID NO: 948529 - DNA, 33 bp, Homo sapien
tctacagaggacccaacggtggccaactgagtg

SEQ ID NO: 948530 - DNA, 33 bp, Homo sapien
tctacagaggacccaatggtggccaactgagtg

SEQ ID NO: 948531 - DNA, 33 bp, Homo sapien
tgtgacttttgccacccacagtgactttgacca

SEQ ID NO: 948532 - DNA, 33 bp, Homo sapien
tgtgacttttgccaccgacagtgactttgacca

SEQ ID NO: 948533 - DNA, 33 bp, Homo sapien
tatggctcctctcagcagaaaacatcctcactg

SEQ ID NO: 948534 - DNA, 33 bp, Homo sapien
tatggctcctctcagcggaaaacatcctcactg

SEQ ID NO: 948535 - DNA, 33 bp, Homo sapien
aggaatatggaaaatccgatggatcctaccctc

SEQ ID NO: 948536 - DNA, 33 bp, Homo sapien
aggaatatggaaaatcggatggatcctaccctc

SEQ ID NO: 948537 - DNA, 33 bp, Homo sapien
cccacctgccacgcacgatccgggagagtctgg

SEQ ID NO: 948538 - DNA, 33 bp, Homo sapien
cccacctgccacgcactatccgggagagtctgg

SEQ ID NO: 948539 - DNA, 33 bp, Homo sapien
gagtatgcttgtattcaatgctgtattcctcct

SEQ ID NO: 948540 - DNA, 33 bp, Homo sapien
gagtatgcttgtattcgatgctgtattcctcct

SEQ ID NO: 948541 - DNA, 33 bp, Homo sapien
ctgaattctaggatcacgaagggctctgccagc

SEQ ID NO: 948542 - DNA, 33 bp, Homo sapien
ctgaattctaggatcatgaagggctctgccagc

SEQ ID NO: 948543 - DNA, 33 bp, Homo sapien
gggaaaagctcagtgacgtgggaaactcccttc

SEQ ID NO: 948544 - DNA, 33 bp, Homo sapien
gggaaaagctcagtgatgtgggaaactcccttc

SEQ ID NO: 948545 - DNA, 33 bp, Homo sapien
tatctttacccttaaaaccacactacacatcat

SEQ ID NO: 948546 - DNA, 33 bp, Homo sapien
tatctttacccttaaagccacactacacatcat

SEQ ID NO: 948547 - DNA, 33 bp, Homo sapien
agagagaataattataaggaacaagactgaagg

SEQ ID NO: 948548 - DNA, 33 bp, Homo sapien
agagagaataattatagggaacaagactgaagg

SEQ ID NO: 948549 - DNA, 33 bp, Homo sapien
agagaactggggaccactgaggaaaggatcagg

SEQ ID NO: 948550 - DNA, 33 bp, Homo sapien
agagaactggggaccattgaggaaaggatcagg

SEQ ID NO: 948551 - DNA, 33 bp, Homo sapien
ctggcaaccataaacacaactgaaagcatctct

SEQ ID NO: 948552 - DNA, 33 bp, Homo sapien
ctggcaaccataaacagaactgaaagcatctct

SEQ ID NO: 948553 - DNA, 33 bp, Homo sapien
gtattcaaacttcagaagggtctccaggaaaca

SEQ ID NO: 948554 - DNA, 33 bp, Homo sapien
gtattcaaacttcagaggggtctccaggaaaca

SEQ ID NO: 948555 - DNA, 33 bp, Homo sapien
aacagaaagacaagagacaagatgagcaggtgt

SEQ ID NO: 948556 - DNA, 33 bp, Homo sapien
aacagaaagacaagagtcaagatgagcaggtgt

SEQ ID NO: 948557 - DNA, 33 bp, Homo sapien
ggtcaagattcttgtgaaaaccttgagtcttta

SEQ ID NO: 948558 - DNA, 33 bp, Homo sapien
ggtcaagattcttgtggaaaccttgagtcttta

SEQ ID NO: 948559 - DNA, 33 bp, Homo sapien
ggggccaggatcaaaacggctccctgtgctggg

SEQ ID NO: 948560 - DNA, 33 bp, Homo sapien
ggggccaggatcaaaatggctccctgtgctggg

SEQ ID NO: 948561 - DNA, 33 bp, Homo sapien
ctcctttcttttcaaccaaccctgggctcaagg

SEQ ID NO: 948562 - DNA, 33 bp, Homo sapien
ctcctttcttttcaacgaaccctgggctcaagg

SEQ ID NO: 948563 - DNA, 33 bp, Homo sapien
ggacctctgagtctcacgtctcttctagcaacc

SEQ ID NO: 948564 - DNA, 33 bp, Homo sapien
ggacctctgagtctcatgtctcttctagcaacc

SEQ ID NO: 948565 - DNA, 33 bp, Homo sapien
gcccgatgaagaatccaagttctctgccacgtg

SEQ ID NO: 948566 - DNA, 33 bp, Homo sapien
gcccgatgaagaatccgagttctctgccacgtg

SEQ ID NO: 948567 - DNA, 33 bp, Homo sapien
acaggctgtcctcaaggcacccttcgctgatgg

SEQ ID NO: 948568 - DNA, 33 bp, Homo sapien
acaggctgtcctcaagtcacccttcgctgatgg

SEQ ID NO: 948569 - DNA, 33 bp, Homo sapien
gcagcctacagtttaacaattggccagctccag

SEQ ID NO: 948570 - DNA, 33 bp, Homo sapien
gcagcctacagtttaagaattggccagctccag

SEQ ID NO: 948571 - DNA, 33 bp, Homo sapien
ccacagcaattggcaaatggtacaaaccagagc

SEQ ID NO: 948572 - DNA, 33 bp, Homo sapien
ccacagcaattggcaagtggtacaaaccagagc

SEQ ID NO: 948573 - DNA, 33 bp, Homo sapien
ccccaaatataatcgcactgaggttgaaactgt

SEQ ID NO: 948574 - DNA, 33 bp, Homo sapien
ccccaaatataatcgcgctgaggttgaaactgt

SEQ ID NO: 948575 - DNA, 33 bp, Homo sapien
ctcaaatgcttgtttccagcacaaagattctgt

SEQ ID NO: 948576 - DNA, 33 bp, Homo sapien
ctcaaatgcttgtttctagcacaaagattctgt

SEQ ID NO: 948577 - DNA, 33 bp, Homo sapien
tgtggggagacaggtaaacaggcagccttagaa

SEQ ID NO: 948578 - DNA, 33 bp, Homo sapien
tgtggggagacaggtagacaggcagccttagaa

SEQ ID NO: 948579 - DNA, 33 bp, Homo sapien
gccctcaatcccattcactagagaggagtcctt

SEQ ID NO: 948580 - DNA, 33 bp, Homo sapien
gccctcaatcccattcgctagagaggagtcctt

SEQ ID NO: 948581 - DNA, 33 bp, Homo sapien
tcttgcttcaaaccaaactcatgtgtaagcccc

SEQ ID NO: 948582 - DNA, 33 bp, Homo sapien
tcttgcttcaaaccaagctcatgtgtaagcccc

SEQ ID NO: 948583 - DNA, 33 bp, Homo sapien
tctgcgggaatggccaatcttgagcaagtcacc

SEQ ID NO: 948584 - DNA, 33 bp, Homo sapien
tctgcgggaatggccagtcttgagcaagtcacc

SEQ ID NO: 948585 - DNA, 33 bp, Homo sapien
cccagcctcctgacctcagagcctacagtctgt

SEQ ID NO: 948586 - DNA, 33 bp, Homo sapien
cccagcctcctgacctgagagcctacagtctgt

SEQ ID NO: 948587 - DNA, 33 bp, Homo sapien
gcagttactatgatgaccagtcccatttgacag

SEQ ID NO: 948588 - DNA, 33 bp, Homo sapien
gcagttactatgatgagcagtcccatttgacag

SEQ ID NO: 948589 - DNA, 33 bp, Homo sapien
ggcggctgcatcgggaagaacttggttttagtc

SEQ ID NO: 948590 - DNA, 33 bp, Homo sapien
ggcggctgcatcgggaggaacttggttttagtc

SEQ ID NO: 948591 - DNA, 33 bp, Homo sapien
ccgaccgttcacacaacggagaggagctcatga

SEQ ID NO: 948592 - DNA, 33 bp, Homo sapien
ccgaccgttcacacaatggagaggagctcatga

SEQ ID NO: 948593 - DNA, 33 bp, Homo sapien
ttgaagggtcaaaataacaggtagctgtagatg

SEQ ID NO: 948594 - DNA, 33 bp, Homo sapien
ttgaagggtcaaaataccaggtagctgtagatg

SEQ ID NO: 948595 - DNA, 33 bp, Homo sapien
ctgaagatcagaaaggcaaggaatgctaggcac

SEQ ID NO: 948596 - DNA, 33 bp, Homo sapien
ctgaagatcagaaagggaaggaatgctaggcac

SEQ ID NO: 948597 - DNA, 33 bp, Homo sapien
gtatcctggacacataaaatacttgcttgacac

SEQ ID NO: 948598 - DNA, 33 bp, Homo sapien
gtatcctggacacatataatacttgcttgacac

SEQ ID NO: 948599 - DNA, 33 bp, Homo sapien
ctgggagcagtaacaaaatattgtcagcagcgg

SEQ ID NO: 948600 - DNA, 33 bp, Homo sapien
ctgggagcagtaacaagatattgtcagcagcgg

SEQ ID NO: 948601 - DNA, 33 bp, Homo sapien
tcattatttcttttctcaaactccatcatcagt

SEQ ID NO: 948602 - DNA, 33 bp, Homo sapien
tcattatttcttttctgaaactccatcatcagt

SEQ ID NO: 948603 - DNA, 33 bp, Homo sapien
tctcatgattctacacgagagctctctctgcta

SEQ ID NO: 948604 - DNA, 33 bp, Homo sapien
tctcatgattctacactagagctctctctgcta

SEQ ID NO: 948605 - DNA, 33 bp, Homo sapien
agagggttccactgtggatgagcaacaagtttt

SEQ ID NO: 948606 - DNA, 33 bp, Homo sapien
agagggttccactgtgtatgagcaacaagtttt

SEQ ID NO: 948607 - DNA, 33 bp, Homo sapien
atgtatttttccttaacgaacacatcgtaccat

SEQ ID NO: 948608 - DNA, 33 bp, Homo sapien
atgtatttttccttaatgaacacatcgtaccat

SEQ ID NO: 948609 - DNA, 33 bp, Homo sapien
tggagagccacccatacaatccagctctctcat

SEQ ID NO: 948610 - DNA, 33 bp, Homo sapien
tggagagccacccatagaatccagctctctcat

SEQ ID NO: 948611 - DNA, 33 bp, Homo sapien
catgtggtacatttcaactggagctctagacac

SEQ ID NO: 948612 - DNA, 33 bp, Homo sapien
catgtggtacatttcacctggagctctagacac

SEQ ID NO: 948613 - DNA, 33 bp, Homo sapien
catgctaagatctgaaaaacactgctctcaaga

SEQ ID NO: 948614 - DNA, 33 bp, Homo sapien
catgctaagatctgaacaacactgctctcaaga

SEQ ID NO: 948615 - DNA, 33 bp, Homo sapien
ctctggccaaactaagccaatctaaatcactta

SEQ ID NO: 948616 - DNA, 33 bp, Homo sapien
ctctggccaaactaaggcaatctaaatcactta

SEQ ID NO: 948617 - DNA, 33 bp, Homo sapien
cagccctagtgggaaaagagtgagtgtaagcag

SEQ ID NO: 948618 - DNA, 33 bp, Homo sapien
cagccctagtgggaaacgagtgagtgtaagcag

SEQ ID NO: 948619 - DNA, 33 bp, Homo sapien
cctagaaatgcaaagcaaaggggaggccaccag

SEQ ID NO: 948620 - DNA, 33 bp, Homo sapien
cctagaaatgcaaagcgaaggggaggccaccag

SEQ ID NO: 948621 - DNA, 33 bp, Homo sapien
gttctgtctttgtagcacattggttcagcagtt

SEQ ID NO: 948622 - DNA, 33 bp, Homo sapien
gttctgtctttgtagcccattggttcagcagtt

SEQ ID NO: 948623 - DNA, 33 bp, Homo sapien
agaatagatcctgggaataaaataagttgggga

SEQ ID NO: 948624 - DNA, 33 bp, Homo sapien
agaatagatcctgggactaaaataagttgggga

SEQ ID NO: 948625 - DNA, 33 bp, Homo sapien
gaaactgaagctcagaaagttgaaatagcggcc

SEQ ID NO: 948626 - DNA, 33 bp, Homo sapien
gaaactgaagctcagagagttgaaatagcggcc

SEQ ID NO: 948627 - DNA, 33 bp, Homo sapien
cctggagatttacaggacccagtctggtgcaca

SEQ ID NO: 948628 - DNA, 33 bp, Homo sapien
cctggagatttacagggcccagtctggtgcaca

SEQ ID NO: 948629 - DNA, 33 bp, Homo sapien
gagagtgccaagtgtacgcttgtcagaggtgaa

SEQ ID NO: 948630 - DNA, 33 bp, Homo sapien
gagagtgccaagtgtatgcttgtcagaggtgaa

SEQ ID NO: 948631 - DNA, 33 bp, Homo sapien
tgtacaagagtttagacccagaaacagagtaga

SEQ ID NO: 948632 - DNA, 33 bp, Homo sapien
tgtacaagagtttagagccagaaacagagtaga

SEQ ID NO: 948633 - DNA, 33 bp, Homo sapien
tgtatttttcactgcaactcattgtgcacgcac

SEQ ID NO: 948634 - DNA, 33 bp, Homo sapien
tgtatttttcactgcagctcattgtgcacgcac

SEQ ID NO: 948635 - DNA, 33 bp, Homo sapien
cttataaaatctttaacgagaaagcctgcagct

SEQ ID NO: 948636 - DNA, 33 bp, Homo sapien
cttataaaatctttaatgagaaagcctgcagct

SEQ ID NO: 948637 - DNA, 33 bp, Homo sapien
caagtttgtgcaaatacgtaagtggacattttt

SEQ ID NO: 948638 - DNA, 33 bp, Homo sapien
caagtttgtgcaaatatgtaagtggacattttt

SEQ ID NO: 948639 - DNA, 33 bp, Homo sapien
gtcagtacatctgttcactaggagaatcaggct

SEQ ID NO: 948640 - DNA, 33 bp, Homo sapien
gtcagtacatctgttcgctaggagaatcaggct

SEQ ID NO: 948641 - DNA, 33 bp, Homo sapien
gaatatgcaaagtccacccaaattatatccaaa

SEQ ID NO: 948642 - DNA, 33 bp, Homo sapien
gaatatgcaaagtccatccaaattatatccaaa

SEQ ID NO: 948643 - DNA, 33 bp, Homo sapien
gaatgtttcaggaaggacaactgtagagaagca

SEQ ID NO: 948644 - DNA, 33 bp, Homo sapien
gaatgtttcaggaagggcaactgtagagaagca

SEQ ID NO: 948645 - DNA, 33 bp, Homo sapien
aatacaaattttgaacaaagattctcattctaa

SEQ ID NO: 948646 - DNA, 33 bp, Homo sapien
aatacaaattttgaacgaagattctcattctaa

SEQ ID NO: 948647 - DNA, 33 bp, Homo sapien
agataactactcccaactgacccaaataaacca

SEQ ID NO: 948648 - DNA, 33 bp, Homo sapien
agataactactcccaattgacccaaataaacca

SEQ ID NO: 948649 - DNA, 33 bp, Homo sapien
agtcttacccttcctgcaactgaggacccgctt

SEQ ID NO: 948650 - DNA, 33 bp, Homo sapien
agtcttacccttcctggaactgaggacccgctt

SEQ ID NO: 948651 - DNA, 33 bp, Homo sapien
gtgaggccaaactgcacggttctgaaacctggt

SEQ ID NO: 948652 - DNA, 33 bp, Homo sapien
gtgaggccaaactgcatggttctgaaacctggt

SEQ ID NO: 948653 - DNA, 33 bp, Homo sapien
tttatatgtaaaaaaactgacccagagaaataa

SEQ ID NO: 948654 - DNA, 33 bp, Homo sapien
tttatatgtaaaaaaagtgacccagagaaataa

SEQ ID NO: 948655 - DNA, 33 bp, Homo sapien
gtgttttggccacataccttataatgtaatgct

SEQ ID NO: 948656 - DNA, 33 bp, Homo sapien
gtgttttggccacatagcttataatgtaatgct

SEQ ID NO: 948657 - DNA, 33 bp, Homo sapien
taatcagcattcatcacgatccatcttttttta

SEQ ID NO: 948658 - DNA, 33 bp, Homo sapien
taatcagcattcatcatgatccatcttttttta

SEQ ID NO: 948659 - DNA, 33 bp, Homo sapien
ttatgcatatgttggccaattcgaggagataat

SEQ ID NO: 948660 - DNA, 33 bp, Homo sapien
ttatgcatatgttggctaattcgaggagataat

SEQ ID NO: 948661 - DNA, 33 bp, Homo sapien
aaaatggtttcaaatacactggttaactggtgt

SEQ ID NO: 948662 - DNA, 33 bp, Homo sapien
aaaatggtttcaaatatactggttaactggtgt

SEQ ID NO: 948663 - DNA, 33 bp, Homo sapien
actcaaacttcaaggaagcaaactgccttcatt

SEQ ID NO: 948664 - DNA, 33 bp, Homo sapien
actcaaacttcaaggaggcaaactgccttcatt

SEQ ID NO: 948665 - DNA, 33 bp, Homo sapien
cacgtagattcctttacgtaactgttaactgac

SEQ ID NO: 948666 - DNA, 33 bp, Homo sapien
cacgtagattcctttaggtaactgttaactgac

SEQ ID NO: 948667 - DNA, 33 bp, Homo sapien
catttcaaagtcaagaaattaaaaccaccatct

SEQ ID NO: 948668 - DNA, 33 bp, Homo sapien
catttcaaagtcaagagattaaaaccaccatct

SEQ ID NO: 948669 - DNA, 33 bp, Homo sapien
aaacttactatgatacaaggagaggctctcacc

SEQ ID NO: 948670 - DNA, 33 bp, Homo sapien
aaacttactatgataccaggagaggctctcacc

SEQ ID NO: 948671 - DNA, 33 bp, Homo sapien
ggtgaacgtttttcagacaaaagcttacatatg

SEQ ID NO: 948672 - DNA, 33 bp, Homo sapien
ggtgaacgtttttcagtcaaaagcttacatatg

SEQ ID NO: 948673 - DNA, 33 bp, Homo sapien
accctaagaaaaatcaatcatatcaaagcacct

SEQ ID NO: 948674 - DNA, 33 bp, Homo sapien
accctaagaaaaatcagtcatatcaaagcacct

SEQ ID NO: 948675 - DNA, 33 bp, Homo sapien
ttctcggattttctcaccatccccatgtacatt

SEQ ID NO: 948676 - DNA, 33 bp, Homo sapien
ttctcggattttctcagcatccccatgtacatt

SEQ ID NO: 948677 - DNA, 33 bp, Homo sapien
gattttattctactccaatttcattctgtctca

SEQ ID NO: 948678 - DNA, 33 bp, Homo sapien
gattttattctactccgatttcattctgtctca

SEQ ID NO: 948679 - DNA, 33 bp, Homo sapien
acatttctgtattcgacgttaagaattgaagtg

SEQ ID NO: 948680 - DNA, 33 bp, Homo sapien
acatttctgtattcgatgttaagaattgaagtg

SEQ ID NO: 948681 - DNA, 33 bp, Homo sapien
ttgttactttgcccaacgaacactggttgcaag

SEQ ID NO: 948682 - DNA, 33 bp, Homo sapien
ttgttactttgcccaatgaacactggttgcaag

SEQ ID NO: 948683 - DNA, 33 bp, Homo sapien
ggaacaaaggcaaacaacattagcagagagaaa

SEQ ID NO: 948684 - DNA, 33 bp, Homo sapien
ggaacaaaggcaaacagcattagcagagagaaa

SEQ ID NO: 948685 - DNA, 33 bp, Homo sapien
atctcctctgcttatacggataccaattgtatt

SEQ ID NO: 948686 - DNA, 33 bp, Homo sapien
atctcctctgcttatatggataccaattgtatt

SEQ ID NO: 948687 - DNA, 33 bp, Homo sapien
taagcactttaccaggaaggttctatcattttt

SEQ ID NO: 948688 - DNA, 33 bp, Homo sapien
taagcactttaccaggtaggttctatcattttt

SEQ ID NO: 948689 - DNA, 33 bp, Homo sapien
gaatgtgactggatggaaacctctttaaatgaa

SEQ ID NO: 948690 - DNA, 33 bp, Homo sapien
gaatgtgactggatgggaacctctttaaatgaa

SEQ ID NO: 948691 - DNA, 33 bp, Homo sapien
gtcttggctttcttgacgagcttttctggatcc

SEQ ID NO: 948692 - DNA, 33 bp, Homo sapien
gtcttggctttcttgatgagcttttctggatcc

SEQ ID NO: 948693 - DNA, 33 bp, Homo sapien
agtagatgctctggaacgtttgcctccacttcc

SEQ ID NO: 948694 - DNA, 33 bp, Homo sapien
agtagatgctctggaatgtttgcctccacttcc

SEQ ID NO: 948695 - DNA, 33 bp, Homo sapien
gactcaggggtgacctcagagagtcctaaaatg

SEQ ID NO: 948696 - DNA, 33 bp, Homo sapien
gactcaggggtgacctgagagagtcctaaaatg

SEQ ID NO: 948697 - DNA, 33 bp, Homo sapien
ctgtgatgagagaaaacataggcagagagactt

SEQ ID NO: 948698 - DNA, 33 bp, Homo sapien
ctgtgatgagagaaaatataggcagagagactt

SEQ ID NO: 948699 - DNA, 33 bp, Homo sapien
agtggaagggatgacactgaataaccttaccat

SEQ ID NO: 948700 - DNA, 33 bp, Homo sapien
agtggaagggatgacagtgaataaccttaccat

SEQ ID NO: 948701 - DNA, 33 bp, Homo sapien
gtttggctgctatgcccaatgcagccacgaata

SEQ ID NO: 948702 - DNA, 33 bp, Homo sapien
gtttggctgctatgcctaatgcagccacgaata

SEQ ID NO: 948703 - DNA, 33 bp, Homo sapien
aaacacttgtacacagcagaataggtatttaac

SEQ ID NO: 948704 - DNA, 33 bp, Homo sapien
aaacacttgtacacaggagaataggtatttaac

SEQ ID NO: 948705 - DNA, 33 bp, Homo sapien
tctcattcctacatagcagcccctagagttaaa

SEQ ID NO: 948706 - DNA, 33 bp, Homo sapien
tctcattcctacatagtagcccctagagttaaa

SEQ ID NO: 948707 - DNA, 33 bp, Homo sapien
atcttcctcgaacacaagtctgagcatgctgct

SEQ ID NO: 948708 - DNA, 33 bp, Homo sapien
atcttcctcgaacacacgtctgagcatgctgct

SEQ ID NO: 948709 - DNA, 33 bp, Homo sapien
ggtaacaggattaagacacaagtaaagacaggc

SEQ ID NO: 948710 - DNA, 33 bp, Homo sapien
ggtaacaggattaagatacaagtaaagacaggc

SEQ ID NO: 948711 - DNA, 33 bp, Homo sapien
tggaagttccacattaaggtgccagcagatttg

SEQ ID NO: 948712 - DNA, 33 bp, Homo sapien
tggaagttccacattagggtgccagcagatttg

SEQ ID NO: 948713 - DNA, 33 bp, Homo sapien
ttattgaaacggattaggggccagtgtcgatca

SEQ ID NO: 948714 - DNA, 33 bp, Homo sapien
ttattgaaacggattatgggccagtgtcgatca

SEQ ID NO: 948715 - DNA, 33 bp, Homo sapien
ccttccaagctacaaaaacactttaacaacttt

SEQ ID NO: 948716 - DNA, 33 bp, Homo sapien
ccttccaagctacaaagacactttaacaacttt

SEQ ID NO: 948717 - DNA, 33 bp, Homo sapien
gaagttgggatcttcaccggatagaaaaagcag

SEQ ID NO: 948718 - DNA, 33 bp, Homo sapien
gaagttgggatcttcagcggatagaaaaagcag

SEQ ID NO: 948719 - DNA, 33 bp, Homo sapien
aaaccatatcacaaggcccaagtgtcaaagcat

SEQ ID NO: 948720 - DNA, 33 bp, Homo sapien
aaaccatatcacaaggtccaagtgtcaaagcat

SEQ ID NO: 948721 - DNA, 33 bp, Homo sapien
tccatgatgacaaaccactaaattggataactc

SEQ ID NO: 948722 - DNA, 33 bp, Homo sapien
tccatgatgacaaaccgctaaattggataactc

SEQ ID NO: 948723 - DNA, 33 bp, Homo sapien
aaataatctctgcagacatgatggcatcttagc

SEQ ID NO: 948724 - DNA, 33 bp, Homo sapien
aaataatctctgcagatatgatggcatcttagc

SEQ ID NO: 948725 - DNA, 33 bp, Homo sapien
aacccctacatctaaagagtaaattcaaaacaa

SEQ ID NO: 948726 - DNA, 33 bp, Homo sapien
aacccctacatctaaatagtaaattcaaaacaa

SEQ ID NO: 948727 - DNA, 33 bp, Homo sapien
gataatcatgcaatcagtagcaatcattatttt

SEQ ID NO: 948728 - DNA, 33 bp, Homo sapien
gataatcatgcaatcattagcaatcattatttt

SEQ ID NO: 948729 - DNA, 33 bp, Homo sapien
tgttattacacacagaactacgcttcaagaatg

SEQ ID NO: 948730 - DNA, 33 bp, Homo sapien
tgttattacacacagacctacgcttcaagaatg

SEQ ID NO: 948731 - DNA, 33 bp, Homo sapien
tctgagtgagggctgacagcaggtatgtcacac

SEQ ID NO: 948732 - DNA, 33 bp, Homo sapien
tctgagtgagggctgagagcaggtatgtcacac

SEQ ID NO: 948733 - DNA, 33 bp, Homo sapien
accatccaggtccctacggtcaagatgtacttg

SEQ ID NO: 948734 - DNA, 33 bp, Homo sapien
accatccaggtccctatggtcaagatgtacttg

SEQ ID NO: 948735 - DNA, 33 bp, Homo sapien
ccaaacaaccagtgcaaaatcctcattctcctc

SEQ ID NO: 948736 - DNA, 33 bp, Homo sapien
ccaaacaaccagtgcagaatcctcattctcctc

SEQ ID NO: 948737 - DNA, 33 bp, Homo sapien; identical to SEQ ID NO: 948735

SEQ ID NO: 948738 - DNA, 33 bp, Homo sapien; identical to SEQ ID NO: 948736

SEQ ID NO: 948739 - DNA, 33 bp, Homo sapien
cacagaatcatggggtaaatgcctaagcggtgt

SEQ ID NO: 948740 - DNA, 33 bp, Homo sapien
cacagaatcatggggtgaatgcctaagcggtgt

SEQ ID NO: 948741 - DNA, 33 bp, Homo sapien
gcaagtataggcagataagttgatgtcagctcc

SEQ ID NO: 948742 - DNA, 33 bp, Homo sapien
gcaagtataggcagatcagttgatgtcagctcc

SEQ ID NO: 948743 - DNA, 33 bp, Homo sapien
tatccgtgtgtacctgcaggttttcactttgaa

SEQ ID NO: 948744 - DNA, 33 bp, Homo sapien
tatccgtgtgtacctgtaggttttcactttgaa

SEQ ID NO: 948745 - DNA, 33 bp, Homo sapien
atgggaattttgaatgaagatgaaagtttaact

SEQ ID NO: 948746 - DNA, 33 bp, Homo sapien
atgggaattttgaatgcagatgaaagtttaact

SEQ ID NO: 948747 - DNA, 33 bp, Homo sapien
agggccaggaaggaaaataacggaagatgagag

SEQ ID NO: 948748 - DNA, 33 bp, Homo sapien
agggccaggaaggaaagtaacggaagatgagag

SEQ ID NO: 948749 - DNA, 33 bp, Homo sapien
cttaagctaattgatacgtgaaaattcagatta

SEQ ID NO: 948750 - DNA, 33 bp, Homo sapien
cttaagctaattgatatgtgaaaattcagatta

SEQ ID NO: 948751 - DNA, 33 bp, Homo sapien
acctggagggagataactgcattctgagcattg

SEQ ID NO: 948752 - DNA, 33 bp, Homo sapien
acctggagggagataagtgcattctgagcattg

SEQ ID NO: 948753 - DNA, 33 bp, Homo sapien
attgtgtgacactctgcagatggatttgatcca

SEQ ID NO: 948754 - DNA, 33 bp, Homo sapien
attgtgtgacactctggagatggatttgatcca

SEQ ID NO: 948755 - DNA, 33 bp, Homo sapien
tgctcagaagaaaagactcctttcaaaacatca

SEQ ID NO: 948756 - DNA, 33 bp, Homo sapien
tgctcagaagaaaagattcctttcaaaacatca

SEQ ID NO: 948757 - DNA, 33 bp, Homo sapien
aggaagctgtagaagaaaagttggaaactagca

SEQ ID NO: 948758 - DNA, 33 bp, Homo sapien
aggaagctgtagaagacaagttggaaactagca

SEQ ID NO: 948759 - DNA, 33 bp, Homo sapien
cacctgaccgttaagaagtttgcaaaggatgcg

SEQ ID NO: 948760 - DNA, 33 bp, Homo sapien
cacctgaccgttaagaggtttgcaaaggatgcg

SEQ ID NO: 948761 - DNA, 33 bp, Homo sapien
tagctgagaagaaaagcctccttcatatacaat

SEQ ID NO: 948762 - DNA, 33 bp, Homo sapien
tagctgagaagaaaaggctccttcatatacaat

SEQ ID NO: 948763 - DNA, 33 bp, Homo sapien
gcagtataagggccacaaccacctcggaatgca

SEQ ID NO: 948764 - DNA, 33 bp, Homo sapien
gcagtataagggccacgaccacctcggaatgca

SEQ ID NO: 948765 - DNA, 33 bp, Homo sapien
ccccatgatgtcagaaagtgccacagtctcatg

SEQ ID NO: 948766 - DNA, 33 bp, Homo sapien
ccccatgatgtcagaaggtgccacagtctcatg

SEQ ID NO: 948767 - DNA, 33 bp, Homo sapien; identical to SEQ ID NO: 948765

SEQ ID NO: 948768 - DNA, 33 bp, Homo sapien; identical to SEQ ID NO: 948766

SEQ ID NO: 948769 - DNA, 33 bp, Homo sapien
gtctgtggattgaagacaggtagttccttttaa

SEQ ID NO: 948770 - DNA, 33 bp, Homo sapien
gtctgtggattgaagagaggtagttccttttaa

SEQ ID NO: 948771 - DNA, 33 bp, Homo sapien
aagggccatgatgggcccgaggacaacaatgaa

SEQ ID NO: 948772 - DNA, 33 bp, Homo sapien
aagggccatgatgggctcgaggacaacaatgaa

SEQ ID NO: 948773 - DNA, 33 bp, Homo sapien
atttctggtttttctggaagatgctagatctgt

SEQ ID NO: 948774 - DNA, 33 bp, Homo sapien
atttctggtttttctgtaagatgctagatctgt

SEQ ID NO: 948775 - DNA, 33 bp, Homo sapien
aataagagtgaaaaaacaatgaatgcttcagct

SEQ ID NO: 948776 - DNA, 33 bp, Homo sapien
aataagagtgaaaaaataatgaatgcttcagct

SEQ ID NO: 948777 - DNA, 33 bp, Homo sapien
agatggcctggagtccagaacagactggattag

SEQ ID NO: 948778 - DNA, 33 bp, Homo sapien
agatggcctggagtccggaacagactggattag

SEQ ID NO: 948779 - DNA, 33 bp, Homo sapien
acaccttcctcttggcacatattcatggacctc

SEQ ID NO: 948780 - DNA, 33 bp, Homo sapien
acaccttcctcttggcgcatattcatggacctc

SEQ ID NO: 948781 - DNA, 33 bp, Homo sapien
agagccgtgagtgaataaatcctagatctcaca

SEQ ID NO: 948782 - DNA, 33 bp, Homo sapien
agagccgtgagtgaatgaatcctagatctcaca

SEQ ID NO: 948783 - DNA, 33 bp, Homo sapien
tcaccacactgctttcaatgatggttgaactaa

SEQ ID NO: 948784 - DNA, 33 bp, Homo sapien
tcaccacactgctttccatgatggttgaactaa

SEQ ID NO: 948785 - DNA, 33 bp, Homo sapien
atgtgaaaccactggaactctcaaactctgctg

SEQ ID NO: 948786 - DNA, 33 bp, Homo sapien
atgtgaaaccactggatctctcaaactctgctg

SEQ ID NO: 948787 - DNA, 33 bp, Homo sapien
gtaatttagaaagaccaattacaaaagtcaact

SEQ ID NO: 948788 - DNA, 33 bp, Homo sapien
gtaatttagaaagacccattacaaaagtcaact

SEQ ID NO: 948789 - DNA, 33 bp, Homo sapien
ctcttggttggaaaagacctggaagtgaccagt

SEQ ID NO: 948790 - DNA, 33 bp, Homo sapien
ctcttggttggaaaaggcctggaagtgaccagt

SEQ ID NO: 948791 - DNA, 33 bp, Homo sapien
cccttacgcttctgagacccggaccattgctcc

SEQ ID NO: 948792 - DNA, 33 bp, Homo sapien
cccttacgcttctgaggcccggaccattgctcc

SEQ ID NO: 948793 - DNA, 33 bp, Homo sapien
cttttcttgatcactgcagctagagccttagca

SEQ ID NO: 948794 - DNA, 33 bp, Homo sapien
cttttcttgatcactgtagctagagccttagca

SEQ ID NO: 948795 - DNA, 33 bp, Homo sapien
agttactaacaagtgaacaacacatcagtaaca

SEQ ID NO: 948796 - DNA, 33 bp, Homo sapien
agttactaacaagtgagcaacacatcagtaaca

SEQ ID NO: 948797 - DNA, 33 bp, Homo sapien
ctggagccaaactgatcagaaaaatgagccctg

SEQ ID NO: 948798 - DNA, 33 bp, Homo sapien
ctggagccaaactgattagaaaaatgagccctg

SEQ ID NO: 948799 - DNA, 33 bp, Homo sapien
cctctctcgttttttacgcacttgtacagatct

SEQ ID NO: 948800 - DNA, 33 bp, Homo sapien
cctctctcgttttttatgcacttgtacagatct

SEQ ID NO: 948801 - DNA, 33 bp, Homo sapien
ctattgtcaaattacacaacactccaaagagaa

SEQ ID NO: 948802 - DNA, 33 bp, Homo sapien
ctattgtcaaattacagaacactccaaagagaa

SEQ ID NO: 948803 - DNA, 33 bp, Homo sapien
aatagatctttttgaaaaactaggaaccctatg

SEQ ID NO: 948804 - DNA, 33 bp, Homo sapien
aatagatctttttgaacaactaggaaccctatg

SEQ ID NO: 948805 - DNA, 33 bp, Homo sapien
ttccttgtaagacagactaaaatcacacctgcc

SEQ ID NO: 948806 - DNA, 33 bp, Homo sapien
ttccttgtaagacagagtaaaatcacacctgcc

SEQ ID NO: 948807 - DNA, 33 bp, Homo sapien
agagaagtaaaggaacggctcatggccagccag

SEQ ID NO: 948808 - DNA, 33 bp, Homo sapien
agagaagtaaaggaactgctcatggccagccag

SEQ ID NO: 948809 - DNA, 33 bp, Homo sapien
catctcttccctttcaacaagttctgtgcccta

SEQ ID NO: 948810 - DNA, 33 bp, Homo sapien
catctcttccctttcatcaagttctgtgcccta

SEQ ID NO: 948811 - DNA, 33 bp, Homo sapien
acatgttccactgtcccacgatttgggaatgag

SEQ ID NO: 948812 - DNA, 33 bp, Homo sapien
acatgttccactgtccgacgatttgggaatgag

SEQ ID NO: 948813 - DNA, 33 bp, Homo sapien
tcacatttccccggaacctccagttgcccttca

SEQ ID NO: 948814 - DNA, 33 bp, Homo sapien
tcacatttccccggaatctccagttgcccttca

SEQ ID NO: 948815 - DNA, 33 bp, Homo sapien
caggtactgggtaatggagtgtggaaaatcaag

SEQ ID NO: 948816 - DNA, 33 bp, Homo sapien
caggtactgggtaatgtagtgtggaaaatcaag

SEQ ID NO: 948817 - DNA, 33 bp, Homo sapien
ggaagtaaaaacgtaactgaatggtttgctctg

SEQ ID NO: 948818 - DNA, 33 bp, Homo sapien
ggaagtaaaaacgtaattgaatggtttgctctg

SEQ ID NO: 948819 - DNA, 33 bp, Homo sapien
gtacccgagtaatggaatatgaagtgactttgg

SEQ ID NO: 948820 - DNA, 33 bp, Homo sapien
gtacccgagtaatggagtatgaagtgactttgg

SEQ ID NO: 948821 - DNA, 33 bp, Homo sapien
gaacagaggctgggacgaggaattctcttgtga

SEQ ID NO: 948822 - DNA, 33 bp, Homo sapien
gaacagaggctgggactaggaattctcttgtga

SEQ ID NO: 948823 - DNA, 33 bp, Homo sapien
gacacagacacacatcacttggttctggatcca

SEQ ID NO: 948824 - DNA, 33 bp, Homo sapien
gacacagacacacatcgcttggttctggatcca

SEQ ID NO: 948825 - DNA, 33 bp, Homo sapien
actctgaggcccaaagcacaccagacacagact

SEQ ID NO: 948826 - DNA, 33 bp, Homo sapien
actctgaggcccaaagtacaccagacacagact

SEQ ID NO: 948827 - DNA, 33 bp, Homo sapien
taacttctctgcattgaattaaggcattaaaat

SEQ ID NO: 948828 - DNA, 33 bp, Homo sapien
taacttctctgcattgcattaaggcattaaaat

SEQ ID NO: 948829 - DNA, 33 bp, Homo sapien
ggctggatggctaaacaagcaggctgtgactca

SEQ ID NO: 948830 - DNA, 33 bp, Homo sapien
ggctggatggctaaacgagcaggctgtgactca

SEQ ID NO: 948831 - DNA, 33 bp, Homo sapien
taaaatagtgactccccaactcaggcctctcca

SEQ ID NO: 948832 - DNA, 33 bp, Homo sapien
taaaatagtgactccctaactcaggcctctcca

SEQ ID NO: 948833 - DNA, 33 bp, Homo sapien
gactgtgctgggggcaatcccattcctgcagca

SEQ ID NO: 948834 - DNA, 33 bp, Homo sapien
gactgtgctgggggcagtcccattcctgcagca

SEQ ID NO: 948835 - DNA, 33 bp, Homo sapien
gcagggacgtgacagcagaaaagcttgtcactg

SEQ ID NO: 948836 - DNA, 33 bp, Homo sapien
gcagggacgtgacagcggaaaagcttgtcactg

SEQ ID NO: 948837 - DNA, 33 bp, Homo sapien
gtgtctagaaaaacgaaatcagaccctgtaatc

SEQ ID NO: 948838 - DNA, 33 bp, Homo sapien
gtgtctagaaaaacgacatcagaccctgtaatc

SEQ ID NO: 948839 - DNA, 33 bp, Homo sapien
gaaagattgtgtcttacggagaagaaacgaaag

SEQ ID NO: 948840 - DNA, 33 bp, Homo sapien
gaaagattgtgtcttatggagaagaaacgaaag

SEQ ID NO: 948841 - DNA, 33 bp, Homo sapien
accaaccctggaggcaaatgtgaagtgcagggg

SEQ ID NO: 948842 - DNA, 33 bp, Homo sapien
accaaccctggaggcagatgtgaagtgcagggg

SEQ ID NO: 948843 - DNA, 33 bp, Homo sapien
gttgtatattttcctcaccaaatgagttgtgct

SEQ ID NO: 948844 - DNA, 33 bp, Homo sapien
gttgtatattttcctccccaaatgagttgtgct

SEQ ID NO: 948845 - DNA, 33 bp, Homo sapien
aaatgcactcaagaaaaaagagctgtcatcttt

SEQ ID NO: 948846 - DNA, 33 bp, Homo sapien
aaatgcactcaagaaagaagagctgtcatcttt

SEQ ID NO: 948847 - DNA, 33 bp, Homo sapien
ccagaagatgagatcacgtcctatccacagggt

SEQ ID NO: 948848 - DNA, 33 bp, Homo sapien
ccagaagatgagatcaggtcctatccacagggt

SEQ ID NO: 948849 - DNA, 33 bp, Homo sapien
gggattctccagcaatcacggggagtttgtgga

SEQ ID NO: 948850 - DNA, 33 bp, Homo sapien
gggattctccagcaatgacggggagtttgtgga

SEQ ID NO: 948851 - DNA, 33 bp, Homo sapien
ttctagggatacaagacaaggaaggatgaaatt

SEQ ID NO: 948852 - DNA, 33 bp, Homo sapien
ttctagggatacaagagaaggaaggatgaaatt

SEQ ID NO: 948853 - DNA, 33 bp, Homo sapien
cgctccttcctcatcccctgcctttgcagttgc

SEQ ID NO: 948854 - DNA, 33 bp, Homo sapien
cgctccttcctcatcctctgcctttgcagttgc

SEQ ID NO: 948855 - DNA, 33 bp, Homo sapien
atatttgtcaaggcaggaggaaagaacgaaacc

SEQ ID NO: 948856 - DNA, 33 bp, Homo sapien
atatttgtcaaggcagtaggaaagaacgaaacc

SEQ ID NO: 948857 - DNA, 33 bp, Homo sapien
ttctctcctaaaatcaactctaacccactgcca

SEQ ID NO: 948858 - DNA, 33 bp, Homo sapien
ttctctcctaaaatcagctctaacccactgcca

SEQ ID NO: 948859 - DNA, 33 bp, Homo sapien
ctactcggtttccctacgggcctctctgcaccc

SEQ ID NO: 948860 - DNA, 33 bp, Homo sapien
ctactcggtttccctatgggcctctctgcaccc

SEQ ID NO: 948861 - DNA, 33 bp, Homo sapien
tcattttaactctggaagctcaatttcctcatc

SEQ ID NO: 948862 - DNA, 33 bp, Homo sapien
tcattttaactctggaggctcaatttcctcatc

SEQ ID NO: 948863 - DNA, 33 bp, Homo sapien
ctgggatgggtgcccccgagattccacatggca

SEQ ID NO: 948864 - DNA, 33 bp, Homo sapien
ctgggatgggtgcccctgagattccacatggca

SEQ ID NO: 948865 - DNA, 33 bp, Homo sapien
agggtgacagcactggcagaacaaggcagcaga

SEQ ID NO: 948866 - DNA, 33 bp, Homo sapien
agggtgacagcactgggagaacaaggcagcaga

SEQ ID NO: 948867 - DNA, 33 bp, Homo sapien
ccactcagccatcaagactcacagggcaaaaaa

SEQ ID NO: 948868 - DNA, 33 bp, Homo sapien
ccactcagccatcaagcctcacagggcaaaaaa

SEQ ID NO: 948869 - DNA, 33 bp, Homo sapien
ggtagttgttaaatcacagttgttatgggtgaa

SEQ ID NO: 948870 - DNA, 33 bp, Homo sapien
ggtagttgttaaatcatagttgttatgggtgaa

SEQ ID NO: 948871 - DNA, 33 bp, Homo sapien
attgtatatgtacccaccaatcagacccatcac

SEQ ID NO: 948872 - DNA, 33 bp, Homo sapien
attgtatatgtacccatcaatcagacccatcac

SEQ ID NO: 948873 - DNA, 33 bp, Homo sapien
aaagaacagagaacgaaaagttaagtaaacaga

SEQ ID NO: 948874 - DNA, 33 bp, Homo sapien
aaagaacagagaacgacaagttaagtaaacaga

SEQ ID NO: 948875 - DNA, 33 bp, Homo sapien
tctagttttcaaccagaaattactagacataca

SEQ ID NO: 948876 - DNA, 33 bp, Homo sapien
tctagttttcaaccaggaattactagacataca

SEQ ID NO: 948877 - DNA, 33 bp, Homo sapien
ttgcagtgattctagactccattcactttccta

SEQ ID NO: 948878 - DNA, 33 bp, Homo sapien
ttgcagtgattctagattccattcactttccta

SEQ ID NO: 948879 - DNA, 33 bp, Homo sapien
agcttccaggtatttgcagtttattatgtgcta

SEQ ID NO: 948880 - DNA, 33 bp, Homo sapien
agcttccaggtatttggagtttattatgtgcta

SEQ ID NO: 948881 - DNA, 33 bp, Homo sapien
aaacaaataaaacgaaagcaacagtcatttgcc

SEQ ID NO: 948882 - DNA, 33 bp, Homo sapien
aaacaaataaaacgaaggcaacagtcatttgcc

SEQ ID NO: 948883 - DNA, 33 bp, Homo sapien
caagcttagcatcaccaggaataagctgggctg

SEQ ID NO: 948884 - DNA, 33 bp, Homo sapien
caagcttagcatcaccgggaataagctgggctg

SEQ ID NO: 948885 - DNA, 33 bp, Homo sapien
cagtgcggttcttcccaccaactcataacccca

SEQ ID NO: 948886 - DNA, 33 bp, Homo sapien
cagtgcggttcttcccgccaactcataacccca

SEQ ID NO: 948887 - DNA, 33 bp, Homo sapien
atttgccagaactaagcagtaattgttaccaca

SEQ ID NO: 948888 - DNA, 33 bp, Homo sapien
atttgccagaactaaggagtaattgttaccaca

SEQ ID NO: 948889 - DNA, 33 bp, Homo sapien
tgactgggaggagacactcgcacctgccctgga

SEQ ID NO: 948890 - DNA, 33 bp, Homo sapien
tgactgggaggagacattcgcacctgccctgga

SEQ ID NO: 948891 - DNA, 33 bp, Homo sapien
caaggaagttttctcacgttccttctcatcaca

SEQ ID NO: 948892 - DNA, 33 bp, Homo sapien
caaggaagttttctcaggttccttctcatcaca

SEQ ID NO: 948893 - DNA, 33 bp, Homo sapien
caggaacgccctcataagaagcctaacctgccc

SEQ ID NO: 948894 - DNA, 33 bp, Homo sapien
caggaacgccctcataggaagcctaacctgccc

SEQ ID NO: 948895 - DNA, 33 bp, Homo sapien
aggcggtggttaatgaagacagatggagggttc

SEQ ID NO: 948896 - DNA, 33 bp, Homo sapien
aggcggtggttaatgaggacagatggagggttc

SEQ ID NO: 948897 - DNA, 33 bp, Homo sapien
tgtgtgaagacaaaagaccgagctgtattcagg

SEQ ID NO: 948898 - DNA, 33 bp, Homo sapien
tgtgtgaagacaaaaggccgagctgtattcagg

SEQ ID NO: 948899 - DNA, 33 bp, Homo sapien
ctgtggtgtcctccacaggtctgcttgaagaac

SEQ ID NO: 948900 - DNA, 33 bp, Homo sapien
ctgtggtgtcctccacgggtctgcttgaagaac

SEQ ID NO: 948901 - DNA, 33 bp, Homo sapien
tcataacaagttctggaaaagagctaaacaaac

SEQ ID NO: 948902 - DNA, 33 bp, Homo sapien
tcataacaagttctgggaaagagctaaacaaac

SEQ ID NO: 948903 - DNA, 33 bp, Homo sapien
aatctctgttgagaccaaattgaacctaaatga

SEQ ID NO: 948904 - DNA, 33 bp, Homo sapien
aatctctgttgagacccaattgaacctaaatga

SEQ ID NO: 948905 - DNA, 33 bp, Homo sapien
gagagggagtggagagacgaagagaaaccagag

SEQ ID NO: 948906 - DNA, 33 bp, Homo sapien
gagagggagtggagaggcgaagagaaaccagag

SEQ ID NO: 948907 - DNA, 33 bp, Homo sapien
atacaaatccacatgcaaccccgatttctgttg

SEQ ID NO: 948908 - DNA, 33 bp, Homo sapien
atacaaatccacatgcgaccccgatttctgttg

SEQ ID NO: 948909 - DNA, 33 bp, Homo sapien
taggacgtcctctaacaaaactgcaaataagaa

SEQ ID NO: 948910 - DNA, 33 bp, Homo sapien
taggacgtcctctaacgaaactgcaaataagaa

SEQ ID NO: 948911 - DNA, 33 bp, Homo sapien
tatactcttgtataaactccaccacaatcaaaa

SEQ ID NO: 948912 - DNA, 33 bp, Homo sapien
tatactcttgtataaagtccaccacaatcaaaa

SEQ ID NO: 948913 - DNA, 33 bp, Homo sapien
cctggaacgcaaggtacgcaccacacaaccatg

SEQ ID NO: 948914 - DNA, 33 bp, Homo sapien
cctggaacgcaaggtaggcaccacacaaccatg

SEQ ID NO: 948915 - DNA, 33 bp, Homo sapien
ctcattccaacacagcagcccgggtctaaggct

SEQ ID NO: 948916 - DNA, 33 bp, Homo sapien
ctcattccaacacagctgcccgggtctaaggct

SEQ ID NO: 948917 - DNA, 33 bp, Homo sapien
ccttcggaacagaataacctcattccaacacag

SEQ ID NO: 948918 - DNA, 33 bp, Homo sapien
ccttcggaacagaatagcctcattccaacacag

SEQ ID NO: 948919 - DNA, 33 bp, Homo sapien
tgacgaatggatacgcaaaacgtgatgtatcca

SEQ ID NO: 948920 - DNA, 33 bp, Homo sapien
tgacgaatggatacgccaaacgtgatgtatcca

SEQ ID NO: 948921 - DNA, 33 bp, Homo sapien
cccagagtggacgagacggtgcctctccagtgc

SEQ ID NO: 948922 - DNA, 33 bp, Homo sapien
cccagagtggacgagatggtgcctctccagtgc

SEQ ID NO: 948923 - DNA, 33 bp, Homo sapien
ctttataaaatgatcacatcttgagagacttat

SEQ ID NO: 948924 - DNA, 33 bp, Homo sapien
ctttataaaatgatcagatcttgagagacttat

SEQ ID NO: 948925 - DNA, 33 bp, Homo sapien
tgcaaacgtctctgtaggtatctctgcattctt

SEQ ID NO: 948926 - DNA, 33 bp, Homo sapien
tgcaaacgtctctgtatgtatctctgcattctt

SEQ ID NO: 948927 - DNA, 33 bp, Homo sapien
ttcaggcaacaagaaactatgttcagctgggcc

SEQ ID NO: 948928 - DNA, 33 bp, Homo sapien
ttcaggcaacaagaaagtatgttcagctgggcc

SEQ ID NO: 948929 - DNA, 33 bp, Homo sapien
tgtacctatgtatagaagtaggaatgagggaac

SEQ ID NO: 948930 - DNA, 33 bp, Homo sapien
tgtacctatgtatagaggtaggaatgagggaac

SEQ ID NO: 948931 - DNA, 33 bp, Homo sapien
cacgtgttgttgattcaccaaatgatacaatgc

SEQ ID NO: 948932 - DNA, 33 bp, Homo sapien
cacgtgttgttgattcgccaaatgatacaatgc

SEQ ID NO: 948933 - DNA, 33 bp, Homo sapien
cgagtgaattctaaaactgcgtgtgtgtgcgtg

SEQ ID NO: 948934 - DNA, 33 bp, Homo sapien
cgagtgaattctaaaattgcgtgtgtgtgcgtg

SEQ ID NO: 948935 - DNA, 33 bp, Homo sapien
ctttgtagtggtcaaaatgagtttttacttctg

SEQ ID NO: 948936 - DNA, 33 bp, Homo sapien
ctttgtagtggtcaaagtgagtttttacttctg

SEQ ID NO: 948937 - DNA, 33 bp, Homo sapien
actgttggtgggaatacaaagcagttcagccac

SEQ ID NO: 948938 - DNA, 33 bp, Homo sapien
actgttggtgggaatataaagcagttcagccac

SEQ ID NO: 948939 - DNA, 33 bp, Homo sapien
aaacgtttcaaaatgaacttcgagcagggagat

SEQ ID NO: 948940 - DNA, 33 bp, Homo sapien
aaacgtttcaaaatgagcttcgagcagggagat

SEQ ID NO: 948941 - DNA, 33 bp, Homo sapien
tttcttggttccatgactagccatttatgaaac

SEQ ID NO: 948942 - DNA, 33 bp, Homo sapien
tttcttggttccatgattagccatttatgaaac

SEQ ID NO: 948943 - DNA, 33 bp, Homo sapien
tggtagctaagagtaaaccttgaccagcttgaa

SEQ ID NO: 948944 - DNA, 33 bp, Homo sapien
tggtagctaagagtaagccttgaccagcttgaa

SEQ ID NO: 948945 - DNA, 33 bp, Homo sapien
aagacacgctgggggcagcattgttttcaacct

SEQ ID NO: 948946 - DNA, 33 bp, Homo sapien
aagacacgctgggggcggcattgttttcaacct

SEQ ID NO: 948947 - DNA, 33 bp, Homo sapien
cccagggatcagccaaatatgacctctggcccc

SEQ ID NO: 948948 - DNA, 33 bp, Homo sapien
cccagggatcagccaactatgacctctggcccc

SEQ ID NO: 948949 - DNA, 33 bp, Homo sapien
ctaaaaaaccctccagcagctataataggagcc

SEQ ID NO: 948950 - DNA, 33 bp, Homo sapien
ctaaaaaaccctccagtagctataataggagcc

SEQ ID NO: 948951 - DNA, 33 bp, Homo sapien
ctcaggtcctcctaacaaaatgctgcagccttt

SEQ ID NO: 948952 - DNA, 33 bp, Homo sapien
ctcaggtcctcctaaccaaatgctgcagccttt

SEQ ID NO: 948953 - DNA, 33 bp, Homo sapien
cagacataaacccatacacccatggccaattga

SEQ ID NO: 948954 - DNA, 33 bp, Homo sapien
cagacataaacccatagacccatggccaattga

SEQ ID NO: 948955 - DNA, 33 bp, Homo sapien
cctgcaaaccgctcacaaagcagataacagtga

SEQ ID NO: 948956 - DNA, 33 bp, Homo sapien
cctgcaaaccgctcacgaagcagataacagtga

SEQ ID NO: 948957 - DNA, 33 bp, Homo sapien; identical to SEQ ID NO: 948955

SEQ ID NO: 948958 - DNA, 33 bp, Homo sapien; identical to SEQ ID NO: 948956

SEQ ID NO: 948959 - DNA, 33 bp, Homo sapien
gcgcctttggtatcttgaaaggtgagccatctc

SEQ ID NO: 948960 - DNA, 33 bp, Homo sapien
gcgcctttggtatctttaaaggtgagccatctc

SEQ ID NO: 948961 - DNA, 33 bp, Homo sapien
tagtttctattgctatcaggttggtgcgaaagt

SEQ ID NO: 948962 - DNA, 33 bp, Homo sapien
tagtttctattgctattaggttggtgcgaaagt

SEQ ID NO: 948963 - DNA, 33 bp, Homo sapien
ctttacctgcagtccaatacacaaatgtgtgta

SEQ ID NO: 948964 - DNA, 33 bp, Homo sapien
ctttacctgcagtccagtacacaaatgtgtgta

SEQ ID NO: 948965 - DNA, 33 bp, Homo sapien
aacctgtacaaagataacagtagctgcctgcag

SEQ ID NO: 948966 - DNA, 33 bp, Homo sapien
aacctgtacaaagatagcagtagctgcctgcag

SEQ ID NO: 948967 - DNA, 33 bp, Homo sapien
caaattagaaaggaagaagtcaaattatctttg

SEQ ID NO: 948968 - DNA, 33 bp, Homo sapien
caaattagaaaggaaggagtcaaattatctttg

SEQ ID NO: 948969 - DNA, 33 bp, Homo sapien
catatagaaatgctaccgatttgtgtatgttga

SEQ ID NO: 948970 - DNA, 33 bp, Homo sapien
catatagaaatgctactgatttgtgtatgttga

SEQ ID NO: 948971 - DNA, 33 bp, Homo sapien
ttgcacctgagtctccagaagagctaagggacc

SEQ ID NO: 948972 - DNA, 33 bp, Homo sapien
ttgcacctgagtctccggaagagctaagggacc

SEQ ID NO: 948973 - DNA, 33 bp, Homo sapien
cgctgctgaagtagcccgctccaccggcaccgc

SEQ ID NO: 948974 - DNA, 33 bp, Homo sapien
cgctgctgaagtagcctgctccaccggcaccgc

SEQ ID NO: 948975 - DNA, 33 bp, Homo sapien
tagacctcagcatttaaccggagcgggggagga

SEQ ID NO: 948976 - DNA, 33 bp, Homo sapien
tagacctcagcatttatccggagcgggggagga

SEQ ID NO: 948977 - DNA, 33 bp, Homo sapien
gctgtgggccttagtcaagccaaccttcctctg

SEQ ID NO: 948978 - DNA, 33 bp, Homo sapien
gctgtgggccttagtcgagccaaccttcctctg

SEQ ID NO: 948979 - DNA, 33 bp, Homo sapien
gtcatagacattcaaaaccgcagtcattccatg

SEQ ID NO: 948980 - DNA, 33 bp, Homo sapien
gtcatagacattcaaagccgcagtcattccatg

SEQ ID NO: 948981 - DNA, 33 bp, Homo sapien
gtctcaggactgataaacgggccaaaggtacct

SEQ ID NO: 948982 - DNA, 33 bp, Homo sapien
gtctcaggactgataagcgggccaaaggtacct

SEQ ID NO: 948983 - DNA, 33 bp, Homo sapien
atcttcagtcatcaagcatggggatttacactg

SEQ ID NO: 948984 - DNA, 33 bp, Homo sapien
atcttcagtcatcaaggatggggatttacactg

SEQ ID NO: 948985 - DNA, 33 bp, Homo sapien
ggtatatagagaggcagatgtatagacaggtta

SEQ ID NO: 948986 - DNA, 33 bp, Homo sapien
ggtatatagagaggcatatgtatagacaggtta

SEQ ID NO: 948987 - DNA, 33 bp, Homo sapien
gattgaaagcgttcaaattcacacggaaagaat

SEQ ID NO: 948988 - DNA, 33 bp, Homo sapien
gattgaaagcgttcaagttcacacggaaagaat

SEQ ID NO: 948989 - DNA, 33 bp, Homo sapien
caagcaatacaaaaataattgaccaagatcaca

SEQ ID NO: 948990 - DNA, 33 bp, Homo sapien
caagcaatacaaaaatcattgaccaagatcaca

SEQ ID NO: 948991 - DNA, 33 bp, Homo sapien
atgtatggaatcctcacaaagacatttataaat

SEQ ID NO: 948992 - DNA, 33 bp, Homo sapien
atgtatggaatcctcagaaagacatttataaat

SEQ ID NO: 948993 - DNA, 33 bp, Homo sapien
gaaattgaacagtgaccggatattgaatgatat

SEQ ID NO: 948994 - DNA, 33 bp, Homo sapien
gaaattgaacagtgactggatattgaatgatat

SEQ ID NO: 948995 - DNA, 33 bp, Homo sapien
agtctgtgatgggaaaaataggcacactcagat

SEQ ID NO: 948996 - DNA, 33 bp, Homo sapien
agtctgtgatgggaaagataggcacactcagat

SEQ ID NO: 948997 - DNA, 33 bp, Homo sapien
attggtaattgttgaaagatgctagagaactaa

SEQ ID NO: 948998 - DNA, 33 bp, Homo sapien
attggtaattgttgaaggatgctagagaactaa

SEQ ID NO: 948999 - DNA, 33 bp, Homo sapien
catcaatcaggatatacggatagaaacacatca

SEQ ID NO: 949000 - DNA, 33 bp, Homo sapien
catcaatcaggatatatggatagaaacacatca

SEQ ID NO: 949001 - DNA, 33 bp, Homo sapien
cgcctttgctacctcaatctccctggcgtctct

SEQ ID NO: 949002 - DNA, 33 bp, Homo sapien
cgcctttgctacctcagtctccctggcgtctct

SEQ ID NO: 949003 - DNA, 33 bp, Homo sapien
tgtgccttaacaatgcaaaactaataaatcctc

SEQ ID NO: 949004 - DNA, 33 bp, Homo sapien
tgtgccttaacaatgccaaactaataaatcctc

SEQ ID NO: 949005 - DNA, 33 bp, Homo sapien
ctgcaaccccagttaggagctggcaggacggaa

SEQ ID NO: 949006 - DNA, 33 bp, Homo sapien
ctgcaaccccagttagtagctggcaggacggaa

SEQ ID NO: 949007 - DNA, 33 bp, Homo sapien
cagggtagaatgtacaggaagagctttccagtc

SEQ ID NO: 949008 - DNA, 33 bp, Homo sapien
cagggtagaatgtacatgaagagctttccagtc

SEQ ID NO: 949009 - DNA, 33 bp, Homo sapien
cactttcttgaaacaagtgaaacaaaagtatgg

SEQ ID NO: 949010 - DNA, 33 bp, Homo sapien
cactttcttgaaacaattgaaacaaaagtatgg

SEQ ID NO: 949011 - DNA, 33 bp, Homo sapien
gtgaccatgtgaccaacctctacatatcctacc

SEQ ID NO: 949012 - DNA, 33 bp, Homo sapien
gtgaccatgtgaccaatctctacatatcctacc

SEQ ID NO: 949013 - DNA, 33 bp, Homo sapien
aaatgggcaaaagatacggactgacatctcaca

SEQ ID NO: 949014 - DNA, 33 bp, Homo sapien
aaatgggcaaaagatatggactgacatctcaca

SEQ ID NO: 949015 - DNA, 33 bp, Homo sapien
atgtatgtctgtttaacgcaccttcgacactca

SEQ ID NO: 949016 - DNA, 33 bp, Homo sapien
atgtatgtctgtttaatgcaccttcgacactca

SEQ ID NO: 949017 - DNA, 33 bp, Homo sapien
atttctccttgtctgtcaatttctgagggtagg

SEQ ID NO: 949018 - DNA, 33 bp, Homo sapien
atttctccttgtctgtgaatttctgagggtagg

SEQ ID NO: 949019 - DNA, 33 bp, Homo sapien
tgtgtgtctttagttccctattctccaggctct

SEQ ID NO: 949020 - DNA, 33 bp, Homo sapien
tgtgtgtctttagttctctattctccaggctct

SEQ ID NO: 949021 - DNA, 33 bp, Homo sapien
gaagatatgattcttaggcactctgagggctcc

SEQ ID NO: 949022 - DNA, 33 bp, Homo sapien
gaagatatgattcttatgcactctgagggctcc

SEQ ID NO: 949023 - DNA, 33 bp, Homo sapien
aggaaaatgactcacccctctctctgggcctca

SEQ ID NO: 949024 - DNA, 33 bp, Homo sapien
aggaaaatgactcacctctctctctgggcctca

SEQ ID NO: 949025 - DNA, 33 bp, Homo sapien
ccagcggtcaatccctaagcagccccgaaattc

SEQ ID NO: 949026 - DNA, 33 bp, Homo sapien
ccagcggtcaatccctcagcagccccgaaattc

SEQ ID NO: 949027 - DNA, 33 bp, Homo sapien
ccgaaattctgccaacaaaaatcacttgctgct

SEQ ID NO: 949028 - DNA, 33 bp, Homo sapien
ccgaaattctgccaacgaaaatcacttgctgct

SEQ ID NO: 949029 - DNA, 33 bp, Homo sapien
atctgggcttttacaccccactcttgtgtctcc

SEQ ID NO: 949030 - DNA, 33 bp, Homo sapien
atctgggcttttacactccactcttgtgtctcc

SEQ ID NO: 949031 - DNA, 33 bp, Homo sapien
ttttttccaacagagcaagagttgtaatgcaca

SEQ ID NO: 949032 - DNA, 33 bp, Homo sapien
ttttttccaacagagctagagttgtaatgcaca

SEQ ID NO: 949033 - DNA, 33 bp, Homo sapien
actgccaggcagccccaaaggttccctgcaacc

SEQ ID NO: 949034 - DNA, 33 bp, Homo sapien
actgccaggcagccccgaaggttccctgcaacc

SEQ ID NO: 949035 - DNA, 33 bp, Homo sapien
gctgctggtctaaggacaaaaccaatgcgtgga

SEQ ID NO: 949036 - DNA, 33 bp, Homo sapien
gctgctggtctaaggagaaaaccaatgcgtgga

SEQ ID NO: 949037 - DNA, 33 bp, Homo sapien
gtttgctgggggttctaagaaaagtttcctcat

SEQ ID NO: 949038 - DNA, 33 bp, Homo sapien
gtttgctgggggttctgagaaaagtttcctcat

SEQ ID NO: 949039 - DNA, 33 bp, Homo sapien
ctggtggtgctcctcacggaaccttgccgcttg

SEQ ID NO: 949040 - DNA, 33 bp, Homo sapien
ctggtggtgctcctcatggaaccttgccgcttg

SEQ ID NO: 949041 - DNA, 33 bp, Homo sapien; identical to SEQ ID NO: 949039

SEQ ID NO: 949042 - DNA, 33 bp, Homo sapien; identical to SEQ ID NO: 949040

SEQ ID NO: 949043 - DNA, 33 bp, Homo sapien
ttattttcatgtcaccactctaggttcattcac

SEQ ID NO: 949044 - DNA, 33 bp, Homo sapien
ttattttcatgtcaccgctctaggttcattcac

SEQ ID NO: 949045 - DNA, 33 bp, Homo sapien
cagttctcaccacttcacttacttcttgcacat

SEQ ID NO: 949046 - DNA, 33 bp, Homo sapien
cagttctcaccacttcgcttacttcttgcacat

SEQ ID NO: 949047 - DNA, 33 bp, Homo sapien
gtctgatctactggggcaaaggccgaaatacac

SEQ ID NO: 949048 - DNA, 33 bp, Homo sapien
gtctgatctactggggtaaaggccgaaatacac

SEQ ID NO: 949049 - DNA, 33 bp, Homo sapien
attgccacaaagccaccaaaatctgtgcctcag

SEQ ID NO: 949050 - DNA, 33 bp, Homo sapien
attgccacaaagccactaaaatctgtgcctcag

SEQ ID NO: 949051 - DNA, 33 bp, Homo sapien
ttttataactgcagtgcaacacaattctgggta

SEQ ID NO: 949052 - DNA, 33 bp, Homo sapien
ttttataactgcagtggaacacaattctgggta

SEQ ID NO: 949053 - DNA, 33 bp, Homo sapien; identical to SEQ ID NO: 949051

SEQ ID NO: 949054 - DNA, 33 bp, Homo sapien; identical to SEQ ID NO: 949052

SEQ ID NO: 949055 - DNA, 33 bp, Homo sapien
ttccttgtaggagatacgttagtagaataccat

SEQ ID NO: 949056 - DNA, 33 bp, Homo sapien
ttccttgtaggagatatgttagtagaataccat

SEQ ID NO: 949057 - DNA, 33 bp, Homo sapien; identical to SEQ ID NO: 949055

SEQ ID NO: 949058 - DNA, 33 bp, Homo sapien; identical to SEQ ID NO: 949056

SEQ ID NO: 949059 - DNA, 33 bp, Homo sapien
cctgaaacccactgagaacctactgccagggtg

SEQ ID NO: 949060 - DNA, 33 bp, Homo sapien
cctgaaacccactgaggacctactgccagggtg

SEQ ID NO: 949061 - DNA, 33 bp, Homo sapien
aaaacagagatcataacactaacggaacagact

SEQ ID NO: 949062 - DNA, 33 bp, Homo sapien
aaaacagagatcataagactaacggaacagact

SEQ ID NO: 949063 - DNA, 33 bp, Homo sapien
cagagtcttggctaccagagtttttaaccctca

SEQ ID NO: 949064 - DNA, 33 bp, Homo sapien
cagagtcttggctaccggagtttttaaccctca

SEQ ID NO: 949065 - DNA, 33 bp, Homo sapien
ggttgttacaaagataagtttgtcagtgcagga

SEQ ID NO: 949066 - DNA, 33 bp, Homo sapien
ggttgttacaaagatatgtttgtcagtgcagga

SEQ ID NO: 949067 - DNA, 33 bp, Homo sapien
acggcttatggtcgtacccggggaacatatgaa

SEQ ID NO: 949068 - DNA, 33 bp, Homo sapien
acggcttatggtcgtatccggggaacatatgaa

SEQ ID NO: 949069 - DNA, 33 bp, Homo sapien
actttcgctagcttcacagaatcctctaaataa

SEQ ID NO: 949070 - DNA, 33 bp, Homo sapien
actttcgctagcttcagagaatcctctaaataa

SEQ ID NO: 949071 - DNA, 33 bp, Homo sapien
cactgcactacttggacgaattcaggctaaaga

SEQ ID NO: 949072 - DNA, 33 bp, Homo sapien
cactgcactacttggatgaattcaggctaaaga

SEQ ID NO: 949073 - DNA, 33 bp, Homo sapien
aggccctttctcaaacccctcaagtatttggct

SEQ ID NO: 949074 - DNA, 33 bp, Homo sapien
aggccctttctcaaactcctcaagtatttggct

SEQ ID NO: 949075 - DNA, 33 bp, Homo sapien
ctaggcccccaagtctcaacttcaggattatgc

SEQ ID NO: 949076 - DNA, 33 bp, Homo sapien
ctaggcccccaagtctgaacttcaggattatgc

SEQ ID NO: 949077 - DNA, 33 bp, Homo sapien
cttctctctggaatgcacctcccacgtcccttc

SEQ ID NO: 949078 - DNA, 33 bp, Homo sapien
cttctctctggaatgcgcctcccacgtcccttc

SEQ ID NO: 949079 - DNA, 33 bp, Homo sapien
cccacctccctctctacagtctagtaacagttg

SEQ ID NO: 949080 - DNA, 33 bp, Homo sapien
cccacctccctctctatagtctagtaacagttg

SEQ ID NO: 949081 - DNA, 33 bp, Homo sapien
gaatggaatgagagcgaatacctttctacaact

SEQ ID NO: 949082 - DNA, 33 bp, Homo sapien
gaatggaatgagagcggatacctttctacaact

SEQ ID NO: 949083 - DNA, 33 bp, Homo sapien
acaggtggacgtaacaatgccttttcagtcttt

SEQ ID NO: 949084 - DNA, 33 bp, Homo sapien
acaggtggacgtaacagtgccttttcagtcttt

SEQ ID NO: 949085 - DNA, 33 bp, Homo sapien
gctgcaggtgcgtatacgatggaggtgagggag

SEQ ID NO: 949086 - DNA, 33 bp, Homo sapien
gctgcaggtgcgtatatgatggaggtgagggag

SEQ ID NO: 949087 - DNA, 33 bp, Homo sapien
taagccacaaattcataaccacttatccttcca

SEQ ID NO: 949088 - DNA, 33 bp, Homo sapien
taagccacaaattcatgaccacttatccttcca

SEQ ID NO: 949089 - DNA, 33 bp, Homo sapien
atcaccaagacaccaaacctgttttatgagctg

SEQ ID NO: 949090 - DNA, 33 bp, Homo sapien
atcaccaagacaccaagcctgttttatgagctg

SEQ ID NO: 949091 - DNA, 33 bp, Homo sapien
ttgtggctgataaaaaatacaggcagggcccag

SEQ ID NO: 949092 - DNA, 33 bp, Homo sapien
ttgtggctgataaaaagtacaggcagggcccag

SEQ ID NO: 949093 - DNA, 33 bp, Homo sapien
cttcaagttggagaaaacttttattggcacagg

SEQ ID NO: 949094 - DNA, 33 bp, Homo sapien
cttcaagttggagaaaccttttattggcacagg

SEQ ID NO: 949095 - DNA, 33 bp, Homo sapien
tctactaccacaaggaaaatagtttaggagaaa

SEQ ID NO: 949096 - DNA, 33 bp, Homo sapien
tctactaccacaaggagaatagtttaggagaaa

SEQ ID NO: 949097 - DNA, 33 bp, Homo sapien
ttttgagccgcgtcataaggaggcaatctgtaa

SEQ ID NO: 949098 - DNA, 33 bp, Homo sapien
ttttgagccgcgtcattaggaggcaatctgtaa

SEQ ID NO: 949099 - DNA, 33 bp, Homo sapien
cagtgcagacaggccacgtgagccaccgctgcc

SEQ ID NO: 949100 - DNA, 33 bp, Homo sapien
cagtgcagacaggccatgtgagccaccgctgcc

SEQ ID NO: 949101 - DNA, 33 bp, Homo sapien
tcagaggttttcattacaggctgtcttttcagc

SEQ ID NO: 949102 - DNA, 33 bp, Homo sapien
tcagaggttttcattagaggctgtcttttcagc

SEQ ID NO: 949103 - DNA, 33 bp, Homo sapien
acacacacaggggcaccgtctcgggcatcagtg

SEQ ID NO: 949104 - DNA, 33 bp, Homo sapien
acacacacaggggcactgtctcgggcatcagtg

SEQ ID NO: 949105 - DNA, 33 bp, Homo sapien
aatgccaaggaagatgcacggcagtcggtcact

SEQ ID NO: 949106 - DNA, 33 bp, Homo sapien
aatgccaaggaagatgtacggcagtcggtcact

SEQ ID NO: 949107 - DNA, 33 bp, Homo sapien
aaagtccttatttcaccagggaaggatgtgaac

SEQ ID NO: 949108 - DNA, 33 bp, Homo sapien
aaagtccttatttcacgagggaaggatgtgaac

SEQ ID NO: 949109 - DNA, 33 bp, Homo sapien
ctgtgattcatactcaaaaaggaaaggtctctg

SEQ ID NO: 949110 - DNA, 33 bp, Homo sapien
ctgtgattcatactcagaaaggaaaggtctctg

SEQ ID NO: 949111 - DNA, 33 bp, Homo sapien
tactgtacacttgaaacagcagacactacgaag

SEQ ID NO: 949112 - DNA, 33 bp, Homo sapien
tactgtacacttgaaatagcagacactacgaag

SEQ ID NO: 949113 - DNA, 33 bp, Homo sapien
ggacttgcgcaagccacgaagctgtgtgactgt

SEQ ID NO: 949114 - DNA, 33 bp, Homo sapien
ggacttgcgcaagccaggaagctgtgtgactgt

SEQ ID NO: 949115 - DNA, 33 bp, Homo sapien
tgtggcgacagtaagaaggcagtagccgggtgc

SEQ ID NO: 949116 - DNA, 33 bp, Homo sapien
tgtggcgacagtaagagggcagtagccgggtgc

SEQ ID NO: 949117 - DNA, 33 bp, Homo sapien
acacatctgccaattaagtcctcttgcccacac

SEQ ID NO: 949118 - DNA, 33 bp, Homo sapien
acacatctgccaattaggtcctcttgcccacac

SEQ ID NO: 949119 - DNA, 33 bp, Homo sapien
cgggtgactaatccaccacttccccccatacac

SEQ ID NO: 949120 - DNA, 33 bp, Homo sapien
cgggtgactaatccactacttccccccatacac

SEQ ID NO: 949121 - DNA, 33 bp, Homo sapien
aaaagaagaagaagaagaactggaactggaaca

SEQ ID NO: 949122 - DNA, 33 bp, Homo sapien
aaaagaagaagaagaataactggaactggaaca

SEQ ID NO: 949123 - DNA, 33 bp, Homo sapien
cagtccagaattaggaagagccgcgggaaggaa

SEQ ID NO: 949124 - DNA, 33 bp, Homo sapien
cagtccagaattaggaggagccgcgggaaggaa

SEQ ID NO: 949125 - DNA, 33 bp, Homo sapien
gtgaatggacactttcactggcttgggtttggg

SEQ ID NO: 949126 - DNA, 33 bp, Homo sapien
gtgaatggacactttcgctggcttgggtttggg

SEQ ID NO: 949127 - DNA, 33 bp, Homo sapien
agcaaaagataactggcataagcagtgatgggc

SEQ ID NO: 949128 - DNA, 33 bp, Homo sapien
agcaaaagataactgggataagcagtgatgggc

SEQ ID NO: 949129 - DNA, 33 bp, Homo sapien
ccaagagagaagaccaactctgcttaagcggtg

SEQ ID NO: 949130 - DNA, 33 bp, Homo sapien
ccaagagagaagaccagctctgcttaagcggtg

SEQ ID NO: 949131 - DNA, 33 bp, Homo sapien
ccacgtttcctcgagacagaacaccaagctcac

SEQ ID NO: 949132 - DNA, 33 bp, Homo sapien
ccacgtttcctcgagatagaacaccaagctcac

SEQ ID NO: 949133 - DNA, 33 bp, Homo sapien
aaaaacaataccacaacgggcgtcaaaccactt

SEQ ID NO: 949134 - DNA, 33 bp, Homo sapien
aaaaacaataccacaaggggcgtcaaaccactt

SEQ ID NO: 949135 - DNA, 33 bp, Homo sapien
tgtacacacatggtgaaattcgtagtaatctcc

SEQ ID NO: 949136 - DNA, 33 bp, Homo sapien
tgtacacacatggtgacattcgtagtaatctcc

SEQ ID NO: 949137 - DNA, 33 bp, Homo sapien
aacttgattgccttacaaatgaactgcttcaag

SEQ ID NO: 949138 - DNA, 33 bp, Homo sapien
aacttgattgccttacgaatgaactgcttcaag

SEQ ID NO: 949139 - DNA, 33 bp, Homo sapien
gatatagcaatagccaataagcatctaaaatga

SEQ ID NO: 949140 - DNA, 33 bp, Homo sapien
gatatagcaatagccagtaagcatctaaaatga

SEQ ID NO: 949141 - DNA, 33 bp, Homo sapien
gaagactcgagtagacacgtcgttaagaagata

SEQ ID NO: 949142 - DNA, 33 bp, Homo sapien
gaagactcgagtagacgcgtcgttaagaagata

SEQ ID NO: 949143 - DNA, 33 bp, Homo sapien
tgaacagaatctataactcctggcccagcacca

SEQ ID NO: 949144 - DNA, 33 bp, Homo sapien
tgaacagaatctataattcctggcccagcacca

SEQ ID NO: 949145 - DNA, 33 bp, Homo sapien
gttggattcccagtcacgtgaaccaagaaatgg

SEQ ID NO: 949146 - DNA, 33 bp, Homo sapien
gttggattcccagtcatgtgaaccaagaaatgg

SEQ ID NO: 949147 - DNA, 33 bp, Homo sapien
tcaatccactgtttgaagggcttaaaatctctt

SEQ ID NO: 949148 - DNA, 33 bp, Homo sapien
tcaatccactgtttgaggggcttaaaatctctt

SEQ ID NO: 949149 - DNA, 33 bp, Homo sapien
tcttaagaccatataaggtaactccacctggag

SEQ ID NO: 949150 - DNA, 33 bp, Homo sapien
tcttaagaccatataatgtaactccacctggag

SEQ ID NO: 949151 - DNA, 33 bp, Homo sapien
gcattttggtggtcaacagacttttaaacagtt

SEQ ID NO: 949152 - DNA, 33 bp, Homo sapien
gcattttggtggtcaatagacttttaaacagtt

SEQ ID NO: 949153 - DNA, 33 bp, Homo sapien
aagaactattacattacgtacccttgatgctgg

SEQ ID NO: 949154 - DNA, 33 bp, Homo sapien
aagaactattacattatgtacccttgatgctgg

SEQ ID NO: 949155 - DNA, 33 bp, Homo sapien
tccaaattctctgtgacctgtttgcagaacgtg

SEQ ID NO: 949156 - DNA, 33 bp, Homo sapien
tccaaattctctgtgagctgtttgcagaacgtg

SEQ ID NO: 949157 - DNA, 33 bp, Homo sapien
cctgcactcttccttcaaaacaattgccatttt

SEQ ID NO: 949158 - DNA, 33 bp, Homo sapien
cctgcactcttccttccaaacaattgccatttt

SEQ ID NO: 949159 - DNA, 33 bp, Homo sapien
gggtgggggatcttcacggcttagacacttgcc

SEQ ID NO: 949160 - DNA, 33 bp, Homo sapien
gggtgggggatcttcatggcttagacacttgcc

SEQ ID NO: 949161 - DNA, 33 bp, Homo sapien
tttcatggctctgtacgcagtggctttcacgag

SEQ ID NO: 949162 - DNA, 33 bp, Homo sapien
tttcatggctctgtactcagtggctttcacgag

SEQ ID NO: 949163 - DNA, 33 bp, Homo sapien
caggacaccaatatcaaatgggccaccatgtta

SEQ ID NO: 949164 - DNA, 33 bp, Homo sapien
caggacaccaatatcagatgggccaccatgtta

SEQ ID NO: 949165 - DNA, 33 bp, Homo sapien
gtaagatcaccaggaaaaagagtaatgcagaaa

SEQ ID NO: 949166 - DNA, 33 bp, Homo sapien
gtaagatcaccaggaagaagagtaatgcagaaa

SEQ ID NO: 949167 - DNA, 33 bp, Homo sapien
cagggccttttcttccacgaattctgcagaacc

SEQ ID NO: 949168 - DNA, 33 bp, Homo sapien
cagggccttttcttcctcgaattctgcagaacc

SEQ ID NO: 949169 - DNA, 33 bp, Homo sapien
tggtccttgagtgatacgctttatatatgaagg

SEQ ID NO: 949170 - DNA, 33 bp, Homo sapien
tggtccttgagtgatatgctttatatatgaagg

SEQ ID NO: 949171 - DNA, 33 bp, Homo sapien
aggtcatgaaaaaaaggcctgtcagtcagctcc

SEQ ID NO: 949172 - DNA, 33 bp, Homo sapien
aggtcatgaaaaaaagtcctgtcagtcagctcc

SEQ ID NO: 949173 - DNA, 33 bp, Homo sapien
gaggctgggctctctgaagtagttcaagagaaa

SEQ ID NO: 949174 - DNA, 33 bp, Homo sapien
gaggctgggctctctgcagtagttcaagagaaa

SEQ ID NO: 949175 - DNA, 33 bp, Homo sapien
gtgtacaccatgttggaacacgctgtgatctta

SEQ ID NO: 949176 - DNA, 33 bp, Homo sapien
gtgtacaccatgttggtacacgctgtgatctta

SEQ ID NO: 949177 - DNA, 33 bp, Homo sapien; identical to SEQ ID NO: 949175

SEQ ID NO: 949178 - DNA, 33 bp, Homo sapien; identical to SEQ ID NO: 949176

SEQ ID NO: 949179 - DNA, 33 bp, Homo sapien
cccccacagttcaaaactcgtcttctttctatc

SEQ ID NO: 949180 - DNA, 33 bp, Homo sapien
cccccacagttcaaaagtcgtcttctttctatc

SEQ ID NO: 949181 - DNA, 33 bp, Homo sapien; identical to SEQ ID NO: 949179

SEQ ID NO: 949182 - DNA, 33 bp, Homo sapien; identical to SEQ ID NO: 949180

SEQ ID NO: 949183 - DNA, 33 bp, Homo sapien
gtagaaagctaacaaagaatcatcgaatttaat

SEQ ID NO: 949184 - DNA, 33 bp, Homo sapien
gtagaaagctaacaaataatcatcgaatttaat

SEQ ID NO: 949185 - DNA, 33 bp, Homo sapien
gtaaatggaacagtcagcaataaccagcacaat

SEQ ID NO: 949186 - DNA, 33 bp, Homo sapien
gtaaatggaacagtcatcaataaccagcacaat

SEQ ID NO: 949187 - DNA, 33 bp, Homo sapien; identical to SEQ ID NO: 949185

SEQ ID NO: 949188 - DNA, 33 bp, Homo sapien; identical to SEQ ID NO: 949186

SEQ ID NO: 949189 - DNA, 33 bp, Homo sapien
aactcagacaaccaaaataatcctaagcaaaaa

SEQ ID NO: 949190 - DNA, 33 bp, Homo sapien
aactcagacaaccaaactaatcctaagcaaaaa

SEQ ID NO: 949191 - DNA, 33 bp, Homo sapien
gacacatgaaccacttcaacagaatagagaacc

SEQ ID NO: 949192 - DNA, 33 bp, Homo sapien
gacacatgaaccacttgaacagaatagagaacc

SEQ ID NO: 949193 - DNA, 33 bp, Homo sapien
cttcaaactatatgacaaagctgcagaaactaa

SEQ ID NO: 949194 - DNA, 33 bp, Homo sapien
cttcaaactatatgacgaagctgcagaaactaa

SEQ ID NO: 949195 - DNA, 33 bp, Homo sapien
atatgtgtatgattcaatactatccatggtttc

SEQ ID NO: 949196 - DNA, 33 bp, Homo sapien
atatgtgtatgattcagtactatccatggtttc

SEQ ID NO: 949197 - DNA, 33 bp, Homo sapien
aaatagtgcaatgaagcaagtgtaagacttgtc

SEQ ID NO: 949198 - DNA, 33 bp, Homo sapien
aaatagtgcaatgaaggaagtgtaagacttgtc

SEQ ID NO: 949199 - DNA, 33 bp, Homo sapien
taccttctgatttctcaagttttttgtttcatg

SEQ ID NO: 949200 - DNA, 33 bp, Homo sapien
taccttctgatttctccagttttttgtttcatg

SEQ ID NO: 949201 - DNA, 33 bp, Homo sapien
catgcactgaagtttgaagagttactcagtgca

SEQ ID NO: 949202 - DNA, 33 bp, Homo sapien
catgcactgaagtttggagagttactcagtgca

SEQ ID NO: 949203 - DNA, 33 bp, Homo sapien
gaaggcttcctatgcccgatgtaaagtgtcctg

SEQ ID NO: 949204 - DNA, 33 bp, Homo sapien
gaaggcttcctatgcctgatgtaaagtgtcctg

SEQ ID NO: 949205 - DNA, 33 bp, Homo sapien
gaatagaagtggttacagaggacatccttgtct

SEQ ID NO: 949206 - DNA, 33 bp, Homo sapien
gaatagaagtggttacggaggacatccttgtct

SEQ ID NO: 949207 - DNA, 33 bp, Homo sapien
tagaacccttatatcacgctctctgttgcctgt

SEQ ID NO: 949208 - DNA, 33 bp, Homo sapien
tagaacccttatatcatgctctctgttgcctgt

SEQ ID NO: 949209 - DNA, 33 bp, Homo sapien
caaaatgatgaacacacctgctaataatcataa

SEQ ID NO: 949210 - DNA, 33 bp, Homo sapien
caaaatgatgaacacatctgctaataatcataa

SEQ ID NO: 949211 - DNA, 33 bp, Homo sapien
gaaaggacactgcttacaaagatgctccacagt

SEQ ID NO: 949212 - DNA, 33 bp, Homo sapien
gaaaggacactgcttagaaagatgctccacagt

SEQ ID NO: 949213 - DNA, 33 bp, Homo sapien
ccttatttcatgtaaaacaatgctagttaacat

SEQ ID NO: 949214 - DNA, 33 bp, Homo sapien
ccttatttcatgtaaatcaatgctagttaacat

SEQ ID NO: 949215 - DNA, 33 bp, Homo sapien; identical to SEQ ID NO: 949213

SEQ ID NO: 949216 - DNA, 33 bp, Homo sapien; identical to SEQ ID NO: 949214

SEQ ID NO: 949217 - DNA, 33 bp, Homo sapien
attgatgacatccaccgaagttatgactgcaag

SEQ ID NO: 949218 - DNA, 33 bp, Homo sapien
attgatgacatccacctaagttatgactgcaag

SEQ ID NO: 949219 - DNA, 33 bp, Homo sapien
ctcaattttcagttacccattgtggagagaacc

SEQ ID NO: 949220 - DNA, 33 bp, Homo sapien
ctcaattttcagttactcattgtggagagaacc

SEQ ID NO: 949221 - DNA, 33 bp, Homo sapien; identical to SEQ ID NO: 949219

SEQ ID NO: 949222 - DNA, 33 bp, Homo sapien; identical to SEQ ID NO: 949220

SEQ ID NO: 949223 - DNA, 33 bp, Homo sapien
gatgtaccagtcaacacaggccatgggagagca

SEQ ID NO: 949224 - DNA, 33 bp, Homo sapien
gatgtaccagtcaacagaggccatgggagagca

SEQ ID NO: 949225 - DNA, 33 bp, Homo sapien; identical to SEQ ID NO: 949223

SEQ ID NO: 949226 - DNA, 33 bp, Homo sapien; identical to SEQ ID NO: 949224

SEQ ID NO: 949227 - DNA, 33 bp, Homo sapien
gaaagacaaaaattaactgaataccatggcttc

SEQ ID NO: 949228 - DNA, 33 bp, Homo sapien
gaaagacaaaaattaattgaataccatggcttc

SEQ ID NO: 949229 - DNA, 33 bp, Homo sapien
tacaggggcctcaagcacagcagtgagctttgg

SEQ ID NO: 949230 - DNA, 33 bp, Homo sapien
tacaggggcctcaagcccagcagtgagctttgg

SEQ ID NO: 949231 - DNA, 33 bp, Homo sapien
ttaagaacagtaatgacaacctaaggcagttta

SEQ ID NO: 949232 - DNA, 33 bp, Homo sapien
ttaagaacagtaatgataacctaaggcagttta

SEQ ID NO: 949233 - DNA, 33 bp, Homo sapien
tgtggaatttgtaatagaatttcaggtgaagta

SEQ ID NO: 949234 - DNA, 33 bp, Homo sapien
tgtggaatttgtaatataatttcaggtgaagta

SEQ ID NO: 949235 - DNA, 33 bp, Homo sapien
atacggtgttgggcataacgttttggcatggag

SEQ ID NO: 949236 - DNA, 33 bp, Homo sapien
atacggtgttgggcatcacgttttggcatggag

SEQ ID NO: 949237 - DNA, 33 bp, Homo sapien
cttctgcctcctgggaagtataaggagggatct

SEQ ID NO: 949238 - DNA, 33 bp, Homo sapien
cttctgcctcctgggaggtataaggagggatct

SEQ ID NO: 949239 - DNA, 33 bp, Homo sapien
aaaatgcactgggatccctcgtaaccaggtagc

SEQ ID NO: 949240 - DNA, 33 bp, Homo sapien
aaaatgcactgggatctctcgtaaccaggtagc

SEQ ID NO: 949241 - DNA, 33 bp, Homo sapien
tcattaaatacattcacaatattaagcaatcat

SEQ ID NO: 949242 - DNA, 33 bp, Homo sapien
tcattaaatacattcagaatattaagcaatcat

SEQ ID NO: 949243 - DNA, 33 bp, Homo sapien
tatttttagtagaaacaaagtctcgtcatgttg

SEQ ID NO: 949244 - DNA, 33 bp, Homo sapien
tatttttagtagaaacgaagtctcgtcatgttg

SEQ ID NO: 949245 - DNA, 33 bp, Homo sapien
ctagctaaaatagaaagcaaggaagaaattcta

SEQ ID NO: 949246 - DNA, 33 bp, Homo sapien
ctagctaaaatagaaatcaaggaagaaattcta

SEQ ID NO: 949247 - DNA, 33 bp, Homo sapien
ctttctgtgcatggccgagttcacctgacgtta

SEQ ID NO: 949248 - DNA, 33 bp, Homo sapien
ctttctgtgcatggcctagttcacctgacgtta

SEQ ID NO: 949249 - DNA, 33 bp, Homo sapien; identical to SEQ ID NO: 949247

SEQ ID NO: 949250 - DNA, 33 bp, Homo sapien; identical to SEQ ID NO: 949248

SEQ ID NO: 949251 - DNA, 33 bp, Homo sapien
catagattttgtatccagataaatagatttatt

SEQ ID NO: 949252 - DNA, 33 bp, Homo sapien
catagattttgtatcctgataaatagatttatt

SEQ ID NO: 949253 - DNA, 33 bp, Homo sapien
ggtaagttatagaaaccgtgctttgactttctt

SEQ ID NO: 949254 - DNA, 33 bp, Homo sapien
ggtaagttatagaaactgtgctttgactttctt

SEQ ID NO: 949255 - DNA, 33 bp, Homo sapien
taaccgcatccagacacatatagcaaatattat

SEQ ID NO: 949256 - DNA, 33 bp, Homo sapien
taaccgcatccagacagatatagcaaatattat

SEQ ID NO: 949257 - DNA, 33 bp, Homo sapien
tagagattcagtataagccctatcaattatatt

SEQ ID NO: 949258 - DNA, 33 bp, Homo sapien
tagagattcagtataatccctatcaattatatt

SEQ ID NO: 949259 - DNA, 33 bp, Homo sapien
acaagtccataactgcgatctctgtccctgacc

SEQ ID NO: 949260 - DNA, 33 bp, Homo sapien
acaagtccataactgctatctctgtccctgacc

SEQ ID NO: 949261 - DNA, 33 bp, Homo sapien
ccccatgtgatagtccaaaatctggcctcatgg

SEQ ID NO: 949262 - DNA, 33 bp, Homo sapien
ccccatgtgatagtccgaaatctggcctcatgg

SEQ ID NO: 949263 - DNA, 33 bp, Homo sapien; identical to SEQ ID NO: 949261

SEQ ID NO: 949264 - DNA, 33 bp, Homo sapien; identical to SEQ ID NO: 949262

SEQ ID NO: 949265 - DNA, 33 bp, Homo sapien
ggctttgagatatggaagaggcttaaagtcaat

SEQ ID NO: 949266 - DNA, 33 bp, Homo sapien
ggctttgagatatggaggaggcttaaagtcaat

SEQ ID NO: 949267 - DNA, 33 bp, Homo sapien
ctcacagccctcattcactcttggtgcctcctc

SEQ ID NO: 949268 - DNA, 33 bp, Homo sapien
ctcacagccctcattcgctcttggtgcctcctc

SEQ ID NO: 949269 - DNA, 33 bp, Homo sapien
gtgagctgaggaataaagtagttttaggatatt

SEQ ID NO: 949270 - DNA, 33 bp, Homo sapien
gtgagctgaggaataacgtagttttaggatatt

SEQ ID NO: 949271 - DNA, 33 bp, Homo sapien
tgtacacccactgtaacattaggcgtaatttct

SEQ ID NO: 949272 - DNA, 33 bp, Homo sapien
tgtacacccactgtaatattaggcgtaatttct

SEQ ID NO: 949273 - DNA, 33 bp, Homo sapien; identical to SEQ ID NO: 949271

SEQ ID NO: 949274 - DNA, 33 bp, Homo sapien; identical to SEQ ID NO: 949272

SEQ ID NO: 949275 - DNA, 33 bp, Homo sapien
ttcagagcaagatacgaaaaaggtaacttggag

SEQ ID NO: 949276 - DNA, 33 bp, Homo sapien
ttcagagcaagatacggaaaaggtaacttggag

SEQ ID NO: 949277 - DNA, 33 bp, Homo sapien
tttctataaagagtggaaatctttcttctgtgg

SEQ ID NO: 949278 - DNA, 33 bp, Homo sapien
tttctataaagagtggcaatctttcttctgtgg

SEQ ID NO: 949279 - DNA, 33 bp, Homo sapien
gaccttgaaggatagacatgttttgcataagca

SEQ ID NO: 949280 - DNA, 33 bp, Homo sapien
gaccttgaaggatagagatgttttgcataagca

SEQ ID NO: 949281 - DNA, 33 bp, Homo sapien
gactactgagccccacaccagagtctctgagca

SEQ ID NO: 949282 - DNA, 33 bp, Homo sapien
gactactgagccccacgccagagtctctgagca

SEQ ID NO: 949283 - DNA, 33 bp, Homo sapien
atctatgtttctaacaagttgtcaggtgacaga

SEQ ID NO: 949284 - DNA, 33 bp, Homo sapien
atctatgtttctaacaggttgtcaggtgacaga

SEQ ID NO: 949285 - DNA, 33 bp, Homo sapien
gcaatgaaaaattatccctgaacaaaatgcata

SEQ ID NO: 949286 - DNA, 33 bp, Homo sapien
gcaatgaaaaattatctctgaacaaaatgcata

SEQ ID NO: 949287 - DNA, 33 bp, Homo sapien
ctaagtactatgcacccattaacttactctcta

SEQ ID NO: 949288 - DNA, 33 bp, Homo sapien
ctaagtactatgcaccgattaacttactctcta

SEQ ID NO: 949289 - DNA, 33 bp, Homo sapien
taagtcattcagcaaggaaaaagatttaaataa

SEQ ID NO: 949290 - DNA, 33 bp, Homo sapien
taagtcattcagcaagtaaaaagatttaaataa

SEQ ID NO: 949291 - DNA, 33 bp, Homo sapien
ttttagttatttgctacacagtatgtagaaagt

SEQ ID NO: 949292 - DNA, 33 bp, Homo sapien
ttttagttatttgctatacagtatgtagaaagt

SEQ ID NO: 949293 - DNA, 33 bp, Homo sapien
tagtgcctcagggttactaaaaagatcaactgt

SEQ ID NO: 949294 - DNA, 33 bp, Homo sapien
tagtgcctcagggttattaaaaagatcaactgt

SEQ ID NO: 949295 - DNA, 33 bp, Homo sapien
tggcttctacttaaccaagactatatctctaat

SEQ ID NO: 949296 - DNA, 33 bp, Homo sapien
tggcttctacttaaccgagactatatctctaat

SEQ ID NO: 949297 - DNA, 33 bp, Homo sapien
ccttaagaaagtcacccaaaattcttgcaactt

SEQ ID NO: 949298 - DNA, 33 bp, Homo sapien
ccttaagaaagtcacctaaaattcttgcaactt

SEQ ID NO: 949299 - DNA, 33 bp, Homo sapien
accatgcctggtcaagcattacagaattaatat

SEQ ID NO: 949300 - DNA, 33 bp, Homo sapien
accatgcctggtcaaggattacagaattaatat

SEQ ID NO: 949301 - DNA, 33 bp, Homo sapien
aaatgtctgaatggcactaatgaggataagttt

SEQ ID NO: 949302 - DNA, 33 bp, Homo sapien
aaatgtctgaatggcagtaatgaggataagttt

SEQ ID NO: 949303 - DNA, 33 bp, Homo sapien
tgcttagtcatattgaactaatgtcaagatctt

SEQ ID NO: 949304 - DNA, 33 bp, Homo sapien
tgcttagtcatattgagctaatgtcaagatctt

SEQ ID NO: 949305 - DNA, 33 bp, Homo sapien
ggctctgcagttttgccgacagaagaaaatgat

SEQ ID NO: 949306 - DNA, 33 bp, Homo sapien
ggctctgcagttttgctgacagaagaaaatgat

SEQ ID NO: 949307 - DNA, 33 bp, Homo sapien
agggaatgaataaaaaagaggtgcctgagaaaa

SEQ ID NO: 949308 - DNA, 33 bp, Homo sapien
agggaatgaataaaaaggaggtgcctgagaaaa

SEQ ID NO: 949309 - DNA, 33 bp, Homo sapien
tgtcatatttattaggaaaaggaactccaaagg

SEQ ID NO: 949310 - DNA, 33 bp, Homo sapien
tgtcatatttattagggaaaggaactccaaagg

SEQ ID NO: 949311 - DNA, 33 bp, Homo sapien
tctgaagaatctagaaatactaagtgtgtgacc

SEQ ID NO: 949312 - DNA, 33 bp, Homo sapien
tctgaagaatctagaagtactaagtgtgtgacc

SEQ ID NO: 949313 - DNA, 33 bp, Homo sapien
ccaggttagcagcttagaaagtcaagagaaaaa

SEQ ID NO: 949314 - DNA, 33 bp, Homo sapien
ccaggttagcagcttataaagtcaagagaaaaa

SEQ ID NO: 949315 - DNA, 33 bp, Homo sapien
ggcaggattccaggtaacaataccatcttggca

SEQ ID NO: 949316 - DNA, 33 bp, Homo sapien
ggcaggattccaggtaccaataccatcttggca

SEQ ID NO: 949317 - DNA, 33 bp, Homo sapien
tccaccctgatagatgcagcttgtggtaaagtc

SEQ ID NO: 949318 - DNA, 33 bp, Homo sapien
tccaccctgatagatggagcttgtggtaaagtc

SEQ ID NO: 949319 - DNA, 33 bp, Homo sapien
agtatagaacattcacggactttccaaggcttt

SEQ ID NO: 949320 - DNA, 33 bp, Homo sapien
agtatagaacattcactgactttccaaggcttt

SEQ ID NO: 949321 - DNA, 33 bp, Homo sapien
cacttgctaggctggaaaataggttaatgagta

SEQ ID NO: 949322 - DNA, 33 bp, Homo sapien
cacttgctaggctggagaataggttaatgagta

SEQ ID NO: 949323 - DNA, 33 bp, Homo sapien
ttaaggccgagtgttacgtgctgccttgacatc

SEQ ID NO: 949324 - DNA, 33 bp, Homo sapien
ttaaggccgagtgttatgtgctgccttgacatc

SEQ ID NO: 949325 - DNA, 33 bp, Homo sapien
agaagtaaagtgtagacgaaggaaagtgtatat

SEQ ID NO: 949326 - DNA, 33 bp, Homo sapien
agaagtaaagtgtagatgaaggaaagtgtatat

SEQ ID NO: 949327 - DNA, 33 bp, Homo sapien
accacattctcatttgcatgactgaggcagaaa

SEQ ID NO: 949328 - DNA, 33 bp, Homo sapien
accacattctcatttggatgactgaggcagaaa

SEQ ID NO: 949329 - DNA, 33 bp, Homo sapien
gtattcactcataccacaagaaccaatttttgc

SEQ ID NO: 949330 - DNA, 33 bp, Homo sapien
gtattcactcataccagaagaaccaatttttgc

SEQ ID NO: 949331 - DNA, 33 bp, Homo sapien
agaacaattgaaaaacgactgcaatagtccaag

SEQ ID NO: 949332 - DNA, 33 bp, Homo sapien
agaacaattgaaaaactactgcaatagtccaag

SEQ ID NO: 949333 - DNA, 33 bp, Homo sapien
ggattctacgttgggaaatactgtatgatgcca

SEQ ID NO: 949334 - DNA, 33 bp, Homo sapien
ggattctacgttgggagatactgtatgatgcca

SEQ ID NO: 949335 - DNA, 33 bp, Homo sapien
aaggttatatctctgaagttaaactgcacataa

SEQ ID NO: 949336 - DNA, 33 bp, Homo sapien
aaggttatatctctgacgttaaactgcacataa

SEQ ID NO: 949337 - DNA, 33 bp, Homo sapien; identical to SEQ ID NO: 949335

SEQ ID NO: 949338 - DNA, 33 bp, Homo sapien; identical to SEQ ID NO: 949336

SEQ ID NO: 949339 - DNA, 33 bp, Homo sapien
tgctctcttgctcagcgatgagtcggtcatgca

SEQ ID NO: 949340 - DNA, 33 bp, Homo sapien
tgctctcttgctcagctatgagtcggtcatgca

SEQ ID NO: 949341 - DNA, 33 bp, Homo sapien
ccctgtaagaaccagaccctactatgtctttag

SEQ ID NO: 949342 - DNA, 33 bp, Homo sapien
ccctgtaagaaccagatcctactatgtctttag

SEQ ID NO: 949343 - DNA, 33 bp, Homo sapien
gtacttacaatcccccccatcagaggagcaaat

SEQ ID NO: 949344 - DNA, 33 bp, Homo sapien
gtacttacaatccccctcatcagaggagcaaat

SEQ ID NO: 949345 - DNA, 33 bp, Homo sapien
ttccccatttttttacacctctcagaagccaaa

SEQ ID NO: 949346 - DNA, 33 bp, Homo sapien
ttccccatttttttactcctctcagaagccaaa

SEQ ID NO: 949347 - DNA, 33 bp, Homo sapien
taaggtaagaagagaacattggcttaattttac

SEQ ID NO: 949348 - DNA, 33 bp, Homo sapien
taaggtaagaagagaatattggcttaattttac

SEQ ID NO: 949349 - DNA, 33 bp, Homo sapien
gtgaccttcttatgagaccaagtgagttagtag

SEQ ID NO: 949350 - DNA, 33 bp, Homo sapien
gtgaccttcttatgagcccaagtgagttagtag

SEQ ID NO: 949351 - DNA, 33 bp, Homo sapien
ttccccattggcagacagctatttccactcaaa

SEQ ID NO: 949352 - DNA, 33 bp, Homo sapien
ttccccattggcagacggctatttccactcaaa

SEQ ID NO: 949353 - DNA, 33 bp, Homo sapien
tttctgggttaaacaaagaaggaatattctgat

SEQ ID NO: 949354 - DNA, 33 bp, Homo sapien
tttctgggttaaacaatgaaggaatattctgat

SEQ ID NO: 949355 - DNA, 33 bp, Homo sapien
gtcacaatccatagaacgaacactaccaacggt

SEQ ID NO: 949356 - DNA, 33 bp, Homo sapien
gtcacaatccatagaatgaacactaccaacggt

SEQ ID NO: 949357 - DNA, 33 bp, Homo sapien
ctattactaagtaaaagcaaccaatctgtaaag

SEQ ID NO: 949358 - DNA, 33 bp, Homo sapien
ctattactaagtaaaatcaaccaatctgtaaag

SEQ ID NO: 949359 - DNA, 33 bp, Homo sapien
tagactgagggtaacaagagacagatttcttac

SEQ ID NO: 949360 - DNA, 33 bp, Homo sapien
tagactgagggtaacaggagacagatttcttac

SEQ ID NO: 949361 - DNA, 33 bp, Homo sapien
tgctcattccaatccaagagcactgggttcatt

SEQ ID NO: 949362 - DNA, 33 bp, Homo sapien
tgctcattccaatccacgagcactgggttcatt

SEQ ID NO: 949363 - DNA, 33 bp, Homo sapien
agtgtctttggcaggagcgttacagaagtgaag

SEQ ID NO: 949364 - DNA, 33 bp, Homo sapien
agtgtctttggcaggatcgttacagaagtgaag

SEQ ID NO: 949365 - DNA, 33 bp, Homo sapien
ttagaaccataagatgaatttaattgtaggtct

SEQ ID NO: 949366 - DNA, 33 bp, Homo sapien
ttagaaccataagatggatttaattgtaggtct

SEQ ID NO: 949367 - DNA, 33 bp, Homo sapien
ccattgccatggaaaggagtggtagcgctgggg

SEQ ID NO: 949368 - DNA, 33 bp, Homo sapien
ccattgccatggaaagtagtggtagcgctgggg

SEQ ID NO: 949369 - DNA, 33 bp, Homo sapien
ccatgatcgaatacaactgggcatagacacctg

SEQ ID NO: 949370 - DNA, 33 bp, Homo sapien
ccatgatcgaatacaattgggcatagacacctg

SEQ ID NO: 949371 - DNA, 33 bp, Homo sapien
catgcaagattcacttaaacaaattacaaatca

SEQ ID NO: 949372 - DNA, 33 bp, Homo sapien
catgcaagattcacttgaacaaattacaaatca

SEQ ID NO: 949373 - DNA, 33 bp, Homo sapien
ccaaatgaaataaaaacgtgtgaatgaatccac

SEQ ID NO: 949374 - DNA, 33 bp, Homo sapien
ccaaatgaaataaaaatgtgtgaatgaatccac

SEQ ID NO: 949375 - DNA, 33 bp, Homo sapien
tcacaacattttaaatcataggcaatgcacaag

SEQ ID NO: 949376 - DNA, 33 bp, Homo sapien
tcacaacattttaaattataggcaatgcacaag

SEQ ID NO: 949377 - DNA, 33 bp, Homo sapien
ctataccacaaatttcactgatgctgtatcatt

SEQ ID NO: 949378 - DNA, 33 bp, Homo sapien
ctataccacaaatttcgctgatgctgtatcatt

SEQ ID NO: 949379 - DNA, 33 bp, Homo sapien
atagatttaactgagaaatgttgtgtttttaga

SEQ ID NO: 949380 - DNA, 33 bp, Homo sapien
atagatttaactgagagatgttgtgtttttaga

SEQ ID NO: 949381 - DNA, 33 bp, Homo sapien
aatatgtgaatgaacacctaattcaaggaatat

SEQ ID NO: 949382 - DNA, 33 bp, Homo sapien
aatatgtgaatgaacagctaattcaaggaatat

SEQ ID NO: 949383 - DNA, 33 bp, Homo sapien
ggcaaattatatccagaagagaatggtttaaaa

SEQ ID NO: 949384 - DNA, 33 bp, Homo sapien
ggcaaattatatccagtagagaatggtttaaaa

SEQ ID NO: 949385 - DNA, 33 bp, Homo sapien
taaattctcacacaacccctgtggtttccgagg

SEQ ID NO: 949386 - DNA, 33 bp, Homo sapien
taaattctcacacaactcctgtggtttccgagg

SEQ ID NO: 949387 - DNA, 33 bp, Homo sapien
tgatgcagaaagagtaaaaaacccacaatgtaa

SEQ ID NO: 949388 - DNA, 33 bp, Homo sapien
tgatgcagaaagagtacaaaacccacaatgtaa

SEQ ID NO: 949389 - DNA, 33 bp, Homo sapien
tgcttttgttacctacacaaggggtgggctcag

SEQ ID NO: 949390 - DNA, 33 bp, Homo sapien
tgcttttgttacctacgcaaggggtgggctcag

SEQ ID NO: 949391 - DNA, 33 bp, Homo sapien
ccctatgcttataagaagtgacccagcccccag

SEQ ID NO: 949392 - DNA, 33 bp, Homo sapien
ccctatgcttataagacgtgacccagcccccag

SEQ ID NO: 949393 - DNA, 33 bp, Homo sapien
ggatcctgtaccttgccataccgtgttcctcca

SEQ ID NO: 949394 - DNA, 33 bp, Homo sapien
ggatcctgtaccttgctataccgtgttcctcca

SEQ ID NO: 949395 - DNA, 33 bp, Homo sapien
ggtagcttgaaaggctaaaagtgatctgatctg

SEQ ID NO: 949396 - DNA, 33 bp, Homo sapien
ggtagcttgaaaggctcaaagtgatctgatctg

SEQ ID NO: 949397 - DNA, 33 bp, Homo sapien
gccagagcactgaccaaatcaaagactcccatt

SEQ ID NO: 949398 - DNA, 33 bp, Homo sapien
gccagagcactgaccatatcaaagactcccatt

SEQ ID NO: 949399 - DNA, 33 bp, Homo sapien
tatcatgtgaagaagacaattcaggaaaggcag

SEQ ID NO: 949400 - DNA, 33 bp, Homo sapien
tatcatgtgaagaagataattcaggaaaggcag

SEQ ID NO: 949401 - DNA, 33 bp, Homo sapien
gccctgaatcagaccactcttttgtgtataaaa

SEQ ID NO: 949402 - DNA, 33 bp, Homo sapien
gccctgaatcagaccagtcttttgtgtataaaa

SEQ ID NO: 949403 - DNA, 33 bp, Homo sapien
aaaatcttagagctgaaaatcttccttcgacat

SEQ ID NO: 949404 - DNA, 33 bp, Homo sapien
aaaatcttagagctgagaatcttccttcgacat

SEQ ID NO: 949405 - DNA, 33 bp, Homo sapien
gcaagcctctcagctaacctatcattggccaac

SEQ ID NO: 949406 - DNA, 33 bp, Homo sapien
gcaagcctctcagctatcctatcattggccaac

SEQ ID NO: 949407 - DNA, 33 bp, Homo sapien
gaaagccagcaaataaacttgtttcaatatttt

SEQ ID NO: 949408 - DNA, 33 bp, Homo sapien
gaaagccagcaaataaccttgtttcaatatttt

SEQ ID NO: 949409 - DNA, 33 bp, Homo sapien
tgttaccaatgctgaactcttgcttaattgata

SEQ ID NO: 949410 - DNA, 33 bp, Homo sapien
tgttaccaatgctgaagtcttgcttaattgata

SEQ ID NO: 949411 - DNA, 33 bp, Homo sapien
gatgtgactagctcaaaatcaaaattagtggaa

SEQ ID NO: 949412 - DNA, 33 bp, Homo sapien
gatgtgactagctcaagatcaaaattagtggaa

SEQ ID NO: 949413 - DNA, 33 bp, Homo sapien
cacactaggccatgataacctctcatgagtgga

SEQ ID NO: 949414 - DNA, 33 bp, Homo sapien
cacactaggccatgatgacctctcatgagtgga

SEQ ID NO: 949415 - DNA, 33 bp, Homo sapien
tttggatatatcacccagaagcaggattactag

SEQ ID NO: 949416 - DNA, 33 bp, Homo sapien
tttggatatatcacccggaagcaggattactag

SEQ ID NO: 949417 - DNA, 33 bp, Homo sapien
agtcttgttatagtcacgctatcatccaagaag

SEQ ID NO: 949418 - DNA, 33 bp, Homo sapien
agtcttgttatagtcatgctatcatccaagaag

SEQ ID NO: 949419 - DNA, 33 bp, Homo sapien
cagagtgatgggtgaacatgatttagcaaggca

SEQ ID NO: 949420 - DNA, 33 bp, Homo sapien
cagagtgatgggtgaatatgatttagcaaggca

SEQ ID NO: 949421 - DNA, 33 bp, Homo sapien
tggatttttaaattaacctcactactggatctg

SEQ ID NO: 949422 - DNA, 33 bp, Homo sapien
tggatttttaaattaagctcactactggatctg

SEQ ID NO: 949423 - DNA, 33 bp, Homo sapien
attttgcaacaatacaagatgttattaactatg

SEQ ID NO: 949424 - DNA, 33 bp, Homo sapien
attttgcaacaatacaggatgttattaactatg

SEQ ID NO: 949425 - DNA, 33 bp, Homo sapien
gaagctggcgaatgacacaaaggacagctggag

SEQ ID NO: 949426 - DNA, 33 bp, Homo sapien
gaagctggcgaatgacgcaaaggacagctggag

SEQ ID NO: 949427 - DNA, 33 bp, Homo sapien
aaaagcaaacagctaaagtggctatgtgttgag

SEQ ID NO: 949428 - DNA, 33 bp, Homo sapien
aaaagcaaacagctaacgtggctatgtgttgag

SEQ ID NO: 949429 - DNA, 33 bp, Homo sapien
tgataaatgtaagaagcatctagatcaagaact

SEQ ID NO: 949430 - DNA, 33 bp, Homo sapien
tgataaatgtaagaaggatctagatcaagaact

SEQ ID NO: 949431 - DNA, 33 bp, Homo sapien
ggttcgaatgtgttgaggtcaccctggtggaga

SEQ ID NO: 949432 - DNA, 33 bp, Homo sapien
ggttcgaatgtgttgatgtcaccctggtggaga

SEQ ID NO: 949433 - DNA, 33 bp, Homo sapien
aaagaacttacgtgaaatccttacttaaatgcc

SEQ ID NO: 949434 - DNA, 33 bp, Homo sapien
aaagaacttacgtgaattccttacttaaatgcc

SEQ ID NO: 949435 - DNA, 33 bp, Homo sapien
tgctttcaagacataacagaggcagagattctt

SEQ ID NO: 949436 - DNA, 33 bp, Homo sapien
tgctttcaagacataatagaggcagagattctt

SEQ ID NO: 949437 - DNA, 33 bp, Homo sapien
atcagaaccaccgctacaactgctaacatcaag

SEQ ID NO: 949438 - DNA, 33 bp, Homo sapien
atcagaaccaccgctagaactgctaacatcaag

SEQ ID NO: 949439 - DNA, 33 bp, Homo sapien
attgagatcagctgcacgtatgttcttgacact

SEQ ID NO: 949440 - DNA, 33 bp, Homo sapien
attgagatcagctgcatgtatgttcttgacact

SEQ ID NO: 949441 - DNA, 33 bp, Homo sapien
gtattaaggagctttcagaaaaatggagcccac

SEQ ID NO: 949442 - DNA, 33 bp, Homo sapien
gtattaaggagctttccgaaaaatggagcccac

SEQ ID NO: 949443 - DNA, 33 bp, Homo sapien
gctgacaaaaatcgttaaaattatctaactcaa

SEQ ID NO: 949444 - DNA, 33 bp, Homo sapien
gctgacaaaaatcgttgaaattatctaactcaa

SEQ ID NO: 949445 - DNA, 33 bp, Homo sapien
gctgcctgcaaatgagaccattctttcaactgg

SEQ ID NO: 949446 - DNA, 33 bp, Homo sapien
gctgcctgcaaatgaggccattctttcaactgg

SEQ ID NO: 949447 - DNA, 33 bp, Homo sapien
gacactttgttaaccccggaaagcattgctact

SEQ ID NO: 949448 - DNA, 33 bp, Homo sapien
gacactttgttaaccctggaaagcattgctact

SEQ ID NO: 949449 - DNA, 33 bp, Homo sapien
atgtctagcttgtaaacaacacatctttattga

SEQ ID NO: 949450 - DNA, 33 bp, Homo sapien
atgtctagcttgtaaataacacatctttattga

SEQ ID NO: 949451 - DNA, 33 bp, Homo sapien
cattaaaatgcagaccacctattagaaagcatt

SEQ ID NO: 949452 - DNA, 33 bp, Homo sapien
cattaaaatgcagacctcctattagaaagcatt

SEQ ID NO: 949453 - DNA, 33 bp, Homo sapien
atactgaaaggcccacagtctcttcattacaca

SEQ ID NO: 949454 - DNA, 33 bp, Homo sapien
atactgaaaggcccaccgtctcttcattacaca

SEQ ID NO: 949455 - DNA, 33 bp, Homo sapien
aactgctactttcactaaagagagaacaaaggc

SEQ ID NO: 949456 - DNA, 33 bp, Homo sapien
aactgctactttcactgaagagagaacaaaggc

SEQ ID NO: 949457 - DNA, 33 bp, Homo sapien
aagtggctttgttatacatagacctcccaaagg

SEQ ID NO: 949458 - DNA, 33 bp, Homo sapien
aagtggctttgttatatatagacctcccaaagg

SEQ ID NO: 949459 - DNA, 33 bp, Homo sapien
ctgacactttgtgaacaggccttttactaaact

SEQ ID NO: 949460 - DNA, 33 bp, Homo sapien
ctgacactttgtgaacgggccttttactaaact

SEQ ID NO: 949461 - DNA, 33 bp, Homo sapien
aggacttgagtgtgacagcacggagcattggag

SEQ ID NO: 949462 - DNA, 33 bp, Homo sapien
aggacttgagtgtgacggcacggagcattggag

SEQ ID NO: 949463 - DNA, 33 bp, Homo sapien
tgcaggaggaagaaaccgtgctagactttgcag

SEQ ID NO: 949464 - DNA, 33 bp, Homo sapien
tgcaggaggaagaaactgtgctagactttgcag

SEQ ID NO: 949465 - DNA, 33 bp, Homo sapien
cttacagtaaaaggtaactgcgtaaaccacata

SEQ ID NO: 949466 - DNA, 33 bp, Homo sapien
cttacagtaaaaggtacctgcgtaaaccacata

SEQ ID NO: 949467 - DNA, 33 bp, Homo sapien
atgaagggactctgaccggagcaaaagaatctg

SEQ ID NO: 949468 - DNA, 33 bp, Homo sapien
atgaagggactctgactggagcaaaagaatctg

SEQ ID NO: 949469 - DNA, 33 bp, Homo sapien
gccttttcagttcctcagaatatttttactatt

SEQ ID NO: 949470 - DNA, 33 bp, Homo sapien
gccttttcagttcctcggaatatttttactatt

SEQ ID NO: 949471 - DNA, 33 bp, Homo sapien
tttacttttatttgtcaacacatcaaatactca

SEQ ID NO: 949472 - DNA, 33 bp, Homo sapien
tttacttttatttgtcgacacatcaaatactca

SEQ ID NO: 949473 - DNA, 33 bp, Homo sapien
ttcttcacttgaactcacttctgtttcttacaa

SEQ ID NO: 949474 - DNA, 33 bp, Homo sapien
ttcttcacttgaactcccttctgtttcttacaa

SEQ ID NO: 949475 - DNA, 33 bp, Homo sapien
gaggagaagaaaagacagatggtaatatgactg

SEQ ID NO: 949476 - DNA, 33 bp, Homo sapien
gaggagaagaaaagacggatggtaatatgactg

SEQ ID NO: 949477 - DNA, 33 bp, Homo sapien
tcacattttccattgacgatagcatgtaacgca

SEQ ID NO: 949478 - DNA, 33 bp, Homo sapien
tcacattttccattgaggatagcatgtaacgca

SEQ ID NO: 949479 - DNA, 33 bp, Homo sapien
gtcccacaacctataacagaaaaacctgcgtta

SEQ ID NO: 949480 - DNA, 33 bp, Homo sapien
gtcccacaacctataagagaaaaacctgcgtta

SEQ ID NO: 949481 - DNA, 33 bp, Homo sapien
tagtccgttctcatgactcaacatccgttctgt

SEQ ID NO: 949482 - DNA, 33 bp, Homo sapien
tagtccgttctcatgagtcaacatccgttctgt

SEQ ID NO: 949483 - DNA, 33 bp, Homo sapien
ggatatgagaaacacactccctagactcatgaa

SEQ ID NO: 949484 - DNA, 33 bp, Homo sapien
ggatatgagaaacacattccctagactcatgaa

SEQ ID NO: 949485 - DNA, 33 bp, Homo sapien
ccaagtagtgggattacaagtgctcaccaccat

SEQ ID NO: 949486 - DNA, 33 bp, Homo sapien
ccaagtagtgggattagaagtgctcaccaccat

SEQ ID NO: 949487 - DNA, 33 bp, Homo sapien
attttttatttttcgaagcaatgtttttttaga

SEQ ID NO: 949488 - DNA, 33 bp, Homo sapien
attttttatttttcgaggcaatgtttttttaga

SEQ ID NO: 949489 - DNA, 33 bp, Homo sapien
ggcaaaagtagtactcaatatatgcatcctaaa

SEQ ID NO: 949490 - DNA, 33 bp, Homo sapien
ggcaaaagtagtactccatatatgcatcctaaa

SEQ ID NO: 949491 - DNA, 33 bp, Homo sapien
actacttttgcctttaagttgtgattatgattt

SEQ ID NO: 949492 - DNA, 33 bp, Homo sapien
actacttttgcctttaggttgtgattatgattt

SEQ ID NO: 949493 - DNA, 33 bp, Homo sapien
gattatactccctcaaaaactaacagactagca

SEQ ID NO: 949494 - DNA, 33 bp, Homo sapien
gattatactccctcaagaactaacagactagca

SEQ ID NO: 949495 - DNA, 33 bp, Homo sapien
gctgatctttgcattacctagacagagaaacaa

SEQ ID NO: 949496 - DNA, 33 bp, Homo sapien
gctgatctttgcattatctagacagagaaacaa

SEQ ID NO: 949497 - DNA, 33 bp, Homo sapien
atattcaagattgatactactattgcttattag

SEQ ID NO: 949498 - DNA, 33 bp, Homo sapien
atattcaagattgatattactattgcttattag

SEQ ID NO: 949499 - DNA, 33 bp, Homo sapien
tcattagatgaagagtaaaagacttattagtca

SEQ ID NO: 949500 - DNA, 33 bp, Homo sapien
tcattagatgaagagttaaagacttattagtca

SEQ ID NO: 949501 - DNA, 33 bp, Homo sapien
gatgagaaaagagaaccaaaccaaactccaaga

SEQ ID NO: 949502 - DNA, 33 bp, Homo sapien
gatgagaaaagagaacgaaaccaaactccaaga

SEQ ID NO: 949503 - DNA, 33 bp, Homo sapien
cccccaccaagttcaactactgagttagaactt

SEQ ID NO: 949504 - DNA, 33 bp, Homo sapien
cccccaccaagttcaagtactgagttagaactt

SEQ ID NO: 949505 - DNA, 33 bp, Homo sapien
aacaactggtaactaacaaccaggtaggaattc

SEQ ID NO: 949506 - DNA, 33 bp, Homo sapien
aacaactggtaactaataaccaggtaggaattc

SEQ ID NO: 949507 - DNA, 33 bp, Homo sapien
agatctgctgtcagaaattcagctgatcctgat

SEQ ID NO: 949508 - DNA, 33 bp, Homo sapien
agatctgctgtcagaacttcagctgatcctgat

SEQ ID NO: 949509 - DNA, 33 bp, Homo sapien
ggagataaggcagaaaatgtaacccttctccca

SEQ ID NO: 949510 - DNA, 33 bp, Homo sapien
ggagataaggcagaaagtgtaacccttctccca

SEQ ID NO: 949511 - DNA, 33 bp, Homo sapien
ttctgcgtgtatttcactcaacaggttttcttc

SEQ ID NO: 949512 - DNA, 33 bp, Homo sapien
ttctgcgtgtatttcagtcaacaggttttcttc

SEQ ID NO: 949513 - DNA, 33 bp, Homo sapien
aagataaagtcgaccactcgtaatatttttttc

SEQ ID NO: 949514 - DNA, 33 bp, Homo sapien
aagataaagtcgaccattcgtaatatttttttc

SEQ ID NO: 949515 - DNA, 33 bp, Homo sapien
caggaaattgaaggaaaccatctgaaacttcaa

SEQ ID NO: 949516 - DNA, 33 bp, Homo sapien
caggaaattgaaggaagccatctgaaacttcaa

SEQ ID NO: 949517 - DNA, 33 bp, Homo sapien
aggaggacttataccaagaagtttaaagagagg

SEQ ID NO: 949518 - DNA, 33 bp, Homo sapien
aggaggacttataccacgaagtttaaagagagg

SEQ ID NO: 949519 - DNA, 33 bp, Homo sapien
cagggagatttttccacgtttgaagtagggtgc

SEQ ID NO: 949520 - DNA, 33 bp, Homo sapien
cagggagatttttccatgtttgaagtagggtgc

SEQ ID NO: 949521 - DNA, 33 bp, Homo sapien
atttaatgagaagggggagtatgtcattaacta

SEQ ID NO: 949522 - DNA, 33 bp, Homo sapien
atttaatgagaaggggtagtatgtcattaacta

SEQ ID NO: 949523 - DNA, 33 bp, Homo sapien
ttgtgatgagatcccacagctgctatgcgggga

SEQ ID NO: 949524 - DNA, 33 bp, Homo sapien
ttgtgatgagatcccagagctgctatgcgggga

SEQ ID NO: 949525 - DNA, 33 bp, Homo sapien
cgaagacaaaacaacaatgatgaaggtgtggaa

SEQ ID NO: 949526 - DNA, 33 bp, Homo sapien
cgaagacaaaacaacagtgatgaaggtgtggaa

SEQ ID NO: 949527 - DNA, 33 bp, Homo sapien
tcggtttcccccagtgaatcatgaattccttca

SEQ ID NO: 949528 - DNA, 33 bp, Homo sapien
tcggtttcccccagtggatcatgaattccttca

SEQ ID NO: 949529 - DNA, 33 bp, Homo sapien
acgatgcaatgtcatcaaaaaatgagcaggaag

SEQ ID NO: 949530 - DNA, 33 bp, Homo sapien
acgatgcaatgtcatcgaaaaatgagcaggaag

SEQ ID NO: 949531 - DNA, 33 bp, Homo sapien
cttggaaatcatccaactcatgcggaaagcaag

SEQ ID NO: 949532 - DNA, 33 bp, Homo sapien
cttggaaatcatccaagtcatgcggaaagcaag

SEQ ID NO: 949533 - DNA, 33 bp, Homo sapien
gccaggtatcacttctgaaatgtttgacttgag

SEQ ID NO: 949534 - DNA, 33 bp, Homo sapien
gccaggtatcacttcttaaatgtttgacttgag

SEQ ID NO: 949535 - DNA, 33 bp, Homo sapien
gcaaacaatgagcctacgttccaataaaatgtt

SEQ ID NO: 949536 - DNA, 33 bp, Homo sapien
gcaaacaatgagcctatgttccaataaaatgtt

SEQ ID NO: 949537 - DNA, 33 bp, Homo sapien
aaaacaagcaaacttacgttcctgataattacg

SEQ ID NO: 949538 - DNA, 33 bp, Homo sapien
aaaacaagcaaacttaggttcctgataattacg

SEQ ID NO: 949539 - DNA, 33 bp, Homo sapien
cagaactccatttagaactcctgcagaagtctc

SEQ ID NO: 949540 - DNA, 33 bp, Homo sapien
cagaactccatttagacctcctgcagaagtctc

SEQ ID NO: 949541 - DNA, 33 bp, Homo sapien
tcagcacctggtttaaatgtcctctctttttct

SEQ ID NO: 949542 - DNA, 33 bp, Homo sapien
tcagcacctggtttaagtgtcctctctttttct

SEQ ID NO: 949543 - DNA, 33 bp, Homo sapien
taattggattatctgtaacacaaaggataaatg

SEQ ID NO: 949544 - DNA, 33 bp, Homo sapien
taattggattatctgtcacacaaaggataaatg

SEQ ID NO: 949545 - DNA, 33 bp, Homo sapien
attataatgcaccgggcaagagaatatgtgctt

SEQ ID NO: 949546 - DNA, 33 bp, Homo sapien
attataatgcaccgggtaagagaatatgtgctt

SEQ ID NO: 949547 - DNA, 33 bp, Homo sapien
gctgcaagttaagaagcctgtcagtagatgttc

SEQ ID NO: 949548 - DNA, 33 bp, Homo sapien
gctgcaagttaagaaggctgtcagtagatgttc

SEQ ID NO: 949549 - DNA, 33 bp, Homo sapien
ctatgggatgacacagcaaaaagaccctcatta

SEQ ID NO: 949550 - DNA, 33 bp, Homo sapien
ctatgggatgacacagtaaaaagaccctcatta

SEQ ID NO: 949551 - DNA, 33 bp, Homo sapien
gaagttcaagatcaaggagttgcatctggttag

SEQ ID NO: 949552 - DNA, 33 bp, Homo sapien
gaagttcaagatcaagtagttgcatctggttag

SEQ ID NO: 949553 - DNA, 33 bp, Homo sapien
ctctgcttggcactgacagcagaaaaattaaga

SEQ ID NO: 949554 - DNA, 33 bp, Homo sapien
ctctgcttggcactgatagcagaaaaattaaga

SEQ ID NO: 949555 - DNA, 33 bp, Homo sapien
taagactaactgtaacaattccggattctttaa

SEQ ID NO: 949556 - DNA, 33 bp, Homo sapien
taagactaactgtaaccattccggattctttaa

SEQ ID NO: 949557 - DNA, 33 bp, Homo sapien
tgtgacaaagttaaaacctgctctaaggtgggc

SEQ ID NO: 949558 - DNA, 33 bp, Homo sapien
tgtgacaaagttaaaatctgctctaaggtgggc

SEQ ID NO: 949559 - DNA, 33 bp, Homo sapien
ataatttaagccacaaagactgtcagaagaatg

SEQ ID NO: 949560 - DNA, 33 bp, Homo sapien
ataatttaagccacaatgactgtcagaagaatg

SEQ ID NO: 949561 - DNA, 33 bp, Homo sapien
tcagcagttttggagacgcaggtaattagtcct

SEQ ID NO: 949562 - DNA, 33 bp, Homo sapien
tcagcagttttggagatgcaggtaattagtcct

SEQ ID NO: 949563 - DNA, 33 bp, Homo sapien
atttggaggccttccaagagttgagtggatagg

SEQ ID NO: 949564 - DNA, 33 bp, Homo sapien
atttggaggccttccaggagttgagtggatagg

SEQ ID NO: 949565 - DNA, 33 bp, Homo sapien
ctcttcctactgtacacaagttcttcatgctta

SEQ ID NO: 949566 - DNA, 33 bp, Homo sapien
ctcttcctactgtacagaagttcttcatgctta

SEQ ID NO: 949567 - DNA, 33 bp, Homo sapien
ctggagcactttcacaactgtctctatttctga

SEQ ID NO: 949568 - DNA, 33 bp, Homo sapien
ctggagcactttcacagctgtctctatttctga

SEQ ID NO: 949569 - DNA, 33 bp, Homo sapien
gaaagtgctccagaaaagcatgttccttctaat

SEQ ID NO: 949570 - DNA, 33 bp, Homo sapien
gaaagtgctccagaaacgcatgttccttctaat

SEQ ID NO: 949571 - DNA, 33 bp, Homo sapien
cacttgcatttttcccactgtaatatgttaaaa

SEQ ID NO: 949572 - DNA, 33 bp, Homo sapien
cacttgcatttttcccgctgtaatatgttaaaa

SEQ ID NO: 949573 - DNA, 33 bp, Homo sapien
acaggtcaacaagccactaagccctaatgatgg

SEQ ID NO: 949574 - DNA, 33 bp, Homo sapien
acaggtcaacaagccagtaagccctaatgatgg

SEQ ID NO: 949575 - DNA, 33 bp, Homo sapien
catttctatagagaggaagaatacaacaatggt

SEQ ID NO: 949576 - DNA, 33 bp, Homo sapien
catttctatagagagggagaatacaacaatggt

SEQ ID NO: 949577 - DNA, 33 bp, Homo sapien
aacaggagcatagtaactgcgaccacagtaaac

SEQ ID NO: 949578 - DNA, 33 bp, Homo sapien
aacaggagcatagtaagtgcgaccacagtaaac

SEQ ID NO: 949579 - DNA, 33 bp, Homo sapien
gaacagaggtacatataaaccagtcaccctcaa

SEQ ID NO: 949580 - DNA, 33 bp, Homo sapien
gaacagaggtacatatgaaccagtcaccctcaa

SEQ ID NO: 949581 - DNA, 33 bp, Homo sapien
aactctcaaaccattccaaatctgtagttttat

SEQ ID NO: 949582 - DNA, 33 bp, Homo sapien
aactctcaaaccattcgaaatctgtagttttat

SEQ ID NO: 949583 - DNA, 33 bp, Homo sapien
atgggcaaaataaccaatgaacatcataatgac

SEQ ID NO: 949584 - DNA, 33 bp, Homo sapien
atgggcaaaataaccagtgaacatcataatgac

SEQ ID NO: 949585 - DNA, 33 bp, Homo sapien
aaaagctttccgcagacagagttgaaatactta

SEQ ID NO: 949586 - DNA, 33 bp, Homo sapien
aaaagctttccgcagagagagttgaaatactta

SEQ ID NO: 949587 - DNA, 33 bp, Homo sapien
gctggagttccacttgcattggtgcaaagagga

SEQ ID NO: 949588 - DNA, 33 bp, Homo sapien
gctggagttccacttgtattggtgcaaagagga

SEQ ID NO: 949589 - DNA, 33 bp, Homo sapien
ttatagggtttatgaaaggttttagtgattgct

SEQ ID NO: 949590 - DNA, 33 bp, Homo sapien
ttatagggtttatgaagggttttagtgattgct

SEQ ID NO: 949591 - DNA, 33 bp, Homo sapien
aggacaaagagaggacagtcatttcccaaactc

SEQ ID NO: 949592 - DNA, 33 bp, Homo sapien
aggacaaagagaggacggtcatttcccaaactc

SEQ ID NO: 949593 - DNA, 33 bp, Homo sapien
aaaaacagagtcaataagttttagagcatgagt

SEQ ID NO: 949594 - DNA, 33 bp, Homo sapien
aaaaacagagtcaatacgttttagagcatgagt

SEQ ID NO: 949595 - DNA, 33 bp, Homo sapien
attacaaggaactaggaaaaagaaattgacatt

SEQ ID NO: 949596 - DNA, 33 bp, Homo sapien
attacaaggaactaggcaaaagaaattgacatt

SEQ ID NO: 949597 - DNA, 33 bp, Homo sapien
tggtcttatgaaatgaacaaataagaattcact

SEQ ID NO: 949598 - DNA, 33 bp, Homo sapien
tggtcttatgaaatgagcaaataagaattcact

SEQ ID NO: 949599 - DNA, 33 bp, Homo sapien
tttcagagaaagaggaagtgattgcatgctgga

SEQ ID NO: 949600 - DNA, 33 bp, Homo sapien
tttcagagaaagaggaggtgattgcatgctgga

SEQ ID NO: 949601 - DNA, 33 bp, Homo sapien
gtaataaagtcacaaaagtgatttggttctttt

SEQ ID NO: 949602 - DNA, 33 bp, Homo sapien
gtaataaagtcacaaacgtgatttggttctttt

SEQ ID NO: 949603 - DNA, 33 bp, Homo sapien
ctgggtcacatggcaacgctactaacttttgaa

SEQ ID NO: 949604 - DNA, 33 bp, Homo sapien
ctgggtcacatggcaatgctactaacttttgaa

SEQ ID NO: 949605 - DNA, 33 bp, Homo sapien
ttgtagaccaatcaaaatgaaagaaaagttcaa

SEQ ID NO: 949606 - DNA, 33 bp, Homo sapien
ttgtagaccaatcaaagtgaaagaaaagttcaa

SEQ ID NO: 949607 - DNA, 33 bp, Homo sapien
ttgttttgccactgacactaaattgtctctgct

SEQ ID NO: 949608 - DNA, 33 bp, Homo sapien
ttgttttgccactgaccctaaattgtctctgct

SEQ ID NO: 949609 - DNA, 33 bp, Homo sapien
gtcacgaagggaatgaccaggcttgaagcatgg

SEQ ID NO: 949610 - DNA, 33 bp, Homo sapien
gtcacgaagggaatgatcaggcttgaagcatgg

SEQ ID NO: 949611 - DNA, 33 bp, Homo sapien
gccagcagcatactagaaaacctgaacaataga

SEQ ID NO: 949612 - DNA, 33 bp, Homo sapien
gccagcagcatactaggaaacctgaacaataga

SEQ ID NO: 949613 - DNA, 33 bp, Homo sapien
aacatccctatatgtaaactttgatcttctact

SEQ ID NO: 949614 - DNA, 33 bp, Homo sapien
aacatccctatatgtacactttgatcttctact

SEQ ID NO: 949615 - DNA, 33 bp, Homo sapien
aatctatgtgtgtcagaaatggtttccaacaga

SEQ ID NO: 949616 - DNA, 33 bp, Homo sapien
aatctatgtgtgtcaggaatggtttccaacaga

SEQ ID NO: 949617 - DNA, 33 bp, Homo sapien
cattggagaaggcttacattttcttgcttagtg

SEQ ID NO: 949618 - DNA, 33 bp, Homo sapien
cattggagaaggcttatattttcttgcttagtg

SEQ ID NO: 949619 - DNA, 33 bp, Homo sapien
tcttccatcctgattaagaaacaacccaaacca

SEQ ID NO: 949620 - DNA, 33 bp, Homo sapien
tcttccatcctgattatgaaacaacccaaacca

SEQ ID NO: 949621 - DNA, 33 bp, Homo sapien
accaaaatcacaagaacaacaatgaacagaaaa

SEQ ID NO: 949622 - DNA, 33 bp, Homo sapien
accaaaatcacaagaataacaatgaacagaaaa

SEQ ID NO: 949623 - DNA, 33 bp, Homo sapien
acacaacaatgaatgcaatccattccacgccct

SEQ ID NO: 949624 - DNA, 33 bp, Homo sapien
acacaacaatgaatgcgatccattccacgccct

SEQ ID NO: 949625 - DNA, 33 bp, Homo sapien
taagtactttactccaaaattaccataacaata

SEQ ID NO: 949626 - DNA, 33 bp, Homo sapien
taagtactttactccagaattaccataacaata

SEQ ID NO: 949627 - DNA, 33 bp, Homo sapien
aactatggtgataatacaagctagtttgggatg

SEQ ID NO: 949628 - DNA, 33 bp, Homo sapien
aactatggtgataatagaagctagtttgggatg

SEQ ID NO: 949629 - DNA, 33 bp, Homo sapien
ctccagtgatgggtaaagagaggagtatgtaaa

SEQ ID NO: 949630 - DNA, 33 bp, Homo sapien
ctccagtgatgggtaaggagaggagtatgtaaa

SEQ ID NO: 949631 - DNA, 33 bp, Homo sapien
gacaaagggccactcacgtttaggcttcagaaa

SEQ ID NO: 949632 - DNA, 33 bp, Homo sapien
gacaaagggccactcatgtttaggcttcagaaa

SEQ ID NO: 949633 - DNA, 33 bp, Homo sapien
gtcagagaccttaagacggcacgtgtaatggaa

SEQ ID NO: 949634 - DNA, 33 bp, Homo sapien
gtcagagaccttaagagggcacgtgtaatggaa

SEQ ID NO: 949635 - DNA, 33 bp, Homo sapien
atttcacacagttcccaggactacatatgctta

SEQ ID NO: 949636 - DNA, 33 bp, Homo sapien
atttcacacagttcccgggactacatatgctta

SEQ ID NO: 949637 - DNA, 33 bp, Homo sapien
atgtatgagctgattaaaatgcagattctcgac

SEQ ID NO: 949638 - DNA, 33 bp, Homo sapien
atgtatgagctgattacaatgcagattctcgac

SEQ ID NO: 949639 - DNA, 33 bp, Homo sapien
aaataaaatttagaaggcctgataataacatta

SEQ ID NO: 949640 - DNA, 33 bp, Homo sapien
aaataaaatttagaagtcctgataataacatta

SEQ ID NO: 949641 - DNA, 33 bp, Homo sapien
aaaggtaaaatgtcaacggcaaatggaatagat

SEQ ID NO: 949642 - DNA, 33 bp, Homo sapien
aaaggtaaaatgtcaatggcaaatggaatagat

SEQ ID NO: 949643 - DNA, 33 bp, Homo sapien
caagaactgaaactgaaggaatgcttagtatat

SEQ ID NO: 949644 - DNA, 33 bp, Homo sapien
caagaactgaaactgatggaatgcttagtatat

SEQ ID NO: 949645 - DNA, 33 bp, Homo sapien
atactaaaagatacccgaagtgtcatatggttg

SEQ ID NO: 949646 - DNA, 33 bp, Homo sapien
atactaaaagataccctaagtgtcatatggttg

SEQ ID NO: 949647 - DNA, 33 bp, Homo sapien
gattatcatggcactcaatgactaccaaaaagt

SEQ ID NO: 949648 - DNA, 33 bp, Homo sapien
gattatcatggcactcgatgactaccaaaaagt

SEQ ID NO: 949649 - DNA, 33 bp, Homo sapien
acttcaaagtgtgtacagcaaaacaacatctta

SEQ ID NO: 949650 - DNA, 33 bp, Homo sapien
acttcaaagtgtgtacggcaaaacaacatctta

SEQ ID NO: 949651 - DNA, 33 bp, Homo sapien
ctgattagctgtggaacgatgagtaccatctca

SEQ ID NO: 949652 - DNA, 33 bp, Homo sapien
ctgattagctgtggaatgatgagtaccatctca

SEQ ID NO: 949653 - DNA, 33 bp, Homo sapien
ttcacaatatttgatgaacttttaatttctcct

SEQ ID NO: 949654 - DNA, 33 bp, Homo sapien
ttcacaatatttgatggacttttaatttctcct

SEQ ID NO: 949655 - DNA, 33 bp, Homo sapien
acttgctgacattctgcaataggatgacaactt

SEQ ID NO: 949656 - DNA, 33 bp, Homo sapien
acttgctgacattctggaataggatgacaactt

SEQ ID NO: 949657 - DNA, 33 bp, Homo sapien
gctacatgaaatatggacattggccataaggag

SEQ ID NO: 949658 - DNA, 33 bp, Homo sapien
gctacatgaaatatgggcattggccataaggag

SEQ ID NO: 949659 - DNA, 33 bp, Homo sapien
atgcagagtgtggtgacattctaacgtaattgg

SEQ ID NO: 949660 - DNA, 33 bp, Homo sapien
atgcagagtgtggtgagattctaacgtaattgg

SEQ ID NO: 949661 - DNA, 33 bp, Homo sapien
catcctcgtgtgcctacgtctagttaatcaaga

SEQ ID NO: 949662 - DNA, 33 bp, Homo sapien
catcctcgtgtgcctaggtctagttaatcaaga

SEQ ID NO: 949663 - DNA, 33 bp, Homo sapien
ttctaagagactaagtaaaaatacacaaaacaa

SEQ ID NO: 949664 - DNA, 33 bp, Homo sapien
ttctaagagactaagtgaaaatacacaaaacaa

SEQ ID NO: 949665 - DNA, 33 bp, Homo sapien
tctccctgtaataaaaatgtttctgggctccag

SEQ ID NO: 949666 - DNA, 33 bp, Homo sapien
tctccctgtaataaaagtgtttctgggctccag

SEQ ID NO: 949667 - DNA, 33 bp, Homo sapien
gttaccatgttatcaaacgcaggcaattgaaag

SEQ ID NO: 949668 - DNA, 33 bp, Homo sapien
gttaccatgttatcaagcgcaggcaattgaaag

SEQ ID NO: 949669 - DNA, 33 bp, Homo sapien
attaacaaacaaaatacggggacttaggtcatc

SEQ ID NO: 949670 - DNA, 33 bp, Homo sapien
attaacaaacaaaatatggggacttaggtcatc

SEQ ID NO: 949671 - DNA, 33 bp, Homo sapien
ataatcttgatttcacagatctcttgatcagtt

SEQ ID NO: 949672 - DNA, 33 bp, Homo sapien
ataatcttgatttcacggatctcttgatcagtt

SEQ ID NO: 949673 - DNA, 33 bp, Homo sapien
caacgatgcctccctaccagccacttgatctac

SEQ ID NO: 949674 - DNA, 33 bp, Homo sapien
caacgatgcctccctatcagccacttgatctac

SEQ ID NO: 949675 - DNA, 33 bp, Homo sapien
gcctctttaggactcaaattttctcttttctgc

SEQ ID NO: 949676 - DNA, 33 bp, Homo sapien
gcctctttaggactcagattttctcttttctgc

SEQ ID NO: 949677 - DNA, 33 bp, Homo sapien
tgactctattccataaagcactgcagattccct

SEQ ID NO: 949678 - DNA, 33 bp, Homo sapien
tgactctattccataaggcactgcagattccct

SEQ ID NO: 949679 - DNA, 33 bp, Homo sapien
ctgtaattcagccaggacattaaggacatgggg

SEQ ID NO: 949680 - DNA, 33 bp, Homo sapien
ctgtaattcagccagggcattaaggacatgggg

SEQ ID NO: 949681 - DNA, 33 bp, Homo sapien
agcatatatagaaaccggatgtatgacacttga

SEQ ID NO: 949682 - DNA, 33 bp, Homo sapien
agcatatatagaaacctgatgtatgacacttga

SEQ ID NO: 949683 - DNA, 33 bp, Homo sapien
agaaaaaccaaatagcccagcaccattactgaa

SEQ ID NO: 949684 - DNA, 33 bp, Homo sapien
agaaaaaccaaatagcgcagcaccattactgaa

SEQ ID NO: 949685 - DNA, 33 bp, Homo sapien
tagctcggtacttctcaaaatatgattcctaga

SEQ ID NO: 949686 - DNA, 33 bp, Homo sapien
tagctcggtacttctctaaatatgattcctaga

SEQ ID NO: 949687 - DNA, 33 bp, Homo sapien
accttctttatgattcacccagagccaggttcc

SEQ ID NO: 949688 - DNA, 33 bp, Homo sapien
accttctttatgattcgcccagagccaggttcc

SEQ ID NO: 949689 - DNA, 33 bp, Homo sapien
agtggttttactgggacactatacagattggtg

SEQ ID NO: 949690 - DNA, 33 bp, Homo sapien
agtggttttactgggatactatacagattggtg

SEQ ID NO: 949691 - DNA, 33 bp, Homo sapien
tgttattttgtaagcaccacattggctactctg

SEQ ID NO: 949692 - DNA, 33 bp, Homo sapien
tgttattttgtaagcatcacattggctactctg

SEQ ID NO: 949693 - DNA, 33 bp, Homo sapien
gaaggcacagaaaggaacatattaaagccactt

SEQ ID NO: 949694 - DNA, 33 bp, Homo sapien
gaaggcacagaaaggatcatattaaagccactt

SEQ ID NO: 949695 - DNA, 33 bp, Homo sapien
tgaagggtagttctgtaacaagcaggagagcca

SEQ ID NO: 949696 - DNA, 33 bp, Homo sapien
tgaagggtagttctgttacaagcaggagagcca

SEQ ID NO: 949697 - DNA, 33 bp, Homo sapien
tttcaaggctttctgcaacgtgtccttacaaca

SEQ ID NO: 949698 - DNA, 33 bp, Homo sapien
tttcaaggctttctgcgacgtgtccttacaaca

SEQ ID NO: 949699 - DNA, 33 bp, Homo sapien
atgacattttatcgcccacactttggccacaga

SEQ ID NO: 949700 - DNA, 33 bp, Homo sapien
atgacattttatcgcctacactttggccacaga

SEQ ID NO: 949701 - DNA, 33 bp, Homo sapien
atggttagattcttcaagatcagaaatagtttt

SEQ ID NO: 949702 - DNA, 33 bp, Homo sapien
atggttagattcttcatgatcagaaatagtttt

SEQ ID NO: 949703 - DNA, 33 bp, Homo sapien
agaatctaaccatgaccaatgaggtatcatgaa

SEQ ID NO: 949704 - DNA, 33 bp, Homo sapien
agaatctaaccatgacgaatgaggtatcatgaa

SEQ ID NO: 949705 - DNA, 33 bp, Homo sapien
tttcttcagctcaagacacagaattttggtgta

SEQ ID NO: 949706 - DNA, 33 bp, Homo sapien
tttcttcagctcaagatacagaattttggtgta

SEQ ID NO: 949707 - DNA, 33 bp, Homo sapien
aaaggtaggaactatagctaattcatctttgta

SEQ ID NO: 949708 - DNA, 33 bp, Homo sapien
aaaggtaggaactatatctaattcatctttgta

SEQ ID NO: 949709 - DNA, 33 bp, Homo sapien
aaatgagttctctaaaaaggctggtaggaatgg

SEQ ID NO: 949710 - DNA, 33 bp, Homo sapien
aaatgagttctctaaagaggctggtaggaatgg

SEQ ID NO: 949711 - DNA, 33 bp, Homo sapien
gaaatatggttaataaacttagctgaatggaga

SEQ ID NO: 949712 - DNA, 33 bp, Homo sapien
gaaatatggttaataaccttagctgaatggaga

SEQ ID NO: 949713 - DNA, 33 bp, Homo sapien
gccaggaggtgggataaagcctggcttccgtgt

SEQ ID NO: 949714 - DNA, 33 bp, Homo sapien
gccaggaggtgggatacagcctggcttccgtgt

SEQ ID NO: 949715 - DNA, 33 bp, Homo sapien
atttttaaacactcaaatctctgatgaaattca

SEQ ID NO: 949716 - DNA, 33 bp, Homo sapien
atttttaaacactcaactctctgatgaaattca

SEQ ID NO: 949717 - DNA, 33 bp, Homo sapien
tacacatgtttgctgaataaatagcctcgttat

SEQ ID NO: 949718 - DNA, 33 bp, Homo sapien
tacacatgtttgctgagtaaatagcctcgttat

SEQ ID NO: 949719 - DNA, 33 bp, Homo sapien
tggatgcgcttgttccaaacacacgcacggccc

SEQ ID NO: 949720 - DNA, 33 bp, Homo sapien
tggatgcgcttgttccgaacacacgcacggccc

SEQ ID NO: 949721 - DNA, 33 bp, Homo sapien
ttccttgagaattacaatagttgagatatgttt

SEQ ID NO: 949722 - DNA, 33 bp, Homo sapien
ttccttgagaattacagtagttgagatatgttt

SEQ ID NO: 949723 - DNA, 33 bp, Homo sapien
attctgcctatggtacagattttcaaaaatgcc

SEQ ID NO: 949724 - DNA, 33 bp, Homo sapien
attctgcctatggtacggattttcaaaaatgcc

SEQ ID NO: 949725 - DNA, 33 bp, Homo sapien
ctaaagagaaagtaaacaaaatggccatctcta

SEQ ID NO: 949726 - DNA, 33 bp, Homo sapien
ctaaagagaaagtaaagaaaatggccatctcta

SEQ ID NO: 949727 - DNA, 33 bp, Homo sapien
gtttaattgattaacaacattgaagctcagata

SEQ ID NO: 949728 - DNA, 33 bp, Homo sapien
gtttaattgattaacaccattgaagctcagata

SEQ ID NO: 949729 - DNA, 33 bp, Homo sapien
ttcacgtcctgagttacaaaccctgcaggtccc

SEQ ID NO: 949730 - DNA, 33 bp, Homo sapien
ttcacgtcctgagttataaaccctgcaggtccc

SEQ ID NO: 949731 - DNA, 33 bp, Homo sapien
cagttcatgatctggacggattgagtgagatgc

SEQ ID NO: 949732 - DNA, 33 bp, Homo sapien
cagttcatgatctggatggattgagtgagatgc

SEQ ID NO: 949733 - DNA, 33 bp, Homo sapien
aggatctttaaggacaatgtagaatcactgcca

SEQ ID NO: 949734 - DNA, 33 bp, Homo sapien
aggatctttaaggacagtgtagaatcactgcca

SEQ ID NO: 949735 - DNA, 33 bp, Homo sapien
tctctaaacatcatcaaaggctgaggcaatcag

SEQ ID NO: 949736 - DNA, 33 bp, Homo sapien
tctctaaacatcatcagaggctgaggcaatcag

SEQ ID NO: 949737 - DNA, 33 bp, Homo sapien
agtaacttattggataaacagagtaaagacaag

SEQ ID NO: 949738 - DNA, 33 bp, Homo sapien
agtaacttattggatatacagagtaaagacaag

SEQ ID NO: 949739 - DNA, 33 bp, Homo sapien
tttgtccctggatttccagaacagccttcaaaa

SEQ ID NO: 949740 - DNA, 33 bp, Homo sapien
tttgtccctggatttctagaacagccttcaaaa

SEQ ID NO: 949741 - DNA, 33 bp, Homo sapien
ttagctgaaggtgttacacaatgggtgctcaaa

SEQ ID NO: 949742 - DNA, 33 bp, Homo sapien
ttagctgaaggtgttatacaatgggtgctcaaa

SEQ ID NO: 949743 - DNA, 33 bp, Homo sapien
tttgaaaggtttgtaaataagtgaaataattca

SEQ ID NO: 949744 - DNA, 33 bp, Homo sapien
tttgaaaggtttgtaagtaagtgaaataattca

SEQ ID NO: 949745 - DNA, 33 bp, Homo sapien
tcaggctcatgtcaaaaaattctaagtcaaatc

SEQ ID NO: 949746 - DNA, 33 bp, Homo sapien
tcaggctcatgtcaaacaattctaagtcaaatc

SEQ ID NO: 949747 - DNA, 33 bp, Homo sapien
gccacgttaaggagatcacaggtgtggtagcta

SEQ ID NO: 949748 - DNA, 33 bp, Homo sapien
gccacgttaaggagattacaggtgtggtagcta

SEQ ID NO: 949749 - DNA, 33 bp, Homo sapien
actggaggatgtattgcagattagctaccacac

SEQ ID NO: 949750 - DNA, 33 bp, Homo sapien
actggaggatgtattggagattagctaccacac

SEQ ID NO: 949751 - DNA, 33 bp, Homo sapien
ttgtttagaccttttccaacattgaacagggct

SEQ ID NO: 949752 - DNA, 33 bp, Homo sapien
ttgtttagaccttttctaacattgaacagggct

SEQ ID NO: 949753 - DNA, 33 bp, Homo sapien
gtctgcgtgatcagtacagtacagaagataaga

SEQ ID NO: 949754 - DNA, 33 bp, Homo sapien
gtctgcgtgatcagtatagtacagaagataaga

SEQ ID NO: 949755 - DNA, 33 bp, Homo sapien
actcctatcccagacacaagcaaaaccacacta

SEQ ID NO: 949756 - DNA, 33 bp, Homo sapien
actcctatcccagacataagcaaaaccacacta

SEQ ID NO: 949757 - DNA, 33 bp, Homo sapien
tacttgagaaagaggtaacatactatttggtaa

SEQ ID NO: 949758 - DNA, 33 bp, Homo sapien
tacttgagaaagaggtgacatactatttggtaa

SEQ ID NO: 949759 - DNA, 33 bp, Homo sapien
gaatgacacataacaaaacataattcctgccct

SEQ ID NO: 949760 - DNA, 33 bp, Homo sapien
gaatgacacataacaagacataattcctgccct

SEQ ID NO: 949761 - DNA, 33 bp, Homo sapien
tttctcttatttgacacatccagcagtgccagt

SEQ ID NO: 949762 - DNA, 33 bp, Homo sapien
tttctcttatttgacagatccagcagtgccagt

SEQ ID NO: 949763 - DNA, 33 bp, Homo sapien
ttgcacttatctcttaccatccttacctcttaa

SEQ ID NO: 949764 - DNA, 33 bp, Homo sapien
ttgcacttatctcttagcatccttacctcttaa

SEQ ID NO: 949765 - DNA, 33 bp, Homo sapien
agttacttgggcatgaatcaaccattctggtgt

SEQ ID NO: 949766 - DNA, 33 bp, Homo sapien
agttacttgggcatgactcaaccattctggtgt

SEQ ID NO: 949767 - DNA, 33 bp, Homo sapien
ctaataccttgtacaaaacagggaatctggaag

SEQ ID NO: 949768 - DNA, 33 bp, Homo sapien
ctaataccttgtacaacacagggaatctggaag

SEQ ID NO: 949769 - DNA, 33 bp, Homo sapien
tgttacttaagtaaaccgaacttgtgcatggtt

SEQ ID NO: 949770 - DNA, 33 bp, Homo sapien
tgttacttaagtaaactgaacttgtgcatggtt

SEQ ID NO: 949771 - DNA, 33 bp, Homo sapien
tacatgaaccttagcacgtagaagtgtccaaag

SEQ ID NO: 949772 - DNA, 33 bp, Homo sapien
tacatgaaccttagcatgtagaagtgtccaaag

SEQ ID NO: 949773 - DNA, 33 bp, Homo sapien
catttgtggatgaaatcatatggtctctgggat

SEQ ID NO: 949774 - DNA, 33 bp, Homo sapien
catttgtggatgaaattatatggtctctgggat

SEQ ID NO: 949775 - DNA, 33 bp, Homo sapien
atcccgatgagtcataagaagaacagatcacac

SEQ ID NO: 949776 - DNA, 33 bp, Homo sapien
atcccgatgagtcataggaagaacagatcacac

SEQ ID NO: 949777 - DNA, 33 bp, Homo sapien
tatggtagaaagccaacgtcataatgctattct

SEQ ID NO: 949778 - DNA, 33 bp, Homo sapien
tatggtagaaagccaaggtcataatgctattct

SEQ ID NO: 949779 - DNA, 33 bp, Homo sapien
atagcatgaaaggagaaagtagggaggaaattg

SEQ ID NO: 949780 - DNA, 33 bp, Homo sapien
atagcatgaaaggagatagtagggaggaaattg

SEQ ID NO: 949781 - DNA, 33 bp, Homo sapien
ggaggaaattggtagagacttacgctacagtaa

SEQ ID NO: 949782 - DNA, 33 bp, Homo sapien
ggaggaaattggtagatacttacgctacagtaa

SEQ ID NO: 949783 - DNA, 33 bp, Homo sapien
gctactgggtactttacgggttgcagagacaca

SEQ ID NO: 949784 - DNA, 33 bp, Homo sapien
gctactgggtactttaggggttgcagagacaca

SEQ ID NO: 949785 - DNA, 33 bp, Homo sapien
gctacatagatgcacacgtttttattactagta

SEQ ID NO: 949786 - DNA, 33 bp, Homo sapien
gctacatagatgcacatgtttttattactagta

SEQ ID NO: 949787 - DNA, 33 bp, Homo sapien
caaatatttcgaggtacaggaggaagaggtgac

SEQ ID NO: 949788 - DNA, 33 bp, Homo sapien
caaatatttcgaggtagaggaggaagaggtgac

SEQ ID NO: 949789 - DNA, 33 bp, Homo sapien
tcaagccatgcctattaaaattaaagtgaaaat

SEQ ID NO: 949790 - DNA, 33 bp, Homo sapien
tcaagccatgcctattgaaattaaagtgaaaat

SEQ ID NO: 949791 - DNA, 33 bp, Homo sapien
aactagtgttctgtgaaataaaaacaaaacaat

SEQ ID NO: 949792 - DNA, 33 bp, Homo sapien
aactagtgttctgtgagataaaaacaaaacaat

SEQ ID NO: 949793 - DNA, 33 bp, Homo sapien
tagtttctccattgaacaaaaagattggaacat

SEQ ID NO: 949794 - DNA, 33 bp, Homo sapien
tagtttctccattgaataaaaagattggaacat

SEQ ID NO: 949795 - DNA, 33 bp, Homo sapien
agataactctctataacccaagatgtcactgct

SEQ ID NO: 949796 - DNA, 33 bp, Homo sapien
agataactctctataatccaagatgtcactgct

SEQ ID NO: 949797 - DNA, 33 bp, Homo sapien
aaggaatgaaagacaaaggaagaaggaagggaa

SEQ ID NO: 949798 - DNA, 33 bp, Homo sapien
aaggaatgaaagacaacggaagaaggaagggaa

SEQ ID NO: 949799 - DNA, 33 bp, Homo sapien
atattttgatgtaaagcagaaattgtttcagtc

SEQ ID NO: 949800 - DNA, 33 bp, Homo sapien
atattttgatgtaaagtagaaattgtttcagtc

SEQ ID NO: 949801 - DNA, 33 bp, Homo sapien
cagcaaaatgttctaacatagagtgagctcatt

SEQ ID NO: 949802 - DNA, 33 bp, Homo sapien
cagcaaaatgttctaatatagagtgagctcatt

SEQ ID NO: 949803 - DNA, 33 bp, Homo sapien
cccacatgtgtagtaactccttttacccttgca

SEQ ID NO: 949804 - DNA, 33 bp, Homo sapien
cccacatgtgtagtaattccttttacccttgca

SEQ ID NO: 949805 - DNA, 33 bp, Homo sapien
gcaaaatatgtgtaggaataacatgataatgag

SEQ ID NO: 949806 - DNA, 33 bp, Homo sapien
gcaaaatatgtgtaggtataacatgataatgag

SEQ ID NO: 949807 - DNA, 33 bp, Homo sapien
aagattgctgttctcactacagatttaaatgcg

SEQ ID NO: 949808 - DNA, 33 bp, Homo sapien
aagattgctgttctcagtacagatttaaatgcg

SEQ ID NO: 949809 - DNA, 33 bp, Homo sapien
aaatatcacgaaacaaagctattatcattggat

SEQ ID NO: 949810 - DNA, 33 bp, Homo sapien
aaatatcacgaaacaaggctattatcattggat

SEQ ID NO: 949811 - DNA, 33 bp, Homo sapien
cttgcttatgttttcaatcttcctaatactttc

SEQ ID NO: 949812 - DNA, 33 bp, Homo sapien
cttgcttatgttttcagtcttcctaatactttc

SEQ ID NO: 949813 - DNA, 33 bp, Homo sapien
gagtggtccagacaaaccagaatgaatagaaag

SEQ ID NO: 949814 - DNA, 33 bp, Homo sapien
gagtggtccagacaaagcagaatgaatagaaag

SEQ ID NO: 949815 - DNA, 33 bp, Homo sapien
gacacagaaacagttacgcggtaagtgctggtg

SEQ ID NO: 949816 - DNA, 33 bp, Homo sapien
gacacagaaacagttatgcggtaagtgctggtg

SEQ ID NO: 949817 - DNA, 33 bp, Homo sapien
agacataaataataaaagtccgttgttatgaag

SEQ ID NO: 949818 - DNA, 33 bp, Homo sapien
agacataaataataaacgtccgttgttatgaag

SEQ ID NO: 949819 - DNA, 33 bp, Homo sapien
atgctaagttgtgcatcagcctttcctgggcaa

SEQ ID NO: 949820 - DNA, 33 bp, Homo sapien
atgctaagttgtgcatgagcctttcctgggcaa

SEQ ID NO: 949821 - DNA, 33 bp, Homo sapien
agaatatccattcacgaatattttatcatttaa

SEQ ID NO: 949822 - DNA, 33 bp, Homo sapien
agaatatccattcacgtatattttatcatttaa

SEQ ID NO: 949823 - DNA, 33 bp, Homo sapien
tacttagttgtatccagagaggagtggacaagg

SEQ ID NO: 949824 - DNA, 33 bp, Homo sapien
tacttagttgtatccatagaggagtggacaagg

SEQ ID NO: 949825 - DNA, 33 bp, Homo sapien
gagatcattattacacagtgccacaaaagaact

SEQ ID NO: 949826 - DNA, 33 bp, Homo sapien
gagatcattattacactgtgccacaaaagaact

SEQ ID NO: 949827 - DNA, 33 bp, Homo sapien
acagaactagcaggcacaacagagaggggatat

SEQ ID NO: 949828 - DNA, 33 bp, Homo sapien
acagaactagcaggcagaacagagaggggatat

SEQ ID NO: 949829 - DNA, 33 bp, Homo sapien
tttcagaggataatgccaagtgtcatgaaccca

SEQ ID NO: 949830 - DNA, 33 bp, Homo sapien
tttcagaggataatgctaagtgtcatgaaccca

SEQ ID NO: 949831 - DNA, 33 bp, Homo sapien
aatatttagtatataaactgaggcattttctgc

SEQ ID NO: 949832 - DNA, 33 bp, Homo sapien
aatatttagtatataagctgaggcattttctgc

SEQ ID NO: 949833 - DNA, 33 bp, Homo sapien
cagatgtgtaattcaaagactacccacttggtc

SEQ ID NO: 949834 - DNA, 33 bp, Homo sapien
cagatgtgtaattcaacgactacccacttggtc

SEQ ID NO: 949835 - DNA, 33 bp, Homo sapien
tagaaatgtgctcttacggtttttgctatttgt

SEQ ID NO: 949836 - DNA, 33 bp, Homo sapien
tagaaatgtgctcttatggtttttgctatttgt

SEQ ID NO: 949837 - DNA, 33 bp, Homo sapien
ctatatctgttatttacgcggagtgattactgt

SEQ ID NO: 949838 - DNA, 33 bp, Homo sapien
ctatatctgttatttatgcggagtgattactgt

SEQ ID NO: 949839 - DNA, 33 bp, Homo sapien
attgactttggtgtgacagagaaatacagtgtt

SEQ ID NO: 949840 - DNA, 33 bp, Homo sapien
attgactttggtgtgatagagaaatacagtgtt

SEQ ID NO: 949841 - DNA, 33 bp, Homo sapien
cttctatctagcctaaatcattgttgctgtagc

SEQ ID NO: 949842 - DNA, 33 bp, Homo sapien
cttctatctagcctaagtcattgttgctgtagc

SEQ ID NO: 949843 - DNA, 33 bp, Homo sapien
cctgaaaatgattgggaaatgactagataaatg

SEQ ID NO: 949844 - DNA, 33 bp, Homo sapien
cctgaaaatgattggggaatgactagataaatg

SEQ ID NO: 949845 - DNA, 33 bp, Homo sapien
gaatgaggattgaggggcaatcatgttatataa

SEQ ID NO: 949846 - DNA, 33 bp, Homo sapien
gaatgaggattgagggtcaatcatgttatataa

SEQ ID NO: 949847 - DNA, 33 bp, Homo sapien
tgtcaaatgagtgatacctaaacagattggagg

SEQ ID NO: 949848 - DNA, 33 bp, Homo sapien
tgtcaaatgagtgatatctaaacagattggagg

SEQ ID NO: 949849 - DNA, 33 bp, Homo sapien
gtgaagagaagggagacgttatcaaattgacac

SEQ ID NO: 949850 - DNA, 33 bp, Homo sapien
gtgaagagaagggagatgttatcaaattgacac

SEQ ID NO: 949851 - DNA, 33 bp, Homo sapien
gaaaaacacaggtatcagaaataagtcaataaa

SEQ ID NO: 949852 - DNA, 33 bp, Homo sapien
gaaaaacacaggtatcggaaataagtcaataaa

SEQ ID NO: 949853 - DNA, 33 bp, Homo sapien
ttaagcatttcactccaactttagtaaaatact

SEQ ID NO: 949854 - DNA, 33 bp, Homo sapien
ttaagcatttcactccgactttagtaaaatact

SEQ ID NO: 949855 - DNA, 33 bp, Homo sapien
gccatttactaagacactgagcttgttgcaagc

SEQ ID NO: 949856 - DNA, 33 bp, Homo sapien
gccatttactaagacattgagcttgttgcaagc

SEQ ID NO: 949857 - DNA, 33 bp, Homo sapien
tcttagtaaatggctccaagcattctggaatat

SEQ ID NO: 949858 - DNA, 33 bp, Homo sapien
tcttagtaaatggctctaagcattctggaatat

SEQ ID NO: 949859 - DNA, 33 bp, Homo sapien
tagagactcttgccaaattatgacagaaaccgt

SEQ ID NO: 949860 - DNA, 33 bp, Homo sapien
tagagactcttgccaagttatgacagaaaccgt

SEQ ID NO: 949861 - DNA, 33 bp, Homo sapien
acattgagagcaatagcatatactcaccttttg

SEQ ID NO: 949862 - DNA, 33 bp, Homo sapien
acattgagagcaataggatatactcaccttttg

SEQ ID NO: 949863 - DNA, 33 bp, Homo sapien
atttaacctctatctgcactcatctatcaatcc

SEQ ID NO: 949864 - DNA, 33 bp, Homo sapien
atttaacctctatctgtactcatctatcaatcc

SEQ ID NO: 949865 - DNA, 33 bp, Homo sapien
cacacacttgtctagacgtgcatatatatacct

SEQ ID NO: 949866 - DNA, 33 bp, Homo sapien
cacacacttgtctagaggtgcatatatatacct

SEQ ID NO: 949867 - DNA, 33 bp, Homo sapien
aaatttgtttgcaaaaatcagcacagaagagtt

SEQ ID NO: 949868 - DNA, 33 bp, Homo sapien
aaatttgtttgcaaaagtcagcacagaagagtt

SEQ ID NO: 949869 - DNA, 33 bp, Homo sapien
ggtcttaacgcaaagaataatactgaagtacaa

SEQ ID NO: 949870 - DNA, 33 bp, Homo sapien
ggtcttaacgcaaagagtaatactgaagtacaa

SEQ ID NO: 949871 - DNA, 33 bp, Homo sapien
tagagacgcttgaatacagtggggagggattac

SEQ ID NO: 949872 - DNA, 33 bp, Homo sapien
tagagacgcttgaatatagtggggagggattac

SEQ ID NO: 949873 - DNA, 33 bp, Homo sapien
agaagctcaacttttacaacttttcaggatctg

SEQ ID NO: 949874 - DNA, 33 bp, Homo sapien
agaagctcaacttttagaacttttcaggatctg

SEQ ID NO: 949875 - DNA, 33 bp, Homo sapien
gagtgtgtcaaatgaaactccccagagtagggt

SEQ ID NO: 949876 - DNA, 33 bp, Homo sapien
gagtgtgtcaaatgaatctccccagagtagggt

SEQ ID NO: 949877 - DNA, 33 bp, Homo sapien
gtagggcacttgcacaactctatccttgcacac

SEQ ID NO: 949878 - DNA, 33 bp, Homo sapien
gtagggcacttgcacagctctatccttgcacac

SEQ ID NO: 949879 - DNA, 33 bp, Homo sapien
taggcttggtaagttgcagctctatagacctcc

SEQ ID NO: 949880 - DNA, 33 bp, Homo sapien
taggcttggtaagttggagctctatagacctcc

SEQ ID NO: 949881 - DNA, 33 bp, Homo sapien
ttatgaagaatttaggcaatgtattttttgcag

SEQ ID NO: 949882 - DNA, 33 bp, Homo sapien
ttatgaagaatttaggtaatgtattttttgcag

SEQ ID NO: 949883 - DNA, 33 bp, Homo sapien
tagctgagagcaattacgagctaacactgaaag

SEQ ID NO: 949884 - DNA, 33 bp, Homo sapien
tagctgagagcaattatgagctaacactgaaag

SEQ ID NO: 949885 - DNA, 33 bp, Homo sapien
tgcacgttaccacatcagaattttcatttctaa

SEQ ID NO: 949886 - DNA, 33 bp, Homo sapien
tgcacgttaccacatcggaattttcatttctaa

SEQ ID NO: 949887 - DNA, 33 bp, Homo sapien
tgatccacactccgcaagcatttaataatatag

SEQ ID NO: 949888 - DNA, 33 bp, Homo sapien
tgatccacactccgcaggcatttaataatatag

SEQ ID NO: 949889 - DNA, 33 bp, Homo sapien
taaatatatggccagtaaaagtccaagtggaca

SEQ ID NO: 949890 - DNA, 33 bp, Homo sapien
taaatatatggccagtcaaagtccaagtggaca

SEQ ID NO: 949891 - DNA, 33 bp, Homo sapien
atatttaatgctattacgtttgcagtttaggag

SEQ ID NO: 949892 - DNA, 33 bp, Homo sapien
atatttaatgctattatgtttgcagtttaggag

SEQ ID NO: 949893 - DNA, 33 bp, Homo sapien
cttccaaagacgtgaaccgtattgcttctccca

SEQ ID NO: 949894 - DNA, 33 bp, Homo sapien
cttccaaagacgtgaatcgtattgcttctccca

SEQ ID NO: 949895 - DNA, 33 bp, Homo sapien
acacatgggaggcactgaccataataacagatg

SEQ ID NO: 949896 - DNA, 33 bp, Homo sapien
acacatgggaggcacttaccataataacagatg

SEQ ID NO: 949897 - DNA, 33 bp, Homo sapien
agatgacattatgatacagaaaatgtgtgtata

SEQ ID NO: 949898 - DNA, 33 bp, Homo sapien
agatgacattatgatatagaaaatgtgtgtata

SEQ ID NO: 949899 - DNA, 33 bp, Homo sapien
cactacaagtggcggaccaaaattagtaatcag

SEQ ID NO: 949900 - DNA, 33 bp, Homo sapien
cactacaagtggcggagcaaaattagtaatcag

SEQ ID NO: 949901 - DNA, 33 bp, Homo sapien
agtctgcggtgtcaagcagttctaatacaataa

SEQ ID NO: 949902 - DNA, 33 bp, Homo sapien
agtctgcggtgtcaaggagttctaatacaataa

SEQ ID NO: 949903 - DNA, 33 bp, Homo sapien
gactagctcttgagctcaaattccagtcttcca

SEQ ID NO: 949904 - DNA, 33 bp, Homo sapien
gactagctcttgagcttaaattccagtcttcca

SEQ ID NO: 949905 - DNA, 33 bp, Homo sapien
agagtccagtaaagagccaggataatagacaaa

SEQ ID NO: 949906 - DNA, 33 bp, Homo sapien
agagtccagtaaagagtcaggataatagacaaa

SEQ ID NO: 949907 - DNA, 33 bp, Homo sapien
tactgtcatccatttccatgtagtgtttctaac

SEQ ID NO: 949908 - DNA, 33 bp, Homo sapien
tactgtcatccatttctatgtagtgtttctaac

SEQ ID NO: 949909 - DNA, 33 bp, Homo sapien
catcatcattcattacaagtcttggtaatatta

SEQ ID NO: 949910 - DNA, 33 bp, Homo sapien
catcatcattcattacgagtcttggtaatatta

SEQ ID NO: 949911 - DNA, 33 bp, Homo sapien
gtgtattcatgcctcagggaaggaattgccata

SEQ ID NO: 949912 - DNA, 33 bp, Homo sapien
gtgtattcatgcctcatggaaggaattgccata

SEQ ID NO: 949913 - DNA, 33 bp, Homo sapien
ggaagccctctatgcccaaaggttggaataaag

SEQ ID NO: 949914 - DNA, 33 bp, Homo sapien
ggaagccctctatgccgaaaggttggaataaag

SEQ ID NO: 949915 - DNA, 33 bp, Homo sapien
cactcattctcctattaaaaacatttcattttc

SEQ ID NO: 949916 - DNA, 33 bp, Homo sapien
cactcattctcctattgaaaacatttcattttc

SEQ ID NO: 949917 - DNA, 33 bp, Homo sapien
aattaggatgaaaaaccatggatctgactcaaa

SEQ ID NO: 949918 - DNA, 33 bp, Homo sapien
aattaggatgaaaaacgatggatctgactcaaa

SEQ ID NO: 949919 - DNA, 33 bp, Homo sapien
cacaactttcatcaacactaccataaggtcata

SEQ ID NO: 949920 - DNA, 33 bp, Homo sapien
cacaactttcatcaacgctaccataaggtcata

SEQ ID NO: 949921 - DNA, 33 bp, Homo sapien
ggctcaaagatactgacacccatctctgactta

SEQ ID NO: 949922 - DNA, 33 bp, Homo sapien
ggctcaaagatactgatacccatctctgactta

SEQ ID NO: 949923 - DNA, 33 bp, Homo sapien
aagacagggaaacataaataagcatgaactatt

SEQ ID NO: 949924 - DNA, 33 bp, Homo sapien
aagacagggaaacatacataagcatgaactatt

SEQ ID NO: 949925 - DNA, 33 bp, Homo sapien
aagcagacacagcggcagagatttttgtgcagg

SEQ ID NO: 949926 - DNA, 33 bp, Homo sapien
aagcagacacagcggcggagatttttgtgcagg

SEQ ID NO: 949927 - DNA, 33 bp, Homo sapien
atttggggacaaactgaaaaaaagagaagaagc

SEQ ID NO: 949928 - DNA, 33 bp, Homo sapien
atttggggacaaactggaaaaaagagaagaagc

SEQ ID NO: 949929 - DNA, 33 bp, Homo sapien
tcactgtctgtttttcaattcacttctcctgag

SEQ ID NO: 949930 - DNA, 33 bp, Homo sapien
tcactgtctgtttttccattcacttctcctgag

SEQ ID NO: 949931 - DNA, 33 bp, Homo sapien
acttgtagaaaagtcaaagaaatatgatgttta

SEQ ID NO: 949932 - DNA, 33 bp, Homo sapien
acttgtagaaaagtcagagaaatatgatgttta

SEQ ID NO: 949933 - DNA, 33 bp, Homo sapien
tcttttaccaattctcaatgttttctcttgttt

SEQ ID NO: 949934 - DNA, 33 bp, Homo sapien
tcttttaccaattctctatgttttctcttgttt

SEQ ID NO: 949935 - DNA, 33 bp, Homo sapien
tcctataaggatcgagaaaagtttattgattgt

SEQ ID NO: 949936 - DNA, 33 bp, Homo sapien
tcctataaggatcgagtaaagtttattgattgt

SEQ ID NO: 949937 - DNA, 33 bp, Homo sapien
caacaagtagctgaaaatttaggaagataacaa

SEQ ID NO: 949938 - DNA, 33 bp, Homo sapien
caacaagtagctgaaactttaggaagataacaa

SEQ ID NO: 949939 - DNA, 33 bp, Homo sapien
aggaaaattatacagaccaaagagaagaaaaca

SEQ ID NO: 949940 - DNA, 33 bp, Homo sapien
aggaaaattatacagagcaaagagaagaaaaca

SEQ ID NO: 949941 - DNA, 33 bp, Homo sapien
gaagtacagaagtcagaactagaaaggtaagtc

SEQ ID NO: 949942 - DNA, 33 bp, Homo sapien
gaagtacagaagtcaggactagaaaggtaagtc

SEQ ID NO: 949943 - DNA, 33 bp, Homo sapien
ctactaggaaagtgaacgaagattctagtatca

SEQ ID NO: 949944 - DNA, 33 bp, Homo sapien
ctactaggaaagtgaatgaagattctagtatca

SEQ ID NO: 949945 - DNA, 33 bp, Homo sapien
ttaattaggcctgtgagcaagttcaccaattta

SEQ ID NO: 949946 - DNA, 33 bp, Homo sapien
ttaattaggcctgtgatcaagttcaccaattta

SEQ ID NO: 949947 - DNA, 33 bp, Homo sapien
taaaaaatgcaaatcgcaggtttatttggatta

SEQ ID NO: 949948 - DNA, 33 bp, Homo sapien
taaaaaatgcaaatcgtaggtttatttggatta

SEQ ID NO: 949949 - DNA, 33 bp, Homo sapien
ttgttagcctctatcacacaggtgctgcaactc

SEQ ID NO: 949950 - DNA, 33 bp, Homo sapien
ttgttagcctctatcatacaggtgctgcaactc

SEQ ID NO: 949951 - DNA, 33 bp, Homo sapien
tggaagaagaggcataagcgtcaagaattgctg

SEQ ID NO: 949952 - DNA, 33 bp, Homo sapien
tggaagaagaggcatacgcgtcaagaattgctg

SEQ ID NO: 949953 - DNA, 33 bp, Homo sapien
aagaaacatctagtcaagattgaaggacagaac

SEQ ID NO: 949954 - DNA, 33 bp, Homo sapien
aagaaacatctagtcatgattgaaggacagaac

SEQ ID NO: 949955 - DNA, 33 bp, Homo sapien
acactgtcacctaatacccatggcttgacggga

SEQ ID NO: 949956 - DNA, 33 bp, Homo sapien
acactgtcacctaatatccatggcttgacggga

SEQ ID NO: 949957 - DNA, 33 bp, Homo sapien
ctgaccgtctctgagacctagtattcctgtctc

SEQ ID NO: 949958 - DNA, 33 bp, Homo sapien
ctgaccgtctctgagatctagtattcctgtctc

SEQ ID NO: 949959 - DNA, 33 bp, Homo sapien
ccatgatttaaggtaaggcaattatactcatat

SEQ ID NO: 949960 - DNA, 33 bp, Homo sapien
ccatgatttaaggtaatgcaattatactcatat

SEQ ID NO: 949961 - DNA, 33 bp, Homo sapien
gcctagttcgtcaaaacaaaacctgatatagct

SEQ ID NO: 949962 - DNA, 33 bp, Homo sapien
gcctagttcgtcaaaagaaaacctgatatagct

SEQ ID NO: 949963 - DNA, 33 bp, Homo sapien
cttatattcatcgtaaccttgataccttattaa

SEQ ID NO: 949964 - DNA, 33 bp, Homo sapien
cttatattcatcgtaatcttgataccttattaa

SEQ ID NO: 949965 - DNA, 33 bp, Homo sapien
gtaagcttctggtaaactcatttcttggaggaa

SEQ ID NO: 949966 - DNA, 33 bp, Homo sapien
gtaagcttctggtaaattcatttcttggaggaa

SEQ ID NO: 949967 - DNA, 33 bp, Homo sapien
tgatagaagggtatgcagagtttctagacgaat

SEQ ID NO: 949968 - DNA, 33 bp, Homo sapien
tgatagaagggtatgctgagtttctagacgaat

SEQ ID NO: 949969 - DNA, 33 bp, Homo sapien
accagattcagaaagagaaaaactcttccagat

SEQ ID NO: 949970 - DNA, 33 bp, Homo sapien
accagattcagaaagataaaaactcttccagat

SEQ ID NO: 949971 - DNA, 33 bp, Homo sapien
aggtttggaacaatctcaatggatatattttta

SEQ ID NO: 949972 - DNA, 33 bp, Homo sapien
aggtttggaacaatctgaatggatatattttta

SEQ ID NO: 949973 - DNA, 33 bp, Homo sapien
ccgtaacttacttagcactaatctacactgatg

SEQ ID NO: 949974 - DNA, 33 bp, Homo sapien
ccgtaacttacttagcgctaatctacactgatg

SEQ ID NO: 949975 - DNA, 33 bp, Homo sapien
acaccttggccagtgacctagaagaaataggta

SEQ ID NO: 949976 - DNA, 33 bp, Homo sapien
acaccttggccagtgatctagaagaaataggta

SEQ ID NO: 949977 - DNA, 33 bp, Homo sapien
cgattccgagccagaaagtgttaagataatttg

SEQ ID NO: 949978 - DNA, 33 bp, Homo sapien
cgattccgagccagaatgtgttaagataatttg

SEQ ID NO: 949979 - DNA, 33 bp, Homo sapien
caattatacctatttaacagaatgcatggagtc

SEQ ID NO: 949980 - DNA, 33 bp, Homo sapien
caattatacctatttagcagaatgcatggagtc

SEQ ID NO: 949981 - DNA, 33 bp, Homo sapien
ttagttttaattgagccctggagaaaatctagc

SEQ ID NO: 949982 - DNA, 33 bp, Homo sapien
ttagttttaattgagctctggagaaaatctagc

SEQ ID NO: 949983 - DNA, 33 bp, Homo sapien
gatgtgaacccttgcagactgtaaatttattaa

SEQ ID NO: 949984 - DNA, 33 bp, Homo sapien
gatgtgaacccttgcatactgtaaatttattaa

SEQ ID NO: 949985 - DNA, 33 bp, Homo sapien
tctgtgagattcctcactcactgcttgtgtgta

SEQ ID NO: 949986 - DNA, 33 bp, Homo sapien
tctgtgagattcctcattcactgcttgtgtgta

SEQ ID NO: 949987 - DNA, 33 bp, Homo sapien
ctgtgtagttttccagaattccatgagcttttg

SEQ ID NO: 949988 - DNA, 33 bp, Homo sapien
ctgtgtagttttccaggattccatgagcttttg

SEQ ID NO: 949989 - DNA, 33 bp, Homo sapien
ctggttttgttaaaatcaagccatacgaagtat

SEQ ID NO: 949990 - DNA, 33 bp, Homo sapien
ctggttttgttaaaattaagccatacgaagtat

SEQ ID NO: 949991 - DNA, 33 bp, Homo sapien; identical to SEQ ID NO: 949989

SEQ ID NO: 949992 - DNA, 33 bp, Homo sapien; identical to SEQ ID NO: 949990

SEQ ID NO: 949993 - DNA, 33 bp, Homo sapien
tgccataaggagcaaacttggaatttttaaaac

SEQ ID NO: 949994 - DNA, 33 bp, Homo sapien
tgccataaggagcaaatttggaatttttaaaac

SEQ ID NO: 949995 - DNA, 33 bp, Homo sapien
caagctcataatgcagacaatctttcaaggaaa

SEQ ID NO: 949996 - DNA, 33 bp, Homo sapien
caagctcataatgcaggcaatctttcaaggaaa

SEQ ID NO: 949997 - DNA, 33 bp, Homo sapien
cagaaaacatgactacactttcactacctacct

SEQ ID NO: 949998 - DNA, 33 bp, Homo sapien
cagaaaacatgactacgctttcactacctacct

SEQ ID NO: 949999 - DNA, 33 bp, Homo sapien
gtattagccattgataagacaaaggttctcaag

SEQ ID NO: 950000 - DNA, 33 bp, Homo sapien
gtattagccattgatacgacaaaggttctcaag

SEQ ID NO: 950001 - DNA, 33 bp, Homo sapien
tgggtgtaatgcctacgacacaaagcaaaaaca

SEQ ID NO: 950002 - DNA, 33 bp, Homo sapien
tgggtgtaatgcctactacacaaagcaaaaaca

SEQ ID NO: 950003 - DNA, 33 bp, Homo sapien
agttctccttgtcagacatgagagaattctgat

SEQ ID NO: 950004 - DNA, 33 bp, Homo sapien
agttctccttgtcagatatgagagaattctgat

SEQ ID NO: 950005 - DNA, 33 bp, Homo sapien
ataattcatatcagtacagcctgacaacttatt

SEQ ID NO: 950006 - DNA, 33 bp, Homo sapien
ataattcatatcagtagagcctgacaacttatt

SEQ ID NO: 950007 - DNA, 33 bp, Homo sapien
gatgtatttttgtggaagaattaaatgcaattg

SEQ ID NO: 950008 - DNA, 33 bp, Homo sapien
gatgtatttttgtggaggaattaaatgcaattg

SEQ ID NO: 950009 - DNA, 33 bp, Homo sapien
agggtgcgatggaaaacgaacatctggaatgta

SEQ ID NO: 950010 - DNA, 33 bp, Homo sapien
agggtgcgatggaaaaggaacatctggaatgta

SEQ ID NO: 950011 - DNA, 33 bp, Homo sapien
cctctttagataacaggctccaagttttcaaaa

SEQ ID NO: 950012 - DNA, 33 bp, Homo sapien
cctctttagataacagtctccaagttttcaaaa

SEQ ID NO: 950013 - DNA, 33 bp, Homo sapien
cagttggtgtctgttaaaactggaattcaagta

SEQ ID NO: 950014 - DNA, 33 bp, Homo sapien
cagttggtgtctgttagaactggaattcaagta

SEQ ID NO: 950015 - DNA, 33 bp, Homo sapien
tatcactcagcactaaaaaaaaagaaaccacta

SEQ ID NO: 950016 - DNA, 33 bp, Homo sapien
tatcactcagcactaacaaaaaagaaaccacta

SEQ ID NO: 950017 - DNA, 33 bp, Homo sapien
aagcaaatatcatttaccctttacaatgtccaa

SEQ ID NO: 950018 - DNA, 33 bp, Homo sapien
aagcaaatatcatttatcctttacaatgtccaa

SEQ ID NO: 950019 - DNA, 33 bp, Homo sapien
ccatcatcatttattacgcagttgatggcattc

SEQ ID NO: 950020 - DNA, 33 bp, Homo sapien
ccatcatcatttattaggcagttgatggcattc

SEQ ID NO: 950021 - DNA, 33 bp, Homo sapien
gaagaactttgaggcactaagaattggctatgt

SEQ ID NO: 950022 - DNA, 33 bp, Homo sapien
gaagaactttgaggcattaagaattggctatgt

SEQ ID NO: 950023 - DNA, 33 bp, Homo sapien
aatgaatatatagccaataagattcactgctta

SEQ ID NO: 950024 - DNA, 33 bp, Homo sapien
aatgaatatatagccactaagattcactgctta

SEQ ID NO: 950025 - DNA, 33 bp, Homo sapien
tgctcatcatcgttaaccaggttgaaaacatat

SEQ ID NO: 950026 - DNA, 33 bp, Homo sapien
tgctcatcatcgttaatcaggttgaaaacatat

SEQ ID NO: 950027 - DNA, 33 bp, Homo sapien
aatcatcactgaagatgagtaacaaacccatgc

SEQ ID NO: 950028 - DNA, 33 bp, Homo sapien
aatcatcactgaagattagtaacaaacccatgc

SEQ ID NO: 950029 - DNA, 33 bp, Homo sapien
tactgatagtttagtacctcaagaataattcca

SEQ ID NO: 950030 - DNA, 33 bp, Homo sapien
tactgatagtttagtatctcaagaataattcca

SEQ ID NO: 950031 - DNA, 33 bp, Homo sapien
tgtgcaacagggcttacggtccctctagtcgtt

SEQ ID NO: 950032 - DNA, 33 bp, Homo sapien
tgtgcaacagggcttatggtccctctagtcgtt

SEQ ID NO: 950033 - DNA, 33 bp, Homo sapien
tccacagacgaactccaagtgggtgtaagaaag

SEQ ID NO: 950034 - DNA, 33 bp, Homo sapien
tccacagacgaactccgagtgggtgtaagaaag

SEQ ID NO: 950035 - DNA, 33 bp, Homo sapien
atactaattctacagacgaagaagtgagacata

SEQ ID NO: 950036 - DNA, 33 bp, Homo sapien
atactaattctacagatgaagaagtgagacata

SEQ ID NO: 950037 - DNA, 33 bp, Homo sapien
cagtaccaaacactatcagagatactctaggga

SEQ ID NO: 950038 - DNA, 33 bp, Homo sapien
cagtaccaaacactatgagagatactctaggga

SEQ ID NO: 950039 - DNA, 33 bp, Homo sapien
ctctatgagagctcaactgtctttgatgactca

SEQ ID NO: 950040 - DNA, 33 bp, Homo sapien
ctctatgagagctcaattgtctttgatgactca

SEQ ID NO: 950041 - DNA, 33 bp, Homo sapien
gatttgaagtctgagcaaatcgaagtcaaatag

SEQ ID NO: 950042 - DNA, 33 bp, Homo sapien
gatttgaagtctgagcgaatcgaagtcaaatag

SEQ ID NO: 950043 - DNA, 33 bp, Homo sapien
tacagtcaggccttcaaatctgtagtttctgca

SEQ ID NO: 950044 - DNA, 33 bp, Homo sapien
tacagtcaggccttcacatctgtagtttctgca

SEQ ID NO: 950045 - DNA, 33 bp, Homo sapien
ctggggattagttctacaattcctgacagtgga

SEQ ID NO: 950046 - DNA, 33 bp, Homo sapien
ctggggattagttctagaattcctgacagtgga

SEQ ID NO: 950047 - DNA, 33 bp, Homo sapien
aagagattaaaatgaaatacatgtcaaaagaga

SEQ ID NO: 950048 - DNA, 33 bp, Homo sapien
aagagattaaaatgaactacatgtcaaaagaga

SEQ ID NO: 950049 - DNA, 33 bp, Homo sapien
ccacacttctaggtacaaattttctctcttagt

SEQ ID NO: 950050 - DNA, 33 bp, Homo sapien
ccacacttctaggtaccaattttctctcttagt

SEQ ID NO: 950051 - DNA, 33 bp, Homo sapien
atgcctggggaaaaaaactacacaagttgcagt

SEQ ID NO: 950052 - DNA, 33 bp, Homo sapien
atgcctggggaaaaaagctacacaagttgcagt

SEQ ID NO: 950053 - DNA, 33 bp, Homo sapien
aaatggtacttataaactgagtgatagaaacat

SEQ ID NO: 950054 - DNA, 33 bp, Homo sapien
aaatggtacttataaattgagtgatagaaacat

SEQ ID NO: 950055 - DNA, 33 bp, Homo sapien
tcttttatggggaagaaaatctaggatatgtat

SEQ ID NO: 950056 - DNA, 33 bp, Homo sapien
tcttttatggggaagagaatctaggatatgtat

SEQ ID NO: 950057 - DNA, 33 bp, Homo sapien
agcaactaccatgagaagttgtgctcttttatg

SEQ ID NO: 950058 - DNA, 33 bp, Homo sapien
agcaactaccatgagacgttgtgctcttttatg

SEQ ID NO: 950059 - DNA, 33 bp, Homo sapien
tcttcacctcagttacagagatatgaccaacag

SEQ ID NO: 950060 - DNA, 33 bp, Homo sapien
tcttcacctcagttacggagatatgaccaacag

SEQ ID NO: 950061 - DNA, 33 bp, Homo sapien
agttttgccagctatgcagaaaataccccataa

SEQ ID NO: 950062 - DNA, 33 bp, Homo sapien
agttttgccagctatgtagaaaataccccataa

SEQ ID NO: 950063 - DNA, 33 bp, Homo sapien
cttggagatgtgtctacgtcagtttacatgaca

SEQ ID NO: 950064 - DNA, 33 bp, Homo sapien
cttggagatgtgtctatgtcagtttacatgaca

SEQ ID NO: 950065 - DNA, 33 bp, Homo sapien
tctacatagtgaaaaacgcatcctgagcaaagt

SEQ ID NO: 950066 - DNA, 33 bp, Homo sapien
tctacatagtgaaaaatgcatcctgagcaaagt

SEQ ID NO: 950067 - DNA, 33 bp, Homo sapien
ttatatacgctttcataaattgtatgaccaaac

SEQ ID NO: 950068 - DNA, 33 bp, Homo sapien
ttatatacgctttcatcaattgtatgaccaaac

SEQ ID NO: 950069 - DNA, 33 bp, Homo sapien
tataaccagtatcttaaactccactcactcctc

SEQ ID NO: 950070 - DNA, 33 bp, Homo sapien
tataaccagtatcttacactccactcactcctc

SEQ ID NO: 950071 - DNA, 33 bp, Homo sapien
attaggtaactgattaggtcaggaaataagatt

SEQ ID NO: 950072 - DNA, 33 bp, Homo sapien
attaggtaactgattatgtcaggaaataagatt

SEQ ID NO: 950073 - DNA, 33 bp, Homo sapien
aagaaatcaacattctcacaagaaaattttctt

SEQ ID NO: 950074 - DNA, 33 bp, Homo sapien
aagaaatcaacattctgacaagaaaattttctt

SEQ ID NO: 950075 - DNA, 33 bp, Homo sapien
ctctttgcaattctaactgatgcacaggaaaaa

SEQ ID NO: 950076 - DNA, 33 bp, Homo sapien
ctctttgcaattctaattgatgcacaggaaaaa

SEQ ID NO: 950077 - DNA, 33 bp, Homo sapien
gagatcaataagaaaaataaatgatgtctaata

SEQ ID NO: 950078 - DNA, 33 bp, Homo sapien
gagatcaataagaaaagtaaatgatgtctaata

SEQ ID NO: 950079 - DNA, 33 bp, Homo sapien
ctaatctggactgtaacgtatccagcttgaggt

SEQ ID NO: 950080 - DNA, 33 bp, Homo sapien
ctaatctggactgtaatgtatccagcttgaggt

SEQ ID NO: 950081 - DNA, 33 bp, Homo sapien
atataagcatcctgaaaaagttcatgtaaaact

SEQ ID NO: 950082 - DNA, 33 bp, Homo sapien
atataagcatcctgaagaagttcatgtaaaact

SEQ ID NO: 950083 - DNA, 33 bp, Homo sapien
actccagtcttttctcaactcaaaccatatttt

SEQ ID NO: 950084 - DNA, 33 bp, Homo sapien
actccagtcttttctcgactcaaaccatatttt

SEQ ID NO: 950085 - DNA, 33 bp, Homo sapien
ttgattgacaccctcaatgaaaacacggttaac

SEQ ID NO: 950086 - DNA, 33 bp, Homo sapien
ttgattgacaccctcagtgaaaacacggttaac

SEQ ID NO: 950087 - DNA, 33 bp, Homo sapien
ctgctagattgtctaaagtcagtttcttttctg

SEQ ID NO: 950088 - DNA, 33 bp, Homo sapien
ctgctagattgtctaatgtcagtttcttttctg

SEQ ID NO: 950089 - DNA, 33 bp, Homo sapien
gagttaatggaagacaaattgatggagatgagt

SEQ ID NO: 950090 - DNA, 33 bp, Homo sapien
gagttaatggaagacacattgatggagatgagt

SEQ ID NO: 950091 - DNA, 33 bp, Homo sapien
ataagattgtcaatgaagtggaagagaaccatg

SEQ ID NO: 950092 - DNA, 33 bp, Homo sapien
ataagattgtcaatgatgtggaagagaaccatg

SEQ ID NO: 950093 - DNA, 33 bp, Homo sapien
agtaaaattaacctgaaacatttttgccttaat

SEQ ID NO: 950094 - DNA, 33 bp, Homo sapien
agtaaaattaacctgagacatttttgccttaat

SEQ ID NO: 950095 - DNA, 33 bp, Homo sapien
acagatttgcagagatgagtaccaactacatat

SEQ ID NO: 950096 - DNA, 33 bp, Homo sapien
acagatttgcagagattagtaccaactacatat

SEQ ID NO: 950097 - DNA, 33 bp, Homo sapien
gccatctgatctgggcactaagtttctgttgaa

SEQ ID NO: 950098 - DNA, 33 bp, Homo sapien
gccatctgatctgggctctaagtttctgttgaa

SEQ ID NO: 950099 - DNA, 33 bp, Homo sapien
gaaacagcttgtagacgattttgaaatatagca

SEQ ID NO: 950100 - DNA, 33 bp, Homo sapien
gaaacagcttgtagactattttgaaatatagca

SEQ ID NO: 950101 - DNA, 33 bp, Homo sapien
aaaaggccaacagatcagaagatgtttgccatt

SEQ ID NO: 950102 - DNA, 33 bp, Homo sapien
aaaaggccaacagatccgaagatgtttgccatt

SEQ ID NO: 950103 - DNA, 33 bp, Homo sapien
gcccagccataggttcacgtaactattctgagc

SEQ ID NO: 950104 - DNA, 33 bp, Homo sapien
gcccagccataggttcccgtaactattctgagc

SEQ ID NO: 950105 - DNA, 33 bp, Homo sapien
atctctgaattatgaagatttgacttatgatct

SEQ ID NO: 950106 - DNA, 33 bp, Homo sapien
atctctgaattatgaatatttgacttatgatct

SEQ ID NO: 950107 - DNA, 33 bp, Homo sapien
catgcggaataataacaaagagctacccttgct

SEQ ID NO: 950108 - DNA, 33 bp, Homo sapien
catgcggaataataacgaagagctacccttgct

SEQ ID NO: 950109 - DNA, 33 bp, Homo sapien
atgtgttttctctccaactttctgagtcttctt

SEQ ID NO: 950110 - DNA, 33 bp, Homo sapien
atgtgttttctctccagctttctgagtcttctt

SEQ ID NO: 950111 - DNA, 33 bp, Homo sapien
agcagaaattctcccactcgttatctttcaaag

SEQ ID NO: 950112 - DNA, 33 bp, Homo sapien
agcagaaattctcccattcgttatctttcaaag

SEQ ID NO: 950113 - DNA, 33 bp, Homo sapien
gcaaattttgagttaaaaaatatcttccaaatc

SEQ ID NO: 950114 - DNA, 33 bp, Homo sapien
gcaaattttgagttaacaaatatcttccaaatc

SEQ ID NO: 950115 - DNA, 33 bp, Homo sapien
aagctatacactgaacccctgtcacgcagaaag

SEQ ID NO: 950116 - DNA, 33 bp, Homo sapien
aagctatacactgaactcctgtcacgcagaaag

SEQ ID NO: 950117 - DNA, 33 bp, Homo sapien
ttgtcaagccaagtaacctctctgcaagtattt

SEQ ID NO: 950118 - DNA, 33 bp, Homo sapien
ttgtcaagccaagtaagctctctgcaagtattt

SEQ ID NO: 950119 - DNA, 33 bp, Homo sapien
taagatactgatgcaaaactgatgatctctctg

SEQ ID NO: 950120 - DNA, 33 bp, Homo sapien
taagatactgatgcaacactgatgatctctctg

SEQ ID NO: 950121 - DNA, 33 bp, Homo sapien
tcccttggcatttacccaaagaagttgaaataa

SEQ ID NO: 950122 - DNA, 33 bp, Homo sapien
tcccttggcatttaccgaaagaagttgaaataa

SEQ ID NO: 950123 - DNA, 33 bp, Homo sapien
caaaaccccaagtgaaaccaactgtaaattatg

SEQ ID NO: 950124 - DNA, 33 bp, Homo sapien
caaaaccccaagtgaacccaactgtaaattatg

SEQ ID NO: 950125 - DNA, 33 bp, Homo sapien
gaatccaataaataatcaactgactggagtgtg

SEQ ID NO: 950126 - DNA, 33 bp, Homo sapien
gaatccaataaataattaactgactggagtgtg

SEQ ID NO: 950127 - DNA, 33 bp, Homo sapien
tccttgaaagagtaaacttctcatgaggtagca

SEQ ID NO: 950128 - DNA, 33 bp, Homo sapien
tccttgaaagagtaaagttctcatgaggtagca

SEQ ID NO: 950129 - DNA, 33 bp, Homo sapien
caagcagcatataatccattaatattaatgaca

SEQ ID NO: 950130 - DNA, 33 bp, Homo sapien
caagcagcatataatcgattaatattaatgaca

SEQ ID NO: 950131 - DNA, 33 bp, Homo sapien
tattttccattttggccaaagttacttatttaa

SEQ ID NO: 950132 - DNA, 33 bp, Homo sapien
tattttccattttggctaaagttacttatttaa

SEQ ID NO: 950133 - DNA, 33 bp, Homo sapien
tgttttcctaagttaaaagcgttgaaattccaa

SEQ ID NO: 950134 - DNA, 33 bp, Homo sapien
tgttttcctaagttaatagcgttgaaattccaa

SEQ ID NO: 950135 - DNA, 33 bp, Homo sapien
aaaatggtacaaacaacactacaacaaatcttt

SEQ ID NO: 950136 - DNA, 33 bp, Homo sapien
aaaatggtacaaacaatactacaacaaatcttt

SEQ ID NO: 950137 - DNA, 33 bp, Homo sapien
acctaattgaatggtccaaggtttggatattac

SEQ ID NO: 950138 - DNA, 33 bp, Homo sapien
acctaattgaatggtcgaaggtttggatattac

SEQ ID NO: 950139 - DNA, 33 bp, Homo sapien
tattcgattcagaaaactttggcaacgtttgtg

SEQ ID NO: 950140 - DNA, 33 bp, Homo sapien
tattcgattcagaaaattttggcaacgtttgtg

SEQ ID NO: 950141 - DNA, 33 bp, Homo sapien
ttagatagcgttttacccacactagaacttctt

SEQ ID NO: 950142 - DNA, 33 bp, Homo sapien
ttagatagcgttttactcacactagaacttctt

SEQ ID NO: 950143 - DNA, 33 bp, Homo sapien
actcctgctacattaccatagtttcatggagtt

SEQ ID NO: 950144 - DNA, 33 bp, Homo sapien
actcctgctacattactatagtttcatggagtt

SEQ ID NO: 950145 - DNA, 33 bp, Homo sapien
gctatgaagagtctaaagtattcaggtggcagt

SEQ ID NO: 950146 - DNA, 33 bp, Homo sapien
gctatgaagagtctaaggtattcaggtggcagt

SEQ ID NO: 950147 - DNA, 33 bp, Homo sapien
atctaaatatttaaacagcctaattgatatact

SEQ ID NO: 950148 - DNA, 33 bp, Homo sapien
atctaaatatttaaacggcctaattgatatact

SEQ ID NO: 950149 - DNA, 33 bp, Homo sapien
gctaagtaaaatgctaaagggaatttcttcttt

SEQ ID NO: 950150 - DNA, 33 bp, Homo sapien
gctaagtaaaatgctagagggaatttcttcttt

SEQ ID NO: 950151 - DNA, 33 bp, Homo sapien
cacgtggccactccaaaggtatctggtatgagg

SEQ ID NO: 950152 - DNA, 33 bp, Homo sapien
cacgtggccactccaatggtatctggtatgagg

SEQ ID NO: 950153 - DNA, 33 bp, Homo sapien
atattgaaatctttaagtaagtgtcattgatct

SEQ ID NO: 950154 - DNA, 33 bp, Homo sapien
atattgaaatctttaattaagtgtcattgatct

SEQ ID NO: 950155 - DNA, 33 bp, Homo sapien
aatatgcacagtaaaacacagaaaattacaagt

SEQ ID NO: 950156 - DNA, 33 bp, Homo sapien
aatatgcacagtaaaagacagaaaattacaagt

SEQ ID NO: 950157 - DNA, 33 bp, Homo sapien
tactatccgacatcaaatcttactgcagacatt

SEQ ID NO: 950158 - DNA, 33 bp, Homo sapien
tactatccgacatcaagtcttactgcagacatt

SEQ ID NO: 950159 - DNA, 33 bp, Homo sapien
aaatgtagagatagtgaagatagtgtttgaagc

SEQ ID NO: 950160 - DNA, 33 bp, Homo sapien
aaatgtagagatagtgtagatagtgtttgaagc

SEQ ID NO: 950161 - DNA, 33 bp, Homo sapien
actgtgtgctttctgacgttacgtaagacatgg

SEQ ID NO: 950162 - DNA, 33 bp, Homo sapien
actgtgtgctttctgatgttacgtaagacatgg

SEQ ID NO: 950163 - DNA, 33 bp, Homo sapien
agaattacactgataaactttgaagcatcaagt

SEQ ID NO: 950164 - DNA, 33 bp, Homo sapien
agaattacactgataacctttgaagcatcaagt

SEQ ID NO: 950165 - DNA, 33 bp, Homo sapien
gcatatcctgaagttaacacaaaagcattgaaa

SEQ ID NO: 950166 - DNA, 33 bp, Homo sapien
gcatatcctgaagttaccacaaaagcattgaaa

SEQ ID NO: 950167 - DNA, 33 bp, Homo sapien
gctccctgagaacttaagctctattcttcaata

SEQ ID NO: 950168 - DNA, 33 bp, Homo sapien
gctccctgagaacttatgctctattcttcaata

SEQ ID NO: 950169 - DNA, 33 bp, Homo sapien
gctccatccttgtatcacttgagtcaccacaat

SEQ ID NO: 950170 - DNA, 33 bp, Homo sapien
gctccatccttgtatcgcttgagtcaccacaat

SEQ ID NO: 950171 - DNA, 33 bp, Homo sapien
gggctttcagagataacctgttctaaattcata

SEQ ID NO: 950172 - DNA, 33 bp, Homo sapien
gggctttcagagataatctgttctaaattcata

SEQ ID NO: 950173 - DNA, 33 bp, Homo sapien
atggcattgaaaaaaactgtgagagacttcagc

SEQ ID NO: 950174 - DNA, 33 bp, Homo sapien
atggcattgaaaaaaattgtgagagacttcagc

SEQ ID NO: 950175 - DNA, 33 bp, Homo sapien
ctcatctaaactttgcagaaatattccacctca

SEQ ID NO: 950176 - DNA, 33 bp, Homo sapien
ctcatctaaactttgcggaaatattccacctca

SEQ ID NO: 950177 - DNA, 33 bp, Homo sapien
cttccctgacatattacatcatttcacactaca

SEQ ID NO: 950178 - DNA, 33 bp, Homo sapien
cttccctgacatattatatcatttcacactaca

SEQ ID NO: 950179 - DNA, 33 bp, Homo sapien
tattcccgtagaagtaataattggcttcagtcc

SEQ ID NO: 950180 - DNA, 33 bp, Homo sapien
tattcccgtagaagtagtaattggcttcagtcc

SEQ ID NO: 950181 - DNA, 33 bp, Homo sapien
taggcttcagtgtgaaacagataataacatgtt

SEQ ID NO: 950182 - DNA, 33 bp, Homo sapien
taggcttcagtgtgaatcagataataacatgtt

SEQ ID NO: 950183 - DNA, 33 bp, Homo sapien
tttatagctgaaatggaaacaacttgttcttcc

SEQ ID NO: 950184 - DNA, 33 bp, Homo sapien
tttatagctgaaatggcaacaacttgttcttcc

SEQ ID NO: 950185 - DNA, 33 bp, Homo sapien
aatctcttcactcttcaaccgtatttccaagag

SEQ ID NO: 950186 - DNA, 33 bp, Homo sapien
aatctcttcactcttcgaccgtatttccaagag

SEQ ID NO: 950187 - DNA, 33 bp, Homo sapien
ttcatggggacagttaccttgtctgctttcttt

SEQ ID NO: 950188 - DNA, 33 bp, Homo sapien
ttcatggggacagttatcttgtctgctttcttt

SEQ ID NO: 950189 - DNA, 33 bp, Homo sapien
gttctgaagtgaaaccgaaggaaagccaagcca

SEQ ID NO: 950190 - DNA, 33 bp, Homo sapien
gttctgaagtgaaacctaaggaaagccaagcca

SEQ ID NO: 950191 - DNA, 33 bp, Homo sapien
atcagtaaggtgaccacagttaattaatctcat

SEQ ID NO: 950192 - DNA, 33 bp, Homo sapien
atcagtaaggtgaccatagttaattaatctcat

SEQ ID NO: 950193 - DNA, 33 bp, Homo sapien
aaagcctcttgcttggaaggtatccatatatca

SEQ ID NO: 950194 - DNA, 33 bp, Homo sapien
aaagcctcttgcttggtaggtatccatatatca

SEQ ID NO: 950195 - DNA, 33 bp, Homo sapien
ttggaatggatccgagcccttgactgtattaac

SEQ ID NO: 950196 - DNA, 33 bp, Homo sapien
ttggaatggatccgagtccttgactgtattaac

SEQ ID NO: 950197 - DNA, 33 bp, Homo sapien
aaacctgacaccattaacaagtacctggtaagg

SEQ ID NO: 950198 - DNA, 33 bp, Homo sapien
aaacctgacaccattagcaagtacctggtaagg

SEQ ID NO: 950199 - DNA, 33 bp, Homo sapien
aaatatgatgctaaggaagaatgtttaattttt

SEQ ID NO: 950200 - DNA, 33 bp, Homo sapien
aaatatgatgctaaggtagaatgtttaattttt

SEQ ID NO: 950201 - DNA, 33 bp, Homo sapien
aagtagtccaggaaaaggtccctgtgttcaatt

SEQ ID NO: 950202 - DNA, 33 bp, Homo sapien
aagtagtccaggaaaatgtccctgtgttcaatt

SEQ ID NO: 950203 - DNA, 33 bp, Homo sapien
cagacactgtatcacacctagacctctctcttt

SEQ ID NO: 950204 - DNA, 33 bp, Homo sapien
cagacactgtatcacagctagacctctctcttt

SEQ ID NO: 950205 - DNA, 33 bp, Homo sapien
aagatatttggcagaaaagatcaaaggagagga

SEQ ID NO: 950206 - DNA, 33 bp, Homo sapien
aagatatttggcagaacagatcaaaggagagga

SEQ ID NO: 950207 - DNA, 33 bp, Homo sapien
gtctcatttcagagaaaaaaaggtttccaattg

SEQ ID NO: 950208 - DNA, 33 bp, Homo sapien
gtctcatttcagagaacaaaaggtttccaattg

SEQ ID NO: 950209 - DNA, 33 bp, Homo sapien
tatagtgattagcacacataatttctcaatatt

SEQ ID NO: 950210 - DNA, 33 bp, Homo sapien
tatagtgattagcacagataatttctcaatatt

SEQ ID NO: 950211 - DNA, 33 bp, Homo sapien
tagggcatggaattgtaaagtgcatgaattaca

SEQ ID NO: 950212 - DNA, 33 bp, Homo sapien
tagggcatggaattgtgaagtgcatgaattaca

SEQ ID NO: 950213 - DNA, 33 bp, Homo sapien
gggagagatgtgttcaaggtgaagaaaaggcat

SEQ ID NO: 950214 - DNA, 33 bp, Homo sapien
gggagagatgtgttcatggtgaagaaaaggcat

SEQ ID NO: 950215 - DNA, 33 bp, Homo sapien
gttaaagtgttaaacaaggagatacactaggaa

SEQ ID NO: 950216 - DNA, 33 bp, Homo sapien
gttaaagtgttaaacacggagatacactaggaa

SEQ ID NO: 950217 - DNA, 33 bp, Homo sapien
ctcactagcaagatgacgttaaataactcattt

SEQ ID NO: 950218 - DNA, 33 bp, Homo sapien
ctcactagcaagatgatgttaaataactcattt

SEQ ID NO: 950219 - DNA, 33 bp, Homo sapien
cacatcccctaaataccgaggagcaaatgaatt

SEQ ID NO: 950220 - DNA, 33 bp, Homo sapien
cacatcccctaaatactgaggagcaaatgaatt

SEQ ID NO: 950221 - DNA, 33 bp, Homo sapien
aattggaataacatacagaaattgctaaaagtt

SEQ ID NO: 950222 - DNA, 33 bp, Homo sapien
aattggaataacatacggaaattgctaaaagtt

SEQ ID NO: 950223 - DNA, 33 bp, Homo sapien
tttattttctctcacagaacactgaagacatag

SEQ ID NO: 950224 - DNA, 33 bp, Homo sapien
tttattttctctcacataacactgaagacatag

SEQ ID NO: 950225 - DNA, 33 bp, Homo sapien
gttagattttcttgccaaagcctaatactcaaa

SEQ ID NO: 950226 - DNA, 33 bp, Homo sapien
gttagattttcttgccgaagcctaatactcaaa

SEQ ID NO: 950227 - DNA, 33 bp, Homo sapien
ggaccaatgaatggatcaaagcttaagtattca

SEQ ID NO: 950228 - DNA, 33 bp, Homo sapien
ggaccaatgaatggatgaaagcttaagtattca

SEQ ID NO: 950229 - DNA, 33 bp, Homo sapien
atttttgacattaacaactgccaaaatgaattt

SEQ ID NO: 950230 - DNA, 33 bp, Homo sapien
atttttgacattaacagctgccaaaatgaattt

SEQ ID NO: 950231 - DNA, 33 bp, Homo sapien
tgtggggcaatgaaaccgagaaagggagctgag

SEQ ID NO: 950232 - DNA, 33 bp, Homo sapien
tgtggggcaatgaaacggagaaagggagctgag

SEQ ID NO: 950233 - DNA, 33 bp, Homo sapien
agactgaggtgggcaaagagagtctagacaggt

SEQ ID NO: 950234 - DNA, 33 bp, Homo sapien
agactgaggtgggcaaggagagtctagacaggt

SEQ ID NO: 950235 - DNA, 33 bp, Homo sapien
cttccataattgagacaaaaaccctgcaggtac

SEQ ID NO: 950236 - DNA, 33 bp, Homo sapien
cttccataattgagaccaaaaccctgcaggtac

SEQ ID NO: 950237 - DNA, 33 bp, Homo sapien
ctgatcactagtccttcaagcactgcaggaagt

SEQ ID NO: 950238 - DNA, 33 bp, Homo sapien
ctgatcactagtcctttaagcactgcaggaagt

SEQ ID NO: 950239 - DNA, 33 bp, Homo sapien
cattactcagcttcaactgatctaatcaatatc

SEQ ID NO: 950240 - DNA, 33 bp, Homo sapien
cattactcagcttcaattgatctaatcaatatc

SEQ ID NO: 950241 - DNA, 33 bp, Homo sapien
gcatcagtccatggagaaattcatgccccagat

SEQ ID NO: 950242 - DNA, 33 bp, Homo sapien
gcatcagtccatggagcaattcatgccccagat

SEQ ID NO: 950243 - DNA, 33 bp, Homo sapien
caaaagtgataagacaaagcaggttaaagtgga

SEQ ID NO: 950244 - DNA, 33 bp, Homo sapien
caaaagtgataagacagagcaggttaaagtgga

SEQ ID NO: 950245 - DNA, 33 bp, Homo sapien
gtttgcatactattcaataggtagttttacaac

SEQ ID NO: 950246 - DNA, 33 bp, Homo sapien
gtttgcatactattcagtaggtagttttacaac

SEQ ID NO: 950247 - DNA, 33 bp, Homo sapien
aaaaggcagatcaatgaagtaagttttattcta

SEQ ID NO: 950248 - DNA, 33 bp, Homo sapien
aaaaggcagatcaatgcagtaagttttattcta

SEQ ID NO: 950249 - DNA, 33 bp, Homo sapien
aggagatcttttcttacctacgttcataaatga

SEQ ID NO: 950250 - DNA, 33 bp, Homo sapien
aggagatcttttcttatctacgttcataaatga

SEQ ID NO: 950251 - DNA, 33 bp, Homo sapien
gctttcatttaggtcccatgatcttttacattt

SEQ ID NO: 950252 - DNA, 33 bp, Homo sapien
gctttcatttaggtccgatgatcttttacattt

SEQ ID NO: 950253 - DNA, 33 bp, Homo sapien
aatgttaggacttacacgactcagagtgctgca

SEQ ID NO: 950254 - DNA, 33 bp, Homo sapien
aatgttaggacttacatgactcagagtgctgca

SEQ ID NO: 950255 - DNA, 33 bp, Homo sapien
tctagcataaaacccaatgaaccaattagtatt

SEQ ID NO: 950256 - DNA, 33 bp, Homo sapien
tctagcataaaacccagtgaaccaattagtatt

SEQ ID NO: 950257 - DNA, 33 bp, Homo sapien
tttgacaaaatccatgaaatcataaggtatatt

SEQ ID NO: 950258 - DNA, 33 bp, Homo sapien
tttgacaaaatccatgcaatcataaggtatatt

SEQ ID NO: 950259 - DNA, 33 bp, Homo sapien
ttgaaaaggacgatgggataagtgatattctaa

SEQ ID NO: 950260 - DNA, 33 bp, Homo sapien
ttgaaaaggacgatggtataagtgatattctaa

SEQ ID NO: 950261 - DNA, 33 bp, Homo sapien
aaataaaagatgcagacaatactgtgttagatt

SEQ ID NO: 950262 - DNA, 33 bp, Homo sapien
aaataaaagatgcagagaatactgtgttagatt

SEQ ID NO: 950263 - DNA, 33 bp, Homo sapien
gaggtccttatgattccacctccttattcttct

SEQ ID NO: 950264 - DNA, 33 bp, Homo sapien
gaggtccttatgattctacctccttattcttct

SEQ ID NO: 950265 - DNA, 33 bp, Homo sapien
ttccaagtatttattacactcctgacaacatat

SEQ ID NO: 950266 - DNA, 33 bp, Homo sapien
ttccaagtatttattagactcctgacaacatat

SEQ ID NO: 950267 - DNA, 33 bp, Homo sapien
tagtgggaatagaaaaatgagcaaaggaagagg

SEQ ID NO: 950268 - DNA, 33 bp, Homo sapien
tagtgggaatagaaaattgagcaaaggaagagg

SEQ ID NO: 950269 - DNA, 33 bp, Homo sapien
ctgttaactacagttacgtttttgtcctgactt

SEQ ID NO: 950270 - DNA, 33 bp, Homo sapien
ctgttaactacagttatgtttttgtcctgactt

SEQ ID NO: 950271 - DNA, 33 bp, Homo sapien
tgctagattgtctccacgactcttttctgttcc

SEQ ID NO: 950272 - DNA, 33 bp, Homo sapien
tgctagattgtctccatgactcttttctgttcc

SEQ ID NO: 950273 - DNA, 33 bp, Homo sapien
taattggtgaagtatacgtccttcctaaaaata

SEQ ID NO: 950274 - DNA, 33 bp, Homo sapien
taattggtgaagtatatgtccttcctaaaaata

SEQ ID NO: 950275 - DNA, 33 bp, Homo sapien
agttattccaaaattgcaccatatcaaacacaa

SEQ ID NO: 950276 - DNA, 33 bp, Homo sapien
agttattccaaaattgtaccatatcaaacacaa

SEQ ID NO: 950277 - DNA, 33 bp, Homo sapien
gcaaatgaacaatcttcaaacctttattgtggc

SEQ ID NO: 950278 - DNA, 33 bp, Homo sapien
gcaaatgaacaatcttgaaacctttattgtggc

SEQ ID NO: 950279 - DNA, 33 bp, Homo sapien
gtcattactcttgaatcatgaaatgcaccattt

SEQ ID NO: 950280 - DNA, 33 bp, Homo sapien
gtcattactcttgaattatgaaatgcaccattt

SEQ ID NO: 950281 - DNA, 33 bp, Homo sapien
aagatcatggtagccaatagtttcaaaagtttc

SEQ ID NO: 950282 - DNA, 33 bp, Homo sapien
aagatcatggtagccagtagtttcaaaagtttc

SEQ ID NO: 950283 - DNA, 33 bp, Homo sapien
aactgtgtatcatataaaaatacgcatctggga

SEQ ID NO: 950284 - DNA, 33 bp, Homo sapien
aactgtgtatcatatacaaatacgcatctggga

SEQ ID NO: 950285 - DNA, 33 bp, Homo sapien
ttctttatcctccttcaagttagagatttattg

SEQ ID NO: 950286 - DNA, 33 bp, Homo sapien
ttctttatcctccttctagttagagatttattg

SEQ ID NO: 950287 - DNA, 33 bp, Homo sapien
ctatagaaacagatgaaaaaaaccagagatata

SEQ ID NO: 950288 - DNA, 33 bp, Homo sapien
ctatagaaacagatgagaaaaaccagagatata

SEQ ID NO: 950289 - DNA, 33 bp, Homo sapien
acagggagatgggaaaaataagagagcattaaa

SEQ ID NO: 950290 - DNA, 33 bp, Homo sapien
acagggagatgggaaagataagagagcattaaa

SEQ ID NO: 950291 - DNA, 33 bp, Homo sapien
acttttacctcaatccacaagaaatttttttac

SEQ ID NO: 950292 - DNA, 33 bp, Homo sapien
acttttacctcaatcctcaagaaatttttttac

SEQ ID NO: 950293 - DNA, 33 bp, Homo sapien
tacatctttcttaggacggctatatggaagact

SEQ ID NO: 950294 - DNA, 33 bp, Homo sapien
tacatctttcttaggatggctatatggaagact

SEQ ID NO: 950295 - DNA, 33 bp, Homo sapien
agggcattggtaagtgaatgaaagcatgcaata

SEQ ID NO: 950296 - DNA, 33 bp, Homo sapien
agggcattggtaagtgtatgaaagcatgcaata

SEQ ID NO: 950297 - DNA, 33 bp, Homo sapien
agcacttgatttcagaacacaagtttaggttat

SEQ ID NO: 950298 - DNA, 33 bp, Homo sapien
agcacttgatttcagatcacaagtttaggttat

SEQ ID NO: 950299 - DNA, 33 bp, Homo sapien
tattttcagaaaatggaaagttctctttgtaat

SEQ ID NO: 950300 - DNA, 33 bp, Homo sapien
tattttcagaaaatgggaagttctctttgtaat

SEQ ID NO: 950301 - DNA, 33 bp, Homo sapien
ttttagagaatgtttacagcgatcatttcacat

SEQ ID NO: 950302 - DNA, 33 bp, Homo sapien
ttttagagaatgtttagagcgatcatttcacat

SEQ ID NO: 950303 - DNA, 33 bp, Homo sapien
tgagcctcaactgaaactgattaaatgattcca

SEQ ID NO: 950304 - DNA, 33 bp, Homo sapien
tgagcctcaactgaaattgattaaatgattcca

SEQ ID NO: 950305 - DNA, 33 bp, Homo sapien
gtgcgaggtaaaataaatgagacactaggtgtt

SEQ ID NO: 950306 - DNA, 33 bp, Homo sapien
gtgcgaggtaaaataagtgagacactaggtgtt

SEQ ID NO: 950307 - DNA, 33 bp, Homo sapien
agtgcatatttggtcccaagttactgttgaaat

SEQ ID NO: 950308 - DNA, 33 bp, Homo sapien
agtgcatatttggtcctaagttactgttgaaat

SEQ ID NO: 950309 - DNA, 33 bp, Homo sapien
ctgtttaatgctgagaacatctgtatgtttttt

SEQ ID NO: 950310 - DNA, 33 bp, Homo sapien
ctgtttaatgctgagatcatctgtatgtttttt

SEQ ID NO: 950311 - DNA, 33 bp, Homo sapien
aaaatgcccaacatagaattaaataatgctaga

SEQ ID NO: 950312 - DNA, 33 bp, Homo sapien
aaaatgcccaacataggattaaataatgctaga

SEQ ID NO: 950313 - DNA, 33 bp, Homo sapien
ttgtttactgaagcaacgtttgtctttttctgc

SEQ ID NO: 950314 - DNA, 33 bp, Homo sapien
ttgtttactgaagcaatgtttgtctttttctgc

SEQ ID NO: 950315 - DNA, 33 bp, Homo sapien
tgtcatcattgaagaagtaggctttgctggaag

SEQ ID NO: 950316 - DNA, 33 bp, Homo sapien
tgtcatcattgaagaattaggctttgctggaag

SEQ ID NO: 950317 - DNA, 33 bp, Homo sapien
atgttaagaggaagagaaaatgtaacatgatgt

SEQ ID NO: 950318 - DNA, 33 bp, Homo sapien
atgttaagaggaagagtaaatgtaacatgatgt

SEQ ID NO: 950319 - DNA, 33 bp, Homo sapien
ttcatacagcacttcaacagatattgagcctat

SEQ ID NO: 950320 - DNA, 33 bp, Homo sapien
ttcatacagcacttcagcagatattgagcctat

SEQ ID NO: 950321 - DNA, 33 bp, Homo sapien
aagtccagtcctctcactcttagtcggggcagg

SEQ ID NO: 950322 - DNA, 33 bp, Homo sapien
aagtccagtcctctcattcttagtcggggcagg

SEQ ID NO: 950323 - DNA, 33 bp, Homo sapien
gcaggtatcagcaagacgagggagagaaggggt

SEQ ID NO: 950324 - DNA, 33 bp, Homo sapien
gcaggtatcagcaagaggagggagagaaggggt

SEQ ID NO: 950325 - DNA, 33 bp, Homo sapien
tcattgaaatgagaccagaaggcccatcttgtg

SEQ ID NO: 950326 - DNA, 33 bp, Homo sapien
tcattgaaatgagaccggaaggcccatcttgtg

SEQ ID NO: 950327 - DNA, 33 bp, Homo sapien
ataatcaaaagctcaggaaagtcgtgtagcttt

SEQ ID NO: 950328 - DNA, 33 bp, Homo sapien
ataatcaaaagctcagtaaagtcgtgtagcttt

SEQ ID NO: 950329 - DNA, 33 bp, Homo sapien
caaagagttttctgatgaatagcatttatatac

SEQ ID NO: 950330 - DNA, 33 bp, Homo sapien
caaagagttttctgattaatagcatttatatac

SEQ ID NO: 950331 - DNA, 33 bp, Homo sapien
tacaggaaaatcatgacagtattttggtacaga

SEQ ID NO: 950332 - DNA, 33 bp, Homo sapien
tacaggaaaatcatgagagtattttggtacaga

SEQ ID NO: 950333 - DNA, 33 bp, Homo sapien
cttcattcaattcaaaggtacagcatatagttc

SEQ ID NO: 950334 - DNA, 33 bp, Homo sapien
cttcattcaattcaaatgtacagcatatagttc

SEQ ID NO: 950335 - DNA, 33 bp, Homo sapien
tgaatgtttagcccacagcaggcactgtcatgt

SEQ ID NO: 950336 - DNA, 33 bp, Homo sapien
tgaatgtttagcccacggcaggcactgtcatgt

SEQ ID NO: 950337 - DNA, 33 bp, Homo sapien
tggatatgatccctaactggttgagaccaactt

SEQ ID NO: 950338 - DNA, 33 bp, Homo sapien
tggatatgatccctaagtggttgagaccaactt

SEQ ID NO: 950339 - DNA, 33 bp, Homo sapien
gggaaagaagtctaataatggagtgaccatatg

SEQ ID NO: 950340 - DNA, 33 bp, Homo sapien
gggaaagaagtctaatgatggagtgaccatatg

SEQ ID NO: 950341 - DNA, 33 bp, Homo sapien
gccaaataatgctcaaacctcttcgctgagttt

SEQ ID NO: 950342 - DNA, 33 bp, Homo sapien
gccaaataatgctcaagcctcttcgctgagttt

SEQ ID NO: 950343 - DNA, 33 bp, Homo sapien
tttatttaggacatagaatttgtagccataaaa

SEQ ID NO: 950344 - DNA, 33 bp, Homo sapien
tttatttaggacatagcatttgtagccataaaa

SEQ ID NO: 950345 - DNA, 33 bp, Homo sapien
atatgcttgtctgatacgtataaaggataaagt

SEQ ID NO: 950346 - DNA, 33 bp, Homo sapien
atatgcttgtctgatatgtataaaggataaagt

SEQ ID NO: 950347 - DNA, 33 bp, Homo sapien
acattttatgttcgcaggaaaacagatgtagca

SEQ ID NO: 950348 - DNA, 33 bp, Homo sapien
acattttatgttcgcatgaaaacagatgtagca

SEQ ID NO: 950349 - DNA, 33 bp, Homo sapien
gaagtagttcaggacaaagcagtagtcatttgt

SEQ ID NO: 950350 - DNA, 33 bp, Homo sapien
gaagtagttcaggacacagcagtagtcatttgt

SEQ ID NO: 950351 - DNA, 33 bp, Homo sapien
catgattttttgtcaagtagtacttccacccaa

SEQ ID NO: 950352 - DNA, 33 bp, Homo sapien
catgattttttgtcaattagtacttccacccaa

SEQ ID NO: 950353 - DNA, 33 bp, Homo sapien
atctgatgtctggttacgttcattcaacaagta

SEQ ID NO: 950354 - DNA, 33 bp, Homo sapien
atctgatgtctggttatgttcattcaacaagta

SEQ ID NO: 950355 - DNA, 33 bp, Homo sapien
cattatgtgccagataactttgggttgcccctg

SEQ ID NO: 950356 - DNA, 33 bp, Homo sapien
cattatgtgccagatagctttgggttgcccctg

SEQ ID NO: 950357 - DNA, 33 bp, Homo sapien
aagtaaggttatttcaaggaacatttacacttg

SEQ ID NO: 950358 - DNA, 33 bp, Homo sapien
aagtaaggttatttcagggaacatttacacttg

SEQ ID NO: 950359 - DNA, 33 bp, Homo sapien
acgtttggtttctgaacttaacaggcctgagag

SEQ ID NO: 950360 - DNA, 33 bp, Homo sapien
acgtttggtttctgaatttaacaggcctgagag

SEQ ID NO: 950361 - DNA, 33 bp, Homo sapien
aatctgatgaaagatacacaacaatattttaaa

SEQ ID NO: 950362 - DNA, 33 bp, Homo sapien
aatctgatgaaagatagacaacaatattttaaa

SEQ ID NO: 950363 - DNA, 33 bp, Homo sapien
gacaagattaatctagcaaagttgcctgttaca

SEQ ID NO: 950364 - DNA, 33 bp, Homo sapien
gacaagattaatctaggaaagttgcctgttaca

SEQ ID NO: 950365 - DNA, 33 bp, Homo sapien
gtttttagctgtggcacacagttaagaaacctt

SEQ ID NO: 950366 - DNA, 33 bp, Homo sapien
gtttttagctgtggcatacagttaagaaacctt

SEQ ID NO: 950367 - DNA, 33 bp, Homo sapien
ctgagaaaggctgtcaatatgaatgagaagatt

SEQ ID NO: 950368 - DNA, 33 bp, Homo sapien
ctgagaaaggctgtcattatgaatgagaagatt

SEQ ID NO: 950369 - DNA, 33 bp, Homo sapien
gactgtttgtttaatcaattttatgaccacaga

SEQ ID NO: 950370 - DNA, 33 bp, Homo sapien
gactgtttgtttaatccattttatgaccacaga

SEQ ID NO: 950371 - DNA, 33 bp, Homo sapien
tgaaatgatcctggaactgaaaacctagttaat

SEQ ID NO: 950372 - DNA, 33 bp, Homo sapien
tgaaatgatcctggaagtgaaaacctagttaat

SEQ ID NO: 950373 - DNA, 33 bp, Homo sapien
tcctcatgctcttgaagtagtgtttcttaaatt

SEQ ID NO: 950374 - DNA, 33 bp, Homo sapien
tcctcatgctcttgaattagtgtttcttaaatt

SEQ ID NO: 950375 - DNA, 33 bp, Homo sapien
ctcttcatgtcctaatgagaagccatttttccc

SEQ ID NO: 950376 - DNA, 33 bp, Homo sapien
ctcttcatgtcctaattagaagccatttttccc

SEQ ID NO: 950377 - DNA, 33 bp, Homo sapien
tcaaagtaggttaccactcacattaaaacttcc

SEQ ID NO: 950378 - DNA, 33 bp, Homo sapien
tcaaagtaggttaccagtcacattaaaacttcc

SEQ ID NO: 950379 - DNA, 33 bp, Homo sapien
ctttgaatcagatctacgcttaacacttttaaa

SEQ ID NO: 950380 - DNA, 33 bp, Homo sapien
ctttgaatcagatctaggcttaacacttttaaa

SEQ ID NO: 950381 - DNA, 33 bp, Homo sapien
tcttttagcttctgaaatgagtagggtaaattt

SEQ ID NO: 950382 - DNA, 33 bp, Homo sapien
tcttttagcttctgaattgagtagggtaaattt

SEQ ID NO: 950383 - DNA, 33 bp, Homo sapien
ttagctaacttgcctaactttcagttttctttt

SEQ ID NO: 950384 - DNA, 33 bp, Homo sapien
ttagctaacttgcctagctttcagttttctttt

SEQ ID NO: 950385 - DNA, 33 bp, Homo sapien
tcttaaagtagaagttcaacagacatggaaatt

SEQ ID NO: 950386 - DNA, 33 bp, Homo sapien
tcttaaagtagaagtttaacagacatggaaatt

SEQ ID NO: 950387 - DNA, 33 bp, Homo sapien
catgggggatgaaaaacgtacatgctttctcgt

SEQ ID NO: 950388 - DNA, 33 bp, Homo sapien
catgggggatgaaaaaggtacatgctttctcgt

SEQ ID NO: 950389 - DNA, 33 bp, Homo sapien
acctagcacgttatacaaacttggcactgaaga

SEQ ID NO: 950390 - DNA, 33 bp, Homo sapien
acctagcacgttatacgaacttggcactgaaga

SEQ ID NO: 950391 - DNA, 33 bp, Homo sapien
aatatggccacaattaacatctggtcaactgca

SEQ ID NO: 950392 - DNA, 33 bp, Homo sapien
aatatggccacaattagcatctggtcaactgca

SEQ ID NO: 950393 - DNA, 33 bp, Homo sapien
ctcttactttgtttacgatggtgaagaaggttg

SEQ ID NO: 950394 - DNA, 33 bp, Homo sapien
ctcttactttgtttactatggtgaagaaggttg

SEQ ID NO: 950395 - DNA, 33 bp, Homo sapien
ctcagttggtgattacgcaattggtctttagat

SEQ ID NO: 950396 - DNA, 33 bp, Homo sapien
ctcagttggtgattactcaattggtctttagat

SEQ ID NO: 950397 - DNA, 33 bp, Homo sapien
tttgaaacactacacaaacttgtctttcttgat

SEQ ID NO: 950398 - DNA, 33 bp, Homo sapien
tttgaaacactacacacacttgtctttcttgat

SEQ ID NO: 950399 - DNA, 33 bp, Homo sapien
gtttcaaaaggtacaacagcaagatgcctaact

SEQ ID NO: 950400 - DNA, 33 bp, Homo sapien
gtttcaaaaggtacaatagcaagatgcctaact

SEQ ID NO: 950401 - DNA, 33 bp, Homo sapien
actggacagtaacttaaagccgtatgaagagat

SEQ ID NO: 950402 - DNA, 33 bp, Homo sapien
actggacagtaacttatagccgtatgaagagat

SEQ ID NO: 950403 - DNA, 33 bp, Homo sapien
ctttgaaaaaatgtaactgaaaatgtgttgtga

SEQ ID NO: 950404 - DNA, 33 bp, Homo sapien
ctttgaaaaaatgtaagtgaaaatgtgttgtga

SEQ ID NO: 950405 - DNA, 33 bp, Homo sapien
ttccagtgttcttctacggtcattaaggtgtag

SEQ ID NO: 950406 - DNA, 33 bp, Homo sapien
ttccagtgttcttctatggtcattaaggtgtag

SEQ ID NO: 950407 - DNA, 33 bp, Homo sapien
atgtgatgtctaataaagtggcatattttccag

SEQ ID NO: 950408 - DNA, 33 bp, Homo sapien
atgtgatgtctaataatgtggcatattttccag

SEQ ID NO: 950409 - DNA, 33 bp, Homo sapien
tgagacaaatgatgtacggcaaagtatagcact

SEQ ID NO: 950410 - DNA, 33 bp, Homo sapien
tgagacaaatgatgtatggcaaagtatagcact

SEQ ID NO: 950411 - DNA, 33 bp, Homo sapien
gcgaagggcctagcataagaaggaaacctcttt

SEQ ID NO: 950412 - DNA, 33 bp, Homo sapien
gcgaagggcctagcatcagaaggaaacctcttt

SEQ ID NO: 950413 - DNA, 33 bp, Homo sapien
ccccaatctttccatcactgtgagaagttagga

SEQ ID NO: 950414 - DNA, 33 bp, Homo sapien
ccccaatctttccatcgctgtgagaagttagga

SEQ ID NO: 950415 - DNA, 33 bp, Homo sapien
attgcaataatcttgacctcttttgcaatagtc

SEQ ID NO: 950416 - DNA, 33 bp, Homo sapien
attgcaataatcttgatctcttttgcaatagtc

SEQ ID NO: 950417 - DNA, 33 bp, Homo sapien
cattcactgtgtctacaatttggcatatttctt

SEQ ID NO: 950418 - DNA, 33 bp, Homo sapien
cattcactgtgtctacgatttggcatatttctt

SEQ ID NO: 950419 - DNA, 33 bp, Homo sapien
acacatattgaccaaaattaatttacatgtaca

SEQ ID NO: 950420 - DNA, 33 bp, Homo sapien
acacatattgaccaaacttaatttacatgtaca

SEQ ID NO: 950421 - DNA, 33 bp, Homo sapien
cagatgtgtttattaactgaggcctaggaaagt

SEQ ID NO: 950422 - DNA, 33 bp, Homo sapien
cagatgtgtttattaattgaggcctaggaaagt

SEQ ID NO: 950423 - DNA, 33 bp, Homo sapien
atttcactggctcgccaaaaaattctcctacct

SEQ ID NO: 950424 - DNA, 33 bp, Homo sapien
atttcactggctcgccgaaaaattctcctacct

SEQ ID NO: 950425 - DNA, 33 bp, Homo sapien
tgagtaatgtaccaaacataactctcaagactg

SEQ ID NO: 950426 - DNA, 33 bp, Homo sapien
tgagtaatgtaccaaagataactctcaagactg

SEQ ID NO: 950427 - DNA, 33 bp, Homo sapien
taactctcaagactgtaaagaatttatgtactt

SEQ ID NO: 950428 - DNA, 33 bp, Homo sapien
taactctcaagactgtgaagaatttatgtactt

SEQ ID NO: 950429 - DNA, 33 bp, Homo sapien
tacagcagtttttcaaagtttaatcattcatga

SEQ ID NO: 950430 - DNA, 33 bp, Homo sapien
tacagcagtttttcaatgtttaatcattcatga

SEQ ID NO: 950431 - DNA, 33 bp, Homo sapien; identical to SEQ ID NO: 950429

SEQ ID NO: 950432 - DNA, 33 bp, Homo sapien; identical to SEQ ID NO: 950430

SEQ ID NO: 950433 - DNA, 33 bp, Homo sapien
atcagccttaactacaacatcagtagacttgtg

SEQ ID NO: 950434 - DNA, 33 bp, Homo sapien
atcagccttaactacagcatcagtagacttgtg

SEQ ID NO: 950435 - DNA, 33 bp, Homo sapien
aaccaatagagtgaagcaggtgatactaatgca

SEQ ID NO: 950436 - DNA, 33 bp, Homo sapien
aaccaatagagtgaaggaggtgatactaatgca

SEQ ID NO: 950437 - DNA, 33 bp, Homo sapien
tatctaataaattacaagtagacttcagtggat

SEQ ID NO: 950438 - DNA, 33 bp, Homo sapien
tatctaataaattacaggtagacttcagtggat

SEQ ID NO: 950439 - DNA, 33 bp, Homo sapien
ttttcactcacataaaattacagatagacaaaa

SEQ ID NO: 950440 - DNA, 33 bp, Homo sapien
ttttcactcacataaacttacagatagacaaaa

SEQ ID NO: 950441 - DNA, 33 bp, Homo sapien
taggagcaaattgaaaagtaaaagatgatataa

SEQ ID NO: 950442 - DNA, 33 bp, Homo sapien
taggagcaaattgaaacgtaaaagatgatataa

SEQ ID NO: 950443 - DNA, 33 bp, Homo sapien
aagttgatttgctctaactgtttttcatatgaa

SEQ ID NO: 950444 - DNA, 33 bp, Homo sapien
aagttgatttgctctatctgtttttcatatgaa

SEQ ID NO: 950445 - DNA, 33 bp, Homo sapien
atattaactgattttcccaaattctgcaatctg

SEQ ID NO: 950446 - DNA, 33 bp, Homo sapien
atattaactgattttcgcaaattctgcaatctg

SEQ ID NO: 950447 - DNA, 33 bp, Homo sapien
aggtctccattcaaacacagtaaggaattctag

SEQ ID NO: 950448 - DNA, 33 bp, Homo sapien
aggtctccattcaaacccagtaaggaattctag

SEQ ID NO: 950449 - DNA, 33 bp, Homo sapien
tttctaataccgtagaagatttttcagaaaact

SEQ ID NO: 950450 - DNA, 33 bp, Homo sapien
tttctaataccgtagatgatttttcagaaaact

SEQ ID NO: 950451 - DNA, 33 bp, Homo sapien
tggtttttgttgaaagcaatcatgagaaaaatg

SEQ ID NO: 950452 - DNA, 33 bp, Homo sapien
tggtttttgttgaaagtaatcatgagaaaaatg

SEQ ID NO: 950453 - DNA, 33 bp, Homo sapien
gtgtcttacacacttcaaccttaacctctggta

SEQ ID NO: 950454 - DNA, 33 bp, Homo sapien
gtgtcttacacacttcgaccttaacctctggta

SEQ ID NO: 950455 - DNA, 33 bp, Homo sapien
ggcacaggatgtaaataaacacagtgcactgca

SEQ ID NO: 950456 - DNA, 33 bp, Homo sapien
ggcacaggatgtaaatgaacacagtgcactgca

SEQ ID NO: 950457 - DNA, 33 bp, Homo sapien
gtttttatcacctataaaatttagcaaccataa

SEQ ID NO: 950458 - DNA, 33 bp, Homo sapien
gtttttatcacctatacaatttagcaaccataa

SEQ ID NO: 950459 - DNA, 33 bp, Homo sapien
aaagttaaagcacacaatgtatactccttcttt

SEQ ID NO: 950460 - DNA, 33 bp, Homo sapien
aaagttaaagcacacattgtatactccttcttt

SEQ ID NO: 950461 - DNA, 33 bp, Homo sapien
acttcattcttctgcacaggtttatgtcttctc

SEQ ID NO: 950462 - DNA, 33 bp, Homo sapien
acttcattcttctgcagaggtttatgtcttctc

SEQ ID NO: 950463 - DNA, 33 bp, Homo sapien
taagaattgttatggacatgggttactcaatag

SEQ ID NO: 950464 - DNA, 33 bp, Homo sapien
taagaattgttatggatatgggttactcaatag

SEQ ID NO: 950465 - DNA, 33 bp, Homo sapien
tccataacaattcttacgctctcatattgctga

SEQ ID NO: 950466 - DNA, 33 bp, Homo sapien
tccataacaattcttaggctctcatattgctga

SEQ ID NO: 950467 - DNA, 33 bp, Homo sapien
atacaacatagaggaccctaaacagaagtatta

SEQ ID NO: 950468 - DNA, 33 bp, Homo sapien
atacaacatagaggactctaaacagaagtatta

SEQ ID NO: 950469 - DNA, 33 bp, Homo sapien
gagtaatctggagtgaagtgaacacgcatacat

SEQ ID NO: 950470 - DNA, 33 bp, Homo sapien
gagtaatctggagtgatgtgaacacgcatacat

SEQ ID NO: 950471 - DNA, 33 bp, Homo sapien
gaaagcccatacctaaatcattccagcacacct

SEQ ID NO: 950472 - DNA, 33 bp, Homo sapien
gaaagcccatacctaactcattccagcacacct

SEQ ID NO: 950473 - DNA, 33 bp, Homo sapien
tgatgtaaatgaagcaagagtagaacattctag

SEQ ID NO: 950474 - DNA, 33 bp, Homo sapien
tgatgtaaatgaagcaggagtagaacattctag

SEQ ID NO: 950475 - DNA, 33 bp, Homo sapien
gttcatgaataagaaaatctccaaaattgaaca

SEQ ID NO: 950476 - DNA, 33 bp, Homo sapien
gttcatgaataagaaactctccaaaattgaaca

SEQ ID NO: 950477 - DNA, 33 bp, Homo sapien
tgaggttcaaattaaagagctccatgggtgaca

SEQ ID NO: 950478 - DNA, 33 bp, Homo sapien
tgaggttcaaattaaatagctccatgggtgaca

SEQ ID NO: 950479 - DNA, 33 bp, Homo sapien
ctgcatgactgaatctaaaagcctggaatttct

SEQ ID NO: 950480 - DNA, 33 bp, Homo sapien
ctgcatgactgaatctgaaagcctggaatttct

SEQ ID NO: 950481 - DNA, 33 bp, Homo sapien
tgggaaatttagatcacgagacagtacagcaca

SEQ ID NO: 950482 - DNA, 33 bp, Homo sapien
tgggaaatttagatcatgagacagtacagcaca

SEQ ID NO: 950483 - DNA, 33 bp, Homo sapien
aaatcgagaaacagcacgaatattgaaggagtt

SEQ ID NO: 950484 - DNA, 33 bp, Homo sapien
aaatcgagaaacagcatgaatattgaaggagtt

SEQ ID NO: 950485 - DNA, 33 bp, Homo sapien
tttaaaattatgtcaactgctggttctgagact

SEQ ID NO: 950486 - DNA, 33 bp, Homo sapien
tttaaaattatgtcaattgctggttctgagact

SEQ ID NO: 950487 - DNA, 33 bp, Homo sapien
actttcaaagccataccctactcagtccatgag

SEQ ID NO: 950488 - DNA, 33 bp, Homo sapien
actttcaaagccatactctactcagtccatgag

SEQ ID NO: 950489 - DNA, 33 bp, Homo sapien
gtgctgtctatgtcggcatattgaaaacataca

SEQ ID NO: 950490 - DNA, 33 bp, Homo sapien
gtgctgtctatgtcggtatattgaaaacataca

SEQ ID NO: 950491 - DNA, 33 bp, Homo sapien
aaatgattcatggtaacagtaaataaaatttgg

SEQ ID NO: 950492 - DNA, 33 bp, Homo sapien
aaatgattcatggtaagagtaaataaaatttgg

SEQ ID NO: 950493 - DNA, 33 bp, Homo sapien
tagatcctaaagtaaacgacagaagagtaggaa

SEQ ID NO: 950494 - DNA, 33 bp, Homo sapien
tagatcctaaagtaaatgacagaagagtaggaa

SEQ ID NO: 950495 - DNA, 33 bp, Homo sapien
aatcatcgttgtcttagatttcatgctataatc

SEQ ID NO: 950496 - DNA, 33 bp, Homo sapien
aatcatcgttgtcttatatttcatgctataatc

SEQ ID NO: 950497 - DNA, 33 bp, Homo sapien
ttagcaattgtgtaaaaccctctcattatgtaa

SEQ ID NO: 950498 - DNA, 33 bp, Homo sapien
ttagcaattgtgtaaacccctctcattatgtaa

SEQ ID NO: 950499 - DNA, 33 bp, Homo sapien
gacagactagaagacaaacaattacagtacagg

SEQ ID NO: 950500 - DNA, 33 bp, Homo sapien
gacagactagaagacagacaattacagtacagg

SEQ ID NO: 950501 - DNA, 33 bp, Homo sapien
ctactagcagctggctaaccttgaactaattcc

SEQ ID NO: 950502 - DNA, 33 bp, Homo sapien
ctactagcagctggctgaccttgaactaattcc

SEQ ID NO: 950503 - DNA, 33 bp, Homo sapien
gcttacagggaaaacacgggtgctgccttattg

SEQ ID NO: 950504 - DNA, 33 bp, Homo sapien
gcttacagggaaaacatgggtgctgccttattg

SEQ ID NO: 950505 - DNA, 33 bp, Homo sapien
aaatgatttttattgccgagtgataaattgtcg

SEQ ID NO: 950506 - DNA, 33 bp, Homo sapien
aaatgatttttattgctgagtgataaattgtcg

SEQ ID NO: 950507 - DNA, 33 bp, Homo sapien
gcctagtgtaagctcaccaggaaagtatgccaa

SEQ ID NO: 950508 - DNA, 33 bp, Homo sapien
gcctagtgtaagctcagcaggaaagtatgccaa

SEQ ID NO: 950509 - DNA, 33 bp, Homo sapien
gtacaataaactctaacaatgtacactgacttt

SEQ ID NO: 950510 - DNA, 33 bp, Homo sapien
gtacaataaactctaagaatgtacactgacttt

SEQ ID NO: 950511 - DNA, 33 bp, Homo sapien
tgatctcaactcgtgggatctacacaatcaaga

SEQ ID NO: 950512 - DNA, 33 bp, Homo sapien
tgatctcaactcgtggtatctacacaatcaaga

SEQ ID NO: 950513 - DNA, 33 bp, Homo sapien
attagaaactttcaaacagctggtttttgtctt

SEQ ID NO: 950514 - DNA, 33 bp, Homo sapien
attagaaactttcaaatagctggtttttgtctt

SEQ ID NO: 950515 - DNA, 33 bp, Homo sapien
tatggagagttttggcacttcatttttaaaaag

SEQ ID NO: 950516 - DNA, 33 bp, Homo sapien
tatggagagttttggcgcttcatttttaaaaag

SEQ ID NO: 950517 - DNA, 33 bp, Homo sapien
gaaaaaaaaacagcagactaatgtgaagcagag

SEQ ID NO: 950518 - DNA, 33 bp, Homo sapien
gaaaaaaaaacagcaggctaatgtgaagcagag

SEQ ID NO: 950519 - DNA, 33 bp, Homo sapien
tctcagagtcagcttgcacactaagaggacaga

SEQ ID NO: 950520 - DNA, 33 bp, Homo sapien
tctcagagtcagcttggacactaagaggacaga

SEQ ID NO: 950521 - DNA, 33 bp, Homo sapien
taatgattgagcatagcaagaaagaatttatca

SEQ ID NO: 950522 - DNA, 33 bp, Homo sapien
taatgattgagcataggaagaaagaatttatca

SEQ ID NO: 950523 - DNA, 33 bp, Homo sapien
cttgaacctttagaaccgaaaatgaattaaatc

SEQ ID NO: 950524 - DNA, 33 bp, Homo sapien
cttgaacctttagaactgaaaatgaattaaatc

SEQ ID NO: 950525 - DNA, 33 bp, Homo sapien
atcttttaggatccataatctgtgaaagaaatg

SEQ ID NO: 950526 - DNA, 33 bp, Homo sapien
atcttttaggatccatcatctgtgaaagaaatg

SEQ ID NO: 950527 - DNA, 33 bp, Homo sapien
ccagcccagggttttccatactacaatcatgac

SEQ ID NO: 950528 - DNA, 33 bp, Homo sapien
ccagcccagggttttctatactacaatcatgac

SEQ ID NO: 950529 - DNA, 33 bp, Homo sapien
agataaaattttctgaccaaggacatagcttaa

SEQ ID NO: 950530 - DNA, 33 bp, Homo sapien
agataaaattttctgatcaaggacatagcttaa

SEQ ID NO: 950531 - DNA, 33 bp, Homo sapien
ttagctgagacgtcaacaaagagtagtatttag

SEQ ID NO: 950532 - DNA, 33 bp, Homo sapien
ttagctgagacgtcaagaaagagtagtatttag

SEQ ID NO: 950533 - DNA, 33 bp, Homo sapien
ccaataacaatgtttacaatgccaagaaagtga

SEQ ID NO: 950534 - DNA, 33 bp, Homo sapien
ccaataacaatgtttataatgccaagaaagtga

SEQ ID NO: 950535 - DNA, 33 bp, Homo sapien
gctagactatatggaagggaaaatacagctgag

SEQ ID NO: 950536 - DNA, 33 bp, Homo sapien
gctagactatatggaatggaaaatacagctgag

SEQ ID NO: 950537 - DNA, 33 bp, Homo sapien
tattgttattttacccacagaagatgtactacg

SEQ ID NO: 950538 - DNA, 33 bp, Homo sapien
tattgttattttacccccagaagatgtactacg

SEQ ID NO: 950539 - DNA, 33 bp, Homo sapien
gaccagacacatcccactgaaagcattccatag

SEQ ID NO: 950540 - DNA, 33 bp, Homo sapien
gaccagacacatcccattgaaagcattccatag

SEQ ID NO: 950541 - DNA, 33 bp, Homo sapien
acacatgtgaaaaataactttgatgaatttgta

SEQ ID NO: 950542 - DNA, 33 bp, Homo sapien
acacatgtgaaaaatacctttgatgaatttgta

SEQ ID NO: 950543 - DNA, 33 bp, Homo sapien
aatgatacttttctaagtggtcataaagaaacc

SEQ ID NO: 950544 - DNA, 33 bp, Homo sapien
aatgatacttttctaattggtcataaagaaacc

SEQ ID NO: 950545 - DNA, 33 bp, Homo sapien
acctgttctcttactacgcacaactttattcta

SEQ ID NO: 950546 - DNA, 33 bp, Homo sapien
acctgttctcttactatgcacaactttattcta

SEQ ID NO: 950547 - DNA, 33 bp, Homo sapien
ttacgacaacatttcagtatttaattcttgttt

SEQ ID NO: 950548 - DNA, 33 bp, Homo sapien
ttacgacaacatttcattatttaattcttgttt

SEQ ID NO: 950549 - DNA, 33 bp, Homo sapien
aagccattttcaaagtcaagttcagggtacctc

SEQ ID NO: 950550 - DNA, 33 bp, Homo sapien
aagccattttcaaagtgaagttcagggtacctc

SEQ ID NO: 950551 - DNA, 33 bp, Homo sapien
tttgttaggacaaggaagaaagcaatgcaaaga

SEQ ID NO: 950552 - DNA, 33 bp, Homo sapien
tttgttaggacaaggaggaaagcaatgcaaaga

SEQ ID NO: 950553 - DNA, 33 bp, Homo sapien
ctaggaagaactgatacatagctgctaattatt

SEQ ID NO: 950554 - DNA, 33 bp, Homo sapien
ctaggaagaactgatatatagctgctaattatt

SEQ ID NO: 950555 - DNA, 33 bp, Homo sapien
catcttttatggggtacaaacacaatatttgaa

SEQ ID NO: 950556 - DNA, 33 bp, Homo sapien
catcttttatggggtagaaacacaatatttgaa

SEQ ID NO: 950557 - DNA, 33 bp, Homo sapien
gacccaaacatagtgcaaaggagattaaaaaaa

SEQ ID NO: 950558 - DNA, 33 bp, Homo sapien
gacccaaacatagtgccaaggagattaaaaaaa

SEQ ID NO: 950559 - DNA, 33 bp, Homo sapien
tcaattctggtttgagacagtaacaagccaatc

SEQ ID NO: 950560 - DNA, 33 bp, Homo sapien
tcaattctggtttgaggcagtaacaagccaatc

SEQ ID NO: 950561 - DNA, 33 bp, Homo sapien
ttgtaagatacattgacggattgtgatattcag

SEQ ID NO: 950562 - DNA, 33 bp, Homo sapien
ttgtaagatacattgatggattgtgatattcag

SEQ ID NO: 950563 - DNA, 33 bp, Homo sapien
gcaaaggctaccttgaaagcccattccaaaata

SEQ ID NO: 950564 - DNA, 33 bp, Homo sapien
gcaaaggctaccttgagagcccattccaaaata

SEQ ID NO: 950565 - DNA, 33 bp, Homo sapien
aaatagcatctgcttccaaatatctcatgttgt

SEQ ID NO: 950566 - DNA, 33 bp, Homo sapien
aaatagcatctgcttctaaatatctcatgttgt

SEQ ID NO: 950567 - DNA, 33 bp, Homo sapien
gaatggggtatgaaaacctccaagatgctttga

SEQ ID NO: 950568 - DNA, 33 bp, Homo sapien
gaatggggtatgaaaagctccaagatgctttga

SEQ ID NO: 950569 - DNA, 33 bp, Homo sapien
taatgtctgtgtagaaatctttactagctgtaa

SEQ ID NO: 950570 - DNA, 33 bp, Homo sapien
taatgtctgtgtagaattctttactagctgtaa

SEQ ID NO: 950571 - DNA, 33 bp, Homo sapien
atatgacttttgtcaccctttatttacagctag

SEQ ID NO: 950572 - DNA, 33 bp, Homo sapien
atatgacttttgtcacgctttatttacagctag

SEQ ID NO: 950573 - DNA, 33 bp, Homo sapien
aattcagacgatcgacacttaatagtcattttt

SEQ ID NO: 950574 - DNA, 33 bp, Homo sapien
aattcagacgatcgacgcttaatagtcattttt

SEQ ID NO: 950575 - DNA, 33 bp, Homo sapien
cacattgctattttcaccaattactcacaatca

SEQ ID NO: 950576 - DNA, 33 bp, Homo sapien
cacattgctattttcatcaattactcacaatca

SEQ ID NO: 950577 - DNA, 33 bp, Homo sapien
attttagtacctaatgaacgttaaaatagttct

SEQ ID NO: 950578 - DNA, 33 bp, Homo sapien
attttagtacctaatggacgttaaaatagttct

SEQ ID NO: 950579 - DNA, 33 bp, Homo sapien
tatctatctttctgtacccatgaaatgactaaa

SEQ ID NO: 950580 - DNA, 33 bp, Homo sapien
tatctatctttctgtagccatgaaatgactaaa

SEQ ID NO: 950581 - DNA, 33 bp, Homo sapien
ttagcagctatttcatcaacccttcttcttggt

SEQ ID NO: 950582 - DNA, 33 bp, Homo sapien
ttagcagctatttcattaacccttcttcttggt

SEQ ID NO: 950583 - DNA, 33 bp, Homo sapien
tcccaaagctcttttaaccagagtcagtaacag

SEQ ID NO: 950584 - DNA, 33 bp, Homo sapien
tcccaaagctcttttagccagagtcagtaacag

SEQ ID NO: 950585 - DNA, 33 bp, Homo sapien
agcacaagggataaacgaacaaaccatcattaa

SEQ ID NO: 950586 - DNA, 33 bp, Homo sapien
agcacaagggataaactaacaaaccatcattaa

SEQ ID NO: 950587 - DNA, 33 bp, Homo sapien
gctatctaatacagaaaatttgaactatttgta

SEQ ID NO: 950588 - DNA, 33 bp, Homo sapien
gctatctaatacagaacatttgaactatttgta

SEQ ID NO: 950589 - DNA, 33 bp, Homo sapien
atttaggcaaatcatcaactagtttattgagtc

SEQ ID NO: 950590 - DNA, 33 bp, Homo sapien
atttaggcaaatcatccactagtttattgagtc

SEQ ID NO: 950591 - DNA, 33 bp, Homo sapien
caaaggcattgctagaccaataaagaacatagt

SEQ ID NO: 950592 - DNA, 33 bp, Homo sapien
caaaggcattgctagatcaataaagaacatagt

SEQ ID NO: 950593 - DNA, 33 bp, Homo sapien
aagtaagcttagcacactcttacattaaatatg

SEQ ID NO: 950594 - DNA, 33 bp, Homo sapien
aagtaagcttagcacagtcttacattaaatatg

SEQ ID NO: 950595 - DNA, 33 bp, Homo sapien
caatccccttgctaatcattaacacacacaaaa

SEQ ID NO: 950596 - DNA, 33 bp, Homo sapien
caatccccttgctaattattaacacacacaaaa

SEQ ID NO: 950597 - DNA, 33 bp, Homo sapien
ttatcaagtccagtaactctaagttggaatttg

SEQ ID NO: 950598 - DNA, 33 bp, Homo sapien
ttatcaagtccagtaattctaagttggaatttg

SEQ ID NO: 950599 - DNA, 33 bp, Homo sapien
tataattaaagagttacagcttcaaattccaac

SEQ ID NO: 950600 - DNA, 33 bp, Homo sapien
tataattaaagagttagagcttcaaattccaac

SEQ ID NO: 950601 - DNA, 33 bp, Homo sapien
tttattgctgtgggttaaaaagtaggtcaaaaa

SEQ ID NO: 950602 - DNA, 33 bp, Homo sapien
tttattgctgtgggttgaaaagtaggtcaaaaa

SEQ ID NO: 950603 - DNA, 33 bp, Homo sapien
aagcagttttaaggtcccaagtagcaagaattt

SEQ ID NO: 950604 - DNA, 33 bp, Homo sapien
aagcagttttaaggtctcaagtagcaagaattt

SEQ ID NO: 950605 - DNA, 33 bp, Homo sapien
ttttttgtgctcttaccatagaagaaaagtatt

SEQ ID NO: 950606 - DNA, 33 bp, Homo sapien
ttttttgtgctcttacgatagaagaaaagtatt

SEQ ID NO: 950607 - DNA, 33 bp, Homo sapien
taactaatccctccaacccagagaaagctacat

SEQ ID NO: 950608 - DNA, 33 bp, Homo sapien
taactaatccctccaatccagagaaagctacat

SEQ ID NO: 950609 - DNA, 33 bp, Homo sapien
tcctctccttgagtcactcttaccagtaccttc

SEQ ID NO: 950610 - DNA, 33 bp, Homo sapien
tcctctccttgagtcattcttaccagtaccttc

SEQ ID NO: 950611 - DNA, 33 bp, Homo sapien
tcaactaatggctgtgaacgcaaacccaggaga

SEQ ID NO: 950612 - DNA, 33 bp, Homo sapien
tcaactaatggctgtggacgcaaacccaggaga

SEQ ID NO: 950613 - DNA, 33 bp, Homo sapien
gattggaatggatttacaaaacagtagaagaaa

SEQ ID NO: 950614 - DNA, 33 bp, Homo sapien
gattggaatggatttataaaacagtagaagaaa

SEQ ID NO: 950615 - DNA, 33 bp, Homo sapien
caggttttttccccaacacttcatggaaactgt

SEQ ID NO: 950616 - DNA, 33 bp, Homo sapien
caggttttttccccaatacttcatggaaactgt

SEQ ID NO: 950617 - DNA, 33 bp, Homo sapien
tctttgttactaacacacatttatttggtgatt

SEQ ID NO: 950618 - DNA, 33 bp, Homo sapien
tctttgttactaacactcatttatttggtgatt

SEQ ID NO: 950619 - DNA, 33 bp, Homo sapien
atctcatctttccttaaaaccagagatttatgt

SEQ ID NO: 950620 - DNA, 33 bp, Homo sapien
atctcatctttccttagaaccagagatttatgt

SEQ ID NO: 950621 - DNA, 33 bp, Homo sapien
aaaagcacgaatcaggaattctcttttggatat

SEQ ID NO: 950622 - DNA, 33 bp, Homo sapien
aaaagcacgaatcaggtattctcttttggatat

SEQ ID NO: 950623 - DNA, 33 bp, Homo sapien
caaaaaccctgtaagcactggccattcattaac

SEQ ID NO: 950624 - DNA, 33 bp, Homo sapien
caaaaaccctgtaagcgctggccattcattaac

SEQ ID NO: 950625 - DNA, 33 bp, Homo sapien
aagcaatatgaaaaagcaagacaaagtgagaga

SEQ ID NO: 950626 - DNA, 33 bp, Homo sapien
aagcaatatgaaaaaggaagacaaagtgagaga

SEQ ID NO: 950627 - DNA, 33 bp, Homo sapien
gagagttgaaattttacacaggttgactaggga

SEQ ID NO: 950628 - DNA, 33 bp, Homo sapien
gagagttgaaattttagacaggttgactaggga

SEQ ID NO: 950629 - DNA, 33 bp, Homo sapien
tatcagaaggaaatgacgaggagaatcaaggaa

SEQ ID NO: 950630 - DNA, 33 bp, Homo sapien
tatcagaaggaaatgatgaggagaatcaaggaa

SEQ ID NO: 950631 - DNA, 33 bp, Homo sapien
cagaattcaaattcaactcacgcagattctaat

SEQ ID NO: 950632 - DNA, 33 bp, Homo sapien
cagaattcaaattcaagtcacgcagattctaat

SEQ ID NO: 950633 - DNA, 33 bp, Homo sapien
gagccttttacctgaacaatgtttgctgcaatt

SEQ ID NO: 950634 - DNA, 33 bp, Homo sapien
gagccttttacctgaataatgtttgctgcaatt

SEQ ID NO: 950635 - DNA, 33 bp, Homo sapien
tctaaatgtgtggagaacaaaggctttccagta

SEQ ID NO: 950636 - DNA, 33 bp, Homo sapien
tctaaatgtgtggagagcaaaggctttccagta

SEQ ID NO: 950637 - DNA, 33 bp, Homo sapien
cagaggaatgagtaaaggtggtctatatacaca

SEQ ID NO: 950638 - DNA, 33 bp, Homo sapien
cagaggaatgagtaaatgtggtctatatacaca

SEQ ID NO: 950639 - DNA, 33 bp, Homo sapien
tacttaaagatggaaacgcgattactaaaaaag

SEQ ID NO: 950640 - DNA, 33 bp, Homo sapien
tacttaaagatggaaaggcgattactaaaaaag

SEQ ID NO: 950641 - DNA, 33 bp, Homo sapien
ggagatcaatttgtcacatggtaatatgaattt

SEQ ID NO: 950642 - DNA, 33 bp, Homo sapien
ggagatcaatttgtcagatggtaatatgaattt

SEQ ID NO: 950643 - DNA, 33 bp, Homo sapien
tcaataaaaagtcaggaaacaagatgctggaca

SEQ ID NO: 950644 - DNA, 33 bp, Homo sapien
tcaataaaaagtcagggaacaagatgctggaca

SEQ ID NO: 950645 - DNA, 33 bp, Homo sapien
tttcacattaatggtaccgactggaagagtctt

SEQ ID NO: 950646 - DNA, 33 bp, Homo sapien
tttcacattaatggtatcgactggaagagtctt

SEQ ID NO: 950647 - DNA, 33 bp, Homo sapien
aatgagtggaaacgaaagagttggaagtgagga

SEQ ID NO: 950648 - DNA, 33 bp, Homo sapien
aatgagtggaaacgaatgagttggaagtgagga

SEQ ID NO: 950649 - DNA, 33 bp, Homo sapien
ctatgcaatcaagagcacttaatgtagaggaag

SEQ ID NO: 950650 - DNA, 33 bp, Homo sapien
ctatgcaatcaagagcgcttaatgtagaggaag

SEQ ID NO: 950651 - DNA, 33 bp, Homo sapien
aatttcatgaatccccaaaaagacggtagcaca

SEQ ID NO: 950652 - DNA, 33 bp, Homo sapien
aatttcatgaatccccgaaaagacggtagcaca

SEQ ID NO: 950653 - DNA, 33 bp, Homo sapien
acaggaacaatatcaacggcatagttagtaggg

SEQ ID NO: 950654 - DNA, 33 bp, Homo sapien
acaggaacaatatcaagggcatagttagtaggg

SEQ ID NO: 950655 - DNA, 33 bp, Homo sapien
ggttgacccactgaaagcttagtagtgactgcc

SEQ ID NO: 950656 - DNA, 33 bp, Homo sapien
ggttgacccactgaaatcttagtagtgactgcc

SEQ ID NO: 950657 - DNA, 33 bp, Homo sapien
gtactaattatcttcaggttacagttgaagaat

SEQ ID NO: 950658 - DNA, 33 bp, Homo sapien
gtactaattatcttcatgttacagttgaagaat

SEQ ID NO: 950659 - DNA, 33 bp, Homo sapien
tcactgatgtgcttacaaactatattcctgatt

SEQ ID NO: 950660 - DNA, 33 bp, Homo sapien
tcactgatgtgcttacgaactatattcctgatt

SEQ ID NO: 950661 - DNA, 33 bp, Homo sapien
ggaaactcagttgtacaaaaagaagtactgcac

SEQ ID NO: 950662 - DNA, 33 bp, Homo sapien
ggaaactcagttgtacgaaaagaagtactgcac

SEQ ID NO: 950663 - DNA, 33 bp, Homo sapien
tagtgaatcatactcccgcatctcttgaagtga

SEQ ID NO: 950664 - DNA, 33 bp, Homo sapien
tagtgaatcatactccggcatctcttgaagtga

SEQ ID NO: 950665 - DNA, 33 bp, Homo sapien
gactcgtttcatatgacagctttctgaatgatg

SEQ ID NO: 950666 - DNA, 33 bp, Homo sapien
gactcgtttcatatgagagctttctgaatgatg

SEQ ID NO: 950667 - DNA, 33 bp, Homo sapien
aacccacgaccaggaacaaaggcactttcttgt

SEQ ID NO: 950668 - DNA, 33 bp, Homo sapien
aacccacgaccaggaataaaggcactttcttgt

SEQ ID NO: 950669 - DNA, 33 bp, Homo sapien
agcctgttgcggagtaagttagagttttccaga

SEQ ID NO: 950670 - DNA, 33 bp, Homo sapien
agcctgttgcggagtatgttagagttttccaga

SEQ ID NO: 950671 - DNA, 33 bp, Homo sapien
aaaatgaagacattcaaaagttaaaaaatggtg

SEQ ID NO: 950672 - DNA, 33 bp, Homo sapien
aaaatgaagacattcagaagttaaaaaatggtg

SEQ ID NO: 950673 - DNA, 33 bp, Homo sapien
ttaaaaatataaaatacgcttcaaatcaccaca

SEQ ID NO: 950674 - DNA, 33 bp, Homo sapien
ttaaaaatataaaataggcttcaaatcaccaca

SEQ ID NO: 950675 - DNA, 33 bp, Homo sapien
atcttttctttgaaaaatgtattagtctgggct

SEQ ID NO: 950676 - DNA, 33 bp, Homo sapien
atcttttctttgaaaagtgtattagtctgggct

SEQ ID NO: 950677 - DNA, 33 bp, Homo sapien
cttatgcatcacattgcaattatcaaaccagta

SEQ ID NO: 950678 - DNA, 33 bp, Homo sapien
cttatgcatcacattgtaattatcaaaccagta

SEQ ID NO: 950679 - DNA, 33 bp, Homo sapien
tttgcaaggaaactctaaaatctgtatccatat

SEQ ID NO: 950680 - DNA, 33 bp, Homo sapien
tttgcaaggaaactctgaaatctgtatccatat

SEQ ID NO: 950681 - DNA, 33 bp, Homo sapien
tcctcttctttgccccaaaagattggagtgtat

SEQ ID NO: 950682 - DNA, 33 bp, Homo sapien
tcctcttctttgcccctaaagattggagtgtat

SEQ ID NO: 950683 - DNA, 33 bp, Homo sapien
ttacctgggcttacaaccattttcttctatgtt

SEQ ID NO: 950684 - DNA, 33 bp, Homo sapien
ttacctgggcttacaatcattttcttctatgtt

SEQ ID NO: 950685 - DNA, 33 bp, Homo sapien
cctccacctcctagacacaaggaagcgttccac

SEQ ID NO: 950686 - DNA, 33 bp, Homo sapien
cctccacctcctagacgcaaggaagcgttccac

SEQ ID NO: 950687 - DNA, 33 bp, Homo sapien
agggcttaatttgcacacaaaaaatagcaggat

SEQ ID NO: 950688 - DNA, 33 bp, Homo sapien
agggcttaatttgcacgcaaaaaatagcaggat

SEQ ID NO: 950689 - DNA, 33 bp, Homo sapien
gaaaatactcaaataaatgaccttgtgacacaa

SEQ ID NO: 950690 - DNA, 33 bp, Homo sapien
gaaaatactcaaataagtgaccttgtgacacaa

SEQ ID NO: 950691 - DNA, 33 bp, Homo sapien
agtggtttaaggtaccagattccgaatgatttc

SEQ ID NO: 950692 - DNA, 33 bp, Homo sapien
agtggtttaaggtaccggattccgaatgatttc

SEQ ID NO: 950693 - DNA, 33 bp, Homo sapien
ctttatcaagttagtacagtataaagtgctgaa

SEQ ID NO: 950694 - DNA, 33 bp, Homo sapien
ctttatcaagttagtagagtataaagtgctgaa

SEQ ID NO: 950695 - DNA, 33 bp, Homo sapien
ccacttagagatgaaacaaaacagacaaaatgc

SEQ ID NO: 950696 - DNA, 33 bp, Homo sapien
ccacttagagatgaaagaaaacagacaaaatgc

SEQ ID NO: 950697 - DNA, 33 bp, Homo sapien
atgcaaatctgataaactgttcgttacacaact

SEQ ID NO: 950698 - DNA, 33 bp, Homo sapien
atgcaaatctgataaattgttcgttacacaact

SEQ ID NO: 950699 - DNA, 33 bp, Homo sapien
gaacaggaataggtaccgcatatttctatacat

SEQ ID NO: 950700 - DNA, 33 bp, Homo sapien
gaacaggaataggtactgcatatttctatacat

SEQ ID NO: 950701 - DNA, 33 bp, Homo sapien
actgctaccttgataacgacatagtagtttgaa

SEQ ID NO: 950702 - DNA, 33 bp, Homo sapien
actgctaccttgataatgacatagtagtttgaa

SEQ ID NO: 950703 - DNA, 33 bp, Homo sapien
aataatttggtaataccgaagtctccaacagaa

SEQ ID NO: 950704 - DNA, 33 bp, Homo sapien
aataatttggtaatactgaagtctccaacagaa

SEQ ID NO: 950705 - DNA, 33 bp, Homo sapien
agatagcttcttccacactattttggttcatct

SEQ ID NO: 950706 - DNA, 33 bp, Homo sapien
agatagcttcttccacgctattttggttcatct

SEQ ID NO: 950707 - DNA, 33 bp, Homo sapien
ccccttgtaagtagaactgaacatcaataggaa

SEQ ID NO: 950708 - DNA, 33 bp, Homo sapien
ccccttgtaagtagaattgaacatcaataggaa

SEQ ID NO: 950709 - DNA, 33 bp, Homo sapien
cagtttaaggcacttaagaatcatttacattaa

SEQ ID NO: 950710 - DNA, 33 bp, Homo sapien
cagtttaaggcacttaggaatcatttacattaa

SEQ ID NO: 950711 - DNA, 33 bp, Homo sapien
cgtaagaaaatagaagaaacggactaatgtata

SEQ ID NO: 950712 - DNA, 33 bp, Homo sapien
cgtaagaaaatagaaggaacggactaatgtata

SEQ ID NO: 950713 - DNA, 33 bp, Homo sapien
ttagttaagcatctaactactgtaagaaaagac

SEQ ID NO: 950714 - DNA, 33 bp, Homo sapien
ttagttaagcatctaagtactgtaagaaaagac

SEQ ID NO: 950715 - DNA, 33 bp, Homo sapien
acatttttattagccacagtcatccatagtttc

SEQ ID NO: 950716 - DNA, 33 bp, Homo sapien
acatttttattagccagagtcatccatagtttc

SEQ ID NO: 950717 - DNA, 33 bp, Homo sapien
gttgctaagcttcccaacatcgagatattcctt

SEQ ID NO: 950718 - DNA, 33 bp, Homo sapien
gttgctaagcttcccaccatcgagatattcctt

SEQ ID NO: 950719 - DNA, 33 bp, Homo sapien
gaattaacaatgtgaccaaaataaaagaaaatg

SEQ ID NO: 950720 - DNA, 33 bp, Homo sapien
gaattaacaatgtgacgaaaataaaagaaaatg

SEQ ID NO: 950721 - DNA, 33 bp, Homo sapien
aaagggcagtctgaacaaggaaaaattacatat

SEQ ID NO: 950722 - DNA, 33 bp, Homo sapien
aaagggcagtctgaactaggaaaaattacatat

SEQ ID NO: 950723 - DNA, 33 bp, Homo sapien
ttccaagttgaattaccataacagcatatatac

SEQ ID NO: 950724 - DNA, 33 bp, Homo sapien
ttccaagttgaattacgataacagcatatatac

SEQ ID NO: 950725 - DNA, 33 bp, Homo sapien
cactaaggttcagtcaaagtcatctcctttttt

SEQ ID NO: 950726 - DNA, 33 bp, Homo sapien
cactaaggttcagtcacagtcatctcctttttt

SEQ ID NO: 950727 - DNA, 33 bp, Homo sapien
agcagaaaataatgcaatacccttagccctttg

SEQ ID NO: 950728 - DNA, 33 bp, Homo sapien
agcagaaaataatgcagtacccttagccctttg

SEQ ID NO: 950729 - DNA, 33 bp, Homo sapien
agaagaccaagcactgaatatctttaactgttg

SEQ ID NO: 950730 - DNA, 33 bp, Homo sapien
agaagaccaagcactggatatctttaactgttg

SEQ ID NO: 950731 - DNA, 33 bp, Homo sapien
gttttgaatgtagatgaaagtcagtcaaaactg

SEQ ID NO: 950732 - DNA, 33 bp, Homo sapien
gttttgaatgtagatgtaagtcagtcaaaactg

SEQ ID NO: 950733 - DNA, 33 bp, Homo sapien
taagtcagcataacaaatatgattgaggtataa

SEQ ID NO: 950734 - DNA, 33 bp, Homo sapien
taagtcagcataacaactatgattgaggtataa

SEQ ID NO: 950735 - DNA, 33 bp, Homo sapien
ggttgtggtatgttcacacaacggaatatttat

SEQ ID NO: 950736 - DNA, 33 bp, Homo sapien
ggttgtggtatgttcatacaacggaatatttat

SEQ ID NO: 950737 - DNA, 33 bp, Homo sapien
ggatactgagaagaaccaaaaagcccatacact

SEQ ID NO: 950738 - DNA, 33 bp, Homo sapien
ggatactgagaagaacgaaaaagcccatacact

SEQ ID NO: 950739 - DNA, 33 bp, Homo sapien
aataatttttaccaacactctttgagggtgaat

SEQ ID NO: 950740 - DNA, 33 bp, Homo sapien
aataatttttaccaacgctctttgagggtgaat

SEQ ID NO: 950741 - DNA, 33 bp, Homo sapien
caaataaatgtggaaccgccactgtaattgaga

SEQ ID NO: 950742 - DNA, 33 bp, Homo sapien
caaataaatgtggaactgccactgtaattgaga

SEQ ID NO: 950743 - DNA, 33 bp, Homo sapien
gacagggagacactgaagtatatttatcaggag

SEQ ID NO: 950744 - DNA, 33 bp, Homo sapien
gacagggagacactgaggtatatttatcaggag

SEQ ID NO: 950745 - DNA, 33 bp, Homo sapien
aaatgcagcattctgaaccgcatgaaaccattt

SEQ ID NO: 950746 - DNA, 33 bp, Homo sapien
aaatgcagcattctgatccgcatgaaaccattt

SEQ ID NO: 950747 - DNA, 33 bp, Homo sapien
ttgaataaagagcgaaaaagatttgagaattct

SEQ ID NO: 950748 - DNA, 33 bp, Homo sapien
ttgaataaagagcgaagaagatttgagaattct

SEQ ID NO: 950749 - DNA, 33 bp, Homo sapien
tgtccatcttaaaatacaaccaccgtcacaata

SEQ ID NO: 950750 - DNA, 33 bp, Homo sapien
tgtccatcttaaaatagaaccaccgtcacaata

SEQ ID NO: 950751 - DNA, 33 bp, Homo sapien
taactgcgttgttgtaaaggacttgaccccggt

SEQ ID NO: 950752 - DNA, 33 bp, Homo sapien
taactgcgttgttgtacaggacttgaccccggt

SEQ ID NO: 950753 - DNA, 33 bp, Homo sapien
gagtgtaccgtttctccctatataaactctctg

SEQ ID NO: 950754 - DNA, 33 bp, Homo sapien
gagtgtaccgtttctcgctatataaactctctg

SEQ ID NO: 950755 - DNA, 33 bp, Homo sapien
tgttgagtcagaaaaacttttgcgtctctcttt

SEQ ID NO: 950756 - DNA, 33 bp, Homo sapien
tgttgagtcagaaaaagttttgcgtctctcttt

SEQ ID NO: 950757 - DNA, 33 bp, Homo sapien
caaatacagattctcaacactgccacacctcca

SEQ ID NO: 950758 - DNA, 33 bp, Homo sapien
caaatacagattctcaccactgccacacctcca

SEQ ID NO: 950759 - DNA, 33 bp, Homo sapien
aataatagcattaaacagagaaagcatgaatct

SEQ ID NO: 950760 - DNA, 33 bp, Homo sapien
aataatagcattaaactgagaaagcatgaatct

SEQ ID NO: 950761 - DNA, 33 bp, Homo sapien
tcctgagtaagtggataatattatttgggactg

SEQ ID NO: 950762 - DNA, 33 bp, Homo sapien
tcctgagtaagtggattatattatttgggactg

SEQ ID NO: 950763 - DNA, 33 bp, Homo sapien
catttacaaagacacacgcaaaatgaagctacc

SEQ ID NO: 950764 - DNA, 33 bp, Homo sapien
catttacaaagacacaggcaaaatgaagctacc

SEQ ID NO: 950765 - DNA, 33 bp, Homo sapien
aaggtcaaccagaacacctgcactgaaactttc

SEQ ID NO: 950766 - DNA, 33 bp, Homo sapien
aaggtcaaccagaacagctgcactgaaactttc

SEQ ID NO: 950767 - DNA, 33 bp, Homo sapien
tactttttgttacttgaaacatacacgtggctg

SEQ ID NO: 950768 - DNA, 33 bp, Homo sapien
tactttttgttacttgcaacatacacgtggctg

SEQ ID NO: 950769 - DNA, 33 bp, Homo sapien
tgatcctgagatctaaatcaattgatggagaca

SEQ ID NO: 950770 - DNA, 33 bp, Homo sapien
tgatcctgagatctaactcaattgatggagaca

SEQ ID NO: 950771 - DNA, 33 bp, Homo sapien
ttgactatcacaatcacgtttcttgagcattat

SEQ ID NO: 950772 - DNA, 33 bp, Homo sapien
ttgactatcacaatcatgtttcttgagcattat

SEQ ID NO: 950773 - DNA, 33 bp, Homo sapien
ctacttcacttataacactaaagcactgagagc

SEQ ID NO: 950774 - DNA, 33 bp, Homo sapien
ctacttcacttataacgctaaagcactgagagc

SEQ ID NO: 950775 - DNA, 33 bp, Homo sapien
tatgtttggttttcaactgaagaaaggaattct

SEQ ID NO: 950776 - DNA, 33 bp, Homo sapien
tatgtttggttttcaattgaagaaaggaattct

SEQ ID NO: 950777 - DNA, 33 bp, Homo sapien
ttggttcatgattgcaagatttatacaggatgc

SEQ ID NO: 950778 - DNA, 33 bp, Homo sapien
ttggttcatgattgcaggatttatacaggatgc

SEQ ID NO: 950779 - DNA, 33 bp, Homo sapien
ccatggtatatgtgaaaagtattaggcatggaa

SEQ ID NO: 950780 - DNA, 33 bp, Homo sapien
ccatggtatatgtgaagagtattaggcatggaa

SEQ ID NO: 950781 - DNA, 33 bp, Homo sapien
agtgttcaaagaatgacgggaacatagaaaaag

SEQ ID NO: 950782 - DNA, 33 bp, Homo sapien
agtgttcaaagaatgatgggaacatagaaaaag

SEQ ID NO: 950783 - DNA, 33 bp, Homo sapien
ccataaataggttagcccttcccaatttcacag

SEQ ID NO: 950784 - DNA, 33 bp, Homo sapien
ccataaataggttagctcttcccaatttcacag

SEQ ID NO: 950785 - DNA, 33 bp, Homo sapien
caaggaaggagcgttacaacgaagcccacagtg

SEQ ID NO: 950786 - DNA, 33 bp, Homo sapien
caaggaaggagcgttagaacgaagcccacagtg

SEQ ID NO: 950787 - DNA, 33 bp, Homo sapien
ctctgtcatatgtcccaaacgagctttagggaa

SEQ ID NO: 950788 - DNA, 33 bp, Homo sapien
ctctgtcatatgtcccgaacgagctttagggaa

SEQ ID NO: 950789 - DNA, 33 bp, Homo sapien
acaactaaacttaataccaaacttcagtgaaat

SEQ ID NO: 950790 - DNA, 33 bp, Homo sapien
acaactaaacttaatagcaaacttcagtgaaat

SEQ ID NO: 950791 - DNA, 33 bp, Homo sapien
tgttgaaatgttagtaaaatcagcttaaggtgc

SEQ ID NO: 950792 - DNA, 33 bp, Homo sapien
tgttgaaatgttagtagaatcagcttaaggtgc

SEQ ID NO: 950793 - DNA, 33 bp, Homo sapien
ggttgcttgctgcaaacaaagccctgagaatgg

SEQ ID NO: 950794 - DNA, 33 bp, Homo sapien
ggttgcttgctgcaaataaagccctgagaatgg

SEQ ID NO: 950795 - DNA, 33 bp, Homo sapien
aggttgaagctctaagaccagaaggtttaattt

SEQ ID NO: 950796 - DNA, 33 bp, Homo sapien
aggttgaagctctaagtccagaaggtttaattt

SEQ ID NO: 950797 - DNA, 33 bp, Homo sapien
gttggctctttggtgccaattttcattactatg

SEQ ID NO: 950798 - DNA, 33 bp, Homo sapien
gttggctctttggtgctaattttcattactatg

SEQ ID NO: 950799 - DNA, 33 bp, Homo sapien
gataagtgatgccatacatataatagcagtaag

SEQ ID NO: 950800 - DNA, 33 bp, Homo sapien
gataagtgatgccatagatataatagcagtaag

SEQ ID NO: 950801 - DNA, 33 bp, Homo sapien
agatacagaaattaaaggtgagccatcatcaca

SEQ ID NO: 950802 - DNA, 33 bp, Homo sapien
agatacagaaattaaatgtgagccatcatcaca

SEQ ID NO: 950803 - DNA, 33 bp, Homo sapien
atttttgtttgggtaccaacctcaaagttaaaa

SEQ ID NO: 950804 - DNA, 33 bp, Homo sapien
atttttgtttgggtactaacctcaaagttaaaa

SEQ ID NO: 950805 - DNA, 33 bp, Homo sapien
ggacaaacagtggggaactataatagtcagagg

SEQ ID NO: 950806 - DNA, 33 bp, Homo sapien
ggacaaacagtggggagctataatagtcagagg

SEQ ID NO: 950807 - DNA, 33 bp, Homo sapien
aatgggttatgaaaaccgagaagatacaagcag

SEQ ID NO: 950808 - DNA, 33 bp, Homo sapien
aatgggttatgaaaactgagaagatacaagcag

SEQ ID NO: 950809 - DNA, 33 bp, Homo sapien
ataaagaccaggaagacggagagtacttcacct

SEQ ID NO: 950810 - DNA, 33 bp, Homo sapien
ataaagaccaggaagatggagagtacttcacct

SEQ ID NO: 950811 - DNA, 33 bp, Homo sapien
aatttagataaaggtacacactaaacatccagc

SEQ ID NO: 950812 - DNA, 33 bp, Homo sapien
aatttagataaaggtagacactaaacatccagc

SEQ ID NO: 950813 - DNA, 33 bp, Homo sapien
atacttatccactatacggtctttgacttatct

SEQ ID NO: 950814 - DNA, 33 bp, Homo sapien
atacttatccactatatggtctttgacttatct

SEQ ID NO: 950815 - DNA, 33 bp, Homo sapien
tatttgattcctggacaagatatttgcagtgga

SEQ ID NO: 950816 - DNA, 33 bp, Homo sapien
tatttgattcctggacgagatatttgcagtgga

SEQ ID NO: 950817 - DNA, 33 bp, Homo sapien
cctttcaagacatcaaacagagccaggcgcggt

SEQ ID NO: 950818 - DNA, 33 bp, Homo sapien
cctttcaagacatcaaccagagccaggcgcggt

SEQ ID NO: 950819 - DNA, 33 bp, Homo sapien
atagatttgtaattaaccagagaaaggtgggaa

SEQ ID NO: 950820 - DNA, 33 bp, Homo sapien
atagatttgtaattaagcagagaaaggtgggaa

SEQ ID NO: 950821 - DNA, 33 bp, Homo sapien
aacccaaaaaacagcacacgccaaaacaattag

SEQ ID NO: 950822 - DNA, 33 bp, Homo sapien
aacccaaaaaacagcagacgccaaaacaattag

SEQ ID NO: 950823 - DNA, 33 bp, Homo sapien
taacaacatctcgaacactgatttcattcccca

SEQ ID NO: 950824 - DNA, 33 bp, Homo sapien
taacaacatctcgaacgctgatttcattcccca

SEQ ID NO: 950825 - DNA, 33 bp, Homo sapien
atttccacttttaacacggtgctttggtgattc

SEQ ID NO: 950826 - DNA, 33 bp, Homo sapien
atttccacttttaacatggtgctttggtgattc

SEQ ID NO: 950827 - DNA, 33 bp, Homo sapien
gtaactattaaacatcaagataaaagttttctg

SEQ ID NO: 950828 - DNA, 33 bp, Homo sapien
gtaactattaaacatcgagataaaagttttctg

SEQ ID NO: 950829 - DNA, 33 bp, Homo sapien
aatacacacacttgtaagcattagccacagtac

SEQ ID NO: 950830 - DNA, 33 bp, Homo sapien
aatacacacacttgtaggcattagccacagtac

SEQ ID NO: 950831 - DNA, 33 bp, Homo sapien
taaacgtattcttctacattacgtccaccatga

SEQ ID NO: 950832 - DNA, 33 bp, Homo sapien
taaacgtattcttctatattacgtccaccatga

SEQ ID NO: 950833 - DNA, 33 bp, Homo sapien
cgtcaaatcgtcataaatcaattaaccttgagg

SEQ ID NO: 950834 - DNA, 33 bp, Homo sapien
cgtcaaatcgtcataactcaattaaccttgagg

SEQ ID NO: 950835 - DNA, 33 bp, Homo sapien
caagcttgtctttaaccccaggcacaagtgctc

SEQ ID NO: 950836 - DNA, 33 bp, Homo sapien
caagcttgtctttaactccaggcacaagtgctc

SEQ ID NO: 950837 - DNA, 33 bp, Homo sapien
tctgtaggtttcattgcactatttcataccgta

SEQ ID NO: 950838 - DNA, 33 bp, Homo sapien
tctgtaggtttcattggactatttcataccgta

SEQ ID NO: 950839 - DNA, 33 bp, Homo sapien
cctaatataccacaaactggacaggatggagat

SEQ ID NO: 950840 - DNA, 33 bp, Homo sapien
cctaatataccacaaattggacaggatggagat

SEQ ID NO: 950841 - DNA, 33 bp, Homo sapien
tctacctctgaaaaaactatcaaattgtaattt

SEQ ID NO: 950842 - DNA, 33 bp, Homo sapien
tctacctctgaaaaaagtatcaaattgtaattt

SEQ ID NO: 950843 - DNA, 33 bp, Homo sapien
ctcagacctacacctccccatttctcactctct

SEQ ID NO: 950844 - DNA, 33 bp, Homo sapien
ctcagacctacacctctccatttctcactctct

SEQ ID NO: 950845 - DNA, 33 bp, Homo sapien
gttggggggacggacactggttataaagccttt

SEQ ID NO: 950846 - DNA, 33 bp, Homo sapien
gttggggggacggacattggttataaagccttt

SEQ ID NO: 950847 - DNA, 33 bp, Homo sapien
tttcagcggaaaatcactaaattaacccaataa

SEQ ID NO: 950848 - DNA, 33 bp, Homo sapien
tttcagcggaaaatcagtaaattaacccaataa

SEQ ID NO: 950849 - DNA, 33 bp, Homo sapien
ccgaggccgctccagcaaagtgtgtgcgtgagt

SEQ ID NO: 950850 - DNA, 33 bp, Homo sapien
ccgaggccgctccagcgaagtgtgtgcgtgagt

SEQ ID NO: 950851 - DNA, 33 bp, Homo sapien
aatgttatattttccaacttttcactgatatta

SEQ ID NO: 950852 - DNA, 33 bp, Homo sapien
aatgttatattttccagcttttcactgatatta

SEQ ID NO: 950853 - DNA, 33 bp, Homo sapien
attgtactgtttactcaatgatagactattatt

SEQ ID NO: 950854 - DNA, 33 bp, Homo sapien
attgtactgtttactccatgatagactattatt

SEQ ID NO: 950855 - DNA, 33 bp, Homo sapien
cctgttacttacaactcagagcatatggtggca

SEQ ID NO: 950856 - DNA, 33 bp, Homo sapien
cctgttacttacaacttagagcatatggtggca

SEQ ID NO: 950857 - DNA, 33 bp, Homo sapien
aagaaccgtgtcttcagctgaactaaggaaaag

SEQ ID NO: 950858 - DNA, 33 bp, Homo sapien
aagaaccgtgtcttcatctgaactaaggaaaag

SEQ ID NO: 950859 - DNA, 33 bp, Homo sapien
aaaatataggcaaaaacttaagacaactagtga

SEQ ID NO: 950860 - DNA, 33 bp, Homo sapien
aaaatataggcaaaaatttaagacaactagtga

SEQ ID NO: 950861 - DNA, 33 bp, Homo sapien
gcaaaccatttaaccactctaagtctcagaata

SEQ ID NO: 950862 - DNA, 33 bp, Homo sapien
gcaaaccatttaaccattctaagtctcagaata

SEQ ID NO: 950863 - DNA, 33 bp, Homo sapien
caatgacggcccttaactgaagtgcacactaaa

SEQ ID NO: 950864 - DNA, 33 bp, Homo sapien
caatgacggcccttaattgaagtgcacactaaa

SEQ ID NO: 950865 - DNA, 33 bp, Homo sapien
actttacaagatggtaccaaattattttcccaa

SEQ ID NO: 950866 - DNA, 33 bp, Homo sapien
actttacaagatggtatcaaattattttcccaa

SEQ ID NO: 950867 - DNA, 33 bp, Homo sapien
tgagtcccattcgctacatggggtaattgaggc

SEQ ID NO: 950868 - DNA, 33 bp, Homo sapien
tgagtcccattcgctatatggggtaattgaggc

SEQ ID NO: 950869 - DNA, 33 bp, Homo sapien
ataaagtgaatacaaaaggaacgcgtgatgaat

SEQ ID NO: 950870 - DNA, 33 bp, Homo sapien
ataaagtgaatacaaagggaacgcgtgatgaat

SEQ ID NO: 950871 - DNA, 33 bp, Homo sapien
tctttcttattctcaaatcaacatctcctgata

SEQ ID NO: 950872 - DNA, 33 bp, Homo sapien
tctttcttattctcaattcaacatctcctgata

SEQ ID NO: 950873 - DNA, 33 bp, Homo sapien
aaggtcaggtagatacaaacttcaaacaaacat

SEQ ID NO: 950874 - DNA, 33 bp, Homo sapien
aaggtcaggtagatacgaacttcaaacaaacat

SEQ ID NO: 950875 - DNA, 33 bp, Homo sapien
cacgcacagccagagccctagtttcttaagtct

SEQ ID NO: 950876 - DNA, 33 bp, Homo sapien
cacgcacagccagagctctagtttcttaagtct

SEQ ID NO: 950877 - DNA, 33 bp, Homo sapien
ctcatgaacatattaaaaataactgagtaataa

SEQ ID NO: 950878 - DNA, 33 bp, Homo sapien
ctcatgaacatattaacaataactgagtaataa

SEQ ID NO: 950879 - DNA, 33 bp, Homo sapien
atatatccagtaatggcatcatggggtcaaatg

SEQ ID NO: 950880 - DNA, 33 bp, Homo sapien
atatatccagtaatgggatcatggggtcaaatg

SEQ ID NO: 950881 - DNA, 33 bp, Homo sapien
ccctgtttccctgatgaacattgccatgataat

SEQ ID NO: 950882 - DNA, 33 bp, Homo sapien
ccctgtttccctgatggacattgccatgataat

SEQ ID NO: 950883 - DNA, 33 bp, Homo sapien
agcacattttaaaaaaccaatgtttgcacaccc

SEQ ID NO: 950884 - DNA, 33 bp, Homo sapien
agcacattttaaaaaatcaatgtttgcacaccc

SEQ ID NO: 950885 - DNA, 33 bp, Homo sapien
tattggatattccaacggctaaacaacctctgg

SEQ ID NO: 950886 - DNA, 33 bp, Homo sapien
tattggatattccaactgctaaacaacctctgg

SEQ ID NO: 950887 - DNA, 33 bp, Homo sapien
tttttgataattttacaacatatgcttacataa

SEQ ID NO: 950888 - DNA, 33 bp, Homo sapien
tttttgataattttactacatatgcttacataa

SEQ ID NO: 950889 - DNA, 33 bp, Homo sapien
tgttccacttctaatacctttcacaagactgtc

SEQ ID NO: 950890 - DNA, 33 bp, Homo sapien
tgttccacttctaatagctttcacaagactgtc

SEQ ID NO: 950891 - DNA, 33 bp, Homo sapien
agaagccatgaaacgaaagcaaaagcaaaatag

SEQ ID NO: 950892 - DNA, 33 bp, Homo sapien
agaagccatgaaacgagagcaaaagcaaaatag

SEQ ID NO: 950893 - DNA, 33 bp, Homo sapien
tgtttcagattctacacccagttagcagcttat

SEQ ID NO: 950894 - DNA, 33 bp, Homo sapien
tgtttcagattctacatccagttagcagcttat

SEQ ID NO: 950895 - DNA, 33 bp, Homo sapien
cagcttttggtaaacaaacacttctgggagcct

SEQ ID NO: 950896 - DNA, 33 bp, Homo sapien
cagcttttggtaaacagacacttctgggagcct

SEQ ID NO: 950897 - DNA, 33 bp, Homo sapien
gacaaaattctacgaaccagaaaacaggccctt

SEQ ID NO: 950898 - DNA, 33 bp, Homo sapien
gacaaaattctacgaatcagaaaacaggccctt

SEQ ID NO: 950899 - DNA, 33 bp, Homo sapien
gcaggatgacagtcaacgaatctgcttaatttt

SEQ ID NO: 950900 - DNA, 33 bp, Homo sapien
gcaggatgacagtcaatgaatctgcttaatttt

SEQ ID NO: 950901 - DNA, 33 bp, Homo sapien
atttattaattctgccaatctagtttgacgcac

SEQ ID NO: 950902 - DNA, 33 bp, Homo sapien
atttattaattctgccgatctagtttgacgcac

SEQ ID NO: 950903 - DNA, 33 bp, Homo sapien
gggacggtatcatggaagaagagaaagacaaag

SEQ ID NO: 950904 - DNA, 33 bp, Homo sapien
gggacggtatcatggaggaagagaaagacaaag

SEQ ID NO: 950905 - DNA, 33 bp, Homo sapien
tcctgactccacttgaggcctgcttttatgcaa

SEQ ID NO: 950906 - DNA, 33 bp, Homo sapien
tcctgactccacttgatgcctgcttttatgcaa

SEQ ID NO: 950907 - DNA, 33 bp, Homo sapien
taaaatagtccctgtcaattactgtttaatgaa

SEQ ID NO: 950908 - DNA, 33 bp, Homo sapien
taaaatagtccctgtccattactgtttaatgaa

SEQ ID NO: 950909 - DNA, 33 bp, Homo sapien
aagctatgaagcaccactggatctggccatcaa

SEQ ID NO: 950910 - DNA, 33 bp, Homo sapien
aagctatgaagcaccattggatctggccatcaa

SEQ ID NO: 950911 - DNA, 33 bp, Homo sapien
ctattttattgtatccaactctcatgctagttt

SEQ ID NO: 950912 - DNA, 33 bp, Homo sapien
ctattttattgtatcccactctcatgctagttt

SEQ ID NO: 950913 - DNA, 33 bp, Homo sapien
ttagcaatacttcataggttgtgtcaactttag

SEQ ID NO: 950914 - DNA, 33 bp, Homo sapien
ttagcaatacttcatatgttgtgtcaactttag

SEQ ID NO: 950915 - DNA, 33 bp, Homo sapien
atttttttctgaagacactgatcattgctcacc

SEQ ID NO: 950916 - DNA, 33 bp, Homo sapien
atttttttctgaagactctgatcattgctcacc

SEQ ID NO: 950917 - DNA, 33 bp, Homo sapien
gaaaaggacctggcaaacaccctgtgaaatgct

SEQ ID NO: 950918 - DNA, 33 bp, Homo sapien
gaaaaggacctggcaagcaccctgtgaaatgct

SEQ ID NO: 950919 - DNA, 33 bp, Homo sapien
tctctgctcctttttcgaacaaaatctcttgag

SEQ ID NO: 950920 - DNA, 33 bp, Homo sapien
tctctgctcctttttctaacaaaatctcttgag

SEQ ID NO: 950921 - DNA, 33 bp, Homo sapien
caaatcagaatttggacgcattgacaggcttag

SEQ ID NO: 950922 - DNA, 33 bp, Homo sapien
caaatcagaatttggatgcattgacaggcttag

SEQ ID NO: 950923 - DNA, 33 bp, Homo sapien
cttatcgatctttcagcctaccaaatctctctt

SEQ ID NO: 950924 - DNA, 33 bp, Homo sapien
cttatcgatctttcaggctaccaaatctctctt

SEQ ID NO: 950925 - DNA, 33 bp, Homo sapien
gacctaccagcataaaatgaatatgttataaat

SEQ ID NO: 950926 - DNA, 33 bp, Homo sapien
gacctaccagcataaattgaatatgttataaat

SEQ ID NO: 950927 - DNA, 33 bp, Homo sapien
aaagccacgtcatttaagtagcatatgaatccg

SEQ ID NO: 950928 - DNA, 33 bp, Homo sapien
aaagccacgtcatttatgtagcatatgaatccg

SEQ ID NO: 950929 - DNA, 33 bp, Homo sapien
tcagccctatatcatcaaaatcttgtttcattt

SEQ ID NO: 950930 - DNA, 33 bp, Homo sapien
tcagccctatatcatcgaaatcttgtttcattt

SEQ ID NO: 950931 - DNA, 33 bp, Homo sapien
tggtaattgctcaaaactactggtggattaatg

SEQ ID NO: 950932 - DNA, 33 bp, Homo sapien
tggtaattgctcaaaagtactggtggattaatg

SEQ ID NO: 950933 - DNA, 33 bp, Homo sapien
gccgcccttgttctatcagtgccagagtctgaa

SEQ ID NO: 950934 - DNA, 33 bp, Homo sapien
gccgcccttgttctatgagtgccagagtctgaa

SEQ ID NO: 950935 - DNA, 33 bp, Homo sapien
actccaaccactgttacggtgatcagcattacc

SEQ ID NO: 950936 - DNA, 33 bp, Homo sapien
actccaaccactgttatggtgatcagcattacc

SEQ ID NO: 950937 - DNA, 33 bp, Homo sapien
gtggcttttggttatacaagtgaagcaaagtgt

SEQ ID NO: 950938 - DNA, 33 bp, Homo sapien
gtggcttttggttatagaagtgaagcaaagtgt

SEQ ID NO: 950939 - DNA, 33 bp, Homo sapien
ggtttcataaaatgtacctgctagtgatttgtt

SEQ ID NO: 950940 - DNA, 33 bp, Homo sapien
ggtttcataaaatgtatctgctagtgatttgtt

SEQ ID NO: 950941 - DNA, 33 bp, Homo sapien
tttcaaaacactttcaacacgcaaatgcctcca

SEQ ID NO: 950942 - DNA, 33 bp, Homo sapien
tttcaaaacactttcatcacgcaaatgcctcca

SEQ ID NO: 950943 - DNA, 33 bp, Homo sapien
tgaaacagggcagttaaaaagggcttctcttac

SEQ ID NO: 950944 - DNA, 33 bp, Homo sapien
tgaaacagggcagttagaaagggcttctcttac

SEQ ID NO: 950945 - DNA, 33 bp, Homo sapien
tgtagtttttttcgtgcaaagcaaatttaacaa

SEQ ID NO: 950946 - DNA, 33 bp, Homo sapien
tgtagtttttttcgtggaaagcaaatttaacaa

SEQ ID NO: 950947 - DNA, 33 bp, Homo sapien
gcaagacctcacttatcactgcaaggacagcac

SEQ ID NO: 950948 - DNA, 33 bp, Homo sapien
gcaagacctcacttattactgcaaggacagcac

SEQ ID NO: 950949 - DNA, 33 bp, Homo sapien
aggtgaagaggagacgacatcacatggaaagga

SEQ ID NO: 950950 - DNA, 33 bp, Homo sapien
aggtgaagaggagacggcatcacatggaaagga

SEQ ID NO: 950951 - DNA, 33 bp, Homo sapien
ataagttccttatagactcaggatgttaggcct

SEQ ID NO: 950952 - DNA, 33 bp, Homo sapien
ataagttccttatagattcaggatgttaggcct

SEQ ID NO: 950953 - DNA, 33 bp, Homo sapien
tgatttgcagctactgacactgtttgctgagtt

SEQ ID NO: 950954 - DNA, 33 bp, Homo sapien
tgatttgcagctactgtcactgtttgctgagtt

SEQ ID NO: 950955 - DNA, 33 bp, Homo sapien
tctggaaaatcaggtgcagatcagattgccaag

SEQ ID NO: 950956 - DNA, 33 bp, Homo sapien
tctggaaaatcaggtggagatcagattgccaag

SEQ ID NO: 950957 - DNA, 33 bp, Homo sapien
cactggtcaaatccaactggaacccaggtggca

SEQ ID NO: 950958 - DNA, 33 bp, Homo sapien
cactggtcaaatccaattggaacccaggtggca

SEQ ID NO: 950959 - DNA, 33 bp, Homo sapien
tttggaaaggtgtatcagaaggtcaagagaatg

SEQ ID NO: 950960 - DNA, 33 bp, Homo sapien
tttggaaaggtgtatcggaaggtcaagagaatg

SEQ ID NO: 950961 - DNA, 33 bp, Homo sapien
tagatgaatcaatggaacaaatgaattaataaa

SEQ ID NO: 950962 - DNA, 33 bp, Homo sapien
tagatgaatcaatggagcaaatgaattaataaa

SEQ ID NO: 950963 - DNA, 33 bp, Homo sapien
aatatgagcatagtaacataacaatggaagtca

SEQ ID NO: 950964 - DNA, 33 bp, Homo sapien
aatatgagcatagtaagataacaatggaagtca

SEQ ID NO: 950965 - DNA, 33 bp, Homo sapien
tgaaattaaaaagtcccgctggagagaggtagt

SEQ ID NO: 950966 - DNA, 33 bp, Homo sapien
tgaaattaaaaagtcctgctggagagaggtagt

SEQ ID NO: 950967 - DNA, 33 bp, Homo sapien
caaagactaccttctgaagcaaagggagttttt

SEQ ID NO: 950968 - DNA, 33 bp, Homo sapien
caaagactaccttctggagcaaagggagttttt

SEQ ID NO: 950969 - DNA, 33 bp, Homo sapien
tgatcttatttgaaaaggagttgcaaatgaaat

SEQ ID NO: 950970 - DNA, 33 bp, Homo sapien
tgatcttatttgaaaatgagttgcaaatgaaat

SEQ ID NO: 950971 - DNA, 33 bp, Homo sapien
ggcatagatacagaaaaacatgagaaatttggt

SEQ ID NO: 950972 - DNA, 33 bp, Homo sapien
ggcatagatacagaaagacatgagaaatttggt

SEQ ID NO: 950973 - DNA, 33 bp, Homo sapien
gaaactgcaaaaaaaaatgatgtgttacacttc

SEQ ID NO: 950974 - DNA, 33 bp, Homo sapien
gaaactgcaaaaaaaattgatgtgttacacttc

SEQ ID NO: 950975 - DNA, 33 bp, Homo sapien
ttgagttcttactacacggtcagcactgtaatt

SEQ ID NO: 950976 - DNA, 33 bp, Homo sapien
ttgagttcttactacatggtcagcactgtaatt

SEQ ID NO: 950977 - DNA, 33 bp, Homo sapien
gacagctccatactgacagtgaaagagaaaggc

SEQ ID NO: 950978 - DNA, 33 bp, Homo sapien
gacagctccatactgagagtgaaagagaaaggc

SEQ ID NO: 950979 - DNA, 33 bp, Homo sapien
cctgtctcttcagtgacgcactttcttcacttg

SEQ ID NO: 950980 - DNA, 33 bp, Homo sapien
cctgtctcttcagtgatgcactttcttcacttg

SEQ ID NO: 950981 - DNA, 33 bp, Homo sapien
ttgtggagggcactaacgagttttctttttttt

SEQ ID NO: 950982 - DNA, 33 bp, Homo sapien
ttgtggagggcactaatgagttttctttttttt

SEQ ID NO: 950983 - DNA, 33 bp, Homo sapien
atccaaatacagagtaagtgttgatgtatccat

SEQ ID NO: 950984 - DNA, 33 bp, Homo sapien
atccaaatacagagtatgtgttgatgtatccat

SEQ ID NO: 950985 - DNA, 33 bp, Homo sapien
aatattttcttgcaacacaaattgtacttcttc

SEQ ID NO: 950986 - DNA, 33 bp, Homo sapien
aatattttcttgcaacgcaaattgtacttcttc

SEQ ID NO: 950987 - DNA, 33 bp, Homo sapien
aaagcgttgtagcctgcatatggtcattctgac

SEQ ID NO: 950988 - DNA, 33 bp, Homo sapien
aaagcgttgtagcctgtatatggtcattctgac

SEQ ID NO: 950989 - DNA, 33 bp, Homo sapien
ttgcgatcaaagggacaccagagaaaaggtgga

SEQ ID NO: 950990 - DNA, 33 bp, Homo sapien
ttgcgatcaaagggacgccagagaaaaggtgga

SEQ ID NO: 950991 - DNA, 33 bp, Homo sapien
taggcaagctgctcagaccagaactcagcagcg

SEQ ID NO: 950992 - DNA, 33 bp, Homo sapien
taggcaagctgctcagtccagaactcagcagcg

SEQ ID NO: 950993 - DNA, 33 bp, Homo sapien
tgagttctaggtataaatgctgaatttctcaag

SEQ ID NO: 950994 - DNA, 33 bp, Homo sapien
tgagttctaggtataagtgctgaatttctcaag

SEQ ID NO: 950995 - DNA, 33 bp, Homo sapien
tgagaaagttgcagaaactaaggagatatcatc

SEQ ID NO: 950996 - DNA, 33 bp, Homo sapien
tgagaaagttgcagaatctaaggagatatcatc

SEQ ID NO: 950997 - DNA, 33 bp, Homo sapien
actatataagcttccacactttacctactttgc

SEQ ID NO: 950998 - DNA, 33 bp, Homo sapien
actatataagcttccatactttacctactttgc

SEQ ID NO: 950999 - DNA, 33 bp, Homo sapien
agtaaacacataccaactgacctctggcatttg

SEQ ID NO: 951000 - DNA, 33 bp, Homo sapien
agtaaacacataccaagtgacctctggcatttg

SEQ ID NO: 951001 - DNA, 33 bp, Homo sapien
cgaatttttaaactcaatatatcccgctttttc

SEQ ID NO: 951002 - DNA, 33 bp, Homo sapien
cgaatttttaaactcactatatcccgctttttc

SEQ ID NO: 951003 - DNA, 33 bp, Homo sapien
tgtcttaagtcatatactagctatccaacttag

SEQ ID NO: 951004 - DNA, 33 bp, Homo sapien
tgtcttaagtcatatagtagctatccaacttag

SEQ ID NO: 951005 - DNA, 33 bp, Homo sapien
actgtacacttatctcaatttgtccttagctat

SEQ ID NO: 951006 - DNA, 33 bp, Homo sapien
actgtacacttatctcgatttgtccttagctat

SEQ ID NO: 951007 - DNA, 33 bp, Homo sapien
aaccaggaaaagtcaaatatagcatatgttcat

SEQ ID NO: 951008 - DNA, 33 bp, Homo sapien
aaccaggaaaagtcaagtatagcatatgttcat

SEQ ID NO: 951009 - DNA, 33 bp, Homo sapien
atattttacaaaaacacgtgatcaaaaatagtc

SEQ ID NO: 951010 - DNA, 33 bp, Homo sapien
atattttacaaaaacaggtgatcaaaaatagtc

SEQ ID NO: 951011 - DNA, 33 bp, Homo sapien
attgagaatctaaaaacagacctggtgttatct

SEQ ID NO: 951012 - DNA, 33 bp, Homo sapien
attgagaatctaaaaagagacctggtgttatct

SEQ ID NO: 951013 - DNA, 33 bp, Homo sapien
aacatttggtactggaactatactagggaggtg

SEQ ID NO: 951014 - DNA, 33 bp, Homo sapien
aacatttggtactggatctatactagggaggtg

SEQ ID NO: 951015 - DNA, 33 bp, Homo sapien
tcttggatggaagaagaatctacatcacctcta

SEQ ID NO: 951016 - DNA, 33 bp, Homo sapien
tcttggatggaagaagcatctacatcacctcta

SEQ ID NO: 951017 - DNA, 33 bp, Homo sapien
tattcattcattgcacaaatattgataacttac

SEQ ID NO: 951018 - DNA, 33 bp, Homo sapien
tattcattcattgcacgaatattgataacttac

SEQ ID NO: 951019 - DNA, 33 bp, Homo sapien
cactctctaggcttaaataaaatgcatcccttt

SEQ ID NO: 951020 - DNA, 33 bp, Homo sapien
cactctctaggcttaagtaaaatgcatcccttt

SEQ ID NO: 951021 - DNA, 33 bp, Homo sapien
tcaatcctgtaagactcagaactataccagctc

SEQ ID NO: 951022 - DNA, 33 bp, Homo sapien
tcaatcctgtaagactgagaactataccagctc

SEQ ID NO: 951023 - DNA, 33 bp, Homo sapien
tgtgaacttggacagacatgagtttgctgcaga

SEQ ID NO: 951024 - DNA, 33 bp, Homo sapien
tgtgaacttggacagatatgagtttgctgcaga

SEQ ID NO: 951025 - DNA, 33 bp, Homo sapien
ttattaactgcggtgacaaaggagtaatgaaag

SEQ ID NO: 951026 - DNA, 33 bp, Homo sapien
ttattaactgcggtgagaaaggagtaatgaaag

SEQ ID NO: 951027 - DNA, 33 bp, Homo sapien
cataataacactagcacatattaagtgtgtatc

SEQ ID NO: 951028 - DNA, 33 bp, Homo sapien
cataataacactagcatatattaagtgtgtatc

SEQ ID NO: 951029 - DNA, 33 bp, Homo sapien
agtgatgaaatacaccccgtgaacatctatcat

SEQ ID NO: 951030 - DNA, 33 bp, Homo sapien
agtgatgaaatacacctcgtgaacatctatcat

SEQ ID NO: 951031 - DNA, 33 bp, Homo sapien
accacactttccaatagagcgtgtttcccttcc

SEQ ID NO: 951032 - DNA, 33 bp, Homo sapien
accacactttccaatatagcgtgtttcccttcc

SEQ ID NO: 951033 - DNA, 33 bp, Homo sapien
ttaaatgaggaatacacagtaacagctaccact

SEQ ID NO: 951034 - DNA, 33 bp, Homo sapien
ttaaatgaggaatacatagtaacagctaccact

SEQ ID NO: 951035 - DNA, 33 bp, Homo sapien
gaggaattcttatggacatgagcaatttatagt

SEQ ID NO: 951036 - DNA, 33 bp, Homo sapien
gaggaattcttatggagatgagcaatttatagt

SEQ ID NO: 951037 - DNA, 33 bp, Homo sapien
cttccttattgtttagcacatttcaaattggat

SEQ ID NO: 951038 - DNA, 33 bp, Homo sapien
cttccttattgtttaggacatttcaaattggat

SEQ ID NO: 951039 - DNA, 33 bp, Homo sapien
agtggagaacagctgacagcattagccttatat

SEQ ID NO: 951040 - DNA, 33 bp, Homo sapien
agtggagaacagctgatagcattagccttatat

SEQ ID NO: 951041 - DNA, 33 bp, Homo sapien
tctttccctataactaggttgagaatgtaaaga

SEQ ID NO: 951042 - DNA, 33 bp, Homo sapien
tctttccctataactatgttgagaatgtaaaga

SEQ ID NO: 951043 - DNA, 33 bp, Homo sapien
tctagtcatggcaaaaaatatattacatgaatc

SEQ ID NO: 951044 - DNA, 33 bp, Homo sapien
tctagtcatggcaaaagatatattacatgaatc

SEQ ID NO: 951045 - DNA, 33 bp, Homo sapien
tatataatgcaaaggaccttatgctaatatttg

SEQ ID NO: 951046 - DNA, 33 bp, Homo sapien
tatataatgcaaaggatcttatgctaatatttg

SEQ ID NO: 951047 - DNA, 33 bp, Homo sapien
aaaaccatgaggttaaagcttagaatgaaatat

SEQ ID NO: 951048 - DNA, 33 bp, Homo sapien
aaaaccatgaggttaacgcttagaatgaaatat

SEQ ID NO: 951049 - DNA, 33 bp, Homo sapien
agaatttagtagcttacctatcttacagtactt

SEQ ID NO: 951050 - DNA, 33 bp, Homo sapien
agaatttagtagcttatctatcttacagtactt

SEQ ID NO: 951051 - DNA, 33 bp, Homo sapien
tatgactggaatacaaatgagaatgaaaggaga

SEQ ID NO: 951052 - DNA, 33 bp, Homo sapien
tatgactggaatacaattgagaatgaaaggaga

SEQ ID NO: 951053 - DNA, 33 bp, Homo sapien
cattaaacatttacccaaacccacagaatatac

SEQ ID NO: 951054 - DNA, 33 bp, Homo sapien
cattaaacatttaccctaacccacagaatatac

SEQ ID NO: 951055 - DNA, 33 bp, Homo sapien
caaaagaaatggtgaaagaaataagaagacgac

SEQ ID NO: 951056 - DNA, 33 bp, Homo sapien
caaaagaaatggtgaacgaaataagaagacgac

SEQ ID NO: 951057 - DNA, 33 bp, Homo sapien
tgtatatcttatggtactaaacgatgaaaatag

SEQ ID NO: 951058 - DNA, 33 bp, Homo sapien
tgtatatcttatggtagtaaacgatgaaaatag

SEQ ID NO: 951059 - DNA, 33 bp, Homo sapien
ctgaaaaattcttaccacctaatactgaagggc

SEQ ID NO: 951060 - DNA, 33 bp, Homo sapien
ctgaaaaattcttaccgcctaatactgaagggc

SEQ ID NO: 951061 - DNA, 33 bp, Homo sapien
aacaacagactccatacacaaagacggtcccat

SEQ ID NO: 951062 - DNA, 33 bp, Homo sapien
aacaacagactccatatacaaagacggtcccat

SEQ ID NO: 951063 - DNA, 33 bp, Homo sapien
ctcatcaatatacccaaaacagtagaaagtgac

SEQ ID NO: 951064 - DNA, 33 bp, Homo sapien
ctcatcaatatacccagaacagtagaaagtgac

SEQ ID NO: 951065 - DNA, 33 bp, Homo sapien
ccaagaggtcacttaaagtagtcgcccacagtg

SEQ ID NO: 951066 - DNA, 33 bp, Homo sapien
ccaagaggtcacttaacgtagtcgcccacagtg

SEQ ID NO: 951067 - DNA, 33 bp, Homo sapien
cattagcttgcctgataagaataatgggccata

SEQ ID NO: 951068 - DNA, 33 bp, Homo sapien
cattagcttgcctgatgagaataatgggccata

SEQ ID NO: 951069 - DNA, 33 bp, Homo sapien
cactaatggtgatatacaattagtaggctagat

SEQ ID NO: 951070 - DNA, 33 bp, Homo sapien
cactaatggtgatatagaattagtaggctagat

SEQ ID NO: 951071 - DNA, 33 bp, Homo sapien
tcaaaattaacctgagaaaatgtttcaattaaa

SEQ ID NO: 951072 - DNA, 33 bp, Homo sapien
tcaaaattaacctgaggaaatgtttcaattaaa

SEQ ID NO: 951073 - DNA, 33 bp, Homo sapien
aatacagagatacttacgtttgatggcctttgg

SEQ ID NO: 951074 - DNA, 33 bp, Homo sapien
aatacagagatacttatgtttgatggcctttgg

SEQ ID NO: 951075 - DNA, 33 bp, Homo sapien
aaatagacggttaaagcaggatgccttgagcca

SEQ ID NO: 951076 - DNA, 33 bp, Homo sapien
aaatagacggttaaaggaggatgccttgagcca

SEQ ID NO: 951077 - DNA, 33 bp, Homo sapien
ggcaatagcagcaacaatactatttacggtatg

SEQ ID NO: 951078 - DNA, 33 bp, Homo sapien
ggcaatagcagcaacagtactatttacggtatg

SEQ ID NO: 951079 - DNA, 33 bp, Homo sapien
caatggacttgctcaaggtttaaatgctctaca

SEQ ID NO: 951080 - DNA, 33 bp, Homo sapien
caatggacttgctcaatgtttaaatgctctaca

SEQ ID NO: 951081 - DNA, 33 bp, Homo sapien
aagcctccattcccaactattatgataaaattc

SEQ ID NO: 951082 - DNA, 33 bp, Homo sapien
aagcctccattcccaagtattatgataaaattc

SEQ ID NO: 951083 - DNA, 33 bp, Homo sapien
ggtagttgccctgaaagttgagacaatctaaaa

SEQ ID NO: 951084 - DNA, 33 bp, Homo sapien
ggtagttgccctgaaatttgagacaatctaaaa

SEQ ID NO: 951085 - DNA, 33 bp, Homo sapien
tcctatacccaattaaaaaaatcatccagctcc

SEQ ID NO: 951086 - DNA, 33 bp, Homo sapien
tcctatacccaattaagaaaatcatccagctcc

SEQ ID NO: 951087 - DNA, 33 bp, Homo sapien
cattaaatgtaggtcaccatgatcctaagctct

SEQ ID NO: 951088 - DNA, 33 bp, Homo sapien
cattaaatgtaggtcagcatgatcctaagctct

SEQ ID NO: 951089 - DNA, 33 bp, Homo sapien
aactttgccaagagaacagcactcagcaaatgg

SEQ ID NO: 951090 - DNA, 33 bp, Homo sapien
aactttgccaagagaatagcactcagcaaatgg

SEQ ID NO: 951091 - DNA, 33 bp, Homo sapien
aaacgatctaacactcaaatgaaaaaccaaaca

SEQ ID NO: 951092 - DNA, 33 bp, Homo sapien
aaacgatctaacactccaatgaaaaaccaaaca

SEQ ID NO: 951093 - DNA, 33 bp, Homo sapien
tcactaagagaattcaataccacaagactggcc

SEQ ID NO: 951094 - DNA, 33 bp, Homo sapien
tcactaagagaattcattaccacaagactggcc

SEQ ID NO: 951095 - DNA, 33 bp, Homo sapien
gcccagactgctcttacacttcccttcaactgt

SEQ ID NO: 951096 - DNA, 33 bp, Homo sapien
gcccagactgctcttatacttcccttcaactgt

SEQ ID NO: 951097 - DNA, 33 bp, Homo sapien
tattcacaggagcaaaaaaatggaattaaccta

SEQ ID NO: 951098 - DNA, 33 bp, Homo sapien
tattcacaggagcaaagaaatggaattaaccta

SEQ ID NO: 951099 - DNA, 33 bp, Homo sapien
ggtacttcagatggaaaagactctaatgttacc

SEQ ID NO: 951100 - DNA, 33 bp, Homo sapien
ggtacttcagatggaagagactctaatgttacc

SEQ ID NO: 951101 - DNA, 33 bp, Homo sapien
tgttccatctttgctcccgcagaaatatattca

SEQ ID NO: 951102 - DNA, 33 bp, Homo sapien
tgttccatctttgctctcgcagaaatatattca

SEQ ID NO: 951103 - DNA, 33 bp, Homo sapien
gatcttaaatatgcaacgtaaaatgagttttga

SEQ ID NO: 951104 - DNA, 33 bp, Homo sapien
gatcttaaatatgcaatgtaaaatgagttttga

SEQ ID NO: 951105 - DNA, 33 bp, Homo sapien
acctatcagctagtggaaatgtagtcatgatac

SEQ ID NO: 951106 - DNA, 33 bp, Homo sapien
acctatcagctagtgggaatgtagtcatgatac

SEQ ID NO: 951107 - DNA, 33 bp, Homo sapien
ttctttgtgagcagacagagataggtaggcgtc

SEQ ID NO: 951108 - DNA, 33 bp, Homo sapien
ttctttgtgagcagaccgagataggtaggcgtc

SEQ ID NO: 951109 - DNA, 33 bp, Homo sapien
tgctatacggaaaagccatatacacttgaaaaa

SEQ ID NO: 951110 - DNA, 33 bp, Homo sapien
tgctatacggaaaagctatatacacttgaaaaa

SEQ ID NO: 951111 - DNA, 33 bp, Homo sapien
gcatacaggcaagtaaataaatgtaagcaagaa

SEQ ID NO: 951112 - DNA, 33 bp, Homo sapien
gcatacaggcaagtaagtaaatgtaagcaagaa

SEQ ID NO: 951113 - DNA, 33 bp, Homo sapien
gtctcatagactggaactggaaatacaaatttt

SEQ ID NO: 951114 - DNA, 33 bp, Homo sapien
gtctcatagactggaattggaaatacaaatttt

SEQ ID NO: 951115 - DNA, 33 bp, Homo sapien
ggtgtggcatttacagactaaaggaagaggaag

SEQ ID NO: 951116 - DNA, 33 bp, Homo sapien
ggtgtggcatttacagtctaaaggaagaggaag

SEQ ID NO: 951117 - DNA, 33 bp, Homo sapien
tagtatgttcttaggggcaaattttatacacat

SEQ ID NO: 951118 - DNA, 33 bp, Homo sapien
tagtatgttcttagggtcaaattttatacacat

SEQ ID NO: 951119 - DNA, 33 bp, Homo sapien
ggaaaaagttcagaaaataggtcattcaacaac

SEQ ID NO: 951120 - DNA, 33 bp, Homo sapien
ggaaaaagttcagaaagtaggtcattcaacaac

SEQ ID NO: 951121 - DNA, 33 bp, Homo sapien
gcactgtagttatccacagtagtagtctgcatg

SEQ ID NO: 951122 - DNA, 33 bp, Homo sapien
gcactgtagttatccatagtagtagtctgcatg

SEQ ID NO: 951123 - DNA, 33 bp, Homo sapien
tggatatagtgggttaagtttgctcgaaaatgg

SEQ ID NO: 951124 - DNA, 33 bp, Homo sapien
tggatatagtgggttaggtttgctcgaaaatgg

SEQ ID NO: 951125 - DNA, 33 bp, Homo sapien
ttttacctggattcaaagattgaggatttgatg

SEQ ID NO: 951126 - DNA, 33 bp, Homo sapien
ttttacctggattcaaggattgaggatttgatg

SEQ ID NO: 951127 - DNA, 33 bp, Homo sapien
actttcacatacattacggtatttcttcctcac

SEQ ID NO: 951128 - DNA, 33 bp, Homo sapien
actttcacatacattatggtatttcttcctcac

SEQ ID NO: 951129 - DNA, 33 bp, Homo sapien
ttcttgagtcagttcaataagtgtttgcttttt

SEQ ID NO: 951130 - DNA, 33 bp, Homo sapien
ttcttgagtcagttcagtaagtgtttgcttttt

SEQ ID NO: 951131 - DNA, 33 bp, Homo sapien
tggcttctctatagacaactgttacattaggga

SEQ ID NO: 951132 - DNA, 33 bp, Homo sapien
tggcttctctatagaccactgttacattaggga

SEQ ID NO: 951133 - DNA, 33 bp, Homo sapien
tgaacacagaccaaaacactgttagacactatc

SEQ ID NO: 951134 - DNA, 33 bp, Homo sapien
tgaacacagaccaaaagactgttagacactatc

SEQ ID NO: 951135 - DNA, 33 bp, Homo sapien
ttaagtataaatacgaatcccagaagagagagg

SEQ ID NO: 951136 - DNA, 33 bp, Homo sapien
ttaagtataaatacgagtcccagaagagagagg

SEQ ID NO: 951137 - DNA, 33 bp, Homo sapien
agagaggttatgggtacgtttttggattcccaa

SEQ ID NO: 951138 - DNA, 33 bp, Homo sapien
agagaggttatgggtatgtttttggattcccaa

SEQ ID NO: 951139 - DNA, 33 bp, Homo sapien
caaggaaggattcccacaaaggtctcacaagta

SEQ ID NO: 951140 - DNA, 33 bp, Homo sapien
caaggaaggattcccataaaggtctcacaagta

SEQ ID NO: 951141 - DNA, 33 bp, Homo sapien
tttctcttgctttccaaactaataagcatcttg

SEQ ID NO: 951142 - DNA, 33 bp, Homo sapien
tttctcttgctttccacactaataagcatcttg

SEQ ID NO: 951143 - DNA, 33 bp, Homo sapien
aaagacataaaaagcactgaatatagcaaacca

SEQ ID NO: 951144 - DNA, 33 bp, Homo sapien
aaagacataaaaagcattgaatatagcaaacca

SEQ ID NO: 951145 - DNA, 33 bp, Homo sapien
atatataatctgttgacgggatttcatgcagac

SEQ ID NO: 951146 - DNA, 33 bp, Homo sapien
atatataatctgttgatgggatttcatgcagac

SEQ ID NO: 951147 - DNA, 33 bp, Homo sapien
ggattttatgatgtcaatgaaaaccttagaata

SEQ ID NO: 951148 - DNA, 33 bp, Homo sapien
ggattttatgatgtcattgaaaaccttagaata

SEQ ID NO: 951149 - DNA, 33 bp, Homo sapien
aaaaaggccttaacaacgacctgttagttacca

SEQ ID NO: 951150 - DNA, 33 bp, Homo sapien
aaaaaggccttaacaatgacctgttagttacca

SEQ ID NO: 951151 - DNA, 33 bp, Homo sapien
tgacttggcaacatgacacagataggaaaaaca

SEQ ID NO: 951152 - DNA, 33 bp, Homo sapien
tgacttggcaacatgatacagataggaaaaaca

SEQ ID NO: 951153 - DNA, 33 bp, Homo sapien
ggtcaggatttagcacaagtgcttctgttcttt

SEQ ID NO: 951154 - DNA, 33 bp, Homo sapien
ggtcaggatttagcacgagtgcttctgttcttt

SEQ ID NO: 951155 - DNA, 33 bp, Homo sapien
ctgtgtaagcgacttcacatttaccttcagttt

SEQ ID NO: 951156 - DNA, 33 bp, Homo sapien
ctgtgtaagcgacttcccatttaccttcagttt

SEQ ID NO: 951157 - DNA, 33 bp, Homo sapien
gtactgactgggatgaacaaatttgcagttcct

SEQ ID NO: 951158 - DNA, 33 bp, Homo sapien
gtactgactgggatgagcaaatttgcagttcct

SEQ ID NO: 951159 - DNA, 33 bp, Homo sapien
gatggactgcaggaggcattgagctgtaagatg

SEQ ID NO: 951160 - DNA, 33 bp, Homo sapien
gatggactgcaggagggattgagctgtaagatg

SEQ ID NO: 951161 - DNA, 33 bp, Homo sapien
attgtccagctaaccacacaatttggtcaacat

SEQ ID NO: 951162 - DNA, 33 bp, Homo sapien
attgtccagctaaccatacaatttggtcaacat

SEQ ID NO: 951163 - DNA, 33 bp, Homo sapien
ccttcatagtccttgaaagttctggcattaagt

SEQ ID NO: 951164 - DNA, 33 bp, Homo sapien
ccttcatagtccttgacagttctggcattaagt

SEQ ID NO: 951165 - DNA, 33 bp, Homo sapien
atagctgctccttgaacggatagtccagaacac

SEQ ID NO: 951166 - DNA, 33 bp, Homo sapien
atagctgctccttgaatggatagtccagaacac

SEQ ID NO: 951167 - DNA, 33 bp, Homo sapien
tgtagctttcttctgacaccaccacttgacaac

SEQ ID NO: 951168 - DNA, 33 bp, Homo sapien
tgtagctttcttctgataccaccacttgacaac

SEQ ID NO: 951169 - DNA, 33 bp, Homo sapien
catgttcttaacttgccacagttttcattgtct

SEQ ID NO: 951170 - DNA, 33 bp, Homo sapien
catgttcttaacttgctacagttttcattgtct

SEQ ID NO: 951171 - DNA, 33 bp, Homo sapien
tgagccatcacatttacgaaaaaacacaagata

SEQ ID NO: 951172 - DNA, 33 bp, Homo sapien
tgagccatcacatttatgaaaaaacacaagata

SEQ ID NO: 951173 - DNA, 33 bp, Homo sapien
cctctttctactcttacgtggtgtgtcttcaca

SEQ ID NO: 951174 - DNA, 33 bp, Homo sapien
cctctttctactcttatgtggtgtgtcttcaca

SEQ ID NO: 951175 - DNA, 33 bp, Homo sapien
gtaactaacctcatgaaggtaaacttttagaag

SEQ ID NO: 951176 - DNA, 33 bp, Homo sapien
gtaactaacctcatgacggtaaacttttagaag

SEQ ID NO: 951177 - DNA, 33 bp, Homo sapien
gatccaggcttgaagtcactgatgaccctgaga

SEQ ID NO: 951178 - DNA, 33 bp, Homo sapien
gatccaggcttgaagttactgatgaccctgaga

SEQ ID NO: 951179 - DNA, 33 bp, Homo sapien
gtcttccatgttcttaccttcgtggaagatgta

SEQ ID NO: 951180 - DNA, 33 bp, Homo sapien
gtcttccatgttcttagcttcgtggaagatgta

SEQ ID NO: 951181 - DNA, 33 bp, Homo sapien
gttttccttaaggcaacgagaagtctggcattg

SEQ ID NO: 951182 - DNA, 33 bp, Homo sapien
gttttccttaaggcaaggagaagtctggcattg

SEQ ID NO: 951183 - DNA, 33 bp, Homo sapien
ttgacaaattttgagacggctgccacatggcca

SEQ ID NO: 951184 - DNA, 33 bp, Homo sapien
ttgacaaattttgagatggctgccacatggcca

SEQ ID NO: 951185 - DNA, 33 bp, Homo sapien
gagaatgtctataagcgccacacgatcatgtct

SEQ ID NO: 951186 - DNA, 33 bp, Homo sapien
gagaatgtctataagctccacacgatcatgtct

SEQ ID NO: 951187 - DNA, 33 bp, Homo sapien
gcttcttatttaactcagaaactggaagtaatc

SEQ ID NO: 951188 - DNA, 33 bp, Homo sapien
gcttcttatttaactcggaaactggaagtaatc

SEQ ID NO: 951189 - DNA, 33 bp, Homo sapien
ctgttatttgaaagcacaacgtagtgaaataaa

SEQ ID NO: 951190 - DNA, 33 bp, Homo sapien
ctgttatttgaaagcataacgtagtgaaataaa

SEQ ID NO: 951191 - DNA, 33 bp, Homo sapien
cttctaaggaactccacctttgagtgctaaagt

SEQ ID NO: 951192 - DNA, 33 bp, Homo sapien
cttctaaggaactccatctttgagtgctaaagt

SEQ ID NO: 951193 - DNA, 33 bp, Homo sapien
agcccctgacttataccggtgactctaggaatg

SEQ ID NO: 951194 - DNA, 33 bp, Homo sapien
agcccctgacttatactggtgactctaggaatg

SEQ ID NO: 951195 - DNA, 33 bp, Homo sapien
gagagaaaggaagaacaagtagcagtcaagatg

SEQ ID NO: 951196 - DNA, 33 bp, Homo sapien
gagagaaaggaagaacgagtagcagtcaagatg

SEQ ID NO: 951197 - DNA, 33 bp, Homo sapien
gcccctactcaggaaaatcatacattagtcatt

SEQ ID NO: 951198 - DNA, 33 bp, Homo sapien
gcccctactcaggaaagtcatacattagtcatt

SEQ ID NO: 951199 - DNA, 33 bp, Homo sapien
cctcatccttctccaccattacctctatgcaga

SEQ ID NO: 951200 - DNA, 33 bp, Homo sapien
cctcatccttctccacgattacctctatgcaga

SEQ ID NO: 951201 - DNA, 33 bp, Homo sapien
catcacagtagcttctctaaccattttgcatca

SEQ ID NO: 951202 - DNA, 33 bp, Homo sapien
catcacagtagcttctgtaaccattttgcatca

SEQ ID NO: 951203 - DNA, 33 bp, Homo sapien
ttgtgagttctgaattggaagagcatcacagta

SEQ ID NO: 951204 - DNA, 33 bp, Homo sapien
ttgtgagttctgaatttgaagagcatcacagta

SEQ ID NO: 951205 - DNA, 33 bp, Homo sapien
ttcacattatacgtaacacttcaaggcacttat

SEQ ID NO: 951206 - DNA, 33 bp, Homo sapien
ttcacattatacgtaatacttcaaggcacttat

SEQ ID NO: 951207 - DNA, 33 bp, Homo sapien
agctctcaatccttgactaaattctgactaaat

SEQ ID NO: 951208 - DNA, 33 bp, Homo sapien
agctctcaatccttgattaaattctgactaaat

SEQ ID NO: 951209 - DNA, 33 bp, Homo sapien
cagctggacaatgagcagaccatatattataac

SEQ ID NO: 951210 - DNA, 33 bp, Homo sapien
cagctggacaatgagcggaccatatattataac

SEQ ID NO: 951211 - DNA, 33 bp, Homo sapien
tatatcaacatctgtaagtgaccataaactctt

SEQ ID NO: 951212 - DNA, 33 bp, Homo sapien
tatatcaacatctgtaggtgaccataaactctt

SEQ ID NO: 951213 - DNA, 33 bp, Homo sapien
actactagagaagttgcaagagtggcttgtaga

SEQ ID NO: 951214 - DNA, 33 bp, Homo sapien
actactagagaagttgtaagagtggcttgtaga

SEQ ID NO: 951215 - DNA, 33 bp, Homo sapien
atgtgatagatatctacaaactctccattcaaa

SEQ ID NO: 951216 - DNA, 33 bp, Homo sapien
atgtgatagatatctagaaactctccattcaaa

SEQ ID NO: 951217 - DNA, 33 bp, Homo sapien
ctacatcctaagagaacgagtatgaatccttcc

SEQ ID NO: 951218 - DNA, 33 bp, Homo sapien
ctacatcctaagagaatgagtatgaatccttcc

SEQ ID NO: 951219 - DNA, 33 bp, Homo sapien
agaaggcttgcaattacgaacctcagagcttat

SEQ ID NO: 951220 - DNA, 33 bp, Homo sapien
agaaggcttgcaattatgaacctcagagcttat

SEQ ID NO: 951221 - DNA, 33 bp, Homo sapien
tttcaaagaattgtcaataccaaaggaccttct

SEQ ID NO: 951222 - DNA, 33 bp, Homo sapien
tttcaaagaattgtcagtaccaaaggaccttct

SEQ ID NO: 951223 - DNA, 33 bp, Homo sapien
ctcaagagtttctctacacagtaaggctcccta

SEQ ID NO: 951224 - DNA, 33 bp, Homo sapien
ctcaagagtttctctatacagtaaggctcccta

SEQ ID NO: 951225 - DNA, 33 bp, Homo sapien
tgtgtcttgtgacacaatatccaagagggaaga

SEQ ID NO: 951226 - DNA, 33 bp, Homo sapien
tgtgtcttgtgacacagtatccaagagggaaga

SEQ ID NO: 951227 - DNA, 33 bp, Homo sapien
agtcctcagagtatcacatattcatgctgccac

SEQ ID NO: 951228 - DNA, 33 bp, Homo sapien
agtcctcagagtatcagatattcatgctgccac

SEQ ID NO: 951229 - DNA, 33 bp, Homo sapien
ttttaagaccactcacaatcatctcagggatag

SEQ ID NO: 951230 - DNA, 33 bp, Homo sapien
ttttaagaccactcacgatcatctcagggatag

SEQ ID NO: 951231 - DNA, 33 bp, Homo sapien
tggagcagaacataagccaatacttagcccaca

SEQ ID NO: 951232 - DNA, 33 bp, Homo sapien
tggagcagaacataaggcaatacttagcccaca

SEQ ID NO: 951233 - DNA, 33 bp, Homo sapien
aggagttttgatttaagtgagggtttcatgagc

SEQ ID NO: 951234 - DNA, 33 bp, Homo sapien
aggagttttgatttaattgagggtttcatgagc

SEQ ID NO: 951235 - DNA, 33 bp, Homo sapien
ttaatcttttggggaacggaaataatctaatgt

SEQ ID NO: 951236 - DNA, 33 bp, Homo sapien
ttaatcttttggggaatggaaataatctaatgt

SEQ ID NO: 951237 - DNA, 33 bp, Homo sapien
acattatctcagggcacagaaagtatttggagt

SEQ ID NO: 951238 - DNA, 33 bp, Homo sapien
acattatctcagggcatagaaagtatttggagt

SEQ ID NO: 951239 - DNA, 33 bp, Homo sapien
tcagttgtttcaggggacccaattcactccaaa

SEQ ID NO: 951240 - DNA, 33 bp, Homo sapien
tcagttgtttcaggggtcccaattcactccaaa

SEQ ID NO: 951241 - DNA, 33 bp, Homo sapien
gcagcataaaatggaccagtacagcagttttgt

SEQ ID NO: 951242 - DNA, 33 bp, Homo sapien
gcagcataaaatggactagtacagcagttttgt

SEQ ID NO: 951243 - DNA, 33 bp, Homo sapien
ttttgcacaacagagaagtttgcaaaatcacaa

SEQ ID NO: 951244 - DNA, 33 bp, Homo sapien
ttttgcacaacagagacgtttgcaaaatcacaa

SEQ ID NO: 951245 - DNA, 33 bp, Homo sapien
attggtgatttatatgcagcaattaatattttc

SEQ ID NO: 951246 - DNA, 33 bp, Homo sapien
attggtgatttatatgtagcaattaatattttc

SEQ ID NO: 951247 - DNA, 33 bp, Homo sapien
gactccaagttgaagactctggactccagtctc

SEQ ID NO: 951248 - DNA, 33 bp, Homo sapien
gactccaagttgaagattctggactccagtctc

SEQ ID NO: 951249 - DNA, 33 bp, Homo sapien
tgctatgactggctaactcctccagccttctgg

SEQ ID NO: 951250 - DNA, 33 bp, Homo sapien
tgctatgactggctaattcctccagccttctgg

SEQ ID NO: 951251 - DNA, 33 bp, Homo sapien
tgccctttctgaaagccaaattactacaaagat

SEQ ID NO: 951252 - DNA, 33 bp, Homo sapien
tgccctttctgaaagcgaaattactacaaagat

SEQ ID NO: 951253 - DNA, 33 bp, Homo sapien
agaattagatgccaaaaacaaaataacaaaaca

SEQ ID NO: 951254 - DNA, 33 bp, Homo sapien
agaattagatgccaaagacaaaataacaaaaca

SEQ ID NO: 951255 - DNA, 33 bp, Homo sapien
aaagataggcaataaaaagctggtaaggatttg

SEQ ID NO: 951256 - DNA, 33 bp, Homo sapien
aaagataggcaataaagagctggtaaggatttg

SEQ ID NO: 951257 - DNA, 33 bp, Homo sapien
tttattagaacacgtacggtatgtatatgaaat

SEQ ID NO: 951258 - DNA, 33 bp, Homo sapien
tttattagaacacgtatggtatgtatatgaaat

SEQ ID NO: 951259 - DNA, 33 bp, Homo sapien
tcttaatgcaaatgtacgacgtttgactgacta

SEQ ID NO: 951260 - DNA, 33 bp, Homo sapien
tcttaatgcaaatgtatgacgtttgactgacta

SEQ ID NO: 951261 - DNA, 33 bp, Homo sapien
agaccatttctgtttacagagcgcttacaactg

SEQ ID NO: 951262 - DNA, 33 bp, Homo sapien
agaccatttctgtttatagagcgcttacaactg

SEQ ID NO: 951263 - DNA, 33 bp, Homo sapien
ctctccatcacagccaagttgggatcataaact

SEQ ID NO: 951264 - DNA, 33 bp, Homo sapien
ctctccatcacagccaggttgggatcataaact

SEQ ID NO: 951265 - DNA, 33 bp, Homo sapien
gcatctctgaagaaataactaagttgaattcag

SEQ ID NO: 951266 - DNA, 33 bp, Homo sapien
gcatctctgaagaaatcactaagttgaattcag

SEQ ID NO: 951267 - DNA, 33 bp, Homo sapien
gttaaatccagcaagacgtactttatacaagag

SEQ ID NO: 951268 - DNA, 33 bp, Homo sapien
gttaaatccagcaagatgtactttatacaagag

SEQ ID NO: 951269 - DNA, 33 bp, Homo sapien
taggcttgtctaaggacgcatccactttcctgt

SEQ ID NO: 951270 - DNA, 33 bp, Homo sapien
taggcttgtctaaggaggcatccactttcctgt

SEQ ID NO: 951271 - DNA, 33 bp, Homo sapien
tatattttccctctcacacaagctgtaaagtca

SEQ ID NO: 951272 - DNA, 33 bp, Homo sapien
tatattttccctctcatacaagctgtaaagtca

SEQ ID NO: 951273 - DNA, 33 bp, Homo sapien
agcacaacagtgagtcaaaagaaatgtaaagga

SEQ ID NO: 951274 - DNA, 33 bp, Homo sapien
agcacaacagtgagtcgaaagaaatgtaaagga

SEQ ID NO: 951275 - DNA, 33 bp, Homo sapien
atcaaagaaagagtggcacagcttaggcttgtt

SEQ ID NO: 951276 - DNA, 33 bp, Homo sapien
atcaaagaaagagtgggacagcttaggcttgtt

SEQ ID NO: 951277 - DNA, 33 bp, Homo sapien
caaatatattttaaaaaaagttgtgtgctggtt

SEQ ID NO: 951278 - DNA, 33 bp, Homo sapien
caaatatattttaaaagaagttgtgtgctggtt

SEQ ID NO: 951279 - DNA, 33 bp, Homo sapien
tctcaatagaatagacagaatgatggaaactat

SEQ ID NO: 951280 - DNA, 33 bp, Homo sapien
tctcaatagaatagacggaatgatggaaactat

SEQ ID NO: 951281 - DNA, 33 bp, Homo sapien
cgttcttctccttgtaacactaaccatcacttt

SEQ ID NO: 951282 - DNA, 33 bp, Homo sapien
cgttcttctccttgtaccactaaccatcacttt

SEQ ID NO: 951283 - DNA, 33 bp, Homo sapien
gttaaaaacaaagaaacagtacatgcatcagcc

SEQ ID NO: 951284 - DNA, 33 bp, Homo sapien
gttaaaaacaaagaaagagtacatgcatcagcc

SEQ ID NO: 951285 - DNA, 33 bp, Homo sapien
gtctcctagtacaaccaggaagaagtaataggt

SEQ ID NO: 951286 - DNA, 33 bp, Homo sapien
gtctcctagtacaaccgggaagaagtaataggt

SEQ ID NO: 951287 - DNA, 33 bp, Homo sapien
gtgcaactctagtataccatcactcgacagcag

SEQ ID NO: 951288 - DNA, 33 bp, Homo sapien
gtgcaactctagtatagcatcactcgacagcag

SEQ ID NO: 951289 - DNA, 33 bp, Homo sapien
cagtagtgatttatacagaaaatttgctttttt

SEQ ID NO: 951290 - DNA, 33 bp, Homo sapien
cagtagtgatttatacggaaaatttgctttttt

SEQ ID NO: 951291 - DNA, 33 bp, Homo sapien
aaagaactctgcactaaatggatgattgctagc

SEQ ID NO: 951292 - DNA, 33 bp, Homo sapien
aaagaactctgcactatatggatgattgctagc

SEQ ID NO: 951293 - DNA, 33 bp, Homo sapien
ttaaatatcattaagacgggtccaatgtacaga

SEQ ID NO: 951294 - DNA, 33 bp, Homo sapien
ttaaatatcattaagatgggtccaatgtacaga

SEQ ID NO: 951295 - DNA, 33 bp, Homo sapien
cctttaccaagctccccagatgactctaattca

SEQ ID NO: 951296 - DNA, 33 bp, Homo sapien
cctttaccaagctccctagatgactctaattca

SEQ ID NO: 951297 - DNA, 33 bp, Homo sapien
gatgtgagaaagctccaatttatttttctataa

SEQ ID NO: 951298 - DNA, 33 bp, Homo sapien
gatgtgagaaagctccgatttatttttctataa

SEQ ID NO: 951299 - DNA, 33 bp, Homo sapien
tgtaccaaagcaaggcccagtatgccagaaaaa

SEQ ID NO: 951300 - DNA, 33 bp, Homo sapien
tgtaccaaagcaaggctcagtatgccagaaaaa

SEQ ID NO: 951301 - DNA, 33 bp, Homo sapien
tagcttccttctactgcagcacttggtctggca

SEQ ID NO: 951302 - DNA, 33 bp, Homo sapien
tagcttccttctactggagcacttggtctggca

SEQ ID NO: 951303 - DNA, 33 bp, Homo sapien
tcagtaagttttgtccaatgttcatacccacac

SEQ ID NO: 951304 - DNA, 33 bp, Homo sapien
tcagtaagttttgtcctatgttcatacccacac

SEQ ID NO: 951305 - DNA, 33 bp, Homo sapien
aattttcttttagacaaaactatgaactaagaa

SEQ ID NO: 951306 - DNA, 33 bp, Homo sapien
aattttcttttagacagaactatgaactaagaa

SEQ ID NO: 951307 - DNA, 33 bp, Homo sapien
gggttagagcatgagacctgtttaaactaaaga

SEQ ID NO: 951308 - DNA, 33 bp, Homo sapien
gggttagagcatgagagctgtttaaactaaaga

SEQ ID NO: 951309 - DNA, 33 bp, Homo sapien
aaacctctaaacaatacagccattttgagtcta

SEQ ID NO: 951310 - DNA, 33 bp, Homo sapien
aaacctctaaacaatagagccattttgagtcta

SEQ ID NO: 951311 - DNA, 33 bp, Homo sapien
agatgatggcgatggacactcagatggacagct

SEQ ID NO: 951312 - DNA, 33 bp, Homo sapien
agatgatggcgatggatactcagatggacagct

SEQ ID NO: 951313 - DNA, 33 bp, Homo sapien
gcagacctggaaaaatgaacagatctgatcagt

SEQ ID NO: 951314 - DNA, 33 bp, Homo sapien
gcagacctggaaaaattaacagatctgatcagt

SEQ ID NO: 951315 - DNA, 33 bp, Homo sapien
agaacggactgatataacatccctaagcctttc

SEQ ID NO: 951316 - DNA, 33 bp, Homo sapien
agaacggactgatatagcatccctaagcctttc

SEQ ID NO: 951317 - DNA, 33 bp, Homo sapien
tcctgattgctctggtaaagatgtacaatacta

SEQ ID NO: 951318 - DNA, 33 bp, Homo sapien
tcctgattgctctggttaagatgtacaatacta

SEQ ID NO: 951319 - DNA, 33 bp, Homo sapien
accagagctactggcccatagtttgtgtgtgtg

SEQ ID NO: 951320 - DNA, 33 bp, Homo sapien
accagagctactggcctatagtttgtgtgtgtg

SEQ ID NO: 951321 - DNA, 33 bp, Homo sapien
taaaacttttgaatcactacgataaacagtttt

SEQ ID NO: 951322 - DNA, 33 bp, Homo sapien
taaaacttttgaatcagtacgataaacagtttt

SEQ ID NO: 951323 - DNA, 33 bp, Homo sapien
ttttgctgtcgtgtaaaagcctagaggcagcca

SEQ ID NO: 951324 - DNA, 33 bp, Homo sapien
ttttgctgtcgtgtaacagcctagaggcagcca

SEQ ID NO: 951325 - DNA, 33 bp, Homo sapien
ggtatagaagacttgcccttttatgagtaggtc

SEQ ID NO: 951326 - DNA, 33 bp, Homo sapien
ggtatagaagacttgcgcttttatgagtaggtc

SEQ ID NO: 951327 - DNA, 33 bp, Homo sapien
tagtttgcatttaagaagttatcagtcaggcag

SEQ ID NO: 951328 - DNA, 33 bp, Homo sapien
tagtttgcatttaagaggttatcagtcaggcag

SEQ ID NO: 951329 - DNA, 33 bp, Homo sapien
tattgagagtttttaacgagaatggattttgaa

SEQ ID NO: 951330 - DNA, 33 bp, Homo sapien
tattgagagtttttaatgagaatggattttgaa

SEQ ID NO: 951331 - DNA, 33 bp, Homo sapien
ggattttgaattatatcaagtccttttctgcat

SEQ ID NO: 951332 - DNA, 33 bp, Homo sapien
ggattttgaattatatgaagtccttttctgcat

SEQ ID NO: 951333 - DNA, 33 bp, Homo sapien
aatcattaaccgcttcaaccacttgcatttcct

SEQ ID NO: 951334 - DNA, 33 bp, Homo sapien
aatcattaaccgcttccaccacttgcatttcct

SEQ ID NO: 951335 - DNA, 33 bp, Homo sapien
agaaacctaggcatttcaaatattatctcatca

SEQ ID NO: 951336 - DNA, 33 bp, Homo sapien
agaaacctaggcatttgaaatattatctcatca

SEQ ID NO: 951337 - DNA, 33 bp, Homo sapien
gattggattatgttaacacctcctaaacacagt

SEQ ID NO: 951338 - DNA, 33 bp, Homo sapien
gattggattatgttaagacctcctaaacacagt

SEQ ID NO: 951339 - DNA, 33 bp, Homo sapien
caaaacatactaaactaaggcacatcattcact

SEQ ID NO: 951340 - DNA, 33 bp, Homo sapien
caaaacatactaaactgaggcacatcattcact

SEQ ID NO: 951341 - DNA, 33 bp, Homo sapien
cagggaacagcaccagcaaacagggaacagcaa

SEQ ID NO: 951342 - DNA, 33 bp, Homo sapien
cagggaacagcaccaggaaacagggaacagcaa

SEQ ID NO: 951343 - DNA, 33 bp, Homo sapien
gtcccagttactacacagctagagagagtgcct

SEQ ID NO: 951344 - DNA, 33 bp, Homo sapien
gtcccagttactacactgctagagagagtgcct

SEQ ID NO: 951345 - DNA, 33 bp, Homo sapien
tactttttcttttagacagaatacttggatgga

SEQ ID NO: 951346 - DNA, 33 bp, Homo sapien
tactttttcttttagagagaatacttggatgga

SEQ ID NO: 951347 - DNA, 33 bp, Homo sapien
ccactgtttcagatgacgattctgacttttttt

SEQ ID NO: 951348 - DNA, 33 bp, Homo sapien
ccactgtttcagatgaggattctgacttttttt

SEQ ID NO: 951349 - DNA, 33 bp, Homo sapien
ccagtaggcatactcaaattcttcagtcaccac

SEQ ID NO: 951350 - DNA, 33 bp, Homo sapien
ccagtaggcatactcacattcttcagtcaccac

SEQ ID NO: 951351 - DNA, 33 bp, Homo sapien
ctaggatgttgaagacaaaagggtggaggaaat

SEQ ID NO: 951352 - DNA, 33 bp, Homo sapien
ctaggatgttgaagaccaaagggtggaggaaat

SEQ ID NO: 951353 - DNA, 33 bp, Homo sapien
aatctcttctaaaacaaaagggtgccgaacatg

SEQ ID NO: 951354 - DNA, 33 bp, Homo sapien
aatctcttctaaaacagaagggtgccgaacatg

SEQ ID NO: 951355 - DNA, 33 bp, Homo sapien
ataagaatggaatagaagttttcacagaacctt

SEQ ID NO: 951356 - DNA, 33 bp, Homo sapien
ataagaatggaatagaggttttcacagaacctt

SEQ ID NO: 951357 - DNA, 33 bp, Homo sapien
tattggtagaaaagtaactcagcctttttatct

SEQ ID NO: 951358 - DNA, 33 bp, Homo sapien
tattggtagaaaagtatctcagcctttttatct

SEQ ID NO: 951359 - DNA, 33 bp, Homo sapien
attcgaagttgtaaaactgttcagtgcatttta

SEQ ID NO: 951360 - DNA, 33 bp, Homo sapien
attcgaagttgtaaaagtgttcagtgcatttta

SEQ ID NO: 951361 - DNA, 33 bp, Homo sapien
cccaaaaatgaatgaaagaatttgaccaaagtg

SEQ ID NO: 951362 - DNA, 33 bp, Homo sapien
cccaaaaatgaatgaatgaatttgaccaaagtg

SEQ ID NO: 951363 - DNA, 33 bp, Homo sapien
cataccagtgagtttacacttacattgaaactg

SEQ ID NO: 951364 - DNA, 33 bp, Homo sapien
cataccagtgagtttatacttacattgaaactg

SEQ ID NO: 951365 - DNA, 33 bp, Homo sapien
aattttgtcactcttgcaagcttgtataacatt

SEQ ID NO: 951366 - DNA, 33 bp, Homo sapien
aattttgtcactcttgtaagcttgtataacatt

SEQ ID NO: 951367 - DNA, 33 bp, Homo sapien
gtcttttgaaaatgaaataaaagaggtctatgg

SEQ ID NO: 951368 - DNA, 33 bp, Homo sapien
gtcttttgaaaatgaactaaaagaggtctatgg

SEQ ID NO: 951369 - DNA, 33 bp, Homo sapien
gatacagaaaatttaacactgctgcacatttga

SEQ ID NO: 951370 - DNA, 33 bp, Homo sapien
gatacagaaaatttaagactgctgcacatttga

SEQ ID NO: 951371 - DNA, 33 bp, Homo sapien
aatctgttgggactgcaataaaacatgacttag

SEQ ID NO: 951372 - DNA, 33 bp, Homo sapien
aatctgttgggactgccataaaacatgacttag

SEQ ID NO: 951373 - DNA, 33 bp, Homo sapien
tggagatgttgcctagaatttgcgtttttaata

SEQ ID NO: 951374 - DNA, 33 bp, Homo sapien
tggagatgttgcctagcatttgcgtttttaata

SEQ ID NO: 951375 - DNA, 33 bp, Homo sapien
gacacttgtgccagaacaatatagtcttataaa

SEQ ID NO: 951376 - DNA, 33 bp, Homo sapien
gacacttgtgccagaataatatagtcttataaa

SEQ ID NO: 951377 - DNA, 33 bp, Homo sapien
agaaattgttggatcacataggaagaaaaagta

SEQ ID NO: 951378 - DNA, 33 bp, Homo sapien
agaaattgttggatcatataggaagaaaaagta

SEQ ID NO: 951379 - DNA, 33 bp, Homo sapien
ttttacttatgttttacgtggtttgaaaattat

SEQ ID NO: 951380 - DNA, 33 bp, Homo sapien
ttttacttatgttttatgtggtttgaaaattat

SEQ ID NO: 951381 - DNA, 33 bp, Homo sapien
gagctgaagtaacgccggagataaacttctttt

SEQ ID NO: 951382 - DNA, 33 bp, Homo sapien
gagctgaagtaacgcctgagataaacttctttt

SEQ ID NO: 951383 - DNA, 33 bp, Homo sapien
ggtgtcctatactacactgatttgacctgttag

SEQ ID NO: 951384 - DNA, 33 bp, Homo sapien
ggtgtcctatactacattgatttgacctgttag

SEQ ID NO: 951385 - DNA, 33 bp, Homo sapien
gctgcaaacagaaagacgatgaaagttatccca

SEQ ID NO: 951386 - DNA, 33 bp, Homo sapien
gctgcaaacagaaagatgatgaaagttatccca

SEQ ID NO: 951387 - DNA, 33 bp, Homo sapien
cattaagtgacttataaaggtgattccggtgag

SEQ ID NO: 951388 - DNA, 33 bp, Homo sapien
cattaagtgacttatagaggtgattccggtgag

SEQ ID NO: 951389 - DNA, 33 bp, Homo sapien
tcagtgcggaccgctaaaactgagtaccataga

SEQ ID NO: 951390 - DNA, 33 bp, Homo sapien
tcagtgcggaccgctataactgagtaccataga

SEQ ID NO: 951391 - DNA, 33 bp, Homo sapien
gattaggctgccacaagggtcaattcttggtga

SEQ ID NO: 951392 - DNA, 33 bp, Homo sapien
gattaggctgccacaatggtcaattcttggtga

SEQ ID NO: 951393 - DNA, 33 bp, Homo sapien
tttagttagaactcagcagcatagtcattccta

SEQ ID NO: 951394 - DNA, 33 bp, Homo sapien
tttagttagaactcagtagcatagtcattccta

SEQ ID NO: 951395 - DNA, 33 bp, Homo sapien
gtaggagtttgcaagaaagtagttctgaagatc

SEQ ID NO: 951396 - DNA, 33 bp, Homo sapien
gtaggagtttgcaagagagtagttctgaagatc

SEQ ID NO: 951397 - DNA, 33 bp, Homo sapien
cttggcattcaaaaacactagcttaacacaaag

SEQ ID NO: 951398 - DNA, 33 bp, Homo sapien
cttggcattcaaaaacgctagcttaacacaaag

SEQ ID NO: 951399 - DNA, 33 bp, Homo sapien
gtatatttgcacataaaataaaccggaaaaagg

SEQ ID NO: 951400 - DNA, 33 bp, Homo sapien
gtatatttgcacataagataaaccggaaaaagg

SEQ ID NO: 951401 - DNA, 33 bp, Homo sapien
atacacgggaagataacaaaaggaggaagatgc

SEQ ID NO: 951402 - DNA, 33 bp, Homo sapien
atacacgggaagataagaaaaggaggaagatgc

SEQ ID NO: 951403 - DNA, 33 bp, Homo sapien
ccatcctgtaaggaaaccatggattaagaatgc

SEQ ID NO: 951404 - DNA, 33 bp, Homo sapien
ccatcctgtaaggaaatcatggattaagaatgc

SEQ ID NO: 951405 - DNA, 33 bp, Homo sapien
gccatcccaacatgaacagcaaaggaaagaaat

SEQ ID NO: 951406 - DNA, 33 bp, Homo sapien
gccatcccaacatgaatagcaaaggaaagaaat

SEQ ID NO: 951407 - DNA, 33 bp, Homo sapien
ggtaccactgttgtataataaaactcatccaag

SEQ ID NO: 951408 - DNA, 33 bp, Homo sapien
ggtaccactgttgtatgataaaactcatccaag

SEQ ID NO: 951409 - DNA, 33 bp, Homo sapien
aacctggcttagcagacagaatccttagtttta

SEQ ID NO: 951410 - DNA, 33 bp, Homo sapien
aacctggcttagcagatagaatccttagtttta

SEQ ID NO: 951411 - DNA, 33 bp, Homo sapien
cactgattggggattaaacatggcaaacgaggt

SEQ ID NO: 951412 - DNA, 33 bp, Homo sapien
cactgattggggattagacatggcaaacgaggt

SEQ ID NO: 951413 - DNA, 33 bp, Homo sapien
aatgtaatagcgatctcactctttcaaagagaa

SEQ ID NO: 951414 - DNA, 33 bp, Homo sapien
aatgtaatagcgatctgactctttcaaagagaa

SEQ ID NO: 951415 - DNA, 33 bp, Homo sapien
tctggattaaactttcaaagcagaatatcctga

SEQ ID NO: 951416 - DNA, 33 bp, Homo sapien
tctggattaaactttcgaagcagaatatcctga

SEQ ID NO: 951417 - DNA, 33 bp, Homo sapien
tgatgcttatattatgcagagatctgacaagtc

SEQ ID NO: 951418 - DNA, 33 bp, Homo sapien
tgatgcttatattatgtagagatctgacaagtc

SEQ ID NO: 951419 - DNA, 33 bp, Homo sapien
tgcacaaaaacatgaacggaaggaaacaaactc

SEQ ID NO: 951420 - DNA, 33 bp, Homo sapien
tgcacaaaaacatgaatggaaggaaacaaactc

SEQ ID NO: 951421 - DNA, 33 bp, Homo sapien
taaaggtttaccctggaaaggaagacaggtaga

SEQ ID NO: 951422 - DNA, 33 bp, Homo sapien
taaaggtttaccctggtaaggaagacaggtaga

SEQ ID NO: 951423 - DNA, 33 bp, Homo sapien
aacaataggataataactgttatgctcctcaaa

SEQ ID NO: 951424 - DNA, 33 bp, Homo sapien
aacaataggataataagtgttatgctcctcaaa

SEQ ID NO: 951425 - DNA, 33 bp, Homo sapien
gtatattctgcttttcacttatgttaatatgtc

SEQ ID NO: 951426 - DNA, 33 bp, Homo sapien
gtatattctgcttttcgcttatgttaatatgtc

SEQ ID NO: 951427 - DNA, 33 bp, Homo sapien
gaactttttaagaggaactcagctgaaagtaaa

SEQ ID NO: 951428 - DNA, 33 bp, Homo sapien
gaactttttaagaggagctcagctgaaagtaaa

SEQ ID NO: 951429 - DNA, 33 bp, Homo sapien
tacaaataaaaactgccagattttggtacataa

SEQ ID NO: 951430 - DNA, 33 bp, Homo sapien
tacaaataaaaactgctagattttggtacataa

SEQ ID NO: 951431 - DNA, 33 bp, Homo sapien
aggggtctgttttaggcagataatggcaaatcc

SEQ ID NO: 951432 - DNA, 33 bp, Homo sapien
aggggtctgttttaggtagataatggcaaatcc

SEQ ID NO: 951433 - DNA, 33 bp, Homo sapien
gaaaggattatgaagacgagtgtggaatcccca

SEQ ID NO: 951434 - DNA, 33 bp, Homo sapien
gaaaggattatgaagaggagtgtggaatcccca

SEQ ID NO: 951435 - DNA, 33 bp, Homo sapien
gaaaatcaagcttatgaatagaaacaattacaa

SEQ ID NO: 951436 - DNA, 33 bp, Homo sapien
gaaaatcaagcttatgcatagaaacaattacaa

SEQ ID NO: 951437 - DNA, 33 bp, Homo sapien
acgagttctctctgaactgataatgacaaaata

SEQ ID NO: 951438 - DNA, 33 bp, Homo sapien
acgagttctctctgaattgataatgacaaaata

SEQ ID NO: 951439 - DNA, 33 bp, Homo sapien
taccccaggaactcgacctgtcttttatgagga

SEQ ID NO: 951440 - DNA, 33 bp, Homo sapien
taccccaggaactcgatctgtcttttatgagga

SEQ ID NO: 951441 - DNA, 33 bp, Homo sapien
aagatgatttattcaacgcaaagataattgttg

SEQ ID NO: 951442 - DNA, 33 bp, Homo sapien
aagatgatttattcaatgcaaagataattgttg

SEQ ID NO: 951443 - DNA, 33 bp, Homo sapien
cactatctagacttacaaacaattccatttggt

SEQ ID NO: 951444 - DNA, 33 bp, Homo sapien
cactatctagacttacgaacaattccatttggt

SEQ ID NO: 951445 - DNA, 33 bp, Homo sapien
ccaatgttgcatatgaagagaaagggacattct

SEQ ID NO: 951446 - DNA, 33 bp, Homo sapien
ccaatgttgcatatgaggagaaagggacattct

SEQ ID NO: 951447 - DNA, 33 bp, Homo sapien
agtaaatgtaagctcaaaaactatttatttcaa

SEQ ID NO: 951448 - DNA, 33 bp, Homo sapien
agtaaatgtaagctcagaaactatttatttcaa

SEQ ID NO: 951449 - DNA, 33 bp, Homo sapien
aggaagaacattggcaccaaatgaaagacaggg

SEQ ID NO: 951450 - DNA, 33 bp, Homo sapien
aggaagaacattggcagcaaatgaaagacaggg

SEQ ID NO: 951451 - DNA, 33 bp, Homo sapien
aaagattcaaaggtcaataaaattattcaagca

SEQ ID NO: 951452 - DNA, 33 bp, Homo sapien
aaagattcaaaggtcattaaaattattcaagca

SEQ ID NO: 951453 - DNA, 33 bp, Homo sapien
gggttcaaaagcattccatggtcagccaggcgc

SEQ ID NO: 951454 - DNA, 33 bp, Homo sapien
gggttcaaaagcattcgatggtcagccaggcgc

SEQ ID NO: 951455 - DNA, 33 bp, Homo sapien
agttttgggttgacagcctcatccatgcattca

SEQ ID NO: 951456 - DNA, 33 bp, Homo sapien
agttttgggttgacagtctcatccatgcattca

SEQ ID NO: 951457 - DNA, 33 bp, Homo sapien
acttaccttaaatgtaagtggatgttaaaataa

SEQ ID NO: 951458 - DNA, 33 bp, Homo sapien
acttaccttaaatgtatgtggatgttaaaataa

SEQ ID NO: 951459 - DNA, 33 bp, Homo sapien
tctgaccactgtggagaaagggaatgaagggag

SEQ ID NO: 951460 - DNA, 33 bp, Homo sapien
tctgaccactgtggaggaagggaatgaagggag

SEQ ID NO: 951461 - DNA, 33 bp, Homo sapien
ttgctagtcaatttcacggctgtgtgaacatca

SEQ ID NO: 951462 - DNA, 33 bp, Homo sapien
ttgctagtcaatttcatggctgtgtgaacatca

SEQ ID NO: 951463 - DNA, 33 bp, Homo sapien
tctgaactctgaacgactagggaccatgtctgc

SEQ ID NO: 951464 - DNA, 33 bp, Homo sapien
tctgaactctgaacgagtagggaccatgtctgc

SEQ ID NO: 951465 - DNA, 33 bp, Homo sapien
ccacattatgtcactacagcctaaagcaacctg

SEQ ID NO: 951466 - DNA, 33 bp, Homo sapien
ccacattatgtcactagagcctaaagcaacctg

SEQ ID NO: 951467 - DNA, 33 bp, Homo sapien
aaacgtggattttctacagcaacctaacttttc

SEQ ID NO: 951468 - DNA, 33 bp, Homo sapien
aaacgtggattttctatagcaacctaacttttc

SEQ ID NO: 951469 - DNA, 33 bp, Homo sapien
aagttgttcatgctcacggttttttgttgagaa

SEQ ID NO: 951470 - DNA, 33 bp, Homo sapien
aagttgttcatgctcatggttttttgttgagaa

SEQ ID NO: 951471 - DNA, 33 bp, Homo sapien
tttaatatcagttccaaagttaggacaaaaagt

SEQ ID NO: 951472 - DNA, 33 bp, Homo sapien
tttaatatcagttccacagttaggacaaaaagt

SEQ ID NO: 951473 - DNA, 33 bp, Homo sapien
atcgtttatcagcacactgacatttaataggaa

SEQ ID NO: 951474 - DNA, 33 bp, Homo sapien
atcgtttatcagcacattgacatttaataggaa

SEQ ID NO: 951475 - DNA, 33 bp, Homo sapien
caaatgttgaagataaagttggccttaagaata

SEQ ID NO: 951476 - DNA, 33 bp, Homo sapien
caaatgttgaagataaggttggccttaagaata

SEQ ID NO: 951477 - DNA, 33 bp, Homo sapien
ggcagcttgaagactaaaagtacgatcacaatt

SEQ ID NO: 951478 - DNA, 33 bp, Homo sapien
ggcagcttgaagactagaagtacgatcacaatt

SEQ ID NO: 951479 - DNA, 33 bp, Homo sapien
ggtaactactggtacaacttttgtgatgagcat

SEQ ID NO: 951480 - DNA, 33 bp, Homo sapien
ggtaactactggtacaccttttgtgatgagcat

SEQ ID NO: 951481 - DNA, 33 bp, Homo sapien
gagatttgaaaagccaaatgagaagagaatttt

SEQ ID NO: 951482 - DNA, 33 bp, Homo sapien
gagatttgaaaagccacatgagaagagaatttt

SEQ ID NO: 951483 - DNA, 33 bp, Homo sapien
tcaccactcctttcaaaacagtatcggaaattc

SEQ ID NO: 951484 - DNA, 33 bp, Homo sapien
tcaccactcctttcaacacagtatcggaaattc

SEQ ID NO: 951485 - DNA, 33 bp, Homo sapien
acagctttccataaggcatgcctaccactgtgt

SEQ ID NO: 951486 - DNA, 33 bp, Homo sapien
acagctttccataaggtatgcctaccactgtgt

SEQ ID NO: 951487 - DNA, 33 bp, Homo sapien
cagcataactttgcataatccataggtcaaaga

SEQ ID NO: 951488 - DNA, 33 bp, Homo sapien
cagcataactttgcattatccataggtcaaaga

SEQ ID NO: 951489 - DNA, 33 bp, Homo sapien
atttgagcgtcaatgaaccagagaaattttaga

SEQ ID NO: 951490 - DNA, 33 bp, Homo sapien
atttgagcgtcaatgacccagagaaattttaga

SEQ ID NO: 951491 - DNA, 33 bp, Homo sapien
tcatctagaacctgagcattcctacatttgtat

SEQ ID NO: 951492 - DNA, 33 bp, Homo sapien
tcatctagaacctgagtattcctacatttgtat

SEQ ID NO: 951493 - DNA, 33 bp, Homo sapien
tcagaaatagaaaaaactgaattgccattatta

SEQ ID NO: 951494 - DNA, 33 bp, Homo sapien
tcagaaatagaaaaaattgaattgccattatta

SEQ ID NO: 951495 - DNA, 33 bp, Homo sapien
aatttggtatatgatacgagacacataaaatca

SEQ ID NO: 951496 - DNA, 33 bp, Homo sapien
aatttggtatatgatatgagacacataaaatca

SEQ ID NO: 951497 - DNA, 33 bp, Homo sapien
tatcatttattcccaactgaaccatggaccaat

SEQ ID NO: 951498 - DNA, 33 bp, Homo sapien
tatcatttattcccaattgaaccatggaccaat

SEQ ID NO: 951499 - DNA, 33 bp, Homo sapien
taagaggtaggagaacaactgaacatatgaagt

SEQ ID NO: 951500 - DNA, 33 bp, Homo sapien
taagaggtaggagaactactgaacatatgaagt

SEQ ID NO: 951501 - DNA, 33 bp, Homo sapien
gaacaggactgcaaaaaggaaaaattaagtcaa

SEQ ID NO: 951502 - DNA, 33 bp, Homo sapien
gaacaggactgcaaaagggaaaaattaagtcaa

SEQ ID NO: 951503 - DNA, 33 bp, Homo sapien
agttaaaggactgttacacttggttcagtagca

SEQ ID NO: 951504 - DNA, 33 bp, Homo sapien
agttaaaggactgttagacttggttcagtagca

SEQ ID NO: 951505 - DNA, 33 bp, Homo sapien
tctccagtgttctacccagtgtataatagagaa

SEQ ID NO: 951506 - DNA, 33 bp, Homo sapien
tctccagtgttctaccgagtgtataatagagaa

SEQ ID NO: 951507 - DNA, 33 bp, Homo sapien
agtcagatggtagtaactgtaaatgcataccta

SEQ ID NO: 951508 - DNA, 33 bp, Homo sapien
agtcagatggtagtaattgtaaatgcataccta

SEQ ID NO: 951509 - DNA, 33 bp, Homo sapien
tttatgagacagctagccaactctgaacacaat

SEQ ID NO: 951510 - DNA, 33 bp, Homo sapien
tttatgagacagctaggcaactctgaacacaat

SEQ ID NO: 951511 - DNA, 33 bp, Homo sapien
gaagcgcaaactttgacatctgaagctcagtgg

SEQ ID NO: 951512 - DNA, 33 bp, Homo sapien
gaagcgcaaactttgagatctgaagctcagtgg

SEQ ID NO: 951513 - DNA, 33 bp, Homo sapien
gtatagttttgaaagaggcataagaatatgaaa

SEQ ID NO: 951514 - DNA, 33 bp, Homo sapien
gtatagttttgaaagatgcataagaatatgaaa

SEQ ID NO: 951515 - DNA, 33 bp, Homo sapien
ttgggataaattttccaaaagccattagtctct

SEQ ID NO: 951516 - DNA, 33 bp, Homo sapien
ttgggataaattttccgaaagccattagtctct

SEQ ID NO: 951517 - DNA, 33 bp, Homo sapien
cactccaggaacatgaatcaaacactgactaat

SEQ ID NO: 951518 - DNA, 33 bp, Homo sapien
cactccaggaacatgagtcaaacactgactaat

SEQ ID NO: 951519 - DNA, 33 bp, Homo sapien
gttagatcctggactcaattttcagcacatttc

SEQ ID NO: 951520 - DNA, 33 bp, Homo sapien
gttagatcctggactcgattttcagcacatttc

SEQ ID NO: 951521 - DNA, 33 bp, Homo sapien
tgcagtcttttgatgacgctgggctgcacaaga

SEQ ID NO: 951522 - DNA, 33 bp, Homo sapien
tgcagtcttttgatgatgctgggctgcacaaga

SEQ ID NO: 951523 - DNA, 33 bp, Homo sapien
tatgttaaatgagttaagccagctatagaaagg

SEQ ID NO: 951524 - DNA, 33 bp, Homo sapien
tatgttaaatgagttaggccagctatagaaagg

SEQ ID NO: 951525 - DNA, 33 bp, Homo sapien
accaggatgtaccgtcacgagtgtaacattcac

SEQ ID NO: 951526 - DNA, 33 bp, Homo sapien
accaggatgtaccgtcgcgagtgtaacattcac

SEQ ID NO: 951527 - DNA, 33 bp, Homo sapien
gcaaaggatattttgaactcctattttccaaat

SEQ ID NO: 951528 - DNA, 33 bp, Homo sapien
gcaaaggatattttgagctcctattttccaaat

SEQ ID NO: 951529 - DNA, 33 bp, Homo sapien
atagtttgaactagaaaggtacagctgatagga

SEQ ID NO: 951530 - DNA, 33 bp, Homo sapien
atagtttgaactagaatggtacagctgatagga

SEQ ID NO: 951531 - DNA, 33 bp, Homo sapien
gtgctgctgagagtacgagttaaagcagatgtc

SEQ ID NO: 951532 - DNA, 33 bp, Homo sapien
gtgctgctgagagtactagttaaagcagatgtc

SEQ ID NO: 951533 - DNA, 33 bp, Homo sapien
gttcgattgcttctaacgaagtagacacaatgt

SEQ ID NO: 951534 - DNA, 33 bp, Homo sapien
gttcgattgcttctaatgaagtagacacaatgt

SEQ ID NO: 951535 - DNA, 33 bp, Homo sapien
gagattatggaccttacggaatagtttgacaag

SEQ ID NO: 951536 - DNA, 33 bp, Homo sapien
gagattatggaccttatggaatagtttgacaag

SEQ ID NO: 951537 - DNA, 33 bp, Homo sapien
taataggtaatacttggaggtttcaacttctaa

SEQ ID NO: 951538 - DNA, 33 bp, Homo sapien
taataggtaatacttgtaggtttcaacttctaa

SEQ ID NO: 951539 - DNA, 33 bp, Homo sapien
ataatgtaagaactgtaaatcttgatatgtaga

SEQ ID NO: 951540 - DNA, 33 bp, Homo sapien
ataatgtaagaactgtgaatcttgatatgtaga

SEQ ID NO: 951541 - DNA, 33 bp, Homo sapien
gatgtttgatagtgggccaacttaattctggaa

SEQ ID NO: 951542 - DNA, 33 bp, Homo sapien
gatgtttgatagtgggtcaacttaattctggaa

SEQ ID NO: 951543 - DNA, 33 bp, Homo sapien
ccatacagctttcttgcagactgagtaacctca

SEQ ID NO: 951544 - DNA, 33 bp, Homo sapien
ccatacagctttcttggagactgagtaacctca

SEQ ID NO: 951545 - DNA, 33 bp, Homo sapien
aaaggaagtgagcctacaagagagcgaaggttt

SEQ ID NO: 951546 - DNA, 33 bp, Homo sapien
aaaggaagtgagcctagaagagagcgaaggttt

SEQ ID NO: 951547 - DNA, 33 bp, Homo sapien
caacaacgtttatgcacgaatgacagtaaatca

SEQ ID NO: 951548 - DNA, 33 bp, Homo sapien
caacaacgtttatgcatgaatgacagtaaatca

SEQ ID NO: 951549 - DNA, 33 bp, Homo sapien
cacacttgaagttcccagaacataccatctaca

SEQ ID NO: 951550 - DNA, 33 bp, Homo sapien
cacacttgaagttcccggaacataccatctaca

SEQ ID NO: 951551 - DNA, 33 bp, Homo sapien
atctatgattggaaaaaattacatagataccta

SEQ ID NO: 951552 - DNA, 33 bp, Homo sapien
atctatgattggaaaacattacatagataccta

SEQ ID NO: 951553 - DNA, 33 bp, Homo sapien
tcctttcactttcatagacacccgcatgatcca

SEQ ID NO: 951554 - DNA, 33 bp, Homo sapien
tcctttcactttcatatacacccgcatgatcca

SEQ ID NO: 951555 - DNA, 33 bp, Homo sapien
gcatcgtccgcgagcacgatttcccttagagtt

SEQ ID NO: 951556 - DNA, 33 bp, Homo sapien
gcatcgtccgcgagcatgatttcccttagagtt

SEQ ID NO: 951557 - DNA, 33 bp, Homo sapien
acttaatgtacagcataatcaaactgttgtctt

SEQ ID NO: 951558 - DNA, 33 bp, Homo sapien
acttaatgtacagcatgatcaaactgttgtctt

SEQ ID NO: 951559 - DNA, 33 bp, Homo sapien
tagacataaacaccaaaacattatgatatatca

SEQ ID NO: 951560 - DNA, 33 bp, Homo sapien
tagacataaacaccaacacattatgatatatca

SEQ ID NO: 951561 - DNA, 33 bp, Homo sapien
tcaccatctcccttcacgtcaagctgggaaaac

SEQ ID NO: 951562 - DNA, 33 bp, Homo sapien
tcaccatctcccttcatgtcaagctgggaaaac

SEQ ID NO: 951563 - DNA, 33 bp, Homo sapien
cttcagttctcaggttgaaccccaaaagacatg

SEQ ID NO: 951564 - DNA, 33 bp, Homo sapien
cttcagttctcaggtttaaccccaaaagacatg

SEQ ID NO: 951565 - DNA, 33 bp, Homo sapien
agaccacactagctagaagatcagggccatgat

SEQ ID NO: 951566 - DNA, 33 bp, Homo sapien
agaccacactagctagcagatcagggccatgat

SEQ ID NO: 951567 - DNA, 33 bp, Homo sapien
ccaaaaaaatacctcacgtctctgttaccaaac

SEQ ID NO: 951568 - DNA, 33 bp, Homo sapien
ccaaaaaaatacctcatgtctctgttaccaaac

SEQ ID NO: 951569 - DNA, 33 bp, Homo sapien
accaattttcttttgccactaaagtgtgctgtt

SEQ ID NO: 951570 - DNA, 33 bp, Homo sapien
accaattttcttttgctactaaagtgtgctgtt

SEQ ID NO: 951571 - DNA, 33 bp, Homo sapien
ttactatacatcacaaatacaactccttcctcc

SEQ ID NO: 951572 - DNA, 33 bp, Homo sapien
ttactatacatcacaagtacaactccttcctcc

SEQ ID NO: 951573 - DNA, 33 bp, Homo sapien
ttgaaaccatttaagacgtgagtaagcttgacc

SEQ ID NO: 951574 - DNA, 33 bp, Homo sapien
ttgaaaccatttaagatgtgagtaagcttgacc

SEQ ID NO: 951575 - DNA, 33 bp, Homo sapien
ttgtatattgctgttacgccctgttgctctgct

SEQ ID NO: 951576 - DNA, 33 bp, Homo sapien
ttgtatattgctgttatgccctgttgctctgct

SEQ ID NO: 951577 - DNA, 33 bp, Homo sapien
tattccctactgagaaagaaattgatgtaaaat

SEQ ID NO: 951578 - DNA, 33 bp, Homo sapien
tattccctactgagaatgaaattgatgtaaaat

SEQ ID NO: 951579 - DNA, 33 bp, Homo sapien
aatccactttggaaaactacttgccagtattta

SEQ ID NO: 951580 - DNA, 33 bp, Homo sapien
aatccactttggaaaattacttgccagtattta

SEQ ID NO: 951581 - DNA, 33 bp, Homo sapien
tatatggctgttcctaccagttaaagcaaacgg

SEQ ID NO: 951582 - DNA, 33 bp, Homo sapien
tatatggctgttcctagcagttaaagcaaacgg

SEQ ID NO: 951583 - DNA, 33 bp, Homo sapien
tataagttgctttcaaaatttaaacacgtcagt

SEQ ID NO: 951584 - DNA, 33 bp, Homo sapien
tataagttgctttcaagatttaaacacgtcagt

SEQ ID NO: 951585 - DNA, 33 bp, Homo sapien
gttccaaattctatctcaatgcagtttggagga

SEQ ID NO: 951586 - DNA, 33 bp, Homo sapien
gttccaaattctatcttaatgcagtttggagga

SEQ ID NO: 951587 - DNA, 33 bp, Homo sapien
tgtttgcattatgtcacgtgggaagttttttga

SEQ ID NO: 951588 - DNA, 33 bp, Homo sapien
tgtttgcattatgtcaggtgggaagttttttga

SEQ ID NO: 951589 - DNA, 33 bp, Homo sapien
tgagccctatctgacacgtccggaaggtattgc

SEQ ID NO: 951590 - DNA, 33 bp, Homo sapien
tgagccctatctgacatgtccggaaggtattgc

SEQ ID NO: 951591 - DNA, 33 bp, Homo sapien
actcttagtggctaacagatgggtagcatagac

SEQ ID NO: 951592 - DNA, 33 bp, Homo sapien
actcttagtggctaacggatgggtagcatagac

SEQ ID NO: 951593 - DNA, 33 bp, Homo sapien
gagtgcgtgttctttacaatactgctgtaagag

SEQ ID NO: 951594 - DNA, 33 bp, Homo sapien
gagtgcgtgttctttagaatactgctgtaagag

SEQ ID NO: 951595 - DNA, 33 bp, Homo sapien
gtggaggtggggctgaagtatgaaaatatctcc

SEQ ID NO: 951596 - DNA, 33 bp, Homo sapien
gtggaggtggggctgaggtatgaaaatatctcc

SEQ ID NO: 951597 - DNA, 33 bp, Homo sapien
tcctctcaaggttacaaagaagtgagtcagacc

SEQ ID NO: 951598 - DNA, 33 bp, Homo sapien
tcctctcaaggttacacagaagtgagtcagacc

SEQ ID NO: 951599 - DNA, 33 bp, Homo sapien
ggcttaatactccgacaatgaaatattctgtac

SEQ ID NO: 951600 - DNA, 33 bp, Homo sapien
ggcttaatactccgacgatgaaatattctgtac

SEQ ID NO: 951601 - DNA, 33 bp, Homo sapien
tatgcttcctagtttaagatgttccttctttcc

SEQ ID NO: 951602 - DNA, 33 bp, Homo sapien
tatgcttcctagtttaggatgttccttctttcc

SEQ ID NO: 951603 - DNA, 33 bp, Homo sapien
tttcaactgtgcaatgaagtttactccaggaat

SEQ ID NO: 951604 - DNA, 33 bp, Homo sapien
tttcaactgtgcaatgtagtttactccaggaat

SEQ ID NO: 951605 - DNA, 33 bp, Homo sapien
atatacaaatgaataaacattcaaggtccaaaa

SEQ ID NO: 951606 - DNA, 33 bp, Homo sapien
atatacaaatgaataatcattcaaggtccaaaa

SEQ ID NO: 951607 - DNA, 33 bp, Homo sapien
ttgttctgatttttacaggaaaatgcttggctg

SEQ ID NO: 951608 - DNA, 33 bp, Homo sapien
ttgttctgatttttaccggaaaatgcttggctg

SEQ ID NO: 951609 - DNA, 33 bp, Homo sapien
gaggtcttttgctctaaaatactatttgtacat

SEQ ID NO: 951610 - DNA, 33 bp, Homo sapien
gaggtcttttgctctagaatactatttgtacat

SEQ ID NO: 951611 - DNA, 33 bp, Homo sapien
gcctgtctccaagaaaatgtatctgcccttttc

SEQ ID NO: 951612 - DNA, 33 bp, Homo sapien
gcctgtctccaagaaactgtatctgcccttttc

SEQ ID NO: 951613 - DNA, 33 bp, Homo sapien
aattcagaattaatgcactagttacacccagat

SEQ ID NO: 951614 - DNA, 33 bp, Homo sapien
aattcagaattaatgcgctagttacacccagat

SEQ ID NO: 951615 - DNA, 33 bp, Homo sapien
ttctaggtaaagtgtcaaaatccctacttttag

SEQ ID NO: 951616 - DNA, 33 bp, Homo sapien
ttctaggtaaagtgtctaaatccctacttttag

SEQ ID NO: 951617 - DNA, 33 bp, Homo sapien
agtgctttaatctctaagacacaatctgagcac

SEQ ID NO: 951618 - DNA, 33 bp, Homo sapien
agtgctttaatctctaggacacaatctgagcac

SEQ ID NO: 951619 - DNA, 33 bp, Homo sapien
gtcctcagaaggcacaatcttgaattactaaac

SEQ ID NO: 951620 - DNA, 33 bp, Homo sapien
gtcctcagaaggcacagtcttgaattactaaac

SEQ ID NO: 951621 - DNA, 33 bp, Homo sapien
tgatgattgcttcaaaactgtgaattcaggcag

SEQ ID NO: 951622 - DNA, 33 bp, Homo sapien
tgatgattgcttcaaagctgtgaattcaggcag

SEQ ID NO: 951623 - DNA, 33 bp, Homo sapien
ctgagaagcaaatgaaatgtgtgaaattcagct

SEQ ID NO: 951624 - DNA, 33 bp, Homo sapien
ctgagaagcaaatgaagtgtgtgaaattcagct

SEQ ID NO: 951625 - DNA, 33 bp, Homo sapien
cccattataaagaaggaacagcaaaaatattta

SEQ ID NO: 951626 - DNA, 33 bp, Homo sapien
cccattataaagaagggacagcaaaaatattta

SEQ ID NO: 951627 - DNA, 33 bp, Homo sapien
agttcatggttacaaaatatcatgggagatttt

SEQ ID NO: 951628 - DNA, 33 bp, Homo sapien
agttcatggttacaaattatcatgggagatttt

SEQ ID NO: 951629 - DNA, 33 bp, Homo sapien
tggtctgattcagttacacctttgtgtctggaa

SEQ ID NO: 951630 - DNA, 33 bp, Homo sapien
tggtctgattcagttatacctttgtgtctggaa

SEQ ID NO: 951631 - DNA, 33 bp, Homo sapien
gggagggagaacatgacaatcagttattttgac

SEQ ID NO: 951632 - DNA, 33 bp, Homo sapien
gggagggagaacatgagaatcagttattttgac

SEQ ID NO: 951633 - DNA, 33 bp, Homo sapien
cccatcccagaaggcactaacactatccctgtg

SEQ ID NO: 951634 - DNA, 33 bp, Homo sapien
cccatcccagaaggcattaacactatccctgtg

SEQ ID NO: 951635 - DNA, 33 bp, Homo sapien
agtctgaggaatcaaactggaggagggataaat

SEQ ID NO: 951636 - DNA, 33 bp, Homo sapien
agtctgaggaatcaaattggaggagggataaat

SEQ ID NO: 951637 - DNA, 33 bp, Homo sapien
atgaggagtggtttgacaatgcaagccatgctc

SEQ ID NO: 951638 - DNA, 33 bp, Homo sapien
atgaggagtggtttgataatgcaagccatgctc

SEQ ID NO: 951639 - DNA, 33 bp, Homo sapien
atttacagaagttgcactgacaagtaacgtctt

SEQ ID NO: 951640 - DNA, 33 bp, Homo sapien
atttacagaagttgcattgacaagtaacgtctt

SEQ ID NO: 951641 - DNA, 33 bp, Homo sapien
aaaggagaaaggcttacggagaagaactcatca

SEQ ID NO: 951642 - DNA, 33 bp, Homo sapien
aaaggagaaaggcttatggagaagaactcatca

SEQ ID NO: 951643 - DNA, 33 bp, Homo sapien
tataagatctcgcaaaatattggccaaccccat

SEQ ID NO: 951644 - DNA, 33 bp, Homo sapien
tataagatctcgcaaagtattggccaaccccat

SEQ ID NO: 951645 - DNA, 33 bp, Homo sapien
ctcatattgggttaagccattggcaagaagaaa

SEQ ID NO: 951646 - DNA, 33 bp, Homo sapien
ctcatattgggttaagtcattggcaagaagaaa

SEQ ID NO: 951647 - DNA, 33 bp, Homo sapien
cccccttggagttggaaatcatttacttgtagt

SEQ ID NO: 951648 - DNA, 33 bp, Homo sapien
cccccttggagttggagatcatttacttgtagt

SEQ ID NO: 951649 - DNA, 33 bp, Homo sapien
tataaagatggaaagaagcctagcagtgtaatt

SEQ ID NO: 951650 - DNA, 33 bp, Homo sapien
tataaagatggaaagaggcctagcagtgtaatt

SEQ ID NO: 951651 - DNA, 33 bp, Homo sapien
tactactcaaggtgataaaatgttttattattg

SEQ ID NO: 951652 - DNA, 33 bp, Homo sapien
tactactcaaggtgatcaaatgttttattattg

SEQ ID NO: 951653 - DNA, 33 bp, Homo sapien
gcactacataacatcacgatatgcattcatgaa

SEQ ID NO: 951654 - DNA, 33 bp, Homo sapien
gcactacataacatcaggatatgcattcatgaa

SEQ ID NO: 951655 - DNA, 33 bp, Homo sapien
gcaatcactcctttcacagtggccaaaaaatat

SEQ ID NO: 951656 - DNA, 33 bp, Homo sapien
gcaatcactcctttcatagtggccaaaaaatat

SEQ ID NO: 951657 - DNA, 33 bp, Homo sapien
tatgtactcccatttacgtgtcatgtgatggac

SEQ ID NO: 951658 - DNA, 33 bp, Homo sapien
tatgtactcccatttatgtgtcatgtgatggac

SEQ ID NO: 951659 - DNA, 33 bp, Homo sapien
ttcatctgtttatacccgaggctaaagattgca

SEQ ID NO: 951660 - DNA, 33 bp, Homo sapien
ttcatctgtttatacctgaggctaaagattgca

SEQ ID NO: 951661 - DNA, 33 bp, Homo sapien
gagagacatttctcaacactaatcatgattggg

SEQ ID NO: 951662 - DNA, 33 bp, Homo sapien
gagagacatttctcaatactaatcatgattggg

SEQ ID NO: 951663 - DNA, 33 bp, Homo sapien
actataactttggtacaaggatcttactgtttc

SEQ ID NO: 951664 - DNA, 33 bp, Homo sapien
actataactttggtacgaggatcttactgtttc

SEQ ID NO: 951665 - DNA, 33 bp, Homo sapien
tttaataacatccttacggacagtgagaggaca

SEQ ID NO: 951666 - DNA, 33 bp, Homo sapien
tttaataacatccttatggacagtgagaggaca

SEQ ID NO: 951667 - DNA, 33 bp, Homo sapien
aaggtttacagcactaagtcttctcatttcttt

SEQ ID NO: 951668 - DNA, 33 bp, Homo sapien
aaggtttacagcactaggtcttctcatttcttt

SEQ ID NO: 951669 - DNA, 33 bp, Homo sapien
agtatgtccatgctaccacatcctaacagctac

SEQ ID NO: 951670 - DNA, 33 bp, Homo sapien
agtatgtccatgctactacatcctaacagctac

SEQ ID NO: 951671 - DNA, 33 bp, Homo sapien
tgcctatttgtcagaaactatttgtcagttttc

SEQ ID NO: 951672 - DNA, 33 bp, Homo sapien
tgcctatttgtcagaagctatttgtcagttttc

SEQ ID NO: 951673 - DNA, 33 bp, Homo sapien
ctgggtccatcagagacaaattcctacctattc

SEQ ID NO: 951674 - DNA, 33 bp, Homo sapien
ctgggtccatcagagagaaattcctacctattc

SEQ ID NO: 951675 - DNA, 33 bp, Homo sapien
gcatattcactgaaccactcatctgatctgaaa

SEQ ID NO: 951676 - DNA, 33 bp, Homo sapien
gcatattcactgaaccgctcatctgatctgaaa

SEQ ID NO: 951677 - DNA, 33 bp, Homo sapien
atctggctgcccaaaaatgattccttcctctta

SEQ ID NO: 951678 - DNA, 33 bp, Homo sapien
atctggctgcccaaaattgattccttcctctta

SEQ ID NO: 951679 - DNA, 33 bp, Homo sapien
taaaataacaggaaaccgatgggtcatacaatg

SEQ ID NO: 951680 - DNA, 33 bp, Homo sapien
taaaataacaggaaactgatgggtcatacaatg

SEQ ID NO: 951681 - DNA, 33 bp, Homo sapien
aatgtataagagtttacagtccctccagcaaac

SEQ ID NO: 951682 - DNA, 33 bp, Homo sapien
aatgtataagagtttatagtccctccagcaaac

SEQ ID NO: 951683 - DNA, 33 bp, Homo sapien
attgcaaacatgaatcagataaataacttgtaa

SEQ ID NO: 951684 - DNA, 33 bp, Homo sapien
attgcaaacatgaatctgataaataacttgtaa

SEQ ID NO: 951685 - DNA, 33 bp, Homo sapien
acttacaggccattgacaaaaaggagtctatta

SEQ ID NO: 951686 - DNA, 33 bp, Homo sapien
acttacaggccattgagaaaaaggagtctatta

SEQ ID NO: 951687 - DNA, 33 bp, Homo sapien
catttcaagaaaatgaagaccttaaaacgaaac

SEQ ID NO: 951688 - DNA, 33 bp, Homo sapien
catttcaagaaaatgacgaccttaaaacgaaac

SEQ ID NO: 951689 - DNA, 33 bp, Homo sapien
taacatacatgggacaccaaactatggaaagca

SEQ ID NO: 951690 - DNA, 33 bp, Homo sapien
taacatacatgggacagcaaactatggaaagca

SEQ ID NO: 951691 - DNA, 33 bp, Homo sapien
aagagtaaccaaatgcaattagaggcactgtct

SEQ ID NO: 951692 - DNA, 33 bp, Homo sapien
aagagtaaccaaatgctattagaggcactgtct

SEQ ID NO: 951693 - DNA, 33 bp, Homo sapien
aactttcctcaacagagaataataggcaatcat

SEQ ID NO: 951694 - DNA, 33 bp, Homo sapien
aactttcctcaacagataataataggcaatcat

SEQ ID NO: 951695 - DNA, 33 bp, Homo sapien
accctaaagtcatttcaaatctaataggagaga

SEQ ID NO: 951696 - DNA, 33 bp, Homo sapien
accctaaagtcatttcgaatctaataggagaga

SEQ ID NO: 951697 - DNA, 33 bp, Homo sapien
ctagtacttaggctggaaaaatcatggtttaag

SEQ ID NO: 951698 - DNA, 33 bp, Homo sapien
ctagtacttaggctgggaaaatcatggtttaag

SEQ ID NO: 951699 - DNA, 33 bp, Homo sapien
tgaaaggagactcatacattcccgaagtaaaaa

SEQ ID NO: 951700 - DNA, 33 bp, Homo sapien
tgaaaggagactcatatattcccgaagtaaaaa

SEQ ID NO: 951701 - DNA, 33 bp, Homo sapien
gaattttggagctcaacgagtggtatctttgag

SEQ ID NO: 951702 - DNA, 33 bp, Homo sapien
gaattttggagctcaaggagtggtatctttgag

SEQ ID NO: 951703 - DNA, 33 bp, Homo sapien
agcattgagaatgttacaatcaaaaagttctaa

SEQ ID NO: 951704 - DNA, 33 bp, Homo sapien
agcattgagaatgttagaatcaaaaagttctaa

SEQ ID NO: 951705 - DNA, 33 bp, Homo sapien
cttttctcaagccatacatttggtaaaagaaag

SEQ ID NO: 951706 - DNA, 33 bp, Homo sapien
cttttctcaagccatatatttggtaaaagaaag

SEQ ID NO: 951707 - DNA, 33 bp, Homo sapien
atcatgtaccaggtaacatctttgccacaaaca

SEQ ID NO: 951708 - DNA, 33 bp, Homo sapien
atcatgtaccaggtaagatctttgccacaaaca

SEQ ID NO: 951709 - DNA, 33 bp, Homo sapien
ctgtttacggccaatcccaattctcagaaataa

SEQ ID NO: 951710 - DNA, 33 bp, Homo sapien
ctgtttacggccaatctcaattctcagaaataa

SEQ ID NO: 951711 - DNA, 33 bp, Homo sapien
aactcatcacactgtccatgttttgctcaggaa

SEQ ID NO: 951712 - DNA, 33 bp, Homo sapien
aactcatcacactgtctatgttttgctcaggaa

SEQ ID NO: 951713 - DNA, 33 bp, Homo sapien
tttgttttgtttttgacatgcaatcttcctctg

SEQ ID NO: 951714 - DNA, 33 bp, Homo sapien
tttgttttgtttttgagatgcaatcttcctctg

SEQ ID NO: 951715 - DNA, 33 bp, Homo sapien
ctaggttagggtaagacagcatctttaaataat

SEQ ID NO: 951716 - DNA, 33 bp, Homo sapien
ctaggttagggtaagagagcatctttaaataat

SEQ ID NO: 951717 - DNA, 33 bp, Homo sapien
tgggatccccagaaacaccttgcagagagtaac

SEQ ID NO: 951718 - DNA, 33 bp, Homo sapien
tgggatccccagaaacgccttgcagagagtaac

SEQ ID NO: 951719 - DNA, 33 bp, Homo sapien
ccagtaggaagaagaaattagtgcagtcttccc

SEQ ID NO: 951720 - DNA, 33 bp, Homo sapien
ccagtaggaagaagaagttagtgcagtcttccc

SEQ ID NO: 951721 - DNA, 33 bp, Homo sapien
ctggagtcaggacatcaattgtgtttaaagatt

SEQ ID NO: 951722 - DNA, 33 bp, Homo sapien
ctggagtcaggacatcgattgtgtttaaagatt

SEQ ID NO: 951723 - DNA, 33 bp, Homo sapien
agttctagcatagtaacgtttcttggttttcca

SEQ ID NO: 951724 - DNA, 33 bp, Homo sapien
agttctagcatagtaatgtttcttggttttcca

SEQ ID NO: 951725 - DNA, 33 bp, Homo sapien
acatagagtaggcttcaaaataaattcaggatt

SEQ ID NO: 951726 - DNA, 33 bp, Homo sapien
acatagagtaggcttcgaaataaattcaggatt

SEQ ID NO: 951727 - DNA, 33 bp, Homo sapien
aaataccaaattcttaactcgcattctcaaatt

SEQ ID NO: 951728 - DNA, 33 bp, Homo sapien
aaataccaaattcttacctcgcattctcaaatt

SEQ ID NO: 951729 - DNA, 33 bp, Homo sapien
ttcctgtttggaaccacctaatccacattcatg

SEQ ID NO: 951730 - DNA, 33 bp, Homo sapien
ttcctgtttggaaccagctaatccacattcatg

SEQ ID NO: 951731 - DNA, 33 bp, Homo sapien
ggagacaggcaatggacagaatcagaaggtttt

SEQ ID NO: 951732 - DNA, 33 bp, Homo sapien
ggagacaggcaatggagagaatcagaaggtttt

SEQ ID NO: 951733 - DNA, 33 bp, Homo sapien
gtatttcctatgccaactcacaaacatatttgt

SEQ ID NO: 951734 - DNA, 33 bp, Homo sapien
gtatttcctatgccaattcacaaacatatttgt

SEQ ID NO: 951735 - DNA, 33 bp, Homo sapien
aattaactcaaactaaggtttaatgatcacgac

SEQ ID NO: 951736 - DNA, 33 bp, Homo sapien
aattaactcaaactaatgtttaatgatcacgac

SEQ ID NO: 951737 - DNA, 33 bp, Homo sapien
atggtagcaatattgacagaatttggaactttc

SEQ ID NO: 951738 - DNA, 33 bp, Homo sapien
atggtagcaatattgagagaatttggaactttc

SEQ ID NO: 951739 - DNA, 33 bp, Homo sapien
gtaagtatgagctctaaaaggaggaattaaatg

SEQ ID NO: 951740 - DNA, 33 bp, Homo sapien
gtaagtatgagctctataaggaggaattaaatg

SEQ ID NO: 951741 - DNA, 33 bp, Homo sapien
aaaaatatagcatttaaaggtataaagagcatc

SEQ ID NO: 951742 - DNA, 33 bp, Homo sapien
aaaaatatagcatttacaggtataaagagcatc

SEQ ID NO: 951743 - DNA, 33 bp, Homo sapien
aacgagaactcggtaaaagttcttattttctca

SEQ ID NO: 951744 - DNA, 33 bp, Homo sapien
aacgagaactcggtaatagttcttattttctca

SEQ ID NO: 951745 - DNA, 33 bp, Homo sapien
gactatggcaatgcaactaatcaacagagccct

SEQ ID NO: 951746 - DNA, 33 bp, Homo sapien
gactatggcaatgcaattaatcaacagagccct

SEQ ID NO: 951747 - DNA, 33 bp, Homo sapien
aacacaggtagaaaccccagagcatggagagcc

SEQ ID NO: 951748 - DNA, 33 bp, Homo sapien
aacacaggtagaaacctcagagcatggagagcc

SEQ ID NO: 951749 - DNA, 33 bp, Homo sapien
aagatatctccaagtacgcagcatgagacaatt

SEQ ID NO: 951750 - DNA, 33 bp, Homo sapien
aagatatctccaagtatgcagcatgagacaatt

SEQ ID NO: 951751 - DNA, 33 bp, Homo sapien
agtttttcatataccacgttgaaagtgtcagga

SEQ ID NO: 951752 - DNA, 33 bp, Homo sapien
agtttttcatataccatgttgaaagtgtcagga

SEQ ID NO: 951753 - DNA, 33 bp, Homo sapien
gaaaaaacacaatgaactgaaaataatgagaaa

SEQ ID NO: 951754 - DNA, 33 bp, Homo sapien
gaaaaaacacaatgaagtgaaaataatgagaaa

SEQ ID NO: 951755 - DNA, 33 bp, Homo sapien
taaattaattgcaggaagctgtgctctacattt

SEQ ID NO: 951756 - DNA, 33 bp, Homo sapien
taaattaattgcaggaggctgtgctctacattt

SEQ ID NO: 951757 - DNA, 33 bp, Homo sapien
acttgatcctcaaaaaaaatggcttatagattc

SEQ ID NO: 951758 - DNA, 33 bp, Homo sapien
acttgatcctcaaaaataatggcttatagattc

SEQ ID NO: 951759 - DNA, 33 bp, Homo sapien
ttttatgtgctactctaaaaaatggtatcctgg

SEQ ID NO: 951760 - DNA, 33 bp, Homo sapien
ttttatgtgctactctgaaaaatggtatcctgg

SEQ ID NO: 951761 - DNA, 33 bp, Homo sapien
agtaacaaatcaagcacgcccaagttccttgct

SEQ ID NO: 951762 - DNA, 33 bp, Homo sapien
agtaacaaatcaagcaggcccaagttccttgct

SEQ ID NO: 951763 - DNA, 33 bp, Homo sapien
aaaaatgtaaagtcagaaaacacaagaacttag

SEQ ID NO: 951764 - DNA, 33 bp, Homo sapien
aaaaatgtaaagtcaggaaacacaagaacttag

SEQ ID NO: 951765 - DNA, 33 bp, Homo sapien
cctgccaggttagcaagactcttacggtaggga

SEQ ID NO: 951766 - DNA, 33 bp, Homo sapien
cctgccaggttagcaatactcttacggtaggga

SEQ ID NO: 951767 - DNA, 33 bp, Homo sapien
actaagaacggtgtgacaggcaatgaagatgca

SEQ ID NO: 951768 - DNA, 33 bp, Homo sapien
actaagaacggtgtgataggcaatgaagatgca

SEQ ID NO: 951769 - DNA, 33 bp, Homo sapien
atagaatgcctattgggacagctaaaaaaattc

SEQ ID NO: 951770 - DNA, 33 bp, Homo sapien
atagaatgcctattggtacagctaaaaaaattc

SEQ ID NO: 951771 - DNA, 33 bp, Homo sapien
tgacattgtctttcacagagcagaagttttaaa

SEQ ID NO: 951772 - DNA, 33 bp, Homo sapien
tgacattgtctttcacggagcagaagttttaaa

SEQ ID NO: 951773 - DNA, 33 bp, Homo sapien
gaccctctttctactacacaggaagaattatta

SEQ ID NO: 951774 - DNA, 33 bp, Homo sapien
gaccctctttctactatacaggaagaattatta

SEQ ID NO: 951775 - DNA, 33 bp, Homo sapien
aaactttctattccaaaaaagatcaggccatag

SEQ ID NO: 951776 - DNA, 33 bp, Homo sapien
aaactttctattccaagaaagatcaggccatag

SEQ ID NO: 951777 - DNA, 33 bp, Homo sapien
actcatggggcatagacaatttttaaatcttag

SEQ ID NO: 951778 - DNA, 33 bp, Homo sapien
actcatggggcatagataatttttaaatcttag

SEQ ID NO: 951779 - DNA, 33 bp, Homo sapien
cacgtagattagtaccacaattcaaactggatg

SEQ ID NO: 951780 - DNA, 33 bp, Homo sapien
cacgtagattagtacctcaattcaaactggatg

SEQ ID NO: 951781 - DNA, 33 bp, Homo sapien
aagaacaagactgtaacaaagatcagctgagcg

SEQ ID NO: 951782 - DNA, 33 bp, Homo sapien
aagaacaagactgtaagaaagatcagctgagcg

SEQ ID NO: 951783 - DNA, 33 bp, Homo sapien
ctccctataatttagcaaactcgtgaaattata

SEQ ID NO: 951784 - DNA, 33 bp, Homo sapien
ctccctataatttagcgaactcgtgaaattata

SEQ ID NO: 951785 - DNA, 33 bp, Homo sapien
ctggtggatatgatagcattaaggtcaacatgg

SEQ ID NO: 951786 - DNA, 33 bp, Homo sapien
ctggtggatatgataggattaaggtcaacatgg

SEQ ID NO: 951787 - DNA, 33 bp, Homo sapien
tgcaagagttctagccacatcctcctcagtgct

SEQ ID NO: 951788 - DNA, 33 bp, Homo sapien
tgcaagagttctagccgcatcctcctcagtgct

SEQ ID NO: 951789 - DNA, 33 bp, Homo sapien
ccagtgacagtaagtaagtcagtggtttccttt

SEQ ID NO: 951790 - DNA, 33 bp, Homo sapien
ccagtgacagtaagtaggtcagtggtttccttt

SEQ ID NO: 951791 - DNA, 33 bp, Homo sapien
gcaactttgcacaatacccaaacagtggaaaca

SEQ ID NO: 951792 - DNA, 33 bp, Homo sapien
gcaactttgcacaatagccaaacagtggaaaca

SEQ ID NO: 951793 - DNA, 33 bp, Homo sapien
gggagtggaaacacaaccctctgggagcggact

SEQ ID NO: 951794 - DNA, 33 bp, Homo sapien
gggagtggaaacacaatcctctgggagcggact

SEQ ID NO: 951795 - DNA, 33 bp, Homo sapien
ttataattgctgggtagagaatttttcctgggg

SEQ ID NO: 951796 - DNA, 33 bp, Homo sapien
ttataattgctgggtatagaatttttcctgggg

SEQ ID NO: 951797 - DNA, 33 bp, Homo sapien
acacatctgggtgttaggctgtagtctcatcat

SEQ ID NO: 951798 - DNA, 33 bp, Homo sapien
acacatctgggtgttatgctgtagtctcatcat

SEQ ID NO: 951799 - DNA, 33 bp, Homo sapien
tagtgttctcattttgaaagacaattgccagcc

SEQ ID NO: 951800 - DNA, 33 bp, Homo sapien
tagtgttctcattttggaagacaattgccagcc

SEQ ID NO: 951801 - DNA, 33 bp, Homo sapien
taatgggggtagcaaaagaatttgatgttctgt

SEQ ID NO: 951802 - DNA, 33 bp, Homo sapien
taatgggggtagcaaacgaatttgatgttctgt

SEQ ID NO: 951803 - DNA, 33 bp, Homo sapien
aactatgtctgaggctcacagttacctcatctt

SEQ ID NO: 951804 - DNA, 33 bp, Homo sapien
aactatgtctgaggcttacagttacctcatctt

SEQ ID NO: 951805 - DNA, 33 bp, Homo sapien
ttcttcattaaaacaccggagagaaagtagtag

SEQ ID NO: 951806 - DNA, 33 bp, Homo sapien
ttcttcattaaaacactggagagaaagtagtag

SEQ ID NO: 951807 - DNA, 33 bp, Homo sapien
gtcccaattcagaaaagaagtcagctctactac

SEQ ID NO: 951808 - DNA, 33 bp, Homo sapien
gtcccaattcagaaaataagtcagctctactac

SEQ ID NO: 951809 - DNA, 33 bp, Homo sapien
gttaaccacctagaagacaaaatgtaaaaggaa

SEQ ID NO: 951810 - DNA, 33 bp, Homo sapien
gttaaccacctagaagccaaaatgtaaaaggaa

SEQ ID NO: 951811 - DNA, 33 bp, Homo sapien
catccattctttcccaatcaacagaaaagtcga

SEQ ID NO: 951812 - DNA, 33 bp, Homo sapien
catccattctttcccagtcaacagaaaagtcga

SEQ ID NO: 951813 - DNA, 33 bp, Homo sapien
gaagccagagggaagaaagcactcagggcatat

SEQ ID NO: 951814 - DNA, 33 bp, Homo sapien
gaagccagagggaagagagcactcagggcatat

SEQ ID NO: 951815 - DNA, 33 bp, Homo sapien
cagaaacaacctgttacgaccctaagactagtt

SEQ ID NO: 951816 - DNA, 33 bp, Homo sapien
cagaaacaacctgttaggaccctaagactagtt

SEQ ID NO: 951817 - DNA, 33 bp, Homo sapien
tttatgaatttactaactgtttgatgatacatt

SEQ ID NO: 951818 - DNA, 33 bp, Homo sapien
tttatgaatttactaattgtttgatgatacatt

SEQ ID NO: 951819 - DNA, 33 bp, Homo sapien
cagataaaaaatcgtgaagaatgtatcatcaaa

SEQ ID NO: 951820 - DNA, 33 bp, Homo sapien
cagataaaaaatcgtggagaatgtatcatcaaa

SEQ ID NO: 951821 - DNA, 33 bp, Homo sapien
agcaacacaagaattacaatagcaggacaatat

SEQ ID NO: 951822 - DNA, 33 bp, Homo sapien
agcaacacaagaattagaatagcaggacaatat

SEQ ID NO: 951823 - DNA, 33 bp, Homo sapien
tccacagctaaatatacgtcacttacttgctga

SEQ ID NO: 951824 - DNA, 33 bp, Homo sapien
tccacagctaaatatatgtcacttacttgctga

SEQ ID NO: 951825 - DNA, 33 bp, Homo sapien
taatgtataggaagaaataatgagctgaaggta

SEQ ID NO: 951826 - DNA, 33 bp, Homo sapien
taatgtataggaagaactaatgagctgaaggta

SEQ ID NO: 951827 - DNA, 33 bp, Homo sapien
aagatacttgctttcacgttgcacaatttccaa

SEQ ID NO: 951828 - DNA, 33 bp, Homo sapien
aagatacttgctttcaggttgcacaatttccaa

SEQ ID NO: 951829 - DNA, 33 bp, Homo sapien
ttcatcagttccctaaaactttttgctcagagg

SEQ ID NO: 951830 - DNA, 33 bp, Homo sapien
ttcatcagttccctaagactttttgctcagagg

SEQ ID NO: 951831 - DNA, 33 bp, Homo sapien
cctgctttatagcgaaaaaatatggtcctaaat

SEQ ID NO: 951832 - DNA, 33 bp, Homo sapien
cctgctttatagcgaagaaatatggtcctaaat

SEQ ID NO: 951833 - DNA, 33 bp, Homo sapien
ggactctgggcaaaacggggatttaggaccata

SEQ ID NO: 951834 - DNA, 33 bp, Homo sapien
ggactctgggcaaaactgggatttaggaccata

SEQ ID NO: 951835 - DNA, 33 bp, Homo sapien
caacaacataaatttccatacacaggaaactga

SEQ ID NO: 951836 - DNA, 33 bp, Homo sapien
caacaacataaatttctatacacaggaaactga

SEQ ID NO: 951837 - DNA, 33 bp, Homo sapien
caaaatcaaaaaagacaaaggttgaagaactgt

SEQ ID NO: 951838 - DNA, 33 bp, Homo sapien
caaaatcaaaaaagacgaaggttgaagaactgt

SEQ ID NO: 951839 - DNA, 33 bp, Homo sapien
ttgaagaatttgagtaaagggtatgtggagttc

SEQ ID NO: 951840 - DNA, 33 bp, Homo sapien
ttgaagaatttgagtatagggtatgtggagttc

SEQ ID NO: 951841 - DNA, 33 bp, Homo sapien
ttttaaggtcataaccaatattagatgcacttt

SEQ ID NO: 951842 - DNA, 33 bp, Homo sapien
ttttaaggtcataaccgatattagatgcacttt

SEQ ID NO: 951843 - DNA, 33 bp, Homo sapien
gaattttaatatacagactggaagtaataacaa

SEQ ID NO: 951844 - DNA, 33 bp, Homo sapien
gaattttaatatacagtctggaagtaataacaa

SEQ ID NO: 951845 - DNA, 33 bp, Homo sapien
tggtctggcctatagacgttttcttcctttgtt

SEQ ID NO: 951846 - DNA, 33 bp, Homo sapien
tggtctggcctatagatgttttcttcctttgtt

SEQ ID NO: 951847 - DNA, 33 bp, Homo sapien
aatgctttctctttagaatttgcattaagattc

SEQ ID NO: 951848 - DNA, 33 bp, Homo sapien
aatgctttctctttaggatttgcattaagattc

SEQ ID NO: 951849 - DNA, 33 bp, Homo sapien
ttctgcagagaccaaacagaagtaaggtattaa

SEQ ID NO: 951850 - DNA, 33 bp, Homo sapien
ttctgcagagaccaaatagaagtaaggtattaa

SEQ ID NO: 951851 - DNA, 33 bp, Homo sapien
agatagtgggccatgacgagttaaagtgtttca

SEQ ID NO: 951852 - DNA, 33 bp, Homo sapien
agatagtgggccatgatgagttaaagtgtttca

SEQ ID NO: 951853 - DNA, 33 bp, Homo sapien
caatccttccggcctacgttcaaatgccagctt

SEQ ID NO: 951854 - DNA, 33 bp, Homo sapien
caatccttccggcctatgttcaaatgccagctt

SEQ ID NO: 951855 - DNA, 33 bp, Homo sapien
tttaaaaggcaagcagacatatattattagtgc

SEQ ID NO: 951856 - DNA, 33 bp, Homo sapien
tttaaaaggcaagcagtcatatattattagtgc

SEQ ID NO: 951857 - DNA, 33 bp, Homo sapien
gaaatctgacaatacccataattagcaaggaga

SEQ ID NO: 951858 - DNA, 33 bp, Homo sapien
gaaatctgacaatacctataattagcaaggaga

SEQ ID NO: 951859 - DNA, 33 bp, Homo sapien
ttggatgatttagaccaggagaaactagattat

SEQ ID NO: 951860 - DNA, 33 bp, Homo sapien
ttggatgatttagaccgggagaaactagattat

SEQ ID NO: 951861 - DNA, 33 bp, Homo sapien
ttagagaatgataacaatggatgaagcagaaag

SEQ ID NO: 951862 - DNA, 33 bp, Homo sapien
ttagagaatgataacattggatgaagcagaaag

SEQ ID NO: 951863 - DNA, 33 bp, Homo sapien
ccataatcccatctcactaactgttgttctagt

SEQ ID NO: 951864 - DNA, 33 bp, Homo sapien
ccataatcccatctcattaactgttgttctagt

SEQ ID NO: 951865 - DNA, 33 bp, Homo sapien
tttatttctggatgcaactttattttttaaacg

SEQ ID NO: 951866 - DNA, 33 bp, Homo sapien
tttatttctggatgcagctttattttttaaacg

SEQ ID NO: 951867 - DNA, 33 bp, Homo sapien
gctacttaaccatgtgaaatgtaataaacactc

SEQ ID NO: 951868 - DNA, 33 bp, Homo sapien
gctacttaaccatgtggaatgtaataaacactc

SEQ ID NO: 951869 - DNA, 33 bp, Homo sapien
gacaacgtgttttactcaaagcagtagttctat

SEQ ID NO: 951870 - DNA, 33 bp, Homo sapien
gacaacgtgttttactgaaagcagtagttctat

SEQ ID NO: 951871 - DNA, 33 bp, Homo sapien
gtatttaaactttaaagcaggagtcagcaaact

SEQ ID NO: 951872 - DNA, 33 bp, Homo sapien
gtatttaaactttaaatcaggagtcagcaaact

SEQ ID NO: 951873 - DNA, 33 bp, Homo sapien
acaaaatgatgccaagacaaggagtattaccag

SEQ ID NO: 951874 - DNA, 33 bp, Homo sapien
acaaaatgatgccaaggcaaggagtattaccag

SEQ ID NO: 951875 - DNA, 33 bp, Homo sapien
catactgttcttgtggccatgaataagtcccac

SEQ ID NO: 951876 - DNA, 33 bp, Homo sapien
catactgttcttgtggtcatgaataagtcccac

SEQ ID NO: 951877 - DNA, 33 bp, Homo sapien
atccattcatccattcaacacatttggatgact

SEQ ID NO: 951878 - DNA, 33 bp, Homo sapien
atccattcatccattcgacacatttggatgact

SEQ ID NO: 951879 - DNA, 33 bp, Homo sapien
agactgtgacctccaactgagacgcagaaaaga

SEQ ID NO: 951880 - DNA, 33 bp, Homo sapien
agactgtgacctccaagtgagacgcagaaaaga

SEQ ID NO: 951881 - DNA, 33 bp, Homo sapien
tttctctatttgctcaaatttcaatctttttgg

SEQ ID NO: 951882 - DNA, 33 bp, Homo sapien
tttctctatttgctcacatttcaatctttttgg

SEQ ID NO: 951883 - DNA, 33 bp, Homo sapien
actgtctatgaacccaaaaggtgagcagacatg

SEQ ID NO: 951884 - DNA, 33 bp, Homo sapien
actgtctatgaacccagaaggtgagcagacatg

SEQ ID NO: 951885 - DNA, 33 bp, Homo sapien
ggtcgaaacactgggaaaatgtaaagtggagca

SEQ ID NO: 951886 - DNA, 33 bp, Homo sapien
ggtcgaaacactgggacaatgtaaagtggagca

SEQ ID NO: 951887 - DNA, 33 bp, Homo sapien
agccaaaacatatctaagcattacttcattcct

SEQ ID NO: 951888 - DNA, 33 bp, Homo sapien
agccaaaacatatctaggcattacttcattcct

SEQ ID NO: 951889 - DNA, 33 bp, Homo sapien
catttccgcatgctaaacggctcattcacaagt

SEQ ID NO: 951890 - DNA, 33 bp, Homo sapien
catttccgcatgctaagcggctcattcacaagt

SEQ ID NO: 951891 - DNA, 33 bp, Homo sapien
tggtggccttcattaccgggtagtgtgttcctt

SEQ ID NO: 951892 - DNA, 33 bp, Homo sapien
tggtggccttcattactgggtagtgtgttcctt

SEQ ID NO: 951893 - DNA, 33 bp, Homo sapien
ttcagtcaaaagagataagggaggtatacattt

SEQ ID NO: 951894 - DNA, 33 bp, Homo sapien
ttcagtcaaaagagatcagggaggtatacattt

SEQ ID NO: 951895 - DNA, 33 bp, Homo sapien
tatagaaaaggatgacaaactgctccttaatcc

SEQ ID NO: 951896 - DNA, 33 bp, Homo sapien
tatagaaaaggatgacgaactgctccttaatcc

SEQ ID NO: 951897 - DNA, 33 bp, Homo sapien
aatcttaaaaatttctcacactaccctctggtt

SEQ ID NO: 951898 - DNA, 33 bp, Homo sapien
aatcttaaaaatttctgacactaccctctggtt

SEQ ID NO: 951899 - DNA, 33 bp, Homo sapien
ataaagacatcaaaaaagtgagagatttgcctt

SEQ ID NO: 951900 - DNA, 33 bp, Homo sapien
ataaagacatcaaaaaggtgagagatttgcctt

SEQ ID NO: 951901 - DNA, 33 bp, Homo sapien
aaaattatatatgacaccattggctaacagtga

SEQ ID NO: 951902 - DNA, 33 bp, Homo sapien
aaaattatatatgacatcattggctaacagtga

SEQ ID NO: 951903 - DNA, 33 bp, Homo sapien
tagccaagatttgaaaagaaactcagtgtccat

SEQ ID NO: 951904 - DNA, 33 bp, Homo sapien
tagccaagatttgaaaggaaactcagtgtccat

SEQ ID NO: 951905 - DNA, 33 bp, Homo sapien
ttattataactactgacaattgaaaaagcatca

SEQ ID NO: 951906 - DNA, 33 bp, Homo sapien
ttattataactactgagaattgaaaaagcatca

SEQ ID NO: 951907 - DNA, 33 bp, Homo sapien
tcagagatatgcctacactgagatgaaaaatta

SEQ ID NO: 951908 - DNA, 33 bp, Homo sapien
tcagagatatgcctacgctgagatgaaaaatta

SEQ ID NO: 951909 - DNA, 33 bp, Homo sapien
agagtggtagtcatcacaggcatagtgttgatt

SEQ ID NO: 951910 - DNA, 33 bp, Homo sapien
agagtggtagtcatcataggcatagtgttgatt

SEQ ID NO: 951911 - DNA, 33 bp, Homo sapien
caacagctgtgttttacactgaacttaaacaac

SEQ ID NO: 951912 - DNA, 33 bp, Homo sapien
caacagctgtgttttatactgaacttaaacaac

SEQ ID NO: 951913 - DNA, 33 bp, Homo sapien
gattccctctattctgaagttacgcccgaacag

SEQ ID NO: 951914 - DNA, 33 bp, Homo sapien
gattccctctattctgcagttacgcccgaacag

SEQ ID NO: 951915 - DNA, 33 bp, Homo sapien
tttctgcctatttgttcaaaagcaaccaaaaat

SEQ ID NO: 951916 - DNA, 33 bp, Homo sapien
tttctgcctatttgttgaaaagcaaccaaaaat

SEQ ID NO: 951917 - DNA, 33 bp, Homo sapien
tgaaatacgtgaaatcacattacacatcagcat

SEQ ID NO: 951918 - DNA, 33 bp, Homo sapien
tgaaatacgtgaaatcccattacacatcagcat

SEQ ID NO: 951919 - DNA, 33 bp, Homo sapien
aaaagaaagcttctcaccttcagttatctgtta

SEQ ID NO: 951920 - DNA, 33 bp, Homo sapien
aaaagaaagcttctcatcttcagttatctgtta

SEQ ID NO: 951921 - DNA, 33 bp, Homo sapien
gtgaaatagacttccacgtatgaaaaagagttt

SEQ ID NO: 951922 - DNA, 33 bp, Homo sapien
gtgaaatagacttccaggtatgaaaaagagttt

SEQ ID NO: 951923 - DNA, 33 bp, Homo sapien
tcatagctgcattaaaatagttctcaatgacat

SEQ ID NO: 951924 - DNA, 33 bp, Homo sapien
tcatagctgcattaaagtagttctcaatgacat

SEQ ID NO: 951925 - DNA, 33 bp, Homo sapien
agcccctggctactacggatcaacttctatctc

SEQ ID NO: 951926 - DNA, 33 bp, Homo sapien
agcccctggctactactgatcaacttctatctc

SEQ ID NO: 951927 - DNA, 33 bp, Homo sapien
atccacccgcctcggccaatacatacaatctta

SEQ ID NO: 951928 - DNA, 33 bp, Homo sapien
atccacccgcctcggctaatacatacaatctta

SEQ ID NO: 951929 - DNA, 33 bp, Homo sapien
atctgtaaattagacagagctcacagcaactca

SEQ ID NO: 951930 - DNA, 33 bp, Homo sapien
atctgtaaattagacatagctcacagcaactca

SEQ ID NO: 951931 - DNA, 33 bp, Homo sapien
aaaaacttacaacaaaatgatttaggcagtata

SEQ ID NO: 951932 - DNA, 33 bp, Homo sapien
aaaaacttacaacaaagtgatttaggcagtata

SEQ ID NO: 951933 - DNA, 33 bp, Homo sapien
attctaaacattcaaaacagtcttaaatattac

SEQ ID NO: 951934 - DNA, 33 bp, Homo sapien
attctaaacattcaaagcagtcttaaatattac

SEQ ID NO: 951935 - DNA, 33 bp, Homo sapien
ttctttcgcaaaatcaaatcttcagcgcacaga

SEQ ID NO: 951936 - DNA, 33 bp, Homo sapien
ttctttcgcaaaatcatatcttcagcgcacaga

SEQ ID NO: 951937 - DNA, 33 bp, Homo sapien
tctacaaagctggctacccagtcagtgcagtgc

SEQ ID NO: 951938 - DNA, 33 bp, Homo sapien
tctacaaagctggctatccagtcagtgcagtgc

SEQ ID NO: 951939 - DNA, 33 bp, Homo sapien
gaagtggttgggtgacagaaacttctaagtggg

SEQ ID NO: 951940 - DNA, 33 bp, Homo sapien
gaagtggttgggtgacggaaacttctaagtggg

SEQ ID NO: 951941 - DNA, 33 bp, Homo sapien
taagattggcaaaactgaaagcatcagcattac

SEQ ID NO: 951942 - DNA, 33 bp, Homo sapien
taagattggcaaaacttaaagcatcagcattac

SEQ ID NO: 951943 - DNA, 33 bp, Homo sapien
ctggctgtgaattagccgacatgatgcggtagg

SEQ ID NO: 951944 - DNA, 33 bp, Homo sapien
ctggctgtgaattagctgacatgatgcggtagg

SEQ ID NO: 951945 - DNA, 33 bp, Homo sapien
ctcaccgacacttccaaatgtttttaacagcag

SEQ ID NO: 951946 - DNA, 33 bp, Homo sapien
ctcaccgacacttccagatgtttttaacagcag

SEQ ID NO: 951947 - DNA, 33 bp, Homo sapien
ttgattgtggaaaccaatgcaaacagaggctaa

SEQ ID NO: 951948 - DNA, 33 bp, Homo sapien
ttgattgtggaaaccagtgcaaacagaggctaa

SEQ ID NO: 951949 - DNA, 33 bp, Homo sapien
taacatttgggatagacggggttaaataaaata

SEQ ID NO: 951950 - DNA, 33 bp, Homo sapien
taacatttgggatagatggggttaaataaaata

SEQ ID NO: 951951 - DNA, 33 bp, Homo sapien
aagccaagatccataaaacagtcttcagagaac

SEQ ID NO: 951952 - DNA, 33 bp, Homo sapien
aagccaagatccataagacagtcttcagagaac

SEQ ID NO: 951953 - DNA, 33 bp, Homo sapien
tggtaaggaaaagtgaatattaactgcagaggt

SEQ ID NO: 951954 - DNA, 33 bp, Homo sapien
tggtaaggaaaagtgagtattaactgcagaggt

SEQ ID NO: 951955 - DNA, 33 bp, Homo sapien
ggaaatggaagatggactcagccctttgtagat

SEQ ID NO: 951956 - DNA, 33 bp, Homo sapien
ggaaatggaagatggattcagccctttgtagat

SEQ ID NO: 951957 - DNA, 33 bp, Homo sapien
ggcatctgcactcacagtaagtaggtaaaaatg

SEQ ID NO: 951958 - DNA, 33 bp, Homo sapien
ggcatctgcactcacattaagtaggtaaaaatg

SEQ ID NO: 951959 - DNA, 33 bp, Homo sapien
agttctttccaagtcagaggtatagattactac

SEQ ID NO: 951960 - DNA, 33 bp, Homo sapien
agttctttccaagtcataggtatagattactac

SEQ ID NO: 951961 - DNA, 33 bp, Homo sapien
gcaattactgattcaaggaaaaattccatttag

SEQ ID NO: 951962 - DNA, 33 bp, Homo sapien
gcaattactgattcaatgaaaaattccatttag

SEQ ID NO: 951963 - DNA, 33 bp, Homo sapien
ggactgcgcaccctgggaattttacgcaacaga

SEQ ID NO: 951964 - DNA, 33 bp, Homo sapien
ggactgcgcaccctggtaattttacgcaacaga

SEQ ID NO: 951965 - DNA, 33 bp, Homo sapien
taggataagagtcacaaacctgtcaccagaaaa

SEQ ID NO: 951966 - DNA, 33 bp, Homo sapien
taggataagagtcacagacctgtcaccagaaaa

SEQ ID NO: 951967 - DNA, 33 bp, Homo sapien
caacatgcttatttcacacagcctctttgaaga

SEQ ID NO: 951968 - DNA, 33 bp, Homo sapien
caacatgcttatttcagacagcctctttgaaga

SEQ ID NO: 951969 - DNA, 33 bp, Homo sapien
tgacaatacataatgcacacaatgatgcaacat

SEQ ID NO: 951970 - DNA, 33 bp, Homo sapien
tgacaatacataatgcgcacaatgatgcaacat

SEQ ID NO: 951971 - DNA, 33 bp, Homo sapien
cttaaacgaaatggatcacaaatacaaatgtta

SEQ ID NO: 951972 - DNA, 33 bp, Homo sapien
cttaaacgaaatggatgacaaatacaaatgtta

SEQ ID NO: 951973 - DNA, 33 bp, Homo sapien
attttaccgacgagaaatctgacgcaaacggga

SEQ ID NO: 951974 - DNA, 33 bp, Homo sapien
attttaccgacgagaactctgacgcaaacggga

SEQ ID NO: 951975 - DNA, 33 bp, Homo sapien
agacgtttctttaactcaccgatttcaatcttt

SEQ ID NO: 951976 - DNA, 33 bp, Homo sapien
agacgtttctttaacttaccgatttcaatcttt

SEQ ID NO: 951977 - DNA, 33 bp, Homo sapien
tcaactcccaggcactcagaaagtagataccac

SEQ ID NO: 951978 - DNA, 33 bp, Homo sapien
tcaactcccaggcactgagaaagtagataccac

SEQ ID NO: 951979 - DNA, 33 bp, Homo sapien
ttaaaatgtatttctcaatccggcctaatggag

SEQ ID NO: 951980 - DNA, 33 bp, Homo sapien
ttaaaatgtatttctccatccggcctaatggag

SEQ ID NO: 951981 - DNA, 33 bp, Homo sapien
agagctgtgccacaagacaatgacacataaacg

SEQ ID NO: 951982 - DNA, 33 bp, Homo sapien
agagctgtgccacaagccaatgacacataaacg

SEQ ID NO: 951983 - DNA, 33 bp, Homo sapien
tagattcaatggaaaagactatgccccagttta

SEQ ID NO: 951984 - DNA, 33 bp, Homo sapien
tagattcaatggaaaatactatgccccagttta

SEQ ID NO: 951985 - DNA, 33 bp, Homo sapien
cctggatttggcatcaacacttagttaagtagg

SEQ ID NO: 951986 - DNA, 33 bp, Homo sapien
cctggatttggcatcagcacttagttaagtagg

SEQ ID NO: 951987 - DNA, 33 bp, Homo sapien
gaacgcaccacagttacgctgcctcctttgcca

SEQ ID NO: 951988 - DNA, 33 bp, Homo sapien
gaacgcaccacagttatgctgcctcctttgcca

SEQ ID NO: 951989 - DNA, 33 bp, Homo sapien
gaggaagggtaataacaacaacgaaaatacttt

SEQ ID NO: 951990 - DNA, 33 bp, Homo sapien
gaggaagggtaataacgacaacgaaaatacttt

SEQ ID NO: 951991 - DNA, 33 bp, Homo sapien
gaagtgtccacttccccggatctctcccatacc

SEQ ID NO: 951992 - DNA, 33 bp, Homo sapien
gaagtgtccacttccctggatctctcccatacc

SEQ ID NO: 951993 - DNA, 33 bp, Homo sapien
aaacatctttttttagcaaccattatacagaca

SEQ ID NO: 951994 - DNA, 33 bp, Homo sapien
aaacatctttttttaggaaccattatacagaca

SEQ ID NO: 951995 - DNA, 33 bp, Homo sapien
catgcagttagttacacatgggatcatttgtcc

SEQ ID NO: 951996 - DNA, 33 bp, Homo sapien
catgcagttagttacagatgggatcatttgtcc

SEQ ID NO: 951997 - DNA, 33 bp, Homo sapien
gagactctacctttcacgaaatcccttagatac

SEQ ID NO: 951998 - DNA, 33 bp, Homo sapien
gagactctacctttcatgaaatcccttagatac

SEQ ID NO: 951999 - DNA, 33 bp, Homo sapien
gcagatacttcttacacggtaggagcaggagca

SEQ ID NO: 952000 - DNA, 33 bp, Homo sapien
gcagatacttcttacatggtaggagcaggagca

SEQ ID NO: 952001 - DNA, 33 bp, Homo sapien
gaccaagtgagatgcaatgatacttggcttggg

SEQ ID NO: 952002 - DNA, 33 bp, Homo sapien
gaccaagtgagatgcagtgatacttggcttggg

SEQ ID NO: 952003 - DNA, 33 bp, Homo sapien
ccaagtgaagaatgtacctatttcccaatttga

SEQ ID NO: 952004 - DNA, 33 bp, Homo sapien
ccaagtgaagaatgtatctatttcccaatttga

SEQ ID NO: 952005 - DNA, 33 bp, Homo sapien
gcgttggctgctggcacaatgtttgtaatttct

SEQ ID NO: 952006 - DNA, 33 bp, Homo sapien
gcgttggctgctggcataatgtttgtaatttct

SEQ ID NO: 952007 - DNA, 33 bp, Homo sapien
actctaaccattaccaaaatcatattctcatgg

SEQ ID NO: 952008 - DNA, 33 bp, Homo sapien
actctaaccattaccacaatcatattctcatgg

SEQ ID NO: 952009 - DNA, 33 bp, Homo sapien
atatttgcaagtcacaaatcgaattatttagta

SEQ ID NO: 952010 - DNA, 33 bp, Homo sapien
atatttgcaagtcacatatcgaattatttagta

SEQ ID NO: 952011 - DNA, 33 bp, Homo sapien
atacatcactgttaggaatataaaatgctgcag

SEQ ID NO: 952012 - DNA, 33 bp, Homo sapien
atacatcactgttaggtatataaaatgctgcag

SEQ ID NO: 952013 - DNA, 33 bp, Homo sapien
gaagccacctaggaaacttagcagggaagtagc

SEQ ID NO: 952014 - DNA, 33 bp, Homo sapien
gaagccacctaggaaatttagcagggaagtagc

SEQ ID NO: 952015 - DNA, 33 bp, Homo sapien
gtactagattgaggcaaatgtgtccaggatcct

SEQ ID NO: 952016 - DNA, 33 bp, Homo sapien
gtactagattgaggcatatgtgtccaggatcct

SEQ ID NO: 952017 - DNA, 33 bp, Homo sapien
cccagacagtgaagtaaaaacctagaagttcac

SEQ ID NO: 952018 - DNA, 33 bp, Homo sapien
cccagacagtgaagtagaaacctagaagttcac

SEQ ID NO: 952019 - DNA, 33 bp, Homo sapien
cttcctacaagccatactatatttctgtctacc

SEQ ID NO: 952020 - DNA, 33 bp, Homo sapien
cttcctacaagccatattatatttctgtctacc

SEQ ID NO: 952021 - DNA, 33 bp, Homo sapien
gctgtattgcgatatgaatctgtgtcaggtcag

SEQ ID NO: 952022 - DNA, 33 bp, Homo sapien
gctgtattgcgatatgtatctgtgtcaggtcag

SEQ ID NO: 952023 - DNA, 33 bp, Homo sapien
gttaccactgagattactaataaattcctcaaa

SEQ ID NO: 952024 - DNA, 33 bp, Homo sapien
gttaccactgagattagtaataaattcctcaaa

SEQ ID NO: 952025 - DNA, 33 bp, Homo sapien
acagaagttaagcacagtgcaggcctgtacagc

SEQ ID NO: 952026 - DNA, 33 bp, Homo sapien
acagaagttaagcacattgcaggcctgtacagc

SEQ ID NO: 952027 - DNA, 33 bp, Homo sapien
ttgataataaaagccaagtttttggaattcaga

SEQ ID NO: 952028 - DNA, 33 bp, Homo sapien
ttgataataaaagccatgtttttggaattcaga

SEQ ID NO: 952029 - DNA, 33 bp, Homo sapien
ttttaactgtcatccacgtcagggaagagaatg

SEQ ID NO: 952030 - DNA, 33 bp, Homo sapien
ttttaactgtcatccatgtcagggaagagaatg

SEQ ID NO: 952031 - DNA, 33 bp, Homo sapien
taccaagcggaaaggggcactcgaaatctagtt

SEQ ID NO: 952032 - DNA, 33 bp, Homo sapien
taccaagcggaaagggtcactcgaaatctagtt

SEQ ID NO: 952033 - DNA, 33 bp, Homo sapien
ctgcttgagaagctgacaagagcaaaagggttc

SEQ ID NO: 952034 - DNA, 33 bp, Homo sapien
ctgcttgagaagctgagaagagcaaaagggttc

SEQ ID NO: 952035 - DNA, 33 bp, Homo sapien
gaatctgttattgaaactggcagaaacacaaaa

SEQ ID NO: 952036 - DNA, 33 bp, Homo sapien
gaatctgttattgaaattggcagaaacacaaaa

SEQ ID NO: 952037 - DNA, 33 bp, Homo sapien
cactgaagggcatccacctaacctcataagaat

SEQ ID NO: 952038 - DNA, 33 bp, Homo sapien
cactgaagggcatccagctaacctcataagaat

SEQ ID NO: 952039 - DNA, 33 bp, Homo sapien
tgaaaatgtcctgaaactgatggtggttttggt

SEQ ID NO: 952040 - DNA, 33 bp, Homo sapien
tgaaaatgtcctgaaattgatggtggttttggt

SEQ ID NO: 952041 - DNA, 33 bp, Homo sapien
ttttggttttggcagtaaaaaaatgaggtactg

SEQ ID NO: 952042 - DNA, 33 bp, Homo sapien
ttttggttttggcagtgaaaaaatgaggtactg

SEQ ID NO: 952043 - DNA, 33 bp, Homo sapien
tagagtccgaggcatcaatataaactcctgttt

SEQ ID NO: 952044 - DNA, 33 bp, Homo sapien
tagagtccgaggcatctatataaactcctgttt

SEQ ID NO: 952045 - DNA, 33 bp, Homo sapien
gaccactgattgctctaacataagcaacttcac

SEQ ID NO: 952046 - DNA, 33 bp, Homo sapien
gaccactgattgctctgacataagcaacttcac

SEQ ID NO: 952047 - DNA, 33 bp, Homo sapien
tctggagtaggagaaacctggttacctagcaga

SEQ ID NO: 952048 - DNA, 33 bp, Homo sapien
tctggagtaggagaaatctggttacctagcaga

SEQ ID NO: 952049 - DNA, 33 bp, Homo sapien
aaactttttcatgtcaccatacctacggatgtt

SEQ ID NO: 952050 - DNA, 33 bp, Homo sapien
aaactttttcatgtcatcatacctacggatgtt

SEQ ID NO: 952051 - DNA, 33 bp, Homo sapien
agcaaaaataatagcaaataagctgaaagtgtt

SEQ ID NO: 952052 - DNA, 33 bp, Homo sapien
agcaaaaataatagcagataagctgaaagtgtt

SEQ ID NO: 952053 - DNA, 33 bp, Homo sapien
aacaaaaccagactaacaaaactgtagaccaat

SEQ ID NO: 952054 - DNA, 33 bp, Homo sapien
aacaaaaccagactaagaaaactgtagaccaat

SEQ ID NO: 952055 - DNA, 33 bp, Homo sapien
ttgtgtctctttcaacagacttcagaaagattt

SEQ ID NO: 952056 - DNA, 33 bp, Homo sapien
ttgtgtctctttcaaccgacttcagaaagattt

SEQ ID NO: 952057 - DNA, 33 bp, Homo sapien
tcactttgagcagactaaggtatttagctttaa

SEQ ID NO: 952058 - DNA, 33 bp, Homo sapien
tcactttgagcagactcaggtatttagctttaa

SEQ ID NO: 952059 - DNA, 33 bp, Homo sapien
caatgatttggaattcagaaacaagatcatgag

SEQ ID NO: 952060 - DNA, 33 bp, Homo sapien
caatgatttggaattcggaaacaagatcatgag

SEQ ID NO: 952061 - DNA, 33 bp, Homo sapien
tccttgaggagagaacagatttttctttgcaag

SEQ ID NO: 952062 - DNA, 33 bp, Homo sapien
tccttgaggagagaacggatttttctttgcaag

SEQ ID NO: 952063 - DNA, 33 bp, Homo sapien
ctatttagcaaggatgaaatatggtttagaagc

SEQ ID NO: 952064 - DNA, 33 bp, Homo sapien
ctatttagcaaggatgcaatatggtttagaagc

SEQ ID NO: 952065 - DNA, 33 bp, Homo sapien
gcttaaaaatcaaatgcaacagggattgtcaaa

SEQ ID NO: 952066 - DNA, 33 bp, Homo sapien
gcttaaaaatcaaatggaacagggattgtcaaa

SEQ ID NO: 952067 - DNA, 33 bp, Homo sapien
caaattctctgctatacacagttaagagtagtt

SEQ ID NO: 952068 - DNA, 33 bp, Homo sapien
caaattctctgctatagacagttaagagtagtt

SEQ ID NO: 952069 - DNA, 33 bp, Homo sapien
atgatggagctatatgaatgagaccaaaggagg

SEQ ID NO: 952070 - DNA, 33 bp, Homo sapien
atgatggagctatatggatgagaccaaaggagg

SEQ ID NO: 952071 - DNA, 33 bp, Homo sapien
agctttatgtttctacaaatgccagttatcctg

SEQ ID NO: 952072 - DNA, 33 bp, Homo sapien
agctttatgtttctaccaatgccagttatcctg

SEQ ID NO: 952073 - DNA, 33 bp, Homo sapien
gagtacacaagaataaagatccacagtcacact

SEQ ID NO: 952074 - DNA, 33 bp, Homo sapien
gagtacacaagaataaggatccacagtcacact

SEQ ID NO: 952075 - DNA, 33 bp, Homo sapien
ctgatggaagaaactggcagtctttgcaacaaa

SEQ ID NO: 952076 - DNA, 33 bp, Homo sapien
ctgatggaagaaactgtcagtctttgcaacaaa

SEQ ID NO: 952077 - DNA, 33 bp, Homo sapien
gtagtcagtactccagcagttgatgccgttgaa

SEQ ID NO: 952078 - DNA, 33 bp, Homo sapien
gtagtcagtactccaggagttgatgccgttgaa

SEQ ID NO: 952079 - DNA, 33 bp, Homo sapien
tcaccaatatcaggtacggtcattccaaaatgg

SEQ ID NO: 952080 - DNA, 33 bp, Homo sapien
tcaccaatatcaggtatggtcattccaaaatgg

SEQ ID NO: 952081 - DNA, 33 bp, Homo sapien
atactacttttattaaatcctgtgtgtctctgt

SEQ ID NO: 952082 - DNA, 33 bp, Homo sapien
atactacttttattaattcctgtgtgtctctgt

SEQ ID NO: 952083 - DNA, 33 bp, Homo sapien
gtgtgtgtgtgtgtgaacttgctcggtctcaat

SEQ ID NO: 952084 - DNA, 33 bp, Homo sapien
gtgtgtgtgtgtgtgagcttgctcggtctcaat

SEQ ID NO: 952085 - DNA, 33 bp, Homo sapien
tagttcagtgggtgcaaaaggtcaatagttctg

SEQ ID NO: 952086 - DNA, 33 bp, Homo sapien
tagttcagtgggtgcacaaggtcaatagttctg

SEQ ID NO: 952087 - DNA, 33 bp, Homo sapien
ctatcaccccaatgaacgtaacgaacaccactc

SEQ ID NO: 952088 - DNA, 33 bp, Homo sapien
ctatcaccccaatgaatgtaacgaacaccactc

SEQ ID NO: 952089 - DNA, 33 bp, Homo sapien
tggtcaactggaataaaaagctgaaaatgccaa

SEQ ID NO: 952090 - DNA, 33 bp, Homo sapien
tggtcaactggaataagaagctgaaaatgccaa

SEQ ID NO: 952091 - DNA, 33 bp, Homo sapien
ataaaattagcttcaacatccacagtctaacat

SEQ ID NO: 952092 - DNA, 33 bp, Homo sapien
ataaaattagcttcaatatccacagtctaacat

SEQ ID NO: 952093 - DNA, 33 bp, Homo sapien
gcctcaaagtctaagcacattggaactggataa

SEQ ID NO: 952094 - DNA, 33 bp, Homo sapien
gcctcaaagtctaagctcattggaactggataa

SEQ ID NO: 952095 - DNA, 33 bp, Homo sapien
atcttgactaaattgaacttgacagtagccctt

SEQ ID NO: 952096 - DNA, 33 bp, Homo sapien
atcttgactaaattgagcttgacagtagccctt

SEQ ID NO: 952097 - DNA, 33 bp, Homo sapien
gtgccgtgaagaattacgattaaagaatttgga

SEQ ID NO: 952098 - DNA, 33 bp, Homo sapien
gtgccgtgaagaattatgattaaagaatttgga

SEQ ID NO: 952099 - DNA, 33 bp, Homo sapien
tacaattcatcaagaacatagcacagagcactt

SEQ ID NO: 952100 - DNA, 33 bp, Homo sapien
tacaattcatcaagaagatagcacagagcactt

SEQ ID NO: 952101 - DNA, 33 bp, Homo sapien
ttaaagcctgacatacaatatacgttctaagag

SEQ ID NO: 952102 - DNA, 33 bp, Homo sapien
ttaaagcctgacatacgatatacgttctaagag

SEQ ID NO: 952103 - DNA, 33 bp, Homo sapien
tgataaagataaaggcaatggagatcctgtgat

SEQ ID NO: 952104 - DNA, 33 bp, Homo sapien
tgataaagataaaggcgatggagatcctgtgat

SEQ ID NO: 952105 - DNA, 33 bp, Homo sapien
atttgaccaagcaaaagtgactttttgtcccac

SEQ ID NO: 952106 - DNA, 33 bp, Homo sapien
atttgaccaagcaaaattgactttttgtcccac

SEQ ID NO: 952107 - DNA, 33 bp, Homo sapien
actttcatcctctttaggtaagtgaccctgaag

SEQ ID NO: 952108 - DNA, 33 bp, Homo sapien
actttcatcctctttatgtaagtgaccctgaag

SEQ ID NO: 952109 - DNA, 33 bp, Homo sapien
tgtgcgcttgtttgtaccaccctgataagtacc

SEQ ID NO: 952110 - DNA, 33 bp, Homo sapien
tgtgcgcttgtttgtagcaccctgataagtacc

SEQ ID NO: 952111 - DNA, 33 bp, Homo sapien
aatagagaacctagaaataaacccaaatattta

SEQ ID NO: 952112 - DNA, 33 bp, Homo sapien
aatagagaacctagaagtaaacccaaatattta

SEQ ID NO: 952113 - DNA, 33 bp, Homo sapien
aaccagttcattgtcaaattaaaaccctagcaa

SEQ ID NO: 952114 - DNA, 33 bp, Homo sapien
aaccagttcattgtcagattaaaaccctagcaa

SEQ ID NO: 952115 - DNA, 33 bp, Homo sapien
tggtatctagttggaaaagaagtagctgatctc

SEQ ID NO: 952116 - DNA, 33 bp, Homo sapien
tggtatctagttggaagagaagtagctgatctc

SEQ ID NO: 952117 - DNA, 33 bp, Homo sapien
ccatgaaataaaagcactgagagctgcataagg

SEQ ID NO: 952118 - DNA, 33 bp, Homo sapien
ccatgaaataaaagcattgagagctgcataagg

SEQ ID NO: 952119 - DNA, 33 bp, Homo sapien
cataaatgactggcaactgagccctagaaatga

SEQ ID NO: 952120 - DNA, 33 bp, Homo sapien
cataaatgactggcaattgagccctagaaatga

SEQ ID NO: 952121 - DNA, 33 bp, Homo sapien
agaaaatgtccctccgaagagactgagccccat

SEQ ID NO: 952122 - DNA, 33 bp, Homo sapien
agaaaatgtccctccgtagagactgagccccat

SEQ ID NO: 952123 - DNA, 33 bp, Homo sapien
tgtttctcaaattctacgtctggcttaaagttc

SEQ ID NO: 952124 - DNA, 33 bp, Homo sapien
tgtttctcaaattctatgtctggcttaaagttc

SEQ ID NO: 952125 - DNA, 33 bp, Homo sapien
actatgtttttagtctaacttcctggcagtact

SEQ ID NO: 952126 - DNA, 33 bp, Homo sapien
actatgtttttagtctgacttcctggcagtact

SEQ ID NO: 952127 - DNA, 33 bp, Homo sapien
tatgtctacacttgcacgaacttctctggagaa

SEQ ID NO: 952128 - DNA, 33 bp, Homo sapien
tatgtctacacttgcatgaacttctctggagaa

SEQ ID NO: 952129 - DNA, 33 bp, Homo sapien
aaaaaagatctagggcaaaaacagtatggtaaa

SEQ ID NO: 952130 - DNA, 33 bp, Homo sapien
aaaaaagatctagggcgaaaacagtatggtaaa

SEQ ID NO: 952131 - DNA, 33 bp, Homo sapien
taagtcaacagatgagaaaataactgaggaaca

SEQ ID NO: 952132 - DNA, 33 bp, Homo sapien
taagtcaacagatgaggaaataactgaggaaca

SEQ ID NO: 952133 - DNA, 33 bp, Homo sapien
aatgattaagtttttacgtgcttttagatgata

SEQ ID NO: 952134 - DNA, 33 bp, Homo sapien
aatgattaagtttttatgtgcttttagatgata

SEQ ID NO: 952135 - DNA, 33 bp, Homo sapien
tagaagaaaacccacaaatgccttctggtatgg

SEQ ID NO: 952136 - DNA, 33 bp, Homo sapien
tagaagaaaacccacatatgccttctggtatgg

SEQ ID NO: 952137 - DNA, 33 bp, Homo sapien
attgatttgagctagacatttgaaaagcaaccc

SEQ ID NO: 952138 - DNA, 33 bp, Homo sapien
attgatttgagctagagatttgaaaagcaaccc

SEQ ID NO: 952139 - DNA, 33 bp, Homo sapien
ttcaaaataggaaacactcacaaaaaagtgact

SEQ ID NO: 952140 - DNA, 33 bp, Homo sapien
ttcaaaataggaaacattcacaaaaaagtgact

SEQ ID NO: 952141 - DNA, 33 bp, Homo sapien
acactgagtaaaccgtaacgggatgtcatcagc

SEQ ID NO: 952142 - DNA, 33 bp, Homo sapien
acactgagtaaaccgtgacgggatgtcatcagc

SEQ ID NO: 952143 - DNA, 33 bp, Homo sapien
tcccatgagtatatcaagatgaataaggaccaa

SEQ ID NO: 952144 - DNA, 33 bp, Homo sapien
tcccatgagtatatcaggatgaataaggaccaa

SEQ ID NO: 952145 - DNA, 33 bp, Homo sapien
ttgcataacagcaaaaactacttttccactaaa

SEQ ID NO: 952146 - DNA, 33 bp, Homo sapien
ttgcataacagcaaaagctacttttccactaaa

SEQ ID NO: 952147 - DNA, 33 bp, Homo sapien
caacttcaagtaccacaactatcttggattttg

SEQ ID NO: 952148 - DNA, 33 bp, Homo sapien
caacttcaagtaccacgactatcttggattttg

SEQ ID NO: 952149 - DNA, 33 bp, Homo sapien
tttatacccaacttgccagtcttagaggctcag

SEQ ID NO: 952150 - DNA, 33 bp, Homo sapien
tttatacccaacttgcgagtcttagaggctcag

SEQ ID NO: 952151 - DNA, 33 bp, Homo sapien
aggactgatgttcttacgaggagacacacacac

SEQ ID NO: 952152 - DNA, 33 bp, Homo sapien
aggactgatgttcttatgaggagacacacacac

SEQ ID NO: 952153 - DNA, 33 bp, Homo sapien
ttatatagttgtgactaaactgttgatagaaat

SEQ ID NO: 952154 - DNA, 33 bp, Homo sapien
ttatatagttgtgactgaactgttgatagaaat

SEQ ID NO: 952155 - DNA, 33 bp, Homo sapien
gtggctgggtttaaaagcttaggatcagccggg

SEQ ID NO: 952156 - DNA, 33 bp, Homo sapien
gtggctgggtttaaaatcttaggatcagccggg

SEQ ID NO: 952157 - DNA, 33 bp, Homo sapien
tgttgcttattcagcaccgccacttgaaagact

SEQ ID NO: 952158 - DNA, 33 bp, Homo sapien
tgttgcttattcagcatcgccacttgaaagact

SEQ ID NO: 952159 - DNA, 33 bp, Homo sapien
agaatacagttgatgaagctcttcttgaaaaac

SEQ ID NO: 952160 - DNA, 33 bp, Homo sapien
agaatacagttgatgacgctcttcttgaaaaac

SEQ ID NO: 952161 - DNA, 33 bp, Homo sapien
tctgaagtattttccacaacacctgttagaata

SEQ ID NO: 952162 - DNA, 33 bp, Homo sapien
tctgaagtattttccagaacacctgttagaata

SEQ ID NO: 952163 - DNA, 33 bp, Homo sapien
gaggcctttatcctggcattgaaggatctaatt

SEQ ID NO: 952164 - DNA, 33 bp, Homo sapien
gaggcctttatcctggtattgaaggatctaatt

SEQ ID NO: 952165 - DNA, 33 bp, Homo sapien
aaaaagcagtttctgaaaattagatccttcaat

SEQ ID NO: 952166 - DNA, 33 bp, Homo sapien
aaaaagcagtttctgagaattagatccttcaat

SEQ ID NO: 952167 - DNA, 33 bp, Homo sapien
attttgaaatgttaaaatgaaggctgaactggc

SEQ ID NO: 952168 - DNA, 33 bp, Homo sapien
attttgaaatgttaaagtgaaggctgaactggc

SEQ ID NO: 952169 - DNA, 33 bp, Homo sapien
tcatcattacttttcacggtaagaacagctatt

SEQ ID NO: 952170 - DNA, 33 bp, Homo sapien
tcatcattacttttcatggtaagaacagctatt

SEQ ID NO: 952171 - DNA, 33 bp, Homo sapien
aatgatgaaaaaccaccattgcttttgcgccaa

SEQ ID NO: 952172 - DNA, 33 bp, Homo sapien
aatgatgaaaaaccactattgcttttgcgccaa

SEQ ID NO: 952173 - DNA, 33 bp, Homo sapien
aaaatttgttttttcacatgctgaatatttctc

SEQ ID NO: 952174 - DNA, 33 bp, Homo sapien
aaaatttgttttttcagatgctgaatatttctc

SEQ ID NO: 952175 - DNA, 33 bp, Homo sapien
acatctgtggttgatacagctatgactagatgt

SEQ ID NO: 952176 - DNA, 33 bp, Homo sapien
acatctgtggttgatatagctatgactagatgt

SEQ ID NO: 952177 - DNA, 33 bp, Homo sapien
agtgtctttggtttaacgcactagcttgactgt

SEQ ID NO: 952178 - DNA, 33 bp, Homo sapien
agtgtctttggtttaatgcactagcttgactgt

SEQ ID NO: 952179 - DNA, 33 bp, Homo sapien
atattcaaatacttggccaaaaatcatgctact

SEQ ID NO: 952180 - DNA, 33 bp, Homo sapien
atattcaaatacttggtcaaaaatcatgctact

SEQ ID NO: 952181 - DNA, 33 bp, Homo sapien
attcctcttttcttgcaccctcctttgacatat

SEQ ID NO: 952182 - DNA, 33 bp, Homo sapien
attcctcttttcttgctccctcctttgacatat

SEQ ID NO: 952183 - DNA, 33 bp, Homo sapien
aatctggcaattctaagcttaccatgtagcaga

SEQ ID NO: 952184 - DNA, 33 bp, Homo sapien
aatctggcaattctaatcttaccatgtagcaga

SEQ ID NO: 952185 - DNA, 33 bp, Homo sapien
cctaatccataaatccagaatccgaaatgctac

SEQ ID NO: 952186 - DNA, 33 bp, Homo sapien
cctaatccataaatccggaatccgaaatgctac

SEQ ID NO: 952187 - DNA, 33 bp, Homo sapien
tactttccagataggcactcaccatgtagagaa

SEQ ID NO: 952188 - DNA, 33 bp, Homo sapien
tactttccagataggcgctcaccatgtagagaa

SEQ ID NO: 952189 - DNA, 33 bp, Homo sapien
ctcccactgcgtaccgcaaaagaaacatgagtt

SEQ ID NO: 952190 - DNA, 33 bp, Homo sapien
ctcccactgcgtaccggaaaagaaacatgagtt

SEQ ID NO: 952191 - DNA, 33 bp, Homo sapien
agtgggaggcatgccaaactctcttttctcagg

SEQ ID NO: 952192 - DNA, 33 bp, Homo sapien
agtgggaggcatgccagactctcttttctcagg

SEQ ID NO: 952193 - DNA, 33 bp, Homo sapien
atcctgggaaacagacagctgggtaaaacatac

SEQ ID NO: 952194 - DNA, 33 bp, Homo sapien
atcctgggaaacagacggctgggtaaaacatac

SEQ ID NO: 952195 - DNA, 33 bp, Homo sapien
cttgcccttggcttgcagagtcttcaccggggc

SEQ ID NO: 952196 - DNA, 33 bp, Homo sapien
cttgcccttggcttgcggagtcttcaccggggc

SEQ ID NO: 952197 - DNA, 33 bp, Homo sapien
tgacagtcctcagataaagggaccggtgcatct

SEQ ID NO: 952198 - DNA, 33 bp, Homo sapien
tgacagtcctcagatatagggaccggtgcatct

SEQ ID NO: 952199 - DNA, 33 bp, Homo sapien
tttgtttcctgttttacattgtttgcgtagaag

SEQ ID NO: 952200 - DNA, 33 bp, Homo sapien
tttgtttcctgttttatattgtttgcgtagaag

SEQ ID NO: 952201 - DNA, 33 bp, Homo sapien
agctcatagtattcacaagaacaaacagggctg

SEQ ID NO: 952202 - DNA, 33 bp, Homo sapien
agctcatagtattcaccagaacaaacagggctg

SEQ ID NO: 952203 - DNA, 33 bp, Homo sapien
gttgcaggttgctctccacacaattgaatacaa

SEQ ID NO: 952204 - DNA, 33 bp, Homo sapien
gttgcaggttgctctctacacaattgaatacaa

SEQ ID NO: 952205 - DNA, 33 bp, Homo sapien
tttactatgagaaagccctgctgctggtaatgt

SEQ ID NO: 952206 - DNA, 33 bp, Homo sapien
tttactatgagaaagctctgctgctggtaatgt

SEQ ID NO: 952207 - DNA, 33 bp, Homo sapien
aacttgttttgaaatactaccagaattgtttta

SEQ ID NO: 952208 - DNA, 33 bp, Homo sapien
aacttgttttgaaatattaccagaattgtttta

SEQ ID NO: 952209 - DNA, 33 bp, Homo sapien
tgtgggtgtcgttaaacaggatgaaaggcctgt

SEQ ID NO: 952210 - DNA, 33 bp, Homo sapien
tgtgggtgtcgttaaataggatgaaaggcctgt

SEQ ID NO: 952211 - DNA, 33 bp, Homo sapien
ctgcatcaatcgtctcaaagtcttccactgtaa

SEQ ID NO: 952212 - DNA, 33 bp, Homo sapien
ctgcatcaatcgtctcgaagtcttccactgtaa

SEQ ID NO: 952213 - DNA, 33 bp, Homo sapien
acatgttttatgactaccttatgttgcaggctg

SEQ ID NO: 952214 - DNA, 33 bp, Homo sapien
acatgttttatgactatcttatgttgcaggctg

SEQ ID NO: 952215 - DNA, 33 bp, Homo sapien
caaaattcaccgtaagaagatagataagctttg

SEQ ID NO: 952216 - DNA, 33 bp, Homo sapien
caaaattcaccgtaaggagatagataagctttg

SEQ ID NO: 952217 - DNA, 33 bp, Homo sapien
gcaacatactcaaagcacgttagtcctgctaca

SEQ ID NO: 952218 - DNA, 33 bp, Homo sapien
gcaacatactcaaagcgcgttagtcctgctaca

SEQ ID NO: 952219 - DNA, 33 bp, Homo sapien
ggtaatatgtgtgaaactgagccctgcatttta

SEQ ID NO: 952220 - DNA, 33 bp, Homo sapien
ggtaatatgtgtgaaattgagccctgcatttta

SEQ ID NO: 952221 - DNA, 33 bp, Homo sapien
cataggctacaccacggatgaaccttggaaact

SEQ ID NO: 952222 - DNA, 33 bp, Homo sapien
cataggctacaccacgtatgaaccttggaaact

SEQ ID NO: 952223 - DNA, 33 bp, Homo sapien
aaagatatatgtacacacactacaataaatcct

SEQ ID NO: 952224 - DNA, 33 bp, Homo sapien
aaagatatatgtacacgcactacaataaatcct

SEQ ID NO: 952225 - DNA, 33 bp, Homo sapien
caattacatattcaaaccgacagtatttttatc

SEQ ID NO: 952226 - DNA, 33 bp, Homo sapien
caattacatattcaaagcgacagtatttttatc

SEQ ID NO: 952227 - DNA, 33 bp, Homo sapien
aaactggaggtagtaacatcactgaacaagtaa

SEQ ID NO: 952228 - DNA, 33 bp, Homo sapien
aaactggaggtagtaatatcactgaacaagtaa

SEQ ID NO: 952229 - DNA, 33 bp, Homo sapien
atttgatgtttaaaaacgacttcttggttactt

SEQ ID NO: 952230 - DNA, 33 bp, Homo sapien
atttgatgtttaaaaatgacttcttggttactt

SEQ ID NO: 952231 - DNA, 33 bp, Homo sapien
tgggaagactttctacaaagcataagagtaact

SEQ ID NO: 952232 - DNA, 33 bp, Homo sapien
tgggaagactttctaccaagcataagagtaact

SEQ ID NO: 952233 - DNA, 33 bp, Homo sapien
gctgaaaagattccaaaataaggcaggtaaaaa

SEQ ID NO: 952234 - DNA, 33 bp, Homo sapien
gctgaaaagattccaagataaggcaggtaaaaa

SEQ ID NO: 952235 - DNA, 33 bp, Homo sapien
atcctgtttcaatcaacagtttcaatgtaaaaa

SEQ ID NO: 952236 - DNA, 33 bp, Homo sapien
atcctgtttcaatcaagagtttcaatgtaaaaa

SEQ ID NO: 952237 - DNA, 33 bp, Homo sapien
gattttattaccaacaatggtagctagggaaag

SEQ ID NO: 952238 - DNA, 33 bp, Homo sapien
gattttattaccaacagtggtagctagggaaag

SEQ ID NO: 952239 - DNA, 33 bp, Homo sapien
gtgcctttttcagccaagttgccttcatggaca

SEQ ID NO: 952240 - DNA, 33 bp, Homo sapien
gtgcctttttcagccaggttgccttcatggaca

SEQ ID NO: 952241 - DNA, 33 bp, Homo sapien
acccttggaagtacaacggatttactgtttatc

SEQ ID NO: 952242 - DNA, 33 bp, Homo sapien
acccttggaagtacaatggatttactgtttatc

SEQ ID NO: 952243 - DNA, 33 bp, Homo sapien
gtgtttgcccagataccagacagggagtgccaa

SEQ ID NO: 952244 - DNA, 33 bp, Homo sapien
gtgtttgcccagatactagacagggagtgccaa

SEQ ID NO: 952245 - DNA, 33 bp, Homo sapien
cataatgtcatttaaaattgtaaacgacagcat

SEQ ID NO: 952246 - DNA, 33 bp, Homo sapien
cataatgtcatttaaatttgtaaacgacagcat

SEQ ID NO: 952247 - DNA, 33 bp, Homo sapien
ttgtgtgaaatcattacgttctactgcaaaaat

SEQ ID NO: 952248 - DNA, 33 bp, Homo sapien
ttgtgtgaaatcattatgttctactgcaaaaat

SEQ ID NO: 952249 - DNA, 33 bp, Homo sapien
aaagagtgaaagatgaactcaaggttttcctgt

SEQ ID NO: 952250 - DNA, 33 bp, Homo sapien
aaagagtgaaagatgacctcaaggttttcctgt

SEQ ID NO: 952251 - DNA, 33 bp, Homo sapien
tctgtagttttgttcagatcaacaaacctgtcc

SEQ ID NO: 952252 - DNA, 33 bp, Homo sapien
tctgtagttttgttcatatcaacaaacctgtcc

SEQ ID NO: 952253 - DNA, 33 bp, Homo sapien
ctctccgtggcgctggaaactcgtgctgtgcag

SEQ ID NO: 952254 - DNA, 33 bp, Homo sapien
ctctccgtggcgctgggaactcgtgctgtgcag

SEQ ID NO: 952255 - DNA, 33 bp, Homo sapien
gcttcatagaaaaactaaatgctaagtggcagg

SEQ ID NO: 952256 - DNA, 33 bp, Homo sapien
gcttcatagaaaaactgaatgctaagtggcagg

SEQ ID NO: 952257 - DNA, 33 bp, Homo sapien
aaatctaagaagtccagtgatgacgtcactgac

SEQ ID NO: 952258 - DNA, 33 bp, Homo sapien
aaatctaagaagtccattgatgacgtcactgac

SEQ ID NO: 952259 - DNA, 33 bp, Homo sapien
agttcctgacaaattcactcttttcctcctctc

SEQ ID NO: 952260 - DNA, 33 bp, Homo sapien
agttcctgacaaattcgctcttttcctcctctc

SEQ ID NO: 952261 - DNA, 33 bp, Homo sapien
tctgcgtgggatcaatcagaaagcttattctgg

SEQ ID NO: 952262 - DNA, 33 bp, Homo sapien
tctgcgtgggatcaatgagaaagcttattctgg

SEQ ID NO: 952263 - DNA, 33 bp, Homo sapien
ccttcaaggaaacaaaagagttgtagtatttct

SEQ ID NO: 952264 - DNA, 33 bp, Homo sapien
ccttcaaggaaacaaaggagttgtagtatttct

SEQ ID NO: 952265 - DNA, 33 bp, Homo sapien
aatccaggcctcttggaatccaggtcaacacca

SEQ ID NO: 952266 - DNA, 33 bp, Homo sapien
aatccaggcctcttgggatccaggtcaacacca

SEQ ID NO: 952267 - DNA, 33 bp, Homo sapien
cagataagagtcaccacgacggcatgaattacc

SEQ ID NO: 952268 - DNA, 33 bp, Homo sapien
cagataagagtcaccatgacggcatgaattacc

SEQ ID NO: 952269 - DNA, 33 bp, Homo sapien
aaatgtcattccaccacagaggcatagaagaaa

SEQ ID NO: 952270 - DNA, 33 bp, Homo sapien
aaatgtcattccaccagagaggcatagaagaaa

SEQ ID NO: 952271 - DNA, 33 bp, Homo sapien
actccttatattcacaatgataacatgagcatt

SEQ ID NO: 952272 - DNA, 33 bp, Homo sapien
actccttatattcacactgataacatgagcatt

SEQ ID NO: 952273 - DNA, 33 bp, Homo sapien
taaatgcaattactcacgcaataaatgtagtct

SEQ ID NO: 952274 - DNA, 33 bp, Homo sapien
taaatgcaattactcatgcaataaatgtagtct

SEQ ID NO: 952275 - DNA, 33 bp, Homo sapien
tatttaaatgagcaaacgtaaagtgtgtaagag

SEQ ID NO: 952276 - DNA, 33 bp, Homo sapien
tatttaaatgagcaaatgtaaagtgtgtaagag

SEQ ID NO: 952277 - DNA, 33 bp, Homo sapien
tttccactgacatcctaacacaggctctgcttc

SEQ ID NO: 952278 - DNA, 33 bp, Homo sapien
tttccactgacatcctgacacaggctctgcttc

SEQ ID NO: 952279 - DNA, 33 bp, Homo sapien
tctttaaaatgtcaacaaacttaattcctgtaa

SEQ ID NO: 952280 - DNA, 33 bp, Homo sapien
tctttaaaatgtcaacgaacttaattcctgtaa

SEQ ID NO: 952281 - DNA, 33 bp, Homo sapien
ccaagctatctccaccacataggacagacactc

SEQ ID NO: 952282 - DNA, 33 bp, Homo sapien
ccaagctatctccaccgcataggacagacactc

SEQ ID NO: 952283 - DNA, 33 bp, Homo sapien
attttagctgatacagaagacattgcctccaca

SEQ ID NO: 952284 - DNA, 33 bp, Homo sapien
attttagctgatacaggagacattgcctccaca

SEQ ID NO: 952285 - DNA, 33 bp, Homo sapien
gcctctgtattttcccaaaaccataagcatgac

SEQ ID NO: 952286 - DNA, 33 bp, Homo sapien
gcctctgtattttcccgaaaccataagcatgac

SEQ ID NO: 952287 - DNA, 33 bp, Homo sapien
gattacattcctaaaacctcacctgacttcatt

SEQ ID NO: 952288 - DNA, 33 bp, Homo sapien
gattacattcctaaaatctcacctgacttcatt

SEQ ID NO: 952289 - DNA, 33 bp, Homo sapien
aagatagatggattgagctctctagatagataa

SEQ ID NO: 952290 - DNA, 33 bp, Homo sapien
aagatagatggattgatctctctagatagataa

SEQ ID NO: 952291 - DNA, 33 bp, Homo sapien
cttatatttaaaatgcacttgacaaaagttggt

SEQ ID NO: 952292 - DNA, 33 bp, Homo sapien
cttatatttaaaatgcgcttgacaaaagttggt

SEQ ID NO: 952293 - DNA, 33 bp, Homo sapien
gaaattgtttttctgacagttggtaggttctat

SEQ ID NO: 952294 - DNA, 33 bp, Homo sapien
gaaattgtttttctgatagttggtaggttctat

SEQ ID NO: 952295 - DNA, 33 bp, Homo sapien
tcactgccacttttcagactcaatacaacacta

SEQ ID NO: 952296 - DNA, 33 bp, Homo sapien
tcactgccacttttcatactcaatacaacacta

SEQ ID NO: 952297 - DNA, 33 bp, Homo sapien
tgttttgtgatgtggaacctaatgaatctaccg

SEQ ID NO: 952298 - DNA, 33 bp, Homo sapien
tgttttgtgatgtggagcctaatgaatctaccg

SEQ ID NO: 952299 - DNA, 33 bp, Homo sapien
ggaggctaagaaaagacaaagatagtccaactt

SEQ ID NO: 952300 - DNA, 33 bp, Homo sapien
ggaggctaagaaaagagaaagatagtccaactt

SEQ ID NO: 952301 - DNA, 33 bp, Homo sapien
atgtatacttttaaagactacctcaaaacatga

SEQ ID NO: 952302 - DNA, 33 bp, Homo sapien
atgtatacttttaaaggctacctcaaaacatga

SEQ ID NO: 952303 - DNA, 33 bp, Homo sapien
ttacaagttacaaaaacagaagtcaagagatcc

SEQ ID NO: 952304 - DNA, 33 bp, Homo sapien
ttacaagttacaaaaatagaagtcaagagatcc

SEQ ID NO: 952305 - DNA, 33 bp, Homo sapien
ctgtttccacaacccccgaagtgtgatataaag

SEQ ID NO: 952306 - DNA, 33 bp, Homo sapien
ctgtttccacaacccctgaagtgtgatataaag

SEQ ID NO: 952307 - DNA, 33 bp, Homo sapien
atgtacacatccttctaaatagcttataagatg

SEQ ID NO: 952308 - DNA, 33 bp, Homo sapien
atgtacacatccttctgaatagcttataagatg

SEQ ID NO: 952309 - DNA, 33 bp, Homo sapien
aaagccaaactctaaaacatttgaagagactta

SEQ ID NO: 952310 - DNA, 33 bp, Homo sapien
aaagccaaactctaaatcatttgaagagactta

SEQ ID NO: 952311 - DNA, 33 bp, Homo sapien
atgttgtaagtaatgaccgtggagatgatttac

SEQ ID NO: 952312 - DNA, 33 bp, Homo sapien
atgttgtaagtaatgatcgtggagatgatttac

SEQ ID NO: 952313 - DNA, 33 bp, Homo sapien
cagcatccttcaagcacctctacgtattagtcc

SEQ ID NO: 952314 - DNA, 33 bp, Homo sapien
cagcatccttcaagcagctctacgtattagtcc

SEQ ID NO: 952315 - DNA, 33 bp, Homo sapien
gcaagattactgaaaccatgtccacaggatctt

SEQ ID NO: 952316 - DNA, 33 bp, Homo sapien
gcaagattactgaaacgatgtccacaggatctt

SEQ ID NO: 952317 - DNA, 33 bp, Homo sapien
gaacaactgagctcaacagagacttagtaacct

SEQ ID NO: 952318 - DNA, 33 bp, Homo sapien
gaacaactgagctcaatagagacttagtaacct

SEQ ID NO: 952319 - DNA, 33 bp, Homo sapien
caaggttaggaaagaccgaagatattctagatt

SEQ ID NO: 952320 - DNA, 33 bp, Homo sapien
caaggttaggaaagactgaagatattctagatt

SEQ ID NO: 952321 - DNA, 33 bp, Homo sapien
tgaacctgtgtaaacccagtttaggaaaatcaa

SEQ ID NO: 952322 - DNA, 33 bp, Homo sapien
tgaacctgtgtaaacctagtttaggaaaatcaa

SEQ ID NO: 952323 - DNA, 33 bp, Homo sapien
acggagaaatgtaagaaagtggagaagggtaat

SEQ ID NO: 952324 - DNA, 33 bp, Homo sapien
acggagaaatgtaagacagtggagaagggtaat

SEQ ID NO: 952325 - DNA, 33 bp, Homo sapien
atagcgaaccacattcacagagctcatacaggc

SEQ ID NO: 952326 - DNA, 33 bp, Homo sapien
atagcgaaccacattctcagagctcatacaggc

SEQ ID NO: 952327 - DNA, 33 bp, Homo sapien
gactagttggagaaaaagagacacaagcactaa

SEQ ID NO: 952328 - DNA, 33 bp, Homo sapien
gactagttggagaaaaggagacacaagcactaa

SEQ ID NO: 952329 - DNA, 33 bp, Homo sapien
gtgatgccttggagctaaaccaaacatttgaca

SEQ ID NO: 952330 - DNA, 33 bp, Homo sapien
gtgatgccttggagctgaaccaaacatttgaca

SEQ ID NO: 952331 - DNA, 33 bp, Homo sapien
taatgacaatttgaaccgtgcaggctactgtga

SEQ ID NO: 952332 - DNA, 33 bp, Homo sapien
taatgacaatttgaactgtgcaggctactgtga

SEQ ID NO: 952333 - DNA, 33 bp, Homo sapien
agctaatactcagttaacagactgtggcataag

SEQ ID NO: 952334 - DNA, 33 bp, Homo sapien
agctaatactcagttagcagactgtggcataag

SEQ ID NO: 952335 - DNA, 33 bp, Homo sapien
tttaatatgaaaaaaccctatgatctacaaatc

SEQ ID NO: 952336 - DNA, 33 bp, Homo sapien
tttaatatgaaaaaactctatgatctacaaatc

SEQ ID NO: 952337 - DNA, 33 bp, Homo sapien
tagtccttcagcctaaattaacatctcatccca

SEQ ID NO: 952338 - DNA, 33 bp, Homo sapien
tagtccttcagcctaagttaacatctcatccca

SEQ ID NO: 952339 - DNA, 33 bp, Homo sapien
ataggtgtcctaacgactatgaagtggtatctg

SEQ ID NO: 952340 - DNA, 33 bp, Homo sapien
ataggtgtcctaacgagtatgaagtggtatctg

SEQ ID NO: 952341 - DNA, 33 bp, Homo sapien
aaccgtacactcaaaaatggttgaaaacgtaaa

SEQ ID NO: 952342 - DNA, 33 bp, Homo sapien
aaccgtacactcaaaactggttgaaaacgtaaa

SEQ ID NO: 952343 - DNA, 33 bp, Homo sapien
tacatttgaggatttaacatttgaggtctcaga

SEQ ID NO: 952344 - DNA, 33 bp, Homo sapien
tacatttgaggatttagcatttgaggtctcaga

SEQ ID NO: 952345 - DNA, 33 bp, Homo sapien
ctgggcacacttcctacggctttgccctgctcc

SEQ ID NO: 952346 - DNA, 33 bp, Homo sapien
ctgggcacacttcctatggctttgccctgctcc

SEQ ID NO: 952347 - DNA, 33 bp, Homo sapien
ctccaagaaataaagacgatttgctcactggtc

SEQ ID NO: 952348 - DNA, 33 bp, Homo sapien
ctccaagaaataaagaggatttgctcactggtc

SEQ ID NO: 952349 - DNA, 33 bp, Homo sapien
ggcatttctcacaccactctgtcagcttcctta

SEQ ID NO: 952350 - DNA, 33 bp, Homo sapien
ggcatttctcacaccattctgtcagcttcctta

SEQ ID NO: 952351 - DNA, 33 bp, Homo sapien
cctctgatctagatgacaaaggcagatctggag

SEQ ID NO: 952352 - DNA, 33 bp, Homo sapien
cctctgatctagatgagaaaggcagatctggag

SEQ ID NO: 952353 - DNA, 33 bp, Homo sapien
gcaacagaccaggagagaaagaaatacaccaag

SEQ ID NO: 952354 - DNA, 33 bp, Homo sapien
gcaacagaccaggagataaagaaatacaccaag

SEQ ID NO: 952355 - DNA, 33 bp, Homo sapien
cactgaccttccttgacgtgttctaagctgctt

SEQ ID NO: 952356 - DNA, 33 bp, Homo sapien
cactgaccttccttgatgtgttctaagctgctt

SEQ ID NO: 952357 - DNA, 33 bp, Homo sapien
aaataggtagattgagaaaagtgagttaagcaa

SEQ ID NO: 952358 - DNA, 33 bp, Homo sapien
aaataggtagattgagtaaagtgagttaagcaa

SEQ ID NO: 952359 - DNA, 33 bp, Homo sapien
actcccatctcaagacacaaccaatgttatctg

SEQ ID NO: 952360 - DNA, 33 bp, Homo sapien
actcccatctcaagacgcaaccaatgttatctg

SEQ ID NO: 952361 - DNA, 33 bp, Homo sapien
tttaaaatgttttaccacatgaagttttgccat

SEQ ID NO: 952362 - DNA, 33 bp, Homo sapien
tttaaaatgttttaccgcatgaagttttgccat

SEQ ID NO: 952363 - DNA, 33 bp, Homo sapien
ttttgccatcaggaataaccaaagtttctctgt

SEQ ID NO: 952364 - DNA, 33 bp, Homo sapien
ttttgccatcaggaatgaccaaagtttctctgt

SEQ ID NO: 952365 - DNA, 33 bp, Homo sapien
agagtggattatgcagacgagtagtttctttag

SEQ ID NO: 952366 - DNA, 33 bp, Homo sapien
agagtggattatgcaggcgagtagtttctttag

SEQ ID NO: 952367 - DNA, 33 bp, Homo sapien
gtgcctctactctgtcacactttaactgattcc

SEQ ID NO: 952368 - DNA, 33 bp, Homo sapien
gtgcctctactctgtcgcactttaactgattcc

SEQ ID NO: 952369 - DNA, 33 bp, Homo sapien
tggaggtggtttcctcaaagctgttctcatgag

SEQ ID NO: 952370 - DNA, 33 bp, Homo sapien
tggaggtggtttcctccaagctgttctcatgag

SEQ ID NO: 952371 - DNA, 33 bp, Homo sapien
gccatggtgcccagcaagtagatactattatat

SEQ ID NO: 952372 - DNA, 33 bp, Homo sapien
gccatggtgcccagcaggtagatactattatat

SEQ ID NO: 952373 - DNA, 33 bp, Homo sapien
tccgactgtaataaccaaaggccataagatttt

SEQ ID NO: 952374 - DNA, 33 bp, Homo sapien
tccgactgtaataacccaaggccataagatttt

SEQ ID NO: 952375 - DNA, 33 bp, Homo sapien
aacaggctggaaaaaaaatcatgttagatacgt

SEQ ID NO: 952376 - DNA, 33 bp, Homo sapien
aacaggctggaaaaaacatcatgttagatacgt

SEQ ID NO: 952377 - DNA, 33 bp, Homo sapien
cccaaagacttgtccacgttcagttttacaagc

SEQ ID NO: 952378 - DNA, 33 bp, Homo sapien
cccaaagacttgtccaggttcagttttacaagc

SEQ ID NO: 952379 - DNA, 33 bp, Homo sapien
aaatgacaagtaaatgcaggatgtaatacatag

SEQ ID NO: 952380 - DNA, 33 bp, Homo sapien
aaatgacaagtaaatggaggatgtaatacatag

SEQ ID NO: 952381 - DNA, 33 bp, Homo sapien
gaagtaaacaacttgaacccatgataactttat

SEQ ID NO: 952382 - DNA, 33 bp, Homo sapien
gaagtaaacaacttgatcccatgataactttat

SEQ ID NO: 952383 - DNA, 33 bp, Homo sapien
ccgaagtattgttacactgagagatcaagtgaa

SEQ ID NO: 952384 - DNA, 33 bp, Homo sapien
ccgaagtattgttacattgagagatcaagtgaa

SEQ ID NO: 952385 - DNA, 33 bp, Homo sapien
ttaaaacagctttaagaaattcttgataaatgg

SEQ ID NO: 952386 - DNA, 33 bp, Homo sapien
ttaaaacagctttaagcaattcttgataaatgg

SEQ ID NO: 952387 - DNA, 33 bp, Homo sapien
gagtttgcaatttatacaatatgttcaagcagc

SEQ ID NO: 952388 - DNA, 33 bp, Homo sapien
gagtttgcaatttatagaatatgttcaagcagc

SEQ ID NO: 952389 - DNA, 33 bp, Homo sapien
ttttagcaggcagttacctagctggactcaaac

SEQ ID NO: 952390 - DNA, 33 bp, Homo sapien
ttttagcaggcagttatctagctggactcaaac

SEQ ID NO: 952391 - DNA, 33 bp, Homo sapien
attagcaattccaacaggagtttttgtgtattc

SEQ ID NO: 952392 - DNA, 33 bp, Homo sapien
attagcaattccaacatgagtttttgtgtattc

SEQ ID NO: 952393 - DNA, 33 bp, Homo sapien
ggtttttaattgttcacggagaaagttagaaac

SEQ ID NO: 952394 - DNA, 33 bp, Homo sapien
ggtttttaattgttcatggagaaagttagaaac

SEQ ID NO: 952395 - DNA, 33 bp, Homo sapien
attggaatcagaggtacaaatatgaaataatgc

SEQ ID NO: 952396 - DNA, 33 bp, Homo sapien
attggaatcagaggtagaaatatgaaataatgc

SEQ ID NO: 952397 - DNA, 33 bp, Homo sapien
cttttctgttttgcaacaagatggactctcttg

SEQ ID NO: 952398 - DNA, 33 bp, Homo sapien
cttttctgttttgcaataagatggactctcttg

SEQ ID NO: 952399 - DNA, 33 bp, Homo sapien
caaagaaactccagagaaatatcagaactgtaa

SEQ ID NO: 952400 - DNA, 33 bp, Homo sapien
caaagaaactccagaggaatatcagaactgtaa

SEQ ID NO: 952401 - DNA, 33 bp, Homo sapien
taaatattagctgttccacttgttagaagccaa

SEQ ID NO: 952402 - DNA, 33 bp, Homo sapien
taaatattagctgttcgacttgttagaagccaa

SEQ ID NO: 952403 - DNA, 33 bp, Homo sapien
gcacgcacacacacgagtaggtacttttgtgcc

SEQ ID NO: 952404 - DNA, 33 bp, Homo sapien
gcacgcacacacacgattaggtacttttgtgcc

SEQ ID NO: 952405 - DNA, 33 bp, Homo sapien
taataagaatcaaagccaaagatctgtggtcag

SEQ ID NO: 952406 - DNA, 33 bp, Homo sapien
taataagaatcaaagcgaaagatctgtggtcag

SEQ ID NO: 952407 - DNA, 33 bp, Homo sapien
caagcttcaacctttcaaagaggataagagcga

SEQ ID NO: 952408 - DNA, 33 bp, Homo sapien
caagcttcaacctttcgaagaggataagagcga

SEQ ID NO: 952409 - DNA, 33 bp, Homo sapien
tctcataattcaactcacataacaactttttcc

SEQ ID NO: 952410 - DNA, 33 bp, Homo sapien
tctcataattcaactcgcataacaactttttcc

SEQ ID NO: 952411 - DNA, 33 bp, Homo sapien
tgaatttggaatgatcacttctctgaaagttag

SEQ ID NO: 952412 - DNA, 33 bp, Homo sapien
tgaatttggaatgatctcttctctgaaagttag

SEQ ID NO: 952413 - DNA, 33 bp, Homo sapien
cataattttggatggagattcagttattgtttt

SEQ ID NO: 952414 - DNA, 33 bp, Homo sapien
cataattttggatggatattcagttattgtttt

SEQ ID NO: 952415 - DNA, 33 bp, Homo sapien
tgtggaatactactcacactacctggccataaa

SEQ ID NO: 952416 - DNA, 33 bp, Homo sapien
tgtggaatactactcatactacctggccataaa

SEQ ID NO: 952417 - DNA, 33 bp, Homo sapien
gattgaaaagtagtaccatacagaagcattaca

SEQ ID NO: 952418 - DNA, 33 bp, Homo sapien
gattgaaaagtagtactatacagaagcattaca

SEQ ID NO: 952419 - DNA, 33 bp, Homo sapien
aaacctctccagagcccagcagaattttctgtt

SEQ ID NO: 952420 - DNA, 33 bp, Homo sapien
aaacctctccagagcctagcagaattttctgtt

SEQ ID NO: 952421 - DNA, 33 bp, Homo sapien
agctgtggcctttgggaacattacataacctct

SEQ ID NO: 952422 - DNA, 33 bp, Homo sapien
agctgtggcctttggggacattacataacctct

SEQ ID NO: 952423 - DNA, 33 bp, Homo sapien
ctctttgacctctacagtctttcaattctagtc

SEQ ID NO: 952424 - DNA, 33 bp, Homo sapien
ctctttgacctctacattctttcaattctagtc

SEQ ID NO: 952425 - DNA, 33 bp, Homo sapien
agtgcctgaaacataggagatcctcatattcag

SEQ ID NO: 952426 - DNA, 33 bp, Homo sapien
agtgcctgaaacatagtagatcctcatattcag

SEQ ID NO: 952427 - DNA, 33 bp, Homo sapien
tttatcccttctgagagagttatttgcttagca

SEQ ID NO: 952428 - DNA, 33 bp, Homo sapien
tttatcccttctgagatagttatttgcttagca

SEQ ID NO: 952429 - DNA, 33 bp, Homo sapien
tgattcctaccactatcacaatatctgaaagta

SEQ ID NO: 952430 - DNA, 33 bp, Homo sapien
tgattcctaccactatgacaatatctgaaagta

SEQ ID NO: 952431 - DNA, 33 bp, Homo sapien
ttgaagtgaaaggaaactatatctcagggaatt

SEQ ID NO: 952432 - DNA, 33 bp, Homo sapien
ttgaagtgaaaggaaattatatctcagggaatt

SEQ ID NO: 952433 - DNA, 33 bp, Homo sapien
atttgggacaataaccgggcatatgaaaccttt

SEQ ID NO: 952434 - DNA, 33 bp, Homo sapien
atttgggacaataacctggcatatgaaaccttt

SEQ ID NO: 952435 - DNA, 33 bp, Homo sapien
atatttgcacttggataactttgccaataacta

SEQ ID NO: 952436 - DNA, 33 bp, Homo sapien
atatttgcacttggatgactttgccaataacta

SEQ ID NO: 952437 - DNA, 33 bp, Homo sapien
gcagtcttaggcttgccgagcatctttattgag

SEQ ID NO: 952438 - DNA, 33 bp, Homo sapien
gcagtcttaggcttgctgagcatctttattgag

SEQ ID NO: 952439 - DNA, 33 bp, Homo sapien
tgcacaaggccctgaacaatcctgattagcaga

SEQ ID NO: 952440 - DNA, 33 bp, Homo sapien
tgcacaaggccctgaataatcctgattagcaga

SEQ ID NO: 952441 - DNA, 33 bp, Homo sapien
taggctgcaccaaacaccttaaaactgactatt

SEQ ID NO: 952442 - DNA, 33 bp, Homo sapien
taggctgcaccaaacatcttaaaactgactatt

SEQ ID NO: 952443 - DNA, 33 bp, Homo sapien
tagacttgagagaaatcacagtaattcagtaaa

SEQ ID NO: 952444 - DNA, 33 bp, Homo sapien
tagacttgagagaaattacagtaattcagtaaa

SEQ ID NO: 952445 - DNA, 33 bp, Homo sapien
aaattgtcaaaagacacatatccgctttactaa

SEQ ID NO: 952446 - DNA, 33 bp, Homo sapien
aaattgtcaaaagacatatatccgctttactaa

SEQ ID NO: 952447 - DNA, 33 bp, Homo sapien
tagacagttgtagtgacattataccaacttcac

SEQ ID NO: 952448 - DNA, 33 bp, Homo sapien
tagacagttgtagtgatattataccaacttcac

SEQ ID NO: 952449 - DNA, 33 bp, Homo sapien
ttggctttataccctccctttctattagttcaa

SEQ ID NO: 952450 - DNA, 33 bp, Homo sapien
ttggctttataccctctctttctattagttcaa

SEQ ID NO: 952451 - DNA, 33 bp, Homo sapien
ttaatgttaggtcagaagagaaattagcaatgg

SEQ ID NO: 952452 - DNA, 33 bp, Homo sapien
ttaatgttaggtcagaggagaaattagcaatgg

SEQ ID NO: 952453 - DNA, 33 bp, Homo sapien
cattttcataagccaacaattctataatcacct

SEQ ID NO: 952454 - DNA, 33 bp, Homo sapien
cattttcataagccaagaattctataatcacct

SEQ ID NO: 952455 - DNA, 33 bp, Homo sapien
gtttgaaacagagtaaacaagttttctgtgcta

SEQ ID NO: 952456 - DNA, 33 bp, Homo sapien
gtttgaaacagagtaatcaagttttctgtgcta

SEQ ID NO: 952457 - DNA, 33 bp, Homo sapien
cactctgcttacttacactttatcaaactcctc

SEQ ID NO: 952458 - DNA, 33 bp, Homo sapien
cactctgcttacttacgctttatcaaactcctc

SEQ ID NO: 952459 - DNA, 33 bp, Homo sapien
attaaagagataaacaatatagcaccaagtgtt

SEQ ID NO: 952460 - DNA, 33 bp, Homo sapien
attaaagagataaacattatagcaccaagtgtt

SEQ ID NO: 952461 - DNA, 33 bp, Homo sapien
caaggcctgtttctctaagaactcgacccagtg

SEQ ID NO: 952462 - DNA, 33 bp, Homo sapien
caaggcctgtttctctgagaactcgacccagtg

SEQ ID NO: 952463 - DNA, 33 bp, Homo sapien
tctcctagtgaacttacattctacaacactgac

SEQ ID NO: 952464 - DNA, 33 bp, Homo sapien
tctcctagtgaacttatattctacaacactgac

SEQ ID NO: 952465 - DNA, 33 bp, Homo sapien
aaaggacacgctaatacactaataaggtacaga

SEQ ID NO: 952466 - DNA, 33 bp, Homo sapien
aaaggacacgctaatatactaataaggtacaga

SEQ ID NO: 952467 - DNA, 33 bp, Homo sapien
gtttgatgtgcctataatacacccaataaaatt

SEQ ID NO: 952468 - DNA, 33 bp, Homo sapien
gtttgatgtgcctatagtacacccaataaaatt

SEQ ID NO: 952469 - DNA, 33 bp, Homo sapien
tgctgtgcaggatcaacaggagttggtgactat

SEQ ID NO: 952470 - DNA, 33 bp, Homo sapien
tgctgtgcaggatcaataggagttggtgactat

SEQ ID NO: 952471 - DNA, 33 bp, Homo sapien
ctgacttggcaaaatgaaatttgttgaagtact

SEQ ID NO: 952472 - DNA, 33 bp, Homo sapien
ctgacttggcaaaatggaatttgttgaagtact

SEQ ID NO: 952473 - DNA, 33 bp, Homo sapien
ctttactagcctgtaacaggtgttaaaagctta

SEQ ID NO: 952474 - DNA, 33 bp, Homo sapien
ctttactagcctgtaataggtgttaaaagctta

SEQ ID NO: 952475 - DNA, 33 bp, Homo sapien
aggtaagaattatgcacgtcaatactaatagga

SEQ ID NO: 952476 - DNA, 33 bp, Homo sapien
aggtaagaattatgcaggtcaatactaatagga

SEQ ID NO: 952477 - DNA, 33 bp, Homo sapien
tttcataatataaaatcacggtatgaaagttga

SEQ ID NO: 952478 - DNA, 33 bp, Homo sapien
tttcataatataaaatgacggtatgaaagttga

SEQ ID NO: 952479 - DNA, 33 bp, Homo sapien
gtagctgattattttaaaaactagtggcattgg

SEQ ID NO: 952480 - DNA, 33 bp, Homo sapien
gtagctgattattttagaaactagtggcattgg

SEQ ID NO: 952481 - DNA, 33 bp, Homo sapien
aaatttgatgcactggaagagataactccttga

SEQ ID NO: 952482 - DNA, 33 bp, Homo sapien
aaatttgatgcactggcagagataactccttga

SEQ ID NO: 952483 - DNA, 33 bp, Homo sapien
ctactaaaaaaggcacaaagcagactactattt

SEQ ID NO: 952484 - DNA, 33 bp, Homo sapien
ctactaaaaaaggcacgaagcagactactattt

SEQ ID NO: 952485 - DNA, 33 bp, Homo sapien
aaaggctagatttccaaagttaaggtactaatg

SEQ ID NO: 952486 - DNA, 33 bp, Homo sapien
aaaggctagatttccagagttaaggtactaatg

SEQ ID NO: 952487 - DNA, 33 bp, Homo sapien
tgaaaacaaaagcagcaaattttaccaagaatt

SEQ ID NO: 952488 - DNA, 33 bp, Homo sapien
tgaaaacaaaagcagccaattttaccaagaatt

SEQ ID NO: 952489 - DNA, 33 bp, Homo sapien
ggttcattgtcactcacaaaaccttttacagct

SEQ ID NO: 952490 - DNA, 33 bp, Homo sapien
ggttcattgtcactcataaaaccttttacagct

SEQ ID NO: 952491 - DNA, 33 bp, Homo sapien
acagagaaagaggagaaggtcattctaggtaaa

SEQ ID NO: 952492 - DNA, 33 bp, Homo sapien
acagagaaagaggagacggtcattctaggtaaa

SEQ ID NO: 952493 - DNA, 33 bp, Homo sapien
atccccatggtctttccacaaaagattgactag

SEQ ID NO: 952494 - DNA, 33 bp, Homo sapien
atccccatggtctttctacaaaagattgactag

SEQ ID NO: 952495 - DNA, 33 bp, Homo sapien
cttgattaaaaaacacaagattggatggcaagt

SEQ ID NO: 952496 - DNA, 33 bp, Homo sapien
cttgattaaaaaacaccagattggatggcaagt

SEQ ID NO: 952497 - DNA, 33 bp, Homo sapien
ctggctgatttattagcatggggttgaaagtgg

SEQ ID NO: 952498 - DNA, 33 bp, Homo sapien
ctggctgatttattaggatggggttgaaagtgg

SEQ ID NO: 952499 - DNA, 33 bp, Homo sapien
gtatttgttagctctgaaatgactcaatactct

SEQ ID NO: 952500 - DNA, 33 bp, Homo sapien
gtatttgttagctctgcaatgactcaatactct

SEQ ID NO: 952501 - DNA, 33 bp, Homo sapien
tgaaacatactgtcaaactgttaccattttgtc

SEQ ID NO: 952502 - DNA, 33 bp, Homo sapien
tgaaacatactgtcaagctgttaccattttgtc

SEQ ID NO: 952503 - DNA, 33 bp, Homo sapien
attttaggcattatctcaacctgcataaagttc

SEQ ID NO: 952504 - DNA, 33 bp, Homo sapien
attttaggcattatctgaacctgcataaagttc

SEQ ID NO: 952505 - DNA, 33 bp, Homo sapien
agtgaaaaagcatttacccaaagtcaatgttac

SEQ ID NO: 952506 - DNA, 33 bp, Homo sapien
agtgaaaaagcatttatccaaagtcaatgttac

SEQ ID NO: 952507 - DNA, 33 bp, Homo sapien
ctagtttgaataataccggtgggccatagggat

SEQ ID NO: 952508 - DNA, 33 bp, Homo sapien
ctagtttgaataatactggtgggccatagggat

SEQ ID NO: 952509 - DNA, 33 bp, Homo sapien
tcttcacctgtagccaaagaacacatactcttc

SEQ ID NO: 952510 - DNA, 33 bp, Homo sapien
tcttcacctgtagccagagaacacatactcttc

SEQ ID NO: 952511 - DNA, 33 bp, Homo sapien
ttacaacgtatgcttccaggcaggatgaaataa

SEQ ID NO: 952512 - DNA, 33 bp, Homo sapien
ttacaacgtatgcttctaggcaggatgaaataa

SEQ ID NO: 952513 - DNA, 33 bp, Homo sapien
gtgactcagcaaccaaaagggtagtgtgaatgt

SEQ ID NO: 952514 - DNA, 33 bp, Homo sapien
gtgactcagcaaccaagagggtagtgtgaatgt

SEQ ID NO: 952515 - DNA, 33 bp, Homo sapien
ccactgagtgaaaaccacggcaggcactgtact

SEQ ID NO: 952516 - DNA, 33 bp, Homo sapien
ccactgagtgaaaaccgcggcaggcactgtact

SEQ ID NO: 952517 - DNA, 33 bp, Homo sapien
agggcaagtgaaaggaaaaggcacatcagaaca

SEQ ID NO: 952518 - DNA, 33 bp, Homo sapien
agggcaagtgaaaggagaaggcacatcagaaca

SEQ ID NO: 952519 - DNA, 33 bp, Homo sapien
agtgtctggggaaaaacgcattctccccactgc

SEQ ID NO: 952520 - DNA, 33 bp, Homo sapien
agtgtctggggaaaaaggcattctccccactgc

SEQ ID NO: 952521 - DNA, 33 bp, Homo sapien
agatgagaaaaattataaacagtcacatgcaaa

SEQ ID NO: 952522 - DNA, 33 bp, Homo sapien
agatgagaaaaattattaacagtcacatgcaaa

SEQ ID NO: 952523 - DNA, 33 bp, Homo sapien
tgtttaaatttgaaaccatagtacctgagttca

SEQ ID NO: 952524 - DNA, 33 bp, Homo sapien
tgtttaaatttgaaacgatagtacctgagttca

SEQ ID NO: 952525 - DNA, 33 bp, Homo sapien
gatcataaagtctcggccaagaattgtgtataa

SEQ ID NO: 952526 - DNA, 33 bp, Homo sapien
gatcataaagtctcggtcaagaattgtgtataa

SEQ ID NO: 952527 - DNA, 33 bp, Homo sapien
actataaaacctcacacagtcattattgaagtt

SEQ ID NO: 952528 - DNA, 33 bp, Homo sapien
actataaaacctcacatagtcattattgaagtt

SEQ ID NO: 952529 - DNA, 33 bp, Homo sapien
aaagtctcaccaaataactaaagcaaacaactt

SEQ ID NO: 952530 - DNA, 33 bp, Homo sapien
aaagtctcaccaaatagctaaagcaaacaactt

SEQ ID NO: 952531 - DNA, 33 bp, Homo sapien
cggtttttactccataagacaccggcaggtctc

SEQ ID NO: 952532 - DNA, 33 bp, Homo sapien
cggtttttactccataggacaccggcaggtctc

SEQ ID NO: 952533 - DNA, 33 bp, Homo sapien
gcttcctaagattcccacttcccatctcagtgt

SEQ ID NO: 952534 - DNA, 33 bp, Homo sapien
gcttcctaagattcccgcttcccatctcagtgt

SEQ ID NO: 952535 - DNA, 33 bp, Homo sapien
cttatcatcaatataacacaacctactcttcct

SEQ ID NO: 952536 - DNA, 33 bp, Homo sapien
cttatcatcaatataatacaacctactcttcct

SEQ ID NO: 952537 - DNA, 33 bp, Homo sapien
tacaggcagatttataaccagagtataggtcaa

SEQ ID NO: 952538 - DNA, 33 bp, Homo sapien
tacaggcagatttatacccagagtataggtcaa

SEQ ID NO: 952539 - DNA, 33 bp, Homo sapien
gcatgaagcactacataaagaaaaatcttctaa

SEQ ID NO: 952540 - DNA, 33 bp, Homo sapien
gcatgaagcactacatgaagaaaaatcttctaa

SEQ ID NO: 952541 - DNA, 33 bp, Homo sapien
ctgtttgctggacatacattttgcccagatttt

SEQ ID NO: 952542 - DNA, 33 bp, Homo sapien
ctgtttgctggacatatattttgcccagatttt

SEQ ID NO: 952543 - DNA, 33 bp, Homo sapien
actgcattcttttagcaaaccagagacattgag

SEQ ID NO: 952544 - DNA, 33 bp, Homo sapien
actgcattcttttagcgaaccagagacattgag

SEQ ID NO: 952545 - DNA, 33 bp, Homo sapien
cttggactttgtccagaaaaatgagaagagaag

SEQ ID NO: 952546 - DNA, 33 bp, Homo sapien
cttggactttgtccaggaaaatgagaagagaag

SEQ ID NO: 952547 - DNA, 33 bp, Homo sapien
catggaaactagtccaagtgacacaacacacac

SEQ ID NO: 952548 - DNA, 33 bp, Homo sapien
catggaaactagtccaggtgacacaacacacac

SEQ ID NO: 952549 - DNA, 33 bp, Homo sapien
atgggactcagatggactcaggggtgatctggc

SEQ ID NO: 952550 - DNA, 33 bp, Homo sapien
atgggactcagatggattcaggggtgatctggc

SEQ ID NO: 952551 - DNA, 33 bp, Homo sapien
caatgctgaagataaaagaactgatagccagat

SEQ ID NO: 952552 - DNA, 33 bp, Homo sapien
caatgctgaagataaaggaactgatagccagat

SEQ ID NO: 952553 - DNA, 33 bp, Homo sapien
tgtttgcgttccttgtcaataccagactctgcg

SEQ ID NO: 952554 - DNA, 33 bp, Homo sapien
tgtttgcgttccttgttaataccagactctgcg

SEQ ID NO: 952555 - DNA, 33 bp, Homo sapien
aatgagtaacaaaagaatcataaatctgtgtgg

SEQ ID NO: 952556 - DNA, 33 bp, Homo sapien
aatgagtaacaaaagagtcataaatctgtgtgg

SEQ ID NO: 952557 - DNA, 33 bp, Homo sapien
cacttcaaacttggcaatgatcatctaataaat

SEQ ID NO: 952558 - DNA, 33 bp, Homo sapien
cacttcaaacttggcattgatcatctaataaat

SEQ ID NO: 952559 - DNA, 33 bp, Homo sapien
caaggaaataggataaatgtgacagaaaataag

SEQ ID NO: 952560 - DNA, 33 bp, Homo sapien
caaggaaataggataagtgtgacagaaaataag

SEQ ID NO: 952561 - DNA, 33 bp, Homo sapien
aacctttttgcataaacgacttaggcgttcatg

SEQ ID NO: 952562 - DNA, 33 bp, Homo sapien
aacctttttgcataaatgacttaggcgttcatg

SEQ ID NO: 952563 - DNA, 33 bp, Homo sapien
gccaaacaactctagcaagacaatttttcattc

SEQ ID NO: 952564 - DNA, 33 bp, Homo sapien
gccaaacaactctagccagacaatttttcattc

SEQ ID NO: 952565 - DNA, 33 bp, Homo sapien
atgtttcctacgtgtacaagaattcacatgagc

SEQ ID NO: 952566 - DNA, 33 bp, Homo sapien
atgtttcctacgtgtataagaattcacatgagc

SEQ ID NO: 952567 - DNA, 33 bp, Homo sapien
cctactatgtgccagactcctaaacgctgggaa

SEQ ID NO: 952568 - DNA, 33 bp, Homo sapien
cctactatgtgccagattcctaaacgctgggaa

SEQ ID NO: 952569 - DNA, 33 bp, Homo sapien
catcagcttctcatacgagttaacagcgtatgt

SEQ ID NO: 952570 - DNA, 33 bp, Homo sapien
catcagcttctcatactagttaacagcgtatgt

SEQ ID NO: 952571 - DNA, 33 bp, Homo sapien
tcataagatgtgcgaacatgaaacgtaatggct

SEQ ID NO: 952572 - DNA, 33 bp, Homo sapien
tcataagatgtgcgaagatgaaacgtaatggct

SEQ ID NO: 952573 - DNA, 33 bp, Homo sapien
ctggattctacttttaactgctgaacattatat

SEQ ID NO: 952574 - DNA, 33 bp, Homo sapien
ctggattctacttttatctgctgaacattatat

SEQ ID NO: 952575 - DNA, 33 bp, Homo sapien
tccactggttttagccaagcagtacaaacacac

SEQ ID NO: 952576 - DNA, 33 bp, Homo sapien
tccactggttttagccgagcagtacaaacacac

SEQ ID NO: 952577 - DNA, 33 bp, Homo sapien
tttcttaccacaaactcaatgcaccagcaaatc

SEQ ID NO: 952578 - DNA, 33 bp, Homo sapien
tttcttaccacaaactgaatgcaccagcaaatc

SEQ ID NO: 952579 - DNA, 33 bp, Homo sapien
ccagcctaaagtcaatgatctcaccacagacca

SEQ ID NO: 952580 - DNA, 33 bp, Homo sapien
ccagcctaaagtcaattatctcaccacagacca

SEQ ID NO: 952581 - DNA, 33 bp, Homo sapien
ttgcataagctaaataccagatgtcttatccat

SEQ ID NO: 952582 - DNA, 33 bp, Homo sapien
ttgcataagctaaatatcagatgtcttatccat

SEQ ID NO: 952583 - DNA, 33 bp, Homo sapien
aagaagtgtggttgaggaaagaaaagaaaagtc

SEQ ID NO: 952584 - DNA, 33 bp, Homo sapien
aagaagtgtggttgagtaaagaaaagaaaagtc

SEQ ID NO: 952585 - DNA, 33 bp, Homo sapien
ttgtgtgaaaagatcacgtttcagttgttgctt

SEQ ID NO: 952586 - DNA, 33 bp, Homo sapien
ttgtgtgaaaagatcaggtttcagttgttgctt

SEQ ID NO: 952587 - DNA, 33 bp, Homo sapien
tattatacagaaagaacggtgtcttgattggtt

SEQ ID NO: 952588 - DNA, 33 bp, Homo sapien
tattatacagaaagaatggtgtcttgattggtt

SEQ ID NO: 952589 - DNA, 33 bp, Homo sapien
agacatgagcaaaagacgtttataagaatgttg

SEQ ID NO: 952590 - DNA, 33 bp, Homo sapien
agacatgagcaaaagatgtttataagaatgttg

SEQ ID NO: 952591 - DNA, 33 bp, Homo sapien
cagtgaaaattctgcaactgtctggatttgcac

SEQ ID NO: 952592 - DNA, 33 bp, Homo sapien
cagtgaaaattctgcacctgtctggatttgcac

SEQ ID NO: 952593 - DNA, 33 bp, Homo sapien
gcagaattttcactgaaagtctaagaagggatg

SEQ ID NO: 952594 - DNA, 33 bp, Homo sapien
gcagaattttcactgagagtctaagaagggatg

SEQ ID NO: 952595 - DNA, 33 bp, Homo sapien
catgaatgaatcaagacagtgttactgtggtat

SEQ ID NO: 952596 - DNA, 33 bp, Homo sapien
catgaatgaatcaagatagtgttactgtggtat

SEQ ID NO: 952597 - DNA, 33 bp, Homo sapien
tatggagagaatataacgtgcagaacagcgtgc

SEQ ID NO: 952598 - DNA, 33 bp, Homo sapien
tatggagagaatataatgtgcagaacagcgtgc

SEQ ID NO: 952599 - DNA, 33 bp, Homo sapien
tgagcccataacacaccgtatttccatctgttg

SEQ ID NO: 952600 - DNA, 33 bp, Homo sapien
tgagcccataacacactgtatttccatctgttg

SEQ ID NO: 952601 - DNA, 33 bp, Homo sapien
cccggctgtatgatggcatttctaagagcgcta

SEQ ID NO: 952602 - DNA, 33 bp, Homo sapien
cccggctgtatgatggtatttctaagagcgcta

SEQ ID NO: 952603 - DNA, 33 bp, Homo sapien
tgaagcacagattatcaaatacagtatttcaga

SEQ ID NO: 952604 - DNA, 33 bp, Homo sapien
tgaagcacagattatcgaatacagtatttcaga

SEQ ID NO: 952605 - DNA, 33 bp, Homo sapien
ccttgtaactgtaggaaaactctctgtataact

SEQ ID NO: 952606 - DNA, 33 bp, Homo sapien
ccttgtaactgtaggataactctctgtataact

SEQ ID NO: 952607 - DNA, 33 bp, Homo sapien
aaaaggtaaataaaagaataaactgactactag

SEQ ID NO: 952608 - DNA, 33 bp, Homo sapien
aaaaggtaaataaaagcataaactgactactag

SEQ ID NO: 952609 - DNA, 33 bp, Homo sapien
gtcagataactgataaatggtacagctggttac

SEQ ID NO: 952610 - DNA, 33 bp, Homo sapien
gtcagataactgataagtggtacagctggttac

SEQ ID NO: 952611 - DNA, 33 bp, Homo sapien
ctcatgctgcaaataaagacacgcccaagcctg

SEQ ID NO: 952612 - DNA, 33 bp, Homo sapien
ctcatgctgcaaataaggacacgcccaagcctg

SEQ ID NO: 952613 - DNA, 33 bp, Homo sapien
agatggttaacactacacttccctaaagcagga

SEQ ID NO: 952614 - DNA, 33 bp, Homo sapien
agatggttaacactacgcttccctaaagcagga

SEQ ID NO: 952615 - DNA, 33 bp, Homo sapien
gagctgagccgattgaatacttgcaaatatttt

SEQ ID NO: 952616 - DNA, 33 bp, Homo sapien
gagctgagccgattgactacttgcaaatatttt

SEQ ID NO: 952617 - DNA, 33 bp, Homo sapien; identical to SEQ ID NO: 952615

SEQ ID NO: 952618 - DNA, 33 bp, Homo sapien; identical to SEQ ID NO: 952616

SEQ ID NO: 952619 - DNA, 33 bp, Homo sapien
gagcagggtgtgtttacctctaacgtgtagtcc

SEQ ID NO: 952620 - DNA, 33 bp, Homo sapien
gagcagggtgtgtttatctctaacgtgtagtcc

SEQ ID NO: 952621 - DNA, 33 bp, Homo sapien
tatacattttgggagacgggagttgcaggcaat

SEQ ID NO: 952622 - DNA, 33 bp, Homo sapien
tatacattttgggagatgggagttgcaggcaat

SEQ ID NO: 952623 - DNA, 33 bp, Homo sapien
agccagcttcacaacaaaatgactcaaactatc

SEQ ID NO: 952624 - DNA, 33 bp, Homo sapien
agccagcttcacaacagaatgactcaaactatc

SEQ ID NO: 952625 - DNA, 33 bp, Homo sapien
gttttctggttgccaactattccaaactgcttc

SEQ ID NO: 952626 - DNA, 33 bp, Homo sapien
gttttctggttgccaattattccaaactgcttc

SEQ ID NO: 952627 - DNA, 33 bp, Homo sapien
gacaattcaattataacgtgccttgaagcagac

SEQ ID NO: 952628 - DNA, 33 bp, Homo sapien
gacaattcaattataatgtgccttgaagcagac

SEQ ID NO: 952629 - DNA, 33 bp, Homo sapien
tggatgtgctgatgacccttatgtgatcattaa

SEQ ID NO: 952630 - DNA, 33 bp, Homo sapien
tggatgtgctgatgactcttatgtgatcattaa

SEQ ID NO: 952631 - DNA, 33 bp, Homo sapien
aattacaggcatatgaccctgatgaacatacat

SEQ ID NO: 952632 - DNA, 33 bp, Homo sapien
aattacaggcatatgatcctgatgaacatacat

SEQ ID NO: 952633 - DNA, 33 bp, Homo sapien
tggttcaacataggcgaatcaataaatgtgata

SEQ ID NO: 952634 - DNA, 33 bp, Homo sapien
tggttcaacataggcgcatcaataaatgtgata

SEQ ID NO: 952635 - DNA, 33 bp, Homo sapien
ctaggcagaacctcaaaatctgaattcatgcaa

SEQ ID NO: 952636 - DNA, 33 bp, Homo sapien
ctaggcagaacctcaagatctgaattcatgcaa

SEQ ID NO: 952637 - DNA, 33 bp, Homo sapien
ggttaacagattcagaaacttgaggtaaaaaca

SEQ ID NO: 952638 - DNA, 33 bp, Homo sapien
ggttaacagattcagatacttgaggtaaaaaca

SEQ ID NO: 952639 - DNA, 33 bp, Homo sapien
cattctgagctagaaacgcaacaaggagtattt

SEQ ID NO: 952640 - DNA, 33 bp, Homo sapien
cattctgagctagaaatgcaacaaggagtattt

SEQ ID NO: 952641 - DNA, 33 bp, Homo sapien
ctcgaatgagttcatactatctagcattttcat

SEQ ID NO: 952642 - DNA, 33 bp, Homo sapien
ctcgaatgagttcatagtatctagcattttcat

SEQ ID NO: 952643 - DNA, 33 bp, Homo sapien
catatcactacacagaagaaaagcaaggctgtt

SEQ ID NO: 952644 - DNA, 33 bp, Homo sapien
catatcactacacagaggaaaagcaaggctgtt

SEQ ID NO: 952645 - DNA, 33 bp, Homo sapien
gcaatgatttacagacccaatacaactcctttt

SEQ ID NO: 952646 - DNA, 33 bp, Homo sapien
gcaatgatttacagactcaatacaactcctttt

SEQ ID NO: 952647 - DNA, 33 bp, Homo sapien
tttatgggtaatgacaatgacaccaaatgaata

SEQ ID NO: 952648 - DNA, 33 bp, Homo sapien
tttatgggtaatgacagtgacaccaaatgaata

SEQ ID NO: 952649 - DNA, 33 bp, Homo sapien
cttagctggaatcagaagaatagaagtcttagt

SEQ ID NO: 952650 - DNA, 33 bp, Homo sapien
cttagctggaatcagatgaatagaagtcttagt

SEQ ID NO: 952651 - DNA, 33 bp, Homo sapien
cacttgataatagcagcagataaggtgaaaagg

SEQ ID NO: 952652 - DNA, 33 bp, Homo sapien
cacttgataatagcaggagataaggtgaaaagg

SEQ ID NO: 952653 - DNA, 33 bp, Homo sapien
aattttagagataccaagccttatagaacttct

SEQ ID NO: 952654 - DNA, 33 bp, Homo sapien
aattttagagataccatgccttatagaacttct

SEQ ID NO: 952655 - DNA, 33 bp, Homo sapien
catcaagttcaacaaacatcctcacgagcccag

SEQ ID NO: 952656 - DNA, 33 bp, Homo sapien
catcaagttcaacaaatatcctcacgagcccag

SEQ ID NO: 952657 - DNA, 33 bp, Homo sapien
attctccacttcggaaccaccaattgtctttgc

SEQ ID NO: 952658 - DNA, 33 bp, Homo sapien
attctccacttcggaagcaccaattgtctttgc

SEQ ID NO: 952659 - DNA, 33 bp, Homo sapien
atagaataaaatagaaagcagtcaaggacaagc

SEQ ID NO: 952660 - DNA, 33 bp, Homo sapien
atagaataaaatagaacgcagtcaaggacaagc

SEQ ID NO: 952661 - DNA, 33 bp, Homo sapien
ccttttagcttccccaatcttcctgttaacacc

SEQ ID NO: 952662 - DNA, 33 bp, Homo sapien
ccttttagcttccccagtcttcctgttaacacc

SEQ ID NO: 952663 - DNA, 33 bp, Homo sapien; identical to SEQ ID NO: 952661

SEQ ID NO: 952664 - DNA, 33 bp, Homo sapien; identical to SEQ ID NO: 952662

SEQ ID NO: 952665 - DNA, 33 bp, Homo sapien
agcgggaaactttgtacaaggctcagctaaaag

SEQ ID NO: 952666 - DNA, 33 bp, Homo sapien
agcgggaaactttgtataaggctcagctaaaag

SEQ ID NO: 952667 - DNA, 33 bp, Homo sapien
aacaaacaggcaaatacacaattgggccaactt

SEQ ID NO: 952668 - DNA, 33 bp, Homo sapien
aacaaacaggcaaatatacaattgggccaactt

SEQ ID NO: 952669 - DNA, 33 bp, Homo sapien
atgcatttatctaaacaccttgttgccactaac

SEQ ID NO: 952670 - DNA, 33 bp, Homo sapien
atgcatttatctaaaccccttgttgccactaac

SEQ ID NO: 952671 - DNA, 33 bp, Homo sapien
taactggcaaaactgcaattaacttcggcaaca

SEQ ID NO: 952672 - DNA, 33 bp, Homo sapien
taactggcaaaactgcgattaacttcggcaaca

SEQ ID NO: 952673 - DNA, 33 bp, Homo sapien
catgggtgatttttacaatttctgggcgttttt

SEQ ID NO: 952674 - DNA, 33 bp, Homo sapien
catgggtgatttttaccatttctgggcgttttt

SEQ ID NO: 952675 - DNA, 33 bp, Homo sapien
gaaagaaaacaaaaccagaagccaggctgctgt

SEQ ID NO: 952676 - DNA, 33 bp, Homo sapien
gaaagaaaacaaaaccggaagccaggctgctgt

SEQ ID NO: 952677 - DNA, 33 bp, Homo sapien
aattgtatttatgttacaagagccctatattct

SEQ ID NO: 952678 - DNA, 33 bp, Homo sapien
aattgtatttatgttagaagagccctatattct

SEQ ID NO: 952679 - DNA, 33 bp, Homo sapien
ccgttgaagagccctaatactgtacacagtaat

SEQ ID NO: 952680 - DNA, 33 bp, Homo sapien
ccgttgaagagccctactactgtacacagtaat

SEQ ID NO: 952681 - DNA, 33 bp, Homo sapien
aggccaactgcaaatacaaggcagagttaatct

SEQ ID NO: 952682 - DNA, 33 bp, Homo sapien
aggccaactgcaaatataaggcagagttaatct

SEQ ID NO: 952683 - DNA, 33 bp, Homo sapien
tgtcagccattgcacacccaaaggagagtgctg

SEQ ID NO: 952684 - DNA, 33 bp, Homo sapien
tgtcagccattgcacatccaaaggagagtgctg

SEQ ID NO: 952685 - DNA, 33 bp, Homo sapien
caagtatccaaacagcaccttttaaatctagac

SEQ ID NO: 952686 - DNA, 33 bp, Homo sapien
caagtatccaaacagcgccttttaaatctagac

SEQ ID NO: 952687 - DNA, 33 bp, Homo sapien
cttaggctactaagtacagagtctccgaaaaaa

SEQ ID NO: 952688 - DNA, 33 bp, Homo sapien
cttaggctactaagtagagagtctccgaaaaaa

SEQ ID NO: 952689 - DNA, 33 bp, Homo sapien
aatcaagtttgttcagcaattttcttgcatggt

SEQ ID NO: 952690 - DNA, 33 bp, Homo sapien
aatcaagtttgttcaggaattttcttgcatggt

SEQ ID NO: 952691 - DNA, 33 bp, Homo sapien
ggctggaaaaaggaaacttgtatatccagcacc

SEQ ID NO: 952692 - DNA, 33 bp, Homo sapien
ggctggaaaaaggaaatttgtatatccagcacc

SEQ ID NO: 952693 - DNA, 33 bp, Homo sapien
tattgaatactgtttaaacttctgagtgtggca

SEQ ID NO: 952694 - DNA, 33 bp, Homo sapien
tattgaatactgtttatacttctgagtgtggca

SEQ ID NO: 952695 - DNA, 33 bp, Homo sapien
atatggcctcaaagcccaccctaaacctcccca

SEQ ID NO: 952696 - DNA, 33 bp, Homo sapien
atatggcctcaaagcctaccctaaacctcccca

SEQ ID NO: 952697 - DNA, 33 bp, Homo sapien
cagaggctaattctatcacacctggaagtttaa

SEQ ID NO: 952698 - DNA, 33 bp, Homo sapien
cagaggctaattctatgacacctggaagtttaa

SEQ ID NO: 952699 - DNA, 33 bp, Homo sapien
cacctggaagtttaaaaagcactcaactcagcc

SEQ ID NO: 952700 - DNA, 33 bp, Homo sapien
cacctggaagtttaaacagcactcaactcagcc

SEQ ID NO: 952701 - DNA, 33 bp, Homo sapien
ttactaagcttaagagacaatctcatccatccc

SEQ ID NO: 952702 - DNA, 33 bp, Homo sapien
ttactaagcttaagaggcaatctcatccatccc

SEQ ID NO: 952703 - DNA, 33 bp, Homo sapien
ggtcaacttctaccaacgatatttttaggctaa

SEQ ID NO: 952704 - DNA, 33 bp, Homo sapien
ggtcaacttctaccaaggatatttttaggctaa

SEQ ID NO: 952705 - DNA, 33 bp, Homo sapien
ggaatttataccttcaaagtcctttctttttca

SEQ ID NO: 952706 - DNA, 33 bp, Homo sapien
ggaatttataccttcacagtcctttctttttca

SEQ ID NO: 952707 - DNA, 33 bp, Homo sapien
aatgtcttaatagctacgggatggcttctctcc

SEQ ID NO: 952708 - DNA, 33 bp, Homo sapien
aatgtcttaatagctatgggatggcttctctcc

SEQ ID NO: 952709 - DNA, 33 bp, Homo sapien
cccaccaacactatataagctttctattttctc

SEQ ID NO: 952710 - DNA, 33 bp, Homo sapien
cccaccaacactatatgagctttctattttctc

SEQ ID NO: 952711 - DNA, 33 bp, Homo sapien
ggctagttattgaggacggaaggcaaagaaaaa

SEQ ID NO: 952712 - DNA, 33 bp, Homo sapien
ggctagttattgaggatggaaggcaaagaaaaa

SEQ ID NO: 952713 - DNA, 33 bp, Homo sapien
aagtgcaattatagaacctgagaagtcacatga

SEQ ID NO: 952714 - DNA, 33 bp, Homo sapien
aagtgcaattatagaagctgagaagtcacatga

SEQ ID NO: 952715 - DNA, 33 bp, Homo sapien
gagattcaaattataaatgaaaagctggaagta

SEQ ID NO: 952716 - DNA, 33 bp, Homo sapien
gagattcaaattataagtgaaaagctggaagta

SEQ ID NO: 952717 - DNA, 33 bp, Homo sapien
ttgtttttatttgctaggtaagcttccagatac

SEQ ID NO: 952718 - DNA, 33 bp, Homo sapien
ttgtttttatttgctatgtaagcttccagatac

SEQ ID NO: 952719 - DNA, 33 bp, Homo sapien
actgaagcaaaccaagaaagaaagctcaagata

SEQ ID NO: 952720 - DNA, 33 bp, Homo sapien
actgaagcaaaccaaggaagaaagctcaagata

SEQ ID NO: 952721 - DNA, 33 bp, Homo sapien
ggggattaacaacaaaatagagagagtagaaga

SEQ ID NO: 952722 - DNA, 33 bp, Homo sapien
ggggattaacaacaaactagagagagtagaaga

SEQ ID NO: 952723 - DNA, 33 bp, Homo sapien
aattagtagcagaaacaaacctggacattttac

SEQ ID NO: 952724 - DNA, 33 bp, Homo sapien
aattagtagcagaaacgaacctggacattttac

SEQ ID NO: 952725 - DNA, 33 bp, Homo sapien
aagatctggaatgggacaagaatgactacttgc

SEQ ID NO: 952726 - DNA, 33 bp, Homo sapien
aagatctggaatgggagaagaatgactacttgc

SEQ ID NO: 952727 - DNA, 33 bp, Homo sapien
agaaactgtcctttccccattgtacattgtttg

SEQ ID NO: 952728 - DNA, 33 bp, Homo sapien
agaaactgtcctttccgcattgtacattgtttg

SEQ ID NO: 952729 - DNA, 33 bp, Homo sapien
aagaaaagacaagttgaaactaagtatcataat

SEQ ID NO: 952730 - DNA, 33 bp, Homo sapien
aagaaaagacaagttgtaactaagtatcataat

SEQ ID NO: 952731 - DNA, 33 bp, Homo sapien
ttctaacataaaatgacgtgaaatgctaaaata

SEQ ID NO: 952732 - DNA, 33 bp, Homo sapien
ttctaacataaaatgatgtgaaatgctaaaata

SEQ ID NO: 952733 - DNA, 33 bp, Homo sapien
gccagataaacataaccgtcacactaaaggcca

SEQ ID NO: 952734 - DNA, 33 bp, Homo sapien
gccagataaacataactgtcacactaaaggcca

SEQ ID NO: 952735 - DNA, 33 bp, Homo sapien
ctccctctgccagaagcatgaagagattatact

SEQ ID NO: 952736 - DNA, 33 bp, Homo sapien
ctccctctgccagaaggatgaagagattatact

SEQ ID NO: 952737 - DNA, 33 bp, Homo sapien
atttaaccagaatgataatcaaaaggctttaaa

SEQ ID NO: 952738 - DNA, 33 bp, Homo sapien
atttaaccagaatgatcatcaaaaggctttaaa

SEQ ID NO: 952739 - DNA, 33 bp, Homo sapien
tatactgtaatgtccacgatcccttaaacaagg

SEQ ID NO: 952740 - DNA, 33 bp, Homo sapien
tatactgtaatgtccatgatcccttaaacaagg

SEQ ID NO: 952741 - DNA, 33 bp, Homo sapien
tcttggggatggacaaaactgggtgaaagggca

SEQ ID NO: 952742 - DNA, 33 bp, Homo sapien
tcttggggatggacaagactgggtgaaagggca

SEQ ID NO: 952743 - DNA, 33 bp, Homo sapien
cctgctagatacggtgaaaccaaaatttcaaag

SEQ ID NO: 952744 - DNA, 33 bp, Homo sapien
cctgctagatacggtggaaccaaaatttcaaag

SEQ ID NO: 952745 - DNA, 33 bp, Homo sapien
tagatgttctcaaaagcctctctggtgtggctg

SEQ ID NO: 952746 - DNA, 33 bp, Homo sapien
tagatgttctcaaaagtctctctggtgtggctg

SEQ ID NO: 952747 - DNA, 33 bp, Homo sapien
tttgttgttagcaaggaaacagtcaattatcaa

SEQ ID NO: 952748 - DNA, 33 bp, Homo sapien
tttgttgttagcaaggcaacagtcaattatcaa

SEQ ID NO: 952749 - DNA, 33 bp, Homo sapien
gaaacctgacacctggaattaaaatgttgcaat

SEQ ID NO: 952750 - DNA, 33 bp, Homo sapien
gaaacctgacacctgggattaaaatgttgcaat

SEQ ID NO: 952751 - DNA, 33 bp, Homo sapien
cttgggttcactgttacactcccgcactggtga

SEQ ID NO: 952752 - DNA, 33 bp, Homo sapien
cttgggttcactgttatactcccgcactggtga

SEQ ID NO: 952753 - DNA, 33 bp, Homo sapien
ttatctgtttctacgacatacctgtatgaatta

SEQ ID NO: 952754 - DNA, 33 bp, Homo sapien
ttatctgtttctacgagatacctgtatgaatta

SEQ ID NO: 952755 - DNA, 33 bp, Homo sapien
accccttagagtcctacagctaattgcaaacca

SEQ ID NO: 952756 - DNA, 33 bp, Homo sapien
accccttagagtcctatagctaattgcaaacca

SEQ ID NO: 952757 - DNA, 33 bp, Homo sapien
atggctaattcatacacagaaagggagagggca

SEQ ID NO: 952758 - DNA, 33 bp, Homo sapien
atggctaattcatacatagaaagggagagggca

SEQ ID NO: 952759 - DNA, 33 bp, Homo sapien
agctggaacctgtcccaagtgttgaggaaacat

SEQ ID NO: 952760 - DNA, 33 bp, Homo sapien
agctggaacctgtcccgagtgttgaggaaacat

SEQ ID NO: 952761 - DNA, 33 bp, Homo sapien
cctcatgcttaaaagacggaagatacaataata

SEQ ID NO: 952762 - DNA, 33 bp, Homo sapien
cctcatgcttaaaagatggaagatacaataata

SEQ ID NO: 952763 - DNA, 33 bp, Homo sapien
ctcctgatttggtccaagtaccagattcctctc

SEQ ID NO: 952764 - DNA, 33 bp, Homo sapien
ctcctgatttggtccaggtaccagattcctctc

SEQ ID NO: 952765 - DNA, 33 bp, Homo sapien
tttacgcttgaacctcaaacaattgaagatttt

SEQ ID NO: 952766 - DNA, 33 bp, Homo sapien
tttacgcttgaacctcgaacaattgaagatttt

SEQ ID NO: 952767 - DNA, 33 bp, Homo sapien
gttgaagaagtgctgaaaaatatatttaagatt

SEQ ID NO: 952768 - DNA, 33 bp, Homo sapien
gttgaagaagtgctgagaaatatatttaagatt

SEQ ID NO: 952769 - DNA, 33 bp, Homo sapien
ggatgctcatcatgtgaacaaactctaggagga

SEQ ID NO: 952770 - DNA, 33 bp, Homo sapien
ggatgctcatcatgtggacaaactctaggagga

SEQ ID NO: 952771 - DNA, 33 bp, Homo sapien
ttccctgtcaggtaaagtgcatatctccacatc

SEQ ID NO: 952772 - DNA, 33 bp, Homo sapien
ttccctgtcaggtaaattgcatatctccacatc

SEQ ID NO: 952773 - DNA, 33 bp, Homo sapien
cagaaaaaataaataacgcgtactaggcttact

SEQ ID NO: 952774 - DNA, 33 bp, Homo sapien
cagaaaaaataaataatgcgtactaggcttact

SEQ ID NO: 952775 - DNA, 33 bp, Homo sapien
gagcagacataattcaatatataacaagctgta

SEQ ID NO: 952776 - DNA, 33 bp, Homo sapien
gagcagacataattcagtatataacaagctgta

SEQ ID NO: 952777 - DNA, 33 bp, Homo sapien
tgtttggctttctaataattaccattcaaactg

SEQ ID NO: 952778 - DNA, 33 bp, Homo sapien
tgtttggctttctaatgattaccattcaaactg

SEQ ID NO: 952779 - DNA, 33 bp, Homo sapien
ctttaattaggtccaacgaggctctggcatagc

SEQ ID NO: 952780 - DNA, 33 bp, Homo sapien
ctttaattaggtccaatgaggctctggcatagc

SEQ ID NO: 952781 - DNA, 33 bp, Homo sapien
ttaaagagagaattaacgtaaaatgtgtgggtg

SEQ ID NO: 952782 - DNA, 33 bp, Homo sapien
ttaaagagagaattaaggtaaaatgtgtgggtg

SEQ ID NO: 952783 - DNA, 33 bp, Homo sapien
cctactaatctctagaccaccttcagggttaat

SEQ ID NO: 952784 - DNA, 33 bp, Homo sapien
cctactaatctctagatcaccttcagggttaat

SEQ ID NO: 952785 - DNA, 33 bp, Homo sapien
cagatatagtcatacacctagagtaccaataat

SEQ ID NO: 952786 - DNA, 33 bp, Homo sapien
cagatatagtcatacatctagagtaccaataat

SEQ ID NO: 952787 - DNA, 33 bp, Homo sapien
agaacagactaatacaatatgaaaccactgttt

SEQ ID NO: 952788 - DNA, 33 bp, Homo sapien
agaacagactaatacactatgaaaccactgttt

SEQ ID NO: 952789 - DNA, 33 bp, Homo sapien
agataatgtacatgaacgtgctttgtgggatac

SEQ ID NO: 952790 - DNA, 33 bp, Homo sapien
agataatgtacatgaatgtgctttgtgggatac

SEQ ID NO: 952791 - DNA, 33 bp, Homo sapien
ccatcagaatgcccccccaacgagaagttattc

SEQ ID NO: 952792 - DNA, 33 bp, Homo sapien
ccatcagaatgccccctcaacgagaagttattc

SEQ ID NO: 952793 - DNA, 33 bp, Homo sapien
ctcactcaaatcctcaaaacaacatgtgaaagg

SEQ ID NO: 952794 - DNA, 33 bp, Homo sapien
ctcactcaaatcctcacaacaacatgtgaaagg

SEQ ID NO: 952795 - DNA, 33 bp, Homo sapien
ttatgaagcctttggaagacatctcactcttag

SEQ ID NO: 952796 - DNA, 33 bp, Homo sapien
ttatgaagcctttggaggacatctcactcttag

SEQ ID NO: 952797 - DNA, 33 bp, Homo sapien
attcataaagagttaccacaaagggttaatgct

SEQ ID NO: 952798 - DNA, 33 bp, Homo sapien
attcataaagagttactacaaagggttaatgct

SEQ ID NO: 952799 - DNA, 33 bp, Homo sapien
gtacagtacggctcaactggttactgctctgcg

SEQ ID NO: 952800 - DNA, 33 bp, Homo sapien
gtacagtacggctcaattggttactgctctgcg

SEQ ID NO: 952801 - DNA, 33 bp, Homo sapien
tcattcctggctgtagaccaaactagctttggg

SEQ ID NO: 952802 - DNA, 33 bp, Homo sapien
tcattcctggctgtaggccaaactagctttggg

SEQ ID NO: 952803 - DNA, 33 bp, Homo sapien
tgaaacaaaactgatgacagacctttctggaaa

SEQ ID NO: 952804 - DNA, 33 bp, Homo sapien
tgaaacaaaactgatggcagacctttctggaaa

SEQ ID NO: 952805 - DNA, 33 bp, Homo sapien
attcttagtgccaaaacttcaattcagtgtatg

SEQ ID NO: 952806 - DNA, 33 bp, Homo sapien
attcttagtgccaaaagttcaattcagtgtatg

SEQ ID NO: 952807 - DNA, 33 bp, Homo sapien
tttctaaacccatcaccgtaactctggttggaa

SEQ ID NO: 952808 - DNA, 33 bp, Homo sapien
tttctaaacccatcactgtaactctggttggaa

SEQ ID NO: 952809 - DNA, 33 bp, Homo sapien
aatggaacttcggtatcacagagaaaaaggctc

SEQ ID NO: 952810 - DNA, 33 bp, Homo sapien
aatggaacttcggtattacagagaaaaaggctc

SEQ ID NO: 952811 - DNA, 33 bp, Homo sapien
tgtgatgtgtcaaggcaattgaaagacatcctc

SEQ ID NO: 952812 - DNA, 33 bp, Homo sapien
tgtgatgtgtcaaggcgattgaaagacatcctc

SEQ ID NO: 952813 - DNA, 33 bp, Homo sapien
ttgaaattaccacctgaaggaaacatcctattt

SEQ ID NO: 952814 - DNA, 33 bp, Homo sapien
ttgaaattaccacctggaggaaacatcctattt

SEQ ID NO: 952815 - DNA, 33 bp, Homo sapien
cacaatctcaggactgaaggcaattttcagtgt

SEQ ID NO: 952816 - DNA, 33 bp, Homo sapien
cacaatctcaggactggaggcaattttcagtgt

SEQ ID NO: 952817 - DNA, 33 bp, Homo sapien
tccagaactgacactaataactggccgtgcttg

SEQ ID NO: 952818 - DNA, 33 bp, Homo sapien
tccagaactgacactattaactggccgtgcttg

SEQ ID NO: 952819 - DNA, 33 bp, Homo sapien
aacaaggcaaagcttccatgaccaatcacatgg

SEQ ID NO: 952820 - DNA, 33 bp, Homo sapien
aacaaggcaaagcttctatgaccaatcacatgg

SEQ ID NO: 952821 - DNA, 33 bp, Homo sapien
ctcatttcctgaagacccttccaccaaaatcta

SEQ ID NO: 952822 - DNA, 33 bp, Homo sapien
ctcatttcctgaagactcttccaccaaaatcta

SEQ ID NO: 952823 - DNA, 33 bp, Homo sapien
ccatcctcagtttccaaaaagattgttctggag

SEQ ID NO: 952824 - DNA, 33 bp, Homo sapien
ccatcctcagtttccataaagattgttctggag

SEQ ID NO: 952825 - DNA, 33 bp, Homo sapien
gaaaaacaattactgcaatgaagatctgcacaa

SEQ ID NO: 952826 - DNA, 33 bp, Homo sapien
gaaaaacaattactgccatgaagatctgcacaa

SEQ ID NO: 952827 - DNA, 33 bp, Homo sapien
catcctttttacttcacgatatccctttgttta

SEQ ID NO: 952828 - DNA, 33 bp, Homo sapien
catcctttttacttcatgatatccctttgttta

SEQ ID NO: 952829 - DNA, 33 bp, Homo sapien
atgtttgcaccctttaaagtttcatctatatac

SEQ ID NO: 952830 - DNA, 33 bp, Homo sapien
atgtttgcaccctttacagtttcatctatatac

SEQ ID NO: 952831 - DNA, 33 bp, Homo sapien
aacttagccaaatttagagcatcacctatcttt

SEQ ID NO: 952832 - DNA, 33 bp, Homo sapien
aacttagccaaatttatagcatcacctatcttt

SEQ ID NO: 952833 - DNA, 33 bp, Homo sapien
gagctctatcttcggcaagtttctgtggtgtct

SEQ ID NO: 952834 - DNA, 33 bp, Homo sapien
gagctctatcttcggcgagtttctgtggtgtct

SEQ ID NO: 952835 - DNA, 33 bp, Homo sapien
ttcatctaggcatctgaagtcagctaccaggtc

SEQ ID NO: 952836 - DNA, 33 bp, Homo sapien
ttcatctaggcatctgcagtcagctaccaggtc

SEQ ID NO: 952837 - DNA, 33 bp, Homo sapien
tgaataatggtccccaaagatattcagttccta

SEQ ID NO: 952838 - DNA, 33 bp, Homo sapien
tgaataatggtccccagagatattcagttccta

SEQ ID NO: 952839 - DNA, 33 bp, Homo sapien
gagtgtgcaagaaaagaatgagacctcaggaaa

SEQ ID NO: 952840 - DNA, 33 bp, Homo sapien
gagtgtgcaagaaaaggatgagacctcaggaaa

SEQ ID NO: 952841 - DNA, 33 bp, Homo sapien
tactttttgggttcacagagatacccagagaaa

SEQ ID NO: 952842 - DNA, 33 bp, Homo sapien
tactttttgggttcacggagatacccagagaaa

SEQ ID NO: 952843 - DNA, 33 bp, Homo sapien
gagaaatgagtaaatcccaaagtggtggctgtg

SEQ ID NO: 952844 - DNA, 33 bp, Homo sapien
gagaaatgagtaaatctcaaagtggtggctgtg

SEQ ID NO: 952845 - DNA, 33 bp, Homo sapien
tcatgaggatgttccaaacattgcatggggcat

SEQ ID NO: 952846 - DNA, 33 bp, Homo sapien
tcatgaggatgttccatacattgcatggggcat

SEQ ID NO: 952847 - DNA, 33 bp, Homo sapien
gtctcctgggaatacaactgtgatcaaatacag

SEQ ID NO: 952848 - DNA, 33 bp, Homo sapien
gtctcctgggaatacagctgtgatcaaatacag

SEQ ID NO: 952849 - DNA, 33 bp, Homo sapien
actggagagtgctactcagatggccagagggct

SEQ ID NO: 952850 - DNA, 33 bp, Homo sapien
actggagagtgctacttagatggccagagggct

SEQ ID NO: 952851 - DNA, 33 bp, Homo sapien
tgtatgggtgtcatccaggaagaactggcaata

SEQ ID NO: 952852 - DNA, 33 bp, Homo sapien
tgtatgggtgtcatccgggaagaactggcaata

SEQ ID NO: 952853 - DNA, 33 bp, Homo sapien
cagtgccaggctcagaaaatatttgtaataata

SEQ ID NO: 952854 - DNA, 33 bp, Homo sapien
cagtgccaggctcagacaatatttgtaataata

SEQ ID NO: 952855 - DNA, 33 bp, Homo sapien
cattttaggacaataaatagctgcatggtctct

SEQ ID NO: 952856 - DNA, 33 bp, Homo sapien
cattttaggacaataactagctgcatggtctct

SEQ ID NO: 952857 - DNA, 33 bp, Homo sapien
ctacatgatttttgaaccaaatggctgtttctg

SEQ ID NO: 952858 - DNA, 33 bp, Homo sapien
ctacatgatttttgaatcaaatggctgtttctg

SEQ ID NO: 952859 - DNA, 33 bp, Homo sapien
cttagttttgcgagagcatttccttctaagaat

SEQ ID NO: 952860 - DNA, 33 bp, Homo sapien
cttagttttgcgagagtatttccttctaagaat

SEQ ID NO: 952861 - DNA, 33 bp, Homo sapien
actaaagtatatcaggccatcccaggattgggt

SEQ ID NO: 952862 - DNA, 33 bp, Homo sapien
actaaagtatatcagggcatcccaggattgggt

SEQ ID NO: 952863 - DNA, 33 bp, Homo sapien
ctttcggaagaattaaatacccaccatatcatt

SEQ ID NO: 952864 - DNA, 33 bp, Homo sapien
ctttcggaagaattaagtacccaccatatcatt

SEQ ID NO: 952865 - DNA, 33 bp, Homo sapien
ttaatactaaagttacgaagactgcacaggctg

SEQ ID NO: 952866 - DNA, 33 bp, Homo sapien
ttaatactaaagttactaagactgcacaggctg

SEQ ID NO: 952867 - DNA, 33 bp, Homo sapien
gtactgtgtgcaataccaagggcatagctccct

SEQ ID NO: 952868 - DNA, 33 bp, Homo sapien
gtactgtgtgcaatactaagggcatagctccct

SEQ ID NO: 952869 - DNA, 33 bp, Homo sapien
cctctgcatctaagagcaataaaaaggttacac

SEQ ID NO: 952870 - DNA, 33 bp, Homo sapien
cctctgcatctaagaggaataaaaaggttacac

SEQ ID NO: 952871 - DNA, 33 bp, Homo sapien
cattctggtaaagtaactattccaccatcctgc

SEQ ID NO: 952872 - DNA, 33 bp, Homo sapien
cattctggtaaagtaagtattccaccatcctgc

SEQ ID NO: 952873 - DNA, 33 bp, Homo sapien
ttggcatgtctcatagccacacataacttatgg

SEQ ID NO: 952874 - DNA, 33 bp, Homo sapien
ttggcatgtctcatagtcacacataacttatgg

SEQ ID NO: 952875 - DNA, 33 bp, Homo sapien
attctgagtgggatgtcaaacagtttagcctct

SEQ ID NO: 952876 - DNA, 33 bp, Homo sapien
attctgagtgggatgtgaaacagtttagcctct

SEQ ID NO: 952877 - DNA, 33 bp, Homo sapien
aggtagcgctgtcgacgcaaaagtagggagggc

SEQ ID NO: 952878 - DNA, 33 bp, Homo sapien
aggtagcgctgtcgactcaaaagtagggagggc

SEQ ID NO: 952879 - DNA, 33 bp, Homo sapien
tctttttcttcccctcacagcgggcgcacacta

SEQ ID NO: 952880 - DNA, 33 bp, Homo sapien
tctttttcttcccctcgcagcgggcgcacacta

SEQ ID NO: 952881 - DNA, 33 bp, Homo sapien
ttcccgggatggcaatcaaggccaacctcttta

SEQ ID NO: 952882 - DNA, 33 bp, Homo sapien
ttcccgggatggcaatgaaggccaacctcttta

SEQ ID NO: 952883 - DNA, 33 bp, Homo sapien
aaaacaaagaaggcgactcctcctacacagcag

SEQ ID NO: 952884 - DNA, 33 bp, Homo sapien
aaaacaaagaaggcgattcctcctacacagcag

SEQ ID NO: 952885 - DNA, 33 bp, Homo sapien
ttacggtggactttcccattgttctttttcagt

SEQ ID NO: 952886 - DNA, 33 bp, Homo sapien
ttacggtggactttcctattgttctttttcagt

SEQ ID NO: 952887 - DNA, 33 bp, Homo sapien
atctaactgaggaatgcattggtagagggaagg

SEQ ID NO: 952888 - DNA, 33 bp, Homo sapien
atctaactgaggaatgtattggtagagggaagg

SEQ ID NO: 952889 - DNA, 33 bp, Homo sapien
tcagtctgcttttacaaattttcacaaaaacaa

SEQ ID NO: 952890 - DNA, 33 bp, Homo sapien
tcagtctgcttttacatattttcacaaaaacaa

SEQ ID NO: 952891 - DNA, 33 bp, Homo sapien
actttattaagcctcccaggataagaagtgcta

SEQ ID NO: 952892 - DNA, 33 bp, Homo sapien
actttattaagcctccgaggataagaagtgcta

SEQ ID NO: 952893 - DNA, 33 bp, Homo sapien
tttacctatttaatgacgcatgaagtaaatagt

SEQ ID NO: 952894 - DNA, 33 bp, Homo sapien
tttacctatttaatgaggcatgaagtaaatagt

SEQ ID NO: 952895 - DNA, 33 bp, Homo sapien
ttagtaattaaagcaaactgggtcctaaattgt

SEQ ID NO: 952896 - DNA, 33 bp, Homo sapien
ttagtaattaaagcaagctgggtcctaaattgt

SEQ ID NO: 952897 - DNA, 33 bp, Homo sapien
tttaatcatttctttagatcaaccatgcaacat

SEQ ID NO: 952898 - DNA, 33 bp, Homo sapien
tttaatcatttctttatatcaaccatgcaacat

SEQ ID NO: 952899 - DNA, 33 bp, Homo sapien
taactgctccaaatcaccaattagttaagtgac

SEQ ID NO: 952900 - DNA, 33 bp, Homo sapien
taactgctccaaatcagcaattagttaagtgac

SEQ ID NO: 952901 - DNA, 33 bp, Homo sapien
cctacaggaagttgaaacattaataaataatat

SEQ ID NO: 952902 - DNA, 33 bp, Homo sapien
cctacaggaagttgaagcattaataaataatat

SEQ ID NO: 952903 - DNA, 33 bp, Homo sapien
tctttaattttcgtgacaccttcatcatttgaa

SEQ ID NO: 952904 - DNA, 33 bp, Homo sapien
tctttaattttcgtgataccttcatcatttgaa

SEQ ID NO: 952905 - DNA, 33 bp, Homo sapien
ccaccttgtaatcatacaatttactttttgtgt

SEQ ID NO: 952906 - DNA, 33 bp, Homo sapien
ccaccttgtaatcatataatttactttttgtgt

SEQ ID NO: 952907 - DNA, 33 bp, Homo sapien
gggacattagtaactccctgtaggatgcacaca

SEQ ID NO: 952908 - DNA, 33 bp, Homo sapien
gggacattagtaactctctgtaggatgcacaca

SEQ ID NO: 952909 - DNA, 33 bp, Homo sapien
gaacaacttacttgtgaacagatttcttaaatc

SEQ ID NO: 952910 - DNA, 33 bp, Homo sapien
gaacaacttacttgtggacagatttcttaaatc

SEQ ID NO: 952911 - DNA, 33 bp, Homo sapien
tagagatgatgtaaaacgtgtacagaaggatat

SEQ ID NO: 952912 - DNA, 33 bp, Homo sapien
tagagatgatgtaaaatgtgtacagaaggatat

SEQ ID NO: 952913 - DNA, 33 bp, Homo sapien
aggatataatttgtgacggagtaaaagtatagt

SEQ ID NO: 952914 - DNA, 33 bp, Homo sapien
aggatataatttgtgatggagtaaaagtatagt

SEQ ID NO: 952915 - DNA, 33 bp, Homo sapien
ctaagtgtccactgaacgatgaataaagaatat

SEQ ID NO: 952916 - DNA, 33 bp, Homo sapien
ctaagtgtccactgaaggatgaataaagaatat

SEQ ID NO: 952917 - DNA, 33 bp, Homo sapien
gcattggctaatgctgcaatggaacctggagaa

SEQ ID NO: 952918 - DNA, 33 bp, Homo sapien
gcattggctaatgctggaatggaacctggagaa

SEQ ID NO: 952919 - DNA, 33 bp, Homo sapien
ggagcaattattcaacagtatttagttggtgtg

SEQ ID NO: 952920 - DNA, 33 bp, Homo sapien
ggagcaattattcaacggtatttagttggtgtg

SEQ ID NO: 952921 - DNA, 33 bp, Homo sapien
gatattggagccatcactgaatcttaaatatta

SEQ ID NO: 952922 - DNA, 33 bp, Homo sapien
gatattggagccatcattgaatcttaaatatta

SEQ ID NO: 952923 - DNA, 33 bp, Homo sapien
taataactaaagccaaaatattattcactgtac

SEQ ID NO: 952924 - DNA, 33 bp, Homo sapien
taataactaaagccaagatattattcactgtac

SEQ ID NO: 952925 - DNA, 33 bp, Homo sapien
ggcggccggcttagcacaagtccatagttcatt

SEQ ID NO: 952926 - DNA, 33 bp, Homo sapien
ggcggccggcttagcagaagtccatagttcatt

SEQ ID NO: 952927 - DNA, 33 bp, Homo sapien
ttattaagcttctccaacattagaataaaacct

SEQ ID NO: 952928 - DNA, 33 bp, Homo sapien
ttattaagcttctccagcattagaataaaacct

SEQ ID NO: 952929 - DNA, 33 bp, Homo sapien
cacctatcagtaggcaaagcttgaagtcacttt

SEQ ID NO: 952930 - DNA, 33 bp, Homo sapien
cacctatcagtaggcagagcttgaagtcacttt

SEQ ID NO: 952931 - DNA, 33 bp, Homo sapien
aagaacatgtgggacaataacttcatgactttt

SEQ ID NO: 952932 - DNA, 33 bp, Homo sapien
aagaacatgtgggacagtaacttcatgactttt

SEQ ID NO: 952933 - DNA, 33 bp, Homo sapien
actggtttttgtgttacaactgaggtggggaat

SEQ ID NO: 952934 - DNA, 33 bp, Homo sapien
actggtttttgtgttagaactgaggtggggaat

SEQ ID NO: 952935 - DNA, 33 bp, Homo sapien
cccaaagacagataatcatctgtcataaccgtc

SEQ ID NO: 952936 - DNA, 33 bp, Homo sapien
cccaaagacagataatgatctgtcataaccgtc

SEQ ID NO: 952937 - DNA, 33 bp, Homo sapien
acacaaaaaatcatgcagagatagaaatggaga

SEQ ID NO: 952938 - DNA, 33 bp, Homo sapien
acacaaaaaatcatgccgagatagaaatggaga

SEQ ID NO: 952939 - DNA, 33 bp, Homo sapien
tgcccttttgctaagacggattcacttgctgtc

SEQ ID NO: 952940 - DNA, 33 bp, Homo sapien
tgcccttttgctaagatggattcacttgctgtc

SEQ ID NO: 952941 - DNA, 33 bp, Homo sapien
gagcacacctagccccaagatttgatttctaaa

SEQ ID NO: 952942 - DNA, 33 bp, Homo sapien
gagcacacctagccccgagatttgatttctaaa

SEQ ID NO: 952943 - DNA, 33 bp, Homo sapien
ctacatctttctcataactggcagcatttttct

SEQ ID NO: 952944 - DNA, 33 bp, Homo sapien
ctacatctttctcatatctggcagcatttttct

SEQ ID NO: 952945 - DNA, 33 bp, Homo sapien
agagaaaatgagatcaaattattctttccattc

SEQ ID NO: 952946 - DNA, 33 bp, Homo sapien
agagaaaatgagatcacattattctttccattc

SEQ ID NO: 952947 - DNA, 33 bp, Homo sapien
atacgtgtattcttagccagtatcttgacaaac

SEQ ID NO: 952948 - DNA, 33 bp, Homo sapien
atacgtgtattcttaggcagtatcttgacaaac

SEQ ID NO: 952949 - DNA, 33 bp, Homo sapien
taaattacagaggtaaacatattctggtctaaa

SEQ ID NO: 952950 - DNA, 33 bp, Homo sapien
taaattacagaggtaagcatattctggtctaaa

SEQ ID NO: 952951 - DNA, 33 bp, Homo sapien
catagagacgatagtaaaagttgaagaccattg

SEQ ID NO: 952952 - DNA, 33 bp, Homo sapien
catagagacgatagtagaagttgaagaccattg

SEQ ID NO: 952953 - DNA, 33 bp, Homo sapien
tggctatactaaacaacagattttcagtatata

SEQ ID NO: 952954 - DNA, 33 bp, Homo sapien
tggctatactaaacaatagattttcagtatata

SEQ ID NO: 952955 - DNA, 33 bp, Homo sapien
gactctcttcttagggccaatggggcaatgaag

SEQ ID NO: 952956 - DNA, 33 bp, Homo sapien
gactctcttcttaggggcaatggggcaatgaag

SEQ ID NO: 952957 - DNA, 33 bp, Homo sapien
gtatttctgacgctgcaatgatgttctagccat

SEQ ID NO: 952958 - DNA, 33 bp, Homo sapien
gtatttctgacgctgcgatgatgttctagccat

SEQ ID NO: 952959 - DNA, 33 bp, Homo sapien
ttaataaagttaaaagcaaacaatgctatccac

SEQ ID NO: 952960 - DNA, 33 bp, Homo sapien
ttaataaagttaaaagtaaacaatgctatccac

SEQ ID NO: 952961 - DNA, 33 bp, Homo sapien
catcatcctaagttcacggctaagaaaacttat

SEQ ID NO: 952962 - DNA, 33 bp, Homo sapien
catcatcctaagttcatggctaagaaaacttat

SEQ ID NO: 952963 - DNA, 33 bp, Homo sapien
acacatgctgatatatcaagggaaattgttttt

SEQ ID NO: 952964 - DNA, 33 bp, Homo sapien
acacatgctgatatatgaagggaaattgttttt

SEQ ID NO: 952965 - DNA, 33 bp, Homo sapien
aaaatagcaggattcagtgaaaggtataaacgt

SEQ ID NO: 952966 - DNA, 33 bp, Homo sapien
aaaatagcaggattcattgaaaggtataaacgt

SEQ ID NO: 952967 - DNA, 33 bp, Homo sapien
agggacgtagttctacagattatcattatctgt

SEQ ID NO: 952968 - DNA, 33 bp, Homo sapien
agggacgtagttctacggattatcattatctgt

SEQ ID NO: 952969 - DNA, 33 bp, Homo sapien
taattattctgccagactaacatgttctaatgt

SEQ ID NO: 952970 - DNA, 33 bp, Homo sapien
taattattctgccagattaacatgttctaatgt

SEQ ID NO: 952971 - DNA, 33 bp, Homo sapien
catttaaacggtatcacgtagtttggcaagaga

SEQ ID NO: 952972 - DNA, 33 bp, Homo sapien
catttaaacggtatcatgtagtttggcaagaga

SEQ ID NO: 952973 - DNA, 33 bp, Homo sapien
ttccaaaacatattcagatttgcatcctgccca

SEQ ID NO: 952974 - DNA, 33 bp, Homo sapien
ttccaaaacatattcatatttgcatcctgccca

SEQ ID NO: 952975 - DNA, 33 bp, Homo sapien
aaaattctgattaaaactggaggaaaacgtgta

SEQ ID NO: 952976 - DNA, 33 bp, Homo sapien
aaaattctgattaaaattggaggaaaacgtgta

SEQ ID NO: 952977 - DNA, 33 bp, Homo sapien
ccatggtatgcagtcaaaggctatgggaaatta

SEQ ID NO: 952978 - DNA, 33 bp, Homo sapien
ccatggtatgcagtcagaggctatgggaaatta

SEQ ID NO: 952979 - DNA, 33 bp, Homo sapien
atagtgagacatcgcaatcctgagtagtatgct

SEQ ID NO: 952980 - DNA, 33 bp, Homo sapien
atagtgagacatcgcattcctgagtagtatgct

SEQ ID NO: 952981 - DNA, 33 bp, Homo sapien
aagaccctctaagacaagaagggaccagagtta

SEQ ID NO: 952982 - DNA, 33 bp, Homo sapien
aagaccctctaagacaggaagggaccagagtta

SEQ ID NO: 952983 - DNA, 33 bp, Homo sapien
agattgtcagccttcacatagccagcccaagtt

SEQ ID NO: 952984 - DNA, 33 bp, Homo sapien
agattgtcagccttcatatagccagcccaagtt

SEQ ID NO: 952985 - DNA, 33 bp, Homo sapien
ggcttctttgtcagaaataggtgtattgatttc

SEQ ID NO: 952986 - DNA, 33 bp, Homo sapien
ggcttctttgtcagaagtaggtgtattgatttc

SEQ ID NO: 952987 - DNA, 33 bp, Homo sapien
cactcgtgagaggctacctcccatgcttaaacc

SEQ ID NO: 952988 - DNA, 33 bp, Homo sapien
cactcgtgagaggctatctcccatgcttaaacc

SEQ ID NO: 952989 - DNA, 33 bp, Homo sapien
ccaaagaatagttacccagacatagcctatgtc

SEQ ID NO: 952990 - DNA, 33 bp, Homo sapien
ccaaagaatagttaccgagacatagcctatgtc

SEQ ID NO: 952991 - DNA, 33 bp, Homo sapien
gattgataaaacagtaccagaaattgcacacac

SEQ ID NO: 952992 - DNA, 33 bp, Homo sapien
gattgataaaacagtatcagaaattgcacacac

SEQ ID NO: 952993 - DNA, 33 bp, Homo sapien
cccaggtgtaacgatcaatattactgttattgt

SEQ ID NO: 952994 - DNA, 33 bp, Homo sapien
cccaggtgtaacgatcgatattactgttattgt

SEQ ID NO: 952995 - DNA, 33 bp, Homo sapien
ttacagattaatgacactggtaagtataaacat

SEQ ID NO: 952996 - DNA, 33 bp, Homo sapien
ttacagattaatgacattggtaagtataaacat

SEQ ID NO: 952997 - DNA, 33 bp, Homo sapien
acctctcagactcctcaaatagctgtgcatcct

SEQ ID NO: 952998 - DNA, 33 bp, Homo sapien
acctctcagactcctcgaatagctgtgcatcct

SEQ ID NO: 952999 - DNA, 33 bp, Homo sapien
ggagacctaaaagcaacgaatgtacagtgttgg

SEQ ID NO: 953000 - DNA, 33 bp, Homo sapien
ggagacctaaaagcaatgaatgtacagtgttgg

SEQ ID NO: 953001 - DNA, 33 bp, Homo sapien
ggttaaaccttaacacaagtaggctgaaaatca

SEQ ID NO: 953002 - DNA, 33 bp, Homo sapien
ggttaaaccttaacacgagtaggctgaaaatca

SEQ ID NO: 953003 - DNA, 33 bp, Homo sapien
ttcccccacaaaaatacagaactgtaggcaata

SEQ ID NO: 953004 - DNA, 33 bp, Homo sapien
ttcccccacaaaaatatagaactgtaggcaata

SEQ ID NO: 953005 - DNA, 33 bp, Homo sapien
ttttccaggtttgcccagcctcttgtttcttta

SEQ ID NO: 953006 - DNA, 33 bp, Homo sapien
ttttccaggtttgcccggcctcttgtttcttta

SEQ ID NO: 953007 - DNA, 33 bp, Homo sapien
agaagacaggaaagcaacgccgtgctaggggaa

SEQ ID NO: 953008 - DNA, 33 bp, Homo sapien
agaagacaggaaagcagcgccgtgctaggggaa

SEQ ID NO: 953009 - DNA, 33 bp, Homo sapien
acacagtttacttgaacttaacgacactggaag

SEQ ID NO: 953010 - DNA, 33 bp, Homo sapien
acacagtttacttgaagttaacgacactggaag

SEQ ID NO: 953011 - DNA, 33 bp, Homo sapien
gtaattgtcaagtgaaatattgattctcttcca

SEQ ID NO: 953012 - DNA, 33 bp, Homo sapien
gtaattgtcaagtgaagtattgattctcttcca

SEQ ID NO: 953013 - DNA, 33 bp, Homo sapien
ttccaaaactttttcacctcactaatctcaaac

SEQ ID NO: 953014 - DNA, 33 bp, Homo sapien
ttccaaaactttttcatctcactaatctcaaac

SEQ ID NO: 953015 - DNA, 33 bp, Homo sapien
ctctttaatgggtataaagtttgagattagtga

SEQ ID NO: 953016 - DNA, 33 bp, Homo sapien
ctctttaatgggtatagagtttgagattagtga

SEQ ID NO: 953017 - DNA, 33 bp, Homo sapien
gcagcagcaggaacagactgtaccaacgacaga

SEQ ID NO: 953018 - DNA, 33 bp, Homo sapien
gcagcagcaggaacaggctgtaccaacgacaga

SEQ ID NO: 953019 - DNA, 33 bp, Homo sapien
gattgtagtcatttccaaatctgttgcctgtgt

SEQ ID NO: 953020 - DNA, 33 bp, Homo sapien
gattgtagtcatttcccaatctgttgcctgtgt

SEQ ID NO: 953021 - DNA, 33 bp, Homo sapien
tttaacactgttctgtgacaaaacctaaacata

SEQ ID NO: 953022 - DNA, 33 bp, Homo sapien
tttaacactgttctgttacaaaacctaaacata

SEQ ID NO: 953023 - DNA, 33 bp, Homo sapien
tgctattatgacacaacggtaaggaaaaaaaga

SEQ ID NO: 953024 - DNA, 33 bp, Homo sapien
tgctattatgacacaatggtaaggaaaaaaaga

SEQ ID NO: 953025 - DNA, 33 bp, Homo sapien
ataatcttcatggggaatacactaatcaaccat

SEQ ID NO: 953026 - DNA, 33 bp, Homo sapien
ataatcttcatggggagtacactaatcaaccat

SEQ ID NO: 953027 - DNA, 33 bp, Homo sapien
tcataggggccatgctaacaagtcaaacagaca

SEQ ID NO: 953028 - DNA, 33 bp, Homo sapien
tcataggggccatgctgacaagtcaaacagaca

SEQ ID NO: 953029 - DNA, 33 bp, Homo sapien
atatattacggcaaatcaagggataatatactc

SEQ ID NO: 953030 - DNA, 33 bp, Homo sapien
atatattacggcaaatgaagggataatatactc

SEQ ID NO: 953031 - DNA, 33 bp, Homo sapien
tgacattcaatgaaaaaagtgactagtttttag

SEQ ID NO: 953032 - DNA, 33 bp, Homo sapien
tgacattcaatgaaaagagtgactagtttttag

SEQ ID NO: 953033 - DNA, 33 bp, Homo sapien
tggcttgcattaagcacaataaccatttactgt

SEQ ID NO: 953034 - DNA, 33 bp, Homo sapien
tggcttgcattaagcagaataaccatttactgt

SEQ ID NO: 953035 - DNA, 33 bp, Homo sapien
gcaaaataagccagcaagggtttggtagaccta

SEQ ID NO: 953036 - DNA, 33 bp, Homo sapien
gcaaaataagccagcatgggtttggtagaccta

SEQ ID NO: 953037 - DNA, 33 bp, Homo sapien
aatatcaatggcagaacagcaggcattaactgg

SEQ ID NO: 953038 - DNA, 33 bp, Homo sapien
aatatcaatggcagaatagcaggcattaactgg

SEQ ID NO: 953039 - DNA, 33 bp, Homo sapien
agatttcacaaaactgaatggtagtgttaagtc

SEQ ID NO: 953040 - DNA, 33 bp, Homo sapien
agatttcacaaaactggatggtagtgttaagtc

SEQ ID NO: 953041 - DNA, 33 bp, Homo sapien
ctatcccatcaggaaactgaataatcattatcg

SEQ ID NO: 953042 - DNA, 33 bp, Homo sapien
ctatcccatcaggaaattgaataatcattatcg

SEQ ID NO: 953043 - DNA, 33 bp, Homo sapien
ggaaaacacaaagtaaacatgaattgcctaaaa

SEQ ID NO: 953044 - DNA, 33 bp, Homo sapien
ggaaaacacaaagtaaccatgaattgcctaaaa

SEQ ID NO: 953045 - DNA, 33 bp, Homo sapien
aaattgcctctgaaaacggaaaagaaaataatt

SEQ ID NO: 953046 - DNA, 33 bp, Homo sapien
aaattgcctctgaaaagggaaaagaaaataatt

SEQ ID NO: 953047 - DNA, 33 bp, Homo sapien
accagaagatgactggaaggagcaaaatggata

SEQ ID NO: 953048 - DNA, 33 bp, Homo sapien
accagaagatgactggcaggagcaaaatggata

SEQ ID NO: 953049 - DNA, 33 bp, Homo sapien
tcccacattttctcgactcagagtctttaatat

SEQ ID NO: 953050 - DNA, 33 bp, Homo sapien
tcccacattttctcgattcagagtctttaatat

SEQ ID NO: 953051 - DNA, 33 bp, Homo sapien
cgccgcataccttccaaatctcagtcctttttc

SEQ ID NO: 953052 - DNA, 33 bp, Homo sapien
cgccgcataccttccacatctcagtcctttttc

SEQ ID NO: 953053 - DNA, 33 bp, Homo sapien
cccctgtaattctgcaatacctctccatgacca

SEQ ID NO: 953054 - DNA, 33 bp, Homo sapien
cccctgtaattctgcagtacctctccatgacca

SEQ ID NO: 953055 - DNA, 33 bp, Homo sapien
tcaatcacctaattcaccctgtaggtcatggat

SEQ ID NO: 953056 - DNA, 33 bp, Homo sapien
tcaatcacctaattcatcctgtaggtcatggat

SEQ ID NO: 953057 - DNA, 33 bp, Homo sapien
aagaagaagtatgatgaatagccctaaataaag

SEQ ID NO: 953058 - DNA, 33 bp, Homo sapien
aagaagaagtatgatgcatagccctaaataaag

SEQ ID NO: 953059 - DNA, 33 bp, Homo sapien
agtctgcagaaaataaaatgcactttggcacca

SEQ ID NO: 953060 - DNA, 33 bp, Homo sapien
agtctgcagaaaataagatgcactttggcacca

SEQ ID NO: 953061 - DNA, 33 bp, Homo sapien
attaatgtcacagttaagagcagcagcttaaga

SEQ ID NO: 953062 - DNA, 33 bp, Homo sapien
attaatgtcacagttaggagcagcagcttaaga

SEQ ID NO: 953063 - DNA, 33 bp, Homo sapien
gcaagagtcacccacaatgagtctggtttaggt

SEQ ID NO: 953064 - DNA, 33 bp, Homo sapien
gcaagagtcacccacagtgagtctggtttaggt

SEQ ID NO: 953065 - DNA, 33 bp, Homo sapien
tcctcctgggaaatgactaaaagagatgcccag

SEQ ID NO: 953066 - DNA, 33 bp, Homo sapien
tcctcctgggaaatgagtaaaagagatgcccag

SEQ ID NO: 953067 - DNA, 33 bp, Homo sapien
tttgcccaaaagccaacaaatgaaagtgattga

SEQ ID NO: 953068 - DNA, 33 bp, Homo sapien
tttgcccaaaagccaagaaatgaaagtgattga

SEQ ID NO: 953069 - DNA, 33 bp, Homo sapien
agttttatcctgatgtcaatctatgcagaactg

SEQ ID NO: 953070 - DNA, 33 bp, Homo sapien
agttttatcctgatgtgaatctatgcagaactg

SEQ ID NO: 953071 - DNA, 33 bp, Homo sapien
ggctttgactctgagacaagtcaacaaattgag

SEQ ID NO: 953072 - DNA, 33 bp, Homo sapien
ggctttgactctgagataagtcaacaaattgag

SEQ ID NO: 953073 - DNA, 33 bp, Homo sapien
acctgagtgagatgccaaaaaggtgctggagac

SEQ ID NO: 953074 - DNA, 33 bp, Homo sapien
acctgagtgagatgccgaaaaggtgctggagac

SEQ ID NO: 953075 - DNA, 33 bp, Homo sapien
cacacaccgtctggtacactttaaatcatctct

SEQ ID NO: 953076 - DNA, 33 bp, Homo sapien
cacacaccgtctggtatactttaaatcatctct

SEQ ID NO: 953077 - DNA, 33 bp, Homo sapien
tccacagttggtttaacgcgatgtggaactcac

SEQ ID NO: 953078 - DNA, 33 bp, Homo sapien
tccacagttggtttaatgcgatgtggaactcac

SEQ ID NO: 953079 - DNA, 33 bp, Homo sapien
ttagaccaacctggaacatcggaagtgcttagt

SEQ ID NO: 953080 - DNA, 33 bp, Homo sapien
ttagaccaacctggaatatcggaagtgcttagt

SEQ ID NO: 953081 - DNA, 33 bp, Homo sapien
gttgtcttacttcctcgagatcagtacattcat

SEQ ID NO: 953082 - DNA, 33 bp, Homo sapien
gttgtcttacttcctctagatcagtacattcat

SEQ ID NO: 953083 - DNA, 33 bp, Homo sapien
tgggaaaggctttgcaataaaatctgggaatgt

SEQ ID NO: 953084 - DNA, 33 bp, Homo sapien
tgggaaaggctttgcactaaaatctgggaatgt

SEQ ID NO: 953085 - DNA, 33 bp, Homo sapien
aggcacaaattgaggcaaatttttctcccttta

SEQ ID NO: 953086 - DNA, 33 bp, Homo sapien
aggcacaaattgaggcgaatttttctcccttta

SEQ ID NO: 953087 - DNA, 33 bp, Homo sapien
gttgactgatgggagagatttactttgaaaccc

SEQ ID NO: 953088 - DNA, 33 bp, Homo sapien
gttgactgatgggagatatttactttgaaaccc

SEQ ID NO: 953089 - DNA, 33 bp, Homo sapien
atttgttttgaataaacgatcctaactggtcac

SEQ ID NO: 953090 - DNA, 33 bp, Homo sapien
atttgttttgaataaatgatcctaactggtcac

SEQ ID NO: 953091 - DNA, 33 bp, Homo sapien
aaacacaaggctaccccgggatcagagtcacgc

SEQ ID NO: 953092 - DNA, 33 bp, Homo sapien
aaacacaaggctaccctgggatcagagtcacgc

SEQ ID NO: 953093 - DNA, 33 bp, Homo sapien
aggctcatgtctccccaattgtttctgcagccc

SEQ ID NO: 953094 - DNA, 33 bp, Homo sapien
aggctcatgtctccccgattgtttctgcagccc

SEQ ID NO: 953095 - DNA, 33 bp, Homo sapien
tggttctggttttcaacgcttttcatccatcct

SEQ ID NO: 953096 - DNA, 33 bp, Homo sapien
tggttctggttttcaatgcttttcatccatcct

SEQ ID NO: 953097 - DNA, 33 bp, Homo sapien
aaagccaaatataacaatagaccaaagggccaa

SEQ ID NO: 953098 - DNA, 33 bp, Homo sapien
aaagccaaatataacagtagaccaaagggccaa

SEQ ID NO: 953099 - DNA, 33 bp, Homo sapien
tctctttccttccctacgtagtgaagtaaccat

SEQ ID NO: 953100 - DNA, 33 bp, Homo sapien
tctctttccttccctatgtagtgaagtaaccat

SEQ ID NO: 953101 - DNA, 33 bp, Homo sapien
ttttagattcagagaccagtagaatacctgcaa

SEQ ID NO: 953102 - DNA, 33 bp, Homo sapien
ttttagattcagagactagtagaatacctgcaa

SEQ ID NO: 953103 - DNA, 33 bp, Homo sapien
cctgtgcctgacgctccatttgcaggtattcta

SEQ ID NO: 953104 - DNA, 33 bp, Homo sapien
cctgtgcctgacgctctatttgcaggtattcta

SEQ ID NO: 953105 - DNA, 33 bp, Homo sapien
agccggaagtctgagacggtctgttttcaagaa

SEQ ID NO: 953106 - DNA, 33 bp, Homo sapien
agccggaagtctgagatggtctgttttcaagaa

SEQ ID NO: 953107 - DNA, 33 bp, Homo sapien
ttactattgtgggttacagaatgagaacatttt

SEQ ID NO: 953108 - DNA, 33 bp, Homo sapien
ttactattgtgggttagagaatgagaacatttt

SEQ ID NO: 953109 - DNA, 33 bp, Homo sapien
catgatgtcaagtttcaatcataaaggccataa

SEQ ID NO: 953110 - DNA, 33 bp, Homo sapien
catgatgtcaagtttcgatcataaaggccataa

SEQ ID NO: 953111 - DNA, 33 bp, Homo sapien
aataaacaaacaaacacaggaaattgagtgggc

SEQ ID NO: 953112 - DNA, 33 bp, Homo sapien
aataaacaaacaaacataggaaattgagtgggc

SEQ ID NO: 953113 - DNA, 33 bp, Homo sapien
ccaaggttggaagtaccagctatatagggtgtg

SEQ ID NO: 953114 - DNA, 33 bp, Homo sapien
ccaaggttggaagtacgagctatatagggtgtg

SEQ ID NO: 953115 - DNA, 33 bp, Homo sapien
aatttcaaggagtggaaatactgtggacaggag

SEQ ID NO: 953116 - DNA, 33 bp, Homo sapien
aatttcaaggagtggagatactgtggacaggag

SEQ ID NO: 953117 - DNA, 33 bp, Homo sapien
ccttgttaggatacataaatacataaacacaca

SEQ ID NO: 953118 - DNA, 33 bp, Homo sapien
ccttgttaggatacatgaatacataaacacaca

SEQ ID NO: 953119 - DNA, 33 bp, Homo sapien
atgattctcctttaggaacaagcaagtgtctga

SEQ ID NO: 953120 - DNA, 33 bp, Homo sapien
atgattctcctttaggtacaagcaagtgtctga

SEQ ID NO: 953121 - DNA, 33 bp, Homo sapien
cctgacaatgaaaaaacggtttgttcagggatt

SEQ ID NO: 953122 - DNA, 33 bp, Homo sapien
cctgacaatgaaaaaatggtttgttcagggatt

SEQ ID NO: 953123 - DNA, 33 bp, Homo sapien
gctacttagtttccctcaacacacgtaggagaa

SEQ ID NO: 953124 - DNA, 33 bp, Homo sapien
gctacttagtttccctgaacacacgtaggagaa

SEQ ID NO: 953125 - DNA, 33 bp, Homo sapien
caaatatttcatgtaagtcttgtggcctattct

SEQ ID NO: 953126 - DNA, 33 bp, Homo sapien
caaatatttcatgtaattcttgtggcctattct

SEQ ID NO: 953127 - DNA, 33 bp, Homo sapien
ttctcaaggttgctcacgacctaaactgttgga

SEQ ID NO: 953128 - DNA, 33 bp, Homo sapien
ttctcaaggttgctcatgacctaaactgttgga

SEQ ID NO: 953129 - DNA, 33 bp, Homo sapien
atgagtatcgtgacaaagctatagtttaaatag

SEQ ID NO: 953130 - DNA, 33 bp, Homo sapien
atgagtatcgtgacaatgctatagtttaaatag

SEQ ID NO: 953131 - DNA, 33 bp, Homo sapien
caacctgatgttccccaagaggtcagtgaccaa

SEQ ID NO: 953132 - DNA, 33 bp, Homo sapien
caacctgatgttccccgagaggtcagtgaccaa

SEQ ID NO: 953133 - DNA, 33 bp, Homo sapien
ttttctcagttttggtaaatatagcacacaacc

SEQ ID NO: 953134 - DNA, 33 bp, Homo sapien
ttttctcagttttggttaatatagcacacaacc

SEQ ID NO: 953135 - DNA, 33 bp, Homo sapien
cactggcacagctagaaaaactcaagccacgcc

SEQ ID NO: 953136 - DNA, 33 bp, Homo sapien
cactggcacagctagacaaactcaagccacgcc

SEQ ID NO: 953137 - DNA, 33 bp, Homo sapien
caatccttgttttcaaagcacagtacaagtccc

SEQ ID NO: 953138 - DNA, 33 bp, Homo sapien
caatccttgttttcaaggcacagtacaagtccc

SEQ ID NO: 953139 - DNA, 33 bp, Homo sapien
gaaagagaacgcatgaccaaagaagtgtcttct

SEQ ID NO: 953140 - DNA, 33 bp, Homo sapien
gaaagagaacgcatgatcaaagaagtgtcttct

SEQ ID NO: 953141 - DNA, 33 bp, Homo sapien
aaaagaaattaggaaacgcgtaaatgtactaag

SEQ ID NO: 953142 - DNA, 33 bp, Homo sapien
aaaagaaattaggaaatgcgtaaatgtactaag

SEQ ID NO: 953143 - DNA, 33 bp, Homo sapien
ctagaaggaggaaaacagcaatttatttattta

SEQ ID NO: 953144 - DNA, 33 bp, Homo sapien
ctagaaggaggaaaacggcaatttatttattta

SEQ ID NO: 953145 - DNA, 33 bp, Homo sapien
gtcttaattcaaacctcaaaataagacatctaa

SEQ ID NO: 953146 - DNA, 33 bp, Homo sapien
gtcttaattcaaacctgaaaataagacatctaa

SEQ ID NO: 953147 - DNA, 33 bp, Homo sapien
caattgcatagaaatcaacggtacaccataaat

SEQ ID NO: 953148 - DNA, 33 bp, Homo sapien
caattgcatagaaatccacggtacaccataaat

SEQ ID NO: 953149 - DNA, 33 bp, Homo sapien
agtgtccttctgtcaactaggctcctactttat

SEQ ID NO: 953150 - DNA, 33 bp, Homo sapien
agtgtccttctgtcaattaggctcctactttat

SEQ ID NO: 953151 - DNA, 33 bp, Homo sapien
tttgttgtttaagctacgctgtgtatgataatt

SEQ ID NO: 953152 - DNA, 33 bp, Homo sapien
tttgttgtttaagctatgctgtgtatgataatt

SEQ ID NO: 953153 - DNA, 33 bp, Homo sapien
actctgacaatctatgcagagaactggtacata

SEQ ID NO: 953154 - DNA, 33 bp, Homo sapien
actctgacaatctatggagagaactggtacata

SEQ ID NO: 953155 - DNA, 33 bp, Homo sapien
tctttcctgatttttacatgtcttgaaaccact

SEQ ID NO: 953156 - DNA, 33 bp, Homo sapien
tctttcctgatttttatatgtcttgaaaccact

SEQ ID NO: 953157 - DNA, 33 bp, Homo sapien
ggacctctactgttaacccaatttcagttattc

SEQ ID NO: 953158 - DNA, 33 bp, Homo sapien
ggacctctactgttaatccaatttcagttattc

SEQ ID NO: 953159 - DNA, 33 bp, Homo sapien
agaatcgtgtagtaaaaggaatgaaaggaaaag

SEQ ID NO: 953160 - DNA, 33 bp, Homo sapien
agaatcgtgtagtaaagggaatgaaaggaaaag

SEQ ID NO: 953161 - DNA, 33 bp, Homo sapien
gcaagcgcttacattcccggacaaacacacgct

SEQ ID NO: 953162 - DNA, 33 bp, Homo sapien
gcaagcgcttacattctcggacaaacacacgct

SEQ ID NO: 953163 - DNA, 33 bp, Homo sapien
tacctacggaacccaagttatctttacctggag

SEQ ID NO: 953164 - DNA, 33 bp, Homo sapien
tacctacggaacccaatttatctttacctggag

SEQ ID NO: 953165 - DNA, 33 bp, Homo sapien
gatgacaaaggccatgaatgtaaaaacacaagg

SEQ ID NO: 953166 - DNA, 33 bp, Homo sapien
gatgacaaaggccatggatgtaaaaacacaagg

SEQ ID NO: 953167 - DNA, 33 bp, Homo sapien
ggggctgagtctcaataaccagtgagcacctcc

SEQ ID NO: 953168 - DNA, 33 bp, Homo sapien
ggggctgagtctcaatcaccagtgagcacctcc

SEQ ID NO: 953169 - DNA, 33 bp, Homo sapien
ttcaattttgggcaaacgtattagtttttctga

SEQ ID NO: 953170 - DNA, 33 bp, Homo sapien
ttcaattttgggcaaatgtattagtttttctga

SEQ ID NO: 953171 - DNA, 33 bp, Homo sapien
agagatgccctgaaacactccaagggtgctagg

SEQ ID NO: 953172 - DNA, 33 bp, Homo sapien
agagatgccctgaaacgctccaagggtgctagg

SEQ ID NO: 953173 - DNA, 33 bp, Homo sapien
tttgtttctgaagttacgtatacagcagaaatt

SEQ ID NO: 953174 - DNA, 33 bp, Homo sapien
tttgtttctgaagttatgtatacagcagaaatt

SEQ ID NO: 953175 - DNA, 33 bp, Homo sapien
tagcaagtacaaccagcacaaatccattcaggt

SEQ ID NO: 953176 - DNA, 33 bp, Homo sapien
tagcaagtacaaccaggacaaatccattcaggt

SEQ ID NO: 953177 - DNA, 33 bp, Homo sapien
atgtaaaacaaacataagcataatgagagagag

SEQ ID NO: 953178 - DNA, 33 bp, Homo sapien
atgtaaaacaaacataggcataatgagagagag

SEQ ID NO: 953179 - DNA, 33 bp, Homo sapien
agcaaaaaagtgatcaagccagaaatcctgctg

SEQ ID NO: 953180 - DNA, 33 bp, Homo sapien
agcaaaaaagtgatcaggccagaaatcctgctg

SEQ ID NO: 953181 - DNA, 33 bp, Homo sapien
ttctgccgttagacgaagctaaatatcagagca

SEQ ID NO: 953182 - DNA, 33 bp, Homo sapien
ttctgccgttagacgaggctaaatatcagagca

SEQ ID NO: 953183 - DNA, 33 bp, Homo sapien
cttcttactcattacaccactttgtataagaga

SEQ ID NO: 953184 - DNA, 33 bp, Homo sapien
cttcttactcattacatcactttgtataagaga

SEQ ID NO: 953185 - DNA, 33 bp, Homo sapien
ggaaatcctggatcccactatcgggagaaccag

SEQ ID NO: 953186 - DNA, 33 bp, Homo sapien
ggaaatcctggatcccgctatcgggagaaccag

SEQ ID NO: 953187 - DNA, 33 bp, Homo sapien
aagacattatatactgcaggtcaaaagaagaaa

SEQ ID NO: 953188 - DNA, 33 bp, Homo sapien
aagacattatatactggaggtcaaaagaagaaa

SEQ ID NO: 953189 - DNA, 33 bp, Homo sapien
cagtcctatgtacccactggaacatttcttcct

SEQ ID NO: 953190 - DNA, 33 bp, Homo sapien
cagtcctatgtacccagtggaacatttcttcct

SEQ ID NO: 953191 - DNA, 33 bp, Homo sapien
ctttgtattcatggaaacgttctagagctgcaa

SEQ ID NO: 953192 - DNA, 33 bp, Homo sapien
ctttgtattcatggaagcgttctagagctgcaa

SEQ ID NO: 953193 - DNA, 33 bp, Homo sapien
ttacactcacagaaaaataaatcagggcaatca

SEQ ID NO: 953194 - DNA, 33 bp, Homo sapien
ttacactcacagaaaattaaatcagggcaatca

SEQ ID NO: 953195 - DNA, 33 bp, Homo sapien
accattatatatgtgaactacttttgaactctc

SEQ ID NO: 953196 - DNA, 33 bp, Homo sapien
accattatatatgtgacctacttttgaactctc

SEQ ID NO: 953197 - DNA, 33 bp, Homo sapien
agggtgaacatctccacgactaaattacctccc

SEQ ID NO: 953198 - DNA, 33 bp, Homo sapien
agggtgaacatctccatgactaaattacctccc

SEQ ID NO: 953199 - DNA, 33 bp, Homo sapien
gtgcaggaggctgacaataaacatctgcacaaa

SEQ ID NO: 953200 - DNA, 33 bp, Homo sapien
gtgcaggaggctgacagtaaacatctgcacaaa

SEQ ID NO: 953201 - DNA, 33 bp, Homo sapien
aatcctctaaggtatcccatcacagttaaaatc

SEQ ID NO: 953202 - DNA, 33 bp, Homo sapien
aatcctctaaggtatctcatcacagttaaaatc

SEQ ID NO: 953203 - DNA, 33 bp, Homo sapien
ggcaaactgcgaaatgaattaactcagagaaga

SEQ ID NO: 953204 - DNA, 33 bp, Homo sapien
ggcaaactgcgaaatgcattaactcagagaaga

SEQ ID NO: 953205 - DNA, 33 bp, Homo sapien
ccatgtctggataccaatgaaatttgtgcagtt

SEQ ID NO: 953206 - DNA, 33 bp, Homo sapien
ccatgtctggataccagtgaaatttgtgcagtt

SEQ ID NO: 953207 - DNA, 33 bp, Homo sapien
tagtttgtcctgcagtaaaaaaaaggccttaaa

SEQ ID NO: 953208 - DNA, 33 bp, Homo sapien
tagtttgtcctgcagtgaaaaaaaggccttaaa

SEQ ID NO: 953209 - DNA, 33 bp, Homo sapien
cccagaaagcaggaaacccttcttaggacctgg

SEQ ID NO: 953210 - DNA, 33 bp, Homo sapien
cccagaaagcaggaaagccttcttaggacctgg

SEQ ID NO: 953211 - DNA, 33 bp, Homo sapien
cgtgaagaaattcagaccacaggtagattaatt

SEQ ID NO: 953212 - DNA, 33 bp, Homo sapien
cgtgaagaaattcagagcacaggtagattaatt

SEQ ID NO: 953213 - DNA, 33 bp, Homo sapien
ttcctcattctccatcactttgatctaatttta

SEQ ID NO: 953214 - DNA, 33 bp, Homo sapien
ttcctcattctccatcgctttgatctaatttta

SEQ ID NO: 953215 - DNA, 33 bp, Homo sapien
catggaaagcctgaaactgggcaaattgtggac

SEQ ID NO: 953216 - DNA, 33 bp, Homo sapien
catggaaagcctgaaattgggcaaattgtggac

SEQ ID NO: 953217 - DNA, 33 bp, Homo sapien
caggagattgagatcactctgactaacacagtg

SEQ ID NO: 953218 - DNA, 33 bp, Homo sapien
caggagattgagatcattctgactaacacagtg

SEQ ID NO: 953219 - DNA, 33 bp, Homo sapien
aggagtctagttgctgccaatcttggtgacggc

SEQ ID NO: 953220 - DNA, 33 bp, Homo sapien
aggagtctagttgctgtcaatcttggtgacggc

SEQ ID NO: 953221 - DNA, 33 bp, Homo sapien
gccagtgagagcagtacagggagtatgtgctgt

SEQ ID NO: 953222 - DNA, 33 bp, Homo sapien
gccagtgagagcagtagagggagtatgtgctgt

SEQ ID NO: 953223 - DNA, 33 bp, Homo sapien
gttgctagatgaagcaaatgtttagcagggtcc

SEQ ID NO: 953224 - DNA, 33 bp, Homo sapien
gttgctagatgaagcatatgtttagcagggtcc

SEQ ID NO: 953225 - DNA, 33 bp, Homo sapien
cctgagccttgagtgacaccccttgctgctggc

SEQ ID NO: 953226 - DNA, 33 bp, Homo sapien
cctgagccttgagtgataccccttgctgctggc

SEQ ID NO: 953227 - DNA, 33 bp, Homo sapien
gggatcccctggcctacaaaagctgagtaaggc

SEQ ID NO: 953228 - DNA, 33 bp, Homo sapien
gggatcccctggcctataaaagctgagtaaggc

SEQ ID NO: 953229 - DNA, 33 bp, Homo sapien
tcacttgagtccttccacatgaactcagcacag

SEQ ID NO: 953230 - DNA, 33 bp, Homo sapien
tcacttgagtccttccgcatgaactcagcacag

SEQ ID NO: 953231 - DNA, 33 bp, Homo sapien
tggtcacttttttcctcaaattacgatgtgcag

SEQ ID NO: 953232 - DNA, 33 bp, Homo sapien
tggtcacttttttccttaaattacgatgtgcag

SEQ ID NO: 953233 - DNA, 33 bp, Homo sapien
ctaataaatgaaaaaaaggcaggcgccagccag

SEQ ID NO: 953234 - DNA, 33 bp, Homo sapien
ctaataaatgaaaaaacggcaggcgccagccag

SEQ ID NO: 953235 - DNA, 33 bp, Homo sapien
gaggccgaggaaggaacctcagttgagcctggg

SEQ ID NO: 953236 - DNA, 33 bp, Homo sapien
gaggccgaggaaggaatctcagttgagcctggg

SEQ ID NO: 953237 - DNA, 33 bp, Homo sapien
gctacaggttatgatacggtaaaaattttatct

SEQ ID NO: 953238 - DNA, 33 bp, Homo sapien
gctacaggttatgatatggtaaaaattttatct

SEQ ID NO: 953239 - DNA, 33 bp, Homo sapien
ccaggctttagtaaaaataatcagagcgttctg

SEQ ID NO: 953240 - DNA, 33 bp, Homo sapien
ccaggctttagtaaaagtaatcagagcgttctg

SEQ ID NO: 953241 - DNA, 33 bp, Homo sapien
tgacactaggacctcaactctactgtacacgtg

SEQ ID NO: 953242 - DNA, 33 bp, Homo sapien
tgacactaggacctcacctctactgtacacgtg

SEQ ID NO: 953243 - DNA, 33 bp, Homo sapien
acagagctggaaaagaacttggaggccacacag

SEQ ID NO: 953244 - DNA, 33 bp, Homo sapien
acagagctggaaaagaccttggaggccacacag

SEQ ID NO: 953245 - DNA, 33 bp, Homo sapien
ctcaaagtggttaagacgagtaaggggatgtga

SEQ ID NO: 953246 - DNA, 33 bp, Homo sapien
ctcaaagtggttaagatgagtaaggggatgtga

SEQ ID NO: 953247 - DNA, 33 bp, Homo sapien
aatcttgggaaatagtcaatccttgccttcttc

SEQ ID NO: 953248 - DNA, 33 bp, Homo sapien
aatcttgggaaatagttaatccttgccttcttc

SEQ ID NO: 953249 - DNA, 33 bp, Homo sapien
atttggaggggggatacagtgatagtgatgatc

SEQ ID NO: 953250 - DNA, 33 bp, Homo sapien
atttggaggggggatagagtgatagtgatgatc

SEQ ID NO: 953251 - DNA, 33 bp, Homo sapien
ggtttcagttccgccaaactctccctcagtcct

SEQ ID NO: 953252 - DNA, 33 bp, Homo sapien
ggtttcagttccgccagactctccctcagtcct

SEQ ID NO: 953253 - DNA, 33 bp, Homo sapien
gggaacgctaggaccacgaggggccatcagtga

SEQ ID NO: 953254 - DNA, 33 bp, Homo sapien
gggaacgctaggaccatgaggggccatcagtga

SEQ ID NO: 953255 - DNA, 33 bp, Homo sapien
ccctctgcctggaatgcacggtccatgtttcac

SEQ ID NO: 953256 - DNA, 33 bp, Homo sapien
ccctctgcctggaatgtacggtccatgtttcac

SEQ ID NO: 953257 - DNA, 33 bp, Homo sapien
aattacagatttatgcaaactaatgaaccagat

SEQ ID NO: 953258 - DNA, 33 bp, Homo sapien
aattacagatttatgccaactaatgaaccagat

SEQ ID NO: 953259 - DNA, 33 bp, Homo sapien
tagatttagggactacccatattcagcttacac

SEQ ID NO: 953260 - DNA, 33 bp, Homo sapien
tagatttagggactacgcatattcagcttacac

SEQ ID NO: 953261 - DNA, 33 bp, Homo sapien
ttcatctactcacttacgctgctctgagccact

SEQ ID NO: 953262 - DNA, 33 bp, Homo sapien
ttcatctactcacttatgctgctctgagccact

SEQ ID NO: 953263 - DNA, 33 bp, Homo sapien
cacaatcatgccctaactcgaagacaactcagt

SEQ ID NO: 953264 - DNA, 33 bp, Homo sapien
cacaatcatgccctaattcgaagacaactcagt

SEQ ID NO: 953265 - DNA, 33 bp, Homo sapien
gaacacatatttacacacactactcttttcata

SEQ ID NO: 953266 - DNA, 33 bp, Homo sapien
gaacacatatttacacgcactactcttttcata

SEQ ID NO: 953267 - DNA, 33 bp, Homo sapien
atatactgctaaatagaagagaggaagagaaat

SEQ ID NO: 953268 - DNA, 33 bp, Homo sapien
atatactgctaaataggagagaggaagagaaat

SEQ ID NO: 953269 - DNA, 33 bp, Homo sapien
catgctagttatgacccatcattcagttcctta

SEQ ID NO: 953270 - DNA, 33 bp, Homo sapien
catgctagttatgacctatcattcagttcctta

SEQ ID NO: 953271 - DNA, 33 bp, Homo sapien
acacacacacaaaataccattgcaaatgcactt

SEQ ID NO: 953272 - DNA, 33 bp, Homo sapien
acacacacacaaaatatcattgcaaatgcactt

SEQ ID NO: 953273 - DNA, 33 bp, Homo sapien
gacaactccagtgtgcaatacaggatttaaaag

SEQ ID NO: 953274 - DNA, 33 bp, Homo sapien
gacaactccagtgtgcgatacaggatttaaaag

SEQ ID NO: 953275 - DNA, 33 bp, Homo sapien
ttttctttcttgctacaatgagggcagtaatac

SEQ ID NO: 953276 - DNA, 33 bp, Homo sapien
ttttctttcttgctacgatgagggcagtaatac

SEQ ID NO: 953277 - DNA, 33 bp, Homo sapien
ttttgacggtttaggaacaaatttggagctctg

SEQ ID NO: 953278 - DNA, 33 bp, Homo sapien
ttttgacggtttaggatcaaatttggagctctg

SEQ ID NO: 953279 - DNA, 33 bp, Homo sapien
agccacagcctgaggacaaacaagagacttgac

SEQ ID NO: 953280 - DNA, 33 bp, Homo sapien
agccacagcctgaggataaacaagagacttgac

SEQ ID NO: 953281 - DNA, 33 bp, Homo sapien
ccacactcaaggaccacataggattgttctcac

SEQ ID NO: 953282 - DNA, 33 bp, Homo sapien
ccacactcaaggaccagataggattgttctcac

SEQ ID NO: 953283 - DNA, 33 bp, Homo sapien
attccaaatgaggctaagtatcttagaaagcca

SEQ ID NO: 953284 - DNA, 33 bp, Homo sapien
attccaaatgaggctatgtatcttagaaagcca

SEQ ID NO: 953285 - DNA, 33 bp, Homo sapien
gtatgcactgtaaacgaacactaagaagattct

SEQ ID NO: 953286 - DNA, 33 bp, Homo sapien
gtatgcactgtaaacggacactaagaagattct

SEQ ID NO: 953287 - DNA, 33 bp, Homo sapien
gtggtacccaactccacaagatattgtcagctc

SEQ ID NO: 953288 - DNA, 33 bp, Homo sapien
gtggtacccaactccagaagatattgtcagctc

SEQ ID NO: 953289 - DNA, 33 bp, Homo sapien
tgtcttaaagttgctccatatgaccatgccagc

SEQ ID NO: 953290 - DNA, 33 bp, Homo sapien
tgtcttaaagttgctctatatgaccatgccagc

SEQ ID NO: 953291 - DNA, 33 bp, Homo sapien
gtccccacatctggataaggagcccagttggtg

SEQ ID NO: 953292 - DNA, 33 bp, Homo sapien
gtccccacatctggattaggagcccagttggtg

SEQ ID NO: 953293 - DNA, 33 bp, Homo sapien
ccaaaaggaagcaggaatacaaccttcgaagtt

SEQ ID NO: 953294 - DNA, 33 bp, Homo sapien
ccaaaaggaagcaggagtacaaccttcgaagtt

SEQ ID NO: 953295 - DNA, 33 bp, Homo sapien
gctttctgctgatgtgaaattctgttttgtctg

SEQ ID NO: 953296 - DNA, 33 bp, Homo sapien
gctttctgctgatgtggaattctgttttgtctg

SEQ ID NO: 953297 - DNA, 33 bp, Homo sapien
tagtatgctataagacagatgacagattgagtg

SEQ ID NO: 953298 - DNA, 33 bp, Homo sapien
tagtatgctataagacggatgacagattgagtg

SEQ ID NO: 953299 - DNA, 33 bp, Homo sapien
aaagtaaattatatccacacaagatgcttaatt

SEQ ID NO: 953300 - DNA, 33 bp, Homo sapien
aaagtaaattatatccgcacaagatgcttaatt

SEQ ID NO: 953301 - DNA, 33 bp, Homo sapien
aaacatcaggcaaatccaaactcaaggacattt

SEQ ID NO: 953302 - DNA, 33 bp, Homo sapien
aaacatcaggcaaatctaaactcaaggacattt

SEQ ID NO: 953303 - DNA, 33 bp, Homo sapien
tggatgtattctcaatcatattttccaggctta

SEQ ID NO: 953304 - DNA, 33 bp, Homo sapien
tggatgtattctcaattatattttccaggctta

SEQ ID NO: 953305 - DNA, 33 bp, Homo sapien
aacttggagaaacaatgagacgttattacattg

SEQ ID NO: 953306 - DNA, 33 bp, Homo sapien
aacttggagaaacaattagacgttattacattg

SEQ ID NO: 953307 - DNA, 33 bp, Homo sapien
atggtgtaaaagataaagcacctacaaagggga

SEQ ID NO: 953308 - DNA, 33 bp, Homo sapien
atggtgtaaaagataaggcacctacaaagggga

SEQ ID NO: 953309 - DNA, 33 bp, Homo sapien
aacccttcagccaaccagagccgtaaaaggact

SEQ ID NO: 953310 - DNA, 33 bp, Homo sapien
aacccttcagccaaccggagccgtaaaaggact

SEQ ID NO: 953311 - DNA, 33 bp, Homo sapien
agaggggattccttacaaactcataaaagcctc

SEQ ID NO: 953312 - DNA, 33 bp, Homo sapien
agaggggattccttacgaactcataaaagcctc

SEQ ID NO: 953313 - DNA, 33 bp, Homo sapien
atatccactatagacacggaaaggaaatgcaaa

SEQ ID NO: 953314 - DNA, 33 bp, Homo sapien
atatccactatagacatggaaaggaaatgcaaa

SEQ ID NO: 953315 - DNA, 33 bp, Homo sapien
tattgcatgataatgaataattcttgcctaatg

SEQ ID NO: 953316 - DNA, 33 bp, Homo sapien
tattgcatgataatgagtaattcttgcctaatg

SEQ ID NO: 953317 - DNA, 33 bp, Homo sapien
gcagtagacttcaagaagagataggatgaggat

SEQ ID NO: 953318 - DNA, 33 bp, Homo sapien
gcagtagacttcaagaggagataggatgaggat

SEQ ID NO: 953319 - DNA, 33 bp, Homo sapien
tctcttgttttaaaaagacaactctgaattgac

SEQ ID NO: 953320 - DNA, 33 bp, Homo sapien
tctcttgttttaaaaatacaactctgaattgac

SEQ ID NO: 953321 - DNA, 33 bp, Homo sapien
tgtaagatgtctctggaattttaaaggatccat

SEQ ID NO: 953322 - DNA, 33 bp, Homo sapien
tgtaagatgtctctgggattttaaaggatccat

SEQ ID NO: 953323 - DNA, 33 bp, Homo sapien
tggaataaacaaagtccatcatgccaggcagct

SEQ ID NO: 953324 - DNA, 33 bp, Homo sapien
tggaataaacaaagtcgatcatgccaggcagct

SEQ ID NO: 953325 - DNA, 33 bp, Homo sapien
aatatcaaagaattccacatttccaataagtag

SEQ ID NO: 953326 - DNA, 33 bp, Homo sapien
aatatcaaagaattccgcatttccaataagtag

SEQ ID NO: 953327 - DNA, 33 bp, Homo sapien
tataaggaggatcatcggaatcacctgatagtg

SEQ ID NO: 953328 - DNA, 33 bp, Homo sapien
tataaggaggatcatctgaatcacctgatagtg

SEQ ID NO: 953329 - DNA, 33 bp, Homo sapien
ctgactctcaaagctccacttttcccttcaatc

SEQ ID NO: 953330 - DNA, 33 bp, Homo sapien
ctgactctcaaagctctacttttcccttcaatc

SEQ ID NO: 953331 - DNA, 33 bp, Homo sapien
ggaacagtgcttaatccaaaagtcctatgcatg

SEQ ID NO: 953332 - DNA, 33 bp, Homo sapien
ggaacagtgcttaatcgaaaagtcctatgcatg

SEQ ID NO: 953333 - DNA, 33 bp, Homo sapien
aaatagagaagcaaaacagtataagaaacactg

SEQ ID NO: 953334 - DNA, 33 bp, Homo sapien
aaatagagaagcaaaagagtataagaaacactg

SEQ ID NO: 953335 - DNA, 33 bp, Homo sapien
tacaagttgagaatacaaacatccaaaggtctt

SEQ ID NO: 953336 - DNA, 33 bp, Homo sapien
tacaagttgagaatacgaacatccaaaggtctt

SEQ ID NO: 953337 - DNA, 33 bp, Homo sapien
agaaataatattgacacggtctaaaaacggttt

SEQ ID NO: 953338 - DNA, 33 bp, Homo sapien
agaaataatattgacatggtctaaaaacggttt

SEQ ID NO: 953339 - DNA, 33 bp, Homo sapien
tacctgtgtaggttatcagggttgttcgtgtag

SEQ ID NO: 953340 - DNA, 33 bp, Homo sapien
tacctgtgtaggttattagggttgttcgtgtag

SEQ ID NO: 953341 - DNA, 33 bp, Homo sapien
gcaggaagaaaggaaaaatcagttgctgctctt

SEQ ID NO: 953342 - DNA, 33 bp, Homo sapien
gcaggaagaaaggaaacatcagttgctgctctt

SEQ ID NO: 953343 - DNA, 33 bp, Homo sapien
tgttgtacttagaaaacctctgctattgagaag

SEQ ID NO: 953344 - DNA, 33 bp, Homo sapien
tgttgtacttagaaaatctctgctattgagaag

SEQ ID NO: 953345 - DNA, 33 bp, Homo sapien
tgactccttaatccaacatggctcgtgtcctta

SEQ ID NO: 953346 - DNA, 33 bp, Homo sapien
tgactccttaatccaatatggctcgtgtcctta

SEQ ID NO: 953347 - DNA, 33 bp, Homo sapien
ttattagaggttaagaaacaaaaatgtgctaag

SEQ ID NO: 953348 - DNA, 33 bp, Homo sapien
ttattagaggttaagagacaaaaatgtgctaag

SEQ ID NO: 953349 - DNA, 33 bp, Homo sapien
agattaaaccagtgtccgaatggagaaattgta

SEQ ID NO: 953350 - DNA, 33 bp, Homo sapien
agattaaaccagtgtctgaatggagaaattgta

SEQ ID NO: 953351 - DNA, 33 bp, Homo sapien
ggagccactttagttcccctactaggccagcag

SEQ ID NO: 953352 - DNA, 33 bp, Homo sapien
ggagccactttagttctcctactaggccagcag

SEQ ID NO: 953353 - DNA, 33 bp, Homo sapien
aagacccatctatgtgaaacatcagcattcctg

SEQ ID NO: 953354 - DNA, 33 bp, Homo sapien
aagacccatctatgtggaacatcagcattcctg

SEQ ID NO: 953355 - DNA, 33 bp, Homo sapien
ttgctgaatttttagcacttagagttctgcctg

SEQ ID NO: 953356 - DNA, 33 bp, Homo sapien
ttgctgaatttttagcgcttagagttctgcctg

SEQ ID NO: 953357 - DNA, 33 bp, Homo sapien
ataaccactcaaacaacacgactatccaaggaa

SEQ ID NO: 953358 - DNA, 33 bp, Homo sapien
ataaccactcaaacaatacgactatccaaggaa

SEQ ID NO: 953359 - DNA, 33 bp, Homo sapien
agcatgcctgtctgaaagtgaagctgtctaacc

SEQ ID NO: 953360 - DNA, 33 bp, Homo sapien
agcatgcctgtctgaatgtgaagctgtctaacc

SEQ ID NO: 953361 - DNA, 33 bp, Homo sapien
cccatatccagttgtacgaagcagctggagaga

SEQ ID NO: 953362 - DNA, 33 bp, Homo sapien
cccatatccagttgtatgaagcagctggagaga

SEQ ID NO: 953363 - DNA, 33 bp, Homo sapien
tggactaaaaccttgacggcagaagcttctcta

SEQ ID NO: 953364 - DNA, 33 bp, Homo sapien
tggactaaaaccttgatggcagaagcttctcta

SEQ ID NO: 953365 - DNA, 33 bp, Homo sapien
agggtcaaaacaagcacataggagctgtgagtt

SEQ ID NO: 953366 - DNA, 33 bp, Homo sapien
agggtcaaaacaagcagataggagctgtgagtt

SEQ ID NO: 953367 - DNA, 33 bp, Homo sapien
caggattcataatgtgaaaaactcttcaagtat

SEQ ID NO: 953368 - DNA, 33 bp, Homo sapien
caggattcataatgtggaaaactcttcaagtat

SEQ ID NO: 953369 - DNA, 33 bp, Homo sapien
agaactggaaaccggaagttctgtccctattgt

SEQ ID NO: 953370 - DNA, 33 bp, Homo sapien
agaactggaaaccggacgttctgtccctattgt

SEQ ID NO: 953371 - DNA, 33 bp, Homo sapien
cattaactcactcatactatacttgctctttta

SEQ ID NO: 953372 - DNA, 33 bp, Homo sapien
cattaactcactcatagtatacttgctctttta

SEQ ID NO: 953373 - DNA, 33 bp, Homo sapien
agttttaccatgcttacctatgagtgtgccttc

SEQ ID NO: 953374 - DNA, 33 bp, Homo sapien
agttttaccatgcttagctatgagtgtgccttc

SEQ ID NO: 953375 - DNA, 33 bp, Homo sapien
cttggacaaagttaggacattggagatttgaga

SEQ ID NO: 953376 - DNA, 33 bp, Homo sapien
cttggacaaagttaggtcattggagatttgaga

SEQ ID NO: 953377 - DNA, 33 bp, Homo sapien
ttaagattagactgaaaggagccaggaaagcag

SEQ ID NO: 953378 - DNA, 33 bp, Homo sapien
ttaagattagactgaagggagccaggaaagcag

SEQ ID NO: 953379 - DNA, 33 bp, Homo sapien
cattcaggaggagagacattacatcaacatgga

SEQ ID NO: 953380 - DNA, 33 bp, Homo sapien
cattcaggaggagagagattacatcaacatgga

SEQ ID NO: 953381 - DNA, 33 bp, Homo sapien
tcctctgagtgaactacaaatgataatgacacc

SEQ ID NO: 953382 - DNA, 33 bp, Homo sapien
tcctctgagtgaactataaatgataatgacacc

SEQ ID NO: 953383 - DNA, 33 bp, Homo sapien
tccaccaggctccttcacttcacagtagattat

SEQ ID NO: 953384 - DNA, 33 bp, Homo sapien
tccaccaggctccttcgcttcacagtagattat

SEQ ID NO: 953385 - DNA, 33 bp, Homo sapien
tctgaggtctaagaaacgcaaacacaattgcta

SEQ ID NO: 953386 - DNA, 33 bp, Homo sapien
tctgaggtctaagaaatgcaaacacaattgcta

SEQ ID NO: 953387 - DNA, 33 bp, Homo sapien
gagattcctttgataacgaggaaaagtttacat

SEQ ID NO: 953388 - DNA, 33 bp, Homo sapien
gagattcctttgataatgaggaaaagtttacat

SEQ ID NO: 953389 - DNA, 33 bp, Homo sapien
ccttaacattatttcaaaaaaatagagggaaag

SEQ ID NO: 953390 - DNA, 33 bp, Homo sapien
ccttaacattatttcacaaaaatagagggaaag

SEQ ID NO: 953391 - DNA, 33 bp, Homo sapien
tgtgcattttcctagccctaagctttcagtaaa

SEQ ID NO: 953392 - DNA, 33 bp, Homo sapien
tgtgcattttcctagctctaagctttcagtaaa

SEQ ID NO: 953393 - DNA, 33 bp, Homo sapien
gaggtgctcaccaggcaaccaacactcgggtga

SEQ ID NO: 953394 - DNA, 33 bp, Homo sapien
gaggtgctcaccaggccaccaacactcgggtga

SEQ ID NO: 953395 - DNA, 33 bp, Homo sapien
gaaagaacatgatggcaacttcacatccctgct

SEQ ID NO: 953396 - DNA, 33 bp, Homo sapien
gaaagaacatgatggcgacttcacatccctgct

SEQ ID NO: 953397 - DNA, 33 bp, Homo sapien
tagtcaagaccccaaactagcagtggtgctgac

SEQ ID NO: 953398 - DNA, 33 bp, Homo sapien
tagtcaagaccccaaattagcagtggtgctgac

SEQ ID NO: 953399 - DNA, 33 bp, Homo sapien
acaccataaattcttaaatctaactatctccct

SEQ ID NO: 953400 - DNA, 33 bp, Homo sapien
acaccataaattcttacatctaactatctccct

SEQ ID NO: 953401 - DNA, 33 bp, Homo sapien
agttctggagactagactcagaaatcaaggctg

SEQ ID NO: 953402 - DNA, 33 bp, Homo sapien
agttctggagactagagtcagaaatcaaggctg

SEQ ID NO: 953403 - DNA, 33 bp, Homo sapien
agtgtatcctgatgtgcataagactgaatactc

SEQ ID NO: 953404 - DNA, 33 bp, Homo sapien
agtgtatcctgatgtgtataagactgaatactc

SEQ ID NO: 953405 - DNA, 33 bp, Homo sapien
aaggtgtcccggaaagcagatttaatcctgtct

SEQ ID NO: 953406 - DNA, 33 bp, Homo sapien
aaggtgtcccggaaagtagatttaatcctgtct

SEQ ID NO: 953407 - DNA, 33 bp, Homo sapien
gcagttcatacccaaactcccctaggtagggtg

SEQ ID NO: 953408 - DNA, 33 bp, Homo sapien
gcagttcatacccaaagtcccctaggtagggtg

SEQ ID NO: 953409 - DNA, 33 bp, Homo sapien
agaccctctatgtggacagccatctgaatgcag

SEQ ID NO: 953410 - DNA, 33 bp, Homo sapien
agaccctctatgtggatagccatctgaatgcag

SEQ ID NO: 953411 - DNA, 33 bp, Homo sapien
gctgtccactccggaacgatcagttctgtaaaa

SEQ ID NO: 953412 - DNA, 33 bp, Homo sapien
gctgtccactccggaatgatcagttctgtaaaa

SEQ ID NO: 953413 - DNA, 33 bp, Homo sapien
actcttaacctgaagcacaagtgacagaaaacc

SEQ ID NO: 953414 - DNA, 33 bp, Homo sapien
actcttaacctgaagcgcaagtgacagaaaacc

SEQ ID NO: 953415 - DNA, 33 bp, Homo sapien
ggcagcaacatctttgaaaaatgcagtgatgca

SEQ ID NO: 953416 - DNA, 33 bp, Homo sapien
ggcagcaacatctttggaaaatgcagtgatgca

SEQ ID NO: 953417 - DNA, 33 bp, Homo sapien
ggaaaatcatcaatcaactccaactaccatgag

SEQ ID NO: 953418 - DNA, 33 bp, Homo sapien
ggaaaatcatcaatcatctccaactaccatgag

SEQ ID NO: 953419 - DNA, 33 bp, Homo sapien
tgacattgtagtgataagaaaatgagatgcggg

SEQ ID NO: 953420 - DNA, 33 bp, Homo sapien
tgacattgtagtgatacgaaaatgagatgcggg

SEQ ID NO: 953421 - DNA, 33 bp, Homo sapien
gattaatgctaattccactaatgagcactaatg

SEQ ID NO: 953422 - DNA, 33 bp, Homo sapien
gattaatgctaattccgctaatgagcactaatg

SEQ ID NO: 953423 - DNA, 33 bp, Homo sapien
catttcccaaatgcctcagcggttgtcttaaca

SEQ ID NO: 953424 - DNA, 33 bp, Homo sapien
catttcccaaatgccttagcggttgtcttaaca

SEQ ID NO: 953425 - DNA, 33 bp, Homo sapien
gtaggatttgacctacagagagtctgaaacagc

SEQ ID NO: 953426 - DNA, 33 bp, Homo sapien
gtaggatttgacctaccgagagtctgaaacagc

SEQ ID NO: 953427 - DNA, 33 bp, Homo sapien
cttgtcctgcgtctctcagagaattttactttt

SEQ ID NO: 953428 - DNA, 33 bp, Homo sapien
cttgtcctgcgtctctgagagaattttactttt

SEQ ID NO: 953429 - DNA, 33 bp, Homo sapien
aggcatagagtggctaaataaaaatgaaacaat

SEQ ID NO: 953430 - DNA, 33 bp, Homo sapien
aggcatagagtggctagataaaaatgaaacaat

SEQ ID NO: 953431 - DNA, 33 bp, Homo sapien
gcaatatgcagtgtaactaaagatgcacatatc

SEQ ID NO: 953432 - DNA, 33 bp, Homo sapien
gcaatatgcagtgtaattaaagatgcacatatc

SEQ ID NO: 953433 - DNA, 33 bp, Homo sapien
ttatagggtaattctacggttgaactttataga

SEQ ID NO: 953434 - DNA, 33 bp, Homo sapien
ttatagggtaattctatggttgaactttataga

SEQ ID NO: 953435 - DNA, 33 bp, Homo sapien
tgctttacaaatattaacaacaaattacatgca

SEQ ID NO: 953436 - DNA, 33 bp, Homo sapien
tgctttacaaatattaccaacaaattacatgca

SEQ ID NO: 953437 - DNA, 33 bp, Homo sapien
tcagttacagtcactacgacctcattttaaaag

SEQ ID NO: 953438 - DNA, 33 bp, Homo sapien
tcagttacagtcactatgacctcattttaaaag

SEQ ID NO: 953439 - DNA, 33 bp, Homo sapien
aacaaggagccacgaccggaggagaagcagcat

SEQ ID NO: 953440 - DNA, 33 bp, Homo sapien
aacaaggagccacgactggaggagaagcagcat

SEQ ID NO: 953441 - DNA, 33 bp, Homo sapien
gtgtacttgaaaacgaatatctatcatatgacc

SEQ ID NO: 953442 - DNA, 33 bp, Homo sapien
gtgtacttgaaaacgagtatctatcatatgacc

SEQ ID NO: 953443 - DNA, 33 bp, Homo sapien
agcatcatctcagccaagaaaggcttttgctac

SEQ ID NO: 953444 - DNA, 33 bp, Homo sapien
agcatcatctcagccaggaaaggcttttgctac

SEQ ID NO: 953445 - DNA, 33 bp, Homo sapien
taagattttctggctgccaccgtattgccagat

SEQ ID NO: 953446 - DNA, 33 bp, Homo sapien
taagattttctggctgtcaccgtattgccagat

SEQ ID NO: 953447 - DNA, 33 bp, Homo sapien
gtcagcaaacagagaaacagatgcatcaacggg

SEQ ID NO: 953448 - DNA, 33 bp, Homo sapien
gtcagcaaacagagaagcagatgcatcaacggg

SEQ ID NO: 953449 - DNA, 33 bp, Homo sapien
tgtgcagctacatgggacactttgtaagccggc

SEQ ID NO: 953450 - DNA, 33 bp, Homo sapien
tgtgcagctacatgggtcactttgtaagccggc

SEQ ID NO: 953451 - DNA, 33 bp, Homo sapien
tcaggaaacatacacccgctgaataccaaaatt

SEQ ID NO: 953452 - DNA, 33 bp, Homo sapien
tcaggaaacatacaccggctgaataccaaaatt

SEQ ID NO: 953453 - DNA, 33 bp, Homo sapien
cattttagagttgagtcaagggaaaaggaaaag

SEQ ID NO: 953454 - DNA, 33 bp, Homo sapien
cattttagagttgagtgaagggaaaaggaaaag

SEQ ID NO: 953455 - DNA, 33 bp, Homo sapien
tgtgggttctttgtgcaaatagctcttctaccc

SEQ ID NO: 953456 - DNA, 33 bp, Homo sapien
tgtgggttctttgtgcgaatagctcttctaccc

SEQ ID NO: 953457 - DNA, 33 bp, Homo sapien
atatacagccagtagcaattctctttcttcgct

SEQ ID NO: 953458 - DNA, 33 bp, Homo sapien
atatacagccagtagccattctctttcttcgct

SEQ ID NO: 953459 - DNA, 33 bp, Homo sapien
tcatgcacagaataaactagattaacttgtgca

SEQ ID NO: 953460 - DNA, 33 bp, Homo sapien
tcatgcacagaataaagtagattaacttgtgca

SEQ ID NO: 953461 - DNA, 33 bp, Homo sapien
aaaaccatgaaaaaaaatcaagacaacttcctg

SEQ ID NO: 953462 - DNA, 33 bp, Homo sapien
aaaaccatgaaaaaaagtcaagacaacttcctg

SEQ ID NO: 953463 - DNA, 33 bp, Homo sapien
ctttgatttctcgattcaaaacacaagcaaaca

SEQ ID NO: 953464 - DNA, 33 bp, Homo sapien
ctttgatttctcgatttaaaacacaagcaaaca

SEQ ID NO: 953465 - DNA, 33 bp, Homo sapien
aatgtacaccagcatcagagtctgtatcagtct

SEQ ID NO: 953466 - DNA, 33 bp, Homo sapien
aatgtacaccagcatcggagtctgtatcagtct

SEQ ID NO: 953467 - DNA, 33 bp, Homo sapien
tgtgcttttacatcatgaagtacgatgcttctt

SEQ ID NO: 953468 - DNA, 33 bp, Homo sapien
tgtgcttttacatcattaagtacgatgcttctt

SEQ ID NO: 953469 - DNA, 33 bp, Homo sapien
tttggttccacagaggaaaagtatgcctggctc

SEQ ID NO: 953470 - DNA, 33 bp, Homo sapien
tttggttccacagagggaaagtatgcctggctc

SEQ ID NO: 953471 - DNA, 33 bp, Homo sapien
gggaagatgatactgacccaggcaagacgcatg

SEQ ID NO: 953472 - DNA, 33 bp, Homo sapien
gggaagatgatactgatccaggcaagacgcatg

SEQ ID NO: 953473 - DNA, 33 bp, Homo sapien
aatacgtaacgaatacaattttcctcctttctc

SEQ ID NO: 953474 - DNA, 33 bp, Homo sapien
aatacgtaacgaataccattttcctcctttctc

SEQ ID NO: 953475 - DNA, 33 bp, Homo sapien
cttaactgcaagaaacacaatttttcccactct

SEQ ID NO: 953476 - DNA, 33 bp, Homo sapien
cttaactgcaagaaacgcaatttttcccactct

SEQ ID NO: 953477 - DNA, 33 bp, Homo sapien
gagtagcaaattgactcaggaaagaatggtgat

SEQ ID NO: 953478 - DNA, 33 bp, Homo sapien
gagtagcaaattgacttaggaaagaatggtgat

SEQ ID NO: 953479 - DNA, 33 bp, Homo sapien
taggcagcttctttgccaaatgaacttgcgata

SEQ ID NO: 953480 - DNA, 33 bp, Homo sapien
taggcagcttctttgcgaaatgaacttgcgata

SEQ ID NO: 953481 - DNA, 33 bp, Homo sapien
ctctgtcttggatacacggagatgtccccacct

SEQ ID NO: 953482 - DNA, 33 bp, Homo sapien
ctctgtcttggatacatggagatgtccccacct

SEQ ID NO: 953483 - DNA, 33 bp, Homo sapien
tgagtgtaatgtgtaacgttttgcaggcagaaa

SEQ ID NO: 953484 - DNA, 33 bp, Homo sapien
tgagtgtaatgtgtaatgttttgcaggcagaaa

SEQ ID NO: 953485 - DNA, 33 bp, Homo sapien
ttcctacatggagccaaggtctcccagctggat

SEQ ID NO: 953486 - DNA, 33 bp, Homo sapien
ttcctacatggagccacggtctcccagctggat

SEQ ID NO: 953487 - DNA, 33 bp, Homo sapien
gggctgtgtctgtgagaaactgctagacttttt

SEQ ID NO: 953488 - DNA, 33 bp, Homo sapien
gggctgtgtctgtgagtaactgctagacttttt

SEQ ID NO: 953489 - DNA, 33 bp, Homo sapien
ggagtcacttttcatacgcagaagaagataact

SEQ ID NO: 953490 - DNA, 33 bp, Homo sapien
ggagtcacttttcatatgcagaagaagataact

SEQ ID NO: 953491 - DNA, 33 bp, Homo sapien
agttggttgcctgacactatttaccactctcag

SEQ ID NO: 953492 - DNA, 33 bp, Homo sapien
agttggttgcctgacagtatttaccactctcag

SEQ ID NO: 953493 - DNA, 33 bp, Homo sapien
aagggagagggcaaaacactactttcttttaat

SEQ ID NO: 953494 - DNA, 33 bp, Homo sapien
aagggagagggcaaaatactactttcttttaat

SEQ ID NO: 953495 - DNA, 33 bp, Homo sapien
tgtgatctgggaatgcaatatgccatctgagca

SEQ ID NO: 953496 - DNA, 33 bp, Homo sapien
tgtgatctgggaatgcgatatgccatctgagca

SEQ ID NO: 953497 - DNA, 33 bp, Homo sapien
cgattatctttccttaaaatgctcgctctgatg

SEQ ID NO: 953498 - DNA, 33 bp, Homo sapien
cgattatctttccttagaatgctcgctctgatg

SEQ ID NO: 953499 - DNA, 33 bp, Homo sapien
gcactgtgcacctgaaagtttggcatatcctga

SEQ ID NO: 953500 - DNA, 33 bp, Homo sapien
gcactgtgcacctgaaggtttggcatatcctga

SEQ ID NO: 953501 - DNA, 33 bp, Homo sapien
tttactcatctgtgcagcccagggccagctggg

SEQ ID NO: 953502 - DNA, 33 bp, Homo sapien
tttactcatctgtgcatcccagggccagctggg

SEQ ID NO: 953503 - DNA, 33 bp, Homo sapien
tgaaagcctgagacaacagaagtttattttctc

SEQ ID NO: 953504 - DNA, 33 bp, Homo sapien
tgaaagcctgagacaagagaagtttattttctc

SEQ ID NO: 953505 - DNA, 33 bp, Homo sapien
atgcttagtcaaaccaaccccagattcaaagag

SEQ ID NO: 953506 - DNA, 33 bp, Homo sapien
atgcttagtcaaaccagccccagattcaaagag

SEQ ID NO: 953507 - DNA, 33 bp, Homo sapien
ttgatctggagatccacaggtaaccagttagtg

SEQ ID NO: 953508 - DNA, 33 bp, Homo sapien
ttgatctggagatccataggtaaccagttagtg

SEQ ID NO: 953509 - DNA, 33 bp, Homo sapien
aattggtgtaggccaaagatgtgtgtgtgttgt

SEQ ID NO: 953510 - DNA, 33 bp, Homo sapien
aattggtgtaggccaaggatgtgtgtgtgttgt

SEQ ID NO: 953511 - DNA, 33 bp, Homo sapien
cactgagccttgcttaggtcgttgatttctttt

SEQ ID NO: 953512 - DNA, 33 bp, Homo sapien
cactgagccttgcttatgtcgttgatttctttt

SEQ ID NO: 953513 - DNA, 33 bp, Homo sapien
tcagtttcctaatccaccaacaagagactgaac

SEQ ID NO: 953514 - DNA, 33 bp, Homo sapien
tcagtttcctaatccatcaacaagagactgaac

SEQ ID NO: 953515 - DNA, 33 bp, Homo sapien
tgcagcttcctctgaccagtagaatctttccta

SEQ ID NO: 953516 - DNA, 33 bp, Homo sapien
tgcagcttcctctgactagtagaatctttccta

SEQ ID NO: 953517 - DNA, 33 bp, Homo sapien
aatctttgatagtcacaggaagcagagccttag

SEQ ID NO: 953518 - DNA, 33 bp, Homo sapien
aatctttgatagtcacgggaagcagagccttag

SEQ ID NO: 953519 - DNA, 33 bp, Homo sapien
agctgtgtgctgcccacgaaatcaatactgagt

SEQ ID NO: 953520 - DNA, 33 bp, Homo sapien
agctgtgtgctgcccatgaaatcaatactgagt

SEQ ID NO: 953521 - DNA, 33 bp, Homo sapien
accttcttttagagacacattatagctactcag

SEQ ID NO: 953522 - DNA, 33 bp, Homo sapien
accttcttttagagacgcattatagctactcag

SEQ ID NO: 953523 - DNA, 33 bp, Homo sapien
ttggagaccctgaacaatcctgcagagaacagc

SEQ ID NO: 953524 - DNA, 33 bp, Homo sapien
ttggagaccctgaacagtcctgcagagaacagc

SEQ ID NO: 953525 - DNA, 33 bp, Homo sapien
tctgcatagtggcgcaagtcctgatggttaaag

SEQ ID NO: 953526 - DNA, 33 bp, Homo sapien
tctgcatagtggcgcacgtcctgatggttaaag

SEQ ID NO: 953527 - DNA, 33 bp, Homo sapien
ataccgcaaaatgtaacggaagacacacgaaag

SEQ ID NO: 953528 - DNA, 33 bp, Homo sapien
ataccgcaaaatgtaatggaagacacacgaaag

SEQ ID NO: 953529 - DNA, 33 bp, Homo sapien
tataatgattgaaagaccctaacgctcccaatt

SEQ ID NO: 953530 - DNA, 33 bp, Homo sapien
tataatgattgaaagagcctaacgctcccaatt

SEQ ID NO: 953531 - DNA, 33 bp, Homo sapien
gacagaacagacataaacaagaacataacaaaa

SEQ ID NO: 953532 - DNA, 33 bp, Homo sapien
gacagaacagacataagcaagaacataacaaaa

SEQ ID NO: 953533 - DNA, 33 bp, Homo sapien
cagcaggcaggaagtacagagattcagaagggc

SEQ ID NO: 953534 - DNA, 33 bp, Homo sapien
cagcaggcaggaagtagagagattcagaagggc

SEQ ID NO: 953535 - DNA, 33 bp, Homo sapien
ctggaccttaaaacaaactcattttgatcctgg

SEQ ID NO: 953536 - DNA, 33 bp, Homo sapien
ctggaccttaaaacaatctcattttgatcctgg

SEQ ID NO: 953537 - DNA, 33 bp, Homo sapien
catgtttttgaaaataccgggctcatatgtcct

SEQ ID NO: 953538 - DNA, 33 bp, Homo sapien
catgtttttgaaaatatcgggctcatatgtcct

SEQ ID NO: 953539 - DNA, 33 bp, Homo sapien
ctcatatgcaacttaacattacattgaactatg

SEQ ID NO: 953540 - DNA, 33 bp, Homo sapien
ctcatatgcaacttaatattacattgaactatg

SEQ ID NO: 953541 - DNA, 33 bp, Homo sapien
tttaatctcttacattgaactctgggatgcatt

SEQ ID NO: 953542 - DNA, 33 bp, Homo sapien
tttaatctcttacatttaactctgggatgcatt

SEQ ID NO: 953543 - DNA, 33 bp, Homo sapien
ggtatctaggaagcaacggaaccaggataggag

SEQ ID NO: 953544 - DNA, 33 bp, Homo sapien
ggtatctaggaagcaagggaaccaggataggag

SEQ ID NO: 953545 - DNA, 33 bp, Homo sapien
gaagggggtggagaataacagtcaatgtggcca

SEQ ID NO: 953546 - DNA, 33 bp, Homo sapien
gaagggggtggagaatcacagtcaatgtggcca

SEQ ID NO: 953547 - DNA, 33 bp, Homo sapien
gggtcgggattataaagtaggtcttctacaccc

SEQ ID NO: 953548 - DNA, 33 bp, Homo sapien
gggtcgggattataaattaggtcttctacaccc

SEQ ID NO: 953549 - DNA, 33 bp, Homo sapien
agcgtagaatctaggacgtaagggctgagagtt

SEQ ID NO: 953550 - DNA, 33 bp, Homo sapien
agcgtagaatctaggatgtaagggctgagagtt

SEQ ID NO: 953551 - DNA, 33 bp, Homo sapien
actggtgattgctgggaagtcagaataaggagt

SEQ ID NO: 953552 - DNA, 33 bp, Homo sapien
actggtgattgctgggtagtcagaataaggagt

SEQ ID NO: 953553 - DNA, 33 bp, Homo sapien
tccttatgtgatatctgaagtccactttcttac

SEQ ID NO: 953554 - DNA, 33 bp, Homo sapien
tccttatgtgatatcttaagtccactttcttac

SEQ ID NO: 953555 - DNA, 33 bp, Homo sapien
aacagccatcaggaaccggcattctgtggtgtg

SEQ ID NO: 953556 - DNA, 33 bp, Homo sapien
aacagccatcaggaacgggcattctgtggtgtg

SEQ ID NO: 953557 - DNA, 33 bp, Homo sapien
acttcgatcctgaaagcataagaattctgcaaa

SEQ ID NO: 953558 - DNA, 33 bp, Homo sapien
acttcgatcctgaaagtataagaattctgcaaa

SEQ ID NO: 953559 - DNA, 33 bp, Homo sapien
gacactactaagtgctcacaaagatgtaacacc

SEQ ID NO: 953560 - DNA, 33 bp, Homo sapien
gacactactaagtgctgacaaagatgtaacacc

SEQ ID NO: 953561 - DNA, 33 bp, Homo sapien
gatccagcctcctaacacaagtctgctcagatc

SEQ ID NO: 953562 - DNA, 33 bp, Homo sapien
gatccagcctcctaacgcaagtctgctcagatc

SEQ ID NO: 953563 - DNA, 33 bp, Homo sapien
cacacataaaggaagacatactctatgatgcta

SEQ ID NO: 953564 - DNA, 33 bp, Homo sapien
cacacataaaggaagatatactctatgatgcta

SEQ ID NO: 953565 - DNA, 33 bp, Homo sapien
attctccaaggccaagcacaactctcagtctat

SEQ ID NO: 953566 - DNA, 33 bp, Homo sapien
attctccaaggccaagtacaactctcagtctat

SEQ ID NO: 953567 - DNA, 33 bp, Homo sapien
cctgttgcatctagtaggtatcaggttagcatg

SEQ ID NO: 953568 - DNA, 33 bp, Homo sapien
cctgttgcatctagtatgtatcaggttagcatg

SEQ ID NO: 953569 - DNA, 33 bp, Homo sapien
atgcctatttagttcacagcattgtccttaggt

SEQ ID NO: 953570 - DNA, 33 bp, Homo sapien
atgcctatttagttcatagcattgtccttaggt

SEQ ID NO: 953571 - DNA, 33 bp, Homo sapien
aaaagagcaagcagtacaaaggagggtctcact

SEQ ID NO: 953572 - DNA, 33 bp, Homo sapien
aaaagagcaagcagtagaaaggagggtctcact

SEQ ID NO: 953573 - DNA, 33 bp, Homo sapien
aagggccaagttacagaacgttactatctgcaa

SEQ ID NO: 953574 - DNA, 33 bp, Homo sapien
aagggccaagttacaggacgttactatctgcaa

SEQ ID NO: 953575 - DNA, 33 bp, Homo sapien
tggtagtgagctgtaaacaaaacttggaatcag

SEQ ID NO: 953576 - DNA, 33 bp, Homo sapien
tggtagtgagctgtaagcaaaacttggaatcag

SEQ ID NO: 953577 - DNA, 33 bp, Homo sapien
atggaaaggccacaataagaggtgacatttggc

SEQ ID NO: 953578 - DNA, 33 bp, Homo sapien
atggaaaggccacaatgagaggtgacatttggc

SEQ ID NO: 953579 - DNA, 33 bp, Homo sapien
cctggaaatggaacaacttggtatccctactct

SEQ ID NO: 953580 - DNA, 33 bp, Homo sapien
cctggaaatggaacaatttggtatccctactct

SEQ ID NO: 953581 - DNA, 33 bp, Homo sapien
acattaagtccttacacctttgcagtagatact

SEQ ID NO: 953582 - DNA, 33 bp, Homo sapien
acattaagtccttacatctttgcagtagatact

SEQ ID NO: 953583 - DNA, 33 bp, Homo sapien
ttcatagatatggaaactaagcttcagagaggc

SEQ ID NO: 953584 - DNA, 33 bp, Homo sapien
ttcatagatatggaaagtaagcttcagagaggc

SEQ ID NO: 953585 - DNA, 33 bp, Homo sapien
taggcaagagtagacactgaggaagttggacag

SEQ ID NO: 953586 - DNA, 33 bp, Homo sapien
taggcaagagtagacattgaggaagttggacag

SEQ ID NO: 953587 - DNA, 33 bp, Homo sapien
catggagaatactgtccaactgaagataacaaa

SEQ ID NO: 953588 - DNA, 33 bp, Homo sapien
catggagaatactgtctaactgaagataacaaa

SEQ ID NO: 953589 - DNA, 33 bp, Homo sapien
gttcacttctgaagaccgcacctccatgctaat

SEQ ID NO: 953590 - DNA, 33 bp, Homo sapien
gttcacttctgaagactgcacctccatgctaat

SEQ ID NO: 953591 - DNA, 33 bp, Homo sapien
ctcttacatgggtaaacagcctgttgcagacat

SEQ ID NO: 953592 - DNA, 33 bp, Homo sapien
ctcttacatgggtaaatagcctgttgcagacat

SEQ ID NO: 953593 - DNA, 33 bp, Homo sapien
tggatattttctagaactgacaaaaaacatcaa

SEQ ID NO: 953594 - DNA, 33 bp, Homo sapien
tggatattttctagaattgacaaaaaacatcaa

SEQ ID NO: 953595 - DNA, 33 bp, Homo sapien
acataagctcagtatacgtagcatttctttgtc

SEQ ID NO: 953596 - DNA, 33 bp, Homo sapien
acataagctcagtatatgtagcatttctttgtc

SEQ ID NO: 953597 - DNA, 33 bp, Homo sapien
gaaaagttagtgaacaagaaaatactgcactca

SEQ ID NO: 953598 - DNA, 33 bp, Homo sapien
gaaaagttagtgaacaggaaaatactgcactca

SEQ ID NO: 953599 - DNA, 33 bp, Homo sapien
ttgactcctctctacaacctgcctgattttgtt

SEQ ID NO: 953600 - DNA, 33 bp, Homo sapien
ttgactcctctctacatcctgcctgattttgtt

SEQ ID NO: 953601 - DNA, 33 bp, Homo sapien
aacttgtggaatgataccaaaagatgtaataca

SEQ ID NO: 953602 - DNA, 33 bp, Homo sapien
aacttgtggaatgatatcaaaagatgtaataca

SEQ ID NO: 953603 - DNA, 33 bp, Homo sapien
cctggtaaataaacacaaccttcacaacaacct

SEQ ID NO: 953604 - DNA, 33 bp, Homo sapien
cctggtaaataaacacgaccttcacaacaacct

SEQ ID NO: 953605 - DNA, 33 bp, Homo sapien
ggactcttgataacaacggatggactgaacact

SEQ ID NO: 953606 - DNA, 33 bp, Homo sapien
ggactcttgataacaatggatggactgaacact

SEQ ID NO: 953607 - DNA, 33 bp, Homo sapien
tcactctcactttatccataggagacagcattc

SEQ ID NO: 953608 - DNA, 33 bp, Homo sapien
tcactctcactttatctataggagacagcattc

SEQ ID NO: 953609 - DNA, 33 bp, Homo sapien
ggctgtggcagcaagactcctgtagctcctgag

SEQ ID NO: 953610 - DNA, 33 bp, Homo sapien
ggctgtggcagcaagattcctgtagctcctgag

SEQ ID NO: 953611 - DNA, 33 bp, Homo sapien
tggccaatgtttatgcacagtggagtttgtttt

SEQ ID NO: 953612 - DNA, 33 bp, Homo sapien
tggccaatgtttatgcccagtggagtttgtttt

SEQ ID NO: 953613 - DNA, 33 bp, Homo sapien
ggctgacacttccaggacaatttcttgtagaag

SEQ ID NO: 953614 - DNA, 33 bp, Homo sapien
ggctgacacttccaggccaatttcttgtagaag

SEQ ID NO: 953615 - DNA, 33 bp, Homo sapien
ctgcacttaaaatccacaaattatgtcacatac

SEQ ID NO: 953616 - DNA, 33 bp, Homo sapien
ctgcacttaaaatccagaaattatgtcacatac

SEQ ID NO: 953617 - DNA, 33 bp, Homo sapien
gcttatatccctggaacgaagagttggttgttt

SEQ ID NO: 953618 - DNA, 33 bp, Homo sapien
gcttatatccctggaatgaagagttggttgttt

SEQ ID NO: 953619 - DNA, 33 bp, Homo sapien
gcagagtcagaggcaacgagtccactgtgggac

SEQ ID NO: 953620 - DNA, 33 bp, Homo sapien
gcagagtcagaggcaatgagtccactgtgggac

SEQ ID NO: 953621 - DNA, 33 bp, Homo sapien
atgataatatcaagtacaacaaactaatataca

SEQ ID NO: 953622 - DNA, 33 bp, Homo sapien
atgataatatcaagtagaacaaactaatataca

SEQ ID NO: 953623 - DNA, 33 bp, Homo sapien
tattactcataatggaacccatgtgactttcag

SEQ ID NO: 953624 - DNA, 33 bp, Homo sapien
tattactcataatggaccccatgtgactttcag

SEQ ID NO: 953625 - DNA, 33 bp, Homo sapien
cagcatctccaaatgaataataataataataac

SEQ ID NO: 953626 - DNA, 33 bp, Homo sapien
cagcatctccaaatgagtaataataataataac

SEQ ID NO: 953627 - DNA, 33 bp, Homo sapien
gcaatcgaataaagaaagagaatgtgaaagaga

SEQ ID NO: 953628 - DNA, 33 bp, Homo sapien
gcaatcgaataaagaaggagaatgtgaaagaga

SEQ ID NO: 953629 - DNA, 33 bp, Homo sapien
taagtcaggcccaataaaaagtaagcagtcatc

SEQ ID NO: 953630 - DNA, 33 bp, Homo sapien
taagtcaggcccaatagaaagtaagcagtcatc

SEQ ID NO: 953631 - DNA, 33 bp, Homo sapien
aaccttccaaagcagtaaattcaccaccaagcc

SEQ ID NO: 953632 - DNA, 33 bp, Homo sapien
aaccttccaaagcagtgaattcaccaccaagcc

SEQ ID NO: 953633 - DNA, 33 bp, Homo sapien
agccagcagcaccagaatcatccagagagcgat

SEQ ID NO: 953634 - DNA, 33 bp, Homo sapien
agccagcagcaccagagtcatccagagagcgat

SEQ ID NO: 953635 - DNA, 33 bp, Homo sapien
atcctctgtgttctgaaggcttaaatttttttg

SEQ ID NO: 953636 - DNA, 33 bp, Homo sapien
atcctctgtgttctgacggcttaaatttttttg

SEQ ID NO: 953637 - DNA, 33 bp, Homo sapien
ggcaaacaacaggaaccgattctgactaacttc

SEQ ID NO: 953638 - DNA, 33 bp, Homo sapien
ggcaaacaacaggaacggattctgactaacttc

SEQ ID NO: 953639 - DNA, 33 bp, Homo sapien
attgtttctatcaagacggtgatattctccttt

SEQ ID NO: 953640 - DNA, 33 bp, Homo sapien
attgtttctatcaagatggtgatattctccttt

SEQ ID NO: 953641 - DNA, 33 bp, Homo sapien
ttgtccttcaagcaggcagtctgatttctaagg

SEQ ID NO: 953642 - DNA, 33 bp, Homo sapien
ttgtccttcaagcaggtagtctgatttctaagg

SEQ ID NO: 953643 - DNA, 33 bp, Homo sapien
gttaaggacttatccacggaatattttgtgaga

SEQ ID NO: 953644 - DNA, 33 bp, Homo sapien
gttaaggacttatccatggaatattttgtgaga

SEQ ID NO: 953645 - DNA, 33 bp, Homo sapien
agagcctaggacctcaccaaggccaattgaaag

SEQ ID NO: 953646 - DNA, 33 bp, Homo sapien
agagcctaggacctcatcaaggccaattgaaag

SEQ ID NO: 953647 - DNA, 33 bp, Homo sapien
aatgcatctccatcttgaacacaacacctccaa

SEQ ID NO: 953648 - DNA, 33 bp, Homo sapien
aatgcatctccatctttaacacaacacctccaa

SEQ ID NO: 953649 - DNA, 33 bp, Homo sapien
ttccctgatcctgaaaatagaataaaaagcagc

SEQ ID NO: 953650 - DNA, 33 bp, Homo sapien
ttccctgatcctgaaagtagaataaaaagcagc

SEQ ID NO: 953651 - DNA, 33 bp, Homo sapien
tggggtgaaagtcccacgaagacacatatatgg

SEQ ID NO: 953652 - DNA, 33 bp, Homo sapien
tggggtgaaagtcccatgaagacacatatatgg

SEQ ID NO: 953653 - DNA, 33 bp, Homo sapien
cacatggtagtggctcaatgagtatgtgttaaa

SEQ ID NO: 953654 - DNA, 33 bp, Homo sapien
cacatggtagtggctcgatgagtatgtgttaaa

SEQ ID NO: 953655 - DNA, 33 bp, Homo sapien
caaggagcaagttccaaattgacaagagtgctt

SEQ ID NO: 953656 - DNA, 33 bp, Homo sapien
caaggagcaagttccagattgacaagagtgctt

SEQ ID NO: 953657 - DNA, 33 bp, Homo sapien
acgtctttcaggcaaacagaaaagcatgcataa

SEQ ID NO: 953658 - DNA, 33 bp, Homo sapien
acgtctttcaggcaaagagaaaagcatgcataa

SEQ ID NO: 953659 - DNA, 33 bp, Homo sapien
aatgcttcaaaacttacggaaatagtgcgatca

SEQ ID NO: 953660 - DNA, 33 bp, Homo sapien
aatgcttcaaaacttatggaaatagtgcgatca

SEQ ID NO: 953661 - DNA, 33 bp, Homo sapien
ccagactattattctgaatggtaatgccaggct

SEQ ID NO: 953662 - DNA, 33 bp, Homo sapien
ccagactattattctggatggtaatgccaggct

SEQ ID NO: 953663 - DNA, 33 bp, Homo sapien
tgccataacagttgacacatatattaaggattt

SEQ ID NO: 953664 - DNA, 33 bp, Homo sapien
tgccataacagttgacgcatatattaaggattt

SEQ ID NO: 953665 - DNA, 33 bp, Homo sapien
taagtgaaaaaatctcagaatgaatgaactgga

SEQ ID NO: 953666 - DNA, 33 bp, Homo sapien
taagtgaaaaaatctcggaatgaatgaactgga

SEQ ID NO: 953667 - DNA, 33 bp, Homo sapien
ggagaagctattttaacaagaagtcaagaactc

SEQ ID NO: 953668 - DNA, 33 bp, Homo sapien
ggagaagctattttaagaagaagtcaagaactc

SEQ ID NO: 953669 - DNA, 33 bp, Homo sapien
gagccaggcagacgtgcactaaggcccagctac

SEQ ID NO: 953670 - DNA, 33 bp, Homo sapien
gagccaggcagacgtgtactaaggcccagctac

SEQ ID NO: 953671 - DNA, 33 bp, Homo sapien
ttttacggatgagaacactaagatttaggaagc

SEQ ID NO: 953672 - DNA, 33 bp, Homo sapien
ttttacggatgagaacgctaagatttaggaagc

SEQ ID NO: 953673 - DNA, 33 bp, Homo sapien
gggaagagaattgtgacagaagcgaaacaagaa

SEQ ID NO: 953674 - DNA, 33 bp, Homo sapien
gggaagagaattgtgatagaagcgaaacaagaa

SEQ ID NO: 953675 - DNA, 33 bp, Homo sapien
gatcattctagtagtcacaataatctggaacag

SEQ ID NO: 953676 - DNA, 33 bp, Homo sapien
gatcattctagtagtcgcaataatctggaacag

SEQ ID NO: 953677 - DNA, 33 bp, Homo sapien
caggttttccatgaaacttaattcgagtgacaa

SEQ ID NO: 953678 - DNA, 33 bp, Homo sapien
caggttttccatgaaatttaattcgagtgacaa

SEQ ID NO: 953679 - DNA, 33 bp, Homo sapien
ccacagatttgcaccccactaaaattcatataa

SEQ ID NO: 953680 - DNA, 33 bp, Homo sapien
ccacagatttgcaccctactaaaattcatataa

SEQ ID NO: 953681 - DNA, 33 bp, Homo sapien
gtgttattttccagtgaattgcagaagttatgt

SEQ ID NO: 953682 - DNA, 33 bp, Homo sapien
gtgttattttccagtgcattgcagaagttatgt

SEQ ID NO: 953683 - DNA, 33 bp, Homo sapien
aacatttttctttgtaagtgtgacagcttctga

SEQ ID NO: 953684 - DNA, 33 bp, Homo sapien
aacatttttctttgtacgtgtgacagcttctga

SEQ ID NO: 953685 - DNA, 33 bp, Homo sapien
gctattattatacaaggagacttttcaaaaccc

SEQ ID NO: 953686 - DNA, 33 bp, Homo sapien
gctattattatacaagtagacttttcaaaaccc

SEQ ID NO: 953687 - DNA, 33 bp, Homo sapien
ggggaactcacataacactaaaataaattggaa

SEQ ID NO: 953688 - DNA, 33 bp, Homo sapien
ggggaactcacataacgctaaaataaattggaa

SEQ ID NO: 953689 - DNA, 33 bp, Homo sapien
agtgactctaactctaggtaatgttcattacta

SEQ ID NO: 953690 - DNA, 33 bp, Homo sapien
agtgactctaactctatgtaatgttcattacta

SEQ ID NO: 953691 - DNA, 33 bp, Homo sapien
gaatgtggcttacaaacaacacaaacttatttc

SEQ ID NO: 953692 - DNA, 33 bp, Homo sapien
gaatgtggcttacaaataacacaaacttatttc

SEQ ID NO: 953693 - DNA, 33 bp, Homo sapien
tattaagtattcgcaacattgtagagttatgtt

SEQ ID NO: 953694 - DNA, 33 bp, Homo sapien
tattaagtattcgcaagattgtagagttatgtt

SEQ ID NO: 953695 - DNA, 33 bp, Homo sapien
gctactctcccaagcaatgagaaaaatccattt

SEQ ID NO: 953696 - DNA, 33 bp, Homo sapien
gctactctcccaagcagtgagaaaaatccattt

SEQ ID NO: 953697 - DNA, 33 bp, Homo sapien
ttgatccaggacttccaccatcttgacccagga

SEQ ID NO: 953698 - DNA, 33 bp, Homo sapien
ttgatccaggacttccgccatcttgacccagga

SEQ ID NO: 953699 - DNA, 33 bp, Homo sapien
agcaagttgcaaaagactacctccattctaata

SEQ ID NO: 953700 - DNA, 33 bp, Homo sapien
agcaagttgcaaaagattacctccattctaata

SEQ ID NO: 953701 - DNA, 33 bp, Homo sapien
agttattacaaaaacaaactgtgacacaaaaat

SEQ ID NO: 953702 - DNA, 33 bp, Homo sapien
agttattacaaaaacagactgtgacacaaaaat

SEQ ID NO: 953703 - DNA, 33 bp, Homo sapien
ctcccctatttccttcacttgcgtcctctttcc

SEQ ID NO: 953704 - DNA, 33 bp, Homo sapien
ctcccctatttccttcgcttgcgtcctctttcc

SEQ ID NO: 953705 - DNA, 33 bp, Homo sapien
gcaagtcacatgctcacagtggccatacctcgt

SEQ ID NO: 953706 - DNA, 33 bp, Homo sapien
gcaagtcacatgctcagagtggccatacctcgt

SEQ ID NO: 953707 - DNA, 33 bp, Homo sapien
cccagaaagcgaagtacaaaacctattccagga

SEQ ID NO: 953708 - DNA, 33 bp, Homo sapien
cccagaaagcgaagtataaaacctattccagga

SEQ ID NO: 953709 - DNA, 33 bp, Homo sapien
tcatctcaggatcgaaacaagagagagatctgc

SEQ ID NO: 953710 - DNA, 33 bp, Homo sapien
tcatctcaggatcgaagcaagagagagatctgc

SEQ ID NO: 953711 - DNA, 33 bp, Homo sapien
tgaaacatgacctagacacagatgctggaattt

SEQ ID NO: 953712 - DNA, 33 bp, Homo sapien
tgaaacatgacctagagacagatgctggaattt

SEQ ID NO: 953713 - DNA, 33 bp, Homo sapien
accactcatccatgtacagaacaccttattcat

SEQ ID NO: 953714 - DNA, 33 bp, Homo sapien
accactcatccatgtatagaacaccttattcat

SEQ ID NO: 953715 - DNA, 33 bp, Homo sapien
cccttttgttcaaggccaaaatcctcacctgtg

SEQ ID NO: 953716 - DNA, 33 bp, Homo sapien
cccttttgttcaaggctaaaatcctcacctgtg

SEQ ID NO: 953717 - DNA, 33 bp, Homo sapien
gcttactgtctggtaaaccatcagttatgaaac

SEQ ID NO: 953718 - DNA, 33 bp, Homo sapien
gcttactgtctggtaacccatcagttatgaaac

SEQ ID NO: 953719 - DNA, 33 bp, Homo sapien
ccatcatttgctaggaacctccacccagaaatg

SEQ ID NO: 953720 - DNA, 33 bp, Homo sapien
ccatcatttgctaggagcctccacccagaaatg

SEQ ID NO: 953721 - DNA, 33 bp, Homo sapien
atctgtgtaatgcgtaagtatagtttttgggca

SEQ ID NO: 953722 - DNA, 33 bp, Homo sapien
atctgtgtaatgcgtaggtatagtttttgggca

SEQ ID NO: 953723 - DNA, 33 bp, Homo sapien
tttgttgtttaaactgaatcgatgccattcagt

SEQ ID NO: 953724 - DNA, 33 bp, Homo sapien
tttgttgtttaaactgtatcgatgccattcagt

SEQ ID NO: 953725 - DNA, 33 bp, Homo sapien
cacagagcacagcttcaacgggcagaggctggg

SEQ ID NO: 953726 - DNA, 33 bp, Homo sapien
cacagagcacagcttccacgggcagaggctggg

SEQ ID NO: 953727 - DNA, 33 bp, Homo sapien
aaacacaccttttccaatcaaaacctgtctacc

SEQ ID NO: 953728 - DNA, 33 bp, Homo sapien
aaacacaccttttccattcaaaacctgtctacc

SEQ ID NO: 953729 - DNA, 33 bp, Homo sapien
aaatgtaaaggtaaaaacagctccactgaattt

SEQ ID NO: 953730 - DNA, 33 bp, Homo sapien
aaatgtaaaggtaaaagcagctccactgaattt

SEQ ID NO: 953731 - DNA, 33 bp, Homo sapien
ttttagaaagcaacgactataattttatagggt

SEQ ID NO: 953732 - DNA, 33 bp, Homo sapien
ttttagaaagcaacgattataattttatagggt

SEQ ID NO: 953733 - DNA, 33 bp, Homo sapien
taagacaatgaaaaaaacaaatattagttgata

SEQ ID NO: 953734 - DNA, 33 bp, Homo sapien
taagacaatgaaaaaaccaaatattagttgata

SEQ ID NO: 953735 - DNA, 33 bp, Homo sapien
catcctgcttaagcaaaccaatgcagaaaggtc

SEQ ID NO: 953736 - DNA, 33 bp, Homo sapien
catcctgcttaagcaacccaatgcagaaaggtc

SEQ ID NO: 953737 - DNA, 33 bp, Homo sapien
tttgattggctaaaagacaccaaggacattctc

SEQ ID NO: 953738 - DNA, 33 bp, Homo sapien
tttgattggctaaaaggcaccaaggacattctc

SEQ ID NO: 953739 - DNA, 33 bp, Homo sapien
tttcacacattttagcaagacatgaaacatcag

SEQ ID NO: 953740 - DNA, 33 bp, Homo sapien
tttcacacattttagcgagacatgaaacatcag

SEQ ID NO: 953741 - DNA, 33 bp, Homo sapien
agatcctgagccttgaagccctagaatattcac

SEQ ID NO: 953742 - DNA, 33 bp, Homo sapien
agatcctgagccttgaggccctagaatattcac

SEQ ID NO: 953743 - DNA, 33 bp, Homo sapien
agtaattggaagctaggccaggtaaaagggctg

SEQ ID NO: 953744 - DNA, 33 bp, Homo sapien
agtaattggaagctagtccaggtaaaagggctg

SEQ ID NO: 953745 - DNA, 33 bp, Homo sapien
gagactagtgaggaaaatttaaaatgggtagaa

SEQ ID NO: 953746 - DNA, 33 bp, Homo sapien
gagactagtgaggaaagtttaaaatgggtagaa

SEQ ID NO: 953747 - DNA, 33 bp, Homo sapien
cattaggcagtggagacgtagacagatggtcca

SEQ ID NO: 953748 - DNA, 33 bp, Homo sapien
cattaggcagtggagatgtagacagatggtcca

SEQ ID NO: 953749 - DNA, 33 bp, Homo sapien
gcctaagatgactaacaaaacgtcaggggagac

SEQ ID NO: 953750 - DNA, 33 bp, Homo sapien
gcctaagatgactaacgaaacgtcaggggagac

SEQ ID NO: 953751 - DNA, 33 bp, Homo sapien
ctgtactatgcaatgaatcaccgtcatgaagca

SEQ ID NO: 953752 - DNA, 33 bp, Homo sapien
ctgtactatgcaatgagtcaccgtcatgaagca

SEQ ID NO: 953753 - DNA, 33 bp, Homo sapien
agtacctgaatatttgcaaaccttttgatagct

SEQ ID NO: 953754 - DNA, 33 bp, Homo sapien
agtacctgaatatttgtaaaccttttgatagct

SEQ ID NO: 953755 - DNA, 33 bp, Homo sapien
ctgccttgcaaaacaaatatccaaatctatatt

SEQ ID NO: 953756 - DNA, 33 bp, Homo sapien
ctgccttgcaaaacaattatccaaatctatatt

SEQ ID NO: 953757 - DNA, 33 bp, Homo sapien
ggaggatccagaaaccactaagtgctaggaatg

SEQ ID NO: 953758 - DNA, 33 bp, Homo sapien
ggaggatccagaaaccgctaagtgctaggaatg

SEQ ID NO: 953759 - DNA, 33 bp, Homo sapien
tttctggatcctcccaatgacctcttatttaaa

SEQ ID NO: 953760 - DNA, 33 bp, Homo sapien
tttctggatcctcccagtgacctcttatttaaa

SEQ ID NO: 953761 - DNA, 33 bp, Homo sapien
cttttcattacctccaagcattgctctatatct

SEQ ID NO: 953762 - DNA, 33 bp, Homo sapien
cttttcattacctccaggcattgctctatatct

SEQ ID NO: 953763 - DNA, 33 bp, Homo sapien
agaagagacattacaacgattgcctcagtaata

SEQ ID NO: 953764 - DNA, 33 bp, Homo sapien
agaagagacattacaatgattgcctcagtaata

SEQ ID NO: 953765 - DNA, 33 bp, Homo sapien
tttgtcgggaggttcacgtttattgattcaatg

SEQ ID NO: 953766 - DNA, 33 bp, Homo sapien
tttgtcgggaggttcatgtttattgattcaatg

SEQ ID NO: 953767 - DNA, 33 bp, Homo sapien
cttcagaacgactctccctaaaaatacataacc

SEQ ID NO: 953768 - DNA, 33 bp, Homo sapien
cttcagaacgactctcgctaaaaatacataacc

SEQ ID NO: 953769 - DNA, 33 bp, Homo sapien
tttatttttggcagaaatgtaagcaccttcatt

SEQ ID NO: 953770 - DNA, 33 bp, Homo sapien
tttatttttggcagaactgtaagcaccttcatt

SEQ ID NO: 953771 - DNA, 33 bp, Homo sapien
ccatcctgagtggaaactgctgcataaggctag

SEQ ID NO: 953772 - DNA, 33 bp, Homo sapien
ccatcctgagtggaaattgctgcataaggctag

SEQ ID NO: 953773 - DNA, 33 bp, Homo sapien
ggacaatcgaaaatagcaacaatatgctctaag

SEQ ID NO: 953774 - DNA, 33 bp, Homo sapien
ggacaatcgaaaatagtaacaatatgctctaag

SEQ ID NO: 953775 - DNA, 33 bp, Homo sapien
ggaaaactgtaagttaaggacaatttgtatttc

SEQ ID NO: 953776 - DNA, 33 bp, Homo sapien
ggaaaactgtaagttagggacaatttgtatttc

SEQ ID NO: 953777 - DNA, 33 bp, Homo sapien
gctcagggtttagtaacaccagtcatcatctct

SEQ ID NO: 953778 - DNA, 33 bp, Homo sapien
gctcagggtttagtaataccagtcatcatctct

SEQ ID NO: 953779 - DNA, 33 bp, Homo sapien
atttgagagcctaacccggtgttcagcaaccaa

SEQ ID NO: 953780 - DNA, 33 bp, Homo sapien
atttgagagcctaacctggtgttcagcaaccaa

SEQ ID NO: 953781 - DNA, 33 bp, Homo sapien
tgcaccattcaaattacgtgtcagctgaggatt

SEQ ID NO: 953782 - DNA, 33 bp, Homo sapien
tgcaccattcaaattatgtgtcagctgaggatt

SEQ ID NO: 953783 - DNA, 33 bp, Homo sapien
tctgagatatttgacacctttatcatttcatat

SEQ ID NO: 953784 - DNA, 33 bp, Homo sapien
tctgagatatttgacatctttatcatttcatat

SEQ ID NO: 953785 - DNA, 33 bp, Homo sapien
ggaatctagtcaccccacttttctagtctcccc

SEQ ID NO: 953786 - DNA, 33 bp, Homo sapien
ggaatctagtcaccccgcttttctagtctcccc

SEQ ID NO: 953787 - DNA, 33 bp, Homo sapien
tgatcagactttgttcaaggattgcgaggggaa

SEQ ID NO: 953788 - DNA, 33 bp, Homo sapien
tgatcagactttgttcgaggattgcgaggggaa

SEQ ID NO: 953789 - DNA, 33 bp, Homo sapien
agtaagcttagaaacaataagtctggtagattg

SEQ ID NO: 953790 - DNA, 33 bp, Homo sapien
agtaagcttagaaacagtaagtctggtagattg

SEQ ID NO: 953791 - DNA, 33 bp, Homo sapien
agcattctgttgcccagaaattgatttgcatca

SEQ ID NO: 953792 - DNA, 33 bp, Homo sapien
agcattctgttgcccataaattgatttgcatca

SEQ ID NO: 953793 - DNA, 33 bp, Homo sapien
accaagccaagtagaaagttgtagtgctgtgtt

SEQ ID NO: 953794 - DNA, 33 bp, Homo sapien
accaagccaagtagaaggttgtagtgctgtgtt

SEQ ID NO: 953795 - DNA, 33 bp, Homo sapien
gctgccagtgatctggaaattgtaagccattta

SEQ ID NO: 953796 - DNA, 33 bp, Homo sapien
gctgccagtgatctgggaattgtaagccattta

SEQ ID NO: 953797 - DNA, 33 bp, Homo sapien
aggaacaaaagccacaatgtaaggaacaaagaa

SEQ ID NO: 953798 - DNA, 33 bp, Homo sapien
aggaacaaaagccacattgtaaggaacaaagaa

SEQ ID NO: 953799 - DNA, 33 bp, Homo sapien
tcaagaagggagagaaaatggtaacctaagagg

SEQ ID NO: 953800 - DNA, 33 bp, Homo sapien
tcaagaagggagagaagatggtaacctaagagg

SEQ ID NO: 953801 - DNA, 33 bp, Homo sapien
gttatgggaatacatacactttatcttgacaac

SEQ ID NO: 953802 - DNA, 33 bp, Homo sapien
gttatgggaatacatagactttatcttgacaac

SEQ ID NO: 953803 - DNA, 33 bp, Homo sapien
taactgactaataagaaccagatctgtgtgaat

SEQ ID NO: 953804 - DNA, 33 bp, Homo sapien
taactgactaataagagccagatctgtgtgaat

SEQ ID NO: 953805 - DNA, 33 bp, Homo sapien
ggcataatgaaagccaatcaatgcagtgacaga

SEQ ID NO: 953806 - DNA, 33 bp, Homo sapien
ggcataatgaaagccagtcaatgcagtgacaga

SEQ ID NO: 953807 - DNA, 33 bp, Homo sapien
cagagacacaagagaacggtgatactcagggca

SEQ ID NO: 953808 - DNA, 33 bp, Homo sapien
cagagacacaagagaatggtgatactcagggca

SEQ ID NO: 953809 - DNA, 33 bp, Homo sapien
aagaagccaacacaaacataaaagggtgcataa

SEQ ID NO: 953810 - DNA, 33 bp, Homo sapien
aagaagccaacacaaagataaaagggtgcataa

SEQ ID NO: 953811 - DNA, 33 bp, Homo sapien
cagggcatgtagtccaaagatataaagacaggt

SEQ ID NO: 953812 - DNA, 33 bp, Homo sapien
cagggcatgtagtccagagatataaagacaggt

SEQ ID NO: 953813 - DNA, 33 bp, Homo sapien
tttttggctattacaaataaagctactgtaaac

SEQ ID NO: 953814 - DNA, 33 bp, Homo sapien
tttttggctattacaagtaaagctactgtaaac

SEQ ID NO: 953815 - DNA, 33 bp, Homo sapien
gtgacttccgaaataacggttggtaattgttta

SEQ ID NO: 953816 - DNA, 33 bp, Homo sapien
gtgacttccgaaataatggttggtaattgttta

SEQ ID NO: 953817 - DNA, 33 bp, Homo sapien
cttgtgacttggaaaccccttgcttccaattgt

SEQ ID NO: 953818 - DNA, 33 bp, Homo sapien
cttgtgacttggaaacgccttgcttccaattgt

SEQ ID NO: 953819 - DNA, 33 bp, Homo sapien
acagcagaagaaactacgactatgactatgtct

SEQ ID NO: 953820 - DNA, 33 bp, Homo sapien
acagcagaagaaactatgactatgactatgtct

SEQ ID NO: 953821 - DNA, 33 bp, Homo sapien
cccacactgaggccaaatgaggccattctgtac

SEQ ID NO: 953822 - DNA, 33 bp, Homo sapien
cccacactgaggccaagtgaggccattctgtac

SEQ ID NO: 953823 - DNA, 33 bp, Homo sapien
ttatttttcctcaaacacttaaatgtagtcact

SEQ ID NO: 953824 - DNA, 33 bp, Homo sapien
ttatttttcctcaaacgcttaaatgtagtcact

SEQ ID NO: 953825 - DNA, 33 bp, Homo sapien
ttttttgctgtttgaacactcttcttcatgctc

SEQ ID NO: 953826 - DNA, 33 bp, Homo sapien
ttttttgctgtttgaatactcttcttcatgctc

SEQ ID NO: 953827 - DNA, 33 bp, Homo sapien
cagggtactccgggaaagatactgaaccatgaa

SEQ ID NO: 953828 - DNA, 33 bp, Homo sapien
cagggtactccgggaacgatactgaaccatgaa

SEQ ID NO: 953829 - DNA, 33 bp, Homo sapien
atctttaactgacttacattggcaaagaccctt

SEQ ID NO: 953830 - DNA, 33 bp, Homo sapien
atctttaactgacttagattggcaaagaccctt

SEQ ID NO: 953831 - DNA, 33 bp, Homo sapien
cagaggaatgatcatgaaagccttgccgcacat

SEQ ID NO: 953832 - DNA, 33 bp, Homo sapien
cagaggaatgatcatggaagccttgccgcacat

SEQ ID NO: 953833 - DNA, 33 bp, Homo sapien
acaatagcctctatcaaatttctagtttcaata

SEQ ID NO: 953834 - DNA, 33 bp, Homo sapien
acaatagcctctatcagatttctagtttcaata

SEQ ID NO: 953835 - DNA, 33 bp, Homo sapien
tcagtcctatttcctcacaactaaaatcaggca

SEQ ID NO: 953836 - DNA, 33 bp, Homo sapien
tcagtcctatttcctcgcaactaaaatcaggca

SEQ ID NO: 953837 - DNA, 33 bp, Homo sapien
ctacttctgtaagagacgtagtcaaagaacaac

SEQ ID NO: 953838 - DNA, 33 bp, Homo sapien
ctacttctgtaagagatgtagtcaaagaacaac

SEQ ID NO: 953839 - DNA, 33 bp, Homo sapien
taccaaacaacgcagcaatctcactttttgtgt

SEQ ID NO: 953840 - DNA, 33 bp, Homo sapien
taccaaacaacgcagcgatctcactttttgtgt

SEQ ID NO: 953841 - DNA, 33 bp, Homo sapien
tatgaatattcacatacacgtatgctctttaat

SEQ ID NO: 953842 - DNA, 33 bp, Homo sapien
tatgaatattcacatatacgtatgctctttaat

SEQ ID NO: 953843 - DNA, 33 bp, Homo sapien
gaaggaggctttaatacgctgcggtcaaggaga

SEQ ID NO: 953844 - DNA, 33 bp, Homo sapien
gaaggaggctttaatatgctgcggtcaaggaga

SEQ ID NO: 953845 - DNA, 33 bp, Homo sapien
agattaaagaagcctaaaatatcatgacaacta

SEQ ID NO: 953846 - DNA, 33 bp, Homo sapien
agattaaagaagcctacaatatcatgacaacta

SEQ ID NO: 953847 - DNA, 33 bp, Homo sapien
tcattaatcaactacacaaagatcatcatgaac

SEQ ID NO: 953848 - DNA, 33 bp, Homo sapien
tcattaatcaactacagaaagatcatcatgaac

SEQ ID NO: 953849 - DNA, 33 bp, Homo sapien
ttttgcacatatcatccaataatttttttctgg

SEQ ID NO: 953850 - DNA, 33 bp, Homo sapien
ttttgcacatatcatctaataatttttttctgg

SEQ ID NO: 953851 - DNA, 33 bp, Homo sapien
aaggaggtaatccccaacaactcttattctctg

SEQ ID NO: 953852 - DNA, 33 bp, Homo sapien
aaggaggtaatccccagcaactcttattctctg

SEQ ID NO: 953853 - DNA, 33 bp, Homo sapien
catctgatttcccaaacggacactcctagcaga

SEQ ID NO: 953854 - DNA, 33 bp, Homo sapien
catctgatttcccaaatggacactcctagcaga

SEQ ID NO: 953855 - DNA, 33 bp, Homo sapien
cccaggcctctttgcaacttggtggtctcaggt

SEQ ID NO: 953856 - DNA, 33 bp, Homo sapien
cccaggcctctttgcagcttggtggtctcaggt

SEQ ID NO: 953857 - DNA, 33 bp, Homo sapien
gcactatctccttagacccagactcctctctaa

SEQ ID NO: 953858 - DNA, 33 bp, Homo sapien
gcactatctccttagatccagactcctctctaa

SEQ ID NO: 953859 - DNA, 33 bp, Homo sapien
gggctcagatactgaacagactgtgtatggcaa

SEQ ID NO: 953860 - DNA, 33 bp, Homo sapien
gggctcagatactgaatagactgtgtatggcaa

SEQ ID NO: 953861 - DNA, 33 bp, Homo sapien
tgtcccagagctttgacggttgaatgacttaac

SEQ ID NO: 953862 - DNA, 33 bp, Homo sapien
tgtcccagagctttgatggttgaatgacttaac

SEQ ID NO: 953863 - DNA, 33 bp, Homo sapien
tccatactgtttggacactagcaaggctgtatg

SEQ ID NO: 953864 - DNA, 33 bp, Homo sapien
tccatactgtttggacgctagcaaggctgtatg

SEQ ID NO: 953865 - DNA, 33 bp, Homo sapien
tacgttgatgattctcacctgcaacaataattg

SEQ ID NO: 953866 - DNA, 33 bp, Homo sapien
tacgttgatgattctcgcctgcaacaataattg

SEQ ID NO: 953867 - DNA, 33 bp, Homo sapien
gtccattacttccacaaatagcttttataacca

SEQ ID NO: 953868 - DNA, 33 bp, Homo sapien
gtccattacttccacagatagcttttataacca

SEQ ID NO: 953869 - DNA, 33 bp, Homo sapien
cttttggctttaatcagaaatggtgattgtcaa

SEQ ID NO: 953870 - DNA, 33 bp, Homo sapien
cttttggctttaatcataaatggtgattgtcaa

SEQ ID NO: 953871 - DNA, 33 bp, Homo sapien
ttaatgcttcaatatacaaacttggcaagtggg

SEQ ID NO: 953872 - DNA, 33 bp, Homo sapien
ttaatgcttcaatatataaacttggcaagtggg

SEQ ID NO: 953873 - DNA, 33 bp, Homo sapien
actttctttagtatacactcctggagaaaggga

SEQ ID NO: 953874 - DNA, 33 bp, Homo sapien
actttctttagtatacgctcctggagaaaggga

SEQ ID NO: 953875 - DNA, 33 bp, Homo sapien
tgaaaggtagaccatgacaagtttttctcgaaa

SEQ ID NO: 953876 - DNA, 33 bp, Homo sapien
tgaaaggtagaccatgccaagtttttctcgaaa

SEQ ID NO: 953877 - DNA, 33 bp, Homo sapien
ttgatcagggcgatcgcagtatcatcagtggtg

SEQ ID NO: 953878 - DNA, 33 bp, Homo sapien
ttgatcagggcgatcgtagtatcatcagtggtg

SEQ ID NO: 953879 - DNA, 33 bp, Homo sapien
tgggagcactgagggaaaagcactatctgtatt

SEQ ID NO: 953880 - DNA, 33 bp, Homo sapien
tgggagcactgagggagaagcactatctgtatt

SEQ ID NO: 953881 - DNA, 33 bp, Homo sapien
tttcacttgttggacacccagcaaatgcatcca

SEQ ID NO: 953882 - DNA, 33 bp, Homo sapien
tttcacttgttggacatccagcaaatgcatcca

SEQ ID NO: 953883 - DNA, 33 bp, Homo sapien
gtgaaatgtttggacaatgattcggatagcttt

SEQ ID NO: 953884 - DNA, 33 bp, Homo sapien
gtgaaatgtttggacagtgattcggatagcttt

SEQ ID NO: 953885 - DNA, 33 bp, Homo sapien
tctgatgcttgcagaactggtaaagaggttgcc

SEQ ID NO: 953886 - DNA, 33 bp, Homo sapien
tctgatgcttgcagaattggtaaagaggttgcc

SEQ ID NO: 953887 - DNA, 33 bp, Homo sapien
atggagtgagtggcaacacaactattttgctgg

SEQ ID NO: 953888 - DNA, 33 bp, Homo sapien
atggagtgagtggcaagacaactattttgctgg

SEQ ID NO: 953889 - DNA, 33 bp, Homo sapien
tgatgaaatacaattacgtcctgtaaatcctat

SEQ ID NO: 953890 - DNA, 33 bp, Homo sapien
tgatgaaatacaattatgtcctgtaaatcctat

SEQ ID NO: 953891 - DNA, 33 bp, Homo sapien
gcaataagaaaaaataaacacatggactttatc

SEQ ID NO: 953892 - DNA, 33 bp, Homo sapien
gcaataagaaaaaatagacacatggactttatc

SEQ ID NO: 953893 - DNA, 33 bp, Homo sapien
acattgttttcctgcaacatctagatggaagtt

SEQ ID NO: 953894 - DNA, 33 bp, Homo sapien
acattgttttcctgcagcatctagatggaagtt

SEQ ID NO: 953895 - DNA, 33 bp, Homo sapien
ggggtaacaggtcccacgaaagtccaaagccca

SEQ ID NO: 953896 - DNA, 33 bp, Homo sapien
ggggtaacaggtcccatgaaagtccaaagccca

SEQ ID NO: 953897 - DNA, 33 bp, Homo sapien
atgtccaaaccgcccactcttagtgaagactga

SEQ ID NO: 953898 - DNA, 33 bp, Homo sapien
atgtccaaaccgcccattcttagtgaagactga

SEQ ID NO: 953899 - DNA, 33 bp, Homo sapien
tgtagggagggacacaaataattaaagcatggt

SEQ ID NO: 953900 - DNA, 33 bp, Homo sapien
tgtagggagggacacagataattaaagcatggt

SEQ ID NO: 953901 - DNA, 33 bp, Homo sapien
tgctctgggctcaggaagattgttcaggcagca

SEQ ID NO: 953902 - DNA, 33 bp, Homo sapien
tgctctgggctcaggaggattgttcaggcagca

SEQ ID NO: 953903 - DNA, 33 bp, Homo sapien
acccagcaatggtaaaaaccagatctggatttt

SEQ ID NO: 953904 - DNA, 33 bp, Homo sapien
acccagcaatggtaaagaccagatctggatttt

SEQ ID NO: 953905 - DNA, 33 bp, Homo sapien
ggaattgggtagaaaacaatatcttgtgataca

SEQ ID NO: 953906 - DNA, 33 bp, Homo sapien
ggaattgggtagaaaataatatcttgtgataca

SEQ ID NO: 953907 - DNA, 33 bp, Homo sapien
ctcaggaccctgtgaggattgcgttaactgcac

SEQ ID NO: 953908 - DNA, 33 bp, Homo sapien
ctcaggaccctgtgagtattgcgttaactgcac

SEQ ID NO: 953909 - DNA, 33 bp, Homo sapien
aaagacaaatactctacccaggatcagctaaat

SEQ ID NO: 953910 - DNA, 33 bp, Homo sapien
aaagacaaatactctatccaggatcagctaaat

SEQ ID NO: 953911 - DNA, 33 bp, Homo sapien
taccaaaaacagcagaacatttaaaccaatatt

SEQ ID NO: 953912 - DNA, 33 bp, Homo sapien
taccaaaaacagcagagcatttaaaccaatatt

SEQ ID NO: 953913 - DNA, 33 bp, Homo sapien
aaagatacaattccaaaaggcactcacatacat

SEQ ID NO: 953914 - DNA, 33 bp, Homo sapien
aaagatacaattccaacaggcactcacatacat

SEQ ID NO: 953915 - DNA, 33 bp, Homo sapien
tacacccaaatagctgcatttctgctcccactt

SEQ ID NO: 953916 - DNA, 33 bp, Homo sapien
tacacccaaatagctgtatttctgctcccactt

SEQ ID NO: 953917 - DNA, 33 bp, Homo sapien
ttcttggaggaagagactacccgggtcggggtt

SEQ ID NO: 953918 - DNA, 33 bp, Homo sapien
ttcttggaggaagagattacccgggtcggggtt

SEQ ID NO: 953919 - DNA, 33 bp, Homo sapien
catccatgctattccactaggtacgctttcttc

SEQ ID NO: 953920 - DNA, 33 bp, Homo sapien
catccatgctattccagtaggtacgctttcttc

SEQ ID NO: 953921 - DNA, 33 bp, Homo sapien
aggcaaggtcttgataataaatcagatatccaa

SEQ ID NO: 953922 - DNA, 33 bp, Homo sapien
aggcaaggtcttgatactaaatcagatatccaa

SEQ ID NO: 953923 - DNA, 33 bp, Homo sapien
agtctgcccagacgaaggaaactcactattaaa

SEQ ID NO: 953924 - DNA, 33 bp, Homo sapien
agtctgcccagacgaatgaaactcactattaaa

SEQ ID NO: 953925 - DNA, 33 bp, Homo sapien
ggcaatttgattaaacacttgtgattccataaa

SEQ ID NO: 953926 - DNA, 33 bp, Homo sapien
ggcaatttgattaaacgcttgtgattccataaa

SEQ ID NO: 953927 - DNA, 33 bp, Homo sapien
ggcaacgtactaatcactccgcaatttgttttt

SEQ ID NO: 953928 - DNA, 33 bp, Homo sapien
ggcaacgtactaatcattccgcaatttgttttt

SEQ ID NO: 953929 - DNA, 33 bp, Homo sapien
tctaaagactctaaaaacacttatgcaatgatc

SEQ ID NO: 953930 - DNA, 33 bp, Homo sapien
tctaaagactctaaaaccacttatgcaatgatc

SEQ ID NO: 953931 - DNA, 33 bp, Homo sapien
cttattttgtgcagtgcaatggactcctgactt

SEQ ID NO: 953932 - DNA, 33 bp, Homo sapien
cttattttgtgcagtggaatggactcctgactt

SEQ ID NO: 953933 - DNA, 33 bp, Homo sapien
agcgagatccttgtgacgctttgccacaaagtt

SEQ ID NO: 953934 - DNA, 33 bp, Homo sapien
agcgagatccttgtgatgctttgccacaaagtt

SEQ ID NO: 953935 - DNA, 33 bp, Homo sapien
atccattaacacacaacagtccggtttacacct

SEQ ID NO: 953936 - DNA, 33 bp, Homo sapien
atccattaacacacaatagtccggtttacacct

SEQ ID NO: 953937 - DNA, 33 bp, Homo sapien
tcagatccctaagcacagtaaatgaccatgtgt

SEQ ID NO: 953938 - DNA, 33 bp, Homo sapien
tcagatccctaagcaccgtaaatgaccatgtgt

SEQ ID NO: 953939 - DNA, 33 bp, Homo sapien
agacccccatttgtcccagactaaaggatccag

SEQ ID NO: 953940 - DNA, 33 bp, Homo sapien
agacccccatttgtccgagactaaaggatccag

SEQ ID NO: 953941 - DNA, 33 bp, Homo sapien
aggttatgatagcaaacagctggtgaagtgacc

SEQ ID NO: 953942 - DNA, 33 bp, Homo sapien
aggttatgatagcaaatagctggtgaagtgacc

SEQ ID NO: 953943 - DNA, 33 bp, Homo sapien
gagcaagaggagaagaaaatgattcctcgtttg

SEQ ID NO: 953944 - DNA, 33 bp, Homo sapien
gagcaagaggagaagacaatgattcctcgtttg

SEQ ID NO: 953945 - DNA, 33 bp, Homo sapien
ccagttcagagtccaaatctcagtctacacgca

SEQ ID NO: 953946 - DNA, 33 bp, Homo sapien
ccagttcagagtccaactctcagtctacacgca

SEQ ID NO: 953947 - DNA, 33 bp, Homo sapien
ccacttacacttcagcaaggagtggccacttcc

SEQ ID NO: 953948 - DNA, 33 bp, Homo sapien
ccacttacacttcagcgaggagtggccacttcc

SEQ ID NO: 953949 - DNA, 33 bp, Homo sapien
gtgggtgcagtccctccctccaaagcaacaaat

SEQ ID NO: 953950 - DNA, 33 bp, Homo sapien
gtgggtgcagtccctctctccaaagcaacaaat

SEQ ID NO: 953951 - DNA, 33 bp, Homo sapien
ttaggtcttctatatccacatcaccctgaaaac

SEQ ID NO: 953952 - DNA, 33 bp, Homo sapien
ttaggtcttctatatcgacatcaccctgaaaac

SEQ ID NO: 953953 - DNA, 33 bp, Homo sapien
acaaagccatcaattcaataaaagcttttcaca

SEQ ID NO: 953954 - DNA, 33 bp, Homo sapien
acaaagccatcaattcgataaaagcttttcaca

SEQ ID NO: 953955 - DNA, 33 bp, Homo sapien
ctcctcctttttttgccatgcaatacacattgc

SEQ ID NO: 953956 - DNA, 33 bp, Homo sapien
ctcctcctttttttgctatgcaatacacattgc

SEQ ID NO: 953957 - DNA, 33 bp, Homo sapien
gaggagatggaggtgacaggagatggatgagaa

SEQ ID NO: 953958 - DNA, 33 bp, Homo sapien
gaggagatggaggtgagaggagatggatgagaa

SEQ ID NO: 953959 - DNA, 33 bp, Homo sapien
caagtgtctgttctgaagaatgatgactgatgg

SEQ ID NO: 953960 - DNA, 33 bp, Homo sapien
caagtgtctgttctgatgaatgatgactgatgg

SEQ ID NO: 953961 - DNA, 33 bp, Homo sapien
tccaggtaagacgggacggagtctagccagatg

SEQ ID NO: 953962 - DNA, 33 bp, Homo sapien
tccaggtaagacgggagggagtctagccagatg

SEQ ID NO: 953963 - DNA, 33 bp, Homo sapien
acagtgttgggtgaaaaacagtcttgccatcta

SEQ ID NO: 953964 - DNA, 33 bp, Homo sapien
acagtgttgggtgaaagacagtcttgccatcta

SEQ ID NO: 953965 - DNA, 33 bp, Homo sapien
agccccttacaacagacaattacctagcctttg

SEQ ID NO: 953966 - DNA, 33 bp, Homo sapien
agccccttacaacagagaattacctagcctttg

SEQ ID NO: 953967 - DNA, 33 bp, Homo sapien
tgcaactggcacatagaatgtaggggccaggaa

SEQ ID NO: 953968 - DNA, 33 bp, Homo sapien
tgcaactggcacatagtatgtaggggccaggaa

SEQ ID NO: 953969 - DNA, 33 bp, Homo sapien
atgtctcagagaggacaagaaaggtgttcggtg

SEQ ID NO: 953970 - DNA, 33 bp, Homo sapien
atgtctcagagaggacgagaaaggtgttcggtg

SEQ ID NO: 953971 - DNA, 33 bp, Homo sapien
ggtgtttaggaactcacatagtgtgggcttgaa

SEQ ID NO: 953972 - DNA, 33 bp, Homo sapien
ggtgtttaggaactcatatagtgtgggcttgaa

SEQ ID NO: 953973 - DNA, 33 bp, Homo sapien
atgaatctgacctcacagaataacctctcaggt

SEQ ID NO: 953974 - DNA, 33 bp, Homo sapien
atgaatctgacctcacggaataacctctcaggt

SEQ ID NO: 953975 - DNA, 33 bp, Homo sapien
gtggccacgaacccatcagagttacagatcctc

SEQ ID NO: 953976 - DNA, 33 bp, Homo sapien
gtggccacgaacccattagagttacagatcctc

SEQ ID NO: 953977 - DNA, 33 bp, Homo sapien
atctcacctccgacgacgtgaaaatgagtttga

SEQ ID NO: 953978 - DNA, 33 bp, Homo sapien
atctcacctccgacgatgtgaaaatgagtttga

SEQ ID NO: 953979 - DNA, 33 bp, Homo sapien
caaggacacacctgaaagtttgctactctgttc

SEQ ID NO: 953980 - DNA, 33 bp, Homo sapien
caaggacacacctgaatgtttgctactctgttc

SEQ ID NO: 953981 - DNA, 33 bp, Homo sapien
tggccctgggacagcactaagtattagagtctg

SEQ ID NO: 953982 - DNA, 33 bp, Homo sapien
tggccctgggacagcagtaagtattagagtctg

SEQ ID NO: 953983 - DNA, 33 bp, Homo sapien
taaacaggttttttcaagaactgcgagactgtt

SEQ ID NO: 953984 - DNA, 33 bp, Homo sapien
taaacaggttttttcaggaactgcgagactgtt

SEQ ID NO: 953985 - DNA, 33 bp, Homo sapien
agccatcactacaatcaattttaaaatatttca

SEQ ID NO: 953986 - DNA, 33 bp, Homo sapien
agccatcactacaatccattttaaaatatttca

SEQ ID NO: 953987 - DNA, 33 bp, Homo sapien
attgaaaacaataaaaaggtctccttctcagtg

SEQ ID NO: 953988 - DNA, 33 bp, Homo sapien
attgaaaacaataaaagggtctccttctcagtg

SEQ ID NO: 953989 - DNA, 33 bp, Homo sapien
gggaccaccagtgacaagggcaggtctgtgagg

SEQ ID NO: 953990 - DNA, 33 bp, Homo sapien
gggaccaccagtgacaggggcaggtctgtgagg

SEQ ID NO: 953991 - DNA, 33 bp, Homo sapien
ttaggtcagggaacagcacaaagtggtaagatc

SEQ ID NO: 953992 - DNA, 33 bp, Homo sapien
ttaggtcagggaacaggacaaagtggtaagatc

SEQ ID NO: 953993 - DNA, 33 bp, Homo sapien
cgctgggagttcagcacaatagggtgcctccac

SEQ ID NO: 953994 - DNA, 33 bp, Homo sapien
cgctgggagttcagcataatagggtgcctccac

SEQ ID NO: 953995 - DNA, 33 bp, Homo sapien
acaaatccagaaaccccaaactctgaggggcca

SEQ ID NO: 953996 - DNA, 33 bp, Homo sapien
acaaatccagaaaccctaaactctgaggggcca

SEQ ID NO: 953997 - DNA, 33 bp, Homo sapien
aaagctagagttagaagacgccattgagaccat

SEQ ID NO: 953998 - DNA, 33 bp, Homo sapien
aaagctagagttagaatacgccattgagaccat

SEQ ID NO: 953999 - DNA, 33 bp, Homo sapien
tagagtaggatacataaaacaggaagaaatatc

SEQ ID NO: 954000 - DNA, 33 bp, Homo sapien
tagagtaggatacatacaacaggaagaaatatc

SEQ ID NO: 954001 - DNA, 33 bp, Homo sapien
atctaggccccttgcaaacaacaggaacagccc

SEQ ID NO: 954002 - DNA, 33 bp, Homo sapien
atctaggccccttgcagacaacaggaacagccc

SEQ ID NO: 954003 - DNA, 33 bp, Homo sapien
cactagctgatctaaacacaaattctagaattg

SEQ ID NO: 954004 - DNA, 33 bp, Homo sapien
cactagctgatctaaagacaaattctagaattg

SEQ ID NO: 954005 - DNA, 33 bp, Homo sapien
aagggcaaagggctaactgtagcttggggacta

SEQ ID NO: 954006 - DNA, 33 bp, Homo sapien
aagggcaaagggctaattgtagcttggggacta

SEQ ID NO: 954007 - DNA, 33 bp, Homo sapien
agactaaggacaaaataacccagcctgaagtcc

SEQ ID NO: 954008 - DNA, 33 bp, Homo sapien
agactaaggacaaaatgacccagcctgaagtcc

SEQ ID NO: 954009 - DNA, 33 bp, Homo sapien
acctctggcctccttgaattttgcatatcaaca

SEQ ID NO: 954010 - DNA, 33 bp, Homo sapien
acctctggcctccttgcattttgcatatcaaca

SEQ ID NO: 954011 - DNA, 33 bp, Homo sapien
ctgatgaaagctagagacaacacaacaaatgag

SEQ ID NO: 954012 - DNA, 33 bp, Homo sapien
ctgatgaaagctagaggcaacacaacaaatgag

SEQ ID NO: 954013 - DNA, 33 bp, Homo sapien
ctacagtttagaacatcatcaggaaagtgctgc

SEQ ID NO: 954014 - DNA, 33 bp, Homo sapien
ctacagtttagaacatgatcaggaaagtgctgc

SEQ ID NO: 954015 - DNA, 33 bp, Homo sapien
ttgagaaaaaacatctcaatgtcaccaagacca

SEQ ID NO: 954016 - DNA, 33 bp, Homo sapien
ttgagaaaaaacatcttaatgtcaccaagacca

SEQ ID NO: 954017 - DNA, 33 bp, Homo sapien
atcatcgctttgccccaaccctgagtttattgt

SEQ ID NO: 954018 - DNA, 33 bp, Homo sapien
atcatcgctttgcccccaccctgagtttattgt

SEQ ID NO: 954019 - DNA, 33 bp, Homo sapien
tgagatacagtgcctgaatcaacagatattaca

SEQ ID NO: 954020 - DNA, 33 bp, Homo sapien
tgagatacagtgcctggatcaacagatattaca

SEQ ID NO: 954021 - DNA, 33 bp, Homo sapien
ttttataatctgttcccaactgaccaggccatt

SEQ ID NO: 954022 - DNA, 33 bp, Homo sapien
ttttataatctgttcctaactgaccaggccatt

SEQ ID NO: 954023 - DNA, 33 bp, Homo sapien
tcttggggtgaaggacaatacagtgaaggagcc

SEQ ID NO: 954024 - DNA, 33 bp, Homo sapien
tcttggggtgaaggacgatacagtgaaggagcc

SEQ ID NO: 954025 - DNA, 33 bp, Homo sapien
tgcctccagcttccaaatgacagatggtcgttt

SEQ ID NO: 954026 - DNA, 33 bp, Homo sapien
tgcctccagcttccaagtgacagatggtcgttt

SEQ ID NO: 954027 - DNA, 33 bp, Homo sapien
gatgaataaacatagcccctaccttcaaatagt

SEQ ID NO: 954028 - DNA, 33 bp, Homo sapien
gatgaataaacatagctcctaccttcaaatagt

SEQ ID NO: 954029 - DNA, 33 bp, Homo sapien
tgatagagaaaggtataaaagcactattcgaac

SEQ ID NO: 954030 - DNA, 33 bp, Homo sapien
tgatagagaaaggtatgaaagcactattcgaac

SEQ ID NO: 954031 - DNA, 33 bp, Homo sapien
taaattcgttgtagtcccacctgtttaattttg

SEQ ID NO: 954032 - DNA, 33 bp, Homo sapien
taaattcgttgtagtctcacctgtttaattttg

SEQ ID NO: 954033 - DNA, 33 bp, Homo sapien
tgtatccagaaaataaatccctgttccttgact

SEQ ID NO: 954034 - DNA, 33 bp, Homo sapien
tgtatccagaaaataattccctgttccttgact

SEQ ID NO: 954035 - DNA, 33 bp, Homo sapien
cttctggtttcttgtccacccctgccacaaaga

SEQ ID NO: 954036 - DNA, 33 bp, Homo sapien
cttctggtttcttgtctacccctgccacaaaga

SEQ ID NO: 954037 - DNA, 33 bp, Homo sapien
caagtgagtttatgaacagctttgcatgatttt

SEQ ID NO: 954038 - DNA, 33 bp, Homo sapien
caagtgagtttatgaagagctttgcatgatttt

SEQ ID NO: 954039 - DNA, 33 bp, Homo sapien
tggatgccttgccctaaagtacaaatgggtgag

SEQ ID NO: 954040 - DNA, 33 bp, Homo sapien
tggatgccttgccctagagtacaaatgggtgag

SEQ ID NO: 954041 - DNA, 33 bp, Homo sapien
gcttaaaggctcttaaatcttcaaatgagctgg

SEQ ID NO: 954042 - DNA, 33 bp, Homo sapien
gcttaaaggctcttaactcttcaaatgagctgg

SEQ ID NO: 954043 - DNA, 33 bp, Homo sapien
ctgaactattacaaaaacacactatgtggtctc

SEQ ID NO: 954044 - DNA, 33 bp, Homo sapien
ctgaactattacaaaagcacactatgtggtctc

SEQ ID NO: 954045 - DNA, 33 bp, Homo sapien
aggtctgccttcaacaagagaatgtatgaaccg

SEQ ID NO: 954046 - DNA, 33 bp, Homo sapien
aggtctgccttcaacaggagaatgtatgaaccg

SEQ ID NO: 954047 - DNA, 33 bp, Homo sapien
gcaggcacccaaagaacgctcaaatcaccgagt

SEQ ID NO: 954048 - DNA, 33 bp, Homo sapien
gcaggcacccaaagaatgctcaaatcaccgagt

SEQ ID NO: 954049 - DNA, 33 bp, Homo sapien
ctagggtcagtgtaagaatcaaccctggagcac

SEQ ID NO: 954050 - DNA, 33 bp, Homo sapien
ctagggtcagtgtaaggatcaaccctggagcac

SEQ ID NO: 954051 - DNA, 33 bp, Homo sapien
ggaaccgctggtcttacggtagcaaagtcttgc

SEQ ID NO: 954052 - DNA, 33 bp, Homo sapien
ggaaccgctggtcttatggtagcaaagtcttgc

SEQ ID NO: 954053 - DNA, 33 bp, Homo sapien
gaaaagtttaggtctacaaatgaggcataaaat

SEQ ID NO: 954054 - DNA, 33 bp, Homo sapien
gaaaagtttaggtctagaaatgaggcataaaat

SEQ ID NO: 954055 - DNA, 33 bp, Homo sapien
ctcccgtccggaggccacatgaccccatttcct

SEQ ID NO: 954056 - DNA, 33 bp, Homo sapien
ctcccgtccggaggccgcatgaccccatttcct

SEQ ID NO: 954057 - DNA, 33 bp, Homo sapien
atgaatggacaaacaaatgagcggatctcagtg

SEQ ID NO: 954058 - DNA, 33 bp, Homo sapien
atgaatggacaaacaagtgagcggatctcagtg

SEQ ID NO: 954059 - DNA, 33 bp, Homo sapien
gactttggcacccagaaactgaatcctccacag

SEQ ID NO: 954060 - DNA, 33 bp, Homo sapien
gactttggcacccagagactgaatcctccacag

SEQ ID NO: 954061 - DNA, 33 bp, Homo sapien
gtattgcaccatctaacgctacctatgggccac

SEQ ID NO: 954062 - DNA, 33 bp, Homo sapien
gtattgcaccatctaatgctacctatgggccac

SEQ ID NO: 954063 - DNA, 33 bp, Homo sapien
tacatgtaacagcataaaatacctaagacggga

SEQ ID NO: 954064 - DNA, 33 bp, Homo sapien
tacatgtaacagcatagaatacctaagacggga

SEQ ID NO: 954065 - DNA, 33 bp, Homo sapien
gaaactgcaacttgcaaatcagatggtttcttt

SEQ ID NO: 954066 - DNA, 33 bp, Homo sapien
gaaactgcaacttgcagatcagatggtttcttt

SEQ ID NO: 954067 - DNA, 33 bp, Homo sapien
tataagccccttaaagacaagcccatgttttat

SEQ ID NO: 954068 - DNA, 33 bp, Homo sapien
tataagccccttaaaggcaagcccatgttttat

SEQ ID NO: 954069 - DNA, 33 bp, Homo sapien
ggtgggggacactaggccagtccaagccaccat

SEQ ID NO: 954070 - DNA, 33 bp, Homo sapien
ggtgggggacactaggtcagtccaagccaccat

SEQ ID NO: 954071 - DNA, 33 bp, Homo sapien
cttttactccgtgaaaatgtagcaaaacctaat

SEQ ID NO: 954072 - DNA, 33 bp, Homo sapien
cttttactccgtgaaagtgtagcaaaacctaat

SEQ ID NO: 954073 - DNA, 33 bp, Homo sapien
ccgggcactgcatctcacttaatattcaactga

SEQ ID NO: 954074 - DNA, 33 bp, Homo sapien
ccgggcactgcatctcgcttaatattcaactga

SEQ ID NO: 954075 - DNA, 33 bp, Homo sapien
ttcccagcagtctttacggaaggctcttctgct

SEQ ID NO: 954076 - DNA, 33 bp, Homo sapien
ttcccagcagtctttatggaaggctcttctgct

SEQ ID NO: 954077 - DNA, 33 bp, Homo sapien
ttttttcatgaaaatgaatcctgttgttctatc

SEQ ID NO: 954078 - DNA, 33 bp, Homo sapien
ttttttcatgaaaatgcatcctgttgttctatc

SEQ ID NO: 954079 - DNA, 33 bp, Homo sapien
gaagatgggctaattcacatgatccctttaatg

SEQ ID NO: 954080 - DNA, 33 bp, Homo sapien
gaagatgggctaattcgcatgatccctttaatg

SEQ ID NO: 954081 - DNA, 33 bp, Homo sapien
tcaaacaggagtctccagccaggtctttgggaa

SEQ ID NO: 954082 - DNA, 33 bp, Homo sapien
tcaaacaggagtctccggccaggtctttgggaa

SEQ ID NO: 954083 - DNA, 33 bp, Homo sapien
gatggaattggaggaacgtggaccctggagtct

SEQ ID NO: 954084 - DNA, 33 bp, Homo sapien
gatggaattggaggaatgtggaccctggagtct

SEQ ID NO: 954085 - DNA, 33 bp, Homo sapien
tgtttaatttccctcacggcattttacacttat

SEQ ID NO: 954086 - DNA, 33 bp, Homo sapien
tgtttaatttccctcatggcattttacacttat

SEQ ID NO: 954087 - DNA, 33 bp, Homo sapien
tggagtcccttatataacagcacaaatcccatt

SEQ ID NO: 954088 - DNA, 33 bp, Homo sapien
tggagtcccttatatatcagcacaaatcccatt

SEQ ID NO: 954089 - DNA, 33 bp, Homo sapien
tacctgtatggagtgaaaaaaagacaccacagt

SEQ ID NO: 954090 - DNA, 33 bp, Homo sapien
tacctgtatggagtgagaaaaagacaccacagt

SEQ ID NO: 954091 - DNA, 33 bp, Homo sapien
gtgtatttgtgggtaacagtttgtgtgtgtagg

SEQ ID NO: 954092 - DNA, 33 bp, Homo sapien
gtgtatttgtgggtaagagtttgtgtgtgtagg

SEQ ID NO: 954093 - DNA, 33 bp, Homo sapien
caagtgtttgtctaaaaaaacagaatgtagaca

SEQ ID NO: 954094 - DNA, 33 bp, Homo sapien
caagtgtttgtctaaagaaacagaatgtagaca

SEQ ID NO: 954095 - DNA, 33 bp, Homo sapien
ctcctctgtggggtaaaagccttgccatagaga

SEQ ID NO: 954096 - DNA, 33 bp, Homo sapien
ctcctctgtggggtaagagccttgccatagaga

SEQ ID NO: 954097 - DNA, 33 bp, Homo sapien
agactcctttgtgtaactgcttgatgaaacatt

SEQ ID NO: 954098 - DNA, 33 bp, Homo sapien
agactcctttgtgtaattgcttgatgaaacatt

SEQ ID NO: 954099 - DNA, 33 bp, Homo sapien
ttaactagatgtcacccggatgaagatcaaagg

SEQ ID NO: 954100 - DNA, 33 bp, Homo sapien
ttaactagatgtcacctggatgaagatcaaagg

SEQ ID NO: 954101 - DNA, 33 bp, Homo sapien
tcactttaacaaagaacgcgaggagacagcctc

SEQ ID NO: 954102 - DNA, 33 bp, Homo sapien
tcactttaacaaagaaggcgaggagacagcctc

SEQ ID NO: 954103 - DNA, 33 bp, Homo sapien
tggagctgtcacagcaaaagaagagaaggaacc

SEQ ID NO: 954104 - DNA, 33 bp, Homo sapien
tggagctgtcacagcacaagaagagaaggaacc

SEQ ID NO: 954105 - DNA, 33 bp, Homo sapien
ttgttagaacaatggacacactttctagggatt

SEQ ID NO: 954106 - DNA, 33 bp, Homo sapien
ttgttagaacaatggagacactttctagggatt

SEQ ID NO: 954107 - DNA, 33 bp, Homo sapien
tcatctccatgtcccaagagtctggctgaataa

SEQ ID NO: 954108 - DNA, 33 bp, Homo sapien
tcatctccatgtcccaggagtctggctgaataa

SEQ ID NO: 954109 - DNA, 33 bp, Homo sapien
gaaggagtgataccacaaaggtcatacagctga

SEQ ID NO: 954110 - DNA, 33 bp, Homo sapien
gaaggagtgataccaccaaggtcatacagctga

SEQ ID NO: 954111 - DNA, 33 bp, Homo sapien
gaaacatctgcaggaacgaacttggagacagaa

SEQ ID NO: 954112 - DNA, 33 bp, Homo sapien
gaaacatctgcaggaatgaacttggagacagaa

SEQ ID NO: 954113 - DNA, 33 bp, Homo sapien
taagatataattaaaacctgaggcccttcacca

SEQ ID NO: 954114 - DNA, 33 bp, Homo sapien
taagatataattaaaatctgaggcccttcacca

SEQ ID NO: 954115 - DNA, 33 bp, Homo sapien
cattcaggacagtgcaacaataacttgggtaga

SEQ ID NO: 954116 - DNA, 33 bp, Homo sapien
cattcaggacagtgcagcaataacttgggtaga

SEQ ID NO: 954117 - DNA, 33 bp, Homo sapien
acagttgtatcttccaatctttcgcgttcattt

SEQ ID NO: 954118 - DNA, 33 bp, Homo sapien
acagttgtatcttccagtctttcgcgttcattt

SEQ ID NO: 954119 - DNA, 33 bp, Homo sapien
aaacatctatctgctaccttggttaacctgctg

SEQ ID NO: 954120 - DNA, 33 bp, Homo sapien
aaacatctatctgctatcttggttaacctgctg

SEQ ID NO: 954121 - DNA, 33 bp, Homo sapien
ctgagccactcacttcaatcggccctttccgct

SEQ ID NO: 954122 - DNA, 33 bp, Homo sapien
ctgagccactcacttcgatcggccctttccgct

SEQ ID NO: 954123 - DNA, 33 bp, Homo sapien
ataaatcgagtatccacgctcctttcaggggat

SEQ ID NO: 954124 - DNA, 33 bp, Homo sapien
ataaatcgagtatccatgctcctttcaggggat

SEQ ID NO: 954125 - DNA, 33 bp, Homo sapien
gctcggaacactccgccgagaatgacttttgga

SEQ ID NO: 954126 - DNA, 33 bp, Homo sapien
gctcggaacactccgcggagaatgacttttgga

SEQ ID NO: 954127 - DNA, 33 bp, Homo sapien
cagttatgaagaaaagacatatggggatttaga

SEQ ID NO: 954128 - DNA, 33 bp, Homo sapien
cagttatgaagaaaaggcatatggggatttaga

SEQ ID NO: 954129 - DNA, 33 bp, Homo sapien
tatttcgagacctggaaaacgttctgatttttt

SEQ ID NO: 954130 - DNA, 33 bp, Homo sapien
tatttcgagacctggacaacgttctgatttttt

SEQ ID NO: 954131 - DNA, 33 bp, Homo sapien
cacgtccacattttacacagagaccaaaaaatc

SEQ ID NO: 954132 - DNA, 33 bp, Homo sapien
cacgtccacattttacccagagaccaaaaaatc

SEQ ID NO: 954133 - DNA, 33 bp, Homo sapien
tgggaggcctgagccacagtgtgtggaatggag

SEQ ID NO: 954134 - DNA, 33 bp, Homo sapien
tgggaggcctgagccatagtgtgtggaatggag

SEQ ID NO: 954135 - DNA, 33 bp, Homo sapien
cccaaagatggagtcaaagcaccccccgagcag

SEQ ID NO: 954136 - DNA, 33 bp, Homo sapien
cccaaagatggagtcagagcaccccccgagcag

SEQ ID NO: 954137 - DNA, 33 bp, Homo sapien
agacagagcgggtacaacagggtgcttgaacaa

SEQ ID NO: 954138 - DNA, 33 bp, Homo sapien
agacagagcgggtacagcagggtgcttgaacaa

SEQ ID NO: 954139 - DNA, 33 bp, Homo sapien
agaacaaaaagataaactgagaatggctattag

SEQ ID NO: 954140 - DNA, 33 bp, Homo sapien
agaacaaaaagataaattgagaatggctattag

SEQ ID NO: 954141 - DNA, 33 bp, Homo sapien
tctaagtctcttcttgcaactgccatgaattag

SEQ ID NO: 954142 - DNA, 33 bp, Homo sapien
tctaagtctcttcttgtaactgccatgaattag

SEQ ID NO: 954143 - DNA, 33 bp, Homo sapien
ctgcctaatgtccacaactttggagaattcacc

SEQ ID NO: 954144 - DNA, 33 bp, Homo sapien
ctgcctaatgtccacagctttggagaattcacc

SEQ ID NO: 954145 - DNA, 33 bp, Homo sapien
tgagtttccacaaatacagaatgtttctaagac

SEQ ID NO: 954146 - DNA, 33 bp, Homo sapien
tgagtttccacaaatatagaatgtttctaagac

SEQ ID NO: 954147 - DNA, 33 bp, Homo sapien
tatttattatcttcgcagaaccttggccgggag

SEQ ID NO: 954148 - DNA, 33 bp, Homo sapien
tatttattatcttcgcggaaccttggccgggag

SEQ ID NO: 954149 - DNA, 33 bp, Homo sapien
tctttatctgcaaaaacgctgtttggattaaag

SEQ ID NO: 954150 - DNA, 33 bp, Homo sapien
tctttatctgcaaaaatgctgtttggattaaag

SEQ ID NO: 954151 - DNA, 33 bp, Homo sapien
ccattctggactcagaacctagaatcagtcacc

SEQ ID NO: 954152 - DNA, 33 bp, Homo sapien
ccattctggactcagagcctagaatcagtcacc

SEQ ID NO: 954153 - DNA, 33 bp, Homo sapien
agttctgtgtaggttacctcttgatgccccaat

SEQ ID NO: 954154 - DNA, 33 bp, Homo sapien
agttctgtgtaggttatctcttgatgccccaat

SEQ ID NO: 954155 - DNA, 33 bp, Homo sapien
cgagtggttaaacaaacggtggcacctccattc

SEQ ID NO: 954156 - DNA, 33 bp, Homo sapien
cgagtggttaaacaaatggtggcacctccattc

SEQ ID NO: 954157 - DNA, 33 bp, Homo sapien
ggcaaaatatgtgctacataaagatcactttct

SEQ ID NO: 954158 - DNA, 33 bp, Homo sapien
ggcaaaatatgtgctatataaagatcactttct

SEQ ID NO: 954159 - DNA, 33 bp, Homo sapien
gttgaaggggcacagcagcaatccattctacaa

SEQ ID NO: 954160 - DNA, 33 bp, Homo sapien
gttgaaggggcacagcggcaatccattctacaa

SEQ ID NO: 954161 - DNA, 33 bp, Homo sapien
attgaaatcattaatacccacaaacaaatgtgt

SEQ ID NO: 954162 - DNA, 33 bp, Homo sapien
attgaaatcattaatagccacaaacaaatgtgt

SEQ ID NO: 954163 - DNA, 33 bp, Homo sapien
gtgaggataggcattgacaatctaacagacttt

SEQ ID NO: 954164 - DNA, 33 bp, Homo sapien
gtgaggataggcattggcaatctaacagacttt

SEQ ID NO: 954165 - DNA, 33 bp, Homo sapien
ataggtgagtaagtaacgccattttctagcagg

SEQ ID NO: 954166 - DNA, 33 bp, Homo sapien
ataggtgagtaagtaatgccattttctagcagg

SEQ ID NO: 954167 - DNA, 33 bp, Homo sapien
taactatattgccataaaagtagtaatacttat

SEQ ID NO: 954168 - DNA, 33 bp, Homo sapien
taactatattgccatagaagtagtaatacttat

SEQ ID NO: 954169 - DNA, 33 bp, Homo sapien
caaacatatctggccagaaaacccaggcaaaaa

SEQ ID NO: 954170 - DNA, 33 bp, Homo sapien
caaacatatctggccataaaacccaggcaaaaa

SEQ ID NO: 954171 - DNA, 33 bp, Homo sapien
cttaccacatttatatcagcctgtttctatagg

SEQ ID NO: 954172 - DNA, 33 bp, Homo sapien
cttaccacatttatattagcctgtttctatagg

SEQ ID NO: 954173 - DNA, 33 bp, Homo sapien
atgtggtaagtaataacggttgccatgtgcctg

SEQ ID NO: 954174 - DNA, 33 bp, Homo sapien
atgtggtaagtaataatggttgccatgtgcctg

SEQ ID NO: 954175 - DNA, 33 bp, Homo sapien
ttggagtgtgagtaccggccctaaatgatcact

SEQ ID NO: 954176 - DNA, 33 bp, Homo sapien
ttggagtgtgagtacctgccctaaatgatcact

SEQ ID NO: 954177 - DNA, 33 bp, Homo sapien
ttgattttcagaggtgcaataattagatttaat

SEQ ID NO: 954178 - DNA, 33 bp, Homo sapien
ttgattttcagaggtgtaataattagatttaat

SEQ ID NO: 954179 - DNA, 33 bp, Homo sapien
tcccagtttgtagatgcaaattgcaagatcaca

SEQ ID NO: 954180 - DNA, 33 bp, Homo sapien
tcccagtttgtagatgtaaattgcaagatcaca

SEQ ID NO: 954181 - DNA, 33 bp, Homo sapien
ggctttgacctaaagaccttcatccctaaatcc

SEQ ID NO: 954182 - DNA, 33 bp, Homo sapien
ggctttgacctaaagagcttcatccctaaatcc

SEQ ID NO: 954183 - DNA, 33 bp, Homo sapien
ctccataacctctaggacaccttccagctcttg

SEQ ID NO: 954184 - DNA, 33 bp, Homo sapien
ctccataacctctagggcaccttccagctcttg

SEQ ID NO: 954185 - DNA, 33 bp, Homo sapien
tcctgggtcttcacaccgatgactaatgggccg

SEQ ID NO: 954186 - DNA, 33 bp, Homo sapien
tcctgggtcttcacactgatgactaatgggccg

SEQ ID NO: 954187 - DNA, 33 bp, Homo sapien
cttttctgtttatagggaatagtgctaggaaat

SEQ ID NO: 954188 - DNA, 33 bp, Homo sapien
cttttctgtttataggtaatagtgctaggaaat

SEQ ID NO: 954189 - DNA, 33 bp, Homo sapien
tcaatgttccaagagcaagtgttccaacaagca

SEQ ID NO: 954190 - DNA, 33 bp, Homo sapien
tcaatgttccaagagcgagtgttccaacaagca

SEQ ID NO: 954191 - DNA, 33 bp, Homo sapien
gacgtgctcaaaaatcaataattttatgtggac

SEQ ID NO: 954192 - DNA, 33 bp, Homo sapien
gacgtgctcaaaaatccataattttatgtggac

SEQ ID NO: 954193 - DNA, 33 bp, Homo sapien
aaactaaggagctacaaaaaggatggtggcata

SEQ ID NO: 954194 - DNA, 33 bp, Homo sapien
aaactaaggagctacagaaaggatggtggcata

SEQ ID NO: 954195 - DNA, 33 bp, Homo sapien
ctgaagaggcatcagcaaagggtgtgaaccagg

SEQ ID NO: 954196 - DNA, 33 bp, Homo sapien
ctgaagaggcatcagcgaagggtgtgaaccagg

SEQ ID NO: 954197 - DNA, 33 bp, Homo sapien
aacacttgatgtaacaaaaactcaataagttat

SEQ ID NO: 954198 - DNA, 33 bp, Homo sapien
aacacttgatgtaacacaaactcaataagttat

SEQ ID NO: 954199 - DNA, 33 bp, Homo sapien
ccacgtgccaggcctaataatcaaaatcatgcc

SEQ ID NO: 954200 - DNA, 33 bp, Homo sapien
ccacgtgccaggcctactaatcaaaatcatgcc

SEQ ID NO: 954201 - DNA, 33 bp, Homo sapien
agtttcacatgaataaagagtgtgtagagtgga

SEQ ID NO: 954202 - DNA, 33 bp, Homo sapien
agtttcacatgaataaggagtgtgtagagtgga

SEQ ID NO: 954203 - DNA, 33 bp, Homo sapien
tggaatcagggctgtgaaaaagcttataatggg

SEQ ID NO: 954204 - DNA, 33 bp, Homo sapien
tggaatcagggctgtggaaaagcttataatggg

SEQ ID NO: 954205 - DNA, 33 bp, Homo sapien
catgatctatccttcaaactaggacaattctga

SEQ ID NO: 954206 - DNA, 33 bp, Homo sapien
catgatctatccttcagactaggacaattctga

SEQ ID NO: 954207 - DNA, 33 bp, Homo sapien
tggtcctgcaagaaaaacgcaaaaccagctggc

SEQ ID NO: 954208 - DNA, 33 bp, Homo sapien
tggtcctgcaagaaaatcgcaaaaccagctggc

SEQ ID NO: 954209 - DNA, 33 bp, Homo sapien
tggaggtgtcaccaagcaaagaacatgaaatgg

SEQ ID NO: 954210 - DNA, 33 bp, Homo sapien
tggaggtgtcaccaaggaaagaacatgaaatgg

SEQ ID NO: 954211 - DNA, 33 bp, Homo sapien
taagacaacgtgtctaaaccaagatgagtgaga

SEQ ID NO: 954212 - DNA, 33 bp, Homo sapien
taagacaacgtgtctagaccaagatgagtgaga

SEQ ID NO: 954213 - DNA, 33 bp, Homo sapien
taaggaagtgctttgccatctgtaagtcttcct

SEQ ID NO: 954214 - DNA, 33 bp, Homo sapien
taaggaagtgctttgctatctgtaagtcttcct

SEQ ID NO: 954215 - DNA, 33 bp, Homo sapien
cactgcttactatgagcccacaaagatttaaca

SEQ ID NO: 954216 - DNA, 33 bp, Homo sapien
cactgcttactatgagtccacaaagatttaaca

SEQ ID NO: 954217 - DNA, 33 bp, Homo sapien
tacacaaggaaagaaaacatctcatcatgcaaa

SEQ ID NO: 954218 - DNA, 33 bp, Homo sapien
tacacaaggaaagaaatcatctcatcatgcaaa

SEQ ID NO: 954219 - DNA, 33 bp, Homo sapien
tctgcttcaggtctcaaataggtcaaatatact

SEQ ID NO: 954220 - DNA, 33 bp, Homo sapien
tctgcttcaggtctcagataggtcaaatatact

SEQ ID NO: 954221 - DNA, 33 bp, Homo sapien
tcaggagagcctcaaacgtcctctggagcttca

SEQ ID NO: 954222 - DNA, 33 bp, Homo sapien
tcaggagagcctcaaatgtcctctggagcttca

SEQ ID NO: 954223 - DNA, 33 bp, Homo sapien
atctcagaagactaggacccagattatctaaca

SEQ ID NO: 954224 - DNA, 33 bp, Homo sapien
atctcagaagactagggcccagattatctaaca

SEQ ID NO: 954225 - DNA, 33 bp, Homo sapien
aagaaaaaaaaaatcccatgactagccacaaaa

SEQ ID NO: 954226 - DNA, 33 bp, Homo sapien
aagaaaaaaaaaatcctatgactagccacaaaa

SEQ ID NO: 954227 - DNA, 33 bp, Homo sapien
gggaacggagcactagcctaagagaaaagccaa

SEQ ID NO: 954228 - DNA, 33 bp, Homo sapien
gggaacggagcactagtctaagagaaaagccaa

SEQ ID NO: 954229 - DNA, 33 bp, Homo sapien
cccctgttaaacaggagtacaaatatcttgcaa

SEQ ID NO: 954230 - DNA, 33 bp, Homo sapien
cccctgttaaacaggattacaaatatcttgcaa

SEQ ID NO: 954231 - DNA, 33 bp, Homo sapien
attatttttgtgctaactcacaatgtattattg

SEQ ID NO: 954232 - DNA, 33 bp, Homo sapien
attatttttgtgctaattcacaatgtattattg

SEQ ID NO: 954233 - DNA, 33 bp, Homo sapien
taaggcacttgagcatgatgccatatttcctca

SEQ ID NO: 954234 - DNA, 33 bp, Homo sapien
taaggcacttgagcattatgccatatttcctca

SEQ ID NO: 954235 - DNA, 33 bp, Homo sapien
cactcctcaattactcactaggtacactgtcta

SEQ ID NO: 954236 - DNA, 33 bp, Homo sapien
cactcctcaattactcgctaggtacactgtcta

SEQ ID NO: 954237 - DNA, 33 bp, Homo sapien
tgcatttgtgaatgaaaggttgttgtgtactat

SEQ ID NO: 954238 - DNA, 33 bp, Homo sapien
tgcatttgtgaatgaacggttgttgtgtactat

SEQ ID NO: 954239 - DNA, 33 bp, Homo sapien
gctcagtgatatcacaacccagatggcttctct

SEQ ID NO: 954240 - DNA, 33 bp, Homo sapien
gctcagtgatatcacagcccagatggcttctct

SEQ ID NO: 954241 - DNA, 33 bp, Homo sapien
actttcaaatggaatggacaggactttatcaga

SEQ ID NO: 954242 - DNA, 33 bp, Homo sapien
actttcaaatggaatgtacaggactttatcaga

SEQ ID NO: 954243 - DNA, 33 bp, Homo sapien
aagcagtggttgcttcaaactccatgttatttt

SEQ ID NO: 954244 - DNA, 33 bp, Homo sapien
aagcagtggttgcttccaactccatgttatttt

SEQ ID NO: 954245 - DNA, 33 bp, Homo sapien
ttaagccctttacaccaacctacactttcttct

SEQ ID NO: 954246 - DNA, 33 bp, Homo sapien
ttaagccctttacacctacctacactttcttct

SEQ ID NO: 954247 - DNA, 33 bp, Homo sapien
tgtgatgtgacattcacagaagccaagagaagg

SEQ ID NO: 954248 - DNA, 33 bp, Homo sapien
tgtgatgtgacattcagagaagccaagagaagg

SEQ ID NO: 954249 - DNA, 33 bp, Homo sapien
ggcatgaataagagaacgatgaggtggctgttt

SEQ ID NO: 954250 - DNA, 33 bp, Homo sapien
ggcatgaataagagaatgatgaggtggctgttt

SEQ ID NO: 954251 - DNA, 33 bp, Homo sapien
tggcaacgtgggagacaaaggcatgaataagag

SEQ ID NO: 954252 - DNA, 33 bp, Homo sapien
tggcaacgtgggagacgaaggcatgaataagag

SEQ ID NO: 954253 - DNA, 33 bp, Homo sapien
ggaggtagatttcacaagaccttgaattccagg

SEQ ID NO: 954254 - DNA, 33 bp, Homo sapien
ggaggtagatttcacaggaccttgaattccagg

SEQ ID NO: 954255 - DNA, 33 bp, Homo sapien
gggatatccaggaccactgcgttggaagagggt

SEQ ID NO: 954256 - DNA, 33 bp, Homo sapien
gggatatccaggaccattgcgttggaagagggt

SEQ ID NO: 954257 - DNA, 33 bp, Homo sapien
cttgcccacgcagaaacactccctaaccttcac

SEQ ID NO: 954258 - DNA, 33 bp, Homo sapien
cttgcccacgcagaaatactccctaaccttcac

SEQ ID NO: 954259 - DNA, 33 bp, Homo sapien
tatttccaggcattcacagactgtagtttctgc

SEQ ID NO: 954260 - DNA, 33 bp, Homo sapien
tatttccaggcattcatagactgtagtttctgc

SEQ ID NO: 954261 - DNA, 33 bp, Homo sapien
attcctcaagatggaacgttaaataatgctgca

SEQ ID NO: 954262 - DNA, 33 bp, Homo sapien
attcctcaagatggaatgttaaataatgctgca

SEQ ID NO: 954263 - DNA, 33 bp, Homo sapien
aaatagtagttagaacactggctttcttcccca

SEQ ID NO: 954264 - DNA, 33 bp, Homo sapien
aaatagtagttagaacgctggctttcttcccca

SEQ ID NO: 954265 - DNA, 33 bp, Homo sapien
gggttgagtcagacaactgctgggtagctagga

SEQ ID NO: 954266 - DNA, 33 bp, Homo sapien
gggttgagtcagacaattgctgggtagctagga

SEQ ID NO: 954267 - DNA, 33 bp, Homo sapien
gaggtcatctagtgagcccaccttcccttccct

SEQ ID NO: 954268 - DNA, 33 bp, Homo sapien
gaggtcatctagtgagtccaccttcccttccct

SEQ ID NO: 954269 - DNA, 33 bp, Homo sapien
tttgcagaccattccagtcatagccatctctcc

SEQ ID NO: 954270 - DNA, 33 bp, Homo sapien
tttgcagaccattccattcatagccatctctcc

SEQ ID NO: 954271 - DNA, 33 bp, Homo sapien
aagtcattgccaaacacatccagaaggggatgt

SEQ ID NO: 954272 - DNA, 33 bp, Homo sapien
aagtcattgccaaacagatccagaaggggatgt

SEQ ID NO: 954273 - DNA, 33 bp, Homo sapien
aactggcctttggctccgactgcttatgcacat

SEQ ID NO: 954274 - DNA, 33 bp, Homo sapien
aactggcctttggctctgactgcttatgcacat

SEQ ID NO: 954275 - DNA, 33 bp, Homo sapien
ggatcgatatggcacaaaatggaaagggagaga

SEQ ID NO: 954276 - DNA, 33 bp, Homo sapien
ggatcgatatggcacagaatggaaagggagaga

SEQ ID NO: 954277 - DNA, 33 bp, Homo sapien
gaggcacagctcgtaaatacacacgtgctcacc

SEQ ID NO: 954278 - DNA, 33 bp, Homo sapien
gaggcacagctcgtaagtacacacgtgctcacc

SEQ ID NO: 954279 - DNA, 33 bp, Homo sapien
tgaccgaagttgcttacaaagttgtaggagctc

SEQ ID NO: 954280 - DNA, 33 bp, Homo sapien
tgaccgaagttgcttataaagttgtaggagctc

SEQ ID NO: 954281 - DNA, 33 bp, Homo sapien
gtggtagatacttggcccaagctggaaatgcct

SEQ ID NO: 954282 - DNA, 33 bp, Homo sapien
gtggtagatacttggctcaagctggaaatgcct

SEQ ID NO: 954283 - DNA, 33 bp, Homo sapien
gcaggaaaatgattcacagaagactcgtcccag

SEQ ID NO: 954284 - DNA, 33 bp, Homo sapien
gcaggaaaatgattcagagaagactcgtcccag

SEQ ID NO: 954285 - DNA, 33 bp, Homo sapien
gagatttaggagcagacaggattaattctgaat

SEQ ID NO: 954286 - DNA, 33 bp, Homo sapien
gagatttaggagcagagaggattaattctgaat

SEQ ID NO: 954287 - DNA, 33 bp, Homo sapien
aggcctgtggaatcgccaagctcccagaatgca

SEQ ID NO: 954288 - DNA, 33 bp, Homo sapien
aggcctgtggaatcgcgaagctcccagaatgca

SEQ ID NO: 954289 - DNA, 33 bp, Homo sapien
gtaaatagaaatcagcccagggaaacacataat

SEQ ID NO: 954290 - DNA, 33 bp, Homo sapien
gtaaatagaaatcagctcagggaaacacataat

SEQ ID NO: 954291 - DNA, 33 bp, Homo sapien
ttccaggtttaaggcaagactataaattaaagc

SEQ ID NO: 954292 - DNA, 33 bp, Homo sapien
ttccaggtttaaggcatgactataaattaaagc

SEQ ID NO: 954293 - DNA, 33 bp, Homo sapien
cactgggctgtcagtaagaaccatattttagac

SEQ ID NO: 954294 - DNA, 33 bp, Homo sapien
cactgggctgtcagtaggaaccatattttagac

SEQ ID NO: 954295 - DNA, 33 bp, Homo sapien
agtccatcacactgtcacccaaaggaatacagt

SEQ ID NO: 954296 - DNA, 33 bp, Homo sapien
agtccatcacactgtcgcccaaaggaatacagt

SEQ ID NO: 954297 - DNA, 33 bp, Homo sapien
agagttgtgcaccccaatagtctcattttagga

SEQ ID NO: 954298 - DNA, 33 bp, Homo sapien
agagttgtgcaccccattagtctcattttagga

SEQ ID NO: 954299 - DNA, 33 bp, Homo sapien
agacttgctcctaccaaaagtgtctatgtgatc

SEQ ID NO: 954300 - DNA, 33 bp, Homo sapien
agacttgctcctaccagaagtgtctatgtgatc

SEQ ID NO: 954301 - DNA, 33 bp, Homo sapien
tccagtcaacagatggccaaggtctcagcccgg

SEQ ID NO: 954302 - DNA, 33 bp, Homo sapien
tccagtcaacagatggtcaaggtctcagcccgg

SEQ ID NO: 954303 - DNA, 33 bp, Homo sapien
gtagagaaacagactcaatcttttttaggacag

SEQ ID NO: 954304 - DNA, 33 bp, Homo sapien
gtagagaaacagactccatcttttttaggacag

SEQ ID NO: 954305 - DNA, 33 bp, Homo sapien
agggtcaccacagtccacaagggggccacatgg

SEQ ID NO: 954306 - DNA, 33 bp, Homo sapien
agggtcaccacagtccgcaagggggccacatgg

SEQ ID NO: 954307 - DNA, 33 bp, Homo sapien
ctgtggggatatccgacagttacagcagaacta

SEQ ID NO: 954308 - DNA, 33 bp, Homo sapien
ctgtggggatatccgagagttacagcagaacta

SEQ ID NO: 954309 - DNA, 33 bp, Homo sapien
atcagccaacctcacaatgagtatctagggtag

SEQ ID NO: 954310 - DNA, 33 bp, Homo sapien
atcagccaacctcacagtgagtatctagggtag

SEQ ID NO: 954311 - DNA, 33 bp, Homo sapien
tgacctttggacacccggcattgaatgattcag

SEQ ID NO: 954312 - DNA, 33 bp, Homo sapien
tgacctttggacaccctgcattgaatgattcag

SEQ ID NO: 954313 - DNA, 33 bp, Homo sapien
acaacatattgatcacagattccaggcagctga

SEQ ID NO: 954314 - DNA, 33 bp, Homo sapien
acaacatattgatcaccgattccaggcagctga

SEQ ID NO: 954315 - DNA, 33 bp, Homo sapien
gagccttgctcaggccacgaacagagttaggtg

SEQ ID NO: 954316 - DNA, 33 bp, Homo sapien
gagccttgctcaggccgcgaacagagttaggtg

SEQ ID NO: 954317 - DNA, 33 bp, Homo sapien
ggcttttactgtgacaatcactcaaatagtgta

SEQ ID NO: 954318 - DNA, 33 bp, Homo sapien
ggcttttactgtgacagtcactcaaatagtgta

SEQ ID NO: 954319 - DNA, 33 bp, Homo sapien
gaatgaagtgtttggaaaccatagctgcttttt

SEQ ID NO: 954320 - DNA, 33 bp, Homo sapien
gaatgaagtgtttggagaccatagctgcttttt

SEQ ID NO: 954321 - DNA, 33 bp, Homo sapien
ctgctgatgttcactacctacaggaaacctttg

SEQ ID NO: 954322 - DNA, 33 bp, Homo sapien
ctgctgatgttcactagctacaggaaacctttg

SEQ ID NO: 954323 - DNA, 33 bp, Homo sapien
caaagaagatacgccacgggaaagtacttcggc

SEQ ID NO: 954324 - DNA, 33 bp, Homo sapien
caaagaagatacgccatgggaaagtacttcggc

SEQ ID NO: 954325 - DNA, 33 bp, Homo sapien
ctcgggggaggtgtagccattctcaaaaaggct

SEQ ID NO: 954326 - DNA, 33 bp, Homo sapien
ctcgggggaggtgtagtcattctcaaaaaggct

SEQ ID NO: 954327 - DNA, 33 bp, Homo sapien
agaattgtaaagaaaacgtcatcatgtgatcaa

SEQ ID NO: 954328 - DNA, 33 bp, Homo sapien
agaattgtaaagaaaaggtcatcatgtgatcaa

SEQ ID NO: 954329 - DNA, 33 bp, Homo sapien
gaaagctccacatcaactggattcccacttctt

SEQ ID NO: 954330 - DNA, 33 bp, Homo sapien
gaaagctccacatcaattggattcccacttctt

SEQ ID NO: 954331 - DNA, 33 bp, Homo sapien
ttttgagtcagagagacgtgaattcagtgttcg

SEQ ID NO: 954332 - DNA, 33 bp, Homo sapien
ttttgagtcagagagatgtgaattcagtgttcg

SEQ ID NO: 954333 - DNA, 33 bp, Homo sapien
ctctgcggtgttcaaaaggtgttgaaattgtct

SEQ ID NO: 954334 - DNA, 33 bp, Homo sapien
ctctgcggtgttcaaagggtgttgaaattgtct

SEQ ID NO: 954335 - DNA, 33 bp, Homo sapien
ctgagcttttcaagagaagggtctgtgtctgct

SEQ ID NO: 954336 - DNA, 33 bp, Homo sapien
ctgagcttttcaagagtagggtctgtgtctgct

SEQ ID NO: 954337 - DNA, 33 bp, Homo sapien
taggactgttctaaaacgacctatgaacaggga

SEQ ID NO: 954338 - DNA, 33 bp, Homo sapien
taggactgttctaaaatgacctatgaacaggga

SEQ ID NO: 954339 - DNA, 33 bp, Homo sapien
ggtaaataaaggtaagcctcaaactcgaagaat

SEQ ID NO: 954340 - DNA, 33 bp, Homo sapien
ggtaaataaaggtaagtctcaaactcgaagaat

SEQ ID NO: 954341 - DNA, 33 bp, Homo sapien
acaaagaattgttttaaggacatgcttatgctg

SEQ ID NO: 954342 - DNA, 33 bp, Homo sapien
acaaagaattgttttagggacatgcttatgctg

SEQ ID NO: 954343 - DNA, 33 bp, Homo sapien
ttcttgcactcaactacgtacagtaaaactcac

SEQ ID NO: 954344 - DNA, 33 bp, Homo sapien
ttcttgcactcaactatgtacagtaaaactcac

SEQ ID NO: 954345 - DNA, 33 bp, Homo sapien
acctttatcaccagtacgaagctctcaagaata

SEQ ID NO: 954346 - DNA, 33 bp, Homo sapien
acctttatcaccagtaggaagctctcaagaata

SEQ ID NO: 954347 - DNA, 33 bp, Homo sapien
aaatgattagacagaacaggtgcctaacgctcc

SEQ ID NO: 954348 - DNA, 33 bp, Homo sapien
aaatgattagacagaataggtgcctaacgctcc

SEQ ID NO: 954349 - DNA, 33 bp, Homo sapien
tggaaaacttaaaagcaaagagttcctgagtgc

SEQ ID NO: 954350 - DNA, 33 bp, Homo sapien
tggaaaacttaaaagcgaagagttcctgagtgc

SEQ ID NO: 954351 - DNA, 33 bp, Homo sapien
aagattggttaacagaggacactattttacact

SEQ ID NO: 954352 - DNA, 33 bp, Homo sapien
aagattggttaacagatgacactattttacact

SEQ ID NO: 954353 - DNA, 33 bp, Homo sapien
agttaagcaggtgatgaaaagcaaagataagtc

SEQ ID NO: 954354 - DNA, 33 bp, Homo sapien
agttaagcaggtgatgcaaagcaaagataagtc

SEQ ID NO: 954355 - DNA, 33 bp, Homo sapien
taaataaataaatcccaaatcacaaactccaga

SEQ ID NO: 954356 - DNA, 33 bp, Homo sapien
taaataaataaatcccgaatcacaaactccaga

SEQ ID NO: 954357 - DNA, 33 bp, Homo sapien
ttctcacatttccatacgcttttatatttatat

SEQ ID NO: 954358 - DNA, 33 bp, Homo sapien
ttctcacatttccatatgcttttatatttatat

SEQ ID NO: 954359 - DNA, 33 bp, Homo sapien
agagatgatgctgaaactgaatatggaaagtta

SEQ ID NO: 954360 - DNA, 33 bp, Homo sapien
agagatgatgctgaaattgaatatggaaagtta

SEQ ID NO: 954361 - DNA, 33 bp, Homo sapien
tcctgcataaacagaaagaacaggtaggttcac

SEQ ID NO: 954362 - DNA, 33 bp, Homo sapien
tcctgcataaacagaaggaacaggtaggttcac

SEQ ID NO: 954363 - DNA, 33 bp, Homo sapien
atgagcgattaagtgcaattttgatgtagggaa

SEQ ID NO: 954364 - DNA, 33 bp, Homo sapien
atgagcgattaagtgcgattttgatgtagggaa

SEQ ID NO: 954365 - DNA, 33 bp, Homo sapien
agggctgcagataccacgcatatgaaatggttc

SEQ ID NO: 954366 - DNA, 33 bp, Homo sapien
agggctgcagataccaggcatatgaaatggttc

SEQ ID NO: 954367 - DNA, 33 bp, Homo sapien
gcgtaccagaggcctcactttacatctaccctt

SEQ ID NO: 954368 - DNA, 33 bp, Homo sapien
gcgtaccagaggcctcgctttacatctaccctt

SEQ ID NO: 954369 - DNA, 33 bp, Homo sapien
tgcctgctggaccatcgctctggtactgggagc

SEQ ID NO: 954370 - DNA, 33 bp, Homo sapien
tgcctgctggaccatctctctggtactgggagc

SEQ ID NO: 954371 - DNA, 33 bp, Homo sapien
ggacgagatgttatgacgaggtcctttctaatc

SEQ ID NO: 954372 - DNA, 33 bp, Homo sapien
ggacgagatgttatgatgaggtcctttctaatc

SEQ ID NO: 954373 - DNA, 33 bp, Homo sapien
ccagacccaggagccaaaatgtgctggtccatt

SEQ ID NO: 954374 - DNA, 33 bp, Homo sapien
ccagacccaggagccagaatgtgctggtccatt

SEQ ID NO: 954375 - DNA, 33 bp, Homo sapien
gtgagtggtacttaaacgggtgtgttaactttg

SEQ ID NO: 954376 - DNA, 33 bp, Homo sapien
gtgagtggtacttaaatgggtgtgttaactttg

SEQ ID NO: 954377 - DNA, 33 bp, Homo sapien
attcaggcactttgtaaatgctaaaactctctg

SEQ ID NO: 954378 - DNA, 33 bp, Homo sapien
attcaggcactttgtagatgctaaaactctctg

SEQ ID NO: 954379 - DNA, 33 bp, Homo sapien
gcctcttcttgagaaaacagtgcatggtgacaa

SEQ ID NO: 954380 - DNA, 33 bp, Homo sapien
gcctcttcttgagaaagcagtgcatggtgacaa

SEQ ID NO: 954381 - DNA, 33 bp, Homo sapien
aggccacaaaatttcccacaactgtcatggatg

SEQ ID NO: 954382 - DNA, 33 bp, Homo sapien
aggccacaaaatttcctacaactgtcatggatg

SEQ ID NO: 954383 - DNA, 33 bp, Homo sapien
aatgcctgacactgagcagactcttatggggca

SEQ ID NO: 954384 - DNA, 33 bp, Homo sapien
aatgcctgacactgagtagactcttatggggca

SEQ ID NO: 954385 - DNA, 33 bp, Homo sapien
tctctctttcatgccaaagcaaacagtggggag

SEQ ID NO: 954386 - DNA, 33 bp, Homo sapien
tctctctttcatgccatagcaaacagtggggag

SEQ ID NO: 954387 - DNA, 33 bp, Homo sapien
aaaaaataaataaaagcctttgacttcggtgca

SEQ ID NO: 954388 - DNA, 33 bp, Homo sapien
aaaaaataaataaaaggctttgacttcggtgca

SEQ ID NO: 954389 - DNA, 33 bp, Homo sapien
tcacagacacttgttccatatttacattccatt

SEQ ID NO: 954390 - DNA, 33 bp, Homo sapien
tcacagacacttgttctatatttacattccatt

SEQ ID NO: 954391 - DNA, 33 bp, Homo sapien
agttggtggcaggaaacgatcatggttctggac

SEQ ID NO: 954392 - DNA, 33 bp, Homo sapien
agttggtggcaggaaatgatcatggttctggac

SEQ ID NO: 954393 - DNA, 33 bp, Homo sapien
gcatccaataagctgaggtctataaccagaatc

SEQ ID NO: 954394 - DNA, 33 bp, Homo sapien
gcatccaataagctgatgtctataaccagaatc

SEQ ID NO: 954395 - DNA, 33 bp, Homo sapien
gttcttactactgtaactcaatcatttgggatt

SEQ ID NO: 954396 - DNA, 33 bp, Homo sapien
gttcttactactgtaagtcaatcatttgggatt

SEQ ID NO: 954397 - DNA, 33 bp, Homo sapien
tagttttgaattaatacgaaagaggcaaaattt

SEQ ID NO: 954398 - DNA, 33 bp, Homo sapien
tagttttgaattaatatgaaagaggcaaaattt

SEQ ID NO: 954399 - DNA, 33 bp, Homo sapien; identical to SEQ ID NO: 954397

SEQ ID NO: 954400 - DNA, 33 bp, Homo sapien; identical to SEQ ID NO: 954398

SEQ ID NO: 954401 - DNA, 33 bp, Homo sapien
tccacggatttggctgcagatccagagagatgg

SEQ ID NO: 954402 - DNA, 33 bp, Homo sapien
tccacggatttggctgtagatccagagagatgg

SEQ ID NO: 954403 - DNA, 33 bp, Homo sapien
tatgtatctgtagacactgactgtttctatcta

SEQ ID NO: 954404 - DNA, 33 bp, Homo sapien
tatgtatctgtagacattgactgtttctatcta

SEQ ID NO: 954405 - DNA, 33 bp, Homo sapien
tcaaaatagctcagaaacaaaaaagataaacat

SEQ ID NO: 954406 - DNA, 33 bp, Homo sapien
tcaaaatagctcagaagcaaaaaagataaacat

SEQ ID NO: 954407 - DNA, 33 bp, Homo sapien
gaggctggacatggacaatgtgctttatcctcg

SEQ ID NO: 954408 - DNA, 33 bp, Homo sapien
gaggctggacatggaccatgtgctttatcctcg

SEQ ID NO: 954409 - DNA, 33 bp, Homo sapien
cataacagcggaaaaaatggagcttccctgtca

SEQ ID NO: 954410 - DNA, 33 bp, Homo sapien
cataacagcggaaaaactggagcttccctgtca

SEQ ID NO: 954411 - DNA, 33 bp, Homo sapien
tccccacaaagacttaaacaggaagtacaaagc

SEQ ID NO: 954412 - DNA, 33 bp, Homo sapien
tccccacaaagacttagacaggaagtacaaagc

SEQ ID NO: 954413 - DNA, 33 bp, Homo sapien
gtacaaattgtgataaggcctaggtaggaagag

SEQ ID NO: 954414 - DNA, 33 bp, Homo sapien
gtacaaattgtgataatgcctaggtaggaagag

SEQ ID NO: 954415 - DNA, 33 bp, Homo sapien
acaaatggataaatcaatgaatcaatatttttc

SEQ ID NO: 954416 - DNA, 33 bp, Homo sapien
acaaatggataaatcagtgaatcaatatttttc

SEQ ID NO: 954417 - DNA, 33 bp, Homo sapien
ttatgtgtaggtattcaagtacatcttgtttgt

SEQ ID NO: 954418 - DNA, 33 bp, Homo sapien
ttatgtgtaggtattctagtacatcttgtttgt

SEQ ID NO: 954419 - DNA, 33 bp, Homo sapien
tttgctacacaaacagaaagggttagtattcag

SEQ ID NO: 954420 - DNA, 33 bp, Homo sapien
tttgctacacaaacaggaagggttagtattcag

SEQ ID NO: 954421 - DNA, 33 bp, Homo sapien
ggataggggaaagctccatgaatgtaagatctg

SEQ ID NO: 954422 - DNA, 33 bp, Homo sapien
ggataggggaaagctctatgaatgtaagatctg

SEQ ID NO: 954423 - DNA, 33 bp, Homo sapien
acaagtttcttgcttaaaagtgcagtcaaagtg

SEQ ID NO: 954424 - DNA, 33 bp, Homo sapien
acaagtttcttgcttacaagtgcagtcaaagtg

SEQ ID NO: 954425 - DNA, 33 bp, Homo sapien
ggggctagcgttgccacctctccctattaaact

SEQ ID NO: 954426 - DNA, 33 bp, Homo sapien
ggggctagcgttgccatctctccctattaaact

SEQ ID NO: 954427 - DNA, 33 bp, Homo sapien
ctcctactagagctacaatacttttcggccctt

SEQ ID NO: 954428 - DNA, 33 bp, Homo sapien
ctcctactagagctacgatacttttcggccctt

SEQ ID NO: 954429 - DNA, 33 bp, Homo sapien
tgcatctcttccatctaactgttcatctgtatc

SEQ ID NO: 954430 - DNA, 33 bp, Homo sapien
tgcatctcttccatctgactgttcatctgtatc

SEQ ID NO: 954431 - DNA, 33 bp, Homo sapien
tatacaacagacttccaggaagtacagcccgga

SEQ ID NO: 954432 - DNA, 33 bp, Homo sapien
tatacaacagacttccgggaagtacagcccgga

SEQ ID NO: 954433 - DNA, 33 bp, Homo sapien
gtactacagttacacgcaatgttatcattagag

SEQ ID NO: 954434 - DNA, 33 bp, Homo sapien
gtactacagttacacggaatgttatcattagag

SEQ ID NO: 954435 - DNA, 33 bp, Homo sapien
ccatgggcacattctgcacaaggagaggatgtg

SEQ ID NO: 954436 - DNA, 33 bp, Homo sapien
ccatgggcacattctgtacaaggagaggatgtg

SEQ ID NO: 954437 - DNA, 33 bp, Homo sapien
aggcaggcacagttccaatcccaggaggcactg

SEQ ID NO: 954438 - DNA, 33 bp, Homo sapien
aggcaggcacagttccgatcccaggaggcactg

SEQ ID NO: 954439 - DNA, 33 bp, Homo sapien
gccttcggtaggaaccaggagcaggttaggaag

SEQ ID NO: 954440 - DNA, 33 bp, Homo sapien
gccttcggtaggaacccggagcaggttaggaag

SEQ ID NO: 954441 - DNA, 33 bp, Homo sapien
aaacacacactctcacgcacatttacacaccta

SEQ ID NO: 954442 - DNA, 33 bp, Homo sapien
aaacacacactctcactcacatttacacaccta

SEQ ID NO: 954443 - DNA, 33 bp, Homo sapien
cactcacattcacatacacacacaaatggtcac

SEQ ID NO: 954444 - DNA, 33 bp, Homo sapien
cactcacattcacatatacacacaaatggtcac

SEQ ID NO: 954445 - DNA, 33 bp, Homo sapien
tcgtgcgtgtgtgagacagcgtgaatgtgaatg

SEQ ID NO: 954446 - DNA, 33 bp, Homo sapien
tcgtgcgtgtgtgagagagcgtgaatgtgaatg

SEQ ID NO: 954447 - DNA, 33 bp, Homo sapien
taacactggcagataccatgctcttatgtttga

SEQ ID NO: 954448 - DNA, 33 bp, Homo sapien
taacactggcagatactatgctcttatgtttga

SEQ ID NO: 954449 - DNA, 33 bp, Homo sapien
ggaggtttctgtgagaagtgttcttgcaggaag

SEQ ID NO: 954450 - DNA, 33 bp, Homo sapien
ggaggtttctgtgagaggtgttcttgcaggaag

SEQ ID NO: 954451 - DNA, 33 bp, Homo sapien
tctcacagaaacctcccgaaaacagaagcctca

SEQ ID NO: 954452 - DNA, 33 bp, Homo sapien
tctcacagaaacctcctgaaaacagaagcctca

SEQ ID NO: 954453 - DNA, 33 bp, Homo sapien
aggagttcacagagaaacaagcactagagtcct

SEQ ID NO: 954454 - DNA, 33 bp, Homo sapien
aggagttcacagagaagcaagcactagagtcct

SEQ ID NO: 954455 - DNA, 33 bp, Homo sapien
gtcctgaactccttaaagattagaagaccggga

SEQ ID NO: 954456 - DNA, 33 bp, Homo sapien
gtcctgaactccttaatgattagaagaccggga

SEQ ID NO: 954457 - DNA, 33 bp, Homo sapien
gaaaagatgtgctagaagtgaagagttgatcca

SEQ ID NO: 954458 - DNA, 33 bp, Homo sapien
gaaaagatgtgctagaggtgaagagttgatcca

SEQ ID NO: 954459 - DNA, 33 bp, Homo sapien
cgttatgaacaacaataaagaggaggagtgttt

SEQ ID NO: 954460 - DNA, 33 bp, Homo sapien
cgttatgaacaacaattaagaggaggagtgttt

SEQ ID NO: 954461 - DNA, 33 bp, Homo sapien
tccggcactacctcacccagtgtgaagtccatc

SEQ ID NO: 954462 - DNA, 33 bp, Homo sapien
tccggcactacctcactcagtgtgaagtccatc

SEQ ID NO: 954463 - DNA, 33 bp, Homo sapien
tctgggcatttcatataagtggaattatgtaat

SEQ ID NO: 954464 - DNA, 33 bp, Homo sapien
tctgggcatttcatatcagtggaattatgtaat

SEQ ID NO: 954465 - DNA, 33 bp, Homo sapien
tagtatatgcatgcaaagaaatactgttcggcc

SEQ ID NO: 954466 - DNA, 33 bp, Homo sapien
tagtatatgcatgcaatgaaatactgttcggcc

SEQ ID NO: 954467 - DNA, 33 bp, Homo sapien
cagtttgcaaagcagacgtgctctttttaccta

SEQ ID NO: 954468 - DNA, 33 bp, Homo sapien
cagtttgcaaagcagatgtgctctttttaccta

SEQ ID NO: 954469 - DNA, 33 bp, Homo sapien
actgtgttcctatagacagaagcactgtaccgc

SEQ ID NO: 954470 - DNA, 33 bp, Homo sapien
actgtgttcctatagagagaagcactgtaccgc

SEQ ID NO: 954471 - DNA, 33 bp, Homo sapien
gttgacaatggagtcagagaattcttttctctg

SEQ ID NO: 954472 - DNA, 33 bp, Homo sapien
gttgacaatggagtcatagaattcttttctctg

SEQ ID NO: 954473 - DNA, 33 bp, Homo sapien
tctggttctgaatctacgatcctcaaacatccc

SEQ ID NO: 954474 - DNA, 33 bp, Homo sapien
tctggttctgaatctatgatcctcaaacatccc

SEQ ID NO: 954475 - DNA, 33 bp, Homo sapien
tgtatgacaaagtcctaaaaagtatgcatcttt

SEQ ID NO: 954476 - DNA, 33 bp, Homo sapien
tgtatgacaaagtcctgaaaagtatgcatcttt

SEQ ID NO: 954477 - DNA, 33 bp, Homo sapien
tggaaagtagaggacagggtaagatgtttgggc

SEQ ID NO: 954478 - DNA, 33 bp, Homo sapien
tggaaagtagaggacatggtaagatgtttgggc

SEQ ID NO: 954479 - DNA, 33 bp, Homo sapien
taataagaaatactgaacaaaatgaactcgaaa

SEQ ID NO: 954480 - DNA, 33 bp, Homo sapien
taataagaaatactgatcaaaatgaactcgaaa

SEQ ID NO: 954481 - DNA, 33 bp, Homo sapien
acaaacccatacccgtaaaagcggaagtgacaa

SEQ ID NO: 954482 - DNA, 33 bp, Homo sapien
acaaacccatacccgtgaaagcggaagtgacaa

SEQ ID NO: 954483 - DNA, 33 bp, Homo sapien
tttcctacgagactctaaactttcaagcctagc

SEQ ID NO: 954484 - DNA, 33 bp, Homo sapien
tttcctacgagactctgaactttcaagcctagc

SEQ ID NO: 954485 - DNA, 33 bp, Homo sapien
gaaatgagaggacttcgatatgtaaagcccact

SEQ ID NO: 954486 - DNA, 33 bp, Homo sapien
gaaatgagaggacttctatatgtaaagcccact

SEQ ID NO: 954487 - DNA, 33 bp, Homo sapien
gtattgttaatgttaacgctgcttgggaaaaaa

SEQ ID NO: 954488 - DNA, 33 bp, Homo sapien
gtattgttaatgttaatgctgcttgggaaaaaa

SEQ ID NO: 954489 - DNA, 33 bp, Homo sapien
acacagtaaaccacaaagcatttcggtgaaggg

SEQ ID NO: 954490 - DNA, 33 bp, Homo sapien
acacagtaaaccacaacgcatttcggtgaaggg

SEQ ID NO: 954491 - DNA, 33 bp, Homo sapien
aaccctgggtgattatcaaagtggctctggtga

SEQ ID NO: 954492 - DNA, 33 bp, Homo sapien
aaccctgggtgattatgaaagtggctctggtga

SEQ ID NO: 954493 - DNA, 33 bp, Homo sapien
aaggagtctttgaagtaaccgtctaagtgactc

SEQ ID NO: 954494 - DNA, 33 bp, Homo sapien
aaggagtctttgaagttaccgtctaagtgactc

SEQ ID NO: 954495 - DNA, 33 bp, Homo sapien
tgggacacctctaataacattaaagcatctcag

SEQ ID NO: 954496 - DNA, 33 bp, Homo sapien
tgggacacctctaatagcattaaagcatctcag

SEQ ID NO: 954497 - DNA, 33 bp, Homo sapien
ggaaggcttcaagcagaacgcaggctttgagag

SEQ ID NO: 954498 - DNA, 33 bp, Homo sapien
ggaaggcttcaagcaggacgcaggctttgagag

SEQ ID NO: 954499 - DNA, 33 bp, Homo sapien
cttaaatcagatgctcacttagcacaatcacct

SEQ ID NO: 954500 - DNA, 33 bp, Homo sapien
cttaaatcagatgctcgcttagcacaatcacct

SEQ ID NO: 954501 - DNA, 33 bp, Homo sapien
gatgaacacagatgaccggcaggagtgaaggtc

SEQ ID NO: 954502 - DNA, 33 bp, Homo sapien
gatgaacacagatgactggcaggagtgaaggtc

SEQ ID NO: 954503 - DNA, 33 bp, Homo sapien
tgtgtccgggtgtgaacagacttagggtgactc

SEQ ID NO: 954504 - DNA, 33 bp, Homo sapien
tgtgtccgggtgtgaagagacttagggtgactc

SEQ ID NO: 954505 - DNA, 33 bp, Homo sapien
ctcagatgcaatcacaaaggaacctattccaga

SEQ ID NO: 954506 - DNA, 33 bp, Homo sapien
ctcagatgcaatcacagaggaacctattccaga

SEQ ID NO: 954507 - DNA, 33 bp, Homo sapien
tcactccagctctatacgctgactttgacaggc

SEQ ID NO: 954508 - DNA, 33 bp, Homo sapien
tcactccagctctatatgctgactttgacaggc

SEQ ID NO: 954509 - DNA, 33 bp, Homo sapien
gtgaattctgaatgtaagtacgactgtgagatt

SEQ ID NO: 954510 - DNA, 33 bp, Homo sapien
gtgaattctgaatgtatgtacgactgtgagatt

SEQ ID NO: 954511 - DNA, 33 bp, Homo sapien
ggatgcatgaaccgtgcagccttcctgtgggcc

SEQ ID NO: 954512 - DNA, 33 bp, Homo sapien
ggatgcatgaaccgtggagccttcctgtgggcc

SEQ ID NO: 954513 - DNA, 33 bp, Homo sapien
tgaataggctcaaagaatatttaagagcagggg

SEQ ID NO: 954514 - DNA, 33 bp, Homo sapien
tgaataggctcaaagagtatttaagagcagggg

SEQ ID NO: 954515 - DNA, 33 bp, Homo sapien
caaagaaaggcaaagaagtcaagtccttgcaca

SEQ ID NO: 954516 - DNA, 33 bp, Homo sapien
caaagaaaggcaaagaggtcaagtccttgcaca

SEQ ID NO: 954517 - DNA, 33 bp, Homo sapien
caggcttctgattaaactggagaagttaggcga

SEQ ID NO: 954518 - DNA, 33 bp, Homo sapien
caggcttctgattaaattggagaagttaggcga

SEQ ID NO: 954519 - DNA, 33 bp, Homo sapien
aaagcaaacatttacagtgcccttactatgtgc

SEQ ID NO: 954520 - DNA, 33 bp, Homo sapien
aaagcaaacatttacattgcccttactatgtgc

SEQ ID NO: 954521 - DNA, 33 bp, Homo sapien
cttcctcaatccacacaaaaagcctactgaagg

SEQ ID NO: 954522 - DNA, 33 bp, Homo sapien
cttcctcaatccacacgaaaagcctactgaagg

SEQ ID NO: 954523 - DNA, 33 bp, Homo sapien
ggggtgcctagtttgaaaggctgtgatggaaag

SEQ ID NO: 954524 - DNA, 33 bp, Homo sapien
ggggtgcctagtttgagaggctgtgatggaaag

SEQ ID NO: 954525 - DNA, 33 bp, Homo sapien
ggaatataccagaatacggatacagagaagcgt

SEQ ID NO: 954526 - DNA, 33 bp, Homo sapien
ggaatataccagaatatggatacagagaagcgt

SEQ ID NO: 954527 - DNA, 33 bp, Homo sapien
cccttttctcgttccacgtgtgcctcaaaatat

SEQ ID NO: 954528 - DNA, 33 bp, Homo sapien
cccttttctcgttccatgtgtgcctcaaaatat

SEQ ID NO: 954529 - DNA, 33 bp, Homo sapien
tctgttcacccaaacgaacattgtcatctcttt

SEQ ID NO: 954530 - DNA, 33 bp, Homo sapien
tctgttcacccaaacgtacattgtcatctcttt

SEQ ID NO: 954531 - DNA, 33 bp, Homo sapien
ggatctccgtcttctacggtgtcactgctttaa

SEQ ID NO: 954532 - DNA, 33 bp, Homo sapien
ggatctccgtcttctagggtgtcactgctttaa

SEQ ID NO: 954533 - DNA, 33 bp, Homo sapien
caggttgaaaagatgaaggtggaattcaccatg

SEQ ID NO: 954534 - DNA, 33 bp, Homo sapien
caggttgaaaagatgatggtggaattcaccatg

SEQ ID NO: 954535 - DNA, 33 bp, Homo sapien
aggaaatcaatgcgagaagagcaaagtgaaagg

SEQ ID NO: 954536 - DNA, 33 bp, Homo sapien
aggaaatcaatgcgagtagagcaaagtgaaagg

SEQ ID NO: 954537 - DNA, 33 bp, Homo sapien
gttctcaaagaagacaatgctactgatggaaat

SEQ ID NO: 954538 - DNA, 33 bp, Homo sapien
gttctcaaagaagacagtgctactgatggaaat

SEQ ID NO: 954539 - DNA, 33 bp, Homo sapien
tccatgaactctcccccacacgatggagtattg

SEQ ID NO: 954540 - DNA, 33 bp, Homo sapien
tccatgaactctcccctacacgatggagtattg

SEQ ID NO: 954541 - DNA, 33 bp, Homo sapien
cttgtccctcaagcagcataaaggatttctaag

SEQ ID NO: 954542 - DNA, 33 bp, Homo sapien
cttgtccctcaagcaggataaaggatttctaag

SEQ ID NO: 954543 - DNA, 33 bp, Homo sapien
atatgaaactctgatacgcacttacttcactaa

SEQ ID NO: 954544 - DNA, 33 bp, Homo sapien
atatgaaactctgataggcacttacttcactaa

SEQ ID NO: 954545 - DNA, 33 bp, Homo sapien
gaggaatccaagaaggacattcacatgaggtat

SEQ ID NO: 954546 - DNA, 33 bp, Homo sapien
gaggaatccaagaaggtcattcacatgaggtat

SEQ ID NO: 954547 - DNA, 33 bp, Homo sapien
ccatctcaaatggactcaaacaataatagacgt

SEQ ID NO: 954548 - DNA, 33 bp, Homo sapien
ccatctcaaatggacttaaacaataatagacgt

SEQ ID NO: 954549 - DNA, 33 bp, Homo sapien
gctccaccctcagaataatgagaccacaacaag

SEQ ID NO: 954550 - DNA, 33 bp, Homo sapien
gctccaccctcagaatgatgagaccacaacaag

SEQ ID NO: 954551 - DNA, 33 bp, Homo sapien
aggttgagttgttcaccagtaaccaatgatgta

SEQ ID NO: 954552 - DNA, 33 bp, Homo sapien
aggttgagttgttcactagtaaccaatgatgta

SEQ ID NO: 954553 - DNA, 33 bp, Homo sapien
ttagccaggtgcagacagaagaaacaacaatct

SEQ ID NO: 954554 - DNA, 33 bp, Homo sapien
ttagccaggtgcagacggaagaaacaacaatct

SEQ ID NO: 954555 - DNA, 33 bp, Homo sapien
gaagacttacttgaaccgccaggatgttctata

SEQ ID NO: 954556 - DNA, 33 bp, Homo sapien
gaagacttacttgaacggccaggatgttctata

SEQ ID NO: 954557 - DNA, 33 bp, Homo sapien
gcgttttgtagcaggacggacttacaagcaatg

SEQ ID NO: 954558 - DNA, 33 bp, Homo sapien
gcgttttgtagcaggagggacttacaagcaatg

SEQ ID NO: 954559 - DNA, 33 bp, Homo sapien
atgatgggtttgacgcacaaacttcaacagtgc

SEQ ID NO: 954560 - DNA, 33 bp, Homo sapien
atgatgggtttgacgcgcaaacttcaacagtgc

SEQ ID NO: 954561 - DNA, 33 bp, Homo sapien
gtggattcccaaacataatgaggtgggaggcac

SEQ ID NO: 954562 - DNA, 33 bp, Homo sapien
gtggattcccaaacatgatgaggtgggaggcac

SEQ ID NO: 954563 - DNA, 33 bp, Homo sapien
agaagcacagacataaataaataatatcatgag

SEQ ID NO: 954564 - DNA, 33 bp, Homo sapien
agaagcacagacataagtaaataatatcatgag

SEQ ID NO: 954565 - DNA, 33 bp, Homo sapien
gccgtcttgctcagaacacagtgactcatgata

SEQ ID NO: 954566 - DNA, 33 bp, Homo sapien
gccgtcttgctcagaatacagtgactcatgata

SEQ ID NO: 954567 - DNA, 33 bp, Homo sapien
gcatcccctatatagcaaaagggtcccaagaaa

SEQ ID NO: 954568 - DNA, 33 bp, Homo sapien
gcatcccctatatagcgaaagggtcccaagaaa

SEQ ID NO: 954569 - DNA, 33 bp, Homo sapien
ccaattggacaagtcaagattgtgctcacagaa

SEQ ID NO: 954570 - DNA, 33 bp, Homo sapien
ccaattggacaagtcaggattgtgctcacagaa

SEQ ID NO: 954571 - DNA, 33 bp, Homo sapien
tagcacattatagagaaagcagaaaggccatgt

SEQ ID NO: 954572 - DNA, 33 bp, Homo sapien
tagcacattatagagagagcagaaaggccatgt

SEQ ID NO: 954573 - DNA, 33 bp, Homo sapien
tgttggagatgatgcacacttttaaattaccag

SEQ ID NO: 954574 - DNA, 33 bp, Homo sapien
tgttggagatgatgcagacttttaaattaccag

SEQ ID NO: 954575 - DNA, 33 bp, Homo sapien
gtcattccaatgatttaaaagtgtacaagctga

SEQ ID NO: 954576 - DNA, 33 bp, Homo sapien
gtcattccaatgatttcaaagtgtacaagctga

SEQ ID NO: 954577 - DNA, 33 bp, Homo sapien
tacatagccctgcttaactgtccggtccttcct

SEQ ID NO: 954578 - DNA, 33 bp, Homo sapien
tacatagccctgcttacctgtccggtccttcct

SEQ ID NO: 954579 - DNA, 33 bp, Homo sapien
catgaagaagaggtgacacgttaagtcaaaaat

SEQ ID NO: 954580 - DNA, 33 bp, Homo sapien
catgaagaagaggtgatacgttaagtcaaaaat

SEQ ID NO: 954581 - DNA, 33 bp, Homo sapien
gcctttctcagagaaacgaagccgagtgggcga

SEQ ID NO: 954582 - DNA, 33 bp, Homo sapien
gcctttctcagagaaatgaagccgagtgggcga

SEQ ID NO: 954583 - DNA, 33 bp, Homo sapien
catttaagcagtgagaaattgaggtggtgtaat

SEQ ID NO: 954584 - DNA, 33 bp, Homo sapien
catttaagcagtgagagattgaggtggtgtaat

SEQ ID NO: 954585 - DNA, 33 bp, Homo sapien
ggcttcaactttgcagcaagtggtctggctcca

SEQ ID NO: 954586 - DNA, 33 bp, Homo sapien
ggcttcaactttgcaggaagtggtctggctcca

SEQ ID NO: 954587 - DNA, 33 bp, Homo sapien
gtcttttcaacttaggaaacagttgggctcctt

SEQ ID NO: 954588 - DNA, 33 bp, Homo sapien
gtcttttcaacttagggaacagttgggctcctt

SEQ ID NO: 954589 - DNA, 33 bp, Homo sapien
cagacacctcctgctaatacagcccatgagtca

SEQ ID NO: 954590 - DNA, 33 bp, Homo sapien
cagacacctcctgctagtacagcccatgagtca

SEQ ID NO: 954591 - DNA, 33 bp, Homo sapien
gggacctttgggaacccatcatcatgcttcctc

SEQ ID NO: 954592 - DNA, 33 bp, Homo sapien
gggacctttgggaacctatcatcatgcttcctc

SEQ ID NO: 954593 - DNA, 33 bp, Homo sapien
ccaatggagcctagaacagaagagactgaaaga

SEQ ID NO: 954594 - DNA, 33 bp, Homo sapien
ccaatggagcctagaagagaagagactgaaaga

SEQ ID NO: 954595 - DNA, 33 bp, Homo sapien
atgtagtctactcccaataagagtggaaggggt

SEQ ID NO: 954596 - DNA, 33 bp, Homo sapien
atgtagtctactcccagtaagagtggaaggggt

SEQ ID NO: 954597 - DNA, 33 bp, Homo sapien
aagttgagtaactctacctcctaagcttggtag

SEQ ID NO: 954598 - DNA, 33 bp, Homo sapien
aagttgagtaactctagctcctaagcttggtag

SEQ ID NO: 954599 - DNA, 33 bp, Homo sapien
actttaaagaggaaaacctggagtccagtcttg

SEQ ID NO: 954600 - DNA, 33 bp, Homo sapien
actttaaagaggaaaatctggagtccagtcttg

SEQ ID NO: 954601 - DNA, 33 bp, Homo sapien
gagattggagaggaaacggcccttgacacggaa

SEQ ID NO: 954602 - DNA, 33 bp, Homo sapien
gagattggagaggaaatggcccttgacacggaa

SEQ ID NO: 954603 - DNA, 33 bp, Homo sapien
tccaatctcctgaccaacttccctgtaattgct

SEQ ID NO: 954604 - DNA, 33 bp, Homo sapien
tccaatctcctgaccatcttccctgtaattgct

SEQ ID NO: 954605 - DNA, 33 bp, Homo sapien
ctgtaattgctggctccaaaatgaacaacagaa

SEQ ID NO: 954606 - DNA, 33 bp, Homo sapien
ctgtaattgctggctcgaaaatgaacaacagaa

SEQ ID NO: 954607 - DNA, 33 bp, Homo sapien
gatgtgctcaaaagcaaagggctttaaacctgc

SEQ ID NO: 954608 - DNA, 33 bp, Homo sapien
gatgtgctcaaaagcagagggctttaaacctgc

SEQ ID NO: 954609 - DNA, 33 bp, Homo sapien
atggataaaatctgtacggtctctatctttgga

SEQ ID NO: 954610 - DNA, 33 bp, Homo sapien
atggataaaatctgtatggtctctatctttgga

SEQ ID NO: 954611 - DNA, 33 bp, Homo sapien
taaatgcacataaaacagtctgtagtaggaata

SEQ ID NO: 954612 - DNA, 33 bp, Homo sapien
taaatgcacataaaacggtctgtagtaggaata

SEQ ID NO: 954613 - DNA, 33 bp, Homo sapien
agatgtgattcagttcccccttcagttgtcttc

SEQ ID NO: 954614 - DNA, 33 bp, Homo sapien
agatgtgattcagttctcccttcagttgtcttc

SEQ ID NO: 954615 - DNA, 33 bp, Homo sapien
atgtggacagtgaagaatcccatacagtgatat

SEQ ID NO: 954616 - DNA, 33 bp, Homo sapien
atgtggacagtgaagagtcccatacagtgatat

SEQ ID NO: 954617 - DNA, 33 bp, Homo sapien
tcggcctgacataggcaagagctatctgcaatc

SEQ ID NO: 954618 - DNA, 33 bp, Homo sapien
tcggcctgacataggcgagagctatctgcaatc

SEQ ID NO: 954619 - DNA, 33 bp, Homo sapien
ggtggcatcctaaagaggagaaaagaccagcat

SEQ ID NO: 954620 - DNA, 33 bp, Homo sapien
ggtggcatcctaaagatgagaaaagaccagcat

SEQ ID NO: 954621 - DNA, 33 bp, Homo sapien
cctttgccacatcccaatgaaattatcacaaaa

SEQ ID NO: 954622 - DNA, 33 bp, Homo sapien
cctttgccacatcccagtgaaattatcacaaaa

SEQ ID NO: 954623 - DNA, 33 bp, Homo sapien
tgaaattatcacaaaacacaagacaaattgaat

SEQ ID NO: 954624 - DNA, 33 bp, Homo sapien
tgaaattatcacaaaatacaagacaaattgaat

SEQ ID NO: 954625 - DNA, 33 bp, Homo sapien
aaaaaatccccacaaccaatacaatactttttt

SEQ ID NO: 954626 - DNA, 33 bp, Homo sapien
aaaaaatccccacaactaatacaatactttttt

SEQ ID NO: 954627 - DNA, 33 bp, Homo sapien
aatggcacatagaatacgacactggacactcat

SEQ ID NO: 954628 - DNA, 33 bp, Homo sapien
aatggcacatagaatatgacactggacactcat

SEQ ID NO: 954629 - DNA, 33 bp, Homo sapien
catgatgcgcatacagcaatgtaaatgcagcag

SEQ ID NO: 954630 - DNA, 33 bp, Homo sapien
catgatgcgcatacaggaatgtaaatgcagcag

SEQ ID NO: 954631 - DNA, 33 bp, Homo sapien
tgcttctgtgttggcagtagtctgtctgggaca

SEQ ID NO: 954632 - DNA, 33 bp, Homo sapien
tgcttctgtgttggcattagtctgtctgggaca

SEQ ID NO: 954633 - DNA, 33 bp, Homo sapien
caccccacttgctgcccgaggatcacttaggca

SEQ ID NO: 954634 - DNA, 33 bp, Homo sapien
caccccacttgctgcctgaggatcacttaggca

SEQ ID NO: 954635 - DNA, 33 bp, Homo sapien
ctaaccgcttaagagaagtgaaagaggttaaga

SEQ ID NO: 954636 - DNA, 33 bp, Homo sapien
ctaaccgcttaagagaggtgaaagaggttaaga

SEQ ID NO: 954637 - DNA, 33 bp, Homo sapien
ctcccatcctacttgccgaagtgagtacagtgt

SEQ ID NO: 954638 - DNA, 33 bp, Homo sapien
ctcccatcctacttgctgaagtgagtacagtgt

SEQ ID NO: 954639 - DNA, 33 bp, Homo sapien
tgaaatcactcggaaacagaaagtcaaataccg

SEQ ID NO: 954640 - DNA, 33 bp, Homo sapien
tgaaatcactcggaaatagaaagtcaaataccg

SEQ ID NO: 954641 - DNA, 33 bp, Homo sapien
aatagacagacattcacaaacagaaggagggag

SEQ ID NO: 954642 - DNA, 33 bp, Homo sapien
aatagacagacattcagaaacagaaggagggag

SEQ ID NO: 954643 - DNA, 33 bp, Homo sapien
atactatttagtgataagtgaataggtggaaaa

SEQ ID NO: 954644 - DNA, 33 bp, Homo sapien
atactatttagtgatatgtgaataggtggaaaa

SEQ ID NO: 954645 - DNA, 33 bp, Homo sapien
tatctgaacattgatggcactttctataacact

SEQ ID NO: 954646 - DNA, 33 bp, Homo sapien
tatctgaacattgatgtcactttctataacact

SEQ ID NO: 954647 - DNA, 33 bp, Homo sapien
gacatagagacatctaaggaaaacccaaagtgt

SEQ ID NO: 954648 - DNA, 33 bp, Homo sapien
gacatagagacatctacggaaaacccaaagtgt

SEQ ID NO: 954649 - DNA, 33 bp, Homo sapien
agctctttgatgaacactgatttcaaaatgatg

SEQ ID NO: 954650 - DNA, 33 bp, Homo sapien
agctctttgatgaacattgatttcaaaatgatg

SEQ ID NO: 954651 - DNA, 33 bp, Homo sapien
gtcctttccagtgtcaacatagctcattattag

SEQ ID NO: 954652 - DNA, 33 bp, Homo sapien
gtcctttccagtgtcaccatagctcattattag

SEQ ID NO: 954653 - DNA, 33 bp, Homo sapien
ggtccaatacacccaacggcaagttgtttcagt

SEQ ID NO: 954654 - DNA, 33 bp, Homo sapien
ggtccaatacacccaatggcaagttgtttcagt

SEQ ID NO: 954655 - DNA, 33 bp, Homo sapien
agaccagtattgagacgctgggaatgtcaacat

SEQ ID NO: 954656 - DNA, 33 bp, Homo sapien
agaccagtattgagactctgggaatgtcaacat

SEQ ID NO: 954657 - DNA, 33 bp, Homo sapien
tgcttctctttagggccaaacttctctcaaaaa

SEQ ID NO: 954658 - DNA, 33 bp, Homo sapien
tgcttctctttagggcgaaacttctctcaaaaa

SEQ ID NO: 954659 - DNA, 33 bp, Homo sapien
cattctttaaaaatccgcatttagtctcttgcc

SEQ ID NO: 954660 - DNA, 33 bp, Homo sapien
cattctttaaaaatcctcatttagtctcttgcc

SEQ ID NO: 954661 - DNA, 33 bp, Homo sapien
ctcatgagattacatacgccatgagggtaagga

SEQ ID NO: 954662 - DNA, 33 bp, Homo sapien
ctcatgagattacatatgccatgagggtaagga

SEQ ID NO: 954663 - DNA, 33 bp, Homo sapien
atgctgctcagaaacaacaggaaggatctagac

SEQ ID NO: 954664 - DNA, 33 bp, Homo sapien
atgctgctcagaaacaccaggaaggatctagac

SEQ ID NO: 954665 - DNA, 33 bp, Homo sapien
gaagtcgaatccccaggccggcaagtcttttat

SEQ ID NO: 954666 - DNA, 33 bp, Homo sapien
gaagtcgaatccccagtccggcaagtcttttat

SEQ ID NO: 954667 - DNA, 33 bp, Homo sapien
gagtaaagatgatttacgtagcagacagcactg

SEQ ID NO: 954668 - DNA, 33 bp, Homo sapien
gagtaaagatgatttatgtagcagacagcactg

SEQ ID NO: 954669 - DNA, 33 bp, Homo sapien
gaaccatgactgcagacgttggaactagcagaa

SEQ ID NO: 954670 - DNA, 33 bp, Homo sapien
gaaccatgactgcagatgttggaactagcagaa

SEQ ID NO: 954671 - DNA, 33 bp, Homo sapien
atgaagaaacaggatactaaataaaaaccacag

SEQ ID NO: 954672 - DNA, 33 bp, Homo sapien
atgaagaaacaggatagtaaataaaaaccacag

SEQ ID NO: 954673 - DNA, 33 bp, Homo sapien
gagaaaaggcagccctcaagttgagttttccca

SEQ ID NO: 954674 - DNA, 33 bp, Homo sapien
gagaaaaggcagccctgaagttgagttttccca

SEQ ID NO: 954675 - DNA, 33 bp, Homo sapien
gctgaacagatgtcaccattataagtccaataa

SEQ ID NO: 954676 - DNA, 33 bp, Homo sapien
gctgaacagatgtcactattataagtccaataa

SEQ ID NO: 954677 - DNA, 33 bp, Homo sapien
ggtcagagaacatctcaacacatggtacattca

SEQ ID NO: 954678 - DNA, 33 bp, Homo sapien
ggtcagagaacatctccacacatggtacattca

SEQ ID NO: 954679 - DNA, 33 bp, Homo sapien
tgttttgctaaaggcaagttctccttttatcct

SEQ ID NO: 954680 - DNA, 33 bp, Homo sapien
tgttttgctaaaggcatgttctccttttatcct

SEQ ID NO: 954681 - DNA, 33 bp, Homo sapien
ccttctgattcagctacgtaaggaagagatgcc

SEQ ID NO: 954682 - DNA, 33 bp, Homo sapien
ccttctgattcagctatgtaaggaagagatgcc

SEQ ID NO: 954683 - DNA, 33 bp, Homo sapien
gcgccaagaactggacactaagctaggccgggg

SEQ ID NO: 954684 - DNA, 33 bp, Homo sapien
gcgccaagaactggacgctaagctaggccgggg

SEQ ID NO: 954685 - DNA, 33 bp, Homo sapien
gcaaggcttgatcttgcagcacaaaatgtttga

SEQ ID NO: 954686 - DNA, 33 bp, Homo sapien
gcaaggcttgatcttgtagcacaaaatgtttga

SEQ ID NO: 954687 - DNA, 33 bp, Homo sapien
ttcaatgatttgacatcatctactgtttcattt

SEQ ID NO: 954688 - DNA, 33 bp, Homo sapien
ttcaatgatttgacattatctactgtttcattt

SEQ ID NO: 954689 - DNA, 33 bp, Homo sapien
ctaatctacagtgatcaacagaaaacgataaat

SEQ ID NO: 954690 - DNA, 33 bp, Homo sapien
ctaatctacagtgatcgacagaaaacgataaat

SEQ ID NO: 954691 - DNA, 33 bp, Homo sapien
tgttcccagacagaaaaggaaatggtttgatga

SEQ ID NO: 954692 - DNA, 33 bp, Homo sapien
tgttcccagacagaaagggaaatggtttgatga

SEQ ID NO: 954693 - DNA, 33 bp, Homo sapien
tcataagtgttgctgacgaataatccagaacaa

SEQ ID NO: 954694 - DNA, 33 bp, Homo sapien
tcataagtgttgctgatgaataatccagaacaa

SEQ ID NO: 954695 - DNA, 33 bp, Homo sapien
gagaaaaaatgttatcaaggatccaagaaaaaa

SEQ ID NO: 954696 - DNA, 33 bp, Homo sapien
gagaaaaaatgttatcgaggatccaagaaaaaa

SEQ ID NO: 954697 - DNA, 33 bp, Homo sapien
tttagcagagcaatggcatcgtcatatgtcccg

SEQ ID NO: 954698 - DNA, 33 bp, Homo sapien
tttagcagagcaatggtatcgtcatatgtcccg

SEQ ID NO: 954699 - DNA, 33 bp, Homo sapien
aatgtagttgggcaacactgatgtggactttcc

SEQ ID NO: 954700 - DNA, 33 bp, Homo sapien
aatgtagttgggcaacgctgatgtggactttcc

SEQ ID NO: 954701 - DNA, 33 bp, Homo sapien
tcctgatgttcaagccagaaaccctggaatcac

SEQ ID NO: 954702 - DNA, 33 bp, Homo sapien
tcctgatgttcaagccggaaaccctggaatcac

SEQ ID NO: 954703 - DNA, 33 bp, Homo sapien
gatgtgggatggtgacaatactgagtcagggaa

SEQ ID NO: 954704 - DNA, 33 bp, Homo sapien
gatgtgggatggtgacgatactgagtcagggaa

SEQ ID NO: 954705 - DNA, 33 bp, Homo sapien
actttaagttgttcaacgtgagctgttttcttt

SEQ ID NO: 954706 - DNA, 33 bp, Homo sapien
actttaagttgttcaatgtgagctgttttcttt

SEQ ID NO: 954707 - DNA, 33 bp, Homo sapien
gtgagccactatgtccagagaatttcattaata

SEQ ID NO: 954708 - DNA, 33 bp, Homo sapien
gtgagccactatgtccggagaatttcattaata

SEQ ID NO: 954709 - DNA, 33 bp, Homo sapien
agccacggttctcttacctgtaaaatggggcaa

SEQ ID NO: 954710 - DNA, 33 bp, Homo sapien
agccacggttctcttatctgtaaaatggggcaa

SEQ ID NO: 954711 - DNA, 33 bp, Homo sapien
catcacatcaacacaaaggagcaggtctttcat

SEQ ID NO: 954712 - DNA, 33 bp, Homo sapien
catcacatcaacacaagggagcaggtctttcat

SEQ ID NO: 954713 - DNA, 33 bp, Homo sapien
cgcactttacggaatacgaaactgaagtagagg

SEQ ID NO: 954714 - DNA, 33 bp, Homo sapien
cgcactttacggaatatgaaactgaagtagagg

SEQ ID NO: 954715 - DNA, 33 bp, Homo sapien
ccatgaaatgctcttacgctgaaatctctaccc

SEQ ID NO: 954716 - DNA, 33 bp, Homo sapien
ccatgaaatgctcttatgctgaaatctctaccc

SEQ ID NO: 954717 - DNA, 33 bp, Homo sapien
aagatgttaaacctcaaatatgtgtcgtgcctt

SEQ ID NO: 954718 - DNA, 33 bp, Homo sapien
aagatgttaaacctcagatatgtgtcgtgcctt

SEQ ID NO: 954719 - DNA, 33 bp, Homo sapien
aaagacttgtggtgaggccctctgcatcttagc

SEQ ID NO: 954720 - DNA, 33 bp, Homo sapien
aaagacttgtggtgagtccctctgcatcttagc

SEQ ID NO: 954721 - DNA, 33 bp, Homo sapien
tacgttgtgcatatgaaattggatactggactt

SEQ ID NO: 954722 - DNA, 33 bp, Homo sapien
tacgttgtgcatatgatattggatactggactt

SEQ ID NO: 954723 - DNA, 33 bp, Homo sapien
gaagtctggggaaagacgggtttgagataggag

SEQ ID NO: 954724 - DNA, 33 bp, Homo sapien
gaagtctggggaaagatgggtttgagataggag

SEQ ID NO: 954725 - DNA, 33 bp, Homo sapien
tgatcatttgatgggaaagagactggttttcaa

SEQ ID NO: 954726 - DNA, 33 bp, Homo sapien
tgatcatttgatgggagagagactggttttcaa

SEQ ID NO: 954727 - DNA, 33 bp, Homo sapien
aggaagactaatgaaacctgggtgcaccagaaa

SEQ ID NO: 954728 - DNA, 33 bp, Homo sapien
aggaagactaatgaaatctgggtgcaccagaaa

SEQ ID NO: 954729 - DNA, 33 bp, Homo sapien
tgaaatctcatcactccaatatacccagtgaga

SEQ ID NO: 954730 - DNA, 33 bp, Homo sapien
tgaaatctcatcactcgaatatacccagtgaga

SEQ ID NO: 954731 - DNA, 33 bp, Homo sapien
ttttcagaagccaggcacggaggccaccatgac

SEQ ID NO: 954732 - DNA, 33 bp, Homo sapien
ttttcagaagccaggcgcggaggccaccatgac

SEQ ID NO: 954733 - DNA, 33 bp, Homo sapien
cctgtgcatccctacccgaaggtcaccctcatt

SEQ ID NO: 954734 - DNA, 33 bp, Homo sapien
cctgtgcatccctacctgaaggtcaccctcatt

SEQ ID NO: 954735 - DNA, 33 bp, Homo sapien
atatgctataaatgaaactggttgtccctccga

SEQ ID NO: 954736 - DNA, 33 bp, Homo sapien
atatgctataaatgaacctggttgtccctccga

SEQ ID NO: 954737 - DNA, 33 bp, Homo sapien
aaaagctaagcctgggaagaaaatcggatgaag

SEQ ID NO: 954738 - DNA, 33 bp, Homo sapien
aaaagctaagcctggggagaaaatcggatgaag

SEQ ID NO: 954739 - DNA, 33 bp, Homo sapien
gctgtatcatgttgaacgagtaactgaaactct

SEQ ID NO: 954740 - DNA, 33 bp, Homo sapien
gctgtatcatgttgaatgagtaactgaaactct

SEQ ID NO: 954741 - DNA, 33 bp, Homo sapien
ttgaagtagtcattcacctgcttgcttcatttc

SEQ ID NO: 954742 - DNA, 33 bp, Homo sapien
ttgaagtagtcattcatctgcttgcttcatttc

SEQ ID NO: 954743 - DNA, 33 bp, Homo sapien
ttcttaactaaatcaagacgttcattaagtact

SEQ ID NO: 954744 - DNA, 33 bp, Homo sapien
ttcttaactaaatcaatacgttcattaagtact

SEQ ID NO: 954745 - DNA, 33 bp, Homo sapien
catcctggttcacttacaggctgtgtggtcctg

SEQ ID NO: 954746 - DNA, 33 bp, Homo sapien
catcctggttcacttataggctgtgtggtcctg

SEQ ID NO: 954747 - DNA, 33 bp, Homo sapien
ctatagttagaattccccaaggcacattctcat

SEQ ID NO: 954748 - DNA, 33 bp, Homo sapien
ctatagttagaattcctcaaggcacattctcat

SEQ ID NO: 954749 - DNA, 33 bp, Homo sapien
ataattgtatcacataagggaaaagaagctgaa

SEQ ID NO: 954750 - DNA, 33 bp, Homo sapien
ataattgtatcacatacgggaaaagaagctgaa

SEQ ID NO: 954751 - DNA, 33 bp, Homo sapien
tggctgggattctttccatggggttctctgacc

SEQ ID NO: 954752 - DNA, 33 bp, Homo sapien
tggctgggattctttctatggggttctctgacc

SEQ ID NO: 954753 - DNA, 33 bp, Homo sapien
acagtcacagaggagacgtggtgaggactaagc

SEQ ID NO: 954754 - DNA, 33 bp, Homo sapien
acagtcacagaggagatgtggtgaggactaagc

SEQ ID NO: 954755 - DNA, 33 bp, Homo sapien
gaaaagtcatggctaacgaggttttccaactgc

SEQ ID NO: 954756 - DNA, 33 bp, Homo sapien
gaaaagtcatggctaatgaggttttccaactgc

SEQ ID NO: 954757 - DNA, 33 bp, Homo sapien
gttgagtgattctgtaaataggtagtttaaaga

SEQ ID NO: 954758 - DNA, 33 bp, Homo sapien
gttgagtgattctgtagataggtagtttaaaga

SEQ ID NO: 954759 - DNA, 33 bp, Homo sapien
aaataatccatttcagaactgggtgaatttgtt

SEQ ID NO: 954760 - DNA, 33 bp, Homo sapien
aaataatccatttcagcactgggtgaatttgtt

SEQ ID NO: 954761 - DNA, 33 bp, Homo sapien
tcctggagtaaatgcacaccattttctatgagc

SEQ ID NO: 954762 - DNA, 33 bp, Homo sapien
tcctggagtaaatgcataccattttctatgagc

SEQ ID NO: 954763 - DNA, 33 bp, Homo sapien
tcccttaatcatttcacgctcatagaaaatggt

SEQ ID NO: 954764 - DNA, 33 bp, Homo sapien
tcccttaatcatttcatgctcatagaaaatggt

SEQ ID NO: 954765 - DNA, 33 bp, Homo sapien
ttaagggatggcttaagggctgcatacaataga

SEQ ID NO: 954766 - DNA, 33 bp, Homo sapien
ttaagggatggcttaatggctgcatacaataga

SEQ ID NO: 954767 - DNA, 33 bp, Homo sapien
tttgtgtccctccccccaaaatggctcactctt

SEQ ID NO: 954768 - DNA, 33 bp, Homo sapien
tttgtgtccctcccccgaaaatggctcactctt

SEQ ID NO: 954769 - DNA, 33 bp, Homo sapien
ttctactgaaacgcaacaagggccagaccttag

SEQ ID NO: 954770 - DNA, 33 bp, Homo sapien
ttctactgaaacgcaagaagggccagaccttag

SEQ ID NO: 954771 - DNA, 33 bp, Homo sapien
acctgctcagaacacagaaaaactataggcaag

SEQ ID NO: 954772 - DNA, 33 bp, Homo sapien
acctgctcagaacacataaaaactataggcaag

SEQ ID NO: 954773 - DNA, 33 bp, Homo sapien
tggccagctgagagacaacaggagtgtgaatgg

SEQ ID NO: 954774 - DNA, 33 bp, Homo sapien
tggccagctgagagacgacaggagtgtgaatgg

SEQ ID NO: 954775 - DNA, 33 bp, Homo sapien
agtcagggtgactccagaaccagcactctcagt

SEQ ID NO: 954776 - DNA, 33 bp, Homo sapien
agtcagggtgactccataaccagcactctcagt

SEQ ID NO: 954777 - DNA, 33 bp, Homo sapien
gctgatcttgccaagacgcaaaattgtaggccc

SEQ ID NO: 954778 - DNA, 33 bp, Homo sapien
gctgatcttgccaagatgcaaaattgtaggccc

SEQ ID NO: 954779 - DNA, 33 bp, Homo sapien
ttctgaggcattaatcaatctaccactcctctt

SEQ ID NO: 954780 - DNA, 33 bp, Homo sapien
ttctgaggcattaatcgatctaccactcctctt

SEQ ID NO: 954781 - DNA, 33 bp, Homo sapien
tccttccaatgtggaaagtgcataagactggta

SEQ ID NO: 954782 - DNA, 33 bp, Homo sapien
tccttccaatgtggaacgtgcataagactggta

SEQ ID NO: 954783 - DNA, 33 bp, Homo sapien
actaattccatcatgaaccccaaccacatgacc

SEQ ID NO: 954784 - DNA, 33 bp, Homo sapien
actaattccatcatgagccccaaccacatgacc

SEQ ID NO: 954785 - DNA, 33 bp, Homo sapien
atatacttcatttggtaaagcatctgttcagaa

SEQ ID NO: 954786 - DNA, 33 bp, Homo sapien
atatacttcatttggtgaagcatctgttcagaa

SEQ ID NO: 954787 - DNA, 33 bp, Homo sapien
cgcatttagccacaaactctactatagtctctt

SEQ ID NO: 954788 - DNA, 33 bp, Homo sapien
cgcatttagccacaaagtctactatagtctctt

SEQ ID NO: 954789 - DNA, 33 bp, Homo sapien
acaatttcaacagtccactaactggtttccttg

SEQ ID NO: 954790 - DNA, 33 bp, Homo sapien
acaatttcaacagtccgctaactggtttccttg

SEQ ID NO: 954791 - DNA, 33 bp, Homo sapien
ctcctgaactctaccacagtcatctcggagcaa

SEQ ID NO: 954792 - DNA, 33 bp, Homo sapien
ctcctgaactctaccatagtcatctcggagcaa

SEQ ID NO: 954793 - DNA, 33 bp, Homo sapien
taattctcccgtgaacccattcccatcaagctt

SEQ ID NO: 954794 - DNA, 33 bp, Homo sapien
taattctcccgtgaacgcattcccatcaagctt

SEQ ID NO: 954795 - DNA, 33 bp, Homo sapien
tggcatgtaccaacacagggatatggacaggtc

SEQ ID NO: 954796 - DNA, 33 bp, Homo sapien
tggcatgtaccaacacggggatatggacaggtc

SEQ ID NO: 954797 - DNA, 33 bp, Homo sapien
gaaagctgcattcaaaaccttcaatgctaatgg

SEQ ID NO: 954798 - DNA, 33 bp, Homo sapien
gaaagctgcattcaaagccttcaatgctaatgg

SEQ ID NO: 954799 - DNA, 33 bp, Homo sapien
gacggccttgctgttaaccaaatgtgtgcagtt

SEQ ID NO: 954800 - DNA, 33 bp, Homo sapien
gacggccttgctgttagccaaatgtgtgcagtt

SEQ ID NO: 954801 - DNA, 33 bp, Homo sapien
ttcaaggaactcagtaaatgtttgtcaagcgaa

SEQ ID NO: 954802 - DNA, 33 bp, Homo sapien
ttcaaggaactcagtagatgtttgtcaagcgaa

SEQ ID NO: 954803 - DNA, 33 bp, Homo sapien
gaatccaataaggaaaggacagccagaaaacaa

SEQ ID NO: 954804 - DNA, 33 bp, Homo sapien
gaatccaataaggaaatgacagccagaaaacaa

SEQ ID NO: 954805 - DNA, 33 bp, Homo sapien
aaccagcagcaatgaaataaatgagtgaatatg

SEQ ID NO: 954806 - DNA, 33 bp, Homo sapien
aaccagcagcaatgaattaaatgagtgaatatg

SEQ ID NO: 954807 - DNA, 33 bp, Homo sapien
ttcagaaacagcctcaaaagcaaaagtctttct

SEQ ID NO: 954808 - DNA, 33 bp, Homo sapien
ttcagaaacagcctcagaagcaaaagtctttct

SEQ ID NO: 954809 - DNA, 33 bp, Homo sapien
ggtaactcacttcacactgctgagagctgggtg

SEQ ID NO: 954810 - DNA, 33 bp, Homo sapien
ggtaactcacttcacattgctgagagctgggtg

SEQ ID NO: 954811 - DNA, 33 bp, Homo sapien
ccctactaagactctaaaaaaatgggcaacaaa

SEQ ID NO: 954812 - DNA, 33 bp, Homo sapien
ccctactaagactctagaaaaatgggcaacaaa

SEQ ID NO: 954813 - DNA, 33 bp, Homo sapien
gaagtagcatatttcacaatgaggacacagaag

SEQ ID NO: 954814 - DNA, 33 bp, Homo sapien
gaagtagcatatttcataatgaggacacagaag

SEQ ID NO: 954815 - DNA, 33 bp, Homo sapien
cctccctcttgctgcaaaatttcccaggggtgt

SEQ ID NO: 954816 - DNA, 33 bp, Homo sapien
cctccctcttgctgcagaatttcccaggggtgt

SEQ ID NO: 954817 - DNA, 33 bp, Homo sapien
gcctttctatatagcacacatctatcccatcgt

SEQ ID NO: 954818 - DNA, 33 bp, Homo sapien
gcctttctatatagcatacatctatcccatcgt

SEQ ID NO: 954819 - DNA, 33 bp, Homo sapien
cacatcagatcactacgggcatcctcctgctta

SEQ ID NO: 954820 - DNA, 33 bp, Homo sapien
cacatcagatcactactggcatcctcctgctta

SEQ ID NO: 954821 - DNA, 33 bp, Homo sapien
ctggatgctgttattacggtattctaggagtca

SEQ ID NO: 954822 - DNA, 33 bp, Homo sapien
ctggatgctgttattatggtattctaggagtca

SEQ ID NO: 954823 - DNA, 33 bp, Homo sapien
tgagcaaaagaatagacggtgaggctttaatgt

SEQ ID NO: 954824 - DNA, 33 bp, Homo sapien
tgagcaaaagaatagatggtgaggctttaatgt

SEQ ID NO: 954825 - DNA, 33 bp, Homo sapien
cttgcctttgtggacacaggactcaaacatttg

SEQ ID NO: 954826 - DNA, 33 bp, Homo sapien
cttgcctttgtggacataggactcaaacatttg

SEQ ID NO: 954827 - DNA, 33 bp, Homo sapien
gccacaacacgaaataactagtatgtcattgtc

SEQ ID NO: 954828 - DNA, 33 bp, Homo sapien
gccacaacacgaaatagctagtatgtcattgtc

SEQ ID NO: 954829 - DNA, 33 bp, Homo sapien
ctagaatcttctgtcccagaatgacttactttt

SEQ ID NO: 954830 - DNA, 33 bp, Homo sapien
ctagaatcttctgtcctagaatgacttactttt

SEQ ID NO: 954831 - DNA, 33 bp, Homo sapien
tcctctgtgcctggacactttgttgcttcctca

SEQ ID NO: 954832 - DNA, 33 bp, Homo sapien
tcctctgtgcctggacgctttgttgcttcctca

SEQ ID NO: 954833 - DNA, 33 bp, Homo sapien
gaaatgacagaaaccacagacagaagagacagg

SEQ ID NO: 954834 - DNA, 33 bp, Homo sapien
gaaatgacagaaaccatagacagaagagacagg

SEQ ID NO: 954835 - DNA, 33 bp, Homo sapien
gtattaaggggaatgacggatgcttcaggataa

SEQ ID NO: 954836 - DNA, 33 bp, Homo sapien
gtattaaggggaatgagggatgcttcaggataa

SEQ ID NO: 954837 - DNA, 33 bp, Homo sapien
ctcatttgatagttaacggtgtgattgtgtgtg

SEQ ID NO: 954838 - DNA, 33 bp, Homo sapien
ctcatttgatagttaatggtgtgattgtgtgtg

SEQ ID NO: 954839 - DNA, 33 bp, Homo sapien
aaatgcattggcctcaagataaactctgagatt

SEQ ID NO: 954840 - DNA, 33 bp, Homo sapien
aaatgcattggcctcaggataaactctgagatt

SEQ ID NO: 954841 - DNA, 33 bp, Homo sapien
gagtccaggaagcaaaggtggttgtggtgcaga

SEQ ID NO: 954842 - DNA, 33 bp, Homo sapien
gagtccaggaagcaaatgtggttgtggtgcaga

SEQ ID NO: 954843 - DNA, 33 bp, Homo sapien
gcctgcattctccaaggctggatatttaggaag

SEQ ID NO: 954844 - DNA, 33 bp, Homo sapien
gcctgcattctccaagtctggatatttaggaag

SEQ ID NO: 954845 - DNA, 33 bp, Homo sapien
tacaaacacacattaggccttttgtgttcatac

SEQ ID NO: 954846 - DNA, 33 bp, Homo sapien
tacaaacacacattagtccttttgtgttcatac

SEQ ID NO: 954847 - DNA, 33 bp, Homo sapien
aatgcagactctagaaacagggtaaccagatgt

SEQ ID NO: 954848 - DNA, 33 bp, Homo sapien
aatgcagactctagaagcagggtaaccagatgt

SEQ ID NO: 954849 - DNA, 33 bp, Homo sapien
tcttggatctggttgacctctttggtccgagta

SEQ ID NO: 954850 - DNA, 33 bp, Homo sapien
tcttggatctggttgagctctttggtccgagta

SEQ ID NO: 954851 - DNA, 33 bp, Homo sapien
tcttgaagaaatccaaaaccagatagccactgc

SEQ ID NO: 954852 - DNA, 33 bp, Homo sapien
tcttgaagaaatccaagaccagatagccactgc

SEQ ID NO: 954853 - DNA, 33 bp, Homo sapien
ttcctcctgttcggaacactcccaaacagggac

SEQ ID NO: 954854 - DNA, 33 bp, Homo sapien
ttcctcctgttcggaatactcccaaacagggac

SEQ ID NO: 954855 - DNA, 33 bp, Homo sapien
ccttgcatggcacagaaagcattagtatggaag

SEQ ID NO: 954856 - DNA, 33 bp, Homo sapien
ccttgcatggcacagagagcattagtatggaag

SEQ ID NO: 954857 - DNA, 33 bp, Homo sapien
cctcaactcctttacaatgctttttctacacat

SEQ ID NO: 954858 - DNA, 33 bp, Homo sapien
cctcaactcctttacagtgctttttctacacat

SEQ ID NO: 954859 - DNA, 33 bp, Homo sapien
tcctgctgagagaaaccgttgtaagggacagga

SEQ ID NO: 954860 - DNA, 33 bp, Homo sapien
tcctgctgagagaaactgttgtaagggacagga

SEQ ID NO: 954861 - DNA, 33 bp, Homo sapien
tttccatatagctggacgctgcagaacattatt

SEQ ID NO: 954862 - DNA, 33 bp, Homo sapien
tttccatatagctggatgctgcagaacattatt

SEQ ID NO: 954863 - DNA, 33 bp, Homo sapien
acaatttgctaagtgtaaattcctttagtttcc

SEQ ID NO: 954864 - DNA, 33 bp, Homo sapien
acaatttgctaagtgtgaattcctttagtttcc

SEQ ID NO: 954865 - DNA, 33 bp, Homo sapien
gtcctgtatagtcttgccaaaaacacttcctgt

SEQ ID NO: 954866 - DNA, 33 bp, Homo sapien
gtcctgtatagtcttgtcaaaaacacttcctgt

SEQ ID NO: 954867 - DNA, 33 bp, Homo sapien
ataaaaaactgctggaatagaagtctaacatgc

SEQ ID NO: 954868 - DNA, 33 bp, Homo sapien
ataaaaaactgctggagtagaagtctaacatgc

SEQ ID NO: 954869 - DNA, 33 bp, Homo sapien
gagaactgttccagtaaaatttagacatctttc

SEQ ID NO: 954870 - DNA, 33 bp, Homo sapien
gagaactgttccagtataatttagacatctttc

SEQ ID NO: 954871 - DNA, 33 bp, Homo sapien
tacataggtgtaaaacaggaaagatacagttta

SEQ ID NO: 954872 - DNA, 33 bp, Homo sapien
tacataggtgtaaaacgggaaagatacagttta

SEQ ID NO: 954873 - DNA, 33 bp, Homo sapien
aaagtttcacaaaggaagaaagcaggccatcct

SEQ ID NO: 954874 - DNA, 33 bp, Homo sapien
aaagtttcacaaaggacgaaagcaggccatcct

SEQ ID NO: 954875 - DNA, 33 bp, Homo sapien
ctcccaataatattgagtactgaactagacata

SEQ ID NO: 954876 - DNA, 33 bp, Homo sapien
ctcccaataatattgattactgaactagacata

SEQ ID NO: 954877 - DNA, 33 bp, Homo sapien
gtaatagtcaaatgtacgtgtttgttcaatgat

SEQ ID NO: 954878 - DNA, 33 bp, Homo sapien
gtaatagtcaaatgtatgtgtttgttcaatgat

SEQ ID NO: 954879 - DNA, 33 bp, Homo sapien
ctaggtagctaaagaacgtggtctacacagaat

SEQ ID NO: 954880 - DNA, 33 bp, Homo sapien
ctaggtagctaaagaatgtggtctacacagaat

SEQ ID NO: 954881 - DNA, 33 bp, Homo sapien
ctaaaatatagccaggacaaaagaaagccactg

SEQ ID NO: 954882 - DNA, 33 bp, Homo sapien
ctaaaatatagccagggcaaaagaaagccactg

SEQ ID NO: 954883 - DNA, 33 bp, Homo sapien
catcagtggaagtgccaatgaagtcaaagttga

SEQ ID NO: 954884 - DNA, 33 bp, Homo sapien
catcagtggaagtgccgatgaagtcaaagttga

SEQ ID NO: 954885 - DNA, 33 bp, Homo sapien
ttggcttcaaccaatgcaaagtaccagcaggag

SEQ ID NO: 954886 - DNA, 33 bp, Homo sapien
ttggcttcaaccaatggaaagtaccagcaggag

SEQ ID NO: 954887 - DNA, 33 bp, Homo sapien
aaggtcggaacagggaactagacagaagagtaa

SEQ ID NO: 954888 - DNA, 33 bp, Homo sapien
aaggtcggaacagggagctagacagaagagtaa

SEQ ID NO: 954889 - DNA, 33 bp, Homo sapien
tgggaccaggccaagacgtttatgactgctaaa

SEQ ID NO: 954890 - DNA, 33 bp, Homo sapien
tgggaccaggccaagaggtttatgactgctaaa

SEQ ID NO: 954891 - DNA, 33 bp, Homo sapien
tgttgcaactgtaaaacgtgatcttggcattgt

SEQ ID NO: 954892 - DNA, 33 bp, Homo sapien
tgttgcaactgtaaaatgtgatcttggcattgt

SEQ ID NO: 954893 - DNA, 33 bp, Homo sapien
aaggatatccaatggacaggtcattgagaagct

SEQ ID NO: 954894 - DNA, 33 bp, Homo sapien
aaggatatccaatggagaggtcattgagaagct

SEQ ID NO: 954895 - DNA, 33 bp, Homo sapien
ctgctacaaaagtgataaagcccttctggctca

SEQ ID NO: 954896 - DNA, 33 bp, Homo sapien
ctgctacaaaagtgattaagcccttctggctca

SEQ ID NO: 954897 - DNA, 33 bp, Homo sapien
tgtggaacatattaccaactttaggctagagta

SEQ ID NO: 954898 - DNA, 33 bp, Homo sapien
tgtggaacatattaccgactttaggctagagta

SEQ ID NO: 954899 - DNA, 33 bp, Homo sapien
gtgatctttttggacactggggcaagattctct

SEQ ID NO: 954900 - DNA, 33 bp, Homo sapien
gtgatctttttggacattggggcaagattctct

SEQ ID NO: 954901 - DNA, 33 bp, Homo sapien
aattacagtaagcaaaaccaccttgcatgatcc

SEQ ID NO: 954902 - DNA, 33 bp, Homo sapien
aattacagtaagcaaatccaccttgcatgatcc

SEQ ID NO: 954903 - DNA, 33 bp, Homo sapien
gagaagtcaacgactcaatgaagaattccactt

SEQ ID NO: 954904 - DNA, 33 bp, Homo sapien
gagaagtcaacgactcgatgaagaattccactt

SEQ ID NO: 954905 - DNA, 33 bp, Homo sapien
ggccagatttatcaaaagaggaacacttgttaa

SEQ ID NO: 954906 - DNA, 33 bp, Homo sapien
ggccagatttatcaaacgaggaacacttgttaa

SEQ ID NO: 954907 - DNA, 33 bp, Homo sapien
ttttctgactgagaccacggctcttacattctc

SEQ ID NO: 954908 - DNA, 33 bp, Homo sapien
ttttctgactgagaccgcggctcttacattctc

SEQ ID NO: 954909 - DNA, 33 bp, Homo sapien
ttttaatgtactgttgcatttgacttgtttcta

SEQ ID NO: 954910 - DNA, 33 bp, Homo sapien
ttttaatgtactgttggatttgacttgtttcta

SEQ ID NO: 954911 - DNA, 33 bp, Homo sapien
tctggtgctttgaaggaagtggaacaggtgaac

SEQ ID NO: 954912 - DNA, 33 bp, Homo sapien
tctggtgctttgaagggagtggaacaggtgaac

SEQ ID NO: 954913 - DNA, 33 bp, Homo sapien
gtctcctggaggaggcaacggacaagaagggct

SEQ ID NO: 954914 - DNA, 33 bp, Homo sapien
gtctcctggaggaggcgacggacaagaagggct

SEQ ID NO: 954915 - DNA, 33 bp, Homo sapien
tgcaactctccattgggattcttcctagatctc

SEQ ID NO: 954916 - DNA, 33 bp, Homo sapien
tgcaactctccattggtattcttcctagatctc

SEQ ID NO: 954917 - DNA, 33 bp, Homo sapien
tcccgatgagcttgcccctcttgttcatacaga

SEQ ID NO: 954918 - DNA, 33 bp, Homo sapien
tcccgatgagcttgcctctcttgttcatacaga

SEQ ID NO: 954919 - DNA, 33 bp, Homo sapien
ttcctgtctaccgttccctctctgctgtctgca

SEQ ID NO: 954920 - DNA, 33 bp, Homo sapien
ttcctgtctaccgttctctctctgctgtctgca

SEQ ID NO: 954921 - DNA, 33 bp, Homo sapien
acgatataaaaccgcactgaataacgaagctac

SEQ ID NO: 954922 - DNA, 33 bp, Homo sapien
acgatataaaaccgcattgaataacgaagctac

SEQ ID NO: 954923 - DNA, 33 bp, Homo sapien
ttacgctacagtagagacacatagaggaacacg

SEQ ID NO: 954924 - DNA, 33 bp, Homo sapien
ttacgctacagtagaggcacatagaggaacacg

SEQ ID NO: 954925 - DNA, 33 bp, Homo sapien
ctcctgatgatttagccgccggtcccactctga

SEQ ID NO: 954926 - DNA, 33 bp, Homo sapien
ctcctgatgatttagctgccggtcccactctga

SEQ ID NO: 954927 - DNA, 33 bp, Homo sapien
tgagtgccaggaaggccagtttcgaacaacgtg

SEQ ID NO: 954928 - DNA, 33 bp, Homo sapien
tgagtgccaggaaggctagtttcgaacaacgtg

SEQ ID NO: 954929 - DNA, 33 bp, Homo sapien
ggaacagtgcaccactaaacctctgtcttcccc

SEQ ID NO: 954930 - DNA, 33 bp, Homo sapien
ggaacagtgcaccactgaacctctgtcttcccc

SEQ ID NO: 954931 - DNA, 33 bp, Homo sapien
ccagtcatcctcattaacatcatctacttcatc

SEQ ID NO: 954932 - DNA, 33 bp, Homo sapien
ccagtcatcctcattagcatcatctacttcatc

SEQ ID NO: 954933 - DNA, 33 bp, Homo sapien
gccgaggatggcgattcaagtaagagtagcttt

SEQ ID NO: 954934 - DNA, 33 bp, Homo sapien
gccgaggatggcgatttaagtaagagtagcttt

SEQ ID NO: 954935 - DNA, 33 bp, Homo sapien
tactgtttaacaatcaggtaccacggaaagcat

SEQ ID NO: 954936 - DNA, 33 bp, Homo sapien
tactgtttaacaatcatgtaccacggaaagcat

SEQ ID NO: 954937 - DNA, 33 bp, Homo sapien
atggaacggcgaccacaattcattgctgagtgc

SEQ ID NO: 954938 - DNA, 33 bp, Homo sapien
atggaacggcgaccaccattcattgctgagtgc

SEQ ID NO: 954939 - DNA, 33 bp, Homo sapien
gtctgattagaagtccaccactgccagagactc

SEQ ID NO: 954940 - DNA, 33 bp, Homo sapien
gtctgattagaagtccgccactgccagagactc

SEQ ID NO: 954941 - DNA, 33 bp, Homo sapien
tttgctcattgactctgaacgtgccattttatg

SEQ ID NO: 954942 - DNA, 33 bp, Homo sapien
tttgctcattgactcttaacgtgccattttatg

SEQ ID NO: 954943 - DNA, 33 bp, Homo sapien
ctggtgagactgtccacaggaggtgggggaact

SEQ ID NO: 954944 - DNA, 33 bp, Homo sapien
ctggtgagactgtccataggaggtgggggaact

SEQ ID NO: 954945 - DNA, 33 bp, Homo sapien
atttctgagtgagatacagtacacgataaaacc

SEQ ID NO: 954946 - DNA, 33 bp, Homo sapien
atttctgagtgagatagagtacacgataaaacc

SEQ ID NO: 954947 - DNA, 33 bp, Homo sapien
ttctttatgatgttaccaaaaactgtatgtggc

SEQ ID NO: 954948 - DNA, 33 bp, Homo sapien
ttctttatgatgttactaaaaactgtatgtggc

SEQ ID NO: 954949 - DNA, 33 bp, Homo sapien
cttatggtaacatcaaatgactagtatgctatg

SEQ ID NO: 954950 - DNA, 33 bp, Homo sapien
cttatggtaacatcaagtgactagtatgctatg

SEQ ID NO: 954951 - DNA, 33 bp, Homo sapien
ttccaggcaaaatcacaacatcctgcaagctgg

SEQ ID NO: 954952 - DNA, 33 bp, Homo sapien
ttccaggcaaaatcacgacatcctgcaagctgg

SEQ ID NO: 954953 - DNA, 33 bp, Homo sapien
gtggaggagtgaaaggacaagtggaaatacata

SEQ ID NO: 954954 - DNA, 33 bp, Homo sapien
gtggaggagtgaaagggcaagtggaaatacata

SEQ ID NO: 954955 - DNA, 33 bp, Homo sapien
tttacattaattgaacgaaaagctagcatatta

SEQ ID NO: 954956 - DNA, 33 bp, Homo sapien
tttacattaattgaactaaaagctagcatatta

SEQ ID NO: 954957 - DNA, 33 bp, Homo sapien
aaatcttggcttacaaagctctgcagtgctatg

SEQ ID NO: 954958 - DNA, 33 bp, Homo sapien
aaatcttggcttacaatgctctgcagtgctatg

SEQ ID NO: 954959 - DNA, 33 bp, Homo sapien
tcggcatcagccacaacgacggtttgtaaaagt

SEQ ID NO: 954960 - DNA, 33 bp, Homo sapien
tcggcatcagccacaatgacggtttgtaaaagt

SEQ ID NO: 954961 - DNA, 33 bp, Homo sapien
tttaccattgacagagcccattacacactatcc

SEQ ID NO: 954962 - DNA, 33 bp, Homo sapien
tttaccattgacagagtccattacacactatcc

SEQ ID NO: 954963 - DNA, 33 bp, Homo sapien
atgggtctgctgaggggattacaccaaattaga

SEQ ID NO: 954964 - DNA, 33 bp, Homo sapien
atgggtctgctgagggtattacaccaaattaga

SEQ ID NO: 954965 - DNA, 33 bp, Homo sapien
aaagaggatgggtagacggcagagttactccat

SEQ ID NO: 954966 - DNA, 33 bp, Homo sapien
aaagaggatgggtagatggcagagttactccat

SEQ ID NO: 954967 - DNA, 33 bp, Homo sapien
cttccttctctacttcaactcacaagttcagcc

SEQ ID NO: 954968 - DNA, 33 bp, Homo sapien
cttccttctctacttcgactcacaagttcagcc

SEQ ID NO: 954969 - DNA, 33 bp, Homo sapien
tgcatataaactgctccaaaggctcacagaaat

SEQ ID NO: 954970 - DNA, 33 bp, Homo sapien
tgcatataaactgctctaaaggctcacagaaat

SEQ ID NO: 954971 - DNA, 33 bp, Homo sapien
gcctagttctctggctcagataccagttatggt

SEQ ID NO: 954972 - DNA, 33 bp, Homo sapien
gcctagttctctggcttagataccagttatggt

SEQ ID NO: 954973 - DNA, 33 bp, Homo sapien
atcgtgatctgtgaacaatatcaagggtcattc

SEQ ID NO: 954974 - DNA, 33 bp, Homo sapien
atcgtgatctgtgaactatatcaagggtcattc

SEQ ID NO: 954975 - DNA, 33 bp, Homo sapien
tcttgctctgttagccagctgaagaagtgcagt

SEQ ID NO: 954976 - DNA, 33 bp, Homo sapien
tcttgctctgttagccggctgaagaagtgcagt

SEQ ID NO: 954977 - DNA, 33 bp, Homo sapien
tgcaaggataatctccacctattcccagtacct

SEQ ID NO: 954978 - DNA, 33 bp, Homo sapien
tgcaaggataatctccgcctattcccagtacct

SEQ ID NO: 954979 - DNA, 33 bp, Homo sapien
taccctccttattaaacgatgcatgacactgta

SEQ ID NO: 954980 - DNA, 33 bp, Homo sapien
taccctccttattaaatgatgcatgacactgta

SEQ ID NO: 954981 - DNA, 33 bp, Homo sapien
gaattaggagtagatacgtagtgaagaaagctg

SEQ ID NO: 954982 - DNA, 33 bp, Homo sapien
gaattaggagtagatatgtagtgaagaaagctg

SEQ ID NO: 954983 - DNA, 33 bp, Homo sapien
tatactttgaaaaaataaacatggtgatatttc

SEQ ID NO: 954984 - DNA, 33 bp, Homo sapien
tatactttgaaaaaatgaacatggtgatatttc

SEQ ID NO: 954985 - DNA, 33 bp, Homo sapien
taaaccagtagaccacacttgaggttgtaaggc

SEQ ID NO: 954986 - DNA, 33 bp, Homo sapien
taaaccagtagaccacgcttgaggttgtaaggc

SEQ ID NO: 954987 - DNA, 33 bp, Homo sapien
ccaaatcagtacttacagaggtttcataatcat

SEQ ID NO: 954988 - DNA, 33 bp, Homo sapien
ccaaatcagtacttacggaggtttcataatcat

SEQ ID NO: 954989 - DNA, 33 bp, Homo sapien
gaatgcctgtttacaacatgagggctgcaaaaa

SEQ ID NO: 954990 - DNA, 33 bp, Homo sapien
gaatgcctgtttacaatatgagggctgcaaaaa

SEQ ID NO: 954991 - DNA, 33 bp, Homo sapien
attctgtggtcataaaataaaacagggtgtaac

SEQ ID NO: 954992 - DNA, 33 bp, Homo sapien
attctgtggtcataaactaaaacagggtgtaac

SEQ ID NO: 954993 - DNA, 33 bp, Homo sapien
cattaagctcttagcacagtttagtcggatacc

SEQ ID NO: 954994 - DNA, 33 bp, Homo sapien
cattaagctcttagcatagtttagtcggatacc

SEQ ID NO: 954995 - DNA, 33 bp, Homo sapien
tataaatgcacctccacgttgaagttgttttga

SEQ ID NO: 954996 - DNA, 33 bp, Homo sapien
tataaatgcacctccaggttgaagttgttttga

SEQ ID NO: 954997 - DNA, 33 bp, Homo sapien
aatgttacttattggccgaaatcatctaatgtc

SEQ ID NO: 954998 - DNA, 33 bp, Homo sapien
aatgttacttattggctgaaatcatctaatgtc

SEQ ID NO: 954999 - DNA, 33 bp, Homo sapien
tactctggaagcaagactaaactgtggaagtgt

SEQ ID NO: 955000 - DNA, 33 bp, Homo sapien
tactctggaagcaagattaaactgtggaagtgt

SEQ ID NO: 955001 - DNA, 33 bp, Homo sapien
cgtgccatgaagagaacgacgccctggaggaaa

SEQ ID NO: 955002 - DNA, 33 bp, Homo sapien
cgtgccatgaagagaaggacgccctggaggaaa

SEQ ID NO: 955003 - DNA, 33 bp, Homo sapien
agagcaagattttccaagaggatgtgctgtacc

SEQ ID NO: 955004 - DNA, 33 bp, Homo sapien
agagcaagattttccaggaggatgtgctgtacc

SEQ ID NO: 955005 - DNA, 33 bp, Homo sapien
atcaacctttgtgtgccagggtctaagtagggt

SEQ ID NO: 955006 - DNA, 33 bp, Homo sapien
atcaacctttgtgtgcgagggtctaagtagggt

SEQ ID NO: 955007 - DNA, 33 bp, Homo sapien
tctccggctctttgtgaaaggaatcttggcgca

SEQ ID NO: 955008 - DNA, 33 bp, Homo sapien
tctccggctctttgtggaaggaatcttggcgca

SEQ ID NO: 955009 - DNA, 33 bp, Homo sapien
aactggacaaaatcacactctgccatgaaggtc

SEQ ID NO: 955010 - DNA, 33 bp, Homo sapien
aactggacaaaatcacgctctgccatgaaggtc

SEQ ID NO: 955011 - DNA, 33 bp, Homo sapien
atgtcagtgaacggaactgaagagcaagacatg

SEQ ID NO: 955012 - DNA, 33 bp, Homo sapien
atgtcagtgaacggaattgaagagcaagacatg

SEQ ID NO: 955013 - DNA, 33 bp, Homo sapien
ctcggatgagggactcaaagctgggctggaagt

SEQ ID NO: 955014 - DNA, 33 bp, Homo sapien
ctcggatgagggactcgaagctgggctggaagt

SEQ ID NO: 955015 - DNA, 33 bp, Homo sapien
tcctgcaccgtggaagccaccttgcgcacacac

SEQ ID NO: 955016 - DNA, 33 bp, Homo sapien
tcctgcaccgtggaaggcaccttgcgcacacac

SEQ ID NO: 955017 - DNA, 33 bp, Homo sapien
cggggtggacagtggacgtgccacggtgctgtg

SEQ ID NO: 955018 - DNA, 33 bp, Homo sapien
cggggtggacagtggatgtgccacggtgctgtg

SEQ ID NO: 955019 - DNA, 33 bp, Homo sapien
tgggaatctggggacacgcagctagaaatcctc

SEQ ID NO: 955020 - DNA, 33 bp, Homo sapien
tgggaatctggggacaggcagctagaaatcctc

SEQ ID NO: 955021 - DNA, 33 bp, Homo sapien
ggtaagaaatgcattcacaatgtgtcttctctc

SEQ ID NO: 955022 - DNA, 33 bp, Homo sapien
ggtaagaaatgcattcgcaatgtgtcttctctc

SEQ ID NO: 955023 - DNA, 33 bp, Homo sapien
ctttttccacagttaacgtctctgaaatcaaag

SEQ ID NO: 955024 - DNA, 33 bp, Homo sapien
ctttttccacagttaatgtctctgaaatcaaag

SEQ ID NO: 955025 - DNA, 33 bp, Homo sapien
tgatttgaatttgttcccattttatgccagctc

SEQ ID NO: 955026 - DNA, 33 bp, Homo sapien
tgatttgaatttgttctcattttatgccagctc

SEQ ID NO: 955027 - DNA, 33 bp, Homo sapien
cttggtactgcagttaagaggaaaacccttgaa

SEQ ID NO: 955028 - DNA, 33 bp, Homo sapien
cttggtactgcagttacgaggaaaacccttgaa

SEQ ID NO: 955029 - DNA, 33 bp, Homo sapien
tgttctcagtgctttacgttgctcatccaactt

SEQ ID NO: 955030 - DNA, 33 bp, Homo sapien
tgttctcagtgctttatgttgctcatccaactt

SEQ ID NO: 955031 - DNA, 33 bp, Homo sapien
gacctgagtcagtagtcacagtgtctgtgtttg

SEQ ID NO: 955032 - DNA, 33 bp, Homo sapien
gacctgagtcagtagttacagtgtctgtgtttg

SEQ ID NO: 955033 - DNA, 33 bp, Homo sapien
gagcacagtgggaatgaaacccaggcagcctgg

SEQ ID NO: 955034 - DNA, 33 bp, Homo sapien
gagcacagtgggaatggaacccaggcagcctgg

SEQ ID NO: 955035 - DNA, 33 bp, Homo sapien
ccatgacagatctgaaagggaagtggtttcaag

SEQ ID NO: 955036 - DNA, 33 bp, Homo sapien
ccatgacagatctgaatgggaagtggtttcaag

SEQ ID NO: 955037 - DNA, 33 bp, Homo sapien
gatttttaagagctacagaagtaaaatgagtgg

SEQ ID NO: 955038 - DNA, 33 bp, Homo sapien
gatttttaagagctacggaagtaaaatgagtgg

SEQ ID NO: 955039 - DNA, 33 bp, Homo sapien
aagaaaaatttgaaacagttgcaatgaccagca

SEQ ID NO: 955040 - DNA, 33 bp, Homo sapien
aagaaaaatttgaaacggttgcaatgaccagca

SEQ ID NO: 955041 - DNA, 33 bp, Homo sapien
agaagcgttagaagataaaattgagaaacagaa

SEQ ID NO: 955042 - DNA, 33 bp, Homo sapien
agaagcgttagaagatgaaattgagaaacagaa

SEQ ID NO: 955043 - DNA, 33 bp, Homo sapien
aaaactatgttaaaacaatggactagtcataca

SEQ ID NO: 955044 - DNA, 33 bp, Homo sapien
aaaactatgttaaaactatggactagtcataca

SEQ ID NO: 955045 - DNA, 33 bp, Homo sapien
ataacaagacagggaaagtagctttttaaggct

SEQ ID NO: 955046 - DNA, 33 bp, Homo sapien
ataacaagacagggaaggtagctttttaaggct

SEQ ID NO: 955047 - DNA, 33 bp, Homo sapien
ggcagtgagtaatagccctggaatgattaaaac

SEQ ID NO: 955048 - DNA, 33 bp, Homo sapien
ggcagtgagtaatagctctggaatgattaaaac

SEQ ID NO: 955049 - DNA, 33 bp, Homo sapien
aggggcatgtggagaaagcctcactgatggata

SEQ ID NO: 955050 - DNA, 33 bp, Homo sapien
aggggcatgtggagaaggcctcactgatggata

SEQ ID NO: 955051 - DNA, 33 bp, Homo sapien
tgctggagataagggcaaaagggtgtgctggaa

SEQ ID NO: 955052 - DNA, 33 bp, Homo sapien
tgctggagataagggcgaaagggtgtgctggaa

SEQ ID NO: 955053 - DNA, 33 bp, Homo sapien
cttctcacctgatctaataagaatagtgactga

SEQ ID NO: 955054 - DNA, 33 bp, Homo sapien
cttctcacctgatctagtaagaatagtgactga

SEQ ID NO: 955055 - DNA, 33 bp, Homo sapien
atccatgaatttagcaaaactactaagccaggt

SEQ ID NO: 955056 - DNA, 33 bp, Homo sapien
atccatgaatttagcagaactactaagccaggt

SEQ ID NO: 955057 - DNA, 33 bp, Homo sapien
agggcagaggtgactacagaaaaaaggaccaag

SEQ ID NO: 955058 - DNA, 33 bp, Homo sapien
agggcagaggtgactatagaaaaaaggaccaag

SEQ ID NO: 955059 - DNA, 33 bp, Homo sapien
gcttgcctttctcccaaacgttgatttctccac

SEQ ID NO: 955060 - DNA, 33 bp, Homo sapien
gcttgcctttctcccacacgttgatttctccac

SEQ ID NO: 955061 - DNA, 33 bp, Homo sapien
ggagtgagagagaagaacgagtattagagacga

SEQ ID NO: 955062 - DNA, 33 bp, Homo sapien
ggagtgagagagaagaccgagtattagagacga

SEQ ID NO: 955063 - DNA, 33 bp, Homo sapien
agaagctaaaagtggccagtctgagttgctaaa

SEQ ID NO: 955064 - DNA, 33 bp, Homo sapien
agaagctaaaagtggcgagtctgagttgctaaa

SEQ ID NO: 955065 - DNA, 33 bp, Homo sapien
ttccagtaccagcttcaccattcactgctgtgt

SEQ ID NO: 955066 - DNA, 33 bp, Homo sapien
ttccagtaccagcttcgccattcactgctgtgt

SEQ ID NO: 955067 - DNA, 33 bp, Homo sapien
gatatagtgatccctacgcctgaactgtcactg

SEQ ID NO: 955068 - DNA, 33 bp, Homo sapien
gatatagtgatccctatgcctgaactgtcactg

SEQ ID NO: 955069 - DNA, 33 bp, Homo sapien
acaggaggcttcacccactactttccttcacac

SEQ ID NO: 955070 - DNA, 33 bp, Homo sapien
acaggaggcttcacccgctactttccttcacac

SEQ ID NO: 955071 - DNA, 33 bp, Homo sapien
gggcaacactcagacaggcacccaggctgggaa

SEQ ID NO: 955072 - DNA, 33 bp, Homo sapien
gggcaacactcagacatgcacccaggctgggaa

SEQ ID NO: 955073 - DNA, 33 bp, Homo sapien
agacttcaaccccctacgtggcaagtccctgcc

SEQ ID NO: 955074 - DNA, 33 bp, Homo sapien
agacttcaaccccctatgtggcaagtccctgcc

SEQ ID NO: 955075 - DNA, 33 bp, Homo sapien
gctctaagcccctccacgacccttgctgtgctc

SEQ ID NO: 955076 - DNA, 33 bp, Homo sapien
gctctaagcccctccaggacccttgctgtgctc

SEQ ID NO: 955077 - DNA, 33 bp, Homo sapien
attaaacaacaatgcaaagcaggttgtaattaa

SEQ ID NO: 955078 - DNA, 33 bp, Homo sapien
attaaacaacaatgcagagcaggttgtaattaa

SEQ ID NO: 955079 - DNA, 33 bp, Homo sapien
gacctcagttctgtgccgacaagtctgaagtga

SEQ ID NO: 955080 - DNA, 33 bp, Homo sapien
gacctcagttctgtgcggacaagtctgaagtga

SEQ ID NO: 955081 - DNA, 33 bp, Homo sapien
gccactgaggtgggtggaatgaagcccgtggga

SEQ ID NO: 955082 - DNA, 33 bp, Homo sapien
gccactgaggtgggtgtaatgaagcccgtggga

SEQ ID NO: 955083 - DNA, 33 bp, Homo sapien
ttttttgctatgattgccaaacttcccggattg

SEQ ID NO: 955084 - DNA, 33 bp, Homo sapien
ttttttgctatgattgtcaaacttcccggattg

SEQ ID NO: 955085 - DNA, 33 bp, Homo sapien
tgaagcagatgcagaaactccactggtgctatg

SEQ ID NO: 955086 - DNA, 33 bp, Homo sapien
tgaagcagatgcagaagctccactggtgctatg

SEQ ID NO: 955087 - DNA, 33 bp, Homo sapien
cccagttgagcccttcagaaccagccatgagac

SEQ ID NO: 955088 - DNA, 33 bp, Homo sapien
cccagttgagcccttcggaaccagccatgagac

SEQ ID NO: 955089 - DNA, 33 bp, Homo sapien
catagcagtgtgacacagagctcaaggcagcgt

SEQ ID NO: 955090 - DNA, 33 bp, Homo sapien
catagcagtgtgacacggagctcaaggcagcgt

SEQ ID NO: 955091 - DNA, 33 bp, Homo sapien
tattgacaacactaagcaatcattggatggaac

SEQ ID NO: 955092 - DNA, 33 bp, Homo sapien
tattgacaacactaagtaatcattggatggaac

SEQ ID NO: 955093 - DNA, 33 bp, Homo sapien
catgtgctccctggccacagatcctgctcctgc

SEQ ID NO: 955094 - DNA, 33 bp, Homo sapien
catgtgctccctggccgcagatcctgctcctgc

SEQ ID NO: 955095 - DNA, 33 bp, Homo sapien
aggaaaagagcagaccaacaggcaaacgtggag

SEQ ID NO: 955096 - DNA, 33 bp, Homo sapien
aggaaaagagcagaccgacaggcaaacgtggag

SEQ ID NO: 955097 - DNA, 33 bp, Homo sapien
ctttctaaacatgcacggtcttattttattccc

SEQ ID NO: 955098 - DNA, 33 bp, Homo sapien
ctttctaaacatgcactgtcttattttattccc

SEQ ID NO: 955099 - DNA, 33 bp, Homo sapien
aattatcctcaggccacgtggaagcacctcctg

SEQ ID NO: 955100 - DNA, 33 bp, Homo sapien
aattatcctcaggccatgtggaagcacctcctg

SEQ ID NO: 955101 - DNA, 33 bp, Homo sapien
caacgtatacttagaacgaaatttgctacctat

SEQ ID NO: 955102 - DNA, 33 bp, Homo sapien
caacgtatacttagaaggaaatttgctacctat

SEQ ID NO: 955103 - DNA, 33 bp, Homo sapien
tgccaggcctccagtaccctcatctcagtaaag

SEQ ID NO: 955104 - DNA, 33 bp, Homo sapien
tgccaggcctccagtatcctcatctcagtaaag

SEQ ID NO: 955105 - DNA, 33 bp, Homo sapien
cctctcccatctatggaaatatttgctgccatc

SEQ ID NO: 955106 - DNA, 33 bp, Homo sapien
cctctcccatctatgggaatatttgctgccatc

SEQ ID NO: 955107 - DNA, 33 bp, Homo sapien
cactggtgcacatggaaacacagcatctcacag

SEQ ID NO: 955108 - DNA, 33 bp, Homo sapien
cactggtgcacatggagacacagcatctcacag

SEQ ID NO: 955109 - DNA, 33 bp, Homo sapien
ctgcttgcgcatggcaacccctcagatatttga

SEQ ID NO: 955110 - DNA, 33 bp, Homo sapien
ctgcttgcgcatggcagcccctcagatatttga

SEQ ID NO: 955111 - DNA, 33 bp, Homo sapien
cagccctgtgctagaaggaaccctgcatgtagt

SEQ ID NO: 955112 - DNA, 33 bp, Homo sapien
cagccctgtgctagaatgaaccctgcatgtagt

SEQ ID NO: 955113 - DNA, 33 bp, Homo sapien
gtccagatgagcctgcaatctgatcagaggaca

SEQ ID NO: 955114 - DNA, 33 bp, Homo sapien
gtccagatgagcctgcgatctgatcagaggaca

SEQ ID NO: 955115 - DNA, 33 bp, Homo sapien
catttctcctggcatcgctagctcttttagatg

SEQ ID NO: 955116 - DNA, 33 bp, Homo sapien
catttctcctggcatctctagctcttttagatg

SEQ ID NO: 955117 - DNA, 33 bp, Homo sapien
caccttctgacccagacggtgtttccgtgccca

SEQ ID NO: 955118 - DNA, 33 bp, Homo sapien
caccttctgacccagatggtgtttccgtgccca

SEQ ID NO: 955119 - DNA, 33 bp, Homo sapien
agaggaagggatgtgaaaatacagatcatgaca

SEQ ID NO: 955120 - DNA, 33 bp, Homo sapien
agaggaagggatgtgagaatacagatcatgaca

SEQ ID NO: 955121 - DNA, 33 bp, Homo sapien
gaaaaatgaagaggcaaaaaagtgatctttcca

SEQ ID NO: 955122 - DNA, 33 bp, Homo sapien
gaaaaatgaagaggcagaaaagtgatctttcca

SEQ ID NO: 955123 - DNA, 33 bp, Homo sapien
tgtccagaaacccggcaaagtctcaagccacac

SEQ ID NO: 955124 - DNA, 33 bp, Homo sapien
tgtccagaaacccggcgaagtctcaagccacac

SEQ ID NO: 955125 - DNA, 33 bp, Homo sapien
agtgtatgtttatagcacttgtgttgttgtgaa

SEQ ID NO: 955126 - DNA, 33 bp, Homo sapien
agtgtatgtttatagcgcttgtgttgttgtgaa

SEQ ID NO: 955127 - DNA, 33 bp, Homo sapien
cctggtttgaggaggaaagaaaagaccaaaaca

SEQ ID NO: 955128 - DNA, 33 bp, Homo sapien
cctggtttgaggaggagagaaaagaccaaaaca

SEQ ID NO: 955129 - DNA, 33 bp, Homo sapien
ccatagaatcttaccacattttgccatgaaata

SEQ ID NO: 955130 - DNA, 33 bp, Homo sapien
ccatagaatcttaccatattttgccatgaaata

SEQ ID NO: 955131 - DNA, 33 bp, Homo sapien
tcctgccgaaataacaatacctcacatttatag

SEQ ID NO: 955132 - DNA, 33 bp, Homo sapien
tcctgccgaaataacagtacctcacatttatag

SEQ ID NO: 955133 - DNA, 33 bp, Homo sapien
aaaacttgttcaaaaccgctcctgaggcagcga

SEQ ID NO: 955134 - DNA, 33 bp, Homo sapien
aaaacttgttcaaaactgctcctgaggcagcga

SEQ ID NO: 955135 - DNA, 33 bp, Homo sapien
cacctgccatacagtaagcacctgctcagtgaa

SEQ ID NO: 955136 - DNA, 33 bp, Homo sapien
cacctgccatacagtaggcacctgctcagtgaa

SEQ ID NO: 955137 - DNA, 33 bp, Homo sapien
catgtggttaggctcactgaaagcagtctgatc

SEQ ID NO: 955138 - DNA, 33 bp, Homo sapien
catgtggttaggctcattgaaagcagtctgatc

SEQ ID NO: 955139 - DNA, 33 bp, Homo sapien
agctaaggtgacagaaattccttgatataaagc

SEQ ID NO: 955140 - DNA, 33 bp, Homo sapien
agctaaggtgacagaagttccttgatataaagc

SEQ ID NO: 955141 - DNA, 33 bp, Homo sapien
acaaaagctctttgaaaaatgaaaagcagtgca

SEQ ID NO: 955142 - DNA, 33 bp, Homo sapien
acaaaagctctttgaagaatgaaaagcagtgca

SEQ ID NO: 955143 - DNA, 33 bp, Homo sapien
tccaacatgtcacagaggatcaaacagccctga

SEQ ID NO: 955144 - DNA, 33 bp, Homo sapien
tccaacatgtcacagatgatcaaacagccctga

SEQ ID NO: 955145 - DNA, 33 bp, Homo sapien
gagtgggacttttgctcagatgcccaacttcag

SEQ ID NO: 955146 - DNA, 33 bp, Homo sapien
gagtgggacttttgcttagatgcccaacttcag

SEQ ID NO: 955147 - DNA, 33 bp, Homo sapien
cttctcaatccagggcaaggtgtgagaggcacg

SEQ ID NO: 955148 - DNA, 33 bp, Homo sapien
cttctcaatccagggcgaggtgtgagaggcacg

SEQ ID NO: 955149 - DNA, 33 bp, Homo sapien
ccttcttggtgaaggcaccgttattagagttaa

SEQ ID NO: 955150 - DNA, 33 bp, Homo sapien
ccttcttggtgaaggcgccgttattagagttaa

SEQ ID NO: 955151 - DNA, 33 bp, Homo sapien
aggagatgctctcccacatgtcattcattcatt

SEQ ID NO: 955152 - DNA, 33 bp, Homo sapien
aggagatgctctcccatatgtcattcattcatt

SEQ ID NO: 955153 - DNA, 33 bp, Homo sapien
taacagacctatgagaaggcagattcagagaga

SEQ ID NO: 955154 - DNA, 33 bp, Homo sapien
taacagacctatgagacggcagattcagagaga

SEQ ID NO: 955155 - DNA, 33 bp, Homo sapien
gccttgctctgcatcaaattttcttcccttcca

SEQ ID NO: 955156 - DNA, 33 bp, Homo sapien
gccttgctctgcatcatattttcttcccttcca

SEQ ID NO: 955157 - DNA, 33 bp, Homo sapien
gcatgcttatatttgaaactcaggaacacaggt

SEQ ID NO: 955158 - DNA, 33 bp, Homo sapien
gcatgcttatatttgacactcaggaacacaggt

SEQ ID NO: 955159 - DNA, 33 bp, Homo sapien
agcccatgactcatccggcttccactctctgag

SEQ ID NO: 955160 - DNA, 33 bp, Homo sapien
agcccatgactcatcctgcttccactctctgag

SEQ ID NO: 955161 - DNA, 33 bp, Homo sapien
gcagctagcgagatgcaaggcagagaggggacc

SEQ ID NO: 955162 - DNA, 33 bp, Homo sapien
gcagctagcgagatgcgaggcagagaggggacc

SEQ ID NO: 955163 - DNA, 33 bp, Homo sapien
aataaaggcggcttgcaacaggctttccaatag

SEQ ID NO: 955164 - DNA, 33 bp, Homo sapien
aataaaggcggcttgccacaggctttccaatag

SEQ ID NO: 955165 - DNA, 33 bp, Homo sapien
aggcacttttatctccaaatcctcatgccaatc

SEQ ID NO: 955166 - DNA, 33 bp, Homo sapien
aggcacttttatctccgaatcctcatgccaatc

SEQ ID NO: 955167 - DNA, 33 bp, Homo sapien
ctttaagttcaattctcacctccaccagatgga

SEQ ID NO: 955168 - DNA, 33 bp, Homo sapien
ctttaagttcaattcttacctccaccagatgga

SEQ ID NO: 955169 - DNA, 33 bp, Homo sapien
aggggaagggtgagcacgggtgtttgacacata

SEQ ID NO: 955170 - DNA, 33 bp, Homo sapien
aggggaagggtgagcatgggtgtttgacacata

SEQ ID NO: 955171 - DNA, 33 bp, Homo sapien
ttttctagttgcacacgggtatagtgggaaggg

SEQ ID NO: 955172 - DNA, 33 bp, Homo sapien
ttttctagttgcacactggtatagtgggaaggg

SEQ ID NO: 955173 - DNA, 33 bp, Homo sapien
atagcattctcccttcaccgcactaccccagcc

SEQ ID NO: 955174 - DNA, 33 bp, Homo sapien
atagcattctcccttcgccgcactaccccagcc

SEQ ID NO: 955175 - DNA, 33 bp, Homo sapien
ttccacacacaactccacagatggttgctgcta

SEQ ID NO: 955176 - DNA, 33 bp, Homo sapien
ttccacacacaactccgcagatggttgctgcta

SEQ ID NO: 955177 - DNA, 33 bp, Homo sapien
tccagtgtaatcattacaaaccttctgcaccct

SEQ ID NO: 955178 - DNA, 33 bp, Homo sapien
tccagtgtaatcattataaaccttctgcaccct

SEQ ID NO: 955179 - DNA, 33 bp, Homo sapien
tggagtgtttgagagaagcacagatttatttat

SEQ ID NO: 955180 - DNA, 33 bp, Homo sapien
tggagtgtttgagagaggcacagatttatttat

SEQ ID NO: 955181 - DNA, 33 bp, Homo sapien
atcccagcccttaaaacccttgtgttgtttctt

SEQ ID NO: 955182 - DNA, 33 bp, Homo sapien
atcccagcccttaaaatccttgtgttgtttctt

SEQ ID NO: 955183 - DNA, 33 bp, Homo sapien
tcctgcagacctggtccagaacactacttcagg

SEQ ID NO: 955184 - DNA, 33 bp, Homo sapien
tcctgcagacctggtcgagaacactacttcagg

SEQ ID NO: 955185 - DNA, 33 bp, Homo sapien
gtcttcaggtaagggacaatgtgatctccccaa

SEQ ID NO: 955186 - DNA, 33 bp, Homo sapien
gtcttcaggtaagggataatgtgatctccccaa

SEQ ID NO: 955187 - DNA, 33 bp, Homo sapien
tacagcggggctggagactaatcctttccggtg

SEQ ID NO: 955188 - DNA, 33 bp, Homo sapien
tacagcggggctggagcctaatcctttccggtg

SEQ ID NO: 955189 - DNA, 33 bp, Homo sapien
tctgtttgtatcatctcaccctttctaccctgt

SEQ ID NO: 955190 - DNA, 33 bp, Homo sapien
tctgtttgtatcatcttaccctttctaccctgt

SEQ ID NO: 955191 - DNA, 33 bp, Homo sapien
acgttgcgtgtgaattcaatgagataatgaaca

SEQ ID NO: 955192 - DNA, 33 bp, Homo sapien
acgttgcgtgtgaatttaatgagataatgaaca

SEQ ID NO: 955193 - DNA, 33 bp, Homo sapien
tgaaatgtatttcttacggtattctgtccagaa

SEQ ID NO: 955194 - DNA, 33 bp, Homo sapien
tgaaatgtatttcttatggtattctgtccagaa

SEQ ID NO: 955195 - DNA, 33 bp, Homo sapien
atttagtgggccatgagcagcattagaaagatg

SEQ ID NO: 955196 - DNA, 33 bp, Homo sapien
atttagtgggccatgatcagcattagaaagatg

SEQ ID NO: 955197 - DNA, 33 bp, Homo sapien
cacctgggatttcgtagacagtgggagagggca

SEQ ID NO: 955198 - DNA, 33 bp, Homo sapien
cacctgggatttcgtatacagtgggagagggca

SEQ ID NO: 955199 - DNA, 33 bp, Homo sapien
gtggcatttcattcaccggcttttctctcccct

SEQ ID NO: 955200 - DNA, 33 bp, Homo sapien
gtggcatttcattcactggcttttctctcccct

SEQ ID NO: 955201 - DNA, 33 bp, Homo sapien
tgacattatactgattaaacctcacgagcaaga

SEQ ID NO: 955202 - DNA, 33 bp, Homo sapien
tgacattatactgattgaacctcacgagcaaga

SEQ ID NO: 955203 - DNA, 33 bp, Homo sapien
tttttggcaaaggtataaagaccatttaattga

SEQ ID NO: 955204 - DNA, 33 bp, Homo sapien
tttttggcaaaggtatcaagaccatttaattga

SEQ ID NO: 955205 - DNA, 33 bp, Homo sapien
taagcaattaatggaacggtttgacaaaaatat

SEQ ID NO: 955206 - DNA, 33 bp, Homo sapien
taagcaattaatggaatggtttgacaaaaatat

SEQ ID NO: 955207 - DNA, 33 bp, Homo sapien
aatcttccaagtagaaagaacatgaaagtctaa

SEQ ID NO: 955208 - DNA, 33 bp, Homo sapien
aatcttccaagtagaaggaacatgaaagtctaa

SEQ ID NO: 955209 - DNA, 33 bp, Homo sapien
ccttccccattatcacagatacttgccaagagg

SEQ ID NO: 955210 - DNA, 33 bp, Homo sapien
ccttccccattatcacggatacttgccaagagg

SEQ ID NO: 955211 - DNA, 33 bp, Homo sapien
tgtgccggaactataactaagttggttctctta

SEQ ID NO: 955212 - DNA, 33 bp, Homo sapien
tgtgccggaactataattaagttggttctctta

SEQ ID NO: 955213 - DNA, 33 bp, Homo sapien
aagaaacaggagctgacatcaaatatgtatctc

SEQ ID NO: 955214 - DNA, 33 bp, Homo sapien
aagaaacaggagctgagatcaaatatgtatctc

SEQ ID NO: 955215 - DNA, 33 bp, Homo sapien
agtccttaggccaggaagtagttcagggtttaa

SEQ ID NO: 955216 - DNA, 33 bp, Homo sapien
agtccttaggccaggaggtagttcagggtttaa

SEQ ID NO: 955217 - DNA, 33 bp, Homo sapien
gggacaaacacaggtacgaaagaatgaaagttt

SEQ ID NO: 955218 - DNA, 33 bp, Homo sapien
gggacaaacacaggtatgaaagaatgaaagttt

SEQ ID NO: 955219 - DNA, 33 bp, Homo sapien
gattggaggctaaagacggccagggttggcggt

SEQ ID NO: 955220 - DNA, 33 bp, Homo sapien
gattggaggctaaagatggccagggttggcggt

SEQ ID NO: 955221 - DNA, 33 bp, Homo sapien
tctgagatgagtcagacgcttacagaggggcca

SEQ ID NO: 955222 - DNA, 33 bp, Homo sapien
tctgagatgagtcagatgcttacagaggggcca

SEQ ID NO: 955223 - DNA, 33 bp, Homo sapien
atcacaactcagttacaataaaatacttgacac

SEQ ID NO: 955224 - DNA, 33 bp, Homo sapien
atcacaactcagttaccataaaatacttgacac

SEQ ID NO: 955225 - DNA, 33 bp, Homo sapien
acacttataataccagcactttgagaggacgag

SEQ ID NO: 955226 - DNA, 33 bp, Homo sapien
acacttataataccaggactttgagaggacgag

SEQ ID NO: 955227 - DNA, 33 bp, Homo sapien
cacaacctggataaaaccattcatacctcaaat

SEQ ID NO: 955228 - DNA, 33 bp, Homo sapien
cacaacctggataaaatcattcatacctcaaat

SEQ ID NO: 955229 - DNA, 33 bp, Homo sapien
aatgggtggaaagtgaaccttgtctaggtaagt

SEQ ID NO: 955230 - DNA, 33 bp, Homo sapien
aatgggtggaaagtgatccttgtctaggtaagt

SEQ ID NO: 955231 - DNA, 33 bp, Homo sapien
ctagcaacgaatgaaaactaagtgtaacaaggg

SEQ ID NO: 955232 - DNA, 33 bp, Homo sapien
ctagcaacgaatgaaagctaagtgtaacaaggg

SEQ ID NO: 955233 - DNA, 33 bp, Homo sapien
gttacaggctccaggacgttctgatctatgaga

SEQ ID NO: 955234 - DNA, 33 bp, Homo sapien
gttacaggctccaggatgttctgatctatgaga

SEQ ID NO: 955235 - DNA, 33 bp, Homo sapien; identical to SEQ ID NO: 955233

SEQ ID NO: 955236 - DNA, 33 bp, Homo sapien; identical to SEQ ID NO: 955234

SEQ ID NO: 955237 - DNA, 33 bp, Homo sapien
taactcatagttcacgaatgaaatcaaagagaa

SEQ ID NO: 955238 - DNA, 33 bp, Homo sapien
taactcatagttcacggatgaaatcaaagagaa

SEQ ID NO: 955239 - DNA, 33 bp, Homo sapien
aataagatgtctgagcgatatccaagattatgt

SEQ ID NO: 955240 - DNA, 33 bp, Homo sapien
aataagatgtctgagctatatccaagattatgt

SEQ ID NO: 955241 - DNA, 33 bp, Homo sapien
gcttccagcttctgcacactttggttctttctc

SEQ ID NO: 955242 - DNA, 33 bp, Homo sapien
gcttccagcttctgcatactttggttctttctc

SEQ ID NO: 955243 - DNA, 33 bp, Homo sapien
tcaccttgggcacctgcagctctgaagtctgtg

SEQ ID NO: 955244 - DNA, 33 bp, Homo sapien
tcaccttgggcacctgtagctctgaagtctgtg

SEQ ID NO: 955245 - DNA, 33 bp, Homo sapien
tgggtttgagttccaaatctctgggtctccctt

SEQ ID NO: 955246 - DNA, 33 bp, Homo sapien
tgggtttgagttccaactctctgggtctccctt

SEQ ID NO: 955247 - DNA, 33 bp, Homo sapien
tctgggacggagacaaccatttgcagcaaattt

SEQ ID NO: 955248 - DNA, 33 bp, Homo sapien
tctgggacggagacaatcatttgcagcaaattt

SEQ ID NO: 955249 - DNA, 33 bp, Homo sapien
gaatgagggcgtcggcacgcattcagatctcac

SEQ ID NO: 955250 - DNA, 33 bp, Homo sapien
gaatgagggcgtcggcgcgcattcagatctcac

SEQ ID NO: 955251 - DNA, 33 bp, Homo sapien
ccaccggagaaaaccacgaatgtacctgaagct

SEQ ID NO: 955252 - DNA, 33 bp, Homo sapien
ccaccggagaaaaccatgaatgtacctgaagct

SEQ ID NO: 955253 - DNA, 33 bp, Homo sapien
ataacaaattaaacacacatttactgagaagct

SEQ ID NO: 955254 - DNA, 33 bp, Homo sapien
ataacaaattaaacacgcatttactgagaagct

SEQ ID NO: 955255 - DNA, 33 bp, Homo sapien
tctggtgtcccaatgccaagtgtccctaccaca

SEQ ID NO: 955256 - DNA, 33 bp, Homo sapien
tctggtgtcccaatgctaagtgtccctaccaca

SEQ ID NO: 955257 - DNA, 33 bp, Homo sapien
ctgcaactattctatacgcttgtctctgccatt

SEQ ID NO: 955258 - DNA, 33 bp, Homo sapien
ctgcaactattctatatgcttgtctctgccatt

SEQ ID NO: 955259 - DNA, 33 bp, Homo sapien
ggcgtcaaataactaacgcgaagtggtagcaca

SEQ ID NO: 955260 - DNA, 33 bp, Homo sapien
ggcgtcaaataactaatgcgaagtggtagcaca

SEQ ID NO: 955261 - DNA, 33 bp, Homo sapien
atggcacactgcagcaggaacatgggccggtcc

SEQ ID NO: 955262 - DNA, 33 bp, Homo sapien
atggcacactgcagcatgaacatgggccggtcc

SEQ ID NO: 955263 - DNA, 33 bp, Homo sapien
aagggctcctcaaggtcaccttcttgtttagca

SEQ ID NO: 955264 - DNA, 33 bp, Homo sapien
aagggctcctcaaggttaccttcttgtttagca

SEQ ID NO: 955265 - DNA, 33 bp, Homo sapien
gagttgtcaaagaggactcacagcagaggaaaa

SEQ ID NO: 955266 - DNA, 33 bp, Homo sapien
gagttgtcaaagaggagtcacagcagaggaaaa

SEQ ID NO: 955267 - DNA, 33 bp, Homo sapien
ttgtgctacccagagacaaagaacacctctaat

SEQ ID NO: 955268 - DNA, 33 bp, Homo sapien
ttgtgctacccagagagaaagaacacctctaat

SEQ ID NO: 955269 - DNA, 33 bp, Homo sapien
acaagggagcttccccactacgctgccatcagc

SEQ ID NO: 955270 - DNA, 33 bp, Homo sapien
acaagggagcttcccccctacgctgccatcagc

SEQ ID NO: 955271 - DNA, 33 bp, Homo sapien
cattcccagagccccacgtagagcgtcagcatc

SEQ ID NO: 955272 - DNA, 33 bp, Homo sapien
cattcccagagccccatgtagagcgtcagcatc

SEQ ID NO: 955273 - DNA, 33 bp, Homo sapien
agcgtcagcatcctggaaaccgtgtggctttct

SEQ ID NO: 955274 - DNA, 33 bp, Homo sapien
agcgtcagcatcctggtaaccgtgtggctttct

SEQ ID NO: 955275 - DNA, 33 bp, Homo sapien
acagggttttaaagaaaggagcgaagtgtgtgg

SEQ ID NO: 955276 - DNA, 33 bp, Homo sapien
acagggttttaaagaagggagcgaagtgtgtgg

SEQ ID NO: 955277 - DNA, 33 bp, Homo sapien
acatgaatagaggaaacagaacgcctccagcca

SEQ ID NO: 955278 - DNA, 33 bp, Homo sapien
acatgaatagaggaaagagaacgcctccagcca

SEQ ID NO: 955279 - DNA, 33 bp, Homo sapien
aaaaaggatgagagaaaactggtattcagagag

SEQ ID NO: 955280 - DNA, 33 bp, Homo sapien
aaaaaggatgagagaagactggtattcagagag

SEQ ID NO: 955281 - DNA, 33 bp, Homo sapien
tgtcacagcctttccacgctagtccttcgatgc

SEQ ID NO: 955282 - DNA, 33 bp, Homo sapien
tgtcacagcctttccatgctagtccttcgatgc

SEQ ID NO: 955283 - DNA, 33 bp, Homo sapien
cagccacgcaagtttacacagaagttcagccag

SEQ ID NO: 955284 - DNA, 33 bp, Homo sapien
cagccacgcaagtttatacagaagttcagccag

SEQ ID NO: 955285 - DNA, 33 bp, Homo sapien
tcatagagcagtgttacggcttccatgggtcca

SEQ ID NO: 955286 - DNA, 33 bp, Homo sapien
tcatagagcagtgttatggcttccatgggtcca

SEQ ID NO: 955287 - DNA, 33 bp, Homo sapien
agatgcagcccaatcagctatgcagagagggtg

SEQ ID NO: 955288 - DNA, 33 bp, Homo sapien
agatgcagcccaatcatctatgcagagagggtg

SEQ ID NO: 955289 - DNA, 33 bp, Homo sapien
ttgagggagtaggcaggatcccccaggagagtg

SEQ ID NO: 955290 - DNA, 33 bp, Homo sapien
ttgagggagtaggcagtatcccccaggagagtg

SEQ ID NO: 955291 - DNA, 33 bp, Homo sapien
cacaccccattcactcggagacaaaggaggtac

SEQ ID NO: 955292 - DNA, 33 bp, Homo sapien
cacaccccattcactctgagacaaaggaggtac

SEQ ID NO: 955293 - DNA, 33 bp, Homo sapien
cagtgagtcggtggaaaaatgaggataatgacc

SEQ ID NO: 955294 - DNA, 33 bp, Homo sapien
cagtgagtcggtggaagaatgaggataatgacc

SEQ ID NO: 955295 - DNA, 33 bp, Homo sapien
ggagaagaagagaagacggtccagtttgaagga

SEQ ID NO: 955296 - DNA, 33 bp, Homo sapien
ggagaagaagagaagatggtccagtttgaagga

SEQ ID NO: 955297 - DNA, 33 bp, Homo sapien
ccagtctttaaggctcaaatctaccgtatgcat

SEQ ID NO: 955298 - DNA, 33 bp, Homo sapien
ccagtctttaaggctcgaatctaccgtatgcat

SEQ ID NO: 955299 - DNA, 33 bp, Homo sapien
tccttttgtcacctgaactccctaacaccctct

SEQ ID NO: 955300 - DNA, 33 bp, Homo sapien
tccttttgtcacctgagctccctaacaccctct

SEQ ID NO: 955301 - DNA, 33 bp, Homo sapien
tgagatctgacaccaacacatagttactgaact

SEQ ID NO: 955302 - DNA, 33 bp, Homo sapien
tgagatctgacaccaatacatagttactgaact

SEQ ID NO: 955303 - DNA, 33 bp, Homo sapien
cacttaggctcattgcagaaccaggctgaccgc

SEQ ID NO: 955304 - DNA, 33 bp, Homo sapien
cacttaggctcattgcggaaccaggctgaccgc

SEQ ID NO: 955305 - DNA, 33 bp, Homo sapien
cagttgggaaaataggacaccttagaactactt

SEQ ID NO: 955306 - DNA, 33 bp, Homo sapien
cagttgggaaaataggtcaccttagaactactt

SEQ ID NO: 955307 - DNA, 33 bp, Homo sapien
ccagacactgaataacaagggtcttgaaacttg

SEQ ID NO: 955308 - DNA, 33 bp, Homo sapien
ccagacactgaataaccagggtcttgaaacttg

SEQ ID NO: 955309 - DNA, 33 bp, Homo sapien
tttgagttctcgttcaaccacttagctgtataa

SEQ ID NO: 955310 - DNA, 33 bp, Homo sapien
tttgagttctcgttcagccacttagctgtataa

SEQ ID NO: 955311 - DNA, 33 bp, Homo sapien
actttactgataagaaaaagggcccttgaccaa

SEQ ID NO: 955312 - DNA, 33 bp, Homo sapien
actttactgataagaagaagggcccttgaccaa

SEQ ID NO: 955313 - DNA, 33 bp, Homo sapien
taattataaagtgctacaggattttcaaatagt

SEQ ID NO: 955314 - DNA, 33 bp, Homo sapien
taattataaagtgctagaggattttcaaatagt

SEQ ID NO: 955315 - DNA, 33 bp, Homo sapien
gatgtggtcgactaccccaccacacctgcttct

SEQ ID NO: 955316 - DNA, 33 bp, Homo sapien
gatgtggtcgactacctcaccacacctgcttct

SEQ ID NO: 955317 - DNA, 33 bp, Homo sapien
ttaactagactactccaattccaatgcaaccag

SEQ ID NO: 955318 - DNA, 33 bp, Homo sapien
ttaactagactactccgattccaatgcaaccag

SEQ ID NO: 955319 - DNA, 33 bp, Homo sapien
caggcagaagttctgaaattatagttcggttgc

SEQ ID NO: 955320 - DNA, 33 bp, Homo sapien
caggcagaagttctgagattatagttcggttgc

SEQ ID NO: 955321 - DNA, 33 bp, Homo sapien
aaaaagtgcaatcagcaaatgaacacagtggca

SEQ ID NO: 955322 - DNA, 33 bp, Homo sapien
aaaaagtgcaatcagcgaatgaacacagtggca

SEQ ID NO: 955323 - DNA, 33 bp, Homo sapien
tggaccattctctctacgtgctgcatctgttgg

SEQ ID NO: 955324 - DNA, 33 bp, Homo sapien
tggaccattctctctatgtgctgcatctgttgg

SEQ ID NO: 955325 - DNA, 33 bp, Homo sapien
agcttagtatcactcaaaactgtagttggtgcc

SEQ ID NO: 955326 - DNA, 33 bp, Homo sapien
agcttagtatcactcagaactgtagttggtgcc

SEQ ID NO: 955327 - DNA, 33 bp, Homo sapien
ggaagacattgttagcccttgaagcacctgtca

SEQ ID NO: 955328 - DNA, 33 bp, Homo sapien
ggaagacattgttagctcttgaagcacctgtca

SEQ ID NO: 955329 - DNA, 33 bp, Homo sapien
ggtagtggcatatagaaagagacctgcaggtcc

SEQ ID NO: 955330 - DNA, 33 bp, Homo sapien
ggtagtggcatatagagagagacctgcaggtcc

SEQ ID NO: 955331 - DNA, 33 bp, Homo sapien
tgtgggtatatacttacgatcatgtgattttac

SEQ ID NO: 955332 - DNA, 33 bp, Homo sapien
tgtgggtatatacttaggatcatgtgattttac

SEQ ID NO: 955333 - DNA, 33 bp, Homo sapien
gatacttaaaatgtcaaccaatgtgtggtgtta

SEQ ID NO: 955334 - DNA, 33 bp, Homo sapien
gatacttaaaatgtcagccaatgtgtggtgtta

SEQ ID NO: 955335 - DNA, 33 bp, Homo sapien
gccactgtctgtaaaacggagagagttgtgaca

SEQ ID NO: 955336 - DNA, 33 bp, Homo sapien
gccactgtctgtaaaatggagagagttgtgaca

SEQ ID NO: 955337 - DNA, 33 bp, Homo sapien
cctagcccagggataccacctaaaatcatcaca

SEQ ID NO: 955338 - DNA, 33 bp, Homo sapien
cctagcccagggatacgacctaaaatcatcaca

SEQ ID NO: 955339 - DNA, 33 bp, Homo sapien
atacagggattatgtaagctaacaaagagctag

SEQ ID NO: 955340 - DNA, 33 bp, Homo sapien
atacagggattatgtatgctaacaaagagctag

SEQ ID NO: 955341 - DNA, 33 bp, Homo sapien
actgcaatgcgtaccccagaagggaagctggca

SEQ ID NO: 955342 - DNA, 33 bp, Homo sapien
actgcaatgcgtacccgagaagggaagctggca

SEQ ID NO: 955343 - DNA, 33 bp, Homo sapien
tcataattttctggaaataagccaaaggttcta

SEQ ID NO: 955344 - DNA, 33 bp, Homo sapien
tcataattttctggaagtaagccaaaggttcta

SEQ ID NO: 955345 - DNA, 33 bp, Homo sapien
ccaccagttttccacacctgtgtactctagatt

SEQ ID NO: 955346 - DNA, 33 bp, Homo sapien
ccaccagttttccacatctgtgtactctagatt

SEQ ID NO: 955347 - DNA, 33 bp, Homo sapien
tgcggtcaggaaaagacaacagtaacgaggatt

SEQ ID NO: 955348 - DNA, 33 bp, Homo sapien
tgcggtcaggaaaagataacagtaacgaggatt

SEQ ID NO: 955349 - DNA, 33 bp, Homo sapien
tgcacttcccaaggacccttctaagcatcactc

SEQ ID NO: 955350 - DNA, 33 bp, Homo sapien
tgcacttcccaaggacgcttctaagcatcactc

SEQ ID NO: 955351 - DNA, 33 bp, Homo sapien
acattaagccactgaaagataaccgtttgtctt

SEQ ID NO: 955352 - DNA, 33 bp, Homo sapien
acattaagccactgaaggataaccgtttgtctt

SEQ ID NO: 955353 - DNA, 33 bp, Homo sapien
tacattagtaagatgaaataaaagtgctgcatc

SEQ ID NO: 955354 - DNA, 33 bp, Homo sapien
tacattagtaagatgacataaaagtgctgcatc

SEQ ID NO: 955355 - DNA, 33 bp, Homo sapien
tttctctctcactcagaaaacagtcaactcctt

SEQ ID NO: 955356 - DNA, 33 bp, Homo sapien
tttctctctcactcaggaaacagtcaactcctt

SEQ ID NO: 955357 - DNA, 33 bp, Homo sapien
aagtaagatataaagcacctactaagtgccaga

SEQ ID NO: 955358 - DNA, 33 bp, Homo sapien
aagtaagatataaagcgcctactaagtgccaga

SEQ ID NO: 955359 - DNA, 33 bp, Homo sapien
cacatttatgatgaagaccttagtggaagtcac

SEQ ID NO: 955360 - DNA, 33 bp, Homo sapien
cacatttatgatgaagtccttagtggaagtcac

SEQ ID NO: 955361 - DNA, 33 bp, Homo sapien
tccacatcattaagaagccttctagaacatgat

SEQ ID NO: 955362 - DNA, 33 bp, Homo sapien
tccacatcattaagaatccttctagaacatgat

SEQ ID NO: 955363 - DNA, 33 bp, Homo sapien
cagtgctgagatgattcgatttgcatttgatgg

SEQ ID NO: 955364 - DNA, 33 bp, Homo sapien
cagtgctgagatgatttgatttgcatttgatgg

SEQ ID NO: 955365 - DNA, 33 bp, Homo sapien
cccattctgaagtttacctttgtgctatctcta

SEQ ID NO: 955366 - DNA, 33 bp, Homo sapien
cccattctgaagtttatctttgtgctatctcta

SEQ ID NO: 955367 - DNA, 33 bp, Homo sapien
atgtcaacctatacacaatagcacccgggcctt

SEQ ID NO: 955368 - DNA, 33 bp, Homo sapien
atgtcaacctatacacgatagcacccgggcctt

SEQ ID NO: 955369 - DNA, 33 bp, Homo sapien
tcctgttttcttagacggaagaccactcctgca

SEQ ID NO: 955370 - DNA, 33 bp, Homo sapien
tcctgttttcttagactgaagaccactcctgca

SEQ ID NO: 955371 - DNA, 33 bp, Homo sapien
tactcccagacttcaaaactctttttcacgtac

SEQ ID NO: 955372 - DNA, 33 bp, Homo sapien
tactcccagacttcaagactctttttcacgtac

SEQ ID NO: 955373 - DNA, 33 bp, Homo sapien
gtggctatgcagctccaatgtactctatgcaaa

SEQ ID NO: 955374 - DNA, 33 bp, Homo sapien
gtggctatgcagctccgatgtactctatgcaaa

SEQ ID NO: 955375 - DNA, 33 bp, Homo sapien
ttttaaatgagggagcactgaggttttgacatg

SEQ ID NO: 955376 - DNA, 33 bp, Homo sapien
ttttaaatgagggagcgctgaggttttgacatg

SEQ ID NO: 955377 - DNA, 33 bp, Homo sapien
aagcatttgatgccccaagcagaggaggaaaga

SEQ ID NO: 955378 - DNA, 33 bp, Homo sapien
aagcatttgatgccccgagcagaggaggaaaga

SEQ ID NO: 955379 - DNA, 33 bp, Homo sapien
actttctaccactccccgagtcatcactatcat

SEQ ID NO: 955380 - DNA, 33 bp, Homo sapien
actttctaccactccctgagtcatcactatcat

SEQ ID NO: 955381 - DNA, 33 bp, Homo sapien
gctgagaagtttcactaactattcataaattgc

SEQ ID NO: 955382 - DNA, 33 bp, Homo sapien
gctgagaagtttcactgactattcataaattgc

SEQ ID NO: 955383 - DNA, 33 bp, Homo sapien
ttgcagaattaaatgacaaattacagaaggcac

SEQ ID NO: 955384 - DNA, 33 bp, Homo sapien
ttgcagaattaaatgagaaattacagaaggcac

SEQ ID NO: 955385 - DNA, 33 bp, Homo sapien
gcgccatcccggatgtcacaaggcagcagccgg

SEQ ID NO: 955386 - DNA, 33 bp, Homo sapien
gcgccatcccggatgttacaaggcagcagccgg

SEQ ID NO: 955387 - DNA, 33 bp, Homo sapien
cgaggcatgggttaaaaatgtggagagggactg

SEQ ID NO: 955388 - DNA, 33 bp, Homo sapien
cgaggcatgggttaaacatgtggagagggactg

SEQ ID NO: 955389 - DNA, 33 bp, Homo sapien
gtgacctcacgaagaaacaaatttaatattata

SEQ ID NO: 955390 - DNA, 33 bp, Homo sapien
gtgacctcacgaagaagcaaatttaatattata

SEQ ID NO: 955391 - DNA, 33 bp, Homo sapien
aaccagattaggcacaccactcggagaccatgc

SEQ ID NO: 955392 - DNA, 33 bp, Homo sapien
aaccagattaggcacagcactcggagaccatgc

SEQ ID NO: 955393 - DNA, 33 bp, Homo sapien
gcactcaggaaacgtgaaatgacatgagtggcc

SEQ ID NO: 955394 - DNA, 33 bp, Homo sapien
gcactcaggaaacgtggaatgacatgagtggcc

SEQ ID NO: 955395 - DNA, 33 bp, Homo sapien
agtttctttgctgggcactctggaatttgttct

SEQ ID NO: 955396 - DNA, 33 bp, Homo sapien
agtttctttgctgggcgctctggaatttgttct

SEQ ID NO: 955397 - DNA, 33 bp, Homo sapien
cttcagagagaaagcacgaatgtgaaaccataa

SEQ ID NO: 955398 - DNA, 33 bp, Homo sapien
cttcagagagaaagcatgaatgtgaaaccataa

SEQ ID NO: 955399 - DNA, 33 bp, Homo sapien
caagggttgcataacaagtctaggaaacgtctg

SEQ ID NO: 955400 - DNA, 33 bp, Homo sapien
caagggttgcataacaggtctaggaaacgtctg

SEQ ID NO: 955401 - DNA, 33 bp, Homo sapien
ttgtgtgtcagacttacgctggtgttgaggccc

SEQ ID NO: 955402 - DNA, 33 bp, Homo sapien
ttgtgtgtcagacttatgctggtgttgaggccc

SEQ ID NO: 955403 - DNA, 33 bp, Homo sapien
gtatatgtatataagtcacttactgggaagagc

SEQ ID NO: 955404 - DNA, 33 bp, Homo sapien
gtatatgtatataagtgacttactgggaagagc

SEQ ID NO: 955405 - DNA, 33 bp, Homo sapien
gtgataataaataccaggacctagcacctgcac

SEQ ID NO: 955406 - DNA, 33 bp, Homo sapien
gtgataataaataccatgacctagcacctgcac

SEQ ID NO: 955407 - DNA, 33 bp, Homo sapien
agtgggggagcccgggcaagtctaactgtttgc

SEQ ID NO: 955408 - DNA, 33 bp, Homo sapien
agtgggggagcccgggtaagtctaactgtttgc

SEQ ID NO: 955409 - DNA, 33 bp, Homo sapien
cgtgcaaaaccgatgacggcagagctgccgggc

SEQ ID NO: 955410 - DNA, 33 bp, Homo sapien
cgtgcaaaaccgatgatggcagagctgccgggc

SEQ ID NO: 955411 - DNA, 33 bp, Homo sapien
gcactgatacattgtagggcctcaggtcaatca

SEQ ID NO: 955412 - DNA, 33 bp, Homo sapien
gcactgatacattgtatggcctcaggtcaatca

SEQ ID NO: 955413 - DNA, 33 bp, Homo sapien
aaaactttccatgttcaaagttcacgtggcatt

SEQ ID NO: 955414 - DNA, 33 bp, Homo sapien
aaaactttccatgttcgaagttcacgtggcatt

SEQ ID NO: 955415 - DNA, 33 bp, Homo sapien
gtgaactttgcattgacgtgaaaaggtccaaat

SEQ ID NO: 955416 - DNA, 33 bp, Homo sapien
gtgaactttgcattgatgtgaaaaggtccaaat

SEQ ID NO: 955417 - DNA, 33 bp, Homo sapien
gaaaaggtccaaattaaaggtgatggcaagcac

SEQ ID NO: 955418 - DNA, 33 bp, Homo sapien
gaaaaggtccaaattagaggtgatggcaagcac

SEQ ID NO: 955419 - DNA, 33 bp, Homo sapien
gagcaaataaagcttcacgtgtcacctgccttc

SEQ ID NO: 955420 - DNA, 33 bp, Homo sapien
gagcaaataaagcttcgcgtgtcacctgccttc

SEQ ID NO: 955421 - DNA, 33 bp, Homo sapien
gtattctcttggttcaaataccttcttggttgg

SEQ ID NO: 955422 - DNA, 33 bp, Homo sapien
gtattctcttggttcagataccttcttggttgg

SEQ ID NO: 955423 - DNA, 33 bp, Homo sapien
ttcctaccacagactggcaaaaacatcttctgg

SEQ ID NO: 955424 - DNA, 33 bp, Homo sapien
ttcctaccacagactgtcaaaaacatcttctgg

SEQ ID NO: 955425 - DNA, 33 bp, Homo sapien
ttgagggctccgtagacacttgtgtactgggct

SEQ ID NO: 955426 - DNA, 33 bp, Homo sapien
ttgagggctccgtagatacttgtgtactgggct

SEQ ID NO: 955427 - DNA, 33 bp, Homo sapien
ctcaagaaaatcatgcagaccgaaggcttctgg

SEQ ID NO: 955428 - DNA, 33 bp, Homo sapien
ctcaagaaaatcatgcggaccgaaggcttctgg

SEQ ID NO: 955429 - DNA, 33 bp, Homo sapien
tgactcttaaaaccctaaagtgatggtggaaat

SEQ ID NO: 955430 - DNA, 33 bp, Homo sapien
tgactcttaaaaccctgaagtgatggtggaaat

SEQ ID NO: 955431 - DNA, 33 bp, Homo sapien
tttttgcctcatctgaaaatagttcctggccag

SEQ ID NO: 955432 - DNA, 33 bp, Homo sapien
tttttgcctcatctgacaatagttcctggccag

SEQ ID NO: 955433 - DNA, 33 bp, Homo sapien
tctgaaaaaggaactcaactgactgataaaatt

SEQ ID NO: 955434 - DNA, 33 bp, Homo sapien
tctgaaaaaggaactccactgactgataaaatt

SEQ ID NO: 955435 - DNA, 33 bp, Homo sapien
gagcttggtttgcatccataagggctttgtagg

SEQ ID NO: 955436 - DNA, 33 bp, Homo sapien
gagcttggtttgcatcgataagggctttgtagg

SEQ ID NO: 955437 - DNA, 33 bp, Homo sapien
agcttcgtgtgtaaggaaatgactagagagaaa

SEQ ID NO: 955438 - DNA, 33 bp, Homo sapien
agcttcgtgtgtaaggtaatgactagagagaaa

SEQ ID NO: 955439 - DNA, 33 bp, Homo sapien
cagcctactgtttcccacattctgcataagagt

SEQ ID NO: 955440 - DNA, 33 bp, Homo sapien
cagcctactgtttcccgcattctgcataagagt

SEQ ID NO: 955441 - DNA, 33 bp, Homo sapien
ggagtttcaagcttaacaggacatcagaagttt

SEQ ID NO: 955442 - DNA, 33 bp, Homo sapien
ggagtttcaagcttaataggacatcagaagttt

SEQ ID NO: 955443 - DNA, 33 bp, Homo sapien
gcaaattgcctgagcccatgagtttgagaccag

SEQ ID NO: 955444 - DNA, 33 bp, Homo sapien
gcaaattgcctgagccgatgagtttgagaccag

SEQ ID NO: 955445 - DNA, 33 bp, Homo sapien
acactgatgacacccaatgctgatgaggatgtg

SEQ ID NO: 955446 - DNA, 33 bp, Homo sapien
acactgatgacacccagtgctgatgaggatgtg

SEQ ID NO: 955447 - DNA, 33 bp, Homo sapien
tgcaattccaattaaaatctcagcaagttattt

SEQ ID NO: 955448 - DNA, 33 bp, Homo sapien
tgcaattccaattaaagtctcagcaagttattt

SEQ ID NO: 955449 - DNA, 33 bp, Homo sapien
tctctccacgtggcaacgcctcctccttgactt

SEQ ID NO: 955450 - DNA, 33 bp, Homo sapien
tctctccacgtggcaatgcctcctccttgactt

SEQ ID NO: 955451 - DNA, 33 bp, Homo sapien
tttgcaaactgtaaacagacattcaaatgtcag

SEQ ID NO: 955452 - DNA, 33 bp, Homo sapien
tttgcaaactgtaaaccgacattcaaatgtcag

SEQ ID NO: 955453 - DNA, 33 bp, Homo sapien
cattcatagtagcagcaactgtgtctatcacca

SEQ ID NO: 955454 - DNA, 33 bp, Homo sapien
cattcatagtagcagccactgtgtctatcacca

SEQ ID NO: 955455 - DNA, 33 bp, Homo sapien
ccttttatgatctttgaattccaggagcttatg

SEQ ID NO: 955456 - DNA, 33 bp, Homo sapien
ccttttatgatctttgcattccaggagcttatg

SEQ ID NO: 955457 - DNA, 33 bp, Homo sapien
tcttgtgctttcaggtcacaactcacacaatgg

SEQ ID NO: 955458 - DNA, 33 bp, Homo sapien
tcttgtgctttcaggttacaactcacacaatgg

SEQ ID NO: 955459 - DNA, 33 bp, Homo sapien
ctgtaaagctggtacacgtaaggagttgattct

SEQ ID NO: 955460 - DNA, 33 bp, Homo sapien
ctgtaaagctggtacatgtaaggagttgattct

SEQ ID NO: 955461 - DNA, 33 bp, Homo sapien
atagcaattaaaggtcccaggaaaggtgggtac

SEQ ID NO: 955462 - DNA, 33 bp, Homo sapien
atagcaattaaaggtctcaggaaaggtgggtac

SEQ ID NO: 955463 - DNA, 33 bp, Homo sapien
caggatgcgtctttcacggaagaagaagatggc

SEQ ID NO: 955464 - DNA, 33 bp, Homo sapien
caggatgcgtctttcatggaagaagaagatggc

SEQ ID NO: 955465 - DNA, 33 bp, Homo sapien
tggggaagtggtaatgcaactattgtgaacctg

SEQ ID NO: 955466 - DNA, 33 bp, Homo sapien
tggggaagtggtaatggaactattgtgaacctg

SEQ ID NO: 955467 - DNA, 33 bp, Homo sapien
tgtaggataattaccaataaccagcaataattg

SEQ ID NO: 955468 - DNA, 33 bp, Homo sapien
tgtaggataattaccagtaaccagcaataattg

SEQ ID NO: 955469 - DNA, 33 bp, Homo sapien
gagtattttactataactcaaactcttatcaca

SEQ ID NO: 955470 - DNA, 33 bp, Homo sapien
gagtattttactataattcaaactcttatcaca

SEQ ID NO: 955471 - DNA, 33 bp, Homo sapien
cagaacttacggttcaaacacaatcaggttgat

SEQ ID NO: 955472 - DNA, 33 bp, Homo sapien
cagaacttacggttcagacacaatcaggttgat

SEQ ID NO: 955473 - DNA, 33 bp, Homo sapien
tctccactcttaggctcacaggagcttttcttt

SEQ ID NO: 955474 - DNA, 33 bp, Homo sapien
tctccactcttaggcttacaggagcttttcttt

SEQ ID NO: 955475 - DNA, 33 bp, Homo sapien
caacaggaaggaatgaagagttggaatacctga

SEQ ID NO: 955476 - DNA, 33 bp, Homo sapien
caacaggaaggaatgaggagttggaatacctga

SEQ ID NO: 955477 - DNA, 33 bp, Homo sapien
ggccccaccctcacgacctcacctaaatctaat

SEQ ID NO: 955478 - DNA, 33 bp, Homo sapien
ggccccaccctcacgagctcacctaaatctaat

SEQ ID NO: 955479 - DNA, 33 bp, Homo sapien
catcctttttaatctgaatatgtgttatcaatt

SEQ ID NO: 955480 - DNA, 33 bp, Homo sapien
catcctttttaatctggatatgtgttatcaatt

SEQ ID NO: 955481 - DNA, 33 bp, Homo sapien
cttgggcaaatggatgaagttctcaaatatttt

SEQ ID NO: 955482 - DNA, 33 bp, Homo sapien
cttgggcaaatggatgtagttctcaaatatttt

SEQ ID NO: 955483 - DNA, 33 bp, Homo sapien
aaggaatgactgaccaataaagatgctgactca

SEQ ID NO: 955484 - DNA, 33 bp, Homo sapien
aaggaatgactgaccagtaaagatgctgactca

SEQ ID NO: 955485 - DNA, 33 bp, Homo sapien
ataaactccttgagaaagttttccatcttagga

SEQ ID NO: 955486 - DNA, 33 bp, Homo sapien
ataaactccttgagaaggttttccatcttagga

SEQ ID NO: 955487 - DNA, 33 bp, Homo sapien
attctttccaaatcacaactattaagacttact

SEQ ID NO: 955488 - DNA, 33 bp, Homo sapien
attctttccaaatcactactattaagacttact

SEQ ID NO: 955489 - DNA, 33 bp, Homo sapien
ggttctgagtgagattgaagaagtgaaccacca

SEQ ID NO: 955490 - DNA, 33 bp, Homo sapien
ggttctgagtgagatttaagaagtgaaccacca

SEQ ID NO: 955491 - DNA, 33 bp, Homo sapien
ggcccagactctcacacaggttttagagggagt

SEQ ID NO: 955492 - DNA, 33 bp, Homo sapien
ggcccagactctcacataggttttagagggagt

SEQ ID NO: 955493 - DNA, 33 bp, Homo sapien
ttctctaagcaacctgaacctcttctctaagca

SEQ ID NO: 955494 - DNA, 33 bp, Homo sapien
ttctctaagcaacctgtacctcttctctaagca

SEQ ID NO: 955495 - DNA, 33 bp, Homo sapien
gatcctgaattaataaatgatgtgagatattaa

SEQ ID NO: 955496 - DNA, 33 bp, Homo sapien
gatcctgaattaataagtgatgtgagatattaa

SEQ ID NO: 955497 - DNA, 33 bp, Homo sapien
ttttgaaagatcagaaaaatgacggtgctggaa

SEQ ID NO: 955498 - DNA, 33 bp, Homo sapien
ttttgaaagatcagaacaatgacggtgctggaa

SEQ ID NO: 955499 - DNA, 33 bp, Homo sapien
gataaacaataaacataatagtaagcaaaccat

SEQ ID NO: 955500 - DNA, 33 bp, Homo sapien
gataaacaataaacattatagtaagcaaaccat

SEQ ID NO: 955501 - DNA, 33 bp, Homo sapien
agaggccaatttctctgactccaaactcatagt

SEQ ID NO: 955502 - DNA, 33 bp, Homo sapien
agaggccaatttctcttactccaaactcatagt

SEQ ID NO: 955503 - DNA, 33 bp, Homo sapien
atcatttgcttatctaccgagtgactttgggaa

SEQ ID NO: 955504 - DNA, 33 bp, Homo sapien
atcatttgcttatctatcgagtgactttgggaa

SEQ ID NO: 955505 - DNA, 33 bp, Homo sapien
tagacaaggccgcagaaaaaccaagtacaataa

SEQ ID NO: 955506 - DNA, 33 bp, Homo sapien
tagacaaggccgcagagaaaccaagtacaataa

SEQ ID NO: 955507 - DNA, 33 bp, Homo sapien
aatgaacttgtaaccacctgaatatatcaacga

SEQ ID NO: 955508 - DNA, 33 bp, Homo sapien
aatgaacttgtaaccagctgaatatatcaacga

SEQ ID NO: 955509 - DNA, 33 bp, Homo sapien
ctgaaaggggaaaccaagtgaattctggcaagg

SEQ ID NO: 955510 - DNA, 33 bp, Homo sapien
ctgaaaggggaaaccaggtgaattctggcaagg

SEQ ID NO: 955511 - DNA, 33 bp, Homo sapien
tgcaggaagaacttcaaatctggtttctgatgc

SEQ ID NO: 955512 - DNA, 33 bp, Homo sapien
tgcaggaagaacttcagatctggtttctgatgc

SEQ ID NO: 955513 - DNA, 33 bp, Homo sapien
gaatgatttgcattcactcattgggcaaacaca

SEQ ID NO: 955514 - DNA, 33 bp, Homo sapien
gaatgatttgcattcattcattgggcaaacaca

SEQ ID NO: 955515 - DNA, 33 bp, Homo sapien
tgagttaaatttgcacaatctacagaaagggtt

SEQ ID NO: 955516 - DNA, 33 bp, Homo sapien
tgagttaaatttgcacgatctacagaaagggtt

SEQ ID NO: 955517 - DNA, 33 bp, Homo sapien
ggcacacacccccatacaaaaacagccagcttc

SEQ ID NO: 955518 - DNA, 33 bp, Homo sapien
ggcacacacccccatataaaaacagccagcttc

SEQ ID NO: 955519 - DNA, 33 bp, Homo sapien
aggcttttgatcaccacaggttgcaattggtgt

SEQ ID NO: 955520 - DNA, 33 bp, Homo sapien
aggcttttgatcaccataggttgcaattggtgt

SEQ ID NO: 955521 - DNA, 33 bp, Homo sapien
gttagtttatattcccacttggagtgtctgaaa

SEQ ID NO: 955522 - DNA, 33 bp, Homo sapien
gttagtttatattccctcttggagtgtctgaaa

SEQ ID NO: 955523 - DNA, 33 bp, Homo sapien
tttcattgtttgattacgccacaatggatgtat

SEQ ID NO: 955524 - DNA, 33 bp, Homo sapien
tttcattgtttgattatgccacaatggatgtat

SEQ ID NO: 955525 - DNA, 33 bp, Homo sapien
tcaaacaatgaaaaccaaacagcaataagagtg

SEQ ID NO: 955526 - DNA, 33 bp, Homo sapien
tcaaacaatgaaaaccgaacagcaataagagtg

SEQ ID NO: 955527 - DNA, 33 bp, Homo sapien
ttccctaattgctctccagtaaaaccataagcc

SEQ ID NO: 955528 - DNA, 33 bp, Homo sapien
ttccctaattgctctctagtaaaaccataagcc

SEQ ID NO: 955529 - DNA, 33 bp, Homo sapien
cctcactgcagaaagaatcagggaaatataatc

SEQ ID NO: 955530 - DNA, 33 bp, Homo sapien
cctcactgcagaaagagtcagggaaatataatc

SEQ ID NO: 955531 - DNA, 33 bp, Homo sapien
gtgtgctcccatgcgacgtttataatgcacctc

SEQ ID NO: 955532 - DNA, 33 bp, Homo sapien
gtgtgctcccatgcgatgtttataatgcacctc

SEQ ID NO: 955533 - DNA, 33 bp, Homo sapien
tgaatatatgttctaacggcctacacacacgca

SEQ ID NO: 955534 - DNA, 33 bp, Homo sapien
tgaatatatgttctaatggcctacacacacgca

SEQ ID NO: 955535 - DNA, 33 bp, Homo sapien
ggtttgttttcttagcacatcgaaaggtaacaa

SEQ ID NO: 955536 - DNA, 33 bp, Homo sapien
ggtttgttttcttagcgcatcgaaaggtaacaa

SEQ ID NO: 955537 - DNA, 33 bp, Homo sapien
cgagaggtgaccgagaaagacccaagcgagcga

SEQ ID NO: 955538 - DNA, 33 bp, Homo sapien
cgagaggtgaccgagagagacccaagcgagcga

SEQ ID NO: 955539 - DNA, 33 bp, Homo sapien
ggtttctccttttcctaaagaatgtgcttaaaa

SEQ ID NO: 955540 - DNA, 33 bp, Homo sapien
ggtttctccttttcctgaagaatgtgcttaaaa

SEQ ID NO: 955541 - DNA, 33 bp, Homo sapien
agcatagcacctggtaagcacagaatgagtact

SEQ ID NO: 955542 - DNA, 33 bp, Homo sapien
agcatagcacctggtaggcacagaatgagtact

SEQ ID NO: 955543 - DNA, 33 bp, Homo sapien
attggaagtgtcttaacgttcattcacttacat

SEQ ID NO: 955544 - DNA, 33 bp, Homo sapien
attggaagtgtcttaatgttcattcacttacat

SEQ ID NO: 955545 - DNA, 33 bp, Homo sapien
aagaacaaaaaaagcacgttaagatgaaggaaa

SEQ ID NO: 955546 - DNA, 33 bp, Homo sapien
aagaacaaaaaaagcatgttaagatgaaggaaa

SEQ ID NO: 955547 - DNA, 33 bp, Homo sapien
gaggagtttgaattctcaatgttgtgaatccct

SEQ ID NO: 955548 - DNA, 33 bp, Homo sapien
gaggagtttgaattcttaatgttgtgaatccct

SEQ ID NO: 955549 - DNA, 33 bp, Homo sapien
tatggacaaaatcagacaagcaaatagactcca

SEQ ID NO: 955550 - DNA, 33 bp, Homo sapien
tatggacaaaatcagagaagcaaatagactcca

SEQ ID NO: 955551 - DNA, 33 bp, Homo sapien
tatgatttatactcagaacatgtcaaaatatat

SEQ ID NO: 955552 - DNA, 33 bp, Homo sapien
tatgatttatactcaggacatgtcaaaatatat

SEQ ID NO: 955553 - DNA, 33 bp, Homo sapien
aattcccgcagtcccaatgaaggaaccctgcct

SEQ ID NO: 955554 - DNA, 33 bp, Homo sapien
aattcccgcagtcccagtgaaggaaccctgcct

SEQ ID NO: 955555 - DNA, 33 bp, Homo sapien
tttctccccaactctccaaacaggaatcccttc

SEQ ID NO: 955556 - DNA, 33 bp, Homo sapien
tttctccccaactctctaaacaggaatcccttc

SEQ ID NO: 955557 - DNA, 33 bp, Homo sapien
gtcagatgtggctaaacgtctccgatctaggtt

SEQ ID NO: 955558 - DNA, 33 bp, Homo sapien
gtcagatgtggctaaatgtctccgatctaggtt

SEQ ID NO: 955559 - DNA, 33 bp, Homo sapien
atctaggttcctgccagcctggcccaaggcaga

SEQ ID NO: 955560 - DNA, 33 bp, Homo sapien
atctaggttcctgccatcctggcccaaggcaga

SEQ ID NO: 955561 - DNA, 33 bp, Homo sapien
catctcagcagcttcaaaaggcccaagttagct

SEQ ID NO: 955562 - DNA, 33 bp, Homo sapien
catctcagcagcttcagaaggcccaagttagct

SEQ ID NO: 955563 - DNA, 33 bp, Homo sapien
tgagagaaaggaaagcaaagacagccaggacag

SEQ ID NO: 955564 - DNA, 33 bp, Homo sapien
tgagagaaaggaaagccaagacagccaggacag

SEQ ID NO: 955565 - DNA, 33 bp, Homo sapien
tgagtagtaaaggccacgaggaaaggaagagga

SEQ ID NO: 955566 - DNA, 33 bp, Homo sapien
tgagtagtaaaggccatgaggaaaggaagagga

SEQ ID NO: 955567 - DNA, 33 bp, Homo sapien
ctgccttctgtgataccacaatcagagctgatc

SEQ ID NO: 955568 - DNA, 33 bp, Homo sapien
ctgccttctgtgatactacaatcagagctgatc

SEQ ID NO: 955569 - DNA, 33 bp, Homo sapien
cctccactttagccacaatctcaactctacccc

SEQ ID NO: 955570 - DNA, 33 bp, Homo sapien
cctccactttagccaccatctcaactctacccc

SEQ ID NO: 955571 - DNA, 33 bp, Homo sapien
tgtgaaaattggtagacgcatagagcacagcac

SEQ ID NO: 955572 - DNA, 33 bp, Homo sapien
tgtgaaaattggtagatgcatagagcacagcac

SEQ ID NO: 955573 - DNA, 33 bp, Homo sapien
gtcagggtgactcaaaatgagctctgctaggtt

SEQ ID NO: 955574 - DNA, 33 bp, Homo sapien
gtcagggtgactcaaagtgagctctgctaggtt

SEQ ID NO: 955575 - DNA, 33 bp, Homo sapien
cctgcctgcccgtctcacgtttatgctctaaca

SEQ ID NO: 955576 - DNA, 33 bp, Homo sapien
cctgcctgcccgtctcgcgtttatgctctaaca

SEQ ID NO: 955577 - DNA, 33 bp, Homo sapien
gacacagcaatgaagaggtcaataataactgct

SEQ ID NO: 955578 - DNA, 33 bp, Homo sapien
gacacagcaatgaagatgtcaataataactgct

SEQ ID NO: 955579 - DNA, 33 bp, Homo sapien
aacaacacaatataacagctatttgtaaaaaac

SEQ ID NO: 955580 - DNA, 33 bp, Homo sapien
aacaacacaatataactgctatttgtaaaaaac

SEQ ID NO: 955581 - DNA, 33 bp, Homo sapien
ttacttttcaagagtcaccatgaaatctacatt

SEQ ID NO: 955582 - DNA, 33 bp, Homo sapien
ttacttttcaagagtcgccatgaaatctacatt

SEQ ID NO: 955583 - DNA, 33 bp, Homo sapien
ttgtatcagttgtttacgtgcaaatcatgtgtc

SEQ ID NO: 955584 - DNA, 33 bp, Homo sapien
ttgtatcagttgtttatgtgcaaatcatgtgtc

SEQ ID NO: 955585 - DNA, 33 bp, Homo sapien
ttcatataataactcaaactaagctttataagt

SEQ ID NO: 955586 - DNA, 33 bp, Homo sapien
ttcatataataactcagactaagctttataagt

SEQ ID NO: 955587 - DNA, 33 bp, Homo sapien
ggtagatgggggaaaacggagatagctagggat

SEQ ID NO: 955588 - DNA, 33 bp, Homo sapien
ggtagatgggggaaaagggagatagctagggat

SEQ ID NO: 955589 - DNA, 33 bp, Homo sapien
aaaggtgaaagcatcaaaatgtcctctggttca

SEQ ID NO: 955590 - DNA, 33 bp, Homo sapien
aaaggtgaaagcatcacaatgtcctctggttca

SEQ ID NO: 955591 - DNA, 33 bp, Homo sapien
acaaaaacatctagcaactaacaaataaaattc

SEQ ID NO: 955592 - DNA, 33 bp, Homo sapien
acaaaaacatctagcatctaacaaataaaattc

SEQ ID NO: 955593 - DNA, 33 bp, Homo sapien
ctctgtaaggtggctcacagtataaacaaggaa

SEQ ID NO: 955594 - DNA, 33 bp, Homo sapien
ctctgtaaggtggctcgcagtataaacaaggaa

SEQ ID NO: 955595 - DNA, 33 bp, Homo sapien
tggaaaaagaaatggacgaggaactaggcaggc

SEQ ID NO: 955596 - DNA, 33 bp, Homo sapien
tggaaaaagaaatggatgaggaactaggcaggc

SEQ ID NO: 955597 - DNA, 33 bp, Homo sapien
catcacagagacaaatcagtgacagccaggaat

SEQ ID NO: 955598 - DNA, 33 bp, Homo sapien
catcacagagacaaattagtgacagccaggaat

SEQ ID NO: 955599 - DNA, 33 bp, Homo sapien
atgaaacaatcactaccaaccttctaaaatata

SEQ ID NO: 955600 - DNA, 33 bp, Homo sapien
atgaaacaatcactactaaccttctaaaatata

SEQ ID NO: 955601 - DNA, 33 bp, Homo sapien
tgtattcttccattctcacactgcgaataaaga

SEQ ID NO: 955602 - DNA, 33 bp, Homo sapien
tgtattcttccattcttacactgcgaataaaga

SEQ ID NO: 955603 - DNA, 33 bp, Homo sapien
atgggtatagtgcaaagaagtgaataggagagc

SEQ ID NO: 955604 - DNA, 33 bp, Homo sapien
atgggtatagtgcaaataagtgaataggagagc

SEQ ID NO: 955605 - DNA, 33 bp, Homo sapien
tcactctgactggtcagtctccatgtcatgcca

SEQ ID NO: 955606 - DNA, 33 bp, Homo sapien
tcactctgactggtcattctccatgtcatgcca

SEQ ID NO: 955607 - DNA, 33 bp, Homo sapien
tttaaaacatttctacaacatcttcaatctctt

SEQ ID NO: 955608 - DNA, 33 bp, Homo sapien
tttaaaacatttctacgacatcttcaatctctt

SEQ ID NO: 955609 - DNA, 33 bp, Homo sapien
agagagctatggacagaagtgattgagtttcca

SEQ ID NO: 955610 - DNA, 33 bp, Homo sapien
agagagctatggacaggagtgattgagtttcca

SEQ ID NO: 955611 - DNA, 33 bp, Homo sapien
atgttgttcttaactccagcacaattaagtcac

SEQ ID NO: 955612 - DNA, 33 bp, Homo sapien
atgttgttcttaactctagcacaattaagtcac

SEQ ID NO: 955613 - DNA, 33 bp, Homo sapien
aagaatgactatgtgacaaaatagctaaggata

SEQ ID NO: 955614 - DNA, 33 bp, Homo sapien
aagaatgactatgtgataaaatagctaaggata

SEQ ID NO: 955615 - DNA, 33 bp, Homo sapien
tgttctagctctctaacacaatgctttgcatag

SEQ ID NO: 955616 - DNA, 33 bp, Homo sapien
tgttctagctctctaatacaatgctttgcatag

SEQ ID NO: 955617 - DNA, 33 bp, Homo sapien
cacagtacactcaaaactggtgtgtcaacaccc

SEQ ID NO: 955618 - DNA, 33 bp, Homo sapien
cacagtacactcaaaattggtgtgtcaacaccc

SEQ ID NO: 955619 - DNA, 33 bp, Homo sapien
gcagcgaattctttaaatacccccaagcaatgt

SEQ ID NO: 955620 - DNA, 33 bp, Homo sapien
gcagcgaattctttaagtacccccaagcaatgt

SEQ ID NO: 955621 - DNA, 33 bp, Homo sapien
gctaaagtgcaattaaaagacatcagttcctgg

SEQ ID NO: 955622 - DNA, 33 bp, Homo sapien
gctaaagtgcaattaagagacatcagttcctgg

SEQ ID NO: 955623 - DNA, 33 bp, Homo sapien
taccaggacctaaaggaaacacacactttctat

SEQ ID NO: 955624 - DNA, 33 bp, Homo sapien
taccaggacctaaagggaacacacactttctat

SEQ ID NO: 955625 - DNA, 33 bp, Homo sapien
ctctccccactaatcaacctaatttcacacgct

SEQ ID NO: 955626 - DNA, 33 bp, Homo sapien
ctctccccactaatcaccctaatttcacacgct

SEQ ID NO: 955627 - DNA, 33 bp, Homo sapien
tgctgtcatccttttacgtccttagacctgaga

SEQ ID NO: 955628 - DNA, 33 bp, Homo sapien
tgctgtcatccttttatgtccttagacctgaga

SEQ ID NO: 955629 - DNA, 33 bp, Homo sapien
aatatgaatgtcttacagatgttcaaggtgctc

SEQ ID NO: 955630 - DNA, 33 bp, Homo sapien
aatatgaatgtcttacggatgttcaaggtgctc

SEQ ID NO: 955631 - DNA, 33 bp, Homo sapien
cccttagcactgataacgtgtattgtaaatgtc

SEQ ID NO: 955632 - DNA, 33 bp, Homo sapien
cccttagcactgataatgtgtattgtaaatgtc

SEQ ID NO: 955633 - DNA, 33 bp, Homo sapien
ccatctatagagtaggaatgatcgtatctcaat

SEQ ID NO: 955634 - DNA, 33 bp, Homo sapien
ccatctatagagtaggtatgatcgtatctcaat

SEQ ID NO: 955635 - DNA, 33 bp, Homo sapien
gcagagacagtaactacaatgcatcagtggcat

SEQ ID NO: 955636 - DNA, 33 bp, Homo sapien
gcagagacagtaactataatgcatcagtggcat

SEQ ID NO: 955637 - DNA, 33 bp, Homo sapien
tcttttctgttttcacacatactccatatccaa

SEQ ID NO: 955638 - DNA, 33 bp, Homo sapien
tcttttctgttttcacgcatactccatatccaa

SEQ ID NO: 955639 - DNA, 33 bp, Homo sapien
aagtgcaataagaagacggacactggagagttt

SEQ ID NO: 955640 - DNA, 33 bp, Homo sapien
aagtgcaataagaagatggacactggagagttt

SEQ ID NO: 955641 - DNA, 33 bp, Homo sapien
actggaaaagaagtctcaatttcactgccaaag

SEQ ID NO: 955642 - DNA, 33 bp, Homo sapien
actggaaaagaagtcttaatttcactgccaaag

SEQ ID NO: 955643 - DNA, 33 bp, Homo sapien
tggtctctaatgataacggtgctgcccaggagg

SEQ ID NO: 955644 - DNA, 33 bp, Homo sapien
tggtctctaatgataatggtgctgcccaggagg

SEQ ID NO: 955645 - DNA, 33 bp, Homo sapien
gcttatagagttgttaagtgggagcagctggct

SEQ ID NO: 955646 - DNA, 33 bp, Homo sapien
gcttatagagttgttaggtgggagcagctggct

SEQ ID NO: 955647 - DNA, 33 bp, Homo sapien
actgatgtggggactaaaaatcaggagtagaga

SEQ ID NO: 955648 - DNA, 33 bp, Homo sapien
actgatgtggggactagaaatcaggagtagaga

SEQ ID NO: 955649 - DNA, 33 bp, Homo sapien
tgttagggctatgtcacgttgttgctgcacttt

SEQ ID NO: 955650 - DNA, 33 bp, Homo sapien
tgttagggctatgtcatgttgttgctgcacttt

SEQ ID NO: 955651 - DNA, 33 bp, Homo sapien
aaagttcccaggcctaagaatgtgtatgtgtat

SEQ ID NO: 955652 - DNA, 33 bp, Homo sapien
aaagttcccaggcctaggaatgtgtatgtgtat

SEQ ID NO: 955653 - DNA, 33 bp, Homo sapien
tgtcttagcttgtctcacatatacacatacaca

SEQ ID NO: 955654 - DNA, 33 bp, Homo sapien
tgtcttagcttgtctcgcatatacacatacaca

SEQ ID NO: 955655 - DNA, 33 bp, Homo sapien
aaaagtctcagtgggacaggacttaaggaagaa

SEQ ID NO: 955656 - DNA, 33 bp, Homo sapien
aaaagtctcagtgggataggacttaaggaagaa

SEQ ID NO: 955657 - DNA, 33 bp, Homo sapien
cattttgcataaccttaaagcttaagcataatg

SEQ ID NO: 955658 - DNA, 33 bp, Homo sapien
cattttgcataaccttgaagcttaagcataatg

SEQ ID NO: 955659 - DNA, 33 bp, Homo sapien
gactagggctgatttccaagcacttgagcctgg

SEQ ID NO: 955660 - DNA, 33 bp, Homo sapien
gactagggctgatttcgaagcacttgagcctgg

SEQ ID NO: 955661 - DNA, 33 bp, Homo sapien
gagatgaagaaaaagacgaaaatcaggccaggt

SEQ ID NO: 955662 - DNA, 33 bp, Homo sapien
gagatgaagaaaaagatgaaaatcaggccaggt

SEQ ID NO: 955663 - DNA, 33 bp, Homo sapien
actctctgaatttaacaggaaaatgagcaggct

SEQ ID NO: 955664 - DNA, 33 bp, Homo sapien
actctctgaatttaacgggaaaatgagcaggct

SEQ ID NO: 955665 - DNA, 33 bp, Homo sapien
gcatggtgctagacacactctctgtactgtttc

SEQ ID NO: 955666 - DNA, 33 bp, Homo sapien
gcatggtgctagacactctctctgtactgtttc

SEQ ID NO: 955667 - DNA, 33 bp, Homo sapien
tctcaaccatcacaaacggcctatcaagtgccc

SEQ ID NO: 955668 - DNA, 33 bp, Homo sapien
tctcaaccatcacaaatggcctatcaagtgccc

SEQ ID NO: 955669 - DNA, 33 bp, Homo sapien
aattatttggcctttaaaattctcatgagtaca

SEQ ID NO: 955670 - DNA, 33 bp, Homo sapien
aattatttggcctttacaattctcatgagtaca

SEQ ID NO: 955671 - DNA, 33 bp, Homo sapien
cacatgcatagccagtcaagatatggtctgaat

SEQ ID NO: 955672 - DNA, 33 bp, Homo sapien
cacatgcatagccagtgaagatatggtctgaat

SEQ ID NO: 955673 - DNA, 33 bp, Homo sapien
ctggtagaagtttaggaataacaagtgcaatgc

SEQ ID NO: 955674 - DNA, 33 bp, Homo sapien
ctggtagaagtttagggataacaagtgcaatgc

SEQ ID NO: 955675 - DNA, 33 bp, Homo sapien
gctttgccacacttgacaaattttatgtcacac

SEQ ID NO: 955676 - DNA, 33 bp, Homo sapien
gctttgccacacttgagaaattttatgtcacac

SEQ ID NO: 955677 - DNA, 33 bp, Homo sapien
taacttacctgacctcacaaaccttacagcagg

SEQ ID NO: 955678 - DNA, 33 bp, Homo sapien
taacttacctgacctcgcaaaccttacagcagg

SEQ ID NO: 955679 - DNA, 33 bp, Homo sapien
tctgtagaactagtaacagtggcatgccgtaga

SEQ ID NO: 955680 - DNA, 33 bp, Homo sapien
tctgtagaactagtaatagtggcatgccgtaga

SEQ ID NO: 955681 - DNA, 33 bp, Homo sapien
gtgactcccaaattcacatgtcaaattcattta

SEQ ID NO: 955682 - DNA, 33 bp, Homo sapien
gtgactcccaaattcatatgtcaaattcattta

SEQ ID NO: 955683 - DNA, 33 bp, Homo sapien
taacattctctatttagaaactgttaaatccaa

SEQ ID NO: 955684 - DNA, 33 bp, Homo sapien
taacattctctatttataaactgttaaatccaa

SEQ ID NO: 955685 - DNA, 33 bp, Homo sapien
ctcattatgaagtacaagtagggcagtagtgtt

SEQ ID NO: 955686 - DNA, 33 bp, Homo sapien
ctcattatgaagtacaggtagggcagtagtgtt

SEQ ID NO: 955687 - DNA, 33 bp, Homo sapien
tgagttgatttttgtacggatgcttcatcatct

SEQ ID NO: 955688 - DNA, 33 bp, Homo sapien
tgagttgatttttgtatggatgcttcatcatct

SEQ ID NO: 955689 - DNA, 33 bp, Homo sapien
catgagatattaaacactgtattacaaaatagg

SEQ ID NO: 955690 - DNA, 33 bp, Homo sapien
catgagatattaaacagtgtattacaaaatagg

SEQ ID NO: 955691 - DNA, 33 bp, Homo sapien
aacagttctcgagagcaaaatattaacatcatg

SEQ ID NO: 955692 - DNA, 33 bp, Homo sapien
aacagttctcgagagccaaatattaacatcatg

SEQ ID NO: 955693 - DNA, 33 bp, Homo sapien
aggagtggacctcggaccaatgaggctcaataa

SEQ ID NO: 955694 - DNA, 33 bp, Homo sapien
aggagtggacctcggatcaatgaggctcaataa

SEQ ID NO: 955695 - DNA, 33 bp, Homo sapien
cttgtcacctcacttcgaaattaaccattagtc

SEQ ID NO: 955696 - DNA, 33 bp, Homo sapien
cttgtcacctcacttctaaattaaccattagtc

SEQ ID NO: 955697 - DNA, 33 bp, Homo sapien
attactctgttacatcaaaaaggataagaacgt

SEQ ID NO: 955698 - DNA, 33 bp, Homo sapien
attactctgttacatcgaaaaggataagaacgt

SEQ ID NO: 955699 - DNA, 33 bp, Homo sapien
cacccgcagagaactacgtactacaccaaagct

SEQ ID NO: 955700 - DNA, 33 bp, Homo sapien
cacccgcagagaactatgtactacaccaaagct

SEQ ID NO: 955701 - DNA, 33 bp, Homo sapien
agaagatgagatgtaaaaacatttgatctaagt

SEQ ID NO: 955702 - DNA, 33 bp, Homo sapien
agaagatgagatgtaacaacatttgatctaagt

SEQ ID NO: 955703 - DNA, 33 bp, Homo sapien
ttctaaatcatagtcaccattaggctattttca

SEQ ID NO: 955704 - DNA, 33 bp, Homo sapien
ttctaaatcatagtcatcattaggctattttca

SEQ ID NO: 955705 - DNA, 33 bp, Homo sapien
tgcagatcattggttaaataaggtttgtagttt

SEQ ID NO: 955706 - DNA, 33 bp, Homo sapien
tgcagatcattggttacataaggtttgtagttt

SEQ ID NO: 955707 - DNA, 33 bp, Homo sapien
cttattcttggggaccactacagcaggtaaatg

SEQ ID NO: 955708 - DNA, 33 bp, Homo sapien
cttattcttggggaccgctacagcaggtaaatg

SEQ ID NO: 955709 - DNA, 33 bp, Homo sapien
ataatgacaacatcacacagcataactgagtat

SEQ ID NO: 955710 - DNA, 33 bp, Homo sapien
ataatgacaacatcacgcagcataactgagtat

SEQ ID NO: 955711 - DNA, 33 bp, Homo sapien
tgtttttcaggaccaccccccaatccaagaaac

SEQ ID NO: 955712 - DNA, 33 bp, Homo sapien
tgtttttcaggaccactccccaatccaagaaac

SEQ ID NO: 955713 - DNA, 33 bp, Homo sapien
tcaagcagctaccaccaatctatatgtttggca

SEQ ID NO: 955714 - DNA, 33 bp, Homo sapien
tcaagcagctaccaccgatctatatgtttggca

SEQ ID NO: 955715 - DNA, 33 bp, Homo sapien
tatagtgaaaggaagaatacctggaaagttaat

SEQ ID NO: 955716 - DNA, 33 bp, Homo sapien
tatagtgaaaggaagagtacctggaaagttaat

SEQ ID NO: 955717 - DNA, 33 bp, Homo sapien
ctagtgtccctagctacatcaaaagctttgtga

SEQ ID NO: 955718 - DNA, 33 bp, Homo sapien
ctagtgtccctagctatatcaaaagctttgtga

SEQ ID NO: 955719 - DNA, 33 bp, Homo sapien
caacttcatgcaaggaatcctgctgagaaattc

SEQ ID NO: 955720 - DNA, 33 bp, Homo sapien
caacttcatgcaaggagtcctgctgagaaattc

SEQ ID NO: 955721 - DNA, 33 bp, Homo sapien
atacagtcacttgctcaccttcattaattgcaa

SEQ ID NO: 955722 - DNA, 33 bp, Homo sapien
atacagtcacttgctcgccttcattaattgcaa

SEQ ID NO: 955723 - DNA, 33 bp, Homo sapien
catgagaaagagaatgcaagcaggtattggaag

SEQ ID NO: 955724 - DNA, 33 bp, Homo sapien
catgagaaagagaatgtaagcaggtattggaag

SEQ ID NO: 955725 - DNA, 33 bp, Homo sapien
tcactctgggctttacaaaatcatacagaccta

SEQ ID NO: 955726 - DNA, 33 bp, Homo sapien
tcactctgggctttacgaaatcatacagaccta

SEQ ID NO: 955727 - DNA, 33 bp, Homo sapien
tcagtagttactatataaaaaagcaagtgtgaa

SEQ ID NO: 955728 - DNA, 33 bp, Homo sapien
tcagtagttactatattaaaaagcaagtgtgaa

SEQ ID NO: 955729 - DNA, 33 bp, Homo sapien
gaaggagcttggtgggaaaataggaaggattct

SEQ ID NO: 955730 - DNA, 33 bp, Homo sapien
gaaggagcttggtgggcaaataggaaggattct

SEQ ID NO: 955731 - DNA, 33 bp, Homo sapien
aactgtgggaagactacactattgctgtaatca

SEQ ID NO: 955732 - DNA, 33 bp, Homo sapien
aactgtgggaagactatactattgctgtaatca

SEQ ID NO: 955733 - DNA, 33 bp, Homo sapien
aaaagtatttagctcaatattttcggcaacttt

SEQ ID NO: 955734 - DNA, 33 bp, Homo sapien
aaaagtatttagctcagtattttcggcaacttt

SEQ ID NO: 955735 - DNA, 33 bp, Homo sapien
cctctataggttaaaacagacaatgaaaatcaa

SEQ ID NO: 955736 - DNA, 33 bp, Homo sapien
cctctataggttaaaagagacaatgaaaatcaa

SEQ ID NO: 955737 - DNA, 33 bp, Homo sapien
gagtgatactctcaggcaagacacatcaatcca

SEQ ID NO: 955738 - DNA, 33 bp, Homo sapien
gagtgatactctcaggtaagacacatcaatcca

SEQ ID NO: 955739 - DNA, 33 bp, Homo sapien
gtagaacataaaagacaacacaatttccacctg

SEQ ID NO: 955740 - DNA, 33 bp, Homo sapien
gtagaacataaaagacgacacaatttccacctg

SEQ ID NO: 955741 - DNA, 33 bp, Homo sapien
tgtacaggcatagtaacagacagatcagtggag

SEQ ID NO: 955742 - DNA, 33 bp, Homo sapien
tgtacaggcatagtaatagacagatcagtggag

SEQ ID NO: 955743 - DNA, 33 bp, Homo sapien
tgttaaaatcaatcacaaagctacacaatttaa

SEQ ID NO: 955744 - DNA, 33 bp, Homo sapien
tgttaaaatcaatcacgaagctacacaatttaa

SEQ ID NO: 955745 - DNA, 33 bp, Homo sapien
atacatcatcagtttacctgccaaaccttgtaa

SEQ ID NO: 955746 - DNA, 33 bp, Homo sapien
atacatcatcagtttatctgccaaaccttgtaa

SEQ ID NO: 955747 - DNA, 33 bp, Homo sapien
tctttaatttaaactacgggaggtcatatggtt

SEQ ID NO: 955748 - DNA, 33 bp, Homo sapien
tctttaatttaaactatgggaggtcatatggtt

SEQ ID NO: 955749 - DNA, 33 bp, Homo sapien
atggagatgctgaacacatgttgcctggtcctg

SEQ ID NO: 955750 - DNA, 33 bp, Homo sapien
atggagatgctgaacatatgttgcctggtcctg

SEQ ID NO: 955751 - DNA, 33 bp, Homo sapien
ttgtgattagtatcaaagcggtgaggtgccctc

SEQ ID NO: 955752 - DNA, 33 bp, Homo sapien
ttgtgattagtatcaatgcggtgaggtgccctc

SEQ ID NO: 955753 - DNA, 33 bp, Homo sapien
atgtagcgtgtcttaaatacatagctagtaatt

SEQ ID NO: 955754 - DNA, 33 bp, Homo sapien
atgtagcgtgtcttaattacatagctagtaatt

SEQ ID NO: 955755 - DNA, 33 bp, Homo sapien
actgcttcctcactgacccattgttttttggat

SEQ ID NO: 955756 - DNA, 33 bp, Homo sapien
actgcttcctcactgatccattgttttttggat

SEQ ID NO: 955757 - DNA, 33 bp, Homo sapien
tgtatttctgtctctgcagataaattttagaaa

SEQ ID NO: 955758 - DNA, 33 bp, Homo sapien
tgtatttctgtctctgtagataaattttagaaa

SEQ ID NO: 955759 - DNA, 33 bp, Homo sapien
gccttatcttaaagacaaacaagaaggggtagg

SEQ ID NO: 955760 - DNA, 33 bp, Homo sapien
gccttatcttaaagaccaacaagaaggggtagg

SEQ ID NO: 955761 - DNA, 33 bp, Homo sapien
catgcctcatatctcaatcctgccctgttaggg

SEQ ID NO: 955762 - DNA, 33 bp, Homo sapien
catgcctcatatctcactcctgccctgttaggg

SEQ ID NO: 955763 - DNA, 33 bp, Homo sapien
ttcttaatcctgaacaataagaggttatgacta

SEQ ID NO: 955764 - DNA, 33 bp, Homo sapien
ttcttaatcctgaacagtaagaggttatgacta

SEQ ID NO: 955765 - DNA, 33 bp, Homo sapien
ctttactatcactatactaggtaggtattaaga

SEQ ID NO: 955766 - DNA, 33 bp, Homo sapien
ctttactatcactatattaggtaggtattaaga

SEQ ID NO: 955767 - DNA, 33 bp, Homo sapien
gtgtgttgtgggcccacgatttgcagcagaaca

SEQ ID NO: 955768 - DNA, 33 bp, Homo sapien
gtgtgttgtgggcccatgatttgcagcagaaca

SEQ ID NO: 955769 - DNA, 33 bp, Homo sapien
tcagcaaccacacaaacgttgatagtgtgcaat

SEQ ID NO: 955770 - DNA, 33 bp, Homo sapien
tcagcaaccacacaaatgttgatagtgtgcaat

SEQ ID NO: 955771 - DNA, 33 bp, Homo sapien
aggtgaaagacctgtacaccgaagacaataaaa

SEQ ID NO: 955772 - DNA, 33 bp, Homo sapien
aggtgaaagacctgtataccgaagacaataaaa

SEQ ID NO: 955773 - DNA, 33 bp, Homo sapien
catcagcaagtgcctccgacatatttcagatct

SEQ ID NO: 955774 - DNA, 33 bp, Homo sapien
catcagcaagtgcctctgacatatttcagatct

SEQ ID NO: 955775 - DNA, 33 bp, Homo sapien
ccatgattttgagttcaaagcttctaagaagga

SEQ ID NO: 955776 - DNA, 33 bp, Homo sapien
ccatgattttgagttcgaagcttctaagaagga

SEQ ID NO: 955777 - DNA, 33 bp, Homo sapien
gctggattagttcacacgggatgtctctgcatt

SEQ ID NO: 955778 - DNA, 33 bp, Homo sapien
gctggattagttcacatgggatgtctctgcatt

SEQ ID NO: 955779 - DNA, 33 bp, Homo sapien
taaaatgaaattaaaaatgtatgacttgccaat

SEQ ID NO: 955780 - DNA, 33 bp, Homo sapien
taaaatgaaattaaaagtgtatgacttgccaat

SEQ ID NO: 955781 - DNA, 33 bp, Homo sapien
tccatgttaatttcccaaaaatatgaatccagg

SEQ ID NO: 955782 - DNA, 33 bp, Homo sapien
tccatgttaatttccccaaaatatgaatccagg

SEQ ID NO: 955783 - DNA, 33 bp, Homo sapien
ccagtgaaagtgtatccgaagttgcagtcaaat

SEQ ID NO: 955784 - DNA, 33 bp, Homo sapien
ccagtgaaagtgtatctgaagttgcagtcaaat

SEQ ID NO: 955785 - DNA, 33 bp, Homo sapien
ttgctgttgtatccaactagagaacctgtctgt

SEQ ID NO: 955786 - DNA, 33 bp, Homo sapien
ttgctgttgtatccaattagagaacctgtctgt

SEQ ID NO: 955787 - DNA, 33 bp, Homo sapien
accaaccactttatacaaacaaaatctgaacac

SEQ ID NO: 955788 - DNA, 33 bp, Homo sapien
accaaccactttatactaacaaaatctgaacac

SEQ ID NO: 955789 - DNA, 33 bp, Homo sapien
gtagaacagcaacaaaatgaagaatagacatag

SEQ ID NO: 955790 - DNA, 33 bp, Homo sapien
gtagaacagcaacaaagtgaagaatagacatag

SEQ ID NO: 955791 - DNA, 33 bp, Homo sapien
caatgtggtaagacatcagtcatgtaaacctca

SEQ ID NO: 955792 - DNA, 33 bp, Homo sapien
caatgtggtaagacattagtcatgtaaacctca

SEQ ID NO: 955793 - DNA, 33 bp, Homo sapien
gtcattgcactgaagaccccttgggttatgcga

SEQ ID NO: 955794 - DNA, 33 bp, Homo sapien
gtcattgcactgaagatcccttgggttatgcga

SEQ ID NO: 955795 - DNA, 33 bp, Homo sapien
gagaaactcaaaaaacacagagaaaacacaacc

SEQ ID NO: 955796 - DNA, 33 bp, Homo sapien
gagaaactcaaaaaacgcagagaaaacacaacc

SEQ ID NO: 955797 - DNA, 33 bp, Homo sapien
ctccagaaaggagatacgaggcaaacgtatgta

SEQ ID NO: 955798 - DNA, 33 bp, Homo sapien
ctccagaaaggagatatgaggcaaacgtatgta

SEQ ID NO: 955799 - DNA, 33 bp, Homo sapien
tgcataatgatgaatacctgctttttttcctct

SEQ ID NO: 955800 - DNA, 33 bp, Homo sapien
tgcataatgatgaatatctgctttttttcctct

SEQ ID NO: 955801 - DNA, 33 bp, Homo sapien
tgacctaaaccggtagcccaggacacatgagca

SEQ ID NO: 955802 - DNA, 33 bp, Homo sapien
tgacctaaaccggtaggccaggacacatgagca

SEQ ID NO: 955803 - DNA, 33 bp, Homo sapien
cctggcaagagaaagtaaaggagtgtattctgg

SEQ ID NO: 955804 - DNA, 33 bp, Homo sapien
cctggcaagagaaagtcaaggagtgtattctgg

SEQ ID NO: 955805 - DNA, 33 bp, Homo sapien
gacaggtgaatgttagccacggtttctgtcttc

SEQ ID NO: 955806 - DNA, 33 bp, Homo sapien
gacaggtgaatgttaggcacggtttctgtcttc

SEQ ID NO: 955807 - DNA, 33 bp, Homo sapien
ttccagatcacaggtaagtaagaggaaaatgtt

SEQ ID NO: 955808 - DNA, 33 bp, Homo sapien
ttccagatcacaggtaggtaagaggaaaatgtt

SEQ ID NO: 955809 - DNA, 33 bp, Homo sapien
agagtctagtgcagaagtggatgtatcagcctt

SEQ ID NO: 955810 - DNA, 33 bp, Homo sapien
agagtctagtgcagaattggatgtatcagcctt

SEQ ID NO: 955811 - DNA, 33 bp, Homo sapien
gtaccagatatctttcaaagtttgcaaatgtat

SEQ ID NO: 955812 - DNA, 33 bp, Homo sapien
gtaccagatatctttcgaagtttgcaaatgtat

SEQ ID NO: 955813 - DNA, 33 bp, Homo sapien
caattttcttacctcaaacttatcctaccacat

SEQ ID NO: 955814 - DNA, 33 bp, Homo sapien
caattttcttacctcagacttatcctaccacat

SEQ ID NO: 955815 - DNA, 33 bp, Homo sapien
ttatagagaatttttaagaagcatgaagaaata

SEQ ID NO: 955816 - DNA, 33 bp, Homo sapien
ttatagagaatttttatgaagcatgaagaaata

SEQ ID NO: 955817 - DNA, 33 bp, Homo sapien
gatttatcattgagtgcaaagtagacgaaaaaa

SEQ ID NO: 955818 - DNA, 33 bp, Homo sapien
gatttatcattgagtggaaagtagacgaaaaaa

SEQ ID NO: 955819 - DNA, 33 bp, Homo sapien
ggtgcaacagatcccaataaaactcaaactaac

SEQ ID NO: 955820 - DNA, 33 bp, Homo sapien
ggtgcaacagatcccagtaaaactcaaactaac

SEQ ID NO: 955821 - DNA, 33 bp, Homo sapien
atatatggccaatataccctcgaatgcttattg

SEQ ID NO: 955822 - DNA, 33 bp, Homo sapien
atatatggccaatatagcctcgaatgcttattg

SEQ ID NO: 955823 - DNA, 33 bp, Homo sapien
acatgatcttatgagaaagtaaaattataagct

SEQ ID NO: 955824 - DNA, 33 bp, Homo sapien
acatgatcttatgagagagtaaaattataagct

SEQ ID NO: 955825 - DNA, 33 bp, Homo sapien
ctttgtagctttaataagtttgtttcatcaatg

SEQ ID NO: 955826 - DNA, 33 bp, Homo sapien
ctttgtagctttaataggtttgtttcatcaatg

SEQ ID NO: 955827 - DNA, 33 bp, Homo sapien
acataattgcaagatacaaggcaaggcagaaaa

SEQ ID NO: 955828 - DNA, 33 bp, Homo sapien
acataattgcaagatataaggcaaggcagaaaa

SEQ ID NO: 955829 - DNA, 33 bp, Homo sapien
actttagaacacctccgattctaaccagtagct

SEQ ID NO: 955830 - DNA, 33 bp, Homo sapien
actttagaacacctcctattctaaccagtagct

SEQ ID NO: 955831 - DNA, 33 bp, Homo sapien
agaaagaaaactgccacgcctagttatggaata

SEQ ID NO: 955832 - DNA, 33 bp, Homo sapien
agaaagaaaactgccatgcctagttatggaata

SEQ ID NO: 955833 - DNA, 33 bp, Homo sapien
acacttctttcactcaactttattgtgaattca

SEQ ID NO: 955834 - DNA, 33 bp, Homo sapien
acacttctttcactcacctttattgtgaattca

SEQ ID NO: 955835 - DNA, 33 bp, Homo sapien
ttatagttaaattacaccaatgtcaagttaagc

SEQ ID NO: 955836 - DNA, 33 bp, Homo sapien
ttatagttaaattacatcaatgtcaagttaagc

SEQ ID NO: 955837 - DNA, 33 bp, Homo sapien
ggcaggattcaaaacaaatatggaacaataacc

SEQ ID NO: 955838 - DNA, 33 bp, Homo sapien
ggcaggattcaaaacagatatggaacaataacc

SEQ ID NO: 955839 - DNA, 33 bp, Homo sapien
tctggtgaattttttccaagttcttctctctcc

SEQ ID NO: 955840 - DNA, 33 bp, Homo sapien
tctggtgaattttttctaagttcttctctctcc

SEQ ID NO: 955841 - DNA, 33 bp, Homo sapien
tttctattccttttaaatgctgttaggaagcct

SEQ ID NO: 955842 - DNA, 33 bp, Homo sapien
tttctattccttttaagtgctgttaggaagcct

SEQ ID NO: 955843 - DNA, 33 bp, Homo sapien
cagttctgccaggaacacaccaatgacaacaca

SEQ ID NO: 955844 - DNA, 33 bp, Homo sapien
cagttctgccaggaacgcaccaatgacaacaca

SEQ ID NO: 955845 - DNA, 33 bp, Homo sapien
cttcttaattttagcacatacgatgtgagtttc

SEQ ID NO: 955846 - DNA, 33 bp, Homo sapien
cttcttaattttagcatatacgatgtgagtttc

SEQ ID NO: 955847 - DNA, 33 bp, Homo sapien
tttgcctatttccatccacaactctgccagaga

SEQ ID NO: 955848 - DNA, 33 bp, Homo sapien
tttgcctatttccatctacaactctgccagaga

SEQ ID NO: 955849 - DNA, 33 bp, Homo sapien
ccttgtgttatagtgacctcaatttctggatga

SEQ ID NO: 955850 - DNA, 33 bp, Homo sapien
ccttgtgttatagtgatctcaatttctggatga

SEQ ID NO: 955851 - DNA, 33 bp, Homo sapien
attaaagcaccacccaagtagaggtctattcta

SEQ ID NO: 955852 - DNA, 33 bp, Homo sapien
attaaagcaccacccaggtagaggtctattcta

SEQ ID NO: 955853 - DNA, 33 bp, Homo sapien
atagggaaaggtagaacgcctacaaagaatctt

SEQ ID NO: 955854 - DNA, 33 bp, Homo sapien
atagggaaaggtagaatgcctacaaagaatctt

SEQ ID NO: 955855 - DNA, 33 bp, Homo sapien
gagggctcatagaggccatggattgaatttcaa

SEQ ID NO: 955856 - DNA, 33 bp, Homo sapien
gagggctcatagaggctatggattgaatttcaa

SEQ ID NO: 955857 - DNA, 33 bp, Homo sapien
ccagtcttccctttccaaacttcagcctattgt

SEQ ID NO: 955858 - DNA, 33 bp, Homo sapien
ccagtcttccctttccgaacttcagcctattgt

SEQ ID NO: 955859 - DNA, 33 bp, Homo sapien
agccatagccctgcgcaaaaggagttgggagaa

SEQ ID NO: 955860 - DNA, 33 bp, Homo sapien
agccatagccctgcgcgaaaggagttgggagaa

SEQ ID NO: 955861 - DNA, 33 bp, Homo sapien
ttccagcaacagttcactccctttgccctttag

SEQ ID NO: 955862 - DNA, 33 bp, Homo sapien
ttccagcaacagttcattccctttgccctttag

SEQ ID NO: 955863 - DNA, 33 bp, Homo sapien
cctcaaaaatataaaacgactgtccagtgccca

SEQ ID NO: 955864 - DNA, 33 bp, Homo sapien
cctcaaaaatataaaatgactgtccagtgccca

SEQ ID NO: 955865 - DNA, 33 bp, Homo sapien
tgtgaaaataggcaccagagttcaaattttatg

SEQ ID NO: 955866 - DNA, 33 bp, Homo sapien
tgtgaaaataggcaccggagttcaaattttatg

SEQ ID NO: 955867 - DNA, 33 bp, Homo sapien
gcattggaaattggagccgaaacccagctgaaa

SEQ ID NO: 955868 - DNA, 33 bp, Homo sapien
gcattggaaattggagtcgaaacccagctgaaa

SEQ ID NO: 955869 - DNA, 33 bp, Homo sapien
ctcagttatgcctacaaaatttatctataatgt

SEQ ID NO: 955870 - DNA, 33 bp, Homo sapien
ctcagttatgcctacagaatttatctataatgt

SEQ ID NO: 955871 - DNA, 33 bp, Homo sapien
cacttgaacacttcctcacctttgacagcttgt

SEQ ID NO: 955872 - DNA, 33 bp, Homo sapien
cacttgaacacttccttacctttgacagcttgt

SEQ ID NO: 955873 - DNA, 33 bp, Homo sapien
tttccccttttatcaacggcctaatttgcaaac

SEQ ID NO: 955874 - DNA, 33 bp, Homo sapien
tttccccttttatcaatggcctaatttgcaaac

SEQ ID NO: 955875 - DNA, 33 bp, Homo sapien
ataagccaactctgaaaccagtttacttcacaa

SEQ ID NO: 955876 - DNA, 33 bp, Homo sapien
ataagccaactctgaacccagtttacttcacaa

SEQ ID NO: 955877 - DNA, 33 bp, Homo sapien
attccaaatgtattcacgacgtttagtattagc

SEQ ID NO: 955878 - DNA, 33 bp, Homo sapien
attccaaatgtattcatgacgtttagtattagc

SEQ ID NO: 955879 - DNA, 33 bp, Homo sapien
gctataaaatgtgataagtgtttatggaggaag

SEQ ID NO: 955880 - DNA, 33 bp, Homo sapien
gctataaaatgtgataggtgtttatggaggaag

SEQ ID NO: 955881 - DNA, 33 bp, Homo sapien
aggcaagtaccaggttcaaattgtgggtgtgat

SEQ ID NO: 955882 - DNA, 33 bp, Homo sapien
aggcaagtaccaggttgaaattgtgggtgtgat

SEQ ID NO: 955883 - DNA, 33 bp, Homo sapien
ttacagaatctgccagaagcatctgcttaaaat

SEQ ID NO: 955884 - DNA, 33 bp, Homo sapien
ttacagaatctgccaggagcatctgcttaaaat

SEQ ID NO: 955885 - DNA, 33 bp, Homo sapien
gggacaaaacaatttgaatgtaggaatctgtct

SEQ ID NO: 955886 - DNA, 33 bp, Homo sapien
gggacaaaacaatttggatgtaggaatctgtct

SEQ ID NO: 955887 - DNA, 33 bp, Homo sapien
caaaaaattcctgctaagtacaacattttcttt

SEQ ID NO: 955888 - DNA, 33 bp, Homo sapien
caaaaaattcctgctacgtacaacattttcttt

SEQ ID NO: 955889 - DNA, 33 bp, Homo sapien
catctcttctagttaaagcagttcctattagtc

SEQ ID NO: 955890 - DNA, 33 bp, Homo sapien
catctcttctagttaaggcagttcctattagtc

SEQ ID NO: 955891 - DNA, 33 bp, Homo sapien
gtccctataccagagaagaacgagtaagtgctc

SEQ ID NO: 955892 - DNA, 33 bp, Homo sapien
gtccctataccagagaggaacgagtaagtgctc

SEQ ID NO: 955893 - DNA, 33 bp, Homo sapien
acacatgtgggaacaaaaaggatgaatacagct

SEQ ID NO: 955894 - DNA, 33 bp, Homo sapien
acacatgtgggaacaagaaggatgaatacagct

SEQ ID NO: 955895 - DNA, 33 bp, Homo sapien
catagatttatacacacaagggttaaagtatta

SEQ ID NO: 955896 - DNA, 33 bp, Homo sapien
catagatttatacacagaagggttaaagtatta

SEQ ID NO: 955897 - DNA, 33 bp, Homo sapien
tctatccaagccaaaccgtcttgagacttaatt

SEQ ID NO: 955898 - DNA, 33 bp, Homo sapien
tctatccaagccaaactgtcttgagacttaatt

SEQ ID NO: 955899 - DNA, 33 bp, Homo sapien
gggattcttgctaaaccgacttaacaagattct

SEQ ID NO: 955900 - DNA, 33 bp, Homo sapien
gggattcttgctaaactgacttaacaagattct

SEQ ID NO: 955901 - DNA, 33 bp, Homo sapien
gctaaggtctggttaacgagagaacctttatta

SEQ ID NO: 955902 - DNA, 33 bp, Homo sapien
gctaaggtctggttaatgagagaacctttatta

SEQ ID NO: 955903 - DNA, 33 bp, Homo sapien
agttaatcatacataaaatgcgaaatggtttta

SEQ ID NO: 955904 - DNA, 33 bp, Homo sapien
agttaatcatacataagatgcgaaatggtttta

SEQ ID NO: 955905 - DNA, 33 bp, Homo sapien
cctattcagtctagaaaaactgtcaagctgacc

SEQ ID NO: 955906 - DNA, 33 bp, Homo sapien
cctattcagtctagaacaactgtcaagctgacc

SEQ ID NO: 955907 - DNA, 33 bp, Homo sapien
tatttcttgattgggagatctttccaccttttc

SEQ ID NO: 955908 - DNA, 33 bp, Homo sapien
tatttcttgattgggatatctttccaccttttc

SEQ ID NO: 955909 - DNA, 33 bp, Homo sapien
cttcttctgtagctacactaattccaagtcatt

SEQ ID NO: 955910 - DNA, 33 bp, Homo sapien
cttcttctgtagctaccctaattccaagtcatt

SEQ ID NO: 955911 - DNA, 33 bp, Homo sapien
tctccattccccacacagaagtttatgacctat

SEQ ID NO: 955912 - DNA, 33 bp, Homo sapien
tctccattccccacaccgaagtttatgacctat

SEQ ID NO: 955913 - DNA, 33 bp, Homo sapien
tcaaaggcacaattaggagacagtggataaggc

SEQ ID NO: 955914 - DNA, 33 bp, Homo sapien
tcaaaggcacaattagtagacagtggataaggc

SEQ ID NO: 955915 - DNA, 33 bp, Homo sapien
ttcttaggaactgtcaaattactttaattgggc

SEQ ID NO: 955916 - DNA, 33 bp, Homo sapien
ttcttaggaactgtcagattactttaattgggc

SEQ ID NO: 955917 - DNA, 33 bp, Homo sapien
cactttgccatataaggaaaatcacagatttga

SEQ ID NO: 955918 - DNA, 33 bp, Homo sapien
cactttgccatataagtaaaatcacagatttga

SEQ ID NO: 955919 - DNA, 33 bp, Homo sapien
gcagtagaactctccacactgcaagttacatat

SEQ ID NO: 955920 - DNA, 33 bp, Homo sapien
gcagtagaactctccatactgcaagttacatat

SEQ ID NO: 955921 - DNA, 33 bp, Homo sapien
accattgacacataaactgtaccatgcctggtt

SEQ ID NO: 955922 - DNA, 33 bp, Homo sapien
accattgacacataaattgtaccatgcctggtt

SEQ ID NO: 955923 - DNA, 33 bp, Homo sapien
ctgtactccagtaggaccaatgaaggactgtac

SEQ ID NO: 955924 - DNA, 33 bp, Homo sapien
ctgtactccagtaggatcaatgaaggactgtac

SEQ ID NO: 955925 - DNA, 33 bp, Homo sapien
aaatgacaggtatgtgaagcaatacatatatta

SEQ ID NO: 955926 - DNA, 33 bp, Homo sapien
aaatgacaggtatgtggagcaatacatatatta

SEQ ID NO: 955927 - DNA, 33 bp, Homo sapien
aaacatttaagtgcaactatcattctgagatat

SEQ ID NO: 955928 - DNA, 33 bp, Homo sapien
aaacatttaagtgcaagtatcattctgagatat

SEQ ID NO: 955929 - DNA, 33 bp, Homo sapien
atatacttcatggttacacctctgcagtttaga

SEQ ID NO: 955930 - DNA, 33 bp, Homo sapien
atatacttcatggttagacctctgcagtttaga

SEQ ID NO: 955931 - DNA, 33 bp, Homo sapien
tatattgaaatgatcaaaggataaaaaatatta

SEQ ID NO: 955932 - DNA, 33 bp, Homo sapien
tatattgaaatgatcagaggataaaaaatatta

SEQ ID NO: 955933 - DNA, 33 bp, Homo sapien
tatagcagaatattctcacccaactgtgctagg

SEQ ID NO: 955934 - DNA, 33 bp, Homo sapien
tatagcagaatattctgacccaactgtgctagg

SEQ ID NO: 955935 - DNA, 33 bp, Homo sapien
tttcctcatccgtaaaatggaggtaaccacttt

SEQ ID NO: 955936 - DNA, 33 bp, Homo sapien
tttcctcatccgtaaactggaggtaaccacttt

SEQ ID NO: 955937 - DNA, 33 bp, Homo sapien
accaacagcacactaaaacctgctcgtggaaag

SEQ ID NO: 955938 - DNA, 33 bp, Homo sapien
accaacagcacactaagacctgctcgtggaaag

SEQ ID NO: 955939 - DNA, 33 bp, Homo sapien
atagggttgaaaacaactcaactaggtttcatt

SEQ ID NO: 955940 - DNA, 33 bp, Homo sapien
atagggttgaaaacaagtcaactaggtttcatt

SEQ ID NO: 955941 - DNA, 33 bp, Homo sapien
ggccattttttattcaaccattggcaggcttct

SEQ ID NO: 955942 - DNA, 33 bp, Homo sapien
ggccattttttattcagccattggcaggcttct

SEQ ID NO: 955943 - DNA, 33 bp, Homo sapien
aagtaactgatgacaccagcaatgaaacctaga

SEQ ID NO: 955944 - DNA, 33 bp, Homo sapien
aagtaactgatgacactagcaatgaaacctaga

SEQ ID NO: 955945 - DNA, 33 bp, Homo sapien
gcttgaaaataaattacgattcacaacacaaag

SEQ ID NO: 955946 - DNA, 33 bp, Homo sapien
gcttgaaaataaattatgattcacaacacaaag

SEQ ID NO: 955947 - DNA, 33 bp, Homo sapien
aggagagaagaaagaactcagatgaaacacaaa

SEQ ID NO: 955948 - DNA, 33 bp, Homo sapien
aggagagaagaaagaagtcagatgaaacacaaa

SEQ ID NO: 955949 - DNA, 33 bp, Homo sapien
ttctttgcaggaatcacaatcatgtgctgtctg

SEQ ID NO: 955950 - DNA, 33 bp, Homo sapien
ttctttgcaggaatcataatcatgtgctgtctg

SEQ ID NO: 955951 - DNA, 33 bp, Homo sapien
acgatcttattaatgcagattctgggttccatt

SEQ ID NO: 955952 - DNA, 33 bp, Homo sapien
acgatcttattaatgcggattctgggttccatt

SEQ ID NO: 955953 - DNA, 33 bp, Homo sapien
gtgacttttcagatctcaattgctactgtcagg

SEQ ID NO: 955954 - DNA, 33 bp, Homo sapien
gtgacttttcagatctgaattgctactgtcagg

SEQ ID NO: 955955 - DNA, 33 bp, Homo sapien
ttccagataattgaacacagagctgacggatga

SEQ ID NO: 955956 - DNA, 33 bp, Homo sapien
ttccagataattgaactcagagctgacggatga

SEQ ID NO: 955957 - DNA, 33 bp, Homo sapien
tattctttatatttcaagcctggcagagtgcat

SEQ ID NO: 955958 - DNA, 33 bp, Homo sapien
tattctttatatttcaggcctggcagagtgcat

SEQ ID NO: 955959 - DNA, 33 bp, Homo sapien
aatttaacagtgtaaactaatgcatatttataa

SEQ ID NO: 955960 - DNA, 33 bp, Homo sapien
aatttaacagtgtaaagtaatgcatatttataa

SEQ ID NO: 955961 - DNA, 33 bp, Homo sapien
agccaccaatctctagcagctgggagtttctag

SEQ ID NO: 955962 - DNA, 33 bp, Homo sapien
agccaccaatctctagtagctgggagtttctag

SEQ ID NO: 955963 - DNA, 33 bp, Homo sapien
tagctttatggctccaaagagtatggaagactc

SEQ ID NO: 955964 - DNA, 33 bp, Homo sapien
tagctttatggctccagagagtatggaagactc

SEQ ID NO: 955965 - DNA, 33 bp, Homo sapien
taggggataatttatcaatgatgttctgtttcc

SEQ ID NO: 955966 - DNA, 33 bp, Homo sapien
taggggataatttatcgatgatgttctgtttcc

SEQ ID NO: 955967 - DNA, 33 bp, Homo sapien
gcccttatttggatcacagattgaatgccattg

SEQ ID NO: 955968 - DNA, 33 bp, Homo sapien
gcccttatttggatcatagattgaatgccattg

SEQ ID NO: 955969 - DNA, 33 bp, Homo sapien
ataaataagcaattatcaaaaggacaggcataa

SEQ ID NO: 955970 - DNA, 33 bp, Homo sapien
ataaataagcaattatgaaaaggacaggcataa

SEQ ID NO: 955971 - DNA, 33 bp, Homo sapien
aaaattctaacaatgcaaaagtaacaaaaagtt

SEQ ID NO: 955972 - DNA, 33 bp, Homo sapien
aaaattctaacaatgcgaaagtaacaaaaagtt

SEQ ID NO: 955973 - DNA, 33 bp, Homo sapien
taaaatattgatagtaaccggattgagaaagtt

SEQ ID NO: 955974 - DNA, 33 bp, Homo sapien
taaaatattgatagtatccggattgagaaagtt

SEQ ID NO: 955975 - DNA, 33 bp, Homo sapien
tcctcttggagcccaaaaattataattcaccca

SEQ ID NO: 955976 - DNA, 33 bp, Homo sapien
tcctcttggagcccaacaattataattcaccca

SEQ ID NO: 955977 - DNA, 33 bp, Homo sapien
tgggcttggttatgaactcttcacattctatga

SEQ ID NO: 955978 - DNA, 33 bp, Homo sapien
tgggcttggttatgaattcttcacattctatga

SEQ ID NO: 955979 - DNA, 33 bp, Homo sapien
tagtggcatcactagaaaggaagcctaagggga

SEQ ID NO: 955980 - DNA, 33 bp, Homo sapien
tagtggcatcactagagaggaagcctaagggga

SEQ ID NO: 955981 - DNA, 33 bp, Homo sapien
aacattttatattcacaatggaagatatctcat

SEQ ID NO: 955982 - DNA, 33 bp, Homo sapien
aacattttatattcacgatggaagatatctcat

SEQ ID NO: 955983 - DNA, 33 bp, Homo sapien
atgcctgatgcagtgacggccacaaaggctgta

SEQ ID NO: 955984 - DNA, 33 bp, Homo sapien
atgcctgatgcagtgatggccacaaaggctgta

SEQ ID NO: 955985 - DNA, 33 bp, Homo sapien
tcatagatgttaaggaagttgttcagggttgta

SEQ ID NO: 955986 - DNA, 33 bp, Homo sapien
tcatagatgttaaggaggttgttcagggttgta

SEQ ID NO: 955987 - DNA, 33 bp, Homo sapien
ggtgagataagacagacaaataatagagtgggc

SEQ ID NO: 955988 - DNA, 33 bp, Homo sapien
ggtgagataagacagagaaataatagagtgggc

SEQ ID NO: 955989 - DNA, 33 bp, Homo sapien
ctgggcgctggtatcaatctcttcttttgtcca

SEQ ID NO: 955990 - DNA, 33 bp, Homo sapien
ctgggcgctggtatcactctcttcttttgtcca

SEQ ID NO: 955991 - DNA, 33 bp, Homo sapien
ccaaacagagccctacagaaaagaacaggtaaa

SEQ ID NO: 955992 - DNA, 33 bp, Homo sapien
ccaaacagagccctacggaaaagaacaggtaaa

SEQ ID NO: 955993 - DNA, 33 bp, Homo sapien
taagtttcaggattcacgtaggcaccaaattcc

SEQ ID NO: 955994 - DNA, 33 bp, Homo sapien
taagtttcaggattcatgtaggcaccaaattcc

SEQ ID NO: 955995 - DNA, 33 bp, Homo sapien
ggaagaatgaaaggaactgggctaataaggtta

SEQ ID NO: 955996 - DNA, 33 bp, Homo sapien
ggaagaatgaaaggaagtgggctaataaggtta

SEQ ID NO: 955997 - DNA, 33 bp, Homo sapien
cttcagtggaattgtgaaaaataatgaaaatca

SEQ ID NO: 955998 - DNA, 33 bp, Homo sapien
cttcagtggaattgtgcaaaataatgaaaatca

SEQ ID NO: 955999 - DNA, 33 bp, Homo sapien
aacagcttcattatcacgggaaagaaactctgc

SEQ ID NO: 956000 - DNA, 33 bp, Homo sapien
aacagcttcattatcatgggaaagaaactctgc

SEQ ID NO: 956001 - DNA, 33 bp, Homo sapien
caacaccagcagcagaaaggtcaagataaaaaa

SEQ ID NO: 956002 - DNA, 33 bp, Homo sapien
caacaccagcagcagagaggtcaagataaaaaa

SEQ ID NO: 956003 - DNA, 33 bp, Homo sapien
ctccaccttttcagaaacaaaagtctccctggt

SEQ ID NO: 956004 - DNA, 33 bp, Homo sapien
ctccaccttttcagaagcaaaagtctccctggt

SEQ ID NO: 956005 - DNA, 33 bp, Homo sapien
tgaggggtttgtcctacagcactcttatggcaa

SEQ ID NO: 956006 - DNA, 33 bp, Homo sapien
tgaggggtttgtcctatagcactcttatggcaa

SEQ ID NO: 956007 - DNA, 33 bp, Homo sapien
tgtgagaatacatcagcattagcctcctggagg

SEQ ID NO: 956008 - DNA, 33 bp, Homo sapien
tgtgagaatacatcaggattagcctcctggagg

SEQ ID NO: 956009 - DNA, 33 bp, Homo sapien
aatttttctttgaacaggctcttgagataacat

SEQ ID NO: 956010 - DNA, 33 bp, Homo sapien
aatttttctttgaacatgctcttgagataacat

SEQ ID NO: 956011 - DNA, 33 bp, Homo sapien
taactgaatacaggataactttgagcgaacagg

SEQ ID NO: 956012 - DNA, 33 bp, Homo sapien
taactgaatacaggatgactttgagcgaacagg

SEQ ID NO: 956013 - DNA, 33 bp, Homo sapien; identical to SEQ ID NO: 956011

SEQ ID NO: 956014 - DNA, 33 bp, Homo sapien; identical to SEQ ID NO: 956012

SEQ ID NO: 956015 - DNA, 33 bp, Homo sapien
tttcaggatatcatcaaattcttttactgatac

SEQ ID NO: 956016 - DNA, 33 bp, Homo sapien
tttcaggatatcatcagattcttttactgatac

SEQ ID NO: 956017 - DNA, 33 bp, Homo sapien; identical to SEQ ID NO: 956015

SEQ ID NO: 956018 - DNA, 33 bp, Homo sapien; identical to SEQ ID NO: 956016

SEQ ID NO: 956019 - DNA, 33 bp, Homo sapien
ttgacctcatcagcaccatctagtttagagccc

SEQ ID NO: 956020 - DNA, 33 bp, Homo sapien
ttgacctcatcagcacgatctagtttagagccc

SEQ ID NO: 956021 - DNA, 33 bp, Homo sapien
atgttggtgctagggacatattgatgcattgaa

SEQ ID NO: 956022 - DNA, 33 bp, Homo sapien
atgttggtgctagggagatattgatgcattgaa

SEQ ID NO: 956023 - DNA, 33 bp, Homo sapien
atgagataatgtcagaaaaaacactttgccttt

SEQ ID NO: 956024 - DNA, 33 bp, Homo sapien
atgagataatgtcagagaaaacactttgccttt

SEQ ID NO: 956025 - DNA, 33 bp, Homo sapien
ttggttggtggaaaaacgtaactagtgctattg

SEQ ID NO: 956026 - DNA, 33 bp, Homo sapien
ttggttggtggaaaaatgtaactagtgctattg

SEQ ID NO: 956027 - DNA, 33 bp, Homo sapien
agcagacaggcactaaaagtgttacgagaagtt

SEQ ID NO: 956028 - DNA, 33 bp, Homo sapien
agcagacaggcactaacagtgttacgagaagtt

SEQ ID NO: 956029 - DNA, 33 bp, Homo sapien
accctaatttcctttcaatgaagtcttgtattc

SEQ ID NO: 956030 - DNA, 33 bp, Homo sapien
accctaatttcctttcgatgaagtcttgtattc

SEQ ID NO: 956031 - DNA, 33 bp, Homo sapien
gtccattgtattccaccatgtgtcttgtttgtt

SEQ ID NO: 956032 - DNA, 33 bp, Homo sapien
gtccattgtattccacgatgtgtcttgtttgtt

SEQ ID NO: 956033 - DNA, 33 bp, Homo sapien
gaacaaaatgtgaacccggagtgcaaaaaatca

SEQ ID NO: 956034 - DNA, 33 bp, Homo sapien
gaacaaaatgtgaacctggagtgcaaaaaatca

SEQ ID NO: 956035 - DNA, 33 bp, Homo sapien
ctctaaaatcatctccaagtttcagatttgtct

SEQ ID NO: 956036 - DNA, 33 bp, Homo sapien
ctctaaaatcatctccgagtttcagatttgtct

SEQ ID NO: 956037 - DNA, 33 bp, Homo sapien
ttttagagtctagggcccttaactactaaagat

SEQ ID NO: 956038 - DNA, 33 bp, Homo sapien
ttttagagtctagggctcttaactactaaagat

SEQ ID NO: 956039 - DNA, 33 bp, Homo sapien
cacactgtattcattacatttacaactatacca

SEQ ID NO: 956040 - DNA, 33 bp, Homo sapien
cacactgtattcattatatttacaactatacca

SEQ ID NO: 956041 - DNA, 33 bp, Homo sapien
atttgggaagctattgcaataaaacaggcaaag

SEQ ID NO: 956042 - DNA, 33 bp, Homo sapien
atttgggaagctattgtaataaaacaggcaaag

SEQ ID NO: 956043 - DNA, 33 bp, Homo sapien
ctggctgtgatagtctcagaagtgtgtgatagt

SEQ ID NO: 956044 - DNA, 33 bp, Homo sapien
ctggctgtgatagtctgagaagtgtgtgatagt

SEQ ID NO: 956045 - DNA, 33 bp, Homo sapien
aactgaattttgttgacgaaggacacaatctgt

SEQ ID NO: 956046 - DNA, 33 bp, Homo sapien
aactgaattttgttgatgaaggacacaatctgt

SEQ ID NO: 956047 - DNA, 33 bp, Homo sapien
tgctaatggaacacaaactcctgcattagaaaa

SEQ ID NO: 956048 - DNA, 33 bp, Homo sapien
tgctaatggaacacaagctcctgcattagaaaa

SEQ ID NO: 956049 - DNA, 33 bp, Homo sapien
tgaagcagtgagatcaagcagttattcaaagat

SEQ ID NO: 956050 - DNA, 33 bp, Homo sapien
tgaagcagtgagatcacgcagttattcaaagat

SEQ ID NO: 956051 - DNA, 33 bp, Homo sapien
tcttttctcttatccagaaaagtaactatatca

SEQ ID NO: 956052 - DNA, 33 bp, Homo sapien
tcttttctcttatccataaaagtaactatatca

SEQ ID NO: 956053 - DNA, 33 bp, Homo sapien
acgagcccaaatctagcacatttctgagatcca

SEQ ID NO: 956054 - DNA, 33 bp, Homo sapien
acgagcccaaatctagtacatttctgagatcca

SEQ ID NO: 956055 - DNA, 33 bp, Homo sapien
ttgaatggagaagaccagagcacatgtccttgt

SEQ ID NO: 956056 - DNA, 33 bp, Homo sapien
ttgaatggagaagaccggagcacatgtccttgt

SEQ ID NO: 956057 - DNA, 33 bp, Homo sapien
acagggaaggataaaccaaaagactgttcagaa

SEQ ID NO: 956058 - DNA, 33 bp, Homo sapien
acagggaaggataaactaaaagactgttcagaa

SEQ ID NO: 956059 - DNA, 33 bp, Homo sapien
ttcttcacctaccacaatatctcataggcactt

SEQ ID NO: 956060 - DNA, 33 bp, Homo sapien
ttcttcacctaccacagtatctcataggcactt

SEQ ID NO: 956061 - DNA, 33 bp, Homo sapien
gagtcacaagttcctgcataatctggctcctcc

SEQ ID NO: 956062 - DNA, 33 bp, Homo sapien
gagtcacaagttcctgtataatctggctcctcc

SEQ ID NO: 956063 - DNA, 33 bp, Homo sapien
agttccctgccagctccgagatttcagcttgcc

SEQ ID NO: 956064 - DNA, 33 bp, Homo sapien
agttccctgccagctctgagatttcagcttgcc

SEQ ID NO: 956065 - DNA, 33 bp, Homo sapien
tattgggaactagaagcctggatttttaggaga

SEQ ID NO: 956066 - DNA, 33 bp, Homo sapien
tattgggaactagaagtctggatttttaggaga

SEQ ID NO: 956067 - DNA, 33 bp, Homo sapien
ctggagaatggtgagaagtatgtttgcagagcc

SEQ ID NO: 956068 - DNA, 33 bp, Homo sapien
ctggagaatggtgagaggtatgtttgcagagcc

SEQ ID NO: 956069 - DNA, 33 bp, Homo sapien
ttcagtttctttgcggaagttatgtctgagttg

SEQ ID NO: 956070 - DNA, 33 bp, Homo sapien
ttcagtttctttgcgggagttatgtctgagttg

SEQ ID NO: 956071 - DNA, 33 bp, Homo sapien
agataaacttagaaaacgtaagtcacctgagct

SEQ ID NO: 956072 - DNA, 33 bp, Homo sapien
agataaacttagaaaatgtaagtcacctgagct

SEQ ID NO: 956073 - DNA, 33 bp, Homo sapien
tttcttgtgtctgacactggaagatataactaa

SEQ ID NO: 956074 - DNA, 33 bp, Homo sapien
tttcttgtgtctgacattggaagatataactaa

SEQ ID NO: 956075 - DNA, 33 bp, Homo sapien
tatttcatttttaaacacaaacactcagtctta

SEQ ID NO: 956076 - DNA, 33 bp, Homo sapien
tatttcatttttaaacgcaaacactcagtctta

SEQ ID NO: 956077 - DNA, 33 bp, Homo sapien
gcaccagctttgaggcaactgtagcacatggtc

SEQ ID NO: 956078 - DNA, 33 bp, Homo sapien
gcaccagctttgaggcgactgtagcacatggtc

SEQ ID NO: 956079 - DNA, 33 bp, Homo sapien
agggagttcctctacaatctgtcctatcctcag

SEQ ID NO: 956080 - DNA, 33 bp, Homo sapien
agggagttcctctacactctgtcctatcctcag

SEQ ID NO: 956081 - DNA, 33 bp, Homo sapien
ggactctacagccagaaaaagataaaatcacta

SEQ ID NO: 956082 - DNA, 33 bp, Homo sapien
ggactctacagccagagaaagataaaatcacta

SEQ ID NO: 956083 - DNA, 33 bp, Homo sapien
attcaatagttcaatgaaatcttttctgaccac

SEQ ID NO: 956084 - DNA, 33 bp, Homo sapien
attcaatagttcaatggaatcttttctgaccac

SEQ ID NO: 956085 - DNA, 33 bp, Homo sapien
atcccctacttgcaaccggctcaaggccattcc

SEQ ID NO: 956086 - DNA, 33 bp, Homo sapien
atcccctacttgcaactggctcaaggccattcc

SEQ ID NO: 956087 - DNA, 33 bp, Homo sapien
tggttttggtccctaacagaactattatttatc

SEQ ID NO: 956088 - DNA, 33 bp, Homo sapien
tggttttggtccctaagagaactattatttatc

SEQ ID NO: 956089 - DNA, 33 bp, Homo sapien
aatttgaaaaaggtgccaggaacaccatctgcc

SEQ ID NO: 956090 - DNA, 33 bp, Homo sapien
aatttgaaaaaggtgctaggaacaccatctgcc

SEQ ID NO: 956091 - DNA, 33 bp, Homo sapien
tcctgaactaaagcaactctctcgtgccagcct

SEQ ID NO: 956092 - DNA, 33 bp, Homo sapien
tcctgaactaaagcaattctctcgtgccagcct

SEQ ID NO: 956093 - DNA, 33 bp, Homo sapien
ctattgttcctgtgaacgagataaattttcttt

SEQ ID NO: 956094 - DNA, 33 bp, Homo sapien
ctattgttcctgtgaatgagataaattttcttt

SEQ ID NO: 956095 - DNA, 33 bp, Homo sapien
cttaaacccatctgtaagtcttgaggctttgaa

SEQ ID NO: 956096 - DNA, 33 bp, Homo sapien
cttaaacccatctgtaggtcttgaggctttgaa

SEQ ID NO: 956097 - DNA, 33 bp, Homo sapien
caaagatgttgataacagcattattgataattt

SEQ ID NO: 956098 - DNA, 33 bp, Homo sapien
caaagatgttgataactgcattattgataattt

SEQ ID NO: 956099 - DNA, 33 bp, Homo sapien
ttactttatgttggaagtccttctatcttagtc

SEQ ID NO: 956100 - DNA, 33 bp, Homo sapien
ttactttatgttggaattccttctatcttagtc

SEQ ID NO: 956101 - DNA, 33 bp, Homo sapien
cttctcctcacactcactgaagacagacaaatc

SEQ ID NO: 956102 - DNA, 33 bp, Homo sapien
cttctcctcacactcattgaagacagacaaatc

SEQ ID NO: 956103 - DNA, 33 bp, Homo sapien
aatgattgaaaaggcacctgaattaactttaaa

SEQ ID NO: 956104 - DNA, 33 bp, Homo sapien
aatgattgaaaaggcatctgaattaactttaaa

SEQ ID NO: 956105 - DNA, 33 bp, Homo sapien
ctttaatagacaaaacagcaaacatatgtaact

SEQ ID NO: 956106 - DNA, 33 bp, Homo sapien
ctttaatagacaaaactgcaaacatatgtaact

SEQ ID NO: 956107 - DNA, 33 bp, Homo sapien
attccaagggtgaacaagtgtagttacatatgt

SEQ ID NO: 956108 - DNA, 33 bp, Homo sapien
attccaagggtgaacacgtgtagttacatatgt

SEQ ID NO: 956109 - DNA, 33 bp, Homo sapien
tagacaatgccctaacaaataagtttttcttct

SEQ ID NO: 956110 - DNA, 33 bp, Homo sapien
tagacaatgccctaacgaataagtttttcttct

SEQ ID NO: 956111 - DNA, 33 bp, Homo sapien
ttagatcttggttcaacttccagttttaaactt

SEQ ID NO: 956112 - DNA, 33 bp, Homo sapien
ttagatcttggttcaagttccagttttaaactt

SEQ ID NO: 956113 - DNA, 33 bp, Homo sapien
taagatttgaacaggaggatgtatgtatcagtc

SEQ ID NO: 956114 - DNA, 33 bp, Homo sapien
taagatttgaacaggatgatgtatgtatcagtc

SEQ ID NO: 956115 - DNA, 33 bp, Homo sapien
gctgactcagatttaagtgggatgagtcaaata

SEQ ID NO: 956116 - DNA, 33 bp, Homo sapien
gctgactcagatttaattgggatgagtcaaata

SEQ ID NO: 956117 - DNA, 33 bp, Homo sapien
catgtcattgaacaagactaaagcatcatgaaa

SEQ ID NO: 956118 - DNA, 33 bp, Homo sapien
catgtcattgaacaaggctaaagcatcatgaaa

SEQ ID NO: 956119 - DNA, 33 bp, Homo sapien
gtatcattatgttgccagcatatattttttaaa

SEQ ID NO: 956120 - DNA, 33 bp, Homo sapien
gtatcattatgttgcctgcatatattttttaaa

SEQ ID NO: 956121 - DNA, 33 bp, Homo sapien
cattagaaaaaagacaaatagcaactagcggga

SEQ ID NO: 956122 - DNA, 33 bp, Homo sapien
cattagaaaaaagacagatagcaactagcggga

SEQ ID NO: 956123 - DNA, 33 bp, Homo sapien
tgaaggtaaatgtcaaactcatctctgcttata

SEQ ID NO: 956124 - DNA, 33 bp, Homo sapien
tgaaggtaaatgtcaagctcatctctgcttata

SEQ ID NO: 956125 - DNA, 33 bp, Homo sapien
tttacttgaggcaacaaaattacgcttaacaac

SEQ ID NO: 956126 - DNA, 33 bp, Homo sapien
tttacttgaggcaacagaattacgcttaacaac

SEQ ID NO: 956127 - DNA, 33 bp, Homo sapien
ggttacagaagtattaaggataaccagagtggt

SEQ ID NO: 956128 - DNA, 33 bp, Homo sapien
ggttacagaagtattagggataaccagagtggt

SEQ ID NO: 956129 - DNA, 33 bp, Homo sapien
aagcctcagtccaagaatcaaaaaagtcaagtt

SEQ ID NO: 956130 - DNA, 33 bp, Homo sapien
aagcctcagtccaagagtcaaaaaagtcaagtt

SEQ ID NO: 956131 - DNA, 33 bp, Homo sapien
ggcagaagtcctaggacagaacagcggatgagt

SEQ ID NO: 956132 - DNA, 33 bp, Homo sapien
ggcagaagtcctaggatagaacagcggatgagt

SEQ ID NO: 956133 - DNA, 33 bp, Homo sapien
gcatcgcttcaaaatacggtgctgtaaaataga

SEQ ID NO: 956134 - DNA, 33 bp, Homo sapien
gcatcgcttcaaaatatggtgctgtaaaataga

SEQ ID NO: 956135 - DNA, 33 bp, Homo sapien
gtgttctgaatataaacgtgctttccatcctta

SEQ ID NO: 956136 - DNA, 33 bp, Homo sapien
gtgttctgaatataaatgtgctttccatcctta

SEQ ID NO: 956137 - DNA, 33 bp, Homo sapien
aaatgcttatcctctacctttgcaaacattaaa

SEQ ID NO: 956138 - DNA, 33 bp, Homo sapien
aaatgcttatcctctatctttgcaaacattaaa

SEQ ID NO: 956139 - DNA, 33 bp, Homo sapien
aataaaaagaaaccaactactactacgtacaac

SEQ ID NO: 956140 - DNA, 33 bp, Homo sapien
aataaaaagaaaccaattactactacgtacaac

SEQ ID NO: 956141 - DNA, 33 bp, Homo sapien
atattaacagtgattgaaggtaaagagatgaag

SEQ ID NO: 956142 - DNA, 33 bp, Homo sapien
atattaacagtgattgcaggtaaagagatgaag

SEQ ID NO: 956143 - DNA, 33 bp, Homo sapien
tcactgctcaaggtccccaagctttcccctctt

SEQ ID NO: 956144 - DNA, 33 bp, Homo sapien
tcactgctcaaggtcctcaagctttcccctctt

SEQ ID NO: 956145 - DNA, 33 bp, Homo sapien
aatgcaaataagcaaacatatgttccccaaaac

SEQ ID NO: 956146 - DNA, 33 bp, Homo sapien
aatgcaaataagcaaatatatgttccccaaaac

SEQ ID NO: 956147 - DNA, 33 bp, Homo sapien
ggcaagagacaccctccatctgcctcttggctg

SEQ ID NO: 956148 - DNA, 33 bp, Homo sapien
ggcaagagacaccctcgatctgcctcttggctg

SEQ ID NO: 956149 - DNA, 33 bp, Homo sapien
agagtgtggaacctgacctgcgctgtccttata

SEQ ID NO: 956150 - DNA, 33 bp, Homo sapien
agagtgtggaacctgatctgcgctgtccttata

SEQ ID NO: 956151 - DNA, 33 bp, Homo sapien
catagtaaaagctcaaaacacggcagccataat

SEQ ID NO: 956152 - DNA, 33 bp, Homo sapien
catagtaaaagctcaacacacggcagccataat

SEQ ID NO: 956153 - DNA, 33 bp, Homo sapien
acattgacttaggtatcagacagacctcactga

SEQ ID NO: 956154 - DNA, 33 bp, Homo sapien
acattgacttaggtattagacagacctcactga

SEQ ID NO: 956155 - DNA, 33 bp, Homo sapien
cttcccttctccaaaaaccaggagcaacttgag

SEQ ID NO: 956156 - DNA, 33 bp, Homo sapien
cttcccttctccaaaatccaggagcaacttgag

SEQ ID NO: 956157 - DNA, 33 bp, Homo sapien
gtaagcagactcctgaacatgaaagctgtaata

SEQ ID NO: 956158 - DNA, 33 bp, Homo sapien
gtaagcagactcctgaccatgaaagctgtaata

SEQ ID NO: 956159 - DNA, 33 bp, Homo sapien
tctcaagtcaaaatggaaagcgaaagtagaacc

SEQ ID NO: 956160 - DNA, 33 bp, Homo sapien
tctcaagtcaaaatgggaagcgaaagtagaacc

SEQ ID NO: 956161 - DNA, 33 bp, Homo sapien
gctttcacaacataccactctcctggttttctt

SEQ ID NO: 956162 - DNA, 33 bp, Homo sapien
gctttcacaacataccgctctcctggttttctt

SEQ ID NO: 956163 - DNA, 33 bp, Homo sapien
gttacaacacaaagaacaagaccgacatgaata

SEQ ID NO: 956164 - DNA, 33 bp, Homo sapien
gttacaacacaaagaagaagaccgacatgaata

SEQ ID NO: 956165 - DNA, 33 bp, Homo sapien
gcacactgaggactagacaaattgctgcggaaa

SEQ ID NO: 956166 - DNA, 33 bp, Homo sapien
gcacactgaggactaggcaaattgctgcggaaa

SEQ ID NO: 956167 - DNA, 33 bp, Homo sapien
catagaatgaagggggcaattcaaagcattaga

SEQ ID NO: 956168 - DNA, 33 bp, Homo sapien
catagaatgaagggggtaattcaaagcattaga

SEQ ID NO: 956169 - DNA, 33 bp, Homo sapien
ctcgtcgcgggtgttacagtccctcgttactaa

SEQ ID NO: 956170 - DNA, 33 bp, Homo sapien
ctcgtcgcgggtgttagagtccctcgttactaa

SEQ ID NO: 956171 - DNA, 33 bp, Homo sapien
catgtgtggtggaaaaatccaagctattctctc

SEQ ID NO: 956172 - DNA, 33 bp, Homo sapien
catgtgtggtggaaaagtccaagctattctctc

SEQ ID NO: 956173 - DNA, 33 bp, Homo sapien
ttatgaaactgttgaacttattagaaatgtact

SEQ ID NO: 956174 - DNA, 33 bp, Homo sapien
ttatgaaactgttgaatttattagaaatgtact

SEQ ID NO: 956175 - DNA, 33 bp, Homo sapien
ctcaggatgaagccaacgctacaggtactgatg

SEQ ID NO: 956176 - DNA, 33 bp, Homo sapien
ctcaggatgaagccaatgctacaggtactgatg

SEQ ID NO: 956177 - DNA, 33 bp, Homo sapien
ggaagctctagcaaacactggtaaagaagggag

SEQ ID NO: 956178 - DNA, 33 bp, Homo sapien
ggaagctctagcaaacgctggtaaagaagggag

SEQ ID NO: 956179 - DNA, 33 bp, Homo sapien
gcatctaacaagttaagaacataaggcagatga

SEQ ID NO: 956180 - DNA, 33 bp, Homo sapien
gcatctaacaagttaataacataaggcagatga

SEQ ID NO: 956181 - DNA, 33 bp, Homo sapien
aaactaacatatgaccaatgagtaggagaaaag

SEQ ID NO: 956182 - DNA, 33 bp, Homo sapien
aaactaacatatgaccgatgagtaggagaaaag

SEQ ID NO: 956183 - DNA, 33 bp, Homo sapien
tcagtgctttgttccacggtggcatacaattgg

SEQ ID NO: 956184 - DNA, 33 bp, Homo sapien
tcagtgctttgttccatggtggcatacaattgg

SEQ ID NO: 956185 - DNA, 33 bp, Homo sapien
tggacagagtccatgccgaaaccattagcctag

SEQ ID NO: 956186 - DNA, 33 bp, Homo sapien
tggacagagtccatgctgaaaccattagcctag

SEQ ID NO: 956187 - DNA, 33 bp, Homo sapien
ctgtagcatctagttacgttatttccaatcgag

SEQ ID NO: 956188 - DNA, 33 bp, Homo sapien
ctgtagcatctagttatgttatttccaatcgag

SEQ ID NO: 956189 - DNA, 33 bp, Homo sapien
ttttgaatcagctcatcaacttctacaaaactt

SEQ ID NO: 956190 - DNA, 33 bp, Homo sapien
ttttgaatcagctcattaacttctacaaaactt

SEQ ID NO: 956191 - DNA, 33 bp, Homo sapien
tgggctgggcagatgcaaagaatgtttgttttc

SEQ ID NO: 956192 - DNA, 33 bp, Homo sapien
tgggctgggcagatgcgaagaatgtttgttttc

SEQ ID NO: 956193 - DNA, 33 bp, Homo sapien
tctacaatgtgatgacaactttccatcttataa

SEQ ID NO: 956194 - DNA, 33 bp, Homo sapien
tctacaatgtgatgaccactttccatcttataa

SEQ ID NO: 956195 - DNA, 33 bp, Homo sapien
agctctcagcacagtacggagacagcggtatac

SEQ ID NO: 956196 - DNA, 33 bp, Homo sapien
agctctcagcacagtatggagacagcggtatac

SEQ ID NO: 956197 - DNA, 33 bp, Homo sapien
aggctgccatataaacacaatagatgggatggc

SEQ ID NO: 956198 - DNA, 33 bp, Homo sapien
aggctgccatataaacgcaatagatgggatggc

SEQ ID NO: 956199 - DNA, 33 bp, Homo sapien
ttaatttgatcatctaacaatttttaaagaggt

SEQ ID NO: 956200 - DNA, 33 bp, Homo sapien
ttaatttgatcatctagcaatttttaaagaggt

SEQ ID NO: 956201 - DNA, 33 bp, Homo sapien
gacaaataaacagtcaacaaacatattttttaa

SEQ ID NO: 956202 - DNA, 33 bp, Homo sapien
gacaaataaacagtcaccaaacatattttttaa

SEQ ID NO: 956203 - DNA, 33 bp, Homo sapien
ctattacaccttgagaaaactatgcaagaaagg

SEQ ID NO: 956204 - DNA, 33 bp, Homo sapien
ctattacaccttgagagaactatgcaagaaagg

SEQ ID NO: 956205 - DNA, 33 bp, Homo sapien
ttgaccccagctctgacgttaggatggtaaaca

SEQ ID NO: 956206 - DNA, 33 bp, Homo sapien
ttgaccccagctctgatgttaggatggtaaaca

SEQ ID NO: 956207 - DNA, 33 bp, Homo sapien
gaaaacactgtgacacccagaacagtcacagca

SEQ ID NO: 956208 - DNA, 33 bp, Homo sapien
gaaaacactgtgacacgcagaacagtcacagca

SEQ ID NO: 956209 - DNA, 33 bp, Homo sapien
ctcctctgatcactgcagaattggcaggaactt

SEQ ID NO: 956210 - DNA, 33 bp, Homo sapien
ctcctctgatcactgcggaattggcaggaactt

SEQ ID NO: 956211 - DNA, 33 bp, Homo sapien
tggatgtcaattatcacaggtattgagtttatg

SEQ ID NO: 956212 - DNA, 33 bp, Homo sapien
tggatgtcaattatcagaggtattgagtttatg

SEQ ID NO: 956213 - DNA, 33 bp, Homo sapien
gcacccaatcagaagaagctggttgagcaccag

SEQ ID NO: 956214 - DNA, 33 bp, Homo sapien
gcacccaatcagaagacgctggttgagcaccag

SEQ ID NO: 956215 - DNA, 33 bp, Homo sapien
aaactcctgggttcggacaatcggccggcctcg

SEQ ID NO: 956216 - DNA, 33 bp, Homo sapien
aaactcctgggttcgggcaatcggccggcctcg

SEQ ID NO: 956217 - DNA, 33 bp, Homo sapien
ttttgtagagatgggagctagcgatgttgctca

SEQ ID NO: 956218 - DNA, 33 bp, Homo sapien
ttttgtagagatgggatctagcgatgttgctca

SEQ ID NO: 956219 - DNA, 33 bp, Homo sapien
tgttacatacgggaaggctataaaagttgctca

SEQ ID NO: 956220 - DNA, 33 bp, Homo sapien
tgttacatacgggaagtctataaaagttgctca

SEQ ID NO: 956221 - DNA, 33 bp, Homo sapien
tctgtttccaactaccaaagctttcaccacttc

SEQ ID NO: 956222 - DNA, 33 bp, Homo sapien
tctgtttccaactaccgaagctttcaccacttc

SEQ ID NO: 956223 - DNA, 33 bp, Homo sapien
atcctctatattcaaactactctgcaaaacact

SEQ ID NO: 956224 - DNA, 33 bp, Homo sapien
atcctctatattcaaagtactctgcaaaacact

SEQ ID NO: 956225 - DNA, 33 bp, Homo sapien
tgacatcagaaccatcaaaaatagggaagggtt

SEQ ID NO: 956226 - DNA, 33 bp, Homo sapien
tgacatcagaaccatccaaaatagggaagggtt

SEQ ID NO: 956227 - DNA, 33 bp, Homo sapien
atggttctgatgtcaccgccatcaaaggttgtc

SEQ ID NO: 956228 - DNA, 33 bp, Homo sapien
atggttctgatgtcactgccatcaaaggttgtc

SEQ ID NO: 956229 - DNA, 33 bp, Homo sapien
taacataccaagtgggaacaagaggctctggga

SEQ ID NO: 956230 - DNA, 33 bp, Homo sapien
taacataccaagtggggacaagaggctctggga

SEQ ID NO: 956231 - DNA, 33 bp, Homo sapien
gtaacacatttcagacagtcacttgtggaagtg

SEQ ID NO: 956232 - DNA, 33 bp, Homo sapien
gtaacacatttcagacggtcacttgtggaagtg

SEQ ID NO: 956233 - DNA, 33 bp, Homo sapien
gctgccagacggatataacgtttccttttcttg

SEQ ID NO: 956234 - DNA, 33 bp, Homo sapien
gctgccagacggatattacgtttccttttcttg

SEQ ID NO: 956235 - DNA, 33 bp, Homo sapien
gttaagtgtctgccgacattacatgacagtgca

SEQ ID NO: 956236 - DNA, 33 bp, Homo sapien
gttaagtgtctgccgatattacatgacagtgca

SEQ ID NO: 956237 - DNA, 33 bp, Homo sapien
aaatcagagctaggaaaatatctgaactgcagt

SEQ ID NO: 956238 - DNA, 33 bp, Homo sapien
aaatcagagctaggaacatatctgaactgcagt

SEQ ID NO: 956239 - DNA, 33 bp, Homo sapien
acaataaaacggcaaaagccctgagaagaatca

SEQ ID NO: 956240 - DNA, 33 bp, Homo sapien
acaataaaacggcaaaggccctgagaagaatca

SEQ ID NO: 956241 - DNA, 33 bp, Homo sapien
aggtttatcactttcacggatctttgaaaaata

SEQ ID NO: 956242 - DNA, 33 bp, Homo sapien
aggtttatcactttcatggatctttgaaaaata

SEQ ID NO: 956243 - DNA, 33 bp, Homo sapien
cagggaattattacaccgtcctctcatccagca

SEQ ID NO: 956244 - DNA, 33 bp, Homo sapien
cagggaattattacactgtcctctcatccagca

SEQ ID NO: 956245 - DNA, 33 bp, Homo sapien
gaaaatcagatggtcaccaggttgtgtaccagc

SEQ ID NO: 956246 - DNA, 33 bp, Homo sapien
gaaaatcagatggtcatcaggttgtgtaccagc

SEQ ID NO: 956247 - DNA, 33 bp, Homo sapien
tctttacagcaatacaagaatggactaacacaa

SEQ ID NO: 956248 - DNA, 33 bp, Homo sapien
tctttacagcaatacaggaatggactaacacaa

SEQ ID NO: 956249 - DNA, 33 bp, Homo sapien
gtttttatgtatatcaatcataccccaggccag

SEQ ID NO: 956250 - DNA, 33 bp, Homo sapien
gtttttatgtatatcagtcataccccaggccag

SEQ ID NO: 956251 - DNA, 33 bp, Homo sapien
tttctttatttcctcacaggtttcctcaggtta

SEQ ID NO: 956252 - DNA, 33 bp, Homo sapien
tttctttatttcctcataggtttcctcaggtta

SEQ ID NO: 956253 - DNA, 33 bp, Homo sapien
ctggttgttataagccactgcatttttggggta

SEQ ID NO: 956254 - DNA, 33 bp, Homo sapien
ctggttgttataagccgctgcatttttggggta

SEQ ID NO: 956255 - DNA, 33 bp, Homo sapien
atacacagaaaccacaagcatagtaactggttg

SEQ ID NO: 956256 - DNA, 33 bp, Homo sapien
atacacagaaaccacacgcatagtaactggttg

SEQ ID NO: 956257 - DNA, 33 bp, Homo sapien
ggttgcttgaccattccagatttaaaaaaggtc

SEQ ID NO: 956258 - DNA, 33 bp, Homo sapien
ggttgcttgaccattctagatttaaaaaaggtc

SEQ ID NO: 956259 - DNA, 33 bp, Homo sapien
ctgctaaattaaccataagcatatccatcaagc

SEQ ID NO: 956260 - DNA, 33 bp, Homo sapien
ctgctaaattaaccatgagcatatccatcaagc

SEQ ID NO: 956261 - DNA, 33 bp, Homo sapien
atagttcattctctagccccgcttgggaagcca

SEQ ID NO: 956262 - DNA, 33 bp, Homo sapien
atagttcattctctaggcccgcttgggaagcca

SEQ ID NO: 956263 - DNA, 33 bp, Homo sapien
ttgttttgcatatttgaaagtctctttaatgtc

SEQ ID NO: 956264 - DNA, 33 bp, Homo sapien
ttgttttgcatatttggaagtctctttaatgtc

SEQ ID NO: 956265 - DNA, 33 bp, Homo sapien
cttccctgtgcttcggaatcacatacagctgtt

SEQ ID NO: 956266 - DNA, 33 bp, Homo sapien
cttccctgtgcttcgggatcacatacagctgtt

SEQ ID NO: 956267 - DNA, 33 bp, Homo sapien
tatgtcctcagattaccgctgctgatgtttcca

SEQ ID NO: 956268 - DNA, 33 bp, Homo sapien
tatgtcctcagattactgctgctgatgtttcca

SEQ ID NO: 956269 - DNA, 33 bp, Homo sapien
gagttgagattccttacaaaaagagcatatgta

SEQ ID NO: 956270 - DNA, 33 bp, Homo sapien
gagttgagattccttataaaaagagcatatgta

SEQ ID NO: 956271 - DNA, 33 bp, Homo sapien
aaggtaatatttagtcccatgacatacaaaaca

SEQ ID NO: 956272 - DNA, 33 bp, Homo sapien
aaggtaatatttagtcgcatgacatacaaaaca

SEQ ID NO: 956273 - DNA, 33 bp, Homo sapien
aacagagactgaaatacaaacccaacttcctaa

SEQ ID NO: 956274 - DNA, 33 bp, Homo sapien
aacagagactgaaatagaaacccaacttcctaa

SEQ ID NO: 956275 - DNA, 33 bp, Homo sapien
tgcaaatgaattaagcaatgcctgttaggccac

SEQ ID NO: 956276 - DNA, 33 bp, Homo sapien
tgcaaatgaattaagcgatgcctgttaggccac

SEQ ID NO: 956277 - DNA, 33 bp, Homo sapien
tatttcatgaaaggaagtatcaattgatctggc

SEQ ID NO: 956278 - DNA, 33 bp, Homo sapien
tatttcatgaaaggaattatcaattgatctggc

SEQ ID NO: 956279 - DNA, 33 bp, Homo sapien
attcataagtaataaggcatggccctcaagagt

SEQ ID NO: 956280 - DNA, 33 bp, Homo sapien
attcataagtaataagtcatggccctcaagagt

SEQ ID NO: 956281 - DNA, 33 bp, Homo sapien
cctgacataaatatgcggaggcaagtctccctt

SEQ ID NO: 956282 - DNA, 33 bp, Homo sapien
cctgacataaatatgctgaggcaagtctccctt

SEQ ID NO: 956283 - DNA, 33 bp, Homo sapien
gttgccctcaccagaacctgactgccctcacca

SEQ ID NO: 956284 - DNA, 33 bp, Homo sapien
gttgccctcaccagaatctgactgccctcacca

SEQ ID NO: 956285 - DNA, 33 bp, Homo sapien
ttggttccaaagacataaccaatagttgctcgt

SEQ ID NO: 956286 - DNA, 33 bp, Homo sapien
ttggttccaaagacatgaccaatagttgctcgt

SEQ ID NO: 956287 - DNA, 33 bp, Homo sapien
agccaatcctggttgtaaattcatagcctagtc

SEQ ID NO: 956288 - DNA, 33 bp, Homo sapien
agccaatcctggttgtgaattcatagcctagtc

SEQ ID NO: 956289 - DNA, 33 bp, Homo sapien
ggagggatagacaaaaacaagtaaacaaagtaa

SEQ ID NO: 956290 - DNA, 33 bp, Homo sapien
ggagggatagacaaaaccaagtaaacaaagtaa

SEQ ID NO: 956291 - DNA, 33 bp, Homo sapien
taagtaaaaagagtcaatccacatgattccaac

SEQ ID NO: 956292 - DNA, 33 bp, Homo sapien
taagtaaaaagagtcagtccacatgattccaac

SEQ ID NO: 956293 - DNA, 33 bp, Homo sapien
caccctgcctacacggccagaatgcccagaata

SEQ ID NO: 956294 - DNA, 33 bp, Homo sapien
caccctgcctacacggtcagaatgcccagaata

SEQ ID NO: 956295 - DNA, 33 bp, Homo sapien
gacttgtgagcctagcaaaagagcaaccctcag

SEQ ID NO: 956296 - DNA, 33 bp, Homo sapien
gacttgtgagcctagcgaaagagcaaccctcag

SEQ ID NO: 956297 - DNA, 33 bp, Homo sapien
gtcttccaaagttacacgaacaaaacagcccga

SEQ ID NO: 956298 - DNA, 33 bp, Homo sapien
gtcttccaaagttacatgaacaaaacagcccga

SEQ ID NO: 956299 - DNA, 33 bp, Homo sapien
ctattatggcatcagaaaacatgactttgtgct

SEQ ID NO: 956300 - DNA, 33 bp, Homo sapien
ctattatggcatcagagaacatgactttgtgct

SEQ ID NO: 956301 - DNA, 33 bp, Homo sapien
tacgcacaatggaataatactcgccttaaacag

SEQ ID NO: 956302 - DNA, 33 bp, Homo sapien
tacgcacaatggaatattactcgccttaaacag

SEQ ID NO: 956303 - DNA, 33 bp, Homo sapien
gactcatgctacacacagcgtggatgaaccttg

SEQ ID NO: 956304 - DNA, 33 bp, Homo sapien
gactcatgctacacactgcgtggatgaaccttg

SEQ ID NO: 956305 - DNA, 33 bp, Homo sapien
agtaaatttcctagaccggcaaaccacttccca

SEQ ID NO: 956306 - DNA, 33 bp, Homo sapien
agtaaatttcctagactggcaaaccacttccca

SEQ ID NO: 956307 - DNA, 33 bp, Homo sapien
aataatgacaaattagaaagcacctaagtgttt

SEQ ID NO: 956308 - DNA, 33 bp, Homo sapien
aataatgacaaattaggaagcacctaagtgttt

SEQ ID NO: 956309 - DNA, 33 bp, Homo sapien
tactagcactggaaaccattgttctagatgaat

SEQ ID NO: 956310 - DNA, 33 bp, Homo sapien
tactagcactggaaacgattgttctagatgaat

SEQ ID NO: 956311 - DNA, 33 bp, Homo sapien
cccagatattgttggccaaatgagatcttccag

SEQ ID NO: 956312 - DNA, 33 bp, Homo sapien
cccagatattgttggctaaatgagatcttccag

SEQ ID NO: 956313 - DNA, 33 bp, Homo sapien
aagagcttcaagcatccaaaaacctggtcacct

SEQ ID NO: 956314 - DNA, 33 bp, Homo sapien
aagagcttcaagcatctaaaaacctggtcacct

SEQ ID NO: 956315 - DNA, 33 bp, Homo sapien
ctgctctaaagtggacaatgaaacttcagaaga

SEQ ID NO: 956316 - DNA, 33 bp, Homo sapien
ctgctctaaagtggacgatgaaacttcagaaga

SEQ ID NO: 956317 - DNA, 33 bp, Homo sapien
tggctagtactaaggcaagataaaagaatgaat

SEQ ID NO: 956318 - DNA, 33 bp, Homo sapien
tggctagtactaaggcgagataaaagaatgaat

SEQ ID NO: 956319 - DNA, 33 bp, Homo sapien
agtcaaggagataccaagtacatcttaccaaat

SEQ ID NO: 956320 - DNA, 33 bp, Homo sapien
agtcaaggagataccacgtacatcttaccaaat

SEQ ID NO: 956321 - DNA, 33 bp, Homo sapien
ccaccattctcttttaccctttagcagtcagag

SEQ ID NO: 956322 - DNA, 33 bp, Homo sapien
ccaccattctcttttatcctttagcagtcagag

SEQ ID NO: 956323 - DNA, 33 bp, Homo sapien
cctcttcatttgttgaagcacatcagagtcctc

SEQ ID NO: 956324 - DNA, 33 bp, Homo sapien
cctcttcatttgttgaggcacatcagagtcctc

SEQ ID NO: 956325 - DNA, 33 bp, Homo sapien
gttgcttcattacacactgtctgtgatggcctg

SEQ ID NO: 956326 - DNA, 33 bp, Homo sapien
gttgcttcattacacattgtctgtgatggcctg

SEQ ID NO: 956327 - DNA, 33 bp, Homo sapien
cctgtgggatccaacacattgctgtttccctgt

SEQ ID NO: 956328 - DNA, 33 bp, Homo sapien
cctgtgggatccaacatattgctgtttccctgt

SEQ ID NO: 956329 - DNA, 33 bp, Homo sapien
ccagagctccaagatcaataattttgaatgtct

SEQ ID NO: 956330 - DNA, 33 bp, Homo sapien
ccagagctccaagatcgataattttgaatgtct

SEQ ID NO: 956331 - DNA, 33 bp, Homo sapien
ttgtgtaaatatacaaagggtcaactccaaatg

SEQ ID NO: 956332 - DNA, 33 bp, Homo sapien
ttgtgtaaatatacaaggggtcaactccaaatg

SEQ ID NO: 956333 - DNA, 33 bp, Homo sapien
taatatacatccattccagcgtgtttttcaaaa

SEQ ID NO: 956334 - DNA, 33 bp, Homo sapien
taatatacatccattctagcgtgtttttcaaaa

SEQ ID NO: 956335 - DNA, 33 bp, Homo sapien
ggatgcttatcactcaaaggttgtgatcaggcc

SEQ ID NO: 956336 - DNA, 33 bp, Homo sapien
ggatgcttatcactcagaggttgtgatcaggcc

SEQ ID NO: 956337 - DNA, 33 bp, Homo sapien
ccatttactaatattacgcggtctgccacttct

SEQ ID NO: 956338 - DNA, 33 bp, Homo sapien
ccatttactaatattatgcggtctgccacttct

SEQ ID NO: 956339 - DNA, 33 bp, Homo sapien
agttctaatccattaccctgtagctttgagaat

SEQ ID NO: 956340 - DNA, 33 bp, Homo sapien
agttctaatccattactctgtagctttgagaat

SEQ ID NO: 956341 - DNA, 33 bp, Homo sapien
tggccctagtgactctaagactactcaattgct

SEQ ID NO: 956342 - DNA, 33 bp, Homo sapien
tggccctagtgactctgagactactcaattgct

SEQ ID NO: 956343 - DNA, 33 bp, Homo sapien
gaattaaagataaagaaggtagcagatactgaa

SEQ ID NO: 956344 - DNA, 33 bp, Homo sapien
gaattaaagataaagatggtagcagatactgaa

SEQ ID NO: 956345 - DNA, 33 bp, Homo sapien
gtgggctcagggactacaaaaggttaaaaagtg

SEQ ID NO: 956346 - DNA, 33 bp, Homo sapien
gtgggctcagggactataaaaggttaaaaagtg

SEQ ID NO: 956347 - DNA, 33 bp, Homo sapien
gttttgttgtttcccacgtaacccagagcaatg

SEQ ID NO: 956348 - DNA, 33 bp, Homo sapien
gttttgttgtttcccatgtaacccagagcaatg

SEQ ID NO: 956349 - DNA, 33 bp, Homo sapien
gaggagtctagggtaactgtggatatgattagc

SEQ ID NO: 956350 - DNA, 33 bp, Homo sapien
gaggagtctagggtaattgtggatatgattagc

SEQ ID NO: 956351 - DNA, 33 bp, Homo sapien
acaggtaaaataagcaacttttgggcgagatga

SEQ ID NO: 956352 - DNA, 33 bp, Homo sapien
acaggtaaaataagcagcttttgggcgagatga

SEQ ID NO: 956353 - DNA, 33 bp, Homo sapien
ggaaggactttaagcacgagaatggacgaaatg

SEQ ID NO: 956354 - DNA, 33 bp, Homo sapien
ggaaggactttaagcatgagaatggacgaaatg

SEQ ID NO: 956355 - DNA, 33 bp, Homo sapien
aaaatgagacacagtacagattcagagagttct

SEQ ID NO: 956356 - DNA, 33 bp, Homo sapien
aaaatgagacacagtagagattcagagagttct

SEQ ID NO: 956357 - DNA, 33 bp, Homo sapien
tctggggtccaccaatcagtttgtataaccctc

SEQ ID NO: 956358 - DNA, 33 bp, Homo sapien
tctggggtccaccaattagtttgtataaccctc

SEQ ID NO: 956359 - DNA, 33 bp, Homo sapien
cacaggggcgtccttgacaaatgttgatttata

SEQ ID NO: 956360 - DNA, 33 bp, Homo sapien
cacaggggcgtccttggcaaatgttgatttata

SEQ ID NO: 956361 - DNA, 33 bp, Homo sapien
ttaaattccaaacacaagccttatatagggtac

SEQ ID NO: 956362 - DNA, 33 bp, Homo sapien
ttaaattccaaacacaggccttatatagggtac

SEQ ID NO: 956363 - DNA, 33 bp, Homo sapien
ggcctccctgggagtgcagaggaaagccgtcct

SEQ ID NO: 956364 - DNA, 33 bp, Homo sapien
ggcctccctgggagtgtagaggaaagccgtcct

SEQ ID NO: 956365 - DNA, 33 bp, Homo sapien
gatagccccaatgtcaatattctatgatgttgt

SEQ ID NO: 956366 - DNA, 33 bp, Homo sapien
gatagccccaatgtcagtattctatgatgttgt

SEQ ID NO: 956367 - DNA, 33 bp, Homo sapien
tatagttaaattgaataaaatcactatgtctta

SEQ ID NO: 956368 - DNA, 33 bp, Homo sapien
tatagttaaattgaatcaaatcactatgtctta

SEQ ID NO: 956369 - DNA, 33 bp, Homo sapien
gcagccttccacgcaccaagtcagtagaataag

SEQ ID NO: 956370 - DNA, 33 bp, Homo sapien
gcagccttccacgcacgaagtcagtagaataag

SEQ ID NO: 956371 - DNA, 33 bp, Homo sapien
tcaaacctatacttaccgaatgctcactaaatg

SEQ ID NO: 956372 - DNA, 33 bp, Homo sapien
tcaaacctatacttactgaatgctcactaaatg

SEQ ID NO: 956373 - DNA, 33 bp, Homo sapien
gtgatgtagatagggtaaagagtgcttttaaca

SEQ ID NO: 956374 - DNA, 33 bp, Homo sapien
gtgatgtagatagggtcaagagtgcttttaaca

SEQ ID NO: 956375 - DNA, 33 bp, Homo sapien
aatgagcaatacaaaaagactgatcaaatgtta

SEQ ID NO: 956376 - DNA, 33 bp, Homo sapien
aatgagcaatacaaaaggactgatcaaatgtta

SEQ ID NO: 956377 - DNA, 33 bp, Homo sapien
gattcacagcaggacacatcaattcattgtcac

SEQ ID NO: 956378 - DNA, 33 bp, Homo sapien
gattcacagcaggacagatcaattcattgtcac

SEQ ID NO: 956379 - DNA, 33 bp, Homo sapien
atggaaaaagctgctcaataacatacgagtgtg

SEQ ID NO: 956380 - DNA, 33 bp, Homo sapien
atggaaaaagctgctcgataacatacgagtgtg

SEQ ID NO: 956381 - DNA, 33 bp, Homo sapien
acatgaaagtacccaaaacaggcaaattcatag

SEQ ID NO: 956382 - DNA, 33 bp, Homo sapien
acatgaaagtacccaacacaggcaaattcatag

SEQ ID NO: 956383 - DNA, 33 bp, Homo sapien
tgtataatgcaattacagaatacctcactgtgt

SEQ ID NO: 956384 - DNA, 33 bp, Homo sapien
tgtataatgcaattacggaatacctcactgtgt

SEQ ID NO: 956385 - DNA, 33 bp, Homo sapien
tgtctattaaagttcacgatgtctgtattatac

SEQ ID NO: 956386 - DNA, 33 bp, Homo sapien
tgtctattaaagttcatgatgtctgtattatac

SEQ ID NO: 956387 - DNA, 33 bp, Homo sapien
ttgcttttttcgttcaatataattctcttccaa

SEQ ID NO: 956388 - DNA, 33 bp, Homo sapien
ttgcttttttcgttcagtataattctcttccaa

SEQ ID NO: 956389 - DNA, 33 bp, Homo sapien
ataatgtgtttatccacgttcctgtactcctgt

SEQ ID NO: 956390 - DNA, 33 bp, Homo sapien
ataatgtgtttatccatgttcctgtactcctgt

SEQ ID NO: 956391 - DNA, 33 bp, Homo sapien
atgaaaacacggtacaaaatgaaagtatttcct

SEQ ID NO: 956392 - DNA, 33 bp, Homo sapien
atgaaaacacggtacagaatgaaagtatttcct

SEQ ID NO: 956393 - DNA, 33 bp, Homo sapien
tatggaagcttacaaccggcacattaagattta

SEQ ID NO: 956394 - DNA, 33 bp, Homo sapien
tatggaagcttacaactggcacattaagattta

SEQ ID NO: 956395 - DNA, 33 bp, Homo sapien
acgtgattcgatcacgaaccttattcaggactg

SEQ ID NO: 956396 - DNA, 33 bp, Homo sapien
acgtgattcgatcacgtaccttattcaggactg

SEQ ID NO: 956397 - DNA, 33 bp, Homo sapien
acaaggaggcagatcaacacataccagcattat

SEQ ID NO: 956398 - DNA, 33 bp, Homo sapien
acaaggaggcagatcatcacataccagcattat

SEQ ID NO: 956399 - DNA, 33 bp, Homo sapien
tagcatagcagggatcacggaatcgcagggcac

SEQ ID NO: 956400 - DNA, 33 bp, Homo sapien
tagcatagcagggatcgcggaatcgcagggcac

SEQ ID NO: 956401 - DNA, 33 bp, Homo sapien
atgtcaattcatctaacagaacgacagggaaaa

SEQ ID NO: 956402 - DNA, 33 bp, Homo sapien
atgtcaattcatctaatagaacgacagggaaaa

SEQ ID NO: 956403 - DNA, 33 bp, Homo sapien
ttttattttgtgtttacagccagaaaggaaggt

SEQ ID NO: 956404 - DNA, 33 bp, Homo sapien
ttttattttgtgtttatagccagaaaggaaggt

SEQ ID NO: 956405 - DNA, 33 bp, Homo sapien
ttaacacaatatcacaataaaaattctcagact

SEQ ID NO: 956406 - DNA, 33 bp, Homo sapien
ttaacacaatatcacagtaaaaattctcagact

SEQ ID NO: 956407 - DNA, 33 bp, Homo sapien
attgcactggaggcagaaatgaacccaggattt

SEQ ID NO: 956408 - DNA, 33 bp, Homo sapien
attgcactggaggcaggaatgaacccaggattt

SEQ ID NO: 956409 - DNA, 33 bp, Homo sapien
gatgacttaacaccaaatacaatataaatgcta

SEQ ID NO: 956410 - DNA, 33 bp, Homo sapien
gatgacttaacaccaagtacaatataaatgcta

SEQ ID NO: 956411 - DNA, 33 bp, Homo sapien
tgaaactttctaccaacgtatcctccgaaacag

SEQ ID NO: 956412 - DNA, 33 bp, Homo sapien
tgaaactttctaccaatgtatcctccgaaacag

SEQ ID NO: 956413 - DNA, 33 bp, Homo sapien
aaacctttcagaggagaaatagtgaaaccaaag

SEQ ID NO: 956414 - DNA, 33 bp, Homo sapien
aaacctttcagaggagtaatagtgaaaccaaag

SEQ ID NO: 956415 - DNA, 33 bp, Homo sapien
atccactgctgtcaaacgtacatattgttcttc

SEQ ID NO: 956416 - DNA, 33 bp, Homo sapien
atccactgctgtcaaatgtacatattgttcttc

SEQ ID NO: 956417 - DNA, 33 bp, Homo sapien
agcattttcatcaaagaagaatcaacttgaggg

SEQ ID NO: 956418 - DNA, 33 bp, Homo sapien
agcattttcatcaaaggagaatcaacttgaggg

SEQ ID NO: 956419 - DNA, 33 bp, Homo sapien
agctcccatctccttcgctgtagcacccgatta

SEQ ID NO: 956420 - DNA, 33 bp, Homo sapien
agctcccatctccttctctgtagcacccgatta

SEQ ID NO: 956421 - DNA, 33 bp, Homo sapien
agctgggacatgagaaaacaagctgacatctct

SEQ ID NO: 956422 - DNA, 33 bp, Homo sapien
agctgggacatgagaagacaagctgacatctct

SEQ ID NO: 956423 - DNA, 33 bp, Homo sapien
acccccagtaaattaaaggtggtagtctctctg

SEQ ID NO: 956424 - DNA, 33 bp, Homo sapien
acccccagtaaattaagggtggtagtctctctg

SEQ ID NO: 956425 - DNA, 33 bp, Homo sapien
gtgacaaaagagattgcagccaggaattgaaaa

SEQ ID NO: 956426 - DNA, 33 bp, Homo sapien
gtgacaaaagagattgtagccaggaattgaaaa

SEQ ID NO: 956427 - DNA, 33 bp, Homo sapien
ctcctcaaatattttcaccagatagccatctgg

SEQ ID NO: 956428 - DNA, 33 bp, Homo sapien
ctcctcaaatattttcgccagatagccatctgg

SEQ ID NO: 956429 - DNA, 33 bp, Homo sapien
ctcaaagtactcacaaacttctagcattctatg

SEQ ID NO: 956430 - DNA, 33 bp, Homo sapien
ctcaaagtactcacaaccttctagcattctatg

SEQ ID NO: 956431 - DNA, 33 bp, Homo sapien
ggactgtcatatttcacatctcttgaccaactg

SEQ ID NO: 956432 - DNA, 33 bp, Homo sapien
ggactgtcatatttcatatctcttgaccaactg

SEQ ID NO: 956433 - DNA, 33 bp, Homo sapien
aaagattctatttacaccaaaatcaggatttaa

SEQ ID NO: 956434 - DNA, 33 bp, Homo sapien
aaagattctatttacatcaaaatcaggatttaa

SEQ ID NO: 956435 - DNA, 33 bp, Homo sapien
tcagcacccatagtcgccaagtgatgaaagatg

SEQ ID NO: 956436 - DNA, 33 bp, Homo sapien
tcagcacccatagtcgtcaagtgatgaaagatg

SEQ ID NO: 956437 - DNA, 33 bp, Homo sapien
gagacaggcccacatacgaaagcccagaagttg

SEQ ID NO: 956438 - DNA, 33 bp, Homo sapien
gagacaggcccacatatgaaagcccagaagttg

SEQ ID NO: 956439 - DNA, 33 bp, Homo sapien
ttctataaactaaagaccagtggactaaaggaa

SEQ ID NO: 956440 - DNA, 33 bp, Homo sapien
ttctataaactaaagagcagtggactaaaggaa

SEQ ID NO: 956441 - DNA, 33 bp, Homo sapien
catgtgaccaggataacaaggcttggttttact

SEQ ID NO: 956442 - DNA, 33 bp, Homo sapien
catgtgaccaggataataaggcttggttttact

SEQ ID NO: 956443 - DNA, 33 bp, Homo sapien
ttcatggctggtaacactgaggtcaaggtatgg

SEQ ID NO: 956444 - DNA, 33 bp, Homo sapien
ttcatggctggtaacattgaggtcaaggtatgg

SEQ ID NO: 956445 - DNA, 33 bp, Homo sapien
catcctaagattacggacatagccagttacaca

SEQ ID NO: 956446 - DNA, 33 bp, Homo sapien
catcctaagattacgggcatagccagttacaca

SEQ ID NO: 956447 - DNA, 33 bp, Homo sapien
atcagcacattgaaaacactaggcaattaagtt

SEQ ID NO: 956448 - DNA, 33 bp, Homo sapien
atcagcacattgaaaatactaggcaattaagtt

SEQ ID NO: 956449 - DNA, 33 bp, Homo sapien
ctcagtttaccaagacaaaaatccactctttgc

SEQ ID NO: 956450 - DNA, 33 bp, Homo sapien
ctcagtttaccaagacgaaaatccactctttgc

SEQ ID NO: 956451 - DNA, 33 bp, Homo sapien
gtgatttgtaccacagacaatttccaacattca

SEQ ID NO: 956452 - DNA, 33 bp, Homo sapien
gtgatttgtaccacaggcaatttccaacattca

SEQ ID NO: 956453 - DNA, 33 bp, Homo sapien
ggcagatcactgcagaacaatgtaggttgtgta

SEQ ID NO: 956454 - DNA, 33 bp, Homo sapien
ggcagatcactgcagaccaatgtaggttgtgta

SEQ ID NO: 956455 - DNA, 33 bp, Homo sapien
caagaatacttaggaacccacagaggtatatgt

SEQ ID NO: 956456 - DNA, 33 bp, Homo sapien
caagaatacttaggaatccacagaggtatatgt

SEQ ID NO: 956457 - DNA, 33 bp, Homo sapien
taaagaggtaggcataaaatcacaaatacatac

SEQ ID NO: 956458 - DNA, 33 bp, Homo sapien
taaagaggtaggcatagaatcacaaatacatac

SEQ ID NO: 956459 - DNA, 33 bp, Homo sapien
gtaagagctagaaacaaaacccaagatttgggg

SEQ ID NO: 956460 - DNA, 33 bp, Homo sapien
gtaagagctagaaacagaacccaagatttgggg

SEQ ID NO: 956461 - DNA, 33 bp, Homo sapien
tgggtgtccatccaagaagaagcaaaacaattg

SEQ ID NO: 956462 - DNA, 33 bp, Homo sapien
tgggtgtccatccaaggagaagcaaaacaattg

SEQ ID NO: 956463 - DNA, 33 bp, Homo sapien
tatatctttgaccgggaaatttaatccatttac

SEQ ID NO: 956464 - DNA, 33 bp, Homo sapien
tatatctttgaccggggaatttaatccatttac

SEQ ID NO: 956465 - DNA, 33 bp, Homo sapien
cccacagctgctttgacacaattcaagcccaga

SEQ ID NO: 956466 - DNA, 33 bp, Homo sapien
cccacagctgctttgagacaattcaagcccaga

SEQ ID NO: 956467 - DNA, 33 bp, Homo sapien
aaatcagttgaatgtacctgggctttcccagtt

SEQ ID NO: 956468 - DNA, 33 bp, Homo sapien
aaatcagttgaatgtagctgggctttcccagtt

SEQ ID NO: 956469 - DNA, 33 bp, Homo sapien
tataagagctgtgcagacgagatgctataggaa

SEQ ID NO: 956470 - DNA, 33 bp, Homo sapien
tataagagctgtgcaggcgagatgctataggaa

SEQ ID NO: 956471 - DNA, 33 bp, Homo sapien
aagcaaacagaatgaaatggctcgctctcctca

SEQ ID NO: 956472 - DNA, 33 bp, Homo sapien
aagcaaacagaatgaactggctcgctctcctca

SEQ ID NO: 956473 - DNA, 33 bp, Homo sapien
cgaaatgtgttagtgaaatgaataggaaataca

SEQ ID NO: 956474 - DNA, 33 bp, Homo sapien
cgaaatgtgttagtgacatgaataggaaataca

SEQ ID NO: 956475 - DNA, 33 bp, Homo sapien
ggaagcctagagaccaataagggaagctatgat

SEQ ID NO: 956476 - DNA, 33 bp, Homo sapien
ggaagcctagagaccagtaagggaagctatgat

SEQ ID NO: 956477 - DNA, 33 bp, Homo sapien
aattgaattacacacaataccaagtggggatct

SEQ ID NO: 956478 - DNA, 33 bp, Homo sapien
aattgaattacacacagtaccaagtggggatct

SEQ ID NO: 956479 - DNA, 33 bp, Homo sapien
catttcctctgatactaaacgtggtagctaaag

SEQ ID NO: 956480 - DNA, 33 bp, Homo sapien
catttcctctgatacttaacgtggtagctaaag

SEQ ID NO: 956481 - DNA, 33 bp, Homo sapien
aagcttaggtagctaacttaagtcctcactact

SEQ ID NO: 956482 - DNA, 33 bp, Homo sapien
aagcttaggtagctaatttaagtcctcactact

SEQ ID NO: 956483 - DNA, 33 bp, Homo sapien
tgcatatgcaaatagaaccttggcaggtgcttg

SEQ ID NO: 956484 - DNA, 33 bp, Homo sapien
tgcatatgcaaatagacccttggcaggtgcttg

SEQ ID NO: 956485 - DNA, 33 bp, Homo sapien
gggtaaaaagagccagaacccaggagcaaccag

SEQ ID NO: 956486 - DNA, 33 bp, Homo sapien
gggtaaaaagagccaggacccaggagcaaccag

SEQ ID NO: 956487 - DNA, 33 bp, Homo sapien
gaacatttatgtaaacactgattacttgcctaa

SEQ ID NO: 956488 - DNA, 33 bp, Homo sapien
gaacatttatgtaaacgctgattacttgcctaa

SEQ ID NO: 956489 - DNA, 33 bp, Homo sapien
tcctacaactgaaacaccaaattgacgtatatt

SEQ ID NO: 956490 - DNA, 33 bp, Homo sapien
tcctacaactgaaacatcaaattgacgtatatt

SEQ ID NO: 956491 - DNA, 33 bp, Homo sapien
gaggacatcacatcacaacgtatggacaaagaa

SEQ ID NO: 956492 - DNA, 33 bp, Homo sapien
gaggacatcacatcacgacgtatggacaaagaa

SEQ ID NO: 956493 - DNA, 33 bp, Homo sapien
gctgtaacaatctccaaatatcaggcattttaa

SEQ ID NO: 956494 - DNA, 33 bp, Homo sapien
gctgtaacaatctccagatatcaggcattttaa

SEQ ID NO: 956495 - DNA, 33 bp, Homo sapien
taacacaggtttcccaatctttatttgttcaca

SEQ ID NO: 956496 - DNA, 33 bp, Homo sapien
taacacaggtttcccagtctttatttgttcaca

SEQ ID NO: 956497 - DNA, 33 bp, Homo sapien
ctccttcttccttccacgtcagagtagtaaaga

SEQ ID NO: 956498 - DNA, 33 bp, Homo sapien
ctccttcttccttccatgtcagagtagtaaaga

SEQ ID NO: 956499 - DNA, 33 bp, Homo sapien
gatctgggttgacacccgagatttttgcatttc

SEQ ID NO: 956500 - DNA, 33 bp, Homo sapien
gatctgggttgacacctgagatttttgcatttc

SEQ ID NO: 956501 - DNA, 33 bp, Homo sapien
tcacattttgagaagcaaaggtctaaactgcag

SEQ ID NO: 956502 - DNA, 33 bp, Homo sapien
tcacattttgagaagcgaaggtctaaactgcag

SEQ ID NO: 956503 - DNA, 33 bp, Homo sapien
ctctatgcctttgatagaaattctcatttgatc

SEQ ID NO: 956504 - DNA, 33 bp, Homo sapien
ctctatgcctttgatataaattctcatttgatc

SEQ ID NO: 956505 - DNA, 33 bp, Homo sapien
cagtaagtaccaagcccgccaggatctcagcac

SEQ ID NO: 956506 - DNA, 33 bp, Homo sapien
cagtaagtaccaagcctgccaggatctcagcac

SEQ ID NO: 956507 - DNA, 33 bp, Homo sapien
aactacaagacagcaactgcttaaccctattct

SEQ ID NO: 956508 - DNA, 33 bp, Homo sapien
aactacaagacagcaagtgcttaaccctattct

SEQ ID NO: 956509 - DNA, 33 bp, Homo sapien
agcctgagaaatgaacacttctaactggaaact

SEQ ID NO: 956510 - DNA, 33 bp, Homo sapien
agcctgagaaatgaacgcttctaactggaaact

SEQ ID NO: 956511 - DNA, 33 bp, Homo sapien
agttcagaacacccaaagtctgcattgtcactc

SEQ ID NO: 956512 - DNA, 33 bp, Homo sapien
agttcagaacacccaaggtctgcattgtcactc

SEQ ID NO: 956513 - DNA, 33 bp, Homo sapien
gcttatcacgcatgtacgtaaccccctttatgt

SEQ ID NO: 956514 - DNA, 33 bp, Homo sapien
gcttatcacgcatgtaggtaaccccctttatgt

SEQ ID NO: 956515 - DNA, 33 bp, Homo sapien
attttaactgtgcaggcccaaagtctaatagat

SEQ ID NO: 956516 - DNA, 33 bp, Homo sapien
attttaactgtgcagggccaaagtctaatagat

SEQ ID NO: 956517 - DNA, 33 bp, Homo sapien
gtaataaaaacagaagccaacacaatgaaaatc

SEQ ID NO: 956518 - DNA, 33 bp, Homo sapien
gtaataaaaacagaagtcaacacaatgaaaatc

SEQ ID NO: 956519 - DNA, 33 bp, Homo sapien
ccagggggaatgactacggctttctttatcaaa

SEQ ID NO: 956520 - DNA, 33 bp, Homo sapien
ccagggggaatgactatggctttctttatcaaa

SEQ ID NO: 956521 - DNA, 33 bp, Homo sapien
aattagtgcttagagaaaatccctttgtcattg

SEQ ID NO: 956522 - DNA, 33 bp, Homo sapien
aattagtgcttagagagaatccctttgtcattg

SEQ ID NO: 956523 - DNA, 33 bp, Homo sapien
taaaaataactgctaccatttgtggacttagtg

SEQ ID NO: 956524 - DNA, 33 bp, Homo sapien
taaaaataactgctactatttgtggacttagtg

SEQ ID NO: 956525 - DNA, 33 bp, Homo sapien
tgcatgacaacagagacagaccattactcccaa

SEQ ID NO: 956526 - DNA, 33 bp, Homo sapien
tgcatgacaacagagatagaccattactcccaa

SEQ ID NO: 956527 - DNA, 33 bp, Homo sapien
tagttgctccggtgtgaacttggcatctcatgg

SEQ ID NO: 956528 - DNA, 33 bp, Homo sapien
tagttgctccggtgtgtacttggcatctcatgg

SEQ ID NO: 956529 - DNA, 33 bp, Homo sapien
cacatcagatgttaaacagaataggtgtttggt

SEQ ID NO: 956530 - DNA, 33 bp, Homo sapien
cacatcagatgttaaatagaataggtgtttggt

SEQ ID NO: 956531 - DNA, 33 bp, Homo sapien
caatttggaagctagaatatgtgtttaatgtgt

SEQ ID NO: 956532 - DNA, 33 bp, Homo sapien
caatttggaagctagactatgtgtttaatgtgt

SEQ ID NO: 956533 - DNA, 33 bp, Homo sapien
tctgttctcattaatcacctttcaaaggcccca

SEQ ID NO: 956534 - DNA, 33 bp, Homo sapien
tctgttctcattaatcgcctttcaaaggcccca

SEQ ID NO: 956535 - DNA, 33 bp, Homo sapien
tattagaaagacctacaaagattgcctgtttta

SEQ ID NO: 956536 - DNA, 33 bp, Homo sapien
tattagaaagacctacgaagattgcctgtttta

SEQ ID NO: 956537 - DNA, 33 bp, Homo sapien
gctgtaactccagcaaatacttgccatttaaat

SEQ ID NO: 956538 - DNA, 33 bp, Homo sapien
gctgtaactccagcaattacttgccatttaaat

SEQ ID NO: 956539 - DNA, 33 bp, Homo sapien
gtgtggtcggaggaaaagtctttgaggatgtca

SEQ ID NO: 956540 - DNA, 33 bp, Homo sapien
gtgtggtcggaggaaacgtctttgaggatgtca

SEQ ID NO: 956541 - DNA, 33 bp, Homo sapien
tatagcactgataacaaagagtccataaaatgg

SEQ ID NO: 956542 - DNA, 33 bp, Homo sapien
tatagcactgataacagagagtccataaaatgg

SEQ ID NO: 956543 - DNA, 33 bp, Homo sapien
tcaaaattaaagcaaaaggttgcaaattcattt

SEQ ID NO: 956544 - DNA, 33 bp, Homo sapien
tcaaaattaaagcaaagggttgcaaattcattt

SEQ ID NO: 956545 - DNA, 33 bp, Homo sapien
aggcattcatgtatcacagcattttggctgaaa

SEQ ID NO: 956546 - DNA, 33 bp, Homo sapien
aggcattcatgtatcatagcattttggctgaaa

SEQ ID NO: 956547 - DNA, 33 bp, Homo sapien
tgaatgagatctcgaaagatagtagtagcagtc

SEQ ID NO: 956548 - DNA, 33 bp, Homo sapien
tgaatgagatctcgaaggatagtagtagcagtc

SEQ ID NO: 956549 - DNA, 33 bp, Homo sapien
caagagttaagatttacgtgtattcgtgaacat

SEQ ID NO: 956550 - DNA, 33 bp, Homo sapien
caagagttaagatttatgtgtattcgtgaacat

SEQ ID NO: 956551 - DNA, 33 bp, Homo sapien
aacagggtcataactggaggaggaaggctacat

SEQ ID NO: 956552 - DNA, 33 bp, Homo sapien
aacagggtcataactgtaggaggaaggctacat

SEQ ID NO: 956553 - DNA, 33 bp, Homo sapien
cagtgcttctcctccacgctcggactgattatt

SEQ ID NO: 956554 - DNA, 33 bp, Homo sapien
cagtgcttctcctccatgctcggactgattatt

SEQ ID NO: 956555 - DNA, 33 bp, Homo sapien
ccttttctggaacataaagtagagtagaatttg

SEQ ID NO: 956556 - DNA, 33 bp, Homo sapien
ccttttctggaacatagagtagagtagaatttg

SEQ ID NO: 956557 - DNA, 33 bp, Homo sapien
gctccacagcaaatcagctcggagcacctgcct

SEQ ID NO: 956558 - DNA, 33 bp, Homo sapien
gctccacagcaaatcatctcggagcacctgcct

SEQ ID NO: 956559 - DNA, 33 bp, Homo sapien
accctgaaaggtaccaatagacgtttctccggt

SEQ ID NO: 956560 - DNA, 33 bp, Homo sapien
accctgaaaggtaccagtagacgtttctccggt

SEQ ID NO: 956561 - DNA, 33 bp, Homo sapien
cttagccaggactgcaggccaagagtgtaaatg

SEQ ID NO: 956562 - DNA, 33 bp, Homo sapien
cttagccaggactgcatgccaagagtgtaaatg

SEQ ID NO: 956563 - DNA, 33 bp, Homo sapien
ccttatctatcctgggacatacctgggtgcttt

SEQ ID NO: 956564 - DNA, 33 bp, Homo sapien
ccttatctatcctgggtcatacctgggtgcttt

SEQ ID NO: 956565 - DNA, 33 bp, Homo sapien
ttccagtgtcaaccaaaatgtaaaactataggg

SEQ ID NO: 956566 - DNA, 33 bp, Homo sapien
ttccagtgtcaaccaacatgtaaaactataggg

SEQ ID NO: 956567 - DNA, 33 bp, Homo sapien
aaaatctgaggtctccaagaaaagaaattctat

SEQ ID NO: 956568 - DNA, 33 bp, Homo sapien
aaaatctgaggtctccgagaaaagaaattctat

SEQ ID NO: 956569 - DNA, 33 bp, Homo sapien
atgcacagtcactgaacaaaacaaacaaacaaa

SEQ ID NO: 956570 - DNA, 33 bp, Homo sapien
atgcacagtcactgaagaaaacaaacaaacaaa

SEQ ID NO: 956571 - DNA, 33 bp, Homo sapien
acagattgacaaggcccggaaagagctgaacta

SEQ ID NO: 956572 - DNA, 33 bp, Homo sapien
acagattgacaaggcctggaaagagctgaacta

SEQ ID NO: 956573 - DNA, 33 bp, Homo sapien
tacagtgactctagaaatgaagctagagcctag

SEQ ID NO: 956574 - DNA, 33 bp, Homo sapien
tacagtgactctagaagtgaagctagagcctag

SEQ ID NO: 956575 - DNA, 33 bp, Homo sapien
aacatgagaggagcagactaaaaataatgtggg

SEQ ID NO: 956576 - DNA, 33 bp, Homo sapien
aacatgagaggagcagcctaaaaataatgtggg

SEQ ID NO: 956577 - DNA, 33 bp, Homo sapien
tttttcatatactcatcacatttgtgttatgtc

SEQ ID NO: 956578 - DNA, 33 bp, Homo sapien
tttttcatatactcattacatttgtgttatgtc

SEQ ID NO: 956579 - DNA, 33 bp, Homo sapien
tcatgtcctcttggcacacatggacaggagcca

SEQ ID NO: 956580 - DNA, 33 bp, Homo sapien
tcatgtcctcttggcatacatggacaggagcca

SEQ ID NO: 956581 - DNA, 33 bp, Homo sapien
atgtaaatgaataaaaacactgttgggctaatt

SEQ ID NO: 956582 - DNA, 33 bp, Homo sapien
atgtaaatgaataaaaccactgttgggctaatt

SEQ ID NO: 956583 - DNA, 33 bp, Homo sapien
aaactaggctgctccccgacaacttaggaagat

SEQ ID NO: 956584 - DNA, 33 bp, Homo sapien
aaactaggctgctccctgacaacttaggaagat

SEQ ID NO: 956585 - DNA, 33 bp, Homo sapien
tctggggctaacaacgaagacatcatttctcag

SEQ ID NO: 956586 - DNA, 33 bp, Homo sapien
tctggggctaacaacggagacatcatttctcag

SEQ ID NO: 956587 - DNA, 33 bp, Homo sapien
gtctccagtttgaacaaggaatagttgtacttg

SEQ ID NO: 956588 - DNA, 33 bp, Homo sapien
gtctccagtttgaacagggaatagttgtacttg

SEQ ID NO: 956589 - DNA, 33 bp, Homo sapien
gcaccaagaaaccagagaattcatgctaactaa

SEQ ID NO: 956590 - DNA, 33 bp, Homo sapien
gcaccaagaaaccagataattcatgctaactaa

SEQ ID NO: 956591 - DNA, 33 bp, Homo sapien
tctcacgtggctctctcaattgcgcagaagcaa

SEQ ID NO: 956592 - DNA, 33 bp, Homo sapien
tctcacgtggctctctgaattgcgcagaagcaa

SEQ ID NO: 956593 - DNA, 33 bp, Homo sapien
ctcaagtagctcacaacgttcctgaaaacttca

SEQ ID NO: 956594 - DNA, 33 bp, Homo sapien
ctcaagtagctcacaatgttcctgaaaacttca

SEQ ID NO: 956595 - DNA, 33 bp, Homo sapien
cactgctcaataaatacacacgtcatgcaaaag

SEQ ID NO: 956596 - DNA, 33 bp, Homo sapien
cactgctcaataaatatacacgtcatgcaaaag

SEQ ID NO: 956597 - DNA, 33 bp, Homo sapien
ggtgtctttgaaacaacagagataccagaagct

SEQ ID NO: 956598 - DNA, 33 bp, Homo sapien
ggtgtctttgaaacaatagagataccagaagct

SEQ ID NO: 956599 - DNA, 33 bp, Homo sapien
tagaatctcccatagaaccacagaaaataacac

SEQ ID NO: 956600 - DNA, 33 bp, Homo sapien
tagaatctcccatagatccacagaaaataacac

SEQ ID NO: 956601 - DNA, 33 bp, Homo sapien
gaaaacggactaatacacatgcctagcacatgt

SEQ ID NO: 956602 - DNA, 33 bp, Homo sapien
gaaaacggactaatacgcatgcctagcacatgt

SEQ ID NO: 956603 - DNA, 33 bp, Homo sapien
gtaagttctagtttaaatacaaaatgcattgcc

SEQ ID NO: 956604 - DNA, 33 bp, Homo sapien
gtaagttctagtttaagtacaaaatgcattgcc

SEQ ID NO: 956605 - DNA, 33 bp, Homo sapien
cagccttagaaaagacacgttatcaggtctagg

SEQ ID NO: 956606 - DNA, 33 bp, Homo sapien
cagccttagaaaagacgcgttatcaggtctagg

SEQ ID NO: 956607 - DNA, 33 bp, Homo sapien
agtcatgctagggagaagactgagatatatgtg

SEQ ID NO: 956608 - DNA, 33 bp, Homo sapien
agtcatgctagggagaggactgagatatatgtg

SEQ ID NO: 956609 - DNA, 33 bp, Homo sapien
gtgagggtttctgagacgtaggtgaaacccact

SEQ ID NO: 956610 - DNA, 33 bp, Homo sapien
gtgagggtttctgagatgtaggtgaaacccact

SEQ ID NO: 956611 - DNA, 33 bp, Homo sapien
gaattcagcagttttcaatattaagcatttagt

SEQ ID NO: 956612 - DNA, 33 bp, Homo sapien
gaattcagcagttttccatattaagcatttagt

SEQ ID NO: 956613 - DNA, 33 bp, Homo sapien
tcagaatctggagaaacgtatttgaatagtttg

SEQ ID NO: 956614 - DNA, 33 bp, Homo sapien
tcagaatctggagaaatgtatttgaatagtttg

SEQ ID NO: 956615 - DNA, 33 bp, Homo sapien
gaatagaaagtgactcaatggggcctgttgcca

SEQ ID NO: 956616 - DNA, 33 bp, Homo sapien
gaatagaaagtgactcgatggggcctgttgcca

SEQ ID NO: 956617 - DNA, 33 bp, Homo sapien
gctatctattgcaacaactaactcaagtgcaaa

SEQ ID NO: 956618 - DNA, 33 bp, Homo sapien
gctatctattgcaacagctaactcaagtgcaaa

SEQ ID NO: 956619 - DNA, 33 bp, Homo sapien
ttctgtaatcccaacaataggaaaatgaccagg

SEQ ID NO: 956620 - DNA, 33 bp, Homo sapien
ttctgtaatcccaacagtaggaaaatgaccagg

SEQ ID NO: 956621 - DNA, 33 bp, Homo sapien
tgcagacatacagcaaagtgtgaacagagcacc

SEQ ID NO: 956622 - DNA, 33 bp, Homo sapien
tgcagacatacagcaaggtgtgaacagagcacc

SEQ ID NO: 956623 - DNA, 33 bp, Homo sapien
gaagtgcattcatgacaattggctgaagtaatg

SEQ ID NO: 956624 - DNA, 33 bp, Homo sapien
gaagtgcattcatgacgattggctgaagtaatg

SEQ ID NO: 956625 - DNA, 33 bp, Homo sapien
ggagggaggaaaatgacgttccaaatcaaagta

SEQ ID NO: 956626 - DNA, 33 bp, Homo sapien
ggagggaggaaaatgatgttccaaatcaaagta

SEQ ID NO: 956627 - DNA, 33 bp, Homo sapien
aagagcagtcctgaacactggtatcctgtctta

SEQ ID NO: 956628 - DNA, 33 bp, Homo sapien
aagagcagtcctgaacgctggtatcctgtctta

SEQ ID NO: 956629 - DNA, 33 bp, Homo sapien
aggactaaagtgaatcaaattgtattattgtat

SEQ ID NO: 956630 - DNA, 33 bp, Homo sapien
aggactaaagtgaatcgaattgtattattgtat

SEQ ID NO: 956631 - DNA, 33 bp, Homo sapien
tgttaaaaattacacaaaagaccaggtacactg

SEQ ID NO: 956632 - DNA, 33 bp, Homo sapien
tgttaaaaattacacagaagaccaggtacactg

SEQ ID NO: 956633 - DNA, 33 bp, Homo sapien
aatgtggcccttgccaaatattctcgatctgtc

SEQ ID NO: 956634 - DNA, 33 bp, Homo sapien
aatgtggcccttgccagatattctcgatctgtc

SEQ ID NO: 956635 - DNA, 33 bp, Homo sapien
ctattacgggtaacaccacacactttcttggat

SEQ ID NO: 956636 - DNA, 33 bp, Homo sapien
ctattacgggtaacactacacactttcttggat

SEQ ID NO: 956637 - DNA, 33 bp, Homo sapien
gaaagttatggacaagcaataatgcaagcacca

SEQ ID NO: 956638 - DNA, 33 bp, Homo sapien
gaaagttatggacaaggaataatgcaagcacca

SEQ ID NO: 956639 - DNA, 33 bp, Homo sapien
agccccacatgaatgaaagcggaaaggtgcgct

SEQ ID NO: 956640 - DNA, 33 bp, Homo sapien
agccccacatgaatgagagcggaaaggtgcgct

SEQ ID NO: 956641 - DNA, 33 bp, Homo sapien
tgttccaagatttgtaagcaactgaactctctt

SEQ ID NO: 956642 - DNA, 33 bp, Homo sapien
tgttccaagatttgtaggcaactgaactctctt

SEQ ID NO: 956643 - DNA, 33 bp, Homo sapien
aggacagaaagagcaacaatattggaatctgac

SEQ ID NO: 956644 - DNA, 33 bp, Homo sapien
aggacagaaagagcaagaatattggaatctgac

SEQ ID NO: 956645 - DNA, 33 bp, Homo sapien
ttcaccactcattcctaaagagtcacatttaat

SEQ ID NO: 956646 - DNA, 33 bp, Homo sapien
ttcaccactcattcctgaagagtcacatttaat

SEQ ID NO: 956647 - DNA, 33 bp, Homo sapien
aatccacttagcttacagaacgggagactcatg

SEQ ID NO: 956648 - DNA, 33 bp, Homo sapien
aatccacttagcttacggaacgggagactcatg

SEQ ID NO: 956649 - DNA, 33 bp, Homo sapien
gtaacaggggtgtaaacgccagccaatctcttt

SEQ ID NO: 956650 - DNA, 33 bp, Homo sapien
gtaacaggggtgtaaatgccagccaatctcttt

SEQ ID NO: 956651 - DNA, 33 bp, Homo sapien
agctcctgcttagtgcagagccattaaggtgtg

SEQ ID NO: 956652 - DNA, 33 bp, Homo sapien
agctcctgcttagtgcggagccattaaggtgtg

SEQ ID NO: 956653 - DNA, 33 bp, Homo sapien
cgaactgcggagattcacttgaaaacggatagg

SEQ ID NO: 956654 - DNA, 33 bp, Homo sapien
cgaactgcggagattcgcttgaaaacggatagg

SEQ ID NO: 956655 - DNA, 33 bp, Homo sapien
ggtcattgatttgggggaaggtagagaaggtaa

SEQ ID NO: 956656 - DNA, 33 bp, Homo sapien
ggtcattgatttggggtaaggtagagaaggtaa

SEQ ID NO: 956657 - DNA, 33 bp, Homo sapien
gatcagtttttgctggaaccgaaattctccgta

SEQ ID NO: 956658 - DNA, 33 bp, Homo sapien
gatcagtttttgctgggaccgaaattctccgta

SEQ ID NO: 956659 - DNA, 33 bp, Homo sapien
ccataaattgtttgaccagtctattggattgga

SEQ ID NO: 956660 - DNA, 33 bp, Homo sapien
ccataaattgtttgactagtctattggattgga

SEQ ID NO: 956661 - DNA, 33 bp, Homo sapien
gatgttgatgattggcagaaggattttatatgt

SEQ ID NO: 956662 - DNA, 33 bp, Homo sapien
gatgttgatgattggcggaaggattttatatgt

SEQ ID NO: 956663 - DNA, 33 bp, Homo sapien
gctccaatgggctatgcagaacaggaaggcagc

SEQ ID NO: 956664 - DNA, 33 bp, Homo sapien
gctccaatgggctatggagaacaggaaggcagc

SEQ ID NO: 956665 - DNA, 33 bp, Homo sapien
tgccattctcaaatcacaaacttcaagcaattt

SEQ ID NO: 956666 - DNA, 33 bp, Homo sapien
tgccattctcaaatcataaacttcaagcaattt

SEQ ID NO: 956667 - DNA, 33 bp, Homo sapien
caacaggaatttccagcatggtctcagaggatt

SEQ ID NO: 956668 - DNA, 33 bp, Homo sapien
caacaggaatttccagtatggtctcagaggatt

SEQ ID NO: 956669 - DNA, 33 bp, Homo sapien
ctataaattatgtgaccatcctactaattcatc

SEQ ID NO: 956670 - DNA, 33 bp, Homo sapien
ctataaattatgtgactatcctactaattcatc

SEQ ID NO: 956671 - DNA, 33 bp, Homo sapien
ggtggactgtagtggacactttagtaggccctc

SEQ ID NO: 956672 - DNA, 33 bp, Homo sapien
ggtggactgtagtggatactttagtaggccctc

SEQ ID NO: 956673 - DNA, 33 bp, Homo sapien
agaggaatgagtcaaacgataggcctgctgcta

SEQ ID NO: 956674 - DNA, 33 bp, Homo sapien
agaggaatgagtcaaatgataggcctgctgcta

SEQ ID NO: 956675 - DNA, 33 bp, Homo sapien
gtttgctgttatgtaacggagaaggaggaatgt

SEQ ID NO: 956676 - DNA, 33 bp, Homo sapien
gtttgctgttatgtaatggagaaggaggaatgt

SEQ ID NO: 956677 - DNA, 33 bp, Homo sapien
gaggtgcaagatgcaacaatctgtgctttactt

SEQ ID NO: 956678 - DNA, 33 bp, Homo sapien
gaggtgcaagatgcaataatctgtgctttactt

SEQ ID NO: 956679 - DNA, 33 bp, Homo sapien
cctggggaagggtgacaattcagatatttggag

SEQ ID NO: 956680 - DNA, 33 bp, Homo sapien
cctggggaagggtgactattcagatatttggag

SEQ ID NO: 956681 - DNA, 33 bp, Homo sapien
gaacctactgactgaaacagaggaagggtcctc

SEQ ID NO: 956682 - DNA, 33 bp, Homo sapien
gaacctactgactgaagcagaggaagggtcctc

SEQ ID NO: 956683 - DNA, 33 bp, Homo sapien
tgcaaggtaggcaaagcagacagcctgtaaata

SEQ ID NO: 956684 - DNA, 33 bp, Homo sapien
tgcaaggtaggcaaaggagacagcctgtaaata

SEQ ID NO: 956685 - DNA, 33 bp, Homo sapien
gtatagtaattgccacaacattgcctctaatgg

SEQ ID NO: 956686 - DNA, 33 bp, Homo sapien
gtatagtaattgccaccacattgcctctaatgg

SEQ ID NO: 956687 - DNA, 33 bp, Homo sapien
agatttatgcaaaagacagaaaaggaagggcag

SEQ ID NO: 956688 - DNA, 33 bp, Homo sapien
agatttatgcaaaagagagaaaaggaagggcag

SEQ ID NO: 956689 - DNA, 33 bp, Homo sapien
atcaccaactctggtcaccttttcatgcttaat

SEQ ID NO: 956690 - DNA, 33 bp, Homo sapien
atcaccaactctggtcgccttttcatgcttaat

SEQ ID NO: 956691 - DNA, 33 bp, Homo sapien
aataatactgaagacaatgatgatgggcaggta

SEQ ID NO: 956692 - DNA, 33 bp, Homo sapien
aataatactgaagacagtgatgatgggcaggta

SEQ ID NO: 956693 - DNA, 33 bp, Homo sapien
cacagcagttcctcgacaaggtcattgttttct

SEQ ID NO: 956694 - DNA, 33 bp, Homo sapien
cacagcagttcctcgataaggtcattgttttct

SEQ ID NO: 956695 - DNA, 33 bp, Homo sapien
ataaaaatagtcacaaggaaactcttagaagat

SEQ ID NO: 956696 - DNA, 33 bp, Homo sapien
ataaaaatagtcacaatgaaactcttagaagat

SEQ ID NO: 956697 - DNA, 33 bp, Homo sapien
actatttggggaaggcagaatctgacatggtct

SEQ ID NO: 956698 - DNA, 33 bp, Homo sapien
actatttggggaaggcggaatctgacatggtct

SEQ ID NO: 956699 - DNA, 33 bp, Homo sapien
ttgcccattctctccaactaaatgcccttcctt

SEQ ID NO: 956700 - DNA, 33 bp, Homo sapien
ttgcccattctctccagctaaatgcccttcctt

SEQ ID NO: 956701 - DNA, 33 bp, Homo sapien
actcaatgctgggaaccataaaaatgggttgag

SEQ ID NO: 956702 - DNA, 33 bp, Homo sapien
actcaatgctgggaactataaaaatgggttgag

SEQ ID NO: 956703 - DNA, 33 bp, Homo sapien
ccaaattcagtactacaaacatttattaattac

SEQ ID NO: 956704 - DNA, 33 bp, Homo sapien
ccaaattcagtactacgaacatttattaattac

SEQ ID NO: 956705 - DNA, 33 bp, Homo sapien
gcagcctggcatcatccccggagaagaatatcc

SEQ ID NO: 956706 - DNA, 33 bp, Homo sapien
gcagcctggcatcatcgccggagaagaatatcc

SEQ ID NO: 956707 - DNA, 33 bp, Homo sapien
ctaaggagaattccaaataagagttttgaagtc

SEQ ID NO: 956708 - DNA, 33 bp, Homo sapien
ctaaggagaattccaagtaagagttttgaagtc

SEQ ID NO: 956709 - DNA, 33 bp, Homo sapien
aattcttgggttaaaaatatctgtttcttattc

SEQ ID NO: 956710 - DNA, 33 bp, Homo sapien
aattcttgggttaaaattatctgtttcttattc

SEQ ID NO: 956711 - DNA, 33 bp, Homo sapien
cccaatctttccaaaactctcaaatctaaaaag

SEQ ID NO: 956712 - DNA, 33 bp, Homo sapien
cccaatctttccaaaattctcaaatctaaaaag

SEQ ID NO: 956713 - DNA, 33 bp, Homo sapien
tgtgtcctgtgctgaacgtcaccagcttggcca

SEQ ID NO: 956714 - DNA, 33 bp, Homo sapien
tgtgtcctgtgctgaatgtcaccagcttggcca

SEQ ID NO: 956715 - DNA, 33 bp, Homo sapien
ctgaggcctgcagcatgaagaagctaggcaagt

SEQ ID NO: 956716 - DNA, 33 bp, Homo sapien
ctgaggcctgcagcattaagaagctaggcaagt

SEQ ID NO: 956717 - DNA, 33 bp, Homo sapien
tcatcttaatgagccacaaatgtgtaattagca

SEQ ID NO: 956718 - DNA, 33 bp, Homo sapien
tcatcttaatgagccataaatgtgtaattagca

SEQ ID NO: 956719 - DNA, 33 bp, Homo sapien
aacatggaaactctgaagggcttaatctctagg

SEQ ID NO: 956720 - DNA, 33 bp, Homo sapien
aacatggaaactctgaggggcttaatctctagg

SEQ ID NO: 956721 - DNA, 33 bp, Homo sapien
gtccaacagtgaaaaacggaaagcaatctaaaa

SEQ ID NO: 956722 - DNA, 33 bp, Homo sapien
gtccaacagtgaaaaatggaaagcaatctaaaa

SEQ ID NO: 956723 - DNA, 33 bp, Homo sapien
gaacttgcgacattgacgtggagaatggtgatg

SEQ ID NO: 956724 - DNA, 33 bp, Homo sapien
gaacttgcgacattgatgtggagaatggtgatg

SEQ ID NO: 956725 - DNA, 33 bp, Homo sapien
ggaccgactgaacataaaataagacagtaaata

SEQ ID NO: 956726 - DNA, 33 bp, Homo sapien
ggaccgactgaacatacaataagacagtaaata

SEQ ID NO: 956727 - DNA, 33 bp, Homo sapien
gacaagtcgagagtaaaaaccttcagggaggtg

SEQ ID NO: 956728 - DNA, 33 bp, Homo sapien
gacaagtcgagagtaacaaccttcagggaggtg

SEQ ID NO: 956729 - DNA, 33 bp, Homo sapien
acattcaaaaccattaagagaagactcccgttt

SEQ ID NO: 956730 - DNA, 33 bp, Homo sapien
acattcaaaaccattaggagaagactcccgttt

SEQ ID NO: 956731 - DNA, 33 bp, Homo sapien
cacagggagttattagacacatcaagtttccaa

SEQ ID NO: 956732 - DNA, 33 bp, Homo sapien
cacagggagttattagtcacatcaagtttccaa

SEQ ID NO: 956733 - DNA, 33 bp, Homo sapien
cataaagggatcacagcaaaatgaaactcgctg

SEQ ID NO: 956734 - DNA, 33 bp, Homo sapien
cataaagggatcacaggaaaatgaaactcgctg

SEQ ID NO: 956735 - DNA, 33 bp, Homo sapien
accaaccccttctcacaccttgtcaatagcctc

SEQ ID NO: 956736 - DNA, 33 bp, Homo sapien
accaaccccttctcacgccttgtcaatagcctc

SEQ ID NO: 956737 - DNA, 33 bp, Homo sapien
agtagaggcatttgtccagagtggatgctggaa

SEQ ID NO: 956738 - DNA, 33 bp, Homo sapien
agtagaggcatttgtctagagtggatgctggaa

SEQ ID NO: 956739 - DNA, 33 bp, Homo sapien
ttgaaccaaacatccacgggaacaagtctcttc

SEQ ID NO: 956740 - DNA, 33 bp, Homo sapien
ttgaaccaaacatccatgggaacaagtctcttc

SEQ ID NO: 956741 - DNA, 33 bp, Homo sapien
gtgccacggatttgaaaataaacttgaaaatca

SEQ ID NO: 956742 - DNA, 33 bp, Homo sapien
gtgccacggatttgaacataaacttgaaaatca

SEQ ID NO: 956743 - DNA, 33 bp, Homo sapien
aggggaaccaacctagaagcctgaactgggggc

SEQ ID NO: 956744 - DNA, 33 bp, Homo sapien
aggggaaccaacctaggagcctgaactgggggc

SEQ ID NO: 956745 - DNA, 33 bp, Homo sapien
cattggtttgaaaaaaatctctgtaatctagaa

SEQ ID NO: 956746 - DNA, 33 bp, Homo sapien
cattggtttgaaaaaactctctgtaatctagaa

SEQ ID NO: 956747 - DNA, 33 bp, Homo sapien
ctaactgcgaaatgacagagatctcatagatgt

SEQ ID NO: 956748 - DNA, 33 bp, Homo sapien
ctaactgcgaaatgactgagatctcatagatgt

SEQ ID NO: 956749 - DNA, 33 bp, Homo sapien
accccaatgaactccaatgccttcagggtcaat

SEQ ID NO: 956750 - DNA, 33 bp, Homo sapien
accccaatgaactccagtgccttcagggtcaat

SEQ ID NO: 956751 - DNA, 33 bp, Homo sapien
actgcagcctcaatcaccagggcccaagtgatc

SEQ ID NO: 956752 - DNA, 33 bp, Homo sapien
actgcagcctcaatcatcagggcccaagtgatc

SEQ ID NO: 956753 - DNA, 33 bp, Homo sapien
tttggacctttgctcacgtctaattcacattgc

SEQ ID NO: 956754 - DNA, 33 bp, Homo sapien
tttggacctttgctcatgtctaattcacattgc

SEQ ID NO: 956755 - DNA, 33 bp, Homo sapien
tcccagttggccgcgggacccgcttccccaggt

SEQ ID NO: 956756 - DNA, 33 bp, Homo sapien
tcccagttggccgcggtacccgcttccccaggt

SEQ ID NO: 956757 - DNA, 33 bp, Homo sapien
ttttggaggtgccagaagagagaatcggtggag

SEQ ID NO: 956758 - DNA, 33 bp, Homo sapien
ttttggaggtgccagaggagagaatcggtggag

SEQ ID NO: 956759 - DNA, 33 bp, Homo sapien
aggttggaggggttcacagaagctcattgcaga

SEQ ID NO: 956760 - DNA, 33 bp, Homo sapien
aggttggaggggttcagagaagctcattgcaga

SEQ ID NO: 956761 - DNA, 33 bp, Homo sapien
ccctgaaattgatcaccgaatattgtgtacttg

SEQ ID NO: 956762 - DNA, 33 bp, Homo sapien
ccctgaaattgatcactgaatattgtgtacttg

SEQ ID NO: 956763 - DNA, 33 bp, Homo sapien
ggaaaaacagctatgcaccttctccagaatgga

SEQ ID NO: 956764 - DNA, 33 bp, Homo sapien
ggaaaaacagctatgcgccttctccagaatgga

SEQ ID NO: 956765 - DNA, 33 bp, Homo sapien
gaggccagaataactgcattgatgccagagtaa

SEQ ID NO: 956766 - DNA, 33 bp, Homo sapien
gaggccagaataactgtattgatgccagagtaa

SEQ ID NO: 956767 - DNA, 33 bp, Homo sapien
ttgaacatgaagttaacattgcagctttattga

SEQ ID NO: 956768 - DNA, 33 bp, Homo sapien
ttgaacatgaagttaatattgcagctttattga

SEQ ID NO: 956769 - DNA, 33 bp, Homo sapien
tcacagctacaaatgaaagttttctagttgttc

SEQ ID NO: 956770 - DNA, 33 bp, Homo sapien
tcacagctacaaatgagagttttctagttgttc

SEQ ID NO: 956771 - DNA, 33 bp, Homo sapien
agacttgaacttgaaccaaaccatttggcctag

SEQ ID NO: 956772 - DNA, 33 bp, Homo sapien
agacttgaacttgaacgaaaccatttggcctag

SEQ ID NO: 956773 - DNA, 33 bp, Homo sapien
acaaagaagtccagagaaataagctcaagttgg

SEQ ID NO: 956774 - DNA, 33 bp, Homo sapien
acaaagaagtccagaggaataagctcaagttgg

SEQ ID NO: 956775 - DNA, 33 bp, Homo sapien
cagagtcaactcccaaactcatttcactttgtt

SEQ ID NO: 956776 - DNA, 33 bp, Homo sapien
cagagtcaactcccaacctcatttcactttgtt

SEQ ID NO: 956777 - DNA, 33 bp, Homo sapien
tagggtggttgcctccaatttactctcctagaa

SEQ ID NO: 956778 - DNA, 33 bp, Homo sapien
tagggtggttgcctcctatttactctcctagaa

SEQ ID NO: 956779 - DNA, 33 bp, Homo sapien
tctcaaaagcaatcagccaacaagtatttgttt

SEQ ID NO: 956780 - DNA, 33 bp, Homo sapien
tctcaaaagcaatcagtcaacaagtatttgttt

SEQ ID NO: 956781 - DNA, 33 bp, Homo sapien
ctagttattccacaccacttaaaactttctaac

SEQ ID NO: 956782 - DNA, 33 bp, Homo sapien
ctagttattccacaccgcttaaaactttctaac

SEQ ID NO: 956783 - DNA, 33 bp, Homo sapien
tgggcaagttgtctcaatactgaatttccccac

SEQ ID NO: 956784 - DNA, 33 bp, Homo sapien
tgggcaagttgtctcagtactgaatttccccac

SEQ ID NO: 956785 - DNA, 33 bp, Homo sapien
atctcgtactacagacacaccataacacctggc

SEQ ID NO: 956786 - DNA, 33 bp, Homo sapien
atctcgtactacagacgcaccataacacctggc

SEQ ID NO: 956787 - DNA, 33 bp, Homo sapien
ggcatttgaaataatcccacacctagagaaaag

SEQ ID NO: 956788 - DNA, 33 bp, Homo sapien
ggcatttgaaataatctcacacctagagaaaag

SEQ ID NO: 956789 - DNA, 33 bp, Homo sapien
agtgataacctctaatcatgactcctgaatcta

SEQ ID NO: 956790 - DNA, 33 bp, Homo sapien
agtgataacctctaatgatgactcctgaatcta

SEQ ID NO: 956791 - DNA, 33 bp, Homo sapien
tctccatgaatgaatgccattaccacttaccct

SEQ ID NO: 956792 - DNA, 33 bp, Homo sapien
tctccatgaatgaatggcattaccacttaccct

SEQ ID NO: 956793 - DNA, 33 bp, Homo sapien
gaagagccactggagcacaaaaactcagggcac

SEQ ID NO: 956794 - DNA, 33 bp, Homo sapien
gaagagccactggagcgcaaaaactcagggcac

SEQ ID NO: 956795 - DNA, 33 bp, Homo sapien
attctaccacaggacaaatttgccacaggacat

SEQ ID NO: 956796 - DNA, 33 bp, Homo sapien
attctaccacaggacatatttgccacaggacat

SEQ ID NO: 956797 - DNA, 33 bp, Homo sapien
gccaggtgtgttgagaagtagaagtgagggagc

SEQ ID NO: 956798 - DNA, 33 bp, Homo sapien
gccaggtgtgttgagaggtagaagtgagggagc

SEQ ID NO: 956799 - DNA, 33 bp, Homo sapien
cagcgagagcttctcaacaaaggcatctcctga

SEQ ID NO: 956800 - DNA, 33 bp, Homo sapien
cagcgagagcttctcagcaaaggcatctcctga

SEQ ID NO: 956801 - DNA, 33 bp, Homo sapien
ggccaattttatgtcaagcctacacattggtta

SEQ ID NO: 956802 - DNA, 33 bp, Homo sapien
ggccaattttatgtcaggcctacacattggtta

SEQ ID NO: 956803 - DNA, 33 bp, Homo sapien
aacggagagcttctaacgtcgggccaaggacac

SEQ ID NO: 956804 - DNA, 33 bp, Homo sapien
aacggagagcttctaatgtcgggccaaggacac

SEQ ID NO: 956805 - DNA, 33 bp, Homo sapien
cacacacccaacccacagatcagaagggcttgt

SEQ ID NO: 956806 - DNA, 33 bp, Homo sapien
cacacacccaacccacggatcagaagggcttgt

SEQ ID NO: 956807 - DNA, 33 bp, Homo sapien
agctcatcgtgtttaacgccttctttttgcaga

SEQ ID NO: 956808 - DNA, 33 bp, Homo sapien
agctcatcgtgtttaatgccttctttttgcaga

SEQ ID NO: 956809 - DNA, 33 bp, Homo sapien
gctacaggattcagaaatggaagagctcatcgt

SEQ ID NO: 956810 - DNA, 33 bp, Homo sapien
gctacaggattcagaagtggaagagctcatcgt

SEQ ID NO: 956811 - DNA, 33 bp, Homo sapien
tgacctcaagttaagacatcactgctatgtaca

SEQ ID NO: 956812 - DNA, 33 bp, Homo sapien
tgacctcaagttaagatatcactgctatgtaca

SEQ ID NO: 956813 - DNA, 33 bp, Homo sapien
aacataactacatctcacaagttttctcttctc

SEQ ID NO: 956814 - DNA, 33 bp, Homo sapien
aacataactacatctcccaagttttctcttctc

SEQ ID NO: 956815 - DNA, 33 bp, Homo sapien
tttaaggtagaaaataagtagcatagatgttat

SEQ ID NO: 956816 - DNA, 33 bp, Homo sapien
tttaaggtagaaaataggtagcatagatgttat

SEQ ID NO: 956817 - DNA, 33 bp, Homo sapien
caacacagtgtaacaacaccaagaaagctggga

SEQ ID NO: 956818 - DNA, 33 bp, Homo sapien
caacacagtgtaacaataccaagaaagctggga

SEQ ID NO: 956819 - DNA, 33 bp, Homo sapien
tttaagtaaggccctccagacattctttaaaag

SEQ ID NO: 956820 - DNA, 33 bp, Homo sapien
tttaagtaaggccctctagacattctttaaaag

SEQ ID NO: 956821 - DNA, 33 bp, Homo sapien
gcaaaacacaccaaatgaatagtcaagatcaag

SEQ ID NO: 956822 - DNA, 33 bp, Homo sapien
gcaaaacacaccaaattaatagtcaagatcaag

SEQ ID NO: 956823 - DNA, 33 bp, Homo sapien
ttaacaatactatccaccttttgtgaaaagcat

SEQ ID NO: 956824 - DNA, 33 bp, Homo sapien
ttaacaatactatccatcttttgtgaaaagcat

SEQ ID NO: 956825 - DNA, 33 bp, Homo sapien
aaatcatagaggtatacggcagtttcgtggact

SEQ ID NO: 956826 - DNA, 33 bp, Homo sapien
aaatcatagaggtatatggcagtttcgtggact

SEQ ID NO: 956827 - DNA, 33 bp, Homo sapien
cttttactggttgcaaaactattagaatttgca

SEQ ID NO: 956828 - DNA, 33 bp, Homo sapien
cttttactggttgcaatactattagaatttgca

SEQ ID NO: 956829 - DNA, 33 bp, Homo sapien
tgatgttgatcctttcaagtgctgaagaaaaaa

SEQ ID NO: 956830 - DNA, 33 bp, Homo sapien
tgatgttgatcctttcgagtgctgaagaaaaaa

SEQ ID NO: 956831 - DNA, 33 bp, Homo sapien
tcagtccattaactacggataacaacactgaaa

SEQ ID NO: 956832 - DNA, 33 bp, Homo sapien
tcagtccattaactactgataacaacactgaaa

SEQ ID NO: 956833 - DNA, 33 bp, Homo sapien
agttttctgcttgttacggcctgtcaacaaggc

SEQ ID NO: 956834 - DNA, 33 bp, Homo sapien
agttttctgcttgttatggcctgtcaacaaggc

SEQ ID NO: 956835 - DNA, 33 bp, Homo sapien
gacgcatggcaattcaaatgatgtgagttttga

SEQ ID NO: 956836 - DNA, 33 bp, Homo sapien
gacgcatggcaattcagatgatgtgagttttga

SEQ ID NO: 956837 - DNA, 33 bp, Homo sapien
gggtaagtaccggtcaactcctgaagttttttc

SEQ ID NO: 956838 - DNA, 33 bp, Homo sapien
gggtaagtaccggtcagctcctgaagttttttc

SEQ ID NO: 956839 - DNA, 33 bp, Homo sapien
cagtgagagatcagaaagaaacaaatggcatct

SEQ ID NO: 956840 - DNA, 33 bp, Homo sapien
cagtgagagatcagaaggaaacaaatggcatct

SEQ ID NO: 956841 - DNA, 33 bp, Homo sapien
cattttagaaatgaacaaacaagtatatcactg

SEQ ID NO: 956842 - DNA, 33 bp, Homo sapien
cattttagaaatgaacgaacaagtatatcactg

SEQ ID NO: 956843 - DNA, 33 bp, Homo sapien
agagcacaatgcactaactgtaagaagtcactt

SEQ ID NO: 956844 - DNA, 33 bp, Homo sapien
agagcacaatgcactagctgtaagaagtcactt

SEQ ID NO: 956845 - DNA, 33 bp, Homo sapien
aggtctgttgtgtcaccggtctgttgactctga

SEQ ID NO: 956846 - DNA, 33 bp, Homo sapien
aggtctgttgtgtcactggtctgttgactctga

SEQ ID NO: 956847 - DNA, 33 bp, Homo sapien
agtagcggaggtgttacgaagggctgtcagatg

SEQ ID NO: 956848 - DNA, 33 bp, Homo sapien
agtagcggaggtgttatgaagggctgtcagatg

SEQ ID NO: 956849 - DNA, 33 bp, Homo sapien
gccatgacattgaggacggctggccactgggca

SEQ ID NO: 956850 - DNA, 33 bp, Homo sapien
gccatgacattgaggatggctggccactgggca

SEQ ID NO: 956851 - DNA, 33 bp, Homo sapien
gtctcggtttccttaacgtaaaatgaatgtcat

SEQ ID NO: 956852 - DNA, 33 bp, Homo sapien
gtctcggtttccttaatgtaaaatgaatgtcat

SEQ ID NO: 956853 - DNA, 33 bp, Homo sapien
tgtgtgaatttaacaaccaaatgaatgaaataa

SEQ ID NO: 956854 - DNA, 33 bp, Homo sapien
tgtgtgaatttaacaatcaaatgaatgaaataa

SEQ ID NO: 956855 - DNA, 33 bp, Homo sapien
agagagaaaagctagacatgacttgagtttcca

SEQ ID NO: 956856 - DNA, 33 bp, Homo sapien
agagagaaaagctagatatgacttgagtttcca

SEQ ID NO: 956857 - DNA, 33 bp, Homo sapien
ataacagcttcaaaacaataaggcataaactga

SEQ ID NO: 956858 - DNA, 33 bp, Homo sapien
ataacagcttcaaaacgataaggcataaactga

SEQ ID NO: 956859 - DNA, 33 bp, Homo sapien
ggatgatgacaaagcaatagcctggataaacgt

SEQ ID NO: 956860 - DNA, 33 bp, Homo sapien
ggatgatgacaaagcagtagcctggataaacgt

SEQ ID NO: 956861 - DNA, 33 bp, Homo sapien
taatcagtacctttgaagctgcacgtttatcca

SEQ ID NO: 956862 - DNA, 33 bp, Homo sapien
taatcagtacctttgaggctgcacgtttatcca

SEQ ID NO: 956863 - DNA, 33 bp, Homo sapien
ccctagcaacagtggaaaatctaaattttgtct

SEQ ID NO: 956864 - DNA, 33 bp, Homo sapien
ccctagcaacagtggacaatctaaattttgtct

SEQ ID NO: 956865 - DNA, 33 bp, Homo sapien
aatttatatctccaccaacactatattcaagtg

SEQ ID NO: 956866 - DNA, 33 bp, Homo sapien
aatttatatctccaccgacactatattcaagtg

SEQ ID NO: 956867 - DNA, 33 bp, Homo sapien
acctcagcctctcaaacagttgtggttacaggt

SEQ ID NO: 956868 - DNA, 33 bp, Homo sapien
acctcagcctctcaaatagttgtggttacaggt

SEQ ID NO: 956869 - DNA, 33 bp, Homo sapien
gtctatttttgagagcaattctggagaatctac

SEQ ID NO: 956870 - DNA, 33 bp, Homo sapien
gtctatttttgagagcgattctggagaatctac

SEQ ID NO: 956871 - DNA, 33 bp, Homo sapien
cacatttcttaaccaacttcagtctagctttct

SEQ ID NO: 956872 - DNA, 33 bp, Homo sapien
cacatttcttaaccaagttcagtctagctttct

SEQ ID NO: 956873 - DNA, 33 bp, Homo sapien
tccaagcagaggcagcaaagcctgaaggaacgt

SEQ ID NO: 956874 - DNA, 33 bp, Homo sapien
tccaagcagaggcagcgaagcctgaaggaacgt

SEQ ID NO: 956875 - DNA, 33 bp, Homo sapien
actcatgcatcacttaacaaggaagctgttccc

SEQ ID NO: 956876 - DNA, 33 bp, Homo sapien
actcatgcatcacttagcaaggaagctgttccc

SEQ ID NO: 956877 - DNA, 33 bp, Homo sapien
gctcaccatttatccccaggacttaaaacactg

SEQ ID NO: 956878 - DNA, 33 bp, Homo sapien
gctcaccatttatccctaggacttaaaacactg

SEQ ID NO: 956879 - DNA, 33 bp, Homo sapien
ttgagctctaaggaaacggggatgatgtcaaat

SEQ ID NO: 956880 - DNA, 33 bp, Homo sapien
ttgagctctaaggaaatggggatgatgtcaaat

SEQ ID NO: 956881 - DNA, 33 bp, Homo sapien
tcctgtgagtcacgtaagtaaggtgcagaaatt

SEQ ID NO: 956882 - DNA, 33 bp, Homo sapien
tcctgtgagtcacgtatgtaaggtgcagaaatt

SEQ ID NO: 956883 - DNA, 33 bp, Homo sapien
tacgtgactcacaggaagaaagtgcctggactt

SEQ ID NO: 956884 - DNA, 33 bp, Homo sapien
tacgtgactcacaggaggaaagtgcctggactt

SEQ ID NO: 956885 - DNA, 33 bp, Homo sapien
accatggcgggacaacccatggactgcaggtaa

SEQ ID NO: 956886 - DNA, 33 bp, Homo sapien
accatggcgggacaactcatggactgcaggtaa

SEQ ID NO: 956887 - DNA, 33 bp, Homo sapien
gagacaggcaggctacagtacaaggagaccact

SEQ ID NO: 956888 - DNA, 33 bp, Homo sapien
gagacaggcaggctacggtacaaggagaccact

SEQ ID NO: 956889 - DNA, 33 bp, Homo sapien
gaagtcggtgtgtaaacggaaagagaagcaggc

SEQ ID NO: 956890 - DNA, 33 bp, Homo sapien
gaagtcggtgtgtaaatggaaagagaagcaggc

SEQ ID NO: 956891 - DNA, 33 bp, Homo sapien
aaataaagtatgtgggaaaaagtgtgttgaaaa

SEQ ID NO: 956892 - DNA, 33 bp, Homo sapien
aaataaagtatgtggggaaaagtgtgttgaaaa

SEQ ID NO: 956893 - DNA, 33 bp, Homo sapien
tcttttaagagttttcccattagctctggttct

SEQ ID NO: 956894 - DNA, 33 bp, Homo sapien
tcttttaagagttttctcattagctctggttct

SEQ ID NO: 956895 - DNA, 33 bp, Homo sapien
aattccttgagtttgcccagagaagacttatgc

SEQ ID NO: 956896 - DNA, 33 bp, Homo sapien
aattccttgagtttgctcagagaagacttatgc

SEQ ID NO: 956897 - DNA, 33 bp, Homo sapien
ttgaaggagtggagcccgaaatgaaatgcagaa

SEQ ID NO: 956898 - DNA, 33 bp, Homo sapien
ttgaaggagtggagcctgaaatgaaatgcagaa

SEQ ID NO: 956899 - DNA, 33 bp, Homo sapien
gagaggaggagaatcaatccctgtcactccagc

SEQ ID NO: 956900 - DNA, 33 bp, Homo sapien
gagaggaggagaatcactccctgtcactccagc

SEQ ID NO: 956901 - DNA, 33 bp, Homo sapien
attctagaagtgaagaaagtgatgtcctgaaaa

SEQ ID NO: 956902 - DNA, 33 bp, Homo sapien
attctagaagtgaagacagtgatgtcctgaaaa

SEQ ID NO: 956903 - DNA, 33 bp, Homo sapien
tatgaactgggatgcaaactaattattatctac

SEQ ID NO: 956904 - DNA, 33 bp, Homo sapien
tatgaactgggatgcagactaattattatctac

SEQ ID NO: 956905 - DNA, 33 bp, Homo sapien
tactttacaaggacaacgccactgtttgttaac

SEQ ID NO: 956906 - DNA, 33 bp, Homo sapien
tactttacaaggacaatgccactgtttgttaac

SEQ ID NO: 956907 - DNA, 33 bp, Homo sapien
ctgagaagtacttggacgtggttgtctggaacc

SEQ ID NO: 956908 - DNA, 33 bp, Homo sapien
ctgagaagtacttggatgtggttgtctggaacc

SEQ ID NO: 956909 - DNA, 33 bp, Homo sapien
tttgtcccttctcacaggaaacttcatccgcag

SEQ ID NO: 956910 - DNA, 33 bp, Homo sapien
tttgtcccttctcacatgaaacttcatccgcag

SEQ ID NO: 956911 - DNA, 33 bp, Homo sapien
tccaggtcaggccttccatggattatttacaga

SEQ ID NO: 956912 - DNA, 33 bp, Homo sapien
tccaggtcaggccttctatggattatttacaga

SEQ ID NO: 956913 - DNA, 33 bp, Homo sapien
cagattttgttgttccagattagaatgcttaaa

SEQ ID NO: 956914 - DNA, 33 bp, Homo sapien
cagattttgttgttcccgattagaatgcttaaa

SEQ ID NO: 956915 - DNA, 33 bp, Homo sapien
tcgcctgactccattagaaaagcttgggcaaac

SEQ ID NO: 956916 - DNA, 33 bp, Homo sapien
tcgcctgactccattataaaagcttgggcaaac

SEQ ID NO: 956917 - DNA, 33 bp, Homo sapien
ccttgctgttcctacacggttaagcttcaggaa

SEQ ID NO: 956918 - DNA, 33 bp, Homo sapien
ccttgctgttcctacatggttaagcttcaggaa

SEQ ID NO: 956919 - DNA, 33 bp, Homo sapien
ccccggcctgctcccaaatctcaaagtcttcct

SEQ ID NO: 956920 - DNA, 33 bp, Homo sapien
ccccggcctgctcccagatctcaaagtcttcct

SEQ ID NO: 956921 - DNA, 33 bp, Homo sapien
gaaagaccccagggaaaatctgtagccacccag

SEQ ID NO: 956922 - DNA, 33 bp, Homo sapien
gaaagaccccagggaacatctgtagccacccag

SEQ ID NO: 956923 - DNA, 33 bp, Homo sapien
acacacctcctgaagaactcctgcaatgcccac

SEQ ID NO: 956924 - DNA, 33 bp, Homo sapien
acacacctcctgaagagctcctgcaatgcccac

SEQ ID NO: 956925 - DNA, 33 bp, Homo sapien
ggagagaatcaaacaacagacttatttgcaaac

SEQ ID NO: 956926 - DNA, 33 bp, Homo sapien
ggagagaatcaaacaatagacttatttgcaaac

SEQ ID NO: 956927 - DNA, 33 bp, Homo sapien
ggaagcttcttttctaccttgcctgagctagag

SEQ ID NO: 956928 - DNA, 33 bp, Homo sapien
ggaagcttcttttctatcttgcctgagctagag

SEQ ID NO: 956929 - DNA, 33 bp, Homo sapien
ctaggtgtgcatgaaaactccccccgacatccc

SEQ ID NO: 956930 - DNA, 33 bp, Homo sapien
ctaggtgtgcatgaaatctccccccgacatccc

SEQ ID NO: 956931 - DNA, 33 bp, Homo sapien
ccggctgacacccgaacagtctaagcttctcca

SEQ ID NO: 956932 - DNA, 33 bp, Homo sapien
ccggctgacacccgaatagtctaagcttctcca

SEQ ID NO: 956933 - DNA, 33 bp, Homo sapien
gccagcaggatcgacaagaagttcccaatagtc

SEQ ID NO: 956934 - DNA, 33 bp, Homo sapien
gccagcaggatcgacaggaagttcccaatagtc

SEQ ID NO: 956935 - DNA, 33 bp, Homo sapien
caacacggaggctacaccaggaccaatcgcatt

SEQ ID NO: 956936 - DNA, 33 bp, Homo sapien
caacacggaggctacatcaggaccaatcgcatt

SEQ ID NO: 956937 - DNA, 33 bp, Homo sapien
aataccacagtagccacgggtcaatataaaaag

SEQ ID NO: 956938 - DNA, 33 bp, Homo sapien
aataccacagtagccatgggtcaatataaaaag

SEQ ID NO: 956939 - DNA, 33 bp, Homo sapien
gacgacagaagaacacaagaaaaggtagatgat

SEQ ID NO: 956940 - DNA, 33 bp, Homo sapien
gacgacagaagaacacgagaaaaggtagatgat

SEQ ID NO: 956941 - DNA, 33 bp, Homo sapien
tttgcccagggtcctaaaactagtcagtggtag

SEQ ID NO: 956942 - DNA, 33 bp, Homo sapien
tttgcccagggtcctagaactagtcagtggtag

SEQ ID NO: 956943 - DNA, 33 bp, Homo sapien
ctttgcattgtaaccaagttggctctccttgcc

SEQ ID NO: 956944 - DNA, 33 bp, Homo sapien
ctttgcattgtaaccacgttggctctccttgcc

SEQ ID NO: 956945 - DNA, 33 bp, Homo sapien
ggatcttggaaggtagacatttatttgaaacag

SEQ ID NO: 956946 - DNA, 33 bp, Homo sapien
ggatcttggaaggtagccatttatttgaaacag

SEQ ID NO: 956947 - DNA, 33 bp, Homo sapien
cttcctcatcactcaccggtcaatggatataag

SEQ ID NO: 956948 - DNA, 33 bp, Homo sapien
cttcctcatcactcactggtcaatggatataag

SEQ ID NO: 956949 - DNA, 33 bp, Homo sapien
cagtaagattaagtaacccgctcacattactta

SEQ ID NO: 956950 - DNA, 33 bp, Homo sapien
cagtaagattaagtaatccgctcacattactta

SEQ ID NO: 956951 - DNA, 33 bp, Homo sapien
agctcagatttctgaaatggttcaaatcttgca

SEQ ID NO: 956952 - DNA, 33 bp, Homo sapien
agctcagatttctgaagtggttcaaatcttgca

SEQ ID NO: 956953 - DNA, 33 bp, Homo sapien
aaataagggataagaaagtgataatactgtctg

SEQ ID NO: 956954 - DNA, 33 bp, Homo sapien
aaataagggataagaacgtgataatactgtctg

SEQ ID NO: 956955 - DNA, 33 bp, Homo sapien
aaaagtcaggctaatacaatcgcctaggtgtcc

SEQ ID NO: 956956 - DNA, 33 bp, Homo sapien
aaaagtcaggctaatagaatcgcctaggtgtcc

SEQ ID NO: 956957 - DNA, 33 bp, Homo sapien
tcgaagggagggtgcaaacgtcttaggtaatgg

SEQ ID NO: 956958 - DNA, 33 bp, Homo sapien
tcgaagggagggtgcacacgtcttaggtaatgg

SEQ ID NO: 956959 - DNA, 33 bp, Homo sapien
agcctgtcattaaggaaccaacttctgaaaagt

SEQ ID NO: 956960 - DNA, 33 bp, Homo sapien
agcctgtcattaaggagccaacttctgaaaagt

SEQ ID NO: 956961 - DNA, 33 bp, Homo sapien
ccttttgtagctatcaaccttctcatgcgtgct

SEQ ID NO: 956962 - DNA, 33 bp, Homo sapien
ccttttgtagctatcagccttctcatgcgtgct

SEQ ID NO: 956963 - DNA, 33 bp, Homo sapien
ggctgtattcagggagcaccatttacattctac

SEQ ID NO: 956964 - DNA, 33 bp, Homo sapien
ggctgtattcagggagtaccatttacattctac

SEQ ID NO: 956965 - DNA, 33 bp, Homo sapien
caagagagtttatcaaacaccaaaacatctgga

SEQ ID NO: 956966 - DNA, 33 bp, Homo sapien
caagagagtttatcaagcaccaaaacatctgga

SEQ ID NO: 956967 - DNA, 33 bp, Homo sapien
tgtccactgtaactaactgatgaagtgcagctt

SEQ ID NO: 956968 - DNA, 33 bp, Homo sapien
tgtccactgtaactaattgatgaagtgcagctt

SEQ ID NO: 956969 - DNA, 33 bp, Homo sapien
gagaagacagaaaggcagcaaccatttgatgtg

SEQ ID NO: 956970 - DNA, 33 bp, Homo sapien
gagaagacagaaaggcggcaaccatttgatgtg

SEQ ID NO: 956971 - DNA, 33 bp, Homo sapien
agcccattctagagaagaaatccccacaagggg

SEQ ID NO: 956972 - DNA, 33 bp, Homo sapien
agcccattctagagaataaatccccacaagggg

SEQ ID NO: 956973 - DNA, 33 bp, Homo sapien
tcagatgaggtcatcacgcactgcccacggcca

SEQ ID NO: 956974 - DNA, 33 bp, Homo sapien
tcagatgaggtcatcaggcactgcccacggcca

SEQ ID NO: 956975 - DNA, 33 bp, Homo sapien
tgttagggtctggcataaattcttggaaaggca

SEQ ID NO: 956976 - DNA, 33 bp, Homo sapien
tgttagggtctggcatgaattcttggaaaggca

SEQ ID NO: 956977 - DNA, 33 bp, Homo sapien
tacttaagtttctagacgcagggccgaggagca

SEQ ID NO: 956978 - DNA, 33 bp, Homo sapien
tacttaagtttctagaggcagggccgaggagca

SEQ ID NO: 956979 - DNA, 33 bp, Homo sapien
agggagaggaggcgtcaaaaggactccacttgg

SEQ ID NO: 956980 - DNA, 33 bp, Homo sapien
agggagaggaggcgtcgaaaggactccacttgg

SEQ ID NO: 956981 - DNA, 33 bp, Homo sapien
ttctactgccagcttccagtaggcctgctatga

SEQ ID NO: 956982 - DNA, 33 bp, Homo sapien
ttctactgccagcttctagtaggcctgctatga

SEQ ID NO: 956983 - DNA, 33 bp, Homo sapien
ggctagcctggttttccagtctgtttgcggtgt

SEQ ID NO: 956984 - DNA, 33 bp, Homo sapien
ggctagcctggttttctagtctgtttgcggtgt

SEQ ID NO: 956985 - DNA, 33 bp, Homo sapien
agtaggagtttgtcaaatcaaagaagggagatg

SEQ ID NO: 956986 - DNA, 33 bp, Homo sapien
agtaggagtttgtcaagtcaaagaagggagatg

SEQ ID NO: 956987 - DNA, 33 bp, Homo sapien
aaccatctattcttaaatcctacactgttttag

SEQ ID NO: 956988 - DNA, 33 bp, Homo sapien
aaccatctattcttaagtcctacactgttttag

SEQ ID NO: 956989 - DNA, 33 bp, Homo sapien
gacacttggtttgccacgcacccgcaggctgca

SEQ ID NO: 956990 - DNA, 33 bp, Homo sapien
gacacttggtttgccatgcacccgcaggctgca

SEQ ID NO: 956991 - DNA, 33 bp, Homo sapien
ctctctgcttccttccagcttgtttaccccgga

SEQ ID NO: 956992 - DNA, 33 bp, Homo sapien
ctctctgcttccttcccgcttgtttaccccgga

SEQ ID NO: 956993 - DNA, 33 bp, Homo sapien
tagaatgagtgaaggacagctagggattgatga

SEQ ID NO: 956994 - DNA, 33 bp, Homo sapien
tagaatgagtgaaggatagctagggattgatga

SEQ ID NO: 956995 - DNA, 33 bp, Homo sapien
tctgaaactgcagcacaatgacccacaggcccg

SEQ ID NO: 956996 - DNA, 33 bp, Homo sapien
tctgaaactgcagcacgatgacccacaggcccg

SEQ ID NO: 956997 - DNA, 33 bp, Homo sapien
gaattatggagttaaacgttaggaaagataaat

SEQ ID NO: 956998 - DNA, 33 bp, Homo sapien
gaattatggagttaaatgttaggaaagataaat

SEQ ID NO: 956999 - DNA, 33 bp, Homo sapien
atttaggcaagaagtacgtgtgtctctatgttt

SEQ ID NO: 957000 - DNA, 33 bp, Homo sapien
atttaggcaagaagtatgtgtgtctctatgttt

SEQ ID NO: 957001 - DNA, 33 bp, Homo sapien
tagcttttgaaaatcccgaggtccagcaatata

SEQ ID NO: 957002 - DNA, 33 bp, Homo sapien
tagcttttgaaaatcctgaggtccagcaatata

SEQ ID NO: 957003 - DNA, 33 bp, Homo sapien
taaagtgggcctacaaaagcaccatgaggaagg

SEQ ID NO: 957004 - DNA, 33 bp, Homo sapien
taaagtgggcctacaacagcaccatgaggaagg

SEQ ID NO: 957005 - DNA, 33 bp, Homo sapien
gtctccttacccatcactatacacaggagtcgt

SEQ ID NO: 957006 - DNA, 33 bp, Homo sapien
gtctccttacccatcattatacacaggagtcgt

SEQ ID NO: 957007 - DNA, 33 bp, Homo sapien
ggactccaactaagacaccccggcctttttctc

SEQ ID NO: 957008 - DNA, 33 bp, Homo sapien
ggactccaactaagactccccggcctttttctc

SEQ ID NO: 957009 - DNA, 33 bp, Homo sapien
attacggttggatagaacaaaagtgaaaacaaa

SEQ ID NO: 957010 - DNA, 33 bp, Homo sapien
attacggttggatagaccaaaagtgaaaacaaa

SEQ ID NO: 957011 - DNA, 33 bp, Homo sapien
gtaagagggtacagtacgtgactcacggtggac

SEQ ID NO: 957012 - DNA, 33 bp, Homo sapien
gtaagagggtacagtatgtgactcacggtggac

SEQ ID NO: 957013 - DNA, 33 bp, Homo sapien
actgaattagtgactcaaatatttttcatgtcc

SEQ ID NO: 957014 - DNA, 33 bp, Homo sapien
actgaattagtgactcgaatatttttcatgtcc

SEQ ID NO: 957015 - DNA, 33 bp, Homo sapien
tcggctgctttacatacgtttcttattgtcact

SEQ ID NO: 957016 - DNA, 33 bp, Homo sapien
tcggctgctttacatatgtttcttattgtcact

SEQ ID NO: 957017 - DNA, 33 bp, Homo sapien
cacatggttattgtgaaggcttgagtgacaata

SEQ ID NO: 957018 - DNA, 33 bp, Homo sapien
cacatggttattgtgagggcttgagtgacaata

SEQ ID NO: 957019 - DNA, 33 bp, Homo sapien
attagttgtttccaaaagtcaaacccactctct

SEQ ID NO: 957020 - DNA, 33 bp, Homo sapien
attagttgtttccaaaggtcaaacccactctct

SEQ ID NO: 957021 - DNA, 33 bp, Homo sapien
cgatagctattatccaatcccacatcgtcatgg

SEQ ID NO: 957022 - DNA, 33 bp, Homo sapien
cgatagctattatccactcccacatcgtcatgg

SEQ ID NO: 957023 - DNA, 33 bp, Homo sapien
ccactgagacatagagaagacctgggccctgtg

SEQ ID NO: 957024 - DNA, 33 bp, Homo sapien
ccactgagacatagaggagacctgggccctgtg

SEQ ID NO: 957025 - DNA, 33 bp, Homo sapien
aaatgggagtgttctacgagtttaaaaataggg

SEQ ID NO: 957026 - DNA, 33 bp, Homo sapien
aaatgggagtgttctatgagtttaaaaataggg

SEQ ID NO: 957027 - DNA, 33 bp, Homo sapien
ttatgtaatagcacaggaagatgaatttgttat

SEQ ID NO: 957028 - DNA, 33 bp, Homo sapien
ttatgtaatagcacagtaagatgaatttgttat

SEQ ID NO: 957029 - DNA, 33 bp, Homo sapien
agcatgaataggactacgttcttttataccgtg

SEQ ID NO: 957030 - DNA, 33 bp, Homo sapien
agcatgaataggactatgttcttttataccgtg

SEQ ID NO: 957031 - DNA, 33 bp, Homo sapien
tgattcagttattggagaggcaaatataacaaa

SEQ ID NO: 957032 - DNA, 33 bp, Homo sapien
tgattcagttattggataggcaaatataacaaa

SEQ ID NO: 957033 - DNA, 33 bp, Homo sapien
ggtccaagtaaagtcaatacatcttaattgagc

SEQ ID NO: 957034 - DNA, 33 bp, Homo sapien
ggtccaagtaaagtcagtacatcttaattgagc

SEQ ID NO: 957035 - DNA, 33 bp, Homo sapien
tctaaaccatggcacaacaattatttgaaaagt

SEQ ID NO: 957036 - DNA, 33 bp, Homo sapien
tctaaaccatggcacagcaattatttgaaaagt

SEQ ID NO: 957037 - DNA, 33 bp, Homo sapien
tgtattactcatggcacgtacttatactaaaaa

SEQ ID NO: 957038 - DNA, 33 bp, Homo sapien
tgtattactcatggcatgtacttatactaaaaa

SEQ ID NO: 957039 - DNA, 33 bp, Homo sapien
caaaaaaaagaaaatacagcatttgtgggatgt

SEQ ID NO: 957040 - DNA, 33 bp, Homo sapien
caaaaaaaagaaaatatagcatttgtgggatgt

SEQ ID NO: 957041 - DNA, 33 bp, Homo sapien
gtggatgaatccctaaagcctaaccctccacat

SEQ ID NO: 957042 - DNA, 33 bp, Homo sapien
gtggatgaatccctaaggcctaaccctccacat

SEQ ID NO: 957043 - DNA, 33 bp, Homo sapien
gatgacatccacagtaactacctttttgagaac

SEQ ID NO: 957044 - DNA, 33 bp, Homo sapien
gatgacatccacagtacctacctttttgagaac

SEQ ID NO: 957045 - DNA, 33 bp, Homo sapien
ctaccccttcaacagcaatttactacttgatcc

SEQ ID NO: 957046 - DNA, 33 bp, Homo sapien
ctaccccttcaacagcgatttactacttgatcc

SEQ ID NO: 957047 - DNA, 33 bp, Homo sapien
tgctatgtaatgaccaaaaaaaggattgtaata

SEQ ID NO: 957048 - DNA, 33 bp, Homo sapien
tgctatgtaatgaccagaaaaaggattgtaata

SEQ ID NO: 957049 - DNA, 33 bp, Homo sapien
gagagtttggtatgcacgctatactattcaagg

SEQ ID NO: 957050 - DNA, 33 bp, Homo sapien
gagagtttggtatgcatgctatactattcaagg

SEQ ID NO: 957051 - DNA, 33 bp, Homo sapien
gagaacattttaggaactatttgcttgggcagg

SEQ ID NO: 957052 - DNA, 33 bp, Homo sapien
gagaacattttaggaagtatttgcttgggcagg

SEQ ID NO: 957053 - DNA, 33 bp, Homo sapien
catagaagagtatgcaaaaggggccacattggc

SEQ ID NO: 957054 - DNA, 33 bp, Homo sapien
catagaagagtatgcagaaggggccacattggc

SEQ ID NO: 957055 - DNA, 33 bp, Homo sapien
aatgtggctgtcagtacgttgagcctgaaaata

SEQ ID NO: 957056 - DNA, 33 bp, Homo sapien
aatgtggctgtcagtaggttgagcctgaaaata

SEQ ID NO: 957057 - DNA, 33 bp, Homo sapien
gagctagtcagtcaaacgtgagaaactcatatg

SEQ ID NO: 957058 - DNA, 33 bp, Homo sapien
gagctagtcagtcaaatgtgagaaactcatatg

SEQ ID NO: 957059 - DNA, 33 bp, Homo sapien
ttaaactttgactctacagcttgtctctggggt

SEQ ID NO: 957060 - DNA, 33 bp, Homo sapien
ttaaactttgactctatagcttgtctctggggt

SEQ ID NO: 957061 - DNA, 33 bp, Homo sapien
aaccggacattgagtacatcttcctgcagagat

SEQ ID NO: 957062 - DNA, 33 bp, Homo sapien
aaccggacattgagtatatcttcctgcagagat

SEQ ID NO: 957063 - DNA, 33 bp, Homo sapien
atatgtcttttccccaacactctgaataagaga

SEQ ID NO: 957064 - DNA, 33 bp, Homo sapien
atatgtcttttccccagcactctgaataagaga

SEQ ID NO: 957065 - DNA, 33 bp, Homo sapien
aataaccaaaatattcaaattagcagaagtaga

SEQ ID NO: 957066 - DNA, 33 bp, Homo sapien
aataaccaaaatattcgaattagcagaagtaga

SEQ ID NO: 957067 - DNA, 33 bp, Homo sapien
tcattgatttactcttaaactgaaaacttgata

SEQ ID NO: 957068 - DNA, 33 bp, Homo sapien
tcattgatttactcttgaactgaaaacttgata

SEQ ID NO: 957069 - DNA, 33 bp, Homo sapien
gtgttattacagattacgaaacaggcatgagag

SEQ ID NO: 957070 - DNA, 33 bp, Homo sapien
gtgttattacagattatgaaacaggcatgagag

SEQ ID NO: 957071 - DNA, 33 bp, Homo sapien
aggataacagtcttaaatagatacttgaaatca

SEQ ID NO: 957072 - DNA, 33 bp, Homo sapien
aggataacagtcttaagtagatacttgaaatca

SEQ ID NO: 957073 - DNA, 33 bp, Homo sapien
taaaacaagaggtagcaaaaacctaagtattaa

SEQ ID NO: 957074 - DNA, 33 bp, Homo sapien
taaaacaagaggtagcgaaaacctaagtattaa

SEQ ID NO: 957075 - DNA, 33 bp, Homo sapien
cacatttaagaaaattcaaatcatatcaagtca

SEQ ID NO: 957076 - DNA, 33 bp, Homo sapien
cacatttaagaaaattgaaatcatatcaagtca

SEQ ID NO: 957077 - DNA, 33 bp, Homo sapien
aggacacagctatgtacgattgtgcccgttctg

SEQ ID NO: 957078 - DNA, 33 bp, Homo sapien
aggacacagctatgtatgattgtgcccgttctg

SEQ ID NO: 957079 - DNA, 33 bp, Homo sapien
ctgcgtgaagaagaaaatagatgattcatgcaa

SEQ ID NO: 957080 - DNA, 33 bp, Homo sapien
ctgcgtgaagaagaaattagatgattcatgcaa

SEQ ID NO: 957081 - DNA, 33 bp, Homo sapien
acaaaaacagcatataaggtcagcttaatttca

SEQ ID NO: 957082 - DNA, 33 bp, Homo sapien
acaaaaacagcatatagggtcagcttaatttca

SEQ ID NO: 957083 - DNA, 33 bp, Homo sapien
gtgggttttctcttcaaggtgtagataacagta

SEQ ID NO: 957084 - DNA, 33 bp, Homo sapien
gtgggttttctcttcacggtgtagataacagta

SEQ ID NO: 957085 - DNA, 33 bp, Homo sapien
gatgtgttatagcacaaggaaaaaagctttgct

SEQ ID NO: 957086 - DNA, 33 bp, Homo sapien
gatgtgttatagcacagggaaaaaagctttgct

SEQ ID NO: 957087 - DNA, 33 bp, Homo sapien
gtagttgagtacaaacaaggacaggcgtttaat

SEQ ID NO: 957088 - DNA, 33 bp, Homo sapien
gtagttgagtacaaaccaggacaggcgtttaat

SEQ ID NO: 957089 - DNA, 33 bp, Homo sapien
agtggccaaaaagcacagataggaaatttcaca

SEQ ID NO: 957090 - DNA, 33 bp, Homo sapien
agtggccaaaaagcaccgataggaaatttcaca

SEQ ID NO: 957091 - DNA, 33 bp, Homo sapien
tcagccttcaacctacaaaagagaaggaaggat

SEQ ID NO: 957092 - DNA, 33 bp, Homo sapien
tcagccttcaacctacgaaagagaaggaaggat

SEQ ID NO: 957093 - DNA, 33 bp, Homo sapien
cagctcttgcaacttaaccatgttgggtcattc

SEQ ID NO: 957094 - DNA, 33 bp, Homo sapien
cagctcttgcaacttagccatgttgggtcattc

SEQ ID NO: 957095 - DNA, 33 bp, Homo sapien
cataattgttctcctacgcacaatgctgaagga

SEQ ID NO: 957096 - DNA, 33 bp, Homo sapien
cataattgttctcctatgcacaatgctgaagga

SEQ ID NO: 957097 - DNA, 33 bp, Homo sapien
ctgtcatgtagcaatacctgtccatgtagcagt

SEQ ID NO: 957098 - DNA, 33 bp, Homo sapien
ctgtcatgtagcaatatctgtccatgtagcagt

SEQ ID NO: 957099 - DNA, 33 bp, Homo sapien
caggcttccagatgaactatgagaaattggcag

SEQ ID NO: 957100 - DNA, 33 bp, Homo sapien
caggcttccagatgaattatgagaaattggcag

SEQ ID NO: 957101 - DNA, 33 bp, Homo sapien
tcacaaactggaactaaaacctatttgcatttc

SEQ ID NO: 957102 - DNA, 33 bp, Homo sapien
tcacaaactggaactagaacctatttgcatttc

SEQ ID NO: 957103 - DNA, 33 bp, Homo sapien
taaagcttgggtttgggaagatttggattagag

SEQ ID NO: 957104 - DNA, 33 bp, Homo sapien
taaagcttgggtttggtaagatttggattagag

SEQ ID NO: 957105 - DNA, 33 bp, Homo sapien
atggatagaagggacaatagcaaacaaacaaat

SEQ ID NO: 957106 - DNA, 33 bp, Homo sapien
atggatagaagggacagtagcaaacaaacaaat

SEQ ID NO: 957107 - DNA, 33 bp, Homo sapien
aacaattccattcacaggtatatatcaagagaa

SEQ ID NO: 957108 - DNA, 33 bp, Homo sapien
aacaattccattcacatgtatatatcaagagaa

SEQ ID NO: 957109 - DNA, 33 bp, Homo sapien
ctccttcctgtatgtgaaaagtggaaaaatacc

SEQ ID NO: 957110 - DNA, 33 bp, Homo sapien
ctccttcctgtatgtggaaagtggaaaaatacc

SEQ ID NO: 957111 - DNA, 33 bp, Homo sapien
tcagtgagtttccaaaatctaccagggtgatga

SEQ ID NO: 957112 - DNA, 33 bp, Homo sapien
tcagtgagtttccaaagtctaccagggtgatga

SEQ ID NO: 957113 - DNA, 33 bp, Homo sapien
tccctttccgtgagaactaatgcttattactta

SEQ ID NO: 957114 - DNA, 33 bp, Homo sapien
tccctttccgtgagaattaatgcttattactta

SEQ ID NO: 957115 - DNA, 33 bp, Homo sapien
cctctggctgtaatgaaataacttggagtcaga

SEQ ID NO: 957116 - DNA, 33 bp, Homo sapien
cctctggctgtaatgagataacttggagtcaga

SEQ ID NO: 957117 - DNA, 33 bp, Homo sapien
cttatgatggccaagtcaccctgggcacaggcc

SEQ ID NO: 957118 - DNA, 33 bp, Homo sapien
cttatgatggccaagttaccctgggcacaggcc

SEQ ID NO: 957119 - DNA, 33 bp, Homo sapien
gacaatgtgtcatggtaaaagctgttactttga

SEQ ID NO: 957120 - DNA, 33 bp, Homo sapien
gacaatgtgtcatggtgaaagctgttactttga

SEQ ID NO: 957121 - DNA, 33 bp, Homo sapien
aagaatcgctttatcccagaaggtcgaggctgc

SEQ ID NO: 957122 - DNA, 33 bp, Homo sapien
aagaatcgctttatcctagaaggtcgaggctgc

SEQ ID NO: 957123 - DNA, 33 bp, Homo sapien
aaagcgattctttcaccgcaggctcctgagtag

SEQ ID NO: 957124 - DNA, 33 bp, Homo sapien
aaagcgattctttcactgcaggctcctgagtag

SEQ ID NO: 957125 - DNA, 33 bp, Homo sapien
gatgcctggattcatgaaactacagtggttagt

SEQ ID NO: 957126 - DNA, 33 bp, Homo sapien
gatgcctggattcatggaactacagtggttagt

SEQ ID NO: 957127 - DNA, 33 bp, Homo sapien
tttattgcctttaagacctaattgtttttctag

SEQ ID NO: 957128 - DNA, 33 bp, Homo sapien
tttattgcctttaagatctaattgtttttctag

SEQ ID NO: 957129 - DNA, 33 bp, Homo sapien
agtccttcaaggagaacgtggcttttgatactc

SEQ ID NO: 957130 - DNA, 33 bp, Homo sapien
agtccttcaaggagaaggtggcttttgatactc

SEQ ID NO: 957131 - DNA, 33 bp, Homo sapien
acaactgtctgtctagcacccaatcctttagat

SEQ ID NO: 957132 - DNA, 33 bp, Homo sapien
acaactgtctgtctagtacccaatcctttagat

SEQ ID NO: 957133 - DNA, 33 bp, Homo sapien
gcttgatgaaaaagtcacaaatagctatacaat

SEQ ID NO: 957134 - DNA, 33 bp, Homo sapien
gcttgatgaaaaagtcgcaaatagctatacaat

SEQ ID NO: 957135 - DNA, 33 bp, Homo sapien
aagagggctggggaaactttactagcccttttt

SEQ ID NO: 957136 - DNA, 33 bp, Homo sapien
aagagggctggggaaattttactagcccttttt

SEQ ID NO: 957137 - DNA, 33 bp, Homo sapien
ttgtcctggcttcaaacaccgtaagtcagaaga

SEQ ID NO: 957138 - DNA, 33 bp, Homo sapien
ttgtcctggcttcaaagaccgtaagtcagaaga

SEQ ID NO: 957139 - DNA, 33 bp, Homo sapien
ggacaatactttccacagcctgccttcttgaca

SEQ ID NO: 957140 - DNA, 33 bp, Homo sapien
ggacaatactttccacggcctgccttcttgaca

SEQ ID NO: 957141 - DNA, 33 bp, Homo sapien
ttcatatattagggaaaaattcgagcattcact

SEQ ID NO: 957142 - DNA, 33 bp, Homo sapien
ttcatatattagggaagaattcgagcattcact

SEQ ID NO: 957143 - DNA, 33 bp, Homo sapien
ggttgtttccagtttaaaatggtgcaattatga

SEQ ID NO: 957144 - DNA, 33 bp, Homo sapien
ggttgtttccagtttagaatggtgcaattatga

SEQ ID NO: 957145 - DNA, 33 bp, Homo sapien
aatgtgcagctcaggaagctttcttactaacca

SEQ ID NO: 957146 - DNA, 33 bp, Homo sapien
aatgtgcagctcaggatgctttcttactaacca

SEQ ID NO: 957147 - DNA, 33 bp, Homo sapien
cacatgtaggcaagccagaatgcacagagaagc

SEQ ID NO: 957148 - DNA, 33 bp, Homo sapien
cacatgtaggcaagccggaatgcacagagaagc

SEQ ID NO: 957149 - DNA, 33 bp, Homo sapien
tgatgccaatgcaaacagatgttcccttcagag

SEQ ID NO: 957150 - DNA, 33 bp, Homo sapien
tgatgccaatgcaaacggatgttcccttcagag

SEQ ID NO: 957151 - DNA, 33 bp, Homo sapien
actgctaggtgaatgccaaattgagaaggaaat

SEQ ID NO: 957152 - DNA, 33 bp, Homo sapien
actgctaggtgaatgctaaattgagaaggaaat

SEQ ID NO: 957153 - DNA, 33 bp, Homo sapien
ggaaaaagactctcagaaaaacgataggggctc

SEQ ID NO: 957154 - DNA, 33 bp, Homo sapien
ggaaaaagactctcagcaaaacgataggggctc

SEQ ID NO: 957155 - DNA, 33 bp, Homo sapien
aacatgtgcttcacataaaggcatatagtcgtt

SEQ ID NO: 957156 - DNA, 33 bp, Homo sapien
aacatgtgcttcacatcaaggcatatagtcgtt

SEQ ID NO: 957157 - DNA, 33 bp, Homo sapien
aattttctgaaatttacgcagctgaccacaggt

SEQ ID NO: 957158 - DNA, 33 bp, Homo sapien
aattttctgaaatttatgcagctgaccacaggt

SEQ ID NO: 957159 - DNA, 33 bp, Homo sapien
tgctccttcaagaatacctgtttgtcaccctta

SEQ ID NO: 957160 - DNA, 33 bp, Homo sapien
tgctccttcaagaatatctgtttgtcaccctta

SEQ ID NO: 957161 - DNA, 33 bp, Homo sapien
gaaactgaatctgaaacttagcaagaaggtagt

SEQ ID NO: 957162 - DNA, 33 bp, Homo sapien
gaaactgaatctgaaagttagcaagaaggtagt

SEQ ID NO: 957163 - DNA, 33 bp, Homo sapien
atcagagatacaactgaaaaaattacaaacttt

SEQ ID NO: 957164 - DNA, 33 bp, Homo sapien
atcagagatacaactggaaaaattacaaacttt

SEQ ID NO: 957165 - DNA, 33 bp, Homo sapien
tgataccagatggaaacttagatcctcagaaaa

SEQ ID NO: 957166 - DNA, 33 bp, Homo sapien
tgataccagatggaaatttagatcctcagaaaa

SEQ ID NO: 957167 - DNA, 33 bp, Homo sapien
aatgaacagaagcaaacaggctatgatggggac

SEQ ID NO: 957168 - DNA, 33 bp, Homo sapien
aatgaacagaagcaaagaggctatgatggggac

SEQ ID NO: 957169 - DNA, 33 bp, Homo sapien
tcaacgtattcagcaaatccttatgttattagt

SEQ ID NO: 957170 - DNA, 33 bp, Homo sapien
tcaacgtattcagcaagtccttatgttattagt

SEQ ID NO: 957171 - DNA, 33 bp, Homo sapien
tgatctgtgaagaatacggaagcatcttggaag

SEQ ID NO: 957172 - DNA, 33 bp, Homo sapien
tgatctgtgaagaatatggaagcatcttggaag

SEQ ID NO: 957173 - DNA, 33 bp, Homo sapien
ctggctccctgatccacggaggaaggcctatta

SEQ ID NO: 957174 - DNA, 33 bp, Homo sapien
ctggctccctgatccatggaggaaggcctatta

SEQ ID NO: 957175 - DNA, 33 bp, Homo sapien
ttttggattaggctaaatatttcattaggcata

SEQ ID NO: 957176 - DNA, 33 bp, Homo sapien
ttttggattaggctaagtatttcattaggcata

SEQ ID NO: 957177 - DNA, 33 bp, Homo sapien
agccctctctagcctaaatccctcagaatctgt

SEQ ID NO: 957178 - DNA, 33 bp, Homo sapien
agccctctctagcctatatccctcagaatctgt

SEQ ID NO: 957179 - DNA, 33 bp, Homo sapien
tctgcacctagttatacgttagagacaatgtct

SEQ ID NO: 957180 - DNA, 33 bp, Homo sapien
tctgcacctagttataggttagagacaatgtct

SEQ ID NO: 957181 - DNA, 33 bp, Homo sapien
atcaaagaggaatgacgataatcttgaatatgg

SEQ ID NO: 957182 - DNA, 33 bp, Homo sapien
atcaaagaggaatgactataatcttgaatatgg

SEQ ID NO: 957183 - DNA, 33 bp, Homo sapien
ttgccaacattcagagacagaggaattcactgt

SEQ ID NO: 957184 - DNA, 33 bp, Homo sapien
ttgccaacattcagagtcagaggaattcactgt

SEQ ID NO: 957185 - DNA, 33 bp, Homo sapien
cccttccaaaataagacggtaagcaggagcctc

SEQ ID NO: 957186 - DNA, 33 bp, Homo sapien
cccttccaaaataagatggtaagcaggagcctc

SEQ ID NO: 957187 - DNA, 33 bp, Homo sapien
tcttttctctaagactcacaaattacaagaacg

SEQ ID NO: 957188 - DNA, 33 bp, Homo sapien
tcttttctctaagacttacaaattacaagaacg

SEQ ID NO: 957189 - DNA, 33 bp, Homo sapien; identical to SEQ ID NO: 957187

SEQ ID NO: 957190 - DNA, 33 bp, Homo sapien; identical to SEQ ID NO: 957188

SEQ ID NO: 957191 - DNA, 33 bp, Homo sapien
agaggttctggttgccactcttcaatcagttct

SEQ ID NO: 957192 - DNA, 33 bp, Homo sapien
agaggttctggttgcctctcttcaatcagttct

SEQ ID NO: 957193 - DNA, 33 bp, Homo sapien
atcaaaattcaggagacgaaaacagctgcttag

SEQ ID NO: 957194 - DNA, 33 bp, Homo sapien
atcaaaattcaggagaggaaaacagctgcttag

SEQ ID NO: 957195 - DNA, 33 bp, Homo sapien; identical to SEQ ID NO: 957193

SEQ ID NO: 957196 - DNA, 33 bp, Homo sapien; identical to SEQ ID NO: 957194

SEQ ID NO: 957197 - DNA, 33 bp, Homo sapien
ggcctcacagacaagacgagcaggttgccgatg

SEQ ID NO: 957198 - DNA, 33 bp, Homo sapien
ggcctcacagacaagatgagcaggttgccgatg

SEQ ID NO: 957199 - DNA, 33 bp, Homo sapien
tgttcatgcttaaaaactttcggattttgaagg

SEQ ID NO: 957200 - DNA, 33 bp, Homo sapien
tgttcatgcttaaaaagtttcggattttgaagg

SEQ ID NO: 957201 - DNA, 33 bp, Homo sapien
ttatcctaagtgatgcagaagggtgatatgatt

SEQ ID NO: 957202 - DNA, 33 bp, Homo sapien
ttatcctaagtgatgctgaagggtgatatgatt

SEQ ID NO: 957203 - DNA, 33 bp, Homo sapien
tgattttctaaaagacacatctaatcatatcac

SEQ ID NO: 957204 - DNA, 33 bp, Homo sapien
tgattttctaaaagacgcatctaatcatatcac

SEQ ID NO: 957205 - DNA, 33 bp, Homo sapien
ctgctaagtgactaaacgtgcatacactgtaga

SEQ ID NO: 957206 - DNA, 33 bp, Homo sapien
ctgctaagtgactaaaggtgcatacactgtaga

SEQ ID NO: 957207 - DNA, 33 bp, Homo sapien
aaaggccatccctgtacgttcgcagagacccca

SEQ ID NO: 957208 - DNA, 33 bp, Homo sapien
aaaggccatccctgtatgttcgcagagacccca

SEQ ID NO: 957209 - DNA, 33 bp, Homo sapien
actcttaacatatacaacctgactataacatga

SEQ ID NO: 957210 - DNA, 33 bp, Homo sapien
actcttaacatatacaccctgactataacatga

SEQ ID NO: 957211 - DNA, 33 bp, Homo sapien
atctcttgctctggtgaatctggctgaatagtt

SEQ ID NO: 957212 - DNA, 33 bp, Homo sapien
atctcttgctctggtggatctggctgaatagtt

SEQ ID NO: 957213 - DNA, 33 bp, Homo sapien
ctcagtgcaggaataactgagtcagggatacaa

SEQ ID NO: 957214 - DNA, 33 bp, Homo sapien
ctcagtgcaggaataagtgagtcagggatacaa

SEQ ID NO: 957215 - DNA, 33 bp, Homo sapien
tttgagggatagtgaccagcagacctatggaaa

SEQ ID NO: 957216 - DNA, 33 bp, Homo sapien
tttgagggatagtgactagcagacctatggaaa

SEQ ID NO: 957217 - DNA, 33 bp, Homo sapien
acagaagccacttgcaccaaaaccacttacagt

SEQ ID NO: 957218 - DNA, 33 bp, Homo sapien
acagaagccacttgcagcaaaaccacttacagt

SEQ ID NO: 957219 - DNA, 33 bp, Homo sapien
gtatgaatgacacctccgaatgcagcatgaaat

SEQ ID NO: 957220 - DNA, 33 bp, Homo sapien
gtatgaatgacacctctgaatgcagcatgaaat

SEQ ID NO: 957221 - DNA, 33 bp, Homo sapien
tttcatcttgtgtttgcacattagccacagagg

SEQ ID NO: 957222 - DNA, 33 bp, Homo sapien
tttcatcttgtgtttggacattagccacagagg

SEQ ID NO: 957223 - DNA, 33 bp, Homo sapien
agggattgatgtttaccgcaaagagcctggagt

SEQ ID NO: 957224 - DNA, 33 bp, Homo sapien
agggattgatgtttactgcaaagagcctggagt

SEQ ID NO: 957225 - DNA, 33 bp, Homo sapien
ccaacaagattgaatacgtgtgtttgtgcacgt

SEQ ID NO: 957226 - DNA, 33 bp, Homo sapien
ccaacaagattgaatatgtgtgtttgtgcacgt

SEQ ID NO: 957227 - DNA, 33 bp, Homo sapien
aagcaattactaaagcaacagtgacttgaggtt

SEQ ID NO: 957228 - DNA, 33 bp, Homo sapien
aagcaattactaaagccacagtgacttgaggtt

SEQ ID NO: 957229 - DNA, 33 bp, Homo sapien
tttcattaacatcttaagacaagtgtatcaaaa

SEQ ID NO: 957230 - DNA, 33 bp, Homo sapien
tttcattaacatcttacgacaagtgtatcaaaa

SEQ ID NO: 957231 - DNA, 33 bp, Homo sapien
ttatactgtgttttggacaagtttctttaaact

SEQ ID NO: 957232 - DNA, 33 bp, Homo sapien
ttatactgtgttttggtcaagtttctttaaact

SEQ ID NO: 957233 - DNA, 33 bp, Homo sapien
atcacggtactgaacacggaataaatgaaccct

SEQ ID NO: 957234 - DNA, 33 bp, Homo sapien
atcacggtactgaacatggaataaatgaaccct

SEQ ID NO: 957235 - DNA, 33 bp, Homo sapien
gtgaagagcctagcacagtatctaggacacagc

SEQ ID NO: 957236 - DNA, 33 bp, Homo sapien
gtgaagagcctagcacggtatctaggacacagc

SEQ ID NO: 957237 - DNA, 33 bp, Homo sapien
ctaggctcttcacttacacgcaatccccttaaa

SEQ ID NO: 957238 - DNA, 33 bp, Homo sapien
ctaggctcttcacttatacgcaatccccttaaa

SEQ ID NO: 957239 - DNA, 33 bp, Homo sapien
ttatggtggtatactaatagagagttgccttaa

SEQ ID NO: 957240 - DNA, 33 bp, Homo sapien
ttatggtggtatactagtagagagttgccttaa

SEQ ID NO: 957241 - DNA, 33 bp, Homo sapien
gagagaacagctttcaaaccatagcattcttcc

SEQ ID NO: 957242 - DNA, 33 bp, Homo sapien
gagagaacagctttcataccatagcattcttcc

SEQ ID NO: 957243 - DNA, 33 bp, Homo sapien
gaaatgtggacaattcagaacaataaagtgctg

SEQ ID NO: 957244 - DNA, 33 bp, Homo sapien
gaaatgtggacaattcggaacaataaagtgctg

SEQ ID NO: 957245 - DNA, 33 bp, Homo sapien
tgtgcgtcattcaacccattgagggtctgcata

SEQ ID NO: 957246 - DNA, 33 bp, Homo sapien
tgtgcgtcattcaacctattgagggtctgcata

SEQ ID NO: 957247 - DNA, 33 bp, Homo sapien
aacagttagattgctaggattatctgttaagat

SEQ ID NO: 957248 - DNA, 33 bp, Homo sapien
aacagttagattgctatgattatctgttaagat

SEQ ID NO: 957249 - DNA, 33 bp, Homo sapien
cccgagttaaatgtacaactgtcttcatgtaat

SEQ ID NO: 957250 - DNA, 33 bp, Homo sapien
cccgagttaaatgtactactgtcttcatgtaat

SEQ ID NO: 957251 - DNA, 33 bp, Homo sapien
aattgaagttggcttacatttatctcctcattg

SEQ ID NO: 957252 - DNA, 33 bp, Homo sapien
aattgaagttggcttatatttatctcctcattg

SEQ ID NO: 957253 - DNA, 33 bp, Homo sapien
taatgtgccaaatgtcaagagggcagaatcgag

SEQ ID NO: 957254 - DNA, 33 bp, Homo sapien
taatgtgccaaatgtcgagagggcagaatcgag

SEQ ID NO: 957255 - DNA, 33 bp, Homo sapien
acctgaaatttccaccaagttctcaagctttct

SEQ ID NO: 957256 - DNA, 33 bp, Homo sapien
acctgaaatttccaccgagttctcaagctttct

SEQ ID NO: 957257 - DNA, 33 bp, Homo sapien
tcaatccggtacatcaaaactttacattataat

SEQ ID NO: 957258 - DNA, 33 bp, Homo sapien
tcaatccggtacatcagaactttacattataat

SEQ ID NO: 957259 - DNA, 33 bp, Homo sapien
aggaggacaagaagaaacacatcagaaagcacc

SEQ ID NO: 957260 - DNA, 33 bp, Homo sapien
aggaggacaagaagaatcacatcagaaagcacc

SEQ ID NO: 957261 - DNA, 33 bp, Homo sapien
tcagaactgaggcataaagttcttcatagtaca

SEQ ID NO: 957262 - DNA, 33 bp, Homo sapien
tcagaactgaggcatagagttcttcatagtaca

SEQ ID NO: 957263 - DNA, 33 bp, Homo sapien
aataattggcactctacaaaagggagatcttcc

SEQ ID NO: 957264 - DNA, 33 bp, Homo sapien
aataattggcactctagaaaagggagatcttcc

SEQ ID NO: 957265 - DNA, 33 bp, Homo sapien
aagatccgcaccgtcaaaacccatctcattaaa

SEQ ID NO: 957266 - DNA, 33 bp, Homo sapien
aagatccgcaccgtcacaacccatctcattaaa

SEQ ID NO: 957267 - DNA, 33 bp, Homo sapien
tgcacagctaaaagtaaaaattgaagccccatg

SEQ ID NO: 957268 - DNA, 33 bp, Homo sapien
tgcacagctaaaagtataaattgaagccccatg

SEQ ID NO: 957269 - DNA, 33 bp, Homo sapien
tcatgccattactgtaaataaggcagtgtagga

SEQ ID NO: 957270 - DNA, 33 bp, Homo sapien
tcatgccattactgtagataaggcagtgtagga

SEQ ID NO: 957271 - DNA, 33 bp, Homo sapien
tttgtaacaggtgtacaagattgtgagaactgc

SEQ ID NO: 957272 - DNA, 33 bp, Homo sapien
tttgtaacaggtgtacgagattgtgagaactgc

SEQ ID NO: 957273 - DNA, 33 bp, Homo sapien
gattttctgcaaaaccagatgatgagaagagac

SEQ ID NO: 957274 - DNA, 33 bp, Homo sapien
gattttctgcaaaaccggatgatgagaagagac

SEQ ID NO: 957275 - DNA, 33 bp, Homo sapien
aatatgcactttatcgcatatcagttatacctc

SEQ ID NO: 957276 - DNA, 33 bp, Homo sapien
aatatgcactttatcgtatatcagttatacctc

SEQ ID NO: 957277 - DNA, 33 bp, Homo sapien
ttctggtagcaagcagaaagcaggactgtgtgt

SEQ ID NO: 957278 - DNA, 33 bp, Homo sapien
ttctggtagcaagcaggaagcaggactgtgtgt

SEQ ID NO: 957279 - DNA, 33 bp, Homo sapien
tatcacctctctgaataaaaggatcatagaatt

SEQ ID NO: 957280 - DNA, 33 bp, Homo sapien
tatcacctctctgaattaaaggatcatagaatt

SEQ ID NO: 957281 - DNA, 33 bp, Homo sapien
agacacattatcaataacacaaaaagtttaggt

SEQ ID NO: 957282 - DNA, 33 bp, Homo sapien
agacacattatcaatagcacaaaaagtttaggt

SEQ ID NO: 957283 - DNA, 33 bp, Homo sapien
catgagggcaatcatacaatacgttagtgatct

SEQ ID NO: 957284 - DNA, 33 bp, Homo sapien
catgagggcaatcatagaatacgttagtgatct

SEQ ID NO: 957285 - DNA, 33 bp, Homo sapien
gacttttcttattccacgtttgacctctttttg

SEQ ID NO: 957286 - DNA, 33 bp, Homo sapien
gacttttcttattccatgtttgacctctttttg

SEQ ID NO: 957287 - DNA, 33 bp, Homo sapien
ggctgtcattcctacaagccagtataataacac

SEQ ID NO: 957288 - DNA, 33 bp, Homo sapien
ggctgtcattcctacaggccagtataataacac

SEQ ID NO: 957289 - DNA, 33 bp, Homo sapien
gttaagaatgcagagaagtcccgaggccaaaaa

SEQ ID NO: 957290 - DNA, 33 bp, Homo sapien
gttaagaatgcagagaggtcccgaggccaaaaa

SEQ ID NO: 957291 - DNA, 33 bp, Homo sapien
gctgtatagaaagccaagagttcaaaatgatac

SEQ ID NO: 957292 - DNA, 33 bp, Homo sapien
gctgtatagaaagccaggagttcaaaatgatac

SEQ ID NO: 957293 - DNA, 33 bp, Homo sapien
aattggaaagtgaaccccaaaacgaacttcaac

SEQ ID NO: 957294 - DNA, 33 bp, Homo sapien
aattggaaagtgaacctcaaaacgaacttcaac

SEQ ID NO: 957295 - DNA, 33 bp, Homo sapien
tggaaaattctcagtacgtaatagaaagccaag

SEQ ID NO: 957296 - DNA, 33 bp, Homo sapien
tggaaaattctcagtatgtaatagaaagccaag

SEQ ID NO: 957297 - DNA, 33 bp, Homo sapien
gaaagagacttaccaaggccagggtcatgtaga

SEQ ID NO: 957298 - DNA, 33 bp, Homo sapien
gaaagagacttaccaatgccagggtcatgtaga

SEQ ID NO: 957299 - DNA, 33 bp, Homo sapien
gtaccgtgccttaatacggaaactcagtgtaaa

SEQ ID NO: 957300 - DNA, 33 bp, Homo sapien
gtaccgtgccttaatatggaaactcagtgtaaa

SEQ ID NO: 957301 - DNA, 33 bp, Homo sapien
accactggtactcacaacccctctggctgggtt

SEQ ID NO: 957302 - DNA, 33 bp, Homo sapien
accactggtactcacaccccctctggctgggtt

SEQ ID NO: 957303 - DNA, 33 bp, Homo sapien
gtagacccacggaggcacccaggttttcaggat

SEQ ID NO: 957304 - DNA, 33 bp, Homo sapien
gtagacccacggaggcccccaggttttcaggat

SEQ ID NO: 957305 - DNA, 33 bp, Homo sapien
atctagctgaaagttacagagtgggtctgtcac

SEQ ID NO: 957306 - DNA, 33 bp, Homo sapien
atctagctgaaagttatagagtgggtctgtcac

SEQ ID NO: 957307 - DNA, 33 bp, Homo sapien
cctgatgcaaaagacaaggcaaagagactaaca

SEQ ID NO: 957308 - DNA, 33 bp, Homo sapien
cctgatgcaaaagacagggcaaagagactaaca

SEQ ID NO: 957309 - DNA, 33 bp, Homo sapien
ggcaaaacccagtgcaaaagcaaacctccatcc

SEQ ID NO: 957310 - DNA, 33 bp, Homo sapien
ggcaaaacccagtgcagaagcaaacctccatcc

SEQ ID NO: 957311 - DNA, 33 bp, Homo sapien
cacacttaatagatcaacaatttaggtaagtga

SEQ ID NO: 957312 - DNA, 33 bp, Homo sapien
cacacttaatagatcatcaatttaggtaagtga

SEQ ID NO: 957313 - DNA, 33 bp, Homo sapien
actaccctagatgtaaatgcaatggatgattgc

SEQ ID NO: 957314 - DNA, 33 bp, Homo sapien
actaccctagatgtaagtgcaatggatgattgc

SEQ ID NO: 957315 - DNA, 33 bp, Homo sapien
tagtgttttaactgaaagctgagacccattagt

SEQ ID NO: 957316 - DNA, 33 bp, Homo sapien
tagtgttttaactgaaggctgagacccattagt

SEQ ID NO: 957317 - DNA, 33 bp, Homo sapien
cagtgaaatgtgagaactcatgaaaaaagaaaa

SEQ ID NO: 957318 - DNA, 33 bp, Homo sapien
cagtgaaatgtgagaagtcatgaaaaaagaaaa

SEQ ID NO: 957319 - DNA, 33 bp, Homo sapien
actgctattcattgtaaccgtctcatctcttgt

SEQ ID NO: 957320 - DNA, 33 bp, Homo sapien
actgctattcattgtacccgtctcatctcttgt

SEQ ID NO: 957321 - DNA, 33 bp, Homo sapien
atgaggactgacaaaaacacagaacaataaact

SEQ ID NO: 957322 - DNA, 33 bp, Homo sapien
atgaggactgacaaaagcacagaacaataaact

SEQ ID NO: 957323 - DNA, 33 bp, Homo sapien
aactcccccaaggtcacacagtggttcagtcag

SEQ ID NO: 957324 - DNA, 33 bp, Homo sapien
aactcccccaaggtcagacagtggttcagtcag

SEQ ID NO: 957325 - DNA, 33 bp, Homo sapien
tttttttaacaggataacttgagcaggctaggc

SEQ ID NO: 957326 - DNA, 33 bp, Homo sapien
tttttttaacaggatatcttgagcaggctaggc

SEQ ID NO: 957327 - DNA, 33 bp, Homo sapien
tcagagaaatttgggcagattaagtagtcactt

SEQ ID NO: 957328 - DNA, 33 bp, Homo sapien
tcagagaaatttgggcggattaagtagtcactt

SEQ ID NO: 957329 - DNA, 33 bp, Homo sapien
ctcctccacttctaaactgagtgtgccaagcta

SEQ ID NO: 957330 - DNA, 33 bp, Homo sapien
ctcctccacttctaaattgagtgtgccaagcta

SEQ ID NO: 957331 - DNA, 33 bp, Homo sapien
ataataaatagcagagaccctaatgtatctcag

SEQ ID NO: 957332 - DNA, 33 bp, Homo sapien
ataataaatagcagagcccctaatgtatctcag

SEQ ID NO: 957333 - DNA, 33 bp, Homo sapien
taggtcactgcctatcaaatggaaaattttctc

SEQ ID NO: 957334 - DNA, 33 bp, Homo sapien
taggtcactgcctatcgaatggaaaattttctc

SEQ ID NO: 957335 - DNA, 33 bp, Homo sapien
atctaaacaagaggtcaaaagccgaaatgccta

SEQ ID NO: 957336 - DNA, 33 bp, Homo sapien
atctaaacaagaggtcgaaagccgaaatgccta

SEQ ID NO: 957337 - DNA, 33 bp, Homo sapien
ctctccatatggcataagttgcaataatgatct

SEQ ID NO: 957338 - DNA, 33 bp, Homo sapien
ctctccatatggcataggttgcaataatgatct

SEQ ID NO: 957339 - DNA, 33 bp, Homo sapien
actctccatacagataaggttctttcctcaaca

SEQ ID NO: 957340 - DNA, 33 bp, Homo sapien
actctccatacagatacggttctttcctcaaca

SEQ ID NO: 957341 - DNA, 33 bp, Homo sapien
tcccaagagcaggggaaaaagagcctcagcaga

SEQ ID NO: 957342 - DNA, 33 bp, Homo sapien
tcccaagagcaggggacaaagagcctcagcaga

SEQ ID NO: 957343 - DNA, 33 bp, Homo sapien
tattctatgaaggtaaatgagcttgccttcctt

SEQ ID NO: 957344 - DNA, 33 bp, Homo sapien
tattctatgaaggtaactgagcttgccttcctt

SEQ ID NO: 957345 - DNA, 33 bp, Homo sapien
gacctcagttgcctcactgaagcagaatgctgg

SEQ ID NO: 957346 - DNA, 33 bp, Homo sapien
gacctcagttgcctcattgaagcagaatgctgg

SEQ ID NO: 957347 - DNA, 33 bp, Homo sapien
gtttaggattggctcacgtgaataatttcagca

SEQ ID NO: 957348 - DNA, 33 bp, Homo sapien
gtttaggattggctcatgtgaataatttcagca

SEQ ID NO: 957349 - DNA, 33 bp, Homo sapien
gggacaaatcctgttacctccctgaatctcagt

SEQ ID NO: 957350 - DNA, 33 bp, Homo sapien
gggacaaatcctgttatctccctgaatctcagt

SEQ ID NO: 957351 - DNA, 33 bp, Homo sapien
gaagttactctgctcaacctcggagacctcatc

SEQ ID NO: 957352 - DNA, 33 bp, Homo sapien
gaagttactctgctcatcctcggagacctcatc

SEQ ID NO: 957353 - DNA, 33 bp, Homo sapien
attattgctagtgctccgacttccccctgagca

SEQ ID NO: 957354 - DNA, 33 bp, Homo sapien
attattgctagtgctctgacttccccctgagca

SEQ ID NO: 957355 - DNA, 33 bp, Homo sapien
gaagcttgttcaagacaatggttttgttggttt

SEQ ID NO: 957356 - DNA, 33 bp, Homo sapien
gaagcttgttcaagacgatggttttgttggttt

SEQ ID NO: 957357 - DNA, 33 bp, Homo sapien
tgttggggtacagtggaaaatctgagctctggt

SEQ ID NO: 957358 - DNA, 33 bp, Homo sapien
tgttggggtacagtgggaaatctgagctctggt

SEQ ID NO: 957359 - DNA, 33 bp, Homo sapien
ctaaagggagaactgacgaacttgcatcaggct

SEQ ID NO: 957360 - DNA, 33 bp, Homo sapien
ctaaagggagaactgaggaacttgcatcaggct

SEQ ID NO: 957361 - DNA, 33 bp, Homo sapien
taactgcagtcaccaacatagctcaaggagaaa

SEQ ID NO: 957362 - DNA, 33 bp, Homo sapien
taactgcagtcaccaatatagctcaaggagaaa

SEQ ID NO: 957363 - DNA, 33 bp, Homo sapien
ctccctctaaaatcacagtctcttcttagaaag

SEQ ID NO: 957364 - DNA, 33 bp, Homo sapien
ctccctctaaaatcaccgtctcttcttagaaag

SEQ ID NO: 957365 - DNA, 33 bp, Homo sapien
ggaacagggacaaggcagaaaatctgagaagaa

SEQ ID NO: 957366 - DNA, 33 bp, Homo sapien
ggaacagggacaaggcggaaaatctgagaagaa

SEQ ID NO: 957367 - DNA, 33 bp, Homo sapien
caggcagcagctaagaccggcacattgcagtcc

SEQ ID NO: 957368 - DNA, 33 bp, Homo sapien
caggcagcagctaagatcggcacattgcagtcc

SEQ ID NO: 957369 - DNA, 33 bp, Homo sapien
gcttcaatcctgggaaaaacttcaaactggtca

SEQ ID NO: 957370 - DNA, 33 bp, Homo sapien
gcttcaatcctgggaagaacttcaaactggtca

SEQ ID NO: 957371 - DNA, 33 bp, Homo sapien
gcacagcagtactaaccaaaggaaacattcatg

SEQ ID NO: 957372 - DNA, 33 bp, Homo sapien
gcacagcagtactaacgaaaggaaacattcatg

SEQ ID NO: 957373 - DNA, 33 bp, Homo sapien
cgtgtgctatagcagacggaaggcagccaggat

SEQ ID NO: 957374 - DNA, 33 bp, Homo sapien
cgtgtgctatagcagatggaaggcagccaggat

SEQ ID NO: 957375 - DNA, 33 bp, Homo sapien
gagactaagaattgctaaagtttggctatttaa

SEQ ID NO: 957376 - DNA, 33 bp, Homo sapien
gagactaagaattgcttaagtttggctatttaa

SEQ ID NO: 957377 - DNA, 33 bp, Homo sapien
actgatataatttaaaactatgagtgacatgag

SEQ ID NO: 957378 - DNA, 33 bp, Homo sapien
actgatataatttaaacctatgagtgacatgag

SEQ ID NO: 957379 - DNA, 33 bp, Homo sapien
aagctgctcctctgcacgtaaacccagtcttgc

SEQ ID NO: 957380 - DNA, 33 bp, Homo sapien
aagctgctcctctgcatgtaaacccagtcttgc

SEQ ID NO: 957381 - DNA, 33 bp, Homo sapien
ggtgccatagaaactacgattgtcttccccaag

SEQ ID NO: 957382 - DNA, 33 bp, Homo sapien
ggtgccatagaaactaggattgtcttccccaag

SEQ ID NO: 957383 - DNA, 33 bp, Homo sapien
ctgatcttgctgcccccactgtttgcttgagaa

SEQ ID NO: 957384 - DNA, 33 bp, Homo sapien
ctgatcttgctgcccctactgtttgcttgagaa

SEQ ID NO: 957385 - DNA, 33 bp, Homo sapien
aacctgctgggatagcagaaacccccaaacttg

SEQ ID NO: 957386 - DNA, 33 bp, Homo sapien
aacctgctgggatagcggaaacccccaaacttg

SEQ ID NO: 957387 - DNA, 33 bp, Homo sapien
aggtttcatatcctcacaaggctttgccctcca

SEQ ID NO: 957388 - DNA, 33 bp, Homo sapien
aggtttcatatcctcagaaggctttgccctcca

SEQ ID NO: 957389 - DNA, 33 bp, Homo sapien
tgagctttggtgcccaagaatttattaggcctt

SEQ ID NO: 957390 - DNA, 33 bp, Homo sapien
tgagctttggtgcccaggaatttattaggcctt

SEQ ID NO: 957391 - DNA, 33 bp, Homo sapien
gtgtctacacaaatcacgtgagttctaggatct

SEQ ID NO: 957392 - DNA, 33 bp, Homo sapien
gtgtctacacaaatcatgtgagttctaggatct

SEQ ID NO: 957393 - DNA, 33 bp, Homo sapien
tctcagaataagtcacagagtttcgtcttagtt

SEQ ID NO: 957394 - DNA, 33 bp, Homo sapien
tctcagaataagtcacggagtttcgtcttagtt

SEQ ID NO: 957395 - DNA, 33 bp, Homo sapien
ggtcacttactgcagaagtaggtcacttgtccc

SEQ ID NO: 957396 - DNA, 33 bp, Homo sapien
ggtcacttactgcagaggtaggtcacttgtccc

SEQ ID NO: 957397 - DNA, 33 bp, Homo sapien
tataactattgttacacagagacactcaaaatt

SEQ ID NO: 957398 - DNA, 33 bp, Homo sapien
tataactattgttacagagagacactcaaaatt

SEQ ID NO: 957399 - DNA, 33 bp, Homo sapien
caggactcttcaaaaaatagttgtttcagttgc

SEQ ID NO: 957400 - DNA, 33 bp, Homo sapien
caggactcttcaaaaagtagttgtttcagttgc

SEQ ID NO: 957401 - DNA, 33 bp, Homo sapien
tgctcattcatggacaaacgtgggactgcacac

SEQ ID NO: 957402 - DNA, 33 bp, Homo sapien
tgctcattcatggacacacgtgggactgcacac

SEQ ID NO: 957403 - DNA, 33 bp, Homo sapien
atcatttgaatacagcacacgttgagcagtggg

SEQ ID NO: 957404 - DNA, 33 bp, Homo sapien
atcatttgaatacagcgcacgttgagcagtggg

SEQ ID NO: 957405 - DNA, 33 bp, Homo sapien
gaattcttagtccttcactcttgtttcttcctc

SEQ ID NO: 957406 - DNA, 33 bp, Homo sapien
gaattcttagtccttcgctcttgtttcttcctc

SEQ ID NO: 957407 - DNA, 33 bp, Homo sapien
gcagctcgtgacccaacgtgacctttctgggag

SEQ ID NO: 957408 - DNA, 33 bp, Homo sapien
gcagctcgtgacccaatgtgacctttctgggag

SEQ ID NO: 957409 - DNA, 33 bp, Homo sapien
tcccacgggagcttccaacagagcaggaaatga

SEQ ID NO: 957410 - DNA, 33 bp, Homo sapien
tcccacgggagcttccgacagagcaggaaatga

SEQ ID NO: 957411 - DNA, 33 bp, Homo sapien
tcattatgattataacggctatggttggtgatt

SEQ ID NO: 957412 - DNA, 33 bp, Homo sapien
tcattatgattataactgctatggttggtgatt

SEQ ID NO: 957413 - DNA, 33 bp, Homo sapien
gattacaggcacctgcaattacgcctggctaat

SEQ ID NO: 957414 - DNA, 33 bp, Homo sapien
gattacaggcacctgccattacgcctggctaat

SEQ ID NO: 957415 - DNA, 33 bp, Homo sapien
agtcctggaagaaaccgattgtgttcatgttgg

SEQ ID NO: 957416 - DNA, 33 bp, Homo sapien
agtcctggaagaaacctattgtgttcatgttgg

SEQ ID NO: 957417 - DNA, 33 bp, Homo sapien
ccggatatcaccattcaaacctccttggctgat

SEQ ID NO: 957418 - DNA, 33 bp, Homo sapien
ccggatatcaccattcgaacctccttggctgat

SEQ ID NO: 957419 - DNA, 33 bp, Homo sapien
tcacttctgttatccacgtctcccatccatctt

SEQ ID NO: 957420 - DNA, 33 bp, Homo sapien
tcacttctgttatccatgtctcccatccatctt

SEQ ID NO: 957421 - DNA, 33 bp, Homo sapien
actgcgctggaaccccactgattttggcaacat

SEQ ID NO: 957422 - DNA, 33 bp, Homo sapien
actgcgctggaaccccgctgattttggcaacat

SEQ ID NO: 957423 - DNA, 33 bp, Homo sapien
cacaggagtggagcgactacaaactgcgctgga

SEQ ID NO: 957424 - DNA, 33 bp, Homo sapien
cacaggagtggagcgattacaaactgcgctgga

SEQ ID NO: 957425 - DNA, 33 bp, Homo sapien
ccataaactgtgatgcactaaaaatgagagatt

SEQ ID NO: 957426 - DNA, 33 bp, Homo sapien
ccataaactgtgatgccctaaaaatgagagatt

SEQ ID NO: 957427 - DNA, 33 bp, Homo sapien
agggagggaagcctccaacctaagcgggatctg

SEQ ID NO: 957428 - DNA, 33 bp, Homo sapien
agggagggaagcctccgacctaagcgggatctg

SEQ ID NO: 957429 - DNA, 33 bp, Homo sapien
tgagaataggaatccaagcatgctaacattgca

SEQ ID NO: 957430 - DNA, 33 bp, Homo sapien
tgagaataggaatccaggcatgctaacattgca

SEQ ID NO: 957431 - DNA, 33 bp, Homo sapien
aggaagatgtcaaaaaaaaaagagctgcacact

SEQ ID NO: 957432 - DNA, 33 bp, Homo sapien
aggaagatgtcaaaaacaaaagagctgcacact

SEQ ID NO: 957433 - DNA, 33 bp, Homo sapien
tatgcaatctcttttacataggcttctctgtgt

SEQ ID NO: 957434 - DNA, 33 bp, Homo sapien
tatgcaatctcttttatataggcttctctgtgt

SEQ ID NO: 957435 - DNA, 33 bp, Homo sapien
gacttggatgacaccgaatgtttcagaacactt

SEQ ID NO: 957436 - DNA, 33 bp, Homo sapien
gacttggatgacaccggatgtttcagaacactt

SEQ ID NO: 957437 - DNA, 33 bp, Homo sapien
ccagcaggctactctagctctcttgaactttct

SEQ ID NO: 957438 - DNA, 33 bp, Homo sapien
ccagcaggctactctatctctcttgaactttct

SEQ ID NO: 957439 - DNA, 33 bp, Homo sapien
actacccggcttatgaaaggagagatcacactt

SEQ ID NO: 957440 - DNA, 33 bp, Homo sapien
actacccggcttatgagaggagagatcacactt

SEQ ID NO: 957441 - DNA, 33 bp, Homo sapien
gccttcctctgagaaacagacgcaggctcccct

SEQ ID NO: 957442 - DNA, 33 bp, Homo sapien
gccttcctctgagaaagagacgcaggctcccct

SEQ ID NO: 957443 - DNA, 33 bp, Homo sapien
cccactactgaggacacgtatgtgaatatagcc

SEQ ID NO: 957444 - DNA, 33 bp, Homo sapien
cccactactgaggacatgtatgtgaatatagcc

SEQ ID NO: 957445 - DNA, 33 bp, Homo sapien
cgtgaagactgatgaacgatggacggctgcact

SEQ ID NO: 957446 - DNA, 33 bp, Homo sapien
cgtgaagactgatgaatgatggacggctgcact

SEQ ID NO: 957447 - DNA, 33 bp, Homo sapien
gatgaacacaacaataccatgaaaactttaaca

SEQ ID NO: 957448 - DNA, 33 bp, Homo sapien
gatgaacacaacaatagcatgaaaactttaaca

SEQ ID NO: 957449 - DNA, 33 bp, Homo sapien
atccttgctatttaaaaaagtcctgtgttgtgt

SEQ ID NO: 957450 - DNA, 33 bp, Homo sapien
atccttgctatttaaacaagtcctgtgttgtgt

SEQ ID NO: 957451 - DNA, 33 bp, Homo sapien
ttgtgtaaagtaaaaaactgaatcgccctttgc

SEQ ID NO: 957452 - DNA, 33 bp, Homo sapien
ttgtgtaaagtaaaaagctgaatcgccctttgc

SEQ ID NO: 957453 - DNA, 33 bp, Homo sapien
tgccctttacaagtaacgccaaaggatgccatc

SEQ ID NO: 957454 - DNA, 33 bp, Homo sapien
tgccctttacaagtaatgccaaaggatgccatc

SEQ ID NO: 957455 - DNA, 33 bp, Homo sapien
tgaccttgtgtgtcaacgaggatgtaaattttc

SEQ ID NO: 957456 - DNA, 33 bp, Homo sapien
tgaccttgtgtgtcaatgaggatgtaaattttc

SEQ ID NO: 957457 - DNA, 33 bp, Homo sapien
aagcatgtctcttacccgcttcacagactttat

SEQ ID NO: 957458 - DNA, 33 bp, Homo sapien
aagcatgtctcttacctgcttcacagactttat

SEQ ID NO: 957459 - DNA, 33 bp, Homo sapien
tgagagcttacctctacgggggtcacctcgtgt

SEQ ID NO: 957460 - DNA, 33 bp, Homo sapien
tgagagcttacctctatgggggtcacctcgtgt

SEQ ID NO: 957461 - DNA, 33 bp, Homo sapien
ggccccactccactccacctgcatacacgaggt

SEQ ID NO: 957462 - DNA, 33 bp, Homo sapien
ggccccactccactccgcctgcatacacgaggt

SEQ ID NO: 957463 - DNA, 33 bp, Homo sapien
catttgtcaagcagaacatgagtttccaatctc

SEQ ID NO: 957464 - DNA, 33 bp, Homo sapien
catttgtcaagcagaagatgagtttccaatctc

SEQ ID NO: 957465 - DNA, 33 bp, Homo sapien
tctgccgaactttgcacaacagactcgtggtta

SEQ ID NO: 957466 - DNA, 33 bp, Homo sapien
tctgccgaactttgcataacagactcgtggtta

SEQ ID NO: 957467 - DNA, 33 bp, Homo sapien
tcaccaggtactggctcaattgcatggacagta

SEQ ID NO: 957468 - DNA, 33 bp, Homo sapien
tcaccaggtactggcttaattgcatggacagta

SEQ ID NO: 957469 - DNA, 33 bp, Homo sapien
gatgtctcagctgagacgttttctacaagttag

SEQ ID NO: 957470 - DNA, 33 bp, Homo sapien
gatgtctcagctgagatgttttctacaagttag

SEQ ID NO: 957471 - DNA, 33 bp, Homo sapien
aagtggagaatttgaaatccatctagcaaagtc

SEQ ID NO: 957472 - DNA, 33 bp, Homo sapien
aagtggagaatttgaagtccatctagcaaagtc

SEQ ID NO: 957473 - DNA, 33 bp, Homo sapien
agaccctatgggagtacgccctctttggttggt

SEQ ID NO: 957474 - DNA, 33 bp, Homo sapien
agaccctatgggagtatgccctctttggttggt

SEQ ID NO: 957475 - DNA, 33 bp, Homo sapien
cctgagcaatcgctgacaccatgtttggatgga

SEQ ID NO: 957476 - DNA, 33 bp, Homo sapien
cctgagcaatcgctgataccatgtttggatgga

SEQ ID NO: 957477 - DNA, 33 bp, Homo sapien
gggctgatgtgacggtaaaaccaaagacggcgt

SEQ ID NO: 957478 - DNA, 33 bp, Homo sapien
gggctgatgtgacggttaaaccaaagacggcgt

SEQ ID NO: 957479 - DNA, 33 bp, Homo sapien
catccttatgtccataggtacccactgtttagc

SEQ ID NO: 957480 - DNA, 33 bp, Homo sapien
catccttatgtccatatgtacccactgtttagc

SEQ ID NO: 957481 - DNA, 33 bp, Homo sapien
gcaatttccatcaaaaatagcaggtagcggagt

SEQ ID NO: 957482 - DNA, 33 bp, Homo sapien
gcaatttccatcaaaattagcaggtagcggagt

SEQ ID NO: 957483 - DNA, 33 bp, Homo sapien
tcttcatggtgggagcccagaatggtatttcat

SEQ ID NO: 957484 - DNA, 33 bp, Homo sapien
tcttcatggtgggagctcagaatggtatttcat

SEQ ID NO: 957485 - DNA, 33 bp, Homo sapien
tggaggggactgttgaagagaagaaagggtcac

SEQ ID NO: 957486 - DNA, 33 bp, Homo sapien
tggaggggactgttgaggagaagaaagggtcac

SEQ ID NO: 957487 - DNA, 33 bp, Homo sapien
gatgaggcacttgaggaccagagacattagata

SEQ ID NO: 957488 - DNA, 33 bp, Homo sapien
gatgaggcacttgaggcccagagacattagata

SEQ ID NO: 957489 - DNA, 33 bp, Homo sapien
gtaaatgcaaggtaaaattccagcaatgggttg

SEQ ID NO: 957490 - DNA, 33 bp, Homo sapien
gtaaatgcaaggtaaagttccagcaatgggttg

SEQ ID NO: 957491 - DNA, 33 bp, Homo sapien
gcactgcagggtcctactagagctttcctccac

SEQ ID NO: 957492 - DNA, 33 bp, Homo sapien
gcactgcagggtcctattagagctttcctccac

SEQ ID NO: 957493 - DNA, 33 bp, Homo sapien
gtttctcctcaacctcactacacttattgctgt

SEQ ID NO: 957494 - DNA, 33 bp, Homo sapien
gtttctcctcaacctccctacacttattgctgt

SEQ ID NO: 957495 - DNA, 33 bp, Homo sapien
ggggttcagtcactcacagattccacctgggtg

SEQ ID NO: 957496 - DNA, 33 bp, Homo sapien
ggggttcagtcactcagagattccacctgggtg

SEQ ID NO: 957497 - DNA, 33 bp, Homo sapien
atggagaagtgtgaagacaccgcctttcctaac

SEQ ID NO: 957498 - DNA, 33 bp, Homo sapien
atggagaagtgtgaagtcaccgcctttcctaac

SEQ ID NO: 957499 - DNA, 33 bp, Homo sapien
tgttatccacaatgaaacgtgaggctgagacat

SEQ ID NO: 957500 - DNA, 33 bp, Homo sapien
tgttatccacaatgaagcgtgaggctgagacat

SEQ ID NO: 957501 - DNA, 33 bp, Homo sapien
gcacccaaagataaatcaatgatgttacgaagc

SEQ ID NO: 957502 - DNA, 33 bp, Homo sapien
gcacccaaagataaatgaatgatgttacgaagc

SEQ ID NO: 957503 - DNA, 33 bp, Homo sapien
gcagcctcatacttacaggcaacagtgtccaga

SEQ ID NO: 957504 - DNA, 33 bp, Homo sapien
gcagcctcatacttacgggcaacagtgtccaga

SEQ ID NO: 957505 - DNA, 33 bp, Homo sapien
gtcctgaaccaatcaacgtctatgatctgctta

SEQ ID NO: 957506 - DNA, 33 bp, Homo sapien
gtcctgaaccaatcaatgtctatgatctgctta

SEQ ID NO: 957507 - DNA, 33 bp, Homo sapien
atgtttctggactttacggaggtccggagaaaa

SEQ ID NO: 957508 - DNA, 33 bp, Homo sapien
atgtttctggactttatggaggtccggagaaaa

SEQ ID NO: 957509 - DNA, 33 bp, Homo sapien
tggagctaaaggtcacagtaaagcaactctgga

SEQ ID NO: 957510 - DNA, 33 bp, Homo sapien
tggagctaaaggtcactgtaaagcaactctgga

SEQ ID NO: 957511 - DNA, 33 bp, Homo sapien
gttttgttttttaatacggagctcatcccgtcg

SEQ ID NO: 957512 - DNA, 33 bp, Homo sapien
gttttgttttttaatatggagctcatcccgtcg

SEQ ID NO: 957513 - DNA, 33 bp, Homo sapien
aatctggttggaaaaaaactgacaacacacaaa

SEQ ID NO: 957514 - DNA, 33 bp, Homo sapien
aatctggttggaaaaacactgacaacacacaaa

SEQ ID NO: 957515 - DNA, 33 bp, Homo sapien
gcttcctggtgtaccacgctctttgtgcacatc

SEQ ID NO: 957516 - DNA, 33 bp, Homo sapien
gcttcctggtgtaccatgctctttgtgcacatc

SEQ ID NO: 957517 - DNA, 33 bp, Homo sapien
ctgacctgatgaataaagatcacacagagaacc

SEQ ID NO: 957518 - DNA, 33 bp, Homo sapien
ctgacctgatgaataaggatcacacagagaacc

SEQ ID NO: 957519 - DNA, 33 bp, Homo sapien
tatttaatgctgaagtaaagtaggtgagacccg

SEQ ID NO: 957520 - DNA, 33 bp, Homo sapien
tatttaatgctgaagtgaagtaggtgagacccg

SEQ ID NO: 957521 - DNA, 33 bp, Homo sapien
ctctcttcctgtcatcccttaggtcacaatatc

SEQ ID NO: 957522 - DNA, 33 bp, Homo sapien
ctctcttcctgtcatctcttaggtcacaatatc

SEQ ID NO: 957523 - DNA, 33 bp, Homo sapien
atttcaaataaaccaacgaaggatttggtatta

SEQ ID NO: 957524 - DNA, 33 bp, Homo sapien
atttcaaataaaccaatgaaggatttggtatta

SEQ ID NO: 957525 - DNA, 33 bp, Homo sapien
tgcccttggaactgaaacgctggggaagagagc

SEQ ID NO: 957526 - DNA, 33 bp, Homo sapien
tgcccttggaactgaagcgctggggaagagagc

SEQ ID NO: 957527 - DNA, 33 bp, Homo sapien
agatggtcctgaatacacagacaggtggccaac

SEQ ID NO: 957528 - DNA, 33 bp, Homo sapien
agatggtcctgaatacgcagacaggtggccaac

SEQ ID NO: 957529 - DNA, 33 bp, Homo sapien
gttttaaaactgaaagcctgccgggtacagtag

SEQ ID NO: 957530 - DNA, 33 bp, Homo sapien
gttttaaaactgaaagtctgccgggtacagtag

SEQ ID NO: 957531 - DNA, 33 bp, Homo sapien
tgatactgataaagcaacatcaaagaaaacaga

SEQ ID NO: 957532 - DNA, 33 bp, Homo sapien
tgatactgataaagcagcatcaaagaaaacaga

SEQ ID NO: 957533 - DNA, 33 bp, Homo sapien
gccacctccgcaggtaactcgttgggcctgaac

SEQ ID NO: 957534 - DNA, 33 bp, Homo sapien
gccacctccgcaggtagctcgttgggcctgaac

SEQ ID NO: 957535 - DNA, 33 bp, Homo sapien
agatgtagacaggcccccgataacatcgtccac

SEQ ID NO: 957536 - DNA, 33 bp, Homo sapien
agatgtagacaggcccgcgataacatcgtccac

SEQ ID NO: 957537 - DNA, 33 bp, Homo sapien
cacaacagaggaagaccctgtctcggaaaaaga

SEQ ID NO: 957538 - DNA, 33 bp, Homo sapien
cacaacagaggaagacgctgtctcggaaaaaga

SEQ ID NO: 957539 - DNA, 33 bp, Homo sapien
ggagaaaactaagaaaatggggcatgagaaata

SEQ ID NO: 957540 - DNA, 33 bp, Homo sapien
ggagaaaactaagaaagtggggcatgagaaata

SEQ ID NO: 957541 - DNA, 33 bp, Homo sapien
tttcagatagttggggaagctttagaattttat

SEQ ID NO: 957542 - DNA, 33 bp, Homo sapien
tttcagatagttgggggagctttagaattttat

SEQ ID NO: 957543 - DNA, 33 bp, Homo sapien
acagaatggaccgtaaatgtttcttattagact

SEQ ID NO: 957544 - DNA, 33 bp, Homo sapien
acagaatggaccgtaagtgtttcttattagact

SEQ ID NO: 957545 - DNA, 33 bp, Homo sapien
ttaatcctcattattcccctatgaagtaaggat

SEQ ID NO: 957546 - DNA, 33 bp, Homo sapien
ttaatcctcattattctcctatgaagtaaggat

SEQ ID NO: 957547 - DNA, 33 bp, Homo sapien
tgtcactcattatgaccatattttcctttagtt

SEQ ID NO: 957548 - DNA, 33 bp, Homo sapien
tgtcactcattatgacgatattttcctttagtt

SEQ ID NO: 957549 - DNA, 33 bp, Homo sapien
gaggtcttggcagagacacaaggaagcaaagtc

SEQ ID NO: 957550 - DNA, 33 bp, Homo sapien
gaggtcttggcagagatacaaggaagcaaagtc

SEQ ID NO: 957551 - DNA, 33 bp, Homo sapien
gccctctattcttctccagtttggacggctatt

SEQ ID NO: 957552 - DNA, 33 bp, Homo sapien
gccctctattcttctctagtttggacggctatt

SEQ ID NO: 957553 - DNA, 33 bp, Homo sapien
taggaaagggtgcaaacgggactttgaggaagg

SEQ ID NO: 957554 - DNA, 33 bp, Homo sapien
taggaaagggtgcaaatgggactttgaggaagg

SEQ ID NO: 957555 - DNA, 33 bp, Homo sapien
atcaaaaggtataaacaggaatagggtgaaagt

SEQ ID NO: 957556 - DNA, 33 bp, Homo sapien
atcaaaaggtataaacgggaatagggtgaaagt

SEQ ID NO: 957557 - DNA, 33 bp, Homo sapien
ctaagcaatcaatttaagacagaaaaagaggta

SEQ ID NO: 957558 - DNA, 33 bp, Homo sapien
ctaagcaatcaatttaggacagaaaaagaggta

SEQ ID NO: 957559 - DNA, 33 bp, Homo sapien
atttaaaccccagaacactagcagctaagggag

SEQ ID NO: 957560 - DNA, 33 bp, Homo sapien
atttaaaccccagaacgctagcagctaagggag

SEQ ID NO: 957561 - DNA, 33 bp, Homo sapien
gggtcaagctgtaaacgccaagtactagtgttc

SEQ ID NO: 957562 - DNA, 33 bp, Homo sapien
gggtcaagctgtaaactccaagtactagtgttc

SEQ ID NO: 957563 - DNA, 33 bp, Homo sapien
agacgacattggcaaaatgactcagacccacag

SEQ ID NO: 957564 - DNA, 33 bp, Homo sapien
agacgacattggcaaagtgactcagacccacag

SEQ ID NO: 957565 - DNA, 33 bp, Homo sapien
tctgtcccagcgtttacgtccttgcttcctctg

SEQ ID NO: 957566 - DNA, 33 bp, Homo sapien
tctgtcccagcgtttatgtccttgcttcctctg

SEQ ID NO: 957567 - DNA, 33 bp, Homo sapien; identical to SEQ ID NO: 957565

SEQ ID NO: 957568 - DNA, 33 bp, Homo sapien; identical to SEQ ID NO: 957566

SEQ ID NO: 957569 - DNA, 33 bp, Homo sapien
tcagcttcagtattcacgttccatcgtgtcatc

SEQ ID NO: 957570 - DNA, 33 bp, Homo sapien
tcagcttcagtattcatgttccatcgtgtcatc

SEQ ID NO: 957571 - DNA, 33 bp, Homo sapien; identical to SEQ ID NO: 957569

SEQ ID NO: 957572 - DNA, 33 bp, Homo sapien; identical to SEQ ID NO: 957570

SEQ ID NO: 957573 - DNA, 33 bp, Homo sapien
agtttcctctgagctcaatttccattagtccaa

SEQ ID NO: 957574 - DNA, 33 bp, Homo sapien
agtttcctctgagctccatttccattagtccaa

SEQ ID NO: 957575 - DNA, 33 bp, Homo sapien
aatacaagtgattagcaacagcttagaaagggg

SEQ ID NO: 957576 - DNA, 33 bp, Homo sapien
aatacaagtgattagcgacagcttagaaagggg

SEQ ID NO: 957577 - DNA, 33 bp, Homo sapien
tatgttgaggaccctaaggaagaaagcccagaa

SEQ ID NO: 957578 - DNA, 33 bp, Homo sapien
tatgttgaggaccctatggaagaaagcccagaa

SEQ ID NO: 957579 - DNA, 33 bp, Homo sapien
tggggttctgctaaaacaggcttcacttaaaat

SEQ ID NO: 957580 - DNA, 33 bp, Homo sapien
tggggttctgctaaaataggcttcacttaaaat

SEQ ID NO: 957581 - DNA, 33 bp, Homo sapien
atgtattgcaaataaaaaaacatggaaaaatct

SEQ ID NO: 957582 - DNA, 33 bp, Homo sapien
atgtattgcaaataaacaaacatggaaaaatct

SEQ ID NO: 957583 - DNA, 33 bp, Homo sapien
aatccagataattcacaataatctctccatttt

SEQ ID NO: 957584 - DNA, 33 bp, Homo sapien
aatccagataattcacgataatctctccatttt

SEQ ID NO: 957585 - DNA, 33 bp, Homo sapien
tctccacgactctaacagagcagggtaagcaca

SEQ ID NO: 957586 - DNA, 33 bp, Homo sapien
tctccacgactctaacggagcagggtaagcaca

SEQ ID NO: 957587 - DNA, 33 bp, Homo sapien
gtctgcagtcaaatgaaagacgcttaaatgctg

SEQ ID NO: 957588 - DNA, 33 bp, Homo sapien
gtctgcagtcaaatgagagacgcttaaatgctg

SEQ ID NO: 957589 - DNA, 33 bp, Homo sapien
agctctctgtagtgccagaaagcaaggatgtgc

SEQ ID NO: 957590 - DNA, 33 bp, Homo sapien
agctctctgtagtgccggaaagcaaggatgtgc

SEQ ID NO: 957591 - DNA, 33 bp, Homo sapien
tttgagatatgttctggaaccaggttattttac

SEQ ID NO: 957592 - DNA, 33 bp, Homo sapien
tttgagatatgttctgtaaccaggttattttac

SEQ ID NO: 957593 - DNA, 33 bp, Homo sapien
agaagcccatgataaccgggaacacgggccctt

SEQ ID NO: 957594 - DNA, 33 bp, Homo sapien
agaagcccatgataactgggaacacgggccctt

SEQ ID NO: 957595 - DNA, 33 bp, Homo sapien
tttagatttgcgtaccaacttattactgtaagc

SEQ ID NO: 957596 - DNA, 33 bp, Homo sapien
tttagatttgcgtaccgacttattactgtaagc

SEQ ID NO: 957597 - DNA, 33 bp, Homo sapien
ccggaaaacctcctgaggctcctttaagcaaag

SEQ ID NO: 957598 - DNA, 33 bp, Homo sapien
ccggaaaacctcctgatgctcctttaagcaaag

SEQ ID NO: 957599 - DNA, 33 bp, Homo sapien
tcacagaggtaatgaacgattcaacagctccac

SEQ ID NO: 957600 - DNA, 33 bp, Homo sapien
tcacagaggtaatgaatgattcaacagctccac

SEQ ID NO: 957601 - DNA, 33 bp, Homo sapien
acaattatgcacaataaaactttggtaaacatg

SEQ ID NO: 957602 - DNA, 33 bp, Homo sapien
acaattatgcacaatagaactttggtaaacatg

SEQ ID NO: 957603 - DNA, 33 bp, Homo sapien
ttggctgtagcttagacagcttggcctgcagag

SEQ ID NO: 957604 - DNA, 33 bp, Homo sapien
ttggctgtagcttagatagcttggcctgcagag

SEQ ID NO: 957605 - DNA, 33 bp, Homo sapien
ggacactaatgggtacagaataaagcctgttga

SEQ ID NO: 957606 - DNA, 33 bp, Homo sapien
ggacactaatgggtacggaataaagcctgttga

SEQ ID NO: 957607 - DNA, 33 bp, Homo sapien
ttactaagttttataaatgacactgaaattaag

SEQ ID NO: 957608 - DNA, 33 bp, Homo sapien
ttactaagttttataagtgacactgaaattaag

SEQ ID NO: 957609 - DNA, 33 bp, Homo sapien
ctagttattaacatcacatctcagaatcataaa

SEQ ID NO: 957610 - DNA, 33 bp, Homo sapien
ctagttattaacatcatatctcagaatcataaa

SEQ ID NO: 957611 - DNA, 33 bp, Homo sapien
ttccttaagaatttcacagtagtgagatgctgc

SEQ ID NO: 957612 - DNA, 33 bp, Homo sapien
ttccttaagaatttcatagtagtgagatgctgc

SEQ ID NO: 957613 - DNA, 33 bp, Homo sapien
taccccatacagctataaagaaattcctggggt

SEQ ID NO: 957614 - DNA, 33 bp, Homo sapien
taccccatacagctatgaagaaattcctggggt

SEQ ID NO: 957615 - DNA, 33 bp, Homo sapien
gctaccattaatgacactcttcctactgaaata

SEQ ID NO: 957616 - DNA, 33 bp, Homo sapien
gctaccattaatgacattcttcctactgaaata

SEQ ID NO: 957617 - DNA, 33 bp, Homo sapien
aagaaactatggtcctcaaatatgccaatttta

SEQ ID NO: 957618 - DNA, 33 bp, Homo sapien
aagaaactatggtcctgaaatatgccaatttta

SEQ ID NO: 957619 - DNA, 33 bp, Homo sapien
aagaagctgtggaggacaatggtgttattactg

SEQ ID NO: 957620 - DNA, 33 bp, Homo sapien
aagaagctgtggaggagaatggtgttattactg

SEQ ID NO: 957621 - DNA, 33 bp, Homo sapien
agatgttaatgcttaccaaattgatccagagat

SEQ ID NO: 957622 - DNA, 33 bp, Homo sapien
agatgttaatgcttactaaattgatccagagat

SEQ ID NO: 957623 - DNA, 33 bp, Homo sapien
accaaaaaagtctaaaacctctgtaatgaatac

SEQ ID NO: 957624 - DNA, 33 bp, Homo sapien
accaaaaaagtctaaatcctctgtaatgaatac

SEQ ID NO: 957625 - DNA, 33 bp, Homo sapien
aggcaaaattggaaaggagacgaaactgtcccc

SEQ ID NO: 957626 - DNA, 33 bp, Homo sapien
aggcaaaattggaaagtagacgaaactgtcccc

SEQ ID NO: 957627 - DNA, 33 bp, Homo sapien
acttttgttgtcagaacaatccatcttcacagg

SEQ ID NO: 957628 - DNA, 33 bp, Homo sapien
acttttgttgtcagaataatccatcttcacagg

SEQ ID NO: 957629 - DNA, 33 bp, Homo sapien
tagtctagatgttgagaaaggcctcgctaaatg

SEQ ID NO: 957630 - DNA, 33 bp, Homo sapien
tagtctagatgttgaggaaggcctcgctaaatg

SEQ ID NO: 957631 - DNA, 33 bp, Homo sapien
aaacttcagtgacttaaaacaaccaaggcttat

SEQ ID NO: 957632 - DNA, 33 bp, Homo sapien
aaacttcagtgacttacaacaaccaaggcttat

SEQ ID NO: 957633 - DNA, 33 bp, Homo sapien
tttactgaggttagaacaggttttgctgtggta

SEQ ID NO: 957634 - DNA, 33 bp, Homo sapien
tttactgaggttagaataggttttgctgtggta

SEQ ID NO: 957635 - DNA, 33 bp, Homo sapien
cttctgatataaagtacgtaggattagttaact

SEQ ID NO: 957636 - DNA, 33 bp, Homo sapien
cttctgatataaagtatgtaggattagttaact

SEQ ID NO: 957637 - DNA, 33 bp, Homo sapien
atcttcacgaagaggcaagctagcaagggggag

SEQ ID NO: 957638 - DNA, 33 bp, Homo sapien
atcttcacgaagaggcgagctagcaagggggag

SEQ ID NO: 957639 - DNA, 33 bp, Homo sapien
ccagtaagagtagaaaataggcttgtaaaaatg

SEQ ID NO: 957640 - DNA, 33 bp, Homo sapien
ccagtaagagtagaaagtaggcttgtaaaaatg

SEQ ID NO: 957641 - DNA, 33 bp, Homo sapien
tttgtgtgttgtcataagttttcaactctttcg

SEQ ID NO: 957642 - DNA, 33 bp, Homo sapien
tttgtgtgttgtcatacgttttcaactctttcg

SEQ ID NO: 957643 - DNA, 33 bp, Homo sapien
tgtccttgctccattgcatcacctttgctcctt

SEQ ID NO: 957644 - DNA, 33 bp, Homo sapien
tgtccttgctccattgtatcacctttgctcctt

SEQ ID NO: 957645 - DNA, 33 bp, Homo sapien
aatggctgataccaagcctgcagtgaaaaatgc

SEQ ID NO: 957646 - DNA, 33 bp, Homo sapien
aatggctgataccaagtctgcagtgaaaaatgc

SEQ ID NO: 957647 - DNA, 33 bp, Homo sapien
gaaacttggttgagcccagaattttgaaaccag

SEQ ID NO: 957648 - DNA, 33 bp, Homo sapien
gaaacttggttgagcctagaattttgaaaccag

SEQ ID NO: 957649 - DNA, 33 bp, Homo sapien
aactcttatagttctccagaggagcagcataaa

SEQ ID NO: 957650 - DNA, 33 bp, Homo sapien
aactcttatagttctctagaggagcagcataaa

SEQ ID NO: 957651 - DNA, 33 bp, Homo sapien
gaagaagagaacatcaagcctcttggctggact

SEQ ID NO: 957652 - DNA, 33 bp, Homo sapien
gaagaagagaacatcaggcctcttggctggact

SEQ ID NO: 957653 - DNA, 33 bp, Homo sapien
ggtgattctgaaacacactgaaggtgaagaaca

SEQ ID NO: 957654 - DNA, 33 bp, Homo sapien
ggtgattctgaaacacgctgaaggtgaagaaca

SEQ ID NO: 957655 - DNA, 33 bp, Homo sapien
gctgctacatggaacactggctaaaagtaggca

SEQ ID NO: 957656 - DNA, 33 bp, Homo sapien
gctgctacatggaacattggctaaaagtaggca

SEQ ID NO: 957657 - DNA, 33 bp, Homo sapien
aaatctctgttcacataaaagcctgtccatgaa

SEQ ID NO: 957658 - DNA, 33 bp, Homo sapien
aaatctctgttcacatgaaagcctgtccatgaa

SEQ ID NO: 957659 - DNA, 33 bp, Homo sapien
ataaggaaataacccaatgaaaaactaggcaaa

SEQ ID NO: 957660 - DNA, 33 bp, Homo sapien
ataaggaaataacccagtgaaaaactaggcaaa

SEQ ID NO: 957661 - DNA, 33 bp, Homo sapien
tgcagcctttatcatacctgatcagcattcaac

SEQ ID NO: 957662 - DNA, 33 bp, Homo sapien
tgcagcctttatcatatctgatcagcattcaac

SEQ ID NO: 957663 - DNA, 33 bp, Homo sapien
tctagatggaatagcacaaaaaggccaactccc

SEQ ID NO: 957664 - DNA, 33 bp, Homo sapien
tctagatggaatagcagaaaaaggccaactccc

SEQ ID NO: 957665 - DNA, 33 bp, Homo sapien
aagacttgcaaacaaacgttcagataaagctgt

SEQ ID NO: 957666 - DNA, 33 bp, Homo sapien
aagacttgcaaacaaatgttcagataaagctgt

SEQ ID NO: 957667 - DNA, 33 bp, Homo sapien
catggttcttccctcagaagttgtcgtcgtgcc

SEQ ID NO: 957668 - DNA, 33 bp, Homo sapien
catggttcttccctcataagttgtcgtcgtgcc

SEQ ID NO: 957669 - DNA, 33 bp, Homo sapien
tggatttccaggaagtaaacttttctctgttga

SEQ ID NO: 957670 - DNA, 33 bp, Homo sapien
tggatttccaggaagtcaacttttctctgttga

SEQ ID NO: 957671 - DNA, 33 bp, Homo sapien
tgatggtagtagctacaaatatcagctatgtgt

SEQ ID NO: 957672 - DNA, 33 bp, Homo sapien
tgatggtagtagctacgaatatcagctatgtgt

SEQ ID NO: 957673 - DNA, 33 bp, Homo sapien
aatagccagtcctgacactgccactaaaaagga

SEQ ID NO: 957674 - DNA, 33 bp, Homo sapien
aatagccagtcctgacgctgccactaaaaagga

SEQ ID NO: 957675 - DNA, 33 bp, Homo sapien
acatagaaagcaggacaactatttaacaggtat

SEQ ID NO: 957676 - DNA, 33 bp, Homo sapien
acatagaaagcaggacgactatttaacaggtat

SEQ ID NO: 957677 - DNA, 33 bp, Homo sapien
actcgttttagaaagaaccctaacagtttgaga

SEQ ID NO: 957678 - DNA, 33 bp, Homo sapien
actcgttttagaaagatccctaacagtttgaga

SEQ ID NO: 957679 - DNA, 33 bp, Homo sapien
gttgtagtcatggggccgagaggagggaaagct

SEQ ID NO: 957680 - DNA, 33 bp, Homo sapien
gttgtagtcatggggctgagaggagggaaagct

SEQ ID NO: 957681 - DNA, 33 bp, Homo sapien
atgccacctgttgtaacgggcgcctgttttata

SEQ ID NO: 957682 - DNA, 33 bp, Homo sapien
atgccacctgttgtaatgggcgcctgttttata

SEQ ID NO: 957683 - DNA, 33 bp, Homo sapien
taaggtcattcaggtcaaaagggcctattatgt

SEQ ID NO: 957684 - DNA, 33 bp, Homo sapien
taaggtcattcaggtcgaaagggcctattatgt

SEQ ID NO: 957685 - DNA, 33 bp, Homo sapien
agacacataaggaaacccaagctgtgatcccag

SEQ ID NO: 957686 - DNA, 33 bp, Homo sapien
agacacataaggaaacgcaagctgtgatcccag

SEQ ID NO: 957687 - DNA, 33 bp, Homo sapien
tggcatttagattagagggtcaatcagcaaggt

SEQ ID NO: 957688 - DNA, 33 bp, Homo sapien
tggcatttagattagatggtcaatcagcaaggt

SEQ ID NO: 957689 - DNA, 33 bp, Homo sapien
ctatgaaagtctttgccaagtcacagtcattaa

SEQ ID NO: 957690 - DNA, 33 bp, Homo sapien
ctatgaaagtctttgcgaagtcacagtcattaa

SEQ ID NO: 957691 - DNA, 33 bp, Homo sapien
ccccgacttaatcagaagtggtgactgagaggc

SEQ ID NO: 957692 - DNA, 33 bp, Homo sapien
ccccgacttaatcagacgtggtgactgagaggc

SEQ ID NO: 957693 - DNA, 33 bp, Homo sapien
tatttatttatccatcaatttgcaggtatggaa

SEQ ID NO: 957694 - DNA, 33 bp, Homo sapien
tatttatttatccatccatttgcaggtatggaa

SEQ ID NO: 957695 - DNA, 33 bp, Homo sapien
gtcacctctgtacacagcgaggtggcattcagt

SEQ ID NO: 957696 - DNA, 33 bp, Homo sapien
gtcacctctgtacacatcgaggtggcattcagt

SEQ ID NO: 957697 - DNA, 33 bp, Homo sapien
ctgggggcggagtaataaaaccacttgctcagt

SEQ ID NO: 957698 - DNA, 33 bp, Homo sapien
ctgggggcggagtaatgaaaccacttgctcagt

SEQ ID NO: 957699 - DNA, 33 bp, Homo sapien
ggtcactaaataccccaaaacctgcttggctgt

SEQ ID NO: 957700 - DNA, 33 bp, Homo sapien
ggtcactaaatacccccaaacctgcttggctgt

SEQ ID NO: 957701 - DNA, 33 bp, Homo sapien
tatttctattctccacaacctcctttctttcct

SEQ ID NO: 957702 - DNA, 33 bp, Homo sapien
tatttctattctccacgacctcctttctttcct

SEQ ID NO: 957703 - DNA, 33 bp, Homo sapien
cacctggtacagcaaaatctaggcacagggatg

SEQ ID NO: 957704 - DNA, 33 bp, Homo sapien
cacctggtacagcaaagtctaggcacagggatg

SEQ ID NO: 957705 - DNA, 33 bp, Homo sapien
aaaaaagcgtttgcagcaccggagagctaccct

SEQ ID NO: 957706 - DNA, 33 bp, Homo sapien
aaaaaagcgtttgcagtaccggagagctaccct

SEQ ID NO: 957707 - DNA, 33 bp, Homo sapien
ggtctactagatggccccattcagtcagacaca

SEQ ID NO: 957708 - DNA, 33 bp, Homo sapien
ggtctactagatggcctcattcagtcagacaca

SEQ ID NO: 957709 - DNA, 33 bp, Homo sapien
tgtcttcttcctgcaaaattccatgtgctcttt

SEQ ID NO: 957710 - DNA, 33 bp, Homo sapien
tgtcttcttcctgcaagattccatgtgctcttt

SEQ ID NO: 957711 - DNA, 33 bp, Homo sapien
gctccaaagcattgacagtagttattctaaaga

SEQ ID NO: 957712 - DNA, 33 bp, Homo sapien
gctccaaagcattgacggtagttattctaaaga

SEQ ID NO: 957713 - DNA, 33 bp, Homo sapien
agtatataagatcagaaggtgttaataatacat

SEQ ID NO: 957714 - DNA, 33 bp, Homo sapien
agtatataagatcagagggtgttaataatacat

SEQ ID NO: 957715 - DNA, 33 bp, Homo sapien
gagaagtgaaaaagctaacctgggtacctcttg

SEQ ID NO: 957716 - DNA, 33 bp, Homo sapien
gagaagtgaaaaagctcacctgggtacctcttg

SEQ ID NO: 957717 - DNA, 33 bp, Homo sapien
tgactcaggtatgctacaaatcctgagtgggga

SEQ ID NO: 957718 - DNA, 33 bp, Homo sapien
tgactcaggtatgctataaatcctgagtgggga

SEQ ID NO: 957719 - DNA, 33 bp, Homo sapien
aaggaagcaacttctaataagagactatagcca

SEQ ID NO: 957720 - DNA, 33 bp, Homo sapien
aaggaagcaacttctagtaagagactatagcca

SEQ ID NO: 957721 - DNA, 33 bp, Homo sapien
agagaagagctgctaacagcaagcagggtgaca

SEQ ID NO: 957722 - DNA, 33 bp, Homo sapien
agagaagagctgctaagagcaagcagggtgaca

SEQ ID NO: 957723 - DNA, 33 bp, Homo sapien
gtgaggtttgagaacacagtctaaatttgtcag

SEQ ID NO: 957724 - DNA, 33 bp, Homo sapien
gtgaggtttgagaacagagtctaaatttgtcag

SEQ ID NO: 957725 - DNA, 33 bp, Homo sapien
acctggaggttgaaacaatgatgctggactgac

SEQ ID NO: 957726 - DNA, 33 bp, Homo sapien
acctggaggttgaaaccatgatgctggactgac

SEQ ID NO: 957727 - DNA, 33 bp, Homo sapien
actgagtagactcccacgaatattagcttcctt

SEQ ID NO: 957728 - DNA, 33 bp, Homo sapien
actgagtagactcccatgaatattagcttcctt

SEQ ID NO: 957729 - DNA, 33 bp, Homo sapien
cactgctagtgaatgtcaaatccagaattggag

SEQ ID NO: 957730 - DNA, 33 bp, Homo sapien
cactgctagtgaatgttaaatccagaattggag

SEQ ID NO: 957731 - DNA, 33 bp, Homo sapien
tattcctggcaacccccaggtctggctcgcgtc

SEQ ID NO: 957732 - DNA, 33 bp, Homo sapien
tattcctggcaaccccgaggtctggctcgcgtc

SEQ ID NO: 957733 - DNA, 33 bp, Homo sapien
tcctcagagcatgaccaagaaggagggacatgt

SEQ ID NO: 957734 - DNA, 33 bp, Homo sapien
tcctcagagcatgacccagaaggagggacatgt

SEQ ID NO: 957735 - DNA, 33 bp, Homo sapien
ccctgggtgatggcaacgaaggcagaaagcccc

SEQ ID NO: 957736 - DNA, 33 bp, Homo sapien
ccctgggtgatggcaatgaaggcagaaagcccc

SEQ ID NO: 957737 - DNA, 33 bp, Homo sapien
ttggagaggtccttgaagtaccgtgacagcgca

SEQ ID NO: 957738 - DNA, 33 bp, Homo sapien
ttggagaggtccttgaggtaccgtgacagcgca

SEQ ID NO: 957739 - DNA, 33 bp, Homo sapien
agacctggagcttccactcttcattcccactgt

SEQ ID NO: 957740 - DNA, 33 bp, Homo sapien
agacctggagcttccattcttcattcccactgt

SEQ ID NO: 957741 - DNA, 33 bp, Homo sapien
ggccaccttgaaggacaagttcagctaaaagat

SEQ ID NO: 957742 - DNA, 33 bp, Homo sapien
ggccaccttgaaggaccagttcagctaaaagat

SEQ ID NO: 957743 - DNA, 33 bp, Homo sapien
agtaccatgtttgcaagtccttcataggttccc

SEQ ID NO: 957744 - DNA, 33 bp, Homo sapien
agtaccatgtttgcaattccttcataggttccc

SEQ ID NO: 957745 - DNA, 33 bp, Homo sapien
tgagtaattaacttggcaaaataagccaatcta

SEQ ID NO: 957746 - DNA, 33 bp, Homo sapien
tgagtaattaacttggtaaaataagccaatcta

SEQ ID NO: 957747 - DNA, 33 bp, Homo sapien
ccaagtctgacttcacaatggttactcatcact

SEQ ID NO: 957748 - DNA, 33 bp, Homo sapien
ccaagtctgacttcacgatggttactcatcact

SEQ ID NO: 957749 - DNA, 33 bp, Homo sapien
atttctaatattcgagaaacaggactaaaggaa

SEQ ID NO: 957750 - DNA, 33 bp, Homo sapien
atttctaatattcgagcaacaggactaaaggaa

SEQ ID NO: 957751 - DNA, 33 bp, Homo sapien
tccccataaaatgaaaatatcctcctcatctac

SEQ ID NO: 957752 - DNA, 33 bp, Homo sapien
tccccataaaatgaaattatcctcctcatctac

SEQ ID NO: 957753 - DNA, 33 bp, Homo sapien
acccaagagccagcctgaactggaactgcttat

SEQ ID NO: 957754 - DNA, 33 bp, Homo sapien
acccaagagccagccttaactggaactgcttat

SEQ ID NO: 957755 - DNA, 33 bp, Homo sapien
agaagaaactatgcaacggggcatgactgtgtt

SEQ ID NO: 957756 - DNA, 33 bp, Homo sapien
agaagaaactatgcaagggggcatgactgtgtt

SEQ ID NO: 957757 - DNA, 33 bp, Homo sapien
taccgaggaatacaggaatgtaatactttaatg

SEQ ID NO: 957758 - DNA, 33 bp, Homo sapien
taccgaggaatacagggatgtaatactttaatg

SEQ ID NO: 957759 - DNA, 33 bp, Homo sapien
taatctcttgttatgaagacaccaatcctattg

SEQ ID NO: 957760 - DNA, 33 bp, Homo sapien
taatctcttgttatgaggacaccaatcctattg

SEQ ID NO: 957761 - DNA, 33 bp, Homo sapien
tcagagttgacaaacccggacagaggagggtct

SEQ ID NO: 957762 - DNA, 33 bp, Homo sapien
tcagagttgacaaacctggacagaggagggtct

SEQ ID NO: 957763 - DNA, 33 bp, Homo sapien
accaagtcataagataaagcattgtaggcctca

SEQ ID NO: 957764 - DNA, 33 bp, Homo sapien
accaagtcataagatagagcattgtaggcctca

SEQ ID NO: 957765 - DNA, 33 bp, Homo sapien
tctttttgttataataccttttgcctaagtagg

SEQ ID NO: 957766 - DNA, 33 bp, Homo sapien
tctttttgttataatatcttttgcctaagtagg

SEQ ID NO: 957767 - DNA, 33 bp, Homo sapien
tgccaggctagaggaaagagcctgacatttttt

SEQ ID NO: 957768 - DNA, 33 bp, Homo sapien
tgccaggctagaggaaggagcctgacatttttt

SEQ ID NO: 957769 - DNA, 33 bp, Homo sapien
tatctacccccgaagacagttcctgatggtttc

SEQ ID NO: 957770 - DNA, 33 bp, Homo sapien
tatctacccccgaagatagttcctgatggtttc

SEQ ID NO: 957771 - DNA, 33 bp, Homo sapien
atatcaatacactactcaaggccagtcagttat

SEQ ID NO: 957772 - DNA, 33 bp, Homo sapien
atatcaatacactactgaaggccagtcagttat

SEQ ID NO: 957773 - DNA, 33 bp, Homo sapien
gtgctgcaaagtcttacggtgcaagagaacagg

SEQ ID NO: 957774 - DNA, 33 bp, Homo sapien
gtgctgcaaagtcttagggtgcaagagaacagg

SEQ ID NO: 957775 - DNA, 33 bp, Homo sapien
tgaaagcagcatctcaatctgtgtccaggtcat

SEQ ID NO: 957776 - DNA, 33 bp, Homo sapien
tgaaagcagcatctcagtctgtgtccaggtcat

SEQ ID NO: 957777 - DNA, 33 bp, Homo sapien
gggaggacagtggtcacgcctctaggtcgtctg

SEQ ID NO: 957778 - DNA, 33 bp, Homo sapien
gggaggacagtggtcatgcctctaggtcgtctg

SEQ ID NO: 957779 - DNA, 33 bp, Homo sapien
tgtcctcaacatctggcaataacttaagtagtg

SEQ ID NO: 957780 - DNA, 33 bp, Homo sapien
tgtcctcaacatctgggaataacttaagtagtg

SEQ ID NO: 957781 - DNA, 33 bp, Homo sapien
agtaaagagagtaaaaatgtgtttgctaaaatt

SEQ ID NO: 957782 - DNA, 33 bp, Homo sapien
agtaaagagagtaaaactgtgtttgctaaaatt

SEQ ID NO: 957783 - DNA, 33 bp, Homo sapien
tgatacgatgttagtacgtaattgtcttcccaa

SEQ ID NO: 957784 - DNA, 33 bp, Homo sapien
tgatacgatgttagtatgtaattgtcttcccaa

SEQ ID NO: 957785 - DNA, 33 bp, Homo sapien
tgctcctatcaaataaacaatgtatctttgaga

SEQ ID NO: 957786 - DNA, 33 bp, Homo sapien
tgctcctatcaaataagcaatgtatctttgaga

SEQ ID NO: 957787 - DNA, 33 bp, Homo sapien
aattaccccgaacataccggtgcagtggcttaa

SEQ ID NO: 957788 - DNA, 33 bp, Homo sapien
aattaccccgaacatagcggtgcagtggcttaa

SEQ ID NO: 957789 - DNA, 33 bp, Homo sapien
caaatgctctcttaacacttctgagcagggatg

SEQ ID NO: 957790 - DNA, 33 bp, Homo sapien
caaatgctctcttaactcttctgagcagggatg

SEQ ID NO: 957791 - DNA, 33 bp, Homo sapien
agaaataaaaccacaacttgtatgccaattgag

SEQ ID NO: 957792 - DNA, 33 bp, Homo sapien
agaaataaaaccacaatttgtatgccaattgag

SEQ ID NO: 957793 - DNA, 33 bp, Homo sapien
tgctcattcgaccctcccaacaatcacgggaga

SEQ ID NO: 957794 - DNA, 33 bp, Homo sapien
tgctcattcgaccctctcaacaatcacgggaga

SEQ ID NO: 957795 - DNA, 33 bp, Homo sapien
tgagtgggcttacaaactcagggtttccactgg

SEQ ID NO: 957796 - DNA, 33 bp, Homo sapien
tgagtgggcttacaaattcagggtttccactgg

SEQ ID NO: 957797 - DNA, 33 bp, Homo sapien
gatttatataaagaaccaacgagaaaaagaagg

SEQ ID NO: 957798 - DNA, 33 bp, Homo sapien
gatttatataaagaacgaacgagaaaaagaagg

SEQ ID NO: 957799 - DNA, 33 bp, Homo sapien
cagcagcagtatactacgctttttggactgccg

SEQ ID NO: 957800 - DNA, 33 bp, Homo sapien
cagcagcagtatactaggctttttggactgccg

SEQ ID NO: 957801 - DNA, 33 bp, Homo sapien
acatctctccttctacagaaagccgcctaacgt

SEQ ID NO: 957802 - DNA, 33 bp, Homo sapien
acatctctccttctacggaaagccgcctaacgt

SEQ ID NO: 957803 - DNA, 33 bp, Homo sapien
ctatttaaacttgtcacgagaaagcaccttctg

SEQ ID NO: 957804 - DNA, 33 bp, Homo sapien
ctatttaaacttgtcatgagaaagcaccttctg

SEQ ID NO: 957805 - DNA, 33 bp, Homo sapien
ctcaaatatcacattggcaataaggcctactgt

SEQ ID NO: 957806 - DNA, 33 bp, Homo sapien
ctcaaatatcacattgtcaataaggcctactgt

SEQ ID NO: 957807 - DNA, 33 bp, Homo sapien
aaatacatcgttaatcactatgcttcttgacat

SEQ ID NO: 957808 - DNA, 33 bp, Homo sapien
aaatacatcgttaatccctatgcttcttgacat

SEQ ID NO: 957809 - DNA, 33 bp, Homo sapien
ggagataccactgttcaactatgagaatggcta

SEQ ID NO: 957810 - DNA, 33 bp, Homo sapien
ggagataccactgttctactatgagaatggcta

SEQ ID NO: 957811 - DNA, 33 bp, Homo sapien
ctcaaatacaaactcaaaatgggttatggacct

SEQ ID NO: 957812 - DNA, 33 bp, Homo sapien
ctcaaatacaaactcagaatgggttatggacct

SEQ ID NO: 957813 - DNA, 33 bp, Homo sapien
cttctcatgactcctacgctaaaatggaaactc

SEQ ID NO: 957814 - DNA, 33 bp, Homo sapien
cttctcatgactcctatgctaaaatggaaactc

SEQ ID NO: 957815 - DNA, 33 bp, Homo sapien
gctgccaaacctttcacatgggctctttgagct

SEQ ID NO: 957816 - DNA, 33 bp, Homo sapien
gctgccaaacctttcagatgggctctttgagct

SEQ ID NO: 957817 - DNA, 33 bp, Homo sapien
ccatctcctctattacgaaagcccctgtaagac

SEQ ID NO: 957818 - DNA, 33 bp, Homo sapien
ccatctcctctattactaaagcccctgtaagac

SEQ ID NO: 957819 - DNA, 33 bp, Homo sapien
aaagaggagctgccacaaattatttgtaatgag

SEQ ID NO: 957820 - DNA, 33 bp, Homo sapien
aaagaggagctgccacgaattatttgtaatgag

SEQ ID NO: 957821 - DNA, 33 bp, Homo sapien
acacaagcaatttcaacagttgatttttctatt

SEQ ID NO: 957822 - DNA, 33 bp, Homo sapien
acacaagcaatttcaagagttgatttttctatt

SEQ ID NO: 957823 - DNA, 33 bp, Homo sapien
agttttttgaggattcaccatttagtatggccc

SEQ ID NO: 957824 - DNA, 33 bp, Homo sapien
agttttttgaggattcgccatttagtatggccc

SEQ ID NO: 957825 - DNA, 33 bp, Homo sapien
atctgagcttgctgcactcatctaggtaggagt

SEQ ID NO: 957826 - DNA, 33 bp, Homo sapien
atctgagcttgctgcattcatctaggtaggagt

SEQ ID NO: 957827 - DNA, 33 bp, Homo sapien
tacttactctctggaaagacaagatgttctgtg

SEQ ID NO: 957828 - DNA, 33 bp, Homo sapien
tacttactctctggaatgacaagatgttctgtg

SEQ ID NO: 957829 - DNA, 33 bp, Homo sapien
tttccccctacaaacacatggagaaattttatg

SEQ ID NO: 957830 - DNA, 33 bp, Homo sapien
tttccccctacaaacagatggagaaattttatg

SEQ ID NO: 957831 - DNA, 33 bp, Homo sapien
caaacaatccagttaaaaaatgggcaacagacc

SEQ ID NO: 957832 - DNA, 33 bp, Homo sapien
caaacaatccagttaagaaatgggcaacagacc

SEQ ID NO: 957833 - DNA, 33 bp, Homo sapien
cttttgatacactccacgaaggaagtgagatgg

SEQ ID NO: 957834 - DNA, 33 bp, Homo sapien
cttttgatacactccatgaaggaagtgagatgg

SEQ ID NO: 957835 - DNA, 33 bp, Homo sapien
tggaaacattaaaagacgacattacagaatgga

SEQ ID NO: 957836 - DNA, 33 bp, Homo sapien
tggaaacattaaaagatgacattacagaatgga

SEQ ID NO: 957837 - DNA, 33 bp, Homo sapien
tttgcagtctgtgtcaagtgatgtcacatctgg

SEQ ID NO: 957838 - DNA, 33 bp, Homo sapien
tttgcagtctgtgtcacgtgatgtcacatctgg

SEQ ID NO: 957839 - DNA, 33 bp, Homo sapien
ctaagcttaaatactcacgactcttctgccctg

SEQ ID NO: 957840 - DNA, 33 bp, Homo sapien
ctaagcttaaatactcgcgactcttctgccctg

SEQ ID NO: 957841 - DNA, 33 bp, Homo sapien
tggacagtccttggataaccagaaagttcaaca

SEQ ID NO: 957842 - DNA, 33 bp, Homo sapien
tggacagtccttggatgaccagaaagttcaaca

SEQ ID NO: 957843 - DNA, 33 bp, Homo sapien
ccatttatggtagacaaatataggttgatgcat

SEQ ID NO: 957844 - DNA, 33 bp, Homo sapien
ccatttatggtagacagatataggttgatgcat

SEQ ID NO: 957845 - DNA, 33 bp, Homo sapien
aaagtctttaacatacaaagaagagtcatgtgg

SEQ ID NO: 957846 - DNA, 33 bp, Homo sapien
aaagtctttaacataccaagaagagtcatgtgg

SEQ ID NO: 957847 - DNA, 33 bp, Homo sapien
acctcatgttgagacaacttcccaggctgggtc

SEQ ID NO: 957848 - DNA, 33 bp, Homo sapien
acctcatgttgagacaccttcccaggctgggtc

SEQ ID NO: 957849 - DNA, 33 bp, Homo sapien
tggttgccaaaagttaccaggaagagagggatg

SEQ ID NO: 957850 - DNA, 33 bp, Homo sapien
tggttgccaaaagttatcaggaagagagggatg

SEQ ID NO: 957851 - DNA, 33 bp, Homo sapien
ggactgctcaggaacactcattcttataaacct

SEQ ID NO: 957852 - DNA, 33 bp, Homo sapien
ggactgctcaggaacattcattcttataaacct

SEQ ID NO: 957853 - DNA, 33 bp, Homo sapien
ataaaagtttacatcccgagactaagcatggag

SEQ ID NO: 957854 - DNA, 33 bp, Homo sapien
ataaaagtttacatcctgagactaagcatggag

SEQ ID NO: 957855 - DNA, 33 bp, Homo sapien
tattttttttggatgacaagttgtgaacataac

SEQ ID NO: 957856 - DNA, 33 bp, Homo sapien
tattttttttggatgagaagttgtgaacataac

SEQ ID NO: 957857 - DNA, 33 bp, Homo sapien
tctcttcctactgttcaaatgttccagctttaa

SEQ ID NO: 957858 - DNA, 33 bp, Homo sapien
tctcttcctactgttcgaatgttccagctttaa

SEQ ID NO: 957859 - DNA, 33 bp, Homo sapien
gaaggaggagaagatacgcagacaactgaaggg

SEQ ID NO: 957860 - DNA, 33 bp, Homo sapien
gaaggaggagaagatatgcagacaactgaaggg

SEQ ID NO: 957861 - DNA, 33 bp, Homo sapien
aagcaagctcacctcaatacccaggtatctcct

SEQ ID NO: 957862 - DNA, 33 bp, Homo sapien
aagcaagctcacctcagtacccaggtatctcct

SEQ ID NO: 957863 - DNA, 33 bp, Homo sapien
aaaggatgaaatagaaatatcactacaagctgg

SEQ ID NO: 957864 - DNA, 33 bp, Homo sapien
aaaggatgaaatagaagtatcactacaagctgg

SEQ ID NO: 957865 - DNA, 33 bp, Homo sapien
acttttaagccttcacactgaatactttgccat

SEQ ID NO: 957866 - DNA, 33 bp, Homo sapien
acttttaagccttcacgctgaatactttgccat

SEQ ID NO: 957867 - DNA, 33 bp, Homo sapien
aggcttagagattttacatgactcgttgatgga

SEQ ID NO: 957868 - DNA, 33 bp, Homo sapien
aggcttagagattttatatgactcgttgatgga

SEQ ID NO: 957869 - DNA, 33 bp, Homo sapien
gagcctcatttaacaacgcggtgaggcagatgg

SEQ ID NO: 957870 - DNA, 33 bp, Homo sapien
gagcctcatttaacaatgcggtgaggcagatgg

SEQ ID NO: 957871 - DNA, 33 bp, Homo sapien
acatccatgttagtacgctgtgggacactttgt

SEQ ID NO: 957872 - DNA, 33 bp, Homo sapien
acatccatgttagtactctgtgggacactttgt

SEQ ID NO: 957873 - DNA, 33 bp, Homo sapien
agacacagaatcgtagacaagggtgatttgatt

SEQ ID NO: 957874 - DNA, 33 bp, Homo sapien
agacacagaatcgtagccaagggtgatttgatt

SEQ ID NO: 957875 - DNA, 33 bp, Homo sapien
ccagataaattgataccatcttcactcatggag

SEQ ID NO: 957876 - DNA, 33 bp, Homo sapien
ccagataaattgatacgatcttcactcatggag

SEQ ID NO: 957877 - DNA, 33 bp, Homo sapien
gtaaacattgaatgaagactaattttccttgcc

SEQ ID NO: 957878 - DNA, 33 bp, Homo sapien
gtaaacattgaatgaatactaattttccttgcc

SEQ ID NO: 957879 - DNA, 33 bp, Homo sapien
tattgcctttgggaaaatgaggtatggatggag

SEQ ID NO: 957880 - DNA, 33 bp, Homo sapien
tattgcctttgggaaagtgaggtatggatggag

SEQ ID NO: 957881 - DNA, 33 bp, Homo sapien
caaagacaaaccaaaacaagcatgctgatatta

SEQ ID NO: 957882 - DNA, 33 bp, Homo sapien
caaagacaaaccaaaataagcatgctgatatta

SEQ ID NO: 957883 - DNA, 33 bp, Homo sapien
gatccaaaccaaacccccaaagcaaatgtgtag

SEQ ID NO: 957884 - DNA, 33 bp, Homo sapien
gatccaaaccaaaccctcaaagcaaatgtgtag

SEQ ID NO: 957885 - DNA, 33 bp, Homo sapien
ttgagtttgtttatgcaaagtccggtctcccca

SEQ ID NO: 957886 - DNA, 33 bp, Homo sapien
ttgagtttgtttatgcgaagtccggtctcccca

SEQ ID NO: 957887 - DNA, 33 bp, Homo sapien
attcgtgaagcggcagaaacaggcattgctgtg

SEQ ID NO: 957888 - DNA, 33 bp, Homo sapien
attcgtgaagcggcaggaacaggcattgctgtg

SEQ ID NO: 957889 - DNA, 33 bp, Homo sapien
atggtcagtgagtgccaaagctaattgtaatgc

SEQ ID NO: 957890 - DNA, 33 bp, Homo sapien
atggtcagtgagtgccgaagctaattgtaatgc

SEQ ID NO: 957891 - DNA, 33 bp, Homo sapien
ctttgctgccataaaaatcaaatgtgctctaag

SEQ ID NO: 957892 - DNA, 33 bp, Homo sapien
ctttgctgccataaaagtcaaatgtgctctaag

SEQ ID NO: 957893 - DNA, 33 bp, Homo sapien
ctggcattaagtaagcaatagggcaaggtgtct

SEQ ID NO: 957894 - DNA, 33 bp, Homo sapien
ctggcattaagtaagccatagggcaaggtgtct

SEQ ID NO: 957895 - DNA, 33 bp, Homo sapien
gccattaaatggaagacgaacctctttggagct

SEQ ID NO: 957896 - DNA, 33 bp, Homo sapien
gccattaaatggaagatgaacctctttggagct

SEQ ID NO: 957897 - DNA, 33 bp, Homo sapien
gcacaggtgttcacagaaaatgtgccttgtccc

SEQ ID NO: 957898 - DNA, 33 bp, Homo sapien
gcacaggtgttcacaggaaatgtgccttgtccc

SEQ ID NO: 957899 - DNA, 33 bp, Homo sapien
ttatccctcttgaaggaatgaggaggcagacac

SEQ ID NO: 957900 - DNA, 33 bp, Homo sapien
ttatccctcttgaagggatgaggaggcagacac

SEQ ID NO: 957901 - DNA, 33 bp, Homo sapien
tgaatcatgcacttggaagcgctaggcctgttg

SEQ ID NO: 957902 - DNA, 33 bp, Homo sapien
tgaatcatgcacttggcagcgctaggcctgttg

SEQ ID NO: 957903 - DNA, 33 bp, Homo sapien
gtgtagacagattgccccttccctttggaggtg

SEQ ID NO: 957904 - DNA, 33 bp, Homo sapien
gtgtagacagattgcctcttccctttggaggtg

SEQ ID NO: 957905 - DNA, 33 bp, Homo sapien
acctggcaattatagaaaaaaatgtccctaagg

SEQ ID NO: 957906 - DNA, 33 bp, Homo sapien
acctggcaattatagagaaaaatgtccctaagg

SEQ ID NO: 957907 - DNA, 33 bp, Homo sapien
ggaagcgaagaccacaaatgattctgaagttta

SEQ ID NO: 957908 - DNA, 33 bp, Homo sapien
ggaagcgaagaccacagatgattctgaagttta

SEQ ID NO: 957909 - DNA, 33 bp, Homo sapien
atgtacattcttggacaagtctttctttggata

SEQ ID NO: 957910 - DNA, 33 bp, Homo sapien
atgtacattcttggactagtctttctttggata

SEQ ID NO: 957911 - DNA, 33 bp, Homo sapien
aggattacatgtgccagtccaacagtatctatg

SEQ ID NO: 957912 - DNA, 33 bp, Homo sapien
aggattacatgtgccattccaacagtatctatg

SEQ ID NO: 957913 - DNA, 33 bp, Homo sapien
agtgatccagaggtcacgggctgctgattccac

SEQ ID NO: 957914 - DNA, 33 bp, Homo sapien
agtgatccagaggtcatgggctgctgattccac

SEQ ID NO: 957915 - DNA, 33 bp, Homo sapien
ctgactaaacatttaacgatgatcacccatatg

SEQ ID NO: 957916 - DNA, 33 bp, Homo sapien
ctgactaaacatttaatgatgatcacccatatg

SEQ ID NO: 957917 - DNA, 33 bp, Homo sapien
tacacaatgtggcacccactagctatgtggcct

SEQ ID NO: 957918 - DNA, 33 bp, Homo sapien
tacacaatgtggcacctactagctatgtggcct

SEQ ID NO: 957919 - DNA, 33 bp, Homo sapien
ttttctgccaggaatccgatgagttggactgga

SEQ ID NO: 957920 - DNA, 33 bp, Homo sapien
ttttctgccaggaatctgatgagttggactgga

SEQ ID NO: 957921 - DNA, 33 bp, Homo sapien
ttttaaatggaactgcagaaaaatctattgtga

SEQ ID NO: 957922 - DNA, 33 bp, Homo sapien
ttttaaatggaactgcggaaaaatctattgtga

SEQ ID NO: 957923 - DNA, 33 bp, Homo sapien
ctcctgagctcagtcaacaataaatgattgttt

SEQ ID NO: 957924 - DNA, 33 bp, Homo sapien
ctcctgagctcagtcagcaataaatgattgttt

SEQ ID NO: 957925 - DNA, 33 bp, Homo sapien
ggtatttttcgtcacaatccctaatggcaagcc

SEQ ID NO: 957926 - DNA, 33 bp, Homo sapien
ggtatttttcgtcacagtccctaatggcaagcc

SEQ ID NO: 957927 - DNA, 33 bp, Homo sapien
aatgaaacagagttgaactaaatagcttatttg

SEQ ID NO: 957928 - DNA, 33 bp, Homo sapien
aatgaaacagagttgagctaaatagcttatttg

SEQ ID NO: 957929 - DNA, 33 bp, Homo sapien
actttaacaaaccccaacctgcggaacagaggc

SEQ ID NO: 957930 - DNA, 33 bp, Homo sapien
actttaacaaaccccatcctgcggaacagaggc

SEQ ID NO: 957931 - DNA, 33 bp, Homo sapien
ttaaagttgttaagaacaagggctactttaaga

SEQ ID NO: 957932 - DNA, 33 bp, Homo sapien
ttaaagttgttaagaataagggctactttaaga

SEQ ID NO: 957933 - DNA, 33 bp, Homo sapien
atttccccctctatacaggcataagcaatctga

SEQ ID NO: 957934 - DNA, 33 bp, Homo sapien
atttccccctctatacgggcataagcaatctga

SEQ ID NO: 957935 - DNA, 33 bp, Homo sapien
aaagaagaggtggaaccatcccaaaatgtccct

SEQ ID NO: 957936 - DNA, 33 bp, Homo sapien
aaagaagaggtggaacgatcccaaaatgtccct

SEQ ID NO: 957937 - DNA, 33 bp, Homo sapien
ttcctcacttgtcagaagagaataatcacacct

SEQ ID NO: 957938 - DNA, 33 bp, Homo sapien
ttcctcacttgtcagatgagaataatcacacct

SEQ ID NO: 957939 - DNA, 33 bp, Homo sapien
agttttacctgtatgaaaatgctggtgggggca

SEQ ID NO: 957940 - DNA, 33 bp, Homo sapien
agttttacctgtatgagaatgctggtgggggca

SEQ ID NO: 957941 - DNA, 33 bp, Homo sapien
ggtacctcgtcaacacgggggcacaaagccaca

SEQ ID NO: 957942 - DNA, 33 bp, Homo sapien
ggtacctcgtcaacactggggcacaaagccaca

SEQ ID NO: 957943 - DNA, 33 bp, Homo sapien
aacacatgaacacaacacctaaaaaaatctgaa

SEQ ID NO: 957944 - DNA, 33 bp, Homo sapien
aacacatgaacacaacgcctaaaaaaatctgaa

SEQ ID NO: 957945 - DNA, 33 bp, Homo sapien
gaaggagtgagaagaaagatggctcaggttata

SEQ ID NO: 957946 - DNA, 33 bp, Homo sapien
gaaggagtgagaagaaggatggctcaggttata

SEQ ID NO: 957947 - DNA, 33 bp, Homo sapien
agagtggagttgtgaaagcaaatgagctaacct

SEQ ID NO: 957948 - DNA, 33 bp, Homo sapien
agagtggagttgtgaacgcaaatgagctaacct

SEQ ID NO: 957949 - DNA, 33 bp, Homo sapien
gggggttggctctccaacgtggaacatacatct

SEQ ID NO: 957950 - DNA, 33 bp, Homo sapien
gggggttggctctccagcgtggaacatacatct

SEQ ID NO: 957951 - DNA, 33 bp, Homo sapien
ctccaagccaaggagcaaggccgcagaaggaat

SEQ ID NO: 957952 - DNA, 33 bp, Homo sapien
ctccaagccaaggagcgaggccgcagaaggaat

SEQ ID NO: 957953 - DNA, 33 bp, Homo sapien
gaagagttgaacccaacacctggatattcttgg

SEQ ID NO: 957954 - DNA, 33 bp, Homo sapien
gaagagttgaacccaatacctggatattcttgg

SEQ ID NO: 957955 - DNA, 33 bp, Homo sapien
aacatgctggtttcccaaagagtccaaaatggt

SEQ ID NO: 957956 - DNA, 33 bp, Homo sapien
aacatgctggtttcccgaagagtccaaaatggt

SEQ ID NO: 957957 - DNA, 33 bp, Homo sapien
tagcttccgggcagcacgaggaaagccatagaa

SEQ ID NO: 957958 - DNA, 33 bp, Homo sapien
tagcttccgggcagcatgaggaaagccatagaa

SEQ ID NO: 957959 - DNA, 33 bp, Homo sapien
ttcaggacaagaggaaaccctacatgaagacag

SEQ ID NO: 957960 - DNA, 33 bp, Homo sapien
ttcaggacaagaggaagccctacatgaagacag

SEQ ID NO: 957961 - DNA, 33 bp, Homo sapien
ctcccaactgtatcagcctcttaatgtctttct

SEQ ID NO: 957962 - DNA, 33 bp, Homo sapien
ctcccaactgtatcaggctcttaatgtctttct

SEQ ID NO: 957963 - DNA, 33 bp, Homo sapien
tacagtgaaatgcacaaaatgtaaatgtacaac

SEQ ID NO: 957964 - DNA, 33 bp, Homo sapien
tacagtgaaatgcacagaatgtaaatgtacaac

SEQ ID NO: 957965 - DNA, 33 bp, Homo sapien
aatgatacagtacaggcaagcatctttcagatt

SEQ ID NO: 957966 - DNA, 33 bp, Homo sapien
aatgatacagtacagggaagcatctttcagatt

SEQ ID NO: 957967 - DNA, 33 bp, Homo sapien
aggctcagtgttcatgcagaggcttgttagtgt

SEQ ID NO: 957968 - DNA, 33 bp, Homo sapien
aggctcagtgttcatgtagaggcttgttagtgt

SEQ ID NO: 957969 - DNA, 33 bp, Homo sapien
aggccataggcgacccggcctatcacctaggct

SEQ ID NO: 957970 - DNA, 33 bp, Homo sapien
aggccataggcgaccctgcctatcacctaggct

SEQ ID NO: 957971 - DNA, 33 bp, Homo sapien
tctgatctgtttcctacgggccatgtaatgctg

SEQ ID NO: 957972 - DNA, 33 bp, Homo sapien
tctgatctgtttcctatgggccatgtaatgctg

SEQ ID NO: 957973 - DNA, 33 bp, Homo sapien
aactgacggagcagaaaaattcaacaagcagtt

SEQ ID NO: 957974 - DNA, 33 bp, Homo sapien
aactgacggagcagaacaattcaacaagcagtt

SEQ ID NO: 957975 - DNA, 33 bp, Homo sapien
tgtagagtactaactcaacaggattctgatctg

SEQ ID NO: 957976 - DNA, 33 bp, Homo sapien
tgtagagtactaactcgacaggattctgatctg

SEQ ID NO: 957977 - DNA, 33 bp, Homo sapien
attaaaatttccacaagaggaatacaaagttct

SEQ ID NO: 957978 - DNA, 33 bp, Homo sapien
attaaaatttccacaataggaatacaaagttct

SEQ ID NO: 957979 - DNA, 33 bp, Homo sapien
tcccaaaggatggatgaaaggatgcaaggaggt

SEQ ID NO: 957980 - DNA, 33 bp, Homo sapien
tcccaaaggatggatggaaggatgcaaggaggt

SEQ ID NO: 957981 - DNA, 33 bp, Homo sapien
gaaggggagatgaataagggccagttgcagcct

SEQ ID NO: 957982 - DNA, 33 bp, Homo sapien
gaaggggagatgaatacgggccagttgcagcct

SEQ ID NO: 957983 - DNA, 33 bp, Homo sapien
ccatgctacttctgaacgatttactgttaggtg

SEQ ID NO: 957984 - DNA, 33 bp, Homo sapien
ccatgctacttctgaatgatttactgttaggtg

SEQ ID NO: 957985 - DNA, 33 bp, Homo sapien
gagggcacgttcttgacacatgggaacttcgct

SEQ ID NO: 957986 - DNA, 33 bp, Homo sapien
gagggcacgttcttgatacatgggaacttcgct

SEQ ID NO: 957987 - DNA, 33 bp, Homo sapien
gtcctagaaaaacttacgatcaaagatggagtc

SEQ ID NO: 957988 - DNA, 33 bp, Homo sapien
gtcctagaaaaacttatgatcaaagatggagtc

SEQ ID NO: 957989 - DNA, 33 bp, Homo sapien
aaaaggaaatccacaccgaatccaactacacaa

SEQ ID NO: 957990 - DNA, 33 bp, Homo sapien
aaaaggaaatccacactgaatccaactacacaa

SEQ ID NO: 957991 - DNA, 33 bp, Homo sapien
aagctgcaaagagccacagaaacttgccgagct

SEQ ID NO: 957992 - DNA, 33 bp, Homo sapien
aagctgcaaagagccatagaaacttgccgagct

SEQ ID NO: 957993 - DNA, 33 bp, Homo sapien
atctcttctccacttgcatcttggcctcttacc

SEQ ID NO: 957994 - DNA, 33 bp, Homo sapien
atctcttctccacttggatcttggcctcttacc

SEQ ID NO: 957995 - DNA, 33 bp, Homo sapien
agcagcagggctgatacgtttaaagacgctggg

SEQ ID NO: 957996 - DNA, 33 bp, Homo sapien
agcagcagggctgatatgtttaaagacgctggg

SEQ ID NO: 957997 - DNA, 33 bp, Homo sapien
caccattccctcactcaaaaaccctgaatgtct

SEQ ID NO: 957998 - DNA, 33 bp, Homo sapien
caccattccctcactcgaaaaccctgaatgtct

SEQ ID NO: 957999 - DNA, 33 bp, Homo sapien
ttaatcaagtactgcccagtggattcttacttt

SEQ ID NO: 958000 - DNA, 33 bp, Homo sapien
ttaatcaagtactgcctagtggattcttacttt

SEQ ID NO: 958001 - DNA, 33 bp, Homo sapien
ccatccccagctggccagaggggtttgtccaat

SEQ ID NO: 958002 - DNA, 33 bp, Homo sapien
ccatccccagctggccggaggggtttgtccaat

SEQ ID NO: 958003 - DNA, 33 bp, Homo sapien
ggacacaagtgttcaacattacaagcctggcaa

SEQ ID NO: 958004 - DNA, 33 bp, Homo sapien
ggacacaagtgttcaagattacaagcctggcaa

SEQ ID NO: 958005 - DNA, 33 bp, Homo sapien
tggtactggaaacctaccaggaaatatcaggtt

SEQ ID NO: 958006 - DNA, 33 bp, Homo sapien
tggtactggaaacctagcaggaaatatcaggtt

SEQ ID NO: 958007 - DNA, 33 bp, Homo sapien
atctctacaaaaaatgaaagttagctaggtatg

SEQ ID NO: 958008 - DNA, 33 bp, Homo sapien
atctctacaaaaaatggaagttagctaggtatg

SEQ ID NO: 958009 - DNA, 33 bp, Homo sapien
ggaggagagaagccaacattaggtaggggagag

SEQ ID NO: 958010 - DNA, 33 bp, Homo sapien
ggaggagagaagccaagattaggtaggggagag

SEQ ID NO: 958011 - DNA, 33 bp, Homo sapien
tgaaggctctaagtaacgacaggcaaaaaggga

SEQ ID NO: 958012 - DNA, 33 bp, Homo sapien
tgaaggctctaagtaatgacaggcaaaaaggga

SEQ ID NO: 958013 - DNA, 33 bp, Homo sapien
cgtatgctctttatcaaaactacgaaacataaa

SEQ ID NO: 958014 - DNA, 33 bp, Homo sapien
cgtatgctctttatcagaactacgaaacataaa

SEQ ID NO: 958015 - DNA, 33 bp, Homo sapien
aacacaagaatagacacatacaatcatgagtcc

SEQ ID NO: 958016 - DNA, 33 bp, Homo sapien
aacacaagaatagacagatacaatcatgagtcc

SEQ ID NO: 958017 - DNA, 33 bp, Homo sapien
ttctctcactgcttaaggtaccctggtttccct

SEQ ID NO: 958018 - DNA, 33 bp, Homo sapien
ttctctcactgcttaatgtaccctggtttccct

SEQ ID NO: 958019 - DNA, 33 bp, Homo sapien
aggaaaaagtttagagcatttgatacagccctg

SEQ ID NO: 958020 - DNA, 33 bp, Homo sapien
aggaaaaagtttagaggatttgatacagccctg

SEQ ID NO: 958021 - DNA, 33 bp, Homo sapien
tctccacatggtaaatcagctcagaattcaatg

SEQ ID NO: 958022 - DNA, 33 bp, Homo sapien
tctccacatggtaaattagctcagaattcaatg

SEQ ID NO: 958023 - DNA, 33 bp, Homo sapien
cctcttctttagatcacgttttgacctgagtac

SEQ ID NO: 958024 - DNA, 33 bp, Homo sapien
cctcttctttagatcatgttttgacctgagtac

SEQ ID NO: 958025 - DNA, 33 bp, Homo sapien
ataaatggtgtagggacaattgagcaactctct

SEQ ID NO: 958026 - DNA, 33 bp, Homo sapien
ataaatggtgtagggataattgagcaactctct

SEQ ID NO: 958027 - DNA, 33 bp, Homo sapien
aatagagttggacacaaagatggtggaggttaa

SEQ ID NO: 958028 - DNA, 33 bp, Homo sapien
aatagagttggacacagagatggtggaggttaa

SEQ ID NO: 958029 - DNA, 33 bp, Homo sapien
tttctttcctggacccccggagcctttgtcgtt

SEQ ID NO: 958030 - DNA, 33 bp, Homo sapien
tttctttcctggaccctcggagcctttgtcgtt

SEQ ID NO: 958031 - DNA, 33 bp, Homo sapien
tttgtcaaactggaaaaacaaaacaaagcaaaa

SEQ ID NO: 958032 - DNA, 33 bp, Homo sapien
tttgtcaaactggaaacacaaaacaaagcaaaa

SEQ ID NO: 958033 - DNA, 33 bp, Homo sapien
atcaaacttttgaacactggttatctgtgggag

SEQ ID NO: 958034 - DNA, 33 bp, Homo sapien
atcaaacttttgaacagtggttatctgtgggag

SEQ ID NO: 958035 - DNA, 33 bp, Homo sapien
ctgctgttaagtcaaaatcccacggttgttatt

SEQ ID NO: 958036 - DNA, 33 bp, Homo sapien
ctgctgttaagtcaaactcccacggttgttatt

SEQ ID NO: 958037 - DNA, 33 bp, Homo sapien
gacttgaattcaaatacgcgttaattagattcc

SEQ ID NO: 958038 - DNA, 33 bp, Homo sapien
gacttgaattcaaatatgcgttaattagattcc

SEQ ID NO: 958039 - DNA, 33 bp, Homo sapien
acctaaatgtgagtccaatagttagctgttgag

SEQ ID NO: 958040 - DNA, 33 bp, Homo sapien
acctaaatgtgagtccgatagttagctgttgag

SEQ ID NO: 958041 - DNA, 33 bp, Homo sapien
tgtcttcttaatagtaacaaatggtctgttctg

SEQ ID NO: 958042 - DNA, 33 bp, Homo sapien
tgtcttcttaatagtagcaaatggtctgttctg

SEQ ID NO: 958043 - DNA, 33 bp, Homo sapien
ggagccagtctctctaaatctgaaatctactcc

SEQ ID NO: 958044 - DNA, 33 bp, Homo sapien
ggagccagtctctctatatctgaaatctactcc

SEQ ID NO: 958045 - DNA, 33 bp, Homo sapien
cagtgactgttacgggaaagtgtttagatacag

SEQ ID NO: 958046 - DNA, 33 bp, Homo sapien
cagtgactgttacggggaagtgtttagatacag

SEQ ID NO: 958047 - DNA, 33 bp, Homo sapien
taggaaactgtctttgaattcattcagtctcac

SEQ ID NO: 958048 - DNA, 33 bp, Homo sapien
taggaaactgtctttgcattcattcagtctcac

SEQ ID NO: 958049 - DNA, 33 bp, Homo sapien
aggcttgaacatcaaagattttcttccgttctg

SEQ ID NO: 958050 - DNA, 33 bp, Homo sapien
aggcttgaacatcaaatattttcttccgttctg

SEQ ID NO: 958051 - DNA, 33 bp, Homo sapien
tgagagataactgttaagcaaccttattggttt

SEQ ID NO: 958052 - DNA, 33 bp, Homo sapien
tgagagataactgttacgcaaccttattggttt

SEQ ID NO: 958053 - DNA, 33 bp, Homo sapien
atttacataatccaagacactaacctttacaac

SEQ ID NO: 958054 - DNA, 33 bp, Homo sapien
atttacataatccaagtcactaacctttacaac

SEQ ID NO: 958055 - DNA, 33 bp, Homo sapien
tcccagctgaaaataccgataaggagggaggga

SEQ ID NO: 958056 - DNA, 33 bp, Homo sapien
tcccagctgaaaatactgataaggagggaggga

SEQ ID NO: 958057 - DNA, 33 bp, Homo sapien
acagtgaccaataaaacgagcataaagtataag

SEQ ID NO: 958058 - DNA, 33 bp, Homo sapien
acagtgaccaataaaatgagcataaagtataag

SEQ ID NO: 958059 - DNA, 33 bp, Homo sapien
taaagctgtgtaccctaactttttaatagttgg

SEQ ID NO: 958060 - DNA, 33 bp, Homo sapien
taaagctgtgtaccctgactttttaatagttgg

SEQ ID NO: 958061 - DNA, 33 bp, Homo sapien
gaaatgcttaccatcacgctgagaatgcacggg

SEQ ID NO: 958062 - DNA, 33 bp, Homo sapien
gaaatgcttaccatcatgctgagaatgcacggg

SEQ ID NO: 958063 - DNA, 33 bp, Homo sapien
tctttacagcaatagcagaagtcaggattcggg

SEQ ID NO: 958064 - DNA, 33 bp, Homo sapien
tctttacagcaatagcggaagtcaggattcggg

SEQ ID NO: 958065 - DNA, 33 bp, Homo sapien
ttaccttgccaggatacgtttcagaattgataa

SEQ ID NO: 958066 - DNA, 33 bp, Homo sapien
ttaccttgccaggatatgtttcagaattgataa

SEQ ID NO: 958067 - DNA, 33 bp, Homo sapien
agctccagacatgctaggttatgcaggtggcat

SEQ ID NO: 958068 - DNA, 33 bp, Homo sapien
agctccagacatgctatgttatgcaggtggcat

SEQ ID NO: 958069 - DNA, 33 bp, Homo sapien
ctagggactggcaaaaattacgttgaccttcag

SEQ ID NO: 958070 - DNA, 33 bp, Homo sapien
ctagggactggcaaaagttacgttgaccttcag

SEQ ID NO: 958071 - DNA, 33 bp, Homo sapien
tgatatacagcgaagaaaaaggatgaattacag

SEQ ID NO: 958072 - DNA, 33 bp, Homo sapien
tgatatacagcgaagagaaaggatgaattacag

SEQ ID NO: 958073 - DNA, 33 bp, Homo sapien
tggccttgacctcagcaccccttgataagtttt

SEQ ID NO: 958074 - DNA, 33 bp, Homo sapien
tggccttgacctcagcgccccttgataagtttt

SEQ ID NO: 958075 - DNA, 33 bp, Homo sapien
agcaagagaacactcaatcctggagagcgctct

SEQ ID NO: 958076 - DNA, 33 bp, Homo sapien
agcaagagaacactcagtcctggagagcgctct

SEQ ID NO: 958077 - DNA, 33 bp, Homo sapien
ttggaccagaggaaaaagggatgaactgggatc

SEQ ID NO: 958078 - DNA, 33 bp, Homo sapien
ttggaccagaggaaaacgggatgaactgggatc

SEQ ID NO: 958079 - DNA, 33 bp, Homo sapien
cattcagaatccagaagattacagctagatgag

SEQ ID NO: 958080 - DNA, 33 bp, Homo sapien
cattcagaatccagaatattacagctagatgag

SEQ ID NO: 958081 - DNA, 33 bp, Homo sapien
ccaggagagaggcctgaaacaatctttcctcac

SEQ ID NO: 958082 - DNA, 33 bp, Homo sapien
ccaggagagaggcctggaacaatctttcctcac

SEQ ID NO: 958083 - DNA, 33 bp, Homo sapien
cccatccaggagtcaacgaaagcttacataaaa

SEQ ID NO: 958084 - DNA, 33 bp, Homo sapien
cccatccaggagtcaatgaaagcttacataaaa

SEQ ID NO: 958085 - DNA, 33 bp, Homo sapien
aactcaactctcctggaagcaagcagatacaaa

SEQ ID NO: 958086 - DNA, 33 bp, Homo sapien
aactcaactctcctgggagcaagcagatacaaa

SEQ ID NO: 958087 - DNA, 33 bp, Homo sapien
ccttctgattgctcacagataataaattataaa

SEQ ID NO: 958088 - DNA, 33 bp, Homo sapien
ccttctgattgctcacggataataaattataaa

SEQ ID NO: 958089 - DNA, 33 bp, Homo sapien
tcattctgagccaaaaaccctatgctgatttat

SEQ ID NO: 958090 - DNA, 33 bp, Homo sapien
tcattctgagccaaaagccctatgctgatttat

SEQ ID NO: 958091 - DNA, 33 bp, Homo sapien
gatggaaaagtaatgcaaggaacttggtaaagt

SEQ ID NO: 958092 - DNA, 33 bp, Homo sapien
gatggaaaagtaatgcgaggaacttggtaaagt

SEQ ID NO: 958093 - DNA, 33 bp, Homo sapien
ttactggtgcatattacatgcttgccagatgcc

SEQ ID NO: 958094 - DNA, 33 bp, Homo sapien
ttactggtgcatattagatgcttgccagatgcc

SEQ ID NO: 958095 - DNA, 33 bp, Homo sapien
gcttttcagagtaagaaaggtaccataaagggc

SEQ ID NO: 958096 - DNA, 33 bp, Homo sapien
gcttttcagagtaagagaggtaccataaagggc

SEQ ID NO: 958097 - DNA, 33 bp, Homo sapien
cttcttctctcctccactcagcagcagatacag

SEQ ID NO: 958098 - DNA, 33 bp, Homo sapien
cttcttctctcctccattcagcagcagatacag

SEQ ID NO: 958099 - DNA, 33 bp, Homo sapien
gtttaaaaatcagaagcattgcaggaaatgaaa

SEQ ID NO: 958100 - DNA, 33 bp, Homo sapien
gtttaaaaatcagaagtattgcaggaaatgaaa

SEQ ID NO: 958101 - DNA, 33 bp, Homo sapien
gacagtgtaacataataaaggcattaaaggtat

SEQ ID NO: 958102 - DNA, 33 bp, Homo sapien
gacagtgtaacataattaaggcattaaaggtat

SEQ ID NO: 958103 - DNA, 33 bp, Homo sapien
attgaagaaaagtctcaaatcaataacctatgc

SEQ ID NO: 958104 - DNA, 33 bp, Homo sapien
attgaagaaaagtctcgaatcaataacctatgc

SEQ ID NO: 958105 - DNA, 33 bp, Homo sapien
gttttagatgagacaaatctgttttaacttata

SEQ ID NO: 958106 - DNA, 33 bp, Homo sapien
gttttagatgagacaagtctgttttaacttata

SEQ ID NO: 958107 - DNA, 33 bp, Homo sapien
caggtggattatctacagcacaattagtaaacc

SEQ ID NO: 958108 - DNA, 33 bp, Homo sapien
caggtggattatctacggcacaattagtaaacc

SEQ ID NO: 958109 - DNA, 33 bp, Homo sapien
gatctgtaacagattcaccaccacagttaacag

SEQ ID NO: 958110 - DNA, 33 bp, Homo sapien
gatctgtaacagattcgccaccacagttaacag

SEQ ID NO: 958111 - DNA, 33 bp, Homo sapien
tttgcacttctgttacaaataacgctgctctgg

SEQ ID NO: 958112 - DNA, 33 bp, Homo sapien
tttgcacttctgttacgaataacgctgctctgg

SEQ ID NO: 958113 - DNA, 33 bp, Homo sapien
aagcctggttccacccacttcctgtcatctttg

SEQ ID NO: 958114 - DNA, 33 bp, Homo sapien
aagcctggttccacccccttcctgtcatctttg

SEQ ID NO: 958115 - DNA, 33 bp, Homo sapien
tacatttctgagtaaactggcaacatcaatgca

SEQ ID NO: 958116 - DNA, 33 bp, Homo sapien
tacatttctgagtaaagtggcaacatcaatgca

SEQ ID NO: 958117 - DNA, 33 bp, Homo sapien
aaatgattaggcaagccacaaattaaaaaaata

SEQ ID NO: 958118 - DNA, 33 bp, Homo sapien
aaatgattaggcaagcgacaaattaaaaaaata

SEQ ID NO: 958119 - DNA, 33 bp, Homo sapien
gtaagtctgggagaaacgcttatctgtgacggt

SEQ ID NO: 958120 - DNA, 33 bp, Homo sapien
gtaagtctgggagaaatgcttatctgtgacggt

SEQ ID NO: 958121 - DNA, 33 bp, Homo sapien
agcagtgaattctgacagctcagtaagacaagg

SEQ ID NO: 958122 - DNA, 33 bp, Homo sapien
agcagtgaattctgacggctcagtaagacaagg

SEQ ID NO: 958123 - DNA, 33 bp, Homo sapien
cagattatatttgaaacagcgcttcatgtgaat

SEQ ID NO: 958124 - DNA, 33 bp, Homo sapien
cagattatatttgaaatagcgcttcatgtgaat

SEQ ID NO: 958125 - DNA, 33 bp, Homo sapien
ttaagcagattggcaaatggtacgtgaggcctg

SEQ ID NO: 958126 - DNA, 33 bp, Homo sapien
ttaagcagattggcaagtggtacgtgaggcctg

SEQ ID NO: 958127 - DNA, 33 bp, Homo sapien
accgcacccagccaaactgtacgtctttgatca

SEQ ID NO: 958128 - DNA, 33 bp, Homo sapien
accgcacccagccaaattgtacgtctttgatca

SEQ ID NO: 958129 - DNA, 33 bp, Homo sapien
agcacaacacttgacaatcatctcccagtgtca

SEQ ID NO: 958130 - DNA, 33 bp, Homo sapien
agcacaacacttgacagtcatctcccagtgtca

SEQ ID NO: 958131 - DNA, 33 bp, Homo sapien
atgaagatctccaggacagtgttagtgtcttcc

SEQ ID NO: 958132 - DNA, 33 bp, Homo sapien
atgaagatctccaggatagtgttagtgtcttcc

SEQ ID NO: 958133 - DNA, 33 bp, Homo sapien
ttgtcatatttataacccctcctcaactaaggc

SEQ ID NO: 958134 - DNA, 33 bp, Homo sapien
ttgtcatatttataactcctcctcaactaaggc

SEQ ID NO: 958135 - DNA, 33 bp, Homo sapien
ctgccgagagaatgaaaagatgtgacagataga

SEQ ID NO: 958136 - DNA, 33 bp, Homo sapien
ctgccgagagaatgaagagatgtgacagataga

SEQ ID NO: 958137 - DNA, 33 bp, Homo sapien
aaacttgacatatgcaatcaacgttaacatcac

SEQ ID NO: 958138 - DNA, 33 bp, Homo sapien
aaacttgacatatgcagtcaacgttaacatcac

SEQ ID NO: 958139 - DNA, 33 bp, Homo sapien
tgtggtatactcacacagtcccttacatcactg

SEQ ID NO: 958140 - DNA, 33 bp, Homo sapien
tgtggtatactcacacggtcccttacatcactg

SEQ ID NO: 958141 - DNA, 33 bp, Homo sapien
gaaccaataatgatcccgagggctaaagggaga

SEQ ID NO: 958142 - DNA, 33 bp, Homo sapien
gaaccaataatgatcctgagggctaaagggaga

SEQ ID NO: 958143 - DNA, 33 bp, Homo sapien
cagagcaggcagtgagaagccaacagtctgaag

SEQ ID NO: 958144 - DNA, 33 bp, Homo sapien
cagagcaggcagtgaggagccaacagtctgaag

SEQ ID NO: 958145 - DNA, 33 bp, Homo sapien
tctgaggactccataaactcagggtccccagaa

SEQ ID NO: 958146 - DNA, 33 bp, Homo sapien
tctgaggactccataagctcagggtccccagaa

SEQ ID NO: 958147 - DNA, 33 bp, Homo sapien
tcccagaatctaaactgagaggacagagacgct

SEQ ID NO: 958148 - DNA, 33 bp, Homo sapien
tcccagaatctaaacttagaggacagagacgct

SEQ ID NO: 958149 - DNA, 33 bp, Homo sapien
caacgtcccctctagaccttgagatgaaacttg

SEQ ID NO: 958150 - DNA, 33 bp, Homo sapien
caacgtcccctctagatcttgagatgaaacttg

SEQ ID NO: 958151 - DNA, 33 bp, Homo sapien
tccaaaatcggaaaaaatctgaagtctgaaaca

SEQ ID NO: 958152 - DNA, 33 bp, Homo sapien
tccaaaatcggaaaaagtctgaagtctgaaaca

SEQ ID NO: 958153 - DNA, 33 bp, Homo sapien
ccccaaagcctgtgtaccttgatctaactgata

SEQ ID NO: 958154 - DNA, 33 bp, Homo sapien
ccccaaagcctgtgtatcttgatctaactgata

SEQ ID NO: 958155 - DNA, 33 bp, Homo sapien
tagcttatcctctcaactgaaaccagtgcatca

SEQ ID NO: 958156 - DNA, 33 bp, Homo sapien
tagcttatcctctcaattgaaaccagtgcatca

SEQ ID NO: 958157 - DNA, 33 bp, Homo sapien
ttgccttccactgtacactctggtttctctcct

SEQ ID NO: 958158 - DNA, 33 bp, Homo sapien
ttgccttccactgtactctctggtttctctcct

SEQ ID NO: 958159 - DNA, 33 bp, Homo sapien
cagttcttaattacaacgtacctgccagctaaa

SEQ ID NO: 958160 - DNA, 33 bp, Homo sapien
cagttcttaattacaatgtacctgccagctaaa

SEQ ID NO: 958161 - DNA, 33 bp, Homo sapien
ctgctgaatggtcaaacaagatgaggactgaca

SEQ ID NO: 958162 - DNA, 33 bp, Homo sapien
ctgctgaatggtcaaataagatgaggactgaca

SEQ ID NO: 958163 - DNA, 33 bp, Homo sapien
aaacagctggctttgcagaatatatgcctgtag

SEQ ID NO: 958164 - DNA, 33 bp, Homo sapien
aaacagctggctttgcggaatatatgcctgtag

SEQ ID NO: 958165 - DNA, 33 bp, Homo sapien
gcaatgtgggggaataactgcacctaggaatcc

SEQ ID NO: 958166 - DNA, 33 bp, Homo sapien
gcaatgtgggggaatagctgcacctaggaatcc

SEQ ID NO: 958167 - DNA, 33 bp, Homo sapien
gttctcttatttcataccttcatcctttctggt

SEQ ID NO: 958168 - DNA, 33 bp, Homo sapien
gttctcttatttcatatcttcatcctttctggt

SEQ ID NO: 958169 - DNA, 33 bp, Homo sapien
gcaagtgtttcataaaaaaggaatgatcattga

SEQ ID NO: 958170 - DNA, 33 bp, Homo sapien
gcaagtgtttcataaagaaggaatgatcattga

SEQ ID NO: 958171 - DNA, 33 bp, Homo sapien
ttgggataattttgaccgcataaaatgattcgg

SEQ ID NO: 958172 - DNA, 33 bp, Homo sapien
ttgggataattttgactgcataaaatgattcgg

SEQ ID NO: 958173 - DNA, 33 bp, Homo sapien
cacttcaaaaccactaaaaccagtttataagtc

SEQ ID NO: 958174 - DNA, 33 bp, Homo sapien
cacttcaaaaccactagaaccagtttataagtc

SEQ ID NO: 958175 - DNA, 33 bp, Homo sapien
aagaaaaaaatatgagaactaggcttaggtaat

SEQ ID NO: 958176 - DNA, 33 bp, Homo sapien
aagaaaaaaatatgaggactaggcttaggtaat

SEQ ID NO: 958177 - DNA, 33 bp, Homo sapien
acctaaacatgttgcacgccatttgtgcccatg

SEQ ID NO: 958178 - DNA, 33 bp, Homo sapien
acctaaacatgttgcaggccatttgtgcccatg

SEQ ID NO: 958179 - DNA, 33 bp, Homo sapien
tttaaaacaagctcataaaaataaaacaaaacc

SEQ ID NO: 958180 - DNA, 33 bp, Homo sapien
tttaaaacaagctcattaaaataaaacaaaacc

SEQ ID NO: 958181 - DNA, 33 bp, Homo sapien
attcagtaaaaacatacgacatctagctgtcca

SEQ ID NO: 958182 - DNA, 33 bp, Homo sapien
attcagtaaaaacatatgacatctagctgtcca

SEQ ID NO: 958183 - DNA, 33 bp, Homo sapien
atgcatccagatttaagaatcaatgctctaaaa

SEQ ID NO: 958184 - DNA, 33 bp, Homo sapien
atgcatccagatttaataatcaatgctctaaaa

SEQ ID NO: 958185 - DNA, 33 bp, Homo sapien
acggtataattaaccacggtgcttgtttaatta

SEQ ID NO: 958186 - DNA, 33 bp, Homo sapien
acggtataattaaccatggtgcttgtttaatta

SEQ ID NO: 958187 - DNA, 33 bp, Homo sapien
aatgtgtttttgttatcaaattctgtccatggt

SEQ ID NO: 958188 - DNA, 33 bp, Homo sapien
aatgtgtttttgttattaaattctgtccatggt

SEQ ID NO: 958189 - DNA, 33 bp, Homo sapien
ggaaagagatactctcaagctaaaatttttaat

SEQ ID NO: 958190 - DNA, 33 bp, Homo sapien
ggaaagagatactctcgagctaaaatttttaat

SEQ ID NO: 958191 - DNA, 33 bp, Homo sapien
tatgtgagatgaagtccgaaacaataccatgtc

SEQ ID NO: 958192 - DNA, 33 bp, Homo sapien
tatgtgagatgaagtctgaaacaataccatgtc

SEQ ID NO: 958193 - DNA, 33 bp, Homo sapien
ctaaactagaattcgcaattattcatggtatac

SEQ ID NO: 958194 - DNA, 33 bp, Homo sapien
ctaaactagaattcgcgattattcatggtatac

SEQ ID NO: 958195 - DNA, 33 bp, Homo sapien
tttcaaccttaactggaaccctcatttctgttg

SEQ ID NO: 958196 - DNA, 33 bp, Homo sapien
tttcaaccttaactgggaccctcatttctgttg

SEQ ID NO: 958197 - DNA, 33 bp, Homo sapien
gtttctgtaatcagaaaactgacttgttggctt

SEQ ID NO: 958198 - DNA, 33 bp, Homo sapien
gtttctgtaatcagaagactgacttgttggctt

SEQ ID NO: 958199 - DNA, 33 bp, Homo sapien
gatggaaagacacatacggtacaaaattacagg

SEQ ID NO: 958200 - DNA, 33 bp, Homo sapien
gatggaaagacacatatggtacaaaattacagg

SEQ ID NO: 958201 - DNA, 33 bp, Homo sapien
catttctcaaactccaaaatacttgcattcttc

SEQ ID NO: 958202 - DNA, 33 bp, Homo sapien
catttctcaaactccagaatacttgcattcttc

SEQ ID NO: 958203 - DNA, 33 bp, Homo sapien
tctggctagtcgacaaaatcctttctaaccagt

SEQ ID NO: 958204 - DNA, 33 bp, Homo sapien
tctggctagtcgacaagatcctttctaaccagt

SEQ ID NO: 958205 - DNA, 33 bp, Homo sapien
tgcagattagagtagaatagagaaacgtgacaa

SEQ ID NO: 958206 - DNA, 33 bp, Homo sapien
tgcagattagagtagactagagaaacgtgacaa

SEQ ID NO: 958207 - DNA, 33 bp, Homo sapien
tcaaatgcccagactaacacgtcttccttaagc

SEQ ID NO: 958208 - DNA, 33 bp, Homo sapien
tcaaatgcccagactaccacgtcttccttaagc

SEQ ID NO: 958209 - DNA, 33 bp, Homo sapien
ttacatatactctgccactaggagttctgcctg

SEQ ID NO: 958210 - DNA, 33 bp, Homo sapien
ttacatatactctgccgctaggagttctgcctg

SEQ ID NO: 958211 - DNA, 33 bp, Homo sapien
tgagactatgacacacaaatcagtccgtctgca

SEQ ID NO: 958212 - DNA, 33 bp, Homo sapien
tgagactatgacacaccaatcagtccgtctgca

SEQ ID NO: 958213 - DNA, 33 bp, Homo sapien
ggacagaattgcctcacgatgcacttggttgga

SEQ ID NO: 958214 - DNA, 33 bp, Homo sapien
ggacagaattgcctcatgatgcacttggttgga

SEQ ID NO: 958215 - DNA, 33 bp, Homo sapien
cttgatccatactctccacagctgattaattaa

SEQ ID NO: 958216 - DNA, 33 bp, Homo sapien
cttgatccatactctctacagctgattaattaa

SEQ ID NO: 958217 - DNA, 33 bp, Homo sapien
tttgtaagcaccatctcaatgttcccatttgac

SEQ ID NO: 958218 - DNA, 33 bp, Homo sapien
tttgtaagcaccatcttaatgttcccatttgac

SEQ ID NO: 958219 - DNA, 33 bp, Homo sapien
aaaagcaaatgaagccaggcatggttgaaacaa

SEQ ID NO: 958220 - DNA, 33 bp, Homo sapien
aaaagcaaatgaagcccggcatggttgaaacaa

SEQ ID NO: 958221 - DNA, 33 bp, Homo sapien
gttttgagtcatttaaggctaaccatcagagtt

SEQ ID NO: 958222 - DNA, 33 bp, Homo sapien
gttttgagtcatttaatgctaaccatcagagtt

SEQ ID NO: 958223 - DNA, 33 bp, Homo sapien
catgtccataagatgaagtaactaactatacct

SEQ ID NO: 958224 - DNA, 33 bp, Homo sapien
catgtccataagatgaggtaactaactatacct

SEQ ID NO: 958225 - DNA, 33 bp, Homo sapien
actgcccccagaatgacgtgagaagtccttcaa

SEQ ID NO: 958226 - DNA, 33 bp, Homo sapien
actgcccccagaatgatgtgagaagtccttcaa

SEQ ID NO: 958227 - DNA, 33 bp, Homo sapien
tgctgaccaatccagaaaaatgtctcaagtaca

SEQ ID NO: 958228 - DNA, 33 bp, Homo sapien
tgctgaccaatccagagaaatgtctcaagtaca

SEQ ID NO: 958229 - DNA, 33 bp, Homo sapien
aaggaggaaaaccagacgagaggcaccactggg

SEQ ID NO: 958230 - DNA, 33 bp, Homo sapien
aaggaggaaaaccagatgagaggcaccactggg

SEQ ID NO: 958231 - DNA, 33 bp, Homo sapien
ctgtaattttgtgtgacgattcctgactcccct

SEQ ID NO: 958232 - DNA, 33 bp, Homo sapien
ctgtaattttgtgtgatgattcctgactcccct

SEQ ID NO: 958233 - DNA, 33 bp, Homo sapien
tgagcatcaagtacacgctgaactagcatctag

SEQ ID NO: 958234 - DNA, 33 bp, Homo sapien
tgagcatcaagtacactctgaactagcatctag

SEQ ID NO: 958235 - DNA, 33 bp, Homo sapien
gcttacacatgcttccacagtactagttgtttc

SEQ ID NO: 958236 - DNA, 33 bp, Homo sapien
gcttacacatgcttcctcagtactagttgtttc

SEQ ID NO: 958237 - DNA, 33 bp, Homo sapien
tggtctgccttgaacacgggctttaggatccta

SEQ ID NO: 958238 - DNA, 33 bp, Homo sapien
tggtctgccttgaacatgggctttaggatccta

SEQ ID NO: 958239 - DNA, 33 bp, Homo sapien
ggtcggcatactgttccatagagttggttcgat

SEQ ID NO: 958240 - DNA, 33 bp, Homo sapien
ggtcggcatactgttctatagagttggttcgat

SEQ ID NO: 958241 - DNA, 33 bp, Homo sapien
tccaacatcgccagtgcattggctgggttgttc

SEQ ID NO: 958242 - DNA, 33 bp, Homo sapien
tccaacatcgccagtggattggctgggttgttc

SEQ ID NO: 958243 - DNA, 33 bp, Homo sapien
tagttgcaaaggataacgcccaaaatattgttt

SEQ ID NO: 958244 - DNA, 33 bp, Homo sapien
tagttgcaaaggataatgcccaaaatattgttt

SEQ ID NO: 958245 - DNA, 33 bp, Homo sapien
aggttgaaaaagacatcacggaaagatatgtca

SEQ ID NO: 958246 - DNA, 33 bp, Homo sapien
aggttgaaaaagacatgacggaaagatatgtca

SEQ ID NO: 958247 - DNA, 33 bp, Homo sapien
tgctcttgaccttaaacgttccctctcacttca

SEQ ID NO: 958248 - DNA, 33 bp, Homo sapien
tgctcttgaccttaaatgttccctctcacttca

SEQ ID NO: 958249 - DNA, 33 bp, Homo sapien
aggcatcacattgttacctcaacattttcagaa

SEQ ID NO: 958250 - DNA, 33 bp, Homo sapien
aggcatcacattgttatctcaacattttcagaa

SEQ ID NO: 958251 - DNA, 33 bp, Homo sapien
taggaagaggataggccaatttatagattgggt

SEQ ID NO: 958252 - DNA, 33 bp, Homo sapien
taggaagaggataggctaatttatagattgggt

SEQ ID NO: 958253 - DNA, 33 bp, Homo sapien
cttttcaagaccatcaatctctgcactctgaat

SEQ ID NO: 958254 - DNA, 33 bp, Homo sapien
cttttcaagaccatcagtctctgcactctgaat

SEQ ID NO: 958255 - DNA, 33 bp, Homo sapien
gctggaagtatactacaacaattttcactgcac

SEQ ID NO: 958256 - DNA, 33 bp, Homo sapien
gctggaagtatactacgacaattttcactgcac

SEQ ID NO: 958257 - DNA, 33 bp, Homo sapien
aaatagactttaatgccagttgaccatggtaga

SEQ ID NO: 958258 - DNA, 33 bp, Homo sapien
aaatagactttaatgctagttgaccatggtaga

SEQ ID NO: 958259 - DNA, 33 bp, Homo sapien
aatactaaattaaaaaaagcctagctgctatgc

SEQ ID NO: 958260 - DNA, 33 bp, Homo sapien
aatactaaattaaaaagagcctagctgctatgc

SEQ ID NO: 958261 - DNA, 33 bp, Homo sapien
aggaaattctgacgcaccatatcatgaaccttg

SEQ ID NO: 958262 - DNA, 33 bp, Homo sapien
aggaaattctgacgcatcatatcatgaaccttg

SEQ ID NO: 958263 - DNA, 33 bp, Homo sapien
tgaatatggtcaaatgaaaaattcagtctgacc

SEQ ID NO: 958264 - DNA, 33 bp, Homo sapien
tgaatatggtcaaatggaaaattcagtctgacc

SEQ ID NO: 958265 - DNA, 33 bp, Homo sapien
gttcacagtctgttcaagggaactcaagacatt

SEQ ID NO: 958266 - DNA, 33 bp, Homo sapien
gttcacagtctgttcaggggaactcaagacatt

SEQ ID NO: 958267 - DNA, 33 bp, Homo sapien
ctcctgccttcccagccaatcttcccagtagcc

SEQ ID NO: 958268 - DNA, 33 bp, Homo sapien
ctcctgccttcccagcgaatcttcccagtagcc

SEQ ID NO: 958269 - DNA, 33 bp, Homo sapien
ttccggaaacaatgtccaaaccacactgcaagc

SEQ ID NO: 958270 - DNA, 33 bp, Homo sapien
ttccggaaacaatgtcgaaaccacactgcaagc

SEQ ID NO: 958271 - DNA, 33 bp, Homo sapien
ggatgatattaatcccaacatcgcagggaatgt

SEQ ID NO: 958272 - DNA, 33 bp, Homo sapien
ggatgatattaatcccgacatcgcagggaatgt

SEQ ID NO: 958273 - DNA, 33 bp, Homo sapien
gataataggagtaatacctgtctagtatattat

SEQ ID NO: 958274 - DNA, 33 bp, Homo sapien
gataataggagtaatatctgtctagtatattat

SEQ ID NO: 958275 - DNA, 33 bp, Homo sapien
agaccgcaaaggtagcaacatccaggactgttg

SEQ ID NO: 958276 - DNA, 33 bp, Homo sapien
agaccgcaaaggtagcgacatccaggactgttg

SEQ ID NO: 958277 - DNA, 33 bp, Homo sapien
ctccctcaggatataaatggatctctctctggt

SEQ ID NO: 958278 - DNA, 33 bp, Homo sapien
ctccctcaggatataagtggatctctctctggt

SEQ ID NO: 958279 - DNA, 33 bp, Homo sapien
tgcttaaagaatacaaaattacagccagatagg

SEQ ID NO: 958280 - DNA, 33 bp, Homo sapien
tgcttaaagaatacaagattacagccagatagg

SEQ ID NO: 958281 - DNA, 33 bp, Homo sapien
gtatttcagaatgtgaagtgtttggagataaag

SEQ ID NO: 958282 - DNA, 33 bp, Homo sapien
gtatttcagaatgtgatgtgtttggagataaag

SEQ ID NO: 958283 - DNA, 33 bp, Homo sapien
tgcaattcactgacacaaggaagactgctggag

SEQ ID NO: 958284 - DNA, 33 bp, Homo sapien
tgcaattcactgacacgaggaagactgctggag

SEQ ID NO: 958285 - DNA, 33 bp, Homo sapien
caccacagatctatgacggggaccatgcgattg

SEQ ID NO: 958286 - DNA, 33 bp, Homo sapien
caccacagatctatgagggggaccatgcgattg

SEQ ID NO: 958287 - DNA, 33 bp, Homo sapien
agcttaggtcactccccgaggttctctggtagg

SEQ ID NO: 958288 - DNA, 33 bp, Homo sapien
agcttaggtcactccctgaggttctctggtagg

SEQ ID NO: 958289 - DNA, 33 bp, Homo sapien
ggattcacatttagaaatactatgtgcctgtca

SEQ ID NO: 958290 - DNA, 33 bp, Homo sapien
ggattcacatttagaagtactatgtgcctgtca

SEQ ID NO: 958291 - DNA, 33 bp, Homo sapien
ggtgttagaaggttgacgtttagctctgtcagg

SEQ ID NO: 958292 - DNA, 33 bp, Homo sapien
ggtgttagaaggttgatgtttagctctgtcagg

SEQ ID NO: 958293 - DNA, 33 bp, Homo sapien
acatctgggctacagcaaaggtgaccaagtgtc

SEQ ID NO: 958294 - DNA, 33 bp, Homo sapien
acatctgggctacagcgaaggtgaccaagtgtc

SEQ ID NO: 958295 - DNA, 33 bp, Homo sapien
tcttaaaacatcgtgaaattattttgcaatttc

SEQ ID NO: 958296 - DNA, 33 bp, Homo sapien
tcttaaaacatcgtgagattattttgcaatttc

SEQ ID NO: 958297 - DNA, 33 bp, Homo sapien
agcatgaaggcaagaacgaactaggcgaggaac

SEQ ID NO: 958298 - DNA, 33 bp, Homo sapien
agcatgaaggcaagaatgaactaggcgaggaac

SEQ ID NO: 958299 - DNA, 33 bp, Homo sapien
gcaaagtccaatctgagaattattttccttcta

SEQ ID NO: 958300 - DNA, 33 bp, Homo sapien
gcaaagtccaatctgataattattttccttcta

SEQ ID NO: 958301 - DNA, 33 bp, Homo sapien
cttcctgccttttataccattgttttgtgactt

SEQ ID NO: 958302 - DNA, 33 bp, Homo sapien
cttcctgccttttatagcattgttttgtgactt

SEQ ID NO: 958303 - DNA, 33 bp, Homo sapien
gggccacagtgcccagcctatattttgctttaa

SEQ ID NO: 958304 - DNA, 33 bp, Homo sapien
gggccacagtgcccagtctatattttgctttaa

SEQ ID NO: 958305 - DNA, 33 bp, Homo sapien
gaattacttacccagaaggaaaccagccattat

SEQ ID NO: 958306 - DNA, 33 bp, Homo sapien
gaattacttacccagagggaaaccagccattat

SEQ ID NO: 958307 - DNA, 33 bp, Homo sapien
ttcatcctcattttacccagctcctatttaaga

SEQ ID NO: 958308 - DNA, 33 bp, Homo sapien
ttcatcctcattttacgcagctcctatttaaga

SEQ ID NO: 958309 - DNA, 33 bp, Homo sapien
gaaagtaaaggagtaaaagaatagctactcaag

SEQ ID NO: 958310 - DNA, 33 bp, Homo sapien
gaaagtaaaggagtaagagaatagctactcaag

SEQ ID NO: 958311 - DNA, 33 bp, Homo sapien
ttttagctttgtaggaaatttttttcttctcct

SEQ ID NO: 958312 - DNA, 33 bp, Homo sapien
ttttagctttgtaggacatttttttcttctcct

SEQ ID NO: 958313 - DNA, 33 bp, Homo sapien
aaaagggctacggtcacccttgagcatagctgg

SEQ ID NO: 958314 - DNA, 33 bp, Homo sapien
aaaagggctacggtcatccttgagcatagctgg

SEQ ID NO: 958315 - DNA, 33 bp, Homo sapien
gagctgccaatgctaacacctgttgtagacttt

SEQ ID NO: 958316 - DNA, 33 bp, Homo sapien
gagctgccaatgctaatacctgttgtagacttt

SEQ ID NO: 958317 - DNA, 33 bp, Homo sapien; identical to SEQ ID NO: 958315

SEQ ID NO: 958318 - DNA, 33 bp, Homo sapien; identical to SEQ ID NO: 958316

SEQ ID NO: 958319 - DNA, 33 bp, Homo sapien
cccagcccacgcatcacccagttttaaatatct

SEQ ID NO: 958320 - DNA, 33 bp, Homo sapien
cccagcccacgcatcatccagttttaaatatct

SEQ ID NO: 958321 - DNA, 33 bp, Homo sapien
ttaaattctgttataacggtatctgtatgtgtg

SEQ ID NO: 958322 - DNA, 33 bp, Homo sapien
ttaaattctgttataatggtatctgtatgtgtg

SEQ ID NO: 958323 - DNA, 33 bp, Homo sapien
cagtttatgagatattgaataggctacatgggc

SEQ ID NO: 958324 - DNA, 33 bp, Homo sapien
cagtttatgagatatttaataggctacatgggc

SEQ ID NO: 958325 - DNA, 33 bp, Homo sapien
tggtgaagtccacccaatgcatggagagaacct

SEQ ID NO: 958326 - DNA, 33 bp, Homo sapien
tggtgaagtccacccagtgcatggagagaacct

SEQ ID NO: 958327 - DNA, 33 bp, Homo sapien
agcgttgagttgccccacatgagtacagcctcc

SEQ ID NO: 958328 - DNA, 33 bp, Homo sapien
agcgttgagttgcccctcatgagtacagcctcc

SEQ ID NO: 958329 - DNA, 33 bp, Homo sapien
atccccaactaaacaagggagaaatggagtcag

SEQ ID NO: 958330 - DNA, 33 bp, Homo sapien
atccccaactaaacaatggagaaatggagtcag

SEQ ID NO: 958331 - DNA, 33 bp, Homo sapien
ccctttcagcttctgacacctttgtgcaagcct

SEQ ID NO: 958332 - DNA, 33 bp, Homo sapien
ccctttcagcttctgatacctttgtgcaagcct

SEQ ID NO: 958333 - DNA, 33 bp, Homo sapien
atacatgatcgatggaaagaagaaacaaatcct

SEQ ID NO: 958334 - DNA, 33 bp, Homo sapien
atacatgatcgatggacagaagaaacaaatcct

SEQ ID NO: 958335 - DNA, 33 bp, Homo sapien
tgaatacatgattacaatgagacaaaatgaaga

SEQ ID NO: 958336 - DNA, 33 bp, Homo sapien
tgaatacatgattacagtgagacaaaatgaaga

SEQ ID NO: 958337 - DNA, 33 bp, Homo sapien
gatgaaagaatagcctcactcagctgctaatcg

SEQ ID NO: 958338 - DNA, 33 bp, Homo sapien
gatgaaagaatagccttactcagctgctaatcg

SEQ ID NO: 958339 - DNA, 33 bp, Homo sapien
ataagaaattggcctcagaacccaaagaactta

SEQ ID NO: 958340 - DNA, 33 bp, Homo sapien
ataagaaattggcctcggaacccaaagaactta

SEQ ID NO: 958341 - DNA, 33 bp, Homo sapien
agagtgattttggcaacgtgtgaagtctatgtg

SEQ ID NO: 958342 - DNA, 33 bp, Homo sapien
agagtgattttggcaatgtgtgaagtctatgtg

SEQ ID NO: 958343 - DNA, 33 bp, Homo sapien
gaaacaaaggatctcacaatgctcagaggcact

SEQ ID NO: 958344 - DNA, 33 bp, Homo sapien
gaaacaaaggatctcataatgctcagaggcact

SEQ ID NO: 958345 - DNA, 33 bp, Homo sapien
gtgagtgataagaacaaatatgcaatccagaag

SEQ ID NO: 958346 - DNA, 33 bp, Homo sapien
gtgagtgataagaacacatatgcaatccagaag

SEQ ID NO: 958347 - DNA, 33 bp, Homo sapien
gttcagtgtgaccaaaatacagaattatagagt

SEQ ID NO: 958348 - DNA, 33 bp, Homo sapien
gttcagtgtgaccaaagtacagaattatagagt

SEQ ID NO: 958349 - DNA, 33 bp, Homo sapien
gggtcatgtaacctgaacagatgaggctctgga

SEQ ID NO: 958350 - DNA, 33 bp, Homo sapien
gggtcatgtaacctgagcagatgaggctctgga

SEQ ID NO: 958351 - DNA, 33 bp, Homo sapien
attgcaccaaaatgaccacaaaagtgtaggagc

SEQ ID NO: 958352 - DNA, 33 bp, Homo sapien
attgcaccaaaatgacgacaaaagtgtaggagc

SEQ ID NO: 958353 - DNA, 33 bp, Homo sapien
actccaggatcgataacttaggcttctatttta

SEQ ID NO: 958354 - DNA, 33 bp, Homo sapien
actccaggatcgataatttaggcttctatttta

SEQ ID NO: 958355 - DNA, 33 bp, Homo sapien
atgacatatagtacacagcagaaaagggctttc

SEQ ID NO: 958356 - DNA, 33 bp, Homo sapien
atgacatatagtacaccgcagaaaagggctttc

SEQ ID NO: 958357 - DNA, 33 bp, Homo sapien
cattgaagcagggaaagaattggagcacaaagg

SEQ ID NO: 958358 - DNA, 33 bp, Homo sapien
cattgaagcagggaaataattggagcacaaagg

SEQ ID NO: 958359 - DNA, 33 bp, Homo sapien
ctatttatttggttcacagtctgttgaccccta

SEQ ID NO: 958360 - DNA, 33 bp, Homo sapien
ctatttatttggttcatagtctgttgaccccta

SEQ ID NO: 958361 - DNA, 33 bp, Homo sapien
tgctcattgtgagccaataaattgactttctgg

SEQ ID NO: 958362 - DNA, 33 bp, Homo sapien
tgctcattgtgagccagtaaattgactttctgg

SEQ ID NO: 958363 - DNA, 33 bp, Homo sapien
cttttttcttattaagcctgaatctgagacaag

SEQ ID NO: 958364 - DNA, 33 bp, Homo sapien
cttttttcttattaagtctgaatctgagacaag

SEQ ID NO: 958365 - DNA, 33 bp, Homo sapien
aattataactgaggaaattatgacagtgaaaga

SEQ ID NO: 958366 - DNA, 33 bp, Homo sapien
aattataactgaggaacttatgacagtgaaaga

SEQ ID NO: 958367 - DNA, 33 bp, Homo sapien
tacagtgaaagaatccaactatggtaattcaag

SEQ ID NO: 958368 - DNA, 33 bp, Homo sapien
tacagtgaaagaatcccactatggtaattcaag

SEQ ID NO: 958369 - DNA, 33 bp, Homo sapien
aggagttcacctctaacagaataaactcccact

SEQ ID NO: 958370 - DNA, 33 bp, Homo sapien
aggagttcacctctaatagaataaactcccact

SEQ ID NO: 958371 - DNA, 33 bp, Homo sapien
aaatactgccggtgacagaagctgcttaatcta

SEQ ID NO: 958372 - DNA, 33 bp, Homo sapien
aaatactgccggtgacggaagctgcttaatcta

SEQ ID NO: 958373 - DNA, 33 bp, Homo sapien
tctggagtactatttcacaaagtataattcatg

SEQ ID NO: 958374 - DNA, 33 bp, Homo sapien
tctggagtactatttcccaaagtataattcatg

SEQ ID NO: 958375 - DNA, 33 bp, Homo sapien
gagaaaaacacactgcacatgataaggctgtca

SEQ ID NO: 958376 - DNA, 33 bp, Homo sapien
gagaaaaacacactgcgcatgataaggctgtca

SEQ ID NO: 958377 - DNA, 33 bp, Homo sapien
ttcagagaaaagaggaatcaagaatctaagtat

SEQ ID NO: 958378 - DNA, 33 bp, Homo sapien
ttcagagaaaagaggagtcaagaatctaagtat

SEQ ID NO: 958379 - DNA, 33 bp, Homo sapien
ggagagagataaggatgaatatgccattgactt

SEQ ID NO: 958380 - DNA, 33 bp, Homo sapien
ggagagagataaggattaatatgccattgactt

SEQ ID NO: 958381 - DNA, 33 bp, Homo sapien
ttctgacagcattaaagacctaaccgaggattg

SEQ ID NO: 958382 - DNA, 33 bp, Homo sapien
ttctgacagcattaaatacctaaccgaggattg

SEQ ID NO: 958383 - DNA, 33 bp, Homo sapien
gacaattgccatgcagacgataaaagggaggca

SEQ ID NO: 958384 - DNA, 33 bp, Homo sapien
gacaattgccatgcaggcgataaaagggaggca

SEQ ID NO: 958385 - DNA, 33 bp, Homo sapien
tttattgtagctctcaacacctttttttcttat

SEQ ID NO: 958386 - DNA, 33 bp, Homo sapien
tttattgtagctctcatcacctttttttcttat

SEQ ID NO: 958387 - DNA, 33 bp, Homo sapien
aaactactagtcacaaaggctgcagctcaaggt

SEQ ID NO: 958388 - DNA, 33 bp, Homo sapien
aaactactagtcacaacggctgcagctcaaggt

SEQ ID NO: 958389 - DNA, 33 bp, Homo sapien
gagtaacattcaaaaagttcaagacaccagtct

SEQ ID NO: 958390 - DNA, 33 bp, Homo sapien
gagtaacattcaaaaatttcaagacaccagtct

SEQ ID NO: 958391 - DNA, 33 bp, Homo sapien
gtgaccgggttggctcacctgtgggactgtact

SEQ ID NO: 958392 - DNA, 33 bp, Homo sapien
gtgaccgggttggctcgcctgtgggactgtact

SEQ ID NO: 958393 - DNA, 33 bp, Homo sapien
ggtcctacagccagtaagtgatgtaggttggat

SEQ ID NO: 958394 - DNA, 33 bp, Homo sapien
ggtcctacagccagtaggtgatgtaggttggat

SEQ ID NO: 958395 - DNA, 33 bp, Homo sapien
ctcagaaatcatagcacagtggctggacatttt

SEQ ID NO: 958396 - DNA, 33 bp, Homo sapien
ctcagaaatcatagcagagtggctggacatttt

SEQ ID NO: 958397 - DNA, 33 bp, Homo sapien
catggagcagctagaaattcacctcaacatact

SEQ ID NO: 958398 - DNA, 33 bp, Homo sapien
catggagcagctagaagttcacctcaacatact

SEQ ID NO: 958399 - DNA, 33 bp, Homo sapien
ttctataaaccagccaaggggtaaggtgcgcag

SEQ ID NO: 958400 - DNA, 33 bp, Homo sapien
ttctataaaccagccacggggtaaggtgcgcag

SEQ ID NO: 958401 - DNA, 33 bp, Homo sapien
tcgggaaggtttagagaagagaaatacccattg

SEQ ID NO: 958402 - DNA, 33 bp, Homo sapien
tcgggaaggtttagaggagagaaatacccattg

SEQ ID NO: 958403 - DNA, 33 bp, Homo sapien
catctcacctggacaggattgttgtatgaatga

SEQ ID NO: 958404 - DNA, 33 bp, Homo sapien
catctcacctggacagtattgttgtatgaatga

SEQ ID NO: 958405 - DNA, 33 bp, Homo sapien
tcaggatccttgaaacccatctcacctggacag

SEQ ID NO: 958406 - DNA, 33 bp, Homo sapien
tcaggatccttgaaacgcatctcacctggacag

SEQ ID NO: 958407 - DNA, 33 bp, Homo sapien
caaaccagagaagttaaccttggcctccgcttt

SEQ ID NO: 958408 - DNA, 33 bp, Homo sapien
caaaccagagaagttagccttggcctccgcttt

SEQ ID NO: 958409 - DNA, 33 bp, Homo sapien
gaagagccaaagacatcatcactgaacatccct

SEQ ID NO: 958410 - DNA, 33 bp, Homo sapien
gaagagccaaagacattatcactgaacatccct

SEQ ID NO: 958411 - DNA, 33 bp, Homo sapien
gattgtctgctgggtaacttgatgaaagagggc

SEQ ID NO: 958412 - DNA, 33 bp, Homo sapien
gattgtctgctgggtagcttgatgaaagagggc

SEQ ID NO: 958413 - DNA, 33 bp, Homo sapien
gtgagctccatgaagcaaaatcaatgttggttt

SEQ ID NO: 958414 - DNA, 33 bp, Homo sapien
gtgagctccatgaagcgaaatcaatgttggttt

SEQ ID NO: 958415 - DNA, 33 bp, Homo sapien
ctaagtggaaaatgcaaatcagcaaaaaggcag

SEQ ID NO: 958416 - DNA, 33 bp, Homo sapien
ctaagtggaaaatgcagatcagcaaaaaggcag

SEQ ID NO: 958417 - DNA, 33 bp, Homo sapien
agatgattgagtagaacgagggagggggtttta

SEQ ID NO: 958418 - DNA, 33 bp, Homo sapien
agatgattgagtagaatgagggagggggtttta

SEQ ID NO: 958419 - DNA, 33 bp, Homo sapien
agagaagccagagacaaaagttacccgtgaaag

SEQ ID NO: 958420 - DNA, 33 bp, Homo sapien
agagaagccagagacagaagttacccgtgaaag

SEQ ID NO: 958421 - DNA, 33 bp, Homo sapien
gcagcaaggagttagacacaacatttagagact

SEQ ID NO: 958422 - DNA, 33 bp, Homo sapien
gcagcaaggagttagatacaacatttagagact

SEQ ID NO: 958423 - DNA, 33 bp, Homo sapien
tctgttggctaaagcactcacaagccattcagc

SEQ ID NO: 958424 - DNA, 33 bp, Homo sapien
tctgttggctaaagcagtcacaagccattcagc

SEQ ID NO: 958425 - DNA, 33 bp, Homo sapien
agcatgagatttgtacacagagcctaactatat

SEQ ID NO: 958426 - DNA, 33 bp, Homo sapien
agcatgagatttgtacgcagagcctaactatat

SEQ ID NO: 958427 - DNA, 33 bp, Homo sapien
aaatattagtaagttcacctgttccatttactc

SEQ ID NO: 958428 - DNA, 33 bp, Homo sapien
aaatattagtaagttcgcctgttccatttactc

SEQ ID NO: 958429 - DNA, 33 bp, Homo sapien
ttatgacatctgggacaggacaatttgaaatct

SEQ ID NO: 958430 - DNA, 33 bp, Homo sapien
ttatgacatctgggacgggacaatttgaaatct

SEQ ID NO: 958431 - DNA, 33 bp, Homo sapien
tcaggctgagttggacgcttggcaattctgagt

SEQ ID NO: 958432 - DNA, 33 bp, Homo sapien
tcaggctgagttggactcttggcaattctgagt

SEQ ID NO: 958433 - DNA, 33 bp, Homo sapien
ttttccagtgcagtcaaaatcctatctagctat

SEQ ID NO: 958434 - DNA, 33 bp, Homo sapien
ttttccagtgcagtcacaatcctatctagctat

SEQ ID NO: 958435 - DNA, 33 bp, Homo sapien
actactgtctaattacaataaagtaacttgatt

SEQ ID NO: 958436 - DNA, 33 bp, Homo sapien
actactgtctaattacgataaagtaacttgatt

SEQ ID NO: 958437 - DNA, 33 bp, Homo sapien
acagtcaggtgaaaacaagtggcaagggcaggt

SEQ ID NO: 958438 - DNA, 33 bp, Homo sapien
acagtcaggtgaaaacgagtggcaagggcaggt

SEQ ID NO: 958439 - DNA, 33 bp, Homo sapien
ctttattctgtagctgccaagtctttaggtatt

SEQ ID NO: 958440 - DNA, 33 bp, Homo sapien
ctttattctgtagctgtcaagtctttaggtatt

SEQ ID NO: 958441 - DNA, 33 bp, Homo sapien
ttgctacagtagcccaagtgaactaagacagat

SEQ ID NO: 958442 - DNA, 33 bp, Homo sapien
ttgctacagtagcccaggtgaactaagacagat

SEQ ID NO: 958443 - DNA, 33 bp, Homo sapien
tgtctccaggcaataacggtccctggctgtttc

SEQ ID NO: 958444 - DNA, 33 bp, Homo sapien
tgtctccaggcaataatggtccctggctgtttc

SEQ ID NO: 958445 - DNA, 33 bp, Homo sapien
cagtgctaaagataaaccagtgatcgcctattt

SEQ ID NO: 958446 - DNA, 33 bp, Homo sapien
cagtgctaaagataaatcagtgatcgcctattt

SEQ ID NO: 958447 - DNA, 33 bp, Homo sapien
tgttttcaggcctaaaatagacaaaataggcga

SEQ ID NO: 958448 - DNA, 33 bp, Homo sapien
tgttttcaggcctaaagtagacaaaataggcga

SEQ ID NO: 958449 - DNA, 33 bp, Homo sapien
caaacacatcatggaaatgagtaccctaagcaa

SEQ ID NO: 958450 - DNA, 33 bp, Homo sapien
caaacacatcatggaactgagtaccctaagcaa

SEQ ID NO: 958451 - DNA, 33 bp, Homo sapien
caactttattgtgaaccgcgcattctagggatc

SEQ ID NO: 958452 - DNA, 33 bp, Homo sapien
caactttattgtgaactgcgcattctagggatc

SEQ ID NO: 958453 - DNA, 33 bp, Homo sapien
cagcatagaaaagtcaggtaaactatacaacag

SEQ ID NO: 958454 - DNA, 33 bp, Homo sapien
cagcatagaaaagtcatgtaaactatacaacag

SEQ ID NO: 958455 - DNA, 33 bp, Homo sapien
tgggaaacaaatgaagcattgatggattcgcaa

SEQ ID NO: 958456 - DNA, 33 bp, Homo sapien
tgggaaacaaatgaagtattgatggattcgcaa

SEQ ID NO: 958457 - DNA, 33 bp, Homo sapien
cagaaaggcaaataagcacacgagacagagtta

SEQ ID NO: 958458 - DNA, 33 bp, Homo sapien
cagaaaggcaaataagtacacgagacagagtta

SEQ ID NO: 958459 - DNA, 33 bp, Homo sapien
ttagatgaatgtcacaatattcaacccacattc

SEQ ID NO: 958460 - DNA, 33 bp, Homo sapien
ttagatgaatgtcacagtattcaacccacattc

SEQ ID NO: 958461 - DNA, 33 bp, Homo sapien
gcttctaattcacagagattcctaatagtccct

SEQ ID NO: 958462 - DNA, 33 bp, Homo sapien
gcttctaattcacagatattcctaatagtccct

SEQ ID NO: 958463 - DNA, 33 bp, Homo sapien
ctggacaaggagaataataccagcttcaaccat

SEQ ID NO: 958464 - DNA, 33 bp, Homo sapien
ctggacaaggagaatagtaccagcttcaaccat

SEQ ID NO: 958465 - DNA, 33 bp, Homo sapien
ctgttctctcaacacacaatctgagctacttgg

SEQ ID NO: 958466 - DNA, 33 bp, Homo sapien
ctgttctctcaacacataatctgagctacttgg

SEQ ID NO: 958467 - DNA, 33 bp, Homo sapien
gtaaaataattttgcaatcatcttgaatggctg

SEQ ID NO: 958468 - DNA, 33 bp, Homo sapien
gtaaaataattttgcagtcatcttgaatggctg

SEQ ID NO: 958469 - DNA, 33 bp, Homo sapien
atgacttgctgttttcactcaagtataaaacag

SEQ ID NO: 958470 - DNA, 33 bp, Homo sapien
atgacttgctgttttctctcaagtataaaacag

SEQ ID NO: 958471 - DNA, 33 bp, Homo sapien
aaactggtgtcccagacgacaatttaagggtga

SEQ ID NO: 958472 - DNA, 33 bp, Homo sapien
aaactggtgtcccagatgacaatttaagggtga

SEQ ID NO: 958473 - DNA, 33 bp, Homo sapien
aagctccatgatctataagttttacctctgagt

SEQ ID NO: 958474 - DNA, 33 bp, Homo sapien
aagctccatgatctatcagttttacctctgagt

SEQ ID NO: 958475 - DNA, 33 bp, Homo sapien
gaaaacaaaagtggtaaaaggcagacaaatgaa

SEQ ID NO: 958476 - DNA, 33 bp, Homo sapien
gaaaacaaaagtggtagaaggcagacaaatgaa

SEQ ID NO: 958477 - DNA, 33 bp, Homo sapien
tcccaaacttggagctaaagatactatcaattc

SEQ ID NO: 958478 - DNA, 33 bp, Homo sapien
tcccaaacttggagctgaagatactatcaattc

SEQ ID NO: 958479 - DNA, 33 bp, Homo sapien
tgtgatttataaactacggctcaaaattgatat

SEQ ID NO: 958480 - DNA, 33 bp, Homo sapien
tgtgatttataaactatggctcaaaattgatat

SEQ ID NO: 958481 - DNA, 33 bp, Homo sapien
cagtgtcacttgctgaacttaacgttataggtc

SEQ ID NO: 958482 - DNA, 33 bp, Homo sapien
cagtgtcacttgctgagcttaacgttataggtc

SEQ ID NO: 958483 - DNA, 33 bp, Homo sapien
ggacaaaggagatccacctgcttctctaattgt

SEQ ID NO: 958484 - DNA, 33 bp, Homo sapien
ggacaaaggagatccatctgcttctctaattgt

SEQ ID NO: 958485 - DNA, 33 bp, Homo sapien
ggagaacatgaggaaaagacgtagatatcaccc

SEQ ID NO: 958486 - DNA, 33 bp, Homo sapien
ggagaacatgaggaaaggacgtagatatcaccc

SEQ ID NO: 958487 - DNA, 33 bp, Homo sapien
tttcctccttatgaaccatctgtttatgtcctt

SEQ ID NO: 958488 - DNA, 33 bp, Homo sapien
tttcctccttatgaactatctgtttatgtcctt

SEQ ID NO: 958489 - DNA, 33 bp, Homo sapien
gacaggcaagagtctagatacttctaccatatc

SEQ ID NO: 958490 - DNA, 33 bp, Homo sapien
gacaggcaagagtctatatacttctaccatatc

SEQ ID NO: 958491 - DNA, 33 bp, Homo sapien
ttgctactgatccttcacaagtataaggattga

SEQ ID NO: 958492 - DNA, 33 bp, Homo sapien
ttgctactgatccttcgcaagtataaggattga

SEQ ID NO: 958493 - DNA, 33 bp, Homo sapien
cacattatggtctccacggtcaactccatcagt

SEQ ID NO: 958494 - DNA, 33 bp, Homo sapien
cacattatggtctccatggtcaactccatcagt

SEQ ID NO: 958495 - DNA, 33 bp, Homo sapien
agagatgtaactttacacctgttagagtggcca

SEQ ID NO: 958496 - DNA, 33 bp, Homo sapien
agagatgtaactttacgcctgttagagtggcca

SEQ ID NO: 958497 - DNA, 33 bp, Homo sapien
ttccatccatgtcgatgagaggtacaggtaaaa

SEQ ID NO: 958498 - DNA, 33 bp, Homo sapien
ttccatccatgtcgattagaggtacaggtaaaa

SEQ ID NO: 958499 - DNA, 33 bp, Homo sapien
ctcaccagctgtgtaaaccagacagccaacacc

SEQ ID NO: 958500 - DNA, 33 bp, Homo sapien
ctcaccagctgtgtaacccagacagccaacacc

SEQ ID NO: 958501 - DNA, 33 bp, Homo sapien
agagctaacagttttacgtgactgacagctgag

SEQ ID NO: 958502 - DNA, 33 bp, Homo sapien
agagctaacagttttatgtgactgacagctgag

SEQ ID NO: 958503 - DNA, 33 bp, Homo sapien
aagacagccagaccaaatcctgatgcaaagccc

SEQ ID NO: 958504 - DNA, 33 bp, Homo sapien
aagacagccagaccaagtcctgatgcaaagccc

SEQ ID NO: 958505 - DNA, 33 bp, Homo sapien
ccaataccatcagttaagtcttgtccacaattt

SEQ ID NO: 958506 - DNA, 33 bp, Homo sapien
ccaataccatcagttaggtcttgtccacaattt

SEQ ID NO: 958507 - DNA, 33 bp, Homo sapien
gcttttctctgatcaaagtgcctgagttccagt

SEQ ID NO: 958508 - DNA, 33 bp, Homo sapien
gcttttctctgatcaaggtgcctgagttccagt

SEQ ID NO: 958509 - DNA, 33 bp, Homo sapien
aaagcttcattcatacacatctgaaaggataaa

SEQ ID NO: 958510 - DNA, 33 bp, Homo sapien
aaagcttcattcatacgcatctgaaaggataaa

SEQ ID NO: 958511 - DNA, 33 bp, Homo sapien
atttgaaacctgttctaaatagctctgtggcaa

SEQ ID NO: 958512 - DNA, 33 bp, Homo sapien
atttgaaacctgttctgaatagctctgtggcaa

SEQ ID NO: 958513 - DNA, 33 bp, Homo sapien
aaataatactgaaagcaatttgttactggtaat

SEQ ID NO: 958514 - DNA, 33 bp, Homo sapien
aaataatactgaaagcgatttgttactggtaat

SEQ ID NO: 958515 - DNA, 33 bp, Homo sapien
tatattgtttcattacaaagtgctttgggattt

SEQ ID NO: 958516 - DNA, 33 bp, Homo sapien
tatattgtttcattaccaagtgctttgggattt

SEQ ID NO: 958517 - DNA, 33 bp, Homo sapien
ccagaatgtttgccacccctgtagaagaaggac

SEQ ID NO: 958518 - DNA, 33 bp, Homo sapien
ccagaatgtttgccactcctgtagaagaaggac

SEQ ID NO: 958519 - DNA, 33 bp, Homo sapien
aagggaaaagtcctacaacacttgtttaatgtc

SEQ ID NO: 958520 - DNA, 33 bp, Homo sapien
aagggaaaagtcctacgacacttgtttaatgtc

SEQ ID NO: 958521 - DNA, 33 bp, Homo sapien
gatacaaatcagagagcaccctaaagaagccct

SEQ ID NO: 958522 - DNA, 33 bp, Homo sapien
gatacaaatcagagaggaccctaaagaagccct

SEQ ID NO: 958523 - DNA, 33 bp, Homo sapien
tctgaaaaatccaagcccctctcacaatcatat

SEQ ID NO: 958524 - DNA, 33 bp, Homo sapien
tctgaaaaatccaagctcctctcacaatcatat

SEQ ID NO: 958525 - DNA, 33 bp, Homo sapien
tcaatcatttaagccacgagttatgtacactat

SEQ ID NO: 958526 - DNA, 33 bp, Homo sapien
tcaatcatttaagccatgagttatgtacactat

SEQ ID NO: 958527 - DNA, 33 bp, Homo sapien
tcttaacattacataagtcaaccaagtattgta

SEQ ID NO: 958528 - DNA, 33 bp, Homo sapien
tcttaacattacataattcaaccaagtattgta

SEQ ID NO: 958529 - DNA, 33 bp, Homo sapien
tcttacgggcccaccaaccaagcataactgttt

SEQ ID NO: 958530 - DNA, 33 bp, Homo sapien
tcttacgggcccaccacccaagcataactgttt

SEQ ID NO: 958531 - DNA, 33 bp, Homo sapien
tggctcacttctgaggcaatgtgctctttgtac

SEQ ID NO: 958532 - DNA, 33 bp, Homo sapien
tggctcacttctgaggtaatgtgctctttgtac

SEQ ID NO: 958533 - DNA, 33 bp, Homo sapien
gttgggggctcacaaacctcatcctagacacat

SEQ ID NO: 958534 - DNA, 33 bp, Homo sapien
gttgggggctcacaaatctcatcctagacacat

SEQ ID NO: 958535 - DNA, 33 bp, Homo sapien
cagagaagggatccgacgtattcagccctcttg

SEQ ID NO: 958536 - DNA, 33 bp, Homo sapien
cagagaagggatccgatgtattcagccctcttg

SEQ ID NO: 958537 - DNA, 33 bp, Homo sapien
agtgcaaagccattatcaccctaggtcacagga

SEQ ID NO: 958538 - DNA, 33 bp, Homo sapien
agtgcaaagccattattaccctaggtcacagga

SEQ ID NO: 958539 - DNA, 33 bp, Homo sapien
tacctattggtattgacgaatggaaaaaatatt

SEQ ID NO: 958540 - DNA, 33 bp, Homo sapien
tacctattggtattgatgaatggaaaaaatatt

SEQ ID NO: 958541 - DNA, 33 bp, Homo sapien
accaatgtttattggacgtaaatgtctactggg

SEQ ID NO: 958542 - DNA, 33 bp, Homo sapien
accaatgtttattggatgtaaatgtctactggg

SEQ ID NO: 958543 - DNA, 33 bp, Homo sapien
ataggagtatgggaaacggctttaagttttaga

SEQ ID NO: 958544 - DNA, 33 bp, Homo sapien
ataggagtatgggaaatggctttaagttttaga

SEQ ID NO: 958545 - DNA, 33 bp, Homo sapien
ggcaatggagttcatgcaagcacattttaagaa

SEQ ID NO: 958546 - DNA, 33 bp, Homo sapien
ggcaatggagttcatggaagcacattttaagaa

SEQ ID NO: 958547 - DNA, 33 bp, Homo sapien
aggaagagcttgaatacgatcctatttgactgc

SEQ ID NO: 958548 - DNA, 33 bp, Homo sapien
aggaagagcttgaatatgatcctatttgactgc

SEQ ID NO: 958549 - DNA, 33 bp, Homo sapien
ccgaatgtcaagttggcaaaaagagatgagcta

SEQ ID NO: 958550 - DNA, 33 bp, Homo sapien
ccgaatgtcaagttggtaaaaagagatgagcta

SEQ ID NO: 958551 - DNA, 33 bp, Homo sapien
ggttaggattgcaatgcactcatcaattaatac

SEQ ID NO: 958552 - DNA, 33 bp, Homo sapien
ggttaggattgcaatggactcatcaattaatac

SEQ ID NO: 958553 - DNA, 33 bp, Homo sapien
cagtaaaaccacgttacatgaattacacaatgt

SEQ ID NO: 958554 - DNA, 33 bp, Homo sapien
cagtaaaaccacgttatatgaattacacaatgt

SEQ ID NO: 958555 - DNA, 33 bp, Homo sapien
cttccagggtcctatgccagttggtctggttta

SEQ ID NO: 958556 - DNA, 33 bp, Homo sapien
cttccagggtcctatgtcagttggtctggttta

SEQ ID NO: 958557 - DNA, 33 bp, Homo sapien
acacagacttaacagaataggaacttggtcaag

SEQ ID NO: 958558 - DNA, 33 bp, Homo sapien
acacagacttaacagagtaggaacttggtcaag

SEQ ID NO: 958559 - DNA, 33 bp, Homo sapien
ttttaaggcttataaacttggcaatgatgtgga

SEQ ID NO: 958560 - DNA, 33 bp, Homo sapien
ttttaaggcttataaatttggcaatgatgtgga

SEQ ID NO: 958561 - DNA, 33 bp, Homo sapien
aataataggcctaatcaccacttacctgttgga

SEQ ID NO: 958562 - DNA, 33 bp, Homo sapien
aataataggcctaatcgccacttacctgttgga

SEQ ID NO: 958563 - DNA, 33 bp, Homo sapien
aaataaatggatcaacacatcaatcaatctggg

SEQ ID NO: 958564 - DNA, 33 bp, Homo sapien
aaataaatggatcaacgcatcaatcaatctggg

SEQ ID NO: 958565 - DNA, 33 bp, Homo sapien
agtactcactcactaccgcatggacaacaccaa

SEQ ID NO: 958566 - DNA, 33 bp, Homo sapien
agtactcactcactactgcatggacaacaccaa

SEQ ID NO: 958567 - DNA, 33 bp, Homo sapien
ctgtggtgcattctacagcgagaggcgagatca

SEQ ID NO: 958568 - DNA, 33 bp, Homo sapien
ctgtggtgcattctacggcgagaggcgagatca

SEQ ID NO: 958569 - DNA, 33 bp, Homo sapien
cagtggaagaagtaaaagtttcaatgcctagaa

SEQ ID NO: 958570 - DNA, 33 bp, Homo sapien
cagtggaagaagtaaacgtttcaatgcctagaa

SEQ ID NO: 958571 - DNA, 33 bp, Homo sapien
tctactgtaggcaaaacaggtattgtgtgggtg

SEQ ID NO: 958572 - DNA, 33 bp, Homo sapien
tctactgtaggcaaaataggtattgtgtgggtg

SEQ ID NO: 958573 - DNA, 33 bp, Homo sapien
ccacatcagctcactcacataatgctctggttt

SEQ ID NO: 958574 - DNA, 33 bp, Homo sapien
ccacatcagctcactcgcataatgctctggttt

SEQ ID NO: 958575 - DNA, 33 bp, Homo sapien
tgctgggatcttgataaccttcacatggacact

SEQ ID NO: 958576 - DNA, 33 bp, Homo sapien
tgctgggatcttgatatccttcacatggacact

SEQ ID NO: 958577 - DNA, 33 bp, Homo sapien
catgagaccacttctaccatgaaaggggcaatg

SEQ ID NO: 958578 - DNA, 33 bp, Homo sapien
catgagaccacttctatcatgaaaggggcaatg

SEQ ID NO: 958579 - DNA, 33 bp, Homo sapien
acaactttcacaccaactgtcttaacacaagtc

SEQ ID NO: 958580 - DNA, 33 bp, Homo sapien
acaactttcacaccaattgtcttaacacaagtc

SEQ ID NO: 958581 - DNA, 33 bp, Homo sapien
ctggacataacaccacagaacttttgaatatcc

SEQ ID NO: 958582 - DNA, 33 bp, Homo sapien
ctggacataacaccaccgaacttttgaatatcc

SEQ ID NO: 958583 - DNA, 33 bp, Homo sapien
tgcaagtcttctttccactgagaatgaatattt

SEQ ID NO: 958584 - DNA, 33 bp, Homo sapien
tgcaagtcttctttcccctgagaatgaatattt

SEQ ID NO: 958585 - DNA, 33 bp, Homo sapien
agctactagaaaatcaccccacttttcagggtt

SEQ ID NO: 958586 - DNA, 33 bp, Homo sapien
agctactagaaaatcatcccacttttcagggtt

SEQ ID NO: 958587 - DNA, 33 bp, Homo sapien
agtagaacacagatacaaccattatctttgaag

SEQ ID NO: 958588 - DNA, 33 bp, Homo sapien
agtagaacacagataccaccattatctttgaag

SEQ ID NO: 958589 - DNA, 33 bp, Homo sapien
tacttgtaagtacgcacgattaaggaagtggta

SEQ ID NO: 958590 - DNA, 33 bp, Homo sapien
tacttgtaagtacgcatgattaaggaagtggta

SEQ ID NO: 958591 - DNA, 33 bp, Homo sapien
acaaatcccccactcccagtaataaaacattag

SEQ ID NO: 958592 - DNA, 33 bp, Homo sapien
acaaatcccccactcctagtaataaaacattag

SEQ ID NO: 958593 - DNA, 33 bp, Homo sapien
gagattaccgtgaacacgctttttgagattttt

SEQ ID NO: 958594 - DNA, 33 bp, Homo sapien
gagattaccgtgaacatgctttttgagattttt

SEQ ID NO: 958595 - DNA, 33 bp, Homo sapien
tgtcatgaggtagttacgctgaaattccgcatt

SEQ ID NO: 958596 - DNA, 33 bp, Homo sapien
tgtcatgaggtagttatgctgaaattccgcatt

SEQ ID NO: 958597 - DNA, 33 bp, Homo sapien
ttggcttggagatgaactggcttcgatatattt

SEQ ID NO: 958598 - DNA, 33 bp, Homo sapien
ttggcttggagatgaattggcttcgatatattt

SEQ ID NO: 958599 - DNA, 33 bp, Homo sapien
gaagtgtggagttcacagaagggaaagatttgg

SEQ ID NO: 958600 - DNA, 33 bp, Homo sapien
gaagtgtggagttcacggaagggaaagatttgg

SEQ ID NO: 958601 - DNA, 33 bp, Homo sapien
tttttgattctgacacaatgatctctggatccc

SEQ ID NO: 958602 - DNA, 33 bp, Homo sapien
tttttgattctgacacgatgatctctggatccc

SEQ ID NO: 958603 - DNA, 33 bp, Homo sapien
tttccctcttcaataccatcccgtatgttttcg

SEQ ID NO: 958604 - DNA, 33 bp, Homo sapien
tttccctcttcaatacgatcccgtatgttttcg

SEQ ID NO: 958605 - DNA, 33 bp, Homo sapien
aagatggatttgattcaaagacacatagtataa

SEQ ID NO: 958606 - DNA, 33 bp, Homo sapien
aagatggatttgattccaagacacatagtataa

SEQ ID NO: 958607 - DNA, 33 bp, Homo sapien
ctgttgtttaaactacccagtctgtggtacttt

SEQ ID NO: 958608 - DNA, 33 bp, Homo sapien
ctgttgtttaaactacgcagtctgtggtacttt

SEQ ID NO: 958609 - DNA, 33 bp, Homo sapien
ttcaatgcaatcccaactaaactcccaaaagtt

SEQ ID NO: 958610 - DNA, 33 bp, Homo sapien
ttcaatgcaatcccaattaaactcccaaaagtt

SEQ ID NO: 958611 - DNA, 33 bp, Homo sapien
taaaaaattcaatcacgaaccttctggaatatc

SEQ ID NO: 958612 - DNA, 33 bp, Homo sapien
taaaaaattcaatcactaaccttctggaatatc

SEQ ID NO: 958613 - DNA, 33 bp, Homo sapien
ctacatctctggctccaacttctttccttagat

SEQ ID NO: 958614 - DNA, 33 bp, Homo sapien
ctacatctctggctccgacttctttccttagat

SEQ ID NO: 958615 - DNA, 33 bp, Homo sapien
gagaatgacttagaaccgcacagcaaaggaatt

SEQ ID NO: 958616 - DNA, 33 bp, Homo sapien
gagaatgacttagaacggcacagcaaaggaatt

SEQ ID NO: 958617 - DNA, 33 bp, Homo sapien
aacaatggtatgatcaagtgttcacaactgtct

SEQ ID NO: 958618 - DNA, 33 bp, Homo sapien
aacaatggtatgatcacgtgttcacaactgtct

SEQ ID NO: 958619 - DNA, 33 bp, Homo sapien
aaggttttgaggatatcaaagtgtagaggggaa

SEQ ID NO: 958620 - DNA, 33 bp, Homo sapien
aaggttttgaggatattaaagtgtagaggggaa

SEQ ID NO: 958621 - DNA, 33 bp, Homo sapien
tgcaaacatcctttcacagagagccaacttaag

SEQ ID NO: 958622 - DNA, 33 bp, Homo sapien
tgcaaacatcctttcatagagagccaacttaag

SEQ ID NO: 958623 - DNA, 33 bp, Homo sapien
aatgtttgtgcaagaacgcttatgtaaaaatat

SEQ ID NO: 958624 - DNA, 33 bp, Homo sapien
aatgtttgtgcaagaatgcttatgtaaaaatat

SEQ ID NO: 958625 - DNA, 33 bp, Homo sapien
atatagatgggaaaaaaatcaaggttagagagg

SEQ ID NO: 958626 - DNA, 33 bp, Homo sapien
atatagatgggaaaaacatcaaggttagagagg

SEQ ID NO: 958627 - DNA, 33 bp, Homo sapien
agctaccttccttgcacaggataatgcctttac

SEQ ID NO: 958628 - DNA, 33 bp, Homo sapien
agctaccttccttgcagaggataatgcctttac

SEQ ID NO: 958629 - DNA, 33 bp, Homo sapien
tatgcgagtgtacctccgaattagtctttttat

SEQ ID NO: 958630 - DNA, 33 bp, Homo sapien
tatgcgagtgtacctctgaattagtctttttat

SEQ ID NO: 958631 - DNA, 33 bp, Homo sapien
caggtgacacccagaactatagttgaaaaatgt

SEQ ID NO: 958632 - DNA, 33 bp, Homo sapien
caggtgacacccagaattatagttgaaaaatgt

SEQ ID NO: 958633 - DNA, 33 bp, Homo sapien
ctgttttctccatttgcatttaggaagcccact

SEQ ID NO: 958634 - DNA, 33 bp, Homo sapien
ctgttttctccatttgtatttaggaagcccact

SEQ ID NO: 958635 - DNA, 33 bp, Homo sapien
aaaattagccccaaaacgattcaaatggtggtg

SEQ ID NO: 958636 - DNA, 33 bp, Homo sapien
aaaattagccccaaaatgattcaaatggtggtg

SEQ ID NO: 958637 - DNA, 33 bp, Homo sapien
aaaatctattctactaaaatcaagcacagctag

SEQ ID NO: 958638 - DNA, 33 bp, Homo sapien
aaaatctattctactacaatcaagcacagctag

SEQ ID NO: 958639 - DNA, 33 bp, Homo sapien
cacatgattgtagatacgaagccagagaaaaag

SEQ ID NO: 958640 - DNA, 33 bp, Homo sapien
cacatgattgtagatatgaagccagagaaaaag

SEQ ID NO: 958641 - DNA, 33 bp, Homo sapien
gagacaaaactgataaaattcagggatgaacta

SEQ ID NO: 958642 - DNA, 33 bp, Homo sapien
gagacaaaactgataagattcagggatgaacta

SEQ ID NO: 958643 - DNA, 33 bp, Homo sapien
tgttaccatggctacagaacaatcagtctttcc

SEQ ID NO: 958644 - DNA, 33 bp, Homo sapien
tgttaccatggctacataacaatcagtctttcc

SEQ ID NO: 958645 - DNA, 33 bp, Homo sapien
tcagaggagaataacacagttcctgtcttcaga

SEQ ID NO: 958646 - DNA, 33 bp, Homo sapien
tcagaggagaataacagagttcctgtcttcaga

SEQ ID NO: 958647 - DNA, 33 bp, Homo sapien
cacaagtacacaggacaatacttgtgatggtta

SEQ ID NO: 958648 - DNA, 33 bp, Homo sapien
cacaagtacacaggacgatacttgtgatggtta

SEQ ID NO: 958649 - DNA, 33 bp, Homo sapien
atttgtttccctgacaagatttctccacaggaa

SEQ ID NO: 958650 - DNA, 33 bp, Homo sapien
atttgtttccctgacaggatttctccacaggaa

SEQ ID NO: 958651 - DNA, 33 bp, Homo sapien
tactgccatcctcaaaaagctaagaatgattgc

SEQ ID NO: 958652 - DNA, 33 bp, Homo sapien
tactgccatcctcaaagagctaagaatgattgc

SEQ ID NO: 958653 - DNA, 33 bp, Homo sapien
gctttcattctttctcaaatttgtctgctctgt

SEQ ID NO: 958654 - DNA, 33 bp, Homo sapien
gctttcattctttctcgaatttgtctgctctgt

SEQ ID NO: 958655 - DNA, 33 bp, Homo sapien
tatccttcaagacccaaataaagtgttctgtga

SEQ ID NO: 958656 - DNA, 33 bp, Homo sapien
tatccttcaagacccatataaagtgttctgtga

SEQ ID NO: 958657 - DNA, 33 bp, Homo sapien
ggctttccccagaacaagtatccaagagagagc

SEQ ID NO: 958658 - DNA, 33 bp, Homo sapien
ggctttccccagaacaggtatccaagagagagc

SEQ ID NO: 958659 - DNA, 33 bp, Homo sapien
tctcctcagtcttctccctcaacaacaaggtac

SEQ ID NO: 958660 - DNA, 33 bp, Homo sapien
tctcctcagtcttctcgctcaacaacaaggtac

SEQ ID NO: 958661 - DNA, 33 bp, Homo sapien
gcagtgaggctacagaactcagagggctgtggc

SEQ ID NO: 958662 - DNA, 33 bp, Homo sapien
gcagtgaggctacagagctcagagggctgtggc

SEQ ID NO: 958663 - DNA, 33 bp, Homo sapien
caacctccaagatggcaccctgtggagagtggc

SEQ ID NO: 958664 - DNA, 33 bp, Homo sapien
caacctccaagatggcgccctgtggagagtggc

SEQ ID NO: 958665 - DNA, 33 bp, Homo sapien
acaatggcaattaagcagataaaattccagtaa

SEQ ID NO: 958666 - DNA, 33 bp, Homo sapien
acaatggcaattaagcggataaaattccagtaa

SEQ ID NO: 958667 - DNA, 33 bp, Homo sapien
gaagccatacatgttacagcaacaagacagaag

SEQ ID NO: 958668 - DNA, 33 bp, Homo sapien
gaagccatacatgttagagcaacaagacagaag

SEQ ID NO: 958669 - DNA, 33 bp, Homo sapien
tgaaggtctagtggaccatttgtggaagggaac

SEQ ID NO: 958670 - DNA, 33 bp, Homo sapien
tgaaggtctagtggactatttgtggaagggaac

SEQ ID NO: 958671 - DNA, 33 bp, Homo sapien
tgttaatgacctagtacgttatctgttaagttt

SEQ ID NO: 958672 - DNA, 33 bp, Homo sapien
tgttaatgacctagtatgttatctgttaagttt

SEQ ID NO: 958673 - DNA, 33 bp, Homo sapien
atcagtgtcttgcatcaccttcttttttttttg

SEQ ID NO: 958674 - DNA, 33 bp, Homo sapien
atcagtgtcttgcatcgccttcttttttttttg

SEQ ID NO: 958675 - DNA, 33 bp, Homo sapien
catcctgatacctaccaattagtatgactataa

SEQ ID NO: 958676 - DNA, 33 bp, Homo sapien
catcctgatacctacccattagtatgactataa

SEQ ID NO: 958677 - DNA, 33 bp, Homo sapien
tgggggtaatttttcacgtaggatgtctgggaa

SEQ ID NO: 958678 - DNA, 33 bp, Homo sapien
tgggggtaatttttcatgtaggatgtctgggaa

SEQ ID NO: 958679 - DNA, 33 bp, Homo sapien
tagggcagatatgcaacgtaggtaaataagggg

SEQ ID NO: 958680 - DNA, 33 bp, Homo sapien
tagggcagatatgcaatgtaggtaaataagggg

SEQ ID NO: 958681 - DNA, 33 bp, Homo sapien
caatatgggaccattgacaactcagtaaacttt

SEQ ID NO: 958682 - DNA, 33 bp, Homo sapien
caatatgggaccattggcaactcagtaaacttt

SEQ ID NO: 958683 - DNA, 33 bp, Homo sapien
gcagccatgctgatatcacaggataccctctgc

SEQ ID NO: 958684 - DNA, 33 bp, Homo sapien
gcagccatgctgatattacaggataccctctgc

SEQ ID NO: 958685 - DNA, 33 bp, Homo sapien
gcataattttcacaacagcttttcaagagttca

SEQ ID NO: 958686 - DNA, 33 bp, Homo sapien
gcataattttcacaactgcttttcaagagttca

SEQ ID NO: 958687 - DNA, 33 bp, Homo sapien
aaccccagtgaagataaggtgcttctcagagaa

SEQ ID NO: 958688 - DNA, 33 bp, Homo sapien
aaccccagtgaagatagggtgcttctcagagaa

SEQ ID NO: 958689 - DNA, 33 bp, Homo sapien
agaagttgctaataaccgggaactagaagcatt

SEQ ID NO: 958690 - DNA, 33 bp, Homo sapien
agaagttgctaataactgggaactagaagcatt

SEQ ID NO: 958691 - DNA, 33 bp, Homo sapien
gaaacaagatgtgaagcaggatttttcccatca

SEQ ID NO: 958692 - DNA, 33 bp, Homo sapien
gaaacaagatgtgaagtaggatttttcccatca

SEQ ID NO: 958693 - DNA, 33 bp, Homo sapien
aaaccatctccggagcacttggctagagattcc

SEQ ID NO: 958694 - DNA, 33 bp, Homo sapien
aaaccatctccggagcgcttggctagagattcc

SEQ ID NO: 958695 - DNA, 33 bp, Homo sapien
tgcagtggtgccgtcagagattgctgtagcctt

SEQ ID NO: 958696 - DNA, 33 bp, Homo sapien
tgcagtggtgccgtcatagattgctgtagcctt

SEQ ID NO: 958697 - DNA, 33 bp, Homo sapien
tggtgtagtgaatagacatgaagtgtggagcta

SEQ ID NO: 958698 - DNA, 33 bp, Homo sapien
tggtgtagtgaatagatatgaagtgtggagcta

SEQ ID NO: 958699 - DNA, 33 bp, Homo sapien
atttagaagcataaaacagggtgaaaggttgtg

SEQ ID NO: 958700 - DNA, 33 bp, Homo sapien
atttagaagcataaaagagggtgaaaggttgtg

SEQ ID NO: 958701 - DNA, 33 bp, Homo sapien
gttggtggtatgcatacgatgtaacctcttttt

SEQ ID NO: 958702 - DNA, 33 bp, Homo sapien
gttggtggtatgcataggatgtaacctcttttt

SEQ ID NO: 958703 - DNA, 33 bp, Homo sapien
tcataagtaacaataacagtgcagtgctagcga

SEQ ID NO: 958704 - DNA, 33 bp, Homo sapien
tcataagtaacaataatagtgcagtgctagcga

SEQ ID NO: 958705 - DNA, 33 bp, Homo sapien
gtaaacctctctaaaaatacccagaaatgcaac

SEQ ID NO: 958706 - DNA, 33 bp, Homo sapien
gtaaacctctctaaaattacccagaaatgcaac

SEQ ID NO: 958707 - DNA, 33 bp, Homo sapien
caggcagttggggaaactaatgagtgaaagtga

SEQ ID NO: 958708 - DNA, 33 bp, Homo sapien
caggcagttggggaaattaatgagtgaaagtga

SEQ ID NO: 958709 - DNA, 33 bp, Homo sapien
tcaacttccaagtggaaatctttcattgtgtct

SEQ ID NO: 958710 - DNA, 33 bp, Homo sapien
tcaacttccaagtggacatctttcattgtgtct

SEQ ID NO: 958711 - DNA, 33 bp, Homo sapien
atccctgcctttgagaagcttacaatctggtta

SEQ ID NO: 958712 - DNA, 33 bp, Homo sapien
atccctgcctttgagaggcttacaatctggtta

SEQ ID NO: 958713 - DNA, 33 bp, Homo sapien
cacacagatcttcagccctagttggattggttc

SEQ ID NO: 958714 - DNA, 33 bp, Homo sapien
cacacagatcttcagctctagttggattggttc

SEQ ID NO: 958715 - DNA, 33 bp, Homo sapien
gaaatggaaagtcaaacagaggctcctaagggg

SEQ ID NO: 958716 - DNA, 33 bp, Homo sapien
gaaatggaaagtcaaatagaggctcctaagggg

SEQ ID NO: 958717 - DNA, 33 bp, Homo sapien
tagaggtccaaaacccagcaatacatcatctgc

SEQ ID NO: 958718 - DNA, 33 bp, Homo sapien
tagaggtccaaaacccggcaatacatcatctgc

SEQ ID NO: 958719 - DNA, 33 bp, Homo sapien
aggaacaaaggcaatacaattcagcaaaagagc

SEQ ID NO: 958720 - DNA, 33 bp, Homo sapien
aggaacaaaggcaatataattcagcaaaagagc

SEQ ID NO: 958721 - DNA, 33 bp, Homo sapien
gcactatcttccaaaacgctacattagagacca

SEQ ID NO: 958722 - DNA, 33 bp, Homo sapien
gcactatcttccaaaatgctacattagagacca

SEQ ID NO: 958723 - DNA, 33 bp, Homo sapien
aaaaaaactaagaggcaacatagtgaacgattc

SEQ ID NO: 958724 - DNA, 33 bp, Homo sapien
aaaaaaactaagaggctacatagtgaacgattc

SEQ ID NO: 958725 - DNA, 33 bp, Homo sapien
cctgaactattcttgcaatttttctgtaaattt

SEQ ID NO: 958726 - DNA, 33 bp, Homo sapien
cctgaactattcttgcgatttttctgtaaattt

SEQ ID NO: 958727 - DNA, 33 bp, Homo sapien
gttaaatggacataacagaaagtaacttttact

SEQ ID NO: 958728 - DNA, 33 bp, Homo sapien
gttaaatggacataacggaaagtaacttttact

SEQ ID NO: 958729 - DNA, 33 bp, Homo sapien
acaatgccttttattaagtacagaccatggtgt

SEQ ID NO: 958730 - DNA, 33 bp, Homo sapien
acaatgccttttattaggtacagaccatggtgt

SEQ ID NO: 958731 - DNA, 33 bp, Homo sapien
cctcagacaggattccactcttggtatgttgcg

SEQ ID NO: 958732 - DNA, 33 bp, Homo sapien
cctcagacaggattccgctcttggtatgttgcg

SEQ ID NO: 958733 - DNA, 33 bp, Homo sapien
tgtctggtggtgaacagggtgcctactaggaag

SEQ ID NO: 958734 - DNA, 33 bp, Homo sapien
tgtctggtggtgaacatggtgcctactaggaag

SEQ ID NO: 958735 - DNA, 33 bp, Homo sapien
tcactatttttcccagcactgacagaggttaca

SEQ ID NO: 958736 - DNA, 33 bp, Homo sapien
tcactatttttcccaggactgacagaggttaca

SEQ ID NO: 958737 - DNA, 33 bp, Homo sapien
acttctgataatgcatcatctctttcatctatc

SEQ ID NO: 958738 - DNA, 33 bp, Homo sapien
acttctgataatgcatgatctctttcatctatc

SEQ ID NO: 958739 - DNA, 33 bp, Homo sapien
tcagcaccatgaaggcactaagaaaaaacagag

SEQ ID NO: 958740 - DNA, 33 bp, Homo sapien
tcagcaccatgaaggctctaagaaaaaacagag

SEQ ID NO: 958741 - DNA, 33 bp, Homo sapien
actgtggtcacacttccggacagcaaatgggga

SEQ ID NO: 958742 - DNA, 33 bp, Homo sapien
actgtggtcacacttctggacagcaaatgggga

SEQ ID NO: 958743 - DNA, 33 bp, Homo sapien
taccgaacctctctgggagccctgtaaatttag

SEQ ID NO: 958744 - DNA, 33 bp, Homo sapien
taccgaacctctctggtagccctgtaaatttag

SEQ ID NO: 958745 - DNA, 33 bp, Homo sapien
ggtgttggaggtagaacatcaccaggtggcagt

SEQ ID NO: 958746 - DNA, 33 bp, Homo sapien
ggtgttggaggtagaatatcaccaggtggcagt

SEQ ID NO: 958747 - DNA, 33 bp, Homo sapien
actcagcaattggcagaaatttgagggctaagg

SEQ ID NO: 958748 - DNA, 33 bp, Homo sapien
actcagcaattggcaggaatttgagggctaagg

SEQ ID NO: 958749 - DNA, 33 bp, Homo sapien
cacaaacaagtgccagcagtcagtctcccacat

SEQ ID NO: 958750 - DNA, 33 bp, Homo sapien
cacaaacaagtgccaggagtcagtctcccacat

SEQ ID NO: 958751 - DNA, 33 bp, Homo sapien
tgcatttcaaaaactaaatgtgtgtctttctgt

SEQ ID NO: 958752 - DNA, 33 bp, Homo sapien
tgcatttcaaaaactagatgtgtgtctttctgt

SEQ ID NO: 958753 - DNA, 33 bp, Homo sapien
aatatataaactcctcaaatgctaccttgttac

SEQ ID NO: 958754 - DNA, 33 bp, Homo sapien
aatatataaactcctcgaatgctaccttgttac

SEQ ID NO: 958755 - DNA, 33 bp, Homo sapien
tggactacagaattaccgatgtgcaaccagttc

SEQ ID NO: 958756 - DNA, 33 bp, Homo sapien
tggactacagaattactgatgtgcaaccagttc

SEQ ID NO: 958757 - DNA, 33 bp, Homo sapien
tgtaaaatgagtcacccagattatgcaaaaaga

SEQ ID NO: 958758 - DNA, 33 bp, Homo sapien
tgtaaaatgagtcacctagattatgcaaaaaga

SEQ ID NO: 958759 - DNA, 33 bp, Homo sapien
ttcctaatatcaaggtgaagttctctcatgtat

SEQ ID NO: 958760 - DNA, 33 bp, Homo sapien
ttcctaatatcaaggttaagttctctcatgtat

SEQ ID NO: 958761 - DNA, 33 bp, Homo sapien
ggtcctgccttatgaactatggaacatcattgt

SEQ ID NO: 958762 - DNA, 33 bp, Homo sapien
ggtcctgccttatgaattatggaacatcattgt

SEQ ID NO: 958763 - DNA, 33 bp, Homo sapien
tgttatacactacaaaaaacagccttcaaactc

SEQ ID NO: 958764 - DNA, 33 bp, Homo sapien
tgttatacactacaaataacagccttcaaactc

SEQ ID NO: 958765 - DNA, 33 bp, Homo sapien
aagtaactcaacaaaactcaacatcattgcctg

SEQ ID NO: 958766 - DNA, 33 bp, Homo sapien
aagtaactcaacaaaattcaacatcattgcctg

SEQ ID NO: 958767 - DNA, 33 bp, Homo sapien
ggcaatttgtcctggacattgtgaattaaatac

SEQ ID NO: 958768 - DNA, 33 bp, Homo sapien
ggcaatttgtcctggatattgtgaattaaatac

SEQ ID NO: 958769 - DNA, 33 bp, Homo sapien
tttctatttacatttacaacagaggcaaattag

SEQ ID NO: 958770 - DNA, 33 bp, Homo sapien
tttctatttacatttataacagaggcaaattag

SEQ ID NO: 958771 - DNA, 33 bp, Homo sapien
tggaacatgaagtgccaagtgagttttttgcta

SEQ ID NO: 958772 - DNA, 33 bp, Homo sapien
tggaacatgaagtgccgagtgagttttttgcta

SEQ ID NO: 958773 - DNA, 33 bp, Homo sapien
aactggcaaaggtatcaagaaaactaggtgtct

SEQ ID NO: 958774 - DNA, 33 bp, Homo sapien
aactggcaaaggtatcgagaaaactaggtgtct

SEQ ID NO: 958775 - DNA, 33 bp, Homo sapien
tatctgtggcctgtcacggagtcatttcaggct

SEQ ID NO: 958776 - DNA, 33 bp, Homo sapien
tatctgtggcctgtcatggagtcatttcaggct

SEQ ID NO: 958777 - DNA, 33 bp, Homo sapien
tcagaaacagaaactaagcaaggtatagtcgaa

SEQ ID NO: 958778 - DNA, 33 bp, Homo sapien
tcagaaacagaaactaggcaaggtatagtcgaa

SEQ ID NO: 958779 - DNA, 33 bp, Homo sapien
atgaagcagatatcaaaaggctccagaactctg

SEQ ID NO: 958780 - DNA, 33 bp, Homo sapien
atgaagcagatatcaagaggctccagaactctg

SEQ ID NO: 958781 - DNA, 33 bp, Homo sapien
agtggctcagtagggccgaaaataatacctggg

SEQ ID NO: 958782 - DNA, 33 bp, Homo sapien
agtggctcagtagggctgaaaataatacctggg

SEQ ID NO: 958783 - DNA, 33 bp, Homo sapien
tttcatgttctgctgacaaagccttacaattgg

SEQ ID NO: 958784 - DNA, 33 bp, Homo sapien
tttcatgttctgctgataaagccttacaattgg

SEQ ID NO: 958785 - DNA, 33 bp, Homo sapien
accttagtacctctccaaaagcaatgtgacatc

SEQ ID NO: 958786 - DNA, 33 bp, Homo sapien
accttagtacctctccgaaagcaatgtgacatc

SEQ ID NO: 958787 - DNA, 33 bp, Homo sapien
atctgaggttttaagccaagtctgtcaggtcac

SEQ ID NO: 958788 - DNA, 33 bp, Homo sapien
atctgaggttttaagctaagtctgtcaggtcac

SEQ ID NO: 958789 - DNA, 33 bp, Homo sapien
atttttaaggatctcaatacacctaactgtgct

SEQ ID NO: 958790 - DNA, 33 bp, Homo sapien
atttttaaggatctcagtacacctaactgtgct

SEQ ID NO: 958791 - DNA, 33 bp, Homo sapien
aacttcctgtttctccacaaagattactgtcta

SEQ ID NO: 958792 - DNA, 33 bp, Homo sapien
aacttcctgtttctccgcaaagattactgtcta

SEQ ID NO: 958793 - DNA, 33 bp, Homo sapien
tacaccctgtacttcacgcagagtcacagtgtg

SEQ ID NO: 958794 - DNA, 33 bp, Homo sapien
tacaccctgtacttcaggcagagtcacagtgtg

SEQ ID NO: 958795 - DNA, 33 bp, Homo sapien
tcctaagcacaagctaagccctgcttccaaaca

SEQ ID NO: 958796 - DNA, 33 bp, Homo sapien
tcctaagcacaagctaggccctgcttccaaaca

SEQ ID NO: 958797 - DNA, 33 bp, Homo sapien
cacctaaggctactaacgccgtaactgtccgtc

SEQ ID NO: 958798 - DNA, 33 bp, Homo sapien
cacctaaggctactaatgccgtaactgtccgtc

SEQ ID NO: 958799 - DNA, 33 bp, Homo sapien
aggattttttttagacgacatttcctgctagta

SEQ ID NO: 958800 - DNA, 33 bp, Homo sapien
aggattttttttagactacatttcctgctagta

SEQ ID NO: 958801 - DNA, 33 bp, Homo sapien
tctgaggggcctatgaaaaaagaggagtctgaa

SEQ ID NO: 958802 - DNA, 33 bp, Homo sapien
tctgaggggcctatgagaaaagaggagtctgaa

SEQ ID NO: 958803 - DNA, 33 bp, Homo sapien
ctctgcggtctcttcgcacccagtcagggtctc

SEQ ID NO: 958804 - DNA, 33 bp, Homo sapien
ctctgcggtctcttcgtacccagtcagggtctc

SEQ ID NO: 958805 - DNA, 33 bp, Homo sapien
tttaaacctgatgacaaagacagagctgaaggg

SEQ ID NO: 958806 - DNA, 33 bp, Homo sapien
tttaaacctgatgacagagacagagctgaaggg

SEQ ID NO: 958807 - DNA, 33 bp, Homo sapien
atcacatgatgaaaaaaattaacaaatgagaca

SEQ ID NO: 958808 - DNA, 33 bp, Homo sapien
atcacatgatgaaaaacattaacaaatgagaca

SEQ ID NO: 958809 - DNA, 33 bp, Homo sapien
aaatgagacaataatacgaaatcatgaagggct

SEQ ID NO: 958810 - DNA, 33 bp, Homo sapien
aaatgagacaataataggaaatcatgaagggct

SEQ ID NO: 958811 - DNA, 33 bp, Homo sapien
ctgtggcacatacttacagtggaatacaactca

SEQ ID NO: 958812 - DNA, 33 bp, Homo sapien
ctgtggcacatacttagagtggaatacaactca

SEQ ID NO: 958813 - DNA, 33 bp, Homo sapien
cattgttgcattaaataaaagtgaaagcacagt

SEQ ID NO: 958814 - DNA, 33 bp, Homo sapien
cattgttgcattaaatgaaagtgaaagcacagt

SEQ ID NO: 958815 - DNA, 33 bp, Homo sapien
atatgtttgttgaaggaatcaaagtaaatgacg

SEQ ID NO: 958816 - DNA, 33 bp, Homo sapien
atatgtttgttgaaggcatcaaagtaaatgacg

SEQ ID NO: 958817 - DNA, 33 bp, Homo sapien
atgtcacgattggaaacgtggatgtcctgacat

SEQ ID NO: 958818 - DNA, 33 bp, Homo sapien
atgtcacgattggaaatgtggatgtcctgacat

SEQ ID NO: 958819 - DNA, 33 bp, Homo sapien
ttgtgatactctattaccttgtgaagcacatga

SEQ ID NO: 958820 - DNA, 33 bp, Homo sapien
ttgtgatactctattatcttgtgaagcacatga

SEQ ID NO: 958821 - DNA, 33 bp, Homo sapien
ggctggagaatgacaccggagaaacactaagct

SEQ ID NO: 958822 - DNA, 33 bp, Homo sapien
ggctggagaatgacactggagaaacactaagct

SEQ ID NO: 958823 - DNA, 33 bp, Homo sapien
ttggcttttagctctgcaagttggaagagggct

SEQ ID NO: 958824 - DNA, 33 bp, Homo sapien
ttggcttttagctctgtaagttggaagagggct

SEQ ID NO: 958825 - DNA, 33 bp, Homo sapien
tcttaaactgcttagacacttccagcaaagcat

SEQ ID NO: 958826 - DNA, 33 bp, Homo sapien
tcttaaactgcttagatacttccagcaaagcat

SEQ ID NO: 958827 - DNA, 33 bp, Homo sapien
taatattgaactctagaaatcttttatccagtt

SEQ ID NO: 958828 - DNA, 33 bp, Homo sapien
taatattgaactctaggaatcttttatccagtt

SEQ ID NO: 958829 - DNA, 33 bp, Homo sapien
acaccccttcatttcccgagtttgttctttcat

SEQ ID NO: 958830 - DNA, 33 bp, Homo sapien
acaccccttcatttcctgagtttgttctttcat

SEQ ID NO: 958831 - DNA, 33 bp, Homo sapien
ggcacatcaacttaatcaattattaaaaagcaa

SEQ ID NO: 958832 - DNA, 33 bp, Homo sapien
ggcacatcaacttaatgaattattaaaaagcaa

SEQ ID NO: 958833 - DNA, 33 bp, Homo sapien
ctgacctactaagaacaacaaccactgaacact

SEQ ID NO: 958834 - DNA, 33 bp, Homo sapien
ctgacctactaagaacgacaaccactgaacact

SEQ ID NO: 958835 - DNA, 33 bp, Homo sapien
aaaaccataagactcccagtagattcacaaatg

SEQ ID NO: 958836 - DNA, 33 bp, Homo sapien
aaaaccataagactcctagtagattcacaaatg

SEQ ID NO: 958837 - DNA, 33 bp, Homo sapien
catgcacagtattccacaaggttcatgctccat

SEQ ID NO: 958838 - DNA, 33 bp, Homo sapien
catgcacagtattccataaggttcatgctccat

SEQ ID NO: 958839 - DNA, 33 bp, Homo sapien
cagaaacttgaaaaacagagaattgtgttggca

SEQ ID NO: 958840 - DNA, 33 bp, Homo sapien
cagaaacttgaaaaacggagaattgtgttggca

SEQ ID NO: 958841 - DNA, 33 bp, Homo sapien
tcagggctccctgacccccaggtgcctattagg

SEQ ID NO: 958842 - DNA, 33 bp, Homo sapien
tcagggctccctgaccgccaggtgcctattagg

SEQ ID NO: 958843 - DNA, 33 bp, Homo sapien
aaataattgagttgataaatcgatagtgttttg

SEQ ID NO: 958844 - DNA, 33 bp, Homo sapien
aaataattgagttgatgaatcgatagtgttttg

SEQ ID NO: 958845 - DNA, 33 bp, Homo sapien
tctgcttagctaagaactgaacaaaaacagcct

SEQ ID NO: 958846 - DNA, 33 bp, Homo sapien
tctgcttagctaagaattgaacaaaaacagcct

SEQ ID NO: 958847 - DNA, 33 bp, Homo sapien
gtctctccagaaggcaaattgtggggtgccact

SEQ ID NO: 958848 - DNA, 33 bp, Homo sapien
gtctctccagaaggcagattgtggggtgccact

SEQ ID NO: 958849 - DNA, 33 bp, Homo sapien
tgcactcattctaaaaataaatgttgtttccaa

SEQ ID NO: 958850 - DNA, 33 bp, Homo sapien
tgcactcattctaaaagtaaatgttgtttccaa

SEQ ID NO: 958851 - DNA, 33 bp, Homo sapien
caagaaccaggatctacggcaccgtcaccctcg

SEQ ID NO: 958852 - DNA, 33 bp, Homo sapien
caagaaccaggatctatggcaccgtcaccctcg

SEQ ID NO: 958853 - DNA, 33 bp, Homo sapien
aggaagctttgcagcccgatgagcaacttagag

SEQ ID NO: 958854 - DNA, 33 bp, Homo sapien
aggaagctttgcagcctgatgagcaacttagag

SEQ ID NO: 958855 - DNA, 33 bp, Homo sapien
ctgtcgaagggaaaaaatcacacttacctatat

SEQ ID NO: 958856 - DNA, 33 bp, Homo sapien
ctgtcgaagggaaaaagtcacacttacctatat

SEQ ID NO: 958857 - DNA, 33 bp, Homo sapien
atggttttacgtgtaacagggtagaggcaaaga

SEQ ID NO: 958858 - DNA, 33 bp, Homo sapien
atggttttacgtgtaagagggtagaggcaaaga

SEQ ID NO: 958859 - DNA, 33 bp, Homo sapien
caaaaagattgtgacaagttggaggaaaaggtg

SEQ ID NO: 958860 - DNA, 33 bp, Homo sapien
caaaaagattgtgacacgttggaggaaaaggtg

SEQ ID NO: 958861 - DNA, 33 bp, Homo sapien
tgagttccacattgagcatttaagcacctgtgg

SEQ ID NO: 958862 - DNA, 33 bp, Homo sapien
tgagttccacattgagtatttaagcacctgtgg

SEQ ID NO: 958863 - DNA, 33 bp, Homo sapien
tcaacagctagagaaaagaaaccatctacccag

SEQ ID NO: 958864 - DNA, 33 bp, Homo sapien
tcaacagctagagaaacgaaaccatctacccag

SEQ ID NO: 958865 - DNA, 33 bp, Homo sapien
atgcagttattttagaagattgtgtgccaagag

SEQ ID NO: 958866 - DNA, 33 bp, Homo sapien
atgcagttattttagaggattgtgtgccaagag

SEQ ID NO: 958867 - DNA, 33 bp, Homo sapien
gtgcttgtattcaacaccagaaaatggaactaa

SEQ ID NO: 958868 - DNA, 33 bp, Homo sapien
gtgcttgtattcaacatcagaaaatggaactaa

SEQ ID NO: 958869 - DNA, 33 bp, Homo sapien
gcagagagggtggaaacctagttgtcaaaaatt

SEQ ID NO: 958870 - DNA, 33 bp, Homo sapien
gcagagagggtggaaatctagttgtcaaaaatt

SEQ ID NO: 958871 - DNA, 33 bp, Homo sapien
gtagagggagaagcaaagtaatggtagatagag

SEQ ID NO: 958872 - DNA, 33 bp, Homo sapien
gtagagggagaagcaaggtaatggtagatagag

SEQ ID NO: 958873 - DNA, 33 bp, Homo sapien
tctttgaaagataccactgaactgcaagcctac

SEQ ID NO: 958874 - DNA, 33 bp, Homo sapien
tctttgaaagataccattgaactgcaagcctac

SEQ ID NO: 958875 - DNA, 33 bp, Homo sapien
aatgaaagaaaaagcccggagtaagctccaaca

SEQ ID NO: 958876 - DNA, 33 bp, Homo sapien
aatgaaagaaaaagcctggagtaagctccaaca

SEQ ID NO: 958877 - DNA, 33 bp, Homo sapien
tgctttgtgttgcacacccaggtaaagaggaaa

SEQ ID NO: 958878 - DNA, 33 bp, Homo sapien
tgctttgtgttgcacatccaggtaaagaggaaa

SEQ ID NO: 958879 - DNA, 33 bp, Homo sapien
ttaggaatcaacctcaaaaagattataatctga

SEQ ID NO: 958880 - DNA, 33 bp, Homo sapien
ttaggaatcaacctcagaaagattataatctga

SEQ ID NO: 958881 - DNA, 33 bp, Homo sapien
ctgtacttgaagtcaacgataacccaactggaa

SEQ ID NO: 958882 - DNA, 33 bp, Homo sapien
ctgtacttgaagtcaatgataacccaactggaa

SEQ ID NO: 958883 - DNA, 33 bp, Homo sapien
agcaaaaccaaagaacagtgtcaggaattcatt

SEQ ID NO: 958884 - DNA, 33 bp, Homo sapien
agcaaaaccaaagaaccgtgtcaggaattcatt

SEQ ID NO: 958885 - DNA, 33 bp, Homo sapien
agtgcaggcttgatgtaaactgtgatctgcagt

SEQ ID NO: 958886 - DNA, 33 bp, Homo sapien
agtgcaggcttgatgttaactgtgatctgcagt

SEQ ID NO: 958887 - DNA, 33 bp, Homo sapien
taaaatgaattattgcacacaactgagaggtga

SEQ ID NO: 958888 - DNA, 33 bp, Homo sapien
taaaatgaattattgcgcacaactgagaggtga

SEQ ID NO: 958889 - DNA, 33 bp, Homo sapien
tcatcctatggattcacagaccacagctgaata

SEQ ID NO: 958890 - DNA, 33 bp, Homo sapien
tcatcctatggattcagagaccacagctgaata

SEQ ID NO: 958891 - DNA, 33 bp, Homo sapien
ctataattaactgagaaacttttaaagcagcta

SEQ ID NO: 958892 - DNA, 33 bp, Homo sapien
ctataattaactgagagacttttaaagcagcta

SEQ ID NO: 958893 - DNA, 33 bp, Homo sapien
taattatagttccaacacctgtgtcaatcttga

SEQ ID NO: 958894 - DNA, 33 bp, Homo sapien
taattatagttccaacccctgtgtcaatcttga

SEQ ID NO: 958895 - DNA, 33 bp, Homo sapien
ttataaataattcggcaataaagaagatagatg

SEQ ID NO: 958896 - DNA, 33 bp, Homo sapien
ttataaataattcggctataaagaagatagatg

SEQ ID NO: 958897 - DNA, 33 bp, Homo sapien
gcttaagcatcaaaacccatgtatgttttcttt

SEQ ID NO: 958898 - DNA, 33 bp, Homo sapien
gcttaagcatcaaaactcatgtatgttttcttt

SEQ ID NO: 958899 - DNA, 33 bp, Homo sapien
tctacatcacttactacacagagatgatgctgg

SEQ ID NO: 958900 - DNA, 33 bp, Homo sapien
tctacatcacttactatacagagatgatgctgg

SEQ ID NO: 958901 - DNA, 33 bp, Homo sapien
aatgatttaagtgcaaatgatgtttggctttct

SEQ ID NO: 958902 - DNA, 33 bp, Homo sapien
aatgatttaagtgcaagtgatgtttggctttct

SEQ ID NO: 958903 - DNA, 33 bp, Homo sapien
ttatctccctttgccccacattttatgtttttg

SEQ ID NO: 958904 - DNA, 33 bp, Homo sapien
ttatctccctttgcccgacattttatgtttttg

SEQ ID NO: 958905 - DNA, 33 bp, Homo sapien
tgagagagtgtgttatcaaccccatccagggag

SEQ ID NO: 958906 - DNA, 33 bp, Homo sapien
tgagagagtgtgttatgaaccccatccagggag

SEQ ID NO: 958907 - DNA, 33 bp, Homo sapien
gggaacctcagagttacggtgctgtatgtgagg

SEQ ID NO: 958908 - DNA, 33 bp, Homo sapien
gggaacctcagagttagggtgctgtatgtgagg

SEQ ID NO: 958909 - DNA, 33 bp, Homo sapien
aacatttagtaaaaaccgcctatgtaaactata

SEQ ID NO: 958910 - DNA, 33 bp, Homo sapien
aacatttagtaaaaactgcctatgtaaactata

SEQ ID NO: 958911 - DNA, 33 bp, Homo sapien
tgtatatcttcaggcactcacacagggccttgc

SEQ ID NO: 958912 - DNA, 33 bp, Homo sapien
tgtatatcttcaggcattcacacagggccttgc

SEQ ID NO: 958913 - DNA, 33 bp, Homo sapien
agatggaaaaaacatcaagtagccctaatgtgt

SEQ ID NO: 958914 - DNA, 33 bp, Homo sapien
agatggaaaaaacatcgagtagccctaatgtgt

SEQ ID NO: 958915 - DNA, 33 bp, Homo sapien
cagaattgcaatttggaagaaaatgcactgttt

SEQ ID NO: 958916 - DNA, 33 bp, Homo sapien
cagaattgcaatttgggagaaaatgcactgttt

SEQ ID NO: 958917 - DNA, 33 bp, Homo sapien
aatttgggccactatactagagtttgaggcagt

SEQ ID NO: 958918 - DNA, 33 bp, Homo sapien
aatttgggccactatagtagagtttgaggcagt

SEQ ID NO: 958919 - DNA, 33 bp, Homo sapien
agaatagccaaaatgacgttataaagaataaga

SEQ ID NO: 958920 - DNA, 33 bp, Homo sapien
agaatagccaaaatgatgttataaagaataaga

SEQ ID NO: 958921 - DNA, 33 bp, Homo sapien
tgattgctaatagatacggcatttctttttgca

SEQ ID NO: 958922 - DNA, 33 bp, Homo sapien
tgattgctaatagatatggcatttctttttgca

SEQ ID NO: 958923 - DNA, 33 bp, Homo sapien
agcataactgactcacaagctatttctgtattc

SEQ ID NO: 958924 - DNA, 33 bp, Homo sapien
agcataactgactcacgagctatttctgtattc

SEQ ID NO: 958925 - DNA, 33 bp, Homo sapien
ccttgccaataaacgacagcaactgggagcagc

SEQ ID NO: 958926 - DNA, 33 bp, Homo sapien
ccttgccaataaacgatagcaactgggagcagc

SEQ ID NO: 958927 - DNA, 33 bp, Homo sapien
aagttcatcatgaatgcaaggcctcagtacttg

SEQ ID NO: 958928 - DNA, 33 bp, Homo sapien
aagttcatcatgaatgtaaggcctcagtacttg

SEQ ID NO: 958929 - DNA, 33 bp, Homo sapien
gtactcaattacagtacggcagcaattttatgt

SEQ ID NO: 958930 - DNA, 33 bp, Homo sapien
gtactcaattacagtatggcagcaattttatgt

SEQ ID NO: 958931 - DNA, 33 bp, Homo sapien
tcccacatataggggacggttttggataaaata

SEQ ID NO: 958932 - DNA, 33 bp, Homo sapien
tcccacatataggggatggttttggataaaata

SEQ ID NO: 958933 - DNA, 33 bp, Homo sapien
tttacaccaaagccaaagattgtgcccgttcag

SEQ ID NO: 958934 - DNA, 33 bp, Homo sapien
tttacaccaaagccaacgattgtgcccgttcag

SEQ ID NO: 958935 - DNA, 33 bp, Homo sapien
ggactctcctctggtacgggaaaggatgctttt

SEQ ID NO: 958936 - DNA, 33 bp, Homo sapien
ggactctcctctggtatgggaaaggatgctttt

SEQ ID NO: 958937 - DNA, 33 bp, Homo sapien
aagaataaccttacctcactatcaatgaaaatc

SEQ ID NO: 958938 - DNA, 33 bp, Homo sapien
aagaataaccttaccttactatcaatgaaaatc

SEQ ID NO: 958939 - DNA, 33 bp, Homo sapien
tctggtagtttcgaaagtctattattttatgac

SEQ ID NO: 958940 - DNA, 33 bp, Homo sapien
tctggtagtttcgaaattctattattttatgac

SEQ ID NO: 958941 - DNA, 33 bp, Homo sapien
cagtgatcaacttccaaattctcaacttcatcc

SEQ ID NO: 958942 - DNA, 33 bp, Homo sapien
cagtgatcaacttccagattctcaacttcatcc

SEQ ID NO: 958943 - DNA, 33 bp, Homo sapien
ttcattcccagtcagcaccaaaataaaatgtaa

SEQ ID NO: 958944 - DNA, 33 bp, Homo sapien
ttcattcccagtcagctccaaaataaaatgtaa

SEQ ID NO: 958945 - DNA, 33 bp, Homo sapien
ctgttaaccgagtatcaaagatgctaagaaact

SEQ ID NO: 958946 - DNA, 33 bp, Homo sapien
ctgttaaccgagtatccaagatgctaagaaact

SEQ ID NO: 958947 - DNA, 33 bp, Homo sapien
ataactggaatcagaacgagaagaaaagcacca

SEQ ID NO: 958948 - DNA, 33 bp, Homo sapien
ataactggaatcagaaggagaagaaaagcacca

SEQ ID NO: 958949 - DNA, 33 bp, Homo sapien
gcagcacagtgaaaaaagtctgttttggaatca

SEQ ID NO: 958950 - DNA, 33 bp, Homo sapien
gcagcacagtgaaaaaggtctgttttggaatca

SEQ ID NO: 958951 - DNA, 33 bp, Homo sapien
actgctcagtaagttacgtattattttcatttt

SEQ ID NO: 958952 - DNA, 33 bp, Homo sapien
actgctcagtaagttatgtattattttcatttt

SEQ ID NO: 958953 - DNA, 33 bp, Homo sapien
gtgaacttaggaaactgaatctatcctgtggaa

SEQ ID NO: 958954 - DNA, 33 bp, Homo sapien
gtgaacttaggaaacttaatctatcctgtggaa

SEQ ID NO: 958955 - DNA, 33 bp, Homo sapien
catactttcttttactcactcagcattttcctc

SEQ ID NO: 958956 - DNA, 33 bp, Homo sapien
catactttcttttacttactcagcattttcctc

SEQ ID NO: 958957 - DNA, 33 bp, Homo sapien
gtccaaatccacagtaacacaccaaaatctact

SEQ ID NO: 958958 - DNA, 33 bp, Homo sapien
gtccaaatccacagtatcacaccaaaatctact

SEQ ID NO: 958959 - DNA, 33 bp, Homo sapien
gcaaagtctttacaacagtatctgacagagaaa

SEQ ID NO: 958960 - DNA, 33 bp, Homo sapien
gcaaagtctttacaacggtatctgacagagaaa

SEQ ID NO: 958961 - DNA, 33 bp, Homo sapien
gaatgtggaaatctaactgatcggctaagtgtt

SEQ ID NO: 958962 - DNA, 33 bp, Homo sapien
gaatgtggaaatctaattgatcggctaagtgtt

SEQ ID NO: 958963 - DNA, 33 bp, Homo sapien
tagcagaaacagcagacgagtagccttagcctc

SEQ ID NO: 958964 - DNA, 33 bp, Homo sapien
tagcagaaacagcagaggagtagccttagcctc

SEQ ID NO: 958965 - DNA, 33 bp, Homo sapien
ttatacctgtcatgcaaatatacagaacccaga

SEQ ID NO: 958966 - DNA, 33 bp, Homo sapien
ttatacctgtcatgcagatatacagaacccaga

SEQ ID NO: 958967 - DNA, 33 bp, Homo sapien
cagatcccttcccccaaactgactaaaataggc

SEQ ID NO: 958968 - DNA, 33 bp, Homo sapien
cagatcccttcccccagactgactaaaataggc

SEQ ID NO: 958969 - DNA, 33 bp, Homo sapien
tacaaatgtgatggtaagataatcaaaaataaa

SEQ ID NO: 958970 - DNA, 33 bp, Homo sapien
tacaaatgtgatggtatgataatcaaaaataaa

SEQ ID NO: 958971 - DNA, 33 bp, Homo sapien
aacatgactgtcaaatcagagcatttattcagt

SEQ ID NO: 958972 - DNA, 33 bp, Homo sapien
aacatgactgtcaaattagagcatttattcagt

SEQ ID NO: 958973 - DNA, 33 bp, Homo sapien
ctgagggattttatgacaaggttggccttatct

SEQ ID NO: 958974 - DNA, 33 bp, Homo sapien
ctgagggattttatgagaaggttggccttatct

SEQ ID NO: 958975 - DNA, 33 bp, Homo sapien
caataccaactcaacacgtggtgagacccagtg

SEQ ID NO: 958976 - DNA, 33 bp, Homo sapien
caataccaactcaacaggtggtgagacccagtg

SEQ ID NO: 958977 - DNA, 33 bp, Homo sapien
actatcctaaagcaagcagatgctaattctgtc

SEQ ID NO: 958978 - DNA, 33 bp, Homo sapien
actatcctaaagcaaggagatgctaattctgtc

SEQ ID NO: 958979 - DNA, 33 bp, Homo sapien
ctggagaattctgcaacggggtgaatttgaaca

SEQ ID NO: 958980 - DNA, 33 bp, Homo sapien
ctggagaattctgcaatggggtgaatttgaaca

SEQ ID NO: 958981 - DNA, 33 bp, Homo sapien
caaagtagtcatttcaagcaaaaatatcatcct

SEQ ID NO: 958982 - DNA, 33 bp, Homo sapien
caaagtagtcatttcaggcaaaaatatcatcct

SEQ ID NO: 958983 - DNA, 33 bp, Homo sapien
aacaggaactggaatcaaaatctgtcagtccct

SEQ ID NO: 958984 - DNA, 33 bp, Homo sapien
aacaggaactggaatcgaaatctgtcagtccct

SEQ ID NO: 958985 - DNA, 33 bp, Homo sapien
ccaaaaataggacacaagttagataaagcatgg

SEQ ID NO: 958986 - DNA, 33 bp, Homo sapien
ccaaaaataggacacaggttagataaagcatgg

SEQ ID NO: 958987 - DNA, 33 bp, Homo sapien
aattttgatctatgagacaacgtgggaagtccg

SEQ ID NO: 958988 - DNA, 33 bp, Homo sapien
aattttgatctatgagtcaacgtgggaagtccg

SEQ ID NO: 958989 - DNA, 33 bp, Homo sapien
aatttgtgctattctaaaccaatactacaacca

SEQ ID NO: 958990 - DNA, 33 bp, Homo sapien
aatttgtgctattctagaccaatactacaacca

SEQ ID NO: 958991 - DNA, 33 bp, Homo sapien
agtgaaaacttagagcacattcttagctaaatg

SEQ ID NO: 958992 - DNA, 33 bp, Homo sapien
agtgaaaacttagagcgcattcttagctaaatg

SEQ ID NO: 958993 - DNA, 33 bp, Homo sapien
aggacaatctgaaaccgagacatgccagttttc

SEQ ID NO: 958994 - DNA, 33 bp, Homo sapien
aggacaatctgaaacctagacatgccagttttc

SEQ ID NO: 958995 - DNA, 33 bp, Homo sapien
ctggttggagggaaaagtaatctctgacctgag

SEQ ID NO: 958996 - DNA, 33 bp, Homo sapien
ctggttggagggaaaattaatctctgacctgag

SEQ ID NO: 958997 - DNA, 33 bp, Homo sapien
tcaaaatgggttcaaagtacacaggacttcggt

SEQ ID NO: 958998 - DNA, 33 bp, Homo sapien
tcaaaatgggttcaaattacacaggacttcggt

SEQ ID NO: 958999 - DNA, 33 bp, Homo sapien
tcaccattacttagatcatcacaggtagggatg

SEQ ID NO: 959000 - DNA, 33 bp, Homo sapien
tcaccattacttagattatcacaggtagggatg

SEQ ID NO: 959001 - DNA, 33 bp, Homo sapien
ttatcttaaagtgaaacctgcttctatcaacta

SEQ ID NO: 959002 - DNA, 33 bp, Homo sapien
ttatcttaaagtgaaatctgcttctatcaacta

SEQ ID NO: 959003 - DNA, 33 bp, Homo sapien
taacttctcagtgttacgtctgtaggtagttaa

SEQ ID NO: 959004 - DNA, 33 bp, Homo sapien
taacttctcagtgttatgtctgtaggtagttaa

SEQ ID NO: 959005 - DNA, 33 bp, Homo sapien
aggccaaattaaactacggtgttgtaagtcagg

SEQ ID NO: 959006 - DNA, 33 bp, Homo sapien
aggccaaattaaactatggtgttgtaagtcagg

SEQ ID NO: 959007 - DNA, 33 bp, Homo sapien
agagggtaggagaacaaagaaatgccttttttt

SEQ ID NO: 959008 - DNA, 33 bp, Homo sapien
agagggtaggagaacagagaaatgccttttttt

SEQ ID NO: 959009 - DNA, 33 bp, Homo sapien
tgggcacacatactacaaaatacccacatgtat

SEQ ID NO: 959010 - DNA, 33 bp, Homo sapien
tgggcacacatactacgaaatacccacatgtat

SEQ ID NO: 959011 - DNA, 33 bp, Homo sapien
tttccttctcaatcaacttaatgtagggccctc

SEQ ID NO: 959012 - DNA, 33 bp, Homo sapien
tttccttctcaatcaagttaatgtagggccctc

SEQ ID NO: 959013 - DNA, 33 bp, Homo sapien
tcatttggtagggtcacaaacacaacttttcaa

SEQ ID NO: 959014 - DNA, 33 bp, Homo sapien
tcatttggtagggtcagaaacacaacttttcaa

SEQ ID NO: 959015 - DNA, 33 bp, Homo sapien
aagtcccagaatatacagtaccacaactggatt

SEQ ID NO: 959016 - DNA, 33 bp, Homo sapien
aagtcccagaatataccgtaccacaactggatt

SEQ ID NO: 959017 - DNA, 33 bp, Homo sapien
ggtggtagatgctgtacgtgcatttttttattt

SEQ ID NO: 959018 - DNA, 33 bp, Homo sapien
ggtggtagatgctgtatgtgcatttttttattt

SEQ ID NO: 959019 - DNA, 33 bp, Homo sapien
gtaatagtcacaatccagagtttgactttaatt

SEQ ID NO: 959020 - DNA, 33 bp, Homo sapien
gtaatagtcacaatcctgagtttgactttaatt

SEQ ID NO: 959021 - DNA, 33 bp, Homo sapien
agtgggaaaaaaagacacttacttgctgatatg

SEQ ID NO: 959022 - DNA, 33 bp, Homo sapien
agtgggaaaaaaagactcttacttgctgatatg

SEQ ID NO: 959023 - DNA, 33 bp, Homo sapien
actttgtcattgatggccagaagccagtaagca

SEQ ID NO: 959024 - DNA, 33 bp, Homo sapien
actttgtcattgatggtcagaagccagtaagca

SEQ ID NO: 959025 - DNA, 33 bp, Homo sapien
aagcgaattctacacccacatgaaaaacatctc

SEQ ID NO: 959026 - DNA, 33 bp, Homo sapien
aagcgaattctacaccgacatgaaaaacatctc

SEQ ID NO: 959027 - DNA, 33 bp, Homo sapien
ctaagcaaactaaagaactattgtaaagcaaaa

SEQ ID NO: 959028 - DNA, 33 bp, Homo sapien
ctaagcaaactaaagacctattgtaaagcaaaa

SEQ ID NO: 959029 - DNA, 33 bp, Homo sapien
ttagtaatcatactaccaataagtgaaccaaac

SEQ ID NO: 959030 - DNA, 33 bp, Homo sapien
ttagtaatcatactacgaataagtgaaccaaac

SEQ ID NO: 959031 - DNA, 33 bp, Homo sapien
ccatgcctctggagaaagatgattttgtatttt

SEQ ID NO: 959032 - DNA, 33 bp, Homo sapien
ccatgcctctggagaaggatgattttgtatttt

SEQ ID NO: 959033 - DNA, 33 bp, Homo sapien
ttttatttgagctctacactctctgcatggcta

SEQ ID NO: 959034 - DNA, 33 bp, Homo sapien
ttttatttgagctctatactctctgcatggcta

SEQ ID NO: 959035 - DNA, 33 bp, Homo sapien
aatttacaagcagaaactgtgtaagaagaggca

SEQ ID NO: 959036 - DNA, 33 bp, Homo sapien
aatttacaagcagaaagtgtgtaagaagaggca

SEQ ID NO: 959037 - DNA, 33 bp, Homo sapien
atagaacctcaggtgacgatggacatgttctgt

SEQ ID NO: 959038 - DNA, 33 bp, Homo sapien
atagaacctcaggtgatgatggacatgttctgt

SEQ ID NO: 959039 - DNA, 33 bp, Homo sapien
tgacactaaggcttaccaaggcaaaagcagaca

SEQ ID NO: 959040 - DNA, 33 bp, Homo sapien
tgacactaaggcttactaaggcaaaagcagaca

SEQ ID NO: 959041 - DNA, 33 bp, Homo sapien
ataatgtcactgaataagatggaactctagttc

SEQ ID NO: 959042 - DNA, 33 bp, Homo sapien
ataatgtcactgaataggatggaactctagttc

SEQ ID NO: 959043 - DNA, 33 bp, Homo sapien
ttaactaaattgactactagccctgagttacca

SEQ ID NO: 959044 - DNA, 33 bp, Homo sapien
ttaactaaattgactattagccctgagttacca

SEQ ID NO: 959045 - DNA, 33 bp, Homo sapien
ttaatcttatctttaacgtcacgtaattgtgtt

SEQ ID NO: 959046 - DNA, 33 bp, Homo sapien
ttaatcttatctttaatgtcacgtaattgtgtt

SEQ ID NO: 959047 - DNA, 33 bp, Homo sapien
tcttcttcactttccacagttaatgttctttcc

SEQ ID NO: 959048 - DNA, 33 bp, Homo sapien
tcttcttcactttccatagttaatgttctttcc

SEQ ID NO: 959049 - DNA, 33 bp, Homo sapien
cacatcaccgtgcagacgtgaaactatcaacga

SEQ ID NO: 959050 - DNA, 33 bp, Homo sapien
cacatcaccgtgcagatgtgaaactatcaacga

SEQ ID NO: 959051 - DNA, 33 bp, Homo sapien
gtagcagctgtggagacgggtgctgaagttgac

SEQ ID NO: 959052 - DNA, 33 bp, Homo sapien
gtagcagctgtggagatgggtgctgaagttgac

SEQ ID NO: 959053 - DNA, 33 bp, Homo sapien
acagggtggaaggccaaatggaacatcacagtc

SEQ ID NO: 959054 - DNA, 33 bp, Homo sapien
acagggtggaaggccacatggaacatcacagtc

SEQ ID NO: 959055 - DNA, 33 bp, Homo sapien
ctctagactcattgaaaacccgtgttcagtggg

SEQ ID NO: 959056 - DNA, 33 bp, Homo sapien
ctctagactcattgaagacccgtgttcagtggg

SEQ ID NO: 959057 - DNA, 33 bp, Homo sapien
aacaacttgactgttaggctaataaagctgaaa

SEQ ID NO: 959058 - DNA, 33 bp, Homo sapien
aacaacttgactgttatgctaataaagctgaaa

SEQ ID NO: 959059 - DNA, 33 bp, Homo sapien
aaaagtcgtggaaccaaaacaacttgactgtta

SEQ ID NO: 959060 - DNA, 33 bp, Homo sapien
aaaagtcgtggaaccagaacaacttgactgtta

SEQ ID NO: 959061 - DNA, 33 bp, Homo sapien
taggagatagggttaacgaaacagcagtaattt

SEQ ID NO: 959062 - DNA, 33 bp, Homo sapien
taggagatagggttaatgaaacagcagtaattt

SEQ ID NO: 959063 - DNA, 33 bp, Homo sapien
ttagctgcatattgcaatctttctttagaacta

SEQ ID NO: 959064 - DNA, 33 bp, Homo sapien
ttagctgcatattgcagtctttctttagaacta

SEQ ID NO: 959065 - DNA, 33 bp, Homo sapien
attaagtgcataacccaaatattcagaatagaa

SEQ ID NO: 959066 - DNA, 33 bp, Homo sapien
attaagtgcataacccgaatattcagaatagaa

SEQ ID NO: 959067 - DNA, 33 bp, Homo sapien
gaaaaatgaaagacagaagtcctcgcttccttc

SEQ ID NO: 959068 - DNA, 33 bp, Homo sapien
gaaaaatgaaagacaggagtcctcgcttccttc

SEQ ID NO: 959069 - DNA, 33 bp, Homo sapien
attccaatcacacatacgttgggaaactcgata

SEQ ID NO: 959070 - DNA, 33 bp, Homo sapien
attccaatcacacatatgttgggaaactcgata

SEQ ID NO: 959071 - DNA, 33 bp, Homo sapien
aaaggcatggaggttgaaagaagaaaaaaactg

SEQ ID NO: 959072 - DNA, 33 bp, Homo sapien
aaaggcatggaggttggaagaagaaaaaaactg

SEQ ID NO: 959073 - DNA, 33 bp, Homo sapien
tgtgaataagcaaacaatgtaggggccaataaa

SEQ ID NO: 959074 - DNA, 33 bp, Homo sapien
tgtgaataagcaaacagtgtaggggccaataaa

SEQ ID NO: 959075 - DNA, 33 bp, Homo sapien
catggatctgcaaccacataaccaatggaagca

SEQ ID NO: 959076 - DNA, 33 bp, Homo sapien
catggatctgcaaccatataaccaatggaagca

SEQ ID NO: 959077 - DNA, 33 bp, Homo sapien
attgcgtactaatggcacgaatgcagttaggat

SEQ ID NO: 959078 - DNA, 33 bp, Homo sapien
attgcgtactaatggcgcgaatgcagttaggat

SEQ ID NO: 959079 - DNA, 33 bp, Homo sapien
tctcaatatctgcttaaaattcaaccaaaccac

SEQ ID NO: 959080 - DNA, 33 bp, Homo sapien
tctcaatatctgcttataattcaaccaaaccac

SEQ ID NO: 959081 - DNA, 33 bp, Homo sapien
agggtttgagagcagcaatataggcacttagca

SEQ ID NO: 959082 - DNA, 33 bp, Homo sapien
agggtttgagagcagcgatataggcacttagca

SEQ ID NO: 959083 - DNA, 33 bp, Homo sapien
actgggctgagaattaaagtcaggagcaaatct

SEQ ID NO: 959084 - DNA, 33 bp, Homo sapien
actgggctgagaattagagtcaggagcaaatct

SEQ ID NO: 959085 - DNA, 33 bp, Homo sapien
catactcatacaaaataatgcttgaaaaaaaga

SEQ ID NO: 959086 - DNA, 33 bp, Homo sapien
catactcatacaaaatgatgcttgaaaaaaaga

SEQ ID NO: 959087 - DNA, 33 bp, Homo sapien
cctaagagctgattaacataaactctttgcaga

SEQ ID NO: 959088 - DNA, 33 bp, Homo sapien
cctaagagctgattaatataaactctttgcaga

SEQ ID NO: 959089 - DNA, 33 bp, Homo sapien
gtttgaccttgacttacggtttagtatattggc

SEQ ID NO: 959090 - DNA, 33 bp, Homo sapien
gtttgaccttgacttatggtttagtatattggc

SEQ ID NO: 959091 - DNA, 33 bp, Homo sapien
agtggcaaaagataaacgtgatttgtagaatcc

SEQ ID NO: 959092 - DNA, 33 bp, Homo sapien
agtggcaaaagataaatgtgatttgtagaatcc

SEQ ID NO: 959093 - DNA, 33 bp, Homo sapien
tgaaattgttctctgaagttccttgatctgcct

SEQ ID NO: 959094 - DNA, 33 bp, Homo sapien
tgaaattgttctctgaggttccttgatctgcct

SEQ ID NO: 959095 - DNA, 33 bp, Homo sapien
tgttgcagatatcttgaaacatcatttgtgctt

SEQ ID NO: 959096 - DNA, 33 bp, Homo sapien
tgttgcagatatcttggaacatcatttgtgctt

SEQ ID NO: 959097 - DNA, 33 bp, Homo sapien
aaggtcacaagctgacagattcgagaaaaggtt

SEQ ID NO: 959098 - DNA, 33 bp, Homo sapien
aaggtcacaagctgacggattcgagaaaaggtt

SEQ ID NO: 959099 - DNA, 33 bp, Homo sapien
tcacaataaaagttaactcatcttctcattctc

SEQ ID NO: 959100 - DNA, 33 bp, Homo sapien
tcacaataaaagttaattcatcttctcattctc

SEQ ID NO: 959101 - DNA, 33 bp, Homo sapien
aaagtctaaaccatacaggtgcctcacaataaa

SEQ ID NO: 959102 - DNA, 33 bp, Homo sapien
aaagtctaaaccatacgggtgcctcacaataaa

SEQ ID NO: 959103 - DNA, 33 bp, Homo sapien
cgcaggccaaaactcaaaactcatatgctgtgt

SEQ ID NO: 959104 - DNA, 33 bp, Homo sapien
cgcaggccaaaactcataactcatatgctgtgt

SEQ ID NO: 959105 - DNA, 33 bp, Homo sapien
attgctcctgttgcaacgtgttgacatctcttg

SEQ ID NO: 959106 - DNA, 33 bp, Homo sapien
attgctcctgttgcaatgtgttgacatctcttg

SEQ ID NO: 959107 - DNA, 33 bp, Homo sapien
tgcacattctaactacaggacacttccttttct

SEQ ID NO: 959108 - DNA, 33 bp, Homo sapien
tgcacattctaactacgggacacttccttttct

SEQ ID NO: 959109 - DNA, 33 bp, Homo sapien
cccattgggctttcaacaaacaccacatggcac

SEQ ID NO: 959110 - DNA, 33 bp, Homo sapien
cccattgggctttcaataaacaccacatggcac

SEQ ID NO: 959111 - DNA, 33 bp, Homo sapien
gagattcagggcctgacatattagtaatatttt

SEQ ID NO: 959112 - DNA, 33 bp, Homo sapien
gagattcagggcctgatatattagtaatatttt

SEQ ID NO: 959113 - DNA, 33 bp, Homo sapien
catatttctagtgttacggcaatgttaactttg

SEQ ID NO: 959114 - DNA, 33 bp, Homo sapien
catatttctagtgttatggcaatgttaactttg

SEQ ID NO: 959115 - DNA, 33 bp, Homo sapien
atatggaagggcaaaacgtctacaatagccaac

SEQ ID NO: 959116 - DNA, 33 bp, Homo sapien
atatggaagggcaaaaggtctacaatagccaac

SEQ ID NO: 959117 - DNA, 33 bp, Homo sapien
aaggactatctttcacaagcactcccagcagat

SEQ ID NO: 959118 - DNA, 33 bp, Homo sapien
aaggactatctttcacgagcactcccagcagat

SEQ ID NO: 959119 - DNA, 33 bp, Homo sapien
acagtaaaagaaggatcagacagatggagatgt

SEQ ID NO: 959120 - DNA, 33 bp, Homo sapien
acagtaaaagaaggattagacagatggagatgt

SEQ ID NO: 959121 - DNA, 33 bp, Homo sapien
aggacacagaattggacgtagtggctgatattt

SEQ ID NO: 959122 - DNA, 33 bp, Homo sapien
aggacacagaattggatgtagtggctgatattt

SEQ ID NO: 959123 - DNA, 33 bp, Homo sapien
aggttccaaaaataatcagtcttggttgggcat

SEQ ID NO: 959124 - DNA, 33 bp, Homo sapien
aggttccaaaaataattagtcttggttgggcat

SEQ ID NO: 959125 - DNA, 33 bp, Homo sapien
cttgtaccctccgaagccaaaacctgagctgta

SEQ ID NO: 959126 - DNA, 33 bp, Homo sapien
cttgtaccctccgaaggcaaaacctgagctgta

SEQ ID NO: 959127 - DNA, 33 bp, Homo sapien
agaacccaaaatttaactcataacccatcagct

SEQ ID NO: 959128 - DNA, 33 bp, Homo sapien
agaacccaaaatttaattcataacccatcagct

SEQ ID NO: 959129 - DNA, 33 bp, Homo sapien
aagtgatatacattacgggactcctcatgcctc

SEQ ID NO: 959130 - DNA, 33 bp, Homo sapien
aagtgatatacattactggactcctcatgcctc

SEQ ID NO: 959131 - DNA, 33 bp, Homo sapien
ttgcctgtgctacatacaagttactttcttcat

SEQ ID NO: 959132 - DNA, 33 bp, Homo sapien
ttgcctgtgctacatataagttactttcttcat

SEQ ID NO: 959133 - DNA, 33 bp, Homo sapien
caatctgatttagaagcattagatgcctagatt

SEQ ID NO: 959134 - DNA, 33 bp, Homo sapien
caatctgatttagaagtattagatgcctagatt

SEQ ID NO: 959135 - DNA, 33 bp, Homo sapien
aagttatttagctgacgggtaaagagtctcttt

SEQ ID NO: 959136 - DNA, 33 bp, Homo sapien
aagttatttagctgactggtaaagagtctcttt

SEQ ID NO: 959137 - DNA, 33 bp, Homo sapien
acctccttctgacaacaatcctcttcatgaccc

SEQ ID NO: 959138 - DNA, 33 bp, Homo sapien
acctccttctgacaaccatcctcttcatgaccc

SEQ ID NO: 959139 - DNA, 33 bp, Homo sapien
taaagtatagtaattacgactttcgtggactga

SEQ ID NO: 959140 - DNA, 33 bp, Homo sapien
taaagtatagtaattatgactttcgtggactga

SEQ ID NO: 959141 - DNA, 33 bp, Homo sapien
gactttcgtggactgacgtgtatgttaaggact

SEQ ID NO: 959142 - DNA, 33 bp, Homo sapien
gactttcgtggactgatgtgtatgttaaggact

SEQ ID NO: 959143 - DNA, 33 bp, Homo sapien
ttttatttttatggagacagatgggcaaagtaa

SEQ ID NO: 959144 - DNA, 33 bp, Homo sapien
ttttatttttatggagtcagatgggcaaagtaa

SEQ ID NO: 959145 - DNA, 33 bp, Homo sapien
acattatttctaagaacagcttattgttgctat

SEQ ID NO: 959146 - DNA, 33 bp, Homo sapien
acattatttctaagaagagcttattgttgctat

SEQ ID NO: 959147 - DNA, 33 bp, Homo sapien
ttgtgtctggtgggggccaattatttaaatttc

SEQ ID NO: 959148 - DNA, 33 bp, Homo sapien
ttgtgtctggtgggggtcaattatttaaatttc

SEQ ID NO: 959149 - DNA, 33 bp, Homo sapien
aaaatttctgaatactaaagtctgtcacccaaa

SEQ ID NO: 959150 - DNA, 33 bp, Homo sapien
aaaatttctgaatactgaagtctgtcacccaaa

SEQ ID NO: 959151 - DNA, 33 bp, Homo sapien
ttatttttcttgtttccaatatcacaacagctc

SEQ ID NO: 959152 - DNA, 33 bp, Homo sapien
ttatttttcttgtttctaatatcacaacagctc

SEQ ID NO: 959153 - DNA, 33 bp, Homo sapien
cctagaactaccatataaggccgggcaccatgg

SEQ ID NO: 959154 - DNA, 33 bp, Homo sapien
cctagaactaccatatgaggccgggcaccatgg

SEQ ID NO: 959155 - DNA, 33 bp, Homo sapien
agatgaggcactggttaaaatatttcacataaa

SEQ ID NO: 959156 - DNA, 33 bp, Homo sapien
agatgaggcactggttgaaatatttcacataaa

SEQ ID NO: 959157 - DNA, 33 bp, Homo sapien
aaaatggggtctgagaagtaaggaacaatcaga

SEQ ID NO: 959158 - DNA, 33 bp, Homo sapien
aaaatggggtctgagaggtaaggaacaatcaga

SEQ ID NO: 959159 - DNA, 33 bp, Homo sapien
ttgttagtacagaagtaacccaaagatagggca

SEQ ID NO: 959160 - DNA, 33 bp, Homo sapien
ttgttagtacagaagttacccaaagatagggca

SEQ ID NO: 959161 - DNA, 33 bp, Homo sapien
caccttttcccccaaacgtcatatactttgata

SEQ ID NO: 959162 - DNA, 33 bp, Homo sapien
caccttttcccccaaatgtcatatactttgata

SEQ ID NO: 959163 - DNA, 33 bp, Homo sapien
catcctccagcattcaagcaattccaaatatct

SEQ ID NO: 959164 - DNA, 33 bp, Homo sapien
catcctccagcattcaggcaattccaaatatct

SEQ ID NO: 959165 - DNA, 33 bp, Homo sapien
aaggaaataactcagaagttcgttagcagaatg

SEQ ID NO: 959166 - DNA, 33 bp, Homo sapien
aaggaaataactcagaggttcgttagcagaatg

SEQ ID NO: 959167 - DNA, 33 bp, Homo sapien
cataatcgcaatcatacggtaggtaacctttgc

SEQ ID NO: 959168 - DNA, 33 bp, Homo sapien
cataatcgcaatcatatggtaggtaacctttgc

SEQ ID NO: 959169 - DNA, 33 bp, Homo sapien
ggaattgctgggtaacaatacttaatacttgat

SEQ ID NO: 959170 - DNA, 33 bp, Homo sapien
ggaattgctgggtaactatacttaatacttgat

SEQ ID NO: 959171 - DNA, 33 bp, Homo sapien
ttcagtagccttgtagacaaaacaagacatatt

SEQ ID NO: 959172 - DNA, 33 bp, Homo sapien
ttcagtagccttgtaggcaaaacaagacatatt

SEQ ID NO: 959173 - DNA, 33 bp, Homo sapien
ctgcttgggcagggacggctttcctgtagaaat

SEQ ID NO: 959174 - DNA, 33 bp, Homo sapien
ctgcttgggcagggactgctttcctgtagaaat

SEQ ID NO: 959175 - DNA, 33 bp, Homo sapien
ctggcaatcttgtaaaatgcagattctgattca

SEQ ID NO: 959176 - DNA, 33 bp, Homo sapien
ctggcaatcttgtaaagtgcagattctgattca

SEQ ID NO: 959177 - DNA, 33 bp, Homo sapien
ccaagtaaatccagaaagtttgcaacaggattt

SEQ ID NO: 959178 - DNA, 33 bp, Homo sapien
ccaagtaaatccagaatgtttgcaacaggattt

SEQ ID NO: 959179 - DNA, 33 bp, Homo sapien
atactgactaaaatccaggaagaatgacattta

SEQ ID NO: 959180 - DNA, 33 bp, Homo sapien
atactgactaaaatccgggaagaatgacattta

SEQ ID NO: 959181 - DNA, 33 bp, Homo sapien
gaatttacagacaaaacatcatctttcctgttc

SEQ ID NO: 959182 - DNA, 33 bp, Homo sapien
gaatttacagacaaaatatcatctttcctgttc

SEQ ID NO: 959183 - DNA, 33 bp, Homo sapien
agagatgttaaacacccgcaaaaggaagtatgt

SEQ ID NO: 959184 - DNA, 33 bp, Homo sapien
agagatgttaaacacctgcaaaaggaagtatgt

SEQ ID NO: 959185 - DNA, 33 bp, Homo sapien
ctgaacctctagagaacacagtcaggtagatga

SEQ ID NO: 959186 - DNA, 33 bp, Homo sapien
ctgaacctctagagaatacagtcaggtagatga

SEQ ID NO: 959187 - DNA, 33 bp, Homo sapien
agtgtttgctttgagaatatgtgaacaaccgaa

SEQ ID NO: 959188 - DNA, 33 bp, Homo sapien
agtgtttgctttgagagtatgtgaacaaccgaa

SEQ ID NO: 959189 - DNA, 33 bp, Homo sapien
cctaccctctgacctaaagtttgggactaattt

SEQ ID NO: 959190 - DNA, 33 bp, Homo sapien
cctaccctctgacctagagtttgggactaattt

SEQ ID NO: 959191 - DNA, 33 bp, Homo sapien
aaggattcattaacccacaggcaaggttaaata

SEQ ID NO: 959192 - DNA, 33 bp, Homo sapien
aaggattcattaacccgcaggcaaggttaaata

SEQ ID NO: 959193 - DNA, 33 bp, Homo sapien
aatctcctatgcacaaaggtagtaccaatagca

SEQ ID NO: 959194 - DNA, 33 bp, Homo sapien
aatctcctatgcacaacggtagtaccaatagca

SEQ ID NO: 959195 - DNA, 33 bp, Homo sapien
tccccccagctgataaaagttaccttctctgag

SEQ ID NO: 959196 - DNA, 33 bp, Homo sapien
tccccccagctgataacagttaccttctctgag

SEQ ID NO: 959197 - DNA, 33 bp, Homo sapien
atgaataaatcaaggaagtcaatatgctttgta

SEQ ID NO: 959198 - DNA, 33 bp, Homo sapien
atgaataaatcaaggatgtcaatatgctttgta

SEQ ID NO: 959199 - DNA, 33 bp, Homo sapien
tagggcgatcctggtgcaagcatgaagccagcc

SEQ ID NO: 959200 - DNA, 33 bp, Homo sapien
tagggcgatcctggtggaagcatgaagccagcc

SEQ ID NO: 959201 - DNA, 33 bp, Homo sapien
gagtaccaacaagaaacagctctcatttttcag

SEQ ID NO: 959202 - DNA, 33 bp, Homo sapien
gagtaccaacaagaaatagctctcatttttcag

SEQ ID NO: 959203 - DNA, 33 bp, Homo sapien
aaccttgtgtctcccaatgggaacttgacatag

SEQ ID NO: 959204 - DNA, 33 bp, Homo sapien
aaccttgtgtctcccagtgggaacttgacatag

SEQ ID NO: 959205 - DNA, 33 bp, Homo sapien
gtctttagaatgaagacagaggctttattccag

SEQ ID NO: 959206 - DNA, 33 bp, Homo sapien
gtctttagaatgaagatagaggctttattccag

SEQ ID NO: 959207 - DNA, 33 bp, Homo sapien
cactggaaagagaccccaactggaaacattgtc

SEQ ID NO: 959208 - DNA, 33 bp, Homo sapien
cactggaaagagacccgaactggaaacattgtc

SEQ ID NO: 959209 - DNA, 33 bp, Homo sapien
ttctctaattacgaaaataagcttatgacaact

SEQ ID NO: 959210 - DNA, 33 bp, Homo sapien
ttctctaattacgaaagtaagcttatgacaact

SEQ ID NO: 959211 - DNA, 33 bp, Homo sapien
accttgctgtaaaaccacatgaaattcatattt

SEQ ID NO: 959212 - DNA, 33 bp, Homo sapien
accttgctgtaaaaccgcatgaaattcatattt

SEQ ID NO: 959213 - DNA, 33 bp, Homo sapien
ttgttgttgttgagcaataaacagtatatacct

SEQ ID NO: 959214 - DNA, 33 bp, Homo sapien
ttgttgttgttgagcattaaacagtatatacct

SEQ ID NO: 959215 - DNA, 33 bp, Homo sapien
agttaacttgactaacaacaagtaagtgaagga

SEQ ID NO: 959216 - DNA, 33 bp, Homo sapien
agttaacttgactaaccacaagtaagtgaagga

SEQ ID NO: 959217 - DNA, 33 bp, Homo sapien
acctaatgctatctaacgtattctgttcttaga

SEQ ID NO: 959218 - DNA, 33 bp, Homo sapien
acctaatgctatctaatgtattctgttcttaga

SEQ ID NO: 959219 - DNA, 33 bp, Homo sapien
ttaggctgctgtattcacatctggtggcctgtc

SEQ ID NO: 959220 - DNA, 33 bp, Homo sapien
ttaggctgctgtattcgcatctggtggcctgtc

SEQ ID NO: 959221 - DNA, 33 bp, Homo sapien
cttggaaaccattgtcacattgctttctgagtc

SEQ ID NO: 959222 - DNA, 33 bp, Homo sapien
cttggaaaccattgtcgcattgctttctgagtc

SEQ ID NO: 959223 - DNA, 33 bp, Homo sapien
tacattttgaaaaaacagaccttgagttattgc

SEQ ID NO: 959224 - DNA, 33 bp, Homo sapien
tacattttgaaaaaaccgaccttgagttattgc

SEQ ID NO: 959225 - DNA, 33 bp, Homo sapien
tcctgcctcaagaacacctaatccttacatttt

SEQ ID NO: 959226 - DNA, 33 bp, Homo sapien
tcctgcctcaagaacagctaatccttacatttt

SEQ ID NO: 959227 - DNA, 33 bp, Homo sapien
attatccagccccaaaatttaagatctaaatgt

SEQ ID NO: 959228 - DNA, 33 bp, Homo sapien
attatccagccccaaagtttaagatctaaatgt

SEQ ID NO: 959229 - DNA, 33 bp, Homo sapien
gcgatacttgccaaaacctagttcaggattaga

SEQ ID NO: 959230 - DNA, 33 bp, Homo sapien
gcgatacttgccaaaatctagttcaggattaga

SEQ ID NO: 959231 - DNA, 33 bp, Homo sapien
tgttttcacctgaccaaagtaaaaataacaact

SEQ ID NO: 959232 - DNA, 33 bp, Homo sapien
tgttttcacctgaccagagtaaaaataacaact

SEQ ID NO: 959233 - DNA, 33 bp, Homo sapien
ataattccagttaaaaaatgaaaagagctttat

SEQ ID NO: 959234 - DNA, 33 bp, Homo sapien
ataattccagttaaaagatgaaaagagctttat

SEQ ID NO: 959235 - DNA, 33 bp, Homo sapien
tactccaatgcaaacaacacaaaactagttctc

SEQ ID NO: 959236 - DNA, 33 bp, Homo sapien
tactccaatgcaaacagcacaaaactagttctc

SEQ ID NO: 959237 - DNA, 33 bp, Homo sapien
gaagtgcctagctacacactctattttcttcta

SEQ ID NO: 959238 - DNA, 33 bp, Homo sapien
gaagtgcctagctacatactctattttcttcta

SEQ ID NO: 959239 - DNA, 33 bp, Homo sapien
aaaatggaataatttaaagacatacaacctaga

SEQ ID NO: 959240 - DNA, 33 bp, Homo sapien
aaaatggaataatttatagacatacaacctaga

SEQ ID NO: 959241 - DNA, 33 bp, Homo sapien
aaaatattcacattagacatttgttaaatttgc

SEQ ID NO: 959242 - DNA, 33 bp, Homo sapien
aaaatattcacattaggcatttgttaaatttgc

SEQ ID NO: 959243 - DNA, 33 bp, Homo sapien
ctgggcaatctgcttccaaaggtaagaggtggt

SEQ ID NO: 959244 - DNA, 33 bp, Homo sapien
ctgggcaatctgcttctaaaggtaagaggtggt

SEQ ID NO: 959245 - DNA, 33 bp, Homo sapien
ggaattcccagttctacgggcttatctgcacgt

SEQ ID NO: 959246 - DNA, 33 bp, Homo sapien
ggaattcccagttctatgggcttatctgcacgt

SEQ ID NO: 959247 - DNA, 33 bp, Homo sapien
gacttttcccttgaaacgtagtgctggcattta

SEQ ID NO: 959248 - DNA, 33 bp, Homo sapien
gacttttcccttgaaatgtagtgctggcattta

SEQ ID NO: 959249 - DNA, 33 bp, Homo sapien
tacaatctggtatgagaattaattttttaaatc

SEQ ID NO: 959250 - DNA, 33 bp, Homo sapien
tacaatctggtatgagtattaattttttaaatc

SEQ ID NO: 959251 - DNA, 33 bp, Homo sapien
gcttgcgaaatgccaaacctgataacatactgc

SEQ ID NO: 959252 - DNA, 33 bp, Homo sapien
gcttgcgaaatgccaagcctgataacatactgc

SEQ ID NO: 959253 - DNA, 33 bp, Homo sapien
ggagtagataacaaagactttccttgaccaaag

SEQ ID NO: 959254 - DNA, 33 bp, Homo sapien
ggagtagataacaaagcctttccttgaccaaag

SEQ ID NO: 959255 - DNA, 33 bp, Homo sapien
gaaatatgaatccaataaggtcacaccctgctt

SEQ ID NO: 959256 - DNA, 33 bp, Homo sapien
gaaatatgaatccaatgaggtcacaccctgctt

SEQ ID NO: 959257 - DNA, 33 bp, Homo sapien
gtatattgccccataactctacttgtactagaa

SEQ ID NO: 959258 - DNA, 33 bp, Homo sapien
gtatattgccccataattctacttgtactagaa

SEQ ID NO: 959259 - DNA, 33 bp, Homo sapien
gtactcaaggggcacgcattacacaagggatga

SEQ ID NO: 959260 - DNA, 33 bp, Homo sapien
gtactcaaggggcacgtattacacaagggatga

SEQ ID NO: 959261 - DNA, 33 bp, Homo sapien
tccaaccaactgaacaacaggatctaagaacat

SEQ ID NO: 959262 - DNA, 33 bp, Homo sapien
tccaaccaactgaacagcaggatctaagaacat

SEQ ID NO: 959263 - DNA, 33 bp, Homo sapien
tctgtctccatttcaaccagattacccagcagt

SEQ ID NO: 959264 - DNA, 33 bp, Homo sapien
tctgtctccatttcaatcagattacccagcagt

SEQ ID NO: 959265 - DNA, 33 bp, Homo sapien
ctaaaaataactatcaacagagagaaagacata

SEQ ID NO: 959266 - DNA, 33 bp, Homo sapien
ctaaaaataactatcagcagagagaaagacata

SEQ ID NO: 959267 - DNA, 33 bp, Homo sapien
atgcatgaaacaagtaaatttgaggcagcaaat

SEQ ID NO: 959268 - DNA, 33 bp, Homo sapien
atgcatgaaacaagtacatttgaggcagcaaat

SEQ ID NO: 959269 - DNA, 33 bp, Homo sapien
aagtatttagtcttcactcctgtgtttgaagca

SEQ ID NO: 959270 - DNA, 33 bp, Homo sapien
aagtatttagtcttcattcctgtgtttgaagca

SEQ ID NO: 959271 - DNA, 33 bp, Homo sapien
tttgaaaagactttacacgaagttgaatggaat

SEQ ID NO: 959272 - DNA, 33 bp, Homo sapien
tttgaaaagactttacccgaagttgaatggaat

SEQ ID NO: 959273 - DNA, 33 bp, Homo sapien
tagaatagacaaattacattttctctgcaaatt

SEQ ID NO: 959274 - DNA, 33 bp, Homo sapien
tagaatagacaaattatattttctctgcaaatt

SEQ ID NO: 959275 - DNA, 33 bp, Homo sapien
gtcaagagggtgaacacggcagatgtggcattt

SEQ ID NO: 959276 - DNA, 33 bp, Homo sapien
gtcaagagggtgaacatggcagatgtggcattt

SEQ ID NO: 959277 - DNA, 33 bp, Homo sapien
atcttcactctggggaaacaatatttaagctgc

SEQ ID NO: 959278 - DNA, 33 bp, Homo sapien
atcttcactctggggagacaatatttaagctgc

SEQ ID NO: 959279 - DNA, 33 bp, Homo sapien
acatcattttaacactcacaacaagtctatcag

SEQ ID NO: 959280 - DNA, 33 bp, Homo sapien
acatcattttaacacttacaacaagtctatcag

SEQ ID NO: 959281 - DNA, 33 bp, Homo sapien
gccctgtgcttactcccaatatgctaatattaa

SEQ ID NO: 959282 - DNA, 33 bp, Homo sapien
gccctgtgcttactcctaatatgctaatattaa

SEQ ID NO: 959283 - DNA, 33 bp, Homo sapien
ctgtagcgcttcatgaactggctccaatcactg

SEQ ID NO: 959284 - DNA, 33 bp, Homo sapien
ctgtagcgcttcatgatctggctccaatcactg

SEQ ID NO: 959285 - DNA, 33 bp, Homo sapien
aatcatattttagtgcccaacatctcatggaag

SEQ ID NO: 959286 - DNA, 33 bp, Homo sapien
aatcatattttagtgctcaacatctcatggaag

SEQ ID NO: 959287 - DNA, 33 bp, Homo sapien
aatgtttcatgtgaagaagcactgctctaaaac

SEQ ID NO: 959288 - DNA, 33 bp, Homo sapien
aatgtttcatgtgaaggagcactgctctaaaac

SEQ ID NO: 959289 - DNA, 33 bp, Homo sapien
taaaacaaagctggaaaacagggaggcaattgc

SEQ ID NO: 959290 - DNA, 33 bp, Homo sapien
taaaacaaagctggaagacagggaggcaattgc

SEQ ID NO: 959291 - DNA, 33 bp, Homo sapien
tatatgcacacacatgaaggtacccacacacat

SEQ ID NO: 959292 - DNA, 33 bp, Homo sapien
tatatgcacacacatggaggtacccacacacat

SEQ ID NO: 959293 - DNA, 33 bp, Homo sapien
caaagccttccaagtacattatctgcatagatt

SEQ ID NO: 959294 - DNA, 33 bp, Homo sapien
caaagccttccaagtagattatctgcatagatt

SEQ ID NO: 959295 - DNA, 33 bp, Homo sapien
agcacactgcctgacacagtaactactcaaaat

SEQ ID NO: 959296 - DNA, 33 bp, Homo sapien
agcacactgcctgacatagtaactactcaaaat

SEQ ID NO: 959297 - DNA, 33 bp, Homo sapien
tggcagaagcctaactcaatgggttgagaaaca

SEQ ID NO: 959298 - DNA, 33 bp, Homo sapien
tggcagaagcctaactgaatgggttgagaaaca

SEQ ID NO: 959299 - DNA, 33 bp, Homo sapien
gaagcctatagactcgaagtgcataaaataccc

SEQ ID NO: 959300 - DNA, 33 bp, Homo sapien
gaagcctatagactcggagtgcataaaataccc

SEQ ID NO: 959301 - DNA, 33 bp, Homo sapien
ttacttctgaataagcaaagttaagctacagtc

SEQ ID NO: 959302 - DNA, 33 bp, Homo sapien
ttacttctgaataagccaagttaagctacagtc

SEQ ID NO: 959303 - DNA, 33 bp, Homo sapien
agaatattagagaagccgactagttgactgtag

SEQ ID NO: 959304 - DNA, 33 bp, Homo sapien
agaatattagagaagcggactagttgactgtag

SEQ ID NO: 959305 - DNA, 33 bp, Homo sapien
aaaacaggaactacaacattctcacacagtcct

SEQ ID NO: 959306 - DNA, 33 bp, Homo sapien
aaaacaggaactacaatattctcacacagtcct

SEQ ID NO: 959307 - DNA, 33 bp, Homo sapien
aatagatttcctagcacggcagtgacactgctt

SEQ ID NO: 959308 - DNA, 33 bp, Homo sapien
aatagatttcctagcatggcagtgacactgctt

SEQ ID NO: 959309 - DNA, 33 bp, Homo sapien
tagattctgtcaattacaggcaccaaaatataa

SEQ ID NO: 959310 - DNA, 33 bp, Homo sapien
tagattctgtcaattataggcaccaaaatataa

SEQ ID NO: 959311 - DNA, 33 bp, Homo sapien
tggtctgagattctgaaactgtacattcacttt

SEQ ID NO: 959312 - DNA, 33 bp, Homo sapien
tggtctgagattctgagactgtacattcacttt

SEQ ID NO: 959313 - DNA, 33 bp, Homo sapien
gctgagccccttactgaaaaggtttcaattctc

SEQ ID NO: 959314 - DNA, 33 bp, Homo sapien
gctgagccccttactggaaaggtttcaattctc

SEQ ID NO: 959315 - DNA, 33 bp, Homo sapien
ttcaccctcaggtacacgagtgttacataaaat

SEQ ID NO: 959316 - DNA, 33 bp, Homo sapien
ttcaccctcaggtacaggagtgttacataaaat

SEQ ID NO: 959317 - DNA, 33 bp, Homo sapien
tgttgcattaatatagacgttttgaggatatca

SEQ ID NO: 959318 - DNA, 33 bp, Homo sapien
tgttgcattaatataggcgttttgaggatatca

SEQ ID NO: 959319 - DNA, 33 bp, Homo sapien
ctgtatattaaccatacgttctgacaagagttc

SEQ ID NO: 959320 - DNA, 33 bp, Homo sapien
ctgtatattaaccatatgttctgacaagagttc

SEQ ID NO: 959321 - DNA, 33 bp, Homo sapien
agatcattcttgctaaatcttccatgagaaagt

SEQ ID NO: 959322 - DNA, 33 bp, Homo sapien
agatcattcttgctaagtcttccatgagaaagt

SEQ ID NO: 959323 - DNA, 33 bp, Homo sapien
gttttcagtattgactaaatgttttggaaagat

SEQ ID NO: 959324 - DNA, 33 bp, Homo sapien
gttttcagtattgactcaatgttttggaaagat

SEQ ID NO: 959325 - DNA, 33 bp, Homo sapien
aaaggaagcttaccatcaaaatttctgtccaaa

SEQ ID NO: 959326 - DNA, 33 bp, Homo sapien
aaaggaagcttaccatgaaaatttctgtccaaa

SEQ ID NO: 959327 - DNA, 33 bp, Homo sapien
gtgtcttcaccaactcaaaataggaaaaattgt

SEQ ID NO: 959328 - DNA, 33 bp, Homo sapien
gtgtcttcaccaactcgaaataggaaaaattgt

SEQ ID NO: 959329 - DNA, 33 bp, Homo sapien
tacagatgaaaagatacgtaaggaaagacatgg

SEQ ID NO: 959330 - DNA, 33 bp, Homo sapien
tacagatgaaaagatatgtaaggaaagacatgg

SEQ ID NO: 959331 - DNA, 33 bp, Homo sapien
ttgccattgataactacggatatctggcaactc

SEQ ID NO: 959332 - DNA, 33 bp, Homo sapien
ttgccattgataactatggatatctggcaactc

SEQ ID NO: 959333 - DNA, 33 bp, Homo sapien
agtaacacaaaataaccgatcctaccagatgag

SEQ ID NO: 959334 - DNA, 33 bp, Homo sapien
agtaacacaaaataactgatcctaccagatgag

SEQ ID NO: 959335 - DNA, 33 bp, Homo sapien
tgaggttccagctttgaataagatagagtaaac

SEQ ID NO: 959336 - DNA, 33 bp, Homo sapien
tgaggttccagctttggataagatagagtaaac

SEQ ID NO: 959337 - DNA, 33 bp, Homo sapien
taacagagaagaaggaatagacctaccattttc

SEQ ID NO: 959338 - DNA, 33 bp, Homo sapien
taacagagaagaaggactagacctaccattttc

SEQ ID NO: 959339 - DNA, 33 bp, Homo sapien
agatatgcccaaactcactccctaactctaggt

SEQ ID NO: 959340 - DNA, 33 bp, Homo sapien
agatatgcccaaactctctccctaactctaggt

SEQ ID NO: 959341 - DNA, 33 bp, Homo sapien
attcacagaaacctcacgacttaccaaagatgc

SEQ ID NO: 959342 - DNA, 33 bp, Homo sapien
attcacagaaacctcatgacttaccaaagatgc

SEQ ID NO: 959343 - DNA, 33 bp, Homo sapien
gtactaagttaccaagcccagtgctaagtcttc

SEQ ID NO: 959344 - DNA, 33 bp, Homo sapien
gtactaagttaccaagtccagtgctaagtcttc

SEQ ID NO: 959345 - DNA, 33 bp, Homo sapien
aatggacacagccctcacacaccttttggtcaa

SEQ ID NO: 959346 - DNA, 33 bp, Homo sapien
aatggacacagccctcgcacaccttttggtcaa

SEQ ID NO: 959347 - DNA, 33 bp, Homo sapien
tggggaaaaaaattccggctttgcctgagaaga

SEQ ID NO: 959348 - DNA, 33 bp, Homo sapien
tggggaaaaaaattcctgctttgcctgagaaga

SEQ ID NO: 959349 - DNA, 33 bp, Homo sapien
gttgtgtgcaaaaccaagaaaaatttgaccaag

SEQ ID NO: 959350 - DNA, 33 bp, Homo sapien
gttgtgtgcaaaaccaggaaaaatttgaccaag

SEQ ID NO: 959351 - DNA, 33 bp, Homo sapien
actctgacatatcaagaaattagtgtcaccaac

SEQ ID NO: 959352 - DNA, 33 bp, Homo sapien
actctgacatatcaaggaattagtgtcaccaac

SEQ ID NO: 959353 - DNA, 33 bp, Homo sapien
caaattgtaatcagaacgccaagttatcaattt

SEQ ID NO: 959354 - DNA, 33 bp, Homo sapien
caaattgtaatcagaatgccaagttatcaattt

SEQ ID NO: 959355 - DNA, 33 bp, Homo sapien
gtattgattcatcgagcctcaatcatatttcag

SEQ ID NO: 959356 - DNA, 33 bp, Homo sapien
gtattgattcatcgagtctcaatcatatttcag

SEQ ID NO: 959357 - DNA, 33 bp, Homo sapien
aaccaaaacactgaaacgtgactttcctagttg

SEQ ID NO: 959358 - DNA, 33 bp, Homo sapien
aaccaaaacactgaaatgtgactttcctagttg

SEQ ID NO: 959359 - DNA, 33 bp, Homo sapien
cttgctactgaatcaagaggatctcctggattt

SEQ ID NO: 959360 - DNA, 33 bp, Homo sapien
cttgctactgaatcaataggatctcctggattt

SEQ ID NO: 959361 - DNA, 33 bp, Homo sapien
gctatctagcttagccaatgacttctccttttt

SEQ ID NO: 959362 - DNA, 33 bp, Homo sapien
gctatctagcttagccgatgacttctccttttt

SEQ ID NO: 959363 - DNA, 33 bp, Homo sapien
taaggtcaagatgggacggagattctggacctg

SEQ ID NO: 959364 - DNA, 33 bp, Homo sapien
taaggtcaagatgggatggagattctggacctg

SEQ ID NO: 959365 - DNA, 33 bp, Homo sapien
gaaaaaatcgatggccacaaagttcttccccat

SEQ ID NO: 959366 - DNA, 33 bp, Homo sapien
gaaaaaatcgatggccgcaaagttcttccccat

SEQ ID NO: 959367 - DNA, 33 bp, Homo sapien
tactcataacaagacagcttgcactgctatcag

SEQ ID NO: 959368 - DNA, 33 bp, Homo sapien
tactcataacaagacatcttgcactgctatcag

SEQ ID NO: 959369 - DNA, 33 bp, Homo sapien
ttagttacgtagctaacggtgtcagagtgaaat

SEQ ID NO: 959370 - DNA, 33 bp, Homo sapien
ttagttacgtagctaagggtgtcagagtgaaat

SEQ ID NO: 959371 - DNA, 33 bp, Homo sapien
cctgtgaatctactcaaatagtatctttattta

SEQ ID NO: 959372 - DNA, 33 bp, Homo sapien
cctgtgaatctactcagatagtatctttattta

SEQ ID NO: 959373 - DNA, 33 bp, Homo sapien
gagaagcattgatccacagtggaaattacatgt

SEQ ID NO: 959374 - DNA, 33 bp, Homo sapien
gagaagcattgatccatagtggaaattacatgt

SEQ ID NO: 959375 - DNA, 33 bp, Homo sapien
aaattacatgtatttaagtatgaaggtagtaaa

SEQ ID NO: 959376 - DNA, 33 bp, Homo sapien
aaattacatgtatttacgtatgaaggtagtaaa

SEQ ID NO: 959377 - DNA, 33 bp, Homo sapien
tgctgtaaaaaatacactctgctgcctttgcag

SEQ ID NO: 959378 - DNA, 33 bp, Homo sapien
tgctgtaaaaaatacagtctgctgcctttgcag

SEQ ID NO: 959379 - DNA, 33 bp, Homo sapien
aagaaaactgagaagaccgtgtctaattttgaa

SEQ ID NO: 959380 - DNA, 33 bp, Homo sapien
aagaaaactgagaagatcgtgtctaattttgaa

SEQ ID NO: 959381 - DNA, 33 bp, Homo sapien
atgacgcggaacacccaaagggcaggaatggaa

SEQ ID NO: 959382 - DNA, 33 bp, Homo sapien
atgacgcggaacacccgaagggcaggaatggaa

SEQ ID NO: 959383 - DNA, 33 bp, Homo sapien
aaaagagagacgcataaaaacagagcatttatc

SEQ ID NO: 959384 - DNA, 33 bp, Homo sapien
aaaagagagacgcatacaaacagagcatttatc

SEQ ID NO: 959385 - DNA, 33 bp, Homo sapien
acaacaaatgaatacaaacactcaacgtgaact

SEQ ID NO: 959386 - DNA, 33 bp, Homo sapien
acaacaaatgaatacagacactcaacgtgaact

SEQ ID NO: 959387 - DNA, 33 bp, Homo sapien
tcatagagaaacctgaatagtcagatttgtttt

SEQ ID NO: 959388 - DNA, 33 bp, Homo sapien
tcatagagaaacctgagtagtcagatttgtttt

SEQ ID NO: 959389 - DNA, 33 bp, Homo sapien
cctagaacaatacctacagcaaatcaggtcagg

SEQ ID NO: 959390 - DNA, 33 bp, Homo sapien
cctagaacaatacctatagcaaatcaggtcagg

SEQ ID NO: 959391 - DNA, 33 bp, Homo sapien
tcctgttgcttagaacggaacttaaaagctggg

SEQ ID NO: 959392 - DNA, 33 bp, Homo sapien
tcctgttgcttagaactgaacttaaaagctggg

SEQ ID NO: 959393 - DNA, 33 bp, Homo sapien
aagttgctgagcagaaagtgccacagtcatgtc

SEQ ID NO: 959394 - DNA, 33 bp, Homo sapien
aagttgctgagcagaaggtgccacagtcatgtc

SEQ ID NO: 959395 - DNA, 33 bp, Homo sapien
cctcaggtaaaaataacgtgatatgaagaatca

SEQ ID NO: 959396 - DNA, 33 bp, Homo sapien
cctcaggtaaaaataatgtgatatgaagaatca

SEQ ID NO: 959397 - DNA, 33 bp, Homo sapien
aagcttggccttttcacgcagctgttgtttgtg

SEQ ID NO: 959398 - DNA, 33 bp, Homo sapien
aagcttggccttttcatgcagctgttgtttgtg

SEQ ID NO: 959399 - DNA, 33 bp, Homo sapien
ctctcagtgctaacaaagcaacattcaatgaca

SEQ ID NO: 959400 - DNA, 33 bp, Homo sapien
ctctcagtgctaacaaggcaacattcaatgaca

SEQ ID NO: 959401 - DNA, 33 bp, Homo sapien
atgtgtggctaccaatgaactaaaatcttattt

SEQ ID NO: 959402 - DNA, 33 bp, Homo sapien
atgtgtggctaccaattaactaaaatcttattt

SEQ ID NO: 959403 - DNA, 33 bp, Homo sapien
aaggtctcagaaataacggcttggtaatggatg

SEQ ID NO: 959404 - DNA, 33 bp, Homo sapien
aaggtctcagaaataatggcttggtaatggatg

SEQ ID NO: 959405 - DNA, 33 bp, Homo sapien
tatacagaaactgaagcccagaaacacccagct

SEQ ID NO: 959406 - DNA, 33 bp, Homo sapien
tatacagaaactgaagtccagaaacacccagct

SEQ ID NO: 959407 - DNA, 33 bp, Homo sapien
tctcagttttaccacccaccagctgagtgatgc

SEQ ID NO: 959408 - DNA, 33 bp, Homo sapien
tctcagttttaccacctaccagctgagtgatgc

SEQ ID NO: 959409 - DNA, 33 bp, Homo sapien
ttaatgatttctagcaagattttttaaaactaa

SEQ ID NO: 959410 - DNA, 33 bp, Homo sapien
ttaatgatttctagcaggattttttaaaactaa

SEQ ID NO: 959411 - DNA, 33 bp, Homo sapien
agggaaagatatctgacatccaacagccaatcc

SEQ ID NO: 959412 - DNA, 33 bp, Homo sapien
agggaaagatatctgagatccaacagccaatcc

SEQ ID NO: 959413 - DNA, 33 bp, Homo sapien
acttgtactaaaatggccaaagcgtttacttac

SEQ ID NO: 959414 - DNA, 33 bp, Homo sapien
acttgtactaaaatggtcaaagcgtttacttac

SEQ ID NO: 959415 - DNA, 33 bp, Homo sapien
cacgtagcgactattcacttttggttttgatac

SEQ ID NO: 959416 - DNA, 33 bp, Homo sapien
cacgtagcgactattcgcttttggttttgatac

SEQ ID NO: 959417 - DNA, 33 bp, Homo sapien
attggaaatgacacccaggacaactggaaggcc

SEQ ID NO: 959418 - DNA, 33 bp, Homo sapien
attggaaatgacacccgggacaactggaaggcc

SEQ ID NO: 959419 - DNA, 33 bp, Homo sapien
ctgatttctgggaagactatccattgttcttat

SEQ ID NO: 959420 - DNA, 33 bp, Homo sapien
ctgatttctgggaagattatccattgttcttat

SEQ ID NO: 959421 - DNA, 33 bp, Homo sapien
cgaacaatgacgaatcaaatcctcagagccaag

SEQ ID NO: 959422 - DNA, 33 bp, Homo sapien
cgaacaatgacgaatcgaatcctcagagccaag

SEQ ID NO: 959423 - DNA, 33 bp, Homo sapien
ttcaaaggcaacaaaaattatcacaacaaaagt

SEQ ID NO: 959424 - DNA, 33 bp, Homo sapien
ttcaaaggcaacaaaagttatcacaacaaaagt

SEQ ID NO: 959425 - DNA, 33 bp, Homo sapien
ctgcaacaatctaccacgaaaaatcaattctaa

SEQ ID NO: 959426 - DNA, 33 bp, Homo sapien
ctgcaacaatctaccatgaaaaatcaattctaa

SEQ ID NO: 959427 - DNA, 33 bp, Homo sapien
aaaaacacgctggctgcagtgtggaaaatggat

SEQ ID NO: 959428 - DNA, 33 bp, Homo sapien
aaaaacacgctggctgtagtgtggaaaatggat

SEQ ID NO: 959429 - DNA, 33 bp, Homo sapien
ataatatagaaatcctaaaacaactggaaattc

SEQ ID NO: 959430 - DNA, 33 bp, Homo sapien
ataatatagaaatccttaaacaactggaaattc

SEQ ID NO: 959431 - DNA, 33 bp, Homo sapien
atttcattctcaaaccaacaggagatgatataa

SEQ ID NO: 959432 - DNA, 33 bp, Homo sapien
atttcattctcaaaccgacaggagatgatataa

SEQ ID NO: 959433 - DNA, 33 bp, Homo sapien
tgccaattcttacagacgttattaaggcattca

SEQ ID NO: 959434 - DNA, 33 bp, Homo sapien
tgccaattcttacagatgttattaaggcattca

SEQ ID NO: 959435 - DNA, 33 bp, Homo sapien
ttgttaatgataccaaacaatcaaggttcaagg

SEQ ID NO: 959436 - DNA, 33 bp, Homo sapien
ttgttaatgataccaagcaatcaaggttcaagg

SEQ ID NO: 959437 - DNA, 33 bp, Homo sapien
ccagaaatagcaaaaccgtaaacttgaaattgt

SEQ ID NO: 959438 - DNA, 33 bp, Homo sapien
ccagaaatagcaaaactgtaaacttgaaattgt

SEQ ID NO: 959439 - DNA, 33 bp, Homo sapien
ccagaacttctatccacgtagcctctagacatg

SEQ ID NO: 959440 - DNA, 33 bp, Homo sapien
ccagaacttctatccaggtagcctctagacatg

SEQ ID NO: 959441 - DNA, 33 bp, Homo sapien
agaattctgaacttcccatcctgttaggcacat

SEQ ID NO: 959442 - DNA, 33 bp, Homo sapien
agaattctgaacttcctatcctgttaggcacat

SEQ ID NO: 959443 - DNA, 33 bp, Homo sapien
taaagatcaacgctaacattgcctccaaccaag

SEQ ID NO: 959444 - DNA, 33 bp, Homo sapien
taaagatcaacgctaatattgcctccaaccaag

SEQ ID NO: 959445 - DNA, 33 bp, Homo sapien
agaagtcttgccatgaatagctcaattaatatg

SEQ ID NO: 959446 - DNA, 33 bp, Homo sapien
agaagtcttgccatgagtagctcaattaatatg

SEQ ID NO: 959447 - DNA, 33 bp, Homo sapien
acgacacagtctttgacgagctggctctccaag

SEQ ID NO: 959448 - DNA, 33 bp, Homo sapien
acgacacagtctttgatgagctggctctccaag

SEQ ID NO: 959449 - DNA, 33 bp, Homo sapien
taaacactttaggcataaattgaagactatgac

SEQ ID NO: 959450 - DNA, 33 bp, Homo sapien
taaacactttaggcatcaattgaagactatgac

SEQ ID NO: 959451 - DNA, 33 bp, Homo sapien
gagtgcgtgaacattcaattcatttctcatttt

SEQ ID NO: 959452 - DNA, 33 bp, Homo sapien
gagtgcgtgaacattcgattcatttctcatttt

SEQ ID NO: 959453 - DNA, 33 bp, Homo sapien
tactcatatgttttcaatagactacaatctact

SEQ ID NO: 959454 - DNA, 33 bp, Homo sapien
tactcatatgttttcattagactacaatctact

SEQ ID NO: 959455 - DNA, 33 bp, Homo sapien
cttctagttaggtccacgtgcagcccaggaggt

SEQ ID NO: 959456 - DNA, 33 bp, Homo sapien
cttctagttaggtccatgtgcagcccaggaggt

SEQ ID NO: 959457 - DNA, 33 bp, Homo sapien
caactggaattagcccggactctagagccactg

SEQ ID NO: 959458 - DNA, 33 bp, Homo sapien
caactggaattagccctgactctagagccactg

SEQ ID NO: 959459 - DNA, 33 bp, Homo sapien
aaaattgtaaattacaaagatgctccgattaaa

SEQ ID NO: 959460 - DNA, 33 bp, Homo sapien
aaaattgtaaattacagagatgctccgattaaa

SEQ ID NO: 959461 - DNA, 33 bp, Homo sapien
ttatagaatgcatctgcaaaagtctgccaaagc

SEQ ID NO: 959462 - DNA, 33 bp, Homo sapien
ttatagaatgcatctgtaaaagtctgccaaagc

SEQ ID NO: 959463 - DNA, 33 bp, Homo sapien
ttagacaaaaatctcacagcctaatattttgaa

SEQ ID NO: 959464 - DNA, 33 bp, Homo sapien
ttagacaaaaatctcagagcctaatattttgaa

SEQ ID NO: 959465 - DNA, 33 bp, Homo sapien
tgtctgtgatttgtgaagcattcatcttgtttc

SEQ ID NO: 959466 - DNA, 33 bp, Homo sapien
tgtctgtgatttgtgaggcattcatcttgtttc

SEQ ID NO: 959467 - DNA, 33 bp, Homo sapien
agaacttaacacagaacaagcattcaacctagc

SEQ ID NO: 959468 - DNA, 33 bp, Homo sapien
agaacttaacacagaagaagcattcaacctagc

SEQ ID NO: 959469 - DNA, 33 bp, Homo sapien
ctattagcagaagcaaatatcagccttcttcag

SEQ ID NO: 959470 - DNA, 33 bp, Homo sapien
ctattagcagaagcaagtatcagccttcttcag

SEQ ID NO: 959471 - DNA, 33 bp, Homo sapien
tcttaaattgcctgacactattttaagtatttt

SEQ ID NO: 959472 - DNA, 33 bp, Homo sapien
tcttaaattgcctgacgctattttaagtatttt

SEQ ID NO: 959473 - DNA, 33 bp, Homo sapien
ttggactgacaaagacagcttaacaagagagaa

SEQ ID NO: 959474 - DNA, 33 bp, Homo sapien
ttggactgacaaagacggcttaacaagagagaa

SEQ ID NO: 959475 - DNA, 33 bp, Homo sapien
ctcccttttcttagatcaattaaatcagaattt

SEQ ID NO: 959476 - DNA, 33 bp, Homo sapien
ctcccttttcttagatgaattaaatcagaattt

SEQ ID NO: 959477 - DNA, 33 bp, Homo sapien
ccgatttcttccctaccggtaatttcaaaatgg

SEQ ID NO: 959478 - DNA, 33 bp, Homo sapien
ccgatttcttccctactggtaatttcaaaatgg

SEQ ID NO: 959479 - DNA, 33 bp, Homo sapien
atgcacggtggagaaaggagacccgcttcgttt

SEQ ID NO: 959480 - DNA, 33 bp, Homo sapien
atgcacggtggagaaatgagacccgcttcgttt

SEQ ID NO: 959481 - DNA, 33 bp, Homo sapien
gtgatggcagatagaaatcctgtttccagggaa

SEQ ID NO: 959482 - DNA, 33 bp, Homo sapien
gtgatggcagatagaactcctgtttccagggaa

SEQ ID NO: 959483 - DNA, 33 bp, Homo sapien
aagaaaaacagaacaacatagttgcactacaaa

SEQ ID NO: 959484 - DNA, 33 bp, Homo sapien
aagaaaaacagaacaatatagttgcactacaaa

SEQ ID NO: 959485 - DNA, 33 bp, Homo sapien
gtagctgattttggaaaagttcactgtggcctg

SEQ ID NO: 959486 - DNA, 33 bp, Homo sapien
gtagctgattttggaagagttcactgtggcctg

SEQ ID NO: 959487 - DNA, 33 bp, Homo sapien
tctcactgccatctggaagtttaacacagtgcc

SEQ ID NO: 959488 - DNA, 33 bp, Homo sapien
tctcactgccatctgggagtttaacacagtgcc

SEQ ID NO: 959489 - DNA, 33 bp, Homo sapien
taggaagactaggaggaaggaaactgactaatt

SEQ ID NO: 959490 - DNA, 33 bp, Homo sapien
taggaagactaggaggtaggaaactgactaatt

SEQ ID NO: 959491 - DNA, 33 bp, Homo sapien
gttgcattgaggactgaagatatggctctagat

SEQ ID NO: 959492 - DNA, 33 bp, Homo sapien
gttgcattgaggactggagatatggctctagat

SEQ ID NO: 959493 - DNA, 33 bp, Homo sapien
gcactttttaatcaccaaagaggagacaaactt

SEQ ID NO: 959494 - DNA, 33 bp, Homo sapien
gcactttttaatcaccgaagaggagacaaactt

SEQ ID NO: 959495 - DNA, 33 bp, Homo sapien
ctcttagaagaaagcaaaatcctgtgagtgaaa

SEQ ID NO: 959496 - DNA, 33 bp, Homo sapien
ctcttagaagaaagcacaatcctgtgagtgaaa

SEQ ID NO: 959497 - DNA, 33 bp, Homo sapien
atcagaagatttgagacagcaatataaactaaa

SEQ ID NO: 959498 - DNA, 33 bp, Homo sapien
atcagaagatttgagatagcaatataaactaaa

SEQ ID NO: 959499 - DNA, 33 bp, Homo sapien
attgcatccagcctcaaaagaatagtataaacc

SEQ ID NO: 959500 - DNA, 33 bp, Homo sapien
attgcatccagcctcagaagaatagtataaacc

SEQ ID NO: 959501 - DNA, 33 bp, Homo sapien
tttatgtacatttacactctaatcacaggtatt

SEQ ID NO: 959502 - DNA, 33 bp, Homo sapien
tttatgtacatttacattctaatcacaggtatt

SEQ ID NO: 959503 - DNA, 33 bp, Homo sapien
agggtgctgtgctaaccggggagaaaaatactc

SEQ ID NO: 959504 - DNA, 33 bp, Homo sapien
agggtgctgtgctaactggggagaaaaatactc

SEQ ID NO: 959505 - DNA, 33 bp, Homo sapien
ctccaaaatattagtaccattgaaagtttgtta

SEQ ID NO: 959506 - DNA, 33 bp, Homo sapien
ctccaaaatattagtatcattgaaagtttgtta

SEQ ID NO: 959507 - DNA, 33 bp, Homo sapien
tgtaattcagaaaggaagtcaccactcattgtt

SEQ ID NO: 959508 - DNA, 33 bp, Homo sapien
tgtaattcagaaaggatgtcaccactcattgtt

SEQ ID NO: 959509 - DNA, 33 bp, Homo sapien
tgtttgcctccaattaacatgaaccattcttaa

SEQ ID NO: 959510 - DNA, 33 bp, Homo sapien
tgtttgcctccaattatcatgaaccattcttaa

SEQ ID NO: 959511 - DNA, 33 bp, Homo sapien
tggaggtgttaaaagcacaactgttggtcctca

SEQ ID NO: 959512 - DNA, 33 bp, Homo sapien
tggaggtgttaaaagcgcaactgttggtcctca

SEQ ID NO: 959513 - DNA, 33 bp, Homo sapien
ctgcctagatatgcaaagaaaaagttcaacgga

SEQ ID NO: 959514 - DNA, 33 bp, Homo sapien
ctgcctagatatgcaaggaaaaagttcaacgga

SEQ ID NO: 959515 - DNA, 33 bp, Homo sapien
tccatgggaaaatgcacgatggttttctatgaa

SEQ ID NO: 959516 - DNA, 33 bp, Homo sapien
tccatgggaaaatgcatgatggttttctatgaa

SEQ ID NO: 959517 - DNA, 33 bp, Homo sapien
taacagacgcaggtaacggagagtgcctgctgg

SEQ ID NO: 959518 - DNA, 33 bp, Homo sapien
taacagacgcaggtaatggagagtgcctgctgg

SEQ ID NO: 959519 - DNA, 33 bp, Homo sapien
ctcagtaaatgctgataaattcctgtatgaata

SEQ ID NO: 959520 - DNA, 33 bp, Homo sapien
ctcagtaaatgctgatcaattcctgtatgaata

SEQ ID NO: 959521 - DNA, 33 bp, Homo sapien
gaatgaacaaacaagaacatttgtctgtacaag

SEQ ID NO: 959522 - DNA, 33 bp, Homo sapien
gaatgaacaaacaagagcatttgtctgtacaag

SEQ ID NO: 959523 - DNA, 33 bp, Homo sapien
gaaggaatcactaattaaatgagatctttgaaa

SEQ ID NO: 959524 - DNA, 33 bp, Homo sapien
gaaggaatcactaattcaatgagatctttgaaa

SEQ ID NO: 959525 - DNA, 33 bp, Homo sapien
gtgcaaactccactctcaaacttttcaaagctt

SEQ ID NO: 959526 - DNA, 33 bp, Homo sapien
gtgcaaactccactctgaaacttttcaaagctt

SEQ ID NO: 959527 - DNA, 33 bp, Homo sapien
gtggacaaagtatcacccacaatgcacaggcgc

SEQ ID NO: 959528 - DNA, 33 bp, Homo sapien
gtggacaaagtatcacgcacaatgcacaggcgc

SEQ ID NO: 959529 - DNA, 33 bp, Homo sapien
tccagcttgggtgataaatcaaaactctgtgtc

SEQ ID NO: 959530 - DNA, 33 bp, Homo sapien
tccagcttgggtgatacatcaaaactctgtgtc

SEQ ID NO: 959531 - DNA, 33 bp, Homo sapien
ttcaaatttatatccaactgctttacaaacact

SEQ ID NO: 959532 - DNA, 33 bp, Homo sapien
ttcaaatttatatccagctgctttacaaacact

SEQ ID NO: 959533 - DNA, 33 bp, Homo sapien
agaatgtagcagctacaagaacaaagaattaga

SEQ ID NO: 959534 - DNA, 33 bp, Homo sapien
agaatgtagcagctacgagaacaaagaattaga

SEQ ID NO: 959535 - DNA, 33 bp, Homo sapien
aatattaacatccacaaactaacacctacttat

SEQ ID NO: 959536 - DNA, 33 bp, Homo sapien
aatattaacatccacagactaacacctacttat

SEQ ID NO: 959537 - DNA, 33 bp, Homo sapien
gaagtcaagtgattggaaagaattttaaagaga

SEQ ID NO: 959538 - DNA, 33 bp, Homo sapien
gaagtcaagtgattgggaagaattttaaagaga

SEQ ID NO: 959539 - DNA, 33 bp, Homo sapien
atcccttcaggtctgaataaaaccataaataga

SEQ ID NO: 959540 - DNA, 33 bp, Homo sapien
atcccttcaggtctgagtaaaaccataaataga

SEQ ID NO: 959541 - DNA, 33 bp, Homo sapien
aaatctattaagcaaagccttttcaacttaaag

SEQ ID NO: 959542 - DNA, 33 bp, Homo sapien
aaatctattaagcaaatccttttcaacttaaag

SEQ ID NO: 959543 - DNA, 33 bp, Homo sapien
ggaaatcatcatttggcaattgtatttcctctt

SEQ ID NO: 959544 - DNA, 33 bp, Homo sapien
ggaaatcatcatttgggaattgtatttcctctt

SEQ ID NO: 959545 - DNA, 33 bp, Homo sapien
tatctagaaaacataccggaaaaacatccagcc

SEQ ID NO: 959546 - DNA, 33 bp, Homo sapien
tatctagaaaacatactggaaaaacatccagcc

SEQ ID NO: 959547 - DNA, 33 bp, Homo sapien
aaacttgatggtttccacttagattcccttatt

SEQ ID NO: 959548 - DNA, 33 bp, Homo sapien
aaacttgatggtttccgcttagattcccttatt

SEQ ID NO: 959549 - DNA, 33 bp, Homo sapien
ggccacaaatcagttacagtcttggaaagcgaa

SEQ ID NO: 959550 - DNA, 33 bp, Homo sapien
ggccacaaatcagttagagtcttggaaagcgaa

SEQ ID NO: 959551 - DNA, 33 bp, Homo sapien
cccctgagtgcctgacgggtactacatagcaga

SEQ ID NO: 959552 - DNA, 33 bp, Homo sapien
cccctgagtgcctgactggtactacatagcaga

SEQ ID NO: 959553 - DNA, 33 bp, Homo sapien
tttcaactttaggaagcagttggtcacaggcca

SEQ ID NO: 959554 - DNA, 33 bp, Homo sapien
tttcaactttaggaagtagttggtcacaggcca

SEQ ID NO: 959555 - DNA, 33 bp, Homo sapien
agatgtgttgaggaaccgtcccacggcaagacc

SEQ ID NO: 959556 - DNA, 33 bp, Homo sapien
agatgtgttgaggaactgtcccacggcaagacc

SEQ ID NO: 959557 - DNA, 33 bp, Homo sapien
caataaacatatgcacactcaccgaactttgct

SEQ ID NO: 959558 - DNA, 33 bp, Homo sapien
caataaacatatgcacgctcaccgaactttgct

SEQ ID NO: 959559 - DNA, 33 bp, Homo sapien
gattaacctacttgaaaatgttagaatacaaat

SEQ ID NO: 959560 - DNA, 33 bp, Homo sapien
gattaacctacttgaagatgttagaatacaaat

SEQ ID NO: 959561 - DNA, 33 bp, Homo sapien
tgactatcagctccaaaaaaataaaataaaata

SEQ ID NO: 959562 - DNA, 33 bp, Homo sapien
tgactatcagctccaataaaataaaataaaata

SEQ ID NO: 959563 - DNA, 33 bp, Homo sapien
agagatttctgacttgaataactgaatatattt

SEQ ID NO: 959564 - DNA, 33 bp, Homo sapien
agagatttctgacttgcataactgaatatattt

SEQ ID NO: 959565 - DNA, 33 bp, Homo sapien
caatgctgtaaaaggccgagtctaagttgatgg

SEQ ID NO: 959566 - DNA, 33 bp, Homo sapien
caatgctgtaaaaggctgagtctaagttgatgg

SEQ ID NO: 959567 - DNA, 33 bp, Homo sapien
gtgtttttcctttaagaccaaagacagcaaatt

SEQ ID NO: 959568 - DNA, 33 bp, Homo sapien
gtgtttttcctttaaggccaaagacagcaaatt

SEQ ID NO: 959569 - DNA, 33 bp, Homo sapien
gacgagcttgcatatgacagagaggcctcacgg

SEQ ID NO: 959570 - DNA, 33 bp, Homo sapien
gacgagcttgcatatgtcagagaggcctcacgg

SEQ ID NO: 959571 - DNA, 33 bp, Homo sapien; identical to SEQ ID NO: 959569

SEQ ID NO: 959572 - DNA, 33 bp, Homo sapien; identical to SEQ ID NO: 959570

SEQ ID NO: 959573 - DNA, 33 bp, Homo sapien
ttgagcactttctccaagctggacactaaaaag

SEQ ID NO: 959574 - DNA, 33 bp, Homo sapien
ttgagcactttctccatgctggacactaaaaag

SEQ ID NO: 959575 - DNA, 33 bp, Homo sapien
ctcagaggatatttacccaacttctgatcagag

SEQ ID NO: 959576 - DNA, 33 bp, Homo sapien
ctcagaggatatttactcaacttctgatcagag

SEQ ID NO: 959577 - DNA, 33 bp, Homo sapien
gagttcaacctgctacagagatttgccaaaaga

SEQ ID NO: 959578 - DNA, 33 bp, Homo sapien
gagttcaacctgctacggagatttgccaaaaga

SEQ ID NO: 959579 - DNA, 33 bp, Homo sapien
agcaatgtgtttttctcaatagctcaggcttcc

SEQ ID NO: 959580 - DNA, 33 bp, Homo sapien
agcaatgtgtttttcttaatagctcaggcttcc

SEQ ID NO: 959581 - DNA, 33 bp, Homo sapien
tggcctttagcactaccatgtaagaagcaatgt

SEQ ID NO: 959582 - DNA, 33 bp, Homo sapien
tggcctttagcactactatgtaagaagcaatgt

SEQ ID NO: 959583 - DNA, 33 bp, Homo sapien
tctttacatttcaggcactgtgtattccaagtc

SEQ ID NO: 959584 - DNA, 33 bp, Homo sapien
tctttacatttcaggccctgtgtattccaagtc

SEQ ID NO: 959585 - DNA, 33 bp, Homo sapien
ttggcatgtgtcatacaatcataggtataatat

SEQ ID NO: 959586 - DNA, 33 bp, Homo sapien
ttggcatgtgtcatacgatcataggtataatat

SEQ ID NO: 959587 - DNA, 33 bp, Homo sapien
tgactctaaaaagtgacaattttgtaggggcca

SEQ ID NO: 959588 - DNA, 33 bp, Homo sapien
tgactctaaaaagtgagaattttgtaggggcca

SEQ ID NO: 959589 - DNA, 33 bp, Homo sapien
gattgcctgtagtcacagccaataagtattaga

SEQ ID NO: 959590 - DNA, 33 bp, Homo sapien
gattgcctgtagtcaccgccaataagtattaga

SEQ ID NO: 959591 - DNA, 33 bp, Homo sapien
catttcctatccatcacatatctagttctatgg

SEQ ID NO: 959592 - DNA, 33 bp, Homo sapien
catttcctatccatcatatatctagttctatgg

SEQ ID NO: 959593 - DNA, 33 bp, Homo sapien
cacaatgtcaagagatcaattggcatttaatga

SEQ ID NO: 959594 - DNA, 33 bp, Homo sapien
cacaatgtcaagagattaattggcatttaatga

SEQ ID NO: 959595 - DNA, 33 bp, Homo sapien
atgaagggatgagacacaggaggctgttttgcc

SEQ ID NO: 959596 - DNA, 33 bp, Homo sapien
atgaagggatgagacataggaggctgttttgcc

SEQ ID NO: 959597 - DNA, 33 bp, Homo sapien
tcttaaacattcactcaaataggtccttactat

SEQ ID NO: 959598 - DNA, 33 bp, Homo sapien
tcttaaacattcactcgaataggtccttactat

SEQ ID NO: 959599 - DNA, 33 bp, Homo sapien
tgaaaaccactttaaaacatggcagccaaaata

SEQ ID NO: 959600 - DNA, 33 bp, Homo sapien
tgaaaaccactttaaagcatggcagccaaaata

SEQ ID NO: 959601 - DNA, 33 bp, Homo sapien
atagagccagagtccaaaagcagtctagattct

SEQ ID NO: 959602 - DNA, 33 bp, Homo sapien
atagagccagagtccacaagcagtctagattct

SEQ ID NO: 959603 - DNA, 33 bp, Homo sapien
ctatccatatatcttcaacaaagtgtgcttatt

SEQ ID NO: 959604 - DNA, 33 bp, Homo sapien
ctatccatatatcttcgacaaagtgtgcttatt

SEQ ID NO: 959605 - DNA, 33 bp, Homo sapien
ctgcccaatgatgaaacgaagacaaatgagatc

SEQ ID NO: 959606 - DNA, 33 bp, Homo sapien
ctgcccaatgatgaaatgaagacaaatgagatc

SEQ ID NO: 959607 - DNA, 33 bp, Homo sapien
tctcagttcagattccaaaaatgttcagggcca

SEQ ID NO: 959608 - DNA, 33 bp, Homo sapien
tctcagttcagattccgaaaatgttcagggcca

SEQ ID NO: 959609 - DNA, 33 bp, Homo sapien
caattcctcttctctaacattaccaaggagcca

SEQ ID NO: 959610 - DNA, 33 bp, Homo sapien
caattcctcttctctatcattaccaaggagcca

SEQ ID NO: 959611 - DNA, 33 bp, Homo sapien
aggagaaagaaatccaactacgtaaatcttaaa

SEQ ID NO: 959612 - DNA, 33 bp, Homo sapien
aggagaaagaaatccagctacgtaaatcttaaa

SEQ ID NO: 959613 - DNA, 33 bp, Homo sapien
tttagccaatggatagccccaatttatattttt

SEQ ID NO: 959614 - DNA, 33 bp, Homo sapien
tttagccaatggatagtcccaatttatattttt

SEQ ID NO: 959615 - DNA, 33 bp, Homo sapien
aaatggggaaacaaagaaacacatgaagaaagc

SEQ ID NO: 959616 - DNA, 33 bp, Homo sapien
aaatggggaaacaaaggaacacatgaagaaagc

SEQ ID NO: 959617 - DNA, 33 bp, Homo sapien
tatgctacttgtatctaaatataagaccacttg

SEQ ID NO: 959618 - DNA, 33 bp, Homo sapien
tatgctacttgtatctgaatataagaccacttg

SEQ ID NO: 959619 - DNA, 33 bp, Homo sapien
atttccacttccctcagtcaaacacatatagct

SEQ ID NO: 959620 - DNA, 33 bp, Homo sapien
atttccacttccctcattcaaacacatatagct

SEQ ID NO: 959621 - DNA, 33 bp, Homo sapien
acttaggtggcaaatacgaaaattattataagt

SEQ ID NO: 959622 - DNA, 33 bp, Homo sapien
acttaggtggcaaatatgaaaattattataagt

SEQ ID NO: 959623 - DNA, 33 bp, Homo sapien
gtaattcttactttgtcttagcccacaggatga

SEQ ID NO: 959624 - DNA, 33 bp, Homo sapien
gtaattcttactttgttttagcccacaggatga

SEQ ID NO: 959625 - DNA, 33 bp, Homo sapien
ctcttttatatttgtaccatttacagtttgttt

SEQ ID NO: 959626 - DNA, 33 bp, Homo sapien
ctcttttatatttgtatcatttacagtttgttt

SEQ ID NO: 959627 - DNA, 33 bp, Homo sapien
ctgctaaaatcaaggacctttttgaaatctcac

SEQ ID NO: 959628 - DNA, 33 bp, Homo sapien
ctgctaaaatcaaggatctttttgaaatctcac

SEQ ID NO: 959629 - DNA, 33 bp, Homo sapien
gcatctgtattgccatcaccctagttctggcca

SEQ ID NO: 959630 - DNA, 33 bp, Homo sapien
gcatctgtattgccattaccctagttctggcca

SEQ ID NO: 959631 - DNA, 33 bp, Homo sapien
gttctggccatcctcactgaccacctgactttc

SEQ ID NO: 959632 - DNA, 33 bp, Homo sapien
gttctggccatcctcattgaccacctgactttc

SEQ ID NO: 959633 - DNA, 33 bp, Homo sapien
aattgtctgtacaacactggaagcaatatcact

SEQ ID NO: 959634 - DNA, 33 bp, Homo sapien
aattgtctgtacaacattggaagcaatatcact

SEQ ID NO: 959635 - DNA, 33 bp, Homo sapien
cagacaattcttacaaagtcctgcagcttttct

SEQ ID NO: 959636 - DNA, 33 bp, Homo sapien
cagacaattcttacaaggtcctgcagcttttct

SEQ ID NO: 959637 - DNA, 33 bp, Homo sapien
taaagtaaaccaacatcaacaacaactccttca

SEQ ID NO: 959638 - DNA, 33 bp, Homo sapien
taaagtaaaccaacattaacaacaactccttca

SEQ ID NO: 959639 - DNA, 33 bp, Homo sapien
gctcagacaataaataaaaacagagtgctcagc

SEQ ID NO: 959640 - DNA, 33 bp, Homo sapien
gctcagacaataaatagaaacagagtgctcagc

SEQ ID NO: 959641 - DNA, 33 bp, Homo sapien
ttctctctggcacttaccatttatctattttat

SEQ ID NO: 959642 - DNA, 33 bp, Homo sapien
ttctctctggcacttatcatttatctattttat

SEQ ID NO: 959643 - DNA, 33 bp, Homo sapien
cccactgctggtccaaaatctgctatcaccatt

SEQ ID NO: 959644 - DNA, 33 bp, Homo sapien
cccactgctggtccaagatctgctatcaccatt

SEQ ID NO: 959645 - DNA, 33 bp, Homo sapien
aaagaggaagcatgaaaaaggttctgatggggt

SEQ ID NO: 959646 - DNA, 33 bp, Homo sapien
aaagaggaagcatgaagaaggttctgatggggt

SEQ ID NO: 959647 - DNA, 33 bp, Homo sapien
taaaacctctcaccagaatattcaaattcagaa

SEQ ID NO: 959648 - DNA, 33 bp, Homo sapien
taaaacctctcaccaggatattcaaattcagaa

SEQ ID NO: 959649 - DNA, 33 bp, Homo sapien
gaagctctgttccaacacctactgcaaaacagt

SEQ ID NO: 959650 - DNA, 33 bp, Homo sapien
gaagctctgttccaacgcctactgcaaaacagt

SEQ ID NO: 959651 - DNA, 33 bp, Homo sapien
gggttagagtgggtagaaactatggatcatcct

SEQ ID NO: 959652 - DNA, 33 bp, Homo sapien
gggttagagtgggtaggaactatggatcatcct

SEQ ID NO: 959653 - DNA, 33 bp, Homo sapien
gtaaacaggatttggcactctacataatggcta

SEQ ID NO: 959654 - DNA, 33 bp, Homo sapien
gtaaacaggatttggcgctctacataatggcta

SEQ ID NO: 959655 - DNA, 33 bp, Homo sapien
ctgtgaactacagaaccgaaacatcaatgtatg

SEQ ID NO: 959656 - DNA, 33 bp, Homo sapien
ctgtgaactacagaactgaaacatcaatgtatg

SEQ ID NO: 959657 - DNA, 33 bp, Homo sapien
agcaagtcaattcaagactgacttcagcatctt

SEQ ID NO: 959658 - DNA, 33 bp, Homo sapien
agcaagtcaattcaagtctgacttcagcatctt

SEQ ID NO: 959659 - DNA, 33 bp, Homo sapien
tactggcaatctcctggaagttattttggcaat

SEQ ID NO: 959660 - DNA, 33 bp, Homo sapien
tactggcaatctcctgtaagttattttggcaat

SEQ ID NO: 959661 - DNA, 33 bp, Homo sapien
gagagcagtttttaatctgtgaacgtgtaagtc

SEQ ID NO: 959662 - DNA, 33 bp, Homo sapien
gagagcagtttttaatttgtgaacgtgtaagtc

SEQ ID NO: 959663 - DNA, 33 bp, Homo sapien
ttcattgagattacataaagatattacgtatat

SEQ ID NO: 959664 - DNA, 33 bp, Homo sapien
ttcattgagattacatgaagatattacgtatat

SEQ ID NO: 959665 - DNA, 33 bp, Homo sapien
tttctaataaatacacaattctatgtcaaattc

SEQ ID NO: 959666 - DNA, 33 bp, Homo sapien
tttctaataaatacacgattctatgtcaaattc

SEQ ID NO: 959667 - DNA, 33 bp, Homo sapien
ccactaacaagtcaacggctttaatgatttagt

SEQ ID NO: 959668 - DNA, 33 bp, Homo sapien
ccactaacaagtcaactgctttaatgatttagt

SEQ ID NO: 959669 - DNA, 33 bp, Homo sapien
tccttcctgaccctaaacttctctcaggagtgt

SEQ ID NO: 959670 - DNA, 33 bp, Homo sapien
tccttcctgaccctaaccttctctcaggagtgt

SEQ ID NO: 959671 - DNA, 33 bp, Homo sapien
atgtattgccacagtagatttccactctgcttt

SEQ ID NO: 959672 - DNA, 33 bp, Homo sapien
atgtattgccacagtatatttccactctgcttt

SEQ ID NO: 959673 - DNA, 33 bp, Homo sapien
gagataccatagtttgaaaggccaaagatctgt

SEQ ID NO: 959674 - DNA, 33 bp, Homo sapien
gagataccatagtttggaaggccaaagatctgt

SEQ ID NO: 959675 - DNA, 33 bp, Homo sapien
tgtaaagctaagctaaatatcagtaaaggtgat

SEQ ID NO: 959676 - DNA, 33 bp, Homo sapien
tgtaaagctaagctaagtatcagtaaaggtgat

SEQ ID NO: 959677 - DNA, 33 bp, Homo sapien
gctttttgaatgaataagtgatttctatgaatt

SEQ ID NO: 959678 - DNA, 33 bp, Homo sapien
gctttttgaatgaataggtgatttctatgaatt

SEQ ID NO: 959679 - DNA, 33 bp, Homo sapien
caggaggaacaggggacgggtgctgacaagagg

SEQ ID NO: 959680 - DNA, 33 bp, Homo sapien
caggaggaacaggggatgggtgctgacaagagg

SEQ ID NO: 959681 - DNA, 33 bp, Homo sapien
gctccagtccttctgactcaacactcgaaagag

SEQ ID NO: 959682 - DNA, 33 bp, Homo sapien
gctccagtccttctgattcaacactcgaaagag

SEQ ID NO: 959683 - DNA, 33 bp, Homo sapien
ctttaaaacttatttacaccaaagtgccaaatg

SEQ ID NO: 959684 - DNA, 33 bp, Homo sapien
ctttaaaacttatttataccaaagtgccaaatg

SEQ ID NO: 959685 - DNA, 33 bp, Homo sapien
ttggattgcttgagaccgcatctgtatgcctat

SEQ ID NO: 959686 - DNA, 33 bp, Homo sapien
ttggattgcttgagactgcatctgtatgcctat

SEQ ID NO: 959687 - DNA, 33 bp, Homo sapien
gaggggaggagcctcaaatggcacagaaatctg

SEQ ID NO: 959688 - DNA, 33 bp, Homo sapien
gaggggaggagcctcagatggcacagaaatctg

SEQ ID NO: 959689 - DNA, 33 bp, Homo sapien
caaatgtctgtaaaagcatttcacttaacaata

SEQ ID NO: 959690 - DNA, 33 bp, Homo sapien
caaatgtctgtaaaaggatttcacttaacaata

SEQ ID NO: 959691 - DNA, 33 bp, Homo sapien
atttcacttaacaatacctggcaaatattatgt

SEQ ID NO: 959692 - DNA, 33 bp, Homo sapien
atttcacttaacaatagctggcaaatattatgt

SEQ ID NO: 959693 - DNA, 33 bp, Homo sapien
ataatgagggaggaccaaggagtctttcaatca

SEQ ID NO: 959694 - DNA, 33 bp, Homo sapien
ataatgagggaggaccgaggagtctttcaatca

SEQ ID NO: 959695 - DNA, 33 bp, Homo sapien
tagaaaatgtatgagacaaactaatggaaggta

SEQ ID NO: 959696 - DNA, 33 bp, Homo sapien
tagaaaatgtatgagagaaactaatggaaggta

SEQ ID NO: 959697 - DNA, 33 bp, Homo sapien
ctcactctccttgtacgctttgcctgcagagtt

SEQ ID NO: 959698 - DNA, 33 bp, Homo sapien
ctcactctccttgtactctttgcctgcagagtt

SEQ ID NO: 959699 - DNA, 33 bp, Homo sapien
atttgagtcagccatacgtgctcatggataaaa

SEQ ID NO: 959700 - DNA, 33 bp, Homo sapien
atttgagtcagccatatgtgctcatggataaaa

SEQ ID NO: 959701 - DNA, 33 bp, Homo sapien
ataacagaatggtaaaatgcaaactgaaatcat

SEQ ID NO: 959702 - DNA, 33 bp, Homo sapien
ataacagaatggtaaactgcaaactgaaatcat

SEQ ID NO: 959703 - DNA, 33 bp, Homo sapien
caatggcctaggaaaaaattgtgagatatggaa

SEQ ID NO: 959704 - DNA, 33 bp, Homo sapien
caatggcctaggaaaacattgtgagatatggaa

SEQ ID NO: 959705 - DNA, 33 bp, Homo sapien
tttgtgtaaatttctacccaactctgaaaatgt

SEQ ID NO: 959706 - DNA, 33 bp, Homo sapien
tttgtgtaaatttctatccaactctgaaaatgt

SEQ ID NO: 959707 - DNA, 33 bp, Homo sapien
ttcagtcttttcattcaagggtgatttacatca

SEQ ID NO: 959708 - DNA, 33 bp, Homo sapien
ttcagtcttttcattcgagggtgatttacatca

SEQ ID NO: 959709 - DNA, 33 bp, Homo sapien
gatttaaaatgctagaaaatttcttactcctgt

SEQ ID NO: 959710 - DNA, 33 bp, Homo sapien
gatttaaaatgctagataatttcttactcctgt

SEQ ID NO: 959711 - DNA, 33 bp, Homo sapien
aattctattcatgtgacgagcggttaatacgtg

SEQ ID NO: 959712 - DNA, 33 bp, Homo sapien
aattctattcatgtgatgagcggttaatacgtg

SEQ ID NO: 959713 - DNA, 33 bp, Homo sapien
cataatcacagaaatgacatctcatcatgtttg

SEQ ID NO: 959714 - DNA, 33 bp, Homo sapien
cataatcacagaaatgtcatctcatcatgtttg

SEQ ID NO: 959715 - DNA, 33 bp, Homo sapien
tattcacagaaaatgaccgccaagtatgtatgg

SEQ ID NO: 959716 - DNA, 33 bp, Homo sapien
tattcacagaaaatgagcgccaagtatgtatgg

SEQ ID NO: 959717 - DNA, 33 bp, Homo sapien
ttattttcgaaaggacagatgacaaaatacaca

SEQ ID NO: 959718 - DNA, 33 bp, Homo sapien
ttattttcgaaaggacggatgacaaaatacaca

SEQ ID NO: 959719 - DNA, 33 bp, Homo sapien
ttgctgcaatttatacaagtcccaaaagagaag

SEQ ID NO: 959720 - DNA, 33 bp, Homo sapien
ttgctgcaatttatacgagtcccaaaagagaag

SEQ ID NO: 959721 - DNA, 33 bp, Homo sapien
cagtactgttcaaatccaatttaacttgttact

SEQ ID NO: 959722 - DNA, 33 bp, Homo sapien
cagtactgttcaaatcgaatttaacttgttact

SEQ ID NO: 959723 - DNA, 33 bp, Homo sapien
gctcttatgtagaggcagaactccacagatctc

SEQ ID NO: 959724 - DNA, 33 bp, Homo sapien
gctcttatgtagaggccgaactccacagatctc

SEQ ID NO: 959725 - DNA, 33 bp, Homo sapien
ccagaaaaaggtgacacggggcataggaagaat

SEQ ID NO: 959726 - DNA, 33 bp, Homo sapien
ccagaaaaaggtgacatggggcataggaagaat

SEQ ID NO: 959727 - DNA, 33 bp, Homo sapien
aagtttagtgaaaaccaaatgcataatatttat

SEQ ID NO: 959728 - DNA, 33 bp, Homo sapien
aagtttagtgaaaaccgaatgcataatatttat

SEQ ID NO: 959729 - DNA, 33 bp, Homo sapien
gacagaggaggactaaatgtatatgatttgggc

SEQ ID NO: 959730 - DNA, 33 bp, Homo sapien
gacagaggaggactaactgtatatgatttgggc

SEQ ID NO: 959731 - DNA, 33 bp, Homo sapien
catgtctaaaatacaccataaatctcgaagtgc

SEQ ID NO: 959732 - DNA, 33 bp, Homo sapien
catgtctaaaatacacgataaatctcgaagtgc

SEQ ID NO: 959733 - DNA, 33 bp, Homo sapien
atacttgagtttttaaaaataagcctgatgatt

SEQ ID NO: 959734 - DNA, 33 bp, Homo sapien
atacttgagtttttaagaataagcctgatgatt

SEQ ID NO: 959735 - DNA, 33 bp, Homo sapien
gacacatttgctaaaactatacaatcacagcaa

SEQ ID NO: 959736 - DNA, 33 bp, Homo sapien
gacacatttgctaaaattatacaatcacagcaa

SEQ ID NO: 959737 - DNA, 33 bp, Homo sapien
gtttggaatcagtttacggattgagttccagct

SEQ ID NO: 959738 - DNA, 33 bp, Homo sapien
gtttggaatcagtttatggattgagttccagct

SEQ ID NO: 959739 - DNA, 33 bp, Homo sapien
taatctttgtttcatacagtttacactacagct

SEQ ID NO: 959740 - DNA, 33 bp, Homo sapien
taatctttgtttcatagagtttacactacagct

SEQ ID NO: 959741 - DNA, 33 bp, Homo sapien
aaagagacacttattcaaaagacataaattgag

SEQ ID NO: 959742 - DNA, 33 bp, Homo sapien
aaagagacacttattcgaaagacataaattgag

SEQ ID NO: 959743 - DNA, 33 bp, Homo sapien
tcctccaaagtcaaaccgtatgatggaagtcag

SEQ ID NO: 959744 - DNA, 33 bp, Homo sapien
tcctccaaagtcaaactgtatgatggaagtcag

SEQ ID NO: 959745 - DNA, 33 bp, Homo sapien
atggaaacaatcattaggtaccttacatgaaat

SEQ ID NO: 959746 - DNA, 33 bp, Homo sapien
atggaaacaatcattatgtaccttacatgaaat

SEQ ID NO: 959747 - DNA, 33 bp, Homo sapien
aaggacatcctgcataaaggactgattaatggt

SEQ ID NO: 959748 - DNA, 33 bp, Homo sapien
aaggacatcctgcatagaggactgattaatggt

SEQ ID NO: 959749 - DNA, 33 bp, Homo sapien
caaccataaatcactcacagcaaagcagttaac

SEQ ID NO: 959750 - DNA, 33 bp, Homo sapien
caaccataaatcactcgcagcaaagcagttaac

SEQ ID NO: 959751 - DNA, 33 bp, Homo sapien
taacaattcattaccactatgatctacaggaag

SEQ ID NO: 959752 - DNA, 33 bp, Homo sapien
taacaattcattaccattatgatctacaggaag

SEQ ID NO: 959753 - DNA, 33 bp, Homo sapien
atctctgtgatcctgaataagtctgttttctat

SEQ ID NO: 959754 - DNA, 33 bp, Homo sapien
atctctgtgatcctgagtaagtctgttttctat

SEQ ID NO: 959755 - DNA, 33 bp, Homo sapien
aggaaacaatcatacaatagaggttaaagctga

SEQ ID NO: 959756 - DNA, 33 bp, Homo sapien
aggaaacaatcatacagtagaggttaaagctga

SEQ ID NO: 959757 - DNA, 33 bp, Homo sapien
aagaatattaaaatacaccacaaatgtatcagt

SEQ ID NO: 959758 - DNA, 33 bp, Homo sapien
aagaatattaaaatacgccacaaatgtatcagt

SEQ ID NO: 959759 - DNA, 33 bp, Homo sapien
gtacaaaggcccttagacaaaagcatggctcat

SEQ ID NO: 959760 - DNA, 33 bp, Homo sapien
gtacaaaggcccttaggcaaaagcatggctcat

SEQ ID NO: 959761 - DNA, 33 bp, Homo sapien
gtagaggtggcaaaaaagtcagtctgtaatagt

SEQ ID NO: 959762 - DNA, 33 bp, Homo sapien
gtagaggtggcaaaaatgtcagtctgtaatagt

SEQ ID NO: 959763 - DNA, 33 bp, Homo sapien
aaaaagctagctgaagaaaaagaatgtctttgc

SEQ ID NO: 959764 - DNA, 33 bp, Homo sapien
aaaaagctagctgaaggaaaagaatgtctttgc

SEQ ID NO: 959765 - DNA, 33 bp, Homo sapien
attccaactgactgaccataattaaacagaaaa

SEQ ID NO: 959766 - DNA, 33 bp, Homo sapien
attccaactgactgacgataattaaacagaaaa

SEQ ID NO: 959767 - DNA, 33 bp, Homo sapien
gggagcattaaagagtaaactttcaagtagaaa

SEQ ID NO: 959768 - DNA, 33 bp, Homo sapien
gggagcattaaagagtgaactttcaagtagaaa

SEQ ID NO: 959769 - DNA, 33 bp, Homo sapien
tgggattgcattacacagattatggggtctcta

SEQ ID NO: 959770 - DNA, 33 bp, Homo sapien
tgggattgcattacacggattatggggtctcta

SEQ ID NO: 959771 - DNA, 33 bp, Homo sapien
ctgccgtttaaagctgaaacatacctcaaagta

SEQ ID NO: 959772 - DNA, 33 bp, Homo sapien
ctgccgtttaaagctgtaacatacctcaaagta

SEQ ID NO: 959773 - DNA, 33 bp, Homo sapien
gaatactttaagcactaaggaactaatttcttt

SEQ ID NO: 959774 - DNA, 33 bp, Homo sapien
gaatactttaagcactgaggaactaatttcttt

SEQ ID NO: 959775 - DNA, 33 bp, Homo sapien
accactgtcaagatcaaaggagaaaaagaacaa

SEQ ID NO: 959776 - DNA, 33 bp, Homo sapien
accactgtcaagatcagaggagaaaaagaacaa

SEQ ID NO: 959777 - DNA, 33 bp, Homo sapien
gatctcgagtttctagcataattcctactttag

SEQ ID NO: 959778 - DNA, 33 bp, Homo sapien
gatctcgagtttctagtataattcctactttag

SEQ ID NO: 959779 - DNA, 33 bp, Homo sapien
tccttgtgaatttgtccaccattttatgacaga

SEQ ID NO: 959780 - DNA, 33 bp, Homo sapien
tccttgtgaatttgtctaccattttatgacaga

SEQ ID NO: 959781 - DNA, 33 bp, Homo sapien
catattcctgcaaataacaagtactcagttcag

SEQ ID NO: 959782 - DNA, 33 bp, Homo sapien
catattcctgcaaataccaagtactcagttcag

SEQ ID NO: 959783 - DNA, 33 bp, Homo sapien
gttcctttttggaaataaactgatggtgtagaa

SEQ ID NO: 959784 - DNA, 33 bp, Homo sapien
gttcctttttggaaattaactgatggtgtagaa

SEQ ID NO: 959785 - DNA, 33 bp, Homo sapien
tttgttgctgatgaatgaaacctcttttcgagt

SEQ ID NO: 959786 - DNA, 33 bp, Homo sapien
tttgttgctgatgaattaaacctcttttcgagt

SEQ ID NO: 959787 - DNA, 33 bp, Homo sapien
tcatcatgaatgagaactggataatgagcatct

SEQ ID NO: 959788 - DNA, 33 bp, Homo sapien
tcatcatgaatgagaagtggataatgagcatct

SEQ ID NO: 959789 - DNA, 33 bp, Homo sapien
gaggataacagaagaacagtgctgtaaggtcaa

SEQ ID NO: 959790 - DNA, 33 bp, Homo sapien
gaggataacagaagaagagtgctgtaaggtcaa

SEQ ID NO: 959791 - DNA, 33 bp, Homo sapien
cagctatattccagaactgttttaaatgcttga

SEQ ID NO: 959792 - DNA, 33 bp, Homo sapien
cagctatattccagaattgttttaaatgcttga

SEQ ID NO: 959793 - DNA, 33 bp, Homo sapien
aagtccaggcaagtgccgagtggatcaggctac

SEQ ID NO: 959794 - DNA, 33 bp, Homo sapien
aagtccaggcaagtgctgagtggatcaggctac

SEQ ID NO: 959795 - DNA, 33 bp, Homo sapien
tatggctaaatctccacgttcacagaaatcagg

SEQ ID NO: 959796 - DNA, 33 bp, Homo sapien
tatggctaaatctccatgttcacagaaatcagg

SEQ ID NO: 959797 - DNA, 33 bp, Homo sapien
acctgcttctgatgcccgcttttaatttttcta

SEQ ID NO: 959798 - DNA, 33 bp, Homo sapien
acctgcttctgatgcctgcttttaatttttcta

SEQ ID NO: 959799 - DNA, 33 bp, Homo sapien
aacacattgttgttaaatgcagacaaatgagaa

SEQ ID NO: 959800 - DNA, 33 bp, Homo sapien
aacacattgttgttaagtgcagacaaatgagaa

SEQ ID NO: 959801 - DNA, 33 bp, Homo sapien
ttgcatctacagtcaacttccgaagactgacac

SEQ ID NO: 959802 - DNA, 33 bp, Homo sapien
ttgcatctacagtcaatttccgaagactgacac

SEQ ID NO: 959803 - DNA, 33 bp, Homo sapien
atgtggagtctgaataaccattgtgaatgaaca

SEQ ID NO: 959804 - DNA, 33 bp, Homo sapien
atgtggagtctgaatatccattgtgaatgaaca

SEQ ID NO: 959805 - DNA, 33 bp, Homo sapien
tagcaaagctgagcccaagtctgaacgcactgt

SEQ ID NO: 959806 - DNA, 33 bp, Homo sapien
tagcaaagctgagcccgagtctgaacgcactgt

SEQ ID NO: 959807 - DNA, 33 bp, Homo sapien
cctttttcccagctacaaggatttgtcaaaagc

SEQ ID NO: 959808 - DNA, 33 bp, Homo sapien
cctttttcccagctacgaggatttgtcaaaagc

SEQ ID NO: 959809 - DNA, 33 bp, Homo sapien
gagtataataaaatcacgaataggaattcatac

SEQ ID NO: 959810 - DNA, 33 bp, Homo sapien
gagtataataaaatcaggaataggaattcatac

SEQ ID NO: 959811 - DNA, 33 bp, Homo sapien
gtgtgaagttgcttgacgttcactgtgatgttg

SEQ ID NO: 959812 - DNA, 33 bp, Homo sapien
gtgtgaagttgcttgatgttcactgtgatgttg

SEQ ID NO: 959813 - DNA, 33 bp, Homo sapien
tctaatttgctctgtactaaccagctctagcac

SEQ ID NO: 959814 - DNA, 33 bp, Homo sapien
tctaatttgctctgtagtaaccagctctagcac

SEQ ID NO: 959815 - DNA, 33 bp, Homo sapien
caaaagaaagactagaaagcctccaaaattagc

SEQ ID NO: 959816 - DNA, 33 bp, Homo sapien
caaaagaaagactagagagcctccaaaattagc

SEQ ID NO: 959817 - DNA, 33 bp, Homo sapien
cagtagagcaatgactcacttccctcaggtttt

SEQ ID NO: 959818 - DNA, 33 bp, Homo sapien
cagtagagcaatgacttacttccctcaggtttt

SEQ ID NO: 959819 - DNA, 33 bp, Homo sapien
accaagggaagagttcacagatgacaggctggt

SEQ ID NO: 959820 - DNA, 33 bp, Homo sapien
accaagggaagagttcgcagatgacaggctggt

SEQ ID NO: 959821 - DNA, 33 bp, Homo sapien
tttgtaatgcaaaatacgtgtagcaggaatttg

SEQ ID NO: 959822 - DNA, 33 bp, Homo sapien
tttgtaatgcaaaatatgtgtagcaggaatttg

SEQ ID NO: 959823 - DNA, 33 bp, Homo sapien
ggggaggtagtattgccgcaaattctgtgtctt

SEQ ID NO: 959824 - DNA, 33 bp, Homo sapien
ggggaggtagtattgctgcaaattctgtgtctt

SEQ ID NO: 959825 - DNA, 33 bp, Homo sapien
agacggttaatggaaccaggactttctaaagca

SEQ ID NO: 959826 - DNA, 33 bp, Homo sapien
agacggttaatggaactaggactttctaaagca

SEQ ID NO: 959827 - DNA, 33 bp, Homo sapien
tattttattaagcaaacggcgtagagttatttg

SEQ ID NO: 959828 - DNA, 33 bp, Homo sapien
tattttattaagcaaatggcgtagagttatttg

SEQ ID NO: 959829 - DNA, 33 bp, Homo sapien
ttaggacaattctttacgagttacttacagaaa

SEQ ID NO: 959830 - DNA, 33 bp, Homo sapien
ttaggacaattctttaggagttacttacagaaa

SEQ ID NO: 959831 - DNA, 33 bp, Homo sapien
tgtgaccactttatcccaaacacactttccttg

SEQ ID NO: 959832 - DNA, 33 bp, Homo sapien
tgtgaccactttatcctaaacacactttccttg

SEQ ID NO: 959833 - DNA, 33 bp, Homo sapien
aaatgaacagcaattagaaacactacaaaatct

SEQ ID NO: 959834 - DNA, 33 bp, Homo sapien
aaatgaacagcaattataaacactacaaaatct

SEQ ID NO: 959835 - DNA, 33 bp, Homo sapien
cttgttcttccttgtcaagatttaagtcacacg

SEQ ID NO: 959836 - DNA, 33 bp, Homo sapien
cttgttcttccttgtcgagatttaagtcacacg

SEQ ID NO: 959837 - DNA, 33 bp, Homo sapien
ctgctagtattttatcacgcaggctattttcat

SEQ ID NO: 959838 - DNA, 33 bp, Homo sapien
ctgctagtattttatcgcgcaggctattttcat

SEQ ID NO: 959839 - DNA, 33 bp, Homo sapien
tattctcgttaactagccagaaaaactctgtaa

SEQ ID NO: 959840 - DNA, 33 bp, Homo sapien
tattctcgttaactagtcagaaaaactctgtaa

SEQ ID NO: 959841 - DNA, 33 bp, Homo sapien
aacgagaatacagtaaatggcccagggtacatc

SEQ ID NO: 959842 - DNA, 33 bp, Homo sapien
aacgagaatacagtaagtggcccagggtacatc

SEQ ID NO: 959843 - DNA, 33 bp, Homo sapien
ggcagaggcaggacccaaaaccaagatgattcc

SEQ ID NO: 959844 - DNA, 33 bp, Homo sapien
ggcagaggcaggacccgaaaccaagatgattcc

SEQ ID NO: 959845 - DNA, 33 bp, Homo sapien
tcttagtttctacacacgatgttcagacatatt

SEQ ID NO: 959846 - DNA, 33 bp, Homo sapien
tcttagtttctacacaggatgttcagacatatt

SEQ ID NO: 959847 - DNA, 33 bp, Homo sapien
ttcatgttgtgaaagaaaagtttttggtcaagc

SEQ ID NO: 959848 - DNA, 33 bp, Homo sapien
ttcatgttgtgaaagagaagtttttggtcaagc

SEQ ID NO: 959849 - DNA, 33 bp, Homo sapien
ctatttgcaagggagaagaagggcacctaatat

SEQ ID NO: 959850 - DNA, 33 bp, Homo sapien
ctatttgcaagggagaggaagggcacctaatat

SEQ ID NO: 959851 - DNA, 33 bp, Homo sapien
cccaaagattaaaagaatatagccgtgtggttt

SEQ ID NO: 959852 - DNA, 33 bp, Homo sapien
cccaaagattaaaagagtatagccgtgtggttt

SEQ ID NO: 959853 - DNA, 33 bp, Homo sapien
aagtccagctgtctggaactttgatcaactatg

SEQ ID NO: 959854 - DNA, 33 bp, Homo sapien
aagtccagctgtctgggactttgatcaactatg

SEQ ID NO: 959855 - DNA, 33 bp, Homo sapien
ttgtacagccatattcccttgcaaggttgtaaa

SEQ ID NO: 959856 - DNA, 33 bp, Homo sapien
ttgtacagccatattcgcttgcaaggttgtaaa

SEQ ID NO: 959857 - DNA, 33 bp, Homo sapien
ccagaactatccagtaacacttattctgcaaac

SEQ ID NO: 959858 - DNA, 33 bp, Homo sapien
ccagaactatccagtagcacttattctgcaaac

SEQ ID NO: 959859 - DNA, 33 bp, Homo sapien
tgccatggcagtcaaacgatactctaaggttaa

SEQ ID NO: 959860 - DNA, 33 bp, Homo sapien
tgccatggcagtcaaatgatactctaaggttaa

SEQ ID NO: 959861 - DNA, 33 bp, Homo sapien
caccaatgatcctttgaacccagacactgattt

SEQ ID NO: 959862 - DNA, 33 bp, Homo sapien
caccaatgatcctttggacccagacactgattt

SEQ ID NO: 959863 - DNA, 33 bp, Homo sapien
tgctattccagcaactcacttcctttcaggggt

SEQ ID NO: 959864 - DNA, 33 bp, Homo sapien
tgctattccagcaactgacttcctttcaggggt

SEQ ID NO: 959865 - DNA, 33 bp, Homo sapien
ggcagtttctgctggaaagaattactggttcat

SEQ ID NO: 959866 - DNA, 33 bp, Homo sapien
ggcagtttctgctggagagaattactggttcat

SEQ ID NO: 959867 - DNA, 33 bp, Homo sapien
gctaatgagatgactaatagctgggagacccta

SEQ ID NO: 959868 - DNA, 33 bp, Homo sapien
gctaatgagatgactagtagctgggagacccta

SEQ ID NO: 959869 - DNA, 33 bp, Homo sapien
aactggactaggtttacgccaattttggataca

SEQ ID NO: 959870 - DNA, 33 bp, Homo sapien
aactggactaggtttatgccaattttggataca

SEQ ID NO: 959871 - DNA, 33 bp, Homo sapien
gtacagcggattggacaacacctatcgcagtgt

SEQ ID NO: 959872 - DNA, 33 bp, Homo sapien
gtacagcggattggactacacctatcgcagtgt

SEQ ID NO: 959873 - DNA, 33 bp, Homo sapien
acccttcatgttactaaagtctccattttatag

SEQ ID NO: 959874 - DNA, 33 bp, Homo sapien
acccttcatgttactacagtctccattttatag

SEQ ID NO: 959875 - DNA, 33 bp, Homo sapien
aacttaaccatgctacagtagaggtgattaaaa

SEQ ID NO: 959876 - DNA, 33 bp, Homo sapien
aacttaaccatgctaccgtagaggtgattaaaa

SEQ ID NO: 959877 - DNA, 33 bp, Homo sapien
tcctttttccttattgaactaaatgcatttagc

SEQ ID NO: 959878 - DNA, 33 bp, Homo sapien
tcctttttccttattggactaaatgcatttagc

SEQ ID NO: 959879 - DNA, 33 bp, Homo sapien
ggtcttaatagagtacagaagccagagtggcca

SEQ ID NO: 959880 - DNA, 33 bp, Homo sapien
ggtcttaatagagtacggaagccagagtggcca

SEQ ID NO: 959881 - DNA, 33 bp, Homo sapien
taatccagattctaaaagaagcaataaaggaga

SEQ ID NO: 959882 - DNA, 33 bp, Homo sapien
taatccagattctaaacgaagcaataaaggaga

SEQ ID NO: 959883 - DNA, 33 bp, Homo sapien
tagctgcattccccagaagactaatatttcttc

SEQ ID NO: 959884 - DNA, 33 bp, Homo sapien
tagctgcattccccaggagactaatatttcttc

SEQ ID NO: 959885 - DNA, 33 bp, Homo sapien
taacctagaaaatggaagtgcaaaatggggagt

SEQ ID NO: 959886 - DNA, 33 bp, Homo sapien
taacctagaaaatggacgtgcaaaatggggagt

SEQ ID NO: 959887 - DNA, 33 bp, Homo sapien
tgttgatagatttagaagaataaccatgaaact

SEQ ID NO: 959888 - DNA, 33 bp, Homo sapien
tgttgatagatttagaggaataaccatgaaact

SEQ ID NO: 959889 - DNA, 33 bp, Homo sapien
ttcatccatatcttacactctgtttctgattaa

SEQ ID NO: 959890 - DNA, 33 bp, Homo sapien
ttcatccatatcttactctctgtttctgattaa

SEQ ID NO: 959891 - DNA, 33 bp, Homo sapien
tgcacataaaaacaaaattagtcttaggttgag

SEQ ID NO: 959892 - DNA, 33 bp, Homo sapien
tgcacataaaaacaaatttagtcttaggttgag

SEQ ID NO: 959893 - DNA, 33 bp, Homo sapien
tgttacaagaccttgacgtttttgaagagaact

SEQ ID NO: 959894 - DNA, 33 bp, Homo sapien
tgttacaagaccttgatgtttttgaagagaact

SEQ ID NO: 959895 - DNA, 33 bp, Homo sapien
ctagaaaggagatgaggccttatccagggtccc

SEQ ID NO: 959896 - DNA, 33 bp, Homo sapien
ctagaaaggagatgagtccttatccagggtccc

SEQ ID NO: 959897 - DNA, 33 bp, Homo sapien
actgctaccctttccaacgtgcatacttgggtc

SEQ ID NO: 959898 - DNA, 33 bp, Homo sapien
actgctaccctttccagcgtgcatacttgggtc

SEQ ID NO: 959899 - DNA, 33 bp, Homo sapien
tggtggatgtggttaacgtgtttttatttttgg

SEQ ID NO: 959900 - DNA, 33 bp, Homo sapien
tggtggatgtggttaatgtgtttttatttttgg

SEQ ID NO: 959901 - DNA, 33 bp, Homo sapien
acgggttttcaacacccagtgcactgaatagca

SEQ ID NO: 959902 - DNA, 33 bp, Homo sapien
acgggttttcaacacctagtgcactgaatagca

SEQ ID NO: 959903 - DNA, 33 bp, Homo sapien
ggttcattttcctgcccgctatgtgttagtgaa

SEQ ID NO: 959904 - DNA, 33 bp, Homo sapien
ggttcattttcctgcctgctatgtgttagtgaa

SEQ ID NO: 959905 - DNA, 33 bp, Homo sapien
ttgagtacaatatgcactattcaggcgacaggt

SEQ ID NO: 959906 - DNA, 33 bp, Homo sapien
ttgagtacaatatgcattattcaggcgacaggt

SEQ ID NO: 959907 - DNA, 33 bp, Homo sapien
atattgttataagacaacctggacattgtgaaa

SEQ ID NO: 959908 - DNA, 33 bp, Homo sapien
atattgttataagacagcctggacattgtgaaa

SEQ ID NO: 959909 - DNA, 33 bp, Homo sapien
tggagcttgccaaagacgttagagataagagga

SEQ ID NO: 959910 - DNA, 33 bp, Homo sapien
tggagcttgccaaagaggttagagataagagga

SEQ ID NO: 959911 - DNA, 33 bp, Homo sapien
tctagcatcctatgcaacatctccactggaata

SEQ ID NO: 959912 - DNA, 33 bp, Homo sapien
tctagcatcctatgcagcatctccactggaata

SEQ ID NO: 959913 - DNA, 33 bp, Homo sapien
aatgaatgagttagcgaatggacattacaaata

SEQ ID NO: 959914 - DNA, 33 bp, Homo sapien
aatgaatgagttagcggatggacattacaaata

SEQ ID NO: 959915 - DNA, 33 bp, Homo sapien
gtatctagttctaaaagtctacgtcccaatgat

SEQ ID NO: 959916 - DNA, 33 bp, Homo sapien
gtatctagttctaaaattctacgtcccaatgat

SEQ ID NO: 959917 - DNA, 33 bp, Homo sapien
tctctataattttgtacgtgtagaaaatactgc

SEQ ID NO: 959918 - DNA, 33 bp, Homo sapien
tctctataattttgtatgtgtagaaaatactgc

SEQ ID NO: 959919 - DNA, 33 bp, Homo sapien
atcattgcctgcagaaaaagatggtgttaagta

SEQ ID NO: 959920 - DNA, 33 bp, Homo sapien
atcattgcctgcagaagaagatggtgttaagta

SEQ ID NO: 959921 - DNA, 33 bp, Homo sapien
aggaaacatcagctcaagaataaccgcagcctt

SEQ ID NO: 959922 - DNA, 33 bp, Homo sapien
aggaaacatcagctcaggaataaccgcagcctt

SEQ ID NO: 959923 - DNA, 33 bp, Homo sapien
tctaccatttaactctaaattccatcagtaccc

SEQ ID NO: 959924 - DNA, 33 bp, Homo sapien
tctaccatttaactctgaattccatcagtaccc

SEQ ID NO: 959925 - DNA, 33 bp, Homo sapien
tggtgttctgttgtacagcagagaagctggcac

SEQ ID NO: 959926 - DNA, 33 bp, Homo sapien
tggtgttctgttgtactgcagagaagctggcac

SEQ ID NO: 959927 - DNA, 33 bp, Homo sapien
atctcaatcactttaaactatcacctataaaag

SEQ ID NO: 959928 - DNA, 33 bp, Homo sapien
atctcaatcactttaatctatcacctataaaag

SEQ ID NO: 959929 - DNA, 33 bp, Homo sapien
gggaccatcccttcaacgtttttcctgtaaatc

SEQ ID NO: 959930 - DNA, 33 bp, Homo sapien
gggaccatcccttcaatgtttttcctgtaaatc

SEQ ID NO: 959931 - DNA, 33 bp, Homo sapien
accacacgattaacccaagctaatggaactcag

SEQ ID NO: 959932 - DNA, 33 bp, Homo sapien
accacacgattaacccgagctaatggaactcag

SEQ ID NO: 959933 - DNA, 33 bp, Homo sapien
tcttgcactgtgataactggctcatttaactta

SEQ ID NO: 959934 - DNA, 33 bp, Homo sapien
tcttgcactgtgataagtggctcatttaactta

SEQ ID NO: 959935 - DNA, 33 bp, Homo sapien; identical to SEQ ID NO: 959933

SEQ ID NO: 959936 - DNA, 33 bp, Homo sapien; identical to SEQ ID NO: 959934

SEQ ID NO: 959937 - DNA, 33 bp, Homo sapien
agctgaccttactctaatacatagtgtaatagg

SEQ ID NO: 959938 - DNA, 33 bp, Homo sapien
agctgaccttactctagtacatagtgtaatagg

SEQ ID NO: 959939 - DNA, 33 bp, Homo sapien
cacaggaactcttatcacaatgctaggctcaca

SEQ ID NO: 959940 - DNA, 33 bp, Homo sapien
cacaggaactcttatcgcaatgctaggctcaca

SEQ ID NO: 959941 - DNA, 33 bp, Homo sapien; identical to SEQ ID NO: 959939

SEQ ID NO: 959942 - DNA, 33 bp, Homo sapien; identical to SEQ ID NO: 959940

SEQ ID NO: 959943 - DNA, 33 bp, Homo sapien
ttaagaaatgtagatcaaggagctgtctaacaa

SEQ ID NO: 959944 - DNA, 33 bp, Homo sapien
ttaagaaatgtagatctaggagctgtctaacaa

SEQ ID NO: 959945 - DNA, 33 bp, Homo sapien
gctgaaggtgagtaggaatggaaaaatgaggac

SEQ ID NO: 959946 - DNA, 33 bp, Homo sapien
gctgaaggtgagtagggatggaaaaatgaggac

SEQ ID NO: 959947 - DNA, 33 bp, Homo sapien
ctagtgagatgaatacagagctcaatggctggg

SEQ ID NO: 959948 - DNA, 33 bp, Homo sapien
ctagtgagatgaatacggagctcaatggctggg

SEQ ID NO: 959949 - DNA, 33 bp, Homo sapien
cacacaactatgtggaaattgaacaacgtgctc

SEQ ID NO: 959950 - DNA, 33 bp, Homo sapien
cacacaactatgtggagattgaacaacgtgctc

SEQ ID NO: 959951 - DNA, 33 bp, Homo sapien
agtgcccatgttcaggcaacactaatatttgca

SEQ ID NO: 959952 - DNA, 33 bp, Homo sapien
agtgcccatgttcaggtaacactaatatttgca

SEQ ID NO: 959953 - DNA, 33 bp, Homo sapien
accatatatgaaaatcaactcaaaatggattaa

SEQ ID NO: 959954 - DNA, 33 bp, Homo sapien
accatatatgaaaatcgactcaaaatggattaa

SEQ ID NO: 959955 - DNA, 33 bp, Homo sapien
ccttgagttctcttcgaccgataagattcccgt

SEQ ID NO: 959956 - DNA, 33 bp, Homo sapien
ccttgagttctcttcggccgataagattcccgt

SEQ ID NO: 959957 - DNA, 33 bp, Homo sapien
tttgtggggggatgaacactggtctctctcact

SEQ ID NO: 959958 - DNA, 33 bp, Homo sapien
tttgtggggggatgaagactggtctctctcact

SEQ ID NO: 959959 - DNA, 33 bp, Homo sapien
ctctgtgtgttagagacgtctaaggaaaagtac

SEQ ID NO: 959960 - DNA, 33 bp, Homo sapien
ctctgtgtgttagagatgtctaaggaaaagtac

SEQ ID NO: 959961 - DNA, 33 bp, Homo sapien
gggaagctagccagaacgacagaaggcacctgg

SEQ ID NO: 959962 - DNA, 33 bp, Homo sapien
gggaagctagccagaatgacagaaggcacctgg

SEQ ID NO: 959963 - DNA, 33 bp, Homo sapien
aattgaaataaaactacgatatgccactatcca

SEQ ID NO: 959964 - DNA, 33 bp, Homo sapien
aattgaaataaaactatgatatgccactatcca

SEQ ID NO: 959965 - DNA, 33 bp, Homo sapien
ctcatagacctcaggaaacctaagagaattaac

SEQ ID NO: 959966 - DNA, 33 bp, Homo sapien
ctcatagacctcaggacacctaagagaattaac

SEQ ID NO: 959967 - DNA, 33 bp, Homo sapien
tgtttggaccaccttaggcaacagacccatagt

SEQ ID NO: 959968 - DNA, 33 bp, Homo sapien
tgtttggaccaccttatgcaacagacccatagt

SEQ ID NO: 959969 - DNA, 33 bp, Homo sapien
ttggggttgattcacaactgccatttattagct

SEQ ID NO: 959970 - DNA, 33 bp, Homo sapien
ttggggttgattcacatctgccatttattagct

SEQ ID NO: 959971 - DNA, 33 bp, Homo sapien
gcttctgtcagggagaaaatatgttgtggtaat

SEQ ID NO: 959972 - DNA, 33 bp, Homo sapien
gcttctgtcagggagacaatatgttgtggtaat

SEQ ID NO: 959973 - DNA, 33 bp, Homo sapien
cattgatcctatggtacgaaaaatttggagatt

SEQ ID NO: 959974 - DNA, 33 bp, Homo sapien
cattgatcctatggtatgaaaaatttggagatt

SEQ ID NO: 959975 - DNA, 33 bp, Homo sapien
actactaatggtataccctgtaagcttttagca

SEQ ID NO: 959976 - DNA, 33 bp, Homo sapien
actactaatggtatactctgtaagcttttagca

SEQ ID NO: 959977 - DNA, 33 bp, Homo sapien
aatcttcagctaaggcaagcaatgtgcatcata

SEQ ID NO: 959978 - DNA, 33 bp, Homo sapien
aatcttcagctaaggcgagcaatgtgcatcata

SEQ ID NO: 959979 - DNA, 33 bp, Homo sapien
caaaaaaaggagactacagccaatatccctgat

SEQ ID NO: 959980 - DNA, 33 bp, Homo sapien
caaaaaaaggagactagagccaatatccctgat

SEQ ID NO: 959981 - DNA, 33 bp, Homo sapien
cagtgagccttatctgcagtttattttctgcag

SEQ ID NO: 959982 - DNA, 33 bp, Homo sapien
cagtgagccttatctgtagtttattttctgcag

SEQ ID NO: 959983 - DNA, 33 bp, Homo sapien
atgacacataaagggacggatgggaaataagac

SEQ ID NO: 959984 - DNA, 33 bp, Homo sapien
atgacacataaagggatggatgggaaataagac

SEQ ID NO: 959985 - DNA, 33 bp, Homo sapien
ctttataggtgagtaaatgtatcatcagaaaag

SEQ ID NO: 959986 - DNA, 33 bp, Homo sapien
ctttataggtgagtaagtgtatcatcagaaaag

SEQ ID NO: 959987 - DNA, 33 bp, Homo sapien
caatcagatctcgaaaaaatagatgctatgcac

SEQ ID NO: 959988 - DNA, 33 bp, Homo sapien
caatcagatctcgaaacaatagatgctatgcac

SEQ ID NO: 959989 - DNA, 33 bp, Homo sapien
tgtttttgtgctggaacgtggtaagacaaaata

SEQ ID NO: 959990 - DNA, 33 bp, Homo sapien
tgtttttgtgctggaatgtggtaagacaaaata

SEQ ID NO: 959991 - DNA, 33 bp, Homo sapien
ctaggcttatttttcacgtcagtcaatgcccca

SEQ ID NO: 959992 - DNA, 33 bp, Homo sapien
ctaggcttatttttcatgtcagtcaatgcccca

SEQ ID NO: 959993 - DNA, 33 bp, Homo sapien
ctattcagtatgtggacgtggccattgatatct

SEQ ID NO: 959994 - DNA, 33 bp, Homo sapien
ctattcagtatgtggatgtggccattgatatct

SEQ ID NO: 959995 - DNA, 33 bp, Homo sapien
acagtaaaggacacacacaatcttccatcttaa

SEQ ID NO: 959996 - DNA, 33 bp, Homo sapien
acagtaaaggacacacccaatcttccatcttaa

SEQ ID NO: 959997 - DNA, 33 bp, Homo sapien
cactccaatacatatcactgagagagcatattc

SEQ ID NO: 959998 - DNA, 33 bp, Homo sapien
cactccaatacatatcgctgagagagcatattc

SEQ ID NO: 959999 - DNA, 33 bp, Homo sapien
gaccaactctggctaaacctgatcaggggctga

SEQ ID NO: 960000 - DNA, 33 bp, Homo sapien
gaccaactctggctaaccctgatcaggggctga

SEQ ID NO: 960001 - DNA, 33 bp, Homo sapien
cctcttttttcatctcaccccatatcaaataca

SEQ ID NO: 960002 - DNA, 33 bp, Homo sapien
cctcttttttcatctcgccccatatcaaataca

SEQ ID NO: 960003 - DNA, 33 bp, Homo sapien
ggttgtctctaggttaaaaagtcaatactaata

SEQ ID NO: 960004 - DNA, 33 bp, Homo sapien
ggttgtctctaggttagaaagtcaatactaata

SEQ ID NO: 960005 - DNA, 33 bp, Homo sapien
cctgtctgcctcaactcacctttgctgtcagca

SEQ ID NO: 960006 - DNA, 33 bp, Homo sapien
cctgtctgcctcaacttacctttgctgtcagca

SEQ ID NO: 960007 - DNA, 33 bp, Homo sapien
ttttataggatatacacaatgatgtttctattc

SEQ ID NO: 960008 - DNA, 33 bp, Homo sapien
ttttataggatatacagaatgatgtttctattc

SEQ ID NO: 960009 - DNA, 33 bp, Homo sapien
aagaagacagagaaaacactgtcattctgaatg

SEQ ID NO: 960010 - DNA, 33 bp, Homo sapien
aagaagacagagaaaagactgtcattctgaatg

SEQ ID NO: 960011 - DNA, 33 bp, Homo sapien
ggctaaactgttactccccatagcttagggagg

SEQ ID NO: 960012 - DNA, 33 bp, Homo sapien
ggctaaactgttactctccatagcttagggagg

SEQ ID NO: 960013 - DNA, 33 bp, Homo sapien
atgagagcgaaagcaacgtgtgtcactccagac

SEQ ID NO: 960014 - DNA, 33 bp, Homo sapien
atgagagcgaaagcaatgtgtgtcactccagac

SEQ ID NO: 960015 - DNA, 33 bp, Homo sapien
tagctatgtattccccaaaacttccttttcttc

SEQ ID NO: 960016 - DNA, 33 bp, Homo sapien
tagctatgtattccccgaaacttccttttcttc

SEQ ID NO: 960017 - DNA, 33 bp, Homo sapien
ctgtttgtgaaatacaatgactccccaaatcct

SEQ ID NO: 960018 - DNA, 33 bp, Homo sapien
ctgtttgtgaaatacattgactccccaaatcct

SEQ ID NO: 960019 - DNA, 33 bp, Homo sapien
attagaagctcaggaaaaaaaaatgtgtgtaca

SEQ ID NO: 960020 - DNA, 33 bp, Homo sapien
attagaagctcaggaacaaaaaatgtgtgtaca

SEQ ID NO: 960021 - DNA, 33 bp, Homo sapien
tccaaagatcaagatgaactcaaaataagttta

SEQ ID NO: 960022 - DNA, 33 bp, Homo sapien
tccaaagatcaagatggactcaaaataagttta

SEQ ID NO: 960023 - DNA, 33 bp, Homo sapien
atgatttttaaggaaacttcctggcctgaggtc

SEQ ID NO: 960024 - DNA, 33 bp, Homo sapien
atgatttttaaggaaagttcctggcctgaggtc

SEQ ID NO: 960025 - DNA, 33 bp, Homo sapien
atctgcttgtctcatcccttctcatgtctttta

SEQ ID NO: 960026 - DNA, 33 bp, Homo sapien
atctgcttgtctcatctcttctcatgtctttta

SEQ ID NO: 960027 - DNA, 33 bp, Homo sapien
aaaatcacaaggaaaaagtccctttcattcaac

SEQ ID NO: 960028 - DNA, 33 bp, Homo sapien
aaaatcacaaggaaaaggtccctttcattcaac

SEQ ID NO: 960029 - DNA, 33 bp, Homo sapien
gtggtgtggaagtccacggaaggtcacttttct

SEQ ID NO: 960030 - DNA, 33 bp, Homo sapien
gtggtgtggaagtccatggaaggtcacttttct

SEQ ID NO: 960031 - DNA, 33 bp, Homo sapien
atgagaagctgatccaccaatagctgggaagac

SEQ ID NO: 960032 - DNA, 33 bp, Homo sapien
atgagaagctgatccatcaatagctgggaagac

SEQ ID NO: 960033 - DNA, 33 bp, Homo sapien
gatgtgctacaaagaagaacaaagaaattaggt

SEQ ID NO: 960034 - DNA, 33 bp, Homo sapien
gatgtgctacaaagaataacaaagaaattaggt

SEQ ID NO: 960035 - DNA, 33 bp, Homo sapien
gatgaaattctactaacctgtcaagtaggaaga

SEQ ID NO: 960036 - DNA, 33 bp, Homo sapien
gatgaaattctactaatctgtcaagtaggaaga

SEQ ID NO: 960037 - DNA, 33 bp, Homo sapien
ttattaatgcccacgcacggtgtcatgcacctg

SEQ ID NO: 960038 - DNA, 33 bp, Homo sapien
ttattaatgcccacgcgcggtgtcatgcacctg

SEQ ID NO: 960039 - DNA, 33 bp, Homo sapien
tcaagtggtcaatgggcagacacaatctactac

SEQ ID NO: 960040 - DNA, 33 bp, Homo sapien
tcaagtggtcaatgggtagacacaatctactac

SEQ ID NO: 960041 - DNA, 33 bp, Homo sapien
ttactcagctattaaaggtcccacctcctaata

SEQ ID NO: 960042 - DNA, 33 bp, Homo sapien
ttactcagctattaaatgtcccacctcctaata

SEQ ID NO: 960043 - DNA, 33 bp, Homo sapien
catgatttaccaccataatctgtttttggccat

SEQ ID NO: 960044 - DNA, 33 bp, Homo sapien
catgatttaccaccatgatctgtttttggccat

SEQ ID NO: 960045 - DNA, 33 bp, Homo sapien
ctggtaagggaaagggaataaccatcattactt

SEQ ID NO: 960046 - DNA, 33 bp, Homo sapien
ctggtaagggaaaggggataaccatcattactt

SEQ ID NO: 960047 - DNA, 33 bp, Homo sapien
attataaggtttctgacaagagaggtaaagatc

SEQ ID NO: 960048 - DNA, 33 bp, Homo sapien
attataaggtttctgataagagaggtaaagatc

SEQ ID NO: 960049 - DNA, 33 bp, Homo sapien
gttacctaagcagagaaaaactaaagcatgaaa

SEQ ID NO: 960050 - DNA, 33 bp, Homo sapien
gttacctaagcagagagaaactaaagcatgaaa

SEQ ID NO: 960051 - DNA, 33 bp, Homo sapien
actttctttcctccaaaggccagtcatcaaata

SEQ ID NO: 960052 - DNA, 33 bp, Homo sapien
actttctttcctccaatggccagtcatcaaata

SEQ ID NO: 960053 - DNA, 33 bp, Homo sapien
ccaagtgtttaatacaggccaaccagattattt

SEQ ID NO: 960054 - DNA, 33 bp, Homo sapien
ccaagtgtttaatacatgccaaccagattattt

SEQ ID NO: 960055 - DNA, 33 bp, Homo sapien
acttgatgaagaactaagatggaatgagatttc

SEQ ID NO: 960056 - DNA, 33 bp, Homo sapien
acttgatgaagaactacgatggaatgagatttc

SEQ ID NO: 960057 - DNA, 33 bp, Homo sapien
gaacaactgacatcatcatacaggaagtataag

SEQ ID NO: 960058 - DNA, 33 bp, Homo sapien
gaacaactgacatcatgatacaggaagtataag

SEQ ID NO: 960059 - DNA, 33 bp, Homo sapien
ataaggattatccccaccattatttcagtagtt

SEQ ID NO: 960060 - DNA, 33 bp, Homo sapien
ataaggattatccccatcattatttcagtagtt

SEQ ID NO: 960061 - DNA, 33 bp, Homo sapien
catactccttcgccacagcattgatggagaggc

SEQ ID NO: 960062 - DNA, 33 bp, Homo sapien
catactccttcgccacggcattgatggagaggc

SEQ ID NO: 960063 - DNA, 33 bp, Homo sapien
gggaactggcaagttacatcagacgactggatt

SEQ ID NO: 960064 - DNA, 33 bp, Homo sapien
gggaactggcaagttatatcagacgactggatt

SEQ ID NO: 960065 - DNA, 33 bp, Homo sapien
ttctctggagaagattaaaaataggtcattttg

SEQ ID NO: 960066 - DNA, 33 bp, Homo sapien
ttctctggagaagattgaaaataggtcattttg

SEQ ID NO: 960067 - DNA, 33 bp, Homo sapien
aattgttcaatattgacacttatgttctaggcc

SEQ ID NO: 960068 - DNA, 33 bp, Homo sapien
aattgttcaatattgatacttatgttctaggcc

SEQ ID NO: 960069 - DNA, 33 bp, Homo sapien
cttttctttgggaatacgggtgatgattcttct

SEQ ID NO: 960070 - DNA, 33 bp, Homo sapien
cttttctttgggaatatgggtgatgattcttct

SEQ ID NO: 960071 - DNA, 33 bp, Homo sapien
aaggctgtgtatttaccgaacacacattttcat

SEQ ID NO: 960072 - DNA, 33 bp, Homo sapien
aaggctgtgtatttacggaacacacattttcat

SEQ ID NO: 960073 - DNA, 33 bp, Homo sapien
ccaagacaagactcagaaatgacaatacagcta

SEQ ID NO: 960074 - DNA, 33 bp, Homo sapien
ccaagacaagactcagcaatgacaatacagcta

SEQ ID NO: 960075 - DNA, 33 bp, Homo sapien
gccctgtgtctgagtacatccactggtatgaag

SEQ ID NO: 960076 - DNA, 33 bp, Homo sapien
gccctgtgtctgagtagatccactggtatgaag

SEQ ID NO: 960077 - DNA, 33 bp, Homo sapien
aaccaaagatggcaaaacagagatgcaatgagt

SEQ ID NO: 960078 - DNA, 33 bp, Homo sapien
aaccaaagatggcaaagcagagatgcaatgagt

SEQ ID NO: 960079 - DNA, 33 bp, Homo sapien
atgaacacaactatcacggtctcgtatacctag

SEQ ID NO: 960080 - DNA, 33 bp, Homo sapien
atgaacacaactatcatggtctcgtatacctag

SEQ ID NO: 960081 - DNA, 33 bp, Homo sapien
actagcatttagctcgcatattgaagaatgatt

SEQ ID NO: 960082 - DNA, 33 bp, Homo sapien
actagcatttagctcggatattgaagaatgatt

SEQ ID NO: 960083 - DNA, 33 bp, Homo sapien
aaaaaaatagttctgacagaagaggatgtttgg

SEQ ID NO: 960084 - DNA, 33 bp, Homo sapien
aaaaaaatagttctgagagaagaggatgtttgg

SEQ ID NO: 960085 - DNA, 33 bp, Homo sapien
gtttggcctcaaattccaatcttcctttattac

SEQ ID NO: 960086 - DNA, 33 bp, Homo sapien
gtttggcctcaaattctaatcttcctttattac

SEQ ID NO: 960087 - DNA, 33 bp, Homo sapien
tactgcagtactctcgaacccaaggtctttcca

SEQ ID NO: 960088 - DNA, 33 bp, Homo sapien
tactgcagtactctcggacccaaggtctttcca

SEQ ID NO: 960089 - DNA, 33 bp, Homo sapien
aaacattatagtgctacaatacattaaaatgtg

SEQ ID NO: 960090 - DNA, 33 bp, Homo sapien
aaacattatagtgctagaatacattaaaatgtg

SEQ ID NO: 960091 - DNA, 33 bp, Homo sapien
taaacactaggtcctaagtagcagggtcatgaa

SEQ ID NO: 960092 - DNA, 33 bp, Homo sapien
taaacactaggtcctaggtagcagggtcatgaa

SEQ ID NO: 960093 - DNA, 33 bp, Homo sapien
cctcctccttgcagcacggacgcttctgacaaa

SEQ ID NO: 960094 - DNA, 33 bp, Homo sapien
cctcctccttgcagcatggacgcttctgacaaa

SEQ ID NO: 960095 - DNA, 33 bp, Homo sapien
atgaatgatctcgttacccaggtactgagcaca

SEQ ID NO: 960096 - DNA, 33 bp, Homo sapien
atgaatgatctcgttatccaggtactgagcaca

SEQ ID NO: 960097 - DNA, 33 bp, Homo sapien
ctttcccacggagaacagattagaacaggaaca

SEQ ID NO: 960098 - DNA, 33 bp, Homo sapien
ctttcccacggagaaccgattagaacaggaaca

SEQ ID NO: 960099 - DNA, 33 bp, Homo sapien
taaaccagtcaccaaaggagtaagagggcttca

SEQ ID NO: 960100 - DNA, 33 bp, Homo sapien
taaaccagtcaccaaatgagtaagagggcttca

SEQ ID NO: 960101 - DNA, 33 bp, Homo sapien
atgaagccttaggagacacccagtacaagatga

SEQ ID NO: 960102 - DNA, 33 bp, Homo sapien
atgaagccttaggagatacccagtacaagatga

SEQ ID NO: 960103 - DNA, 33 bp, Homo sapien
tggctgggtggctttacgtcctctgaacctggc

SEQ ID NO: 960104 - DNA, 33 bp, Homo sapien
tggctgggtggctttatgtcctctgaacctggc

SEQ ID NO: 960105 - DNA, 33 bp, Homo sapien
gtgttagataaaggccactgatcattgaagcat

SEQ ID NO: 960106 - DNA, 33 bp, Homo sapien
gtgttagataaaggccgctgatcattgaagcat

SEQ ID NO: 960107 - DNA, 33 bp, Homo sapien
gtagctattaaccacaaacaacatggagctagc

SEQ ID NO: 960108 - DNA, 33 bp, Homo sapien
gtagctattaaccacacacaacatggagctagc

SEQ ID NO: 960109 - DNA, 33 bp, Homo sapien
cagacagtaagtgcataaggtctgtcaaacaca

SEQ ID NO: 960110 - DNA, 33 bp, Homo sapien
cagacagtaagtgcatcaggtctgtcaaacaca

SEQ ID NO: 960111 - DNA, 33 bp, Homo sapien
tagattgaggggacaaggaagggagtttggaga

SEQ ID NO: 960112 - DNA, 33 bp, Homo sapien
tagattgaggggacaatgaagggagtttggaga

SEQ ID NO: 960113 - DNA, 33 bp, Homo sapien
ttgagaggaccactgcagagaaaacgagcctat

SEQ ID NO: 960114 - DNA, 33 bp, Homo sapien
ttgagaggaccactgcggagaaaacgagcctat

SEQ ID NO: 960115 - DNA, 33 bp, Homo sapien
cccactgcgctttatacaaacctcttctaatgc

SEQ ID NO: 960116 - DNA, 33 bp, Homo sapien
cccactgcgctttatagaaacctcttctaatgc

SEQ ID NO: 960117 - DNA, 33 bp, Homo sapien
agtgtgtgtgctgataaaaggcaaaacagaaca

SEQ ID NO: 960118 - DNA, 33 bp, Homo sapien
agtgtgtgtgctgatataaggcaaaacagaaca

SEQ ID NO: 960119 - DNA, 33 bp, Homo sapien
tttactgctgaagaaactgagcttcctttgagg

SEQ ID NO: 960120 - DNA, 33 bp, Homo sapien
tttactgctgaagaaattgagcttcctttgagg

SEQ ID NO: 960121 - DNA, 33 bp, Homo sapien
tggcaggggagggatacacacaaacttccttat

SEQ ID NO: 960122 - DNA, 33 bp, Homo sapien
tggcaggggagggatatacacaaacttccttat

SEQ ID NO: 960123 - DNA, 33 bp, Homo sapien
aaaagaaaaatgaagcccaaagaagtgaattta

SEQ ID NO: 960124 - DNA, 33 bp, Homo sapien
aaaagaaaaatgaagctcaaagaagtgaattta

SEQ ID NO: 960125 - DNA, 33 bp, Homo sapien
ttccacctgattagggaaacagaccacattata

SEQ ID NO: 960126 - DNA, 33 bp, Homo sapien
ttccacctgattaggggaacagaccacattata

SEQ ID NO: 960127 - DNA, 33 bp, Homo sapien
ctgcctctcttgtagccgccttctagcaaagca

SEQ ID NO: 960128 - DNA, 33 bp, Homo sapien
ctgcctctcttgtagctgccttctagcaaagca

SEQ ID NO: 960129 - DNA, 33 bp, Homo sapien
gagacaatggaacagaaacttagggagaaatga

SEQ ID NO: 960130 - DNA, 33 bp, Homo sapien
gagacaatggaacagagacttagggagaaatga

SEQ ID NO: 960131 - DNA, 33 bp, Homo sapien
gggaataaaaagaatcccttgactcctcagaag

SEQ ID NO: 960132 - DNA, 33 bp, Homo sapien
gggaataaaaagaatctcttgactcctcagaag

SEQ ID NO: 960133 - DNA, 33 bp, Homo sapien
gaacccactatagccaacataattctgagctgc

SEQ ID NO: 960134 - DNA, 33 bp, Homo sapien
gaacccactatagccagcataattctgagctgc

SEQ ID NO: 960135 - DNA, 33 bp, Homo sapien
gtggaagtggatgtcacaaccatactatctcag

SEQ ID NO: 960136 - DNA, 33 bp, Homo sapien
gtggaagtggatgtcagaaccatactatctcag

SEQ ID NO: 960137 - DNA, 33 bp, Homo sapien
aaacataaactatccccgagttattggaagatt

SEQ ID NO: 960138 - DNA, 33 bp, Homo sapien
aaacataaactatccctgagttattggaagatt

SEQ ID NO: 960139 - DNA, 33 bp, Homo sapien
ttggattttccaggtgaaatcaatgtatttaca

SEQ ID NO: 960140 - DNA, 33 bp, Homo sapien
ttggattttccaggtggaatcaatgtatttaca

SEQ ID NO: 960141 - DNA, 33 bp, Homo sapien
ggttttttgtacgtctaacacctgccaaccagc

SEQ ID NO: 960142 - DNA, 33 bp, Homo sapien
ggttttttgtacgtctgacacctgccaaccagc

SEQ ID NO: 960143 - DNA, 33 bp, Homo sapien
ggcaagaaggagaatcaatgtgtatttaagaga

SEQ ID NO: 960144 - DNA, 33 bp, Homo sapien
ggcaagaaggagaatcgatgtgtatttaagaga

SEQ ID NO: 960145 - DNA, 33 bp, Homo sapien
tgggctggtgccatctcaaggtgacaatggctg

SEQ ID NO: 960146 - DNA, 33 bp, Homo sapien
tgggctggtgccatctgaaggtgacaatggctg

SEQ ID NO: 960147 - DNA, 33 bp, Homo sapien
atgtgtgttgtgtttaaaggagggtgacatttt

SEQ ID NO: 960148 - DNA, 33 bp, Homo sapien
atgtgtgttgtgtttacaggagggtgacatttt

SEQ ID NO: 960149 - DNA, 33 bp, Homo sapien
tggtggttgaggaggaatcaggaaagttgtcaa

SEQ ID NO: 960150 - DNA, 33 bp, Homo sapien
tggtggttgaggaggagtcaggaaagttgtcaa

SEQ ID NO: 960151 - DNA, 33 bp, Homo sapien
cttcactgggtatctcaaagggtaaccgggaca

SEQ ID NO: 960152 - DNA, 33 bp, Homo sapien
cttcactgggtatctcgaagggtaaccgggaca

SEQ ID NO: 960153 - DNA, 33 bp, Homo sapien
ctttgcttaactgcacacttaggggtgtgtgtg

SEQ ID NO: 960154 - DNA, 33 bp, Homo sapien
ctttgcttaactgcactcttaggggtgtgtgtg

SEQ ID NO: 960155 - DNA, 33 bp, Homo sapien
ttggattgggcaatgaagaggttggggttgaac

SEQ ID NO: 960156 - DNA, 33 bp, Homo sapien
ttggattgggcaatgaggaggttggggttgaac

SEQ ID NO: 960157 - DNA, 33 bp, Homo sapien
gattaaatatggagcccaagctgaaaccttgtt

SEQ ID NO: 960158 - DNA, 33 bp, Homo sapien
gattaaatatggagcctaagctgaaaccttgtt

SEQ ID NO: 960159 - DNA, 33 bp, Homo sapien
gaaagacaccaatggaaaatttcaaaggagcaa

SEQ ID NO: 960160 - DNA, 33 bp, Homo sapien
gaaagacaccaatggacaatttcaaaggagcaa

SEQ ID NO: 960161 - DNA, 33 bp, Homo sapien
ccagccagacaaggaaaagctacttataacatg

SEQ ID NO: 960162 - DNA, 33 bp, Homo sapien
ccagccagacaaggaagagctacttataacatg

SEQ ID NO: 960163 - DNA, 33 bp, Homo sapien
acttggcctgtacagaccttattactgtacaaa

SEQ ID NO: 960164 - DNA, 33 bp, Homo sapien
acttggcctgtacagagcttattactgtacaaa

SEQ ID NO: 960165 - DNA, 33 bp, Homo sapien
ttgatggaacttcttgcatgcactctgtctctc

SEQ ID NO: 960166 - DNA, 33 bp, Homo sapien
ttgatggaacttcttgtatgcactctgtctctc

SEQ ID NO: 960167 - DNA, 33 bp, Homo sapien
tgagaaggaacatcaaatggagagtagccaatg

SEQ ID NO: 960168 - DNA, 33 bp, Homo sapien
tgagaaggaacatcaagtggagagtagccaatg

SEQ ID NO: 960169 - DNA, 33 bp, Homo sapien
tttccagcatcttcaccaaatcaagctgcttcc

SEQ ID NO: 960170 - DNA, 33 bp, Homo sapien
tttccagcatcttcactaaatcaagctgcttcc

SEQ ID NO: 960171 - DNA, 33 bp, Homo sapien
agctgcttccctaccacaaatatcttcaatatt

SEQ ID NO: 960172 - DNA, 33 bp, Homo sapien
agctgcttccctaccagaaatatcttcaatatt

SEQ ID NO: 960173 - DNA, 33 bp, Homo sapien
aggatggaaagagcccaggattgggagtcacat

SEQ ID NO: 960174 - DNA, 33 bp, Homo sapien
aggatggaaagagcccgggattgggagtcacat

SEQ ID NO: 960175 - DNA, 33 bp, Homo sapien
gtttggtaagtacaagcatccgagcaaattaat

SEQ ID NO: 960176 - DNA, 33 bp, Homo sapien
gtttggtaagtacaagtatccgagcaaattaat

SEQ ID NO: 960177 - DNA, 33 bp, Homo sapien
aagtaatggtgaatgtcacagcagccattacta

SEQ ID NO: 960178 - DNA, 33 bp, Homo sapien
aagtaatggtgaatgtgacagcagccattacta

SEQ ID NO: 960179 - DNA, 33 bp, Homo sapien
gcagcatctttggaaccggataatgagtagagg

SEQ ID NO: 960180 - DNA, 33 bp, Homo sapien
gcagcatctttggaactggataatgagtagagg

SEQ ID NO: 960181 - DNA, 33 bp, Homo sapien
tcacaaaagcccctgacgattctggcattgctc

SEQ ID NO: 960182 - DNA, 33 bp, Homo sapien
tcacaaaagcccctgatgattctggcattgctc

SEQ ID NO: 960183 - DNA, 33 bp, Homo sapien
tcgtgaggactaaacaacccaacatcaaatcga

SEQ ID NO: 960184 - DNA, 33 bp, Homo sapien
tcgtgaggactaaacaccccaacatcaaatcga

SEQ ID NO: 960185 - DNA, 33 bp, Homo sapien
tgtgtagctcaaagacaatgatgtttgtgaagg

SEQ ID NO: 960186 - DNA, 33 bp, Homo sapien
tgtgtagctcaaagacgatgatgtttgtgaagg

SEQ ID NO: 960187 - DNA, 33 bp, Homo sapien
tagtgctatcccaagacgaggaggaccactggg

SEQ ID NO: 960188 - DNA, 33 bp, Homo sapien
tagtgctatcccaagatgaggaggaccactggg

SEQ ID NO: 960189 - DNA, 33 bp, Homo sapien
ctaataggaggaatagacatgaaccacaacact

SEQ ID NO: 960190 - DNA, 33 bp, Homo sapien
ctaataggaggaatagccatgaaccacaacact

SEQ ID NO: 960191 - DNA, 33 bp, Homo sapien
atacctgtatatgtgaaaaaggagaaggcagga

SEQ ID NO: 960192 - DNA, 33 bp, Homo sapien
atacctgtatatgtgagaaaggagaaggcagga

SEQ ID NO: 960193 - DNA, 33 bp, Homo sapien
tgcaaataaactatagactaaccatctaatgtg

SEQ ID NO: 960194 - DNA, 33 bp, Homo sapien
tgcaaataaactataggctaaccatctaatgtg

SEQ ID NO: 960195 - DNA, 33 bp, Homo sapien
tagcctacagtaaatacggtggcctgagttagt

SEQ ID NO: 960196 - DNA, 33 bp, Homo sapien
tagcctacagtaaatatggtggcctgagttagt

SEQ ID NO: 960197 - DNA, 33 bp, Homo sapien
gtggaaatgtgtagtacgaccaatgcagtcctt

SEQ ID NO: 960198 - DNA, 33 bp, Homo sapien
gtggaaatgtgtagtatgaccaatgcagtcctt

SEQ ID NO: 960199 - DNA, 33 bp, Homo sapien
gaaactgattactttgcactgccttaatgaagt

SEQ ID NO: 960200 - DNA, 33 bp, Homo sapien
gaaactgattactttgtactgccttaatgaagt

SEQ ID NO: 960201 - DNA, 33 bp, Homo sapien
cttgcattcaacagccactactaaaataaataa

SEQ ID NO: 960202 - DNA, 33 bp, Homo sapien
cttgcattcaacagccgctactaaaataaataa

SEQ ID NO: 960203 - DNA, 33 bp, Homo sapien
aagaagagtctgagaccagcaatatgactccag

SEQ ID NO: 960204 - DNA, 33 bp, Homo sapien
aagaagagtctgagacgagcaatatgactccag

SEQ ID NO: 960205 - DNA, 33 bp, Homo sapien
tgagagtcaagaatcccgagattttttgccatt

SEQ ID NO: 960206 - DNA, 33 bp, Homo sapien
tgagagtcaagaatcctgagattttttgccatt

SEQ ID NO: 960207 - DNA, 33 bp, Homo sapien
ttcccagacctggcaacggcttcaagtaaggga

SEQ ID NO: 960208 - DNA, 33 bp, Homo sapien
ttcccagacctggcaatggcttcaagtaaggga

SEQ ID NO: 960209 - DNA, 33 bp, Homo sapien
aagaatccatccaggaatacttgaaatccctta

SEQ ID NO: 960210 - DNA, 33 bp, Homo sapien
aagaatccatccaggagtacttgaaatccctta

SEQ ID NO: 960211 - DNA, 33 bp, Homo sapien
aatggacaatagggaacaggcatcacaatatca

SEQ ID NO: 960212 - DNA, 33 bp, Homo sapien
aatggacaatagggaataggcatcacaatatca

SEQ ID NO: 960213 - DNA, 33 bp, Homo sapien
tgcatgtagagcaaaaagaatgaccacagctca

SEQ ID NO: 960214 - DNA, 33 bp, Homo sapien
tgcatgtagagcaaaaggaatgaccacagctca

SEQ ID NO: 960215 - DNA, 33 bp, Homo sapien
tgagaattttccattccaatctggttttcttac

SEQ ID NO: 960216 - DNA, 33 bp, Homo sapien
tgagaattttccattctaatctggttttcttac

SEQ ID NO: 960217 - DNA, 33 bp, Homo sapien
aggaatttataagccaatagagaaaatgcatat

SEQ ID NO: 960218 - DNA, 33 bp, Homo sapien
aggaatttataagccagtagagaaaatgcatat

SEQ ID NO: 960219 - DNA, 33 bp, Homo sapien
ctcaattctaatggaaccttataccctatttca

SEQ ID NO: 960220 - DNA, 33 bp, Homo sapien
ctcaattctaatggaagcttataccctatttca

SEQ ID NO: 960221 - DNA, 33 bp, Homo sapien
aatctaagaccacagcaataaatactaaaactg

SEQ ID NO: 960222 - DNA, 33 bp, Homo sapien
aatctaagaccacagccataaatactaaaactg

SEQ ID NO: 960223 - DNA, 33 bp, Homo sapien
tttagtagtaaggttaaagtagccatagagcaa

SEQ ID NO: 960224 - DNA, 33 bp, Homo sapien
tttagtagtaaggttagagtagccatagagcaa

SEQ ID NO: 960225 - DNA, 33 bp, Homo sapien
aaccccatacataagcaatgtcatttacaggat

SEQ ID NO: 960226 - DNA, 33 bp, Homo sapien
aaccccatacataagcgatgtcatttacaggat

SEQ ID NO: 960227 - DNA, 33 bp, Homo sapien
aaatacataaaaccaccgctttgagcaaaacgc

SEQ ID NO: 960228 - DNA, 33 bp, Homo sapien
aaatacataaaaccactgctttgagcaaaacgc

SEQ ID NO: 960229 - DNA, 33 bp, Homo sapien
aagtttagaaatcaacaggtagaagttagatct

SEQ ID NO: 960230 - DNA, 33 bp, Homo sapien
aagtttagaaatcaacgggtagaagttagatct

SEQ ID NO: 960231 - DNA, 33 bp, Homo sapien
ttggtttgtccttccacatctattctaagccct

SEQ ID NO: 960232 - DNA, 33 bp, Homo sapien
ttggtttgtccttccagatctattctaagccct

SEQ ID NO: 960233 - DNA, 33 bp, Homo sapien
agtaactatcacttacggcaaattcactttgtg

SEQ ID NO: 960234 - DNA, 33 bp, Homo sapien
agtaactatcacttactgcaaattcactttgtg

SEQ ID NO: 960235 - DNA, 33 bp, Homo sapien
ccaaccaatcacaagtcaattctccctcttagg

SEQ ID NO: 960236 - DNA, 33 bp, Homo sapien
ccaaccaatcacaagttaattctccctcttagg

SEQ ID NO: 960237 - DNA, 33 bp, Homo sapien
gtaactcctttctcacaggcattgcaaaacata

SEQ ID NO: 960238 - DNA, 33 bp, Homo sapien
gtaactcctttctcacgggcattgcaaaacata

SEQ ID NO: 960239 - DNA, 33 bp, Homo sapien
caaatccaaagaagaaaaacgtctaagagaact

SEQ ID NO: 960240 - DNA, 33 bp, Homo sapien
caaatccaaagaagaagaacgtctaagagaact

SEQ ID NO: 960241 - DNA, 33 bp, Homo sapien
ccaaaccatcttctcccaagctctttgccccag

SEQ ID NO: 960242 - DNA, 33 bp, Homo sapien
ccaaaccatcttctcctaagctctttgccccag

SEQ ID NO: 960243 - DNA, 33 bp, Homo sapien
acaacaccacttcaaacgaattgagaaaaattg

SEQ ID NO: 960244 - DNA, 33 bp, Homo sapien
acaacaccacttcaaatgaattgagaaaaattg

SEQ ID NO: 960245 - DNA, 33 bp, Homo sapien
gaatccttcctggagaacttagtcaagaacaaa

SEQ ID NO: 960246 - DNA, 33 bp, Homo sapien
gaatccttcctggagatcttagtcaagaacaaa

SEQ ID NO: 960247 - DNA, 33 bp, Homo sapien
tttgtttttctaccaccctacctcttgtgccta

SEQ ID NO: 960248 - DNA, 33 bp, Homo sapien
tttgtttttctaccactctacctcttgtgccta

SEQ ID NO: 960249 - DNA, 33 bp, Homo sapien
gtgttgcagaaaggacacttaataatgacaatc

SEQ ID NO: 960250 - DNA, 33 bp, Homo sapien
gtgttgcagaaaggacgcttaataatgacaatc

SEQ ID NO: 960251 - DNA, 33 bp, Homo sapien
gtaaactccttgaggaaatgaaacttgccttac

SEQ ID NO: 960252 - DNA, 33 bp, Homo sapien
gtaaactccttgaggagatgaaacttgccttac

SEQ ID NO: 960253 - DNA, 33 bp, Homo sapien
attttaaagtcatctaaaacagctttctattct

SEQ ID NO: 960254 - DNA, 33 bp, Homo sapien
attttaaagtcatctacaacagctttctattct

SEQ ID NO: 960255 - DNA, 33 bp, Homo sapien
cttaagaaatttataagtggaaacagcacacat

SEQ ID NO: 960256 - DNA, 33 bp, Homo sapien
cttaagaaatttataattggaaacagcacacat

SEQ ID NO: 960257 - DNA, 33 bp, Homo sapien
gagagctaaagatgtgcacttacaagcatcctg

SEQ ID NO: 960258 - DNA, 33 bp, Homo sapien
gagagctaaagatgtgtacttacaagcatcctg

SEQ ID NO: 960259 - DNA, 33 bp, Homo sapien
gtgtggcatttctgaaagctagtcctaactctg

SEQ ID NO: 960260 - DNA, 33 bp, Homo sapien
gtgtggcatttctgaacgctagtcctaactctg

SEQ ID NO: 960261 - DNA, 33 bp, Homo sapien
gcctgcaaaatgcttaaaccattgaaataagtg

SEQ ID NO: 960262 - DNA, 33 bp, Homo sapien
gcctgcaaaatgcttataccattgaaataagtg

SEQ ID NO: 960263 - DNA, 33 bp, Homo sapien
ttatctgaaaaagaaaatagtagtaccagccct

SEQ ID NO: 960264 - DNA, 33 bp, Homo sapien
ttatctgaaaaagaaagtagtagtaccagccct

SEQ ID NO: 960265 - DNA, 33 bp, Homo sapien
gctcagtattctgcgcactacagtaactgctgt

SEQ ID NO: 960266 - DNA, 33 bp, Homo sapien
gctcagtattctgcgcgctacagtaactgctgt

SEQ ID NO: 960267 - DNA, 33 bp, Homo sapien
cctaatattttctagaaccctctccaaaaggtc

SEQ ID NO: 960268 - DNA, 33 bp, Homo sapien
cctaatattttctagagccctctccaaaaggtc

SEQ ID NO: 960269 - DNA, 33 bp, Homo sapien
atgctcacacctgagacatttcctattctggtt

SEQ ID NO: 960270 - DNA, 33 bp, Homo sapien
atgctcacacctgagatatttcctattctggtt

SEQ ID NO: 960271 - DNA, 33 bp, Homo sapien
gttagttttgctaaacaaatagagctctgtaaa

SEQ ID NO: 960272 - DNA, 33 bp, Homo sapien
gttagttttgctaaacgaatagagctctgtaaa

SEQ ID NO: 960273 - DNA, 33 bp, Homo sapien
gtagcgaacaactaggaccaacactgcacataa

SEQ ID NO: 960274 - DNA, 33 bp, Homo sapien
gtagcgaacaactagggccaacactgcacataa

SEQ ID NO: 960275 - DNA, 33 bp, Homo sapien
taggttactatgttctaacaagcaagctgcgaa

SEQ ID NO: 960276 - DNA, 33 bp, Homo sapien
taggttactatgttctgacaagcaagctgcgaa

SEQ ID NO: 960277 - DNA, 33 bp, Homo sapien
cgttgtgaccccggaccgccagattctctctgc

SEQ ID NO: 960278 - DNA, 33 bp, Homo sapien
cgttgtgaccccggactgccagattctctctgc

SEQ ID NO: 960279 - DNA, 33 bp, Homo sapien
ctctttagtctccctacatctgatttctacctc

SEQ ID NO: 960280 - DNA, 33 bp, Homo sapien
ctctttagtctccctatatctgatttctacctc

SEQ ID NO: 960281 - DNA, 33 bp, Homo sapien
tccaactgagtctcaacttaatgtaaaatctat

SEQ ID NO: 960282 - DNA, 33 bp, Homo sapien
tccaactgagtctcaatttaatgtaaaatctat

SEQ ID NO: 960283 - DNA, 33 bp, Homo sapien
cagatgaaatcagagacgttaccgagggctaga

SEQ ID NO: 960284 - DNA, 33 bp, Homo sapien
cagatgaaatcagagatgttaccgagggctaga

SEQ ID NO: 960285 - DNA, 33 bp, Homo sapien
aggaagtgatgttgaaaagaagtgtttgctgta

SEQ ID NO: 960286 - DNA, 33 bp, Homo sapien
aggaagtgatgttgaagagaagtgtttgctgta

SEQ ID NO: 960287 - DNA, 33 bp, Homo sapien
caaaaggcagacttcacatttcggcctgtcttg

SEQ ID NO: 960288 - DNA, 33 bp, Homo sapien
caaaaggcagacttcatatttcggcctgtcttg

SEQ ID NO: 960289 - DNA, 33 bp, Homo sapien
gctcaggggcaaaccacatttgatgcagggtat

SEQ ID NO: 960290 - DNA, 33 bp, Homo sapien
gctcaggggcaaaccatatttgatgcagggtat

SEQ ID NO: 960291 - DNA, 33 bp, Homo sapien
ccaactcatagctgaccgaacataccttattgg

SEQ ID NO: 960292 - DNA, 33 bp, Homo sapien
ccaactcatagctgactgaacataccttattgg

SEQ ID NO: 960293 - DNA, 33 bp, Homo sapien
acaatggccaatttgaaaccataatgtgacata

SEQ ID NO: 960294 - DNA, 33 bp, Homo sapien
acaatggccaatttgagaccataatgtgacata

SEQ ID NO: 960295 - DNA, 33 bp, Homo sapien
acgaggaataaaaaagccttgattgtaacactt

SEQ ID NO: 960296 - DNA, 33 bp, Homo sapien
acgaggaataaaaaaggcttgattgtaacactt

SEQ ID NO: 960297 - DNA, 33 bp, Homo sapien
ctgggtctttggaccactgaacacaatctttta

SEQ ID NO: 960298 - DNA, 33 bp, Homo sapien
ctgggtctttggaccattgaacacaatctttta

SEQ ID NO: 960299 - DNA, 33 bp, Homo sapien
acatcacttatgtgaaaaaaacagcttaaaaga

SEQ ID NO: 960300 - DNA, 33 bp, Homo sapien
acatcacttatgtgaataaaacagcttaaaaga

SEQ ID NO: 960301 - DNA, 33 bp, Homo sapien
ccaagctctttcacaacctggagactataaggt

SEQ ID NO: 960302 - DNA, 33 bp, Homo sapien
ccaagctctttcacaatctggagactataaggt

SEQ ID NO: 960303 - DNA, 33 bp, Homo sapien
agttgtttagccaagtcaatatcacaagtgcct

SEQ ID NO: 960304 - DNA, 33 bp, Homo sapien
agttgtttagccaagttaatatcacaagtgcct

SEQ ID NO: 960305 - DNA, 33 bp, Homo sapien
ctatttcaattttgtcacagttgtttagccaag

SEQ ID NO: 960306 - DNA, 33 bp, Homo sapien
ctatttcaattttgtcgcagttgtttagccaag

SEQ ID NO: 960307 - DNA, 33 bp, Homo sapien
ctacaagattaaactacacaaactcgctaagct

SEQ ID NO: 960308 - DNA, 33 bp, Homo sapien
ctacaagattaaactatacaaactcgctaagct

SEQ ID NO: 960309 - DNA, 33 bp, Homo sapien
tattataaacagatgacctctctgaaaagttat

SEQ ID NO: 960310 - DNA, 33 bp, Homo sapien
tattataaacagatgatctctctgaaaagttat

SEQ ID NO: 960311 - DNA, 33 bp, Homo sapien
ctcatcgagaattacacgaatgttagccattat

SEQ ID NO: 960312 - DNA, 33 bp, Homo sapien
ctcatcgagaattacatgaatgttagccattat

SEQ ID NO: 960313 - DNA, 33 bp, Homo sapien
attaataccagtctcacaggttataggaaatat

SEQ ID NO: 960314 - DNA, 33 bp, Homo sapien
attaataccagtctcataggttataggaaatat

SEQ ID NO: 960315 - DNA, 33 bp, Homo sapien
tttcattcaatgcaaaattgttcaggacctact

SEQ ID NO: 960316 - DNA, 33 bp, Homo sapien
tttcattcaatgcaaagttgttcaggacctact

SEQ ID NO: 960317 - DNA, 33 bp, Homo sapien
tacgatgatagaatgccatttggggtagtaaat

SEQ ID NO: 960318 - DNA, 33 bp, Homo sapien
tacgatgatagaatgctatttggggtagtaaat

SEQ ID NO: 960319 - DNA, 33 bp, Homo sapien
tatctaattattatcaatcaatagctgctctgc

SEQ ID NO: 960320 - DNA, 33 bp, Homo sapien
tatctaattattatcagtcaatagctgctctgc

SEQ ID NO: 960321 - DNA, 33 bp, Homo sapien
aacaacttgtagtctaaattggaagcctgcaaa

SEQ ID NO: 960322 - DNA, 33 bp, Homo sapien
aacaacttgtagtctacattggaagcctgcaaa

SEQ ID NO: 960323 - DNA, 33 bp, Homo sapien
agatatggctgctagacgtactgaaattcaaag

SEQ ID NO: 960324 - DNA, 33 bp, Homo sapien
agatatggctgctagatgtactgaaattcaaag

SEQ ID NO: 960325 - DNA, 33 bp, Homo sapien
tgcaattgttattctacgtttagccacaatcct

SEQ ID NO: 960326 - DNA, 33 bp, Homo sapien
tgcaattgttattctatgtttagccacaatcct

SEQ ID NO: 960327 - DNA, 33 bp, Homo sapien
tattacgcattttacaaatctataagagggcaa

SEQ ID NO: 960328 - DNA, 33 bp, Homo sapien
tattacgcattttacagatctataagagggcaa

SEQ ID NO: 960329 - DNA, 33 bp, Homo sapien
ttgtgtcttctagttacaggaatttgtagtcac

SEQ ID NO: 960330 - DNA, 33 bp, Homo sapien
ttgtgtcttctagttataggaatttgtagtcac

SEQ ID NO: 960331 - DNA, 33 bp, Homo sapien
cctgatttctggattgcagctgtaacagttgtc

SEQ ID NO: 960332 - DNA, 33 bp, Homo sapien
cctgatttctggattgtagctgtaacagttgtc

SEQ ID NO: 960333 - DNA, 33 bp, Homo sapien
taaaaatatggatgcaagagtaatggtaatcaa

SEQ ID NO: 960334 - DNA, 33 bp, Homo sapien
taaaaatatggatgcaggagtaatggtaatcaa

SEQ ID NO: 960335 - DNA, 33 bp, Homo sapien
ccactattagcacaagccagaggtaacacatga

SEQ ID NO: 960336 - DNA, 33 bp, Homo sapien
ccactattagcacaaggcagaggtaacacatga

SEQ ID NO: 960337 - DNA, 33 bp, Homo sapien
cacacatgagattctagggtttctaccacggat

SEQ ID NO: 960338 - DNA, 33 bp, Homo sapien
cacacatgagattctatggtttctaccacggat

SEQ ID NO: 960339 - DNA, 33 bp, Homo sapien
ttgctaagtgctaagagagagagtgatgtggaa

SEQ ID NO: 960340 - DNA, 33 bp, Homo sapien
ttgctaagtgctaagatagagagtgatgtggaa

SEQ ID NO: 960341 - DNA, 33 bp, Homo sapien
tttgcacttgtgtgaacattcaattttgagatc

SEQ ID NO: 960342 - DNA, 33 bp, Homo sapien
tttgcacttgtgtgaatattcaattttgagatc

SEQ ID NO: 960343 - DNA, 33 bp, Homo sapien
tctgcttctctatagacctggagcaaatgaact

SEQ ID NO: 960344 - DNA, 33 bp, Homo sapien
tctgcttctctatagatctggagcaaatgaact

SEQ ID NO: 960345 - DNA, 33 bp, Homo sapien
ataaactgaaacacaacgtagtaggtggctgtt

SEQ ID NO: 960346 - DNA, 33 bp, Homo sapien
ataaactgaaacacaatgtagtaggtggctgtt

SEQ ID NO: 960347 - DNA, 33 bp, Homo sapien
taggcaccaaaacagacaatggaaccgtatcct

SEQ ID NO: 960348 - DNA, 33 bp, Homo sapien
taggcaccaaaacagagaatggaaccgtatcct

SEQ ID NO: 960349 - DNA, 33 bp, Homo sapien
tgattttgcatcttcacggctcagttcccaatt

SEQ ID NO: 960350 - DNA, 33 bp, Homo sapien
tgattttgcatcttcatggctcagttcccaatt

SEQ ID NO: 960351 - DNA, 33 bp, Homo sapien
ttacaagagtagtttaaattcaggaaattgcag

SEQ ID NO: 960352 - DNA, 33 bp, Homo sapien
ttacaagagtagtttacattcaggaaattgcag

SEQ ID NO: 960353 - DNA, 33 bp, Homo sapien
gaatagatggtgataggaataaaaatcaacaaa

SEQ ID NO: 960354 - DNA, 33 bp, Homo sapien
gaatagatggtgatagtaataaaaatcaacaaa

SEQ ID NO: 960355 - DNA, 33 bp, Homo sapien
tctgacttttcttccactcttcttatccataca

SEQ ID NO: 960356 - DNA, 33 bp, Homo sapien
tctgacttttcttccattcttcttatccataca

SEQ ID NO: 960357 - DNA, 33 bp, Homo sapien
ttatatcacactgctacgtatcaggcacatgga

SEQ ID NO: 960358 - DNA, 33 bp, Homo sapien
ttatatcacactgctatgtatcaggcacatgga

SEQ ID NO: 960359 - DNA, 33 bp, Homo sapien
gtctgcagctccccacaagaccaacggacaagg

SEQ ID NO: 960360 - DNA, 33 bp, Homo sapien
gtctgcagctccccacgagaccaacggacaagg

SEQ ID NO: 960361 - DNA, 33 bp, Homo sapien
tgctgatgcctagaaccgatacaaaggaaaaca

SEQ ID NO: 960362 - DNA, 33 bp, Homo sapien
tgctgatgcctagaactgatacaaaggaaaaca

SEQ ID NO: 960363 - DNA, 33 bp, Homo sapien
tcattcaaaatgctacagagacataagaggagg

SEQ ID NO: 960364 - DNA, 33 bp, Homo sapien
tcattcaaaatgctacggagacataagaggagg

SEQ ID NO: 960365 - DNA, 33 bp, Homo sapien
actatctgcagattcaatgaaaccagcaggata

SEQ ID NO: 960366 - DNA, 33 bp, Homo sapien
actatctgcagattcagtgaaaccagcaggata

SEQ ID NO: 960367 - DNA, 33 bp, Homo sapien
caaaactcagaggtaagaaagcatttacattgc

SEQ ID NO: 960368 - DNA, 33 bp, Homo sapien
caaaactcagaggtaataaagcatttacattgc

SEQ ID NO: 960369 - DNA, 33 bp, Homo sapien
ccaggttgagtgtatacgtcagccatagtacca

SEQ ID NO: 960370 - DNA, 33 bp, Homo sapien
ccaggttgagtgtatatgtcagccatagtacca

SEQ ID NO: 960371 - DNA, 33 bp, Homo sapien
taccattgaatgatccaactcaaatatgttgcc

SEQ ID NO: 960372 - DNA, 33 bp, Homo sapien
taccattgaatgatccgactcaaatatgttgcc

SEQ ID NO: 960373 - DNA, 33 bp, Homo sapien
taactcttcacaactacctaattccaggaacat

SEQ ID NO: 960374 - DNA, 33 bp, Homo sapien
taactcttcacaactatctaattccaggaacat

SEQ ID NO: 960375 - DNA, 33 bp, Homo sapien
gcctattcattcctgcggattcacgaaccccaa

SEQ ID NO: 960376 - DNA, 33 bp, Homo sapien
gcctattcattcctgctgattcacgaaccccaa

SEQ ID NO: 960377 - DNA, 33 bp, Homo sapien
ccctgctagtagcaaaagcaatatatatccagt

SEQ ID NO: 960378 - DNA, 33 bp, Homo sapien
ccctgctagtagcaaaggcaatatatatccagt

SEQ ID NO: 960379 - DNA, 33 bp, Homo sapien
agcagatcaagactttaaaagagctcttagaaa

SEQ ID NO: 960380 - DNA, 33 bp, Homo sapien
agcagatcaagactttcaaagagctcttagaaa

SEQ ID NO: 960381 - DNA, 33 bp, Homo sapien
taaccatttgaacttggattatacattgccaat

SEQ ID NO: 960382 - DNA, 33 bp, Homo sapien
taaccatttgaacttgtattatacattgccaat

SEQ ID NO: 960383 - DNA, 33 bp, Homo sapien
tgactccatggtaaatcatctggactttttttt

SEQ ID NO: 960384 - DNA, 33 bp, Homo sapien
tgactccatggtaaattatctggactttttttt

SEQ ID NO: 960385 - DNA, 33 bp, Homo sapien
gttggagtttagtgaacctctcataagctacaa

SEQ ID NO: 960386 - DNA, 33 bp, Homo sapien
gttggagtttagtgaatctctcataagctacaa

SEQ ID NO: 960387 - DNA, 33 bp, Homo sapien
acacttagctgaaaacagtagccaagagaaaag

SEQ ID NO: 960388 - DNA, 33 bp, Homo sapien
acacttagctgaaaacggtagccaagagaaaag

SEQ ID NO: 960389 - DNA, 33 bp, Homo sapien
ttatgttccctcataactgaaagaggcttaata

SEQ ID NO: 960390 - DNA, 33 bp, Homo sapien
ttatgttccctcataattgaaagaggcttaata

SEQ ID NO: 960391 - DNA, 33 bp, Homo sapien
attacctataattgaacagccctgcaattagca

SEQ ID NO: 960392 - DNA, 33 bp, Homo sapien
attacctataattgaatagccctgcaattagca

SEQ ID NO: 960393 - DNA, 33 bp, Homo sapien
ccatgtgcttcttataaacctggagtttgagaa

SEQ ID NO: 960394 - DNA, 33 bp, Homo sapien
ccatgtgcttcttatacacctggagtttgagaa

SEQ ID NO: 960395 - DNA, 33 bp, Homo sapien
aaaagctttctaaaaacgtgacctatgagctgt

SEQ ID NO: 960396 - DNA, 33 bp, Homo sapien
aaaagctttctaaaaatgtgacctatgagctgt

SEQ ID NO: 960397 - DNA, 33 bp, Homo sapien
gatttaggactaaccaaggtgagcaattatctc

SEQ ID NO: 960398 - DNA, 33 bp, Homo sapien
gatttaggactaaccagggtgagcaattatctc

SEQ ID NO: 960399 - DNA, 33 bp, Homo sapien
aatttgagtagatatacggacaaagccctcagg

SEQ ID NO: 960400 - DNA, 33 bp, Homo sapien
aatttgagtagatatatggacaaagccctcagg

SEQ ID NO: 960401 - DNA, 33 bp, Homo sapien
atatctttggacaacaatatactactatctcct

SEQ ID NO: 960402 - DNA, 33 bp, Homo sapien
atatctttggacaacagtatactactatctcct

SEQ ID NO: 960403 - DNA, 33 bp, Homo sapien
ggggtagagatagagggacttgctttgcttttg

SEQ ID NO: 960404 - DNA, 33 bp, Homo sapien
ggggtagagatagaggtacttgctttgcttttg

SEQ ID NO: 960405 - DNA, 33 bp, Homo sapien
catttggtctttaatgaatgctgaaatctatct

SEQ ID NO: 960406 - DNA, 33 bp, Homo sapien
catttggtctttaatgcatgctgaaatctatct

SEQ ID NO: 960407 - DNA, 33 bp, Homo sapien
aatgaaaagcaagctacggactgaaggaaaatt

SEQ ID NO: 960408 - DNA, 33 bp, Homo sapien
aatgaaaagcaagctatggactgaaggaaaatt

SEQ ID NO: 960409 - DNA, 33 bp, Homo sapien
gaatgaccagtataataaggatgcatgctttta

SEQ ID NO: 960410 - DNA, 33 bp, Homo sapien
gaatgaccagtataatgaggatgcatgctttta

SEQ ID NO: 960411 - DNA, 33 bp, Homo sapien
tttgccatcattaaaacatagacttcaatgtca

SEQ ID NO: 960412 - DNA, 33 bp, Homo sapien
tttgccatcattaaaatatagacttcaatgtca

SEQ ID NO: 960413 - DNA, 33 bp, Homo sapien
catatggggtttccacacagattaaactatgtg

SEQ ID NO: 960414 - DNA, 33 bp, Homo sapien
catatggggtttccacgcagattaaactatgtg

SEQ ID NO: 960415 - DNA, 33 bp, Homo sapien
taaagtttctaccagacacagactacggaatat

SEQ ID NO: 960416 - DNA, 33 bp, Homo sapien
taaagtttctaccagagacagactacggaatat

SEQ ID NO: 960417 - DNA, 33 bp, Homo sapien
gcattcagtccttatccacacagaaaatgaaac

SEQ ID NO: 960418 - DNA, 33 bp, Homo sapien
gcattcagtccttatctacacagaaaatgaaac

SEQ ID NO: 960419 - DNA, 33 bp, Homo sapien
gatattgtctcaaaaaatatttgtaactgggca

SEQ ID NO: 960420 - DNA, 33 bp, Homo sapien
gatattgtctcaaaaagtatttgtaactgggca

SEQ ID NO: 960421 - DNA, 33 bp, Homo sapien
gtttcactaaaaaagcaaaaggaaaggtgtcat

SEQ ID NO: 960422 - DNA, 33 bp, Homo sapien
gtttcactaaaaaagcgaaaggaaaggtgtcat

SEQ ID NO: 960423 - DNA, 33 bp, Homo sapien
cctaatccctacatgaaaaaatcgcctatctca

SEQ ID NO: 960424 - DNA, 33 bp, Homo sapien
cctaatccctacatgacaaaatcgcctatctca

SEQ ID NO: 960425 - DNA, 33 bp, Homo sapien
atgtcctattgcttccacttagcaggtacaaca

SEQ ID NO: 960426 - DNA, 33 bp, Homo sapien
atgtcctattgcttccccttagcaggtacaaca

SEQ ID NO: 960427 - DNA, 33 bp, Homo sapien
tgtgcctaattacaagaaacactgcacttgggg

SEQ ID NO: 960428 - DNA, 33 bp, Homo sapien
tgtgcctaattacaagcaacactgcacttgggg

SEQ ID NO: 960429 - DNA, 33 bp, Homo sapien
gttgtaggaccccatgaatattatattttggag

SEQ ID NO: 960430 - DNA, 33 bp, Homo sapien
gttgtaggaccccatgcatattatattttggag

SEQ ID NO: 960431 - DNA, 33 bp, Homo sapien
cttacaaccaaccctccaagagcttccctctgc

SEQ ID NO: 960432 - DNA, 33 bp, Homo sapien
cttacaaccaaccctcgaagagcttccctctgc

SEQ ID NO: 960433 - DNA, 33 bp, Homo sapien
tgattgcctggtgtcacctaagacccaactgag

SEQ ID NO: 960434 - DNA, 33 bp, Homo sapien
tgattgcctggtgtcatctaagacccaactgag

SEQ ID NO: 960435 - DNA, 33 bp, Homo sapien
agttatatctcaatgagagaggaagaatattat

SEQ ID NO: 960436 - DNA, 33 bp, Homo sapien
agttatatctcaatgatagaggaagaatattat

SEQ ID NO: 960437 - DNA, 33 bp, Homo sapien
agtgggacaaatgcctaactaaagtggctttaa

SEQ ID NO: 960438 - DNA, 33 bp, Homo sapien
agtgggacaaatgcctcactaaagtggctttaa

SEQ ID NO: 960439 - DNA, 33 bp, Homo sapien
ataggaataccaaaaaccctgaaagcaaagtga

SEQ ID NO: 960440 - DNA, 33 bp, Homo sapien
ataggaataccaaaaatcctgaaagcaaagtga

SEQ ID NO: 960441 - DNA, 33 bp, Homo sapien
ttaggagtaaagtctacgctcgagatataaaac

SEQ ID NO: 960442 - DNA, 33 bp, Homo sapien
ttaggagtaaagtctatgctcgagatataaaac

SEQ ID NO: 960443 - DNA, 33 bp, Homo sapien
tggtaagaaatgtgtccatttttggtaagaaaa

SEQ ID NO: 960444 - DNA, 33 bp, Homo sapien
tggtaagaaatgtgtctatttttggtaagaaaa

SEQ ID NO: 960445 - DNA, 33 bp, Homo sapien
ttgaccaaactgatctaaacaactgaaaagatg

SEQ ID NO: 960446 - DNA, 33 bp, Homo sapien
ttgaccaaactgatctgaacaactgaaaagatg

SEQ ID NO: 960447 - DNA, 33 bp, Homo sapien
gctacatgtgaaatacaagaaaaatggagtagt

SEQ ID NO: 960448 - DNA, 33 bp, Homo sapien
gctacatgtgaaatacgagaaaaatggagtagt

SEQ ID NO: 960449 - DNA, 33 bp, Homo sapien
taagtaatgatatcacaaaattccaagtacctt

SEQ ID NO: 960450 - DNA, 33 bp, Homo sapien
taagtaatgatatcacgaaattccaagtacctt

SEQ ID NO: 960451 - DNA, 33 bp, Homo sapien
acctctcttactaataacttggtagtacaatac

SEQ ID NO: 960452 - DNA, 33 bp, Homo sapien
acctctcttactaataccttggtagtacaatac

SEQ ID NO: 960453 - DNA, 33 bp, Homo sapien
ttgaccaagtgggtcacggtgcaatgcgttagg

SEQ ID NO: 960454 - DNA, 33 bp, Homo sapien
ttgaccaagtgggtcatggtgcaatgcgttagg

SEQ ID NO: 960455 - DNA, 33 bp, Homo sapien
aataacaatcactgcaagtagaaggattcaata

SEQ ID NO: 960456 - DNA, 33 bp, Homo sapien
aataacaatcactgcaggtagaaggattcaata

SEQ ID NO: 960457 - DNA, 33 bp, Homo sapien
agaagtaggcttcggacggtggataataacaaa

SEQ ID NO: 960458 - DNA, 33 bp, Homo sapien
agaagtaggcttcggatggtggataataacaaa

SEQ ID NO: 960459 - DNA, 33 bp, Homo sapien
tgggtaaggtttacaaaagagtcctcctatgtc

SEQ ID NO: 960460 - DNA, 33 bp, Homo sapien
tgggtaaggtttacaacagagtcctcctatgtc

SEQ ID NO: 960461 - DNA, 33 bp, Homo sapien
acatcatgatagcagactcgccggagtaatgag

SEQ ID NO: 960462 - DNA, 33 bp, Homo sapien
acatcatgatagcagattcgccggagtaatgag

SEQ ID NO: 960463 - DNA, 33 bp, Homo sapien
gtattccctgtttaaaactcttcgatgaccatc

SEQ ID NO: 960464 - DNA, 33 bp, Homo sapien
gtattccctgtttaaagctcttcgatgaccatc

SEQ ID NO: 960465 - DNA, 33 bp, Homo sapien
aaaacaagcctacgtagaactgaaaactcttct

SEQ ID NO: 960466 - DNA, 33 bp, Homo sapien
aaaacaagcctacgtataactgaaaactcttct

SEQ ID NO: 960467 - DNA, 33 bp, Homo sapien
ttctctttcaaatgacgctaagaaggcaagaga

SEQ ID NO: 960468 - DNA, 33 bp, Homo sapien
ttctctttcaaatgactctaagaaggcaagaga

SEQ ID NO: 960469 - DNA, 33 bp, Homo sapien
ctttagcattgtgtagccaaaagcttcatggca

SEQ ID NO: 960470 - DNA, 33 bp, Homo sapien
ctttagcattgtgtagtcaaaagcttcatggca

SEQ ID NO: 960471 - DNA, 33 bp, Homo sapien
caacccacagataaaaactgggtgtagcaattg

SEQ ID NO: 960472 - DNA, 33 bp, Homo sapien
caacccacagataaaacctgggtgtagcaattg

SEQ ID NO: 960473 - DNA, 33 bp, Homo sapien
atttagtggataagcacgatctatatatggagt

SEQ ID NO: 960474 - DNA, 33 bp, Homo sapien
atttagtggataagcatgatctatatatggagt

SEQ ID NO: 960475 - DNA, 33 bp, Homo sapien
ttgttaatagattaaaaagtggtcagcatggca

SEQ ID NO: 960476 - DNA, 33 bp, Homo sapien
ttgttaatagattaaagagtggtcagcatggca

SEQ ID NO: 960477 - DNA, 33 bp, Homo sapien
caataaagattggtaaacatcataaaagagcta

SEQ ID NO: 960478 - DNA, 33 bp, Homo sapien
caataaagattggtaagcatcataaaagagcta

SEQ ID NO: 960479 - DNA, 33 bp, Homo sapien
ccttgatgtgtgtatacgtcagtgagttcttag

SEQ ID NO: 960480 - DNA, 33 bp, Homo sapien
ccttgatgtgtgtatatgtcagtgagttcttag

SEQ ID NO: 960481 - DNA, 33 bp, Homo sapien
attttaatacaaaagacgaaggatatactcaga

SEQ ID NO: 960482 - DNA, 33 bp, Homo sapien
attttaatacaaaagatgaaggatatactcaga

SEQ ID NO: 960483 - DNA, 33 bp, Homo sapien
aattgtcaccaagctacaagtactggtcttttc

SEQ ID NO: 960484 - DNA, 33 bp, Homo sapien
aattgtcaccaagctataagtactggtcttttc

SEQ ID NO: 960485 - DNA, 33 bp, Homo sapien
atttaaacatgggaaacgtgtggtggtatcatt

SEQ ID NO: 960486 - DNA, 33 bp, Homo sapien
atttaaacatgggaaatgtgtggtggtatcatt

SEQ ID NO: 960487 - DNA, 33 bp, Homo sapien
tgaaatgtaatttcaactgctggagttttgcca

SEQ ID NO: 960488 - DNA, 33 bp, Homo sapien
tgaaatgtaatttcaattgctggagttttgcca

SEQ ID NO: 960489 - DNA, 33 bp, Homo sapien
tcaaaatatgtgggggaattttctaaatctctt

SEQ ID NO: 960490 - DNA, 33 bp, Homo sapien
tcaaaatatgtggggggattttctaaatctctt

SEQ ID NO: 960491 - DNA, 33 bp, Homo sapien
aggtatgattaactgacgatagctaggattaca

SEQ ID NO: 960492 - DNA, 33 bp, Homo sapien
aggtatgattaactgatgatagctaggattaca

SEQ ID NO: 960493 - DNA, 33 bp, Homo sapien
atatacacagaatggaaaattttagaattcagg

SEQ ID NO: 960494 - DNA, 33 bp, Homo sapien
atatacacagaatggataattttagaattcagg

SEQ ID NO: 960495 - DNA, 33 bp, Homo sapien
aatctgcattaactacaaacacaatcaaggtat

SEQ ID NO: 960496 - DNA, 33 bp, Homo sapien
aatctgcattaactaccaacacaatcaaggtat

SEQ ID NO: 960497 - DNA, 33 bp, Homo sapien
caatcttctgtgaggcaaggaaacactaagtag

SEQ ID NO: 960498 - DNA, 33 bp, Homo sapien
caatcttctgtgaggcgaggaaacactaagtag

SEQ ID NO: 960499 - DNA, 33 bp, Homo sapien
tgaatgggactggcaaacttaaaattggacacc

SEQ ID NO: 960500 - DNA, 33 bp, Homo sapien
tgaatgggactggcaatcttaaaattggacacc

SEQ ID NO: 960501 - DNA, 33 bp, Homo sapien
agctccctaaggacagaaaatgagtagtgaata

SEQ ID NO: 960502 - DNA, 33 bp, Homo sapien
agctccctaaggacaggaaatgagtagtgaata

SEQ ID NO: 960503 - DNA, 33 bp, Homo sapien
aagtaaacacaagtaactaccagcaaatgtttt

SEQ ID NO: 960504 - DNA, 33 bp, Homo sapien
aagtaaacacaagtaattaccagcaaatgtttt

SEQ ID NO: 960505 - DNA, 33 bp, Homo sapien
ttttctctctcatagaagtgtcaccggtgatgt

SEQ ID NO: 960506 - DNA, 33 bp, Homo sapien
ttttctctctcatagaggtgtcaccggtgatgt

SEQ ID NO: 960507 - DNA, 33 bp, Homo sapien
gagccacggtgctcagccacagtacaggtttat

SEQ ID NO: 960508 - DNA, 33 bp, Homo sapien
gagccacggtgctcagtcacagtacaggtttat

SEQ ID NO: 960509 - DNA, 33 bp, Homo sapien
gcagtgtcacggggaacaccaagttgcaccaaa

SEQ ID NO: 960510 - DNA, 33 bp, Homo sapien
gcagtgtcacggggaagaccaagttgcaccaaa

SEQ ID NO: 960511 - DNA, 33 bp, Homo sapien
aataatacattcaaaaaaattttccatttcata

SEQ ID NO: 960512 - DNA, 33 bp, Homo sapien
aataatacattcaaaacaattttccatttcata

SEQ ID NO: 960513 - DNA, 33 bp, Homo sapien
cttttcatggaaacaccgaagtcctgttgtctt

SEQ ID NO: 960514 - DNA, 33 bp, Homo sapien
cttttcatggaaacactgaagtcctgttgtctt

SEQ ID NO: 960515 - DNA, 33 bp, Homo sapien
caccactttttgtcaaactctgaacttgtttct

SEQ ID NO: 960516 - DNA, 33 bp, Homo sapien
caccactttttgtcaagctctgaacttgtttct

SEQ ID NO: 960517 - DNA, 33 bp, Homo sapien
tttgaagccatcagtacgactttctcaaaatag

SEQ ID NO: 960518 - DNA, 33 bp, Homo sapien
tttgaagccatcagtatgactttctcaaaatag

SEQ ID NO: 960519 - DNA, 33 bp, Homo sapien
attcttagcataggcacggtgtttcagaaacga

SEQ ID NO: 960520 - DNA, 33 bp, Homo sapien
attcttagcataggcatggtgtttcagaaacga

SEQ ID NO: 960521 - DNA, 33 bp, Homo sapien
accgacatgaatctaccagaaaatggccaggaa

SEQ ID NO: 960522 - DNA, 33 bp, Homo sapien
accgacatgaatctactagaaaatggccaggaa

SEQ ID NO: 960523 - DNA, 33 bp, Homo sapien
tataaattggtggttacgtattgtgctattttg

SEQ ID NO: 960524 - DNA, 33 bp, Homo sapien
tataaattggtggttatgtattgtgctattttg

SEQ ID NO: 960525 - DNA, 33 bp, Homo sapien
ctctaagggacattcacccaaatctgactctgg

SEQ ID NO: 960526 - DNA, 33 bp, Homo sapien
ctctaagggacattcatccaaatctgactctgg

SEQ ID NO: 960527 - DNA, 33 bp, Homo sapien
ggacatgtcaggtggggagtttgacaacagagt

SEQ ID NO: 960528 - DNA, 33 bp, Homo sapien
ggacatgtcaggtgggtagtttgacaacagagt

SEQ ID NO: 960529 - DNA, 33 bp, Homo sapien
caaaatcccatgttcacagtcactagagcatac

SEQ ID NO: 960530 - DNA, 33 bp, Homo sapien
caaaatcccatgttcatagtcactagagcatac

SEQ ID NO: 960531 - DNA, 33 bp, Homo sapien
gccctctggataaggaagagcatcactttttag

SEQ ID NO: 960532 - DNA, 33 bp, Homo sapien
gccctctggataaggatgagcatcactttttag

SEQ ID NO: 960533 - DNA, 33 bp, Homo sapien
ggcctggggacacaacggttgacctcattgccc

SEQ ID NO: 960534 - DNA, 33 bp, Homo sapien
ggcctggggacacaactgttgacctcattgccc

SEQ ID NO: 960535 - DNA, 33 bp, Homo sapien
tttttaaatcacataaaaattacagacaaaaga

SEQ ID NO: 960536 - DNA, 33 bp, Homo sapien
tttttaaatcacataacaattacagacaaaaga

SEQ ID NO: 960537 - DNA, 33 bp, Homo sapien
gaaagcggaaagcactcaagaaatgttgaaggc

SEQ ID NO: 960538 - DNA, 33 bp, Homo sapien
gaaagcggaaagcactgaagaaatgttgaaggc

SEQ ID NO: 960539 - DNA, 33 bp, Homo sapien
gtacaaacagtgaatacgtggataatggattag

SEQ ID NO: 960540 - DNA, 33 bp, Homo sapien
gtacaaacagtgaatatgtggataatggattag

SEQ ID NO: 960541 - DNA, 33 bp, Homo sapien
taccacacactcaacccaccaactctcttttgc

SEQ ID NO: 960542 - DNA, 33 bp, Homo sapien
taccacacactcaaccgaccaactctcttttgc

SEQ ID NO: 960543 - DNA, 33 bp, Homo sapien
aaaagttaggaggtacaaaattgctcttgggat

SEQ ID NO: 960544 - DNA, 33 bp, Homo sapien
aaaagttaggaggtacgaaattgctcttgggat

SEQ ID NO: 960545 - DNA, 33 bp, Homo sapien
acctgagtgtgagttaccatttctttattccta

SEQ ID NO: 960546 - DNA, 33 bp, Homo sapien
acctgagtgtgagttagcatttctttattccta

SEQ ID NO: 960547 - DNA, 33 bp, Homo sapien
caattgctaagtcatacactcagaaacctcaag

SEQ ID NO: 960548 - DNA, 33 bp, Homo sapien
caattgctaagtcatatactcagaaacctcaag

SEQ ID NO: 960549 - DNA, 33 bp, Homo sapien
ttattattgaggaataaaaattatgaatgctaa

SEQ ID NO: 960550 - DNA, 33 bp, Homo sapien
ttattattgaggaatacaaattatgaatgctaa

SEQ ID NO: 960551 - DNA, 33 bp, Homo sapien
ccttccaaccctctaacagcaacttggcacagc

SEQ ID NO: 960552 - DNA, 33 bp, Homo sapien
ccttccaaccctctaagagcaacttggcacagc

SEQ ID NO: 960553 - DNA, 33 bp, Homo sapien
atgtatttactacagaaaactggaagtcagtct

SEQ ID NO: 960554 - DNA, 33 bp, Homo sapien
atgtatttactacagacaactggaagtcagtct

SEQ ID NO: 960555 - DNA, 33 bp, Homo sapien
actgtcactccaggaagtgcagaggttaagatg

SEQ ID NO: 960556 - DNA, 33 bp, Homo sapien
actgtcactccaggaattgcagaggttaagatg

SEQ ID NO: 960557 - DNA, 33 bp, Homo sapien
gagtaggaaggaacagcctcattaacattcata

SEQ ID NO: 960558 - DNA, 33 bp, Homo sapien
gagtaggaaggaacaggctcattaacattcata

SEQ ID NO: 960559 - DNA, 33 bp, Homo sapien
gtaaacaaatgaatataaggagtttagtgcaaa

SEQ ID NO: 960560 - DNA, 33 bp, Homo sapien
gtaaacaaatgaatatgaggagtttagtgcaaa

SEQ ID NO: 960561 - DNA, 33 bp, Homo sapien
ctatgatgctcaagtagctaaccaggaggaaaa

SEQ ID NO: 960562 - DNA, 33 bp, Homo sapien
ctatgatgctcaagtatctaaccaggaggaaaa

SEQ ID NO: 960563 - DNA, 33 bp, Homo sapien
taggtccccagaatcacggcagacattttaagc

SEQ ID NO: 960564 - DNA, 33 bp, Homo sapien
taggtccccagaatcatggcagacattttaagc

SEQ ID NO: 960565 - DNA, 33 bp, Homo sapien
tctttcacaatctaggacaaagagtatgggata

SEQ ID NO: 960566 - DNA, 33 bp, Homo sapien
tctttcacaatctagggcaaagagtatgggata

SEQ ID NO: 960567 - DNA, 33 bp, Homo sapien
tggtgggaagtggagtaacaatggtgagggcac

SEQ ID NO: 960568 - DNA, 33 bp, Homo sapien
tggtgggaagtggagttacaatggtgagggcac

SEQ ID NO: 960569 - DNA, 33 bp, Homo sapien
gggaaatgtcatgttgcagctgaattaatactg

SEQ ID NO: 960570 - DNA, 33 bp, Homo sapien
gggaaatgtcatgttgtagctgaattaatactg

SEQ ID NO: 960571 - DNA, 33 bp, Homo sapien
aagaaagaatattaacaaggctaaaggagtcaa

SEQ ID NO: 960572 - DNA, 33 bp, Homo sapien
aagaaagaatattaacgaggctaaaggagtcaa

SEQ ID NO: 960573 - DNA, 33 bp, Homo sapien
tgtgtatgtgcttggcaaggcatttctggacag

SEQ ID NO: 960574 - DNA, 33 bp, Homo sapien
tgtgtatgtgcttggccaggcatttctggacag

SEQ ID NO: 960575 - DNA, 33 bp, Homo sapien
ggcccagctaaggaataatagattttgaatgca

SEQ ID NO: 960576 - DNA, 33 bp, Homo sapien
ggcccagctaaggaatcatagattttgaatgca

SEQ ID NO: 960577 - DNA, 33 bp, Homo sapien
agttatatcatcaaagaatactgtacagcttta

SEQ ID NO: 960578 - DNA, 33 bp, Homo sapien
agttatatcatcaaaggatactgtacagcttta

SEQ ID NO: 960579 - DNA, 33 bp, Homo sapien
atggatcagcagggaacgtctgtacaaaaatga

SEQ ID NO: 960580 - DNA, 33 bp, Homo sapien
atggatcagcagggaaggtctgtacaaaaatga

SEQ ID NO: 960581 - DNA, 33 bp, Homo sapien
ggtagaaaactttcaccgctcatcatggttaat

SEQ ID NO: 960582 - DNA, 33 bp, Homo sapien
ggtagaaaactttcactgctcatcatggttaat

SEQ ID NO: 960583 - DNA, 33 bp, Homo sapien
aggttttggaatgaagcagccttgtttcatatc

SEQ ID NO: 960584 - DNA, 33 bp, Homo sapien
aggttttggaatgaagtagccttgtttcatatc

SEQ ID NO: 960585 - DNA, 33 bp, Homo sapien
gtgttcactggtttcaatcttcccatgttcatc

SEQ ID NO: 960586 - DNA, 33 bp, Homo sapien
gtgttcactggtttcagtcttcccatgttcatc

SEQ ID NO: 960587 - DNA, 33 bp, Homo sapien
tgcctttcctcctgtaacttgcttttgctcatt

SEQ ID NO: 960588 - DNA, 33 bp, Homo sapien
tgcctttcctcctgtagcttgcttttgctcatt

SEQ ID NO: 960589 - DNA, 33 bp, Homo sapien
ttttggatcaaggagaactgctttcttttctaa

SEQ ID NO: 960590 - DNA, 33 bp, Homo sapien
ttttggatcaaggagacctgctttcttttctaa

SEQ ID NO: 960591 - DNA, 33 bp, Homo sapien
atagaaaatggaattagcacatcgggaactaaa

SEQ ID NO: 960592 - DNA, 33 bp, Homo sapien
atagaaaatggaattatcacatcgggaactaaa

SEQ ID NO: 960593 - DNA, 33 bp, Homo sapien
attagagtgtttttagaccatatatttgaggag

SEQ ID NO: 960594 - DNA, 33 bp, Homo sapien
attagagtgtttttagcccatatatttgaggag

SEQ ID NO: 960595 - DNA, 33 bp, Homo sapien
agtgagtattctcctaataaggcattgccagtg

SEQ ID NO: 960596 - DNA, 33 bp, Homo sapien
agtgagtattctcctagtaaggcattgccagtg

SEQ ID NO: 960597 - DNA, 33 bp, Homo sapien
ataccatgtcatggcaccttcctttatttgtga

SEQ ID NO: 960598 - DNA, 33 bp, Homo sapien
ataccatgtcatggcatcttcctttatttgtga

SEQ ID NO: 960599 - DNA, 33 bp, Homo sapien
ctttcaaataggataaacttcaagatagataga

SEQ ID NO: 960600 - DNA, 33 bp, Homo sapien
ctttcaaataggataagcttcaagatagataga

SEQ ID NO: 960601 - DNA, 33 bp, Homo sapien
ttccatgttcatgatgaaaagactccatattgt

SEQ ID NO: 960602 - DNA, 33 bp, Homo sapien
ttccatgttcatgatggaaagactccatattgt

SEQ ID NO: 960603 - DNA, 33 bp, Homo sapien
atttgacactctataaccagagcatcttttaaa

SEQ ID NO: 960604 - DNA, 33 bp, Homo sapien
atttgacactctataatcagagcatcttttaaa

SEQ ID NO: 960605 - DNA, 33 bp, Homo sapien
atgcaaggtcattacacatgggagcacggtgca

SEQ ID NO: 960606 - DNA, 33 bp, Homo sapien
atgcaaggtcattacatatgggagcacggtgca

SEQ ID NO: 960607 - DNA, 33 bp, Homo sapien
tgggatatactatccactagacttcatctgcat

SEQ ID NO: 960608 - DNA, 33 bp, Homo sapien
tgggatatactatccattagacttcatctgcat

SEQ ID NO: 960609 - DNA, 33 bp, Homo sapien
taaatgcaatttcccaataaagacactaggact

SEQ ID NO: 960610 - DNA, 33 bp, Homo sapien
taaatgcaatttcccagtaaagacactaggact

SEQ ID NO: 960611 - DNA, 33 bp, Homo sapien
ttaatgtgtcccttgacggttcatttgctaagg

SEQ ID NO: 960612 - DNA, 33 bp, Homo sapien
ttaatgtgtcccttgatggttcatttgctaagg

SEQ ID NO: 960613 - DNA, 33 bp, Homo sapien
tgactgggtttccacaacctctagctttcagtt

SEQ ID NO: 960614 - DNA, 33 bp, Homo sapien
tgactgggtttccacatcctctagctttcagtt

SEQ ID NO: 960615 - DNA, 33 bp, Homo sapien
gtagctggaaccataggagtatgcaatcacatc

SEQ ID NO: 960616 - DNA, 33 bp, Homo sapien
gtagctggaaccatagtagtatgcaatcacatc

SEQ ID NO: 960617 - DNA, 33 bp, Homo sapien
ctctattatctatcccgctgcctaatttattta

SEQ ID NO: 960618 - DNA, 33 bp, Homo sapien
ctctattatctatccctctgcctaatttattta

SEQ ID NO: 960619 - DNA, 33 bp, Homo sapien
ccttagtttttctaaaataacagtgtcctgttt

SEQ ID NO: 960620 - DNA, 33 bp, Homo sapien
ccttagtttttctaaagtaacagtgtcctgttt

SEQ ID NO: 960621 - DNA, 33 bp, Homo sapien
aaacaaaaacatgaaactgtgataatgtcaaga

SEQ ID NO: 960622 - DNA, 33 bp, Homo sapien
aaacaaaaacatgaaattgtgataatgtcaaga

SEQ ID NO: 960623 - DNA, 33 bp, Homo sapien
agatataaaatctgtgcagaaactaattttatt

SEQ ID NO: 960624 - DNA, 33 bp, Homo sapien
agatataaaatctgtggagaaactaattttatt

SEQ ID NO: 960625 - DNA, 33 bp, Homo sapien
tcatctcgccttgtcaaggaatgtaagaaatcc

SEQ ID NO: 960626 - DNA, 33 bp, Homo sapien
tcatctcgccttgtcatggaatgtaagaaatcc

SEQ ID NO: 960627 - DNA, 33 bp, Homo sapien
catttcctctctgtcaaagccaaacttttaatc

SEQ ID NO: 960628 - DNA, 33 bp, Homo sapien
catttcctctctgtcacagccaaacttttaatc

SEQ ID NO: 960629 - DNA, 33 bp, Homo sapien
ttccttgcagtgatcaggaaagacactagattt

SEQ ID NO: 960630 - DNA, 33 bp, Homo sapien
ttccttgcagtgatcatgaaagacactagattt

SEQ ID NO: 960631 - DNA, 33 bp, Homo sapien
tttgatagagttaaccactttcttcttcttgat

SEQ ID NO: 960632 - DNA, 33 bp, Homo sapien
tttgatagagttaaccgctttcttcttcttgat

SEQ ID NO: 960633 - DNA, 33 bp, Homo sapien
acctactttacaattcaaaattctcataatatt

SEQ ID NO: 960634 - DNA, 33 bp, Homo sapien
acctactttacaattcgaaattctcataatatt

SEQ ID NO: 960635 - DNA, 33 bp, Homo sapien
actgcgctctcctccaataaaatctcctaataa

SEQ ID NO: 960636 - DNA, 33 bp, Homo sapien
actgcgctctcctccagtaaaatctcctaataa

SEQ ID NO: 960637 - DNA, 33 bp, Homo sapien
gctattcttcagaggaaagaacagaaaagagtc

SEQ ID NO: 960638 - DNA, 33 bp, Homo sapien
gctattcttcagaggagagaacagaaaagagtc

SEQ ID NO: 960639 - DNA, 33 bp, Homo sapien
aaggaatgagcaggaaattcagttatctagcca

SEQ ID NO: 960640 - DNA, 33 bp, Homo sapien
aaggaatgagcaggaagttcagttatctagcca

SEQ ID NO: 960641 - DNA, 33 bp, Homo sapien
ttccccaaatctccccaaaattctgatgctcat

SEQ ID NO: 960642 - DNA, 33 bp, Homo sapien
ttccccaaatctccccgaaattctgatgctcat

SEQ ID NO: 960643 - DNA, 33 bp, Homo sapien
tgtagccccaatactacgctttagttataccta

SEQ ID NO: 960644 - DNA, 33 bp, Homo sapien
tgtagccccaatactatgctttagttataccta

SEQ ID NO: 960645 - DNA, 33 bp, Homo sapien
acttaattggtagatcaatgactaggaagacag

SEQ ID NO: 960646 - DNA, 33 bp, Homo sapien
acttaattggtagatccatgactaggaagacag

SEQ ID NO: 960647 - DNA, 33 bp, Homo sapien
aattcctaaccttttcaccttctagaataccct

SEQ ID NO: 960648 - DNA, 33 bp, Homo sapien
aattcctaaccttttcgccttctagaataccct

SEQ ID NO: 960649 - DNA, 33 bp, Homo sapien
tctttctactgcattaaccaaggacatgaattt

SEQ ID NO: 960650 - DNA, 33 bp, Homo sapien
tctttctactgcattagccaaggacatgaattt

SEQ ID NO: 960651 - DNA, 33 bp, Homo sapien
ggggttatgatcaagtcaaggaaagagagaaat

SEQ ID NO: 960652 - DNA, 33 bp, Homo sapien
ggggttatgatcaagttaaggaaagagagaaat

SEQ ID NO: 960653 - DNA, 33 bp, Homo sapien
acctacctgcagtagaatagataagtaaattgt

SEQ ID NO: 960654 - DNA, 33 bp, Homo sapien
acctacctgcagtagattagataagtaaattgt

SEQ ID NO: 960655 - DNA, 33 bp, Homo sapien
ggggatttgaataggtaaattttgaagcagctt

SEQ ID NO: 960656 - DNA, 33 bp, Homo sapien
ggggatttgaataggtcaattttgaagcagctt

SEQ ID NO: 960657 - DNA, 33 bp, Homo sapien
ataatacttaaactcacagcccaaagccaggca

SEQ ID NO: 960658 - DNA, 33 bp, Homo sapien
ataatacttaaactcatagcccaaagccaggca

SEQ ID NO: 960659 - DNA, 33 bp, Homo sapien
cctcagtgccccaagacggccagtgtatcattt

SEQ ID NO: 960660 - DNA, 33 bp, Homo sapien
cctcagtgccccaagatggccagtgtatcattt

SEQ ID NO: 960661 - DNA, 33 bp, Homo sapien
cacagaggtacaccgcaaccatctctcaacttg

SEQ ID NO: 960662 - DNA, 33 bp, Homo sapien
cacagaggtacaccgcgaccatctctcaacttg

SEQ ID NO: 960663 - DNA, 33 bp, Homo sapien
ctctcaacttgcataaaatgacgatcaaaatgc

SEQ ID NO: 960664 - DNA, 33 bp, Homo sapien
ctctcaacttgcataacatgacgatcaaaatgc

SEQ ID NO: 960665 - DNA, 33 bp, Homo sapien
tgtggataatgacagaatcagaattgggtcact

SEQ ID NO: 960666 - DNA, 33 bp, Homo sapien
tgtggataatgacagagtcagaattgggtcact

SEQ ID NO: 960667 - DNA, 33 bp, Homo sapien
gctttggatgattaaaaacactcatgaagaagg

SEQ ID NO: 960668 - DNA, 33 bp, Homo sapien
gctttggatgattaaagacactcatgaagaagg

SEQ ID NO: 960669 - DNA, 33 bp, Homo sapien
aggtctgggaggttcacgatttagcaggattca

SEQ ID NO: 960670 - DNA, 33 bp, Homo sapien
aggtctgggaggttcatgatttagcaggattca

SEQ ID NO: 960671 - DNA, 33 bp, Homo sapien
tctactttaacacctaagtgctcttgaatcctg

SEQ ID NO: 960672 - DNA, 33 bp, Homo sapien
tctactttaacacctaggtgctcttgaatcctg

SEQ ID NO: 960673 - DNA, 33 bp, Homo sapien
aatggagtctgtcaaagcagatcatgtacacgg

SEQ ID NO: 960674 - DNA, 33 bp, Homo sapien
aatggagtctgtcaaatcagatcatgtacacgg

SEQ ID NO: 960675 - DNA, 33 bp, Homo sapien
agctgaagataattatcaagcagaagacaaaaa

SEQ ID NO: 960676 - DNA, 33 bp, Homo sapien
agctgaagataattattaagcagaagacaaaaa

SEQ ID NO: 960677 - DNA, 33 bp, Homo sapien
ttaacatagatttggacgcccctttgggtttga

SEQ ID NO: 960678 - DNA, 33 bp, Homo sapien
ttaacatagatttggatgcccctttgggtttga

SEQ ID NO: 960679 - DNA, 33 bp, Homo sapien
agatccaaaattgcaggatgcagaggctggaga

SEQ ID NO: 960680 - DNA, 33 bp, Homo sapien
agatccaaaattgcagtatgcagaggctggaga

SEQ ID NO: 960681 - DNA, 33 bp, Homo sapien
gaagcaagaaggcatgaaaaagaaaagttaagg

SEQ ID NO: 960682 - DNA, 33 bp, Homo sapien
gaagcaagaaggcatgcaaaagaaaagttaagg

SEQ ID NO: 960683 - DNA, 33 bp, Homo sapien
ttacaccatgttttgaagcaaagataactgaca

SEQ ID NO: 960684 - DNA, 33 bp, Homo sapien
ttacaccatgttttgaggcaaagataactgaca

SEQ ID NO: 960685 - DNA, 33 bp, Homo sapien
cagagattccagaggccctagttattattaaga

SEQ ID NO: 960686 - DNA, 33 bp, Homo sapien
cagagattccagaggctctagttattattaaga

SEQ ID NO: 960687 - DNA, 33 bp, Homo sapien
ggcatgaatgggtagaaggatgggactattctt

SEQ ID NO: 960688 - DNA, 33 bp, Homo sapien
ggcatgaatgggtagagggatgggactattctt

SEQ ID NO: 960689 - DNA, 33 bp, Homo sapien
ccgtgagctgcttccaaccaattaaggagtgtg

SEQ ID NO: 960690 - DNA, 33 bp, Homo sapien
ccgtgagctgcttccagccaattaaggagtgtg

SEQ ID NO: 960691 - DNA, 33 bp, Homo sapien
tgaaggtagattgttgcaaatttcatcaggtgg

SEQ ID NO: 960692 - DNA, 33 bp, Homo sapien
tgaaggtagattgttgtaaatttcatcaggtgg

SEQ ID NO: 960693 - DNA, 33 bp, Homo sapien
tcttggacccattagacagctgagtttgatgga

SEQ ID NO: 960694 - DNA, 33 bp, Homo sapien
tcttggacccattagagagctgagtttgatgga

SEQ ID NO: 960695 - DNA, 33 bp, Homo sapien
tcgtcaatgtgggagaatatcgggggttaagac

SEQ ID NO: 960696 - DNA, 33 bp, Homo sapien
tcgtcaatgtgggagagtatcgggggttaagac

SEQ ID NO: 960697 - DNA, 33 bp, Homo sapien
cataattacatcaacaaaatgagtattacaata

SEQ ID NO: 960698 - DNA, 33 bp, Homo sapien
cataattacatcaacataatgagtattacaata

SEQ ID NO: 960699 - DNA, 33 bp, Homo sapien
ctttatagcccctgtaacccacacagtagttta

SEQ ID NO: 960700 - DNA, 33 bp, Homo sapien
ctttatagcccctgtatcccacacagtagttta

SEQ ID NO: 960701 - DNA, 33 bp, Homo sapien
tgtagcatttaagacaaaggtttcctaaagatg

SEQ ID NO: 960702 - DNA, 33 bp, Homo sapien
tgtagcatttaagacagaggtttcctaaagatg

SEQ ID NO: 960703 - DNA, 33 bp, Homo sapien
attgcttactatgtacagaacaccattataaat

SEQ ID NO: 960704 - DNA, 33 bp, Homo sapien
attgcttactatgtacggaacaccattataaat

SEQ ID NO: 960705 - DNA, 33 bp, Homo sapien
aaaccatctctgagaaaaacctgatggcagatt

SEQ ID NO: 960706 - DNA, 33 bp, Homo sapien
aaaccatctctgagaacaacctgatggcagatt

SEQ ID NO: 960707 - DNA, 33 bp, Homo sapien
gtacattatctctcctcaaagttctgatatgtg

SEQ ID NO: 960708 - DNA, 33 bp, Homo sapien
gtacattatctctcctgaaagttctgatatgtg

SEQ ID NO: 960709 - DNA, 33 bp, Homo sapien
tgataagcattcaccaatagcatttttctctat

SEQ ID NO: 960710 - DNA, 33 bp, Homo sapien
tgataagcattcaccagtagcatttttctctat

SEQ ID NO: 960711 - DNA, 33 bp, Homo sapien
caggtgacatttggacaaagaggcaaactaaag

SEQ ID NO: 960712 - DNA, 33 bp, Homo sapien
caggtgacatttggacgaagaggcaaactaaag

SEQ ID NO: 960713 - DNA, 33 bp, Homo sapien
gaggcaaactaaagaacgtcaatgagagaatgg

SEQ ID NO: 960714 - DNA, 33 bp, Homo sapien
gaggcaaactaaagaatgtcaatgagagaatgg

SEQ ID NO: 960715 - DNA, 33 bp, Homo sapien
ttactttattctcttaccaaacgcatttgagca

SEQ ID NO: 960716 - DNA, 33 bp, Homo sapien
ttactttattctcttatcaaacgcatttgagca

SEQ ID NO: 960717 - DNA, 33 bp, Homo sapien
agtgcccttaataaaacggagaatacaggagga

SEQ ID NO: 960718 - DNA, 33 bp, Homo sapien
agtgcccttaataaaatggagaatacaggagga

SEQ ID NO: 960719 - DNA, 33 bp, Homo sapien
ttcagcaaacttctcaggcaattagtgcaagat

SEQ ID NO: 960720 - DNA, 33 bp, Homo sapien
ttcagcaaacttctcatgcaattagtgcaagat

SEQ ID NO: 960721 - DNA, 33 bp, Homo sapien
agccattcccatgtctaaagtataggataaaca

SEQ ID NO: 960722 - DNA, 33 bp, Homo sapien
agccattcccatgtctgaagtataggataaaca

SEQ ID NO: 960723 - DNA, 33 bp, Homo sapien
aaagtagtaaaaataacctccttgtttgattta

SEQ ID NO: 960724 - DNA, 33 bp, Homo sapien
aaagtagtaaaaataatctccttgtttgattta

SEQ ID NO: 960725 - DNA, 33 bp, Homo sapien
ctgatatctccaagaactcctatcatccctcat

SEQ ID NO: 960726 - DNA, 33 bp, Homo sapien
ctgatatctccaagaagtcctatcatccctcat

SEQ ID NO: 960727 - DNA, 33 bp, Homo sapien
ccacatccactcacaggagcctaccacttctat

SEQ ID NO: 960728 - DNA, 33 bp, Homo sapien
ccacatccactcacagtagcctaccacttctat

SEQ ID NO: 960729 - DNA, 33 bp, Homo sapien
gcttaaacacaagtgacggtggttgactccttt

SEQ ID NO: 960730 - DNA, 33 bp, Homo sapien
gcttaaacacaagtgatggtggttgactccttt

SEQ ID NO: 960731 - DNA, 33 bp, Homo sapien
aaatgacctgaagcaaactgatcaggaaatgaa

SEQ ID NO: 960732 - DNA, 33 bp, Homo sapien
aaatgacctgaagcaacctgatcaggaaatgaa

SEQ ID NO: 960733 - DNA, 33 bp, Homo sapien
tcctgtttgtcacacagtacttttgaaagtgtc

SEQ ID NO: 960734 - DNA, 33 bp, Homo sapien
tcctgtttgtcacacattacttttgaaagtgtc

SEQ ID NO: 960735 - DNA, 33 bp, Homo sapien
tccagaaagacacaaagatcttagagttttaaa

SEQ ID NO: 960736 - DNA, 33 bp, Homo sapien
tccagaaagacacaaatatcttagagttttaaa

SEQ ID NO: 960737 - DNA, 33 bp, Homo sapien
actccagttgtaaccaaaaccaatttcagctac

SEQ ID NO: 960738 - DNA, 33 bp, Homo sapien
actccagttgtaaccagaaccaatttcagctac

SEQ ID NO: 960739 - DNA, 33 bp, Homo sapien
ctggtcttctgtatgaaaaatttcttaaaagag

SEQ ID NO: 960740 - DNA, 33 bp, Homo sapien
ctggtcttctgtatgacaaatttcttaaaagag

SEQ ID NO: 960741 - DNA, 33 bp, Homo sapien
agagaaaaagtgctgcagagagaaaggaaggaa

SEQ ID NO: 960742 - DNA, 33 bp, Homo sapien
agagaaaaagtgctgcggagagaaaggaaggaa

SEQ ID NO: 960743 - DNA, 33 bp, Homo sapien
ctgataactgctgctaaaagaagtcagggccta

SEQ ID NO: 960744 - DNA, 33 bp, Homo sapien
ctgataactgctgctacaagaagtcagggccta

SEQ ID NO: 960745 - DNA, 33 bp, Homo sapien
gccagctttttgtaaccctgaaatattgcatca

SEQ ID NO: 960746 - DNA, 33 bp, Homo sapien
gccagctttttgtaactctgaaatattgcatca

SEQ ID NO: 960747 - DNA, 33 bp, Homo sapien
ctggccatatggttaaacttagttctgaacatg

SEQ ID NO: 960748 - DNA, 33 bp, Homo sapien
ctggccatatggttaaccttagttctgaacatg

SEQ ID NO: 960749 - DNA, 33 bp, Homo sapien
aaggaaagattggtagccaatgtgtttttctga

SEQ ID NO: 960750 - DNA, 33 bp, Homo sapien
aaggaaagattggtagtcaatgtgtttttctga

SEQ ID NO: 960751 - DNA, 33 bp, Homo sapien
tttagcagagtctggaataagtgtaactggatt

SEQ ID NO: 960752 - DNA, 33 bp, Homo sapien
tttagcagagtctggattaagtgtaactggatt

SEQ ID NO: 960753 - DNA, 33 bp, Homo sapien
tgcagtatttctctcaaaagttcacaagcattg

SEQ ID NO: 960754 - DNA, 33 bp, Homo sapien
tgcagtatttctctcagaagttcacaagcattg

SEQ ID NO: 960755 - DNA, 33 bp, Homo sapien
agctatcatctggcaaatgtcatcccaaggcag

SEQ ID NO: 960756 - DNA, 33 bp, Homo sapien
agctatcatctggcaagtgtcatcccaaggcag

SEQ ID NO: 960757 - DNA, 33 bp, Homo sapien
atctgcacttggtaaaacatatcaatcttttat

SEQ ID NO: 960758 - DNA, 33 bp, Homo sapien
atctgcacttggtaaagcatatcaatcttttat

SEQ ID NO: 960759 - DNA, 33 bp, Homo sapien
aacacaactgattatccgagagctctgatagag

SEQ ID NO: 960760 - DNA, 33 bp, Homo sapien
aacacaactgattatctgagagctctgatagag

SEQ ID NO: 960761 - DNA, 33 bp, Homo sapien
gctggcttcaagacaacgtcaccaacccaattc

SEQ ID NO: 960762 - DNA, 33 bp, Homo sapien
gctggcttcaagacaaggtcaccaacccaattc

SEQ ID NO: 960763 - DNA, 33 bp, Homo sapien
attcaatttaggtaacaacaaaacatctgtaaa

SEQ ID NO: 960764 - DNA, 33 bp, Homo sapien
attcaatttaggtaacgacaaaacatctgtaaa

SEQ ID NO: 960765 - DNA, 33 bp, Homo sapien
gaaaggacagtttctacgtttatacacaatcaa

SEQ ID NO: 960766 - DNA, 33 bp, Homo sapien
gaaaggacagtttctatgtttatacacaatcaa

SEQ ID NO: 960767 - DNA, 33 bp, Homo sapien
gagacgagctttatgagaaaccattttctgact

SEQ ID NO: 960768 - DNA, 33 bp, Homo sapien
gagacgagctttatgataaaccattttctgact

SEQ ID NO: 960769 - DNA, 33 bp, Homo sapien
atatatatataccataagggcacatttcaatgt

SEQ ID NO: 960770 - DNA, 33 bp, Homo sapien
atatatatataccataggggcacatttcaatgt

SEQ ID NO: 960771 - DNA, 33 bp, Homo sapien
ggggatcttttgccaacggaagagccaacagca

SEQ ID NO: 960772 - DNA, 33 bp, Homo sapien
ggggatcttttgccaatggaagagccaacagca

SEQ ID NO: 960773 - DNA, 33 bp, Homo sapien
acccccttcctgacaactccttatgccctattg

SEQ ID NO: 960774 - DNA, 33 bp, Homo sapien
acccccttcctgacaattccttatgccctattg

SEQ ID NO: 960775 - DNA, 33 bp, Homo sapien
agtttcacgggattcaaaattacacaaagatat

SEQ ID NO: 960776 - DNA, 33 bp, Homo sapien
agtttcacgggattcataattacacaaagatat

SEQ ID NO: 960777 - DNA, 33 bp, Homo sapien
tcttggatttatttcactgatgctttatccccg

SEQ ID NO: 960778 - DNA, 33 bp, Homo sapien
tcttggatttatttcattgatgctttatccccg

SEQ ID NO: 960779 - DNA, 33 bp, Homo sapien
taaagaagagaagaaagtaccaggacttaaggc

SEQ ID NO: 960780 - DNA, 33 bp, Homo sapien
taaagaagagaagaaattaccaggacttaaggc

SEQ ID NO: 960781 - DNA, 33 bp, Homo sapien
tcactgcctgtgaaacaaagcccttattctttg

SEQ ID NO: 960782 - DNA, 33 bp, Homo sapien
tcactgcctgtgaaacgaagcccttattctttg

SEQ ID NO: 960783 - DNA, 33 bp, Homo sapien
tacacaacttctgctacgcaacagaatttttat

SEQ ID NO: 960784 - DNA, 33 bp, Homo sapien
tacacaacttctgctatgcaacagaatttttat

SEQ ID NO: 960785 - DNA, 33 bp, Homo sapien
agtaatgagtcactacaaagacattattgacct

SEQ ID NO: 960786 - DNA, 33 bp, Homo sapien
agtaatgagtcactacgaagacattattgacct

SEQ ID NO: 960787 - DNA, 33 bp, Homo sapien
gtgccttccagaaaaactgttttccataaaaac

SEQ ID NO: 960788 - DNA, 33 bp, Homo sapien
gtgccttccagaaaaattgttttccataaaaac

SEQ ID NO: 960789 - DNA, 33 bp, Homo sapien
ctgttttgcaaatatacgacttttggtagcact

SEQ ID NO: 960790 - DNA, 33 bp, Homo sapien
ctgttttgcaaatatatgacttttggtagcact

SEQ ID NO: 960791 - DNA, 33 bp, Homo sapien
ataaaaggcaatattagcctggaatatgataat

SEQ ID NO: 960792 - DNA, 33 bp, Homo sapien
ataaaaggcaatattatcctggaatatgataat

SEQ ID NO: 960793 - DNA, 33 bp, Homo sapien
aaagttccctttcagaaacagagtatctcttat

SEQ ID NO: 960794 - DNA, 33 bp, Homo sapien
aaagttccctttcagagacagagtatctcttat

SEQ ID NO: 960795 - DNA, 33 bp, Homo sapien
cctactgtcattataaactgtgaccaaaaagca

SEQ ID NO: 960796 - DNA, 33 bp, Homo sapien
cctactgtcattataacctgtgaccaaaaagca

SEQ ID NO: 960797 - DNA, 33 bp, Homo sapien
acttaacagttcaaaagaccttaaaatctgcac

SEQ ID NO: 960798 - DNA, 33 bp, Homo sapien
acttaacagttcaaaataccttaaaatctgcac

SEQ ID NO: 960799 - DNA, 33 bp, Homo sapien
gaaagtcctgcaggaaccaccactaggggaggc

SEQ ID NO: 960800 - DNA, 33 bp, Homo sapien
gaaagtcctgcaggaatcaccactaggggaggc

SEQ ID NO: 960801 - DNA, 33 bp, Homo sapien
aaaccctcctctgtgccactggccagatgccag

SEQ ID NO: 960802 - DNA, 33 bp, Homo sapien
aaaccctcctctgtgctactggccagatgccag

SEQ ID NO: 960803 - DNA, 33 bp, Homo sapien
acatcaagggaacctacagtggaattaaatatc

SEQ ID NO: 960804 - DNA, 33 bp, Homo sapien
acatcaagggaacctagagtggaattaaatatc

SEQ ID NO: 960805 - DNA, 33 bp, Homo sapien
tgtgatattggctccacaaaaataccaaaaaat

SEQ ID NO: 960806 - DNA, 33 bp, Homo sapien
tgtgatattggctccataaaaataccaaaaaat

SEQ ID NO: 960807 - DNA, 33 bp, Homo sapien
ctcaaagcattcactagattgaaacctagctgg

SEQ ID NO: 960808 - DNA, 33 bp, Homo sapien
ctcaaagcattcactatattgaaacctagctgg

SEQ ID NO: 960809 - DNA, 33 bp, Homo sapien
tttgtggggaggaaataaacagaagaataaata

SEQ ID NO: 960810 - DNA, 33 bp, Homo sapien
tttgtggggaggaaattaacagaagaataaata

SEQ ID NO: 960811 - DNA, 33 bp, Homo sapien
tagaaactatgattaaactacaaccattgttgt

SEQ ID NO: 960812 - DNA, 33 bp, Homo sapien
tagaaactatgattaagctacaaccattgttgt

SEQ ID NO: 960813 - DNA, 33 bp, Homo sapien
agggacaatatatccaaaggccctaattaagag

SEQ ID NO: 960814 - DNA, 33 bp, Homo sapien
agggacaatatatccacaggccctaattaagag

SEQ ID NO: 960815 - DNA, 33 bp, Homo sapien
tgcactaaacagcaaaggaatagtttatggtaa

SEQ ID NO: 960816 - DNA, 33 bp, Homo sapien
tgcactaaacagcaaatgaatagtttatggtaa

SEQ ID NO: 960817 - DNA, 33 bp, Homo sapien
aaaaggggctgagcaacgtgagataaatacctc

SEQ ID NO: 960818 - DNA, 33 bp, Homo sapien
aaaaggggctgagcaatgtgagataaatacctc

SEQ ID NO: 960819 - DNA, 33 bp, Homo sapien
gagcctccctagctggaatcatctgcatgtgtt

SEQ ID NO: 960820 - DNA, 33 bp, Homo sapien
gagcctccctagctgggatcatctgcatgtgtt

SEQ ID NO: 960821 - DNA, 33 bp, Homo sapien
tgccagaagtcaccaacctgattacagtcagac

SEQ ID NO: 960822 - DNA, 33 bp, Homo sapien
tgccagaagtcaccaagctgattacagtcagac

SEQ ID NO: 960823 - DNA, 33 bp, Homo sapien
acttaatgcttatgtgcatcatccttgttgtat

SEQ ID NO: 960824 - DNA, 33 bp, Homo sapien
acttaatgcttatgtgtatcatccttgttgtat

SEQ ID NO: 960825 - DNA, 33 bp, Homo sapien
tggatgtataactgaaaaatatttgagttggtt

SEQ ID NO: 960826 - DNA, 33 bp, Homo sapien
tggatgtataactgaagaatatttgagttggtt

SEQ ID NO: 960827 - DNA, 33 bp, Homo sapien
ttttgctttttctccccatatactgtcagctag

SEQ ID NO: 960828 - DNA, 33 bp, Homo sapien
ttttgctttttctccctatatactgtcagctag

SEQ ID NO: 960829 - DNA, 33 bp, Homo sapien
tcagttgtcaaaatgaagttctagcagtaccat

SEQ ID NO: 960830 - DNA, 33 bp, Homo sapien
tcagttgtcaaaatgatgttctagcagtaccat

SEQ ID NO: 960831 - DNA, 33 bp, Homo sapien
attagctggtcacaaacattcaaaagattcccc

SEQ ID NO: 960832 - DNA, 33 bp, Homo sapien
attagctggtcacaaagattcaaaagattcccc

SEQ ID NO: 960833 - DNA, 33 bp, Homo sapien
atggttgtgttgagcaagagtcctccttgtgag

SEQ ID NO: 960834 - DNA, 33 bp, Homo sapien
atggttgtgttgagcaggagtcctccttgtgag

SEQ ID NO: 960835 - DNA, 33 bp, Homo sapien
cctactgtactgacaaagcagatccaggctgtc

SEQ ID NO: 960836 - DNA, 33 bp, Homo sapien
cctactgtactgacaaggcagatccaggctgtc

SEQ ID NO: 960837 - DNA, 33 bp, Homo sapien
ccttccactgggtgaccaccctagagtccaagc

SEQ ID NO: 960838 - DNA, 33 bp, Homo sapien
ccttccactgggtgactaccctagagtccaagc

SEQ ID NO: 960839 - DNA, 33 bp, Homo sapien
gccactcacatttgcacagcgcttccatatgta

SEQ ID NO: 960840 - DNA, 33 bp, Homo sapien
gccactcacatttgcatagcgcttccatatgta

SEQ ID NO: 960841 - DNA, 33 bp, Homo sapien
caccttgagggaagacggaaactaatatccatt

SEQ ID NO: 960842 - DNA, 33 bp, Homo sapien
caccttgagggaagactgaaactaatatccatt

SEQ ID NO: 960843 - DNA, 33 bp, Homo sapien
tgcagtaatcagaggaaagcatcatagcaggac

SEQ ID NO: 960844 - DNA, 33 bp, Homo sapien
tgcagtaatcagaggacagcatcatagcaggac

SEQ ID NO: 960845 - DNA, 33 bp, Homo sapien
gttgtatccctccttacatccttttcatgtgtc

SEQ ID NO: 960846 - DNA, 33 bp, Homo sapien
gttgtatccctccttatatccttttcatgtgtc

SEQ ID NO: 960847 - DNA, 33 bp, Homo sapien
ccttcaaaatgagcaacggtggatggagttctc

SEQ ID NO: 960848 - DNA, 33 bp, Homo sapien
ccttcaaaatgagcaatggtggatggagttctc

SEQ ID NO: 960849 - DNA, 33 bp, Homo sapien
tatgtatctcaattaccagtttgctactgaaat

SEQ ID NO: 960850 - DNA, 33 bp, Homo sapien
tatgtatctcaattactagtttgctactgaaat

SEQ ID NO: 960851 - DNA, 33 bp, Homo sapien
gggaatttatgttctaaaaaggtgatatgctca

SEQ ID NO: 960852 - DNA, 33 bp, Homo sapien
gggaatttatgttctagaaaggtgatatgctca

SEQ ID NO: 960853 - DNA, 33 bp, Homo sapien
catctcctcacatttgaatgcagcacaaatttc

SEQ ID NO: 960854 - DNA, 33 bp, Homo sapien
catctcctcacatttggatgcagcacaaatttc

SEQ ID NO: 960855 - DNA, 33 bp, Homo sapien
gggatccatcctctaaacacataataaggtgcc

SEQ ID NO: 960856 - DNA, 33 bp, Homo sapien
gggatccatcctctaagcacataataaggtgcc

SEQ ID NO: 960857 - DNA, 33 bp, Homo sapien
acttttcatatgggcaataatgatacctaatcc

SEQ ID NO: 960858 - DNA, 33 bp, Homo sapien
acttttcatatgggcagtaatgatacctaatcc

SEQ ID NO: 960859 - DNA, 33 bp, Homo sapien
tgtattaacaattttgaagcggggcactatggc

SEQ ID NO: 960860 - DNA, 33 bp, Homo sapien
tgtattaacaattttggagcggggcactatggc

SEQ ID NO: 960861 - DNA, 33 bp, Homo sapien
agttttctaagagaacaatttacagactagtat

SEQ ID NO: 960862 - DNA, 33 bp, Homo sapien
agttttctaagagaaccatttacagactagtat

SEQ ID NO: 960863 - DNA, 33 bp, Homo sapien
ggactgggtagagatacgggtagatttatgttg

SEQ ID NO: 960864 - DNA, 33 bp, Homo sapien
ggactgggtagagatatgggtagatttatgttg

SEQ ID NO: 960865 - DNA, 33 bp, Homo sapien
cttttcttgcttgaaaatggaacccaaccaatt

SEQ ID NO: 960866 - DNA, 33 bp, Homo sapien
cttttcttgcttgaaagtggaacccaaccaatt

SEQ ID NO: 960867 - DNA, 33 bp, Homo sapien
taggaggaaagttggaaaatttactatcagttt

SEQ ID NO: 960868 - DNA, 33 bp, Homo sapien
taggaggaaagttggagaatttactatcagttt

SEQ ID NO: 960869 - DNA, 33 bp, Homo sapien
cttgctttctccagaaataatgaagaacagcta

SEQ ID NO: 960870 - DNA, 33 bp, Homo sapien
cttgctttctccagaagtaatgaagaacagcta

SEQ ID NO: 960871 - DNA, 33 bp, Homo sapien
gggccctgtatttaccactagcttcagtgccta

SEQ ID NO: 960872 - DNA, 33 bp, Homo sapien
gggccctgtatttaccgctagcttcagtgccta

SEQ ID NO: 960873 - DNA, 33 bp, Homo sapien
attggagaataatgaacgtgcttttgtagagtc

SEQ ID NO: 960874 - DNA, 33 bp, Homo sapien
attggagaataatgaatgtgcttttgtagagtc

SEQ ID NO: 960875 - DNA, 33 bp, Homo sapien
gtaaatagagtaatgcgccttagaattagctct

SEQ ID NO: 960876 - DNA, 33 bp, Homo sapien
gtaaatagagtaatgctccttagaattagctct

SEQ ID NO: 960877 - DNA, 33 bp, Homo sapien
cttattgtaagtgaagaagtgactcacagataa

SEQ ID NO: 960878 - DNA, 33 bp, Homo sapien
cttattgtaagtgaaggagtgactcacagataa

SEQ ID NO: 960879 - DNA, 33 bp, Homo sapien
agagtggaatggacaaacctgagggtaactgtc

SEQ ID NO: 960880 - DNA, 33 bp, Homo sapien
agagtggaatggacaagcctgagggtaactgtc

SEQ ID NO: 960881 - DNA, 33 bp, Homo sapien
taacaacgcatgaatacgtctatgtatctggca

SEQ ID NO: 960882 - DNA, 33 bp, Homo sapien
taacaacgcatgaatatgtctatgtatctggca

SEQ ID NO: 960883 - DNA, 33 bp, Homo sapien
acagtttatgtcaaaaatacaataaagtcagaa

SEQ ID NO: 960884 - DNA, 33 bp, Homo sapien
acagtttatgtcaaaagtacaataaagtcagaa

SEQ ID NO: 960885 - DNA, 33 bp, Homo sapien
cagtctttcccagagacataaccacaggagaac

SEQ ID NO: 960886 - DNA, 33 bp, Homo sapien
cagtctttcccagagatataaccacaggagaac

SEQ ID NO: 960887 - DNA, 33 bp, Homo sapien
tgtaggattgcagtataaattcaaaactccaaa

SEQ ID NO: 960888 - DNA, 33 bp, Homo sapien
tgtaggattgcagtatgaattcaaaactccaaa

SEQ ID NO: 960889 - DNA, 33 bp, Homo sapien
agttcaaataagaaaaaagattgtgtgttttca

SEQ ID NO: 960890 - DNA, 33 bp, Homo sapien
agttcaaataagaaaagagattgtgtgttttca

SEQ ID NO: 960891 - DNA, 33 bp, Homo sapien
gttaatttgctttcctgtaccagacacctctga

SEQ ID NO: 960892 - DNA, 33 bp, Homo sapien
gttaatttgctttcctttaccagacacctctga

SEQ ID NO: 960893 - DNA, 33 bp, Homo sapien
gtgctgaagagatgaaagtgtcttcttgtagca

SEQ ID NO: 960894 - DNA, 33 bp, Homo sapien
gtgctgaagagatgaatgtgtcttcttgtagca

SEQ ID NO: 960895 - DNA, 33 bp, Homo sapien
gtcgtcctgtaccaagaatggaaggggcacctc

SEQ ID NO: 960896 - DNA, 33 bp, Homo sapien
gtcgtcctgtaccaaggatggaaggggcacctc

SEQ ID NO: 960897 - DNA, 33 bp, Homo sapien
catcccaaagaaagaaaggttgatagtccttgg

SEQ ID NO: 960898 - DNA, 33 bp, Homo sapien
catcccaaagaaagaagggttgatagtccttgg

SEQ ID NO: 960899 - DNA, 33 bp, Homo sapien
acgtagggtcttgacaggatcaccttagccaat

SEQ ID NO: 960900 - DNA, 33 bp, Homo sapien
acgtagggtcttgacatgatcaccttagccaat

SEQ ID NO: 960901 - DNA, 33 bp, Homo sapien
ctttagatctgcgaaaataaaacatggatacag

SEQ ID NO: 960902 - DNA, 33 bp, Homo sapien
ctttagatctgcgaaagtaaaacatggatacag

SEQ ID NO: 960903 - DNA, 33 bp, Homo sapien
caggaaaagtgaatgaacaatggcggtgaaata

SEQ ID NO: 960904 - DNA, 33 bp, Homo sapien
caggaaaagtgaatgatcaatggcggtgaaata

SEQ ID NO: 960905 - DNA, 33 bp, Homo sapien
aaacaaaaaacaggcccagtataattctttcct

SEQ ID NO: 960906 - DNA, 33 bp, Homo sapien
aaacaaaaaacaggcctagtataattctttcct

SEQ ID NO: 960907 - DNA, 33 bp, Homo sapien
ttttgacaccaattaacctgtattcagccagat

SEQ ID NO: 960908 - DNA, 33 bp, Homo sapien
ttttgacaccaattaatctgtattcagccagat

SEQ ID NO: 960909 - DNA, 33 bp, Homo sapien
aaaatatgaagcaaagcctcctggttttttctt

SEQ ID NO: 960910 - DNA, 33 bp, Homo sapien
aaaatatgaagcaaaggctcctggttttttctt

SEQ ID NO: 960911 - DNA, 33 bp, Homo sapien
taacttataataggtcacatgaattttttacaa

SEQ ID NO: 960912 - DNA, 33 bp, Homo sapien
taacttataataggtcgcatgaattttttacaa

SEQ ID NO: 960913 - DNA, 33 bp, Homo sapien
caatgttatttccagacctttctctgtgtcctc

SEQ ID NO: 960914 - DNA, 33 bp, Homo sapien
caatgttatttccagatctttctctgtgtcctc

SEQ ID NO: 960915 - DNA, 33 bp, Homo sapien
ggagctgattgttaaacctaaagcccaaaggag

SEQ ID NO: 960916 - DNA, 33 bp, Homo sapien
ggagctgattgttaaagctaaagcccaaaggag

SEQ ID NO: 960917 - DNA, 33 bp, Homo sapien
agcaaaaatataatcactctgaggttgtgccat

SEQ ID NO: 960918 - DNA, 33 bp, Homo sapien
agcaaaaatataatcattctgaggttgtgccat

SEQ ID NO: 960919 - DNA, 33 bp, Homo sapien
aggtatctcattctcactgaaaaccatcaggat

SEQ ID NO: 960920 - DNA, 33 bp, Homo sapien
aggtatctcattctcattgaaaaccatcaggat

SEQ ID NO: 960921 - DNA, 33 bp, Homo sapien
ccgaagtggctcttgccaaggtcattaaggatt

SEQ ID NO: 960922 - DNA, 33 bp, Homo sapien
ccgaagtggctcttgctaaggtcattaaggatt

SEQ ID NO: 960923 - DNA, 33 bp, Homo sapien
cccattataaatgtaacctgttgctttgttaac

SEQ ID NO: 960924 - DNA, 33 bp, Homo sapien
cccattataaatgtaatctgttgctttgttaac

SEQ ID NO: 960925 - DNA, 33 bp, Homo sapien
atgacaagtttagtcacagctttattcctaatt

SEQ ID NO: 960926 - DNA, 33 bp, Homo sapien
atgacaagtttagtcagagctttattcctaatt

SEQ ID NO: 960927 - DNA, 33 bp, Homo sapien
tgaagatgggattcccagaagcacgaggaagcc

SEQ ID NO: 960928 - DNA, 33 bp, Homo sapien
tgaagatgggattcccggaagcacgaggaagcc

SEQ ID NO: 960929 - DNA, 33 bp, Homo sapien
ttcttaagaagcttgccgacaagtagagcagaa

SEQ ID NO: 960930 - DNA, 33 bp, Homo sapien
ttcttaagaagcttgctgacaagtagagcagaa

SEQ ID NO: 960931 - DNA, 33 bp, Homo sapien
tcagaaattataggaaagtgatgaccgtggcaa

SEQ ID NO: 960932 - DNA, 33 bp, Homo sapien
tcagaaattataggaatgtgatgaccgtggcaa

SEQ ID NO: 960933 - DNA, 33 bp, Homo sapien
atacgtcattacagtcaatgtttaccattcttt

SEQ ID NO: 960934 - DNA, 33 bp, Homo sapien
atacgtcattacagtccatgtttaccattcttt

SEQ ID NO: 960935 - DNA, 33 bp, Homo sapien
ttatgcaaacagaataaaagatcatagagtggg

SEQ ID NO: 960936 - DNA, 33 bp, Homo sapien
ttatgcaaacagaatagaagatcatagagtggg

SEQ ID NO: 960937 - DNA, 33 bp, Homo sapien
tgctttgtgaaacaacagtaccttgacaggaat

SEQ ID NO: 960938 - DNA, 33 bp, Homo sapien
tgctttgtgaaacaacggtaccttgacaggaat

SEQ ID NO: 960939 - DNA, 33 bp, Homo sapien
cacggaatgtagacaactgaaggtttaaatcca

SEQ ID NO: 960940 - DNA, 33 bp, Homo sapien
cacggaatgtagacaattgaaggtttaaatcca

SEQ ID NO: 960941 - DNA, 33 bp, Homo sapien
ccataacacttgaaaacagatgagctgtattag

SEQ ID NO: 960942 - DNA, 33 bp, Homo sapien
ccataacacttgaaaatagatgagctgtattag

SEQ ID NO: 960943 - DNA, 33 bp, Homo sapien
taggatcttccaaaccacatctttatgctgtct

SEQ ID NO: 960944 - DNA, 33 bp, Homo sapien
taggatcttccaaaccgcatctttatgctgtct

SEQ ID NO: 960945 - DNA, 33 bp, Homo sapien
agactaaaattggaaacgttgtaagtcatctta

SEQ ID NO: 960946 - DNA, 33 bp, Homo sapien
agactaaaattggaaatgttgtaagtcatctta

SEQ ID NO: 960947 - DNA, 33 bp, Homo sapien
tttccagaacacccaccgtaatttgcagagcga

SEQ ID NO: 960948 - DNA, 33 bp, Homo sapien
tttccagaacacccactgtaatttgcagagcga

SEQ ID NO: 960949 - DNA, 33 bp, Homo sapien
tcttcgcacacctataaaggcaggtgttaacag

SEQ ID NO: 960950 - DNA, 33 bp, Homo sapien
tcttcgcacacctatagaggcaggtgttaacag

SEQ ID NO: 960951 - DNA, 33 bp, Homo sapien
tgatcttttggaaaacacacactttcatgacac

SEQ ID NO: 960952 - DNA, 33 bp, Homo sapien
tgatcttttggaaaacgcacactttcatgacac

SEQ ID NO: 960953 - DNA, 33 bp, Homo sapien
cctgaataatcccaatcagctgctttctgcttt

SEQ ID NO: 960954 - DNA, 33 bp, Homo sapien
cctgaataatcccaattagctgctttctgcttt

SEQ ID NO: 960955 - DNA, 33 bp, Homo sapien
agcaatatcattaaacagacatgtgttgtcagc

SEQ ID NO: 960956 - DNA, 33 bp, Homo sapien
agcaatatcattaaacggacatgtgttgtcagc

SEQ ID NO: 960957 - DNA, 33 bp, Homo sapien
agtttatacaaaatgaagatgacaacctgggcc

SEQ ID NO: 960958 - DNA, 33 bp, Homo sapien
agtttatacaaaatgaggatgacaacctgggcc

SEQ ID NO: 960959 - DNA, 33 bp, Homo sapien
cccaactcagagacctaacttgaagatcaaagt

SEQ ID NO: 960960 - DNA, 33 bp, Homo sapien
cccaactcagagacctgacttgaagatcaaagt

SEQ ID NO: 960961 - DNA, 33 bp, Homo sapien
ctgtcctttgtcttagaaacttgcctgttatgc

SEQ ID NO: 960962 - DNA, 33 bp, Homo sapien
ctgtcctttgtcttagcaacttgcctgttatgc

SEQ ID NO: 960963 - DNA, 33 bp, Homo sapien
ttctggatcccttttgaaactgagagcagcact

SEQ ID NO: 960964 - DNA, 33 bp, Homo sapien
ttctggatcccttttgcaactgagagcagcact

SEQ ID NO: 960965 - DNA, 33 bp, Homo sapien
ggatatggggacaggaaagattaaagcaggttc

SEQ ID NO: 960966 - DNA, 33 bp, Homo sapien
ggatatggggacaggagagattaaagcaggttc

SEQ ID NO: 960967 - DNA, 33 bp, Homo sapien
attacatgtagcaaagacttctatctaatatag

SEQ ID NO: 960968 - DNA, 33 bp, Homo sapien
attacatgtagcaaagccttctatctaatatag

SEQ ID NO: 960969 - DNA, 33 bp, Homo sapien
ctctctatttgttgtcacagggctaagaaatgc

SEQ ID NO: 960970 - DNA, 33 bp, Homo sapien
ctctctatttgttgtcgcagggctaagaaatgc

SEQ ID NO: 960971 - DNA, 33 bp, Homo sapien
aaacgttggacaaatcaaaggatttctttgtac

SEQ ID NO: 960972 - DNA, 33 bp, Homo sapien
aaacgttggacaaatcgaaggatttctttgtac

SEQ ID NO: 960973 - DNA, 33 bp, Homo sapien
ttttcccacttctccaataagtcagccagaagt

SEQ ID NO: 960974 - DNA, 33 bp, Homo sapien
ttttcccacttctccagtaagtcagccagaagt

SEQ ID NO: 960975 - DNA, 33 bp, Homo sapien
acataacagaattgcacagaactaccagcaaat

SEQ ID NO: 960976 - DNA, 33 bp, Homo sapien
acataacagaattgcatagaactaccagcaaat

SEQ ID NO: 960977 - DNA, 33 bp, Homo sapien
acattgaattggcccaaaaggttttaccaacaa

SEQ ID NO: 960978 - DNA, 33 bp, Homo sapien
acattgaattggcccagaaggttttaccaacaa

SEQ ID NO: 960979 - DNA, 33 bp, Homo sapien
gatggctgcaagatcactccaaataaggccatc

SEQ ID NO: 960980 - DNA, 33 bp, Homo sapien
gatggctgcaagatcattccaaataaggccatc

SEQ ID NO: 960981 - DNA, 33 bp, Homo sapien
gtccctaccttgtgtccagcccaatgtgtcaga

SEQ ID NO: 960982 - DNA, 33 bp, Homo sapien
gtccctaccttgtgtctagcccaatgtgtcaga

SEQ ID NO: 960983 - DNA, 33 bp, Homo sapien
aaaagaatgagaaatacgtaagcaaaaatgaga

SEQ ID NO: 960984 - DNA, 33 bp, Homo sapien
aaaagaatgagaaatatgtaagcaaaaatgaga

SEQ ID NO: 960985 - DNA, 33 bp, Homo sapien
tgtgaagatctttgccaattgaaagcctttctc

SEQ ID NO: 960986 - DNA, 33 bp, Homo sapien
tgtgaagatctttgcccattgaaagcctttctc

SEQ ID NO: 960987 - DNA, 33 bp, Homo sapien
tatggagtcagctaaacataccaaggcttaaat

SEQ ID NO: 960988 - DNA, 33 bp, Homo sapien
tatggagtcagctaaatataccaaggcttaaat

SEQ ID NO: 960989 - DNA, 33 bp, Homo sapien
aatagtctgagatgaacagataaagatgttcca

SEQ ID NO: 960990 - DNA, 33 bp, Homo sapien
aatagtctgagatgaatagataaagatgttcca

SEQ ID NO: 960991 - DNA, 33 bp, Homo sapien
ttcatcaatgtttagaacaactcagaaagtttc

SEQ ID NO: 960992 - DNA, 33 bp, Homo sapien
ttcatcaatgtttagagcaactcagaaagtttc

SEQ ID NO: 960993 - DNA, 33 bp, Homo sapien
ttgcatttgcatttgagataataaaccataaca

SEQ ID NO: 960994 - DNA, 33 bp, Homo sapien
ttgcatttgcatttgatataataaaccataaca

SEQ ID NO: 960995 - DNA, 33 bp, Homo sapien
agaaacagttgataaaataagtcactgtgttcc

SEQ ID NO: 960996 - DNA, 33 bp, Homo sapien
agaaacagttgataaagtaagtcactgtgttcc

SEQ ID NO: 960997 - DNA, 33 bp, Homo sapien
ggtaaatgaaagtccacgttactgaacccatgc

SEQ ID NO: 960998 - DNA, 33 bp, Homo sapien
ggtaaatgaaagtccatgttactgaacccatgc

SEQ ID NO: 960999 - DNA, 33 bp, Homo sapien
aagaactctctttgataacggtgagaattttgt

SEQ ID NO: 961000 - DNA, 33 bp, Homo sapien
aagaactctctttgatgacggtgagaattttgt

SEQ ID NO: 961001 - DNA, 33 bp, Homo sapien
aataaattttctcttcaatgctgtacttggtag

SEQ ID NO: 961002 - DNA, 33 bp, Homo sapien
aataaattttctcttcgatgctgtacttggtag

SEQ ID NO: 961003 - DNA, 33 bp, Homo sapien
agtttagctgacataaggggggaactttccagt

SEQ ID NO: 961004 - DNA, 33 bp, Homo sapien
agtttagctgacataatgggggaactttccagt

SEQ ID NO: 961005 - DNA, 33 bp, Homo sapien
ttgtattctgcagaagaaaaaaatggtgaattt

SEQ ID NO: 961006 - DNA, 33 bp, Homo sapien
ttgtattctgcagaaggaaaaaatggtgaattt

SEQ ID NO: 961007 - DNA, 33 bp, Homo sapien
tactaataatcccaaagaacatgcaattttagt

SEQ ID NO: 961008 - DNA, 33 bp, Homo sapien
tactaataatcccaaataacatgcaattttagt

SEQ ID NO: 961009 - DNA, 33 bp, Homo sapien
gcagtgacagtcttcagaattagtcctgggtgg

SEQ ID NO: 961010 - DNA, 33 bp, Homo sapien
gcagtgacagtcttcataattagtcctgggtgg

SEQ ID NO: 961011 - DNA, 33 bp, Homo sapien
tctcaccctttccttaactttggcctctaccct

SEQ ID NO: 961012 - DNA, 33 bp, Homo sapien
tctcaccctttccttagctttggcctctaccct

SEQ ID NO: 961013 - DNA, 33 bp, Homo sapien
acccttgtttaaatgacgtgtcctatggagagc

SEQ ID NO: 961014 - DNA, 33 bp, Homo sapien
acccttgtttaaatgatgtgtcctatggagagc

SEQ ID NO: 961015 - DNA, 33 bp, Homo sapien
gatgtttgttacacacacaattcatttcctaat

SEQ ID NO: 961016 - DNA, 33 bp, Homo sapien
gatgtttgttacacacgcaattcatttcctaat

SEQ ID NO: 961017 - DNA, 33 bp, Homo sapien
ttggtgggtgttagcaagcttctttcagcaagg

SEQ ID NO: 961018 - DNA, 33 bp, Homo sapien
ttggtgggtgttagcaggcttctttcagcaagg

SEQ ID NO: 961019 - DNA, 33 bp, Homo sapien
ctgacctcacagcaaaatgcattccctgactct

SEQ ID NO: 961020 - DNA, 33 bp, Homo sapien
ctgacctcacagcaaactgcattccctgactct

SEQ ID NO: 961021 - DNA, 33 bp, Homo sapien
tcaacaaatgcaaacccaattcttttttaatac

SEQ ID NO: 961022 - DNA, 33 bp, Homo sapien
tcaacaaatgcaaacctaattcttttttaatac

SEQ ID NO: 961023 - DNA, 33 bp, Homo sapien
gatacttggaatgtccagactacaggaacaaag

SEQ ID NO: 961024 - DNA, 33 bp, Homo sapien
gatacttggaatgtcccgactacaggaacaaag

SEQ ID NO: 961025 - DNA, 33 bp, Homo sapien
ctcaggactgtgaccacggacctaagtgaggac

SEQ ID NO: 961026 - DNA, 33 bp, Homo sapien
ctcaggactgtgaccatggacctaagtgaggac

SEQ ID NO: 961027 - DNA, 33 bp, Homo sapien
ctgtttcaatattagacgtgaagaggactgatt

SEQ ID NO: 961028 - DNA, 33 bp, Homo sapien
ctgtttcaatattagatgtgaagaggactgatt

SEQ ID NO: 961029 - DNA, 33 bp, Homo sapien
ggtaggacaagaggaaaaaagacacaaacaact

SEQ ID NO: 961030 - DNA, 33 bp, Homo sapien
ggtaggacaagaggaagaaagacacaaacaact

SEQ ID NO: 961031 - DNA, 33 bp, Homo sapien
atgaaatcacacagaacactaaattacttcaat

SEQ ID NO: 961032 - DNA, 33 bp, Homo sapien
atgaaatcacacagaatactaaattacttcaat

SEQ ID NO: 961033 - DNA, 33 bp, Homo sapien
aatatagttgcttccactgcaataagtaaaaaa

SEQ ID NO: 961034 - DNA, 33 bp, Homo sapien
aatatagttgcttccagtgcaataagtaaaaaa

SEQ ID NO: 961035 - DNA, 33 bp, Homo sapien
ctttttgagataaaagccaccctgatttgtgtt

SEQ ID NO: 961036 - DNA, 33 bp, Homo sapien
ctttttgagataaaaggcaccctgatttgtgtt

SEQ ID NO: 961037 - DNA, 33 bp, Homo sapien
tataatgcaggctgtaaaaatgacacgacacgc

SEQ ID NO: 961038 - DNA, 33 bp, Homo sapien
tataatgcaggctgtagaaatgacacgacacgc

SEQ ID NO: 961039 - DNA, 33 bp, Homo sapien
cacttgtcagctaagccagtcttaatttttggt

SEQ ID NO: 961040 - DNA, 33 bp, Homo sapien
cacttgtcagctaagctagtcttaatttttggt

SEQ ID NO: 961041 - DNA, 33 bp, Homo sapien
gctgagctgaactttacggtttaaaatgtgtat

SEQ ID NO: 961042 - DNA, 33 bp, Homo sapien
gctgagctgaactttatggtttaaaatgtgtat

SEQ ID NO: 961043 - DNA, 33 bp, Homo sapien
atagacaactactaacccaggcctggaactcaa

SEQ ID NO: 961044 - DNA, 33 bp, Homo sapien
atagacaactactaactcaggcctggaactcaa

SEQ ID NO: 961045 - DNA, 33 bp, Homo sapien
agcattagttactttgaaatgtgccgcacacca

SEQ ID NO: 961046 - DNA, 33 bp, Homo sapien
agcattagttactttgcaatgtgccgcacacca

SEQ ID NO: 961047 - DNA, 33 bp, Homo sapien
ttacttttaactgcaacccacatcatttgtctt

SEQ ID NO: 961048 - DNA, 33 bp, Homo sapien
ttacttttaactgcaagccacatcatttgtctt

SEQ ID NO: 961049 - DNA, 33 bp, Homo sapien
aaggtgcttcctgggaacttttgtctaatttaa

SEQ ID NO: 961050 - DNA, 33 bp, Homo sapien
aaggtgcttcctgggatcttttgtctaatttaa

SEQ ID NO: 961051 - DNA, 33 bp, Homo sapien
gtctctgctactgtgcccttgaaaaccacactt

SEQ ID NO: 961052 - DNA, 33 bp, Homo sapien
gtctctgctactgtgctcttgaaaaccacactt

SEQ ID NO: 961053 - DNA, 33 bp, Homo sapien
tcttcatgtctctaagacctttattgtgttttc

SEQ ID NO: 961054 - DNA, 33 bp, Homo sapien
tcttcatgtctctaaggcctttattgtgttttc

SEQ ID NO: 961055 - DNA, 33 bp, Homo sapien
tacctatggttttcaactggagtcagtagttct

SEQ ID NO: 961056 - DNA, 33 bp, Homo sapien
tacctatggttttcaattggagtcagtagttct

SEQ ID NO: 961057 - DNA, 33 bp, Homo sapien
agctgaccagacctgtaaagagtaagaaatggt

SEQ ID NO: 961058 - DNA, 33 bp, Homo sapien
agctgaccagacctgtgaagagtaagaaatggt

SEQ ID NO: 961059 - DNA, 33 bp, Homo sapien
aaaaagagggaagcaaccattctgagttccagc

SEQ ID NO: 961060 - DNA, 33 bp, Homo sapien
aaaaagagggaagcaatcattctgagttccagc

SEQ ID NO: 961061 - DNA, 33 bp, Homo sapien
ctttgggcgtaaacgcaacaggagtgtgtgaaa

SEQ ID NO: 961062 - DNA, 33 bp, Homo sapien
ctttgggcgtaaacgcgacaggagtgtgtgaaa

SEQ ID NO: 961063 - DNA, 33 bp, Homo sapien
tgtctacatcatgcccaagtgtttcagcttcca

SEQ ID NO: 961064 - DNA, 33 bp, Homo sapien
tgtctacatcatgcccgagtgtttcagcttcca

SEQ ID NO: 961065 - DNA, 33 bp, Homo sapien
tccagaaacttctggccataaaattagacttct

SEQ ID NO: 961066 - DNA, 33 bp, Homo sapien
tccagaaacttctggctataaaattagacttct

SEQ ID NO: 961067 - DNA, 33 bp, Homo sapien
gagacttacagtgaacaaacataggaaccgagg

SEQ ID NO: 961068 - DNA, 33 bp, Homo sapien
gagacttacagtgaacgaacataggaaccgagg

SEQ ID NO: 961069 - DNA, 33 bp, Homo sapien
tcttgaattcagctcacgtgtgctataagtatc

SEQ ID NO: 961070 - DNA, 33 bp, Homo sapien
tcttgaattcagctcatgtgtgctataagtatc

SEQ ID NO: 961071 - DNA, 33 bp, Homo sapien
gagtttgaaaacctccactcactgccatgaaca

SEQ ID NO: 961072 - DNA, 33 bp, Homo sapien
gagtttgaaaacctccgctcactgccatgaaca

SEQ ID NO: 961073 - DNA, 33 bp, Homo sapien
ggaaagccacaactaacagctatgcaccaagtg

SEQ ID NO: 961074 - DNA, 33 bp, Homo sapien
ggaaagccacaactaagagctatgcaccaagtg

SEQ ID NO: 961075 - DNA, 33 bp, Homo sapien
gatgcttgagttgaatcagaaagtattcataag

SEQ ID NO: 961076 - DNA, 33 bp, Homo sapien
gatgcttgagttgaattagaaagtattcataag

SEQ ID NO: 961077 - DNA, 33 bp, Homo sapien
ctgtttgacttcaaggccaggatcccgttttcc

SEQ ID NO: 961078 - DNA, 33 bp, Homo sapien
ctgtttgacttcaaggtcaggatcccgttttcc

SEQ ID NO: 961079 - DNA, 33 bp, Homo sapien
atctattgattaattaactatgacattgcagcc

SEQ ID NO: 961080 - DNA, 33 bp, Homo sapien
atctattgattaattatctatgacattgcagcc

SEQ ID NO: 961081 - DNA, 33 bp, Homo sapien
attgccttcagggtaaataaaatgagcatttat

SEQ ID NO: 961082 - DNA, 33 bp, Homo sapien
attgccttcagggtaactaaaatgagcatttat

SEQ ID NO: 961083 - DNA, 33 bp, Homo sapien
ctggcattcattcagaagtcacgcatgagacta

SEQ ID NO: 961084 - DNA, 33 bp, Homo sapien
ctggcattcattcagaggtcacgcatgagacta

SEQ ID NO: 961085 - DNA, 33 bp, Homo sapien
gagatgaggaaaaaaaatattctattggttcat

SEQ ID NO: 961086 - DNA, 33 bp, Homo sapien
gagatgaggaaaaaaagtattctattggttcat

SEQ ID NO: 961087 - DNA, 33 bp, Homo sapien
ccagagtccagaaagtcaagtcattccaagagc

SEQ ID NO: 961088 - DNA, 33 bp, Homo sapien
ccagagtccagaaagtgaagtcattccaagagc

SEQ ID NO: 961089 - DNA, 33 bp, Homo sapien
acttctaatttacactgaggtgttgaggtaaag

SEQ ID NO: 961090 - DNA, 33 bp, Homo sapien
acttctaatttacacttaggtgttgaggtaaag

SEQ ID NO: 961091 - DNA, 33 bp, Homo sapien
ttaaccaacaactgcagtcgaaagattgttgtt

SEQ ID NO: 961092 - DNA, 33 bp, Homo sapien
ttaaccaacaactgcattcgaaagattgttgtt

SEQ ID NO: 961093 - DNA, 33 bp, Homo sapien
gatctttaaagactggcattaatcatctgagta

SEQ ID NO: 961094 - DNA, 33 bp, Homo sapien
gatctttaaagactggtattaatcatctgagta

SEQ ID NO: 961095 - DNA, 33 bp, Homo sapien
ggtactgagaggttataaagattcatagacaga

SEQ ID NO: 961096 - DNA, 33 bp, Homo sapien
ggtactgagaggttatgaagattcatagacaga

SEQ ID NO: 961097 - DNA, 33 bp, Homo sapien
tgccaaccaatccacaggaccaccctatttgaa

SEQ ID NO: 961098 - DNA, 33 bp, Homo sapien
tgccaaccaatccacatgaccaccctatttgaa

SEQ ID NO: 961099 - DNA, 33 bp, Homo sapien
agcattttcaatgagcaaatacatgatatttag

SEQ ID NO: 961100 - DNA, 33 bp, Homo sapien
agcattttcaatgagcgaatacatgatatttag

SEQ ID NO: 961101 - DNA, 33 bp, Homo sapien
ccacctttgaaacattaaatgaaggctacccta

SEQ ID NO: 961102 - DNA, 33 bp, Homo sapien
ccacctttgaaacattcaatgaaggctacccta

SEQ ID NO: 961103 - DNA, 33 bp, Homo sapien
atatagtaaagagaagaataggtatgtatttat

SEQ ID NO: 961104 - DNA, 33 bp, Homo sapien
atatagtaaagagaaggataggtatgtatttat

SEQ ID NO: 961105 - DNA, 33 bp, Homo sapien
tctgagaaaatccagaaaaaatattgtgcaggc

SEQ ID NO: 961106 - DNA, 33 bp, Homo sapien
tctgagaaaatccagataaaatattgtgcaggc

SEQ ID NO: 961107 - DNA, 33 bp, Homo sapien
caaagtgtgactggcacctgttatctaaataca

SEQ ID NO: 961108 - DNA, 33 bp, Homo sapien
caaagtgtgactggcatctgttatctaaataca

SEQ ID NO: 961109 - DNA, 33 bp, Homo sapien
ggatgtcagaagaattaaactgctttcattcat

SEQ ID NO: 961110 - DNA, 33 bp, Homo sapien
ggatgtcagaagaatttaactgctttcattcat

SEQ ID NO: 961111 - DNA, 33 bp, Homo sapien
gctacaagagacaagaaaagaaaatgagctatg

SEQ ID NO: 961112 - DNA, 33 bp, Homo sapien
gctacaagagacaagacaagaaaatgagctatg

SEQ ID NO: 961113 - DNA, 33 bp, Homo sapien
atctggtcaggaaggacgcaccaccttgctggt

SEQ ID NO: 961114 - DNA, 33 bp, Homo sapien
atctggtcaggaaggatgcaccaccttgctggt

SEQ ID NO: 961115 - DNA, 33 bp, Homo sapien
ggttgcatactgaatgacaaattaaaaatcagt

SEQ ID NO: 961116 - DNA, 33 bp, Homo sapien
ggttgcatactgaatgccaaattaaaaatcagt

SEQ ID NO: 961117 - DNA, 33 bp, Homo sapien
ctctgacaggaatctaccttcgaaataatgttg

SEQ ID NO: 961118 - DNA, 33 bp, Homo sapien
ctctgacaggaatctatcttcgaaataatgttg

SEQ ID NO: 961119 - DNA, 33 bp, Homo sapien
atctaaattatgtttagcatcatcttccaaatc

SEQ ID NO: 961120 - DNA, 33 bp, Homo sapien
atctaaattatgtttatcatcatcttccaaatc

SEQ ID NO: 961121 - DNA, 33 bp, Homo sapien
gtgttcatcaataagaggtcttcagactccaga

SEQ ID NO: 961122 - DNA, 33 bp, Homo sapien
gtgttcatcaataagatgtcttcagactccaga

SEQ ID NO: 961123 - DNA, 33 bp, Homo sapien
taatagtttaatagtaactttggatgattgagt

SEQ ID NO: 961124 - DNA, 33 bp, Homo sapien
taatagtttaatagtagctttggatgattgagt

SEQ ID NO: 961125 - DNA, 33 bp, Homo sapien
ttgagcaaatcttttacggcagttttcctcata

SEQ ID NO: 961126 - DNA, 33 bp, Homo sapien
ttgagcaaatcttttatggcagttttcctcata

SEQ ID NO: 961127 - DNA, 33 bp, Homo sapien
cccacaactttaactcaaatgcttttacactta

SEQ ID NO: 961128 - DNA, 33 bp, Homo sapien
cccacaactttaactccaatgcttttacactta

SEQ ID NO: 961129 - DNA, 33 bp, Homo sapien
atattacacaattgcaaatacaactgcactgag

SEQ ID NO: 961130 - DNA, 33 bp, Homo sapien
atattacacaattgcatatacaactgcactgag

SEQ ID NO: 961131 - DNA, 33 bp, Homo sapien
ccaggtcatccagtacactttcacggcctttgg

SEQ ID NO: 961132 - DNA, 33 bp, Homo sapien
ccaggtcatccagtacgctttcacggcctttgg

SEQ ID NO: 961133 - DNA, 33 bp, Homo sapien
aggctgcactgccatcgattttatccaaaacag

SEQ ID NO: 961134 - DNA, 33 bp, Homo sapien
aggctgcactgccatctattttatccaaaacag

SEQ ID NO: 961135 - DNA, 33 bp, Homo sapien
gccatgttcatataccggcttttatgtcccctc

SEQ ID NO: 961136 - DNA, 33 bp, Homo sapien
gccatgttcatatacctgcttttatgtcccctc

SEQ ID NO: 961137 - DNA, 33 bp, Homo sapien
aatcctgcattagacaatatgtgaaagagaata

SEQ ID NO: 961138 - DNA, 33 bp, Homo sapien
aatcctgcattagacactatgtgaaagagaata

SEQ ID NO: 961139 - DNA, 33 bp, Homo sapien
atacattatgttcagaagttatcaaaaatggag

SEQ ID NO: 961140 - DNA, 33 bp, Homo sapien
atacattatgttcagaggttatcaaaaatggag

SEQ ID NO: 961141 - DNA, 33 bp, Homo sapien
gaggtgaagacacataaggtggaggaactacaa

SEQ ID NO: 961142 - DNA, 33 bp, Homo sapien
gaggtgaagacacatatggtggaggaactacaa

SEQ ID NO: 961143 - DNA, 33 bp, Homo sapien
taataagcttaacatacatagatacccatgcaa

SEQ ID NO: 961144 - DNA, 33 bp, Homo sapien
taataagcttaacatatatagatacccatgcaa

SEQ ID NO: 961145 - DNA, 33 bp, Homo sapien
aatatttatagtagcaccatttacagtattcct

SEQ ID NO: 961146 - DNA, 33 bp, Homo sapien
aatatttatagtagcatcatttacagtattcct

SEQ ID NO: 961147 - DNA, 33 bp, Homo sapien
atataatgttgaccacactggaaaaaaaaatgc

SEQ ID NO: 961148 - DNA, 33 bp, Homo sapien
atataatgttgaccacgctggaaaaaaaaatgc

SEQ ID NO: 961149 - DNA, 33 bp, Homo sapien
gttctccagaacctgaaatcacctgtctgtact

SEQ ID NO: 961150 - DNA, 33 bp, Homo sapien
gttctccagaacctgagatcacctgtctgtact

SEQ ID NO: 961151 - DNA, 33 bp, Homo sapien
gtctcattcttaaagacgcttacaagagaggag

SEQ ID NO: 961152 - DNA, 33 bp, Homo sapien
gtctcattcttaaagatgcttacaagagaggag

SEQ ID NO: 961153 - DNA, 33 bp, Homo sapien
tttaccaacatttacaacattgtgagatataca

SEQ ID NO: 961154 - DNA, 33 bp, Homo sapien
tttaccaacatttacagcattgtgagatataca

SEQ ID NO: 961155 - DNA, 33 bp, Homo sapien
caacactcatgcataaaggtataagtccacacc

SEQ ID NO: 961156 - DNA, 33 bp, Homo sapien
caacactcatgcataagggtataagtccacacc

SEQ ID NO: 961157 - DNA, 33 bp, Homo sapien
tctttctgctgtgagggattaggaccataggga

SEQ ID NO: 961158 - DNA, 33 bp, Homo sapien
tctttctgctgtgaggtattaggaccataggga

SEQ ID NO: 961159 - DNA, 33 bp, Homo sapien
aaagaaattaaagatcagagaggataaacgact

SEQ ID NO: 961160 - DNA, 33 bp, Homo sapien
aaagaaattaaagatcggagaggataaacgact

SEQ ID NO: 961161 - DNA, 33 bp, Homo sapien
gtgaaatttgattcctaaaccatacttttacaa

SEQ ID NO: 961162 - DNA, 33 bp, Homo sapien
gtgaaatttgattcctcaaccatacttttacaa

SEQ ID NO: 961163 - DNA, 33 bp, Homo sapien
tggtggttttgactcacggttcagtctagcagg

SEQ ID NO: 961164 - DNA, 33 bp, Homo sapien
tggtggttttgactcatggttcagtctagcagg

SEQ ID NO: 961165 - DNA, 33 bp, Homo sapien
ttagtgaggcagtctgaaaaaactgtttaatat

SEQ ID NO: 961166 - DNA, 33 bp, Homo sapien
ttagtgaggcagtctgcaaaaactgtttaatat

SEQ ID NO: 961167 - DNA, 33 bp, Homo sapien
agcaggtgatttccatcagatggtccattaaag

SEQ ID NO: 961168 - DNA, 33 bp, Homo sapien
agcaggtgatttccattagatggtccattaaag

SEQ ID NO: 961169 - DNA, 33 bp, Homo sapien
tttcacctcctttctacgacctagcacaattgt

SEQ ID NO: 961170 - DNA, 33 bp, Homo sapien
tttcacctcctttctatgacctagcacaattgt

SEQ ID NO: 961171 - DNA, 33 bp, Homo sapien
atgaaagcaaggttgacgttgatgtcttgttcc

SEQ ID NO: 961172 - DNA, 33 bp, Homo sapien
atgaaagcaaggttgatgttgatgtcttgttcc

SEQ ID NO: 961173 - DNA, 33 bp, Homo sapien
aaaacctgtttagttacaggatagttgtggggg

SEQ ID NO: 961174 - DNA, 33 bp, Homo sapien
aaaacctgtttagttagaggatagttgtggggg

SEQ ID NO: 961175 - DNA, 33 bp, Homo sapien
gaaagtatattaagcagtattcctgaggagaaa

SEQ ID NO: 961176 - DNA, 33 bp, Homo sapien
gaaagtatattaagcattattcctgaggagaaa

SEQ ID NO: 961177 - DNA, 33 bp, Homo sapien
tttgatgtgtaacttacggtcatgtactgtttg

SEQ ID NO: 961178 - DNA, 33 bp, Homo sapien
tttgatgtgtaacttatggtcatgtactgtttg

SEQ ID NO: 961179 - DNA, 33 bp, Homo sapien
ttgatagtgggagtgaaaataaaggtgtattga

SEQ ID NO: 961180 - DNA, 33 bp, Homo sapien
ttgatagtgggagtgataataaaggtgtattga

SEQ ID NO: 961181 - DNA, 33 bp, Homo sapien
agagggaagtcacgtgcatgaaaggcaagcatg

SEQ ID NO: 961182 - DNA, 33 bp, Homo sapien
agagggaagtcacgtgtatgaaaggcaagcatg

SEQ ID NO: 961183 - DNA, 33 bp, Homo sapien
caaagtatcaatcatagaagggaatgttcttat

SEQ ID NO: 961184 - DNA, 33 bp, Homo sapien
caaagtatcaatcatataagggaatgttcttat

SEQ ID NO: 961185 - DNA, 33 bp, Homo sapien
tcttaactggctctaaacccataaaatattcaa

SEQ ID NO: 961186 - DNA, 33 bp, Homo sapien
tcttaactggctctaatcccataaaatattcaa

SEQ ID NO: 961187 - DNA, 33 bp, Homo sapien
cccactactttctccccgctactatactcaatg

SEQ ID NO: 961188 - DNA, 33 bp, Homo sapien
cccactactttctccctgctactatactcaatg

SEQ ID NO: 961189 - DNA, 33 bp, Homo sapien
ctgtttgggtttcaagcaagagatgaggtggct

SEQ ID NO: 961190 - DNA, 33 bp, Homo sapien
ctgtttgggtttcaagtaagagatgaggtggct

SEQ ID NO: 961191 - DNA, 33 bp, Homo sapien
gtgcctccagaaaaaaacagaaacaggaatttc

SEQ ID NO: 961192 - DNA, 33 bp, Homo sapien
gtgcctccagaaaaaaccagaaacaggaatttc

SEQ ID NO: 961193 - DNA, 33 bp, Homo sapien
tcctgacttaccctaccacacatcagtttaaga

SEQ ID NO: 961194 - DNA, 33 bp, Homo sapien
tcctgacttaccctactacacatcagtttaaga

SEQ ID NO: 961195 - DNA, 33 bp, Homo sapien
aaaagtccaacagtaaacacaccaaattttaga

SEQ ID NO: 961196 - DNA, 33 bp, Homo sapien
aaaagtccaacagtaaccacaccaaattttaga

SEQ ID NO: 961197 - DNA, 33 bp, Homo sapien
aacatgtcttttggcaacttaaatatctatcta

SEQ ID NO: 961198 - DNA, 33 bp, Homo sapien
aacatgtcttttggcaccttaaatatctatcta

SEQ ID NO: 961199 - DNA, 33 bp, Homo sapien
ggcctcttaaagtcagcaggagccatgtgacta

SEQ ID NO: 961200 - DNA, 33 bp, Homo sapien
ggcctcttaaagtcagtaggagccatgtgacta

SEQ ID NO: 961201 - DNA, 33 bp, Homo sapien
tttttcctggctgatacaggtctttctaatcct

SEQ ID NO: 961202 - DNA, 33 bp, Homo sapien
tttttcctggctgatataggtctttctaatcct

SEQ ID NO: 961203 - DNA, 33 bp, Homo sapien
ttagttctactcagaaaagcaattgttggactt

SEQ ID NO: 961204 - DNA, 33 bp, Homo sapien
ttagttctactcagaagagcaattgttggactt

SEQ ID NO: 961205 - DNA, 33 bp, Homo sapien
ccttcagccggcatcaaaagcagattttcatac

SEQ ID NO: 961206 - DNA, 33 bp, Homo sapien
ccttcagccggcatcagaagcagattttcatac

SEQ ID NO: 961207 - DNA, 33 bp, Homo sapien
gactaatatcaatccacatctcctgtgcacttc

SEQ ID NO: 961208 - DNA, 33 bp, Homo sapien
gactaatatcaatccatatctcctgtgcacttc

SEQ ID NO: 961209 - DNA, 33 bp, Homo sapien
cttccaatgctgttctaaagacaaacgttcttg

SEQ ID NO: 961210 - DNA, 33 bp, Homo sapien
cttccaatgctgttcttaagacaaacgttcttg

SEQ ID NO: 961211 - DNA, 33 bp, Homo sapien
ctactcagccttataccacctgttcacttctct

SEQ ID NO: 961212 - DNA, 33 bp, Homo sapien
ctactcagccttatactacctgttcacttctct

SEQ ID NO: 961213 - DNA, 33 bp, Homo sapien
ttccaggacatgataactgtagaaggcctggaa

SEQ ID NO: 961214 - DNA, 33 bp, Homo sapien
ttccaggacatgataattgtagaaggcctggaa

SEQ ID NO: 961215 - DNA, 33 bp, Homo sapien
agaggtaaagaagtgaaaaactgaattctgaga

SEQ ID NO: 961216 - DNA, 33 bp, Homo sapien
agaggtaaagaagtgagaaactgaattctgaga

SEQ ID NO: 961217 - DNA, 33 bp, Homo sapien
tgtaggtgagcaatccaggactacggaaatgca

SEQ ID NO: 961218 - DNA, 33 bp, Homo sapien
tgtaggtgagcaatccgggactacggaaatgca

SEQ ID NO: 961219 - DNA, 33 bp, Homo sapien
agcatggctcacacggaattactagtgcttatt

SEQ ID NO: 961220 - DNA, 33 bp, Homo sapien
agcatggctcacacggcattactagtgcttatt

SEQ ID NO: 961221 - DNA, 33 bp, Homo sapien
attatgctaaacaacacgctctattaagacatt

SEQ ID NO: 961222 - DNA, 33 bp, Homo sapien
attatgctaaacaacatgctctattaagacatt

SEQ ID NO: 961223 - DNA, 33 bp, Homo sapien
ggagaggctgaagaacaaattggagatgacaga

SEQ ID NO: 961224 - DNA, 33 bp, Homo sapien
ggagaggctgaagaacgaattggagatgacaga

SEQ ID NO: 961225 - DNA, 33 bp, Homo sapien
tatgtgccctgtctagaaagacttcatgatcta

SEQ ID NO: 961226 - DNA, 33 bp, Homo sapien
tatgtgccctgtctaggaagacttcatgatcta

SEQ ID NO: 961227 - DNA, 33 bp, Homo sapien
aaaccagtgaaattcaaaccaacttttccttga

SEQ ID NO: 961228 - DNA, 33 bp, Homo sapien
aaaccagtgaaattcagaccaacttttccttga

SEQ ID NO: 961229 - DNA, 33 bp, Homo sapien
atttcagcaaagtggagcaatagagtgtggcct

SEQ ID NO: 961230 - DNA, 33 bp, Homo sapien
atttcagcaaagtggatcaatagagtgtggcct

SEQ ID NO: 961231 - DNA, 33 bp, Homo sapien
gtcagaaaattctaacaattgatcaagaaagac

SEQ ID NO: 961232 - DNA, 33 bp, Homo sapien
gtcagaaaattctaaccattgatcaagaaagac

SEQ ID NO: 961233 - DNA, 33 bp, Homo sapien
aaatatgtaattctgaaaaaacgagggttcttc

SEQ ID NO: 961234 - DNA, 33 bp, Homo sapien
aaatatgtaattctgagaaaacgagggttcttc

SEQ ID NO: 961235 - DNA, 33 bp, Homo sapien
gtttcttaaactggcccataagctcctcgaggg

SEQ ID NO: 961236 - DNA, 33 bp, Homo sapien
gtttcttaaactggcctataagctcctcgaggg

SEQ ID NO: 961237 - DNA, 33 bp, Homo sapien
ttgattcctgacgaaaatcgagcctgcctgctc

SEQ ID NO: 961238 - DNA, 33 bp, Homo sapien
ttgattcctgacgaaagtcgagcctgcctgctc

SEQ ID NO: 961239 - DNA, 33 bp, Homo sapien
tagaatgacagtttctcaccagccaaggcttta

SEQ ID NO: 961240 - DNA, 33 bp, Homo sapien
tagaatgacagtttctgaccagccaaggcttta

SEQ ID NO: 961241 - DNA, 33 bp, Homo sapien
gagggaaaagtgaaacaatcttctgtgtgccac

SEQ ID NO: 961242 - DNA, 33 bp, Homo sapien
gagggaaaagtgaaacgatcttctgtgtgccac

SEQ ID NO: 961243 - DNA, 33 bp, Homo sapien
ttctgcaaatgtaaaacgttaatggcgacatca

SEQ ID NO: 961244 - DNA, 33 bp, Homo sapien
ttctgcaaatgtaaaatgttaatggcgacatca

SEQ ID NO: 961245 - DNA, 33 bp, Homo sapien
actactgcatccttggcaccttgccagctttac

SEQ ID NO: 961246 - DNA, 33 bp, Homo sapien
actactgcatccttggtaccttgccagctttac

SEQ ID NO: 961247 - DNA, 33 bp, Homo sapien
cgccagggtgagcacactggaataaatactgag

SEQ ID NO: 961248 - DNA, 33 bp, Homo sapien
cgccagggtgagcacattggaataaatactgag

SEQ ID NO: 961249 - DNA, 33 bp, Homo sapien
gattaggagactggagaatctatacgccaattc

SEQ ID NO: 961250 - DNA, 33 bp, Homo sapien
gattaggagactggagcatctatacgccaattc

SEQ ID NO: 961251 - DNA, 33 bp, Homo sapien
atgttcacttgtttaaggtctctctcaccccca

SEQ ID NO: 961252 - DNA, 33 bp, Homo sapien
atgttcacttgtttaatgtctctctcaccccca

SEQ ID NO: 961253 - DNA, 33 bp, Homo sapien
ggggctcagtggggaaatccatttaaccagagc

SEQ ID NO: 961254 - DNA, 33 bp, Homo sapien
ggggctcagtggggaactccatttaaccagagc

SEQ ID NO: 961255 - DNA, 33 bp, Homo sapien
ctggtttgatggagtaccccctacacctagaat

SEQ ID NO: 961256 - DNA, 33 bp, Homo sapien
ctggtttgatggagtatcccctacacctagaat

SEQ ID NO: 961257 - DNA, 33 bp, Homo sapien
ctttttcttagtcttccatcatgtggatatacc

SEQ ID NO: 961258 - DNA, 33 bp, Homo sapien
ctttttcttagtcttctatcatgtggatatacc

SEQ ID NO: 961259 - DNA, 33 bp, Homo sapien
actgtagactagcacaaccgattttattcgcag

SEQ ID NO: 961260 - DNA, 33 bp, Homo sapien
actgtagactagcacacccgattttattcgcag

SEQ ID NO: 961261 - DNA, 33 bp, Homo sapien
gaagctcaacgtcttacgggagaaaggagcaac

SEQ ID NO: 961262 - DNA, 33 bp, Homo sapien
gaagctcaacgtcttaggggagaaaggagcaac

SEQ ID NO: 961263 - DNA, 33 bp, Homo sapien
ctagatactatacaccaagtacatattttaatg

SEQ ID NO: 961264 - DNA, 33 bp, Homo sapien
ctagatactatacaccgagtacatattttaatg

SEQ ID NO: 961265 - DNA, 33 bp, Homo sapien
taagaattctaagcaccgtgatgtgacccgact

SEQ ID NO: 961266 - DNA, 33 bp, Homo sapien
taagaattctaagcactgtgatgtgacccgact

SEQ ID NO: 961267 - DNA, 33 bp, Homo sapien
aaacactcattgagagacacaggcatccagcca

SEQ ID NO: 961268 - DNA, 33 bp, Homo sapien
aaacactcattgagaggcacaggcatccagcca

SEQ ID NO: 961269 - DNA, 33 bp, Homo sapien
atttttcataaaggtgcaatatgccaagtatac

SEQ ID NO: 961270 - DNA, 33 bp, Homo sapien
atttttcataaaggtgtaatatgccaagtatac

SEQ ID NO: 961271 - DNA, 33 bp, Homo sapien
aatagtcaaacattgcaaataacctgaatgttt

SEQ ID NO: 961272 - DNA, 33 bp, Homo sapien
aatagtcaaacattgcgaataacctgaatgttt

SEQ ID NO: 961273 - DNA, 33 bp, Homo sapien
ctcttaggtgaggtgaaacagtcagaaattgtt

SEQ ID NO: 961274 - DNA, 33 bp, Homo sapien
ctcttaggtgaggtgagacagtcagaaattgtt

SEQ ID NO: 961275 - DNA, 33 bp, Homo sapien
tgcagactgctataacaatgacaaagaaaataa

SEQ ID NO: 961276 - DNA, 33 bp, Homo sapien
tgcagactgctataacgatgacaaagaaaataa

SEQ ID NO: 961277 - DNA, 33 bp, Homo sapien
ttcagatctcctaaaaagcatcctcatgaaatg

SEQ ID NO: 961278 - DNA, 33 bp, Homo sapien
ttcagatctcctaaaaggcatcctcatgaaatg

SEQ ID NO: 961279 - DNA, 33 bp, Homo sapien
ccaccaagaccattgaataaggagttaactaca

SEQ ID NO: 961280 - DNA, 33 bp, Homo sapien
ccaccaagaccattgagtaaggagttaactaca

SEQ ID NO: 961281 - DNA, 33 bp, Homo sapien
ttcagagaaaaggcaacggtcacctaatggtag

SEQ ID NO: 961282 - DNA, 33 bp, Homo sapien
ttcagagaaaaggcaatggtcacctaatggtag

SEQ ID NO: 961283 - DNA, 33 bp, Homo sapien
ggggcacacatcagcccgcttcagacctggcct

SEQ ID NO: 961284 - DNA, 33 bp, Homo sapien
ggggcacacatcagcctgcttcagacctggcct

SEQ ID NO: 961285 - DNA, 33 bp, Homo sapien
aatctttcctttaagcgcttgaggaatagaaaa

SEQ ID NO: 961286 - DNA, 33 bp, Homo sapien
aatctttcctttaagctcttgaggaatagaaaa

SEQ ID NO: 961287 - DNA, 33 bp, Homo sapien
gtctgtggaatgaaacccggaaaagaagttgaa

SEQ ID NO: 961288 - DNA, 33 bp, Homo sapien
gtctgtggaatgaaactcggaaaagaagttgaa

SEQ ID NO: 961289 - DNA, 33 bp, Homo sapien
caatgcaagtgctggaagggatcttagagatga

SEQ ID NO: 961290 - DNA, 33 bp, Homo sapien
caatgcaagtgctggacgggatcttagagatga

SEQ ID NO: 961291 - DNA, 33 bp, Homo sapien
ttggggaacagcatcaacatcggttctggcatg

SEQ ID NO: 961292 - DNA, 33 bp, Homo sapien
ttggggaacagcatcatcatcggttctggcatg

SEQ ID NO: 961293 - DNA, 33 bp, Homo sapien
gcttatgtcctgtccccgagttcttgagaggaa

SEQ ID NO: 961294 - DNA, 33 bp, Homo sapien
gcttatgtcctgtccctgagttcttgagaggaa

SEQ ID NO: 961295 - DNA, 33 bp, Homo sapien
tccttttaaagaatgaacatcaagcatccactc

SEQ ID NO: 961296 - DNA, 33 bp, Homo sapien
tccttttaaagaatgagcatcaagcatccactc

SEQ ID NO: 961297 - DNA, 33 bp, Homo sapien
tagtacctgagaggaacgcctataggttttaat

SEQ ID NO: 961298 - DNA, 33 bp, Homo sapien
tagtacctgagaggaatgcctataggttttaat

SEQ ID NO: 961299 - DNA, 33 bp, Homo sapien
gtgtaatcagatcccacaggagcttttctgatg

SEQ ID NO: 961300 - DNA, 33 bp, Homo sapien
gtgtaatcagatcccagaggagcttttctgatg

SEQ ID NO: 961301 - DNA, 33 bp, Homo sapien
ctgcctaaccaattctgacttttttcatcctgt

SEQ ID NO: 961302 - DNA, 33 bp, Homo sapien
ctgcctaaccaattcttacttttttcatcctgt

SEQ ID NO: 961303 - DNA, 33 bp, Homo sapien
tattaaacactggataacagctactattattat

SEQ ID NO: 961304 - DNA, 33 bp, Homo sapien
tattaaacactggataccagctactattattat

SEQ ID NO: 961305 - DNA, 33 bp, Homo sapien
ttccatctacaaagaaatgccatccctacttag

SEQ ID NO: 961306 - DNA, 33 bp, Homo sapien
ttccatctacaaagaagtgccatccctacttag

SEQ ID NO: 961307 - DNA, 33 bp, Homo sapien
cacaggtatgatgtaaagttgaacattttttta

SEQ ID NO: 961308 - DNA, 33 bp, Homo sapien
cacaggtatgatgtaaggttgaacattttttta

SEQ ID NO: 961309 - DNA, 33 bp, Homo sapien
agccctgtccaaaagaaggagattgatgagcct

SEQ ID NO: 961310 - DNA, 33 bp, Homo sapien
agccctgtccaaaagagggagattgatgagcct

SEQ ID NO: 961311 - DNA, 33 bp, Homo sapien
tccctgaataataataactctgttcaatacctg

SEQ ID NO: 961312 - DNA, 33 bp, Homo sapien
tccctgaataataatacctctgttcaatacctg

SEQ ID NO: 961313 - DNA, 33 bp, Homo sapien
ttttgagaaactatcagactgcttttcaaagaa

SEQ ID NO: 961314 - DNA, 33 bp, Homo sapien
ttttgagaaactatcatactgcttttcaaagaa

SEQ ID NO: 961315 - DNA, 33 bp, Homo sapien
gtacattgactttaaaatcttagcaacatacta

SEQ ID NO: 961316 - DNA, 33 bp, Homo sapien
gtacattgactttaaactcttagcaacatacta

SEQ ID NO: 961317 - DNA, 33 bp, Homo sapien
gttaaggtggctgaaaactcccatgcctgaaag

SEQ ID NO: 961318 - DNA, 33 bp, Homo sapien
gttaaggtggctgaaagctcccatgcctgaaag

SEQ ID NO: 961319 - DNA, 33 bp, Homo sapien
tacagtgcacaatctacgaatgtgtctgagccc

SEQ ID NO: 961320 - DNA, 33 bp, Homo sapien
tacagtgcacaatctatgaatgtgtctgagccc

SEQ ID NO: 961321 - DNA, 33 bp, Homo sapien
agcccttgctgccacacctaaacaagtcaactc

SEQ ID NO: 961322 - DNA, 33 bp, Homo sapien
agcccttgctgccacatctaaacaagtcaactc

SEQ ID NO: 961323 - DNA, 33 bp, Homo sapien
gatgggccaatatgacagctcaacattctcttt

SEQ ID NO: 961324 - DNA, 33 bp, Homo sapien
gatgggccaatatgacggctcaacattctcttt

SEQ ID NO: 961325 - DNA, 33 bp, Homo sapien
agagtctgaaacccaaatctcgtacttacacat

SEQ ID NO: 961326 - DNA, 33 bp, Homo sapien
agagtctgaaacccaactctcgtacttacacat

SEQ ID NO: 961327 - DNA, 33 bp, Homo sapien
tagatgttgctatcacgattttataaatgagca

SEQ ID NO: 961328 - DNA, 33 bp, Homo sapien
tagatgttgctatcactattttataaatgagca

SEQ ID NO: 961329 - DNA, 33 bp, Homo sapien
ggcttctttctccttaaaaattcccacacctaa

SEQ ID NO: 961330 - DNA, 33 bp, Homo sapien
ggcttctttctccttacaaattcccacacctaa

SEQ ID NO: 961331 - DNA, 33 bp, Homo sapien
aactagtacattgacacgatggttgtctaagtc

SEQ ID NO: 961332 - DNA, 33 bp, Homo sapien
aactagtacattgacatgatggttgtctaagtc

SEQ ID NO: 961333 - DNA, 33 bp, Homo sapien
atggcatctgaaataacggttcttggcccaaca

SEQ ID NO: 961334 - DNA, 33 bp, Homo sapien
atggcatctgaaataatggttcttggcccaaca

SEQ ID NO: 961335 - DNA, 33 bp, Homo sapien
ctggtcaagtcactgacatattttatccagcct

SEQ ID NO: 961336 - DNA, 33 bp, Homo sapien
ctggtcaagtcactgatatattttatccagcct

SEQ ID NO: 961337 - DNA, 33 bp, Homo sapien
ttgcaaagctccacgaagcaagtgagtcgccta

SEQ ID NO: 961338 - DNA, 33 bp, Homo sapien
ttgcaaagctccacgaggcaagtgagtcgccta

SEQ ID NO: 961339 - DNA, 33 bp, Homo sapien
caagtaagataatatgaatttgacaccccaaca

SEQ ID NO: 961340 - DNA, 33 bp, Homo sapien
caagtaagataatatggatttgacaccccaaca

SEQ ID NO: 961341 - DNA, 33 bp, Homo sapien
ttgtcaccaaaacctacgacaggaatttgatgg

SEQ ID NO: 961342 - DNA, 33 bp, Homo sapien
ttgtcaccaaaacctatgacaggaatttgatgg

SEQ ID NO: 961343 - DNA, 33 bp, Homo sapien
ctaggctacatgagggaaataataactgatgac

SEQ ID NO: 961344 - DNA, 33 bp, Homo sapien
ctaggctacatgagggcaataataactgatgac

SEQ ID NO: 961345 - DNA, 33 bp, Homo sapien
ggaatatggactaataccttccatacccttttg

SEQ ID NO: 961346 - DNA, 33 bp, Homo sapien
ggaatatggactaatatcttccatacccttttg

SEQ ID NO: 961347 - DNA, 33 bp, Homo sapien
agcaaaatctgcaaaaaggaaaaagatgataat

SEQ ID NO: 961348 - DNA, 33 bp, Homo sapien
agcaaaatctgcaaaagggaaaaagatgataat

SEQ ID NO: 961349 - DNA, 33 bp, Homo sapien
agttcctgcagcattaggacttatactatcaaa

SEQ ID NO: 961350 - DNA, 33 bp, Homo sapien
agttcctgcagcattatgacttatactatcaaa

SEQ ID NO: 961351 - DNA, 33 bp, Homo sapien
cagatttccaatactgcagcttgttaataaatt

SEQ ID NO: 961352 - DNA, 33 bp, Homo sapien
cagatttccaatactgtagcttgttaataaatt

SEQ ID NO: 961353 - DNA, 33 bp, Homo sapien
actcaaagcatttcaagttctgaatttgtacag

SEQ ID NO: 961354 - DNA, 33 bp, Homo sapien
actcaaagcatttcaatttctgaatttgtacag

SEQ ID NO: 961355 - DNA, 33 bp, Homo sapien
tggatggcaaatataacggcaggcactcatgat

SEQ ID NO: 961356 - DNA, 33 bp, Homo sapien
tggatggcaaatataatggcaggcactcatgat

SEQ ID NO: 961357 - DNA, 33 bp, Homo sapien
gccttatgctataaccaacagagaattagatgg

SEQ ID NO: 961358 - DNA, 33 bp, Homo sapien
gccttatgctataacctacagagaattagatgg

SEQ ID NO: 961359 - DNA, 33 bp, Homo sapien
ttcctagtcattagcaaagactctgccctgaaa

SEQ ID NO: 961360 - DNA, 33 bp, Homo sapien
ttcctagtcattagcacagactctgccctgaaa

SEQ ID NO: 961361 - DNA, 33 bp, Homo sapien
ctttcaaactttcagcggaccttcatctgccct

SEQ ID NO: 961362 - DNA, 33 bp, Homo sapien
ctttcaaactttcagctgaccttcatctgccct

SEQ ID NO: 961363 - DNA, 33 bp, Homo sapien
tgagcacaggaatcagaaatggcaaccaattgc

SEQ ID NO: 961364 - DNA, 33 bp, Homo sapien
tgagcacaggaatcaggaatggcaaccaattgc

SEQ ID NO: 961365 - DNA, 33 bp, Homo sapien
tatcttattgacatgcccattgacagctcttac

SEQ ID NO: 961366 - DNA, 33 bp, Homo sapien
tatcttattgacatgctcattgacagctcttac

SEQ ID NO: 961367 - DNA, 33 bp, Homo sapien
gcaaagcgaggttcccaaaggagaaataatata

SEQ ID NO: 961368 - DNA, 33 bp, Homo sapien
gcaaagcgaggttcccgaaggagaaataatata

SEQ ID NO: 961369 - DNA, 33 bp, Homo sapien
tttgctatatggtcaacatctgaggactgattt

SEQ ID NO: 961370 - DNA, 33 bp, Homo sapien
tttgctatatggtcaagatctgaggactgattt

SEQ ID NO: 961371 - DNA, 33 bp, Homo sapien
taaaacacagtctacacgacatcagttcttccc

SEQ ID NO: 961372 - DNA, 33 bp, Homo sapien
taaaacacagtctacatgacatcagttcttccc

SEQ ID NO: 961373 - DNA, 33 bp, Homo sapien
attctcaaacatatgcaccaaaagatatgtaaa

SEQ ID NO: 961374 - DNA, 33 bp, Homo sapien
attctcaaacatatgcgccaaaagatatgtaaa

SEQ ID NO: 961375 - DNA, 33 bp, Homo sapien
aaacaacagacagtgcagactcgaaatggaggg

SEQ ID NO: 961376 - DNA, 33 bp, Homo sapien
aaacaacagacagtgcggactcgaaatggaggg

SEQ ID NO: 961377 - DNA, 33 bp, Homo sapien
caagtgctcaattataactaatatggtaaaatg

SEQ ID NO: 961378 - DNA, 33 bp, Homo sapien
caagtgctcaattatatctaatatggtaaaatg

SEQ ID NO: 961379 - DNA, 33 bp, Homo sapien
cctaatatttgcatgacactttgcaatttacag

SEQ ID NO: 961380 - DNA, 33 bp, Homo sapien
cctaatatttgcatgatactttgcaatttacag

SEQ ID NO: 961381 - DNA, 33 bp, Homo sapien
aagctaaacaagcagaagatttacaataaatac

SEQ ID NO: 961382 - DNA, 33 bp, Homo sapien
aagctaaacaagcagaggatttacaataaatac

SEQ ID NO: 961383 - DNA, 33 bp, Homo sapien
catgcttcttgctccaacttaatttgtccctta

SEQ ID NO: 961384 - DNA, 33 bp, Homo sapien
catgcttcttgctccagcttaatttgtccctta

SEQ ID NO: 961385 - DNA, 33 bp, Homo sapien
tgtgatcttttggctgccagaggagttattcct

SEQ ID NO: 961386 - DNA, 33 bp, Homo sapien
tgtgatcttttggctgtcagaggagttattcct

SEQ ID NO: 961387 - DNA, 33 bp, Homo sapien
ataacaaagaaagtgaagcatttagcaattcat

SEQ ID NO: 961388 - DNA, 33 bp, Homo sapien
ataacaaagaaagtgatgcatttagcaattcat

SEQ ID NO: 961389 - DNA, 33 bp, Homo sapien
accaaatcaagatggcaaatctcaagcacagtc

SEQ ID NO: 961390 - DNA, 33 bp, Homo sapien
accaaatcaagatggcgaatctcaagcacagtc

SEQ ID NO: 961391 - DNA, 33 bp, Homo sapien
tagtatatccagggcacgagtgacacgtcagtc

SEQ ID NO: 961392 - DNA, 33 bp, Homo sapien
tagtatatccagggcatgagtgacacgtcagtc

SEQ ID NO: 961393 - DNA, 33 bp, Homo sapien
ggatagtgatactaacaaaagagccaacatgag

SEQ ID NO: 961394 - DNA, 33 bp, Homo sapien
ggatagtgatactaaccaaagagccaacatgag

SEQ ID NO: 961395 - DNA, 33 bp, Homo sapien
ttccaatatgctgctcaatgattttagatgatt

SEQ ID NO: 961396 - DNA, 33 bp, Homo sapien
ttccaatatgctgctcgatgattttagatgatt

SEQ ID NO: 961397 - DNA, 33 bp, Homo sapien
tctttaagttgtccgaaatttcctgctgctttt

SEQ ID NO: 961398 - DNA, 33 bp, Homo sapien
tctttaagttgtccgacatttcctgctgctttt

SEQ ID NO: 961399 - DNA, 33 bp, Homo sapien
attttgtgtccctttaaaccagagattcaagtg

SEQ ID NO: 961400 - DNA, 33 bp, Homo sapien
attttgtgtccctttagaccagagattcaagtg

SEQ ID NO: 961401 - DNA, 33 bp, Homo sapien
taaaagcagcaaggagacccatcaaatatttct

SEQ ID NO: 961402 - DNA, 33 bp, Homo sapien
taaaagcagcaaggaggcccatcaaatatttct

SEQ ID NO: 961403 - DNA, 33 bp, Homo sapien
tcccaataagttcccactctctctcctcctgac

SEQ ID NO: 961404 - DNA, 33 bp, Homo sapien
tcccaataagttcccattctctctcctcctgac

SEQ ID NO: 961405 - DNA, 33 bp, Homo sapien
attagcttagagaggaaggaatatggaggactg

SEQ ID NO: 961406 - DNA, 33 bp, Homo sapien
attagcttagagaggatggaatatggaggactg

SEQ ID NO: 961407 - DNA, 33 bp, Homo sapien
ttttagcctgaaattgaagtttgaacctaaaga

SEQ ID NO: 961408 - DNA, 33 bp, Homo sapien
ttttagcctgaaattggagtttgaacctaaaga

SEQ ID NO: 961409 - DNA, 33 bp, Homo sapien
ttgctcagatagtgacaaaggggataaaaccaa

SEQ ID NO: 961410 - DNA, 33 bp, Homo sapien
ttgctcagatagtgacgaaggggataaaaccaa

SEQ ID NO: 961411 - DNA, 33 bp, Homo sapien
ctcatctgtgaaaaaggagtcataatctctgcc

SEQ ID NO: 961412 - DNA, 33 bp, Homo sapien
ctcatctgtgaaaaagtagtcataatctctgcc

SEQ ID NO: 961413 - DNA, 33 bp, Homo sapien
aaagacccattcttcacagaccctgcaggctgc

SEQ ID NO: 961414 - DNA, 33 bp, Homo sapien
aaagacccattcttcagagaccctgcaggctgc

SEQ ID NO: 961415 - DNA, 33 bp, Homo sapien
cgaatcagcctcagagaaacaagccatactcct

SEQ ID NO: 961416 - DNA, 33 bp, Homo sapien
cgaatcagcctcagagcaacaagccatactcct

SEQ ID NO: 961417 - DNA, 33 bp, Homo sapien
ccacagatgaaatgaaatatgagagctgtttta

SEQ ID NO: 961418 - DNA, 33 bp, Homo sapien
ccacagatgaaatgaagtatgagagctgtttta

SEQ ID NO: 961419 - DNA, 33 bp, Homo sapien
gggcttggcggttgagaaaattgcagcaaaatt

SEQ ID NO: 961420 - DNA, 33 bp, Homo sapien
gggcttggcggttgaggaaattgcagcaaaatt

SEQ ID NO: 961421 - DNA, 33 bp, Homo sapien
tacctctgagtgtggccgaactaatgatgcagc

SEQ ID NO: 961422 - DNA, 33 bp, Homo sapien
tacctctgagtgtggctgaactaatgatgcagc

SEQ ID NO: 961423 - DNA, 33 bp, Homo sapien
tggatcccatcttcaaagagcttacaacttagt

SEQ ID NO: 961424 - DNA, 33 bp, Homo sapien
tggatcccatcttcaaggagcttacaacttagt

SEQ ID NO: 961425 - DNA, 33 bp, Homo sapien
taacctggggcctgaaaaggtttagccatgagc

SEQ ID NO: 961426 - DNA, 33 bp, Homo sapien
taacctggggcctgaataggtttagccatgagc

SEQ ID NO: 961427 - DNA, 33 bp, Homo sapien
catttgtgtgtgtaaacggataaatgtacatag

SEQ ID NO: 961428 - DNA, 33 bp, Homo sapien
catttgtgtgtgtaaatggataaatgtacatag

SEQ ID NO: 961429 - DNA, 33 bp, Homo sapien
gaaacatccacaaaaaaggaacttctattgtaa

SEQ ID NO: 961430 - DNA, 33 bp, Homo sapien
gaaacatccacaaaaatggaacttctattgtaa

SEQ ID NO: 961431 - DNA, 33 bp, Homo sapien
ataagcactcagtatacgttaacttctaccagt

SEQ ID NO: 961432 - DNA, 33 bp, Homo sapien
ataagcactcagtatatgttaacttctaccagt

SEQ ID NO: 961433 - DNA, 33 bp, Homo sapien
cagaacaccttagctacagactcacttcctcag

SEQ ID NO: 961434 - DNA, 33 bp, Homo sapien
cagaacaccttagctatagactcacttcctcag

SEQ ID NO: 961435 - DNA, 33 bp, Homo sapien
gggtctcatagctacagctttttctttcctgga

SEQ ID NO: 961436 - DNA, 33 bp, Homo sapien
gggtctcatagctacatctttttctttcctgga

SEQ ID NO: 961437 - DNA, 33 bp, Homo sapien
atgtgacacctttccaagaagtgcggattccct

SEQ ID NO: 961438 - DNA, 33 bp, Homo sapien
atgtgacacctttccaggaagtgcggattccct

SEQ ID NO: 961439 - DNA, 33 bp, Homo sapien
tttatggcttaatcagcagttgcaatttgttag

SEQ ID NO: 961440 - DNA, 33 bp, Homo sapien
tttatggcttaatcagtagttgcaatttgttag

SEQ ID NO: 961441 - DNA, 33 bp, Homo sapien
ccaagtcaccgagagacagcaattacatcagaa

SEQ ID NO: 961442 - DNA, 33 bp, Homo sapien
ccaagtcaccgagagagagcaattacatcagaa

SEQ ID NO: 961443 - DNA, 33 bp, Homo sapien
taaactcattacaagcgcggttatcaacctgaa

SEQ ID NO: 961444 - DNA, 33 bp, Homo sapien
taaactcattacaagctcggttatcaacctgaa

SEQ ID NO: 961445 - DNA, 33 bp, Homo sapien
gcacttgtgaaagttaaagatttagcatgaaca

SEQ ID NO: 961446 - DNA, 33 bp, Homo sapien
gcacttgtgaaagttagagatttagcatgaaca

SEQ ID NO: 961447 - DNA, 33 bp, Homo sapien
tggaagctgctcagaaagtttcaagaggtcttt

SEQ ID NO: 961448 - DNA, 33 bp, Homo sapien
tggaagctgctcagaaggtttcaagaggtcttt

SEQ ID NO: 961449 - DNA, 33 bp, Homo sapien
ctcttgtctctgtcagaagaaaaaaataaaata

SEQ ID NO: 961450 - DNA, 33 bp, Homo sapien
ctcttgtctctgtcagcagaaaaaaataaaata

SEQ ID NO: 961451 - DNA, 33 bp, Homo sapien
tggagctagaaagacaatcacaaaccgaggact

SEQ ID NO: 961452 - DNA, 33 bp, Homo sapien
tggagctagaaagacagtcacaaaccgaggact

SEQ ID NO: 961453 - DNA, 33 bp, Homo sapien
tcgtgattctgtgcaacatgtcgcagggtgcag

SEQ ID NO: 961454 - DNA, 33 bp, Homo sapien
tcgtgattctgtgcaatatgtcgcagggtgcag

SEQ ID NO: 961455 - DNA, 33 bp, Homo sapien
gtcactttgtcaatatcactgtcggatgctgag

SEQ ID NO: 961456 - DNA, 33 bp, Homo sapien
gtcactttgtcaatattactgtcggatgctgag

SEQ ID NO: 961457 - DNA, 33 bp, Homo sapien
aatcaagctcagtgggaaaatgggaacattgaa

SEQ ID NO: 961458 - DNA, 33 bp, Homo sapien
aatcaagctcagtggggaaatgggaacattgaa

SEQ ID NO: 961459 - DNA, 33 bp, Homo sapien
gcaacctcatgaaagacgctgagtcagaatcac

SEQ ID NO: 961460 - DNA, 33 bp, Homo sapien
gcaacctcatgaaagatgctgagtcagaatcac

SEQ ID NO: 961461 - DNA, 33 bp, Homo sapien
atcaccatcaaccctcaaagcaaatccctccat

SEQ ID NO: 961462 - DNA, 33 bp, Homo sapien
atcaccatcaaccctctaagcaaatccctccat

SEQ ID NO: 961463 - DNA, 33 bp, Homo sapien
acctatttgggaagcacgatatttctaggggtc

SEQ ID NO: 961464 - DNA, 33 bp, Homo sapien
acctatttgggaagcaggatatttctaggggtc

SEQ ID NO: 961465 - DNA, 33 bp, Homo sapien
gcacttctaaccacaacagatagactctgatac

SEQ ID NO: 961466 - DNA, 33 bp, Homo sapien
gcacttctaaccacaatagatagactctgatac

SEQ ID NO: 961467 - DNA, 33 bp, Homo sapien
aaggtaatttcaagcacagaattgttccaccat

SEQ ID NO: 961468 - DNA, 33 bp, Homo sapien
aaggtaatttcaagcagagaattgttccaccat

SEQ ID NO: 961469 - DNA, 33 bp, Homo sapien
agactttgcagacagacgttgcacataaagagc

SEQ ID NO: 961470 - DNA, 33 bp, Homo sapien
agactttgcagacagatgttgcacataaagagc

SEQ ID NO: 961471 - DNA, 33 bp, Homo sapien
gatgaatctaaaacacacatttctaagtgaaaa

SEQ ID NO: 961472 - DNA, 33 bp, Homo sapien
gatgaatctaaaacacgcatttctaagtgaaaa

SEQ ID NO: 961473 - DNA, 33 bp, Homo sapien
aagagaggtgaataaaagctgttgaatgaaaga

SEQ ID NO: 961474 - DNA, 33 bp, Homo sapien
aagagaggtgaataaaggctgttgaatgaaaga

SEQ ID NO: 961475 - DNA, 33 bp, Homo sapien
cgagttaataagatacagaatcctagtatccct

SEQ ID NO: 961476 - DNA, 33 bp, Homo sapien
cgagttaataagatactgaatcctagtatccct

SEQ ID NO: 961477 - DNA, 33 bp, Homo sapien
cctctggacttgttcacctcccagttaccccat

SEQ ID NO: 961478 - DNA, 33 bp, Homo sapien
cctctggacttgttcatctcccagttaccccat

SEQ ID NO: 961479 - DNA, 33 bp, Homo sapien
tttcatcaggagattacgatgatttgtgttctc

SEQ ID NO: 961480 - DNA, 33 bp, Homo sapien
tttcatcaggagattatgatgatttgtgttctc

SEQ ID NO: 961481 - DNA, 33 bp, Homo sapien
ctcttgccacaagccaatgcctcgctggcttgg

SEQ ID NO: 961482 - DNA, 33 bp, Homo sapien
ctcttgccacaagccagtgcctcgctggcttgg

SEQ ID NO: 961483 - DNA, 33 bp, Homo sapien
gccccatagctgacacagtacacagctcataaa

SEQ ID NO: 961484 - DNA, 33 bp, Homo sapien
gccccatagctgacacggtacacagctcataaa

SEQ ID NO: 961485 - DNA, 33 bp, Homo sapien
gagcacgtggatagccagagcaagaagaagatc

SEQ ID NO: 961486 - DNA, 33 bp, Homo sapien
gagcacgtggatagccggagcaagaagaagatc

SEQ ID NO: 961487 - DNA, 33 bp, Homo sapien
cattatagagcaataacaataatcacttacata

SEQ ID NO: 961488 - DNA, 33 bp, Homo sapien
cattatagagcaataataataatcacttacata

SEQ ID NO: 961489 - DNA, 33 bp, Homo sapien
tcaaactgttggaccacggcctagagcaggagc

SEQ ID NO: 961490 - DNA, 33 bp, Homo sapien
tcaaactgttggaccagggcctagagcaggagc

SEQ ID NO: 961491 - DNA, 33 bp, Homo sapien
gactccttcctcttcaagtgacttcatttccag

SEQ ID NO: 961492 - DNA, 33 bp, Homo sapien
gactccttcctcttcacgtgacttcatttccag

SEQ ID NO: 961493 - DNA, 33 bp, Homo sapien
atcttgttaaatcacaatagttctagatgttct

SEQ ID NO: 961494 - DNA, 33 bp, Homo sapien
atcttgttaaatcacagtagttctagatgttct

SEQ ID NO: 961495 - DNA, 33 bp, Homo sapien
atagtagccaacagtaataactgctaatgtttg

SEQ ID NO: 961496 - DNA, 33 bp, Homo sapien
atagtagccaacagtagtaactgctaatgtttg

SEQ ID NO: 961497 - DNA, 33 bp, Homo sapien
accatccttgccttcaacaagggcagaatatcc

SEQ ID NO: 961498 - DNA, 33 bp, Homo sapien
accatccttgccttcaccaagggcagaatatcc

SEQ ID NO: 961499 - DNA, 33 bp, Homo sapien
ccagccacatgatactaacgaacaggtttcaca

SEQ ID NO: 961500 - DNA, 33 bp, Homo sapien
ccagccacatgatacttacgaacaggtttcaca

SEQ ID NO: 961501 - DNA, 33 bp, Homo sapien
ctaatacaacatccaagatataagaagtgctgt

SEQ ID NO: 961502 - DNA, 33 bp, Homo sapien
ctaatacaacatccaatatataagaagtgctgt

SEQ ID NO: 961503 - DNA, 33 bp, Homo sapien
cttccatgtttcctaaggagctcgtgtttatcc

SEQ ID NO: 961504 - DNA, 33 bp, Homo sapien
cttccatgtttcctaatgagctcgtgtttatcc

SEQ ID NO: 961505 - DNA, 33 bp, Homo sapien
atgtcacactcatatcactatcatttcactctg

SEQ ID NO: 961506 - DNA, 33 bp, Homo sapien
atgtcacactcatatcgctatcatttcactctg

SEQ ID NO: 961507 - DNA, 33 bp, Homo sapien
aagaataaatgaacccacggagttcagaaggaa

SEQ ID NO: 961508 - DNA, 33 bp, Homo sapien
aagaataaatgaacccgcggagttcagaaggaa

SEQ ID NO: 961509 - DNA, 33 bp, Homo sapien
tgacttagagaggcaaagaaaggaataacagag

SEQ ID NO: 961510 - DNA, 33 bp, Homo sapien
tgacttagagaggcaacgaaaggaataacagag

SEQ ID NO: 961511 - DNA, 33 bp, Homo sapien
tccttctgagaggccacaagtgaaaggtcccca

SEQ ID NO: 961512 - DNA, 33 bp, Homo sapien
tccttctgagaggccataagtgaaaggtcccca

SEQ ID NO: 961513 - DNA, 33 bp, Homo sapien
accagcaccgtgacaccggagcacaagcagaag

SEQ ID NO: 961514 - DNA, 33 bp, Homo sapien
accagcaccgtgacactggagcacaagcagaag

SEQ ID NO: 961515 - DNA, 33 bp, Homo sapien
gtatataccagtaacacgtatatcgttaatgct

SEQ ID NO: 961516 - DNA, 33 bp, Homo sapien
gtatataccagtaacatgtatatcgttaatgct

SEQ ID NO: 961517 - DNA, 33 bp, Homo sapien
attccttgcattagacacagtgaaagaacacca

SEQ ID NO: 961518 - DNA, 33 bp, Homo sapien
attccttgcattagacccagtgaaagaacacca

SEQ ID NO: 961519 - DNA, 33 bp, Homo sapien
gtcgcaggaggaagataagagatgttagagcag

SEQ ID NO: 961520 - DNA, 33 bp, Homo sapien
gtcgcaggaggaagattagagatgttagagcag

SEQ ID NO: 961521 - DNA, 33 bp, Homo sapien
gatagagacaggactaaggccaagaagaaagag

SEQ ID NO: 961522 - DNA, 33 bp, Homo sapien
gatagagacaggactagggccaagaagaaagag

SEQ ID NO: 961523 - DNA, 33 bp, Homo sapien
ataggttagagccaaactatccagtcactgtgg

SEQ ID NO: 961524 - DNA, 33 bp, Homo sapien
ataggttagagccaaagtatccagtcactgtgg

SEQ ID NO: 961525 - DNA, 33 bp, Homo sapien
ttctttttaaatggataataccgatggaaataa

SEQ ID NO: 961526 - DNA, 33 bp, Homo sapien
ttctttttaaatggatgataccgatggaaataa

SEQ ID NO: 961527 - DNA, 33 bp, Homo sapien
cactaaatctacaggccacaaaaagaggtcctg

SEQ ID NO: 961528 - DNA, 33 bp, Homo sapien
cactaaatctacaggctacaaaaagaggtcctg

SEQ ID NO: 961529 - DNA, 33 bp, Homo sapien
ctcaagacttcttcttaaaccaaatttctcacc

SEQ ID NO: 961530 - DNA, 33 bp, Homo sapien
ctcaagacttcttcttgaaccaaatttctcacc

SEQ ID NO: 961531 - DNA, 33 bp, Homo sapien
tgtgatggttagtgccaagtgtcaacctgattg

SEQ ID NO: 961532 - DNA, 33 bp, Homo sapien
tgtgatggttagtgccgagtgtcaacctgattg

SEQ ID NO: 961533 - DNA, 33 bp, Homo sapien
aacccacattgctacaatcaccatgactcagaa

SEQ ID NO: 961534 - DNA, 33 bp, Homo sapien
aacccacattgctacagtcaccatgactcagaa

SEQ ID NO: 961535 - DNA, 33 bp, Homo sapien
tctgccttccttattagcgtcttcacagcaccc

SEQ ID NO: 961536 - DNA, 33 bp, Homo sapien
tctgccttccttattatcgtcttcacagcaccc

SEQ ID NO: 961537 - DNA, 33 bp, Homo sapien
ggtctagagcagcaaagcaccacaaattccagc

SEQ ID NO: 961538 - DNA, 33 bp, Homo sapien
ggtctagagcagcaaatcaccacaaattccagc

SEQ ID NO: 961539 - DNA, 33 bp, Homo sapien
acattatcacattcaaccaacttttcattttaa

SEQ ID NO: 961540 - DNA, 33 bp, Homo sapien
acattatcacattcaatcaacttttcattttaa

SEQ ID NO: 961541 - DNA, 33 bp, Homo sapien
tatttggaccttctacaaggttatctcagctgg

SEQ ID NO: 961542 - DNA, 33 bp, Homo sapien
tatttggaccttctacgaggttatctcagctgg

SEQ ID NO: 961543 - DNA, 33 bp, Homo sapien
tgcaggatatgacctacagctttgtgggatgca

SEQ ID NO: 961544 - DNA, 33 bp, Homo sapien
tgcaggatatgacctatagctttgtgggatgca

SEQ ID NO: 961545 - DNA, 33 bp, Homo sapien
ctaagcaactctaccccctaggtccagcaccct

SEQ ID NO: 961546 - DNA, 33 bp, Homo sapien
ctaagcaactctaccctctaggtccagcaccct

SEQ ID NO: 961547 - DNA, 33 bp, Homo sapien
ctgtttccaagaaatacgctgtttagtgacatt

SEQ ID NO: 961548 - DNA, 33 bp, Homo sapien
ctgtttccaagaaatatgctgtttagtgacatt

SEQ ID NO: 961549 - DNA, 33 bp, Homo sapien
cactggcctggaactgcaacctgataaccaaag

SEQ ID NO: 961550 - DNA, 33 bp, Homo sapien
cactggcctggaactggaacctgataaccaaag

SEQ ID NO: 961551 - DNA, 33 bp, Homo sapien
cctcccgcagtcattccgaaatatttcgagtgt

SEQ ID NO: 961552 - DNA, 33 bp, Homo sapien
cctcccgcagtcattctgaaatatttcgagtgt

SEQ ID NO: 961553 - DNA, 33 bp, Homo sapien
aataagtacagatgaaatggttttggggacaca

SEQ ID NO: 961554 - DNA, 33 bp, Homo sapien
aataagtacagatgaagtggttttggggacaca

SEQ ID NO: 961555 - DNA, 33 bp, Homo sapien
attaaattaatacttacgtgcaactactgtgta

SEQ ID NO: 961556 - DNA, 33 bp, Homo sapien
attaaattaatacttatgtgcaactactgtgta

SEQ ID NO: 961557 - DNA, 33 bp, Homo sapien
gcgagtagttgggagcagatcatttttctcact

SEQ ID NO: 961558 - DNA, 33 bp, Homo sapien
gcgagtagttgggagcggatcatttttctcact

SEQ ID NO: 961559 - DNA, 33 bp, Homo sapien
cccttattaaagccgccgagactctcaggaagt

SEQ ID NO: 961560 - DNA, 33 bp, Homo sapien
cccttattaaagccgctgagactctcaggaagt

SEQ ID NO: 961561 - DNA, 33 bp, Homo sapien
gccacagcggaaaatacgtttcttgctgtggat

SEQ ID NO: 961562 - DNA, 33 bp, Homo sapien
gccacagcggaaaatatgtttcttgctgtggat

SEQ ID NO: 961563 - DNA, 33 bp, Homo sapien
ggatgccatctcaactcacattttttaagcccc

SEQ ID NO: 961564 - DNA, 33 bp, Homo sapien
ggatgccatctcaacttacattttttaagcccc

SEQ ID NO: 961565 - DNA, 33 bp, Homo sapien
tattagtcacatttggcataactgaacctttcc

SEQ ID NO: 961566 - DNA, 33 bp, Homo sapien
tattagtcacatttggtataactgaacctttcc

SEQ ID NO: 961567 - DNA, 33 bp, Homo sapien
ttaaatgcagacttcgcagaatcacttacaacc

SEQ ID NO: 961568 - DNA, 33 bp, Homo sapien
ttaaatgcagacttcggagaatcacttacaacc

SEQ ID NO: 961569 - DNA, 33 bp, Homo sapien
ataattacaaactgtaataagcagcatgaagga

SEQ ID NO: 961570 - DNA, 33 bp, Homo sapien
ataattacaaactgtagtaagcagcatgaagga

SEQ ID NO: 961571 - DNA, 33 bp, Homo sapien
ttgagctttcactgggaacggcatgttgaagta

SEQ ID NO: 961572 - DNA, 33 bp, Homo sapien
ttgagctttcactgggcacggcatgttgaagta

SEQ ID NO: 961573 - DNA, 33 bp, Homo sapien
agaccaccattctctaacttgcctattcaagga

SEQ ID NO: 961574 - DNA, 33 bp, Homo sapien
agaccaccattctctaccttgcctattcaagga

SEQ ID NO: 961575 - DNA, 33 bp, Homo sapien
gagctgattcacagaacaaatgcatgcaaacct

SEQ ID NO: 961576 - DNA, 33 bp, Homo sapien
gagctgattcacagaataaatgcatgcaaacct

SEQ ID NO: 961577 - DNA, 33 bp, Homo sapien
ggatatcggatttcaccgagaaggggactcagg

SEQ ID NO: 961578 - DNA, 33 bp, Homo sapien
ggatatcggatttcactgagaaggggactcagg

SEQ ID NO: 961579 - DNA, 33 bp, Homo sapien
gtagtaaaactccttaggctgattgcttagggg

SEQ ID NO: 961580 - DNA, 33 bp, Homo sapien
gtagtaaaactccttatgctgattgcttagggg

SEQ ID NO: 961581 - DNA, 33 bp, Homo sapien
cattagatgtcagacactgggtcaaggatgcaa

SEQ ID NO: 961582 - DNA, 33 bp, Homo sapien
cattagatgtcagacattgggtcaaggatgcaa

SEQ ID NO: 961583 - DNA, 33 bp, Homo sapien
catgcatgggctgtgacagcatcgtaacaagga

SEQ ID NO: 961584 - DNA, 33 bp, Homo sapien
catgcatgggctgtgagagcatcgtaacaagga

SEQ ID NO: 961585 - DNA, 33 bp, Homo sapien
atgaaaggacaaggacacagtgggcaccaggcc

SEQ ID NO: 961586 - DNA, 33 bp, Homo sapien
atgaaaggacaaggacgcagtgggcaccaggcc

SEQ ID NO: 961587 - DNA, 33 bp, Homo sapien
agggtggggggctaccaagcctgcataacaaag

SEQ ID NO: 961588 - DNA, 33 bp, Homo sapien
agggtggggggctaccgagcctgcataacaaag

SEQ ID NO: 961589 - DNA, 33 bp, Homo sapien
agcttccgatctgaaacgagctcggcctcccca

SEQ ID NO: 961590 - DNA, 33 bp, Homo sapien
agcttccgatctgaaatgagctcggcctcccca

SEQ ID NO: 961591 - DNA, 33 bp, Homo sapien
aagattcctgtaaggacgcaaggctttctgcac

SEQ ID NO: 961592 - DNA, 33 bp, Homo sapien
aagattcctgtaaggatgcaaggctttctgcac

SEQ ID NO: 961593 - DNA, 33 bp, Homo sapien
ttcactgtaagatggaaacattaataggctccg

SEQ ID NO: 961594 - DNA, 33 bp, Homo sapien
ttcactgtaagatggagacattaataggctccg

SEQ ID NO: 961595 - DNA, 33 bp, Homo sapien
agggatgcatgctttacgcagattccacttgtt

SEQ ID NO: 961596 - DNA, 33 bp, Homo sapien
agggatgcatgctttatgcagattccacttgtt

SEQ ID NO: 961597 - DNA, 33 bp, Homo sapien
atctacggagagaaataacaaaggatgctaggg

SEQ ID NO: 961598 - DNA, 33 bp, Homo sapien
atctacggagagaaattacaaaggatgctaggg

SEQ ID NO: 961599 - DNA, 33 bp, Homo sapien
tcattttcacacaacactggcgaagattcaaaa

SEQ ID NO: 961600 - DNA, 33 bp, Homo sapien
tcattttcacacaacagtggcgaagattcaaaa

SEQ ID NO: 961601 - DNA, 33 bp, Homo sapien
gggtccttctattggcccaaaggaggtatttgc

SEQ ID NO: 961602 - DNA, 33 bp, Homo sapien
gggtccttctattggctcaaaggaggtatttgc

SEQ ID NO: 961603 - DNA, 33 bp, Homo sapien
ttcagttgcaaaaaccaggattggtgccttcca

SEQ ID NO: 961604 - DNA, 33 bp, Homo sapien
ttcagttgcaaaaaccgggattggtgccttcca

SEQ ID NO: 961605 - DNA, 33 bp, Homo sapien
gtggctctaagtacggccagaggtcgatccacc

SEQ ID NO: 961606 - DNA, 33 bp, Homo sapien
gtggctctaagtacggtcagaggtcgatccacc

SEQ ID NO: 961607 - DNA, 33 bp, Homo sapien
catggttcctttttaaatgctttcttctctgag

SEQ ID NO: 961608 - DNA, 33 bp, Homo sapien
catggttcctttttaagtgctttcttctctgag

SEQ ID NO: 961609 - DNA, 33 bp, Homo sapien
ggccaaaagatccaacactgggtatctgaggac

SEQ ID NO: 961610 - DNA, 33 bp, Homo sapien
ggccaaaagatccaaccctgggtatctgaggac

SEQ ID NO: 961611 - DNA, 33 bp, Homo sapien
tgagccacagagcagacggttagagggacctag

SEQ ID NO: 961612 - DNA, 33 bp, Homo sapien
tgagccacagagcagatggttagagggacctag

SEQ ID NO: 961613 - DNA, 33 bp, Homo sapien
acatctggtttcctgcgactccaagacttcctc

SEQ ID NO: 961614 - DNA, 33 bp, Homo sapien
acatctggtttcctgctactccaagacttcctc

SEQ ID NO: 961615 - DNA, 33 bp, Homo sapien
tacaactcaatagcagaaagacaaataacccag

SEQ ID NO: 961616 - DNA, 33 bp, Homo sapien
tacaactcaatagcaggaagacaaataacccag

SEQ ID NO: 961617 - DNA, 33 bp, Homo sapien
ccctgtctctacagaaaataacacaataagcta

SEQ ID NO: 961618 - DNA, 33 bp, Homo sapien
ccctgtctctacagaagataacacaataagcta

SEQ ID NO: 961619 - DNA, 33 bp, Homo sapien
ttcccaggagtcccaacgccctttttctcaaag

SEQ ID NO: 961620 - DNA, 33 bp, Homo sapien
ttcccaggagtcccaaggccctttttctcaaag

SEQ ID NO: 961621 - DNA, 33 bp, Homo sapien
ttgtaacatagagaaaagagggttcaaatttaa

SEQ ID NO: 961622 - DNA, 33 bp, Homo sapien
ttgtaacatagagaaaggagggttcaaatttaa

SEQ ID NO: 961623 - DNA, 33 bp, Homo sapien
ctgcctcaccagcaaccgcgttaccttcggact

SEQ ID NO: 961624 - DNA, 33 bp, Homo sapien
ctgcctcaccagcaactgcgttaccttcggact

SEQ ID NO: 961625 - DNA, 33 bp, Homo sapien
tactaaaattcacaatcagctgtatctcacact

SEQ ID NO: 961626 - DNA, 33 bp, Homo sapien
tactaaaattcacaattagctgtatctcacact

SEQ ID NO: 961627 - DNA, 33 bp, Homo sapien
taaacacagcaaatctcaccttgaaatggttcc

SEQ ID NO: 961628 - DNA, 33 bp, Homo sapien
taaacacagcaaatctgaccttgaaatggttcc

SEQ ID NO: 961629 - DNA, 33 bp, Homo sapien
aaagaaattctgaaacgactttatgtgcatatt

SEQ ID NO: 961630 - DNA, 33 bp, Homo sapien
aaagaaattctgaaactactttatgtgcatatt

SEQ ID NO: 961631 - DNA, 33 bp, Homo sapien
actcaagatgcaagacaaaacttataatatgtt

SEQ ID NO: 961632 - DNA, 33 bp, Homo sapien
actcaagatgcaagaccaaacttataatatgtt

SEQ ID NO: 961633 - DNA, 33 bp, Homo sapien
gaaaggaattgataaacaagcacgcttaaacag

SEQ ID NO: 961634 - DNA, 33 bp, Homo sapien
gaaaggaattgataaataagcacgcttaaacag

SEQ ID NO: 961635 - DNA, 33 bp, Homo sapien
tgcttgaattgaattcactccaggtttccatta

SEQ ID NO: 961636 - DNA, 33 bp, Homo sapien
tgcttgaattgaattcgctccaggtttccatta

SEQ ID NO: 961637 - DNA, 33 bp, Homo sapien
cctaagatagagtcggcaatcattgttgccatg

SEQ ID NO: 961638 - DNA, 33 bp, Homo sapien
cctaagatagagtcggtaatcattgttgccatg

SEQ ID NO: 961639 - DNA, 33 bp, Homo sapien
attaagctggtgtaaaacacttttcccactccc

SEQ ID NO: 961640 - DNA, 33 bp, Homo sapien
attaagctggtgtaaaccacttttcccactccc

SEQ ID NO: 961641 - DNA, 33 bp, Homo sapien
ggctattcaatgataaccagtcttccgtcttat

SEQ ID NO: 961642 - DNA, 33 bp, Homo sapien
ggctattcaatgataatcagtcttccgtcttat

SEQ ID NO: 961643 - DNA, 33 bp, Homo sapien
ggcattcctggaaccaagtttctgtagtggtac

SEQ ID NO: 961644 - DNA, 33 bp, Homo sapien
ggcattcctggaaccatgtttctgtagtggtac

SEQ ID NO: 961645 - DNA, 33 bp, Homo sapien
gggtaaaatgacttcaaagcagttccggaagtg

SEQ ID NO: 961646 - DNA, 33 bp, Homo sapien
gggtaaaatgacttcagagcagttccggaagtg

SEQ ID NO: 961647 - DNA, 33 bp, Homo sapien
tactggggctctgatcacctttacccttgcttt

SEQ ID NO: 961648 - DNA, 33 bp, Homo sapien
tactggggctctgatctcctttacccttgcttt

SEQ ID NO: 961649 - DNA, 33 bp, Homo sapien
gcttagcagaggtaaacgtagctcttgtttttc

SEQ ID NO: 961650 - DNA, 33 bp, Homo sapien
gcttagcagaggtaaatgtagctcttgtttttc

SEQ ID NO: 961651 - DNA, 33 bp, Homo sapien
gctggaccttcaggaccctttccctaatttgtg

SEQ ID NO: 961652 - DNA, 33 bp, Homo sapien
gctggaccttcaggactctttccctaatttgtg

SEQ ID NO: 961653 - DNA, 33 bp, Homo sapien
aatattcctggataaccgtcaaattgttaagat

SEQ ID NO: 961654 - DNA, 33 bp, Homo sapien
aatattcctggataactgtcaaattgttaagat

SEQ ID NO: 961655 - DNA, 33 bp, Homo sapien
agtgaaagtaactcaaatgtccttcgatagggg

SEQ ID NO: 961656 - DNA, 33 bp, Homo sapien
agtgaaagtaactcaagtgtccttcgatagggg

SEQ ID NO: 961657 - DNA, 33 bp, Homo sapien
atgttctggaggcagacagtggtaacaatgtga

SEQ ID NO: 961658 - DNA, 33 bp, Homo sapien
atgttctggaggcagatagtggtaacaatgtga

SEQ ID NO: 961659 - DNA, 33 bp, Homo sapien
cagacatggtattaccacttgaaggaaattaca

SEQ ID NO: 961660 - DNA, 33 bp, Homo sapien
cagacatggtattaccgcttgaaggaaattaca

SEQ ID NO: 961661 - DNA, 33 bp, Homo sapien
tgatcagtgtaagagacggcatttgttaattta

SEQ ID NO: 961662 - DNA, 33 bp, Homo sapien
tgatcagtgtaagagagggcatttgttaattta

SEQ ID NO: 961663 - DNA, 33 bp, Homo sapien
tgagctatcagtgctgcaaatttttaggaaaat

SEQ ID NO: 961664 - DNA, 33 bp, Homo sapien
tgagctatcagtgctgtaaatttttaggaaaat

SEQ ID NO: 961665 - DNA, 33 bp, Homo sapien
agtcacttcggcgatggaaacgcgactttgcgg

SEQ ID NO: 961666 - DNA, 33 bp, Homo sapien
agtcacttcggcgatgtaaacgcgactttgcgg

SEQ ID NO: 961667 - DNA, 33 bp, Homo sapien
gcctttgaatgtaggacggaattaagttaaata

SEQ ID NO: 961668 - DNA, 33 bp, Homo sapien
gcctttgaatgtaggatggaattaagttaaata

SEQ ID NO: 961669 - DNA, 33 bp, Homo sapien
agctcttggcgcctgcaattcccaagtgggatt

SEQ ID NO: 961670 - DNA, 33 bp, Homo sapien
agctcttggcgcctgcgattcccaagtgggatt

SEQ ID NO: 961671 - DNA, 33 bp, Homo sapien
ggtctatctttgaccaatggaactgcaaatcaa

SEQ ID NO: 961672 - DNA, 33 bp, Homo sapien
ggtctatctttgaccagtggaactgcaaatcaa

SEQ ID NO: 961673 - DNA, 33 bp, Homo sapien
taagcctcttacaatcacattcccaaagaaaac

SEQ ID NO: 961674 - DNA, 33 bp, Homo sapien
taagcctcttacaatcgcattcccaaagaaaac

SEQ ID NO: 961675 - DNA, 33 bp, Homo sapien
gaacaaaggaagaccactgatgagaataaggaa

SEQ ID NO: 961676 - DNA, 33 bp, Homo sapien
gaacaaaggaagaccattgatgagaataaggaa

SEQ ID NO: 961677 - DNA, 33 bp, Homo sapien
aacacattggtgattcccaaatccctttcctca

SEQ ID NO: 961678 - DNA, 33 bp, Homo sapien
aacacattggtgattctcaaatccctttcctca

SEQ ID NO: 961679 - DNA, 33 bp, Homo sapien
tcctatctgcccccaagttcgctgcagctcata

SEQ ID NO: 961680 - DNA, 33 bp, Homo sapien
tcctatctgcccccaatttcgctgcagctcata

SEQ ID NO: 961681 - DNA, 33 bp, Homo sapien
atgtaattaacagttacattctaatctcaatag

SEQ ID NO: 961682 - DNA, 33 bp, Homo sapien
atgtaattaacagttatattctaatctcaatag

SEQ ID NO: 961683 - DNA, 33 bp, Homo sapien
ctaaatgcctggtacagacctgaatgtgataga

SEQ ID NO: 961684 - DNA, 33 bp, Homo sapien
ctaaatgcctggtacatacctgaatgtgataga

SEQ ID NO: 961685 - DNA, 33 bp, Homo sapien
gtctacaagttcataccgatatccatccatcca

SEQ ID NO: 961686 - DNA, 33 bp, Homo sapien
gtctacaagttcatactgatatccatccatcca

SEQ ID NO: 961687 - DNA, 33 bp, Homo sapien
atcatttgcagacgccactggcgagagcctcca

SEQ ID NO: 961688 - DNA, 33 bp, Homo sapien
atcatttgcagacgccgctggcgagagcctcca

SEQ ID NO: 961689 - DNA, 33 bp, Homo sapien
acagagttctcagggaaaacgccgcgagtgttc

SEQ ID NO: 961690 - DNA, 33 bp, Homo sapien
acagagttctcagggataacgccgcgagtgttc

SEQ ID NO: 961691 - DNA, 33 bp, Homo sapien
ctcttaggctagagtcccttaatctacttatgt

SEQ ID NO: 961692 - DNA, 33 bp, Homo sapien
ctcttaggctagagtctcttaatctacttatgt

SEQ ID NO: 961693 - DNA, 33 bp, Homo sapien
aagcaggaatctagtgcaagaattggaggcagc

SEQ ID NO: 961694 - DNA, 33 bp, Homo sapien
aagcaggaatctagtgtaagaattggaggcagc

SEQ ID NO: 961695 - DNA, 33 bp, Homo sapien
tcctatctaaagcctaagcatggatacatatgt

SEQ ID NO: 961696 - DNA, 33 bp, Homo sapien
tcctatctaaagcctatgcatggatacatatgt

SEQ ID NO: 961697 - DNA, 33 bp, Homo sapien
gaggccaaggaacaacaacattgaatgtgtgtg

SEQ ID NO: 961698 - DNA, 33 bp, Homo sapien
gaggccaaggaacaaccacattgaatgtgtgtg

SEQ ID NO: 961699 - DNA, 33 bp, Homo sapien
tagctttattataatgccagtggccaaaacgcc

SEQ ID NO: 961700 - DNA, 33 bp, Homo sapien
tagctttattataatgtcagtggccaaaacgcc

SEQ ID NO: 961701 - DNA, 33 bp, Homo sapien
tgtgtggctaggtgtaagtcacttaatcttttg

SEQ ID NO: 961702 - DNA, 33 bp, Homo sapien
tgtgtggctaggtgtaggtcacttaatcttttg

SEQ ID NO: 961703 - DNA, 33 bp, Homo sapien
atataaatgaaatgtaagtgaatttggtcattc

SEQ ID NO: 961704 - DNA, 33 bp, Homo sapien
atataaatgaaatgtacgtgaatttggtcattc

SEQ ID NO: 961705 - DNA, 33 bp, Homo sapien
tttttagaccatatacagtaacctgacattgcc

SEQ ID NO: 961706 - DNA, 33 bp, Homo sapien
tttttagaccatatacggtaacctgacattgcc

SEQ ID NO: 961707 - DNA, 33 bp, Homo sapien
acacacgcacaagccaatcttgcctcctgagct

SEQ ID NO: 961708 - DNA, 33 bp, Homo sapien
acacacgcacaagccagtcttgcctcctgagct

SEQ ID NO: 961709 - DNA, 33 bp, Homo sapien
ttccaggactggtcaccgtaggattggaggtga

SEQ ID NO: 961710 - DNA, 33 bp, Homo sapien
ttccaggactggtcactgtaggattggaggtga

SEQ ID NO: 961711 - DNA, 33 bp, Homo sapien
atgttgcccagagaggcaataaacttattaata

SEQ ID NO: 961712 - DNA, 33 bp, Homo sapien
atgttgcccagagagggaataaacttattaata

SEQ ID NO: 961713 - DNA, 33 bp, Homo sapien
gcacctacactgaatacgggcagaaacgataag

SEQ ID NO: 961714 - DNA, 33 bp, Homo sapien
gcacctacactgaatatgggcagaaacgataag

SEQ ID NO: 961715 - DNA, 33 bp, Homo sapien
tgtgtttcttcttgacagaccctggtgcttccc

SEQ ID NO: 961716 - DNA, 33 bp, Homo sapien
tgtgtttcttcttgacggaccctggtgcttccc

SEQ ID NO: 961717 - DNA, 33 bp, Homo sapien
tgaaattagactgaaacggacatgatttaaaga

SEQ ID NO: 961718 - DNA, 33 bp, Homo sapien
tgaaattagactgaaatggacatgatttaaaga

SEQ ID NO: 961719 - DNA, 33 bp, Homo sapien
catctagtggaaaagagccccttgcacagccgt

SEQ ID NO: 961720 - DNA, 33 bp, Homo sapien
catctagtggaaaagatccccttgcacagccgt

SEQ ID NO: 961721 - DNA, 33 bp, Homo sapien
cacacatcaaacataccggggaagagatgccag

SEQ ID NO: 961722 - DNA, 33 bp, Homo sapien
cacacatcaaacatactggggaagagatgccag

SEQ ID NO: 961723 - DNA, 33 bp, Homo sapien
agaagagcaacaagaacctaacaagactggatt

SEQ ID NO: 961724 - DNA, 33 bp, Homo sapien
agaagagcaacaagaatctaacaagactggatt

SEQ ID NO: 961725 - DNA, 33 bp, Homo sapien
gatctgccatctacacactatgtgacattggtc

SEQ ID NO: 961726 - DNA, 33 bp, Homo sapien
gatctgccatctacacgctatgtgacattggtc

SEQ ID NO: 961727 - DNA, 33 bp, Homo sapien
aaaggagaagctctgcaattagaccaatgtcac

SEQ ID NO: 961728 - DNA, 33 bp, Homo sapien
aaaggagaagctctgccattagaccaatgtcac

SEQ ID NO: 961729 - DNA, 33 bp, Homo sapien
ccccatgttaggtcaacgtagagatatttgcct

SEQ ID NO: 961730 - DNA, 33 bp, Homo sapien
ccccatgttaggtcaatgtagagatatttgcct

SEQ ID NO: 961731 - DNA, 33 bp, Homo sapien
aacaggcacctcggcactgaaatacctccagtt

SEQ ID NO: 961732 - DNA, 33 bp, Homo sapien
aacaggcacctcggcattgaaatacctccagtt

SEQ ID NO: 961733 - DNA, 33 bp, Homo sapien
tcacacagcacccagaaagtccttaagagggaa

SEQ ID NO: 961734 - DNA, 33 bp, Homo sapien
tcacacagcacccagagagtccttaagagggaa

SEQ ID NO: 961735 - DNA, 33 bp, Homo sapien
aagattttctaagtcactaacctgtaatcttcc

SEQ ID NO: 961736 - DNA, 33 bp, Homo sapien
aagattttctaagtcattaacctgtaatcttcc

SEQ ID NO: 961737 - DNA, 33 bp, Homo sapien
gctatatgaggttgcccaactaaacgctacact

SEQ ID NO: 961738 - DNA, 33 bp, Homo sapien
gctatatgaggttgcctaactaaacgctacact

SEQ ID NO: 961739 - DNA, 33 bp, Homo sapien
tgtacatgattcagagacacatggattaaattt

SEQ ID NO: 961740 - DNA, 33 bp, Homo sapien
tgtacatgattcagagccacatggattaaattt

SEQ ID NO: 961741 - DNA, 33 bp, Homo sapien
aggcagttactctgaaaagaatcattgtagagc

SEQ ID NO: 961742 - DNA, 33 bp, Homo sapien
aggcagttactctgaatagaatcattgtagagc

SEQ ID NO: 961743 - DNA, 33 bp, Homo sapien
tccatcatgaactgcacctccttgaaggtgaag

SEQ ID NO: 961744 - DNA, 33 bp, Homo sapien
tccatcatgaactgcatctccttgaaggtgaag

SEQ ID NO: 961745 - DNA, 33 bp, Homo sapien
cttttgtcctctttcacagtagacaggcttgac

SEQ ID NO: 961746 - DNA, 33 bp, Homo sapien
cttttgtcctctttcatagtagacaggcttgac

SEQ ID NO: 961747 - DNA, 33 bp, Homo sapien
cacagccaaactaagcaagtagtattatagaat

SEQ ID NO: 961748 - DNA, 33 bp, Homo sapien
cacagccaaactaagcgagtagtattatagaat

SEQ ID NO: 961749 - DNA, 33 bp, Homo sapien
ctcagcttctcagagagcccccatgcctggctt

SEQ ID NO: 961750 - DNA, 33 bp, Homo sapien
ctcagcttctcagagatcccccatgcctggctt

SEQ ID NO: 961751 - DNA, 33 bp, Homo sapien
aaagaccaggctgctaagaacccaagcagtgca

SEQ ID NO: 961752 - DNA, 33 bp, Homo sapien
aaagaccaggctgctaggaacccaagcagtgca

SEQ ID NO: 961753 - DNA, 33 bp, Homo sapien
tgtcaattgccctttgcagttccagggaagcct

SEQ ID NO: 961754 - DNA, 33 bp, Homo sapien
tgtcaattgccctttgtagttccagggaagcct

SEQ ID NO: 961755 - DNA, 33 bp, Homo sapien
tttattactcattcaaatatcaccaaccaatca

SEQ ID NO: 961756 - DNA, 33 bp, Homo sapien
tttattactcattcaagtatcaccaaccaatca

SEQ ID NO: 961757 - DNA, 33 bp, Homo sapien
catcaccgccactgctaaaactcaggtgaaagt

SEQ ID NO: 961758 - DNA, 33 bp, Homo sapien
catcaccgccactgctgaaactcaggtgaaagt

SEQ ID NO: 961759 - DNA, 33 bp, Homo sapien
gggggaaaaacaaagaatctctgttgatacact

SEQ ID NO: 961760 - DNA, 33 bp, Homo sapien
gggggaaaaacaaagactctctgttgatacact

SEQ ID NO: 961761 - DNA, 33 bp, Homo sapien
aaatgtatacaataaacgtgaacccagctgagt

SEQ ID NO: 961762 - DNA, 33 bp, Homo sapien
aaatgtatacaataaatgtgaacccagctgagt

SEQ ID NO: 961763 - DNA, 33 bp, Homo sapien
tctaataaataaatacagctgaaacagatagct

SEQ ID NO: 961764 - DNA, 33 bp, Homo sapien
tctaataaataaatacggctgaaacagatagct

SEQ ID NO: 961765 - DNA, 33 bp, Homo sapien
tgtcctgtgatttctaataaaatgttcaactat

SEQ ID NO: 961766 - DNA, 33 bp, Homo sapien
tgtcctgtgatttctagtaaaatgttcaactat

SEQ ID NO: 961767 - DNA, 33 bp, Homo sapien
tctgaaagcactgttacgtaactaacctacctt

SEQ ID NO: 961768 - DNA, 33 bp, Homo sapien
tctgaaagcactgttatgtaactaacctacctt

SEQ ID NO: 961769 - DNA, 33 bp, Homo sapien
gcagagatgttgaataagtagaagtatgttcag

SEQ ID NO: 961770 - DNA, 33 bp, Homo sapien
gcagagatgttgaataggtagaagtatgttcag

SEQ ID NO: 961771 - DNA, 33 bp, Homo sapien
ggcaggactcgagagacggtgcttcttgctgcc

SEQ ID NO: 961772 - DNA, 33 bp, Homo sapien
ggcaggactcgagagatggtgcttcttgctgcc

SEQ ID NO: 961773 - DNA, 33 bp, Homo sapien
ctaagcagtctggttccatggtcttttcgccac

SEQ ID NO: 961774 - DNA, 33 bp, Homo sapien
ctaagcagtctggttctatggtcttttcgccac

SEQ ID NO: 961775 - DNA, 33 bp, Homo sapien
ggatgctgcctcttccagaccccacatgtgtta

SEQ ID NO: 961776 - DNA, 33 bp, Homo sapien
ggatgctgcctcttccggaccccacatgtgtta

SEQ ID NO: 961777 - DNA, 33 bp, Homo sapien
gaaaagagatggcccacgataccaccactttgc

SEQ ID NO: 961778 - DNA, 33 bp, Homo sapien
gaaaagagatggcccatgataccaccactttgc

SEQ ID NO: 961779 - DNA, 33 bp, Homo sapien
aagctcagaaaatcaaagaagagaattggcacg

SEQ ID NO: 961780 - DNA, 33 bp, Homo sapien
aagctcagaaaatcaaggaagagaattggcacg

SEQ ID NO: 961781 - DNA, 33 bp, Homo sapien
caaataaggaatttaactcagtggctttttgtt

SEQ ID NO: 961782 - DNA, 33 bp, Homo sapien
caaataaggaatttaattcagtggctttttgtt

SEQ ID NO: 961783 - DNA, 33 bp, Homo sapien
tattgcttaactatcacctcctgtagagtccat

SEQ ID NO: 961784 - DNA, 33 bp, Homo sapien
tattgcttaactatcatctcctgtagagtccat

SEQ ID NO: 961785 - DNA, 33 bp, Homo sapien
gctcaatggtagggaagaaatatgagtaacaaa

SEQ ID NO: 961786 - DNA, 33 bp, Homo sapien
gctcaatggtagggaataaatatgagtaacaaa

SEQ ID NO: 961787 - DNA, 33 bp, Homo sapien
gagataaagagacacaaggaaaaataaggatgg

SEQ ID NO: 961788 - DNA, 33 bp, Homo sapien
gagataaagagacacagggaaaaataaggatgg

SEQ ID NO: 961789 - DNA, 33 bp, Homo sapien
gagctctctctgcgaaactttcttctcagtctc

SEQ ID NO: 961790 - DNA, 33 bp, Homo sapien
gagctctctctgcgaatctttcttctcagtctc

SEQ ID NO: 961791 - DNA, 33 bp, Homo sapien
acaaagtcaacaaggccagttttaggtatatta

SEQ ID NO: 961792 - DNA, 33 bp, Homo sapien
acaaagtcaacaaggcgagttttaggtatatta

SEQ ID NO: 961793 - DNA, 33 bp, Homo sapien
tggtcctctgggtgacaggtgattttcctttct

SEQ ID NO: 961794 - DNA, 33 bp, Homo sapien
tggtcctctgggtgacgggtgattttcctttct

SEQ ID NO: 961795 - DNA, 33 bp, Homo sapien
ttccagtaactaaaaaatgtatttcaggctagg

SEQ ID NO: 961796 - DNA, 33 bp, Homo sapien
ttccagtaactaaaaactgtatttcaggctagg

SEQ ID NO: 961797 - DNA, 33 bp, Homo sapien
ctaataatcctggcaaatcattataacagggta

SEQ ID NO: 961798 - DNA, 33 bp, Homo sapien
ctaataatcctggcaactcattataacagggta

SEQ ID NO: 961799 - DNA, 33 bp, Homo sapien
ttgactgtaggcacgacgtaatacagccagtct

SEQ ID NO: 961800 - DNA, 33 bp, Homo sapien
ttgactgtaggcacgatgtaatacagccagtct

SEQ ID NO: 961801 - DNA, 33 bp, Homo sapien
aagctaatcagcaaaactgcttataggagactc

SEQ ID NO: 961802 - DNA, 33 bp, Homo sapien
aagctaatcagcaaaagtgcttataggagactc

SEQ ID NO: 961803 - DNA, 33 bp, Homo sapien
atcaggaaagtacagggcatgttacatccccat

SEQ ID NO: 961804 - DNA, 33 bp, Homo sapien
atcaggaaagtacaggtcatgttacatccccat

SEQ ID NO: 961805 - DNA, 33 bp, Homo sapien
tgtgcagttctgtgccaaacacgggagacacag

SEQ ID NO: 961806 - DNA, 33 bp, Homo sapien
tgtgcagttctgtgccgaacacgggagacacag

SEQ ID NO: 961807 - DNA, 33 bp, Homo sapien
taggaatatttaggaaccctcagctcccaaggc

SEQ ID NO: 961808 - DNA, 33 bp, Homo sapien
taggaatatttaggaatcctcagctcccaaggc

SEQ ID NO: 961809 - DNA, 33 bp, Homo sapien
tggtgatctttttggacaaaggatgggtttgtc

SEQ ID NO: 961810 - DNA, 33 bp, Homo sapien
tggtgatctttttggagaaaggatgggtttgtc

SEQ ID NO: 961811 - DNA, 33 bp, Homo sapien
actccaaatgtgtcaacgtcagcctggcagtga

SEQ ID NO: 961812 - DNA, 33 bp, Homo sapien
actccaaatgtgtcaaggtcagcctggcagtga

SEQ ID NO: 961813 - DNA, 33 bp, Homo sapien
aatgaaatacagtcaaaaggattcactccaaat

SEQ ID NO: 961814 - DNA, 33 bp, Homo sapien
aatgaaatacagtcaacaggattcactccaaat

SEQ ID NO: 961815 - DNA, 33 bp, Homo sapien
ttgtttataaactttcaaaatgtcggaagtgga

SEQ ID NO: 961816 - DNA, 33 bp, Homo sapien
ttgtttataaactttcgaaatgtcggaagtgga

SEQ ID NO: 961817 - DNA, 33 bp, Homo sapien
ctagtcatcttaacacccaagagcttcatggta

SEQ ID NO: 961818 - DNA, 33 bp, Homo sapien
ctagtcatcttaacactcaagagcttcatggta

SEQ ID NO: 961819 - DNA, 33 bp, Homo sapien
ttgatgccacaattaacgtaagtcacttaggac

SEQ ID NO: 961820 - DNA, 33 bp, Homo sapien
ttgatgccacaattaatgtaagtcacttaggac

SEQ ID NO: 961821 - DNA, 33 bp, Homo sapien
gattgcatgttccttacagaatctaactcatgc

SEQ ID NO: 961822 - DNA, 33 bp, Homo sapien
gattgcatgttccttatagaatctaactcatgc

SEQ ID NO: 961823 - DNA, 33 bp, Homo sapien
aaggttcacaagggccaaggaagattccatcaa

SEQ ID NO: 961824 - DNA, 33 bp, Homo sapien
aaggttcacaagggccgaggaagattccatcaa

SEQ ID NO: 961825 - DNA, 33 bp, Homo sapien
aaaagcaaaggtagataacaaaggccttcactt

SEQ ID NO: 961826 - DNA, 33 bp, Homo sapien
aaaagcaaaggtagatgacaaaggccttcactt

SEQ ID NO: 961827 - DNA, 33 bp, Homo sapien
tcagaaacctaattaccaccttcctgttctgaa

SEQ ID NO: 961828 - DNA, 33 bp, Homo sapien
tcagaaacctaattactaccttcctgttctgaa

SEQ ID NO: 961829 - DNA, 33 bp, Homo sapien
atctgtcaccttttgccaataacacagtcttga

SEQ ID NO: 961830 - DNA, 33 bp, Homo sapien
atctgtcaccttttgctaataacacagtcttga

SEQ ID NO: 961831 - DNA, 33 bp, Homo sapien
ttaaattgatttttagacctctttctataagat

SEQ ID NO: 961832 - DNA, 33 bp, Homo sapien
ttaaattgatttttaggcctctttctataagat

SEQ ID NO: 961833 - DNA, 33 bp, Homo sapien
aatgttagacccaaaaccatacaaaccctagaa

SEQ ID NO: 961834 - DNA, 33 bp, Homo sapien
aatgttagacccaaaatcatacaaaccctagaa

SEQ ID NO: 961835 - DNA, 33 bp, Homo sapien
cagcaagtagagcaaacttgactataggacttc

SEQ ID NO: 961836 - DNA, 33 bp, Homo sapien
cagcaagtagagcaaagttgactataggacttc

SEQ ID NO: 961837 - DNA, 33 bp, Homo sapien
gcacaatataaaaaccagagataaagagcaaaa

SEQ ID NO: 961838 - DNA, 33 bp, Homo sapien
gcacaatataaaaaccggagataaagagcaaaa

SEQ ID NO: 961839 - DNA, 33 bp, Homo sapien
tagaagttcccttagcaaaggtattttggtagt

SEQ ID NO: 961840 - DNA, 33 bp, Homo sapien
tagaagttcccttagcgaaggtattttggtagt

SEQ ID NO: 961841 - DNA, 33 bp, Homo sapien
ctaatatctggactcaataaggagcttaaacaa

SEQ ID NO: 961842 - DNA, 33 bp, Homo sapien
ctaatatctggactcagtaaggagcttaaacaa

SEQ ID NO: 961843 - DNA, 33 bp, Homo sapien
tcccattcaacatagcactagaagtcctagcca

SEQ ID NO: 961844 - DNA, 33 bp, Homo sapien
tcccattcaacatagcgctagaagtcctagcca

SEQ ID NO: 961845 - DNA, 33 bp, Homo sapien
atagagttaaatgtgaacatagaggtgtgacct

SEQ ID NO: 961846 - DNA, 33 bp, Homo sapien
atagagttaaatgtgatcatagaggtgtgacct

SEQ ID NO: 961847 - DNA, 33 bp, Homo sapien
tcccatagtgaaagtacagctaaacaaagtatt

SEQ ID NO: 961848 - DNA, 33 bp, Homo sapien
tcccatagtgaaagtagagctaaacaaagtatt

SEQ ID NO: 961849 - DNA, 33 bp, Homo sapien
ctaaggagctagtgtcaccaatgcaaatttaaa

SEQ ID NO: 961850 - DNA, 33 bp, Homo sapien
ctaaggagctagtgtcgccaatgcaaatttaaa

SEQ ID NO: 961851 - DNA, 33 bp, Homo sapien
tttatagagcaaaaggaaacacgtgaaaagcaa

SEQ ID NO: 961852 - DNA, 33 bp, Homo sapien
tttatagagcaaaagggaacacgtgaaaagcaa

SEQ ID NO: 961853 - DNA, 33 bp, Homo sapien
gtccatactgtccaaaatgatacacaaattcaa

SEQ ID NO: 961854 - DNA, 33 bp, Homo sapien
gtccatactgtccaaattgatacacaaattcaa

SEQ ID NO: 961855 - DNA, 33 bp, Homo sapien
atggtatcccagtaaaattcatatgttaaagat

SEQ ID NO: 961856 - DNA, 33 bp, Homo sapien
atggtatcccagtaaagttcatatgttaaagat

SEQ ID NO: 961857 - DNA, 33 bp, Homo sapien
aaaagccttctacttcgctttatgccagttcct

SEQ ID NO: 961858 - DNA, 33 bp, Homo sapien
aaaagccttctacttctctttatgccagttcct

SEQ ID NO: 961859 - DNA, 33 bp, Homo sapien
catgtcttggagcaaaagatttcctgcgagaca

SEQ ID NO: 961860 - DNA, 33 bp, Homo sapien
catgtcttggagcaaaggatttcctgcgagaca

SEQ ID NO: 961861 - DNA, 33 bp, Homo sapien
taagttgtcaccctaacgttctgaaattcagag

SEQ ID NO: 961862 - DNA, 33 bp, Homo sapien
taagttgtcaccctaaggttctgaaattcagag

SEQ ID NO: 961863 - DNA, 33 bp, Homo sapien
tcagggtgaaaacttagaaattagtggcatcaa

SEQ ID NO: 961864 - DNA, 33 bp, Homo sapien
tcagggtgaaaacttataaattagtggcatcaa

SEQ ID NO: 961865 - DNA, 33 bp, Homo sapien
ggtgatgtagaagacactctttaagcgcaggaa

SEQ ID NO: 961866 - DNA, 33 bp, Homo sapien
ggtgatgtagaagacattctttaagcgcaggaa

SEQ ID NO: 961867 - DNA, 33 bp, Homo sapien
aaatctaataatagcacacgtgtaactcttttg

SEQ ID NO: 961868 - DNA, 33 bp, Homo sapien
aaatctaataatagcagacgtgtaactcttttg

SEQ ID NO: 961869 - DNA, 33 bp, Homo sapien
tggtatggggtacaccaatgctggcagcagtgt

SEQ ID NO: 961870 - DNA, 33 bp, Homo sapien
tggtatggggtacaccgatgctggcagcagtgt

SEQ ID NO: 961871 - DNA, 33 bp, Homo sapien
gagctataaaatagtaactgattcttggaggaa

SEQ ID NO: 961872 - DNA, 33 bp, Homo sapien
gagctataaaatagtagctgattcttggaggaa

SEQ ID NO: 961873 - DNA, 33 bp, Homo sapien
gccctagaactcccaaaagcatatgccctttgt

SEQ ID NO: 961874 - DNA, 33 bp, Homo sapien
gccctagaactcccaagagcatatgccctttgt

SEQ ID NO: 961875 - DNA, 33 bp, Homo sapien
tgcatctatgttcagtaacctttggacatcatt

SEQ ID NO: 961876 - DNA, 33 bp, Homo sapien
tgcatctatgttcagtgacctttggacatcatt

SEQ ID NO: 961877 - DNA, 33 bp, Homo sapien
atggggtaggacctgcaaaagtaaaagtgccta

SEQ ID NO: 961878 - DNA, 33 bp, Homo sapien
atggggtaggacctgcgaaagtaaaagtgccta

SEQ ID NO: 961879 - DNA, 33 bp, Homo sapien
ggtctctttcaatgagcaggacaatttaccttc

SEQ ID NO: 961880 - DNA, 33 bp, Homo sapien
ggtctctttcaatgagtaggacaatttaccttc

SEQ ID NO: 961881 - DNA, 33 bp, Homo sapien
tttatggaagaggtaacagattacttgtatctt

SEQ ID NO: 961882 - DNA, 33 bp, Homo sapien
tttatggaagaggtaagagattacttgtatctt

SEQ ID NO: 961883 - DNA, 33 bp, Homo sapien
ttataattgtccctcactctgcagactgcttgt

SEQ ID NO: 961884 - DNA, 33 bp, Homo sapien
ttataattgtccctcattctgcagactgcttgt

SEQ ID NO: 961885 - DNA, 33 bp, Homo sapien
agccacaaataccactaaacaaacttcaaggaa

SEQ ID NO: 961886 - DNA, 33 bp, Homo sapien
agccacaaataccactgaacaaacttcaaggaa

SEQ ID NO: 961887 - DNA, 33 bp, Homo sapien
gaatcaggtgaaaggaacctaagaccctcatct

SEQ ID NO: 961888 - DNA, 33 bp, Homo sapien
gaatcaggtgaaaggagcctaagaccctcatct

SEQ ID NO: 961889 - DNA, 33 bp, Homo sapien
attttttgactgtaaaatattccatggtgtgtg

SEQ ID NO: 961890 - DNA, 33 bp, Homo sapien
attttttgactgtaaagtattccatggtgtgtg

SEQ ID NO: 961891 - DNA, 33 bp, Homo sapien
gaagcctacttaaacaaatatagcacacatcat

SEQ ID NO: 961892 - DNA, 33 bp, Homo sapien
gaagcctacttaaacagatatagcacacatcat

SEQ ID NO: 961893 - DNA, 33 bp, Homo sapien
gaaaattgttggacccacctaagatgatatatg

SEQ ID NO: 961894 - DNA, 33 bp, Homo sapien
gaaaattgttggacccgcctaagatgatatatg

SEQ ID NO: 961895 - DNA, 33 bp, Homo sapien
gtgctgtggccatcatcataaatcactttaggc

SEQ ID NO: 961896 - DNA, 33 bp, Homo sapien
gtgctgtggccatcatgataaatcactttaggc

SEQ ID NO: 961897 - DNA, 33 bp, Homo sapien
ttctgaaaaactagaagaatgcagatggtattg

SEQ ID NO: 961898 - DNA, 33 bp, Homo sapien
ttctgaaaaactagaataatgcagatggtattg

SEQ ID NO: 961899 - DNA, 33 bp, Homo sapien
ctgaaatactttgtctcaaactcgattcgaagc

SEQ ID NO: 961900 - DNA, 33 bp, Homo sapien
ctgaaatactttgtctgaaactcgattcgaagc

SEQ ID NO: 961901 - DNA, 33 bp, Homo sapien
caatccaatgagtaaacggtaaaatgtatgaac

SEQ ID NO: 961902 - DNA, 33 bp, Homo sapien
caatccaatgagtaaatggtaaaatgtatgaac

SEQ ID NO: 961903 - DNA, 33 bp, Homo sapien
tttcacttctccttcacgtatcaagcttagttt

SEQ ID NO: 961904 - DNA, 33 bp, Homo sapien
tttcacttctccttcatgtatcaagcttagttt

SEQ ID NO: 961905 - DNA, 33 bp, Homo sapien
ttctagtggttcctcaaaaaaagaagcacagaa

SEQ ID NO: 961906 - DNA, 33 bp, Homo sapien
ttctagtggttcctcagaaaaagaagcacagaa

SEQ ID NO: 961907 - DNA, 33 bp, Homo sapien
agttgctgttgaggaaagtattggataacaatt

SEQ ID NO: 961908 - DNA, 33 bp, Homo sapien
agttgctgttgaggaaggtattggataacaatt

SEQ ID NO: 961909 - DNA, 33 bp, Homo sapien
tcagacacattcaaaaccccagtcatgtttata

SEQ ID NO: 961910 - DNA, 33 bp, Homo sapien
tcagacacattcaaaagcccagtcatgtttata

SEQ ID NO: 961911 - DNA, 33 bp, Homo sapien
agactaatacaaatagaaattgagactgtgggc

SEQ ID NO: 961912 - DNA, 33 bp, Homo sapien
agactaatacaaataggaattgagactgtgggc

SEQ ID NO: 961913 - DNA, 33 bp, Homo sapien
ttttcctctaaagctaccataatcaagacagaa

SEQ ID NO: 961914 - DNA, 33 bp, Homo sapien
ttttcctctaaagctatcataatcaagacagaa

SEQ ID NO: 961915 - DNA, 33 bp, Homo sapien
acaaacccacagtaaacatactcaacaggcaaa

SEQ ID NO: 961916 - DNA, 33 bp, Homo sapien
acaaacccacagtaaatatactcaacaggcaaa

SEQ ID NO: 961917 - DNA, 33 bp, Homo sapien
aaagatttttttagacaggacctcaaaagcaca

SEQ ID NO: 961918 - DNA, 33 bp, Homo sapien
aaagatttttttagaccggacctcaaaagcaca

SEQ ID NO: 961919 - DNA, 33 bp, Homo sapien
attattaagccttgaaaatggttgtcctgtcat

SEQ ID NO: 961920 - DNA, 33 bp, Homo sapien
attattaagccttgaatatggttgtcctgtcat

SEQ ID NO: 961921 - DNA, 33 bp, Homo sapien
gcagagtgataataaggagaaagtcagcaaaaa

SEQ ID NO: 961922 - DNA, 33 bp, Homo sapien
gcagagtgataataagtagaaagtcagcaaaaa

SEQ ID NO: 961923 - DNA, 33 bp, Homo sapien
atgtggttttattagcaaggcttatttgcctga

SEQ ID NO: 961924 - DNA, 33 bp, Homo sapien
atgtggttttattagccaggcttatttgcctga

SEQ ID NO: 961925 - DNA, 33 bp, Homo sapien
cctagagaatctggagaatgtaattacaatttc

SEQ ID NO: 961926 - DNA, 33 bp, Homo sapien
cctagagaatctggagtatgtaattacaatttc

SEQ ID NO: 961927 - DNA, 33 bp, Homo sapien
agctgatgaatattgccgaccaactgctatttt

SEQ ID NO: 961928 - DNA, 33 bp, Homo sapien
agctgatgaatattgctgaccaactgctatttt

SEQ ID NO: 961929 - DNA, 33 bp, Homo sapien
gtgtgaggtaagttaccaacattcattaaaagc

SEQ ID NO: 961930 - DNA, 33 bp, Homo sapien
gtgtgaggtaagttactaacattcattaaaagc

SEQ ID NO: 961931 - DNA, 33 bp, Homo sapien
tgcctctttatactcaatccatgactccacccg

SEQ ID NO: 961932 - DNA, 33 bp, Homo sapien
tgcctctttatactcagtccatgactccacccg

SEQ ID NO: 961933 - DNA, 33 bp, Homo sapien
acaatttctgacatacaaaaaacaacattaatt

SEQ ID NO: 961934 - DNA, 33 bp, Homo sapien
acaatttctgacatacgaaaaacaacattaatt

SEQ ID NO: 961935 - DNA, 33 bp, Homo sapien
aaagctcaacatcatcaagcattaagaaaatgc

SEQ ID NO: 961936 - DNA, 33 bp, Homo sapien
aaagctcaacatcatcgagcattaagaaaatgc

SEQ ID NO: 961937 - DNA, 33 bp, Homo sapien
cagttacattgataaaactctggccataccaag

SEQ ID NO: 961938 - DNA, 33 bp, Homo sapien
cagttacattgataaacctctggccataccaag

SEQ ID NO: 961939 - DNA, 33 bp, Homo sapien
tatatggttcctacccccacatcttggccaaag

SEQ ID NO: 961940 - DNA, 33 bp, Homo sapien
tatatggttcctaccctcacatcttggccaaag

SEQ ID NO: 961941 - DNA, 33 bp, Homo sapien
cttgctcctgcttttcccttgtgacataccttt

SEQ ID NO: 961942 - DNA, 33 bp, Homo sapien
cttgctcctgcttttctcttgtgacataccttt

SEQ ID NO: 961943 - DNA, 33 bp, Homo sapien
tatatttaagatgccactattatgtaaattgat

SEQ ID NO: 961944 - DNA, 33 bp, Homo sapien
tatatttaagatgccagtattatgtaaattgat

SEQ ID NO: 961945 - DNA, 33 bp, Homo sapien
gttgatagcactttatcaatatttgagaggtaa

SEQ ID NO: 961946 - DNA, 33 bp, Homo sapien
gttgatagcactttattaatatttgagaggtaa

SEQ ID NO: 961947 - DNA, 33 bp, Homo sapien
tattgaaaaacacagaaagcagattgtgtttgc

SEQ ID NO: 961948 - DNA, 33 bp, Homo sapien
tattgaaaaacacagagagcagattgtgtttgc

SEQ ID NO: 961949 - DNA, 33 bp, Homo sapien
ggtacatatttacagtaaaatagggggaatatt

SEQ ID NO: 961950 - DNA, 33 bp, Homo sapien
ggtacatatttacagttaaatagggggaatatt

SEQ ID NO: 961951 - DNA, 33 bp, Homo sapien
tacaatgagttgacagaaacttccccaccactg

SEQ ID NO: 961952 - DNA, 33 bp, Homo sapien
tacaatgagttgacaggaacttccccaccactg

SEQ ID NO: 961953 - DNA, 33 bp, Homo sapien
gacattggtccaagcaaggattttattggtttg

SEQ ID NO: 961954 - DNA, 33 bp, Homo sapien
gacattggtccaagcacggattttattggtttg

SEQ ID NO: 961955 - DNA, 33 bp, Homo sapien
tatgactaatacataacggaaattgcattcact

SEQ ID NO: 961956 - DNA, 33 bp, Homo sapien
tatgactaatacataatggaaattgcattcact

SEQ ID NO: 961957 - DNA, 33 bp, Homo sapien
tgtttgacttgaaaagacattcatgctaaaact

SEQ ID NO: 961958 - DNA, 33 bp, Homo sapien
tgtttgacttgaaaaggcattcatgctaaaact

SEQ ID NO: 961959 - DNA, 33 bp, Homo sapien
aagacagtttgtcaaacgtgaaaaggagttatc

SEQ ID NO: 961960 - DNA, 33 bp, Homo sapien
aagacagtttgtcaaatgtgaaaaggagttatc

SEQ ID NO: 961961 - DNA, 33 bp, Homo sapien
aaattaataagtaaaacaatgccttgtggaaaa

SEQ ID NO: 961962 - DNA, 33 bp, Homo sapien
aaattaataagtaaaataatgccttgtggaaaa

SEQ ID NO: 961963 - DNA, 33 bp, Homo sapien
tttattgtgatacagaacacgaggaggagccca

SEQ ID NO: 961964 - DNA, 33 bp, Homo sapien
tttattgtgatacagagcacgaggaggagccca

SEQ ID NO: 961965 - DNA, 33 bp, Homo sapien
agccatttttccccccactgcaattagtgtcca

SEQ ID NO: 961966 - DNA, 33 bp, Homo sapien
agccatttttccccccgctgcaattagtgtcca

SEQ ID NO: 961967 - DNA, 33 bp, Homo sapien
cccagaacacacttcacagttgccttgaggagt

SEQ ID NO: 961968 - DNA, 33 bp, Homo sapien
cccagaacacacttcagagttgccttgaggagt

SEQ ID NO: 961969 - DNA, 33 bp, Homo sapien
gttaaacgacaattaacaatagccacagtcatt

SEQ ID NO: 961970 - DNA, 33 bp, Homo sapien
gttaaacgacaattaataatagccacagtcatt

SEQ ID NO: 961971 - DNA, 33 bp, Homo sapien
cttatctatttgcacaagtaagttaagtttata

SEQ ID NO: 961972 - DNA, 33 bp, Homo sapien
cttatctatttgcacaggtaagttaagtttata

SEQ ID NO: 961973 - DNA, 33 bp, Homo sapien
aatgaaaagcaaaaagcaaagaattgccagtgt

SEQ ID NO: 961974 - DNA, 33 bp, Homo sapien
aatgaaaagcaaaaagtaaagaattgccagtgt

SEQ ID NO: 961975 - DNA, 33 bp, Homo sapien
agttttctaacataacaacctgatcaccagtta

SEQ ID NO: 961976 - DNA, 33 bp, Homo sapien
agttttctaacataacgacctgatcaccagtta

SEQ ID NO: 961977 - DNA, 33 bp, Homo sapien
aagtggctagggataaaattgaggcactaaagc

SEQ ID NO: 961978 - DNA, 33 bp, Homo sapien
aagtggctagggataacattgaggcactaaagc

SEQ ID NO: 961979 - DNA, 33 bp, Homo sapien
caaagtttagataacacgacaaaatgataaaga

SEQ ID NO: 961980 - DNA, 33 bp, Homo sapien
caaagtttagataacatgacaaaatgataaaga

SEQ ID NO: 961981 - DNA, 33 bp, Homo sapien
agagaaagaggaaatacggaggtcacagcattc

SEQ ID NO: 961982 - DNA, 33 bp, Homo sapien
agagaaagaggaaatatggaggtcacagcattc

SEQ ID NO: 961983 - DNA, 33 bp, Homo sapien
cacaaagcattcagcccatggaccaaacattaa

SEQ ID NO: 961984 - DNA, 33 bp, Homo sapien
cacaaagcattcagcctatggaccaaacattaa

SEQ ID NO: 961985 - DNA, 33 bp, Homo sapien
aattgttttggaagacagcaaaacctgaagtat

SEQ ID NO: 961986 - DNA, 33 bp, Homo sapien
aattgttttggaagacggcaaaacctgaagtat

SEQ ID NO: 961987 - DNA, 33 bp, Homo sapien
cctttaggtagaataaatctggaagcatattca

SEQ ID NO: 961988 - DNA, 33 bp, Homo sapien
cctttaggtagaataagtctggaagcatattca

SEQ ID NO: 961989 - DNA, 33 bp, Homo sapien
atctggctctattttacaaggtcatctatttta

SEQ ID NO: 961990 - DNA, 33 bp, Homo sapien
atctggctctattttagaaggtcatctatttta

SEQ ID NO: 961991 - DNA, 33 bp, Homo sapien
tacataagaacactgagatagagaaatggctca

SEQ ID NO: 961992 - DNA, 33 bp, Homo sapien
tacataagaacactgatatagagaaatggctca

SEQ ID NO: 961993 - DNA, 33 bp, Homo sapien
ctgaaagtcatgagtggcaaaagcagaactagt

SEQ ID NO: 961994 - DNA, 33 bp, Homo sapien
ctgaaagtcatgagtgtcaaaagcagaactagt

SEQ ID NO: 961995 - DNA, 33 bp, Homo sapien
tgagctaaacatgacggagatccacagttgtag

SEQ ID NO: 961996 - DNA, 33 bp, Homo sapien
tgagctaaacatgacgtagatccacagttgtag

SEQ ID NO: 961997 - DNA, 33 bp, Homo sapien
tcactttacggtgactaaaacatctagaggttt

SEQ ID NO: 961998 - DNA, 33 bp, Homo sapien
tcactttacggtgacttaaacatctagaggttt

SEQ ID NO: 961999 - DNA, 33 bp, Homo sapien
aagtaagacatagtccaaatttcagtgaccccc

SEQ ID NO: 962000 - DNA, 33 bp, Homo sapien
aagtaagacatagtccgaatttcagtgaccccc

SEQ ID NO: 962001 - DNA, 33 bp, Homo sapien
ggactttcacacacaaactgaaaaggctaggct

SEQ ID NO: 962002 - DNA, 33 bp, Homo sapien
ggactttcacacacaagctgaaaaggctaggct

SEQ ID NO: 962003 - DNA, 33 bp, Homo sapien
tataaaactcaagagaaagtgatagaggcagga

SEQ ID NO: 962004 - DNA, 33 bp, Homo sapien
tataaaactcaagagacagtgatagaggcagga

SEQ ID NO: 962005 - DNA, 33 bp, Homo sapien
gcattgacttgaattcacctgaagactgaaatg

SEQ ID NO: 962006 - DNA, 33 bp, Homo sapien
gcattgacttgaattcccctgaagactgaaatg

SEQ ID NO: 962007 - DNA, 33 bp, Homo sapien
gcttaactcgaatacaactgtacacaccctatt

SEQ ID NO: 962008 - DNA, 33 bp, Homo sapien
gcttaactcgaatacatctgtacacaccctatt

SEQ ID NO: 962009 - DNA, 33 bp, Homo sapien
acacaggaacatagacacaagggaaaacatcac

SEQ ID NO: 962010 - DNA, 33 bp, Homo sapien
acacaggaacatagactcaagggaaaacatcac

SEQ ID NO: 962011 - DNA, 33 bp, Homo sapien
aaagctagaattaataagtgccactggattaga

SEQ ID NO: 962012 - DNA, 33 bp, Homo sapien
aaagctagaattaatacgtgccactggattaga

SEQ ID NO: 962013 - DNA, 33 bp, Homo sapien
atgaaaactgataggaaaaatcttactttgctg

SEQ ID NO: 962014 - DNA, 33 bp, Homo sapien
atgaaaactgataggacaaatcttactttgctg

SEQ ID NO: 962015 - DNA, 33 bp, Homo sapien
caatgaaaacaatgaactacctggtttcggcta

SEQ ID NO: 962016 - DNA, 33 bp, Homo sapien
caatgaaaacaatgaattacctggtttcggcta

SEQ ID NO: 962017 - DNA, 33 bp, Homo sapien
cctcagggctgtcttacggagaggagaaagttg

SEQ ID NO: 962018 - DNA, 33 bp, Homo sapien
cctcagggctgtcttatggagaggagaaagttg

SEQ ID NO: 962019 - DNA, 33 bp, Homo sapien
gctggtgactggctagcaaatgcctattctgta

SEQ ID NO: 962020 - DNA, 33 bp, Homo sapien
gctggtgactggctaggaaatgcctattctgta

SEQ ID NO: 962021 - DNA, 33 bp, Homo sapien
ggtgttataaagctgacgaacacacgtacacgt

SEQ ID NO: 962022 - DNA, 33 bp, Homo sapien
ggtgttataaagctgatgaacacacgtacacgt

SEQ ID NO: 962023 - DNA, 33 bp, Homo sapien
ccagaagcttttgtaccgatatgttcaacatct

SEQ ID NO: 962024 - DNA, 33 bp, Homo sapien
ccagaagcttttgtactgatatgttcaacatct

SEQ ID NO: 962025 - DNA, 33 bp, Homo sapien
tcatttttgaaactggaaatgaacaggtaagag

SEQ ID NO: 962026 - DNA, 33 bp, Homo sapien
tcatttttgaaactggcaatgaacaggtaagag

SEQ ID NO: 962027 - DNA, 33 bp, Homo sapien
gtgtgaagtctctgtaacattgactgaatgtat

SEQ ID NO: 962028 - DNA, 33 bp, Homo sapien
gtgtgaagtctctgtagcattgactgaatgtat

SEQ ID NO: 962029 - DNA, 33 bp, Homo sapien
tagaatcctagctcaaagacagaagaagaaaaa

SEQ ID NO: 962030 - DNA, 33 bp, Homo sapien
tagaatcctagctcaatgacagaagaagaaaaa

SEQ ID NO: 962031 - DNA, 33 bp, Homo sapien
caaatttacatttttcaagacaatgctaatggg

SEQ ID NO: 962032 - DNA, 33 bp, Homo sapien
caaatttacatttttctagacaatgctaatggg

SEQ ID NO: 962033 - DNA, 33 bp, Homo sapien
ggtagatttgagttagaacaccagcaacagttt

SEQ ID NO: 962034 - DNA, 33 bp, Homo sapien
ggtagatttgagttaggacaccagcaacagttt

SEQ ID NO: 962035 - DNA, 33 bp, Homo sapien
cagagctgcggagctaacacatcaccatggtca

SEQ ID NO: 962036 - DNA, 33 bp, Homo sapien
cagagctgcggagctatcacatcaccatggtca

SEQ ID NO: 962037 - DNA, 33 bp, Homo sapien
gagggaaaggcttggccacatcaactctccttt

SEQ ID NO: 962038 - DNA, 33 bp, Homo sapien
gagggaaaggcttggctacatcaactctccttt

SEQ ID NO: 962039 - DNA, 33 bp, Homo sapien
cagaggagtgactgtacgccattctctttgcca

SEQ ID NO: 962040 - DNA, 33 bp, Homo sapien
cagaggagtgactgtatgccattctctttgcca

SEQ ID NO: 962041 - DNA, 33 bp, Homo sapien
cctccaagattaaaacaaggatttctgtggtcc

SEQ ID NO: 962042 - DNA, 33 bp, Homo sapien
cctccaagattaaaaccaggatttctgtggtcc

SEQ ID NO: 962043 - DNA, 33 bp, Homo sapien
ttgttgtggttataacagtctccaaatattcct

SEQ ID NO: 962044 - DNA, 33 bp, Homo sapien
ttgttgtggttataacggtctccaaatattcct

SEQ ID NO: 962045 - DNA, 33 bp, Homo sapien
gatgggccaaggaaaacgcctggctctgatagt

SEQ ID NO: 962046 - DNA, 33 bp, Homo sapien
gatgggccaaggaaaatgcctggctctgatagt

SEQ ID NO: 962047 - DNA, 33 bp, Homo sapien
ttgtatctaccttgagacccatctgatcatctc

SEQ ID NO: 962048 - DNA, 33 bp, Homo sapien
ttgtatctaccttgaggcccatctgatcatctc

SEQ ID NO: 962049 - DNA, 33 bp, Homo sapien
tgataatgcctgtcacaaagggaaaatgtcaac

SEQ ID NO: 962050 - DNA, 33 bp, Homo sapien
tgataatgcctgtcacgaagggaaaatgtcaac

SEQ ID NO: 962051 - DNA, 33 bp, Homo sapien
gaaagtttaggaaacacgtctgtcagtgacaaa

SEQ ID NO: 962052 - DNA, 33 bp, Homo sapien
gaaagtttaggaaacatgtctgtcagtgacaaa

SEQ ID NO: 962053 - DNA, 33 bp, Homo sapien
tgtttgatccttgaaccggagagaatcatgcct

SEQ ID NO: 962054 - DNA, 33 bp, Homo sapien
tgtttgatccttgaactggagagaatcatgcct

SEQ ID NO: 962055 - DNA, 33 bp, Homo sapien
tgtaatctcatggcaccgtccttcttgtgctta

SEQ ID NO: 962056 - DNA, 33 bp, Homo sapien
tgtaatctcatggcactgtccttcttgtgctta

SEQ ID NO: 962057 - DNA, 33 bp, Homo sapien
tcagcataaatttggcaaagcttcccattgaac

SEQ ID NO: 962058 - DNA, 33 bp, Homo sapien
tcagcataaatttggcgaagcttcccattgaac

SEQ ID NO: 962059 - DNA, 33 bp, Homo sapien
ccaaccacagatgaacacttcagaaaaatgaaa

SEQ ID NO: 962060 - DNA, 33 bp, Homo sapien
ccaaccacagatgaacccttcagaaaaatgaaa

SEQ ID NO: 962061 - DNA, 33 bp, Homo sapien
ccatagtggttttggactaatatacattcccat

SEQ ID NO: 962062 - DNA, 33 bp, Homo sapien
ccatagtggttttggattaatatacattcccat

SEQ ID NO: 962063 - DNA, 33 bp, Homo sapien
tgtaaacacacaagaacgtttgagaaaagtgat

SEQ ID NO: 962064 - DNA, 33 bp, Homo sapien
tgtaaacacacaagaaggtttgagaaaagtgat

SEQ ID NO: 962065 - DNA, 33 bp, Homo sapien
agggcaggaaatgatcaatgtggccttgcttta

SEQ ID NO: 962066 - DNA, 33 bp, Homo sapien
agggcaggaaatgatcgatgtggccttgcttta

SEQ ID NO: 962067 - DNA, 33 bp, Homo sapien
ctatgactctgacaaccgaccaaatagaatcac

SEQ ID NO: 962068 - DNA, 33 bp, Homo sapien
ctatgactctgacaactgaccaaatagaatcac

SEQ ID NO: 962069 - DNA, 33 bp, Homo sapien
aaatgtaaatcaaaacagtgatgcaataccacc

SEQ ID NO: 962070 - DNA, 33 bp, Homo sapien
aaatgtaaatcaaaaccgtgatgcaataccacc

SEQ ID NO: 962071 - DNA, 33 bp, Homo sapien
agtgagggagagtccccaatcatgagatgtcat

SEQ ID NO: 962072 - DNA, 33 bp, Homo sapien
agtgagggagagtccctaatcatgagatgtcat

SEQ ID NO: 962073 - DNA, 33 bp, Homo sapien
ccactgcaaaggcgcaccctaatagtcaagtag

SEQ ID NO: 962074 - DNA, 33 bp, Homo sapien
ccactgcaaaggcgcatcctaatagtcaagtag

SEQ ID NO: 962075 - DNA, 33 bp, Homo sapien
tgattaataccctaaagaaagtcatcattctgt

SEQ ID NO: 962076 - DNA, 33 bp, Homo sapien
tgattaataccctaaataaagtcatcattctgt

SEQ ID NO: 962077 - DNA, 33 bp, Homo sapien
ggtagtttatttgtgaaatagtccctggaagca

SEQ ID NO: 962078 - DNA, 33 bp, Homo sapien
ggtagtttatttgtgagatagtccctggaagca

SEQ ID NO: 962079 - DNA, 33 bp, Homo sapien
aaaagatgagtgtgaaccttacagaccattatt

SEQ ID NO: 962080 - DNA, 33 bp, Homo sapien
aaaagatgagtgtgaatcttacagaccattatt

SEQ ID NO: 962081 - DNA, 33 bp, Homo sapien
ccctcctagtcttccaccgtttggggtctccag

SEQ ID NO: 962082 - DNA, 33 bp, Homo sapien
ccctcctagtcttccatcgtttggggtctccag

SEQ ID NO: 962083 - DNA, 33 bp, Homo sapien
gaacttcctcaaagacactgtctctcacctgct

SEQ ID NO: 962084 - DNA, 33 bp, Homo sapien
gaacttcctcaaagacgctgtctctcacctgct

SEQ ID NO: 962085 - DNA, 33 bp, Homo sapien
caaatgctagaactccaaatagttttaatttca

SEQ ID NO: 962086 - DNA, 33 bp, Homo sapien
caaatgctagaactccgaatagttttaatttca

SEQ ID NO: 962087 - DNA, 33 bp, Homo sapien
ctcaccaactcagttaagatgattattgcaaaa

SEQ ID NO: 962088 - DNA, 33 bp, Homo sapien
ctcaccaactcagttaggatgattattgcaaaa

SEQ ID NO: 962089 - DNA, 33 bp, Homo sapien
aatctgtcatgagagagaatctgattaacaata

SEQ ID NO: 962090 - DNA, 33 bp, Homo sapien
aatctgtcatgagagataatctgattaacaata

SEQ ID NO: 962091 - DNA, 33 bp, Homo sapien
ttgtagcaatttcagcagactactcttccgttc

SEQ ID NO: 962092 - DNA, 33 bp, Homo sapien
ttgtagcaatttcagcggactactcttccgttc

SEQ ID NO: 962093 - DNA, 33 bp, Homo sapien
acaatgtcagtgttccaagaaactctcactgga

SEQ ID NO: 962094 - DNA, 33 bp, Homo sapien
acaatgtcagtgttccgagaaactctcactgga

SEQ ID NO: 962095 - DNA, 33 bp, Homo sapien
cttcagtgtggatttacggattttactttatgg

SEQ ID NO: 962096 - DNA, 33 bp, Homo sapien
cttcagtgtggatttatggattttactttatgg

SEQ ID NO: 962097 - DNA, 33 bp, Homo sapien
cttcttgttctgccaacacattgtggagatacc

SEQ ID NO: 962098 - DNA, 33 bp, Homo sapien
cttcttgttctgccaatacattgtggagatacc

SEQ ID NO: 962099 - DNA, 33 bp, Homo sapien
gtttctagcagcgctggatctattgcaagtgct

SEQ ID NO: 962100 - DNA, 33 bp, Homo sapien
gtttctagcagcgctgtatctattgcaagtgct

SEQ ID NO: 962101 - DNA, 33 bp, Homo sapien
cctccatgacgcctcacgtcgaaggaacaattt

SEQ ID NO: 962102 - DNA, 33 bp, Homo sapien
cctccatgacgcctcatgtcgaaggaacaattt

SEQ ID NO: 962103 - DNA, 33 bp, Homo sapien
gtcaagatgatcaaaaacaaggaaaatcacaga

SEQ ID NO: 962104 - DNA, 33 bp, Homo sapien
gtcaagatgatcaaaaccaaggaaaatcacaga

SEQ ID NO: 962105 - DNA, 33 bp, Homo sapien
gaaagatcaaagaagaagagaactgaacattag

SEQ ID NO: 962106 - DNA, 33 bp, Homo sapien
gaaagatcaaagaagatgagaactgaacattag

SEQ ID NO: 962107 - DNA, 33 bp, Homo sapien
gtcttttcagcacctcaagtttgtttgtatgtt

SEQ ID NO: 962108 - DNA, 33 bp, Homo sapien
gtcttttcagcacctcgagtttgtttgtatgtt

SEQ ID NO: 962109 - DNA, 33 bp, Homo sapien
caaagtcattttacaaaactgagtcagcccatc

SEQ ID NO: 962110 - DNA, 33 bp, Homo sapien
caaagtcattttacaagactgagtcagcccatc

SEQ ID NO: 962111 - DNA, 33 bp, Homo sapien
ggtagagataatggaagtgtcagtgagagatat

SEQ ID NO: 962112 - DNA, 33 bp, Homo sapien
ggtagagataatggaattgtcagtgagagatat

SEQ ID NO: 962113 - DNA, 33 bp, Homo sapien
aggactgcacggtttgcagtcagggtggtagag

SEQ ID NO: 962114 - DNA, 33 bp, Homo sapien
aggactgcacggtttgtagtcagggtggtagag

SEQ ID NO: 962115 - DNA, 33 bp, Homo sapien
gaaacccattaggagactacaccagtaattcag

SEQ ID NO: 962116 - DNA, 33 bp, Homo sapien
gaaacccattaggagagtacaccagtaattcag

SEQ ID NO: 962117 - DNA, 33 bp, Homo sapien
tcacttctgatttccaaagttcagctcaggcaa

SEQ ID NO: 962118 - DNA, 33 bp, Homo sapien
tcacttctgatttccagagttcagctcaggcaa

SEQ ID NO: 962119 - DNA, 33 bp, Homo sapien
gttctgttcttggggacctttccttttcttaag

SEQ ID NO: 962120 - DNA, 33 bp, Homo sapien
gttctgttcttggggatctttccttttcttaag

SEQ ID NO: 962121 - DNA, 33 bp, Homo sapien
tcttaagctttccctacgcaggacagaggtgaa

SEQ ID NO: 962122 - DNA, 33 bp, Homo sapien
tcttaagctttccctatgcaggacagaggtgaa

SEQ ID NO: 962123 - DNA, 33 bp, Homo sapien
tgctaaacatggacaagctttacctcttcaaat

SEQ ID NO: 962124 - DNA, 33 bp, Homo sapien
tgctaaacatggacaatctttacctcttcaaat

SEQ ID NO: 962125 - DNA, 33 bp, Homo sapien
aagagacttatgaaagacttaattttggcagat

SEQ ID NO: 962126 - DNA, 33 bp, Homo sapien
aagagacttatgaaagccttaattttggcagat

SEQ ID NO: 962127 - DNA, 33 bp, Homo sapien
ccggccaatgatgtaaagttttaaagtcatgtg

SEQ ID NO: 962128 - DNA, 33 bp, Homo sapien
ccggccaatgatgtaatgttttaaagtcatgtg

SEQ ID NO: 962129 - DNA, 33 bp, Homo sapien
aattctccaagatatccagacagaggctgtaat

SEQ ID NO: 962130 - DNA, 33 bp, Homo sapien
aattctccaagatatctagacagaggctgtaat

SEQ ID NO: 962131 - DNA, 33 bp, Homo sapien
aaggagctttggagaccgaaggaacatcctgtg

SEQ ID NO: 962132 - DNA, 33 bp, Homo sapien
aaggagctttggagacggaaggaacatcctgtg

SEQ ID NO: 962133 - DNA, 33 bp, Homo sapien
gaatctgaaggcataaagacatagcaggtcatg

SEQ ID NO: 962134 - DNA, 33 bp, Homo sapien
gaatctgaaggcataaggacatagcaggtcatg

SEQ ID NO: 962135 - DNA, 33 bp, Homo sapien
tccaacttttgttctcaatgaatggtaaagatg

SEQ ID NO: 962136 - DNA, 33 bp, Homo sapien
tccaacttttgttctccatgaatggtaaagatg

SEQ ID NO: 962137 - DNA, 33 bp, Homo sapien
catagtgggatagctcaatgtgcatacagcgtg

SEQ ID NO: 962138 - DNA, 33 bp, Homo sapien
catagtgggatagctcgatgtgcatacagcgtg

SEQ ID NO: 962139 - DNA, 33 bp, Homo sapien
ttggatagatttcatacgtatttcagttactat

SEQ ID NO: 962140 - DNA, 33 bp, Homo sapien
ttggatagatttcatatgtatttcagttactat

SEQ ID NO: 962141 - DNA, 33 bp, Homo sapien
gctaccaactgaccacagatgcctgagagagct

SEQ ID NO: 962142 - DNA, 33 bp, Homo sapien
gctaccaactgaccacggatgcctgagagagct

SEQ ID NO: 962143 - DNA, 33 bp, Homo sapien
agcaggaatagacaaagaatgtggaatttttat

SEQ ID NO: 962144 - DNA, 33 bp, Homo sapien
agcaggaatagacaaataatgtggaatttttat

SEQ ID NO: 962145 - DNA, 33 bp, Homo sapien
ttttaactgatgtaacagaagcaatgtgtattt

SEQ ID NO: 962146 - DNA, 33 bp, Homo sapien
ttttaactgatgtaacggaagcaatgtgtattt

SEQ ID NO: 962147 - DNA, 33 bp, Homo sapien
ctcccctaaacacatcaacactccaagtgggag

SEQ ID NO: 962148 - DNA, 33 bp, Homo sapien
ctcccctaaacacatcgacactccaagtgggag

SEQ ID NO: 962149 - DNA, 33 bp, Homo sapien
accatgagtgcctgaacaaaatggaattctgca

SEQ ID NO: 962150 - DNA, 33 bp, Homo sapien
accatgagtgcctgaataaaatggaattctgca

SEQ ID NO: 962151 - DNA, 33 bp, Homo sapien
aacccctgtaaccagtcgtcaactctacaccta

SEQ ID NO: 962152 - DNA, 33 bp, Homo sapien
aacccctgtaaccagttgtcaactctacaccta

SEQ ID NO: 962153 - DNA, 33 bp, Homo sapien
ttaagccaagaatcacacgctatatacagtaac

SEQ ID NO: 962154 - DNA, 33 bp, Homo sapien
ttaagccaagaatcacgcgctatatacagtaac

SEQ ID NO: 962155 - DNA, 33 bp, Homo sapien
gactttgtcattttccaaccttgtacatctgaa

SEQ ID NO: 962156 - DNA, 33 bp, Homo sapien
gactttgtcattttccgaccttgtacatctgaa

SEQ ID NO: 962157 - DNA, 33 bp, Homo sapien
acctgcaaattctgaaataaatgttcagactgg

SEQ ID NO: 962158 - DNA, 33 bp, Homo sapien
acctgcaaattctgaagtaaatgttcagactgg

SEQ ID NO: 962159 - DNA, 33 bp, Homo sapien
aacatgacctgggaaacgagttaaaattgtgtg

SEQ ID NO: 962160 - DNA, 33 bp, Homo sapien
aacatgacctgggaaatgagttaaaattgtgtg

SEQ ID NO: 962161 - DNA, 33 bp, Homo sapien
atttctgaatcaccaacgggacttcctcactgc

SEQ ID NO: 962162 - DNA, 33 bp, Homo sapien
atttctgaatcaccaatgggacttcctcactgc

SEQ ID NO: 962163 - DNA, 33 bp, Homo sapien
ttatcattcctgttacagctagcataaaaacca

SEQ ID NO: 962164 - DNA, 33 bp, Homo sapien
ttatcattcctgttaccgctagcataaaaacca

SEQ ID NO: 962165 - DNA, 33 bp, Homo sapien
tctttctaagcccaaaccattcccttttgaaca

SEQ ID NO: 962166 - DNA, 33 bp, Homo sapien
tctttctaagcccaaatcattcccttttgaaca

SEQ ID NO: 962167 - DNA, 33 bp, Homo sapien
ttatgcattttcttcaaacttcaaggggagtaa

SEQ ID NO: 962168 - DNA, 33 bp, Homo sapien
ttatgcattttcttcagacttcaaggggagtaa

SEQ ID NO: 962169 - DNA, 33 bp, Homo sapien
attctgcctctttgaaagtttttaggcttgctc

SEQ ID NO: 962170 - DNA, 33 bp, Homo sapien
attctgcctctttgaacgtttttaggcttgctc

SEQ ID NO: 962171 - DNA, 33 bp, Homo sapien
cccatgccttaagcaccgagaatacgatctgaa

SEQ ID NO: 962172 - DNA, 33 bp, Homo sapien
cccatgccttaagcactgagaatacgatctgaa

SEQ ID NO: 962173 - DNA, 33 bp, Homo sapien
gtttggcacaaattgcaagctaaacaaaatctg

SEQ ID NO: 962174 - DNA, 33 bp, Homo sapien
gtttggcacaaattgcgagctaaacaaaatctg

SEQ ID NO: 962175 - DNA, 33 bp, Homo sapien
gactgaaccacataagacctggtaattataaga

SEQ ID NO: 962176 - DNA, 33 bp, Homo sapien
gactgaaccacataagtcctggtaattataaga

SEQ ID NO: 962177 - DNA, 33 bp, Homo sapien
gctcttaacactttacaccatggtttatccaac

SEQ ID NO: 962178 - DNA, 33 bp, Homo sapien
gctcttaacactttactccatggtttatccaac

SEQ ID NO: 962179 - DNA, 33 bp, Homo sapien
aattatacaatgtcaaagttggaagtgttaccc

SEQ ID NO: 962180 - DNA, 33 bp, Homo sapien
aattatacaatgtcaaggttggaagtgttaccc

SEQ ID NO: 962181 - DNA, 33 bp, Homo sapien
aaaacagttggatacacattcctgagttggaag

SEQ ID NO: 962182 - DNA, 33 bp, Homo sapien
aaaacagttggatacagattcctgagttggaag

SEQ ID NO: 962183 - DNA, 33 bp, Homo sapien
gacctggaactcaccacgcctttcctagaaact

SEQ ID NO: 962184 - DNA, 33 bp, Homo sapien
gacctggaactcaccatgcctttcctagaaact

SEQ ID NO: 962185 - DNA, 33 bp, Homo sapien
ttctacctcagttagaagctggtggcccagaca

SEQ ID NO: 962186 - DNA, 33 bp, Homo sapien
ttctacctcagttagatgctggtggcccagaca

SEQ ID NO: 962187 - DNA, 33 bp, Homo sapien
ttcctaccagatggccaaaactgctgccccagt

SEQ ID NO: 962188 - DNA, 33 bp, Homo sapien
ttcctaccagatggccgaaactgctgccccagt

SEQ ID NO: 962189 - DNA, 33 bp, Homo sapien
atatcagaatgcgttacggcaaagaatggcatt

SEQ ID NO: 962190 - DNA, 33 bp, Homo sapien
atatcagaatgcgttatggcaaagaatggcatt

SEQ ID NO: 962191 - DNA, 33 bp, Homo sapien
cattctgatattatccacaccgcagctctgcac

SEQ ID NO: 962192 - DNA, 33 bp, Homo sapien
cattctgatattatccgcaccgcagctctgcac

SEQ ID NO: 962193 - DNA, 33 bp, Homo sapien
tcccctgatcttcacaatcaaataacaaagcct

SEQ ID NO: 962194 - DNA, 33 bp, Homo sapien
tcccctgatcttcacactcaaataacaaagcct

SEQ ID NO: 962195 - DNA, 33 bp, Homo sapien
gggaagtacataaataccaatggtcagcatcca

SEQ ID NO: 962196 - DNA, 33 bp, Homo sapien
gggaagtacataaatatcaatggtcagcatcca

SEQ ID NO: 962197 - DNA, 33 bp, Homo sapien
gaagatgtagtgaaacaaatactgcacctataa

SEQ ID NO: 962198 - DNA, 33 bp, Homo sapien
gaagatgtagtgaaacgaatactgcacctataa

SEQ ID NO: 962199 - DNA, 33 bp, Homo sapien
gggatatttaggtcatcaacttttatccacaaa

SEQ ID NO: 962200 - DNA, 33 bp, Homo sapien
gggatatttaggtcatgaacttttatccacaaa

SEQ ID NO: 962201 - DNA, 33 bp, Homo sapien
aaagttgattcaaaacagaaacttcaaagcaga

SEQ ID NO: 962202 - DNA, 33 bp, Homo sapien
aaagttgattcaaaacggaaacttcaaagcaga

SEQ ID NO: 962203 - DNA, 33 bp, Homo sapien
aagtggtgacttgagacatggatccctgaaaga

SEQ ID NO: 962204 - DNA, 33 bp, Homo sapien
aagtggtgacttgagagatggatccctgaaaga

SEQ ID NO: 962205 - DNA, 33 bp, Homo sapien
tgccactgctgaaagggcctactgaagctgaca

SEQ ID NO: 962206 - DNA, 33 bp, Homo sapien
tgccactgctgaaaggtcctactgaagctgaca

SEQ ID NO: 962207 - DNA, 33 bp, Homo sapien
aaaaaggacttatcacagacatagtatcctcaa

SEQ ID NO: 962208 - DNA, 33 bp, Homo sapien
aaaaaggacttatcacggacatagtatcctcaa

SEQ ID NO: 962209 - DNA, 33 bp, Homo sapien
ttcacagaattccttccatgtaacccaaattta

SEQ ID NO: 962210 - DNA, 33 bp, Homo sapien
ttcacagaattccttctatgtaacccaaattta

SEQ ID NO: 962211 - DNA, 33 bp, Homo sapien
ttcttttctcggtgtacattcttggtgcctttg

SEQ ID NO: 962212 - DNA, 33 bp, Homo sapien
ttcttttctcggtgtatattcttggtgcctttg

SEQ ID NO: 962213 - DNA, 33 bp, Homo sapien
ttcagccattgaaacagagaaatcctgtactat

SEQ ID NO: 962214 - DNA, 33 bp, Homo sapien
ttcagccattgaaacatagaaatcctgtactat

SEQ ID NO: 962215 - DNA, 33 bp, Homo sapien
acccactcaggtttaaccatatcttcaggtctt

SEQ ID NO: 962216 - DNA, 33 bp, Homo sapien
acccactcaggtttaatcatatcttcaggtctt

SEQ ID NO: 962217 - DNA, 33 bp, Homo sapien
ttcatggaagggaaacaaattttacaagctact

SEQ ID NO: 962218 - DNA, 33 bp, Homo sapien
ttcatggaagggaaacgaattttacaagctact

SEQ ID NO: 962219 - DNA, 33 bp, Homo sapien
gcccaattaggatatgaagtatgcacatatgga

SEQ ID NO: 962220 - DNA, 33 bp, Homo sapien
gcccaattaggatatgcagtatgcacatatgga

SEQ ID NO: 962221 - DNA, 33 bp, Homo sapien
ttgcatgcctgtcgtgaattgtagacatctcaa

SEQ ID NO: 962222 - DNA, 33 bp, Homo sapien
ttgcatgcctgtcgtgcattgtagacatctcaa

SEQ ID NO: 962223 - DNA, 33 bp, Homo sapien
tgcaatattgaaaaacactttgctgacaaacag

SEQ ID NO: 962224 - DNA, 33 bp, Homo sapien
tgcaatattgaaaaacgctttgctgacaaacag

SEQ ID NO: 962225 - DNA, 33 bp, Homo sapien
tggtgatgcttaaggaacagtcagagataaaca

SEQ ID NO: 962226 - DNA, 33 bp, Homo sapien
tggtgatgcttaaggatcagtcagagataaaca

SEQ ID NO: 962227 - DNA, 33 bp, Homo sapien
gtgactctattagggaccagtgctcaaactctc

SEQ ID NO: 962228 - DNA, 33 bp, Homo sapien
gtgactctattagggatcagtgctcaaactctc

SEQ ID NO: 962229 - DNA, 33 bp, Homo sapien
gaagctttctcattaaatacatgacaccactct

SEQ ID NO: 962230 - DNA, 33 bp, Homo sapien
gaagctttctcattaagtacatgacaccactct

SEQ ID NO: 962231 - DNA, 33 bp, Homo sapien
agtcagatcctgcccaatgcaaatgatgtcagg

SEQ ID NO: 962232 - DNA, 33 bp, Homo sapien
agtcagatcctgcccagtgcaaatgatgtcagg

SEQ ID NO: 962233 - DNA, 33 bp, Homo sapien
gcttttattatttgccaatgtaaaggtagaaaa

SEQ ID NO: 962234 - DNA, 33 bp, Homo sapien
gcttttattatttgccgatgtaaaggtagaaaa

SEQ ID NO: 962235 - DNA, 33 bp, Homo sapien
taaatgggataataaaaggaaagaatttagagc

SEQ ID NO: 962236 - DNA, 33 bp, Homo sapien
taaatgggataataaatggaaagaatttagagc

SEQ ID NO: 962237 - DNA, 33 bp, Homo sapien
tgatcattagcatttcactgtcattaaccttca

SEQ ID NO: 962238 - DNA, 33 bp, Homo sapien
tgatcattagcatttcgctgtcattaaccttca

SEQ ID NO: 962239 - DNA, 33 bp, Homo sapien
tgacaaatgtctcaagccttaatcccacagaac

SEQ ID NO: 962240 - DNA, 33 bp, Homo sapien
tgacaaatgtctcaaggcttaatcccacagaac

SEQ ID NO: 962241 - DNA, 33 bp, Homo sapien
ctcgtaccttaaggataaaatacacatactcat

SEQ ID NO: 962242 - DNA, 33 bp, Homo sapien
ctcgtaccttaaggatcaaatacacatactcat

SEQ ID NO: 962243 - DNA, 33 bp, Homo sapien
attttgagattatggacaaggtattgcaggcct

SEQ ID NO: 962244 - DNA, 33 bp, Homo sapien
attttgagattatggagaaggtattgcaggcct

SEQ ID NO: 962245 - DNA, 33 bp, Homo sapien
gagtagataattagaacgcacaccattaccctt

SEQ ID NO: 962246 - DNA, 33 bp, Homo sapien
gagtagataattagaaggcacaccattaccctt

SEQ ID NO: 962247 - DNA, 33 bp, Homo sapien
ttgcaaagatgtcaaacataataatcagaagat

SEQ ID NO: 962248 - DNA, 33 bp, Homo sapien
ttgcaaagatgtcaaatataataatcagaagat

SEQ ID NO: 962249 - DNA, 33 bp, Homo sapien
agcatcctgaatgacacagataaggaccatatt

SEQ ID NO: 962250 - DNA, 33 bp, Homo sapien
agcatcctgaatgacagagataaggaccatatt

SEQ ID NO: 962251 - DNA, 33 bp, Homo sapien
gatgaaaggaattcacacttgctgactaatttt

SEQ ID NO: 962252 - DNA, 33 bp, Homo sapien
gatgaaaggaattcacgcttgctgactaatttt

SEQ ID NO: 962253 - DNA, 33 bp, Homo sapien
tcctacaaaattgagacgaattccagccctcag

SEQ ID NO: 962254 - DNA, 33 bp, Homo sapien
tcctacaaaattgagatgaattccagccctcag

SEQ ID NO: 962255 - DNA, 33 bp, Homo sapien
acacacagcactacacaattccaagtgatgctc

SEQ ID NO: 962256 - DNA, 33 bp, Homo sapien
acacacagcactacaccattccaagtgatgctc

SEQ ID NO: 962257 - DNA, 33 bp, Homo sapien
ctcagtagagatacaaataaggtctgtccagta

SEQ ID NO: 962258 - DNA, 33 bp, Homo sapien
ctcagtagagatacaagtaaggtctgtccagta

SEQ ID NO: 962259 - DNA, 33 bp, Homo sapien
agaactgtagtcattaagggctgtgaagagtag

SEQ ID NO: 962260 - DNA, 33 bp, Homo sapien
agaactgtagtcattaggggctgtgaagagtag

SEQ ID NO: 962261 - DNA, 33 bp, Homo sapien
tttttatctcctaacccgacttagatgttttat

SEQ ID NO: 962262 - DNA, 33 bp, Homo sapien
tttttatctcctaacctgacttagatgttttat

SEQ ID NO: 962263 - DNA, 33 bp, Homo sapien
tcagacaacctggttaacaatccaaacagcagg

SEQ ID NO: 962264 - DNA, 33 bp, Homo sapien
tcagacaacctggttagcaatccaaacagcagg

SEQ ID NO: 962265 - DNA, 33 bp, Homo sapien
aaagtgcttatcataacgcagagaacatactaa

SEQ ID NO: 962266 - DNA, 33 bp, Homo sapien
aaagtgcttatcataatgcagagaacatactaa

SEQ ID NO: 962267 - DNA, 33 bp, Homo sapien
tctgttgacacagctgaataatataagacagaa

SEQ ID NO: 962268 - DNA, 33 bp, Homo sapien
tctgttgacacagctggataatataagacagaa

SEQ ID NO: 962269 - DNA, 33 bp, Homo sapien
taatgttagccactgacacaatacatacattcc

SEQ ID NO: 962270 - DNA, 33 bp, Homo sapien
taatgttagccactgatacaatacatacattcc

SEQ ID NO: 962271 - DNA, 33 bp, Homo sapien
tcctgttggcaaccacagtaaaagagagctgag

SEQ ID NO: 962272 - DNA, 33 bp, Homo sapien
tcctgttggcaaccacggtaaaagagagctgag

SEQ ID NO: 962273 - DNA, 33 bp, Homo sapien
aatcccatgatctaatcacaaagactccccaag

SEQ ID NO: 962274 - DNA, 33 bp, Homo sapien
aatcccatgatctaattacaaagactccccaag

SEQ ID NO: 962275 - DNA, 33 bp, Homo sapien
ctggtaaggcaagtcaatcatgagaatttccac

SEQ ID NO: 962276 - DNA, 33 bp, Homo sapien
ctggtaaggcaagtcactcatgagaatttccac

SEQ ID NO: 962277 - DNA, 33 bp, Homo sapien
gaggctcccaaggtaacagtcactaacttctac

SEQ ID NO: 962278 - DNA, 33 bp, Homo sapien
gaggctcccaaggtaatagtcactaacttctac

SEQ ID NO: 962279 - DNA, 33 bp, Homo sapien
attttcccaggatgacagacacttctttaaggg

SEQ ID NO: 962280 - DNA, 33 bp, Homo sapien
attttcccaggatgacggacacttctttaaggg

SEQ ID NO: 962281 - DNA, 33 bp, Homo sapien
tgaatgaattggtcccacataaaggggcaggtg

SEQ ID NO: 962282 - DNA, 33 bp, Homo sapien
tgaatgaattggtcccgcataaaggggcaggtg

SEQ ID NO: 962283 - DNA, 33 bp, Homo sapien
ttctgatcccactgtcaataagaaatgaaagat

SEQ ID NO: 962284 - DNA, 33 bp, Homo sapien
ttctgatcccactgtcgataagaaatgaaagat

SEQ ID NO: 962285 - DNA, 33 bp, Homo sapien
gggacattgtcttaaacaggaacattcaagttc

SEQ ID NO: 962286 - DNA, 33 bp, Homo sapien
gggacattgtcttaaataggaacattcaagttc

SEQ ID NO: 962287 - DNA, 33 bp, Homo sapien
cctttacaagcgacaaaactgatatcctctcat

SEQ ID NO: 962288 - DNA, 33 bp, Homo sapien
cctttacaagcgacaagactgatatcctctcat

SEQ ID NO: 962289 - DNA, 33 bp, Homo sapien
ctttaacaggggcagcaaggttttcaggctaca

SEQ ID NO: 962290 - DNA, 33 bp, Homo sapien
ctttaacaggggcagcgaggttttcaggctaca

SEQ ID NO: 962291 - DNA, 33 bp, Homo sapien
tcttccacattctccgaaaatcctgttctcccc

SEQ ID NO: 962292 - DNA, 33 bp, Homo sapien
tcttccacattctccggaaatcctgttctcccc

SEQ ID NO: 962293 - DNA, 33 bp, Homo sapien
ggctaagatagctcgacatcatgacggagctct

SEQ ID NO: 962294 - DNA, 33 bp, Homo sapien
ggctaagatagctcgatatcatgacggagctct

SEQ ID NO: 962295 - DNA, 33 bp, Homo sapien
gattcccagcacttaaaagagtctccaaacgac

SEQ ID NO: 962296 - DNA, 33 bp, Homo sapien
gattcccagcacttaagagagtctccaaacgac

SEQ ID NO: 962297 - DNA, 33 bp, Homo sapien
ggaattctaactcaataatggccagcatctctc

SEQ ID NO: 962298 - DNA, 33 bp, Homo sapien
ggaattctaactcaatcatggccagcatctctc

SEQ ID NO: 962299 - DNA, 33 bp, Homo sapien
catggttagctcctacaggaaggaaaggcgaaa

SEQ ID NO: 962300 - DNA, 33 bp, Homo sapien
catggttagctcctacgggaaggaaaggcgaaa

SEQ ID NO: 962301 - DNA, 33 bp, Homo sapien
tgtttataaattgtccagagaattgtaggcaca

SEQ ID NO: 962302 - DNA, 33 bp, Homo sapien
tgtttataaattgtccggagaattgtaggcaca

SEQ ID NO: 962303 - DNA, 33 bp, Homo sapien
gaatgcaaagcagcccacagcaaaaggtacact

SEQ ID NO: 962304 - DNA, 33 bp, Homo sapien
gaatgcaaagcagcccgcagcaaaaggtacact

SEQ ID NO: 962305 - DNA, 33 bp, Homo sapien
aatgtggctatgaaacacatttccttcacctgt

SEQ ID NO: 962306 - DNA, 33 bp, Homo sapien
aatgtggctatgaaacgcatttccttcacctgt

SEQ ID NO: 962307 - DNA, 33 bp, Homo sapien
cctatctctacactcccgagaatatctgaacta

SEQ ID NO: 962308 - DNA, 33 bp, Homo sapien
cctatctctacactcctgagaatatctgaacta

SEQ ID NO: 962309 - DNA, 33 bp, Homo sapien
tatctgacaagcctcaaatcatagggtatgaac

SEQ ID NO: 962310 - DNA, 33 bp, Homo sapien
tatctgacaagcctcacatcatagggtatgaac

SEQ ID NO: 962311 - DNA, 33 bp, Homo sapien
cctggcctcttcaactcacgtgtgtggcctggt

SEQ ID NO: 962312 - DNA, 33 bp, Homo sapien
cctggcctcttcaacttacgtgtgtggcctggt

SEQ ID NO: 962313 - DNA, 33 bp, Homo sapien
tcagaaatttccagaaatctaacactaatttga

SEQ ID NO: 962314 - DNA, 33 bp, Homo sapien
tcagaaatttccagaagtctaacactaatttga

SEQ ID NO: 962315 - DNA, 33 bp, Homo sapien
ggcatttggtatagggaagtaacagtacctgct

SEQ ID NO: 962316 - DNA, 33 bp, Homo sapien
ggcatttggtataggggagtaacagtacctgct

SEQ ID NO: 962317 - DNA, 33 bp, Homo sapien
gaataagtagttgtctaaacgaatagcatgaag

SEQ ID NO: 962318 - DNA, 33 bp, Homo sapien
gaataagtagttgtctgaacgaatagcatgaag

SEQ ID NO: 962319 - DNA, 33 bp, Homo sapien
cacctcaagataccccactcttttaggccaaaa

SEQ ID NO: 962320 - DNA, 33 bp, Homo sapien
cacctcaagataccccgctcttttaggccaaaa

SEQ ID NO: 962321 - DNA, 33 bp, Homo sapien
ttcattaaggaaaatgcagctatagcacttgat

SEQ ID NO: 962322 - DNA, 33 bp, Homo sapien
ttcattaaggaaaatggagctatagcacttgat

SEQ ID NO: 962323 - DNA, 33 bp, Homo sapien
gatatccagtcaagccaatggatgtagctacca

SEQ ID NO: 962324 - DNA, 33 bp, Homo sapien
gatatccagtcaagccgatggatgtagctacca

SEQ ID NO: 962325 - DNA, 33 bp, Homo sapien
gaaagttgggagaatgcactcttagtcagggtt

SEQ ID NO: 962326 - DNA, 33 bp, Homo sapien
gaaagttgggagaatgtactcttagtcagggtt

SEQ ID NO: 962327 - DNA, 33 bp, Homo sapien
ttcatgtaacaaataacgtaagcctcacttttt

SEQ ID NO: 962328 - DNA, 33 bp, Homo sapien
ttcatgtaacaaataatgtaagcctcacttttt

SEQ ID NO: 962329 - DNA, 33 bp, Homo sapien
ttattgatacatacaacttggatgagttactgg

SEQ ID NO: 962330 - DNA, 33 bp, Homo sapien
ttattgatacatacaatttggatgagttactgg

SEQ ID NO: 962331 - DNA, 33 bp, Homo sapien
gtatcctattgtgaagcaggcatcatgttttat

SEQ ID NO: 962332 - DNA, 33 bp, Homo sapien
gtatcctattgtgaagtaggcatcatgttttat

SEQ ID NO: 962333 - DNA, 33 bp, Homo sapien
gcaaagtttgactgcacagttctgtacctcagt

SEQ ID NO: 962334 - DNA, 33 bp, Homo sapien
gcaaagtttgactgcatagttctgtacctcagt

SEQ ID NO: 962335 - DNA, 33 bp, Homo sapien
tttatttttttctggcaatttgtctcttctcca

SEQ ID NO: 962336 - DNA, 33 bp, Homo sapien
tttatttttttctggcgatttgtctcttctcca

SEQ ID NO: 962337 - DNA, 33 bp, Homo sapien
ctatgaagaatacaacggagtaagagcaaggac

SEQ ID NO: 962338 - DNA, 33 bp, Homo sapien
ctatgaagaatacaactgagtaagagcaaggac

SEQ ID NO: 962339 - DNA, 33 bp, Homo sapien
ggcatgaaatgctcaacgccttatgttcagagc

SEQ ID NO: 962340 - DNA, 33 bp, Homo sapien
ggcatgaaatgctcaatgccttatgttcagagc

SEQ ID NO: 962341 - DNA, 33 bp, Homo sapien
tacatattgatggaagccaaacagaagtctgag

SEQ ID NO: 962342 - DNA, 33 bp, Homo sapien
tacatattgatggaagtcaaacagaagtctgag

SEQ ID NO: 962343 - DNA, 33 bp, Homo sapien
cagagtgaggaagtaacgtctacagggcatttg

SEQ ID NO: 962344 - DNA, 33 bp, Homo sapien
cagagtgaggaagtaatgtctacagggcatttg

SEQ ID NO: 962345 - DNA, 33 bp, Homo sapien
cagatatgtgaagaaaaaaggcctgagtttatt

SEQ ID NO: 962346 - DNA, 33 bp, Homo sapien
cagatatgtgaagaaagaaggcctgagtttatt

SEQ ID NO: 962347 - DNA, 33 bp, Homo sapien
gaaaacgatttctttccagtcctgaaataagtc

SEQ ID NO: 962348 - DNA, 33 bp, Homo sapien
gaaaacgatttctttcgagtcctgaaataagtc

SEQ ID NO: 962349 - DNA, 33 bp, Homo sapien
catcttccattatctcaccagcttcctatgcaa

SEQ ID NO: 962350 - DNA, 33 bp, Homo sapien
catcttccattatctcgccagcttcctatgcaa

SEQ ID NO: 962351 - DNA, 33 bp, Homo sapien
acttatccaaaaaaagaacatatacagattttt

SEQ ID NO: 962352 - DNA, 33 bp, Homo sapien
acttatccaaaaaaaggacatatacagattttt

SEQ ID NO: 962353 - DNA, 33 bp, Homo sapien
ggcgtaactagcagaaagactttaaacttacca

SEQ ID NO: 962354 - DNA, 33 bp, Homo sapien
ggcgtaactagcagaatgactttaaacttacca

SEQ ID NO: 962355 - DNA, 33 bp, Homo sapien
gccaagtccaaaactacgcacgagtatcatgca

SEQ ID NO: 962356 - DNA, 33 bp, Homo sapien
gccaagtccaaaactatgcacgagtatcatgca

SEQ ID NO: 962357 - DNA, 33 bp, Homo sapien
atttcaggtaattcaaacacagttgcattgctt

SEQ ID NO: 962358 - DNA, 33 bp, Homo sapien
atttcaggtaattcaagcacagttgcattgctt

SEQ ID NO: 962359 - DNA, 33 bp, Homo sapien
tcccctgatgttgcagaaaaatgagcaccagtc

SEQ ID NO: 962360 - DNA, 33 bp, Homo sapien
tcccctgatgttgcaggaaaatgagcaccagtc

SEQ ID NO: 962361 - DNA, 33 bp, Homo sapien
cttataactagaaaaccgtaaagtaagcttgtc

SEQ ID NO: 962362 - DNA, 33 bp, Homo sapien
cttataactagaaaactgtaaagtaagcttgtc

SEQ ID NO: 962363 - DNA, 33 bp, Homo sapien
aagaaataaaagtacaaatcaaccatagtctca

SEQ ID NO: 962364 - DNA, 33 bp, Homo sapien
aagaaataaaagtacagatcaaccatagtctca

SEQ ID NO: 962365 - DNA, 33 bp, Homo sapien
aaattctgattttaggcagaaggcaaatccctg

SEQ ID NO: 962366 - DNA, 33 bp, Homo sapien
aaattctgattttaggtagaaggcaaatccctg

SEQ ID NO: 962367 - DNA, 33 bp, Homo sapien
tcaggtacttgatacagtggctacttttatttt

SEQ ID NO: 962368 - DNA, 33 bp, Homo sapien
tcaggtacttgatacattggctacttttatttt

SEQ ID NO: 962369 - DNA, 33 bp, Homo sapien
atttgagtcaggagacaagagctgtcaggtact

SEQ ID NO: 962370 - DNA, 33 bp, Homo sapien
atttgagtcaggagaccagagctgtcaggtact

SEQ ID NO: 962371 - DNA, 33 bp, Homo sapien
gactgtcatctccccaaagttctagggttgagc

SEQ ID NO: 962372 - DNA, 33 bp, Homo sapien
gactgtcatctccccatagttctagggttgagc

SEQ ID NO: 962373 - DNA, 33 bp, Homo sapien
atgtgcctgaaggtacactgctcaaccctagaa

SEQ ID NO: 962374 - DNA, 33 bp, Homo sapien
atgtgcctgaaggtacgctgctcaaccctagaa

SEQ ID NO: 962375 - DNA, 33 bp, Homo sapien
ctccaaaaaatattacaccaatgcatgaccttc

SEQ ID NO: 962376 - DNA, 33 bp, Homo sapien
ctccaaaaaatattacgccaatgcatgaccttc

SEQ ID NO: 962377 - DNA, 33 bp, Homo sapien
ccagtgagagatggaaactcggacccgagtgca

SEQ ID NO: 962378 - DNA, 33 bp, Homo sapien
ccagtgagagatggaagctcggacccgagtgca

SEQ ID NO: 962379 - DNA, 33 bp, Homo sapien
atagaaaaaaatagcacccaatagctttagagt

SEQ ID NO: 962380 - DNA, 33 bp, Homo sapien
atagaaaaaaatagcatccaatagctttagagt

SEQ ID NO: 962381 - DNA, 33 bp, Homo sapien
aatggttccatgctaaattagaggatttacact

SEQ ID NO: 962382 - DNA, 33 bp, Homo sapien
aatggttccatgctaatttagaggatttacact

SEQ ID NO: 962383 - DNA, 33 bp, Homo sapien
caactgttaagtggaacgtaataatacagggat

SEQ ID NO: 962384 - DNA, 33 bp, Homo sapien
caactgttaagtggaatgtaataatacagggat

SEQ ID NO: 962385 - DNA, 33 bp, Homo sapien
tgctggagagatgagaaaaaagtgacttggaag

SEQ ID NO: 962386 - DNA, 33 bp, Homo sapien
tgctggagagatgagacaaaagtgacttggaag

SEQ ID NO: 962387 - DNA, 33 bp, Homo sapien
cctgtagaatcttccccgacaactgctggttct

SEQ ID NO: 962388 - DNA, 33 bp, Homo sapien
cctgtagaatcttccctgacaactgctggttct

SEQ ID NO: 962389 - DNA, 33 bp, Homo sapien
ttggttattggacccacgctttcactggtgaga

SEQ ID NO: 962390 - DNA, 33 bp, Homo sapien
ttggttattggacccatgctttcactggtgaga

SEQ ID NO: 962391 - DNA, 33 bp, Homo sapien
agctcctcattttacaaactgcctagaatcaaa

SEQ ID NO: 962392 - DNA, 33 bp, Homo sapien
agctcctcattttacagactgcctagaatcaaa

SEQ ID NO: 962393 - DNA, 33 bp, Homo sapien
tgatgagaataaatcacacaagtagaagtgggt

SEQ ID NO: 962394 - DNA, 33 bp, Homo sapien
tgatgagaataaatcatacaagtagaagtgggt

SEQ ID NO: 962395 - DNA, 33 bp, Homo sapien
ctgtgaaggattgtgccatgaagaatggagcac

SEQ ID NO: 962396 - DNA, 33 bp, Homo sapien
ctgtgaaggattgtgctatgaagaatggagcac

SEQ ID NO: 962397 - DNA, 33 bp, Homo sapien
cttcttaccatctatcacttgcattacacatct

SEQ ID NO: 962398 - DNA, 33 bp, Homo sapien
cttcttaccatctatcccttgcattacacatct

SEQ ID NO: 962399 - DNA, 33 bp, Homo sapien
tacagctgaatctggacggaaactaaggagact

SEQ ID NO: 962400 - DNA, 33 bp, Homo sapien
tacagctgaatctggatggaaactaaggagact

SEQ ID NO: 962401 - DNA, 33 bp, Homo sapien
ccagagacctgaacatcatacatcagcagaaac

SEQ ID NO: 962402 - DNA, 33 bp, Homo sapien
ccagagacctgaacattatacatcagcagaaac

SEQ ID NO: 962403 - DNA, 33 bp, Homo sapien
aaaggtcttgttcagaaaaagtatgtacacttg

SEQ ID NO: 962404 - DNA, 33 bp, Homo sapien
aaaggtcttgttcagagaaagtatgtacacttg

SEQ ID NO: 962405 - DNA, 33 bp, Homo sapien
ctgacaacttctggaacactttgagttttgcct

SEQ ID NO: 962406 - DNA, 33 bp, Homo sapien
ctgacaacttctggaatactttgagttttgcct

SEQ ID NO: 962407 - DNA, 33 bp, Homo sapien
ccagtttctgtgcctgaagagagacgaagcccc

SEQ ID NO: 962408 - DNA, 33 bp, Homo sapien
ccagtttctgtgcctgcagagagacgaagcccc

SEQ ID NO: 962409 - DNA, 33 bp, Homo sapien
cctcttgttgaaagtgcagagcaacattacagt

SEQ ID NO: 962410 - DNA, 33 bp, Homo sapien
cctcttgttgaaagtggagagcaacattacagt

SEQ ID NO: 962411 - DNA, 33 bp, Homo sapien
gcatccaggtctggacaaatacaaagcaaagcc

SEQ ID NO: 962412 - DNA, 33 bp, Homo sapien
gcatccaggtctggacgaatacaaagcaaagcc

SEQ ID NO: 962413 - DNA, 33 bp, Homo sapien
cattccatatcctcgacgtcctgctggaacaat

SEQ ID NO: 962414 - DNA, 33 bp, Homo sapien
cattccatatcctcgatgtcctgctggaacaat

SEQ ID NO: 962415 - DNA, 33 bp, Homo sapien
attagtggttctgttaaatagttaaagtctata

SEQ ID NO: 962416 - DNA, 33 bp, Homo sapien
attagtggttctgttatatagttaaagtctata

SEQ ID NO: 962417 - DNA, 33 bp, Homo sapien
accaccaccttcaagactaccaccaacttctgc

SEQ ID NO: 962418 - DNA, 33 bp, Homo sapien
accaccaccttcaagattaccaccaacttctgc

SEQ ID NO: 962419 - DNA, 33 bp, Homo sapien
ttttgtcaaagagctaaaggaagtgggagtctg

SEQ ID NO: 962420 - DNA, 33 bp, Homo sapien
ttttgtcaaagagctagaggaagtgggagtctg

SEQ ID NO: 962421 - DNA, 33 bp, Homo sapien
aaactgttgtataaaacgaggcagaagaccaca

SEQ ID NO: 962422 - DNA, 33 bp, Homo sapien
aaactgttgtataaaatgaggcagaagaccaca

SEQ ID NO: 962423 - DNA, 33 bp, Homo sapien
atcaacgtcagctatacatagtttacaaatgga

SEQ ID NO: 962424 - DNA, 33 bp, Homo sapien
atcaacgtcagctatagatagtttacaaatgga

SEQ ID NO: 962425 - DNA, 33 bp, Homo sapien
gccctattgcctttaacgtaagaacaggaaaaa

SEQ ID NO: 962426 - DNA, 33 bp, Homo sapien
gccctattgcctttaatgtaagaacaggaaaaa

SEQ ID NO: 962427 - DNA, 33 bp, Homo sapien
aatggagggctcttaaaaatagtggatttcaat

SEQ ID NO: 962428 - DNA, 33 bp, Homo sapien
aatggagggctcttaacaatagtggatttcaat

SEQ ID NO: 962429 - DNA, 33 bp, Homo sapien
tgttctaccaattaaagacagggctaggtagaa

SEQ ID NO: 962430 - DNA, 33 bp, Homo sapien
tgttctaccaattaaatacagggctaggtagaa

SEQ ID NO: 962431 - DNA, 33 bp, Homo sapien
atcactcaatacatagaaaaagataaacaatga

SEQ ID NO: 962432 - DNA, 33 bp, Homo sapien
atcactcaatacataggaaaagataaacaatga

SEQ ID NO: 962433 - DNA, 33 bp, Homo sapien
gtggtttgttatcttccctggtggcaaagtata

SEQ ID NO: 962434 - DNA, 33 bp, Homo sapien
gtggtttgttatcttctctggtggcaaagtata

SEQ ID NO: 962435 - DNA, 33 bp, Homo sapien
ctgaagttgagggcaaagatacttcagcaaaaa

SEQ ID NO: 962436 - DNA, 33 bp, Homo sapien
ctgaagttgagggcaatgatacttcagcaaaaa

SEQ ID NO: 962437 - DNA, 33 bp, Homo sapien
actgccactttcatggaagattttcgtgggaca

SEQ ID NO: 962438 - DNA, 33 bp, Homo sapien
actgccactttcatgggagattttcgtgggaca

SEQ ID NO: 962439 - DNA, 33 bp, Homo sapien
aggtaatgtggataaactgaactctgaaggaat

SEQ ID NO: 962440 - DNA, 33 bp, Homo sapien
aggtaatgtggataaattgaactctgaaggaat

SEQ ID NO: 962441 - DNA, 33 bp, Homo sapien
atgcctgacattgacccctattctaaaatactt

SEQ ID NO: 962442 - DNA, 33 bp, Homo sapien
atgcctgacattgacctctattctaaaatactt

SEQ ID NO: 962443 - DNA, 33 bp, Homo sapien
gcccacatagccttctcactccttctctgctga

SEQ ID NO: 962444 - DNA, 33 bp, Homo sapien
gcccacatagccttcttactccttctctgctga

SEQ ID NO: 962445 - DNA, 33 bp, Homo sapien
atggctgagagacctgaagagaaatcacatccc

SEQ ID NO: 962446 - DNA, 33 bp, Homo sapien
atggctgagagacctgcagagaaatcacatccc

SEQ ID NO: 962447 - DNA, 33 bp, Homo sapien
ttgcaattttagtagcagaggcagcttctaaga

SEQ ID NO: 962448 - DNA, 33 bp, Homo sapien
ttgcaattttagtagcggaggcagcttctaaga

SEQ ID NO: 962449 - DNA, 33 bp, Homo sapien
gtggtagaatttgagagaatattccagtggtcc

SEQ ID NO: 962450 - DNA, 33 bp, Homo sapien
gtggtagaatttgagataatattccagtggtcc

SEQ ID NO: 962451 - DNA, 33 bp, Homo sapien
ggaatagaattggaaccggttcttagggtgtgt

SEQ ID NO: 962452 - DNA, 33 bp, Homo sapien
ggaatagaattggaactggttcttagggtgtgt

SEQ ID NO: 962453 - DNA, 33 bp, Homo sapien
gagggaaagaaaggaactgatcatcacttacac

SEQ ID NO: 962454 - DNA, 33 bp, Homo sapien
gagggaaagaaaggaattgatcatcacttacac

SEQ ID NO: 962455 - DNA, 33 bp, Homo sapien
gagggtcaaagaggtcactttactttcctaaac

SEQ ID NO: 962456 - DNA, 33 bp, Homo sapien
gagggtcaaagaggtcgctttactttcctaaac

SEQ ID NO: 962457 - DNA, 33 bp, Homo sapien
tgttcaatgtcccagacacagcaaggactcact

SEQ ID NO: 962458 - DNA, 33 bp, Homo sapien
tgttcaatgtcccagatacagcaaggactcact

SEQ ID NO: 962459 - DNA, 33 bp, Homo sapien
aacttcattcagtccactgctgtttaaagctcc

SEQ ID NO: 962460 - DNA, 33 bp, Homo sapien
aacttcattcagtccagtgctgtttaaagctcc

SEQ ID NO: 962461 - DNA, 33 bp, Homo sapien
tttgtctagacttacaaggtctttttcaggaac

SEQ ID NO: 962462 - DNA, 33 bp, Homo sapien
tttgtctagacttacagggtctttttcaggaac

SEQ ID NO: 962463 - DNA, 33 bp, Homo sapien
tctaagcatgatgtaaatgaatctgaggctttt

SEQ ID NO: 962464 - DNA, 33 bp, Homo sapien
tctaagcatgatgtaagtgaatctgaggctttt

SEQ ID NO: 962465 - DNA, 33 bp, Homo sapien
acgtttgcaatttgaccgagaaatgtggtttca

SEQ ID NO: 962466 - DNA, 33 bp, Homo sapien
acgtttgcaatttgactgagaaatgtggtttca

SEQ ID NO: 962467 - DNA, 33 bp, Homo sapien
cttctattgcagcaaaagacccacctagtaact

SEQ ID NO: 962468 - DNA, 33 bp, Homo sapien
cttctattgcagcaaatgacccacctagtaact

SEQ ID NO: 962469 - DNA, 33 bp, Homo sapien
ttgtacaatagatcaccagaacctcttcctcct

SEQ ID NO: 962470 - DNA, 33 bp, Homo sapien
ttgtacaatagatcacgagaacctcttcctcct

SEQ ID NO: 962471 - DNA, 33 bp, Homo sapien
gctttggaattactacaactcttggccatgaag

SEQ ID NO: 962472 - DNA, 33 bp, Homo sapien
gctttggaattactacgactcttggccatgaag

SEQ ID NO: 962473 - DNA, 33 bp, Homo sapien
catctgtggttactcacagttaggcatagttcc

SEQ ID NO: 962474 - DNA, 33 bp, Homo sapien
catctgtggttactcatagttaggcatagttcc

SEQ ID NO: 962475 - DNA, 33 bp, Homo sapien
ctacagttgtacagagcccggtggagagaggaa

SEQ ID NO: 962476 - DNA, 33 bp, Homo sapien
ctacagttgtacagagtccggtggagagaggaa

SEQ ID NO: 962477 - DNA, 33 bp, Homo sapien
gatgaatcaccagaaactgtgacaccctcagtg

SEQ ID NO: 962478 - DNA, 33 bp, Homo sapien
gatgaatcaccagaaattgtgacaccctcagtg

SEQ ID NO: 962479 - DNA, 33 bp, Homo sapien
catggcattgtaagtgaatcctcacaatacttg

SEQ ID NO: 962480 - DNA, 33 bp, Homo sapien
catggcattgtaagtggatcctcacaatacttg

SEQ ID NO: 962481 - DNA, 33 bp, Homo sapien
atcaaaagatgttcaacaaaggtcattcacagc

SEQ ID NO: 962482 - DNA, 33 bp, Homo sapien
atcaaaagatgttcaataaaggtcattcacagc

SEQ ID NO: 962483 - DNA, 33 bp, Homo sapien
aacaatgtgtgatccaaaataagccagacacac

SEQ ID NO: 962484 - DNA, 33 bp, Homo sapien
aacaatgtgtgatccacaataagccagacacac

SEQ ID NO: 962485 - DNA, 33 bp, Homo sapien
gttacagaattcagacaccaaagtcattaagat

SEQ ID NO: 962486 - DNA, 33 bp, Homo sapien
gttacagaattcagacgccaaagtcattaagat

SEQ ID NO: 962487 - DNA, 33 bp, Homo sapien
tttaggactaatggcccatgtgagaatttacat

SEQ ID NO: 962488 - DNA, 33 bp, Homo sapien
tttaggactaatggcctatgtgagaatttacat

SEQ ID NO: 962489 - DNA, 33 bp, Homo sapien
agcagaagcctacttaaagcctgaattattctg

SEQ ID NO: 962490 - DNA, 33 bp, Homo sapien
agcagaagcctacttagagcctgaattattctg

SEQ ID NO: 962491 - DNA, 33 bp, Homo sapien
tggcaataatgaagtacgcaatttttgaccaag

SEQ ID NO: 962492 - DNA, 33 bp, Homo sapien
tggcaataatgaagtatgcaatttttgaccaag

SEQ ID NO: 962493 - DNA, 33 bp, Homo sapien
ttcttatcctgtggtccaggttggggcctgaga

SEQ ID NO: 962494 - DNA, 33 bp, Homo sapien
ttcttatcctgtggtcgaggttggggcctgaga

SEQ ID NO: 962495 - DNA, 33 bp, Homo sapien
gacactcataaagtaaacatcacacctgaaata

SEQ ID NO: 962496 - DNA, 33 bp, Homo sapien
gacactcataaagtaagcatcacacctgaaata

SEQ ID NO: 962497 - DNA, 33 bp, Homo sapien
ttaaaggtaaagtgacagaaacacattacagaa

SEQ ID NO: 962498 - DNA, 33 bp, Homo sapien
ttaaaggtaaagtgacggaaacacattacagaa

SEQ ID NO: 962499 - DNA, 33 bp, Homo sapien
tagagattgatgaaaaagatgtgactgagagca

SEQ ID NO: 962500 - DNA, 33 bp, Homo sapien
tagagattgatgaaaaggatgtgactgagagca

SEQ ID NO: 962501 - DNA, 33 bp, Homo sapien
catgaggcagtttggtcaataggagaaaagaca

SEQ ID NO: 962502 - DNA, 33 bp, Homo sapien
catgaggcagtttggttaataggagaaaagaca

SEQ ID NO: 962503 - DNA, 33 bp, Homo sapien
tttcagggtctccccacgatcactgttcctgca

SEQ ID NO: 962504 - DNA, 33 bp, Homo sapien
tttcagggtctccccatgatcactgttcctgca

SEQ ID NO: 962505 - DNA, 33 bp, Homo sapien
atgagacttacccagacgaactagtgtattgaa

SEQ ID NO: 962506 - DNA, 33 bp, Homo sapien
atgagacttacccagaggaactagtgtattgaa

SEQ ID NO: 962507 - DNA, 33 bp, Homo sapien
agagttaagtgaccaaattagaaatggttaatg

SEQ ID NO: 962508 - DNA, 33 bp, Homo sapien
agagttaagtgaccaagttagaaatggttaatg

SEQ ID NO: 962509 - DNA, 33 bp, Homo sapien
aattaaaggaagtataagcagtcatccttcagt

SEQ ID NO: 962510 - DNA, 33 bp, Homo sapien
aattaaaggaagtatatgcagtcatccttcagt

SEQ ID NO: 962511 - DNA, 33 bp, Homo sapien
tagaaaaggatgaagcacacactaaaaattaat

SEQ ID NO: 962512 - DNA, 33 bp, Homo sapien
tagaaaaggatgaagcgcacactaaaaattaat

SEQ ID NO: 962513 - DNA, 33 bp, Homo sapien
actgtattcatgatacgcagaaaagaaagtctg

SEQ ID NO: 962514 - DNA, 33 bp, Homo sapien
actgtattcatgatactcagaaaagaaagtctg

SEQ ID NO: 962515 - DNA, 33 bp, Homo sapien
atctagccaagcttaccgatcccatccttgaag

SEQ ID NO: 962516 - DNA, 33 bp, Homo sapien
atctagccaagcttactgatcccatccttgaag

SEQ ID NO: 962517 - DNA, 33 bp, Homo sapien
tcatgatactagttctcaccagtggaatgtgaa

SEQ ID NO: 962518 - DNA, 33 bp, Homo sapien
tcatgatactagttcttaccagtggaatgtgaa

SEQ ID NO: 962519 - DNA, 33 bp, Homo sapien
catgccaaatgtcctgaaatttggagagcaata

SEQ ID NO: 962520 - DNA, 33 bp, Homo sapien
catgccaaatgtcctgcaatttggagagcaata

SEQ ID NO: 962521 - DNA, 33 bp, Homo sapien
aaaacaaagtctggaagatttgggtgtaaattt

SEQ ID NO: 962522 - DNA, 33 bp, Homo sapien
aaaacaaagtctggaatatttgggtgtaaattt

SEQ ID NO: 962523 - DNA, 33 bp, Homo sapien
ggttactggaggccaaccttgaaaatctcctaa

SEQ ID NO: 962524 - DNA, 33 bp, Homo sapien
ggttactggaggccaatcttgaaaatctcctaa

SEQ ID NO: 962525 - DNA, 33 bp, Homo sapien
catatggacgtttaaccgcaggacccatcacaa

SEQ ID NO: 962526 - DNA, 33 bp, Homo sapien
catatggacgtttaactgcaggacccatcacaa

SEQ ID NO: 962527 - DNA, 33 bp, Homo sapien
ggaggaagaaaagtcactgaatccaagaggaaa

SEQ ID NO: 962528 - DNA, 33 bp, Homo sapien
ggaggaagaaaagtcattgaatccaagaggaaa

SEQ ID NO: 962529 - DNA, 33 bp, Homo sapien
taatgaagttgacacacgatacgttttgtgtac

SEQ ID NO: 962530 - DNA, 33 bp, Homo sapien
taatgaagttgacacatgatacgttttgtgtac

SEQ ID NO: 962531 - DNA, 33 bp, Homo sapien
agggactcaagataaaatcatgtttgtgaaggt

SEQ ID NO: 962532 - DNA, 33 bp, Homo sapien
agggactcaagataaagtcatgtttgtgaaggt

SEQ ID NO: 962533 - DNA, 33 bp, Homo sapien
taaatagtacccagcactgagagttagaagtgg

SEQ ID NO: 962534 - DNA, 33 bp, Homo sapien
taaatagtacccagcattgagagttagaagtgg

SEQ ID NO: 962535 - DNA, 33 bp, Homo sapien
tcagcaaatactctacaattttgtttgtttagt

SEQ ID NO: 962536 - DNA, 33 bp, Homo sapien
tcagcaaatactctactattttgtttgtttagt

SEQ ID NO: 962537 - DNA, 33 bp, Homo sapien
ctataatactgtagaaaaataggtaagcagctt

SEQ ID NO: 962538 - DNA, 33 bp, Homo sapien
ctataatactgtagaagaataggtaagcagctt

SEQ ID NO: 962539 - DNA, 33 bp, Homo sapien
ccctcacctctagaaacgtaaacctctgcctgt

SEQ ID NO: 962540 - DNA, 33 bp, Homo sapien
ccctcacctctagaaatgtaaacctctgcctgt

SEQ ID NO: 962541 - DNA, 33 bp, Homo sapien
aacgtctaaacctctacggaagcaaacacctag

SEQ ID NO: 962542 - DNA, 33 bp, Homo sapien
aacgtctaaacctctatggaagcaaacacctag

SEQ ID NO: 962543 - DNA, 33 bp, Homo sapien
cttggcacacaggctccaagttccaactggaaa

SEQ ID NO: 962544 - DNA, 33 bp, Homo sapien
cttggcacacaggctctaagttccaactggaaa

SEQ ID NO: 962545 - DNA, 33 bp, Homo sapien
cattcatttgccaaaaccactccctttgggaat

SEQ ID NO: 962546 - DNA, 33 bp, Homo sapien
cattcatttgccaaaagcactccctttgggaat

SEQ ID NO: 962547 - DNA, 33 bp, Homo sapien
aggctaattctggcaaaaaacactttcagcatc

SEQ ID NO: 962548 - DNA, 33 bp, Homo sapien
aggctaattctggcaacaaacactttcagcatc

SEQ ID NO: 962549 - DNA, 33 bp, Homo sapien
catagagaattggaaacaccatttgccaattgc

SEQ ID NO: 962550 - DNA, 33 bp, Homo sapien
catagagaattggaaagaccatttgccaattgc

SEQ ID NO: 962551 - DNA, 33 bp, Homo sapien
ggggatgtgtgtgttccatgtcagggaaagaat

SEQ ID NO: 962552 - DNA, 33 bp, Homo sapien
ggggatgtgtgtgttctatgtcagggaaagaat

SEQ ID NO: 962553 - DNA, 33 bp, Homo sapien
gaactattttgactaacaatgactgataaaagg

SEQ ID NO: 962554 - DNA, 33 bp, Homo sapien
gaactattttgactaataatgactgataaaagg

SEQ ID NO: 962555 - DNA, 33 bp, Homo sapien
ggcaacaaaggcattaacagctctggaaagtca

SEQ ID NO: 962556 - DNA, 33 bp, Homo sapien
ggcaacaaaggcattagcagctctggaaagtca

SEQ ID NO: 962557 - DNA, 33 bp, Homo sapien
aaacagaaaaaatatacatgttttggcatgtct

SEQ ID NO: 962558 - DNA, 33 bp, Homo sapien
aaacagaaaaaatatatatgttttggcatgtct

SEQ ID NO: 962559 - DNA, 33 bp, Homo sapien
aaagttcatttaacccactttctattgttggat

SEQ ID NO: 962560 - DNA, 33 bp, Homo sapien
aaagttcatttaacccgctttctattgttggat

SEQ ID NO: 962561 - DNA, 33 bp, Homo sapien
taagatgatggtggtgaaataagataaagtcca

SEQ ID NO: 962562 - DNA, 33 bp, Homo sapien
taagatgatggtggtggaataagataaagtcca

SEQ ID NO: 962563 - DNA, 33 bp, Homo sapien
acagactgtggcatagaagagacacgcaaaaag

SEQ ID NO: 962564 - DNA, 33 bp, Homo sapien
acagactgtggcatagcagagacacgcaaaaag

SEQ ID NO: 962565 - DNA, 33 bp, Homo sapien
ttcttaacaagctgaacgactacaggacccttc

SEQ ID NO: 962566 - DNA, 33 bp, Homo sapien
ttcttaacaagctgaaggactacaggacccttc

SEQ ID NO: 962567 - DNA, 33 bp, Homo sapien
agagagaatgaggtcacattaatgatggagata

SEQ ID NO: 962568 - DNA, 33 bp, Homo sapien
agagagaatgaggtcatattaatgatggagata

SEQ ID NO: 962569 - DNA, 33 bp, Homo sapien
agagagctggtaaaacagtatttctgggtatgt

SEQ ID NO: 962570 - DNA, 33 bp, Homo sapien
agagagctggtaaaaccgtatttctgggtatgt

SEQ ID NO: 962571 - DNA, 33 bp, Homo sapien
tgtgtttgtttggttaaaagatgatgaaaacag

SEQ ID NO: 962572 - DNA, 33 bp, Homo sapien
tgtgtttgtttggttagaagatgatgaaaacag

SEQ ID NO: 962573 - DNA, 33 bp, Homo sapien
tagaggagaaagagtgcactgctagatttggtg

SEQ ID NO: 962574 - DNA, 33 bp, Homo sapien
tagaggagaaagagtgtactgctagatttggtg

SEQ ID NO: 962575 - DNA, 33 bp, Homo sapien
gtaaaagccatgagaaccatcatcattttcttt

SEQ ID NO: 962576 - DNA, 33 bp, Homo sapien
gtaaaagccatgagaagcatcatcattttcttt

SEQ ID NO: 962577 - DNA, 33 bp, Homo sapien
gaggagagtggcaagaccggaggctggaatagc

SEQ ID NO: 962578 - DNA, 33 bp, Homo sapien
gaggagagtggcaagatcggaggctggaatagc

SEQ ID NO: 962579 - DNA, 33 bp, Homo sapien
gcacacccccgccagaagattcacaatctttaa

SEQ ID NO: 962580 - DNA, 33 bp, Homo sapien
gcacacccccgccagaggattcacaatctttaa

SEQ ID NO: 962581 - DNA, 33 bp, Homo sapien
gcccactggtttagacactgttcttcattccct

SEQ ID NO: 962582 - DNA, 33 bp, Homo sapien
gcccactggtttagacgctgttcttcattccct

SEQ ID NO: 962583 - DNA, 33 bp, Homo sapien
tcaactctcaccacaaacctactgctcccattt

SEQ ID NO: 962584 - DNA, 33 bp, Homo sapien
tcaactctcaccacaatcctactgctcccattt

SEQ ID NO: 962585 - DNA, 33 bp, Homo sapien
gcatccattgaaagcgaagcaccaaaagcattg

SEQ ID NO: 962586 - DNA, 33 bp, Homo sapien
gcatccattgaaagcgcagcaccaaaagcattg

SEQ ID NO: 962587 - DNA, 33 bp, Homo sapien
tcctcatgttcaggacgggctcatactagaagt

SEQ ID NO: 962588 - DNA, 33 bp, Homo sapien
tcctcatgttcaggactggctcatactagaagt

SEQ ID NO: 962589 - DNA, 33 bp, Homo sapien
aaacaaggtctcttcccacgtgtaaaaagtagg

SEQ ID NO: 962590 - DNA, 33 bp, Homo sapien
aaacaaggtctcttcctacgtgtaaaaagtagg

SEQ ID NO: 962591 - DNA, 33 bp, Homo sapien
tcttattcctgcagaccaggccattccactatg

SEQ ID NO: 962592 - DNA, 33 bp, Homo sapien
tcttattcctgcagacgaggccattccactatg

SEQ ID NO: 962593 - DNA, 33 bp, Homo sapien
agactaaacctcctggaacaaggcctggagaga

SEQ ID NO: 962594 - DNA, 33 bp, Homo sapien
agactaaacctcctgggacaaggcctggagaga

SEQ ID NO: 962595 - DNA, 33 bp, Homo sapien
gtagcaataggataccaaattttaacctgactc

SEQ ID NO: 962596 - DNA, 33 bp, Homo sapien
gtagcaataggataccgaattttaacctgactc

SEQ ID NO: 962597 - DNA, 33 bp, Homo sapien
tgcatgagagatagaaacaaatctaccttcaaa

SEQ ID NO: 962598 - DNA, 33 bp, Homo sapien
tgcatgagagatagaagcaaatctaccttcaaa

SEQ ID NO: 962599 - DNA, 33 bp, Homo sapien
tcaatgtaatcctaaccgatggttgtaaatact

SEQ ID NO: 962600 - DNA, 33 bp, Homo sapien
tcaatgtaatcctaactgatggttgtaaatact

SEQ ID NO: 962601 - DNA, 33 bp, Homo sapien
gttgtattacagacacagtggaataccactcag

SEQ ID NO: 962602 - DNA, 33 bp, Homo sapien
gttgtattacagacacggtggaataccactcag

SEQ ID NO: 962603 - DNA, 33 bp, Homo sapien
aaacaatagccagcaccgtagacatttcaactg

SEQ ID NO: 962604 - DNA, 33 bp, Homo sapien
aaacaatagccagcactgtagacatttcaactg

SEQ ID NO: 962605 - DNA, 33 bp, Homo sapien
ccctccttgtgctctcaaaatggaggtttccac

SEQ ID NO: 962606 - DNA, 33 bp, Homo sapien
ccctccttgtgctctcgaaatggaggtttccac

SEQ ID NO: 962607 - DNA, 33 bp, Homo sapien
gggtgggtccagggataaaccaatggtggccac

SEQ ID NO: 962608 - DNA, 33 bp, Homo sapien
gggtgggtccagggatgaaccaatggtggccac

SEQ ID NO: 962609 - DNA, 33 bp, Homo sapien
ggatttggcattatcaaaagtggattgttcagc

SEQ ID NO: 962610 - DNA, 33 bp, Homo sapien
ggatttggcattatcataagtggattgttcagc

SEQ ID NO: 962611 - DNA, 33 bp, Homo sapien
ggacaaaatgaaggacagcaaggttagaggggc

SEQ ID NO: 962612 - DNA, 33 bp, Homo sapien
ggacaaaatgaaggacggcaaggttagaggggc

SEQ ID NO: 962613 - DNA, 33 bp, Homo sapien
gtttgcctcagatgtaagaaagcgaggcgaggc

SEQ ID NO: 962614 - DNA, 33 bp, Homo sapien
gtttgcctcagatgtaggaaagcgaggcgaggc

SEQ ID NO: 962615 - DNA, 33 bp, Homo sapien
gccctgcccagatcaccggctcattctccctat

SEQ ID NO: 962616 - DNA, 33 bp, Homo sapien
gccctgcccagatcactggctcattctccctat

SEQ ID NO: 962617 - DNA, 33 bp, Homo sapien
gagatgtgggcccagaactatgagagaatggag

SEQ ID NO: 962618 - DNA, 33 bp, Homo sapien
gagatgtgggcccagagctatgagagaatggag

SEQ ID NO: 962619 - DNA, 33 bp, Homo sapien
tgttccaagaaagaaacgataagtcacagccta

SEQ ID NO: 962620 - DNA, 33 bp, Homo sapien
tgttccaagaaagaaatgataagtcacagccta

SEQ ID NO: 962621 - DNA, 33 bp, Homo sapien
gagcctccacttaacacagaaaatctttttaca

SEQ ID NO: 962622 - DNA, 33 bp, Homo sapien
gagcctccacttaacagagaaaatctttttaca

SEQ ID NO: 962623 - DNA, 33 bp, Homo sapien
tttctttgaaacgtacagaagcacttaatgaga

SEQ ID NO: 962624 - DNA, 33 bp, Homo sapien
tttctttgaaacgtaccgaagcacttaatgaga

SEQ ID NO: 962625 - DNA, 33 bp, Homo sapien
aaaaacctcactttcccctcgagttatctgatt

SEQ ID NO: 962626 - DNA, 33 bp, Homo sapien
aaaaacctcactttccgctcgagttatctgatt

SEQ ID NO: 962627 - DNA, 33 bp, Homo sapien
attcaaatgacacacaatggaagtataggaaga

SEQ ID NO: 962628 - DNA, 33 bp, Homo sapien
attcaaatgacacacattggaagtataggaaga

SEQ ID NO: 962629 - DNA, 33 bp, Homo sapien
attgcattttagattaaaggtttgtgccaaccc

SEQ ID NO: 962630 - DNA, 33 bp, Homo sapien
attgcattttagattacaggtttgtgccaaccc

SEQ ID NO: 962631 - DNA, 33 bp, Homo sapien
ttggtaattctcatgacatttcaaactttatta

SEQ ID NO: 962632 - DNA, 33 bp, Homo sapien
ttggtaattctcatgatatttcaaactttatta

SEQ ID NO: 962633 - DNA, 33 bp, Homo sapien
gtccaatgatcagggacgttgtgggagagattc

SEQ ID NO: 962634 - DNA, 33 bp, Homo sapien
gtccaatgatcagggatgttgtgggagagattc

SEQ ID NO: 962635 - DNA, 33 bp, Homo sapien
ctgaatctcaggagacaatgtgagaatacactg

SEQ ID NO: 962636 - DNA, 33 bp, Homo sapien
ctgaatctcaggagaccatgtgagaatacactg

SEQ ID NO: 962637 - DNA, 33 bp, Homo sapien
caggtggagtattctaagcaggagaaacaggta

SEQ ID NO: 962638 - DNA, 33 bp, Homo sapien
caggtggagtattctaggcaggagaaacaggta

SEQ ID NO: 962639 - DNA, 33 bp, Homo sapien
catgtgaggccgatcaacgcatcaataaagtat

SEQ ID NO: 962640 - DNA, 33 bp, Homo sapien
catgtgaggccgatcaccgcatcaataaagtat

SEQ ID NO: 962641 - DNA, 33 bp, Homo sapien
aagagaataataaatagggggaatgactctacc

SEQ ID NO: 962642 - DNA, 33 bp, Homo sapien
aagagaataataaatatggggaatgactctacc

SEQ ID NO: 962643 - DNA, 33 bp, Homo sapien
acaccctggagatgaacgtcagggctcctcctt

SEQ ID NO: 962644 - DNA, 33 bp, Homo sapien
acaccctggagatgaatgtcagggctcctcctt

SEQ ID NO: 962645 - DNA, 33 bp, Homo sapien
tgtgtggattagaggtaaattatctaaagtatc

SEQ ID NO: 962646 - DNA, 33 bp, Homo sapien
tgtgtggattagaggtgaattatctaaagtatc

SEQ ID NO: 962647 - DNA, 33 bp, Homo sapien
tcatccagctcctaacaactgtgggatctgcct

SEQ ID NO: 962648 - DNA, 33 bp, Homo sapien
tcatccagctcctaacgactgtgggatctgcct

SEQ ID NO: 962649 - DNA, 33 bp, Homo sapien
tgctaggtgttgaatcccaagagactttcagtg

SEQ ID NO: 962650 - DNA, 33 bp, Homo sapien
tgctaggtgttgaatctcaagagactttcagtg

SEQ ID NO: 962651 - DNA, 33 bp, Homo sapien
ttctccattgccatgacgaggccaaggtttctt

SEQ ID NO: 962652 - DNA, 33 bp, Homo sapien
ttctccattgccatgatgaggccaaggtttctt

SEQ ID NO: 962653 - DNA, 33 bp, Homo sapien
agaccttaccagagagaagatttccagcatttt

SEQ ID NO: 962654 - DNA, 33 bp, Homo sapien
agaccttaccagagagcagatttccagcatttt

SEQ ID NO: 962655 - DNA, 33 bp, Homo sapien
tcctgagctaaagttaagacaactgcctggaag

SEQ ID NO: 962656 - DNA, 33 bp, Homo sapien
tcctgagctaaagttaggacaactgcctggaag

SEQ ID NO: 962657 - DNA, 33 bp, Homo sapien
gcctaagcctggaaggaacaatacagcagaccc

SEQ ID NO: 962658 - DNA, 33 bp, Homo sapien
gcctaagcctggaagggacaatacagcagaccc

SEQ ID NO: 962659 - DNA, 33 bp, Homo sapien
ttcccatatgtcacacccaacactctcatctct

SEQ ID NO: 962660 - DNA, 33 bp, Homo sapien
ttcccatatgtcacactcaacactctcatctct

SEQ ID NO: 962661 - DNA, 33 bp, Homo sapien
tgaggcagagaaaacaagaaagtacttaagttc

SEQ ID NO: 962662 - DNA, 33 bp, Homo sapien
tgaggcagagaaaacaggaaagtacttaagttc

SEQ ID NO: 962663 - DNA, 33 bp, Homo sapien
gttacttgaaataaaagtacgctttccaagatg

SEQ ID NO: 962664 - DNA, 33 bp, Homo sapien
gttacttgaaataaaattacgctttccaagatg

SEQ ID NO: 962665 - DNA, 33 bp, Homo sapien
caaaagatgtgttcaaatcctaatccctggtac

SEQ ID NO: 962666 - DNA, 33 bp, Homo sapien
caaaagatgtgttcaagtcctaatccctggtac

SEQ ID NO: 962667 - DNA, 33 bp, Homo sapien
ttgacttggtcactccacaatatatatgtatgc

SEQ ID NO: 962668 - DNA, 33 bp, Homo sapien
ttgacttggtcactccgcaatatatatgtatgc

SEQ ID NO: 962669 - DNA, 33 bp, Homo sapien
caagagaacccctctgaacatttctggagtcat

SEQ ID NO: 962670 - DNA, 33 bp, Homo sapien
caagagaacccctctgcacatttctggagtcat

SEQ ID NO: 962671 - DNA, 33 bp, Homo sapien
ctgccttgagtggtaacagcatcggcagttgtc

SEQ ID NO: 962672 - DNA, 33 bp, Homo sapien
ctgccttgagtggtaagagcatcggcagttgtc

SEQ ID NO: 962673 - DNA, 33 bp, Homo sapien
aatagtaattcccgtacgtgttcattttatttt

SEQ ID NO: 962674 - DNA, 33 bp, Homo sapien
aatagtaattcccgtatgtgttcattttatttt

SEQ ID NO: 962675 - DNA, 33 bp, Homo sapien
aacgtgacttgccaatcattagaattttctagt

SEQ ID NO: 962676 - DNA, 33 bp, Homo sapien
aacgtgacttgccaattattagaattttctagt

SEQ ID NO: 962677 - DNA, 33 bp, Homo sapien
ctgaggaaatgcacggaaaatacttagcacatg

SEQ ID NO: 962678 - DNA, 33 bp, Homo sapien
ctgaggaaatgcacgggaaatacttagcacatg

SEQ ID NO: 962679 - DNA, 33 bp, Homo sapien
tgtgggtgcttgcaaaatcaagaaaacaaaagc

SEQ ID NO: 962680 - DNA, 33 bp, Homo sapien
tgtgggtgcttgcaaagtcaagaaaacaaaagc

SEQ ID NO: 962681 - DNA, 33 bp, Homo sapien
ttcccatttctgaccccacctatttatccaact

SEQ ID NO: 962682 - DNA, 33 bp, Homo sapien
ttcccatttctgaccctacctatttatccaact

SEQ ID NO: 962683 - DNA, 33 bp, Homo sapien
aatgggatttaagaggccatctaaccaaagtct

SEQ ID NO: 962684 - DNA, 33 bp, Homo sapien
aatgggatttaagaggtcatctaaccaaagtct

SEQ ID NO: 962685 - DNA, 33 bp, Homo sapien
aagccccactccaggcggaagaagtgcagcccc

SEQ ID NO: 962686 - DNA, 33 bp, Homo sapien
aagccccactccaggctgaagaagtgcagcccc

SEQ ID NO: 962687 - DNA, 33 bp, Homo sapien
atttgcatggtgatacacttctgctaggagagt

SEQ ID NO: 962688 - DNA, 33 bp, Homo sapien
atttgcatggtgatacccttctgctaggagagt

SEQ ID NO: 962689 - DNA, 33 bp, Homo sapien
cgtctcagaggttaaaaacttcgatagggactc

SEQ ID NO: 962690 - DNA, 33 bp, Homo sapien
cgtctcagaggttaaatacttcgatagggactc

SEQ ID NO: 962691 - DNA, 33 bp, Homo sapien
aagccttgcgctttaaataacaggggagcttcc

SEQ ID NO: 962692 - DNA, 33 bp, Homo sapien
aagccttgcgctttaagtaacaggggagcttcc

SEQ ID NO: 962693 - DNA, 33 bp, Homo sapien
gcatgaccaggtttcaaggcatctgacaacgaa

SEQ ID NO: 962694 - DNA, 33 bp, Homo sapien
gcatgaccaggtttcatggcatctgacaacgaa

SEQ ID NO: 962695 - DNA, 33 bp, Homo sapien
cagagggctacagagcaatgcaggttcatgggt

SEQ ID NO: 962696 - DNA, 33 bp, Homo sapien
cagagggctacagagcgatgcaggttcatgggt

SEQ ID NO: 962697 - DNA, 33 bp, Homo sapien
ttctgggaaatatcacggatgtacagacttccc

SEQ ID NO: 962698 - DNA, 33 bp, Homo sapien
ttctgggaaatatcactgatgtacagacttccc

SEQ ID NO: 962699 - DNA, 33 bp, Homo sapien
agcacaccagcatctccctgtgcgaggacccct

SEQ ID NO: 962700 - DNA, 33 bp, Homo sapien
agcacaccagcatctctctgtgcgaggacccct

SEQ ID NO: 962701 - DNA, 33 bp, Homo sapien
agcctgcaaatggacacatgttaattctgattg

SEQ ID NO: 962702 - DNA, 33 bp, Homo sapien
agcctgcaaatggacagatgttaattctgattg

SEQ ID NO: 962703 - DNA, 33 bp, Homo sapien
ggagtgcttggggacacgcttgctggaaaaggc

SEQ ID NO: 962704 - DNA, 33 bp, Homo sapien
ggagtgcttggggacatgcttgctggaaaaggc

SEQ ID NO: 962705 - DNA, 33 bp, Homo sapien
attaccttgtcttctacacaaagaaaatgtgcg

SEQ ID NO: 962706 - DNA, 33 bp, Homo sapien
attaccttgtcttctatacaaagaaaatgtgcg

SEQ ID NO: 962707 - DNA, 33 bp, Homo sapien
ttctggtaaactgtgaacttggtgatcctccga

SEQ ID NO: 962708 - DNA, 33 bp, Homo sapien
ttctggtaaactgtgagcttggtgatcctccga

SEQ ID NO: 962709 - DNA, 33 bp, Homo sapien
ttgaagaattagtttaagaagagcaagactgga

SEQ ID NO: 962710 - DNA, 33 bp, Homo sapien
ttgaagaattagtttaggaagagcaagactgga

SEQ ID NO: 962711 - DNA, 33 bp, Homo sapien
gctctctagtgaaacacaatagatggatatatt

SEQ ID NO: 962712 - DNA, 33 bp, Homo sapien
gctctctagtgaaacagaatagatggatatatt

SEQ ID NO: 962713 - DNA, 33 bp, Homo sapien
catcgttcaaaagatacagtgatacaatgatat

SEQ ID NO: 962714 - DNA, 33 bp, Homo sapien
catcgttcaaaagatagagtgatacaatgatat

SEQ ID NO: 962715 - DNA, 33 bp, Homo sapien
taaccacactacgacaagaacaaaaccacacat

SEQ ID NO: 962716 - DNA, 33 bp, Homo sapien
taaccacactacgacaggaacaaaaccacacat

SEQ ID NO: 962717 - DNA, 33 bp, Homo sapien
atatttgtttgtgaaacttctatgtagtctaaa

SEQ ID NO: 962718 - DNA, 33 bp, Homo sapien
atatttgtttgtgaaatttctatgtagtctaaa

SEQ ID NO: 962719 - DNA, 33 bp, Homo sapien
aaaaaatggggacagaagaactggtagagaaat

SEQ ID NO: 962720 - DNA, 33 bp, Homo sapien
aaaaaatggggacagaggaactggtagagaaat

SEQ ID NO: 962721 - DNA, 33 bp, Homo sapien
tttttgctctgttacacgctagacagtcttccg

SEQ ID NO: 962722 - DNA, 33 bp, Homo sapien
tttttgctctgttacatgctagacagtcttccg

SEQ ID NO: 962723 - DNA, 33 bp, Homo sapien
ctgccataattaatccaatttctttaggggcca

SEQ ID NO: 962724 - DNA, 33 bp, Homo sapien
ctgccataattaatccgatttctttaggggcca

SEQ ID NO: 962725 - DNA, 33 bp, Homo sapien
tttagaaggtcatcaacttccagcacttgcaat

SEQ ID NO: 962726 - DNA, 33 bp, Homo sapien
tttagaaggtcatcaatttccagcacttgcaat

SEQ ID NO: 962727 - DNA, 33 bp, Homo sapien
aagattaccttggaaggccgagtgcggcagttc

SEQ ID NO: 962728 - DNA, 33 bp, Homo sapien
aagattaccttggaagtccgagtgcggcagttc

SEQ ID NO: 962729 - DNA, 33 bp, Homo sapien
gagtttcagcttcaaccagacactcttaaaggg

SEQ ID NO: 962730 - DNA, 33 bp, Homo sapien
gagtttcagcttcaactagacactcttaaaggg

SEQ ID NO: 962731 - DNA, 33 bp, Homo sapien
gtataccttgcaaggcaatagctggacagtacc

SEQ ID NO: 962732 - DNA, 33 bp, Homo sapien
gtataccttgcaaggcgatagctggacagtacc

SEQ ID NO: 962733 - DNA, 33 bp, Homo sapien
attcaatggtcattaaacaattacatattaaat

SEQ ID NO: 962734 - DNA, 33 bp, Homo sapien
attcaatggtcattaatcaattacatattaaat

SEQ ID NO: 962735 - DNA, 33 bp, Homo sapien
tcctcaagctttagaaagcagtcattcggatta

SEQ ID NO: 962736 - DNA, 33 bp, Homo sapien
tcctcaagctttagaatgcagtcattcggatta

SEQ ID NO: 962737 - DNA, 33 bp, Homo sapien
ctaatctagctctttgcaggaaatgctaagtta

SEQ ID NO: 962738 - DNA, 33 bp, Homo sapien
ctaatctagctctttgtaggaaatgctaagtta

SEQ ID NO: 962739 - DNA, 33 bp, Homo sapien
tttttggacctcaagcaagaaagatttcagagc

SEQ ID NO: 962740 - DNA, 33 bp, Homo sapien
tttttggacctcaagcgagaaagatttcagagc

SEQ ID NO: 962741 - DNA, 33 bp, Homo sapien
tttaatcctttcaagacgtaagagtagaccact

SEQ ID NO: 962742 - DNA, 33 bp, Homo sapien
tttaatcctttcaagatgtaagagtagaccact

SEQ ID NO: 962743 - DNA, 33 bp, Homo sapien
atcccatcatttctcaataccttaatttccctt

SEQ ID NO: 962744 - DNA, 33 bp, Homo sapien
atcccatcatttctcagtaccttaatttccctt

SEQ ID NO: 962745 - DNA, 33 bp, Homo sapien
cctctcaagatgttcacggaaccaccaaggccg

SEQ ID NO: 962746 - DNA, 33 bp, Homo sapien
cctctcaagatgttcatggaaccaccaaggccg

SEQ ID NO: 962747 - DNA, 33 bp, Homo sapien
taagataagatgagataacccaggtaaagttct

SEQ ID NO: 962748 - DNA, 33 bp, Homo sapien
taagataagatgagatgacccaggtaaagttct

SEQ ID NO: 962749 - DNA, 33 bp, Homo sapien
ctttgttccaatagagaaaaaaaaacagagttg

SEQ ID NO: 962750 - DNA, 33 bp, Homo sapien
ctttgttccaatagaggaaaaaaaacagagttg

SEQ ID NO: 962751 - DNA, 33 bp, Homo sapien
tgatccctgaacgggaaacacaatctacataac

SEQ ID NO: 962752 - DNA, 33 bp, Homo sapien
tgatccctgaacgggacacacaatctacataac

SEQ ID NO: 962753 - DNA, 33 bp, Homo sapien
tttatttcaggctcgaagtcatcataacttttt

SEQ ID NO: 962754 - DNA, 33 bp, Homo sapien
tttatttcaggctcgacgtcatcataacttttt

SEQ ID NO: 962755 - DNA, 33 bp, Homo sapien
ctcagtacttgcagcaacaggaacatggagaaa

SEQ ID NO: 962756 - DNA, 33 bp, Homo sapien
ctcagtacttgcagcagcaggaacatggagaaa

SEQ ID NO: 962757 - DNA, 33 bp, Homo sapien
gccagctttgactccaagtacagcaggattctg

SEQ ID NO: 962758 - DNA, 33 bp, Homo sapien
gccagctttgactccaggtacagcaggattctg

SEQ ID NO: 962759 - DNA, 33 bp, Homo sapien; identical to SEQ ID NO: 962757

SEQ ID NO: 962760 - DNA, 33 bp, Homo sapien; identical to SEQ ID NO: 962758

SEQ ID NO: 962761 - DNA, 33 bp, Homo sapien
ctctggtgatgttagactacaagcgtgcttgat

SEQ ID NO: 962762 - DNA, 33 bp, Homo sapien
ctctggtgatgttagattacaagcgtgcttgat

SEQ ID NO: 962763 - DNA, 33 bp, Homo sapien
caaccaaggtcccaacaaggttttcaatggaac

SEQ ID NO: 962764 - DNA, 33 bp, Homo sapien
caaccaaggtcccaacgaggttttcaatggaac

SEQ ID NO: 962765 - DNA, 33 bp, Homo sapien
gcaggaaaggaagtggaaagtcctctgatatca

SEQ ID NO: 962766 - DNA, 33 bp, Homo sapien
gcaggaaaggaagtggcaagtcctctgatatca

SEQ ID NO: 962767 - DNA, 33 bp, Homo sapien
ttccacctttagagtaccccaaagtgatagaaa

SEQ ID NO: 962768 - DNA, 33 bp, Homo sapien
ttccacctttagagtatcccaaagtgatagaaa

SEQ ID NO: 962769 - DNA, 33 bp, Homo sapien
accttctgggttacgacaggtttctttactgaa

SEQ ID NO: 962770 - DNA, 33 bp, Homo sapien
accttctgggttacgataggtttctttactgaa

SEQ ID NO: 962771 - DNA, 33 bp, Homo sapien
ttgctactacaaccacggctgcattgaatactc

SEQ ID NO: 962772 - DNA, 33 bp, Homo sapien
ttgctactacaaccactgctgcattgaatactc

SEQ ID NO: 962773 - DNA, 33 bp, Homo sapien
atgttgggtgagcagacgcttaaacctttcagg

SEQ ID NO: 962774 - DNA, 33 bp, Homo sapien
atgttgggtgagcagatgcttaaacctttcagg

SEQ ID NO: 962775 - DNA, 33 bp, Homo sapien
agagactttctgataccgccctttgcaaatgtt

SEQ ID NO: 962776 - DNA, 33 bp, Homo sapien
agagactttctgatactgccctttgcaaatgtt

SEQ ID NO: 962777 - DNA, 33 bp, Homo sapien
ctcagaaaatcagttacctttccctgaccccac

SEQ ID NO: 962778 - DNA, 33 bp, Homo sapien
ctcagaaaatcagttagctttccctgaccccac

SEQ ID NO: 962779 - DNA, 33 bp, Homo sapien
gtctaggtaaattgcactcaaagaagtagtagc

SEQ ID NO: 962780 - DNA, 33 bp, Homo sapien
gtctaggtaaattgcattcaaagaagtagtagc

SEQ ID NO: 962781 - DNA, 33 bp, Homo sapien
ctccattttacgactaacctttttattgaacac

SEQ ID NO: 962782 - DNA, 33 bp, Homo sapien
ctccattttacgactagcctttttattgaacac

SEQ ID NO: 962783 - DNA, 33 bp, Homo sapien
tgccatattttccacacagagattaaactcctc

SEQ ID NO: 962784 - DNA, 33 bp, Homo sapien
tgccatattttccacatagagattaaactcctc

SEQ ID NO: 962785 - DNA, 33 bp, Homo sapien
cagaaagtttgaccaccgatcatatcatttggg

SEQ ID NO: 962786 - DNA, 33 bp, Homo sapien
cagaaagtttgaccactgatcatatcatttggg

SEQ ID NO: 962787 - DNA, 33 bp, Homo sapien
ctctactctgtggactaaatggaaatgtatcta

SEQ ID NO: 962788 - DNA, 33 bp, Homo sapien
ctctactctgtggactgaatggaaatgtatcta

SEQ ID NO: 962789 - DNA, 33 bp, Homo sapien
ggcaatgggactgtaacgaaacaatcccaagtc

SEQ ID NO: 962790 - DNA, 33 bp, Homo sapien
ggcaatgggactgtaatgaaacaatcccaagtc

SEQ ID NO: 962791 - DNA, 33 bp, Homo sapien
tcacgaaagtaacaaaccataaagtttcagatg

SEQ ID NO: 962792 - DNA, 33 bp, Homo sapien
tcacgaaagtaacaaatcataaagtttcagatg

SEQ ID NO: 962793 - DNA, 33 bp, Homo sapien
actatgggcttaaaaacagagaattcagaggtg

SEQ ID NO: 962794 - DNA, 33 bp, Homo sapien
actatgggcttaaaaatagagaattcagaggtg

SEQ ID NO: 962795 - DNA, 33 bp, Homo sapien
aagtcatttgaggtcaatatgaaatcaagcctg

SEQ ID NO: 962796 - DNA, 33 bp, Homo sapien
aagtcatttgaggtcagtatgaaatcaagcctg

SEQ ID NO: 962797 - DNA, 33 bp, Homo sapien
taggacattttcctcacgggggtagcatttgcc

SEQ ID NO: 962798 - DNA, 33 bp, Homo sapien
taggacattttcctcatgggggtagcatttgcc

SEQ ID NO: 962799 - DNA, 33 bp, Homo sapien
gattcagcccagtccactgcatcaactactaac

SEQ ID NO: 962800 - DNA, 33 bp, Homo sapien
gattcagcccagtccattgcatcaactactaac

SEQ ID NO: 962801 - DNA, 33 bp, Homo sapien
cataactttgtgttaaatgcgtttctgtttcaa

SEQ ID NO: 962802 - DNA, 33 bp, Homo sapien
cataactttgtgttaagtgcgtttctgtttcaa

SEQ ID NO: 962803 - DNA, 33 bp, Homo sapien
aacaatgaaaccaaaaatgtgaaaaatgtggca

SEQ ID NO: 962804 - DNA, 33 bp, Homo sapien
aacaatgaaaccaaaagtgtgaaaaatgtggca

SEQ ID NO: 962805 - DNA, 33 bp, Homo sapien
cacacacacaagggcaaaaagtttgagtcgccc

SEQ ID NO: 962806 - DNA, 33 bp, Homo sapien
cacacacacaagggcagaaagtttgagtcgccc

SEQ ID NO: 962807 - DNA, 33 bp, Homo sapien
acagataaatgttagcaagtggacgaattcgca

SEQ ID NO: 962808 - DNA, 33 bp, Homo sapien
acagataaatgttagcgagtggacgaattcgca

SEQ ID NO: 962809 - DNA, 33 bp, Homo sapien
ccttcccttcctttcccagatcattcgcaaggt

SEQ ID NO: 962810 - DNA, 33 bp, Homo sapien
ccttcccttcctttcctagatcattcgcaaggt

SEQ ID NO: 962811 - DNA, 33 bp, Homo sapien
ctgggaggcctgaagacgaacggtcgagctcac

SEQ ID NO: 962812 - DNA, 33 bp, Homo sapien
ctgggaggcctgaagaggaacggtcgagctcac

SEQ ID NO: 962813 - DNA, 33 bp, Homo sapien
ctggctctggggtttcaagcaagtcacattctg

SEQ ID NO: 962814 - DNA, 33 bp, Homo sapien
ctggctctggggtttcgagcaagtcacattctg

SEQ ID NO: 962815 - DNA, 33 bp, Homo sapien
gccagcatgcccagcccggaactggagacgccg

SEQ ID NO: 962816 - DNA, 33 bp, Homo sapien
gccagcatgcccagcctggaactggagacgccg

SEQ ID NO: 962817 - DNA, 33 bp, Homo sapien
cccttctttcctacctcaaccttagactccagg

SEQ ID NO: 962818 - DNA, 33 bp, Homo sapien
cccttctttcctacctgaaccttagactccagg

SEQ ID NO: 962819 - DNA, 33 bp, Homo sapien
gtgattcctgtcccacccattcacgtgcaggtc

SEQ ID NO: 962820 - DNA, 33 bp, Homo sapien
gtgattcctgtcccacgcattcacgtgcaggtc

SEQ ID NO: 962821 - DNA, 33 bp, Homo sapien
ttccagaaactctgcacgatctaaagtgctaca

SEQ ID NO: 962822 - DNA, 33 bp, Homo sapien
ttccagaaactctgcatgatctaaagtgctaca

SEQ ID NO: 962823 - DNA, 33 bp, Homo sapien
tacttggttccaggtcccaaatgagcggggagg

SEQ ID NO: 962824 - DNA, 33 bp, Homo sapien
tacttggttccaggtcgcaaatgagcggggagg

SEQ ID NO: 962825 - DNA, 33 bp, Homo sapien
gaagccaggctttaaaaaaagagagagtgcata

SEQ ID NO: 962826 - DNA, 33 bp, Homo sapien
gaagccaggctttaaagaaagagagagtgcata

SEQ ID NO: 962827 - DNA, 33 bp, Homo sapien
tattgctgcagcttcacagtgactcccaccagc

SEQ ID NO: 962828 - DNA, 33 bp, Homo sapien
tattgctgcagcttcatagtgactcccaccagc

SEQ ID NO: 962829 - DNA, 33 bp, Homo sapien
ctgcttcagggggtcagcccatttggcaaatat

SEQ ID NO: 962830 - DNA, 33 bp, Homo sapien
ctgcttcagggggtcatcccatttggcaaatat

SEQ ID NO: 962831 - DNA, 33 bp, Homo sapien
gagaggagctttgtcactagaatttccccaggt

SEQ ID NO: 962832 - DNA, 33 bp, Homo sapien
gagaggagctttgtcattagaatttccccaggt

SEQ ID NO: 962833 - DNA, 33 bp, Homo sapien
cacccagttaatatgcaatggagctggggttga

SEQ ID NO: 962834 - DNA, 33 bp, Homo sapien
cacccagttaatatgcgatggagctggggttga

SEQ ID NO: 962835 - DNA, 33 bp, Homo sapien
ggacatttggagcccacgaggtgaacacaacag

SEQ ID NO: 962836 - DNA, 33 bp, Homo sapien
ggacatttggagcccatgaggtgaacacaacag

SEQ ID NO: 962837 - DNA, 33 bp, Homo sapien
ccgggggaaaagcaaacgtgaagatctagagag

SEQ ID NO: 962838 - DNA, 33 bp, Homo sapien
ccgggggaaaagcaaatgtgaagatctagagag

SEQ ID NO: 962839 - DNA, 33 bp, Homo sapien
tgtggaggaggtgagacgtggggagtggagagg

SEQ ID NO: 962840 - DNA, 33 bp, Homo sapien
tgtggaggaggtgagatgtggggagtggagagg

SEQ ID NO: 962841 - DNA, 33 bp, Homo sapien
gtggcctgtacgtagcacaataggcactaatag

SEQ ID NO: 962842 - DNA, 33 bp, Homo sapien
gtggcctgtacgtagcgcaataggcactaatag

SEQ ID NO: 962843 - DNA, 33 bp, Homo sapien
cgttcatcaccttctagcaagtaaagaattcca

SEQ ID NO: 962844 - DNA, 33 bp, Homo sapien
cgttcatcaccttctatcaagtaaagaattcca

SEQ ID NO: 962845 - DNA, 33 bp, Homo sapien
gactcattcattcactcagacattaattcaaca

SEQ ID NO: 962846 - DNA, 33 bp, Homo sapien
gactcattcattcacttagacattaattcaaca

SEQ ID NO: 962847 - DNA, 33 bp, Homo sapien
catattctcagtaaggaattttcataagcattc

SEQ ID NO: 962848 - DNA, 33 bp, Homo sapien
catattctcagtaagggattttcataagcattc

SEQ ID NO: 962849 - DNA, 33 bp, Homo sapien
atggagccaacgtcaacgcccagtcacaggtaa

SEQ ID NO: 962850 - DNA, 33 bp, Homo sapien
atggagccaacgtcaatgcccagtcacaggtaa

SEQ ID NO: 962851 - DNA, 33 bp, Homo sapien
cctcatcactaggttacgtatctaaaaatagag

SEQ ID NO: 962852 - DNA, 33 bp, Homo sapien
cctcatcactaggttatgtatctaaaaatagag

SEQ ID NO: 962853 - DNA, 33 bp, Homo sapien
acagaagcttaattccccaaatagcaaccaact

SEQ ID NO: 962854 - DNA, 33 bp, Homo sapien
acagaagcttaattccgcaaatagcaaccaact

SEQ ID NO: 962855 - DNA, 33 bp, Homo sapien
gctgcagacctgcaaacgtaatatattctgttg

SEQ ID NO: 962856 - DNA, 33 bp, Homo sapien
gctgcagacctgcaaatgtaatatattctgttg

SEQ ID NO: 962857 - DNA, 33 bp, Homo sapien
gagagaagagcctaaactggggttacagagagg

SEQ ID NO: 962858 - DNA, 33 bp, Homo sapien
gagagaagagcctaaagtggggttacagagagg

SEQ ID NO: 962859 - DNA, 33 bp, Homo sapien
ttggaataaatggagcacctataacaataattt

SEQ ID NO: 962860 - DNA, 33 bp, Homo sapien
ttggaataaatggagcgcctataacaataattt

SEQ ID NO: 962861 - DNA, 33 bp, Homo sapien
cctgacacagagcaatcaggaaagcaaagccct

SEQ ID NO: 962862 - DNA, 33 bp, Homo sapien
cctgacacagagcaatgaggaaagcaaagccct

SEQ ID NO: 962863 - DNA, 33 bp, Homo sapien
tttagatgcctgtgtccaatgtacttcctgtgc

SEQ ID NO: 962864 - DNA, 33 bp, Homo sapien
tttagatgcctgtgtctaatgtacttcctgtgc

SEQ ID NO: 962865 - DNA, 33 bp, Homo sapien
ttaaaattggcattcacataagggggttcctgt

SEQ ID NO: 962866 - DNA, 33 bp, Homo sapien
ttaaaattggcattcatataagggggttcctgt

SEQ ID NO: 962867 - DNA, 33 bp, Homo sapien
tgaggtccctatagtaataaaattcgtagagac

SEQ ID NO: 962868 - DNA, 33 bp, Homo sapien
tgaggtccctatagtagtaaaattcgtagagac

SEQ ID NO: 962869 - DNA, 33 bp, Homo sapien
aggaaattctatgctgcatatctgaccacaatt

SEQ ID NO: 962870 - DNA, 33 bp, Homo sapien
aggaaattctatgctgtatatctgaccacaatt

SEQ ID NO: 962871 - DNA, 33 bp, Homo sapien
ttgtaagctggggagaataaagcctttcttgtc

SEQ ID NO: 962872 - DNA, 33 bp, Homo sapien
ttgtaagctggggagagtaaagcctttcttgtc

SEQ ID NO: 962873 - DNA, 33 bp, Homo sapien
aactccaccctttaccaagaaaggcaggctggt

SEQ ID NO: 962874 - DNA, 33 bp, Homo sapien
aactccaccctttaccgagaaaggcaggctggt

SEQ ID NO: 962875 - DNA, 33 bp, Homo sapien
ggccgggtgcccaggacaccttaattgaccact

SEQ ID NO: 962876 - DNA, 33 bp, Homo sapien
ggccgggtgcccaggataccttaattgaccact

SEQ ID NO: 962877 - DNA, 33 bp, Homo sapien
tctcaattctgaaaaagagacccggtgtgcaaa

SEQ ID NO: 962878 - DNA, 33 bp, Homo sapien
tctcaattctgaaaaatagacccggtgtgcaaa

SEQ ID NO: 962879 - DNA, 33 bp, Homo sapien
ttggaattctatttagacacccacaagacaccc

SEQ ID NO: 962880 - DNA, 33 bp, Homo sapien
ttggaattctatttaggcacccacaagacaccc

SEQ ID NO: 962881 - DNA, 33 bp, Homo sapien
ttcctaaatgggccaacgtgtctcagacactga

SEQ ID NO: 962882 - DNA, 33 bp, Homo sapien
ttcctaaatgggccaatgtgtctcagacactga

SEQ ID NO: 962883 - DNA, 33 bp, Homo sapien
attgaacccctgcctacgtccatccaatgatca

SEQ ID NO: 962884 - DNA, 33 bp, Homo sapien
attgaacccctgcctatgtccatccaatgatca

SEQ ID NO: 962885 - DNA, 33 bp, Homo sapien
taggcagacttggtggcatcgcaagaccctatc

SEQ ID NO: 962886 - DNA, 33 bp, Homo sapien
taggcagacttggtggtatcgcaagaccctatc

SEQ ID NO: 962887 - DNA, 33 bp, Homo sapien
aatcttggcttaaacactgttaatcagtttctc

SEQ ID NO: 962888 - DNA, 33 bp, Homo sapien
aatcttggcttaaacattgttaatcagtttctc

SEQ ID NO: 962889 - DNA, 33 bp, Homo sapien
aacgttcacatttacaaagccagaaaattaggg

SEQ ID NO: 962890 - DNA, 33 bp, Homo sapien
aacgttcacatttacagagccagaaaattaggg

SEQ ID NO: 962891 - DNA, 33 bp, Homo sapien
aagcctcccctacctacggcttctgtgtagtag

SEQ ID NO: 962892 - DNA, 33 bp, Homo sapien
aagcctcccctacctatggcttctgtgtagtag

SEQ ID NO: 962893 - DNA, 33 bp, Homo sapien
taatgttctgtctacacggcgtgatttgaagat

SEQ ID NO: 962894 - DNA, 33 bp, Homo sapien
taatgttctgtctacatggcgtgatttgaagat

SEQ ID NO: 962895 - DNA, 33 bp, Homo sapien
gctgtcttccagtgcaaagctatgccaatcctg

SEQ ID NO: 962896 - DNA, 33 bp, Homo sapien
gctgtcttccagtgcagagctatgccaatcctg

SEQ ID NO: 962897 - DNA, 33 bp, Homo sapien
cagccactgctcgcccaactaggacatttttgc

SEQ ID NO: 962898 - DNA, 33 bp, Homo sapien
cagccactgctcgcccgactaggacatttttgc

SEQ ID NO: 962899 - DNA, 33 bp, Homo sapien
atgtatgttcctgtcaatatgtttagcctttgc

SEQ ID NO: 962900 - DNA, 33 bp, Homo sapien
atgtatgttcctgtcactatgtttagcctttgc

SEQ ID NO: 962901 - DNA, 33 bp, Homo sapien
cagtaacatactttgcacatgacccagcaatcc

SEQ ID NO: 962902 - DNA, 33 bp, Homo sapien
cagtaacatactttgcgcatgacccagcaatcc

SEQ ID NO: 962903 - DNA, 33 bp, Homo sapien
acaccatctttcgttaggaaaagtagactgaaa

SEQ ID NO: 962904 - DNA, 33 bp, Homo sapien
acaccatctttcgttatgaaaagtagactgaaa

SEQ ID NO: 962905 - DNA, 33 bp, Homo sapien
atctttggaaggcacagatcggtgggataaaaa

SEQ ID NO: 962906 - DNA, 33 bp, Homo sapien
atctttggaaggcacatatcggtgggataaaaa

SEQ ID NO: 962907 - DNA, 33 bp, Homo sapien
ttgttaactcaagatacgtatgatgcaggcagg

SEQ ID NO: 962908 - DNA, 33 bp, Homo sapien
ttgttaactcaagatatgtatgatgcaggcagg

SEQ ID NO: 962909 - DNA, 33 bp, Homo sapien
gctccttcacacctaaatattaaaagccctagc

SEQ ID NO: 962910 - DNA, 33 bp, Homo sapien
gctccttcacacctaagtattaaaagccctagc

SEQ ID NO: 962911 - DNA, 33 bp, Homo sapien
gggagcttaataaatccaggctgttctcattac

SEQ ID NO: 962912 - DNA, 33 bp, Homo sapien
gggagcttaataaatcgaggctgttctcattac

SEQ ID NO: 962913 - DNA, 33 bp, Homo sapien
ccaacctcatctaggacactggaggcaatgttt

SEQ ID NO: 962914 - DNA, 33 bp, Homo sapien
ccaacctcatctaggatactggaggcaatgttt

SEQ ID NO: 962915 - DNA, 33 bp, Homo sapien
tgtggcatcagctataaattccagatttcatct

SEQ ID NO: 962916 - DNA, 33 bp, Homo sapien
tgtggcatcagctatacattccagatttcatct

SEQ ID NO: 962917 - DNA, 33 bp, Homo sapien
ataaaaagctaaaggcccagataacaggaaaaa

SEQ ID NO: 962918 - DNA, 33 bp, Homo sapien
ataaaaagctaaaggctcagataacaggaaaaa

SEQ ID NO: 962919 - DNA, 33 bp, Homo sapien
caggactccgttttcacctgctctttcatttgc

SEQ ID NO: 962920 - DNA, 33 bp, Homo sapien
caggactccgttttcatctgctctttcatttgc

SEQ ID NO: 962921 - DNA, 33 bp, Homo sapien
tgatagcagtgacgcaaactcttaggactgatt

SEQ ID NO: 962922 - DNA, 33 bp, Homo sapien
tgatagcagtgacgcatactcttaggactgatt

SEQ ID NO: 962923 - DNA, 33 bp, Homo sapien
aaagacgctctcttcgccagagtgggtcaccta

SEQ ID NO: 962924 - DNA, 33 bp, Homo sapien
aaagacgctctcttcgtcagagtgggtcaccta

SEQ ID NO: 962925 - DNA, 33 bp, Homo sapien
tcacctaaggatcttaggaaaattcggactctg

SEQ ID NO: 962926 - DNA, 33 bp, Homo sapien
tcacctaaggatcttatgaaaattcggactctg

SEQ ID NO: 962927 - DNA, 33 bp, Homo sapien
ggagggcccttcctaaacacagtctaccctccc

SEQ ID NO: 962928 - DNA, 33 bp, Homo sapien
ggagggcccttcctaagcacagtctaccctccc

SEQ ID NO: 962929 - DNA, 33 bp, Homo sapien
aatctttcacttcaaccaaaactcctcacaatt

SEQ ID NO: 962930 - DNA, 33 bp, Homo sapien
aatctttcacttcaactaaaactcctcacaatt

SEQ ID NO: 962931 - DNA, 33 bp, Homo sapien
tatgagttcaaacaaactttaagctgacatact

SEQ ID NO: 962932 - DNA, 33 bp, Homo sapien
tatgagttcaaacaaattttaagctgacatact

SEQ ID NO: 962933 - DNA, 33 bp, Homo sapien
caaacactgtggtgtaactttaaggaagcacac

SEQ ID NO: 962934 - DNA, 33 bp, Homo sapien
caaacactgtggtgtatctttaaggaagcacac

SEQ ID NO: 962935 - DNA, 33 bp, Homo sapien
cctctaaaaccactgacacattttgcagtctag

SEQ ID NO: 962936 - DNA, 33 bp, Homo sapien
cctctaaaaccactgatacattttgcagtctag

SEQ ID NO: 962937 - DNA, 33 bp, Homo sapien; identical to SEQ ID NO: 962935

SEQ ID NO: 962938 - DNA, 33 bp, Homo sapien; identical to SEQ ID NO: 962936

SEQ ID NO: 962939 - DNA, 33 bp, Homo sapien
agccacaggaaactaccgtactatattcacaca

SEQ ID NO: 962940 - DNA, 33 bp, Homo sapien
agccacaggaaactactgtactatattcacaca

SEQ ID NO: 962941 - DNA, 33 bp, Homo sapien
tgttcataatagttgccgacgatcctttgtact

SEQ ID NO: 962942 - DNA, 33 bp, Homo sapien
tgttcataatagttgctgacgatcctttgtact

SEQ ID NO: 962943 - DNA, 33 bp, Homo sapien
aaaagattgcaataaacgagaagtcctcacatg

SEQ ID NO: 962944 - DNA, 33 bp, Homo sapien
aaaagattgcaataaatgagaagtcctcacatg

SEQ ID NO: 962945 - DNA, 33 bp, Homo sapien
gcaagagcacctttcacagttgaacagataaac

SEQ ID NO: 962946 - DNA, 33 bp, Homo sapien
gcaagagcacctttcatagttgaacagataaac

SEQ ID NO: 962947 - DNA, 33 bp, Homo sapien
gtatctgaaagatgccacaatatagaagcaatg

SEQ ID NO: 962948 - DNA, 33 bp, Homo sapien
gtatctgaaagatgccgcaatatagaagcaatg

SEQ ID NO: 962949 - DNA, 33 bp, Homo sapien
atgggatcctcaatcactacaatggaaaatcaa

SEQ ID NO: 962950 - DNA, 33 bp, Homo sapien
atgggatcctcaatcattacaatggaaaatcaa

SEQ ID NO: 962951 - DNA, 33 bp, Homo sapien
atcttatactatgccaacagagtatttggcctt

SEQ ID NO: 962952 - DNA, 33 bp, Homo sapien
atcttatactatgccagcagagtatttggcctt

SEQ ID NO: 962953 - DNA, 33 bp, Homo sapien
caccttcctattagcccgcgaaataattcaaac

SEQ ID NO: 962954 - DNA, 33 bp, Homo sapien
caccttcctattagcctgcgaaataattcaaac

SEQ ID NO: 962955 - DNA, 33 bp, Homo sapien
agcacaatatctggcactcaggaggtttcagta

SEQ ID NO: 962956 - DNA, 33 bp, Homo sapien
agcacaatatctggcattcaggaggtttcagta

SEQ ID NO: 962957 - DNA, 33 bp, Homo sapien
tttataatacccatcgaagcttgtaattactgt

SEQ ID NO: 962958 - DNA, 33 bp, Homo sapien
tttataatacccatcgcagcttgtaattactgt

SEQ ID NO: 962959 - DNA, 33 bp, Homo sapien
cttctgccttcttcaaatctttgcactaatgtc

SEQ ID NO: 962960 - DNA, 33 bp, Homo sapien
cttctgccttcttcaagtctttgcactaatgtc

SEQ ID NO: 962961 - DNA, 33 bp, Homo sapien
tccctggacttaaaccccatcttcagtacttag

SEQ ID NO: 962962 - DNA, 33 bp, Homo sapien
tccctggacttaaacctcatcttcagtacttag

SEQ ID NO: 962963 - DNA, 33 bp, Homo sapien
actggtttaggggttcaatttctaatgagcaga

SEQ ID NO: 962964 - DNA, 33 bp, Homo sapien
actggtttaggggttcgatttctaatgagcaga

SEQ ID NO: 962965 - DNA, 33 bp, Homo sapien
agacactgcaaaggcgcagtgcttctctacaga

SEQ ID NO: 962966 - DNA, 33 bp, Homo sapien
agacactgcaaaggcggagtgcttctctacaga

SEQ ID NO: 962967 - DNA, 33 bp, Homo sapien
gtagagttaattactcaaacgtttcaggcctca

SEQ ID NO: 962968 - DNA, 33 bp, Homo sapien
gtagagttaattactccaacgtttcaggcctca

SEQ ID NO: 962969 - DNA, 33 bp, Homo sapien
agaggctgtgggttcaatcccggaatcctgctg

SEQ ID NO: 962970 - DNA, 33 bp, Homo sapien
agaggctgtgggttcagtcccggaatcctgctg

SEQ ID NO: 962971 - DNA, 33 bp, Homo sapien
aatcccacagcaaaaaaagcattctaaggctgt

SEQ ID NO: 962972 - DNA, 33 bp, Homo sapien
aatcccacagcaaaaatagcattctaaggctgt

SEQ ID NO: 962973 - DNA, 33 bp, Homo sapien
gtgagctgtcctgttacggaactcttacaaatc

SEQ ID NO: 962974 - DNA, 33 bp, Homo sapien
gtgagctgtcctgttatggaactcttacaaatc

SEQ ID NO: 962975 - DNA, 33 bp, Homo sapien
gttcccaggcaatgccaacatgtccatactgca

SEQ ID NO: 962976 - DNA, 33 bp, Homo sapien
gttcccaggcaatgccgacatgtccatactgca

SEQ ID NO: 962977 - DNA, 33 bp, Homo sapien
ctgattctggattgggcacagcccctggaaagg

SEQ ID NO: 962978 - DNA, 33 bp, Homo sapien
ctgattctggattgggtacagcccctggaaagg

SEQ ID NO: 962979 - DNA, 33 bp, Homo sapien
ttctgttctgttgtgacaacatacgacatgggg

SEQ ID NO: 962980 - DNA, 33 bp, Homo sapien
ttctgttctgttgtgagaacatacgacatgggg

SEQ ID NO: 962981 - DNA, 33 bp, Homo sapien
caataaaggaactgtacacatgtagtcaatcaa

SEQ ID NO: 962982 - DNA, 33 bp, Homo sapien
caataaaggaactgtagacatgtagtcaatcaa

SEQ ID NO: 962983 - DNA, 33 bp, Homo sapien
atttgataatagtatcaatttacgtttgtcttt

SEQ ID NO: 962984 - DNA, 33 bp, Homo sapien
atttgataatagtatccatttacgtttgtcttt

SEQ ID NO: 962985 - DNA, 33 bp, Homo sapien
gatctaagtgtattagcacagggtttcttctgt

SEQ ID NO: 962986 - DNA, 33 bp, Homo sapien
gatctaagtgtattaggacagggtttcttctgt

SEQ ID NO: 962987 - DNA, 33 bp, Homo sapien
cctggtgaaaactaaaccagtcagtgcaataaa

SEQ ID NO: 962988 - DNA, 33 bp, Homo sapien
cctggtgaaaactaaatcagtcagtgcaataaa

SEQ ID NO: 962989 - DNA, 33 bp, Homo sapien
gggaaagtgaaaagaacgatacagaaaagcccc

SEQ ID NO: 962990 - DNA, 33 bp, Homo sapien
gggaaagtgaaaagaatgatacagaaaagcccc

SEQ ID NO: 962991 - DNA, 33 bp, Homo sapien
cctcatctgtaaaataggaatgtgagccggaca

SEQ ID NO: 962992 - DNA, 33 bp, Homo sapien
cctcatctgtaaaatatgaatgtgagccggaca

SEQ ID NO: 962993 - DNA, 33 bp, Homo sapien
gtcttgctgaaggccacgctactggtaaattgt

SEQ ID NO: 962994 - DNA, 33 bp, Homo sapien
gtcttgctgaaggccatgctactggtaaattgt

SEQ ID NO: 962995 - DNA, 33 bp, Homo sapien
tggcctactgttcaaaacaatttctaggctgaa

SEQ ID NO: 962996 - DNA, 33 bp, Homo sapien
tggcctactgttcaaagcaatttctaggctgaa

SEQ ID NO: 962997 - DNA, 33 bp, Homo sapien
actggaactgagaaaagaacttttatgtgatgt

SEQ ID NO: 962998 - DNA, 33 bp, Homo sapien
actggaactgagaaaataacttttatgtgatgt

SEQ ID NO: 962999 - DNA, 33 bp, Homo sapien
aagcaatcattaagaaattaagcaatcattaag

SEQ ID NO: 963000 - DNA, 33 bp, Homo sapien
aagcaatcattaagaagttaagcaatcattaag

SEQ ID NO: 963001 - DNA, 33 bp, Homo sapien
ctcagcaatgtgaacaatgaacaagtcttgaaa

SEQ ID NO: 963002 - DNA, 33 bp, Homo sapien
ctcagcaatgtgaacactgaacaagtcttgaaa

SEQ ID NO: 963003 - DNA, 33 bp, Homo sapien
gaaactgaggttacacagtcggatacctgtcag

SEQ ID NO: 963004 - DNA, 33 bp, Homo sapien
gaaactgaggttacacggtcggatacctgtcag

SEQ ID NO: 963005 - DNA, 33 bp, Homo sapien
aagagaaatggtccaaaaggctgagatagaggt

SEQ ID NO: 963006 - DNA, 33 bp, Homo sapien
aagagaaatggtccaagaggctgagatagaggt

SEQ ID NO: 963007 - DNA, 33 bp, Homo sapien
ctcagatttgagaactaagggcatttactgaga

SEQ ID NO: 963008 - DNA, 33 bp, Homo sapien
ctcagatttgagaactgagggcatttactgaga

SEQ ID NO: 963009 - DNA, 33 bp, Homo sapien
tccaaggaactgtgaaccctgataaattccttg

SEQ ID NO: 963010 - DNA, 33 bp, Homo sapien
tccaaggaactgtgaatcctgataaattccttg

SEQ ID NO: 963011 - DNA, 33 bp, Homo sapien
attccgatgatgaggaagaaggtagcattgttc

SEQ ID NO: 963012 - DNA, 33 bp, Homo sapien
attccgatgatgaggaggaaggtagcattgttc

SEQ ID NO: 963013 - DNA, 33 bp, Homo sapien
catatggaacttaaaaatcagatgagctgacag

SEQ ID NO: 963014 - DNA, 33 bp, Homo sapien
catatggaacttaaaactcagatgagctgacag

SEQ ID NO: 963015 - DNA, 33 bp, Homo sapien
aaacagaactgaactcagagtcagaagatatgg

SEQ ID NO: 963016 - DNA, 33 bp, Homo sapien
aaacagaactgaactcggagtcagaagatatgg

SEQ ID NO: 963017 - DNA, 33 bp, Homo sapien
cttactaagcatttaacgtagagctatatgcat

SEQ ID NO: 963018 - DNA, 33 bp, Homo sapien
cttactaagcatttaatgtagagctatatgcat

SEQ ID NO: 963019 - DNA, 33 bp, Homo sapien
ggcatgtaccaaaataatatttacattgggaga

SEQ ID NO: 963020 - DNA, 33 bp, Homo sapien
ggcatgtaccaaaatagtatttacattgggaga

SEQ ID NO: 963021 - DNA, 33 bp, Homo sapien
agtcaatattcaataaatcttgtacataactat

SEQ ID NO: 963022 - DNA, 33 bp, Homo sapien
agtcaatattcaataagtcttgtacataactat

SEQ ID NO: 963023 - DNA, 33 bp, Homo sapien
aaattgtgagtaaatacaaacgtgggtggctgt

SEQ ID NO: 963024 - DNA, 33 bp, Homo sapien
aaattgtgagtaaatagaaacgtgggtggctgt

SEQ ID NO: 963025 - DNA, 33 bp, Homo sapien
cgccttttagtggctaaaaccgagaacggagac

SEQ ID NO: 963026 - DNA, 33 bp, Homo sapien
cgccttttagtggctagaaccgagaacggagac

SEQ ID NO: 963027 - DNA, 33 bp, Homo sapien
aaataaacttgtagcacagagtataacaggaat

SEQ ID NO: 963028 - DNA, 33 bp, Homo sapien
aaataaacttgtagcagagagtataacaggaat

SEQ ID NO: 963029 - DNA, 33 bp, Homo sapien
tgtgtgctcttcacaagcaaaagcaaagcaaaa

SEQ ID NO: 963030 - DNA, 33 bp, Homo sapien
tgtgtgctcttcacaatcaaaagcaaagcaaaa

SEQ ID NO: 963031 - DNA, 33 bp, Homo sapien
aattattgggctattacagttctgagagctgag

SEQ ID NO: 963032 - DNA, 33 bp, Homo sapien
aattattgggctattatagttctgagagctgag

SEQ ID NO: 963033 - DNA, 33 bp, Homo sapien
cagcacctttgaaatacctgtactgacaatcac

SEQ ID NO: 963034 - DNA, 33 bp, Homo sapien
cagcacctttgaaatagctgtactgacaatcac

SEQ ID NO: 963035 - DNA, 33 bp, Homo sapien
tcaaaagccaacataaagacattccaggttatg

SEQ ID NO: 963036 - DNA, 33 bp, Homo sapien
tcaaaagccaacataaggacattccaggttatg

SEQ ID NO: 963037 - DNA, 33 bp, Homo sapien
acacatttgcttttccaaattagtttgctatac

SEQ ID NO: 963038 - DNA, 33 bp, Homo sapien
acacatttgcttttcccaattagtttgctatac

SEQ ID NO: 963039 - DNA, 33 bp, Homo sapien
agaaagagagtcaagagtcatagccttaggagc

SEQ ID NO: 963040 - DNA, 33 bp, Homo sapien
agaaagagagtcaagattcatagccttaggagc

SEQ ID NO: 963041 - DNA, 33 bp, Homo sapien
aacctcattgtagacaacataggaactttttca

SEQ ID NO: 963042 - DNA, 33 bp, Homo sapien
aacctcattgtagacaccataggaactttttca

SEQ ID NO: 963043 - DNA, 33 bp, Homo sapien
gaactctggcaattgcaatcgagggtccgtggt

SEQ ID NO: 963044 - DNA, 33 bp, Homo sapien
gaactctggcaattgcgatcgagggtccgtggt

SEQ ID NO: 963045 - DNA, 33 bp, Homo sapien
actaatacggttgcacaggtgcttttcctgaga

SEQ ID NO: 963046 - DNA, 33 bp, Homo sapien
actaatacggttgcacgggtgcttttcctgaga

SEQ ID NO: 963047 - DNA, 33 bp, Homo sapien
gagctgtagtgtgacgaatcagaactagacaag

SEQ ID NO: 963048 - DNA, 33 bp, Homo sapien
gagctgtagtgtgacgcatcagaactagacaag

SEQ ID NO: 963049 - DNA, 33 bp, Homo sapien
tagaaatctacccaggccagctgcaggtaagta

SEQ ID NO: 963050 - DNA, 33 bp, Homo sapien
tagaaatctacccaggtcagctgcaggtaagta

SEQ ID NO: 963051 - DNA, 33 bp, Homo sapien
tttgagacaaagcgtcgctctgtagtgcagtga

SEQ ID NO: 963052 - DNA, 33 bp, Homo sapien
tttgagacaaagcgtctctctgtagtgcagtga

SEQ ID NO: 963053 - DNA, 33 bp, Homo sapien
ctttactgactatttcactttttgccctggaaa

SEQ ID NO: 963054 - DNA, 33 bp, Homo sapien
ctttactgactatttcgctttttgccctggaaa

SEQ ID NO: 963055 - DNA, 33 bp, Homo sapien
gaaagttctgctgacactctgatttttataccc

SEQ ID NO: 963056 - DNA, 33 bp, Homo sapien
gaaagttctgctgacagtctgatttttataccc

SEQ ID NO: 963057 - DNA, 33 bp, Homo sapien
cacttcttccagcttacgaaaggggtctgaaga

SEQ ID NO: 963058 - DNA, 33 bp, Homo sapien
cacttcttccagcttatgaaaggggtctgaaga

SEQ ID NO: 963059 - DNA, 33 bp, Homo sapien
tttgtcctttgcctcacaaatcctgccagcctg

SEQ ID NO: 963060 - DNA, 33 bp, Homo sapien
tttgtcctttgcctcagaaatcctgccagcctg

SEQ ID NO: 963061 - DNA, 33 bp, Homo sapien
tgtttccagagtgtggcaagccattctaccttt

SEQ ID NO: 963062 - DNA, 33 bp, Homo sapien
tgtttccagagtgtggtaagccattctaccttt

SEQ ID NO: 963063 - DNA, 33 bp, Homo sapien
caacagagcatttccactggaaaagggggtttt

SEQ ID NO: 963064 - DNA, 33 bp, Homo sapien
caacagagcatttccattggaaaagggggtttt

SEQ ID NO: 963065 - DNA, 33 bp, Homo sapien
acattaactcaggcaaacttaaagaaacagccc

SEQ ID NO: 963066 - DNA, 33 bp, Homo sapien
acattaactcaggcaaccttaaagaaacagccc

SEQ ID NO: 963067 - DNA, 33 bp, Homo sapien
cgttgtctgtatttaccgccctttatgtatcca

SEQ ID NO: 963068 - DNA, 33 bp, Homo sapien
cgttgtctgtatttactgccctttatgtatcca

SEQ ID NO: 963069 - DNA, 33 bp, Homo sapien
ctaaaactgatggctacatggaaaaagaggact

SEQ ID NO: 963070 - DNA, 33 bp, Homo sapien
ctaaaactgatggctagatggaaaaagaggact

SEQ ID NO: 963071 - DNA, 33 bp, Homo sapien
actgctatcagacatccctgccggaggagtcca

SEQ ID NO: 963072 - DNA, 33 bp, Homo sapien
actgctatcagacatctctgccggaggagtcca

SEQ ID NO: 963073 - DNA, 33 bp, Homo sapien
ctgggtttttccctcaacatcatcctttagaga

SEQ ID NO: 963074 - DNA, 33 bp, Homo sapien
ctgggtttttccctcagcatcatcctttagaga

SEQ ID NO: 963075 - DNA, 33 bp, Homo sapien
cagttatcttgaaccacgaagcaacactgaggg

SEQ ID NO: 963076 - DNA, 33 bp, Homo sapien
cagttatcttgaaccatgaagcaacactgaggg

SEQ ID NO: 963077 - DNA, 33 bp, Homo sapien
agtgaggtagccctcaaagacttcagaggaaac

SEQ ID NO: 963078 - DNA, 33 bp, Homo sapien
agtgaggtagccctcacagacttcagaggaaac

SEQ ID NO: 963079 - DNA, 33 bp, Homo sapien
acttagagttccctgaaattgttttctcattca

SEQ ID NO: 963080 - DNA, 33 bp, Homo sapien
acttagagttccctgatattgttttctcattca

SEQ ID NO: 963081 - DNA, 33 bp, Homo sapien
agtattatgattcagcacctaatgtgtcagatt

SEQ ID NO: 963082 - DNA, 33 bp, Homo sapien
agtattatgattcagcgcctaatgtgtcagatt

SEQ ID NO: 963083 - DNA, 33 bp, Homo sapien
gttaatgagaataataatagttgccttacttat

SEQ ID NO: 963084 - DNA, 33 bp, Homo sapien
gttaatgagaataatagtagttgccttacttat

SEQ ID NO: 963085 - DNA, 33 bp, Homo sapien
caacacaggaaccaaaaacaggcgagacacaca

SEQ ID NO: 963086 - DNA, 33 bp, Homo sapien
caacacaggaaccaaacacaggcgagacacaca

SEQ ID NO: 963087 - DNA, 33 bp, Homo sapien
tcacatccataatgaacttacactaagccccta

SEQ ID NO: 963088 - DNA, 33 bp, Homo sapien
tcacatccataatgaatttacactaagccccta

SEQ ID NO: 963089 - DNA, 33 bp, Homo sapien
gccagtaagcagacacaaaatgatcagtagcat

SEQ ID NO: 963090 - DNA, 33 bp, Homo sapien
gccagtaagcagacacgaaatgatcagtagcat

SEQ ID NO: 963091 - DNA, 33 bp, Homo sapien
aaagctatggaagacaatgggttaagagtaatg

SEQ ID NO: 963092 - DNA, 33 bp, Homo sapien
aaagctatggaagacagtgggttaagagtaatg

SEQ ID NO: 963093 - DNA, 33 bp, Homo sapien
ttacttatgttgaagacgatgaatttttttttt

SEQ ID NO: 963094 - DNA, 33 bp, Homo sapien
ttacttatgttgaagatgatgaatttttttttt

SEQ ID NO: 963095 - DNA, 33 bp, Homo sapien
tttaaaatggaagatagtatcaaaaaggttcaa

SEQ ID NO: 963096 - DNA, 33 bp, Homo sapien
tttaaaatggaagatattatcaaaaaggttcaa

SEQ ID NO: 963097 - DNA, 33 bp, Homo sapien
gcaagaagggaaaacacggtcagacagaccaca

SEQ ID NO: 963098 - DNA, 33 bp, Homo sapien
gcaagaagggaaaacatggtcagacagaccaca

SEQ ID NO: 963099 - DNA, 33 bp, Homo sapien
aaattaatatgcataaatacattggttctaaaa

SEQ ID NO: 963100 - DNA, 33 bp, Homo sapien
aaattaatatgcataagtacattggttctaaaa

SEQ ID NO: 963101 - DNA, 33 bp, Homo sapien
ggataaatctcagaaacgtaatgttgagctttt

SEQ ID NO: 963102 - DNA, 33 bp, Homo sapien
ggataaatctcagaaatgtaatgttgagctttt

SEQ ID NO: 963103 - DNA, 33 bp, Homo sapien
ctgactattttaagcccactgtcgagacctact

SEQ ID NO: 963104 - DNA, 33 bp, Homo sapien
ctgactattttaagcctactgtcgagacctact

SEQ ID NO: 963105 - DNA, 33 bp, Homo sapien
tgggcaaggttctcatcagtaaactcagtgtgc

SEQ ID NO: 963106 - DNA, 33 bp, Homo sapien
tgggcaaggttctcattagtaaactcagtgtgc

SEQ ID NO: 963107 - DNA, 33 bp, Homo sapien
ttcaattattagtgatcacaacacatcaggata

SEQ ID NO: 963108 - DNA, 33 bp, Homo sapien
ttcaattattagtgatgacaacacatcaggata

SEQ ID NO: 963109 - DNA, 33 bp, Homo sapien
agggtgaaggccccaacgtatctgggagcttat

SEQ ID NO: 963110 - DNA, 33 bp, Homo sapien
agggtgaaggccccaatgtatctgggagcttat

SEQ ID NO: 963111 - DNA, 33 bp, Homo sapien
tgagggactctgataaacgtctgtttcttttat

SEQ ID NO: 963112 - DNA, 33 bp, Homo sapien
tgagggactctgataatcgtctgtttcttttat

SEQ ID NO: 963113 - DNA, 33 bp, Homo sapien
ccctcacatacacaaaagcaccaagttcatatg

SEQ ID NO: 963114 - DNA, 33 bp, Homo sapien
ccctcacatacacaaaggcaccaagttcatatg

SEQ ID NO: 963115 - DNA, 33 bp, Homo sapien
atcttaaagtagtctaccttcccaatagttttt

SEQ ID NO: 963116 - DNA, 33 bp, Homo sapien
atcttaaagtagtctatcttcccaatagttttt

SEQ ID NO: 963117 - DNA, 33 bp, Homo sapien
ttttaggaaaggtgcagaaaggtgatatgagaa

SEQ ID NO: 963118 - DNA, 33 bp, Homo sapien
ttttaggaaaggtgcataaaggtgatatgagaa

SEQ ID NO: 963119 - DNA, 33 bp, Homo sapien
ctattaacagtgtttagataactgcaaaggaat

SEQ ID NO: 963120 - DNA, 33 bp, Homo sapien
ctattaacagtgtttatataactgcaaaggaat

SEQ ID NO: 963121 - DNA, 33 bp, Homo sapien
cttcttccaatgcaagactatttcagctgcact

SEQ ID NO: 963122 - DNA, 33 bp, Homo sapien
cttcttccaatgcaaggctatttcagctgcact

SEQ ID NO: 963123 - DNA, 33 bp, Homo sapien
tcgagacatttttttgaaggtggaaaattcatt

SEQ ID NO: 963124 - DNA, 33 bp, Homo sapien
tcgagacatttttttgcaggtggaaaattcatt

SEQ ID NO: 963125 - DNA, 33 bp, Homo sapien
ttgataagtaacagaacaaatttgataagtaac

SEQ ID NO: 963126 - DNA, 33 bp, Homo sapien
ttgataagtaacagaagaaatttgataagtaac

SEQ ID NO: 963127 - DNA, 33 bp, Homo sapien
catataccttctgtgaaatgcgtgtttaaatct

SEQ ID NO: 963128 - DNA, 33 bp, Homo sapien
catataccttctgtgagatgcgtgtttaaatct

SEQ ID NO: 963129 - DNA, 33 bp, Homo sapien
ccttgcctttgctggcaatcctaccggctgctc

SEQ ID NO: 963130 - DNA, 33 bp, Homo sapien
ccttgcctttgctggcgatcctaccggctgctc

SEQ ID NO: 963131 - DNA, 33 bp, Homo sapien
aaaggcaagggtagacccagtggcagaagcctc

SEQ ID NO: 963132 - DNA, 33 bp, Homo sapien
aaaggcaagggtagactcagtggcagaagcctc

SEQ ID NO: 963133 - DNA, 33 bp, Homo sapien
catgtcgtcctggagaactgccagggtttctgg

SEQ ID NO: 963134 - DNA, 33 bp, Homo sapien
catgtcgtcctggagacctgccagggtttctgg

SEQ ID NO: 963135 - DNA, 33 bp, Homo sapien
tattcctgcttctttgaaattcatcatagtttt

SEQ ID NO: 963136 - DNA, 33 bp, Homo sapien
tattcctgcttctttgcaattcatcatagtttt

SEQ ID NO: 963137 - DNA, 33 bp, Homo sapien
gacccggatatttgccactaggcgatctttcca

SEQ ID NO: 963138 - DNA, 33 bp, Homo sapien
gacccggatatttgccgctaggcgatctttcca

SEQ ID NO: 963139 - DNA, 33 bp, Homo sapien
cataaaaatcagatgacaaagtgtgattagcag

SEQ ID NO: 963140 - DNA, 33 bp, Homo sapien
cataaaaatcagatgataaagtgtgattagcag

SEQ ID NO: 963141 - DNA, 33 bp, Homo sapien
gattattactattgtgaatgtattgctgtacta

SEQ ID NO: 963142 - DNA, 33 bp, Homo sapien
gattattactattgtggatgtattgctgtacta

SEQ ID NO: 963143 - DNA, 33 bp, Homo sapien
gggacctgggaagaaaacttcacttaaatcttt

SEQ ID NO: 963144 - DNA, 33 bp, Homo sapien
gggacctgggaagaaatcttcacttaaatcttt

SEQ ID NO: 963145 - DNA, 33 bp, Homo sapien
tttgacatcaagatgcccttactgattcaaatc

SEQ ID NO: 963146 - DNA, 33 bp, Homo sapien
tttgacatcaagatgcgcttactgattcaaatc

SEQ ID NO: 963147 - DNA, 33 bp, Homo sapien
agagccaaaccttgtcaatgactcatcactgtc

SEQ ID NO: 963148 - DNA, 33 bp, Homo sapien
agagccaaaccttgtccatgactcatcactgtc

SEQ ID NO: 963149 - DNA, 33 bp, Homo sapien
aatatagtctcctcaaactggaaatactcaact

SEQ ID NO: 963150 - DNA, 33 bp, Homo sapien
aatatagtctcctcaagctggaaatactcaact

SEQ ID NO: 963151 - DNA, 33 bp, Homo sapien
gaatgatgctgaaaaaactcaagacttcacagg

SEQ ID NO: 963152 - DNA, 33 bp, Homo sapien
gaatgatgctgaaaaagctcaagacttcacagg

SEQ ID NO: 963153 - DNA, 33 bp, Homo sapien
aaaagtaaaatggaaaatgattcacgattagtt

SEQ ID NO: 963154 - DNA, 33 bp, Homo sapien
aaaagtaaaatggaaagtgattcacgattagtt

SEQ ID NO: 963155 - DNA, 33 bp, Homo sapien
gccttgttatgtagacaaaaactcttaggttaa

SEQ ID NO: 963156 - DNA, 33 bp, Homo sapien
gccttgttatgtagacgaaaactcttaggttaa

SEQ ID NO: 963157 - DNA, 33 bp, Homo sapien
atatgaatatctcttaccagaggtgtcagactc

SEQ ID NO: 963158 - DNA, 33 bp, Homo sapien
atatgaatatctcttatcagaggtgtcagactc

SEQ ID NO: 963159 - DNA, 33 bp, Homo sapien
tgtcttggaaagaatcaaaaccttaaggtcaat

SEQ ID NO: 963160 - DNA, 33 bp, Homo sapien
tgtcttggaaagaatcgaaaccttaaggtcaat

SEQ ID NO: 963161 - DNA, 33 bp, Homo sapien
aatgggatttctaataggtagggtaagaaagga

SEQ ID NO: 963162 - DNA, 33 bp, Homo sapien
aatgggatttctaatatgtagggtaagaaagga

SEQ ID NO: 963163 - DNA, 33 bp, Homo sapien
ccatgtatattcagaaatgtgatagtttctttt

SEQ ID NO: 963164 - DNA, 33 bp, Homo sapien
ccatgtatattcagaagtgtgatagtttctttt

SEQ ID NO: 963165 - DNA, 33 bp, Homo sapien
ctgttgagtcctataccattaagattttcaaca

SEQ ID NO: 963166 - DNA, 33 bp, Homo sapien
ctgttgagtcctatactattaagattttcaaca

SEQ ID NO: 963167 - DNA, 33 bp, Homo sapien
aaattgattctagaaacgggtgagaattgggtg

SEQ ID NO: 963168 - DNA, 33 bp, Homo sapien
aaattgattctagaaatgggtgagaattgggtg

SEQ ID NO: 963169 - DNA, 33 bp, Homo sapien
ccagctgtgggggcaacgaggtccggccaaatc

SEQ ID NO: 963170 - DNA, 33 bp, Homo sapien
ccagctgtgggggcaatgaggtccggccaaatc

SEQ ID NO: 963171 - DNA, 33 bp, Homo sapien
gagacctataatgaaaagcaaaatattcacaga

SEQ ID NO: 963172 - DNA, 33 bp, Homo sapien
gagacctataatgaaatgcaaaatattcacaga

SEQ ID NO: 963173 - DNA, 33 bp, Homo sapien
actttcgtcttattcagctgtttggaaacgctc

SEQ ID NO: 963174 - DNA, 33 bp, Homo sapien
actttcgtcttattcatctgtttggaaacgctc

SEQ ID NO: 963175 - DNA, 33 bp, Homo sapien
cagtttgccatagaccacaatgggcttccaaat

SEQ ID NO: 963176 - DNA, 33 bp, Homo sapien
cagtttgccatagaccgcaatgggcttccaaat

SEQ ID NO: 963177 - DNA, 33 bp, Homo sapien
ttaaatctttctttggaaaaacttattgaggtc

SEQ ID NO: 963178 - DNA, 33 bp, Homo sapien
ttaaatctttctttgggaaaacttattgaggtc

SEQ ID NO: 963179 - DNA, 33 bp, Homo sapien
atgtggaatcatctcacggagtaatcttttctt

SEQ ID NO: 963180 - DNA, 33 bp, Homo sapien
atgtggaatcatctcatggagtaatcttttctt

SEQ ID NO: 963181 - DNA, 33 bp, Homo sapien
ttctttgactatcggcaaagaaacatttggaag

SEQ ID NO: 963182 - DNA, 33 bp, Homo sapien
ttctttgactatcggcgaagaaacatttggaag

SEQ ID NO: 963183 - DNA, 33 bp, Homo sapien
caagggacacttgggaacccactgaggcctgtg

SEQ ID NO: 963184 - DNA, 33 bp, Homo sapien
caagggacacttgggagcccactgaggcctgtg

SEQ ID NO: 963185 - DNA, 33 bp, Homo sapien
ttgagcactttgtgtccaatgttgcaaaaggaa

SEQ ID NO: 963186 - DNA, 33 bp, Homo sapien
ttgagcactttgtgtctaatgttgcaaaaggaa

SEQ ID NO: 963187 - DNA, 33 bp, Homo sapien
tctagatcctccagcaagtgaaaatctcttccc

SEQ ID NO: 963188 - DNA, 33 bp, Homo sapien
tctagatcctccagcaggtgaaaatctcttccc

SEQ ID NO: 963189 - DNA, 33 bp, Homo sapien
aaaagcagcaagagggccccaaattgaaggtca

SEQ ID NO: 963190 - DNA, 33 bp, Homo sapien
aaaagcagcaagagggtcccaaattgaaggtca

SEQ ID NO: 963191 - DNA, 33 bp, Homo sapien
tgcagatttggggtgcacaccatttgcaagaaa

SEQ ID NO: 963192 - DNA, 33 bp, Homo sapien
tgcagatttggggtgcccaccatttgcaagaaa

SEQ ID NO: 963193 - DNA, 33 bp, Homo sapien
caggcttgaaacaggacgttgacgcagccaggg

SEQ ID NO: 963194 - DNA, 33 bp, Homo sapien
caggcttgaaacaggatgttgacgcagccaggg

SEQ ID NO: 963195 - DNA, 33 bp, Homo sapien
cagatgtccaggtcgcgcatttataggccagtg

SEQ ID NO: 963196 - DNA, 33 bp, Homo sapien
cagatgtccaggtcgctcatttataggccagtg

SEQ ID NO: 963197 - DNA, 33 bp, Homo sapien
gagagctctgtcgctcaaaagaaagctggtaat

SEQ ID NO: 963198 - DNA, 33 bp, Homo sapien
gagagctctgtcgctcgaaagaaagctggtaat

SEQ ID NO: 963199 - DNA, 33 bp, Homo sapien
ggcctgtagtgaaaaacgtaatatcctgtgata

SEQ ID NO: 963200 - DNA, 33 bp, Homo sapien
ggcctgtagtgaaaaatgtaatatcctgtgata

SEQ ID NO: 963201 - DNA, 33 bp, Homo sapien
acaaagcagtttcacaagtaggtgctttctagt

SEQ ID NO: 963202 - DNA, 33 bp, Homo sapien
acaaagcagtttcacaggtaggtgctttctagt

SEQ ID NO: 963203 - DNA, 33 bp, Homo sapien
cctcggcctacctcaacgtctccctgagtctct

SEQ ID NO: 963204 - DNA, 33 bp, Homo sapien
cctcggcctacctcaatgtctccctgagtctct

SEQ ID NO: 963205 - DNA, 33 bp, Homo sapien
tgtctgtgtctcttgcagaaggctcccacaagt

SEQ ID NO: 963206 - DNA, 33 bp, Homo sapien
tgtctgtgtctcttgcggaaggctcccacaagt

SEQ ID NO: 963207 - DNA, 33 bp, Homo sapien
ttcctgcagtgttgccaagtctaccctctgtct

SEQ ID NO: 963208 - DNA, 33 bp, Homo sapien
ttcctgcagtgttgccgagtctaccctctgtct

SEQ ID NO: 963209 - DNA, 33 bp, Homo sapien
ttgagccaggcagaaacagaagcatcgagaccg

SEQ ID NO: 963210 - DNA, 33 bp, Homo sapien
ttgagccaggcagaaagagaagcatcgagaccg

SEQ ID NO: 963211 - DNA, 33 bp, Homo sapien
gtcaggctcttaatccccagacttagagcaggg

SEQ ID NO: 963212 - DNA, 33 bp, Homo sapien
gtcaggctcttaatcctcagacttagagcaggg

SEQ ID NO: 963213 - DNA, 33 bp, Homo sapien
gaagaactgaccagaccgcagaaaatgctagga

SEQ ID NO: 963214 - DNA, 33 bp, Homo sapien
gaagaactgaccagacggcagaaaatgctagga

SEQ ID NO: 963215 - DNA, 33 bp, Homo sapien
cccgtgatccaacgtcacctgtggccctcccac

SEQ ID NO: 963216 - DNA, 33 bp, Homo sapien
cccgtgatccaacgtcgcctgtggccctcccac

SEQ ID NO: 963217 - DNA, 33 bp, Homo sapien
ggaagtcattgagtccagcagagcggataagtg

SEQ ID NO: 963218 - DNA, 33 bp, Homo sapien
ggaagtcattgagtccggcagagcggataagtg

SEQ ID NO: 963219 - DNA, 33 bp, Homo sapien
ctctcacttctatttaagcagaaattcagcaag

SEQ ID NO: 963220 - DNA, 33 bp, Homo sapien
ctctcacttctatttaggcagaaattcagcaag

SEQ ID NO: 963221 - DNA, 33 bp, Homo sapien
ccagcaaaaactcaggaagatgttgaggtaggc

SEQ ID NO: 963222 - DNA, 33 bp, Homo sapien
ccagcaaaaactcagggagatgttgaggtaggc

SEQ ID NO: 963223 - DNA, 33 bp, Homo sapien
cagagtgctttgaggtaaatagtgaaaaacaaa

SEQ ID NO: 963224 - DNA, 33 bp, Homo sapien
cagagtgctttgaggttaatagtgaaaaacaaa

SEQ ID NO: 963225 - DNA, 33 bp, Homo sapien
cccattccagaagccaacaggtttgtctcgggc

SEQ ID NO: 963226 - DNA, 33 bp, Homo sapien
cccattccagaagccaccaggtttgtctcgggc

SEQ ID NO: 963227 - DNA, 33 bp, Homo sapien
tgtgtctcttgcggaaagcccttaaaagcgaaa

SEQ ID NO: 963228 - DNA, 33 bp, Homo sapien
tgtgtctcttgcggaaggcccttaaaagcgaaa

SEQ ID NO: 963229 - DNA, 33 bp, Homo sapien
tttagtttttatcacacgattttcagtttttca

SEQ ID NO: 963230 - DNA, 33 bp, Homo sapien
tttagtttttatcacatgattttcagtttttca

SEQ ID NO: 963231 - DNA, 33 bp, Homo sapien
cacaaagcattttcaccggtagcttctttctag

SEQ ID NO: 963232 - DNA, 33 bp, Homo sapien
cacaaagcattttcacgggtagcttctttctag

SEQ ID NO: 963233 - DNA, 33 bp, Homo sapien
cctttatgtatcaccacaaagatatcactgagc

SEQ ID NO: 963234 - DNA, 33 bp, Homo sapien
cctttatgtatcaccagaaagatatcactgagc

SEQ ID NO: 963235 - DNA, 33 bp, Homo sapien
agagtgggctccaggactcctaactccccctga

SEQ ID NO: 963236 - DNA, 33 bp, Homo sapien
agagtgggctccaggattcctaactccccctga

SEQ ID NO: 963237 - DNA, 33 bp, Homo sapien
ttccataacactttccgataaattttcctcttt

SEQ ID NO: 963238 - DNA, 33 bp, Homo sapien
ttccataacactttcctataaattttcctcttt

SEQ ID NO: 963239 - DNA, 33 bp, Homo sapien
aaataaatccacacatcacatagaagtttcaca

SEQ ID NO: 963240 - DNA, 33 bp, Homo sapien
aaataaatccacacatgacatagaagtttcaca

SEQ ID NO: 963241 - DNA, 33 bp, Homo sapien
tgaatgtacacatcacaaagcggttttacagat

SEQ ID NO: 963242 - DNA, 33 bp, Homo sapien
tgaatgtacacatcacgaagcggttttacagat

SEQ ID NO: 963243 - DNA, 33 bp, Homo sapien
ctcactgagccctaaaatggaaaacaaaatgtc

SEQ ID NO: 963244 - DNA, 33 bp, Homo sapien
ctcactgagccctaaagtggaaaacaaaatgtc

SEQ ID NO: 963245 - DNA, 33 bp, Homo sapien
aggtttaactctatgacctgagtccacatgcca

SEQ ID NO: 963246 - DNA, 33 bp, Homo sapien
aggtttaactctatgatctgagtccacatgcca

SEQ ID NO: 963247 - DNA, 33 bp, Homo sapien
aatccacacatcataaagtggtttcaaagatag

SEQ ID NO: 963248 - DNA, 33 bp, Homo sapien
aatccacacatcataaggtggtttcaaagatag

SEQ ID NO: 963249 - DNA, 33 bp, Homo sapien
aaatgtttccatttataagctgaatacacacat

SEQ ID NO: 963250 - DNA, 33 bp, Homo sapien
aaatgtttccatttatgagctgaatacacacat

SEQ ID NO: 963251 - DNA, 33 bp, Homo sapien
aagcagttagcagacagattctttctagttttt

SEQ ID NO: 963252 - DNA, 33 bp, Homo sapien
aagcagttagcagacatattctttctagttttt

SEQ ID NO: 963253 - DNA, 33 bp, Homo sapien
tcaaaataatggcattaaaaaagttcagttaga

SEQ ID NO: 963254 - DNA, 33 bp, Homo sapien
tcaaaataatggcatttaaaaagttcagttaga

SEQ ID NO: 963255 - DNA, 33 bp, Homo sapien
ttttcttagttttgataatagtgttatagttac

SEQ ID NO: 963256 - DNA, 33 bp, Homo sapien
ttttcttagttttgattatagtgttatagttac

SEQ ID NO: 963257 - DNA, 33 bp, Homo sapien
ccctttcaaaagactaactcatagaatcacaaa

SEQ ID NO: 963258 - DNA, 33 bp, Homo sapien
ccctttcaaaagactatctcatagaatcacaaa

SEQ ID NO: 963259 - DNA, 33 bp, Homo sapien
aataaggtgttttctaataagtttcaaaaggga

SEQ ID NO: 963260 - DNA, 33 bp, Homo sapien
aataaggtgttttctagtaagtttcaaaaggga

SEQ ID NO: 963261 - DNA, 33 bp, Homo sapien
tcctggatttcaagccacacacaagatttacac

SEQ ID NO: 963262 - DNA, 33 bp, Homo sapien
tcctggatttcaagccgcacacaagatttacac

SEQ ID NO: 963263 - DNA, 33 bp, Homo sapien
tcattctaggtttaggaaatttaagcaactgca

SEQ ID NO: 963264 - DNA, 33 bp, Homo sapien
tcattctaggtttaggcaatttaagcaactgca

SEQ ID NO: 963265 - DNA, 33 bp, Homo sapien
ggatcgtatgtggcccaccatctgcttctataa

SEQ ID NO: 963266 - DNA, 33 bp, Homo sapien
ggatcgtatgtggcccgccatctgcttctataa

SEQ ID NO: 963267 - DNA, 33 bp, Homo sapien
atagacaatgtgtaaacaaatgagcatggccat

SEQ ID NO: 963268 - DNA, 33 bp, Homo sapien
atagacaatgtgtaaagaaatgagcatggccat

SEQ ID NO: 963269 - DNA, 33 bp, Homo sapien
ttaagagaaagaatgaactgaacctcttgtgca

SEQ ID NO: 963270 - DNA, 33 bp, Homo sapien
ttaagagaaagaatgagctgaacctcttgtgca

SEQ ID NO: 963271 - DNA, 33 bp, Homo sapien
cattgtaggaatatggcatgatacagaaatcag

SEQ ID NO: 963272 - DNA, 33 bp, Homo sapien
cattgtaggaatatggtatgatacagaaatcag

SEQ ID NO: 963273 - DNA, 33 bp, Homo sapien
gtgggaccatgttggactagagagagatgaggt

SEQ ID NO: 963274 - DNA, 33 bp, Homo sapien
gtgggaccatgttggattagagagagatgaggt

SEQ ID NO: 963275 - DNA, 33 bp, Homo sapien
gcaacctgtctatcataaaacgcctctttatag

SEQ ID NO: 963276 - DNA, 33 bp, Homo sapien
gcaacctgtctatcatcaaacgcctctttatag

SEQ ID NO: 963277 - DNA, 33 bp, Homo sapien
gccattgttaatgaggcagatgactctggagaa

SEQ ID NO: 963278 - DNA, 33 bp, Homo sapien
gccattgttaatgaggtagatgactctggagaa

SEQ ID NO: 963279 - DNA, 33 bp, Homo sapien
atttaagttaagacaaaatgttgcctggttgcc

SEQ ID NO: 963280 - DNA, 33 bp, Homo sapien
atttaagttaagacaatatgttgcctggttgcc

SEQ ID NO: 963281 - DNA, 33 bp, Homo sapien
tacatcaattaggataaagcaaaatctgtttga

SEQ ID NO: 963282 - DNA, 33 bp, Homo sapien
tacatcaattaggatacagcaaaatctgtttga

SEQ ID NO: 963283 - DNA, 33 bp, Homo sapien
atagatcccatagaaccgggaacgctttactct

SEQ ID NO: 963284 - DNA, 33 bp, Homo sapien
atagatcccatagaactgggaacgctttactct

SEQ ID NO: 963285 - DNA, 33 bp, Homo sapien
ttccgtagcatgcaaaacaggtagagagagccc

SEQ ID NO: 963286 - DNA, 33 bp, Homo sapien
ttccgtagcatgcaaaccaggtagagagagccc

SEQ ID NO: 963287 - DNA, 33 bp, Homo sapien
ggcagaatgctagccaaaaagtagaggttgtgc

SEQ ID NO: 963288 - DNA, 33 bp, Homo sapien
ggcagaatgctagccagaaagtagaggttgtgc

SEQ ID NO: 963289 - DNA, 33 bp, Homo sapien; identical to SEQ ID NO: 963287

SEQ ID NO: 963290 - DNA, 33 bp, Homo sapien; identical to SEQ ID NO: 963288

SEQ ID NO: 963291 - DNA, 33 bp, Homo sapien
tcatattacctaatgacgggccaaaaaatattt

SEQ ID NO: 963292 - DNA, 33 bp, Homo sapien
tcatattacctaatgatgggccaaaaaatattt

SEQ ID NO: 963293 - DNA, 33 bp, Homo sapien
gcctagttacagcatacagatgacattttgaca

SEQ ID NO: 963294 - DNA, 33 bp, Homo sapien
gcctagttacagcatatagatgacattttgaca

SEQ ID NO: 963295 - DNA, 33 bp, Homo sapien
atatcaaaatgccatacgtaggctggaaccagt

SEQ ID NO: 963296 - DNA, 33 bp, Homo sapien
atatcaaaatgccatatgtaggctggaaccagt

SEQ ID NO: 963297 - DNA, 33 bp, Homo sapien
gtgtaatttcgacataaacctttgcccagctct

SEQ ID NO: 963298 - DNA, 33 bp, Homo sapien
gtgtaatttcgacatatacctttgcccagctct

SEQ ID NO: 963299 - DNA, 33 bp, Homo sapien
ggcataactactgataaggtacagaacctgttt

SEQ ID NO: 963300 - DNA, 33 bp, Homo sapien
ggcataactactgatatggtacagaacctgttt

SEQ ID NO: 963301 - DNA, 33 bp, Homo sapien; identical to SEQ ID NO: 963299

SEQ ID NO: 963302 - DNA, 33 bp, Homo sapien; identical to SEQ ID NO: 963300

SEQ ID NO: 963303 - DNA, 33 bp, Homo sapien
ctgaagtgtagtacacagtatcggctacagtat

SEQ ID NO: 963304 - DNA, 33 bp, Homo sapien
ctgaagtgtagtacaccgtatcggctacagtat

SEQ ID NO: 963305 - DNA, 33 bp, Homo sapien
acaaggtttcctgatacagacagagttctgttt

SEQ ID NO: 963306 - DNA, 33 bp, Homo sapien
acaaggtttcctgatatagacagagttctgttt

SEQ ID NO: 963307 - DNA, 33 bp, Homo sapien; identical to SEQ ID NO: 963305

SEQ ID NO: 963308 - DNA, 33 bp, Homo sapien; identical to SEQ ID NO: 963306

SEQ ID NO: 963309 - DNA, 33 bp, Homo sapien
attctgtttgcttctcaaatatttcaaatattt

SEQ ID NO: 963310 - DNA, 33 bp, Homo sapien
attctgtttgcttctcgaatatttcaaatattt

SEQ ID NO: 963311 - DNA, 33 bp, Homo sapien
cacctggcctctcctacgggctttgaatgcctc

SEQ ID NO: 963312 - DNA, 33 bp, Homo sapien
cacctggcctctcctatgggctttgaatgcctc

SEQ ID NO: 963313 - DNA, 33 bp, Homo sapien
aagaagttgcgacctcaccttagtccattattt

SEQ ID NO: 963314 - DNA, 33 bp, Homo sapien
aagaagttgcgacctcgccttagtccattattt

SEQ ID NO: 963315 - DNA, 33 bp, Homo sapien
cttgttaatgggagtacatggtctgttttatgg

SEQ ID NO: 963316 - DNA, 33 bp, Homo sapien
cttgttaatgggagtatatggtctgttttatgg

SEQ ID NO: 963317 - DNA, 33 bp, Homo sapien
tgattccttccatttgcactgcatcatttgttg

SEQ ID NO: 963318 - DNA, 33 bp, Homo sapien
tgattccttccatttggactgcatcatttgttg

SEQ ID NO: 963319 - DNA, 33 bp, Homo sapien
atggaaggaatcatcaaaaaggtaatggaaatc

SEQ ID NO: 963320 - DNA, 33 bp, Homo sapien
atggaaggaatcatcagaaaggtaatggaaatc

SEQ ID NO: 963321 - DNA, 33 bp, Homo sapien; identical to SEQ ID NO: 963319

SEQ ID NO: 963322 - DNA, 33 bp, Homo sapien; identical to SEQ ID NO: 963320

SEQ ID NO: 963323 - DNA, 33 bp, Homo sapien
gtacactaaaatggtcaaaagaaatgaacagga

SEQ ID NO: 963324 - DNA, 33 bp, Homo sapien
gtacactaaaatggtctaaagaaatgaacagga

SEQ ID NO: 963325 - DNA, 33 bp, Homo sapien
cttgtgctcataaaataactggaataactaggg

SEQ ID NO: 963326 - DNA, 33 bp, Homo sapien
cttgtgctcataaaatcactggaataactaggg

SEQ ID NO: 963327 - DNA, 33 bp, Homo sapien
tctaagtaggtgtattcaacaagttttggaagg

SEQ ID NO: 963328 - DNA, 33 bp, Homo sapien
tctaagtaggtgtattgaacaagttttggaagg

SEQ ID NO: 963329 - DNA, 33 bp, Homo sapien
tttttactgacttgtacgacaggaaaattgcta

SEQ ID NO: 963330 - DNA, 33 bp, Homo sapien
tttttactgacttgtatgacaggaaaattgcta

SEQ ID NO: 963331 - DNA, 33 bp, Homo sapien
cccagccttttgaagcacaggcaatacctggag

SEQ ID NO: 963332 - DNA, 33 bp, Homo sapien
cccagccttttgaagcgcaggcaatacctggag

SEQ ID NO: 963333 - DNA, 33 bp, Homo sapien
taacagccagtagttagaaaagacaattttgta

SEQ ID NO: 963334 - DNA, 33 bp, Homo sapien
taacagccagtagttataaaagacaattttgta

SEQ ID NO: 963335 - DNA, 33 bp, Homo sapien
tgtaacataaccaggaacaaataggctaacgaa

SEQ ID NO: 963336 - DNA, 33 bp, Homo sapien
tgtaacataaccaggagcaaataggctaacgaa

SEQ ID NO: 963337 - DNA, 33 bp, Homo sapien
tgtcaccctcaatgataagaagattgtgtcata

SEQ ID NO: 963338 - DNA, 33 bp, Homo sapien
tgtcaccctcaatgatgagaagattgtgtcata

SEQ ID NO: 963339 - DNA, 33 bp, Homo sapien
cctgatccctgactaggaaaggcactgtggctt

SEQ ID NO: 963340 - DNA, 33 bp, Homo sapien
cctgatccctgactagtaaaggcactgtggctt

SEQ ID NO: 963341 - DNA, 33 bp, Homo sapien
ctcttctgcttggatccagccaacaggagacat

SEQ ID NO: 963342 - DNA, 33 bp, Homo sapien
ctcttctgcttggatctagccaacaggagacat

SEQ ID NO: 963343 - DNA, 33 bp, Homo sapien
atcaaaggcctaataaagactcttgtacctgga

SEQ ID NO: 963344 - DNA, 33 bp, Homo sapien
atcaaaggcctaataacgactcttgtacctgga

SEQ ID NO: 963345 - DNA, 33 bp, Homo sapien
tcaactgtgacatatacctaaagaagcacccag

SEQ ID NO: 963346 - DNA, 33 bp, Homo sapien
tcaactgtgacatatatctaaagaagcacccag

SEQ ID NO: 963347 - DNA, 33 bp, Homo sapien; identical to SEQ ID NO: 963345

SEQ ID NO: 963348 - DNA, 33 bp, Homo sapien; identical to SEQ ID NO: 963346

SEQ ID NO: 963349 - DNA, 33 bp, Homo sapien
agggcagaccttaagcactgttttcaccaagtt

SEQ ID NO: 963350 - DNA, 33 bp, Homo sapien
agggcagaccttaagctctgttttcaccaagtt

SEQ ID NO: 963351 - DNA, 33 bp, Homo sapien
cccacgaaacccacaccaaaattcaacagtata

SEQ ID NO: 963352 - DNA, 33 bp, Homo sapien
cccacgaaacccacacgaaaattcaacagtata

SEQ ID NO: 963353 - DNA, 33 bp, Homo sapien
aagcaggcagaacagccacttcagggctaaatg

SEQ ID NO: 963354 - DNA, 33 bp, Homo sapien
aagcaggcagaacagctacttcagggctaaatg

SEQ ID NO: 963355 - DNA, 33 bp, Homo sapien; identical to SEQ ID NO: 963353

SEQ ID NO: 963356 - DNA, 33 bp, Homo sapien; identical to SEQ ID NO: 963354

SEQ ID NO: 963357 - DNA, 33 bp, Homo sapien
ttttacaagaaggtgacctaggacatcacacat

SEQ ID NO: 963358 - DNA, 33 bp, Homo sapien
ttttacaagaaggtgatctaggacatcacacat

SEQ ID NO: 963359 - DNA, 33 bp, Homo sapien; identical to SEQ ID NO: 963357

SEQ ID NO: 963360 - DNA, 33 bp, Homo sapien; identical to SEQ ID NO: 963358

SEQ ID NO: 963361 - DNA, 33 bp, Homo sapien
agagtcaaatcacacaagtgttcagcaacaatt

SEQ ID NO: 963362 - DNA, 33 bp, Homo sapien
agagtcaaatcacacaggtgttcagcaacaatt

SEQ ID NO: 963363 - DNA, 33 bp, Homo sapien
tgacctactatttgaggctatacccaggtaatg

SEQ ID NO: 963364 - DNA, 33 bp, Homo sapien
tgacctactatttgagtctatacccaggtaatg

SEQ ID NO: 963365 - DNA, 33 bp, Homo sapien
tttggtgacgtttgaaacatgattcagcaaatc

SEQ ID NO: 963366 - DNA, 33 bp, Homo sapien
tttggtgacgtttgaaccatgattcagcaaatc

SEQ ID NO: 963367 - DNA, 33 bp, Homo sapien
tattttgcctcttatcgctaggcttaaggtagt

SEQ ID NO: 963368 - DNA, 33 bp, Homo sapien
tattttgcctcttatctctaggcttaaggtagt

SEQ ID NO: 963369 - DNA, 33 bp, Homo sapien
caggcttctccaaaaaagtagctacaagtccag

SEQ ID NO: 963370 - DNA, 33 bp, Homo sapien
caggcttctccaaaaacgtagctacaagtccag

SEQ ID NO: 963371 - DNA, 33 bp, Homo sapien
gggcccttacaaagtgaaaaatagtgacatatt

SEQ ID NO: 963372 - DNA, 33 bp, Homo sapien
gggcccttacaaagtgcaaaatagtgacatatt

SEQ ID NO: 963373 - DNA, 33 bp, Homo sapien
ttatataaaattcaggaaggattataacgctta

SEQ ID NO: 963374 - DNA, 33 bp, Homo sapien
ttatataaaattcagggaggattataacgctta

SEQ ID NO: 963375 - DNA, 33 bp, Homo sapien
aggagtttgtacattaagagttagtgttgtaag

SEQ ID NO: 963376 - DNA, 33 bp, Homo sapien
aggagtttgtacattacgagttagtgttgtaag

SEQ ID NO: 963377 - DNA, 33 bp, Homo sapien
ataaaaacaggatggacgaaggcaactgtcata

SEQ ID NO: 963378 - DNA, 33 bp, Homo sapien
ataaaaacaggatggatgaaggcaactgtcata

SEQ ID NO: 963379 - DNA, 33 bp, Homo sapien
gtgatgcagccaaagtcacccactggtgagagg

SEQ ID NO: 963380 - DNA, 33 bp, Homo sapien
gtgatgcagccaaagttacccactggtgagagg

SEQ ID NO: 963381 - DNA, 33 bp, Homo sapien
aaggtggctctcaggaagaaatgaagggaaaca

SEQ ID NO: 963382 - DNA, 33 bp, Homo sapien
aaggtggctctcaggaggaaatgaagggaaaca

SEQ ID NO: 963383 - DNA, 33 bp, Homo sapien
atttgccaaactcctaccttgacatacgcttgt

SEQ ID NO: 963384 - DNA, 33 bp, Homo sapien
atttgccaaactcctatcttgacatacgcttgt

SEQ ID NO: 963385 - DNA, 33 bp, Homo sapien
attcccaagacacgtacgacctcagtggcagca

SEQ ID NO: 963386 - DNA, 33 bp, Homo sapien
attcccaagacacgtatgacctcagtggcagca

SEQ ID NO: 963387 - DNA, 33 bp, Homo sapien
aagcaagtggcccgcaagtttcactgactaaac

SEQ ID NO: 963388 - DNA, 33 bp, Homo sapien
aagcaagtggcccgcacgtttcactgactaaac

SEQ ID NO: 963389 - DNA, 33 bp, Homo sapien
ctcgaagtgtcactcaacctttcctgtaaaaaa

SEQ ID NO: 963390 - DNA, 33 bp, Homo sapien
ctcgaagtgtcactcatcctttcctgtaaaaaa

SEQ ID NO: 963391 - DNA, 33 bp, Homo sapien
gcatcaggaaggatccaagaacagctgggctgg

SEQ ID NO: 963392 - DNA, 33 bp, Homo sapien
gcatcaggaaggatcccagaacagctgggctgg

SEQ ID NO: 963393 - DNA, 33 bp, Homo sapien
caccaagtggaaaaaaatcactccatgcactcc

SEQ ID NO: 963394 - DNA, 33 bp, Homo sapien
caccaagtggaaaaaattcactccatgcactcc

SEQ ID NO: 963395 - DNA, 33 bp, Homo sapien
ctgtctttgtggggtcacaccttcaatatggca

SEQ ID NO: 963396 - DNA, 33 bp, Homo sapien
ctgtctttgtggggtcgcaccttcaatatggca

SEQ ID NO: 963397 - DNA, 33 bp, Homo sapien
gtcatagagtaaatcacgaagtgtagcaggaga

SEQ ID NO: 963398 - DNA, 33 bp, Homo sapien
gtcatagagtaaatcatgaagtgtagcaggaga

SEQ ID NO: 963399 - DNA, 33 bp, Homo sapien
tttacaaatgcataggaagaaaagcgatctcac

SEQ ID NO: 963400 - DNA, 33 bp, Homo sapien
tttacaaatgcataggcagaaaagcgatctcac

SEQ ID NO: 963401 - DNA, 33 bp, Homo sapien
catcttcttccacaaccaagtcttgtttatttc

SEQ ID NO: 963402 - DNA, 33 bp, Homo sapien
catcttcttccacaactaagtcttgtttatttc

SEQ ID NO: 963403 - DNA, 33 bp, Homo sapien
gtgagtcctgacaaaacatcctgttctagagat

SEQ ID NO: 963404 - DNA, 33 bp, Homo sapien
gtgagtcctgacaaaatatcctgttctagagat

SEQ ID NO: 963405 - DNA, 33 bp, Homo sapien
attctcttacagttcagatagtctcttagcacc

SEQ ID NO: 963406 - DNA, 33 bp, Homo sapien
attctcttacagttcatatagtctcttagcacc

SEQ ID NO: 963407 - DNA, 33 bp, Homo sapien
aatttagcctacataaccagtttatcaaaatat

SEQ ID NO: 963408 - DNA, 33 bp, Homo sapien
aatttagcctacataatcagtttatcaaaatat

SEQ ID NO: 963409 - DNA, 33 bp, Homo sapien
tgttaggagaaagtaaaagacgtggagatctgt

SEQ ID NO: 963410 - DNA, 33 bp, Homo sapien
tgttaggagaaagtaacagacgtggagatctgt

SEQ ID NO: 963411 - DNA, 33 bp, Homo sapien
gtggatgagatgaaaacgttatttccaaagatt

SEQ ID NO: 963412 - DNA, 33 bp, Homo sapien
gtggatgagatgaaaatgttatttccaaagatt

SEQ ID NO: 963413 - DNA, 33 bp, Homo sapien
gcaagtgaccttgcaaatgacaaataaccttca

SEQ ID NO: 963414 - DNA, 33 bp, Homo sapien
gcaagtgaccttgcaagtgacaaataaccttca

SEQ ID NO: 963415 - DNA, 33 bp, Homo sapien
tgccctataagccatagccacaatagtacacaa

SEQ ID NO: 963416 - DNA, 33 bp, Homo sapien
tgccctataagccatatccacaatagtacacaa

SEQ ID NO: 963417 - DNA, 33 bp, Homo sapien
caataccatcttagaacgaaaaacagccataga

SEQ ID NO: 963418 - DNA, 33 bp, Homo sapien
caataccatcttagaatgaaaaacagccataga

SEQ ID NO: 963419 - DNA, 33 bp, Homo sapien
ccaagccaacagctaggattgtcacactcatat

SEQ ID NO: 963420 - DNA, 33 bp, Homo sapien
ccaagccaacagctagtattgtcacactcatat

SEQ ID NO: 963421 - DNA, 33 bp, Homo sapien
gtggctatcgatgtggaaagtcaggacacttta

SEQ ID NO: 963422 - DNA, 33 bp, Homo sapien
gtggctatcgatgtgggaagtcaggacacttta

SEQ ID NO: 963423 - DNA, 33 bp, Homo sapien
atcgtctgcctattctcaatacctttcactgaa

SEQ ID NO: 963424 - DNA, 33 bp, Homo sapien
atcgtctgcctattctgaatacctttcactgaa

SEQ ID NO: 963425 - DNA, 33 bp, Homo sapien
caaagaaagtaaagccgcaaatcccaacttaaa

SEQ ID NO: 963426 - DNA, 33 bp, Homo sapien
caaagaaagtaaagcctcaaatcccaacttaaa

SEQ ID NO: 963427 - DNA, 33 bp, Homo sapien
acacttgagacgtatagcataaaagacatgaca

SEQ ID NO: 963428 - DNA, 33 bp, Homo sapien
acacttgagacgtatatcataaaagacatgaca

SEQ ID NO: 963429 - DNA, 33 bp, Homo sapien
ttgtcctctcctgaaagtctgacacctatgatg

SEQ ID NO: 963430 - DNA, 33 bp, Homo sapien
ttgtcctctcctgaaattctgacacctatgatg

SEQ ID NO: 963431 - DNA, 33 bp, Homo sapien
ttgtattcatctcagcaactataagatgtcaaa

SEQ ID NO: 963432 - DNA, 33 bp, Homo sapien
ttgtattcatctcagcgactataagatgtcaaa

SEQ ID NO: 963433 - DNA, 33 bp, Homo sapien
aacaagatccacagaaaggccttttagatacac

SEQ ID NO: 963434 - DNA, 33 bp, Homo sapien
aacaagatccacagaagggccttttagatacac

SEQ ID NO: 963435 - DNA, 33 bp, Homo sapien
gtaatccaatgcaagggagctaaaaatcattgt

SEQ ID NO: 963436 - DNA, 33 bp, Homo sapien
gtaatccaatgcaaggtagctaaaaatcattgt

SEQ ID NO: 963437 - DNA, 33 bp, Homo sapien
tttttgggtctggttacagatagagatccagtt

SEQ ID NO: 963438 - DNA, 33 bp, Homo sapien
tttttgggtctggttagagatagagatccagtt

SEQ ID NO: 963439 - DNA, 33 bp, Homo sapien
ggttttgatgctttcaaactttacaatcctgaa

SEQ ID NO: 963440 - DNA, 33 bp, Homo sapien
ggttttgatgctttcagactttacaatcctgaa

SEQ ID NO: 963441 - DNA, 33 bp, Homo sapien
tattgataaggacttacagtaactccagcttgt

SEQ ID NO: 963442 - DNA, 33 bp, Homo sapien
tattgataaggacttagagtaactccagcttgt

SEQ ID NO: 963443 - DNA, 33 bp, Homo sapien
agcaatggctgatgcacggactcattggagaaa

SEQ ID NO: 963444 - DNA, 33 bp, Homo sapien
agcaatggctgatgcagggactcattggagaaa

SEQ ID NO: 963445 - DNA, 33 bp, Homo sapien; identical to SEQ ID NO: 963443

SEQ ID NO: 963446 - DNA, 33 bp, Homo sapien; identical to SEQ ID NO: 963444

SEQ ID NO: 963447 - DNA, 33 bp, Homo sapien
aaagtgaactgctcgtaaaccctgcaaagttca

SEQ ID NO: 963448 - DNA, 33 bp, Homo sapien
aaagtgaactgctcgttaaccctgcaaagttca

SEQ ID NO: 963449 - DNA, 33 bp, Homo sapien; identical to SEQ ID NO: 963447

SEQ ID NO: 963450 - DNA, 33 bp, Homo sapien; identical to SEQ ID NO: 963448

SEQ ID NO: 963451 - DNA, 33 bp, Homo sapien
gttacccaagagtcaacgtaaggtcttctttta

SEQ ID NO: 963452 - DNA, 33 bp, Homo sapien
gttacccaagagtcaatgtaaggtcttctttta

SEQ ID NO: 963453 - DNA, 33 bp, Homo sapien
tagctgcctttcctagcaccattcattgcacag

SEQ ID NO: 963454 - DNA, 33 bp, Homo sapien
tagctgcctttcctagtaccattcattgcacag

SEQ ID NO: 963455 - DNA, 33 bp, Homo sapien
tgctgagacacccacactaggaaaaacctcttc

SEQ ID NO: 963456 - DNA, 33 bp, Homo sapien
tgctgagacacccacagtaggaaaaacctcttc

SEQ ID NO: 963457 - DNA, 33 bp, Homo sapien
cacagagaccaatgcaaaaataaggagaggccc

SEQ ID NO: 963458 - DNA, 33 bp, Homo sapien
cacagagaccaatgcacaaataaggagaggccc

SEQ ID NO: 963459 - DNA, 33 bp, Homo sapien
ttcctctgcagcacaaattgaggtgtctggatg

SEQ ID NO: 963460 - DNA, 33 bp, Homo sapien
ttcctctgcagcacaagttgaggtgtctggatg

SEQ ID NO: 963461 - DNA, 33 bp, Homo sapien
catgctatgaaataacgggggctttcgtcacaa

SEQ ID NO: 963462 - DNA, 33 bp, Homo sapien
catgctatgaaataactggggctttcgtcacaa

SEQ ID NO: 963463 - DNA, 33 bp, Homo sapien
tggagaaactctacaaagatacagaaacaccta

SEQ ID NO: 963464 - DNA, 33 bp, Homo sapien
tggagaaactctacaaggatacagaaacaccta

SEQ ID NO: 963465 - DNA, 33 bp, Homo sapien
caggatgtaaagaaaacaaatagcaaacttaca

SEQ ID NO: 963466 - DNA, 33 bp, Homo sapien
caggatgtaaagaaaagaaatagcaaacttaca

SEQ ID NO: 963467 - DNA, 33 bp, Homo sapien
tattggtatcttccaagaagcatttgctatggt

SEQ ID NO: 963468 - DNA, 33 bp, Homo sapien
tattggtatcttccaataagcatttgctatggt

SEQ ID NO: 963469 - DNA, 33 bp, Homo sapien
ccaggaaaagcagatacaacaatgaagaactta

SEQ ID NO: 963470 - DNA, 33 bp, Homo sapien
ccaggaaaagcagatagaacaatgaagaactta

SEQ ID NO: 963471 - DNA, 33 bp, Homo sapien
gtgaaccttcatgagcaagaggtcactattaac

SEQ ID NO: 963472 - DNA, 33 bp, Homo sapien
gtgaaccttcatgagcgagaggtcactattaac

SEQ ID NO: 963473 - DNA, 33 bp, Homo sapien
gagcagaacccacagacgagacgtatctggtgt

SEQ ID NO: 963474 - DNA, 33 bp, Homo sapien
gagcagaacccacagatgagacgtatctggtgt

SEQ ID NO: 963475 - DNA, 33 bp, Homo sapien
gagggaacacacaggaaaaaactaccaaatcag

SEQ ID NO: 963476 - DNA, 33 bp, Homo sapien
gagggaacacacaggagaaaactaccaaatcag

SEQ ID NO: 963477 - DNA, 33 bp, Homo sapien
aattttgctaactcctcaatcccttgtcttctt

SEQ ID NO: 963478 - DNA, 33 bp, Homo sapien
aattttgctaactccttaatcccttgtcttctt

SEQ ID NO: 963479 - DNA, 33 bp, Homo sapien
atctgtgaaatgaatcaatggcatcttataaga

SEQ ID NO: 963480 - DNA, 33 bp, Homo sapien
atctgtgaaatgaatcgatggcatcttataaga

SEQ ID NO: 963481 - DNA, 33 bp, Homo sapien
tgtcatccctaattcacagtgtggcctttacac

SEQ ID NO: 963482 - DNA, 33 bp, Homo sapien
tgtcatccctaattcatagtgtggcctttacac

SEQ ID NO: 963483 - DNA, 33 bp, Homo sapien
agatttctgtaagcaacgtcgtcttaactgtca

SEQ ID NO: 963484 - DNA, 33 bp, Homo sapien
agatttctgtaagcaatgtcgtcttaactgtca

SEQ ID NO: 963485 - DNA, 33 bp, Homo sapien
taatttgtgttcaatcagagctacaaaaagact

SEQ ID NO: 963486 - DNA, 33 bp, Homo sapien
taatttgtgttcaatcggagctacaaaaagact

SEQ ID NO: 963487 - DNA, 33 bp, Homo sapien
cgttgcaggcctgtggaagatcaaagtcctcca

SEQ ID NO: 963488 - DNA, 33 bp, Homo sapien
cgttgcaggcctgtgggagatcaaagtcctcca

SEQ ID NO: 963489 - DNA, 33 bp, Homo sapien
accatgtctttatccaccagcttgccctaatgg

SEQ ID NO: 963490 - DNA, 33 bp, Homo sapien
accatgtctttatccatcagcttgccctaatgg

SEQ ID NO: 963491 - DNA, 33 bp, Homo sapien
caagacacaggtggcacctctaggacagatgtc

SEQ ID NO: 963492 - DNA, 33 bp, Homo sapien
caagacacaggtggcatctctaggacagatgtc

SEQ ID NO: 963493 - DNA, 33 bp, Homo sapien
aaatgccttgcacagaagaggagtgtggggtgc

SEQ ID NO: 963494 - DNA, 33 bp, Homo sapien
aaatgccttgcacagaggaggagtgtggggtgc

SEQ ID NO: 963495 - DNA, 33 bp, Homo sapien
aaactaacggactaccaacatgctactgtttct

SEQ ID NO: 963496 - DNA, 33 bp, Homo sapien
aaactaacggactaccgacatgctactgtttct

SEQ ID NO: 963497 - DNA, 33 bp, Homo sapien
cccgtgatcaagctggcatctctcgtgtatgat

SEQ ID NO: 963498 - DNA, 33 bp, Homo sapien
cccgtgatcaagctggtatctctcgtgtatgat

SEQ ID NO: 963499 - DNA, 33 bp, Homo sapien
aattcaggtacaaaaccatcagatccaacaaat

SEQ ID NO: 963500 - DNA, 33 bp, Homo sapien
aattcaggtacaaaactatcagatccaacaaat

SEQ ID NO: 963501 - DNA, 33 bp, Homo sapien
ttagttacaggatggaaaagatgaggacatgaa

SEQ ID NO: 963502 - DNA, 33 bp, Homo sapien
ttagttacaggatggagaagatgaggacatgaa

SEQ ID NO: 963503 - DNA, 33 bp, Homo sapien
atgtaagtagttccgacagagctctccgtgtct

SEQ ID NO: 963504 - DNA, 33 bp, Homo sapien
atgtaagtagttccgatagagctctccgtgtct

SEQ ID NO: 963505 - DNA, 33 bp, Homo sapien
ccagcagcatcgtgataagagtgcacagggacc

SEQ ID NO: 963506 - DNA, 33 bp, Homo sapien
ccagcagcatcgtgatgagagtgcacagggacc

SEQ ID NO: 963507 - DNA, 33 bp, Homo sapien
aaagctcaacttaggaaatcatgtactctccct

SEQ ID NO: 963508 - DNA, 33 bp, Homo sapien
aaagctcaacttaggacatcatgtactctccct

SEQ ID NO: 963509 - DNA, 33 bp, Homo sapien
ctcctgcttcctcaggaaaggcttatatcagtg

SEQ ID NO: 963510 - DNA, 33 bp, Homo sapien
ctcctgcttcctcagggaaggcttatatcagtg

SEQ ID NO: 963511 - DNA, 33 bp, Homo sapien
atttagctttatctacagagcaggcagcaggtg

SEQ ID NO: 963512 - DNA, 33 bp, Homo sapien
atttagctttatctacggagcaggcagcaggtg

SEQ ID NO: 963513 - DNA, 33 bp, Homo sapien
aaaacaactgagaaaacattaataatccagtcc

SEQ ID NO: 963514 - DNA, 33 bp, Homo sapien
aaaacaactgagaaaatattaataatccagtcc

SEQ ID NO: 963515 - DNA, 33 bp, Homo sapien
gaaaacgaactcttcagacttccacacattcct

SEQ ID NO: 963516 - DNA, 33 bp, Homo sapien
gaaaacgaactcttcatacttccacacattcct

SEQ ID NO: 963517 - DNA, 33 bp, Homo sapien
caccgcacccggccacaaaaaacaaatttaatt

SEQ ID NO: 963518 - DNA, 33 bp, Homo sapien
caccgcacccggccacgaaaaacaaatttaatt

SEQ ID NO: 963519 - DNA, 33 bp, Homo sapien
acagaggatctgtggaatagtgggtgcagggag

SEQ ID NO: 963520 - DNA, 33 bp, Homo sapien
acagaggatctgtggagtagtgggtgcagggag

SEQ ID NO: 963521 - DNA, 33 bp, Homo sapien
ttagcatgagctataccatcctgctatttaaag

SEQ ID NO: 963522 - DNA, 33 bp, Homo sapien
ttagcatgagctatactatcctgctatttaaag

SEQ ID NO: 963523 - DNA, 33 bp, Homo sapien
gttggtttcttgggaacgtaacacacctagagc

SEQ ID NO: 963524 - DNA, 33 bp, Homo sapien
gttggtttcttgggaaggtaacacacctagagc

SEQ ID NO: 963525 - DNA, 33 bp, Homo sapien
ttacccacatgatacccgccataagatggtttc

SEQ ID NO: 963526 - DNA, 33 bp, Homo sapien
ttacccacatgataccggccataagatggtttc

SEQ ID NO: 963527 - DNA, 33 bp, Homo sapien
ccaaacttgaatgttggagctcatggttcgtgt

SEQ ID NO: 963528 - DNA, 33 bp, Homo sapien
ccaaacttgaatgttgtagctcatggttcgtgt

SEQ ID NO: 963529 - DNA, 33 bp, Homo sapien
gataggtgctgatgaactggtcagtgataactt

SEQ ID NO: 963530 - DNA, 33 bp, Homo sapien
gataggtgctgatgaattggtcagtgataactt

SEQ ID NO: 963531 - DNA, 33 bp, Homo sapien
actctgaagttgaaaagtcatttatgttccgct

SEQ ID NO: 963532 - DNA, 33 bp, Homo sapien
actctgaagttgaaaattcatttatgttccgct

SEQ ID NO: 963533 - DNA, 33 bp, Homo sapien
gaggaggcttaatggaagtgtgtctggcgggca

SEQ ID NO: 963534 - DNA, 33 bp, Homo sapien
gaggaggcttaatggacgtgtgtctggcgggca

SEQ ID NO: 963535 - DNA, 33 bp, Homo sapien
tgcttactggggcccaggtattggcacatgccc

SEQ ID NO: 963536 - DNA, 33 bp, Homo sapien
tgcttactggggcccatgtattggcacatgccc

SEQ ID NO: 963537 - DNA, 33 bp, Homo sapien
taaataaaggaacaatgagtctgaaacagggaa

SEQ ID NO: 963538 - DNA, 33 bp, Homo sapien
taaataaaggaacaattagtctgaaacagggaa

SEQ ID NO: 963539 - DNA, 33 bp, Homo sapien
atgttaagtagtgacacagaaaatataaaaaag

SEQ ID NO: 963540 - DNA, 33 bp, Homo sapien
atgttaagtagtgacatagaaaatataaaaaag

SEQ ID NO: 963541 - DNA, 33 bp, Homo sapien
agacagtgtgaagacgcacagggagcctctatg

SEQ ID NO: 963542 - DNA, 33 bp, Homo sapien
agacagtgtgaagacgtacagggagcctctatg

SEQ ID NO: 963543 - DNA, 33 bp, Homo sapien
ggaatgcctgcagcgcactcttggcctaggacc

SEQ ID NO: 963544 - DNA, 33 bp, Homo sapien
ggaatgcctgcagcgctctcttggcctaggacc

SEQ ID NO: 963545 - DNA, 33 bp, Homo sapien
gttacggaggtcagagaaaaagtataagttaaa

SEQ ID NO: 963546 - DNA, 33 bp, Homo sapien
gttacggaggtcagaggaaaagtataagttaaa

SEQ ID NO: 963547 - DNA, 33 bp, Homo sapien
cctaatgaagagtcagaacttttactgtcaccc

SEQ ID NO: 963548 - DNA, 33 bp, Homo sapien
cctaatgaagagtcaggacttttactgtcaccc

SEQ ID NO: 963549 - DNA, 33 bp, Homo sapien
actacctattttgcccaaaagtgaggcacaaag

SEQ ID NO: 963550 - DNA, 33 bp, Homo sapien
actacctattttgcccgaaagtgaggcacaaag

SEQ ID NO: 963551 - DNA, 33 bp, Homo sapien
cttggggcagctactccgagcctttgttttctc

SEQ ID NO: 963552 - DNA, 33 bp, Homo sapien
cttggggcagctactctgagcctttgttttctc

SEQ ID NO: 963553 - DNA, 33 bp, Homo sapien
atgttcctctatgctacacctcacacaagagtt

SEQ ID NO: 963554 - DNA, 33 bp, Homo sapien
atgttcctctatgctagacctcacacaagagtt

SEQ ID NO: 963555 - DNA, 33 bp, Homo sapien
tttcaggaattcgtggaagagatggccagctga

SEQ ID NO: 963556 - DNA, 33 bp, Homo sapien
tttcaggaattcgtgggagagatggccagctga

SEQ ID NO: 963557 - DNA, 33 bp, Homo sapien
ctgctatgaacatggacgcacaaatatttcttt

SEQ ID NO: 963558 - DNA, 33 bp, Homo sapien
ctgctatgaacatggatgcacaaatatttcttt

SEQ ID NO: 963559 - DNA, 33 bp, Homo sapien
ttcctgtttatagaagaagcatgaagcctgttt

SEQ ID NO: 963560 - DNA, 33 bp, Homo sapien
ttcctgtttatagaagcagcatgaagcctgttt

SEQ ID NO: 963561 - DNA, 33 bp, Homo sapien
agaagagcagctcttcacaaaagagagacagac

SEQ ID NO: 963562 - DNA, 33 bp, Homo sapien
agaagagcagctcttcgcaaaagagagacagac

SEQ ID NO: 963563 - DNA, 33 bp, Homo sapien
aagtgtctttaagcaaacaaaaggtcccaataa

SEQ ID NO: 963564 - DNA, 33 bp, Homo sapien
aagtgtctttaagcaagcaaaaggtcccaataa

SEQ ID NO: 963565 - DNA, 33 bp, Homo sapien
ctgtacattgatctgaacttcattaaccttgct

SEQ ID NO: 963566 - DNA, 33 bp, Homo sapien
ctgtacattgatctgaccttcattaaccttgct

SEQ ID NO: 963567 - DNA, 33 bp, Homo sapien
ttaaaaggcactttgcaaaaaattacaaaaata

SEQ ID NO: 963568 - DNA, 33 bp, Homo sapien
ttaaaaggcactttgcgaaaaattacaaaaata

SEQ ID NO: 963569 - DNA, 33 bp, Homo sapien
cagggacaaaaacaagaccagtaagcctggaag

SEQ ID NO: 963570 - DNA, 33 bp, Homo sapien
cagggacaaaaacaaggccagtaagcctggaag

SEQ ID NO: 963571 - DNA, 33 bp, Homo sapien
ttccattttttaacacaagaacattcagatgtg

SEQ ID NO: 963572 - DNA, 33 bp, Homo sapien
ttccattttttaacactagaacattcagatgtg

SEQ ID NO: 963573 - DNA, 33 bp, Homo sapien
cagcacccaagtccatgagggcacaatccttcc

SEQ ID NO: 963574 - DNA, 33 bp, Homo sapien
cagcacccaagtccattagggcacaatccttcc

SEQ ID NO: 963575 - DNA, 33 bp, Homo sapien
aagcacccgctgtgcaccgttctcgcctgtgag

SEQ ID NO: 963576 - DNA, 33 bp, Homo sapien
aagcacccgctgtgcatcgttctcgcctgtgag

SEQ ID NO: 963577 - DNA, 33 bp, Homo sapien
gttctgtccttggtgacggtgcacttcctagct

SEQ ID NO: 963578 - DNA, 33 bp, Homo sapien
gttctgtccttggtgatggtgcacttcctagct

SEQ ID NO: 963579 - DNA, 33 bp, Homo sapien
gtgggtgaaagtacaaacatgaggatgttaaag

SEQ ID NO: 963580 - DNA, 33 bp, Homo sapien
gtgggtgaaagtacaaccatgaggatgttaaag

SEQ ID NO: 963581 - DNA, 33 bp, Homo sapien
atcaagtaataaataacgtgcaaccagctgccc

SEQ ID NO: 963582 - DNA, 33 bp, Homo sapien
atcaagtaataaataatgtgcaaccagctgccc

SEQ ID NO: 963583 - DNA, 33 bp, Homo sapien
aggggagttctcctacacaagcttttttgcctg

SEQ ID NO: 963584 - DNA, 33 bp, Homo sapien
aggggagttctcctactcaagcttttttgcctg

SEQ ID NO: 963585 - DNA, 33 bp, Homo sapien
gccaaattgtaaaaacagtcaatgctaggaaga

SEQ ID NO: 963586 - DNA, 33 bp, Homo sapien
gccaaattgtaaaaaccgtcaatgctaggaaga

SEQ ID NO: 963587 - DNA, 33 bp, Homo sapien
acatccataccagagaatactcagccataaaaa

SEQ ID NO: 963588 - DNA, 33 bp, Homo sapien
acatccataccagagactactcagccataaaaa

SEQ ID NO: 963589 - DNA, 33 bp, Homo sapien
gagagcaagatcaaatcagttacaaaaaaataa

SEQ ID NO: 963590 - DNA, 33 bp, Homo sapien
gagagcaagatcaaattagttacaaaaaaataa

SEQ ID NO: 963591 - DNA, 33 bp, Homo sapien
cattcatttcttcaacaagtatttagctcctac

SEQ ID NO: 963592 - DNA, 33 bp, Homo sapien
cattcatttcttcaacgagtatttagctcctac

SEQ ID NO: 963593 - DNA, 33 bp, Homo sapien
gtgggaggtaggcttccagctacttccaaccag

SEQ ID NO: 963594 - DNA, 33 bp, Homo sapien
gtgggaggtaggcttctagctacttccaaccag

SEQ ID NO: 963595 - DNA, 33 bp, Homo sapien
gagaacctgttgcagccacagaaatctgaatca

SEQ ID NO: 963596 - DNA, 33 bp, Homo sapien
gagaacctgttgcagctacagaaatctgaatca

SEQ ID NO: 963597 - DNA, 33 bp, Homo sapien
gaaaagtgctacatacaacagtaaccaaaacaa

SEQ ID NO: 963598 - DNA, 33 bp, Homo sapien
gaaaagtgctacatactacagtaaccaaaacaa

SEQ ID NO: 963599 - DNA, 33 bp, Homo sapien
gacttggattattaaaagtatgtgtttctccaa

SEQ ID NO: 963600 - DNA, 33 bp, Homo sapien
gacttggattattaaaggtatgtgtttctccaa

SEQ ID NO: 963601 - DNA, 33 bp, Homo sapien
gagagatgttcggcacaaaatcctggaggcttt

SEQ ID NO: 963602 - DNA, 33 bp, Homo sapien
gagagatgttcggcaccaaatcctggaggcttt

SEQ ID NO: 963603 - DNA, 33 bp, Homo sapien
ggccgggctgtgggaaactcttccgagcaaaca

SEQ ID NO: 963604 - DNA, 33 bp, Homo sapien
ggccgggctgtgggaacctcttccgagcaaaca

SEQ ID NO: 963605 - DNA, 33 bp, Homo sapien
aacgcctcaagcagaaacagagtctgtgaccga

SEQ ID NO: 963606 - DNA, 33 bp, Homo sapien
aacgcctcaagcagaagcagagtctgtgaccga

SEQ ID NO: 963607 - DNA, 33 bp, Homo sapien
gtttcctccttcagtacgtgagtagtatttcca

SEQ ID NO: 963608 - DNA, 33 bp, Homo sapien
gtttcctccttcagtatgtgagtagtatttcca

SEQ ID NO: 963609 - DNA, 33 bp, Homo sapien
ggacagaggttgtatacgtaaagaaaaggctca

SEQ ID NO: 963610 - DNA, 33 bp, Homo sapien
ggacagaggttgtatatgtaaagaaaaggctca

SEQ ID NO: 963611 - DNA, 33 bp, Homo sapien
caacctctgtccttacgcaccgtccacattctg

SEQ ID NO: 963612 - DNA, 33 bp, Homo sapien
caacctctgtccttactcaccgtccacattctg

SEQ ID NO: 963613 - DNA, 33 bp, Homo sapien
tctaccctcacctctacgtccagtctatcacta

SEQ ID NO: 963614 - DNA, 33 bp, Homo sapien
tctaccctcacctctatgtccagtctatcacta

SEQ ID NO: 963615 - DNA, 33 bp, Homo sapien
ccaggtgtccagccacccactttgtctcaggtg

SEQ ID NO: 963616 - DNA, 33 bp, Homo sapien
ccaggtgtccagccactcactttgtctcaggtg

SEQ ID NO: 963617 - DNA, 33 bp, Homo sapien
aagaacatgacccaaaataccagccataactac

SEQ ID NO: 963618 - DNA, 33 bp, Homo sapien
aagaacatgacccaaattaccagccataactac

SEQ ID NO: 963619 - DNA, 33 bp, Homo sapien
tatttggttctcttaaataatcaagaacattaa

SEQ ID NO: 963620 - DNA, 33 bp, Homo sapien
tatttggttctcttaagtaatcaagaacattaa

SEQ ID NO: 963621 - DNA, 33 bp, Homo sapien
gtacgggaaaagtagacgtcaatcaggtggaaa

SEQ ID NO: 963622 - DNA, 33 bp, Homo sapien
gtacgggaaaagtagatgtcaatcaggtggaaa

SEQ ID NO: 963623 - DNA, 33 bp, Homo sapien
tttcgggaagagacgggaaagggagattcagag

SEQ ID NO: 963624 - DNA, 33 bp, Homo sapien
tttcgggaagagacggtaaagggagattcagag

SEQ ID NO: 963625 - DNA, 33 bp, Homo sapien
atagcaaatgagttctaaagagactgtcttaaa

SEQ ID NO: 963626 - DNA, 33 bp, Homo sapien
atagcaaatgagttctgaagagactgtcttaaa

SEQ ID NO: 963627 - DNA, 33 bp, Homo sapien
acagtctgcattcccgaagaaagcccgcaccag

SEQ ID NO: 963628 - DNA, 33 bp, Homo sapien
acagtctgcattcccggagaaagcccgcaccag

SEQ ID NO: 963629 - DNA, 33 bp, Homo sapien
ctctgaggttggttctgaatgctcacaaagcta

SEQ ID NO: 963630 - DNA, 33 bp, Homo sapien
ctctgaggttggttcttaatgctcacaaagcta

SEQ ID NO: 963631 - DNA, 33 bp, Homo sapien
taacttcctgagaagaacataccagtattttag

SEQ ID NO: 963632 - DNA, 33 bp, Homo sapien
taacttcctgagaagagcataccagtattttag

SEQ ID NO: 963633 - DNA, 33 bp, Homo sapien
agaaccagagctgggaaaattaggagacagacc

SEQ ID NO: 963634 - DNA, 33 bp, Homo sapien
agaaccagagctgggagaattaggagacagacc

SEQ ID NO: 963635 - DNA, 33 bp, Homo sapien
agccttagggaacggacgtgccagccatggtgg

SEQ ID NO: 963636 - DNA, 33 bp, Homo sapien
agccttagggaacggatgtgccagccatggtgg

SEQ ID NO: 963637 - DNA, 33 bp, Homo sapien
agttatagacaggggcaacaggaaaacgcagga

SEQ ID NO: 963638 - DNA, 33 bp, Homo sapien
agttatagacaggggcgacaggaaaacgcagga

SEQ ID NO: 963639 - DNA, 33 bp, Homo sapien
tcccacagctgcctcactccatcggcccactcc

SEQ ID NO: 963640 - DNA, 33 bp, Homo sapien
tcccacagctgcctcattccatcggcccactcc

SEQ ID NO: 963641 - DNA, 33 bp, Homo sapien
acgtggtgtgcccaacaaggaaccacatggggc

SEQ ID NO: 963642 - DNA, 33 bp, Homo sapien
acgtggtgtgcccaaccaggaaccacatggggc

SEQ ID NO: 963643 - DNA, 33 bp, Homo sapien
atgcctcctatttttacgcgctggctgcaccca

SEQ ID NO: 963644 - DNA, 33 bp, Homo sapien
atgcctcctatttttatgcgctggctgcaccca

SEQ ID NO: 963645 - DNA, 33 bp, Homo sapien
tgtttatttctcagccactaatggattgtttga

SEQ ID NO: 963646 - DNA, 33 bp, Homo sapien
tgtttatttctcagccgctaatggattgtttga

SEQ ID NO: 963647 - DNA, 33 bp, Homo sapien
aagttggatttgtctgaaattgaccaagaacct

SEQ ID NO: 963648 - DNA, 33 bp, Homo sapien
aagttggatttgtctgtaattgaccaagaacct

SEQ ID NO: 963649 - DNA, 33 bp, Homo sapien
gtatcataagcacaaaattatgacttcacaaga

SEQ ID NO: 963650 - DNA, 33 bp, Homo sapien
gtatcataagcacaaacttatgacttcacaaga

SEQ ID NO: 963651 - DNA, 33 bp, Homo sapien
ttcccaaccctgctcagatgctatggaacttag

SEQ ID NO: 963652 - DNA, 33 bp, Homo sapien
ttcccaaccctgctcatatgctatggaacttag

SEQ ID NO: 963653 - DNA, 33 bp, Homo sapien
tgagcttaacacgcagaaggggtgcaacatttt

SEQ ID NO: 963654 - DNA, 33 bp, Homo sapien
tgagcttaacacgcagcaggggtgcaacatttt

SEQ ID NO: 963655 - DNA, 33 bp, Homo sapien
gtgccatggattctgacaaagcctccatctccc

SEQ ID NO: 963656 - DNA, 33 bp, Homo sapien
gtgccatggattctgagaaagcctccatctccc

SEQ ID NO: 963657 - DNA, 33 bp, Homo sapien
ttctcgccaaaatacaagcttgagctccaattg

SEQ ID NO: 963658 - DNA, 33 bp, Homo sapien
ttctcgccaaaatacaggcttgagctccaattg

SEQ ID NO: 963659 - DNA, 33 bp, Homo sapien
gaggtgagacgcaagcacagaggctttccagag

SEQ ID NO: 963660 - DNA, 33 bp, Homo sapien
gaggtgagacgcaagcgcagaggctttccagag

SEQ ID NO: 963661 - DNA, 33 bp, Homo sapien
ggcaagacgggggcaacgctctgagggcgatga

SEQ ID NO: 963662 - DNA, 33 bp, Homo sapien
ggcaagacgggggcaatgctctgagggcgatga

SEQ ID NO: 963663 - DNA, 33 bp, Homo sapien
cctaacaaattgccccaaaatgtgctggcttaa

SEQ ID NO: 963664 - DNA, 33 bp, Homo sapien
cctaacaaattgccccgaaatgtgctggcttaa

SEQ ID NO: 963665 - DNA, 33 bp, Homo sapien
tttttcatccaagacacacttacctattgctga

SEQ ID NO: 963666 - DNA, 33 bp, Homo sapien
tttttcatccaagacagacttacctattgctga

SEQ ID NO: 963667 - DNA, 33 bp, Homo sapien
agaatgccttccaatccctactttagaattttc

SEQ ID NO: 963668 - DNA, 33 bp, Homo sapien
agaatgccttccaatctctactttagaattttc

SEQ ID NO: 963669 - DNA, 33 bp, Homo sapien
cgatgttttagatagagaggaacttagaaaatt

SEQ ID NO: 963670 - DNA, 33 bp, Homo sapien
cgatgttttagatagataggaacttagaaaatt

SEQ ID NO: 963671 - DNA, 33 bp, Homo sapien
gcatggcacggactgacaggttacatgggaaac

SEQ ID NO: 963672 - DNA, 33 bp, Homo sapien
gcatggcacggactgataggttacatgggaaac

SEQ ID NO: 963673 - DNA, 33 bp, Homo sapien
gccctgtctcactagcagattgaccatgagtac

SEQ ID NO: 963674 - DNA, 33 bp, Homo sapien
gccctgtctcactagcggattgaccatgagtac

SEQ ID NO: 963675 - DNA, 33 bp, Homo sapien
aattttgcagaaagaaacattgcaggaagtttt

SEQ ID NO: 963676 - DNA, 33 bp, Homo sapien
aattttgcagaaagaatcattgcaggaagtttt

SEQ ID NO: 963677 - DNA, 33 bp, Homo sapien
ccagctttgccacttacggtttcacatgataag

SEQ ID NO: 963678 - DNA, 33 bp, Homo sapien
ccagctttgccacttatggtttcacatgataag

SEQ ID NO: 963679 - DNA, 33 bp, Homo sapien
tataaactagttgctaaagaatcactttcagaa

SEQ ID NO: 963680 - DNA, 33 bp, Homo sapien
tataaactagttgctacagaatcactttcagaa

SEQ ID NO: 963681 - DNA, 33 bp, Homo sapien
catgggaatgctgcaaagttaatggaagagagg

SEQ ID NO: 963682 - DNA, 33 bp, Homo sapien
catgggaatgctgcaaggttaatggaagagagg

SEQ ID NO: 963683 - DNA, 33 bp, Homo sapien
tttcttttatgaatcaacttgcagctctattag

SEQ ID NO: 963684 - DNA, 33 bp, Homo sapien
tttcttttatgaatcaccttgcagctctattag

SEQ ID NO: 963685 - DNA, 33 bp, Homo sapien
ctaagacctcttcccccacttctgatcgaatga

SEQ ID NO: 963686 - DNA, 33 bp, Homo sapien
ctaagacctcttcccctacttctgatcgaatga

SEQ ID NO: 963687 - DNA, 33 bp, Homo sapien
gttatctgaaatcaacgattcaaatatagacta

SEQ ID NO: 963688 - DNA, 33 bp, Homo sapien
gttatctgaaatcaactattcaaatatagacta

SEQ ID NO: 963689 - DNA, 33 bp, Homo sapien
ctggcaacacagtgcacgtcagtctattacaaa

SEQ ID NO: 963690 - DNA, 33 bp, Homo sapien
ctggcaacacagtgcatgtcagtctattacaaa

SEQ ID NO: 963691 - DNA, 33 bp, Homo sapien
gcccagaaagtactgcacctgatcagataagaa

SEQ ID NO: 963692 - DNA, 33 bp, Homo sapien
gcccagaaagtactgctcctgatcagataagaa

SEQ ID NO: 963693 - DNA, 33 bp, Homo sapien
gaaggcgcctcgggcgaagcgcagtagagccac

SEQ ID NO: 963694 - DNA, 33 bp, Homo sapien
gaaggcgcctcgggcggagcgcagtagagccac

SEQ ID NO: 963695 - DNA, 33 bp, Homo sapien
atccacagacccctctcaatcttctggttctag

SEQ ID NO: 963696 - DNA, 33 bp, Homo sapien
atccacagacccctcttaatcttctggttctag

SEQ ID NO: 963697 - DNA, 33 bp, Homo sapien
ttgcttctgcagccaaagtcagaggcgattctg

SEQ ID NO: 963698 - DNA, 33 bp, Homo sapien
ttgcttctgcagccaaggtcagaggcgattctg

SEQ ID NO: 963699 - DNA, 33 bp, Homo sapien
tggggatgtatggggaaatttctgagattctag

SEQ ID NO: 963700 - DNA, 33 bp, Homo sapien
tggggatgtatggggacatttctgagattctag

SEQ ID NO: 963701 - DNA, 33 bp, Homo sapien
gccactgactttgtgaccatagcagtgattgaa

SEQ ID NO: 963702 - DNA, 33 bp, Homo sapien
gccactgactttgtgatcatagcagtgattgaa

SEQ ID NO: 963703 - DNA, 33 bp, Homo sapien
cagaaaccagggttccccatttccaggcttttg

SEQ ID NO: 963704 - DNA, 33 bp, Homo sapien
cagaaaccagggttcctcatttccaggcttttg

SEQ ID NO: 963705 - DNA, 33 bp, Homo sapien
tggtgccagagtcatacagatatgtgtagagtg

SEQ ID NO: 963706 - DNA, 33 bp, Homo sapien
tggtgccagagtcatagagatatgtgtagagtg

SEQ ID NO: 963707 - DNA, 33 bp, Homo sapien
gtcccagataaggaacagggatccgatttattc

SEQ ID NO: 963708 - DNA, 33 bp, Homo sapien
gtcccagataaggaacggggatccgatttattc

SEQ ID NO: 963709 - DNA, 33 bp, Homo sapien
ggattttctttgacctaaaaaatccatgtaaac

SEQ ID NO: 963710 - DNA, 33 bp, Homo sapien
ggattttctttgacctcaaaaatccatgtaaac

SEQ ID NO: 963711 - DNA, 33 bp, Homo sapien
gctctaagagttttgaagttcgtgttagaaaac

SEQ ID NO: 963712 - DNA, 33 bp, Homo sapien
gctctaagagttttgaggttcgtgttagaaaac

SEQ ID NO: 963713 - DNA, 33 bp, Homo sapien
attatgtaaatgatacccagcagtgttatcaga

SEQ ID NO: 963714 - DNA, 33 bp, Homo sapien
attatgtaaatgatactcagcagtgttatcaga

SEQ ID NO: 963715 - DNA, 33 bp, Homo sapien
gcaatcatttcaacaaaaattttgagctgttta

SEQ ID NO: 963716 - DNA, 33 bp, Homo sapien
gcaatcatttcaacaacaattttgagctgttta

SEQ ID NO: 963717 - DNA, 33 bp, Homo sapien
caatttgatgtcttaaacctgcataaaccctgt

SEQ ID NO: 963718 - DNA, 33 bp, Homo sapien
caatttgatgtcttaagcctgcataaaccctgt

SEQ ID NO: 963719 - DNA, 33 bp, Homo sapien
aattttgctctttgtcacagaaaggtactggca

SEQ ID NO: 963720 - DNA, 33 bp, Homo sapien
aattttgctctttgtcgcagaaaggtactggca

SEQ ID NO: 963721 - DNA, 33 bp, Homo sapien
atcagcccaatcccacagtaatcctcattgcct

SEQ ID NO: 963722 - DNA, 33 bp, Homo sapien
atcagcccaatcccacggtaatcctcattgcct

SEQ ID NO: 963723 - DNA, 33 bp, Homo sapien
ttagtcacttatgggacggtttgcagagcaggt

SEQ ID NO: 963724 - DNA, 33 bp, Homo sapien
ttagtcacttatgggatggtttgcagagcaggt

SEQ ID NO: 963725 - DNA, 33 bp, Homo sapien
ctcattgtaaaaagaaatgtgatgaaggagaaa

SEQ ID NO: 963726 - DNA, 33 bp, Homo sapien
ctcattgtaaaaagaagtgtgatgaaggagaaa

SEQ ID NO: 963727 - DNA, 33 bp, Homo sapien
catgcacatgattccacgtcaaaagaacaagtt

SEQ ID NO: 963728 - DNA, 33 bp, Homo sapien
catgcacatgattccaggtcaaaagaacaagtt

SEQ ID NO: 963729 - DNA, 33 bp, Homo sapien
tatagaggaaatcttacgaaaggcttgaaaaga

SEQ ID NO: 963730 - DNA, 33 bp, Homo sapien
tatagaggaaatcttatgaaaggcttgaaaaga

SEQ ID NO: 963731 - DNA, 33 bp, Homo sapien
ggtccacaattgcgtccgacccaacactgcttt

SEQ ID NO: 963732 - DNA, 33 bp, Homo sapien
ggtccacaattgcgtctgacccaacactgcttt

SEQ ID NO: 963733 - DNA, 33 bp, Homo sapien
tggtattatatttcaacgacttttccagctgtt

SEQ ID NO: 963734 - DNA, 33 bp, Homo sapien
tggtattatatttcaatgacttttccagctgtt

SEQ ID NO: 963735 - DNA, 33 bp, Homo sapien
ttatccgcctatataactgaggtcctgtttcaa

SEQ ID NO: 963736 - DNA, 33 bp, Homo sapien
ttatccgcctatataattgaggtcctgtttcaa

SEQ ID NO: 963737 - DNA, 33 bp, Homo sapien
tgcaggacgtttgactcagaaacggatgcacag

SEQ ID NO: 963738 - DNA, 33 bp, Homo sapien
tgcaggacgtttgacttagaaacggatgcacag

SEQ ID NO: 963739 - DNA, 33 bp, Homo sapien
gccaatcaaactctaccatttcagtgatcatgt

SEQ ID NO: 963740 - DNA, 33 bp, Homo sapien
gccaatcaaactctactatttcagtgatcatgt

SEQ ID NO: 963741 - DNA, 33 bp, Homo sapien
caaagtgtggtagcataagaaccaaatactgct

SEQ ID NO: 963742 - DNA, 33 bp, Homo sapien
caaagtgtggtagcatgagaaccaaatactgct

SEQ ID NO: 963743 - DNA, 33 bp, Homo sapien
ttgacttatcattaccaagcaacacataaactt

SEQ ID NO: 963744 - DNA, 33 bp, Homo sapien
ttgacttatcattacccagcaacacataaactt

SEQ ID NO: 963745 - DNA, 33 bp, Homo sapien
acatgtgactactcacaatgtactgtcatgcta

SEQ ID NO: 963746 - DNA, 33 bp, Homo sapien
acatgtgactactcactatgtactgtcatgcta

SEQ ID NO: 963747 - DNA, 33 bp, Homo sapien
tcccaagtgagtagacaatggggtgcaccaaac

SEQ ID NO: 963748 - DNA, 33 bp, Homo sapien
tcccaagtgagtagacgatggggtgcaccaaac

SEQ ID NO: 963749 - DNA, 33 bp, Homo sapien
catctttacttgtgcacagatttaagtcacagt

SEQ ID NO: 963750 - DNA, 33 bp, Homo sapien
catctttacttgtgcagagatttaagtcacagt

SEQ ID NO: 963751 - DNA, 33 bp, Homo sapien
gctttcaatccatacccactaacactcagaaga

SEQ ID NO: 963752 - DNA, 33 bp, Homo sapien
gctttcaatccatacctactaacactcagaaga

SEQ ID NO: 963753 - DNA, 33 bp, Homo sapien
gtctggccaagtgccaaaacggaaaagttgcca

SEQ ID NO: 963754 - DNA, 33 bp, Homo sapien
gtctggccaagtgccacaacggaaaagttgcca

SEQ ID NO: 963755 - DNA, 33 bp, Homo sapien
tctcttctgaatgtgacactactatcttgagta

SEQ ID NO: 963756 - DNA, 33 bp, Homo sapien
tctcttctgaatgtgatactactatcttgagta

SEQ ID NO: 963757 - DNA, 33 bp, Homo sapien
gggggattaaaacaaagttatacagcatagggc

SEQ ID NO: 963758 - DNA, 33 bp, Homo sapien
gggggattaaaacaaatttatacagcatagggc

SEQ ID NO: 963759 - DNA, 33 bp, Homo sapien
ataagattttcagttcaaggacctaggttgtgt

SEQ ID NO: 963760 - DNA, 33 bp, Homo sapien
ataagattttcagttcgaggacctaggttgtgt

SEQ ID NO: 963761 - DNA, 33 bp, Homo sapien
agacattatagatttgcatagctctggaaaggg

SEQ ID NO: 963762 - DNA, 33 bp, Homo sapien
agacattatagatttgtatagctctggaaaggg

SEQ ID NO: 963763 - DNA, 33 bp, Homo sapien
agacaatgaggtgcacagagttaagtaggagca

SEQ ID NO: 963764 - DNA, 33 bp, Homo sapien
agacaatgaggtgcacggagttaagtaggagca

SEQ ID NO: 963765 - DNA, 33 bp, Homo sapien
agaagcgcacacttagaaggaactagtgctatt

SEQ ID NO: 963766 - DNA, 33 bp, Homo sapien
agaagcgcacacttagtaggaactagtgctatt

SEQ ID NO: 963767 - DNA, 33 bp, Homo sapien
gacaggagcagcccacaagtcatatggccttag

SEQ ID NO: 963768 - DNA, 33 bp, Homo sapien
gacaggagcagcccacgagtcatatggccttag

SEQ ID NO: 963769 - DNA, 33 bp, Homo sapien
caaatgcaataaacacacattcttatccacact

SEQ ID NO: 963770 - DNA, 33 bp, Homo sapien
caaatgcaataaacacgcattcttatccacact

SEQ ID NO: 963771 - DNA, 33 bp, Homo sapien
gtaggagataatgttacggatgtagaataagat

SEQ ID NO: 963772 - DNA, 33 bp, Homo sapien
gtaggagataatgttatggatgtagaataagat

SEQ ID NO: 963773 - DNA, 33 bp, Homo sapien
cgaaacagcgacttaacgattcgtacatttttt

SEQ ID NO: 963774 - DNA, 33 bp, Homo sapien
cgaaacagcgacttaatgattcgtacatttttt

SEQ ID NO: 963775 - DNA, 33 bp, Homo sapien
ggattatttcctgtgacgtttttctacctggac

SEQ ID NO: 963776 - DNA, 33 bp, Homo sapien
ggattatttcctgtgatgtttttctacctggac

SEQ ID NO: 963777 - DNA, 33 bp, Homo sapien
ggggtgagtcattaaccgcggtcctggtgctgg

SEQ ID NO: 963778 - DNA, 33 bp, Homo sapien
ggggtgagtcattaactgcggtcctggtgctgg

SEQ ID NO: 963779 - DNA, 33 bp, Homo sapien
aggtagattctacaaacaagcgaaggtgatcag

SEQ ID NO: 963780 - DNA, 33 bp, Homo sapien
aggtagattctacaaagaagcgaaggtgatcag

SEQ ID NO: 963781 - DNA, 33 bp, Homo sapien
tccccacgataaaagcacacacaaacagcaggt

SEQ ID NO: 963782 - DNA, 33 bp, Homo sapien
tccccacgataaaagcgcacacaaacagcaggt

SEQ ID NO: 963783 - DNA, 33 bp, Homo sapien
gctgctacaatgtagacggttgccaatgccaga

SEQ ID NO: 963784 - DNA, 33 bp, Homo sapien
gctgctacaatgtagagggttgccaatgccaga

SEQ ID NO: 963785 - DNA, 33 bp, Homo sapien
tgtaaattcatgtccaacattctcaattgtaaa

SEQ ID NO: 963786 - DNA, 33 bp, Homo sapien
tgtaaattcatgtccagcattctcaattgtaaa

SEQ ID NO: 963787 - DNA, 33 bp, Homo sapien
actgcataggtaaacacaaaaggcagcattatt

SEQ ID NO: 963788 - DNA, 33 bp, Homo sapien
actgcataggtaaacataaaaggcagcattatt

SEQ ID NO: 963789 - DNA, 33 bp, Homo sapien
tcactcttattctgcaccttatacaggcagatg

SEQ ID NO: 963790 - DNA, 33 bp, Homo sapien
tcactcttattctgcatcttatacaggcagatg

SEQ ID NO: 963791 - DNA, 33 bp, Homo sapien
tcattagtttagaagtaaccttagctgaagttt

SEQ ID NO: 963792 - DNA, 33 bp, Homo sapien
tcattagtttagaagttaccttagctgaagttt

SEQ ID NO: 963793 - DNA, 33 bp, Homo sapien
aggataagatgcatagacaagttaatgaacact

SEQ ID NO: 963794 - DNA, 33 bp, Homo sapien
aggataagatgcatagtcaagttaatgaacact

SEQ ID NO: 963795 - DNA, 33 bp, Homo sapien
tttcccatcctgaagcacagcctggttctgtag

SEQ ID NO: 963796 - DNA, 33 bp, Homo sapien
tttcccatcctgaagcgcagcctggttctgtag

SEQ ID NO: 963797 - DNA, 33 bp, Homo sapien
atgagttggggcatgacagtagaaagaagagag

SEQ ID NO: 963798 - DNA, 33 bp, Homo sapien
atgagttggggcatgatagtagaaagaagagag

SEQ ID NO: 963799 - DNA, 33 bp, Homo sapien
agggaactggccattacgaccagtggatagagt

SEQ ID NO: 963800 - DNA, 33 bp, Homo sapien
agggaactggccattatgaccagtggatagagt

SEQ ID NO: 963801 - DNA, 33 bp, Homo sapien
tgccactccctattgaagtccgagttgatttta

SEQ ID NO: 963802 - DNA, 33 bp, Homo sapien
tgccactccctattgacgtccgagttgatttta

SEQ ID NO: 963803 - DNA, 33 bp, Homo sapien
gaaagctattctcacaatgtagcttcttccaag

SEQ ID NO: 963804 - DNA, 33 bp, Homo sapien
gaaagctattctcacagtgtagcttcttccaag

SEQ ID NO: 963805 - DNA, 33 bp, Homo sapien
acattagatctctagaagtattcatcccacata

SEQ ID NO: 963806 - DNA, 33 bp, Homo sapien
acattagatctctagacgtattcatcccacata

SEQ ID NO: 963807 - DNA, 33 bp, Homo sapien
ctccaccctatctcatcactctcccacaaaaca

SEQ ID NO: 963808 - DNA, 33 bp, Homo sapien
ctccaccctatctcatgactctcccacaaaaca

SEQ ID NO: 963809 - DNA, 33 bp, Homo sapien
atgaatacaggagataagtacatgaaggtgctc

SEQ ID NO: 963810 - DNA, 33 bp, Homo sapien
atgaatacaggagatacgtacatgaaggtgctc

SEQ ID NO: 963811 - DNA, 33 bp, Homo sapien
gcacaactttactgacacaaaaaagtgaaaaga

SEQ ID NO: 963812 - DNA, 33 bp, Homo sapien
gcacaactttactgacgcaaaaaagtgaaaaga

SEQ ID NO: 963813 - DNA, 33 bp, Homo sapien
gattgtactttgattacgtgcaggaatttagct

SEQ ID NO: 963814 - DNA, 33 bp, Homo sapien
gattgtactttgattatgtgcaggaatttagct

SEQ ID NO: 963815 - DNA, 33 bp, Homo sapien
gttgctgaattctaggcaaatatggcatgtcat

SEQ ID NO: 963816 - DNA, 33 bp, Homo sapien
gttgctgaattctaggtaaatatggcatgtcat

SEQ ID NO: 963817 - DNA, 33 bp, Homo sapien
cagaagttcccaatgacgtaattatgtcatacg

SEQ ID NO: 963818 - DNA, 33 bp, Homo sapien
cagaagttcccaatgatgtaattatgtcatacg

SEQ ID NO: 963819 - DNA, 33 bp, Homo sapien
cggacagaatcatgaaagcatcaagagaaaagt

SEQ ID NO: 963820 - DNA, 33 bp, Homo sapien
cggacagaatcatgaaggcatcaagagaaaagt

SEQ ID NO: 963821 - DNA, 33 bp, Homo sapien
ctaggacttgaaggtggataggatttgaacaat

SEQ ID NO: 963822 - DNA, 33 bp, Homo sapien
ctaggacttgaaggtgtataggatttgaacaat

SEQ ID NO: 963823 - DNA, 33 bp, Homo sapien
acatgctcaggaataaagtcatgctctatttcc

SEQ ID NO: 963824 - DNA, 33 bp, Homo sapien
acatgctcaggaataaggtcatgctctatttcc

SEQ ID NO: 963825 - DNA, 33 bp, Homo sapien
tttctggctagcaaaaccaaatagatgcaatta

SEQ ID NO: 963826 - DNA, 33 bp, Homo sapien
tttctggctagcaaaatcaaatagatgcaatta

SEQ ID NO: 963827 - DNA, 33 bp, Homo sapien
tgaccaagggaagacacaaatggctatttaaat

SEQ ID NO: 963828 - DNA, 33 bp, Homo sapien
tgaccaagggaagacagaaatggctatttaaat

SEQ ID NO: 963829 - DNA, 33 bp, Homo sapien
gagactctagttctaacgttttacctctaggat

SEQ ID NO: 963830 - DNA, 33 bp, Homo sapien
gagactctagttctaatgttttacctctaggat

SEQ ID NO: 963831 - DNA, 33 bp, Homo sapien
tattttcagaaagagccgaattatcctagaggt

SEQ ID NO: 963832 - DNA, 33 bp, Homo sapien
tattttcagaaagagctgaattatcctagaggt

SEQ ID NO: 963833 - DNA, 33 bp, Homo sapien
tagacaggaagttccaaaggtctacagctcaaa

SEQ ID NO: 963834 - DNA, 33 bp, Homo sapien
tagacaggaagttccagaggtctacagctcaaa

SEQ ID NO: 963835 - DNA, 33 bp, Homo sapien
tactctagtcatattaccccttctccatcaccc

SEQ ID NO: 963836 - DNA, 33 bp, Homo sapien
tactctagtcatattatcccttctccatcaccc

SEQ ID NO: 963837 - DNA, 33 bp, Homo sapien
cagacttccagtactacgtttaataacagtggt

SEQ ID NO: 963838 - DNA, 33 bp, Homo sapien
cagacttccagtactaggtttaataacagtggt

SEQ ID NO: 963839 - DNA, 33 bp, Homo sapien
caagaaacagccaatactaacatcattctccaa

SEQ ID NO: 963840 - DNA, 33 bp, Homo sapien
caagaaacagccaatattaacatcattctccaa

SEQ ID NO: 963841 - DNA, 33 bp, Homo sapien
ctcctttgaagtacccgcatcaaagtgtgtgtg

SEQ ID NO: 963842 - DNA, 33 bp, Homo sapien
ctcctttgaagtaccctcatcaaagtgtgtgtg

SEQ ID NO: 963843 - DNA, 33 bp, Homo sapien
gatgatagatagatagaacaaatctcccaatgt

SEQ ID NO: 963844 - DNA, 33 bp, Homo sapien
gatgatagatagataggacaaatctcccaatgt

SEQ ID NO: 963845 - DNA, 33 bp, Homo sapien
taaaacctaaacaaaaatggcataacaaaaata

SEQ ID NO: 963846 - DNA, 33 bp, Homo sapien
taaaacctaaacaaaagtggcataacaaaaata

SEQ ID NO: 963847 - DNA, 33 bp, Homo sapien
ccttagatgaagactaaacttctgcatttgaga

SEQ ID NO: 963848 - DNA, 33 bp, Homo sapien
ccttagatgaagactatacttctgcatttgaga

SEQ ID NO: 963849 - DNA, 33 bp, Homo sapien
aaaccacttcatgtgcaattagaaactaggggg

SEQ ID NO: 963850 - DNA, 33 bp, Homo sapien
aaaccacttcatgtgcgattagaaactaggggg

SEQ ID NO: 963851 - DNA, 33 bp, Homo sapien
tcagcagcttgtcttacactctttcctcagaaa

SEQ ID NO: 963852 - DNA, 33 bp, Homo sapien
tcagcagcttgtcttatactctttcctcagaaa

SEQ ID NO: 963853 - DNA, 33 bp, Homo sapien
atgctgcaaatttagaacaagaattcaggaaat

SEQ ID NO: 963854 - DNA, 33 bp, Homo sapien
atgctgcaaatttagagcaagaattcaggaaat

SEQ ID NO: 963855 - DNA, 33 bp, Homo sapien
caagaatttaccacttcaagctcaaaaacctaa

SEQ ID NO: 963856 - DNA, 33 bp, Homo sapien
caagaatttaccactttaagctcaaaaacctaa

SEQ ID NO: 963857 - DNA, 33 bp, Homo sapien
tccacataggaccagaccaagctcttgtagccc

SEQ ID NO: 963858 - DNA, 33 bp, Homo sapien
tccacataggaccagatcaagctcttgtagccc

SEQ ID NO: 963859 - DNA, 33 bp, Homo sapien
ttgcttttattctgaaatgtttttatacttatt

SEQ ID NO: 963860 - DNA, 33 bp, Homo sapien
ttgcttttattctgaagtgtttttatacttatt

SEQ ID NO: 963861 - DNA, 33 bp, Homo sapien
tttggaatgaaaacccagcagctatttgcaggc

SEQ ID NO: 963862 - DNA, 33 bp, Homo sapien
tttggaatgaaaacccggcagctatttgcaggc

SEQ ID NO: 963863 - DNA, 33 bp, Homo sapien
gagttgccccttgatacagcatatgatctccaa

SEQ ID NO: 963864 - DNA, 33 bp, Homo sapien
gagttgccccttgatatagcatatgatctccaa

SEQ ID NO: 963865 - DNA, 33 bp, Homo sapien
atgtctatatcaaagcaatagctagaggaagaa

SEQ ID NO: 963866 - DNA, 33 bp, Homo sapien
atgtctatatcaaagcgatagctagaggaagaa

SEQ ID NO: 963867 - DNA, 33 bp, Homo sapien
tcccactatatggaagacagccttgctagaggg

SEQ ID NO: 963868 - DNA, 33 bp, Homo sapien
tcccactatatggaaggcagccttgctagaggg

SEQ ID NO: 963869 - DNA, 33 bp, Homo sapien
tcaaagaagcatcctccgaagtggggcatcact

SEQ ID NO: 963870 - DNA, 33 bp, Homo sapien
tcaaagaagcatcctctgaagtggggcatcact

SEQ ID NO: 963871 - DNA, 33 bp, Homo sapien
tccatggccaaaatgtaaagcactgatagagag

SEQ ID NO: 963872 - DNA, 33 bp, Homo sapien
tccatggccaaaatgtgaagcactgatagagag

SEQ ID NO: 963873 - DNA, 33 bp, Homo sapien
aaagatgcaaagagcaactgaacataaggaggg

SEQ ID NO: 963874 - DNA, 33 bp, Homo sapien
aaagatgcaaagagcagctgaacataaggaggg

SEQ ID NO: 963875 - DNA, 33 bp, Homo sapien
atccacatcttgctcacggttagtgcctggaca

SEQ ID NO: 963876 - DNA, 33 bp, Homo sapien
atccacatcttgctcatggttagtgcctggaca

SEQ ID NO: 963877 - DNA, 33 bp, Homo sapien
ctttggtggacctccactgataacaaaataaac

SEQ ID NO: 963878 - DNA, 33 bp, Homo sapien
ctttggtggacctccattgataacaaaataaac

SEQ ID NO: 963879 - DNA, 33 bp, Homo sapien
ggatactttgccttgacctggtttcagacacac

SEQ ID NO: 963880 - DNA, 33 bp, Homo sapien
ggatactttgccttgatctggtttcagacacac

SEQ ID NO: 963881 - DNA, 33 bp, Homo sapien
acaaatcacctgaatacgatcctgtcttccacc

SEQ ID NO: 963882 - DNA, 33 bp, Homo sapien
acaaatcacctgaatatgatcctgtcttccacc

SEQ ID NO: 963883 - DNA, 33 bp, Homo sapien
ctttgtatttttcacacactttgtcctttatga

SEQ ID NO: 963884 - DNA, 33 bp, Homo sapien
ctttgtatttttcacagactttgtcctttatga

SEQ ID NO: 963885 - DNA, 33 bp, Homo sapien
ttgctttctcctactacaggctagttttctttc

SEQ ID NO: 963886 - DNA, 33 bp, Homo sapien
ttgctttctcctactataggctagttttctttc

SEQ ID NO: 963887 - DNA, 33 bp, Homo sapien
tttatgagctgtttagaaaaaagtagtgaaaac

SEQ ID NO: 963888 - DNA, 33 bp, Homo sapien
tttatgagctgtttaggaaaaagtagtgaaaac

SEQ ID NO: 963889 - DNA, 33 bp, Homo sapien
agagtaggatgctatagccaaagaaggcctcca

SEQ ID NO: 963890 - DNA, 33 bp, Homo sapien
agagtaggatgctatatccaaagaaggcctcca

SEQ ID NO: 963891 - DNA, 33 bp, Homo sapien
cagctatatccagtccgacaatgtttgtcttta

SEQ ID NO: 963892 - DNA, 33 bp, Homo sapien
cagctatatccagtcctacaatgtttgtcttta

SEQ ID NO: 963893 - DNA, 33 bp, Homo sapien
tgattaatccataaaaaacaataacagagtgga

SEQ ID NO: 963894 - DNA, 33 bp, Homo sapien
tgattaatccataaaagacaataacagagtgga

SEQ ID NO: 963895 - DNA, 33 bp, Homo sapien
ctaaaactgttaggaaaaagtctagtagaaaag

SEQ ID NO: 963896 - DNA, 33 bp, Homo sapien
ctaaaactgttaggaagaagtctagtagaaaag

SEQ ID NO: 963897 - DNA, 33 bp, Homo sapien
agagtggtggttaccaagagctacaaggtgagg

SEQ ID NO: 963898 - DNA, 33 bp, Homo sapien
agagtggtggttaccaggagctacaaggtgagg

SEQ ID NO: 963899 - DNA, 33 bp, Homo sapien
tggcctttaaatagtaacagaagcaaactttac

SEQ ID NO: 963900 - DNA, 33 bp, Homo sapien
tggcctttaaatagtatcagaagcaaactttac

SEQ ID NO: 963901 - DNA, 33 bp, Homo sapien
tgcttttcataatacacctcagtacttcatctg

SEQ ID NO: 963902 - DNA, 33 bp, Homo sapien
tgcttttcataatacatctcagtacttcatctg

SEQ ID NO: 963903 - DNA, 33 bp, Homo sapien
cacacagagatgattacagtcgcaaggtgtttt

SEQ ID NO: 963904 - DNA, 33 bp, Homo sapien
cacacagagatgattagagtcgcaaggtgtttt

SEQ ID NO: 963905 - DNA, 33 bp, Homo sapien
ctactacattcagttaacactccttcaaataaa

SEQ ID NO: 963906 - DNA, 33 bp, Homo sapien
ctactacattcagttagcactccttcaaataaa

SEQ ID NO: 963907 - DNA, 33 bp, Homo sapien
gagcaacttcaatgaaatacgttacaatatgat

SEQ ID NO: 963908 - DNA, 33 bp, Homo sapien
gagcaacttcaatgaactacgttacaatatgat

SEQ ID NO: 963909 - DNA, 33 bp, Homo sapien
agtgccacaggaaagaatcagacaagtatcata

SEQ ID NO: 963910 - DNA, 33 bp, Homo sapien
agtgccacaggaaagagtcagacaagtatcata

SEQ ID NO: 963911 - DNA, 33 bp, Homo sapien
gcagcatattaaaaaaacttatccaccacaatc

SEQ ID NO: 963912 - DNA, 33 bp, Homo sapien
gcagcatattaaaaaatcttatccaccacaatc

SEQ ID NO: 963913 - DNA, 33 bp, Homo sapien
ttcttcaaactaaacaacaataacgacacaacc

SEQ ID NO: 963914 - DNA, 33 bp, Homo sapien
ttcttcaaactaaacagcaataacgacacaacc

SEQ ID NO: 963915 - DNA, 33 bp, Homo sapien
catttatctctcacttaaagcactcactgtaat

SEQ ID NO: 963916 - DNA, 33 bp, Homo sapien
catttatctctcacttgaagcactcactgtaat

SEQ ID NO: 963917 - DNA, 33 bp, Homo sapien
tgcattaggaaaacaagttaactacagaacaca

SEQ ID NO: 963918 - DNA, 33 bp, Homo sapien
tgcattaggaaaacaatttaactacagaacaca

SEQ ID NO: 963919 - DNA, 33 bp, Homo sapien
gttgagaaagaatatcacaagctcttttcaata

SEQ ID NO: 963920 - DNA, 33 bp, Homo sapien
gttgagaaagaatatcgcaagctcttttcaata

SEQ ID NO: 963921 - DNA, 33 bp, Homo sapien
tatgtacaaagcaggaagaccataattatctct

SEQ ID NO: 963922 - DNA, 33 bp, Homo sapien
tatgtacaaagcaggaggaccataattatctct

SEQ ID NO: 963923 - DNA, 33 bp, Homo sapien
gcctgggtgacaggacaagatacaataaaaaaa

SEQ ID NO: 963924 - DNA, 33 bp, Homo sapien
gcctgggtgacaggacgagatacaataaaaaaa

SEQ ID NO: 963925 - DNA, 33 bp, Homo sapien
tacaaaactggaacccaccatctggtaactgag

SEQ ID NO: 963926 - DNA, 33 bp, Homo sapien
tacaaaactggaaccctccatctggtaactgag

SEQ ID NO: 963927 - DNA, 33 bp, Homo sapien
agtaaatgtgttatgacatacaaagcactgaaa

SEQ ID NO: 963928 - DNA, 33 bp, Homo sapien
agtaaatgtgttatgatatacaaagcactgaaa

SEQ ID NO: 963929 - DNA, 33 bp, Homo sapien
cctagcctattatttcccttttgacacacagat

SEQ ID NO: 963930 - DNA, 33 bp, Homo sapien
cctagcctattatttctcttttgacacacagat

SEQ ID NO: 963931 - DNA, 33 bp, Homo sapien
gaagcctacagtttagacatggcaaggaaagag

SEQ ID NO: 963932 - DNA, 33 bp, Homo sapien
gaagcctacagtttaggcatggcaaggaaagag

SEQ ID NO: 963933 - DNA, 33 bp, Homo sapien
tactcttaagatgtgaaattatccaaaatatat

SEQ ID NO: 963934 - DNA, 33 bp, Homo sapien
tactcttaagatgtgacattatccaaaatatat

SEQ ID NO: 963935 - DNA, 33 bp, Homo sapien
ggcatcacaagtcagaaggaatcttgtgcaaag

SEQ ID NO: 963936 - DNA, 33 bp, Homo sapien
ggcatcacaagtcagacggaatcttgtgcaaag

SEQ ID NO: 963937 - DNA, 33 bp, Homo sapien
tcacaagtctcctgtgaatgaaaaagtacttta

SEQ ID NO: 963938 - DNA, 33 bp, Homo sapien
tcacaagtctcctgtgtatgaaaaagtacttta

SEQ ID NO: 963939 - DNA, 33 bp, Homo sapien
aaaatggattgtagacaaaatcataatgctatc

SEQ ID NO: 963940 - DNA, 33 bp, Homo sapien
aaaatggattgtagaccaaatcataatgctatc

SEQ ID NO: 963941 - DNA, 33 bp, Homo sapien
aacaagggtcaatggaagaaagagcagcctttt

SEQ ID NO: 963942 - DNA, 33 bp, Homo sapien
aacaagggtcaatggaggaaagagcagcctttt

SEQ ID NO: 963943 - DNA, 33 bp, Homo sapien
ccttggcactccaatacgtctatttacagtagg

SEQ ID NO: 963944 - DNA, 33 bp, Homo sapien
ccttggcactccaatatgtctatttacagtagg

SEQ ID NO: 963945 - DNA, 33 bp, Homo sapien
gacaagaggtgtaataagagtgctgaggtctac

SEQ ID NO: 963946 - DNA, 33 bp, Homo sapien
gacaagaggtgtaataggagtgctgaggtctac

SEQ ID NO: 963947 - DNA, 33 bp, Homo sapien
ctccaaagaagagcgacgcagagagacaagata

SEQ ID NO: 963948 - DNA, 33 bp, Homo sapien
ctccaaagaagagcgatgcagagagacaagata

SEQ ID NO: 963949 - DNA, 33 bp, Homo sapien
tcaaactcctcgaaaactttattatcctgagca

SEQ ID NO: 963950 - DNA, 33 bp, Homo sapien
tcaaactcctcgaaaattttattatcctgagca

SEQ ID NO: 963951 - DNA, 33 bp, Homo sapien
ccatgttgttttccatcactaacacttctaaat

SEQ ID NO: 963952 - DNA, 33 bp, Homo sapien
ccatgttgttttccatgactaacacttctaaat

SEQ ID NO: 963953 - DNA, 33 bp, Homo sapien
gactgaagaactgtcacggaatgggagagactg

SEQ ID NO: 963954 - DNA, 33 bp, Homo sapien
gactgaagaactgtcatggaatgggagagactg

SEQ ID NO: 963955 - DNA, 33 bp, Homo sapien
tcactaaaaggagaaactgtatgagagtctccg

SEQ ID NO: 963956 - DNA, 33 bp, Homo sapien
tcactaaaaggagaaattgtatgagagtctccg

SEQ ID NO: 963957 - DNA, 33 bp, Homo sapien
tcagatggagtcattcaagtaacagatttaaaa

SEQ ID NO: 963958 - DNA, 33 bp, Homo sapien
tcagatggagtcattcgagtaacagatttaaaa

SEQ ID NO: 963959 - DNA, 33 bp, Homo sapien
ttctataccttgtttacggttgtatcaaatgta

SEQ ID NO: 963960 - DNA, 33 bp, Homo sapien
ttctataccttgtttatggttgtatcaaatgta

SEQ ID NO: 963961 - DNA, 33 bp, Homo sapien
gtcagtacatctcacacgttttattcaaggtgc

SEQ ID NO: 963962 - DNA, 33 bp, Homo sapien
gtcagtacatctcacatgttttattcaaggtgc

SEQ ID NO: 963963 - DNA, 33 bp, Homo sapien
cagaaggcttcagagacgtggcatgtaagataa

SEQ ID NO: 963964 - DNA, 33 bp, Homo sapien
cagaaggcttcagagatgtggcatgtaagataa

SEQ ID NO: 963965 - DNA, 33 bp, Homo sapien
tgacggagtttttacaataaagccaggaagtca

SEQ ID NO: 963966 - DNA, 33 bp, Homo sapien
tgacggagtttttacagtaaagccaggaagtca

SEQ ID NO: 963967 - DNA, 33 bp, Homo sapien
caattgcttgcttcaaaagatttgaaatatgaa

SEQ ID NO: 963968 - DNA, 33 bp, Homo sapien
caattgcttgcttcaatagatttgaaatatgaa

SEQ ID NO: 963969 - DNA, 33 bp, Homo sapien
agactgactactcccaggttttaaattagaatt

SEQ ID NO: 963970 - DNA, 33 bp, Homo sapien
agactgactactcccatgttttaaattagaatt

SEQ ID NO: 963971 - DNA, 33 bp, Homo sapien
actaaaaattctgatgaatgaatgtgtttctct

SEQ ID NO: 963972 - DNA, 33 bp, Homo sapien
actaaaaattctgatgcatgaatgtgtttctct

SEQ ID NO: 963973 - DNA, 33 bp, Homo sapien
gggtgagtcgattgtcccatcctagccttctca

SEQ ID NO: 963974 - DNA, 33 bp, Homo sapien
gggtgagtcgattgtcgcatcctagccttctca

SEQ ID NO: 963975 - DNA, 33 bp, Homo sapien
ggctgtaactcaccttcaacctcattatctgta

SEQ ID NO: 963976 - DNA, 33 bp, Homo sapien
ggctgtaactcacctttaacctcattatctgta

SEQ ID NO: 963977 - DNA, 33 bp, Homo sapien
gtttcttcacttgtagaatggggaagtaatagt

SEQ ID NO: 963978 - DNA, 33 bp, Homo sapien
gtttcttcacttgtagcatggggaagtaatagt

SEQ ID NO: 963979 - DNA, 33 bp, Homo sapien
gaggcaagaatcttcacatggttaaagctcacc

SEQ ID NO: 963980 - DNA, 33 bp, Homo sapien
gaggcaagaatcttcatatggttaaagctcacc

SEQ ID NO: 963981 - DNA, 33 bp, Homo sapien
caaaatcacactgttgcaaggccagcatctggg

SEQ ID NO: 963982 - DNA, 33 bp, Homo sapien
caaaatcacactgttgtaaggccagcatctggg

SEQ ID NO: 963983 - DNA, 33 bp, Homo sapien
tgaaactttaaaacaaggagacgtatcctgata

SEQ ID NO: 963984 - DNA, 33 bp, Homo sapien
tgaaactttaaaacaatgagacgtatcctgata

SEQ ID NO: 963985 - DNA, 33 bp, Homo sapien
ttgctcacaaagcctaccttgttcttttcatct

SEQ ID NO: 963986 - DNA, 33 bp, Homo sapien
ttgctcacaaagcctatcttgttcttttcatct

SEQ ID NO: 963987 - DNA, 33 bp, Homo sapien
agcagctcctgagtcaaaggtagtttactctca

SEQ ID NO: 963988 - DNA, 33 bp, Homo sapien
agcagctcctgagtcacaggtagtttactctca

SEQ ID NO: 963989 - DNA, 33 bp, Homo sapien
catgccatttctagagcaatccttgttttttat

SEQ ID NO: 963990 - DNA, 33 bp, Homo sapien
catgccatttctagagtaatccttgttttttat

SEQ ID NO: 963991 - DNA, 33 bp, Homo sapien
gaatgagaaaggcacacagttgttgagtatcac

SEQ ID NO: 963992 - DNA, 33 bp, Homo sapien
gaatgagaaaggcacatagttgttgagtatcac

SEQ ID NO: 963993 - DNA, 33 bp, Homo sapien
ttaatctttaagcagaatagaaggagactcaat

SEQ ID NO: 963994 - DNA, 33 bp, Homo sapien
ttaatctttaagcagagtagaaggagactcaat

SEQ ID NO: 963995 - DNA, 33 bp, Homo sapien
tgaaccccaaaagtatcagaagacaagaagtaa

SEQ ID NO: 963996 - DNA, 33 bp, Homo sapien
tgaaccccaaaagtattagaagacaagaagtaa

SEQ ID NO: 963997 - DNA, 33 bp, Homo sapien
aaattttaaagacctacaattcagcctggcaat

SEQ ID NO: 963998 - DNA, 33 bp, Homo sapien
aaattttaaagacctataattcagcctggcaat

SEQ ID NO: 963999 - DNA, 33 bp, Homo sapien
cttgcattaataatcacaggcgagactgcagca

SEQ ID NO: 964000 - DNA, 33 bp, Homo sapien
cttgcattaataatcagaggcgagactgcagca

SEQ ID NO: 964001 - DNA, 33 bp, Homo sapien
ccactcatatcctaaactgcttattcaaatttc

SEQ ID NO: 964002 - DNA, 33 bp, Homo sapien
ccactcatatcctaaattgcttattcaaatttc

SEQ ID NO: 964003 - DNA, 33 bp, Homo sapien
gtccctgacatgaatagaaagttgtggactttc

SEQ ID NO: 964004 - DNA, 33 bp, Homo sapien
gtccctgacatgaatataaagttgtggactttc

SEQ ID NO: 964005 - DNA, 33 bp, Homo sapien
agtctgtccctaaagcacagagttgaacaagga

SEQ ID NO: 964006 - DNA, 33 bp, Homo sapien
agtctgtccctaaagcgcagagttgaacaagga

SEQ ID NO: 964007 - DNA, 33 bp, Homo sapien
actatggtgacatcacaattttagggcttctta

SEQ ID NO: 964008 - DNA, 33 bp, Homo sapien
actatggtgacatcacgattttagggcttctta

SEQ ID NO: 964009 - DNA, 33 bp, Homo sapien
tgttactgtggcatagaaaactaatacacatct

SEQ ID NO: 964010 - DNA, 33 bp, Homo sapien
tgttactgtggcataggaaactaatacacatct

SEQ ID NO: 964011 - DNA, 33 bp, Homo sapien
agactcaaaagacatgaatgatccaaatatgac

SEQ ID NO: 964012 - DNA, 33 bp, Homo sapien
agactcaaaagacatggatgatccaaatatgac

SEQ ID NO: 964013 - DNA, 33 bp, Homo sapien
gctggatgcattaacgcaaagtgaatatacctg

SEQ ID NO: 964014 - DNA, 33 bp, Homo sapien
gctggatgcattaacgtaaagtgaatatacctg

SEQ ID NO: 964015 - DNA, 33 bp, Homo sapien
ttgaaggagacacaaaatgatagtgcatagaca

SEQ ID NO: 964016 - DNA, 33 bp, Homo sapien
ttgaaggagacacaaagtgatagtgcatagaca

SEQ ID NO: 964017 - DNA, 33 bp, Homo sapien
ctctaatagaagcttaaaatcttaatggtctag

SEQ ID NO: 964018 - DNA, 33 bp, Homo sapien
ctctaatagaagcttagaatcttaatggtctag

SEQ ID NO: 964019 - DNA, 33 bp, Homo sapien
acatcatcattaaacaagaagagatgtggaatc

SEQ ID NO: 964020 - DNA, 33 bp, Homo sapien
acatcatcattaaacaggaagagatgtggaatc

SEQ ID NO: 964021 - DNA, 33 bp, Homo sapien
atatgtgaaactaaataattgcaatccaaatct

SEQ ID NO: 964022 - DNA, 33 bp, Homo sapien
atatgtgaaactaaatcattgcaatccaaatct

SEQ ID NO: 964023 - DNA, 33 bp, Homo sapien
gaggtagattcacaaaactgtaacaatccaaga

SEQ ID NO: 964024 - DNA, 33 bp, Homo sapien
gaggtagattcacaaagctgtaacaatccaaga

SEQ ID NO: 964025 - DNA, 33 bp, Homo sapien
gcaaacacagcctcaactctagccagaaaaact

SEQ ID NO: 964026 - DNA, 33 bp, Homo sapien
gcaaacacagcctcaagtctagccagaaaaact

SEQ ID NO: 964027 - DNA, 33 bp, Homo sapien
aagtgaacaaaaacataagccaaagacaatgac

SEQ ID NO: 964028 - DNA, 33 bp, Homo sapien
aagtgaacaaaaacatgagccaaagacaatgac

SEQ ID NO: 964029 - DNA, 33 bp, Homo sapien
agcatgtaacgctggacggatgtaatgcctaga

SEQ ID NO: 964030 - DNA, 33 bp, Homo sapien
agcatgtaacgctggatggatgtaatgcctaga

SEQ ID NO: 964031 - DNA, 33 bp, Homo sapien
gtcacatgaccatgtagtacaatgtatgcatgc

SEQ ID NO: 964032 - DNA, 33 bp, Homo sapien
gtcacatgaccatgtattacaatgtatgcatgc

SEQ ID NO: 964033 - DNA, 33 bp, Homo sapien
ttttaagtgaaagatgaaatatcccaaatgtat

SEQ ID NO: 964034 - DNA, 33 bp, Homo sapien
ttttaagtgaaagatggaatatcccaaatgtat

SEQ ID NO: 964035 - DNA, 33 bp, Homo sapien
gtgaccttgaaaaatgaaaggaggacatcttcc

SEQ ID NO: 964036 - DNA, 33 bp, Homo sapien
gtgaccttgaaaaatggaaggaggacatcttcc

SEQ ID NO: 964037 - DNA, 33 bp, Homo sapien
ttattaaacatgatacacaaagtacagtgaaaa

SEQ ID NO: 964038 - DNA, 33 bp, Homo sapien
ttattaaacatgatacccaaagtacagtgaaaa

SEQ ID NO: 964039 - DNA, 33 bp, Homo sapien
tcatgtacttagtgacaatttgtatatcttctt

SEQ ID NO: 964040 - DNA, 33 bp, Homo sapien
tcatgtacttagtgaccatttgtatatcttctt

SEQ ID NO: 964041 - DNA, 33 bp, Homo sapien
aataatcagttgaaaacgaaaatgtaagatatc

SEQ ID NO: 964042 - DNA, 33 bp, Homo sapien
aataatcagttgaaaatgaaaatgtaagatatc

SEQ ID NO: 964043 - DNA, 33 bp, Homo sapien
caaagaaaagtaagtaaataggtgtaaacaata

SEQ ID NO: 964044 - DNA, 33 bp, Homo sapien
caaagaaaagtaagtacataggtgtaaacaata

SEQ ID NO: 964045 - DNA, 33 bp, Homo sapien
tgcattgctattgtagaatccaagggagttaat

SEQ ID NO: 964046 - DNA, 33 bp, Homo sapien
tgcattgctattgtagtatccaagggagttaat

SEQ ID NO: 964047 - DNA, 33 bp, Homo sapien
tgcttatgctggcaaactatttcaaacaaaata

SEQ ID NO: 964048 - DNA, 33 bp, Homo sapien
tgcttatgctggcaaattatttcaaacaaaata

SEQ ID NO: 964049 - DNA, 33 bp, Homo sapien
taagtccaataagaaacagtttacaacctgctg

SEQ ID NO: 964050 - DNA, 33 bp, Homo sapien
taagtccaataagaaagagtttacaacctgctg

SEQ ID NO: 964051 - DNA, 33 bp, Homo sapien
caagggtattgtgccactgacataatagttatt

SEQ ID NO: 964052 - DNA, 33 bp, Homo sapien
caagggtattgtgccagtgacataatagttatt

SEQ ID NO: 964053 - DNA, 33 bp, Homo sapien
ggaaatctcccaaaaccgcagagagagacagag

SEQ ID NO: 964054 - DNA, 33 bp, Homo sapien
ggaaatctcccaaaactgcagagagagacagag

SEQ ID NO: 964055 - DNA, 33 bp, Homo sapien
tctcagaaatactcaacgacctagtcgctcact

SEQ ID NO: 964056 - DNA, 33 bp, Homo sapien
tctcagaaatactcaaggacctagtcgctcact

SEQ ID NO: 964057 - DNA, 33 bp, Homo sapien
aaggccctaagagcacaatgggtcagcaggaaa

SEQ ID NO: 964058 - DNA, 33 bp, Homo sapien
aaggccctaagagcaccatgggtcagcaggaaa

SEQ ID NO: 964059 - DNA, 33 bp, Homo sapien
aggttgacttcacttcaccatatattgatatcc

SEQ ID NO: 964060 - DNA, 33 bp, Homo sapien
aggttgacttcacttcgccatatattgatatcc

SEQ ID NO: 964061 - DNA, 33 bp, Homo sapien
cattcatttctcagaaaccaaaaggcgccatct

SEQ ID NO: 964062 - DNA, 33 bp, Homo sapien
cattcatttctcagaacccaaaaggcgccatct

SEQ ID NO: 964063 - DNA, 33 bp, Homo sapien
ttggatgtgatggaataaaatctgtcacttctt

SEQ ID NO: 964064 - DNA, 33 bp, Homo sapien
ttggatgtgatggaatcaaatctgtcacttctt

SEQ ID NO: 964065 - DNA, 33 bp, Homo sapien
taacaccagttatatacgatatctttgagaaga

SEQ ID NO: 964066 - DNA, 33 bp, Homo sapien
taacaccagttatatatgatatctttgagaaga

SEQ ID NO: 964067 - DNA, 33 bp, Homo sapien
aagcttacttctttgcaaactactcattcccag

SEQ ID NO: 964068 - DNA, 33 bp, Homo sapien
aagcttacttctttgcgaactactcattcccag

SEQ ID NO: 964069 - DNA, 33 bp, Homo sapien
ccaattcagataatcaactttcacagcacacca

SEQ ID NO: 964070 - DNA, 33 bp, Homo sapien
ccaattcagataatcacctttcacagcacacca

SEQ ID NO: 964071 - DNA, 33 bp, Homo sapien
cattagttctctttgaggcaaatactactttaa

SEQ ID NO: 964072 - DNA, 33 bp, Homo sapien
cattagttctctttgatgcaaatactactttaa

SEQ ID NO: 964073 - DNA, 33 bp, Homo sapien
aaatcctctggaagtcacttcagccctatggga

SEQ ID NO: 964074 - DNA, 33 bp, Homo sapien
aaatcctctggaagtcgcttcagccctatggga

SEQ ID NO: 964075 - DNA, 33 bp, Homo sapien
aaagcaacagaagaaaataagaagtcactgtgc

SEQ ID NO: 964076 - DNA, 33 bp, Homo sapien
aaagcaacagaagaaattaagaagtcactgtgc

SEQ ID NO: 964077 - DNA, 33 bp, Homo sapien
atcccattgaagagtacagtttcaacatacaaa

SEQ ID NO: 964078 - DNA, 33 bp, Homo sapien
atcccattgaagagtagagtttcaacatacaaa

SEQ ID NO: 964079 - DNA, 33 bp, Homo sapien
tttcacggacataatacagagcgaaagaggcca

SEQ ID NO: 964080 - DNA, 33 bp, Homo sapien
tttcacggacataatatagagcgaaagaggcca

SEQ ID NO: 964081 - DNA, 33 bp, Homo sapien
cctttttcgagccagacaaggtctatttatcct

SEQ ID NO: 964082 - DNA, 33 bp, Homo sapien
cctttttcgagccagagaaggtctatttatcct

SEQ ID NO: 964083 - DNA, 33 bp, Homo sapien
ttataatgctaccatcacattattaaccacata

SEQ ID NO: 964084 - DNA, 33 bp, Homo sapien
ttataatgctaccatcgcattattaaccacata

SEQ ID NO: 964085 - DNA, 33 bp, Homo sapien
agctcacagacagtaaataactgagctcctgtt

SEQ ID NO: 964086 - DNA, 33 bp, Homo sapien
agctcacagacagtaactaactgagctcctgtt

SEQ ID NO: 964087 - DNA, 33 bp, Homo sapien
gaagagaccagatgaaacagcttatttttcacc

SEQ ID NO: 964088 - DNA, 33 bp, Homo sapien
gaagagaccagatgaagcagcttatttttcacc

SEQ ID NO: 964089 - DNA, 33 bp, Homo sapien
ctcacctacccattgacacacaagtgatttacc

SEQ ID NO: 964090 - DNA, 33 bp, Homo sapien
ctcacctacccattgatacacaagtgatttacc

SEQ ID NO: 964091 - DNA, 33 bp, Homo sapien
attagcgcatagcaacacaccaaaatgaggagt

SEQ ID NO: 964092 - DNA, 33 bp, Homo sapien
attagcgcatagcaacgcaccaaaatgaggagt

SEQ ID NO: 964093 - DNA, 33 bp, Homo sapien
gactctactctaaataccttacattgttgcttg

SEQ ID NO: 964094 - DNA, 33 bp, Homo sapien
gactctactctaaatatcttacattgttgcttg

SEQ ID NO: 964095 - DNA, 33 bp, Homo sapien
agtaaaagccattgagaaatgttcatagggact

SEQ ID NO: 964096 - DNA, 33 bp, Homo sapien
agtaaaagccattgagcaatgttcatagggact

SEQ ID NO: 964097 - DNA, 33 bp, Homo sapien
ctgctacttctagtgaagctcctcattggcata

SEQ ID NO: 964098 - DNA, 33 bp, Homo sapien
ctgctacttctagtgaggctcctcattggcata

SEQ ID NO: 964099 - DNA, 33 bp, Homo sapien
agtaatgtcataaagaagagattgtaaagagcc

SEQ ID NO: 964100 - DNA, 33 bp, Homo sapien
agtaatgtcataaagaggagattgtaaagagcc

SEQ ID NO: 964101 - DNA, 33 bp, Homo sapien
cagagaagaggacaccaattgtttcaggaagat

SEQ ID NO: 964102 - DNA, 33 bp, Homo sapien
cagagaagaggacaccgattgtttcaggaagat

SEQ ID NO: 964103 - DNA, 33 bp, Homo sapien
ctgactgccagagtaaatctgctgtcttcagga

SEQ ID NO: 964104 - DNA, 33 bp, Homo sapien
ctgactgccagagtaagtctgctgtcttcagga

SEQ ID NO: 964105 - DNA, 33 bp, Homo sapien
tgtcaatgaaacacaccagagaattcgaagtct

SEQ ID NO: 964106 - DNA, 33 bp, Homo sapien
tgtcaatgaaacacacgagagaattcgaagtct

SEQ ID NO: 964107 - DNA, 33 bp, Homo sapien
caccagccactcaccactctctattatatggta

SEQ ID NO: 964108 - DNA, 33 bp, Homo sapien
caccagccactcaccagtctctattatatggta

SEQ ID NO: 964109 - DNA, 33 bp, Homo sapien
ctgaagttctcattaaatatgtcaaaacatatt

SEQ ID NO: 964110 - DNA, 33 bp, Homo sapien
ctgaagttctcattaactatgtcaaaacatatt

SEQ ID NO: 964111 - DNA, 33 bp, Homo sapien
tagcctcaatcaaataacagcctcttaagtgag

SEQ ID NO: 964112 - DNA, 33 bp, Homo sapien
tagcctcaatcaaataccagcctcttaagtgag

SEQ ID NO: 964113 - DNA, 33 bp, Homo sapien
tctataaaatagtacgacaagggtataactaga

SEQ ID NO: 964114 - DNA, 33 bp, Homo sapien
tctataaaatagtacggcaagggtataactaga

SEQ ID NO: 964115 - DNA, 33 bp, Homo sapien
ttgtctcctacgagtacagcgatgactttgagt

SEQ ID NO: 964116 - DNA, 33 bp, Homo sapien
ttgtctcctacgagtagagcgatgactttgagt

SEQ ID NO: 964117 - DNA, 33 bp, Homo sapien
tcagtgcacagcatgacaaggaaagcttcacag

SEQ ID NO: 964118 - DNA, 33 bp, Homo sapien
tcagtgcacagcatgataaggaaagcttcacag

SEQ ID NO: 964119 - DNA, 33 bp, Homo sapien
cagattatttcatcggacaagtattaagcctag

SEQ ID NO: 964120 - DNA, 33 bp, Homo sapien
cagattatttcatcggccaagtattaagcctag

SEQ ID NO: 964121 - DNA, 33 bp, Homo sapien
agaataatggaagagcacttaaaaggcagagca

SEQ ID NO: 964122 - DNA, 33 bp, Homo sapien
agaataatggaagagcgcttaaaaggcagagca

SEQ ID NO: 964123 - DNA, 33 bp, Homo sapien
gcttgggagaaaaggaagcctgtgttctgaaga

SEQ ID NO: 964124 - DNA, 33 bp, Homo sapien
gcttgggagaaaaggaggcctgtgttctgaaga

SEQ ID NO: 964125 - DNA, 33 bp, Homo sapien
tgtttttccgtgaaaagattgcagctaaaaaag

SEQ ID NO: 964126 - DNA, 33 bp, Homo sapien
tgtttttccgtgaaaatattgcagctaaaaaag

SEQ ID NO: 964127 - DNA, 33 bp, Homo sapien
agtaagtgaggaaacaagagaagcaaaaagcat

SEQ ID NO: 964128 - DNA, 33 bp, Homo sapien
agtaagtgaggaaacaggagaagcaaaaagcat

SEQ ID NO: 964129 - DNA, 33 bp, Homo sapien
ctagcagcctgaactaaaatgaaaaagttatat

SEQ ID NO: 964130 - DNA, 33 bp, Homo sapien
ctagcagcctgaactagaatgaaaaagttatat

SEQ ID NO: 964131 - DNA, 33 bp, Homo sapien
gatacagacatggtcaaagaaagtttttctgtg

SEQ ID NO: 964132 - DNA, 33 bp, Homo sapien
gatacagacatggtcagagaaagtttttctgtg

SEQ ID NO: 964133 - DNA, 33 bp, Homo sapien
atattccctatgctgaaagttgttaagtataag

SEQ ID NO: 964134 - DNA, 33 bp, Homo sapien
atattccctatgctgagagttgttaagtataag

SEQ ID NO: 964135 - DNA, 33 bp, Homo sapien
atgtaagtgtgaaatacgcttctttggaaggaa

SEQ ID NO: 964136 - DNA, 33 bp, Homo sapien
atgtaagtgtgaaatatgcttctttggaaggaa

SEQ ID NO: 964137 - DNA, 33 bp, Homo sapien
ttgttttagccactgaaaattgactgagttctc

SEQ ID NO: 964138 - DNA, 33 bp, Homo sapien
ttgttttagccactgagaattgactgagttctc

SEQ ID NO: 964139 - DNA, 33 bp, Homo sapien
ttaaccaatgatctagacaacaccttttctgcc

SEQ ID NO: 964140 - DNA, 33 bp, Homo sapien
ttaaccaatgatctagtcaacaccttttctgcc

SEQ ID NO: 964141 - DNA, 33 bp, Homo sapien
gtctcagtgaaaagggaaatggctaattcagtc

SEQ ID NO: 964142 - DNA, 33 bp, Homo sapien
gtctcagtgaaaaggggaatggctaattcagtc

SEQ ID NO: 964143 - DNA, 33 bp, Homo sapien
ggatgaggcagtgataagattgtgcagaggctg

SEQ ID NO: 964144 - DNA, 33 bp, Homo sapien
ggatgaggcagtgataggattgtgcagaggctg

SEQ ID NO: 964145 - DNA, 33 bp, Homo sapien
tggtctactctatctacggacaagaggaggagg

SEQ ID NO: 964146 - DNA, 33 bp, Homo sapien
tggtctactctatctatggacaagaggaggagg

SEQ ID NO: 964147 - DNA, 33 bp, Homo sapien
acaacatcactttaccacatgaatgcaatctaa

SEQ ID NO: 964148 - DNA, 33 bp, Homo sapien
acaacatcactttaccgcatgaatgcaatctaa

SEQ ID NO: 964149 - DNA, 33 bp, Homo sapien
attcaaatggacttcactaacattcatggataa

SEQ ID NO: 964150 - DNA, 33 bp, Homo sapien
attcaaatggacttcagtaacattcatggataa

SEQ ID NO: 964151 - DNA, 33 bp, Homo sapien
agagttggaacaagacacagatctttttagagc

SEQ ID NO: 964152 - DNA, 33 bp, Homo sapien
agagttggaacaagacccagatctttttagagc

SEQ ID NO: 964153 - DNA, 33 bp, Homo sapien
cattctcaaactccctcaaagtcaattacaaat

SEQ ID NO: 964154 - DNA, 33 bp, Homo sapien
cattctcaaactccctgaaagtcaattacaaat

SEQ ID NO: 964155 - DNA, 33 bp, Homo sapien
ttatcaaatggtatccaaatttatcattgttgt

SEQ ID NO: 964156 - DNA, 33 bp, Homo sapien
ttatcaaatggtatccgaatttatcattgttgt

SEQ ID NO: 964157 - DNA, 33 bp, Homo sapien
agagcaaggaacttgaagtgaaagacctgaaga

SEQ ID NO: 964158 - DNA, 33 bp, Homo sapien
agagcaaggaacttgacgtgaaagacctgaaga

SEQ ID NO: 964159 - DNA, 33 bp, Homo sapien
gatgacttgccatccaatcctttctgtttgtgt

SEQ ID NO: 964160 - DNA, 33 bp, Homo sapien
gatgacttgccatccagtcctttctgtttgtgt

SEQ ID NO: 964161 - DNA, 33 bp, Homo sapien
tatctgcttattcagccccacaacctggcagaa

SEQ ID NO: 964162 - DNA, 33 bp, Homo sapien
tatctgcttattcagcgccacaacctggcagaa

SEQ ID NO: 964163 - DNA, 33 bp, Homo sapien
tcaatctaaaatagcacgggtggccttcattca

SEQ ID NO: 964164 - DNA, 33 bp, Homo sapien
tcaatctaaaatagcatgggtggccttcattca

SEQ ID NO: 964165 - DNA, 33 bp, Homo sapien
gcacagaacctgacttaaagccacacactttgg

SEQ ID NO: 964166 - DNA, 33 bp, Homo sapien
gcacagaacctgactttaagccacacactttgg

SEQ ID NO: 964167 - DNA, 33 bp, Homo sapien
aagattaccgagacaacttactttccatgacac

SEQ ID NO: 964168 - DNA, 33 bp, Homo sapien
aagattaccgagacaagttactttccatgacac

SEQ ID NO: 964169 - DNA, 33 bp, Homo sapien
ttattgaattttactacaagccttttcagtgtt

SEQ ID NO: 964170 - DNA, 33 bp, Homo sapien
ttattgaattttactagaagccttttcagtgtt

SEQ ID NO: 964171 - DNA, 33 bp, Homo sapien
aatcacagaacaccaacaattaaacaaatcaca

SEQ ID NO: 964172 - DNA, 33 bp, Homo sapien
aatcacagaacaccaataattaaacaaatcaca

SEQ ID NO: 964173 - DNA, 33 bp, Homo sapien
gtgtgtggaaatagagccccaccataccaagca

SEQ ID NO: 964174 - DNA, 33 bp, Homo sapien
gtgtgtggaaatagagtcccaccataccaagca

SEQ ID NO: 964175 - DNA, 33 bp, Homo sapien
gattcctgaatgataaaagattccataggattt

SEQ ID NO: 964176 - DNA, 33 bp, Homo sapien
gattcctgaatgataagagattccataggattt

SEQ ID NO: 964177 - DNA, 33 bp, Homo sapien
aatgagctaatatgtaaacatttcttagtgcag

SEQ ID NO: 964178 - DNA, 33 bp, Homo sapien
aatgagctaatatgtacacatttcttagtgcag

SEQ ID NO: 964179 - DNA, 33 bp, Homo sapien
ttagacccagagaaaaggtagtccagtctaccc

SEQ ID NO: 964180 - DNA, 33 bp, Homo sapien
ttagacccagagaaaatgtagtccagtctaccc

SEQ ID NO: 964181 - DNA, 33 bp, Homo sapien
tccttttaaattctcaaccaggctccgttttcc

SEQ ID NO: 964182 - DNA, 33 bp, Homo sapien
tccttttaaattctcagccaggctccgttttcc

SEQ ID NO: 964183 - DNA, 33 bp, Homo sapien
tcagtttagatacccaagagtatttcagagctt

SEQ ID NO: 964184 - DNA, 33 bp, Homo sapien
tcagtttagatacccaggagtatttcagagctt

SEQ ID NO: 964185 - DNA, 33 bp, Homo sapien
aagaaaatcatccttaacagcctactaaaattt

SEQ ID NO: 964186 - DNA, 33 bp, Homo sapien
aagaaaatcatccttagcagcctactaaaattt

SEQ ID NO: 964187 - DNA, 33 bp, Homo sapien
tcaatgtgataaagagaatctacgaaaacatac

SEQ ID NO: 964188 - DNA, 33 bp, Homo sapien
tcaatgtgataaagagtatctacgaaaacatac

SEQ ID NO: 964189 - DNA, 33 bp, Homo sapien
gttaaactagacttgcaacactagaataaacta

SEQ ID NO: 964190 - DNA, 33 bp, Homo sapien
gttaaactagacttgcgacactagaataaacta

SEQ ID NO: 964191 - DNA, 33 bp, Homo sapien
ccaaagtccagatcctaagagaaatgtgcctga

SEQ ID NO: 964192 - DNA, 33 bp, Homo sapien
ccaaagtccagatcctgagagaaatgtgcctga

SEQ ID NO: 964193 - DNA, 33 bp, Homo sapien
gctatcactttatgtccactaggatggccattg

SEQ ID NO: 964194 - DNA, 33 bp, Homo sapien
gctatcactttatgtctactaggatggccattg

SEQ ID NO: 964195 - DNA, 33 bp, Homo sapien
caattgaggaagcagcgcttgtctttcccatct

SEQ ID NO: 964196 - DNA, 33 bp, Homo sapien
caattgaggaagcagctcttgtctttcccatct

SEQ ID NO: 964197 - DNA, 33 bp, Homo sapien
aatcggaggaggaagacattgtagccttgagta

SEQ ID NO: 964198 - DNA, 33 bp, Homo sapien
aatcggaggaggaagatattgtagccttgagta

SEQ ID NO: 964199 - DNA, 33 bp, Homo sapien
ctgaaaccttaaaaatgaagccatatactgcaa

SEQ ID NO: 964200 - DNA, 33 bp, Homo sapien
ctgaaaccttaaaaattaagccatatactgcaa

SEQ ID NO: 964201 - DNA, 33 bp, Homo sapien
agtaagttgctatagacggaaaatgaactcaag

SEQ ID NO: 964202 - DNA, 33 bp, Homo sapien
agtaagttgctatagatggaaaatgaactcaag

SEQ ID NO: 964203 - DNA, 33 bp, Homo sapien
tttcagacatggttgtaaagagtcagctccttg

SEQ ID NO: 964204 - DNA, 33 bp, Homo sapien
tttcagacatggttgtcaagagtcagctccttg

SEQ ID NO: 964205 - DNA, 33 bp, Homo sapien
agtgcaatcaagcgaaatgtagtaaaatgaggt

SEQ ID NO: 964206 - DNA, 33 bp, Homo sapien
agtgcaatcaagcgaagtgtagtaaaatgaggt

SEQ ID NO: 964207 - DNA, 33 bp, Homo sapien
gctcacatcaatgccaaccttttggcttaatgg

SEQ ID NO: 964208 - DNA, 33 bp, Homo sapien
gctcacatcaatgccagccttttggcttaatgg

SEQ ID NO: 964209 - DNA, 33 bp, Homo sapien
ctgcttttgtcagcagcccttgatatttttgga

SEQ ID NO: 964210 - DNA, 33 bp, Homo sapien
ctgcttttgtcagcagtccttgatatttttgga

SEQ ID NO: 964211 - DNA, 33 bp, Homo sapien
tattttcatggtttcaaatctttccaggatatt

SEQ ID NO: 964212 - DNA, 33 bp, Homo sapien
tattttcatggtttcagatctttccaggatatt

SEQ ID NO: 964213 - DNA, 33 bp, Homo sapien
aaatctaatcacaaaacgacgtttgacaagatt

SEQ ID NO: 964214 - DNA, 33 bp, Homo sapien
aaatctaatcacaaaatgacgtttgacaagatt

SEQ ID NO: 964215 - DNA, 33 bp, Homo sapien
cccagggccaacttcacatagcttttaccaggt

SEQ ID NO: 964216 - DNA, 33 bp, Homo sapien
cccagggccaacttcagatagcttttaccaggt

SEQ ID NO: 964217 - DNA, 33 bp, Homo sapien
gctgcaatatgtaagaaggtgtcattaacctag

SEQ ID NO: 964218 - DNA, 33 bp, Homo sapien
gctgcaatatgtaagacggtgtcattaacctag

SEQ ID NO: 964219 - DNA, 33 bp, Homo sapien
tggaaatggggaatacaattatattttagcagt

SEQ ID NO: 964220 - DNA, 33 bp, Homo sapien
tggaaatggggaatacgattatattttagcagt

SEQ ID NO: 964221 - DNA, 33 bp, Homo sapien
gagtacaacctccattaaaaatgccttgtattt

SEQ ID NO: 964222 - DNA, 33 bp, Homo sapien
gagtacaacctccattgaaaatgccttgtattt

SEQ ID NO: 964223 - DNA, 33 bp, Homo sapien
ttttggaagtttaaaaccagatggatgatgagt

SEQ ID NO: 964224 - DNA, 33 bp, Homo sapien
ttttggaagtttaaaatcagatggatgatgagt

SEQ ID NO: 964225 - DNA, 33 bp, Homo sapien
atgagattttggtcaaaggaaaaagcaaaatgt

SEQ ID NO: 964226 - DNA, 33 bp, Homo sapien
atgagattttggtcaacggaaaaagcaaaatgt

SEQ ID NO: 964227 - DNA, 33 bp, Homo sapien
tagtcattgttttgcaacttcaatgaaactaaa

SEQ ID NO: 964228 - DNA, 33 bp, Homo sapien
tagtcattgttttgcagcttcaatgaaactaaa

SEQ ID NO: 964229 - DNA, 33 bp, Homo sapien
taactgtttcaaagcaatagcattttccctttc

SEQ ID NO: 964230 - DNA, 33 bp, Homo sapien
taactgtttcaaagcagtagcattttccctttc

SEQ ID NO: 964231 - DNA, 33 bp, Homo sapien
atttaaagctctatcaagcaatctgactgaaat

SEQ ID NO: 964232 - DNA, 33 bp, Homo sapien
atttaaagctctatcaggcaatctgactgaaat

SEQ ID NO: 964233 - DNA, 33 bp, Homo sapien
atattagggaccttgcactcttctagggtctgt

SEQ ID NO: 964234 - DNA, 33 bp, Homo sapien
atattagggaccttgcgctcttctagggtctgt

SEQ ID NO: 964235 - DNA, 33 bp, Homo sapien
aaactcagaaatttccaaagcacattttcccca

SEQ ID NO: 964236 - DNA, 33 bp, Homo sapien
aaactcagaaatttccgaagcacattttcccca

SEQ ID NO: 964237 - DNA, 33 bp, Homo sapien
atgtacttcaaataaaatctcataggggagtcc

SEQ ID NO: 964238 - DNA, 33 bp, Homo sapien
atgtacttcaaataaagtctcataggggagtcc

SEQ ID NO: 964239 - DNA, 33 bp, Homo sapien
cctggattgaggagaacagtcagaacaaaaggt

SEQ ID NO: 964240 - DNA, 33 bp, Homo sapien
cctggattgaggagaatagtcagaacaaaaggt

SEQ ID NO: 964241 - DNA, 33 bp, Homo sapien
aatctcagcaaacataagtgtgtatattcattg

SEQ ID NO: 964242 - DNA, 33 bp, Homo sapien
aatctcagcaaacatatgtgtgtatattcattg

SEQ ID NO: 964243 - DNA, 33 bp, Homo sapien
tgtagtctttttccaccgattctttcacttagc

SEQ ID NO: 964244 - DNA, 33 bp, Homo sapien
tgtagtctttttccactgattctttcacttagc

SEQ ID NO: 964245 - DNA, 33 bp, Homo sapien
aacaccaaggaaattaccaggagcagaaaataa

SEQ ID NO: 964246 - DNA, 33 bp, Homo sapien
aacaccaaggaaattatcaggagcagaaaataa

SEQ ID NO: 964247 - DNA, 33 bp, Homo sapien
aaaagccacaaaaggacaggaacatttgtaaat

SEQ ID NO: 964248 - DNA, 33 bp, Homo sapien
aaaagccacaaaaggataggaacatttgtaaat

SEQ ID NO: 964249 - DNA, 33 bp, Homo sapien
agcaacagacttagggaatgaaagcaggttgct

SEQ ID NO: 964250 - DNA, 33 bp, Homo sapien
agcaacagacttaggggatgaaagcaggttgct

SEQ ID NO: 964251 - DNA, 33 bp, Homo sapien
gaaacaaatgggctgacaccaaaagaagttgat

SEQ ID NO: 964252 - DNA, 33 bp, Homo sapien
gaaacaaatgggctgataccaaaagaagttgat

SEQ ID NO: 964253 - DNA, 33 bp, Homo sapien
tttaactacacctacaacttatagaaactcatc

SEQ ID NO: 964254 - DNA, 33 bp, Homo sapien
tttaactacacctacatcttatagaaactcatc

SEQ ID NO: 964255 - DNA, 33 bp, Homo sapien
ttaagaataaattgaccgctaatggtatatgtt

SEQ ID NO: 964256 - DNA, 33 bp, Homo sapien
ttaagaataaattgactgctaatggtatatgtt

SEQ ID NO: 964257 - DNA, 33 bp, Homo sapien
gagacctggcccaaacaccttaaaatgcatcac

SEQ ID NO: 964258 - DNA, 33 bp, Homo sapien
gagacctggcccaaacgccttaaaatgcatcac

SEQ ID NO: 964259 - DNA, 33 bp, Homo sapien
tagttaaataagtagcagcatggtatggaggga

SEQ ID NO: 964260 - DNA, 33 bp, Homo sapien
tagttaaataagtagccgcatggtatggaggga

SEQ ID NO: 964261 - DNA, 33 bp, Homo sapien
tttgagttttcaaaaaaggtacacggatgaagg

SEQ ID NO: 964262 - DNA, 33 bp, Homo sapien
tttgagttttcaaaaacggtacacggatgaagg

SEQ ID NO: 964263 - DNA, 33 bp, Homo sapien
ctagatttgttcagcgaagtctgttttcttgca

SEQ ID NO: 964264 - DNA, 33 bp, Homo sapien
ctagatttgttcagcggagtctgttttcttgca

SEQ ID NO: 964265 - DNA, 33 bp, Homo sapien
aacattaagcattctcaaataaacaagatatca

SEQ ID NO: 964266 - DNA, 33 bp, Homo sapien
aacattaagcattctcgaataaacaagatatca

SEQ ID NO: 964267 - DNA, 33 bp, Homo sapien
atttgacaggaagttccagtaaggcaattcacc

SEQ ID NO: 964268 - DNA, 33 bp, Homo sapien
atttgacaggaagttctagtaaggcaattcacc

SEQ ID NO: 964269 - DNA, 33 bp, Homo sapien
ttgttaaatgctggtacataagagcacaactga

SEQ ID NO: 964270 - DNA, 33 bp, Homo sapien
ttgttaaatgctggtatataagagcacaactga

SEQ ID NO: 964271 - DNA, 33 bp, Homo sapien
atgagactgaaataaccgatgaggatgattgta

SEQ ID NO: 964272 - DNA, 33 bp, Homo sapien
atgagactgaaataactgatgaggatgattgta

SEQ ID NO: 964273 - DNA, 33 bp, Homo sapien
aggtcagtttgggtaaaatatggaaagaatgaa

SEQ ID NO: 964274 - DNA, 33 bp, Homo sapien
aggtcagtttgggtaagatatggaaagaatgaa

SEQ ID NO: 964275 - DNA, 33 bp, Homo sapien
tgaagactggttcagaaaggaaaagaggagagg

SEQ ID NO: 964276 - DNA, 33 bp, Homo sapien
tgaagactggttcagagaggaaaagaggagagg

SEQ ID NO: 964277 - DNA, 33 bp, Homo sapien
acattaaactcacggaacctctcccatgccctg

SEQ ID NO: 964278 - DNA, 33 bp, Homo sapien
acattaaactcacggagcctctcccatgccctg

SEQ ID NO: 964279 - DNA, 33 bp, Homo sapien
ttttttcttgataagacgttctttccagtaatg

SEQ ID NO: 964280 - DNA, 33 bp, Homo sapien
ttttttcttgataagatgttctttccagtaatg

SEQ ID NO: 964281 - DNA, 33 bp, Homo sapien
gagttgaactgatgaaaaacaaatctccagatg

SEQ ID NO: 964282 - DNA, 33 bp, Homo sapien
gagttgaactgatgaacaacaaatctccagatg

SEQ ID NO: 964283 - DNA, 33 bp, Homo sapien
agtctgccagtatccacgatcatccctccctgg

SEQ ID NO: 964284 - DNA, 33 bp, Homo sapien
agtctgccagtatccatgatcatccctccctgg

SEQ ID NO: 964285 - DNA, 33 bp, Homo sapien
aggagtttacctactccaaccatgtggcattgt

SEQ ID NO: 964286 - DNA, 33 bp, Homo sapien
aggagtttacctactcgaaccatgtggcattgt

SEQ ID NO: 964287 - DNA, 33 bp, Homo sapien
aggcaaacgatgtcataaggacacagagaagaa

SEQ ID NO: 964288 - DNA, 33 bp, Homo sapien
aggcaaacgatgtcatgaggacacagagaagaa

SEQ ID NO: 964289 - DNA, 33 bp, Homo sapien
tttaacaacatatttacctttcaaaatgcagat

SEQ ID NO: 964290 - DNA, 33 bp, Homo sapien
tttaacaacatatttatctttcaaaatgcagat

SEQ ID NO: 964291 - DNA, 33 bp, Homo sapien
gataagtaaaatgaatcacagccatgttataag

SEQ ID NO: 964292 - DNA, 33 bp, Homo sapien
gataagtaaaatgaattacagccatgttataag

SEQ ID NO: 964293 - DNA, 33 bp, Homo sapien
aataactttgcaagaaaaaaaggatcaccatag

SEQ ID NO: 964294 - DNA, 33 bp, Homo sapien
aataactttgcaagaagaaaaggatcaccatag

SEQ ID NO: 964295 - DNA, 33 bp, Homo sapien
gtgtgtagaagtgttccatcaaagtacccaact

SEQ ID NO: 964296 - DNA, 33 bp, Homo sapien
gtgtgtagaagtgttctatcaaagtacccaact

SEQ ID NO: 964297 - DNA, 33 bp, Homo sapien
acaaagagcagagaacagctgaaagtttccttt

SEQ ID NO: 964298 - DNA, 33 bp, Homo sapien
acaaagagcagagaacggctgaaagtttccttt

SEQ ID NO: 964299 - DNA, 33 bp, Homo sapien
actctcacttgcaaagaaaagcatggttatgct

SEQ ID NO: 964300 - DNA, 33 bp, Homo sapien
actctcacttgcaaaggaaagcatggttatgct

SEQ ID NO: 964301 - DNA, 33 bp, Homo sapien
atgagcatttatttgaactacgttgagcctgtc

SEQ ID NO: 964302 - DNA, 33 bp, Homo sapien
atgagcatttatttgagctacgttgagcctgtc

SEQ ID NO: 964303 - DNA, 33 bp, Homo sapien
gataaagaatcagactaaaaaatgctatggttt

SEQ ID NO: 964304 - DNA, 33 bp, Homo sapien
gataaagaatcagactcaaaaatgctatggttt

SEQ ID NO: 964305 - DNA, 33 bp, Homo sapien
ctcaatgagctggacacgggttctgtttttcca

SEQ ID NO: 964306 - DNA, 33 bp, Homo sapien
ctcaatgagctggacatgggttctgtttttcca

SEQ ID NO: 964307 - DNA, 33 bp, Homo sapien
accagtatatcttccaatgcggtaccaaagaag

SEQ ID NO: 964308 - DNA, 33 bp, Homo sapien
accagtatatcttccagtgcggtaccaaagaag

SEQ ID NO: 964309 - DNA, 33 bp, Homo sapien
aatagcctttttactacgctgtgcagttacgtt

SEQ ID NO: 964310 - DNA, 33 bp, Homo sapien
aatagcctttttactatgctgtgcagttacgtt

SEQ ID NO: 964311 - DNA, 33 bp, Homo sapien
tatttaaaaaccagtacggaagaatcaattaca

SEQ ID NO: 964312 - DNA, 33 bp, Homo sapien
tatttaaaaaccagtatggaagaatcaattaca

SEQ ID NO: 964313 - DNA, 33 bp, Homo sapien
gtaggacatgatgtaacgataaaagggtcaatt

SEQ ID NO: 964314 - DNA, 33 bp, Homo sapien
gtaggacatgatgtaatgataaaagggtcaatt

SEQ ID NO: 964315 - DNA, 33 bp, Homo sapien
gctcaactgttgtaagacgcacaaaagatcttc

SEQ ID NO: 964316 - DNA, 33 bp, Homo sapien
gctcaactgttgtaaggcgcacaaaagatcttc

SEQ ID NO: 964317 - DNA, 33 bp, Homo sapien
catcgtgaagaaagaaagtcacaaactcactac

SEQ ID NO: 964318 - DNA, 33 bp, Homo sapien
catcgtgaagaaagaaggtcacaaactcactac

SEQ ID NO: 964319 - DNA, 33 bp, Homo sapien
gagtaggcacttcctaacctatgaaagcagggg

SEQ ID NO: 964320 - DNA, 33 bp, Homo sapien
gagtaggcacttcctagcctatgaaagcagggg

SEQ ID NO: 964321 - DNA, 33 bp, Homo sapien
aatatgtaccttggaggcaactatttaagcatc

SEQ ID NO: 964322 - DNA, 33 bp, Homo sapien
aatatgtaccttggagtcaactatttaagcatc

SEQ ID NO: 964323 - DNA, 33 bp, Homo sapien
tttgttaggtcagtgacgtaataatagtctaga

SEQ ID NO: 964324 - DNA, 33 bp, Homo sapien
tttgttaggtcagtgatgtaataatagtctaga

SEQ ID NO: 964325 - DNA, 33 bp, Homo sapien
agacacacctaaggaacctcctgtgcatactct

SEQ ID NO: 964326 - DNA, 33 bp, Homo sapien
agacacacctaaggaatctcctgtgcatactct

SEQ ID NO: 964327 - DNA, 33 bp, Homo sapien
ggaatatgatgacagtcaataaggcattctgta

SEQ ID NO: 964328 - DNA, 33 bp, Homo sapien
ggaatatgatgacagttaataaggcattctgta

SEQ ID NO: 964329 - DNA, 33 bp, Homo sapien
catttgatgatgtgtaaccctaattttatggct

SEQ ID NO: 964330 - DNA, 33 bp, Homo sapien
catttgatgatgtgtacccctaattttatggct

SEQ ID NO: 964331 - DNA, 33 bp, Homo sapien
agtttaacccattaaacgtgtgttccacttcaa

SEQ ID NO: 964332 - DNA, 33 bp, Homo sapien
agtttaacccattaaaggtgtgttccacttcaa

SEQ ID NO: 964333 - DNA, 33 bp, Homo sapien
tgtttttcccaatcaacgtctgtgtttaacaga

SEQ ID NO: 964334 - DNA, 33 bp, Homo sapien
tgtttttcccaatcaatgtctgtgtttaacaga

SEQ ID NO: 964335 - DNA, 33 bp, Homo sapien
tcagatcaacctcttcccgctcattcccaacat

SEQ ID NO: 964336 - DNA, 33 bp, Homo sapien
tcagatcaacctcttctcgctcattcccaacat

SEQ ID NO: 964337 - DNA, 33 bp, Homo sapien
tttttttcaagacaaaccacacatatttcctat

SEQ ID NO: 964338 - DNA, 33 bp, Homo sapien
tttttttcaagacaaatcacacatatttcctat

SEQ ID NO: 964339 - DNA, 33 bp, Homo sapien
gaagggagtttatggacgataggaaatatgtgt

SEQ ID NO: 964340 - DNA, 33 bp, Homo sapien
gaagggagtttatggaggataggaaatatgtgt

SEQ ID NO: 964341 - DNA, 33 bp, Homo sapien
ccatggatgaagaaaaattgctttccttcctca

SEQ ID NO: 964342 - DNA, 33 bp, Homo sapien
ccatggatgaagaaaacttgctttccttcctca

SEQ ID NO: 964343 - DNA, 33 bp, Homo sapien
acgttattacctattccatttcactttctagtg

SEQ ID NO: 964344 - DNA, 33 bp, Homo sapien
acgttattacctattcgatttcactttctagtg

SEQ ID NO: 964345 - DNA, 33 bp, Homo sapien
atgctataaacataacagagaacaaactgattt

SEQ ID NO: 964346 - DNA, 33 bp, Homo sapien
atgctataaacataacggagaacaaactgattt

SEQ ID NO: 964347 - DNA, 33 bp, Homo sapien
tattaaaaagctgttacaccatattgctgtatt

SEQ ID NO: 964348 - DNA, 33 bp, Homo sapien
tattaaaaagctgttataccatattgctgtatt

SEQ ID NO: 964349 - DNA, 33 bp, Homo sapien
atgtgcagttcctttaacctttcatctttagcc

SEQ ID NO: 964350 - DNA, 33 bp, Homo sapien
atgtgcagttcctttagcctttcatctttagcc

SEQ ID NO: 964351 - DNA, 33 bp, Homo sapien
atgtgattccttaaaaaagtatcaaaatcagtg

SEQ ID NO: 964352 - DNA, 33 bp, Homo sapien
atgtgattccttaaaacagtatcaaaatcagtg

SEQ ID NO: 964353 - DNA, 33 bp, Homo sapien
atagttcctgtcatacaagaattttagtttagt

SEQ ID NO: 964354 - DNA, 33 bp, Homo sapien
atagttcctgtcatacgagaattttagtttagt

SEQ ID NO: 964355 - DNA, 33 bp, Homo sapien
ataggggaatgttcaaaaagattgatgtaatgg

SEQ ID NO: 964356 - DNA, 33 bp, Homo sapien
ataggggaatgttcaagaagattgatgtaatgg

SEQ ID NO: 964357 - DNA, 33 bp, Homo sapien
atgctttgtaaaaagaatatcacaaagctgaac

SEQ ID NO: 964358 - DNA, 33 bp, Homo sapien
atgctttgtaaaaagattatcacaaagctgaac

SEQ ID NO: 964359 - DNA, 33 bp, Homo sapien
gtctactttcctactgaagtataaatggcctga

SEQ ID NO: 964360 - DNA, 33 bp, Homo sapien
gtctactttcctactggagtataaatggcctga

SEQ ID NO: 964361 - DNA, 33 bp, Homo sapien
acatgggctgtgttagcataatagccttccttt

SEQ ID NO: 964362 - DNA, 33 bp, Homo sapien
acatgggctgtgttaggataatagccttccttt

SEQ ID NO: 964363 - DNA, 33 bp, Homo sapien
tgcccatttttaacaccgaattgccagtatact

SEQ ID NO: 964364 - DNA, 33 bp, Homo sapien
tgcccatttttaacactgaattgccagtatact

SEQ ID NO: 964365 - DNA, 33 bp, Homo sapien
acacaaggaggaattcaatactaaggaaggaaa

SEQ ID NO: 964366 - DNA, 33 bp, Homo sapien
acacaaggaggaattcgatactaaggaaggaaa

SEQ ID NO: 964367 - DNA, 33 bp, Homo sapien
agaagcttaactctaccagctttgaaatatgag

SEQ ID NO: 964368 - DNA, 33 bp, Homo sapien
agaagcttaactctacgagctttgaaatatgag

SEQ ID NO: 964369 - DNA, 33 bp, Homo sapien
ttttttgaagcttaaaggttttgactgttaata

SEQ ID NO: 964370 - DNA, 33 bp, Homo sapien
ttttttgaagcttaaatgttttgactgttaata

SEQ ID NO: 964371 - DNA, 33 bp, Homo sapien
aaaaatcagtgcagaaaaatttcaaataattca

SEQ ID NO: 964372 - DNA, 33 bp, Homo sapien
aaaaatcagtgcagaacaatttcaaataattca

SEQ ID NO: 964373 - DNA, 33 bp, Homo sapien
taagtctatttcactggagttccatatatttat

SEQ ID NO: 964374 - DNA, 33 bp, Homo sapien
taagtctatttcactgtagttccatatatttat

SEQ ID NO: 964375 - DNA, 33 bp, Homo sapien
gtaggatagcagttcacgtttgttagtaagaag

SEQ ID NO: 964376 - DNA, 33 bp, Homo sapien
gtaggatagcagttcatgtttgttagtaagaag

SEQ ID NO: 964377 - DNA, 33 bp, Homo sapien
ctctctactctctaaacgaattgaagtaaatga

SEQ ID NO: 964378 - DNA, 33 bp, Homo sapien
ctctctactctctaaatgaattgaagtaaatga

SEQ ID NO: 964379 - DNA, 33 bp, Homo sapien
tagtttggagccaaagcattagccccctcatgt

SEQ ID NO: 964380 - DNA, 33 bp, Homo sapien
tagtttggagccaaagtattagccccctcatgt

SEQ ID NO: 964381 - DNA, 33 bp, Homo sapien
tgcacagcaccacttcacagccctagttctgag

SEQ ID NO: 964382 - DNA, 33 bp, Homo sapien
tgcacagcaccacttcgcagccctagttctgag

SEQ ID NO: 964383 - DNA, 33 bp, Homo sapien
acctcaggtcagctaaaggagccattgcctgcc

SEQ ID NO: 964384 - DNA, 33 bp, Homo sapien
acctcaggtcagctaagggagccattgcctgcc

SEQ ID NO: 964385 - DNA, 33 bp, Homo sapien
ggaaaccacagaagggcagtatgctccctcacc

SEQ ID NO: 964386 - DNA, 33 bp, Homo sapien
ggaaaccacagaagggtagtatgctccctcacc

SEQ ID NO: 964387 - DNA, 33 bp, Homo sapien
gatcagaagtaagtgtcaaacttgcagccactc

SEQ ID NO: 964388 - DNA, 33 bp, Homo sapien
gatcagaagtaagtgttaaacttgcagccactc

SEQ ID NO: 964389 - DNA, 33 bp, Homo sapien
gaaggatgaaatgcaaagaacttcaaaaacatt

SEQ ID NO: 964390 - DNA, 33 bp, Homo sapien
gaaggatgaaatgcaaggaacttcaaaaacatt

SEQ ID NO: 964391 - DNA, 33 bp, Homo sapien
cagctaccaagccaggaatctaagtagtttgtt

SEQ ID NO: 964392 - DNA, 33 bp, Homo sapien
cagctaccaagccaggcatctaagtagtttgtt

SEQ ID NO: 964393 - DNA, 33 bp, Homo sapien
gacaaaattcaccactaagattttacctgtgtg

SEQ ID NO: 964394 - DNA, 33 bp, Homo sapien
gacaaaattcaccactcagattttacctgtgtg

SEQ ID NO: 964395 - DNA, 33 bp, Homo sapien
tctcctgtagtccttccataactacaccagcat

SEQ ID NO: 964396 - DNA, 33 bp, Homo sapien
tctcctgtagtccttctataactacaccagcat

SEQ ID NO: 964397 - DNA, 33 bp, Homo sapien
ttaccttgagatgaagacgtttcagatggtgac

SEQ ID NO: 964398 - DNA, 33 bp, Homo sapien
ttaccttgagatgaaggcgtttcagatggtgac

SEQ ID NO: 964399 - DNA, 33 bp, Homo sapien
agtttgtaagaagaaacatattgacagtagaga

SEQ ID NO: 964400 - DNA, 33 bp, Homo sapien
agtttgtaagaagaaagatattgacagtagaga

SEQ ID NO: 964401 - DNA, 33 bp, Homo sapien
aagactcaatggcaaaagtgctcataaacagaa

SEQ ID NO: 964402 - DNA, 33 bp, Homo sapien
aagactcaatggcaaaggtgctcataaacagaa

SEQ ID NO: 964403 - DNA, 33 bp, Homo sapien
attcaacctctgtatccacttttgagaaccaca

SEQ ID NO: 964404 - DNA, 33 bp, Homo sapien
attcaacctctgtatctacttttgagaaccaca

SEQ ID NO: 964405 - DNA, 33 bp, Homo sapien
attacaccttgtccgaacaccaacttcatggat

SEQ ID NO: 964406 - DNA, 33 bp, Homo sapien
attacaccttgtccgatcaccaacttcatggat

SEQ ID NO: 964407 - DNA, 33 bp, Homo sapien
ttagtgagagtgaagacgaagcaacttagttca

SEQ ID NO: 964408 - DNA, 33 bp, Homo sapien
ttagtgagagtgaagatgaagcaacttagttca

SEQ ID NO: 964409 - DNA, 33 bp, Homo sapien
tcactatggagccaacacacatggaaggtgatc

SEQ ID NO: 964410 - DNA, 33 bp, Homo sapien
tcactatggagccaacgcacatggaaggtgatc

SEQ ID NO: 964411 - DNA, 33 bp, Homo sapien
ctcttacaagacttcagatgagatagcagatga

SEQ ID NO: 964412 - DNA, 33 bp, Homo sapien
ctcttacaagacttcatatgagatagcagatga

SEQ ID NO: 964413 - DNA, 33 bp, Homo sapien
aacaaaaactctgagaaagcatgtcttgctgat

SEQ ID NO: 964414 - DNA, 33 bp, Homo sapien
aacaaaaactctgagagagcatgtcttgctgat

SEQ ID NO: 964415 - DNA, 33 bp, Homo sapien
gcagagagagaatggaatagtgtggaagagctg

SEQ ID NO: 964416 - DNA, 33 bp, Homo sapien
gcagagagagaatggagtagtgtggaagagctg

SEQ ID NO: 964417 - DNA, 33 bp, Homo sapien
ttgaaatcaagaaatacgtgttctctggtattg

SEQ ID NO: 964418 - DNA, 33 bp, Homo sapien
ttgaaatcaagaaatatgtgttctctggtattg

SEQ ID NO: 964419 - DNA, 33 bp, Homo sapien
taaagttagctgttacacatattgatactttcc

SEQ ID NO: 964420 - DNA, 33 bp, Homo sapien
taaagttagctgttacgcatattgatactttcc

SEQ ID NO: 964421 - DNA, 33 bp, Homo sapien
tggaagaaagtctggcagacagcaacttctcaa

SEQ ID NO: 964422 - DNA, 33 bp, Homo sapien
tggaagaaagtctggcggacagcaacttctcaa

SEQ ID NO: 964423 - DNA, 33 bp, Homo sapien
attaggggagaacaaacgaacagttacaggtat

SEQ ID NO: 964424 - DNA, 33 bp, Homo sapien
attaggggagaacaaaggaacagttacaggtat

SEQ ID NO: 964425 - DNA, 33 bp, Homo sapien
agaagtcaagttccaacggcattgaggttcata

SEQ ID NO: 964426 - DNA, 33 bp, Homo sapien
agaagtcaagttccaatggcattgaggttcata

SEQ ID NO: 964427 - DNA, 33 bp, Homo sapien
ttctcaaattgaactacggaatctccacttgca

SEQ ID NO: 964428 - DNA, 33 bp, Homo sapien
ttctcaaattgaactatggaatctccacttgca

SEQ ID NO: 964429 - DNA, 33 bp, Homo sapien
gagttcatgagtttaaaggacatgattgtataa

SEQ ID NO: 964430 - DNA, 33 bp, Homo sapien
gagttcatgagtttaatggacatgattgtataa

SEQ ID NO: 964431 - DNA, 33 bp, Homo sapien
gctcatttgtaaactcacaaccaactatgtgcc

SEQ ID NO: 964432 - DNA, 33 bp, Homo sapien
gctcatttgtaaactcgcaaccaactatgtgcc

SEQ ID NO: 964433 - DNA, 33 bp, Homo sapien
gggtacatgtatctcacaaattacagttgaccc

SEQ ID NO: 964434 - DNA, 33 bp, Homo sapien
gggtacatgtatctcagaaattacagttgaccc

SEQ ID NO: 964435 - DNA, 33 bp, Homo sapien
aatgtcatagtcttaacagtctcgaacatattc

SEQ ID NO: 964436 - DNA, 33 bp, Homo sapien
aatgtcatagtcttaagagtctcgaacatattc

SEQ ID NO: 964437 - DNA, 33 bp, Homo sapien
tcctttgatctgtgaactatgttgcttaatttt

SEQ ID NO: 964438 - DNA, 33 bp, Homo sapien
tcctttgatctgtgaagtatgttgcttaatttt

SEQ ID NO: 964439 - DNA, 33 bp, Homo sapien
ctatgagtagacgacaataatatttcaaatctt

SEQ ID NO: 964440 - DNA, 33 bp, Homo sapien
ctatgagtagacgacagtaatatttcaaatctt

SEQ ID NO: 964441 - DNA, 33 bp, Homo sapien
cagcatatatcaaacactctctacctcctgtta

SEQ ID NO: 964442 - DNA, 33 bp, Homo sapien
cagcatatatcaaacattctctacctcctgtta

SEQ ID NO: 964443 - DNA, 33 bp, Homo sapien
gaagagaattacatacaaaaggagagagggatg

SEQ ID NO: 964444 - DNA, 33 bp, Homo sapien
gaagagaattacatacgaaaggagagagggatg

SEQ ID NO: 964445 - DNA, 33 bp, Homo sapien
atgtgtaaaactgacaacaatgctatttttgga

SEQ ID NO: 964446 - DNA, 33 bp, Homo sapien
atgtgtaaaactgacagcaatgctatttttgga

SEQ ID NO: 964447 - DNA, 33 bp, Homo sapien
tgtgttttctaaacatgaatttgagaacgtttt

SEQ ID NO: 964448 - DNA, 33 bp, Homo sapien
tgtgttttctaaacattaatttgagaacgtttt

SEQ ID NO: 964449 - DNA, 33 bp, Homo sapien
aaacaaaaaagttactgaggtggatcttaatca

SEQ ID NO: 964450 - DNA, 33 bp, Homo sapien
aaacaaaaaagttacttaggtggatcttaatca

SEQ ID NO: 964451 - DNA, 33 bp, Homo sapien
cagacaaagcatcctccaatcaactctgcaaat

SEQ ID NO: 964452 - DNA, 33 bp, Homo sapien
cagacaaagcatcctctaatcaactctgcaaat

SEQ ID NO: 964453 - DNA, 33 bp, Homo sapien
actctgatttaatgaaatgttgacaaggtcact

SEQ ID NO: 964454 - DNA, 33 bp, Homo sapien
actctgatttaatgaattgttgacaaggtcact

SEQ ID NO: 964455 - DNA, 33 bp, Homo sapien
gaagattgatgttgaacaagtagtcgtgagttt

SEQ ID NO: 964456 - DNA, 33 bp, Homo sapien
gaagattgatgttgaataagtagtcgtgagttt

SEQ ID NO: 964457 - DNA, 33 bp, Homo sapien
aggccctcataatgctcagacttttctccatac

SEQ ID NO: 964458 - DNA, 33 bp, Homo sapien
aggccctcataatgcttagacttttctccatac

SEQ ID NO: 964459 - DNA, 33 bp, Homo sapien
tggctgaacacaagcaaagattataagtaattt

SEQ ID NO: 964460 - DNA, 33 bp, Homo sapien
tggctgaacacaagcacagattataagtaattt

SEQ ID NO: 964461 - DNA, 33 bp, Homo sapien
tggtagagatcaagtcaaaaggagagagcaaaa

SEQ ID NO: 964462 - DNA, 33 bp, Homo sapien
tggtagagatcaagtcgaaaggagagagcaaaa

SEQ ID NO: 964463 - DNA, 33 bp, Homo sapien
acctgtgtgaaatttacgtgaagccctcatagg

SEQ ID NO: 964464 - DNA, 33 bp, Homo sapien
acctgtgtgaaatttatgtgaagccctcatagg

SEQ ID NO: 964465 - DNA, 33 bp, Homo sapien
ggacttcaactgtgaccaaggaattcattatga

SEQ ID NO: 964466 - DNA, 33 bp, Homo sapien
ggacttcaactgtgactaaggaattcattatga

SEQ ID NO: 964467 - DNA, 33 bp, Homo sapien
ttggatggtaacagtacgttttgttatgtgaga

SEQ ID NO: 964468 - DNA, 33 bp, Homo sapien
ttggatggtaacagtatgttttgttatgtgaga

SEQ ID NO: 964469 - DNA, 33 bp, Homo sapien
taacagagctccaaaaggtatggaacaaatgag

SEQ ID NO: 964470 - DNA, 33 bp, Homo sapien
taacagagctccaaaatgtatggaacaaatgag

SEQ ID NO: 964471 - DNA, 33 bp, Homo sapien
ttttctcttcgatttcacctcatttgttccata

SEQ ID NO: 964472 - DNA, 33 bp, Homo sapien
ttttctcttcgatttcgcctcatttgttccata

SEQ ID NO: 964473 - DNA, 33 bp, Homo sapien
gttgtagacatcagtaacccactgtaactaatg

SEQ ID NO: 964474 - DNA, 33 bp, Homo sapien
gttgtagacatcagtaccccactgtaactaatg

SEQ ID NO: 964475 - DNA, 33 bp, Homo sapien
ataaaataattcatccaaggagtattttctcag

SEQ ID NO: 964476 - DNA, 33 bp, Homo sapien
ataaaataattcatccgaggagtattttctcag

SEQ ID NO: 964477 - DNA, 33 bp, Homo sapien
tgaaaccatgacatgtaaaagaaaacctgaaga

SEQ ID NO: 964478 - DNA, 33 bp, Homo sapien
tgaaaccatgacatgtgaaagaaaacctgaaga

SEQ ID NO: 964479 - DNA, 33 bp, Homo sapien
gaaactaaggtccatgccagcagagatgcctgg

SEQ ID NO: 964480 - DNA, 33 bp, Homo sapien
gaaactaaggtccatgtcagcagagatgcctgg

SEQ ID NO: 964481 - DNA, 33 bp, Homo sapien
tcaatattcggatagacgggtaatagtatctat

SEQ ID NO: 964482 - DNA, 33 bp, Homo sapien
tcaatattcggatagatgggtaatagtatctat

SEQ ID NO: 964483 - DNA, 33 bp, Homo sapien
ctttttccgacaaataatacacccttaatcaaa

SEQ ID NO: 964484 - DNA, 33 bp, Homo sapien
ctttttccgacaaatagtacacccttaatcaaa

SEQ ID NO: 964485 - DNA, 33 bp, Homo sapien
atagctacattacacaacctgacctagctccag

SEQ ID NO: 964486 - DNA, 33 bp, Homo sapien
atagctacattacacatcctgacctagctccag

SEQ ID NO: 964487 - DNA, 33 bp, Homo sapien
atggatcaatattagacgtgatagaaagcaaaa

SEQ ID NO: 964488 - DNA, 33 bp, Homo sapien
atggatcaatattagatgtgatagaaagcaaaa

SEQ ID NO: 964489 - DNA, 33 bp, Homo sapien
actactgtttgtgtccacgttcagttgggttca

SEQ ID NO: 964490 - DNA, 33 bp, Homo sapien
actactgtttgtgtccgcgttcagttgggttca

SEQ ID NO: 964491 - DNA, 33 bp, Homo sapien
ggccacggaattttacaagtcatgtcatataag

SEQ ID NO: 964492 - DNA, 33 bp, Homo sapien
ggccacggaattttactagtcatgtcatataag

SEQ ID NO: 964493 - DNA, 33 bp, Homo sapien
gcatcagaacgtcgcaactttccgtgtctgaat

SEQ ID NO: 964494 - DNA, 33 bp, Homo sapien
gcatcagaacgtcgcatctttccgtgtctgaat

SEQ ID NO: 964495 - DNA, 33 bp, Homo sapien
gttagggatattgcaacggggaattttggaaaa

SEQ ID NO: 964496 - DNA, 33 bp, Homo sapien
gttagggatattgcaatggggaattttggaaaa

SEQ ID NO: 964497 - DNA, 33 bp, Homo sapien
ggggttcgcttcaggcactattcatttggttca

SEQ ID NO: 964498 - DNA, 33 bp, Homo sapien
ggggttcgcttcaggcgctattcatttggttca

SEQ ID NO: 964499 - DNA, 33 bp, Homo sapien
gtaaccttttatcaaaattcttagcctctttgc

SEQ ID NO: 964500 - DNA, 33 bp, Homo sapien
gtaaccttttatcaaagttcttagcctctttgc

SEQ ID NO: 964501 - DNA, 33 bp, Homo sapien
atcaagctaaaacacaacataaaaactttgtga

SEQ ID NO: 964502 - DNA, 33 bp, Homo sapien
atcaagctaaaacacagcataaaaactttgtga

SEQ ID NO: 964503 - DNA, 33 bp, Homo sapien
aaaactagcaacagggaaaggattttctattta

SEQ ID NO: 964504 - DNA, 33 bp, Homo sapien
aaaactagcaacagggtaaggattttctattta

SEQ ID NO: 964505 - DNA, 33 bp, Homo sapien
gttcaaatctggctcccattgttccaaatgact

SEQ ID NO: 964506 - DNA, 33 bp, Homo sapien
gttcaaatctggctcctattgttccaaatgact

SEQ ID NO: 964507 - DNA, 33 bp, Homo sapien
tgtaaaacagtgtggccactttgaaaaattgtt

SEQ ID NO: 964508 - DNA, 33 bp, Homo sapien
tgtaaaacagtgtggctactttgaaaaattgtt

SEQ ID NO: 964509 - DNA, 33 bp, Homo sapien
tcctatacaccaacgacgggcaaccagagagcc

SEQ ID NO: 964510 - DNA, 33 bp, Homo sapien
tcctatacaccaacgatgggcaaccagagagcc

SEQ ID NO: 964511 - DNA, 33 bp, Homo sapien
aagaagatacttaccaactgtaaactgataaaa

SEQ ID NO: 964512 - DNA, 33 bp, Homo sapien
aagaagatacttaccacctgtaaactgataaaa

SEQ ID NO: 964513 - DNA, 33 bp, Homo sapien
catgtggtaatctctaactctactatgaatggc

SEQ ID NO: 964514 - DNA, 33 bp, Homo sapien
catgtggtaatctctagctctactatgaatggc

SEQ ID NO: 964515 - DNA, 33 bp, Homo sapien
tcttgaacattaaaccagacttccatttgcaaa

SEQ ID NO: 964516 - DNA, 33 bp, Homo sapien
tcttgaacattaaacccgacttccatttgcaaa

SEQ ID NO: 964517 - DNA, 33 bp, Homo sapien
ttacaatatttactgaaaactatctactgtggc

SEQ ID NO: 964518 - DNA, 33 bp, Homo sapien
ttacaatatttactgagaactatctactgtggc

SEQ ID NO: 964519 - DNA, 33 bp, Homo sapien
ccaggctaagccatgcagatatggagcataaag

SEQ ID NO: 964520 - DNA, 33 bp, Homo sapien
ccaggctaagccatgcggatatggagcataaag

SEQ ID NO: 964521 - DNA, 33 bp, Homo sapien
gcaagtgattatgacaaattgggattttgataa

SEQ ID NO: 964522 - DNA, 33 bp, Homo sapien
gcaagtgattatgacatattgggattttgataa

SEQ ID NO: 964523 - DNA, 33 bp, Homo sapien
gaaactacacaggcccccgtcatttaactcata

SEQ ID NO: 964524 - DNA, 33 bp, Homo sapien
gaaactacacaggccctcgtcatttaactcata

SEQ ID NO: 964525 - DNA, 33 bp, Homo sapien
tgaagagacaaggaaactgtttggttatgggaa

SEQ ID NO: 964526 - DNA, 33 bp, Homo sapien
tgaagagacaaggaaagtgtttggttatgggaa

SEQ ID NO: 964527 - DNA, 33 bp, Homo sapien
tgctattggccatcacaaggctttctaaattcc

SEQ ID NO: 964528 - DNA, 33 bp, Homo sapien
tgctattggccatcacgaggctttctaaattcc

SEQ ID NO: 964529 - DNA, 33 bp, Homo sapien
ttgaaagccaaatgaaaaaggaaagacctctgc

SEQ ID NO: 964530 - DNA, 33 bp, Homo sapien
ttgaaagccaaatgaagaaggaaagacctctgc

SEQ ID NO: 964531 - DNA, 33 bp, Homo sapien
ttacaacattaaggaggagtaatggagctgtat

SEQ ID NO: 964532 - DNA, 33 bp, Homo sapien
ttacaacattaaggagtagtaatggagctgtat

SEQ ID NO: 964533 - DNA, 33 bp, Homo sapien
tgaacagtaaaggaagacatcctggcctgagaa

SEQ ID NO: 964534 - DNA, 33 bp, Homo sapien
tgaacagtaaaggaaggcatcctggcctgagaa

SEQ ID NO: 964535 - DNA, 33 bp, Homo sapien
aattctcatatggtaaaaggaaagaatgttcaa

SEQ ID NO: 964536 - DNA, 33 bp, Homo sapien
aattctcatatggtaagaggaaagaatgttcaa

SEQ ID NO: 964537 - DNA, 33 bp, Homo sapien
aaaaggtagaggcacagggaattaaaggcaatg

SEQ ID NO: 964538 - DNA, 33 bp, Homo sapien
aaaaggtagaggcacatggaattaaaggcaatg

SEQ ID NO: 964539 - DNA, 33 bp, Homo sapien
tcttactatgtgagcaaaaacctgtaatccaga

SEQ ID NO: 964540 - DNA, 33 bp, Homo sapien
tcttactatgtgagcagaaacctgtaatccaga

SEQ ID NO: 964541 - DNA, 33 bp, Homo sapien
taacatccatgcgaagaaaatggaacacttata

SEQ ID NO: 964542 - DNA, 33 bp, Homo sapien
taacatccatgcgaaggaaatggaacacttata

SEQ ID NO: 964543 - DNA, 33 bp, Homo sapien
tgtaattgtatctcataaaagaataaatgatgt

SEQ ID NO: 964544 - DNA, 33 bp, Homo sapien
tgtaattgtatctcatgaaagaataaatgatgt

SEQ ID NO: 964545 - DNA, 33 bp, Homo sapien
aatgaaggttattccaaggttaacagcttgttt

SEQ ID NO: 964546 - DNA, 33 bp, Homo sapien
aatgaaggttattccagggttaacagcttgttt

SEQ ID NO: 964547 - DNA, 33 bp, Homo sapien
ttgagagactgtagataaccataaagtccacca

SEQ ID NO: 964548 - DNA, 33 bp, Homo sapien
ttgagagactgtagatgaccataaagtccacca

SEQ ID NO: 964549 - DNA, 33 bp, Homo sapien
tttaacatttctgggaacatatctaagaagtga

SEQ ID NO: 964550 - DNA, 33 bp, Homo sapien
tttaacatttctgggagcatatctaagaagtga

SEQ ID NO: 964551 - DNA, 33 bp, Homo sapien
tatatgagtgttaaagaaagataccacacaata

SEQ ID NO: 964552 - DNA, 33 bp, Homo sapien
tatatgagtgttaaagcaagataccacacaata

SEQ ID NO: 964553 - DNA, 33 bp, Homo sapien
catctactttgccgagaaactggatgagtcatg

SEQ ID NO: 964554 - DNA, 33 bp, Homo sapien
catctactttgccgaggaactggatgagtcatg

SEQ ID NO: 964555 - DNA, 33 bp, Homo sapien
aactggaagaaagacaaaatgactaggtagatt

SEQ ID NO: 964556 - DNA, 33 bp, Homo sapien
aactggaagaaagacagaatgactaggtagatt

SEQ ID NO: 964557 - DNA, 33 bp, Homo sapien
tccttcaggaaaatcccatctgtaaccacagag

SEQ ID NO: 964558 - DNA, 33 bp, Homo sapien
tccttcaggaaaatcctatctgtaaccacagag

SEQ ID NO: 964559 - DNA, 33 bp, Homo sapien
taccctcctggccaaactgcagactctgcagaa

SEQ ID NO: 964560 - DNA, 33 bp, Homo sapien
taccctcctggccaaattgcagactctgcagaa

SEQ ID NO: 964561 - DNA, 33 bp, Homo sapien
tgtagaactccctgaaagatttgctgagagctt

SEQ ID NO: 964562 - DNA, 33 bp, Homo sapien
tgtagaactccctgaaggatttgctgagagctt

SEQ ID NO: 964563 - DNA, 33 bp, Homo sapien
agagtaacacagaaaactgaaaaatcatctcaa

SEQ ID NO: 964564 - DNA, 33 bp, Homo sapien
agagtaacacagaaaagtgaaaaatcatctcaa

SEQ ID NO: 964565 - DNA, 33 bp, Homo sapien
cttttgctccttgaaaaataaggcctcacagaa

SEQ ID NO: 964566 - DNA, 33 bp, Homo sapien
cttttgctccttgaaacataaggcctcacagaa

SEQ ID NO: 964567 - DNA, 33 bp, Homo sapien
agcttggcatcttcaacattagtacatttttta

SEQ ID NO: 964568 - DNA, 33 bp, Homo sapien
agcttggcatcttcaatattagtacatttttta

SEQ ID NO: 964569 - DNA, 33 bp, Homo sapien
ctgtcctcatgtgaaacatttatcaaacatatc

SEQ ID NO: 964570 - DNA, 33 bp, Homo sapien
ctgtcctcatgtgaaagatttatcaaacatatc

SEQ ID NO: 964571 - DNA, 33 bp, Homo sapien
acagaatgaatgttggaagaattagttgtcatt

SEQ ID NO: 964572 - DNA, 33 bp, Homo sapien
acagaatgaatgttggcagaattagttgtcatt

SEQ ID NO: 964573 - DNA, 33 bp, Homo sapien
cctgactttgagaaaaacaccagagaaacacaa

SEQ ID NO: 964574 - DNA, 33 bp, Homo sapien
cctgactttgagaaaaccaccagagaaacacaa

SEQ ID NO: 964575 - DNA, 33 bp, Homo sapien
tcatgaacacaacgtaacttaaaaatatagcaa

SEQ ID NO: 964576 - DNA, 33 bp, Homo sapien
tcatgaacacaacgtagcttaaaaatatagcaa

SEQ ID NO: 964577 - DNA, 33 bp, Homo sapien
ttagtgtgatcctttgcaagtaagaagacactc

SEQ ID NO: 964578 - DNA, 33 bp, Homo sapien
ttagtgtgatcctttgtaagtaagaagacactc

SEQ ID NO: 964579 - DNA, 33 bp, Homo sapien
ctgaataacagaaaaaatcgactaaaaagcaag

SEQ ID NO: 964580 - DNA, 33 bp, Homo sapien
ctgaataacagaaaaagtcgactaaaaagcaag

SEQ ID NO: 964581 - DNA, 33 bp, Homo sapien
agggaaatggaaattaagatggcatttaagggg

SEQ ID NO: 964582 - DNA, 33 bp, Homo sapien
agggaaatggaaattaggatggcatttaagggg

SEQ ID NO: 964583 - DNA, 33 bp, Homo sapien
gcaaaatccttgaaaacccttgtcttctatctc

SEQ ID NO: 964584 - DNA, 33 bp, Homo sapien
gcaaaatccttgaaaatccttgtcttctatctc

SEQ ID NO: 964585 - DNA, 33 bp, Homo sapien
ttgcttctcaagtcaaaaaatatcctcaagttt

SEQ ID NO: 964586 - DNA, 33 bp, Homo sapien
ttgcttctcaagtcaacaaatatcctcaagttt

SEQ ID NO: 964587 - DNA, 33 bp, Homo sapien
ttgagaagcaaaaggcagagatgaaggagcaac

SEQ ID NO: 964588 - DNA, 33 bp, Homo sapien
ttgagaagcaaaaggcggagatgaaggagcaac

SEQ ID NO: 964589 - DNA, 33 bp, Homo sapien
gaaaaaggagagaatacgatcaagaaacaagag

SEQ ID NO: 964590 - DNA, 33 bp, Homo sapien
gaaaaaggagagaataggatcaagaaacaagag

SEQ ID NO: 964591 - DNA, 33 bp, Homo sapien
ataattgcccaattcaacttgaaggcctgatac

SEQ ID NO: 964592 - DNA, 33 bp, Homo sapien
ataattgcccaattcagcttgaaggcctgatac

SEQ ID NO: 964593 - DNA, 33 bp, Homo sapien
atatcatgccgtgtccaatcacaaaactaaaaa

SEQ ID NO: 964594 - DNA, 33 bp, Homo sapien
atatcatgccgtgtccgatcacaaaactaaaaa

SEQ ID NO: 964595 - DNA, 33 bp, Homo sapien
tggattataaaaatcaataatagcaatgccttt

SEQ ID NO: 964596 - DNA, 33 bp, Homo sapien
tggattataaaaatcagtaatagcaatgccttt

SEQ ID NO: 964597 - DNA, 33 bp, Homo sapien
tggaattgagtattgaactatgaatattttgcc

SEQ ID NO: 964598 - DNA, 33 bp, Homo sapien
tggaattgagtattgacctatgaatattttgcc

SEQ ID NO: 964599 - DNA, 33 bp, Homo sapien
tttgaggaaaaaattaccatactagttgctctt

SEQ ID NO: 964600 - DNA, 33 bp, Homo sapien
tttgaggaaaaaattatcatactagttgctctt

SEQ ID NO: 964601 - DNA, 33 bp, Homo sapien
atataaaaggaattgacgattttcaatttgttc

SEQ ID NO: 964602 - DNA, 33 bp, Homo sapien
atataaaaggaattgatgattttcaatttgttc

SEQ ID NO: 964603 - DNA, 33 bp, Homo sapien
tttgggtaaaataatcaatgcctatcatgaagc

SEQ ID NO: 964604 - DNA, 33 bp, Homo sapien
tttgggtaaaataatcgatgcctatcatgaagc

SEQ ID NO: 964605 - DNA, 33 bp, Homo sapien
acatggaagcattttgcagaaatagccacacta

SEQ ID NO: 964606 - DNA, 33 bp, Homo sapien
acatggaagcattttggagaaatagccacacta

SEQ ID NO: 964607 - DNA, 33 bp, Homo sapien
ggtccctggatattcccgattttacagtttgtg

SEQ ID NO: 964608 - DNA, 33 bp, Homo sapien
ggtccctggatattcctgattttacagtttgtg

SEQ ID NO: 964609 - DNA, 33 bp, Homo sapien
tttgtgatgcttctcaaactcttcccttcattt

SEQ ID NO: 964610 - DNA, 33 bp, Homo sapien
tttgtgatgcttctcagactcttcccttcattt

SEQ ID NO: 964611 - DNA, 33 bp, Homo sapien
ataccagcaaagtgtacacctcgttaacagtcc

SEQ ID NO: 964612 - DNA, 33 bp, Homo sapien
ataccagcaaagtgtagacctcgttaacagtcc

SEQ ID NO: 964613 - DNA, 33 bp, Homo sapien
atctgtcttggtgatgaaagtttatttgaaagt

SEQ ID NO: 964614 - DNA, 33 bp, Homo sapien
atctgtcttggtgatggaagtttatttgaaagt

SEQ ID NO: 964615 - DNA, 33 bp, Homo sapien
tcaataacctgaacacggaacaagtgtggaatg

SEQ ID NO: 964616 - DNA, 33 bp, Homo sapien
tcaataacctgaacactgaacaagtgtggaatg

SEQ ID NO: 964617 - DNA, 33 bp, Homo sapien
cagaagctctatctcacgtgcaatgcaagaatt

SEQ ID NO: 964618 - DNA, 33 bp, Homo sapien
cagaagctctatctcatgtgcaatgcaagaatt

SEQ ID NO: 964619 - DNA, 33 bp, Homo sapien
ccattgtattgtaggacctcttttttattagct

SEQ ID NO: 964620 - DNA, 33 bp, Homo sapien
ccattgtattgtaggatctcttttttattagct

SEQ ID NO: 964621 - DNA, 33 bp, Homo sapien
agtccttcatgcggtgaaagtgctgagcaaaag

SEQ ID NO: 964622 - DNA, 33 bp, Homo sapien
agtccttcatgcggtggaagtgctgagcaaaag

SEQ ID NO: 964623 - DNA, 33 bp, Homo sapien
aaggtgtctcaatacactggggataccgaccca

SEQ ID NO: 964624 - DNA, 33 bp, Homo sapien
aaggtgtctcaatacattggggataccgaccca

SEQ ID NO: 964625 - DNA, 33 bp, Homo sapien
ctacataggagaaaaaagttgcaaatggctgtt

SEQ ID NO: 964626 - DNA, 33 bp, Homo sapien
ctacataggagaaaaaggttgcaaatggctgtt

SEQ ID NO: 964627 - DNA, 33 bp, Homo sapien
cagattttagcctttgcattatctgttttcaca

SEQ ID NO: 964628 - DNA, 33 bp, Homo sapien
cagattttagcctttgtattatctgttttcaca

SEQ ID NO: 964629 - DNA, 33 bp, Homo sapien
cgctgtccctggtgacaaactacatatttttaa

SEQ ID NO: 964630 - DNA, 33 bp, Homo sapien
cgctgtccctggtgaccaactacatatttttaa

SEQ ID NO: 964631 - DNA, 33 bp, Homo sapien
ctttccacttctaaacaattctaaatttctaaa

SEQ ID NO: 964632 - DNA, 33 bp, Homo sapien
ctttccacttctaaacgattctaaatttctaaa

SEQ ID NO: 964633 - DNA, 33 bp, Homo sapien
ccattaatcagattgtaaaagaaagtaccacat

SEQ ID NO: 964634 - DNA, 33 bp, Homo sapien
ccattaatcagattgttaaagaaagtaccacat

SEQ ID NO: 964635 - DNA, 33 bp, Homo sapien
acaaataagtgttgtaaagtaaaatatacaaag

SEQ ID NO: 964636 - DNA, 33 bp, Homo sapien
acaaataagtgttgtacagtaaaatatacaaag

SEQ ID NO: 964637 - DNA, 33 bp, Homo sapien
gtccagtttgcagagaacgaggaatgccaagtg

SEQ ID NO: 964638 - DNA, 33 bp, Homo sapien
gtccagtttgcagagaccgaggaatgccaagtg

SEQ ID NO: 964639 - DNA, 33 bp, Homo sapien
cagttgaagcatacttgaaaaattcaaaaggag

SEQ ID NO: 964640 - DNA, 33 bp, Homo sapien
cagttgaagcatactttaaaaattcaaaaggag

SEQ ID NO: 964641 - DNA, 33 bp, Homo sapien
tgtttaattcctatcaatcaggcatttgctaca

SEQ ID NO: 964642 - DNA, 33 bp, Homo sapien
tgtttaattcctatcagtcaggcatttgctaca

SEQ ID NO: 964643 - DNA, 33 bp, Homo sapien
atactgtattgtacacggacaaatgtgttaaga

SEQ ID NO: 964644 - DNA, 33 bp, Homo sapien
atactgtattgtacactgacaaatgtgttaaga

SEQ ID NO: 964645 - DNA, 33 bp, Homo sapien
gaggaaaacagaagaaagttaactcctagattt

SEQ ID NO: 964646 - DNA, 33 bp, Homo sapien
gaggaaaacagaagaaggttaactcctagattt

SEQ ID NO: 964647 - DNA, 33 bp, Homo sapien
aaatggactaatacaacggaataatactcagcc

SEQ ID NO: 964648 - DNA, 33 bp, Homo sapien
aaatggactaatacaatggaataatactcagcc

SEQ ID NO: 964649 - DNA, 33 bp, Homo sapien
gtatagtgtcttagtacgtcacttatcttgtct

SEQ ID NO: 964650 - DNA, 33 bp, Homo sapien
gtatagtgtcttagtatgtcacttatcttgtct

SEQ ID NO: 964651 - DNA, 33 bp, Homo sapien
aattgcaaatgcaacaatcttgacattttaaca

SEQ ID NO: 964652 - DNA, 33 bp, Homo sapien
aattgcaaatgcaacagtcttgacattttaaca

SEQ ID NO: 964653 - DNA, 33 bp, Homo sapien
gggtgaggaaaacaaacggacttggcaatgggg

SEQ ID NO: 964654 - DNA, 33 bp, Homo sapien
gggtgaggaaaacaaatggacttggcaatgggg

SEQ ID NO: 964655 - DNA, 33 bp, Homo sapien
taggtctgctaataaacaactgagagcaaatta

SEQ ID NO: 964656 - DNA, 33 bp, Homo sapien
taggtctgctaataaataactgagagcaaatta

SEQ ID NO: 964657 - DNA, 33 bp, Homo sapien
gtaagttgttttgacacaatttggacactgtca

SEQ ID NO: 964658 - DNA, 33 bp, Homo sapien
gtaagttgttttgacataatttggacactgtca

SEQ ID NO: 964659 - DNA, 33 bp, Homo sapien
tcatattgacaaaatcagagtcagtatacacac

SEQ ID NO: 964660 - DNA, 33 bp, Homo sapien
tcatattgacaaaatcggagtcagtatacacac

SEQ ID NO: 964661 - DNA, 33 bp, Homo sapien
gggagtctgggatggaaggtgtctgtttagtgc

SEQ ID NO: 964662 - DNA, 33 bp, Homo sapien
gggagtctgggatggagggtgtctgtttagtgc

SEQ ID NO: 964663 - DNA, 33 bp, Homo sapien
tgccactaaattgaaacggtttcatcatttacc

SEQ ID NO: 964664 - DNA, 33 bp, Homo sapien
tgccactaaattgaaatggtttcatcatttacc

SEQ ID NO: 964665 - DNA, 33 bp, Homo sapien
gaatgtaagttagtcacgtaatctgtttactgt

SEQ ID NO: 964666 - DNA, 33 bp, Homo sapien
gaatgtaagttagtcatgtaatctgtttactgt

SEQ ID NO: 964667 - DNA, 33 bp, Homo sapien
aacactttttatcttaccatctccgcaaattat

SEQ ID NO: 964668 - DNA, 33 bp, Homo sapien
aacactttttatcttatcatctccgcaaattat

SEQ ID NO: 964669 - DNA, 33 bp, Homo sapien
ttaagtgtctaactcaagttggaaagaataaat

SEQ ID NO: 964670 - DNA, 33 bp, Homo sapien
ttaagtgtctaactcaggttggaaagaataaat

SEQ ID NO: 964671 - DNA, 33 bp, Homo sapien
tttaggtatgttaaaaatgcaaattgtttacat

SEQ ID NO: 964672 - DNA, 33 bp, Homo sapien
tttaggtatgttaaaagtgcaaattgtttacat

SEQ ID NO: 964673 - DNA, 33 bp, Homo sapien
cttctcaggctccccaatcttaggctgcttgtt

SEQ ID NO: 964674 - DNA, 33 bp, Homo sapien
cttctcaggctccccagtcttaggctgcttgtt

SEQ ID NO: 964675 - DNA, 33 bp, Homo sapien
ggagattgaagatgacagtagaaagtctgtgaa

SEQ ID NO: 964676 - DNA, 33 bp, Homo sapien
ggagattgaagatgacggtagaaagtctgtgaa

SEQ ID NO: 964677 - DNA, 33 bp, Homo sapien
atgcaaggtctttaaacgctgacatgaatatga

SEQ ID NO: 964678 - DNA, 33 bp, Homo sapien
atgcaaggtctttaaaggctgacatgaatatga

SEQ ID NO: 964679 - DNA, 33 bp, Homo sapien
accttttcgggcaaagaaagacaaagacagaga

SEQ ID NO: 964680 - DNA, 33 bp, Homo sapien
accttttcgggcaaaggaagacaaagacagaga

SEQ ID NO: 964681 - DNA, 33 bp, Homo sapien
ccgtgagggtccgcaacttcattcttgaagtca

SEQ ID NO: 964682 - DNA, 33 bp, Homo sapien
ccgtgagggtccgcaagttcattcttgaagtca

SEQ ID NO: 964683 - DNA, 33 bp, Homo sapien
caattataaatgcctgcaaacactgagatattt

SEQ ID NO: 964684 - DNA, 33 bp, Homo sapien
caattataaatgcctggaaacactgagatattt

SEQ ID NO: 964685 - DNA, 33 bp, Homo sapien
gaaagaaagtataagacagcatgattagtgaga

SEQ ID NO: 964686 - DNA, 33 bp, Homo sapien
gaaagaaagtataagagagcatgattagtgaga

SEQ ID NO: 964687 - DNA, 33 bp, Homo sapien
aagtgaaatgaaatccgaagtgaagctccaaaa

SEQ ID NO: 964688 - DNA, 33 bp, Homo sapien
aagtgaaatgaaatcctaagtgaagctccaaaa

SEQ ID NO: 964689 - DNA, 33 bp, Homo sapien
gacacagaggttttaactggcaccagcacaact

SEQ ID NO: 964690 - DNA, 33 bp, Homo sapien
gacacagaggttttaattggcaccagcacaact

SEQ ID NO: 964691 - DNA, 33 bp, Homo sapien
aattgtctcagagttaagtgtaaatgtgatagg

SEQ ID NO: 964692 - DNA, 33 bp, Homo sapien
aattgtctcagagttaggtgtaaatgtgatagg

SEQ ID NO: 964693 - DNA, 33 bp, Homo sapien
tcagggtattcatgacactacactgagatgatt

SEQ ID NO: 964694 - DNA, 33 bp, Homo sapien
tcagggtattcatgacgctacactgagatgatt

SEQ ID NO: 964695 - DNA, 33 bp, Homo sapien
tactaaagatctacggaatgttctacagacata

SEQ ID NO: 964696 - DNA, 33 bp, Homo sapien
tactaaagatctacgggatgttctacagacata

SEQ ID NO: 964697 - DNA, 33 bp, Homo sapien
atacatcatttcttcacctataatccttataca

SEQ ID NO: 964698 - DNA, 33 bp, Homo sapien
atacatcatttcttcatctataatccttataca

SEQ ID NO: 964699 - DNA, 33 bp, Homo sapien
tgtggtaaaagtatggccaatttcctttccatc

SEQ ID NO: 964700 - DNA, 33 bp, Homo sapien
tgtggtaaaagtatgggcaatttcctttccatc

SEQ ID NO: 964701 - DNA, 33 bp, Homo sapien
tttacaaaaagagagcaaatgagagacagttct

SEQ ID NO: 964702 - DNA, 33 bp, Homo sapien
tttacaaaaagagagccaatgagagacagttct

SEQ ID NO: 964703 - DNA, 33 bp, Homo sapien
tgtataaatgacactcggacttctgtttgccct

SEQ ID NO: 964704 - DNA, 33 bp, Homo sapien
tgtataaatgacactctgacttctgtttgccct

SEQ ID NO: 964705 - DNA, 33 bp, Homo sapien
atatctgaaacttaacaattagctacatccagc

SEQ ID NO: 964706 - DNA, 33 bp, Homo sapien
atatctgaaacttaactattagctacatccagc

SEQ ID NO: 964707 - DNA, 33 bp, Homo sapien
ttaagccttttcatagcaagttcttcaacatgt

SEQ ID NO: 964708 - DNA, 33 bp, Homo sapien
ttaagccttttcatagtaagttcttcaacatgt

SEQ ID NO: 964709 - DNA, 33 bp, Homo sapien
ccagcagaacaaagaaataacacaagaaaaagg

SEQ ID NO: 964710 - DNA, 33 bp, Homo sapien
ccagcagaacaaagaagtaacacaagaaaaagg

SEQ ID NO: 964711 - DNA, 33 bp, Homo sapien
caataaaccaccaagactcaaagtcctcaccaa

SEQ ID NO: 964712 - DNA, 33 bp, Homo sapien
caataaaccaccaagattcaaagtcctcaccaa

SEQ ID NO: 964713 - DNA, 33 bp, Homo sapien
gggagcctcttgagtcaatgctaactggttgtt

SEQ ID NO: 964714 - DNA, 33 bp, Homo sapien
gggagcctcttgagtcgatgctaactggttgtt

SEQ ID NO: 964715 - DNA, 33 bp, Homo sapien
tacttcagacacctaaggaaaaagtataataat

SEQ ID NO: 964716 - DNA, 33 bp, Homo sapien
tacttcagacacctaatgaaaaagtataataat

SEQ ID NO: 964717 - DNA, 33 bp, Homo sapien
gatttaaaatcctctcaagtaatcattcatatt

SEQ ID NO: 964718 - DNA, 33 bp, Homo sapien
gatttaaaatcctctcgagtaatcattcatatt

SEQ ID NO: 964719 - DNA, 33 bp, Homo sapien
ccatgaagacagaaatcatattggatttaaagt

SEQ ID NO: 964720 - DNA, 33 bp, Homo sapien
ccatgaagacagaaattatattggatttaaagt

SEQ ID NO: 964721 - DNA, 33 bp, Homo sapien
atccttgttgagataggagattttagatgctct

SEQ ID NO: 964722 - DNA, 33 bp, Homo sapien
atccttgttgagatagtagattttagatgctct

SEQ ID NO: 964723 - DNA, 33 bp, Homo sapien
gtaagatcatgctctcaatgggtcaataaaggt

SEQ ID NO: 964724 - DNA, 33 bp, Homo sapien
gtaagatcatgctctcgatgggtcaataaaggt

SEQ ID NO: 964725 - DNA, 33 bp, Homo sapien
tagttcctttcccttgaatgctttgtcctatgc

SEQ ID NO: 964726 - DNA, 33 bp, Homo sapien
tagttcctttcccttgtatgctttgtcctatgc

SEQ ID NO: 964727 - DNA, 33 bp, Homo sapien
acatgacctaagaagcacaggagacctgaggct

SEQ ID NO: 964728 - DNA, 33 bp, Homo sapien
acatgacctaagaagcccaggagacctgaggct

SEQ ID NO: 964729 - DNA, 33 bp, Homo sapien
agaaacatctaaagaaacatccgcagtgcgctt

SEQ ID NO: 964730 - DNA, 33 bp, Homo sapien
agaaacatctaaagaagcatccgcagtgcgctt

SEQ ID NO: 964731 - DNA, 33 bp, Homo sapien
gaaatttcaatttcgaatcataactgaggtata

SEQ ID NO: 964732 - DNA, 33 bp, Homo sapien
gaaatttcaatttcgagtcataactgaggtata

SEQ ID NO: 964733 - DNA, 33 bp, Homo sapien
acacattgttacatacactccctaacatgacat

SEQ ID NO: 964734 - DNA, 33 bp, Homo sapien
acacattgttacatacgctccctaacatgacat

SEQ ID NO: 964735 - DNA, 33 bp, Homo sapien
ttcagaggatgaaaacaactagatgtcatgtta

SEQ ID NO: 964736 - DNA, 33 bp, Homo sapien
ttcagaggatgaaaacgactagatgtcatgtta

SEQ ID NO: 964737 - DNA, 33 bp, Homo sapien
tagctgaggttatacagccatctagaagcgatg

SEQ ID NO: 964738 - DNA, 33 bp, Homo sapien
tagctgaggttatacatccatctagaagcgatg

SEQ ID NO: 964739 - DNA, 33 bp, Homo sapien
ataaaagctaaggagaactattttatcgtctct

SEQ ID NO: 964740 - DNA, 33 bp, Homo sapien
ataaaagctaaggagagctattttatcgtctct

SEQ ID NO: 964741 - DNA, 33 bp, Homo sapien
caaatgctgcttccaccatcatcttacttgact

SEQ ID NO: 964742 - DNA, 33 bp, Homo sapien
caaatgctgcttccactatcatcttacttgact

SEQ ID NO: 964743 - DNA, 33 bp, Homo sapien
gatcgagaggtaagaacgaaacagcaaaagaga

SEQ ID NO: 964744 - DNA, 33 bp, Homo sapien
gatcgagaggtaagaatgaaacagcaaaagaga

SEQ ID NO: 964745 - DNA, 33 bp, Homo sapien
tgtcccatgcttggtaagaagtgtagcagcatc

SEQ ID NO: 964746 - DNA, 33 bp, Homo sapien
tgtcccatgcttggtaggaagtgtagcagcatc

SEQ ID NO: 964747 - DNA, 33 bp, Homo sapien
gcctgttatcactgtcaatgttttggatgtagt

SEQ ID NO: 964748 - DNA, 33 bp, Homo sapien
gcctgttatcactgtccatgttttggatgtagt

SEQ ID NO: 964749 - DNA, 33 bp, Homo sapien
aagaatctacacctagacatagcatattcacat

SEQ ID NO: 964750 - DNA, 33 bp, Homo sapien
aagaatctacacctaggcatagcatattcacat

SEQ ID NO: 964751 - DNA, 33 bp, Homo sapien
gaggacaacagaaaaagaagtgcacttgatgaa

SEQ ID NO: 964752 - DNA, 33 bp, Homo sapien
gaggacaacagaaaaataagtgcacttgatgaa

SEQ ID NO: 964753 - DNA, 33 bp, Homo sapien
acacagaatggttccacatgtttaacaacatga

SEQ ID NO: 964754 - DNA, 33 bp, Homo sapien
acacagaatggttccatatgtttaacaacatga

SEQ ID NO: 964755 - DNA, 33 bp, Homo sapien
gatggaaggagcaagaaggttgtgagaaaattc

SEQ ID NO: 964756 - DNA, 33 bp, Homo sapien
gatggaaggagcaagagggttgtgagaaaattc

SEQ ID NO: 964757 - DNA, 33 bp, Homo sapien
ggagagaaatggaaaacgccaatgctaaggata

SEQ ID NO: 964758 - DNA, 33 bp, Homo sapien
ggagagaaatggaaaatgccaatgctaaggata

SEQ ID NO: 964759 - DNA, 33 bp, Homo sapien
agttggttatcacagaagtttggccctttttct

SEQ ID NO: 964760 - DNA, 33 bp, Homo sapien
agttggttatcacagacgtttggccctttttct

SEQ ID NO: 964761 - DNA, 33 bp, Homo sapien
tctaacagataccaaaaaacgcagaagtagctt

SEQ ID NO: 964762 - DNA, 33 bp, Homo sapien
tctaacagataccaaacaacgcagaagtagctt

SEQ ID NO: 964763 - DNA, 33 bp, Homo sapien
aatccagcttccaataacttgttcttcatttct

SEQ ID NO: 964764 - DNA, 33 bp, Homo sapien
aatccagcttccaataccttgttcttcatttct

SEQ ID NO: 964765 - DNA, 33 bp, Homo sapien
taaatcgaatttgaaccgtaaaacaagttactg

SEQ ID NO: 964766 - DNA, 33 bp, Homo sapien
taaatcgaatttgaactgtaaaacaagttactg

SEQ ID NO: 964767 - DNA, 33 bp, Homo sapien
aaaccttgtcctgggaaaatttgctgtttaggc

SEQ ID NO: 964768 - DNA, 33 bp, Homo sapien
aaaccttgtcctgggagaatttgctgtttaggc

SEQ ID NO: 964769 - DNA, 33 bp, Homo sapien
tgttgtatttaatagactaaggtggacagaata

SEQ ID NO: 964770 - DNA, 33 bp, Homo sapien
tgttgtatttaatagattaaggtggacagaata

SEQ ID NO: 964771 - DNA, 33 bp, Homo sapien
tctatgagattgtgaactgtgataagattaact

SEQ ID NO: 964772 - DNA, 33 bp, Homo sapien
tctatgagattgtgaattgtgataagattaact

SEQ ID NO: 964773 - DNA, 33 bp, Homo sapien
tctgtgcagatttttcaaatgtaagatttcctg

SEQ ID NO: 964774 - DNA, 33 bp, Homo sapien
tctgtgcagatttttcgaatgtaagatttcctg

SEQ ID NO: 964775 - DNA, 33 bp, Homo sapien
tcataagggtgatggccgatactccagtaacaa

SEQ ID NO: 964776 - DNA, 33 bp, Homo sapien
tcataagggtgatggctgatactccagtaacaa

SEQ ID NO: 964777 - DNA, 33 bp, Homo sapien
cggtggtatttacctccctatgcagcaccagac

SEQ ID NO: 964778 - DNA, 33 bp, Homo sapien
cggtggtatttacctctctatgcagcaccagac

SEQ ID NO: 964779 - DNA, 33 bp, Homo sapien
gcctattctaccttaaaatgtctttctgatgat

SEQ ID NO: 964780 - DNA, 33 bp, Homo sapien
gcctattctaccttaacatgtctttctgatgat

SEQ ID NO: 964781 - DNA, 33 bp, Homo sapien
cagttacgtgaaatcgaagttcaaagtcatagt

SEQ ID NO: 964782 - DNA, 33 bp, Homo sapien
cagttacgtgaaatcgcagttcaaagtcatagt

SEQ ID NO: 964783 - DNA, 33 bp, Homo sapien
cattttattgactttacaaaaattctcattatt

SEQ ID NO: 964784 - DNA, 33 bp, Homo sapien
cattttattgactttagaaaaattctcattatt

SEQ ID NO: 964785 - DNA, 33 bp, Homo sapien
aggtcaataggcagaagacttggtctcatgttg

SEQ ID NO: 964786 - DNA, 33 bp, Homo sapien
aggtcaataggcagaatacttggtctcatgttg

SEQ ID NO: 964787 - DNA, 33 bp, Homo sapien
agttaacattttgccacattcacgtttctctgt

SEQ ID NO: 964788 - DNA, 33 bp, Homo sapien
agttaacattttgccatattcacgtttctctgt

SEQ ID NO: 964789 - DNA, 33 bp, Homo sapien
agtcccatgcctgcataatcactgtcctgatgg

SEQ ID NO: 964790 - DNA, 33 bp, Homo sapien
agtcccatgcctgcatcatcactgtcctgatgg

SEQ ID NO: 964791 - DNA, 33 bp, Homo sapien
cctacagtgagatcagcaataacttctcatcca

SEQ ID NO: 964792 - DNA, 33 bp, Homo sapien
cctacagtgagatcagtaataacttctcatcca

SEQ ID NO: 964793 - DNA, 33 bp, Homo sapien
acactatagaactagacagcaacccagagaaat

SEQ ID NO: 964794 - DNA, 33 bp, Homo sapien
acactatagaactagatagcaacccagagaaat

SEQ ID NO: 964795 - DNA, 33 bp, Homo sapien
gtaataccattatgaacatttcttgcttcaggc

SEQ ID NO: 964796 - DNA, 33 bp, Homo sapien
gtaataccattatgaagatttcttgcttcaggc

SEQ ID NO: 964797 - DNA, 33 bp, Homo sapien
ctaatcttggtttgcgcagttaagggattatag

SEQ ID NO: 964798 - DNA, 33 bp, Homo sapien
ctaatcttggtttgcgtagttaagggattatag

SEQ ID NO: 964799 - DNA, 33 bp, Homo sapien
atgcagtcctatgatcaaggtaatgcagaggaa

SEQ ID NO: 964800 - DNA, 33 bp, Homo sapien
atgcagtcctatgatcgaggtaatgcagaggaa

SEQ ID NO: 964801 - DNA, 33 bp, Homo sapien
ttcatgaataagcatcaccttcaggaagctaag

SEQ ID NO: 964802 - DNA, 33 bp, Homo sapien
ttcatgaataagcatcgccttcaggaagctaag

SEQ ID NO: 964803 - DNA, 33 bp, Homo sapien
ttatgaggttgtgacactaattgaaaagaacac

SEQ ID NO: 964804 - DNA, 33 bp, Homo sapien
ttatgaggttgtgacattaattgaaaagaacac

SEQ ID NO: 964805 - DNA, 33 bp, Homo sapien
gcacatatgtggaaaaaaatgcttcaaaactgc

SEQ ID NO: 964806 - DNA, 33 bp, Homo sapien
gcacatatgtggaaaagaatgcttcaaaactgc

SEQ ID NO: 964807 - DNA, 33 bp, Homo sapien
acgtctcccttgccacaccattaggaatcggga

SEQ ID NO: 964808 - DNA, 33 bp, Homo sapien
acgtctcccttgccacgccattaggaatcggga

SEQ ID NO: 964809 - DNA, 33 bp, Homo sapien
gtgtctgaaaggccgactcccgattcctaatgg

SEQ ID NO: 964810 - DNA, 33 bp, Homo sapien
gtgtctgaaaggccgattcccgattcctaatgg

SEQ ID NO: 964811 - DNA, 33 bp, Homo sapien
gccaaatttcactggaaaataacccaagagaaa

SEQ ID NO: 964812 - DNA, 33 bp, Homo sapien
gccaaatttcactggagaataacccaagagaaa

SEQ ID NO: 964813 - DNA, 33 bp, Homo sapien
aggcttcaagtcaaaacggactaatttcttaac

SEQ ID NO: 964814 - DNA, 33 bp, Homo sapien
aggcttcaagtcaaaatggactaatttcttaac

SEQ ID NO: 964815 - DNA, 33 bp, Homo sapien
tcagttctacgttgaacacatatggtgagagtg

SEQ ID NO: 964816 - DNA, 33 bp, Homo sapien
tcagttctacgttgaatacatatggtgagagtg

SEQ ID NO: 964817 - DNA, 33 bp, Homo sapien
aattgctagttttctacatttaataccatgata

SEQ ID NO: 964818 - DNA, 33 bp, Homo sapien
aattgctagttttctatatttaataccatgata

SEQ ID NO: 964819 - DNA, 33 bp, Homo sapien
agaaaaatgagaataaagtaaggacagtcagat

SEQ ID NO: 964820 - DNA, 33 bp, Homo sapien
agaaaaatgagaataaggtaaggacagtcagat

SEQ ID NO: 964821 - DNA, 33 bp, Homo sapien
tttattacactttgaaaatgtttttggaagggt

SEQ ID NO: 964822 - DNA, 33 bp, Homo sapien
tttattacactttgaatatgtttttggaagggt

SEQ ID NO: 964823 - DNA, 33 bp, Homo sapien
aagatcgggaacttcactatcatcatcatcatc

SEQ ID NO: 964824 - DNA, 33 bp, Homo sapien
aagatcgggaacttcattatcatcatcatcatc

SEQ ID NO: 964825 - DNA, 33 bp, Homo sapien
ttaccaagccaaaggtgaagtgggatgtaagca

SEQ ID NO: 964826 - DNA, 33 bp, Homo sapien
ttaccaagccaaaggttaagtgggatgtaagca

SEQ ID NO: 964827 - DNA, 33 bp, Homo sapien
tttggaataatctaccggaataaagtttcaaag

SEQ ID NO: 964828 - DNA, 33 bp, Homo sapien
tttggaataatctacctgaataaagtttcaaag

SEQ ID NO: 964829 - DNA, 33 bp, Homo sapien
cagactaggaacaagagagtttgcatgggaatt

SEQ ID NO: 964830 - DNA, 33 bp, Homo sapien
cagactaggaacaagatagtttgcatgggaatt

SEQ ID NO: 964831 - DNA, 33 bp, Homo sapien
cctctaattctctaacagaagaaggcagaaaag

SEQ ID NO: 964832 - DNA, 33 bp, Homo sapien
cctctaattctctaacggaagaaggcagaaaag

SEQ ID NO: 964833 - DNA, 33 bp, Homo sapien
ttcttatcaggaaacactctctttctattttca

SEQ ID NO: 964834 - DNA, 33 bp, Homo sapien
ttcttatcaggaaacattctctttctattttca

SEQ ID NO: 964835 - DNA, 33 bp, Homo sapien
aaatcttaaaccttccaagagtgtcgtaggatg

SEQ ID NO: 964836 - DNA, 33 bp, Homo sapien
aaatcttaaaccttccgagagtgtcgtaggatg

SEQ ID NO: 964837 - DNA, 33 bp, Homo sapien
tcttccagttgctctgcagagtatagaaacatt

SEQ ID NO: 964838 - DNA, 33 bp, Homo sapien
tcttccagttgctctgtagagtatagaaacatt

SEQ ID NO: 964839 - DNA, 33 bp, Homo sapien
cctgtataaggtttagccaaggatagagacttt

SEQ ID NO: 964840 - DNA, 33 bp, Homo sapien
cctgtataaggtttagtcaaggatagagacttt

SEQ ID NO: 964841 - DNA, 33 bp, Homo sapien
tcttaaaaaaaaagaaatgcagagcctcaggcc

SEQ ID NO: 964842 - DNA, 33 bp, Homo sapien
tcttaaaaaaaaagaagtgcagagcctcaggcc

SEQ ID NO: 964843 - DNA, 33 bp, Homo sapien
gcttataaacgcatctcacagtgtcttcaaata

SEQ ID NO: 964844 - DNA, 33 bp, Homo sapien
gcttataaacgcatcttacagtgtcttcaaata

SEQ ID NO: 964845 - DNA, 33 bp, Homo sapien
acttgtttccatgcgacgttgatccaattagga

SEQ ID NO: 964846 - DNA, 33 bp, Homo sapien
acttgtttccatgcgatgttgatccaattagga

SEQ ID NO: 964847 - DNA, 33 bp, Homo sapien
aaccacagccacacaaaatggtgtacttaaatg

SEQ ID NO: 964848 - DNA, 33 bp, Homo sapien
aaccacagccacacaagatggtgtacttaaatg

SEQ ID NO: 964849 - DNA, 33 bp, Homo sapien
ggggtctgactgttaaaaacaaacaagcaaaca

SEQ ID NO: 964850 - DNA, 33 bp, Homo sapien
ggggtctgactgttaacaacaaacaagcaaaca

SEQ ID NO: 964851 - DNA, 33 bp, Homo sapien
atgttctaacccaatgcagagcagctaagaacc

SEQ ID NO: 964852 - DNA, 33 bp, Homo sapien
atgttctaacccaatgtagagcagctaagaacc

SEQ ID NO: 964853 - DNA, 33 bp, Homo sapien
cgcagcctgggagtaacagggagaagaaaggct

SEQ ID NO: 964854 - DNA, 33 bp, Homo sapien
cgcagcctgggagtaagagggagaagaaaggct

SEQ ID NO: 964855 - DNA, 33 bp, Homo sapien
aaaacaccaagaaacagtaactgtgcaattctg

SEQ ID NO: 964856 - DNA, 33 bp, Homo sapien
aaaacaccaagaaacattaactgtgcaattctg

SEQ ID NO: 964857 - DNA, 33 bp, Homo sapien
ctttactcaagttgatataggtttaagttatgt

SEQ ID NO: 964858 - DNA, 33 bp, Homo sapien
ctttactcaagttgatgtaggtttaagttatgt

SEQ ID NO: 964859 - DNA, 33 bp, Homo sapien
agaggaacacatctaccgaagactcaggaggag

SEQ ID NO: 964860 - DNA, 33 bp, Homo sapien
agaggaacacatctactgaagactcaggaggag

SEQ ID NO: 964861 - DNA, 33 bp, Homo sapien
aatgaccctggaatagaatggagtcaaatcaca

SEQ ID NO: 964862 - DNA, 33 bp, Homo sapien
aatgaccctggaataggatggagtcaaatcaca

SEQ ID NO: 964863 - DNA, 33 bp, Homo sapien
ttaaaataattttccaagtcttccaatgattta

SEQ ID NO: 964864 - DNA, 33 bp, Homo sapien
ttaaaataattttccaggtcttccaatgattta

SEQ ID NO: 964865 - DNA, 33 bp, Homo sapien
atagctagttaaaacaataagtatcatctaatt

SEQ ID NO: 964866 - DNA, 33 bp, Homo sapien
atagctagttaaaacagtaagtatcatctaatt

SEQ ID NO: 964867 - DNA, 33 bp, Homo sapien
aagttctctggaagcacaagaatttggaaacag

SEQ ID NO: 964868 - DNA, 33 bp, Homo sapien
aagttctctggaagcataagaatttggaaacag

SEQ ID NO: 964869 - DNA, 33 bp, Homo sapien
accttttgggaaacaaatggagcctaatgtgtg

SEQ ID NO: 964870 - DNA, 33 bp, Homo sapien
accttttgggaaacaagtggagcctaatgtgtg

SEQ ID NO: 964871 - DNA, 33 bp, Homo sapien
aaaattagtggtgaatcaagatgaaaaattatg

SEQ ID NO: 964872 - DNA, 33 bp, Homo sapien
aaaattagtggtgaatgaagatgaaaaattatg

SEQ ID NO: 964873 - DNA, 33 bp, Homo sapien
taacttgggctttcaactcagctcagctactcc

SEQ ID NO: 964874 - DNA, 33 bp, Homo sapien
taacttgggctttcaattcagctcagctactcc

SEQ ID NO: 964875 - DNA, 33 bp, Homo sapien
gaaattttattcagtgaaaggtatattgtaact

SEQ ID NO: 964876 - DNA, 33 bp, Homo sapien
gaaattttattcagtggaaggtatattgtaact

SEQ ID NO: 964877 - DNA, 33 bp, Homo sapien
gagtaagatttcattgcaaagctgatatttcaa

SEQ ID NO: 964878 - DNA, 33 bp, Homo sapien
gagtaagatttcattgtaaagctgatatttcaa

SEQ ID NO: 964879 - DNA, 33 bp, Homo sapien
gggctaacacagatatcacatgaatgtctcagg

SEQ ID NO: 964880 - DNA, 33 bp, Homo sapien
gggctaacacagatattacatgaatgtctcagg

SEQ ID NO: 964881 - DNA, 33 bp, Homo sapien
cgtccatgggcatatgcaaagagaaagcctaag

SEQ ID NO: 964882 - DNA, 33 bp, Homo sapien
cgtccatgggcatatgtaaagagaaagcctaag

SEQ ID NO: 964883 - DNA, 33 bp, Homo sapien
gtaagtttcctgcttaccaattatttcaccttt

SEQ ID NO: 964884 - DNA, 33 bp, Homo sapien
gtaagtttcctgcttatcaattatttcaccttt

SEQ ID NO: 964885 - DNA, 33 bp, Homo sapien
agtataaggaggtacaaaaaggttgacaaatgc

SEQ ID NO: 964886 - DNA, 33 bp, Homo sapien
agtataaggaggtacacaaaggttgacaaatgc

SEQ ID NO: 964887 - DNA, 33 bp, Homo sapien
taaggccttgacttaacgttattaggggatttc

SEQ ID NO: 964888 - DNA, 33 bp, Homo sapien
taaggccttgacttaatgttattaggggatttc

SEQ ID NO: 964889 - DNA, 33 bp, Homo sapien
ctactattagagactgaagggaaacgcacaaag

SEQ ID NO: 964890 - DNA, 33 bp, Homo sapien
ctactattagagactggagggaaacgcacaaag

SEQ ID NO: 964891 - DNA, 33 bp, Homo sapien
atgttttataaagccaagtctggtctgtgagga

SEQ ID NO: 964892 - DNA, 33 bp, Homo sapien
atgttttataaagccaggtctggtctgtgagga

SEQ ID NO: 964893 - DNA, 33 bp, Homo sapien
ttgactatatgtgagagtccagaatattttaat

SEQ ID NO: 964894 - DNA, 33 bp, Homo sapien
ttgactatatgtgagattccagaatattttaat

SEQ ID NO: 964895 - DNA, 33 bp, Homo sapien
aaaagtcccggtgttacatattcaaacaagaag

SEQ ID NO: 964896 - DNA, 33 bp, Homo sapien
aaaagtcccggtgttatatattcaaacaagaag

SEQ ID NO: 964897 - DNA, 33 bp, Homo sapien
aagacttatcattaccaagattgtgactaaggt

SEQ ID NO: 964898 - DNA, 33 bp, Homo sapien
aagacttatcattaccgagattgtgactaaggt

SEQ ID NO: 964899 - DNA, 33 bp, Homo sapien
tgttgccgtggagtccgcttatgcatttgttac

SEQ ID NO: 964900 - DNA, 33 bp, Homo sapien
tgttgccgtggagtcctcttatgcatttgttac

SEQ ID NO: 964901 - DNA, 33 bp, Homo sapien
ctttgaggtttcaatgcaaggtattctaccttt

SEQ ID NO: 964902 - DNA, 33 bp, Homo sapien
ctttgaggtttcaatggaaggtattctaccttt

SEQ ID NO: 964903 - DNA, 33 bp, Homo sapien
caagatattttatgcaccagttgcttcacatct

SEQ ID NO: 964904 - DNA, 33 bp, Homo sapien
caagatattttatgcatcagttgcttcacatct

SEQ ID NO: 964905 - DNA, 33 bp, Homo sapien
ttgagaaacacaagtcacccttattaaatttca

SEQ ID NO: 964906 - DNA, 33 bp, Homo sapien
ttgagaaacacaagtcgcccttattaaatttca

SEQ ID NO: 964907 - DNA, 33 bp, Homo sapien
tgactctgtataccccaaagtagacacattgtg

SEQ ID NO: 964908 - DNA, 33 bp, Homo sapien
tgactctgtataccccgaagtagacacattgtg

SEQ ID NO: 964909 - DNA, 33 bp, Homo sapien
tctacaaattagaaagaacatatactcagaagc

SEQ ID NO: 964910 - DNA, 33 bp, Homo sapien
tctacaaattagaaaggacatatactcagaagc

SEQ ID NO: 964911 - DNA, 33 bp, Homo sapien
ccttggaattttggaacgataggagcacctttt

SEQ ID NO: 964912 - DNA, 33 bp, Homo sapien
ccttggaattttggaatgataggagcacctttt

SEQ ID NO: 964913 - DNA, 33 bp, Homo sapien
gatctcaagaaactacagtactagattacttga

SEQ ID NO: 964914 - DNA, 33 bp, Homo sapien
gatctcaagaaactacggtactagattacttga

SEQ ID NO: 964915 - DNA, 33 bp, Homo sapien
gccacctggtgacacacgccgcaaattttaggg

SEQ ID NO: 964916 - DNA, 33 bp, Homo sapien
gccacctggtgacacatgccgcaaattttaggg

SEQ ID NO: 964917 - DNA, 33 bp, Homo sapien
ttttcacaatggaaagaactaaacattaaaatg

SEQ ID NO: 964918 - DNA, 33 bp, Homo sapien
ttttcacaatggaaaggactaaacattaaaatg

SEQ ID NO: 964919 - DNA, 33 bp, Homo sapien
caagtttgaatgctaaaaccttaagggagagaa

SEQ ID NO: 964920 - DNA, 33 bp, Homo sapien
caagtttgaatgctaagaccttaagggagagaa

SEQ ID NO: 964921 - DNA, 33 bp, Homo sapien
tttgaaatgagttgagccctttcttaggttctc

SEQ ID NO: 964922 - DNA, 33 bp, Homo sapien
tttgaaatgagttgagtcctttcttaggttctc

SEQ ID NO: 964923 - DNA, 33 bp, Homo sapien
ccagatgggtggcaaaggccttatattattgat

SEQ ID NO: 964924 - DNA, 33 bp, Homo sapien
ccagatgggtggcaaatgccttatattattgat

SEQ ID NO: 964925 - DNA, 33 bp, Homo sapien
ttggagccagacattacgtaagatatgtggtct

SEQ ID NO: 964926 - DNA, 33 bp, Homo sapien
ttggagccagacattatgtaagatatgtggtct

SEQ ID NO: 964927 - DNA, 33 bp, Homo sapien
agaataggagctattaaacaaattatcacattc

SEQ ID NO: 964928 - DNA, 33 bp, Homo sapien
agaataggagctattacacaaattatcacattc

SEQ ID NO: 964929 - DNA, 33 bp, Homo sapien
acagattgctgatgaggatttctcggcaattca

SEQ ID NO: 964930 - DNA, 33 bp, Homo sapien
acagattgctgatgagtatttctcggcaattca

SEQ ID NO: 964931 - DNA, 33 bp, Homo sapien
cacacacagagactacagtagcaatcagcagtg

SEQ ID NO: 964932 - DNA, 33 bp, Homo sapien
cacacacagagactacggtagcaatcagcagtg

SEQ ID NO: 964933 - DNA, 33 bp, Homo sapien
tatccatgcgcagtttaaaaatttccaggaaaa

SEQ ID NO: 964934 - DNA, 33 bp, Homo sapien
tatccatgcgcagttttaaaatttccaggaaaa

SEQ ID NO: 964935 - DNA, 33 bp, Homo sapien
aattctacaaagaccaagatttggaatatcttc

SEQ ID NO: 964936 - DNA, 33 bp, Homo sapien
aattctacaaagaccatgatttggaatatcttc

SEQ ID NO: 964937 - DNA, 33 bp, Homo sapien
ttactgggaccacttacagcacaaatttctata

SEQ ID NO: 964938 - DNA, 33 bp, Homo sapien
ttactgggaccacttatagcacaaatttctata

SEQ ID NO: 964939 - DNA, 33 bp, Homo sapien
tcaagcctaagatacaatcttcctgtgcatctc

SEQ ID NO: 964940 - DNA, 33 bp, Homo sapien
tcaagcctaagatacagtcttcctgtgcatctc

SEQ ID NO: 964941 - DNA, 33 bp, Homo sapien
gttcagaaaagacaaactgagtgagagattttg

SEQ ID NO: 964942 - DNA, 33 bp, Homo sapien
gttcagaaaagacaaattgagtgagagattttg

SEQ ID NO: 964943 - DNA, 33 bp, Homo sapien
cttgcgaggtttgaaagaaacatttgatgggaa

SEQ ID NO: 964944 - DNA, 33 bp, Homo sapien
cttgcgaggtttgaaataaacatttgatgggaa

SEQ ID NO: 964945 - DNA, 33 bp, Homo sapien
cattgctgtgtgtccaatcttagagcattgttc

SEQ ID NO: 964946 - DNA, 33 bp, Homo sapien
cattgctgtgtgtccactcttagagcattgttc

SEQ ID NO: 964947 - DNA, 33 bp, Homo sapien
ttcaatgaagatggaaaaagtaaaagctagtca

SEQ ID NO: 964948 - DNA, 33 bp, Homo sapien
ttcaatgaagatggaagaagtaaaagctagtca

SEQ ID NO: 964949 - DNA, 33 bp, Homo sapien
tcatctgaacttggtacggttattcactccaaa

SEQ ID NO: 964950 - DNA, 33 bp, Homo sapien
tcatctgaacttggtatggttattcactccaaa

SEQ ID NO: 964951 - DNA, 33 bp, Homo sapien
actaaacaagtcattccccaagtatttaccttg

SEQ ID NO: 964952 - DNA, 33 bp, Homo sapien
actaaacaagtcattctccaagtatttaccttg

SEQ ID NO: 964953 - DNA, 33 bp, Homo sapien
actacatgaatggagacggaaggcagatgtcac

SEQ ID NO: 964954 - DNA, 33 bp, Homo sapien
actacatgaatggagagggaaggcagatgtcac

SEQ ID NO: 964955 - DNA, 33 bp, Homo sapien
gtggtgtaccttgaggcatctctgcattgggcc

SEQ ID NO: 964956 - DNA, 33 bp, Homo sapien
gtggtgtaccttgaggtatctctgcattgggcc

SEQ ID NO: 964957 - DNA, 33 bp, Homo sapien
cagctttccatagtaaacagatttcttcaactc

SEQ ID NO: 964958 - DNA, 33 bp, Homo sapien
cagctttccatagtaagcagatttcttcaactc

SEQ ID NO: 964959 - DNA, 33 bp, Homo sapien
atatgctggtatggcccgatttgttttgaaatc

SEQ ID NO: 964960 - DNA, 33 bp, Homo sapien
atatgctggtatggcctgatttgttttgaaatc

SEQ ID NO: 964961 - DNA, 33 bp, Homo sapien
tgatgtcagccacgagaccattatatagacttg

SEQ ID NO: 964962 - DNA, 33 bp, Homo sapien
tgatgtcagccacgaggccattatatagacttg

SEQ ID NO: 964963 - DNA, 33 bp, Homo sapien
aaatttcaaggtcatactatctgtgaatagaaa

SEQ ID NO: 964964 - DNA, 33 bp, Homo sapien
aaatttcaaggtcatattatctgtgaatagaaa

SEQ ID NO: 964965 - DNA, 33 bp, Homo sapien
tcttctgagactggaaggtacaagatgttcact

SEQ ID NO: 964966 - DNA, 33 bp, Homo sapien
tcttctgagactggaatgtacaagatgttcact

SEQ ID NO: 964967 - DNA, 33 bp, Homo sapien
aactgaggacgaaaaagttctaccatttgccca

SEQ ID NO: 964968 - DNA, 33 bp, Homo sapien
aactgaggacgaaaaatttctaccatttgccca

SEQ ID NO: 964969 - DNA, 33 bp, Homo sapien
ttatttcacatttttaactaacaacaattttta

SEQ ID NO: 964970 - DNA, 33 bp, Homo sapien
ttatttcacatttttagctaacaacaattttta

SEQ ID NO: 964971 - DNA, 33 bp, Homo sapien
aatcctccccttgtaagattttgattatgcttc

SEQ ID NO: 964972 - DNA, 33 bp, Homo sapien
aatcctccccttgtaatattttgattatgcttc

SEQ ID NO: 964973 - DNA, 33 bp, Homo sapien
tccaataagataataacggaaatgtgtttttgg

SEQ ID NO: 964974 - DNA, 33 bp, Homo sapien
tccaataagataataatggaaatgtgtttttgg

SEQ ID NO: 964975 - DNA, 33 bp, Homo sapien
cgggccaagtgctgccaatgaggaaaaggtggg

SEQ ID NO: 964976 - DNA, 33 bp, Homo sapien
cgggccaagtgctgccgatgaggaaaaggtggg

SEQ ID NO: 964977 - DNA, 33 bp, Homo sapien
actgtgttgattcagcagaagagaggttcctgg

SEQ ID NO: 964978 - DNA, 33 bp, Homo sapien
actgtgttgattcagccgaagagaggttcctgg

SEQ ID NO: 964979 - DNA, 33 bp, Homo sapien
acatagcatttaactagctggctagctttgttt

SEQ ID NO: 964980 - DNA, 33 bp, Homo sapien
acatagcatttaactatctggctagctttgttt

SEQ ID NO: 964981 - DNA, 33 bp, Homo sapien
tattggaattcccaccactccatttcacttcaa

SEQ ID NO: 964982 - DNA, 33 bp, Homo sapien
tattggaattcccacctctccatttcacttcaa

SEQ ID NO: 964983 - DNA, 33 bp, Homo sapien
ctacccacggggttgccacgactgagctttgag

SEQ ID NO: 964984 - DNA, 33 bp, Homo sapien
ctacccacggggttgctacgactgagctttgag

SEQ ID NO: 964985 - DNA, 33 bp, Homo sapien
aaatgggaatcattacaaaacacactttgtagg

SEQ ID NO: 964986 - DNA, 33 bp, Homo sapien
aaatgggaatcattacgaaacacactttgtagg

SEQ ID NO: 964987 - DNA, 33 bp, Homo sapien
aagtctctgcagttcacgtgtatcactgttgtt

SEQ ID NO: 964988 - DNA, 33 bp, Homo sapien
aagtctctgcagttcatgtgtatcactgttgtt

SEQ ID NO: 964989 - DNA, 33 bp, Homo sapien
tgcacactgtggttcacatcaaatttccatttg

SEQ ID NO: 964990 - DNA, 33 bp, Homo sapien
tgcacactgtggttcagatcaaatttccatttg

SEQ ID NO: 964991 - DNA, 33 bp, Homo sapien
catgcacaaccatgcccgagtgctttttgtatt

SEQ ID NO: 964992 - DNA, 33 bp, Homo sapien
catgcacaaccatgcctgagtgctttttgtatt

SEQ ID NO: 964993 - DNA, 33 bp, Homo sapien
cactttcccacatcaacggaatcaaataatcga

SEQ ID NO: 964994 - DNA, 33 bp, Homo sapien
cactttcccacatcaatggaatcaaataatcga

SEQ ID NO: 964995 - DNA, 33 bp, Homo sapien
gctgtacatttcaagacgcttatttctacacat

SEQ ID NO: 964996 - DNA, 33 bp, Homo sapien
gctgtacatttcaagatgcttatttctacacat

SEQ ID NO: 964997 - DNA, 33 bp, Homo sapien
ccaaccaagtcttaaccgcagaagccaaacaat

SEQ ID NO: 964998 - DNA, 33 bp, Homo sapien
ccaaccaagtcttaactgcagaagccaaacaat

SEQ ID NO: 964999 - DNA, 33 bp, Homo sapien
acctgatttatagttacaaccattgaagccctg

SEQ ID NO: 965000 - DNA, 33 bp, Homo sapien
acctgatttatagttagaaccattgaagccctg

SEQ ID NO: 965001 - DNA, 33 bp, Homo sapien
ggtcacgtttctaaaccacattgaaaggattgg

SEQ ID NO: 965002 - DNA, 33 bp, Homo sapien
ggtcacgtttctaaacgacattgaaaggattgg

SEQ ID NO: 965003 - DNA, 33 bp, Homo sapien
gaatgttagctttccacactttcagattttatg

SEQ ID NO: 965004 - DNA, 33 bp, Homo sapien
gaatgttagctttccatactttcagattttatg

SEQ ID NO: 965005 - DNA, 33 bp, Homo sapien
gtattactggatctagcatgattctgaactgag

SEQ ID NO: 965006 - DNA, 33 bp, Homo sapien
gtattactggatctaggatgattctgaactgag

SEQ ID NO: 965007 - DNA, 33 bp, Homo sapien
aatagacccacacatacacggtcaactgatgac

SEQ ID NO: 965008 - DNA, 33 bp, Homo sapien
aatagacccacacatatacggtcaactgatgac

SEQ ID NO: 965009 - DNA, 33 bp, Homo sapien
attttggagcattttgaatctttggatttgaga

SEQ ID NO: 965010 - DNA, 33 bp, Homo sapien
attttggagcattttggatctttggatttgaga

SEQ ID NO: 965011 - DNA, 33 bp, Homo sapien
tatggaattaactttaacccatgtgtaaaacat

SEQ ID NO: 965012 - DNA, 33 bp, Homo sapien
tatggaattaactttagcccatgtgtaaaacat

SEQ ID NO: 965013 - DNA, 33 bp, Homo sapien
tgatattccagttaaaccattcatctccttgtc

SEQ ID NO: 965014 - DNA, 33 bp, Homo sapien
tgatattccagttaaagcattcatctccttgtc

SEQ ID NO: 965015 - DNA, 33 bp, Homo sapien
ctggaatatcagggaaaaggaggtctgaggaag

SEQ ID NO: 965016 - DNA, 33 bp, Homo sapien
ctggaatatcagggaacaggaggtctgaggaag

SEQ ID NO: 965017 - DNA, 33 bp, Homo sapien
agtggagatggataaacggaagcattccaagta

SEQ ID NO: 965018 - DNA, 33 bp, Homo sapien
agtggagatggataaatggaagcattccaagta

SEQ ID NO: 965019 - DNA, 33 bp, Homo sapien
gattcatgcaatgttccagtgaagtggagatgg

SEQ ID NO: 965020 - DNA, 33 bp, Homo sapien
gattcatgcaatgttctagtgaagtggagatgg

SEQ ID NO: 965021 - DNA, 33 bp, Homo sapien
cactcacacatagagaaattacacatacattta

SEQ ID NO: 965022 - DNA, 33 bp, Homo sapien
cactcacacatagagatattacacatacattta

SEQ ID NO: 965023 - DNA, 33 bp, Homo sapien
aggatgtaagcactggaaaaatggcaacttcca

SEQ ID NO: 965024 - DNA, 33 bp, Homo sapien
aggatgtaagcactggcaaaatggcaacttcca

SEQ ID NO: 965025 - DNA, 33 bp, Homo sapien
gaagagtttgcctcacactgttgtttagctcat

SEQ ID NO: 965026 - DNA, 33 bp, Homo sapien
gaagagtttgcctcacgctgttgtttagctcat

SEQ ID NO: 965027 - DNA, 33 bp, Homo sapien
ttgaaaatgaccaaataagaccaagtgagacac

SEQ ID NO: 965028 - DNA, 33 bp, Homo sapien
ttgaaaatgaccaaatgagaccaagtgagacac

SEQ ID NO: 965029 - DNA, 33 bp, Homo sapien
ttggcccctcaactacaaatcagcctactctgt

SEQ ID NO: 965030 - DNA, 33 bp, Homo sapien
ttggcccctcaactacgaatcagcctactctgt

SEQ ID NO: 965031 - DNA, 33 bp, Homo sapien
tctactacaaaccctcacctagaatttgactgg

SEQ ID NO: 965032 - DNA, 33 bp, Homo sapien
tctactacaaaccctcgcctagaatttgactgg

SEQ ID NO: 965033 - DNA, 33 bp, Homo sapien
tgtctctgacaaaatccgaagtctccgtcaaat

SEQ ID NO: 965034 - DNA, 33 bp, Homo sapien
tgtctctgacaaaatctgaagtctccgtcaaat

SEQ ID NO: 965035 - DNA, 33 bp, Homo sapien
aacaatgctgttacataataccctgggtttgtt

SEQ ID NO: 965036 - DNA, 33 bp, Homo sapien
aacaatgctgttacatcataccctgggtttgtt

SEQ ID NO: 965037 - DNA, 33 bp, Homo sapien
cggagctaatgaataaatgtccgtagagttaag

SEQ ID NO: 965038 - DNA, 33 bp, Homo sapien
cggagctaatgaataattgtccgtagagttaag

SEQ ID NO: 965039 - DNA, 33 bp, Homo sapien
cttactagggcagaaaagtgtcttaaaatatat

SEQ ID NO: 965040 - DNA, 33 bp, Homo sapien
cttactagggcagaaacgtgtcttaaaatatat

SEQ ID NO: 965041 - DNA, 33 bp, Homo sapien
ggttcatttatgtagcaaaacacttatctgtta

SEQ ID NO: 965042 - DNA, 33 bp, Homo sapien
ggttcatttatgtagcgaaacacttatctgtta

SEQ ID NO: 965043 - DNA, 33 bp, Homo sapien
ttcagagtctttgtcaaggtatagttaaagaaa

SEQ ID NO: 965044 - DNA, 33 bp, Homo sapien
ttcagagtctttgtcagggtatagttaaagaaa

SEQ ID NO: 965045 - DNA, 33 bp, Homo sapien
aatcaaaagtaatgaaactattatgtgcaggac

SEQ ID NO: 965046 - DNA, 33 bp, Homo sapien
aatcaaaagtaatgaacctattatgtgcaggac

SEQ ID NO: 965047 - DNA, 33 bp, Homo sapien
tggaaataagcagatacacaatgaggaagaaaa

SEQ ID NO: 965048 - DNA, 33 bp, Homo sapien
tggaaataagcagatatacaatgaggaagaaaa

SEQ ID NO: 965049 - DNA, 33 bp, Homo sapien
gttatagtcaagtttgcataaccacttttgctc

SEQ ID NO: 965050 - DNA, 33 bp, Homo sapien
gttatagtcaagtttgtataaccacttttgctc

SEQ ID NO: 965051 - DNA, 33 bp, Homo sapien
tcacttttctcacttacattttccagaatgtcc

SEQ ID NO: 965052 - DNA, 33 bp, Homo sapien
tcacttttctcacttatattttccagaatgtcc

SEQ ID NO: 965053 - DNA, 33 bp, Homo sapien
ttgcagctggcagtctaaatcctatgagtaaat

SEQ ID NO: 965054 - DNA, 33 bp, Homo sapien
ttgcagctggcagtctgaatcctatgagtaaat

SEQ ID NO: 965055 - DNA, 33 bp, Homo sapien
ctgtcattgataattcactttcactctcaggtg

SEQ ID NO: 965056 - DNA, 33 bp, Homo sapien
ctgtcattgataattcgctttcactctcaggtg

SEQ ID NO: 965057 - DNA, 33 bp, Homo sapien
gtgaagagaatgcaagaagttgaagttctaacc

SEQ ID NO: 965058 - DNA, 33 bp, Homo sapien
gtgaagagaatgcaagcagttgaagttctaacc

SEQ ID NO: 965059 - DNA, 33 bp, Homo sapien
aagtttggtgaagttccatacccaatgccctac

SEQ ID NO: 965060 - DNA, 33 bp, Homo sapien
aagtttggtgaagttctatacccaatgccctac

SEQ ID NO: 965061 - DNA, 33 bp, Homo sapien
atttcagattatagaacagcgtgcgggtttcga

SEQ ID NO: 965062 - DNA, 33 bp, Homo sapien
atttcagattatagaagagcgtgcgggtttcga

SEQ ID NO: 965063 - DNA, 33 bp, Homo sapien
attcccaaatacatcacagaaactaggataatc

SEQ ID NO: 965064 - DNA, 33 bp, Homo sapien
attcccaaatacatcatagaaactaggataatc

SEQ ID NO: 965065 - DNA, 33 bp, Homo sapien
tttcatatcaaacaataatgatcttttggattt

SEQ ID NO: 965066 - DNA, 33 bp, Homo sapien
tttcatatcaaacaattatgatcttttggattt

SEQ ID NO: 965067 - DNA, 33 bp, Homo sapien
tctgtagagagccttgaacagtgtctgagattt

SEQ ID NO: 965068 - DNA, 33 bp, Homo sapien
tctgtagagagccttgcacagtgtctgagattt

SEQ ID NO: 965069 - DNA, 33 bp, Homo sapien
caaatggtacttagaaattcagacttaatctta

SEQ ID NO: 965070 - DNA, 33 bp, Homo sapien
caaatggtacttagaagttcagacttaatctta

SEQ ID NO: 965071 - DNA, 33 bp, Homo sapien
aacaggctgagttgagaagtggaaaaagttttg

SEQ ID NO: 965072 - DNA, 33 bp, Homo sapien
aacaggctgagttgagcagtggaaaaagttttg

SEQ ID NO: 965073 - DNA, 33 bp, Homo sapien
acaactaaaagccaagcagacagtagaagccct

SEQ ID NO: 965074 - DNA, 33 bp, Homo sapien
acaactaaaagccaaggagacagtagaagccct

SEQ ID NO: 965075 - DNA, 33 bp, Homo sapien
tttgtgagaattcaaactgggacaactaaaagc

SEQ ID NO: 965076 - DNA, 33 bp, Homo sapien
tttgtgagaattcaaagtgggacaactaaaagc

SEQ ID NO: 965077 - DNA, 33 bp, Homo sapien
ggaataaaagacattacattctgggtcagagat

SEQ ID NO: 965078 - DNA, 33 bp, Homo sapien
ggaataaaagacattagattctgggtcagagat

SEQ ID NO: 965079 - DNA, 33 bp, Homo sapien
gggatggaaactcttccaagtgagtctgtgaag

SEQ ID NO: 965080 - DNA, 33 bp, Homo sapien
gggatggaaactcttctaagtgagtctgtgaag

SEQ ID NO: 965081 - DNA, 33 bp, Homo sapien
caagttgttttttaaactcaaggatgaccttga

SEQ ID NO: 965082 - DNA, 33 bp, Homo sapien
caagttgttttttaaagtcaaggatgaccttga

SEQ ID NO: 965083 - DNA, 33 bp, Homo sapien
atttgtaggaataaccactaaaaaaatgaagta

SEQ ID NO: 965084 - DNA, 33 bp, Homo sapien
atttgtaggaataaccgctaaaaaaatgaagta

SEQ ID NO: 965085 - DNA, 33 bp, Homo sapien
ctggtggatccatgtccctcctcacatagagac

SEQ ID NO: 965086 - DNA, 33 bp, Homo sapien
ctggtggatccatgtctctcctcacatagagac

SEQ ID NO: 965087 - DNA, 33 bp, Homo sapien
cagaaataaatgggacagaactgatagcccgtg

SEQ ID NO: 965088 - DNA, 33 bp, Homo sapien
cagaaataaatgggacggaactgatagcccgtg

SEQ ID NO: 965089 - DNA, 33 bp, Homo sapien
gctctctacttctaaactgacacttccaggtgg

SEQ ID NO: 965090 - DNA, 33 bp, Homo sapien
gctctctacttctaaattgacacttccaggtgg

SEQ ID NO: 965091 - DNA, 33 bp, Homo sapien
acaatcaaaccaaggcaaaaaaaccacatcggc

SEQ ID NO: 965092 - DNA, 33 bp, Homo sapien
acaatcaaaccaaggcgaaaaaaccacatcggc

SEQ ID NO: 965093 - DNA, 33 bp, Homo sapien
tgtctgtactgccaaactcacagagttattttg

SEQ ID NO: 965094 - DNA, 33 bp, Homo sapien
tgtctgtactgccaaattcacagagttattttg

SEQ ID NO: 965095 - DNA, 33 bp, Homo sapien
ctccctgataaggaacacatgcttgatcctgcc

SEQ ID NO: 965096 - DNA, 33 bp, Homo sapien
ctccctgataaggaacgcatgcttgatcctgcc

SEQ ID NO: 965097 - DNA, 33 bp, Homo sapien
gagcattggccatatacgaaagaggaaatctga

SEQ ID NO: 965098 - DNA, 33 bp, Homo sapien
gagcattggccatatatgaaagaggaaatctga

SEQ ID NO: 965099 - DNA, 33 bp, Homo sapien
atgatccatttttgtcaatttcaggtatgtttg

SEQ ID NO: 965100 - DNA, 33 bp, Homo sapien
atgatccatttttgtcgatttcaggtatgtttg

SEQ ID NO: 965101 - DNA, 33 bp, Homo sapien
aacctataatgatttaaaggatttgaatggcat

SEQ ID NO: 965102 - DNA, 33 bp, Homo sapien
aacctataatgatttagaggatttgaatggcat

SEQ ID NO: 965103 - DNA, 33 bp, Homo sapien
aaaagaacacaacagacatttctcagataacaa

SEQ ID NO: 965104 - DNA, 33 bp, Homo sapien
aaaagaacacaacagatatttctcagataacaa

SEQ ID NO: 965105 - DNA, 33 bp, Homo sapien
atagaggcagcaaggagcccgtttctagcttgt

SEQ ID NO: 965106 - DNA, 33 bp, Homo sapien
atagaggcagcaaggatcccgtttctagcttgt

SEQ ID NO: 965107 - DNA, 33 bp, Homo sapien
aacataatttatcagaaccttaaaatgaggcag

SEQ ID NO: 965108 - DNA, 33 bp, Homo sapien
aacataatttatcagatccttaaaatgaggcag

SEQ ID NO: 965109 - DNA, 33 bp, Homo sapien
gccaactctatcagcaataaaggcagttgatgg

SEQ ID NO: 965110 - DNA, 33 bp, Homo sapien
gccaactctatcagcagtaaaggcagttgatgg

SEQ ID NO: 965111 - DNA, 33 bp, Homo sapien
gcttgaggggatggaaactcgatactccgtgat

SEQ ID NO: 965112 - DNA, 33 bp, Homo sapien
gcttgaggggatggaagctcgatactccgtgat

SEQ ID NO: 965113 - DNA, 33 bp, Homo sapien
aatgcagcgagaaagacatcatgaacctcaggc

SEQ ID NO: 965114 - DNA, 33 bp, Homo sapien
aatgcagcgagaaagatatcatgaacctcaggc

SEQ ID NO: 965115 - DNA, 33 bp, Homo sapien
tgatctgaatgtcaaacgatttcttctaattga

SEQ ID NO: 965116 - DNA, 33 bp, Homo sapien
tgatctgaatgtcaaatgatttcttctaattga

SEQ ID NO: 965117 - DNA, 33 bp, Homo sapien
gcccctaaattttaaccaggcaaatggtctccc

SEQ ID NO: 965118 - DNA, 33 bp, Homo sapien
gcccctaaattttaacgaggcaaatggtctccc

SEQ ID NO: 965119 - DNA, 33 bp, Homo sapien
ttttataaatctccatcacagatgccaaaccta

SEQ ID NO: 965120 - DNA, 33 bp, Homo sapien
ttttataaatctccattacagatgccaaaccta

SEQ ID NO: 965121 - DNA, 33 bp, Homo sapien
ttaaaactcccttcagcagaatgccatgttttg

SEQ ID NO: 965122 - DNA, 33 bp, Homo sapien
ttaaaactcccttcagtagaatgccatgttttg

SEQ ID NO: 965123 - DNA, 33 bp, Homo sapien
gaaacaaactctcatacggatttccactaagga

SEQ ID NO: 965124 - DNA, 33 bp, Homo sapien
gaaacaaactctcatatggatttccactaagga

SEQ ID NO: 965125 - DNA, 33 bp, Homo sapien
aggaggtgctagcagggagtgggatgcaggaaa

SEQ ID NO: 965126 - DNA, 33 bp, Homo sapien
aggaggtgctagcaggtagtgggatgcaggaaa

SEQ ID NO: 965127 - DNA, 33 bp, Homo sapien
tcctatgcaccgtgaaatacagttgacctttga

SEQ ID NO: 965128 - DNA, 33 bp, Homo sapien
tcctatgcaccgtgaagtacagttgacctttga

SEQ ID NO: 965129 - DNA, 33 bp, Homo sapien
ttatgagacgactccaagaatctttgcttttgg

SEQ ID NO: 965130 - DNA, 33 bp, Homo sapien
ttatgagacgactccaggaatctttgcttttgg

SEQ ID NO: 965131 - DNA, 33 bp, Homo sapien
gctactgaacttgaagcaagcacttacctttta

SEQ ID NO: 965132 - DNA, 33 bp, Homo sapien
gctactgaacttgaaggaagcacttacctttta

SEQ ID NO: 965133 - DNA, 33 bp, Homo sapien
cattttagtcactagtaaattagctgtgaagac

SEQ ID NO: 965134 - DNA, 33 bp, Homo sapien
cattttagtcactagtcaattagctgtgaagac

SEQ ID NO: 965135 - DNA, 33 bp, Homo sapien
ccttagcctagctacaacccctccacatggcct

SEQ ID NO: 965136 - DNA, 33 bp, Homo sapien
ccttagcctagctacaccccctccacatggcct

SEQ ID NO: 965137 - DNA, 33 bp, Homo sapien
aagctcaaggcacaccacaaaattcatcagcat

SEQ ID NO: 965138 - DNA, 33 bp, Homo sapien
aagctcaaggcacaccgcaaaattcatcagcat

SEQ ID NO: 965139 - DNA, 33 bp, Homo sapien
agtaggtgttgtcaaacatgctgacattaaaac

SEQ ID NO: 965140 - DNA, 33 bp, Homo sapien
agtaggtgttgtcaaagatgctgacattaaaac

SEQ ID NO: 965141 - DNA, 33 bp, Homo sapien
gctgcctctgactcaacgctgtttgtgaacagc

SEQ ID NO: 965142 - DNA, 33 bp, Homo sapien
gctgcctctgactcaatgctgtttgtgaacagc

SEQ ID NO: 965143 - DNA, 33 bp, Homo sapien
ctgtaaaagtgaataaagtacagatatttctta

SEQ ID NO: 965144 - DNA, 33 bp, Homo sapien
ctgtaaaagtgaataaggtacagatatttctta

SEQ ID NO: 965145 - DNA, 33 bp, Homo sapien
ttttgttgtgactatacattgcaaacaatgact

SEQ ID NO: 965146 - DNA, 33 bp, Homo sapien
ttttgttgtgactatatattgcaaacaatgact

SEQ ID NO: 965147 - DNA, 33 bp, Homo sapien
tgaatatgggaaacaacatgtagtagctttatt

SEQ ID NO: 965148 - DNA, 33 bp, Homo sapien
tgaatatgggaaacaatatgtagtagctttatt

SEQ ID NO: 965149 - DNA, 33 bp, Homo sapien
tgtgaatcaaaaggtaaaaatggacattgtcaa

SEQ ID NO: 965150 - DNA, 33 bp, Homo sapien
tgtgaatcaaaaggtagaaatggacattgtcaa

SEQ ID NO: 965151 - DNA, 33 bp, Homo sapien
gagcatttgaacactgaaagaattgctttgaac

SEQ ID NO: 965152 - DNA, 33 bp, Homo sapien
gagcatttgaacactgcaagaattgctttgaac

SEQ ID NO: 965153 - DNA, 33 bp, Homo sapien
aaaccctggactaagcccatattcttatcctct

SEQ ID NO: 965154 - DNA, 33 bp, Homo sapien
aaaccctggactaagctcatattcttatcctct

SEQ ID NO: 965155 - DNA, 33 bp, Homo sapien
ctgacaggatggcttacgactctgctttctgtt

SEQ ID NO: 965156 - DNA, 33 bp, Homo sapien
ctgacaggatggcttatgactctgctttctgtt

SEQ ID NO: 965157 - DNA, 33 bp, Homo sapien
gtcctgtaggaaataacactgagatcccagtat

SEQ ID NO: 965158 - DNA, 33 bp, Homo sapien
gtcctgtaggaaataatactgagatcccagtat

SEQ ID NO: 965159 - DNA, 33 bp, Homo sapien
tcagcttgatatggtaacatgattgtgaccttc

SEQ ID NO: 965160 - DNA, 33 bp, Homo sapien
tcagcttgatatggtagcatgattgtgaccttc

SEQ ID NO: 965161 - DNA, 33 bp, Homo sapien; identical to SEQ ID NO: 965159

SEQ ID NO: 965162 - DNA, 33 bp, Homo sapien; identical to SEQ ID NO: 965160

SEQ ID NO: 965163 - DNA, 33 bp, Homo sapien
ctatccatgtggactcaaagtcatctcttactg

SEQ ID NO: 965164 - DNA, 33 bp, Homo sapien
ctatccatgtggactcgaagtcatctcttactg

SEQ ID NO: 965165 - DNA, 33 bp, Homo sapien
aaatcattttagaagacagcgaatgagacagaa

SEQ ID NO: 965166 - DNA, 33 bp, Homo sapien
aaatcattttagaagagagcgaatgagacagaa

SEQ ID NO: 965167 - DNA, 33 bp, Homo sapien
gtggaaatgctgtagaaggtaagtactgccaca

SEQ ID NO: 965168 - DNA, 33 bp, Homo sapien
gtggaaatgctgtagagggtaagtactgccaca

SEQ ID NO: 965169 - DNA, 33 bp, Homo sapien
gtcagagcacaacacaagctatttggtttcctt

SEQ ID NO: 965170 - DNA, 33 bp, Homo sapien
gtcagagcacaacacaggctatttggtttcctt

SEQ ID NO: 965171 - DNA, 33 bp, Homo sapien
taaaataaaactgctacgaacatccatgtgcag

SEQ ID NO: 965172 - DNA, 33 bp, Homo sapien
taaaataaaactgctatgaacatccatgtgcag

SEQ ID NO: 965173 - DNA, 33 bp, Homo sapien
gtcatgtattccactcactgttcctgaggaaga

SEQ ID NO: 965174 - DNA, 33 bp, Homo sapien
gtcatgtattccactcgctgttcctgaggaaga

SEQ ID NO: 965175 - DNA, 33 bp, Homo sapien
tgttcaactaactgatcagaaagtcagagagca

SEQ ID NO: 965176 - DNA, 33 bp, Homo sapien
tgttcaactaactgattagaaagtcagagagca

SEQ ID NO: 965177 - DNA, 33 bp, Homo sapien
atgctaaggaactgaactgtatcccgcaggtaa

SEQ ID NO: 965178 - DNA, 33 bp, Homo sapien
atgctaaggaactgaattgtatcccgcaggtaa

SEQ ID NO: 965179 - DNA, 33 bp, Homo sapien
agcaccacatgacgacagaatgattccctgaat

SEQ ID NO: 965180 - DNA, 33 bp, Homo sapien
agcaccacatgacgacggaatgattccctgaat

SEQ ID NO: 965181 - DNA, 33 bp, Homo sapien
aggaaatggatagtgacctaagcgaattaacac

SEQ ID NO: 965182 - DNA, 33 bp, Homo sapien
aggaaatggatagtgagctaagcgaattaacac

SEQ ID NO: 965183 - DNA, 33 bp, Homo sapien
tttatcaatgccaccaatgaaaacccaatgaag

SEQ ID NO: 965184 - DNA, 33 bp, Homo sapien
tttatcaatgccaccagtgaaaacccaatgaag

SEQ ID NO: 965185 - DNA, 33 bp, Homo sapien
gcacacacattgttgcacagccatagccaccat

SEQ ID NO: 965186 - DNA, 33 bp, Homo sapien
gcacacacattgttgcgcagccatagccaccat

SEQ ID NO: 965187 - DNA, 33 bp, Homo sapien
ttactgaacacagatagaaacaacttatgtcac

SEQ ID NO: 965188 - DNA, 33 bp, Homo sapien
ttactgaacacagatataaacaacttatgtcac

SEQ ID NO: 965189 - DNA, 33 bp, Homo sapien
tttagttcctgaaaacagtctggtcatatctgg

SEQ ID NO: 965190 - DNA, 33 bp, Homo sapien
tttagttcctgaaaactgtctggtcatatctgg

SEQ ID NO: 965191 - DNA, 33 bp, Homo sapien
atataaagagaagccaatatttcccacggtata

SEQ ID NO: 965192 - DNA, 33 bp, Homo sapien
atataaagagaagccactatttcccacggtata

SEQ ID NO: 965193 - DNA, 33 bp, Homo sapien
tcagtatttcacggaaacaggaacatttgacag

SEQ ID NO: 965194 - DNA, 33 bp, Homo sapien
tcagtatttcacggaagcaggaacatttgacag

SEQ ID NO: 965195 - DNA, 33 bp, Homo sapien
tatttcctatcctctgacacccaaatatctcac

SEQ ID NO: 965196 - DNA, 33 bp, Homo sapien
tatttcctatcctctggcacccaaatatctcac

SEQ ID NO: 965197 - DNA, 33 bp, Homo sapien
catggaagaaataaccagatgtgtgattatata

SEQ ID NO: 965198 - DNA, 33 bp, Homo sapien
catggaagaaataaccggatgtgtgattatata

SEQ ID NO: 965199 - DNA, 33 bp, Homo sapien
aggcttcctggcttctaacattattcaaacatt

SEQ ID NO: 965200 - DNA, 33 bp, Homo sapien
aggcttcctggcttctgacattattcaaacatt

SEQ ID NO: 965201 - DNA, 33 bp, Homo sapien
agtgtgacttcgccagcacaaggcagtggtgac

SEQ ID NO: 965202 - DNA, 33 bp, Homo sapien
agtgtgacttcgccaggacaaggcagtggtgac

SEQ ID NO: 965203 - DNA, 33 bp, Homo sapien
ggcttccttggtctaccagctttgggaacataa

SEQ ID NO: 965204 - DNA, 33 bp, Homo sapien
ggcttccttggtctacgagctttgggaacataa

SEQ ID NO: 965205 - DNA, 33 bp, Homo sapien
ttttgctccggatagacggttgattaaaaagtc

SEQ ID NO: 965206 - DNA, 33 bp, Homo sapien
ttttgctccggatagatggttgattaaaaagtc

SEQ ID NO: 965207 - DNA, 33 bp, Homo sapien
gctggttataaaagtgacaattgctttaataat

SEQ ID NO: 965208 - DNA, 33 bp, Homo sapien
gctggttataaaagtggcaattgctttaataat

SEQ ID NO: 965209 - DNA, 33 bp, Homo sapien
acatataggagaggtacctagagccaaatgata

SEQ ID NO: 965210 - DNA, 33 bp, Homo sapien
acatataggagaggtatctagagccaaatgata

SEQ ID NO: 965211 - DNA, 33 bp, Homo sapien
catttcaagaagctcaaaaatcttgtaagtaaa

SEQ ID NO: 965212 - DNA, 33 bp, Homo sapien
catttcaagaagctcagaaatcttgtaagtaaa

SEQ ID NO: 965213 - DNA, 33 bp, Homo sapien
aattttagaaattgtacatgtgcttataagaga

SEQ ID NO: 965214 - DNA, 33 bp, Homo sapien
aattttagaaattgtatatgtgcttataagaga

SEQ ID NO: 965215 - DNA, 33 bp, Homo sapien
aagcctagattcacaccatatcattctctagac

SEQ ID NO: 965216 - DNA, 33 bp, Homo sapien
aagcctagattcacacgatatcattctctagac

SEQ ID NO: 965217 - DNA, 33 bp, Homo sapien
aaccacactttttctaatacaattctaggatcc

SEQ ID NO: 965218 - DNA, 33 bp, Homo sapien
aaccacactttttctagtacaattctaggatcc

SEQ ID NO: 965219 - DNA, 33 bp, Homo sapien
aagaaacctgtcttcaatacaggataatgatta

SEQ ID NO: 965220 - DNA, 33 bp, Homo sapien
aagaaacctgtcttcagtacaggataatgatta

SEQ ID NO: 965221 - DNA, 33 bp, Homo sapien
gagatgccttttttcaagtttccgtgatactaa

SEQ ID NO: 965222 - DNA, 33 bp, Homo sapien
gagatgccttttttcaggtttccgtgatactaa

SEQ ID NO: 965223 - DNA, 33 bp, Homo sapien
ttatttataaaattgccaagagttgcattaaaa

SEQ ID NO: 965224 - DNA, 33 bp, Homo sapien
ttatttataaaattgcgaagagttgcattaaaa

SEQ ID NO: 965225 - DNA, 33 bp, Homo sapien
ctgcccaaagcacataccaaaagcaaacataaa

SEQ ID NO: 965226 - DNA, 33 bp, Homo sapien
ctgcccaaagcacatagcaaaagcaaacataaa

SEQ ID NO: 965227 - DNA, 33 bp, Homo sapien
tcagaaaaagctgagacgaaaagatccactgaa

SEQ ID NO: 965228 - DNA, 33 bp, Homo sapien
tcagaaaaagctgagatgaaaagatccactgaa

SEQ ID NO: 965229 - DNA, 33 bp, Homo sapien
gcaaattgagggaaacgccaataagctgtagca

SEQ ID NO: 965230 - DNA, 33 bp, Homo sapien
gcaaattgagggaaactccaataagctgtagca

SEQ ID NO: 965231 - DNA, 33 bp, Homo sapien
agagcaaaagtaaacaaaaatagtgtgagcagg

SEQ ID NO: 965232 - DNA, 33 bp, Homo sapien
agagcaaaagtaaacataaatagtgtgagcagg

SEQ ID NO: 965233 - DNA, 33 bp, Homo sapien
tggacaacataacacaagtgctaacatatgcca

SEQ ID NO: 965234 - DNA, 33 bp, Homo sapien
tggacaacataacacaggtgctaacatatgcca

SEQ ID NO: 965235 - DNA, 33 bp, Homo sapien
tccagagcgatggcaaaacacattcttattaaa

SEQ ID NO: 965236 - DNA, 33 bp, Homo sapien
tccagagcgatggcaacacacattcttattaaa

SEQ ID NO: 965237 - DNA, 33 bp, Homo sapien
tcttttgccgtacagaacctcttaagtttaatt

SEQ ID NO: 965238 - DNA, 33 bp, Homo sapien
tcttttgccgtacagagcctcttaagtttaatt

SEQ ID NO: 965239 - DNA, 33 bp, Homo sapien
tcttcccttgtactcacaatgcccatgtttcat

SEQ ID NO: 965240 - DNA, 33 bp, Homo sapien
tcttcccttgtactcataatgcccatgtttcat

SEQ ID NO: 965241 - DNA, 33 bp, Homo sapien
ctttgatttaggttaaaccattgcactgtacct

SEQ ID NO: 965242 - DNA, 33 bp, Homo sapien
ctttgatttaggttaatccattgcactgtacct

SEQ ID NO: 965243 - DNA, 33 bp, Homo sapien
gggtatcttcactgaaagggttgggcattaaga

SEQ ID NO: 965244 - DNA, 33 bp, Homo sapien
gggtatcttcactgaaggggttgggcattaaga

SEQ ID NO: 965245 - DNA, 33 bp, Homo sapien
tctggagttctgtaaacgtggaagaaatcagac

SEQ ID NO: 965246 - DNA, 33 bp, Homo sapien
tctggagttctgtaaatgtggaagaaatcagac

SEQ ID NO: 965247 - DNA, 33 bp, Homo sapien
acccctctgagattccaaatgagcaagcaccct

SEQ ID NO: 965248 - DNA, 33 bp, Homo sapien
acccctctgagattccgaatgagcaagcaccct

SEQ ID NO: 965249 - DNA, 33 bp, Homo sapien
aacatgccctttgaaacgtgctacttttaaatc

SEQ ID NO: 965250 - DNA, 33 bp, Homo sapien
aacatgccctttgaaatgtgctacttttaaatc

SEQ ID NO: 965251 - DNA, 33 bp, Homo sapien
gtgacagattctcaaaacagctctcccagattg

SEQ ID NO: 965252 - DNA, 33 bp, Homo sapien
gtgacagattctcaaaccagctctcccagattg

SEQ ID NO: 965253 - DNA, 33 bp, Homo sapien
cttaataggatgaaaaagcagttcatcacgtct

SEQ ID NO: 965254 - DNA, 33 bp, Homo sapien
cttaataggatgaaaaggcagttcatcacgtct

SEQ ID NO: 965255 - DNA, 33 bp, Homo sapien
tcatagactaaaacaacagaatcctgtaaaaag

SEQ ID NO: 965256 - DNA, 33 bp, Homo sapien
tcatagactaaaacaagagaatcctgtaaaaag

SEQ ID NO: 965257 - DNA, 33 bp, Homo sapien
aagtattagccttgaaccttggtcagtagggag

SEQ ID NO: 965258 - DNA, 33 bp, Homo sapien
aagtattagccttgaatcttggtcagtagggag

SEQ ID NO: 965259 - DNA, 33 bp, Homo sapien
tcaactattgactcatgatctaccaggggaagg

SEQ ID NO: 965260 - DNA, 33 bp, Homo sapien
tcaactattgactcattatctaccaggggaagg

SEQ ID NO: 965261 - DNA, 33 bp, Homo sapien
cctccccgggtttccaacttgagtgctgatgga

SEQ ID NO: 965262 - DNA, 33 bp, Homo sapien
cctccccgggtttccagcttgagtgctgatgga

SEQ ID NO: 965263 - DNA, 33 bp, Homo sapien
ttcacttaggaattcaaaggcaagctggtggta

SEQ ID NO: 965264 - DNA, 33 bp, Homo sapien
ttcacttaggaattcataggcaagctggtggta

SEQ ID NO: 965265 - DNA, 33 bp, Homo sapien
tggaaatgctaaaggtaaaacagagaatgaaac

SEQ ID NO: 965266 - DNA, 33 bp, Homo sapien
tggaaatgctaaaggtgaaacagagaatgaaac

SEQ ID NO: 965267 - DNA, 33 bp, Homo sapien
gttgaaggaaaggatgaaaaccatgcatcacca

SEQ ID NO: 965268 - DNA, 33 bp, Homo sapien
gttgaaggaaaggatggaaaccatgcatcacca

SEQ ID NO: 965269 - DNA, 33 bp, Homo sapien
gcactgacaggacttaacaattgagtagatgtg

SEQ ID NO: 965270 - DNA, 33 bp, Homo sapien
gcactgacaggacttagcaattgagtagatgtg

SEQ ID NO: 965271 - DNA, 33 bp, Homo sapien
ggtctttctcactcaaaaattctatgcttctgt

SEQ ID NO: 965272 - DNA, 33 bp, Homo sapien
ggtctttctcactcaacaattctatgcttctgt

SEQ ID NO: 965273 - DNA, 33 bp, Homo sapien
ggtagaactcactaccaaggatcgttgaaacct

SEQ ID NO: 965274 - DNA, 33 bp, Homo sapien
ggtagaactcactaccgaggatcgttgaaacct

SEQ ID NO: 965275 - DNA, 33 bp, Homo sapien
atccacatggccaagaaggaagcaatgagtcca

SEQ ID NO: 965276 - DNA, 33 bp, Homo sapien
atccacatggccaagagggaagcaatgagtcca

SEQ ID NO: 965277 - DNA, 33 bp, Homo sapien
gtagtgttcaacgataccagcaaagctgctctg

SEQ ID NO: 965278 - DNA, 33 bp, Homo sapien
gtagtgttcaacgatatcagcaaagctgctctg

SEQ ID NO: 965279 - DNA, 33 bp, Homo sapien
gagcctgtcacgtaaacggggagaaatatcaat

SEQ ID NO: 965280 - DNA, 33 bp, Homo sapien
gagcctgtcacgtaaatggggagaaatatcaat

SEQ ID NO: 965281 - DNA, 33 bp, Homo sapien
tctctgtcctgagaataataagcaccaacttaa

SEQ ID NO: 965282 - DNA, 33 bp, Homo sapien
tctctgtcctgagaatgataagcaccaacttaa

SEQ ID NO: 965283 - DNA, 33 bp, Homo sapien
ttaaattctctcagtcccaaatcttttatctgc

SEQ ID NO: 965284 - DNA, 33 bp, Homo sapien
ttaaattctctcagtctcaaatcttttatctgc

SEQ ID NO: 965285 - DNA, 33 bp, Homo sapien
tgtctgatcttgtgaaatcctctaaggaaagtc

SEQ ID NO: 965286 - DNA, 33 bp, Homo sapien
tgtctgatcttgtgaagtcctctaaggaaagtc

SEQ ID NO: 965287 - DNA, 33 bp, Homo sapien
agttctcagaaacacaccatttcaagtttagaa

SEQ ID NO: 965288 - DNA, 33 bp, Homo sapien
agttctcagaaacacatcatttcaagtttagaa

SEQ ID NO: 965289 - DNA, 33 bp, Homo sapien
atcctggccctgaccaacgtaagcagccattac

SEQ ID NO: 965290 - DNA, 33 bp, Homo sapien
atcctggccctgaccagcgtaagcagccattac

SEQ ID NO: 965291 - DNA, 33 bp, Homo sapien
gcaggcagagcttcctcaaacactctatgtggc

SEQ ID NO: 965292 - DNA, 33 bp, Homo sapien
gcaggcagagcttccttaaacactctatgtggc

SEQ ID NO: 965293 - DNA, 33 bp, Homo sapien
tgttttagctttgcccaacattctgtaaatgtc

SEQ ID NO: 965294 - DNA, 33 bp, Homo sapien
tgttttagctttgcccgacattctgtaaatgtc

SEQ ID NO: 965295 - DNA, 33 bp, Homo sapien
acaaaatcttaaatgaagactgctgaagtagat

SEQ ID NO: 965296 - DNA, 33 bp, Homo sapien
acaaaatcttaaatgaggactgctgaagtagat

SEQ ID NO: 965297 - DNA, 33 bp, Homo sapien
ctcagatatactaaaacagacgatgggacctgt

SEQ ID NO: 965298 - DNA, 33 bp, Homo sapien
ctcagatatactaaaatagacgatgggacctgt

SEQ ID NO: 965299 - DNA, 33 bp, Homo sapien
atatctgagcataaggaaatatattgaagcaga

SEQ ID NO: 965300 - DNA, 33 bp, Homo sapien
atatctgagcataagggaatatattgaagcaga

SEQ ID NO: 965301 - DNA, 33 bp, Homo sapien
agagattccataactaaaagtctgcttcaatat

SEQ ID NO: 965302 - DNA, 33 bp, Homo sapien
agagattccataactacaagtctgcttcaatat

SEQ ID NO: 965303 - DNA, 33 bp, Homo sapien
aaggcctgagaaccagacagggatgctgcatct

SEQ ID NO: 965304 - DNA, 33 bp, Homo sapien
aaggcctgagaaccaggcagggatgctgcatct

SEQ ID NO: 965305 - DNA, 33 bp, Homo sapien
actgcgtggaggtctgaaagagcaacacagcag

SEQ ID NO: 965306 - DNA, 33 bp, Homo sapien
actgcgtggaggtctggaagagcaacacagcag

SEQ ID NO: 965307 - DNA, 33 bp, Homo sapien
cggcgtggatatccaactggttccatacattct

SEQ ID NO: 965308 - DNA, 33 bp, Homo sapien
cggcgtggatatccaagtggttccatacattct

SEQ ID NO: 965309 - DNA, 33 bp, Homo sapien
agtctactgacattgcacccctgctctaaggat

SEQ ID NO: 965310 - DNA, 33 bp, Homo sapien
agtctactgacattgcgcccctgctctaaggat

SEQ ID NO: 965311 - DNA, 33 bp, Homo sapien
ataggaacagataagaacaccttaaagtccttt

SEQ ID NO: 965312 - DNA, 33 bp, Homo sapien
ataggaacagataagagcaccttaaagtccttt

SEQ ID NO: 965313 - DNA, 33 bp, Homo sapien
ccatccctcaggtaataactcagtgatccaggt

SEQ ID NO: 965314 - DNA, 33 bp, Homo sapien
ccatccctcaggtaatgactcagtgatccaggt

SEQ ID NO: 965315 - DNA, 33 bp, Homo sapien
agtcattccagagcaactgagtcaaggtagcat

SEQ ID NO: 965316 - DNA, 33 bp, Homo sapien
agtcattccagagcaattgagtcaaggtagcat

SEQ ID NO: 965317 - DNA, 33 bp, Homo sapien
atgctgagaagtggaaaaggtataataagttga

SEQ ID NO: 965318 - DNA, 33 bp, Homo sapien
atgctgagaagtggaacaggtataataagttga

SEQ ID NO: 965319 - DNA, 33 bp, Homo sapien
acaaaaatgctttgaccgaggatccatcagagg

SEQ ID NO: 965320 - DNA, 33 bp, Homo sapien
acaaaaatgctttgactgaggatccatcagagg

SEQ ID NO: 965321 - DNA, 33 bp, Homo sapien
cctgtcatgctcttcccaaattcttctagggaa

SEQ ID NO: 965322 - DNA, 33 bp, Homo sapien
cctgtcatgctcttcctaaattcttctagggaa

SEQ ID NO: 965323 - DNA, 33 bp, Homo sapien
tcaataatcaggtggaaaaatgatgacttctat

SEQ ID NO: 965324 - DNA, 33 bp, Homo sapien
tcaataatcaggtggacaaatgatgacttctat

SEQ ID NO: 965325 - DNA, 33 bp, Homo sapien
ttctgaccctagaatacgtaagcattttaaaga

SEQ ID NO: 965326 - DNA, 33 bp, Homo sapien
ttctgaccctagaatatgtaagcattttaaaga

SEQ ID NO: 965327 - DNA, 33 bp, Homo sapien
tgggcttgcttttaaccgctctctttcagaagc

SEQ ID NO: 965328 - DNA, 33 bp, Homo sapien
tgggcttgcttttaactgctctctttcagaagc

SEQ ID NO: 965329 - DNA, 33 bp, Homo sapien
ccgctgcactgtgggaactactctctggactgg

SEQ ID NO: 965330 - DNA, 33 bp, Homo sapien
ccgctgcactgtgggatctactctctggactgg

SEQ ID NO: 965331 - DNA, 33 bp, Homo sapien; identical to SEQ ID NO: 965329

SEQ ID NO: 965332 - DNA, 33 bp, Homo sapien; identical to SEQ ID NO: 965330

SEQ ID NO: 965333 - DNA, 33 bp, Homo sapien
ctggaggctattatacccagtgaaataactcag

SEQ ID NO: 965334 - DNA, 33 bp, Homo sapien
ctggaggctattatactcagtgaaataactcag

SEQ ID NO: 965335 - DNA, 33 bp, Homo sapien
cacagtcatgagaaaaattgccatttctgagta

SEQ ID NO: 965336 - DNA, 33 bp, Homo sapien
cacagtcatgagaaaacttgccatttctgagta

SEQ ID NO: 965337 - DNA, 33 bp, Homo sapien
gtgctggcagtgattccatttgggaacagtatc

SEQ ID NO: 965338 - DNA, 33 bp, Homo sapien
gtgctggcagtgattctatttgggaacagtatc

SEQ ID NO: 965339 - DNA, 33 bp, Homo sapien
gactttggctaaaacaacatatgcctaatacct

SEQ ID NO: 965340 - DNA, 33 bp, Homo sapien
gactttggctaaaacagcatatgcctaatacct

SEQ ID NO: 965341 - DNA, 33 bp, Homo sapien
tctttagatacttcaacgtggttcagtacaagc

SEQ ID NO: 965342 - DNA, 33 bp, Homo sapien
tctttagatacttcaatgtggttcagtacaagc

SEQ ID NO: 965343 - DNA, 33 bp, Homo sapien
cttctgctcttcttggcattcaaagcctgctaa

SEQ ID NO: 965344 - DNA, 33 bp, Homo sapien
cttctgctcttcttggtattcaaagcctgctaa

SEQ ID NO: 965345 - DNA, 33 bp, Homo sapien
aaggcagaatttcagacggatgaactagtgaag

SEQ ID NO: 965346 - DNA, 33 bp, Homo sapien
aaggcagaatttcagatggatgaactagtgaag

SEQ ID NO: 965347 - DNA, 33 bp, Homo sapien
gtttgaaaataaacaaatatgacaatgagatga

SEQ ID NO: 965348 - DNA, 33 bp, Homo sapien
gtttgaaaataaacaattatgacaatgagatga

SEQ ID NO: 965349 - DNA, 33 bp, Homo sapien
actggttctgccagcaacgtgaaacctgagcag

SEQ ID NO: 965350 - DNA, 33 bp, Homo sapien
actggttctgccagcagcgtgaaacctgagcag

SEQ ID NO: 965351 - DNA, 33 bp, Homo sapien
tcttcttctataacacagagaaactggaaaagt

SEQ ID NO: 965352 - DNA, 33 bp, Homo sapien
tcttcttctataacactgagaaactggaaaagt

SEQ ID NO: 965353 - DNA, 33 bp, Homo sapien
gttatagaagaagaaacgagactcagcatggta

SEQ ID NO: 965354 - DNA, 33 bp, Homo sapien
gttatagaagaagaaatgagactcagcatggta

SEQ ID NO: 965355 - DNA, 33 bp, Homo sapien
gcaacatggagggcaaactggtttttacagttc

SEQ ID NO: 965356 - DNA, 33 bp, Homo sapien
gcaacatggagggcaacctggtttttacagttc

SEQ ID NO: 965357 - DNA, 33 bp, Homo sapien
agcttgttgcatttaacgaccaaatctatcgtt

SEQ ID NO: 965358 - DNA, 33 bp, Homo sapien
agcttgttgcatttaatgaccaaatctatcgtt

SEQ ID NO: 965359 - DNA, 33 bp, Homo sapien
tataaggctacatcaaagtataggacaaatttg

SEQ ID NO: 965360 - DNA, 33 bp, Homo sapien
tataaggctacatcaacgtataggacaaatttg

SEQ ID NO: 965361 - DNA, 33 bp, Homo sapien
aagaaaagcaagcaccaagaggaagtataataa

SEQ ID NO: 965362 - DNA, 33 bp, Homo sapien
aagaaaagcaagcaccgagaggaagtataataa

SEQ ID NO: 965363 - DNA, 33 bp, Homo sapien
gtttcttcgctcctgaagagaaatagaaagaaa

SEQ ID NO: 965364 - DNA, 33 bp, Homo sapien
gtttcttcgctcctgaggagaaatagaaagaaa

SEQ ID NO: 965365 - DNA, 33 bp, Homo sapien
ctgttggaccttgacacgagcaggaatggatcc

SEQ ID NO: 965366 - DNA, 33 bp, Homo sapien
ctgttggaccttgacatgagcaggaatggatcc

SEQ ID NO: 965367 - DNA, 33 bp, Homo sapien
ttagtcagtggactcaactacttttgcattgat

SEQ ID NO: 965368 - DNA, 33 bp, Homo sapien
ttagtcagtggactcacctacttttgcattgat

SEQ ID NO: 965369 - DNA, 33 bp, Homo sapien
tgacttctggcttctacgttttgtcagtaggag

SEQ ID NO: 965370 - DNA, 33 bp, Homo sapien
tgacttctggcttctaggttttgtcagtaggag

SEQ ID NO: 965371 - DNA, 33 bp, Homo sapien
aacatgagactttgtgaataggaaaggtcacat

SEQ ID NO: 965372 - DNA, 33 bp, Homo sapien
aacatgagactttgtggataggaaaggtcacat

SEQ ID NO: 965373 - DNA, 33 bp, Homo sapien
taggttgtgtaaatccagaaaagtaggagtgag

SEQ ID NO: 965374 - DNA, 33 bp, Homo sapien
taggttgtgtaaatccggaaaagtaggagtgag

SEQ ID NO: 965375 - DNA, 33 bp, Homo sapien
ttttaacattagcgacaccatcttgattctgac

SEQ ID NO: 965376 - DNA, 33 bp, Homo sapien
ttttaacattagcgactccatcttgattctgac

SEQ ID NO: 965377 - DNA, 33 bp, Homo sapien
gaaaacaatatagacaatcaaagggtcaaaaaa

SEQ ID NO: 965378 - DNA, 33 bp, Homo sapien
gaaaacaatatagacagtcaaagggtcaaaaaa

SEQ ID NO: 965379 - DNA, 33 bp, Homo sapien
ttacaaaaatcacaagaaattctgttgataggt

SEQ ID NO: 965380 - DNA, 33 bp, Homo sapien
ttacaaaaatcacaagcaattctgttgataggt

SEQ ID NO: 965381 - DNA, 33 bp, Homo sapien
tctccctcccacctacaatgatatgaaaagatg

SEQ ID NO: 965382 - DNA, 33 bp, Homo sapien
tctccctcccacctaccatgatatgaaaagatg

SEQ ID NO: 965383 - DNA, 33 bp, Homo sapien
ggggactgagaggcaaatgagtcataaaatagt

SEQ ID NO: 965384 - DNA, 33 bp, Homo sapien
ggggactgagaggcaattgagtcataaaatagt

SEQ ID NO: 965385 - DNA, 33 bp, Homo sapien
tatatttagcaattaccaagtgcaagttttcta

SEQ ID NO: 965386 - DNA, 33 bp, Homo sapien
tatatttagcaattacgaagtgcaagttttcta

SEQ ID NO: 965387 - DNA, 33 bp, Homo sapien
atcaccacacaacacacacacctctgtcataaa

SEQ ID NO: 965388 - DNA, 33 bp, Homo sapien
atcaccacacaacacatacacctctgtcataaa

SEQ ID NO: 965389 - DNA, 33 bp, Homo sapien
aaagatggaggtcagacgcttgttccaagctag

SEQ ID NO: 965390 - DNA, 33 bp, Homo sapien
aaagatggaggtcagatgcttgttccaagctag

SEQ ID NO: 965391 - DNA, 33 bp, Homo sapien
gatcccagaacaaaccagcaatgttgacaccct

SEQ ID NO: 965392 - DNA, 33 bp, Homo sapien
gatcccagaacaaaccggcaatgttgacaccct

SEQ ID NO: 965393 - DNA, 33 bp, Homo sapien
tatttgtattctcccaaatgaatgtaaaaaggt

SEQ ID NO: 965394 - DNA, 33 bp, Homo sapien
tatttgtattctcccagatgaatgtaaaaaggt

SEQ ID NO: 965395 - DNA, 33 bp, Homo sapien
aaggaataccattagcactctttgtgaagttta

SEQ ID NO: 965396 - DNA, 33 bp, Homo sapien
aaggaataccattagcgctctttgtgaagttta

SEQ ID NO: 965397 - DNA, 33 bp, Homo sapien
cactcttttgcagataaatgtaaatgtctcaat

SEQ ID NO: 965398 - DNA, 33 bp, Homo sapien
cactcttttgcagatatatgtaaatgtctcaat

SEQ ID NO: 965399 - DNA, 33 bp, Homo sapien
gtaaatgtctcaattgcattctttttctacttt

SEQ ID NO: 965400 - DNA, 33 bp, Homo sapien
gtaaatgtctcaattgtattctttttctacttt

SEQ ID NO: 965401 - DNA, 33 bp, Homo sapien
gtggaaaaggtgatagccataaagatcataagc

SEQ ID NO: 965402 - DNA, 33 bp, Homo sapien
gtggaaaaggtgatagtcataaagatcataagc

SEQ ID NO: 965403 - DNA, 33 bp, Homo sapien
tcctggcagatagaataagatgaaggcaggatt

SEQ ID NO: 965404 - DNA, 33 bp, Homo sapien
tcctggcagatagaatgagatgaaggcaggatt

SEQ ID NO: 965405 - DNA, 33 bp, Homo sapien
aaactgttatacatcaaaaggtccaattaataa

SEQ ID NO: 965406 - DNA, 33 bp, Homo sapien
aaactgttatacatcataaggtccaattaataa

SEQ ID NO: 965407 - DNA, 33 bp, Homo sapien
ctgcatgtgaatctgcacccaaatttccctctt

SEQ ID NO: 965408 - DNA, 33 bp, Homo sapien
ctgcatgtgaatctgcgcccaaatttccctctt

SEQ ID NO: 965409 - DNA, 33 bp, Homo sapien
ttttattgagctatgacagctgtattaattgtg

SEQ ID NO: 965410 - DNA, 33 bp, Homo sapien
ttttattgagctatgatagctgtattaattgtg

SEQ ID NO: 965411 - DNA, 33 bp, Homo sapien
tcaattcttatttaccacctcagtttaccacca

SEQ ID NO: 965412 - DNA, 33 bp, Homo sapien
tcaattcttatttaccgcctcagtttaccacca

SEQ ID NO: 965413 - DNA, 33 bp, Homo sapien
gctaaacccagtcaaacacccaggaaatgatgt

SEQ ID NO: 965414 - DNA, 33 bp, Homo sapien
gctaaacccagtcaaatacccaggaaatgatgt

SEQ ID NO: 965415 - DNA, 33 bp, Homo sapien
ttctcccaatgtggtaaagtttcatggtctctg

SEQ ID NO: 965416 - DNA, 33 bp, Homo sapien
ttctcccaatgtggtagagtttcatggtctctg

SEQ ID NO: 965417 - DNA, 33 bp, Homo sapien
agtgagggtcatattccgaaacagagaccatga

SEQ ID NO: 965418 - DNA, 33 bp, Homo sapien
agtgagggtcatattctgaaacagagaccatga

SEQ ID NO: 965419 - DNA, 33 bp, Homo sapien
ttcaacagtttttaaacgtgaaatcctaacagt

SEQ ID NO: 965420 - DNA, 33 bp, Homo sapien
ttcaacagtttttaaatgtgaaatcctaacagt

SEQ ID NO: 965421 - DNA, 33 bp, Homo sapien
gaaaaatggaatgagccataacacttgtcctct

SEQ ID NO: 965422 - DNA, 33 bp, Homo sapien
gaaaaatggaatgagcgataacacttgtcctct

SEQ ID NO: 965423 - DNA, 33 bp, Homo sapien
tgatgaaatgataaataagcataaggcatttcc

SEQ ID NO: 965424 - DNA, 33 bp, Homo sapien
tgatgaaatgataaattagcataaggcatttcc

SEQ ID NO: 965425 - DNA, 33 bp, Homo sapien
gtgatgatatttttataagcccaaaaacctgaa

SEQ ID NO: 965426 - DNA, 33 bp, Homo sapien
gtgatgatatttttatcagcccaaaaacctgaa

SEQ ID NO: 965427 - DNA, 33 bp, Homo sapien
ataatgaaagctggtagaatgaacagtgatttc

SEQ ID NO: 965428 - DNA, 33 bp, Homo sapien
ataatgaaagctggtataatgaacagtgatttc

SEQ ID NO: 965429 - DNA, 33 bp, Homo sapien
taatttggatgagttacaacttattttatattt

SEQ ID NO: 965430 - DNA, 33 bp, Homo sapien
taatttggatgagttagaacttattttatattt

SEQ ID NO: 965431 - DNA, 33 bp, Homo sapien
agggccactagccacaaaaaaagaaatgagtag

SEQ ID NO: 965432 - DNA, 33 bp, Homo sapien
agggccactagccacagaaaaagaaatgagtag

SEQ ID NO: 965433 - DNA, 33 bp, Homo sapien
gagtgatgctgaacaacgcagatgttaccgact

SEQ ID NO: 965434 - DNA, 33 bp, Homo sapien
gagtgatgctgaacaaggcagatgttaccgact

SEQ ID NO: 965435 - DNA, 33 bp, Homo sapien
gaccgcccgtcctggcactgtatcctcagtgga

SEQ ID NO: 965436 - DNA, 33 bp, Homo sapien
gaccgcccgtcctggctctgtatcctcagtgga

SEQ ID NO: 965437 - DNA, 33 bp, Homo sapien
accacaaaacttagcaacctaaaccaacgtata

SEQ ID NO: 965438 - DNA, 33 bp, Homo sapien
accacaaaacttagcagcctaaaccaacgtata

SEQ ID NO: 965439 - DNA, 33 bp, Homo sapien
gggccacgtggtctaaagacattttccctggag

SEQ ID NO: 965440 - DNA, 33 bp, Homo sapien
gggccacgtggtctaaggacattttccctggag

SEQ ID NO: 965441 - DNA, 33 bp, Homo sapien
ttggagacatttcaaacaggataagagtgcatc

SEQ ID NO: 965442 - DNA, 33 bp, Homo sapien
ttggagacatttcaaataggataagagtgcatc

SEQ ID NO: 965443 - DNA, 33 bp, Homo sapien
gacaggattcaaccacaaaagaatattcacagg

SEQ ID NO: 965444 - DNA, 33 bp, Homo sapien
gacaggattcaaccacgaaagaatattcacagg

SEQ ID NO: 965445 - DNA, 33 bp, Homo sapien
tttacaaatgagtgaacagatggtaaattgttt

SEQ ID NO: 965446 - DNA, 33 bp, Homo sapien
tttacaaatgagtgaagagatggtaaattgttt

SEQ ID NO: 965447 - DNA, 33 bp, Homo sapien
gataaaaacccattaaaattctcacacgatgca

SEQ ID NO: 965448 - DNA, 33 bp, Homo sapien
gataaaaacccattaatattctcacacgatgca

SEQ ID NO: 965449 - DNA, 33 bp, Homo sapien
ggggtactctttagaaggtcatcagggagtgcc

SEQ ID NO: 965450 - DNA, 33 bp, Homo sapien
ggggtactctttagaatgtcatcagggagtgcc

SEQ ID NO: 965451 - DNA, 33 bp, Homo sapien
ctataaatttgctccaagatttgcagtaaaaca

SEQ ID NO: 965452 - DNA, 33 bp, Homo sapien
ctataaatttgctccaggatttgcagtaaaaca

SEQ ID NO: 965453 - DNA, 33 bp, Homo sapien
attaacatatcctaaacgcactttctttagaaa

SEQ ID NO: 965454 - DNA, 33 bp, Homo sapien
attaacatatcctaaatgcactttctttagaaa

SEQ ID NO: 965455 - DNA, 33 bp, Homo sapien
taggcagttagatatagattctctggagttcgg

SEQ ID NO: 965456 - DNA, 33 bp, Homo sapien
taggcagttagatatatattctctggagttcgg

SEQ ID NO: 965457 - DNA, 33 bp, Homo sapien
aacacttattgatgcgccagtgtacaacagcag

SEQ ID NO: 965458 - DNA, 33 bp, Homo sapien
aacacttattgatgcggcagtgtacaacagcag

SEQ ID NO: 965459 - DNA, 33 bp, Homo sapien
gcaatttcatagcaaaatagatcactgtaataa

SEQ ID NO: 965460 - DNA, 33 bp, Homo sapien
gcaatttcatagcaaagtagatcactgtaataa

SEQ ID NO: 965461 - DNA, 33 bp, Homo sapien
tttatttttctaaaggccatttatatgcaattt

SEQ ID NO: 965462 - DNA, 33 bp, Homo sapien
tttatttttctaaaggtcatttatatgcaattt

SEQ ID NO: 965463 - DNA, 33 bp, Homo sapien
agctggaaacataccaaggagctttatgcaatg

SEQ ID NO: 965464 - DNA, 33 bp, Homo sapien
agctggaaacataccagggagctttatgcaatg

SEQ ID NO: 965465 - DNA, 33 bp, Homo sapien
gcttacaggacccacaatgtaaaaaagagaggt

SEQ ID NO: 965466 - DNA, 33 bp, Homo sapien
gcttacaggacccacagtgtaaaaaagagaggt

SEQ ID NO: 965467 - DNA, 33 bp, Homo sapien
gggagacatttgcttcaccttctgttttcaaat

SEQ ID NO: 965468 - DNA, 33 bp, Homo sapien
gggagacatttgcttcgccttctgttttcaaat

SEQ ID NO: 965469 - DNA, 33 bp, Homo sapien
aacttcccaaatgaaacggcaatgagaaaaaat

SEQ ID NO: 965470 - DNA, 33 bp, Homo sapien
aacttcccaaatgaaatggcaatgagaaaaaat

SEQ ID NO: 965471 - DNA, 33 bp, Homo sapien
gcaactgccatatacacgaattcacacagagga

SEQ ID NO: 965472 - DNA, 33 bp, Homo sapien
gcaactgccatatacaggaattcacacagagga

SEQ ID NO: 965473 - DNA, 33 bp, Homo sapien
gatggagccagtctgaccttagtatccctcagt

SEQ ID NO: 965474 - DNA, 33 bp, Homo sapien
gatggagccagtctgatcttagtatccctcagt

SEQ ID NO: 965475 - DNA, 33 bp, Homo sapien
taaagttggccttataaaactcaaaatatttgg

SEQ ID NO: 965476 - DNA, 33 bp, Homo sapien
taaagttggccttatacaactcaaaatatttgg

SEQ ID NO: 965477 - DNA, 33 bp, Homo sapien
agtgttcaaatgatgacgccagggctctatttc

SEQ ID NO: 965478 - DNA, 33 bp, Homo sapien
agtgttcaaatgatgatgccagggctctatttc

SEQ ID NO: 965479 - DNA, 33 bp, Homo sapien
gattcattcttgacaaatggattgccttatcac

SEQ ID NO: 965480 - DNA, 33 bp, Homo sapien
gattcattcttgacaagtggattgccttatcac

SEQ ID NO: 965481 - DNA, 33 bp, Homo sapien
attaaaattctagtaacattggatattctatta

SEQ ID NO: 965482 - DNA, 33 bp, Homo sapien
attaaaattctagtaagattggatattctatta

SEQ ID NO: 965483 - DNA, 33 bp, Homo sapien
tagagaccttcatgtaacaatgaaataccagat

SEQ ID NO: 965484 - DNA, 33 bp, Homo sapien
tagagaccttcatgtatcaatgaaataccagat

SEQ ID NO: 965485 - DNA, 33 bp, Homo sapien
tcacattctggatggacagaaaaatgttaggaa

SEQ ID NO: 965486 - DNA, 33 bp, Homo sapien
tcacattctggatggagagaaaaatgttaggaa

SEQ ID NO: 965487 - DNA, 33 bp, Homo sapien
cgatgccaaaagacgacggaaatgtagtgccta

SEQ ID NO: 965488 - DNA, 33 bp, Homo sapien
cgatgccaaaagacgatggaaatgtagtgccta

SEQ ID NO: 965489 - DNA, 33 bp, Homo sapien
ctgaactgggtaaatacgaccatggatgttacc

SEQ ID NO: 965490 - DNA, 33 bp, Homo sapien
ctgaactgggtaaatatgaccatggatgttacc

SEQ ID NO: 965491 - DNA, 33 bp, Homo sapien
gatgagtacaggcaataatcacactgaccacat

SEQ ID NO: 965492 - DNA, 33 bp, Homo sapien
gatgagtacaggcaatgatcacactgaccacat

SEQ ID NO: 965493 - DNA, 33 bp, Homo sapien
gctggcattcactaagaaattatcaagtaccag

SEQ ID NO: 965494 - DNA, 33 bp, Homo sapien
gctggcattcactaagcaattatcaagtaccag

SEQ ID NO: 965495 - DNA, 33 bp, Homo sapien
gcctgatgatcacaacacaacccacttcatgcc

SEQ ID NO: 965496 - DNA, 33 bp, Homo sapien
gcctgatgatcacaacgcaacccacttcatgcc

SEQ ID NO: 965497 - DNA, 33 bp, Homo sapien
gatttcagtaggttggcactccaggatggcagt

SEQ ID NO: 965498 - DNA, 33 bp, Homo sapien
gatttcagtaggttggtactccaggatggcagt

SEQ ID NO: 965499 - DNA, 33 bp, Homo sapien
attcatccaactctggcaaatgttatgtggaaa

SEQ ID NO: 965500 - DNA, 33 bp, Homo sapien
attcatccaactctgggaaatgttatgtggaaa

SEQ ID NO: 965501 - DNA, 33 bp, Homo sapien
agctcatgacatctaacaatatcatctctactg

SEQ ID NO: 965502 - DNA, 33 bp, Homo sapien
agctcatgacatctaataatatcatctctactg

SEQ ID NO: 965503 - DNA, 33 bp, Homo sapien
tcatcttgtctggtataaacatctgggaaggat

SEQ ID NO: 965504 - DNA, 33 bp, Homo sapien
tcatcttgtctggtattaacatctgggaaggat

SEQ ID NO: 965505 - DNA, 33 bp, Homo sapien
gctctaacaaactaccaccaactaccacaaact

SEQ ID NO: 965506 - DNA, 33 bp, Homo sapien
gctctaacaaactacctccaactaccacaaact

SEQ ID NO: 965507 - DNA, 33 bp, Homo sapien
aaggtaatagcagtgaacattgataatatttat

SEQ ID NO: 965508 - DNA, 33 bp, Homo sapien
aaggtaatagcagtgagcattgataatatttat

SEQ ID NO: 965509 - DNA, 33 bp, Homo sapien
ctgttcacaggttaaacgaaagtgacagttatg

SEQ ID NO: 965510 - DNA, 33 bp, Homo sapien
ctgttcacaggttaaatgaaagtgacagttatg

SEQ ID NO: 965511 - DNA, 33 bp, Homo sapien
tgctcagttatctgagaaacaaatgaacagaca

SEQ ID NO: 965512 - DNA, 33 bp, Homo sapien
tgctcagttatctgaggaacaaatgaacagaca

SEQ ID NO: 965513 - DNA, 33 bp, Homo sapien
gaaggagaagtaggtcaagttggtgattacatg

SEQ ID NO: 965514 - DNA, 33 bp, Homo sapien
gaaggagaagtaggtccagttggtgattacatg

SEQ ID NO: 965515 - DNA, 33 bp, Homo sapien
gttctacttcagagaccgtaatattggcaacct

SEQ ID NO: 965516 - DNA, 33 bp, Homo sapien
gttctacttcagagacggtaatattggcaacct

SEQ ID NO: 965517 - DNA, 33 bp, Homo sapien
aagaaggctaactacaaggtgtatgcaaggaag

SEQ ID NO: 965518 - DNA, 33 bp, Homo sapien
aagaaggctaactacagggtgtatgcaaggaag

SEQ ID NO: 965519 - DNA, 33 bp, Homo sapien
cagaataaaaagaagcaatgcaaaattctagac

SEQ ID NO: 965520 - DNA, 33 bp, Homo sapien
cagaataaaaagaagcgatgcaaaattctagac

SEQ ID NO: 965521 - DNA, 33 bp, Homo sapien
gtctatgtatgtttaacggggaggccctatgaa

SEQ ID NO: 965522 - DNA, 33 bp, Homo sapien
gtctatgtatgtttaagggggaggccctatgaa

SEQ ID NO: 965523 - DNA, 33 bp, Homo sapien
tgaagttagagatcacaggaagatggcagatag

SEQ ID NO: 965524 - DNA, 33 bp, Homo sapien
tgaagttagagatcacgggaagatggcagatag

SEQ ID NO: 965525 - DNA, 33 bp, Homo sapien
actaattttgtttcaactacaaggtcagcaagc

SEQ ID NO: 965526 - DNA, 33 bp, Homo sapien
actaattttgtttcaagtacaaggtcagcaagc

SEQ ID NO: 965527 - DNA, 33 bp, Homo sapien; identical to SEQ ID NO: 965525

SEQ ID NO: 965528 - DNA, 33 bp, Homo sapien; identical to SEQ ID NO: 965526

SEQ ID NO: 965529 - DNA, 33 bp, Homo sapien
tttgcagttaatggtgcagagaactgatttgat

SEQ ID NO: 965530 - DNA, 33 bp, Homo sapien
tttgcagttaatggtggagagaactgatttgat

SEQ ID NO: 965531 - DNA, 33 bp, Homo sapien
atatgttaaaatttgcacttgaatgtccacatg

SEQ ID NO: 965532 - DNA, 33 bp, Homo sapien
atatgttaaaatttgcgcttgaatgtccacatg

SEQ ID NO: 965533 - DNA, 33 bp, Homo sapien
ccattattttcaagtacaaaattgcatcctgtg

SEQ ID NO: 965534 - DNA, 33 bp, Homo sapien
ccattattttcaagtataaaattgcatcctgtg

SEQ ID NO: 965535 - DNA, 33 bp, Homo sapien
agttcccgtacatagaagcttgttacagctggt

SEQ ID NO: 965536 - DNA, 33 bp, Homo sapien
agttcccgtacatagacgcttgttacagctggt

SEQ ID NO: 965537 - DNA, 33 bp, Homo sapien
tttcctcagtatgagaccttaaccactggagga

SEQ ID NO: 965538 - DNA, 33 bp, Homo sapien
tttcctcagtatgagagcttaaccactggagga

SEQ ID NO: 965539 - DNA, 33 bp, Homo sapien
cttccaaagacccccaaatctcatccagtcggg

SEQ ID NO: 965540 - DNA, 33 bp, Homo sapien
cttccaaagacccccagatctcatccagtcggg

SEQ ID NO: 965541 - DNA, 33 bp, Homo sapien
ctcccattccaaaggcacagaataaggagttac

SEQ ID NO: 965542 - DNA, 33 bp, Homo sapien
ctcccattccaaaggcgcagaataaggagttac

SEQ ID NO: 965543 - DNA, 33 bp, Homo sapien
tttaattttccagttacaagccatagctgccag

SEQ ID NO: 965544 - DNA, 33 bp, Homo sapien
tttaattttccagttataagccatagctgccag

SEQ ID NO: 965545 - DNA, 33 bp, Homo sapien
cccaccctggacaacaaccataccatgctttgc

SEQ ID NO: 965546 - DNA, 33 bp, Homo sapien
cccaccctggacaacacccataccatgctttgc

SEQ ID NO: 965547 - DNA, 33 bp, Homo sapien
agtcactgctgtacacaaacatttctggtgaga

SEQ ID NO: 965548 - DNA, 33 bp, Homo sapien
agtcactgctgtacaccaacatttctggtgaga

SEQ ID NO: 965549 - DNA, 33 bp, Homo sapien
acagccactgaaccaaacttgcctgcattcact

SEQ ID NO: 965550 - DNA, 33 bp, Homo sapien
acagccactgaaccaaccttgcctgcattcact

SEQ ID NO: 965551 - DNA, 33 bp, Homo sapien
ctatggcctcagcataaagtgagtaatttggga

SEQ ID NO: 965552 - DNA, 33 bp, Homo sapien
ctatggcctcagcatacagtgagtaatttggga

SEQ ID NO: 965553 - DNA, 33 bp, Homo sapien
atgttttgtatcctcagggcctaggacagtcct

SEQ ID NO: 965554 - DNA, 33 bp, Homo sapien
atgttttgtatcctcatggcctaggacagtcct

SEQ ID NO: 965555 - DNA, 33 bp, Homo sapien
caactgctcttggtgaaccccttccctctggaa

SEQ ID NO: 965556 - DNA, 33 bp, Homo sapien
caactgctcttggtgacccccttccctctggaa

SEQ ID NO: 965557 - DNA, 33 bp, Homo sapien
tatttttagctatttcgatgtggacccacaatc

SEQ ID NO: 965558 - DNA, 33 bp, Homo sapien
tatttttagctatttctatgtggacccacaatc

SEQ ID NO: 965559 - DNA, 33 bp, Homo sapien
gagaaagtaaccaaaccgcccacttccataaaa

SEQ ID NO: 965560 - DNA, 33 bp, Homo sapien
gagaaagtaaccaaactgcccacttccataaaa

SEQ ID NO: 965561 - DNA, 33 bp, Homo sapien
ggcctttatttaactaccatcacatagcaatta

SEQ ID NO: 965562 - DNA, 33 bp, Homo sapien
ggcctttatttaactatcatcacatagcaatta

SEQ ID NO: 965563 - DNA, 33 bp, Homo sapien
acacacacattaacaacactcatgtcaacacat

SEQ ID NO: 965564 - DNA, 33 bp, Homo sapien
acacacacattaacaagactcatgtcaacacat

SEQ ID NO: 965565 - DNA, 33 bp, Homo sapien
attttcccacagtttccattattacctgttaat

SEQ ID NO: 965566 - DNA, 33 bp, Homo sapien
attttcccacagtttcgattattacctgttaat

SEQ ID NO: 965567 - DNA, 33 bp, Homo sapien
tggtaaactgcagccaagttcctgtctagtaac

SEQ ID NO: 965568 - DNA, 33 bp, Homo sapien
tggtaaactgcagccaggttcctgtctagtaac

SEQ ID NO: 965569 - DNA, 33 bp, Homo sapien
tgtggatcaaaaaccaatgggaacctggaacca

SEQ ID NO: 965570 - DNA, 33 bp, Homo sapien
tgtggatcaaaaaccagtgggaacctggaacca

SEQ ID NO: 965571 - DNA, 33 bp, Homo sapien
atgaagcaatggctcaaatccaaatgagaagag

SEQ ID NO: 965572 - DNA, 33 bp, Homo sapien
atgaagcaatggctcagatccaaatgagaagag

SEQ ID NO: 965573 - DNA, 33 bp, Homo sapien
cttccctgtttaacaaatctcactatctttgtc

SEQ ID NO: 965574 - DNA, 33 bp, Homo sapien
cttccctgtttaacaagtctcactatctttgtc

SEQ ID NO: 965575 - DNA, 33 bp, Homo sapien
gtgaggtgaaatgataaatccaagatgggcatt

SEQ ID NO: 965576 - DNA, 33 bp, Homo sapien
gtgaggtgaaatgatagatccaagatgggcatt

SEQ ID NO: 965577 - DNA, 33 bp, Homo sapien
tagaatttcaacttacggcaaagtctttcagga

SEQ ID NO: 965578 - DNA, 33 bp, Homo sapien
tagaatttcaacttactgcaaagtctttcagga

SEQ ID NO: 965579 - DNA, 33 bp, Homo sapien
atgttctgggcccacacctacactgaggtgacc

SEQ ID NO: 965580 - DNA, 33 bp, Homo sapien
atgttctgggcccacagctacactgaggtgacc

SEQ ID NO: 965581 - DNA, 33 bp, Homo sapien
ggtgccagcacctatacagtgtcaacagggcaa

SEQ ID NO: 965582 - DNA, 33 bp, Homo sapien
ggtgccagcacctatagagtgtcaacagggcaa

SEQ ID NO: 965583 - DNA, 33 bp, Homo sapien
attacttgcttctttccccagggcactttgctc

SEQ ID NO: 965584 - DNA, 33 bp, Homo sapien
attacttgcttctttctccagggcactttgctc

SEQ ID NO: 965585 - DNA, 33 bp, Homo sapien
gtcattacgaaaatagaagcatctgttgggagt

SEQ ID NO: 965586 - DNA, 33 bp, Homo sapien
gtcattacgaaaatagcagcatctgttgggagt

SEQ ID NO: 965587 - DNA, 33 bp, Homo sapien
tgtttctattctaggcacagggtataaaaaatt

SEQ ID NO: 965588 - DNA, 33 bp, Homo sapien
tgtttctattctaggcgcagggtataaaaaatt

SEQ ID NO: 965589 - DNA, 33 bp, Homo sapien
tgagatccatgaaaacagggactttatctccac

SEQ ID NO: 965590 - DNA, 33 bp, Homo sapien
tgagatccatgaaaacggggactttatctccac

SEQ ID NO: 965591 - DNA, 33 bp, Homo sapien
ccaacctttaagacacaagcttcaaaacatcat

SEQ ID NO: 965592 - DNA, 33 bp, Homo sapien
ccaacctttaagacacgagcttcaaaacatcat

SEQ ID NO: 965593 - DNA, 33 bp, Homo sapien
tgggattctgttataacgcccaacatagataac

SEQ ID NO: 965594 - DNA, 33 bp, Homo sapien
tgggattctgttataatgcccaacatagataac

SEQ ID NO: 965595 - DNA, 33 bp, Homo sapien
taaaaaatctaaaccgcaatcaaggtcttgtga

SEQ ID NO: 965596 - DNA, 33 bp, Homo sapien
taaaaaatctaaaccgtaatcaaggtcttgtga

SEQ ID NO: 965597 - DNA, 33 bp, Homo sapien
aaccttcatgagttacaatttgattattgcaac

SEQ ID NO: 965598 - DNA, 33 bp, Homo sapien
aaccttcatgagttaccatttgattattgcaac

SEQ ID NO: 965599 - DNA, 33 bp, Homo sapien
atgaaattcgctaagacgagtaaagaacattcc

SEQ ID NO: 965600 - DNA, 33 bp, Homo sapien
atgaaattcgctaagatgagtaaagaacattcc

SEQ ID NO: 965601 - DNA, 33 bp, Homo sapien
cagtgcttcacaatacgcacttctatttagcca

SEQ ID NO: 965602 - DNA, 33 bp, Homo sapien
cagtgcttcacaatactcacttctatttagcca

SEQ ID NO: 965603 - DNA, 33 bp, Homo sapien
aaaccatagtgtcaaactgaaaaagtgtgtttg

SEQ ID NO: 965604 - DNA, 33 bp, Homo sapien
aaaccatagtgtcaaattgaaaaagtgtgtttg

SEQ ID NO: 965605 - DNA, 33 bp, Homo sapien
gaccgcctccctgagacgacttcagtttgcagg

SEQ ID NO: 965606 - DNA, 33 bp, Homo sapien
gaccgcctccctgagatgacttcagtttgcagg

SEQ ID NO: 965607 - DNA, 33 bp, Homo sapien
ccatgtatgcttctgaaccttcatgcattggtt

SEQ ID NO: 965608 - DNA, 33 bp, Homo sapien
ccatgtatgcttctgagccttcatgcattggtt

SEQ ID NO: 965609 - DNA, 33 bp, Homo sapien
gatgaattagcccttgaatttctgagagttgaa

SEQ ID NO: 965610 - DNA, 33 bp, Homo sapien
gatgaattagcccttgcatttctgagagttgaa

SEQ ID NO: 965611 - DNA, 33 bp, Homo sapien
ctaagtcccagaggccactgaaatgattcaagt

SEQ ID NO: 965612 - DNA, 33 bp, Homo sapien
ctaagtcccagaggccgctgaaatgattcaagt

SEQ ID NO: 965613 - DNA, 33 bp, Homo sapien
cagaaagtactatcagcagtgaaaacaatggtg

SEQ ID NO: 965614 - DNA, 33 bp, Homo sapien
cagaaagtactatcagtagtgaaaacaatggtg

SEQ ID NO: 965615 - DNA, 33 bp, Homo sapien
gcagcatccaggtgtcaagggatgagattcagg

SEQ ID NO: 965616 - DNA, 33 bp, Homo sapien
gcagcatccaggtgtcgagggatgagattcagg

SEQ ID NO: 965617 - DNA, 33 bp, Homo sapien
gcctggtgctgatgtccaacagggaaaagggag

SEQ ID NO: 965618 - DNA, 33 bp, Homo sapien
gcctggtgctgatgtctaacagggaaaagggag

SEQ ID NO: 965619 - DNA, 33 bp, Homo sapien
atttgtggaactacaaatgtccatagcaacaga

SEQ ID NO: 965620 - DNA, 33 bp, Homo sapien
atttgtggaactacaagtgtccatagcaacaga

SEQ ID NO: 965621 - DNA, 33 bp, Homo sapien
cagggtaaagggactgaactcctttctgtaagg

SEQ ID NO: 965622 - DNA, 33 bp, Homo sapien
cagggtaaagggactgtactcctttctgtaagg

SEQ ID NO: 965623 - DNA, 33 bp, Homo sapien
tcagtgttgacatgaaaaaggggatgaccagct

SEQ ID NO: 965624 - DNA, 33 bp, Homo sapien
tcagtgttgacatgaagaaggggatgaccagct

SEQ ID NO: 965625 - DNA, 33 bp, Homo sapien
tttttgggatgaaaaaggcacagttacagctaa

SEQ ID NO: 965626 - DNA, 33 bp, Homo sapien
tttttgggatgaaaaatgcacagttacagctaa

SEQ ID NO: 965627 - DNA, 33 bp, Homo sapien
ttcattggcattagtaagtgaccatagaaaatg

SEQ ID NO: 965628 - DNA, 33 bp, Homo sapien
ttcattggcattagtaggtgaccatagaaaatg

SEQ ID NO: 965629 - DNA, 33 bp, Homo sapien
acactcatgggcttaacgtcacacggaagtcaa

SEQ ID NO: 965630 - DNA, 33 bp, Homo sapien
acactcatgggcttaatgtcacacggaagtcaa

SEQ ID NO: 965631 - DNA, 33 bp, Homo sapien
ctttattcatatagtcaaaaactggaaatagcc

SEQ ID NO: 965632 - DNA, 33 bp, Homo sapien
ctttattcatatagtccaaaactggaaatagcc

SEQ ID NO: 965633 - DNA, 33 bp, Homo sapien
tactcctttataattaggcccacgtcctcccac

SEQ ID NO: 965634 - DNA, 33 bp, Homo sapien
tactcctttataattatgcccacgtcctcccac

SEQ ID NO: 965635 - DNA, 33 bp, Homo sapien
gcgaagtttaaaataaatcaatgccaaaaaagc

SEQ ID NO: 965636 - DNA, 33 bp, Homo sapien
gcgaagtttaaaataagtcaatgccaaaaaagc

SEQ ID NO: 965637 - DNA, 33 bp, Homo sapien
aaaaaaaataaagctacagatgtgtctttcggc

SEQ ID NO: 965638 - DNA, 33 bp, Homo sapien
aaaaaaaataaagctatagatgtgtctttcggc

SEQ ID NO: 965639 - DNA, 33 bp, Homo sapien
aaaataataaaataaaaggtggctgttactgtc

SEQ ID NO: 965640 - DNA, 33 bp, Homo sapien
aaaataataaaataaagggtggctgttactgtc

SEQ ID NO: 965641 - DNA, 33 bp, Homo sapien
cagcctcagtgacttcaccgtagagaatgagaa

SEQ ID NO: 965642 - DNA, 33 bp, Homo sapien
cagcctcagtgacttcgccgtagagaatgagaa

SEQ ID NO: 965643 - DNA, 33 bp, Homo sapien
aagtgcatagcgtggaacagcaggacgaattca

SEQ ID NO: 965644 - DNA, 33 bp, Homo sapien
aagtgcatagcgtggagcagcaggacgaattca

SEQ ID NO: 965645 - DNA, 33 bp, Homo sapien
atgactaacttgagccacatgtcatgagcaggg

SEQ ID NO: 965646 - DNA, 33 bp, Homo sapien
atgactaacttgagccgcatgtcatgagcaggg

SEQ ID NO: 965647 - DNA, 33 bp, Homo sapien
acggtgtcaaggcaatcaggggagaaccacaac

SEQ ID NO: 965648 - DNA, 33 bp, Homo sapien
acggtgtcaaggcaatgaggggagaaccacaac

SEQ ID NO: 965649 - DNA, 33 bp, Homo sapien
atgggagagtgtgttgcagttaacggctgcagg

SEQ ID NO: 965650 - DNA, 33 bp, Homo sapien
atgggagagtgtgttgtagttaacggctgcagg

SEQ ID NO: 965651 - DNA, 33 bp, Homo sapien
gggcatttttgaggaacgtgattgtctttgagg

SEQ ID NO: 965652 - DNA, 33 bp, Homo sapien
gggcatttttgaggaatgtgattgtctttgagg

SEQ ID NO: 965653 - DNA, 33 bp, Homo sapien
ttccatcatcttccgactccctccctgatgaag

SEQ ID NO: 965654 - DNA, 33 bp, Homo sapien
ttccatcatcttccgattccctccctgatgaag

SEQ ID NO: 965655 - DNA, 33 bp, Homo sapien
taaggccaggaggactaaaataagcacattaga

SEQ ID NO: 965656 - DNA, 33 bp, Homo sapien
taaggccaggaggactgaaataagcacattaga

SEQ ID NO: 965657 - DNA, 33 bp, Homo sapien
cagcagcataagataaagggagttgcacagaca

SEQ ID NO: 965658 - DNA, 33 bp, Homo sapien
cagcagcataagataaggggagttgcacagaca

SEQ ID NO: 965659 - DNA, 33 bp, Homo sapien
tcagacaacgagaaacggctacattaaagtaca

SEQ ID NO: 965660 - DNA, 33 bp, Homo sapien
tcagacaacgagaaactgctacattaaagtaca

SEQ ID NO: 965661 - DNA, 33 bp, Homo sapien
tgcaggtgtatgttccagaatgctgcctgccat

SEQ ID NO: 965662 - DNA, 33 bp, Homo sapien
tgcaggtgtatgttccggaatgctgcctgccat

SEQ ID NO: 965663 - DNA, 33 bp, Homo sapien
aggagtgacactgtgaaaagaagtcctgagaga

SEQ ID NO: 965664 - DNA, 33 bp, Homo sapien
aggagtgacactgtgagaagaagtcctgagaga

SEQ ID NO: 965665 - DNA, 33 bp, Homo sapien
tattatatagtacacaatatttacagtttaaag

SEQ ID NO: 965666 - DNA, 33 bp, Homo sapien
tattatatagtacacagtatttacagtttaaag

SEQ ID NO: 965667 - DNA, 33 bp, Homo sapien
tcatacatatctccaacgaaatcttaaatagtt

SEQ ID NO: 965668 - DNA, 33 bp, Homo sapien
tcatacatatctccaatgaaatcttaaatagtt

SEQ ID NO: 965669 - DNA, 33 bp, Homo sapien
tctcaaagtatctctgaagaatgtctattgcag

SEQ ID NO: 965670 - DNA, 33 bp, Homo sapien
tctcaaagtatctctggagaatgtctattgcag

SEQ ID NO: 965671 - DNA, 33 bp, Homo sapien
gcctatacaggtataaacttgtctctaactttg

SEQ ID NO: 965672 - DNA, 33 bp, Homo sapien
gcctatacaggtataagcttgtctctaactttg

SEQ ID NO: 965673 - DNA, 33 bp, Homo sapien
tttttagtgtcttcaaaggctcttctcatgttc

SEQ ID NO: 965674 - DNA, 33 bp, Homo sapien
tttttagtgtcttcaacggctcttctcatgttc

SEQ ID NO: 965675 - DNA, 33 bp, Homo sapien
ctggatttggctcttcaaacaatttttagtgtc

SEQ ID NO: 965676 - DNA, 33 bp, Homo sapien
ctggatttggctcttcgaacaatttttagtgtc

SEQ ID NO: 965677 - DNA, 33 bp, Homo sapien
ataggcttgcaggatcagagagaaagtgttgcc

SEQ ID NO: 965678 - DNA, 33 bp, Homo sapien
ataggcttgcaggatccgagagaaagtgttgcc

SEQ ID NO: 965679 - DNA, 33 bp, Homo sapien
agggcagaaaagacgaaatcacagaatcaaaag

SEQ ID NO: 965680 - DNA, 33 bp, Homo sapien
agggcagaaaagacgagatcacagaatcaaaag

SEQ ID NO: 965681 - DNA, 33 bp, Homo sapien
agctgatcagctttcagtcttttggtaatatca

SEQ ID NO: 965682 - DNA, 33 bp, Homo sapien
agctgatcagctttcattcttttggtaatatca

SEQ ID NO: 965683 - DNA, 33 bp, Homo sapien
aattcaaatcctgtcaccttgggtaagtcacat

SEQ ID NO: 965684 - DNA, 33 bp, Homo sapien
aattcaaatcctgtcagcttgggtaagtcacat

SEQ ID NO: 965685 - DNA, 33 bp, Homo sapien
tacctgacaatactgacgagttcaaccttccct

SEQ ID NO: 965686 - DNA, 33 bp, Homo sapien
tacctgacaatactgatgagttcaaccttccct

SEQ ID NO: 965687 - DNA, 33 bp, Homo sapien
aacttttccaaatttcaaaagtacttgtgctgt

SEQ ID NO: 965688 - DNA, 33 bp, Homo sapien
aacttttccaaatttccaaagtacttgtgctgt

SEQ ID NO: 965689 - DNA, 33 bp, Homo sapien
gtcataacgatcattaaaactacaactgagtca

SEQ ID NO: 965690 - DNA, 33 bp, Homo sapien
gtcataacgatcattagaactacaactgagtca

SEQ ID NO: 965691 - DNA, 33 bp, Homo sapien
gtttttcctaggctgacataaaaatactgtaga

SEQ ID NO: 965692 - DNA, 33 bp, Homo sapien
gtttttcctaggctgagataaaaatactgtaga

SEQ ID NO: 965693 - DNA, 33 bp, Homo sapien
tgtgtgaaacctgtaactgattttatgtttaat

SEQ ID NO: 965694 - DNA, 33 bp, Homo sapien
tgtgtgaaacctgtaattgattttatgtttaat

SEQ ID NO: 965695 - DNA, 33 bp, Homo sapien
tctccacccaatcttaagaaaacaagtaattgg

SEQ ID NO: 965696 - DNA, 33 bp, Homo sapien
tctccacccaatcttacgaaaacaagtaattgg

SEQ ID NO: 965697 - DNA, 33 bp, Homo sapien
acattctgacacttcactcctgagaaacttgta

SEQ ID NO: 965698 - DNA, 33 bp, Homo sapien
acattctgacacttcattcctgagaaacttgta

SEQ ID NO: 965699 - DNA, 33 bp, Homo sapien
tagttacttagcaacaaggacaccaatgcagag

SEQ ID NO: 965700 - DNA, 33 bp, Homo sapien
tagttacttagcaacacggacaccaatgcagag

SEQ ID NO: 965701 - DNA, 33 bp, Homo sapien
ttggactatttcaacaatagcatggtgaatagg

SEQ ID NO: 965702 - DNA, 33 bp, Homo sapien
ttggactatttcaacagtagcatggtgaatagg

SEQ ID NO: 965703 - DNA, 33 bp, Homo sapien
ccctctcacttttgaaatatacagaaaatacct

SEQ ID NO: 965704 - DNA, 33 bp, Homo sapien
ccctctcacttttgaagtatacagaaaatacct

SEQ ID NO: 965705 - DNA, 33 bp, Homo sapien
atatctgtgctgctcaatacaatagtttgtcac

SEQ ID NO: 965706 - DNA, 33 bp, Homo sapien
atatctgtgctgctcagtacaatagtttgtcac

SEQ ID NO: 965707 - DNA, 33 bp, Homo sapien
aaggcagccaggtgatcaataaacattatataa

SEQ ID NO: 965708 - DNA, 33 bp, Homo sapien
aaggcagccaggtgatgaataaacattatataa

SEQ ID NO: 965709 - DNA, 33 bp, Homo sapien
catagaccatgggtaacgaagaacagaaataaa

SEQ ID NO: 965710 - DNA, 33 bp, Homo sapien
catagaccatgggtaatgaagaacagaaataaa

SEQ ID NO: 965711 - DNA, 33 bp, Homo sapien
gctgctagtagaacaactcaatcaagaggcaga

SEQ ID NO: 965712 - DNA, 33 bp, Homo sapien
gctgctagtagaacaattcaatcaagaggcaga

SEQ ID NO: 965713 - DNA, 33 bp, Homo sapien
cattttacacagtaaacagtgcacaccaaaatg

SEQ ID NO: 965714 - DNA, 33 bp, Homo sapien
cattttacacagtaaagagtgcacaccaaaatg

SEQ ID NO: 965715 - DNA, 33 bp, Homo sapien
ctgttggtatctaaaacactgtttccaaatctt

SEQ ID NO: 965716 - DNA, 33 bp, Homo sapien
ctgttggtatctaaaatactgtttccaaatctt

SEQ ID NO: 965717 - DNA, 33 bp, Homo sapien
gtaaatccaaccattacggaagtagtcttcctt

SEQ ID NO: 965718 - DNA, 33 bp, Homo sapien
gtaaatccaaccattatggaagtagtcttcctt

SEQ ID NO: 965719 - DNA, 33 bp, Homo sapien
aggccctgtgggacaaagtaatgccctggagtt

SEQ ID NO: 965720 - DNA, 33 bp, Homo sapien
aggccctgtgggacaacgtaatgccctggagtt

SEQ ID NO: 965721 - DNA, 33 bp, Homo sapien
aatatttgctgaagaacttcctctccatcaatt

SEQ ID NO: 965722 - DNA, 33 bp, Homo sapien
aatatttgctgaagaagttcctctccatcaatt

SEQ ID NO: 965723 - DNA, 33 bp, Homo sapien
ataaagcaatagataacggagatacagaaaagt

SEQ ID NO: 965724 - DNA, 33 bp, Homo sapien
ataaagcaatagataatggagatacagaaaagt

SEQ ID NO: 965725 - DNA, 33 bp, Homo sapien
tctctatggatttgcccagtctgaaaatttctt

SEQ ID NO: 965726 - DNA, 33 bp, Homo sapien
tctctatggatttgcctagtctgaaaatttctt

SEQ ID NO: 965727 - DNA, 33 bp, Homo sapien
gttccctgctttagacactgaccttgaatatct

SEQ ID NO: 965728 - DNA, 33 bp, Homo sapien
gttccctgctttagacgctgaccttgaatatct

SEQ ID NO: 965729 - DNA, 33 bp, Homo sapien
ctttatgggtaccacacggagacagcttcgaag

SEQ ID NO: 965730 - DNA, 33 bp, Homo sapien
ctttatgggtaccacagggagacagcttcgaag

SEQ ID NO: 965731 - DNA, 33 bp, Homo sapien
cacttgatggagctaactgcaagctaatatcaa

SEQ ID NO: 965732 - DNA, 33 bp, Homo sapien
cacttgatggagctaattgcaagctaatatcaa

SEQ ID NO: 965733 - DNA, 33 bp, Homo sapien
tactgtttaccattccaattcataattatgcta

SEQ ID NO: 965734 - DNA, 33 bp, Homo sapien
tactgtttaccattccgattcataattatgcta

SEQ ID NO: 965735 - DNA, 33 bp, Homo sapien
caataaccagttacaaaatgagataaaagtaca

SEQ ID NO: 965736 - DNA, 33 bp, Homo sapien
caataaccagttacaagatgagataaaagtaca

SEQ ID NO: 965737 - DNA, 33 bp, Homo sapien
acccagcctaaagttgaagccagtatgattttc

SEQ ID NO: 965738 - DNA, 33 bp, Homo sapien
acccagcctaaagttggagccagtatgattttc

SEQ ID NO: 965739 - DNA, 33 bp, Homo sapien
ttatggagttacgaaaaatgaattgcctgctag

SEQ ID NO: 965740 - DNA, 33 bp, Homo sapien
ttatggagttacgaaagatgaattgcctgctag

SEQ ID NO: 965741 - DNA, 33 bp, Homo sapien
aagtaatccatgtagaagaatgtatagaaacaa

SEQ ID NO: 965742 - DNA, 33 bp, Homo sapien
aagtaatccatgtagaggaatgtatagaaacaa

SEQ ID NO: 965743 - DNA, 33 bp, Homo sapien
gcatatacttgtttcacaggcatctcaaaatcc

SEQ ID NO: 965744 - DNA, 33 bp, Homo sapien
gcatatacttgtttcataggcatctcaaaatcc

SEQ ID NO: 965745 - DNA, 33 bp, Homo sapien
taatgttcatgctccccaatttgtgtgtgtgta

SEQ ID NO: 965746 - DNA, 33 bp, Homo sapien
taatgttcatgctccctaatttgtgtgtgtgta

SEQ ID NO: 965747 - DNA, 33 bp, Homo sapien
ttctttttgaggtgatcaacatttttggaaaac

SEQ ID NO: 965748 - DNA, 33 bp, Homo sapien
ttctttttgaggtgatgaacatttttggaaaac

SEQ ID NO: 965749 - DNA, 33 bp, Homo sapien
gaaataatatcagggaaaataaaagcctggtcc

SEQ ID NO: 965750 - DNA, 33 bp, Homo sapien
gaaataatatcagggagaataaaagcctggtcc

SEQ ID NO: 965751 - DNA, 33 bp, Homo sapien
ttccctatccacttcacacaatcctttgcattt

SEQ ID NO: 965752 - DNA, 33 bp, Homo sapien
ttccctatccacttcatacaatcctttgcattt

SEQ ID NO: 965753 - DNA, 33 bp, Homo sapien
aaccaagttacctgtgaaaaggaagcccgaagt

SEQ ID NO: 965754 - DNA, 33 bp, Homo sapien
aaccaagttacctgtggaaaggaagcccgaagt

SEQ ID NO: 965755 - DNA, 33 bp, Homo sapien
aaactctacatacagacgacacaaatccttccc

SEQ ID NO: 965756 - DNA, 33 bp, Homo sapien
aaactctacatacagatgacacaaatccttccc

SEQ ID NO: 965757 - DNA, 33 bp, Homo sapien
tgtgttggtattgaaacctcaactctgaagtta

SEQ ID NO: 965758 - DNA, 33 bp, Homo sapien
tgtgttggtattgaaatctcaactctgaagtta

SEQ ID NO: 965759 - DNA, 33 bp, Homo sapien
aacttattggctgttacacaacttactgaacct

SEQ ID NO: 965760 - DNA, 33 bp, Homo sapien
aacttattggctgttatacaacttactgaacct

SEQ ID NO: 965761 - DNA, 33 bp, Homo sapien
atcatgcacttaaagcaacttaatgtacactta

SEQ ID NO: 965762 - DNA, 33 bp, Homo sapien
atcatgcacttaaagcgacttaatgtacactta

SEQ ID NO: 965763 - DNA, 33 bp, Homo sapien
catgaactaggtaaaacaggccagacacaaaag

SEQ ID NO: 965764 - DNA, 33 bp, Homo sapien
catgaactaggtaaaataggccagacacaaaag

SEQ ID NO: 965765 - DNA, 33 bp, Homo sapien
atgcagttgatagtctaaaagcagagttgttca

SEQ ID NO: 965766 - DNA, 33 bp, Homo sapien
atgcagttgatagtctgaaagcagagttgttca

SEQ ID NO: 965767 - DNA, 33 bp, Homo sapien
tctccctgtgcaagacagcaaatttctacctct

SEQ ID NO: 965768 - DNA, 33 bp, Homo sapien
tctccctgtgcaagacggcaaatttctacctct

SEQ ID NO: 965769 - DNA, 33 bp, Homo sapien
acccagatcatcagcacaatccgctataggtag

SEQ ID NO: 965770 - DNA, 33 bp, Homo sapien
acccagatcatcagcataatccgctataggtag

SEQ ID NO: 965771 - DNA, 33 bp, Homo sapien
tgtatgtgtctatgtacgggttctctcacacac

SEQ ID NO: 965772 - DNA, 33 bp, Homo sapien
tgtatgtgtctatgtatgggttctctcacacac

SEQ ID NO: 965773 - DNA, 33 bp, Homo sapien
gacagaaaataattgccgaatttgacagtaagg

SEQ ID NO: 965774 - DNA, 33 bp, Homo sapien
gacagaaaataattgctgaatttgacagtaagg

SEQ ID NO: 965775 - DNA, 33 bp, Homo sapien
tggcatgcttgaagtaacagattttgaatgaaa

SEQ ID NO: 965776 - DNA, 33 bp, Homo sapien
tggcatgcttgaagtatcagattttgaatgaaa

SEQ ID NO: 965777 - DNA, 33 bp, Homo sapien
tctaaaataatgataactcttcatctgagattg

SEQ ID NO: 965778 - DNA, 33 bp, Homo sapien
tctaaaataatgataattcttcatctgagattg

SEQ ID NO: 965779 - DNA, 33 bp, Homo sapien
taactggctactcaaacactttcccattgttta

SEQ ID NO: 965780 - DNA, 33 bp, Homo sapien
taactggctactcaaatactttcccattgttta

SEQ ID NO: 965781 - DNA, 33 bp, Homo sapien
agacatgattatcctcaaaggctgtttgccagg

SEQ ID NO: 965782 - DNA, 33 bp, Homo sapien
agacatgattatcctccaaggctgtttgccagg

SEQ ID NO: 965783 - DNA, 33 bp, Homo sapien
caaacggtaacaggccaatttatcagcttctaa

SEQ ID NO: 965784 - DNA, 33 bp, Homo sapien
caaacggtaacaggccgatttatcagcttctaa

SEQ ID NO: 965785 - DNA, 33 bp, Homo sapien
caggatagaccacatactaggcccacagaacaa

SEQ ID NO: 965786 - DNA, 33 bp, Homo sapien
caggatagaccacatattaggcccacagaacaa

SEQ ID NO: 965787 - DNA, 33 bp, Homo sapien
catgagactgtgaaccgaagaccacaaccccac

SEQ ID NO: 965788 - DNA, 33 bp, Homo sapien
catgagactgtgaacctaagaccacaaccccac

SEQ ID NO: 965789 - DNA, 33 bp, Homo sapien
ggactcctttttatcccgactctcggtctccag

SEQ ID NO: 965790 - DNA, 33 bp, Homo sapien
ggactcctttttatcctgactctcggtctccag

SEQ ID NO: 965791 - DNA, 33 bp, Homo sapien
tgttatgtaaggtgaccgattctgccctcggtg

SEQ ID NO: 965792 - DNA, 33 bp, Homo sapien
tgttatgtaaggtgacggattctgccctcggtg

SEQ ID NO: 965793 - DNA, 33 bp, Homo sapien
gatgtagtgtcatttaactatttttgcactttt

SEQ ID NO: 965794 - DNA, 33 bp, Homo sapien
gatgtagtgtcatttatctatttttgcactttt

SEQ ID NO: 965795 - DNA, 33 bp, Homo sapien
gtaaaaatcactacatcaaagtagcatgtgatg

SEQ ID NO: 965796 - DNA, 33 bp, Homo sapien
gtaaaaatcactacattaaagtagcatgtgatg

SEQ ID NO: 965797 - DNA, 33 bp, Homo sapien
gaaattttgtccagtaactccttacttcaatac

SEQ ID NO: 965798 - DNA, 33 bp, Homo sapien
gaaattttgtccagtatctccttacttcaatac

SEQ ID NO: 965799 - DNA, 33 bp, Homo sapien
actcatttctaggacacgaatgctgaaacattt

SEQ ID NO: 965800 - DNA, 33 bp, Homo sapien
actcatttctaggacatgaatgctgaaacattt

SEQ ID NO: 965801 - DNA, 33 bp, Homo sapien
ttcagaacccaatcaaagtttacccattacctg

SEQ ID NO: 965802 - DNA, 33 bp, Homo sapien
ttcagaacccaatcaaggtttacccattacctg

SEQ ID NO: 965803 - DNA, 33 bp, Homo sapien
ggaagaatccataagaaatgccaagtaagataa

SEQ ID NO: 965804 - DNA, 33 bp, Homo sapien
ggaagaatccataagagatgccaagtaagataa

SEQ ID NO: 965805 - DNA, 33 bp, Homo sapien
tttcttgtgtctataacagatcaacattctcaa

SEQ ID NO: 965806 - DNA, 33 bp, Homo sapien
tttcttgtgtctataatagatcaacattctcaa

SEQ ID NO: 965807 - DNA, 33 bp, Homo sapien
caacaacctccatctcagaatcttcttcccaga

SEQ ID NO: 965808 - DNA, 33 bp, Homo sapien
caacaacctccatctcggaatcttcttcccaga

SEQ ID NO: 965809 - DNA, 33 bp, Homo sapien
ttaacaaatgcttaaacttatgtatacataatt

SEQ ID NO: 965810 - DNA, 33 bp, Homo sapien
ttaacaaatgcttaaagttatgtatacataatt

SEQ ID NO: 965811 - DNA, 33 bp, Homo sapien
gtataccatccaaatcacattcagattccccca

SEQ ID NO: 965812 - DNA, 33 bp, Homo sapien
gtataccatccaaatcgcattcagattccccca

SEQ ID NO: 965813 - DNA, 33 bp, Homo sapien
cacccagggaaaagtcaaaggttgaaggtggtg

SEQ ID NO: 965814 - DNA, 33 bp, Homo sapien
cacccagggaaaagtcgaaggttgaaggtggtg

SEQ ID NO: 965815 - DNA, 33 bp, Homo sapien
tttgcaacgatcaactcaacttgcctaataatt

SEQ ID NO: 965816 - DNA, 33 bp, Homo sapien
tttgcaacgatcaacttaacttgcctaataatt

SEQ ID NO: 965817 - DNA, 33 bp, Homo sapien
agtccattttggctacggtaacacaatatcata

SEQ ID NO: 965818 - DNA, 33 bp, Homo sapien
agtccattttggctactgtaacacaatatcata

SEQ ID NO: 965819 - DNA, 33 bp, Homo sapien
ctaaatatactaaatacacgattgtctcatcct

SEQ ID NO: 965820 - DNA, 33 bp, Homo sapien
ctaaatatactaaatatacgattgtctcatcct

SEQ ID NO: 965821 - DNA, 33 bp, Homo sapien
cctttgtggaagcataagtcatgttatctttgt

SEQ ID NO: 965822 - DNA, 33 bp, Homo sapien
cctttgtggaagcatatgtcatgttatctttgt

SEQ ID NO: 965823 - DNA, 33 bp, Homo sapien
catccaaagttattgcccttagctcctttttgt

SEQ ID NO: 965824 - DNA, 33 bp, Homo sapien
catccaaagttattgctcttagctcctttttgt

SEQ ID NO: 965825 - DNA, 33 bp, Homo sapien
ggtagagcacattacccatatacaaagttctca

SEQ ID NO: 965826 - DNA, 33 bp, Homo sapien
ggtagagcacattacctatatacaaagttctca

SEQ ID NO: 965827 - DNA, 33 bp, Homo sapien
ctccaatcaggaagccaaacgaagcatcaaagg

SEQ ID NO: 965828 - DNA, 33 bp, Homo sapien
ctccaatcaggaagccgaacgaagcatcaaagg

SEQ ID NO: 965829 - DNA, 33 bp, Homo sapien
tctgccacatgaaaggaccacctccctgtcttc

SEQ ID NO: 965830 - DNA, 33 bp, Homo sapien
tctgccacatgaaagggccacctccctgtcttc

SEQ ID NO: 965831 - DNA, 33 bp, Homo sapien
ctattcccaacattgacgaatcctattaacata

SEQ ID NO: 965832 - DNA, 33 bp, Homo sapien
ctattcccaacattgatgaatcctattaacata

SEQ ID NO: 965833 - DNA, 33 bp, Homo sapien
catcagcactagagcaaatggacaaattgtggt

SEQ ID NO: 965834 - DNA, 33 bp, Homo sapien
catcagcactagagcagatggacaaattgtggt

SEQ ID NO: 965835 - DNA, 33 bp, Homo sapien
catgcagcttggagaagttcctatacactgtgt

SEQ ID NO: 965836 - DNA, 33 bp, Homo sapien
catgcagcttggagaatttcctatacactgtgt

SEQ ID NO: 965837 - DNA, 33 bp, Homo sapien
atatgttaattttcaacgtgatgtttacctaat

SEQ ID NO: 965838 - DNA, 33 bp, Homo sapien
atatgttaattttcaatgtgatgtttacctaat

SEQ ID NO: 965839 - DNA, 33 bp, Homo sapien
ctgtgtgtcccctagaaaaatgacctaacctct

SEQ ID NO: 965840 - DNA, 33 bp, Homo sapien
ctgtgtgtcccctagagaaatgacctaacctct

SEQ ID NO: 965841 - DNA, 33 bp, Homo sapien
gagggttatagctggtcaaagagttattttatg

SEQ ID NO: 965842 - DNA, 33 bp, Homo sapien
gagggttatagctggtgaaagagttattttatg

SEQ ID NO: 965843 - DNA, 33 bp, Homo sapien
gggatagaaacattaacacttcaaaaggtcctt

SEQ ID NO: 965844 - DNA, 33 bp, Homo sapien
gggatagaaacattaatacttcaaaaggtcctt

SEQ ID NO: 965845 - DNA, 33 bp, Homo sapien
atcttgtgttagaagacagaataaaaccatggc

SEQ ID NO: 965846 - DNA, 33 bp, Homo sapien
atcttgtgttagaagagagaataaaaccatggc

SEQ ID NO: 965847 - DNA, 33 bp, Homo sapien
tctggagcaaatgaaacagtcaaccaaactgta

SEQ ID NO: 965848 - DNA, 33 bp, Homo sapien
tctggagcaaatgaaagagtcaaccaaactgta

SEQ ID NO: 965849 - DNA, 33 bp, Homo sapien
agcttctgtgtatgtacgcatttctagaatgaa

SEQ ID NO: 965850 - DNA, 33 bp, Homo sapien
agcttctgtgtatgtatgcatttctagaatgaa

SEQ ID NO: 965851 - DNA, 33 bp, Homo sapien
cacccgaccaagggaactgaaaatttgatttct

SEQ ID NO: 965852 - DNA, 33 bp, Homo sapien
cacccgaccaagggaattgaaaatttgatttct

SEQ ID NO: 965853 - DNA, 33 bp, Homo sapien
aaattcgtttaccagaaccaaaggtgttgttgg

SEQ ID NO: 965854 - DNA, 33 bp, Homo sapien
aaattcgtttaccagacccaaaggtgttgttgg

SEQ ID NO: 965855 - DNA, 33 bp, Homo sapien
ccttctagaggccggcacccaaaagtgaaaggt

SEQ ID NO: 965856 - DNA, 33 bp, Homo sapien
ccttctagaggccggcgcccaaaagtgaaaggt

SEQ ID NO: 965857 - DNA, 33 bp, Homo sapien
atactgctgtatacataataattgaatcaactg

SEQ ID NO: 965858 - DNA, 33 bp, Homo sapien
atactgctgtatacatgataattgaatcaactg

SEQ ID NO: 965859 - DNA, 33 bp, Homo sapien
tatcttcaatccctaactctctgctaaaagaaa

SEQ ID NO: 965860 - DNA, 33 bp, Homo sapien
tatcttcaatccctaagtctctgctaaaagaaa

SEQ ID NO: 965861 - DNA, 33 bp, Homo sapien
gggaaatatctgacggcaaacagcaccaggaga

SEQ ID NO: 965862 - DNA, 33 bp, Homo sapien
gggaaatatctgacggtaaacagcaccaggaga

SEQ ID NO: 965863 - DNA, 33 bp, Homo sapien
tgctgcctgcatctccaagaagatccatctggt

SEQ ID NO: 965864 - DNA, 33 bp, Homo sapien
tgctgcctgcatctccgagaagatccatctggt

SEQ ID NO: 965865 - DNA, 33 bp, Homo sapien
aacagatcaacacccacgtgagaaactccactg

SEQ ID NO: 965866 - DNA, 33 bp, Homo sapien
aacagatcaacacccatgtgagaaactccactg

SEQ ID NO: 965867 - DNA, 33 bp, Homo sapien
gccaacaccacatccacagtcatgttgatacaa

SEQ ID NO: 965868 - DNA, 33 bp, Homo sapien
gccaacaccacatccatagtcatgttgatacaa

SEQ ID NO: 965869 - DNA, 33 bp, Homo sapien
ctaagtcctaagtatgaatctacaattcaggtt

SEQ ID NO: 965870 - DNA, 33 bp, Homo sapien
ctaagtcctaagtatggatctacaattcaggtt

SEQ ID NO: 965871 - DNA, 33 bp, Homo sapien
tgggagcaacatgagaccacgtaagccctcaat

SEQ ID NO: 965872 - DNA, 33 bp, Homo sapien
tgggagcaacatgagatcacgtaagccctcaat

SEQ ID NO: 965873 - DNA, 33 bp, Homo sapien
ctctctgtctgaagcaccaactccaccttcttc

SEQ ID NO: 965874 - DNA, 33 bp, Homo sapien
ctctctgtctgaagcatcaactccaccttcttc

SEQ ID NO: 965875 - DNA, 33 bp, Homo sapien
aaaagctgacgtgccaataaacaaaaaacatgg

SEQ ID NO: 965876 - DNA, 33 bp, Homo sapien
aaaagctgacgtgccagtaaacaaaaaacatgg

SEQ ID NO: 965877 - DNA, 33 bp, Homo sapien
acagataaatgttaacaaggatgtggagaaatt

SEQ ID NO: 965878 - DNA, 33 bp, Homo sapien
acagataaatgttaacgaggatgtggagaaatt

SEQ ID NO: 965879 - DNA, 33 bp, Homo sapien
gacctttctcctggtacgaaatttttattttat

SEQ ID NO: 965880 - DNA, 33 bp, Homo sapien
gacctttctcctggtatgaaatttttattttat

SEQ ID NO: 965881 - DNA, 33 bp, Homo sapien
aagagcttcaggaaagcagtagaagaagaagca

SEQ ID NO: 965882 - DNA, 33 bp, Homo sapien
aagagcttcaggaaagtagtagaagaagaagca

SEQ ID NO: 965883 - DNA, 33 bp, Homo sapien
aagggtgtagacaacaatgtaagaggcttaaag

SEQ ID NO: 965884 - DNA, 33 bp, Homo sapien
aagggtgtagacaacagtgtaagaggcttaaag

SEQ ID NO: 965885 - DNA, 33 bp, Homo sapien
catgctttctcttaccgcccaactatggctcaa

SEQ ID NO: 965886 - DNA, 33 bp, Homo sapien
catgctttctcttacctcccaactatggctcaa

SEQ ID NO: 965887 - DNA, 33 bp, Homo sapien
ccatggttcataatgccatcgtctcttgcctaa

SEQ ID NO: 965888 - DNA, 33 bp, Homo sapien
ccatggttcataatgctatcgtctcttgcctaa

SEQ ID NO: 965889 - DNA, 33 bp, Homo sapien
tggcgatggttagaaaaccttgtgagtacacta

SEQ ID NO: 965890 - DNA, 33 bp, Homo sapien
tggcgatggttagaaacccttgtgagtacacta

SEQ ID NO: 965891 - DNA, 33 bp, Homo sapien
agtcatgtggatatccagctcctaacaaccact

SEQ ID NO: 965892 - DNA, 33 bp, Homo sapien
agtcatgtggatatccggctcctaacaaccact

SEQ ID NO: 965893 - DNA, 33 bp, Homo sapien
agagaagcctggaaaaatttaacaaaactggag

SEQ ID NO: 965894 - DNA, 33 bp, Homo sapien
agagaagcctggaaaagtttaacaaaactggag

SEQ ID NO: 965895 - DNA, 33 bp, Homo sapien
tattacaacagttatcaatcttcatcactggta

SEQ ID NO: 965896 - DNA, 33 bp, Homo sapien
tattacaacagttatccatcttcatcactggta

SEQ ID NO: 965897 - DNA, 33 bp, Homo sapien
ggaagctatggttatgcatacggtgagcaaggt

SEQ ID NO: 965898 - DNA, 33 bp, Homo sapien
ggaagctatggttatgtatacggtgagcaaggt

SEQ ID NO: 965899 - DNA, 33 bp, Homo sapien
agaacagtctttgctaaggtctacagaggtcat

SEQ ID NO: 965900 - DNA, 33 bp, Homo sapien
agaacagtctttgctacggtctacagaggtcat

SEQ ID NO: 965901 - DNA, 33 bp, Homo sapien
gaaatgtaccaaagaccctgtgttgttattaaa

SEQ ID NO: 965902 - DNA, 33 bp, Homo sapien
gaaatgtaccaaagactctgtgttgttattaaa

SEQ ID NO: 965903 - DNA, 33 bp, Homo sapien
tgacagttttgcaaggcccaaaaagtggacaga

SEQ ID NO: 965904 - DNA, 33 bp, Homo sapien
tgacagttttgcaaggtccaaaaagtggacaga

SEQ ID NO: 965905 - DNA, 33 bp, Homo sapien
tcactcgggtgagcccagcatgtctcaagcttg

SEQ ID NO: 965906 - DNA, 33 bp, Homo sapien
tcactcgggtgagcccggcatgtctcaagcttg

SEQ ID NO: 965907 - DNA, 33 bp, Homo sapien
tgcagcgatggtctgacattcggcatttctgga

SEQ ID NO: 965908 - DNA, 33 bp, Homo sapien
tgcagcgatggtctgagattcggcatttctgga

SEQ ID NO: 965909 - DNA, 33 bp, Homo sapien
cttcctttctttttatcagtccagtcagagttg

SEQ ID NO: 965910 - DNA, 33 bp, Homo sapien
cttcctttctttttattagtccagtcagagttg

SEQ ID NO: 965911 - DNA, 33 bp, Homo sapien
ggatctatacagtggacactaagtagtaccaag

SEQ ID NO: 965912 - DNA, 33 bp, Homo sapien
ggatctatacagtggatactaagtagtaccaag

SEQ ID NO: 965913 - DNA, 33 bp, Homo sapien
gcataccattaggcagaaattccacctctggaa

SEQ ID NO: 965914 - DNA, 33 bp, Homo sapien
gcataccattaggcagcaattccacctctggaa

SEQ ID NO: 965915 - DNA, 33 bp, Homo sapien
tggagcaggtaaagcccatactggaaggacaag

SEQ ID NO: 965916 - DNA, 33 bp, Homo sapien
tggagcaggtaaagcctatactggaaggacaag

SEQ ID NO: 965917 - DNA, 33 bp, Homo sapien
agctcctagcacatcacaggtgccgaaagaatc

SEQ ID NO: 965918 - DNA, 33 bp, Homo sapien
agctcctagcacatcataggtgccgaaagaatc

SEQ ID NO: 965919 - DNA, 33 bp, Homo sapien
aaacgacagaccaataaccttgtagaatataga

SEQ ID NO: 965920 - DNA, 33 bp, Homo sapien
aaacgacagaccaatatccttgtagaatataga

SEQ ID NO: 965921 - DNA, 33 bp, Homo sapien
ggactccagttactcaggtattaggccactgaa

SEQ ID NO: 965922 - DNA, 33 bp, Homo sapien
ggactccagttactcatgtattaggccactgaa

SEQ ID NO: 965923 - DNA, 33 bp, Homo sapien
agatcagtgaaattaaaagtgtggcaatgaaaa

SEQ ID NO: 965924 - DNA, 33 bp, Homo sapien
agatcagtgaaattaacagtgtggcaatgaaaa

SEQ ID NO: 965925 - DNA, 33 bp, Homo sapien
gaaactgtaatgatgaaaagtaacaattgacta

SEQ ID NO: 965926 - DNA, 33 bp, Homo sapien
gaaactgtaatgatgagaagtaacaattgacta

SEQ ID NO: 965927 - DNA, 33 bp, Homo sapien
atgtgctattattagaatcctttgaagtagaag

SEQ ID NO: 965928 - DNA, 33 bp, Homo sapien
atgtgctattattagagtcctttgaagtagaag

SEQ ID NO: 965929 - DNA, 33 bp, Homo sapien
agacaggaccttgtcaacgctttcaaatatgta

SEQ ID NO: 965930 - DNA, 33 bp, Homo sapien
agacaggaccttgtcagcgctttcaaatatgta

SEQ ID NO: 965931 - DNA, 33 bp, Homo sapien
acaccttaaaagcaaaagacatttcatgtttgt

SEQ ID NO: 965932 - DNA, 33 bp, Homo sapien
acaccttaaaagcaaacgacatttcatgtttgt

SEQ ID NO: 965933 - DNA, 33 bp, Homo sapien
aaatgtttctagattcccatctcccataatcag

SEQ ID NO: 965934 - DNA, 33 bp, Homo sapien
aaatgtttctagattctcatctcccataatcag

SEQ ID NO: 965935 - DNA, 33 bp, Homo sapien
ttctgtgcatgataaccagcaggtccaagtgaa

SEQ ID NO: 965936 - DNA, 33 bp, Homo sapien
ttctgtgcatgataacgagcaggtccaagtgaa

SEQ ID NO: 965937 - DNA, 33 bp, Homo sapien
ggtctcaggactatgaagttctcttgtatctac

SEQ ID NO: 965938 - DNA, 33 bp, Homo sapien
ggtctcaggactatgaggttctcttgtatctac

SEQ ID NO: 965939 - DNA, 33 bp, Homo sapien
ccattgctatgaacaccgcccattatccttcta

SEQ ID NO: 965940 - DNA, 33 bp, Homo sapien
ccattgctatgaacactgcccattatccttcta

SEQ ID NO: 965941 - DNA, 33 bp, Homo sapien
aacatttccttacttaccatgacacttttattc

SEQ ID NO: 965942 - DNA, 33 bp, Homo sapien
aacatttccttacttagcatgacacttttattc

SEQ ID NO: 965943 - DNA, 33 bp, Homo sapien
attctataaagtcacaaggaacactgaattagt

SEQ ID NO: 965944 - DNA, 33 bp, Homo sapien
attctataaagtcacagggaacactgaattagt

SEQ ID NO: 965945 - DNA, 33 bp, Homo sapien
tcataatgtccattgaaactctaaccagagctc

SEQ ID NO: 965946 - DNA, 33 bp, Homo sapien
tcataatgtccattgacactctaaccagagctc

SEQ ID NO: 965947 - DNA, 33 bp, Homo sapien
gaaaaaaaattcgtaaaatctgtgataatcata

SEQ ID NO: 965948 - DNA, 33 bp, Homo sapien
gaaaaaaaattcgtaagatctgtgataatcata

SEQ ID NO: 965949 - DNA, 33 bp, Homo sapien
agactttcataagccaatgaggtttacacagag

SEQ ID NO: 965950 - DNA, 33 bp, Homo sapien
agactttcataagccagtgaggtttacacagag

SEQ ID NO: 965951 - DNA, 33 bp, Homo sapien
gtataggcctggcttagattaatgatgccatca

SEQ ID NO: 965952 - DNA, 33 bp, Homo sapien
gtataggcctggcttatattaatgatgccatca

SEQ ID NO: 965953 - DNA, 33 bp, Homo sapien
actaggagacaggagaagaaaggtctgttagag

SEQ ID NO: 965954 - DNA, 33 bp, Homo sapien
actaggagacaggagaggaaaggtctgttagag

SEQ ID NO: 965955 - DNA, 33 bp, Homo sapien
agaacttctccctgacacaggatgtaagagaat

SEQ ID NO: 965956 - DNA, 33 bp, Homo sapien
agaacttctccctgacgcaggatgtaagagaat

SEQ ID NO: 965957 - DNA, 33 bp, Homo sapien
ctcttgtagttcatcccacgtgtagttcatcga

SEQ ID NO: 965958 - DNA, 33 bp, Homo sapien
ctcttgtagttcatcctacgtgtagttcatcga

SEQ ID NO: 965959 - DNA, 33 bp, Homo sapien
aagatgagatattcaaaagcaaccgcattatac

SEQ ID NO: 965960 - DNA, 33 bp, Homo sapien
aagatgagatattcaacagcaaccgcattatac

SEQ ID NO: 965961 - DNA, 33 bp, Homo sapien
catacacagaattctaagtggcttggatgacaa

SEQ ID NO: 965962 - DNA, 33 bp, Homo sapien
catacacagaattctatgtggcttggatgacaa

SEQ ID NO: 965963 - DNA, 33 bp, Homo sapien
ttctgtcccttccttcaacactcagttcatctc

SEQ ID NO: 965964 - DNA, 33 bp, Homo sapien
ttctgtcccttccttccacactcagttcatctc

SEQ ID NO: 965965 - DNA, 33 bp, Homo sapien
gtcaccaaattgtgtacgttcacagtcatttca

SEQ ID NO: 965966 - DNA, 33 bp, Homo sapien
gtcaccaaattgtgtatgttcacagtcatttca

SEQ ID NO: 965967 - DNA, 33 bp, Homo sapien
ttctggaggataacaccaggcaagaaagaagat

SEQ ID NO: 965968 - DNA, 33 bp, Homo sapien
ttctggaggataacactaggcaagaaagaagat

SEQ ID NO: 965969 - DNA, 33 bp, Homo sapien
ttattcaaatgagtaacgtttactttgtttctg

SEQ ID NO: 965970 - DNA, 33 bp, Homo sapien
ttattcaaatgagtaatgtttactttgtttctg

SEQ ID NO: 965971 - DNA, 33 bp, Homo sapien
acatctaggcaatacactaaagaagaagacagc

SEQ ID NO: 965972 - DNA, 33 bp, Homo sapien
acatctaggcaatacattaaagaagaagacagc

SEQ ID NO: 965973 - DNA, 33 bp, Homo sapien
agctgcagacatccagaatattcacagaagttt

SEQ ID NO: 965974 - DNA, 33 bp, Homo sapien
agctgcagacatccaggatattcacagaagttt

SEQ ID NO: 965975 - DNA, 33 bp, Homo sapien
cggtttgacaggagataatctatgtaaagaggg

SEQ ID NO: 965976 - DNA, 33 bp, Homo sapien
cggtttgacaggagattatctatgtaaagaggg

SEQ ID NO: 965977 - DNA, 33 bp, Homo sapien
cttaagattcatccaaactgttacatctattag

SEQ ID NO: 965978 - DNA, 33 bp, Homo sapien
cttaagattcatccaagctgttacatctattag

SEQ ID NO: 965979 - DNA, 33 bp, Homo sapien
ggaagcctttctaaaactgacattacattgtat

SEQ ID NO: 965980 - DNA, 33 bp, Homo sapien
ggaagcctttctaaaagtgacattacattgtat

SEQ ID NO: 965981 - DNA, 33 bp, Homo sapien
ttctggggttctcacaaaggcaaatgttccaag

SEQ ID NO: 965982 - DNA, 33 bp, Homo sapien
ttctggggttctcacacaggcaaatgttccaag

SEQ ID NO: 965983 - DNA, 33 bp, Homo sapien
ttgttgaatgtagaagccaaatacattatttta

SEQ ID NO: 965984 - DNA, 33 bp, Homo sapien
ttgttgaatgtagaaggcaaatacattatttta

SEQ ID NO: 965985 - DNA, 33 bp, Homo sapien
cttaacagtgcacttacgtagagacaaagagat

SEQ ID NO: 965986 - DNA, 33 bp, Homo sapien
cttaacagtgcacttatgtagagacaaagagat

SEQ ID NO: 965987 - DNA, 33 bp, Homo sapien
atcacagaatacttccaataaagtcaaagataa

SEQ ID NO: 965988 - DNA, 33 bp, Homo sapien
atcacagaatacttccgataaagtcaaagataa

SEQ ID NO: 965989 - DNA, 33 bp, Homo sapien
gggacctgagtgtttacgtttctaacaagctct

SEQ ID NO: 965990 - DNA, 33 bp, Homo sapien
gggacctgagtgtttatgtttctaacaagctct

SEQ ID NO: 965991 - DNA, 33 bp, Homo sapien
caaatgtccctatgaacggcctgctgtttgtta

SEQ ID NO: 965992 - DNA, 33 bp, Homo sapien
caaatgtccctatgaatggcctgctgtttgtta

SEQ ID NO: 965993 - DNA, 33 bp, Homo sapien
cacagggcatcccagaacctttactatatttat

SEQ ID NO: 965994 - DNA, 33 bp, Homo sapien
cacagggcatcccagagcctttactatatttat

SEQ ID NO: 965995 - DNA, 33 bp, Homo sapien
agtctgttgttccaccaaaacaattgtgggccc

SEQ ID NO: 965996 - DNA, 33 bp, Homo sapien
agtctgttgttccaccgaaacaattgtgggccc

SEQ ID NO: 965997 - DNA, 33 bp, Homo sapien
tgtggatcatacaaggccaatattgtttccatt

SEQ ID NO: 965998 - DNA, 33 bp, Homo sapien
tgtggatcatacaaggtcaatattgtttccatt

SEQ ID NO: 965999 - DNA, 33 bp, Homo sapien
aaaatgtattttgaaaagcatggctacctgtat

SEQ ID NO: 966000 - DNA, 33 bp, Homo sapien
aaaatgtattttgaaaggcatggctacctgtat

SEQ ID NO: 966001 - DNA, 33 bp, Homo sapien
aggccatctgctggtagaattacttcttgcttg

SEQ ID NO: 966002 - DNA, 33 bp, Homo sapien
aggccatctgctggtataattacttcttgcttg

SEQ ID NO: 966003 - DNA, 33 bp, Homo sapien
tcaggattctaactcccattccctgtaccccac

SEQ ID NO: 966004 - DNA, 33 bp, Homo sapien
tcaggattctaactcctattccctgtaccccac

SEQ ID NO: 966005 - DNA, 33 bp, Homo sapien
ttatgtatatgcttccaaaagaggccaaattct

SEQ ID NO: 966006 - DNA, 33 bp, Homo sapien
ttatgtatatgcttccgaaagaggccaaattct

SEQ ID NO: 966007 - DNA, 33 bp, Homo sapien
tgttactagacttcggaaactgctcgagacaat

SEQ ID NO: 966008 - DNA, 33 bp, Homo sapien
tgttactagacttcgggaactgctcgagacaat

SEQ ID NO: 966009 - DNA, 33 bp, Homo sapien
ttacttaaaactaaccaaatcttacatccaaaa

SEQ ID NO: 966010 - DNA, 33 bp, Homo sapien
ttacttaaaactaaccgaatcttacatccaaaa

SEQ ID NO: 966011 - DNA, 33 bp, Homo sapien
caatcttaataacaccagagcataggattgtct

SEQ ID NO: 966012 - DNA, 33 bp, Homo sapien
caatcttaataacaccggagcataggattgtct

SEQ ID NO: 966013 - DNA, 33 bp, Homo sapien
aaacacctaatggagcactggggctctaggcag

SEQ ID NO: 966014 - DNA, 33 bp, Homo sapien
aaacacctaatggagcgctggggctctaggcag

SEQ ID NO: 966015 - DNA, 33 bp, Homo sapien
tttgggggctgagctacattgctggtgggatta

SEQ ID NO: 966016 - DNA, 33 bp, Homo sapien
tttgggggctgagctagattgctggtgggatta

SEQ ID NO: 966017 - DNA, 33 bp, Homo sapien
attcttggtgacctgaaagaaagcactaaaacg

SEQ ID NO: 966018 - DNA, 33 bp, Homo sapien
attcttggtgacctgagagaaagcactaaaacg

SEQ ID NO: 966019 - DNA, 33 bp, Homo sapien
agttgtggagaaggaaaaaggttatattttgca

SEQ ID NO: 966020 - DNA, 33 bp, Homo sapien
agttgtggagaaggaagaaggttatattttgca

SEQ ID NO: 966021 - DNA, 33 bp, Homo sapien
catccatttatttatgaaaaaatattgcctgcc

SEQ ID NO: 966022 - DNA, 33 bp, Homo sapien
catccatttatttatgcaaaaatattgcctgcc

SEQ ID NO: 966023 - DNA, 33 bp, Homo sapien
aaccattataacaacaacatctacttactgaac

SEQ ID NO: 966024 - DNA, 33 bp, Homo sapien
aaccattataacaacagcatctacttactgaac

SEQ ID NO: 966025 - DNA, 33 bp, Homo sapien
agggttgagattaggcagaaactgtgtagagga

SEQ ID NO: 966026 - DNA, 33 bp, Homo sapien
agggttgagattaggcggaaactgtgtagagga

SEQ ID NO: 966027 - DNA, 33 bp, Homo sapien
gatacaaataaagaacggtcatgcagagttaaa

SEQ ID NO: 966028 - DNA, 33 bp, Homo sapien
gatacaaataaagaactgtcatgcagagttaaa

SEQ ID NO: 966029 - DNA, 33 bp, Homo sapien
aaagaatggagaatgcaaaagtgtccgcatgga

SEQ ID NO: 966030 - DNA, 33 bp, Homo sapien
aaagaatggagaatgccaaagtgtccgcatgga

SEQ ID NO: 966031 - DNA, 33 bp, Homo sapien
tcagaacacaatatctcaaagtatggcaccctg

SEQ ID NO: 966032 - DNA, 33 bp, Homo sapien
tcagaacacaatatctgaaagtatggcaccctg

SEQ ID NO: 966033 - DNA, 33 bp, Homo sapien
tccctcctagtttcaagataagcctcacataga

SEQ ID NO: 966034 - DNA, 33 bp, Homo sapien
tccctcctagtttcaatataagcctcacataga

SEQ ID NO: 966035 - DNA, 33 bp, Homo sapien
aatttaaattgacaaaggcaacttgtgttatat

SEQ ID NO: 966036 - DNA, 33 bp, Homo sapien
aatttaaattgacaaatgcaacttgtgttatat

SEQ ID NO: 966037 - DNA, 33 bp, Homo sapien
acttgaaatgtgtttaacttgaattgctctgca

SEQ ID NO: 966038 - DNA, 33 bp, Homo sapien
acttgaaatgtgtttatcttgaattgctctgca

SEQ ID NO: 966039 - DNA, 33 bp, Homo sapien
gcgcatagccagacctcaagatgggagcattct

SEQ ID NO: 966040 - DNA, 33 bp, Homo sapien
gcgcatagccagacctgaagatgggagcattct

SEQ ID NO: 966041 - DNA, 33 bp, Homo sapien
caccatggcattgctaccattctcatacgcgtc

SEQ ID NO: 966042 - DNA, 33 bp, Homo sapien
caccatggcattgctatcattctcatacgcgtc

SEQ ID NO: 966043 - DNA, 33 bp, Homo sapien
tatgcatatggagagcaagacgaagacacacag

SEQ ID NO: 966044 - DNA, 33 bp, Homo sapien
tatgcatatggagagcgagacgaagacacacag

SEQ ID NO: 966045 - DNA, 33 bp, Homo sapien
acacacctaggttatacggtaaagcctgtggct

SEQ ID NO: 966046 - DNA, 33 bp, Homo sapien
acacacctaggttatatggtaaagcctgtggct

SEQ ID NO: 966047 - DNA, 33 bp, Homo sapien
ggaagaaagggaagatcatagctagaacaggga

SEQ ID NO: 966048 - DNA, 33 bp, Homo sapien
ggaagaaagggaagatgatagctagaacaggga

SEQ ID NO: 966049 - DNA, 33 bp, Homo sapien
tttaataatatagtcacgctctgagggttcaca

SEQ ID NO: 966050 - DNA, 33 bp, Homo sapien
tttaataatatagtcatgctctgagggttcaca

SEQ ID NO: 966051 - DNA, 33 bp, Homo sapien
aaatgtttatgatccaccttactgtttgtgaac

SEQ ID NO: 966052 - DNA, 33 bp, Homo sapien
aaatgtttatgatccatcttactgtttgtgaac

SEQ ID NO: 966053 - DNA, 33 bp, Homo sapien
gagaaccacaatcctgaactctgaagaaagatg

SEQ ID NO: 966054 - DNA, 33 bp, Homo sapien
gagaaccacaatcctgcactctgaagaaagatg

SEQ ID NO: 966055 - DNA, 33 bp, Homo sapien
tgcaactgtgaaatgacacaaaaccaaagtgaa

SEQ ID NO: 966056 - DNA, 33 bp, Homo sapien
tgcaactgtgaaatgatacaaaaccaaagtgaa

SEQ ID NO: 966057 - DNA, 33 bp, Homo sapien
tcgttagaaactcaggaaccttattataatact

SEQ ID NO: 966058 - DNA, 33 bp, Homo sapien
tcgttagaaactcagggaccttattataatact

SEQ ID NO: 966059 - DNA, 33 bp, Homo sapien
aagtagtgactgaactcaaagatgttacttttt

SEQ ID NO: 966060 - DNA, 33 bp, Homo sapien
aagtagtgactgaacttaaagatgttacttttt

SEQ ID NO: 966061 - DNA, 33 bp, Homo sapien
agtgtgtttaacgcaaaatgctgcttttctaca

SEQ ID NO: 966062 - DNA, 33 bp, Homo sapien
agtgtgtttaacgcaatatgctgcttttctaca

SEQ ID NO: 966063 - DNA, 33 bp, Homo sapien
gttcaaatctctctccactgaatccttccctcc

SEQ ID NO: 966064 - DNA, 33 bp, Homo sapien
gttcaaatctctctccgctgaatccttccctcc

SEQ ID NO: 966065 - DNA, 33 bp, Homo sapien
gaaagcatctgccagaagagtcattgaacagtt

SEQ ID NO: 966066 - DNA, 33 bp, Homo sapien
gaaagcatctgccagaggagtcattgaacagtt

SEQ ID NO: 966067 - DNA, 33 bp, Homo sapien
attctatgtgttgttacaggtaatttaggaagt

SEQ ID NO: 966068 - DNA, 33 bp, Homo sapien
attctatgtgttgttataggtaatttaggaagt

SEQ ID NO: 966069 - DNA, 33 bp, Homo sapien
ggtgacccttcctcaagtattgtgatttaagtt

SEQ ID NO: 966070 - DNA, 33 bp, Homo sapien
ggtgacccttcctcaattattgtgatttaagtt

SEQ ID NO: 966071 - DNA, 33 bp, Homo sapien
gcactagaagcatacaatagggaaaggttcact

SEQ ID NO: 966072 - DNA, 33 bp, Homo sapien
gcactagaagcatacattagggaaaggttcact

SEQ ID NO: 966073 - DNA, 33 bp, Homo sapien
tcttgttaggtagtgacggaagctgagggtatc

SEQ ID NO: 966074 - DNA, 33 bp, Homo sapien
tcttgttaggtagtgatggaagctgagggtatc

SEQ ID NO: 966075 - DNA, 33 bp, Homo sapien
gaaccacgttggaaaacacactttaggacacta

SEQ ID NO: 966076 - DNA, 33 bp, Homo sapien
gaaccacgttggaaaatacactttaggacacta

SEQ ID NO: 966077 - DNA, 33 bp, Homo sapien
gggttccttttcccccaacagcagtgatcacct

SEQ ID NO: 966078 - DNA, 33 bp, Homo sapien
gggttccttttcccccgacagcagtgatcacct

SEQ ID NO: 966079 - DNA, 33 bp, Homo sapien
atcatatggtaaaatcaatgactcaaaggtctc

SEQ ID NO: 966080 - DNA, 33 bp, Homo sapien
atcatatggtaaaatcgatgactcaaaggtctc

SEQ ID NO: 966081 - DNA, 33 bp, Homo sapien
gaactgaggcgccctccctgtgaagtctgtgtt

SEQ ID NO: 966082 - DNA, 33 bp, Homo sapien
gaactgaggcgccctctctgtgaagtctgtgtt

SEQ ID NO: 966083 - DNA, 33 bp, Homo sapien
atacaaaattgccataccttttttctcgggctt

SEQ ID NO: 966084 - DNA, 33 bp, Homo sapien
atacaaaattgccatagcttttttctcgggctt

SEQ ID NO: 966085 - DNA, 33 bp, Homo sapien
ctcatttacaaaaagaagatgatggcacctaaa

SEQ ID NO: 966086 - DNA, 33 bp, Homo sapien
ctcatttacaaaaagaggatgatggcacctaaa

SEQ ID NO: 966087 - DNA, 33 bp, Homo sapien
ttcaaagacggtaacaatgaaaatcaaattccg

SEQ ID NO: 966088 - DNA, 33 bp, Homo sapien
ttcaaagacggtaacagtgaaaatcaaattccg

SEQ ID NO: 966089 - DNA, 33 bp, Homo sapien
tttgtatagcgtcaaccgaagaatactttaaaa

SEQ ID NO: 966090 - DNA, 33 bp, Homo sapien
tttgtatagcgtcaactgaagaatactttaaaa

SEQ ID NO: 966091 - DNA, 33 bp, Homo sapien
catttaatttgacttgaaggaggagacaaattt

SEQ ID NO: 966092 - DNA, 33 bp, Homo sapien
catttaatttgacttgcaggaggagacaaattt

SEQ ID NO: 966093 - DNA, 33 bp, Homo sapien
aggtaaaataattgcaagtgtgattcaaaagca

SEQ ID NO: 966094 - DNA, 33 bp, Homo sapien
aggtaaaataattgcatgtgtgattcaaaagca

SEQ ID NO: 966095 - DNA, 33 bp, Homo sapien
ctgcaaactagttaaccagtacagtcaagtgac

SEQ ID NO: 966096 - DNA, 33 bp, Homo sapien
ctgcaaactagttaacgagtacagtcaagtgac

SEQ ID NO: 966097 - DNA, 33 bp, Homo sapien
atcctgagtcatgaaacaaaccacaacaaattt

SEQ ID NO: 966098 - DNA, 33 bp, Homo sapien
atcctgagtcatgaaataaaccacaacaaattt

SEQ ID NO: 966099 - DNA, 33 bp, Homo sapien
taataaggaaatgctacgcacaacctcacaaat

SEQ ID NO: 966100 - DNA, 33 bp, Homo sapien
taataaggaaatgctatgcacaacctcacaaat

SEQ ID NO: 966101 - DNA, 33 bp, Homo sapien
acttagatgaagtgaaccaatttctcaaaaagc

SEQ ID NO: 966102 - DNA, 33 bp, Homo sapien
acttagatgaagtgaatcaatttctcaaaaagc

SEQ ID NO: 966103 - DNA, 33 bp, Homo sapien
gcatatcatgtaagataagattctaattacatt

SEQ ID NO: 966104 - DNA, 33 bp, Homo sapien
gcatatcatgtaagatgagattctaattacatt

SEQ ID NO: 966105 - DNA, 33 bp, Homo sapien
attactgacacgttgagtaacccttagaaagtt

SEQ ID NO: 966106 - DNA, 33 bp, Homo sapien
attactgacacgttgattaacccttagaaagtt

SEQ ID NO: 966107 - DNA, 33 bp, Homo sapien
ggacttttagcaaataggtagacttggaaatct

SEQ ID NO: 966108 - DNA, 33 bp, Homo sapien
ggacttttagcaaatatgtagacttggaaatct

SEQ ID NO: 966109 - DNA, 33 bp, Homo sapien
ttggggcagaaagaaccggagctgcaagctgtc

SEQ ID NO: 966110 - DNA, 33 bp, Homo sapien
ttggggcagaaagaactggagctgcaagctgtc

SEQ ID NO: 966111 - DNA, 33 bp, Homo sapien
gtaacaagcctgaggccacaaccccagcaagtc

SEQ ID NO: 966112 - DNA, 33 bp, Homo sapien
gtaacaagcctgaggcgacaaccccagcaagtc

SEQ ID NO: 966113 - DNA, 33 bp, Homo sapien
aagtcatccagcagcacagcacactctagagca

SEQ ID NO: 966114 - DNA, 33 bp, Homo sapien
aagtcatccagcagcagagcacactctagagca

SEQ ID NO: 966115 - DNA, 33 bp, Homo sapien
agaaggagatatagaaagatgaaaggctaaatt

SEQ ID NO: 966116 - DNA, 33 bp, Homo sapien
agaaggagatatagaacgatgaaaggctaaatt

SEQ ID NO: 966117 - DNA, 33 bp, Homo sapien
attattgtggtttgcaagtaagagttacaagca

SEQ ID NO: 966118 - DNA, 33 bp, Homo sapien
attattgtggtttgcaggtaagagttacaagca

SEQ ID NO: 966119 - DNA, 33 bp, Homo sapien
tgtgtttggctctccaactctacttaaaactag

SEQ ID NO: 966120 - DNA, 33 bp, Homo sapien
tgtgtttggctctccatctctacttaaaactag

SEQ ID NO: 966121 - DNA, 33 bp, Homo sapien
gtggacataatggttgcaagttcagagtttgga

SEQ ID NO: 966122 - DNA, 33 bp, Homo sapien
gtggacataatggttgtaagttcagagtttgga

SEQ ID NO: 966123 - DNA, 33 bp, Homo sapien
gatttaaaaatatacccgcttgcctggcatact

SEQ ID NO: 966124 - DNA, 33 bp, Homo sapien
gatttaaaaatatacctgcttgcctggcatact

SEQ ID NO: 966125 - DNA, 33 bp, Homo sapien
atgtagaaagaaaaccacaggctgtcagacaaa

SEQ ID NO: 966126 - DNA, 33 bp, Homo sapien
atgtagaaagaaaaccgcaggctgtcagacaaa

SEQ ID NO: 966127 - DNA, 33 bp, Homo sapien
aaagctagaagaggcacagggatgcttctaatt

SEQ ID NO: 966128 - DNA, 33 bp, Homo sapien
aaagctagaagaggcagagggatgcttctaatt

SEQ ID NO: 966129 - DNA, 33 bp, Homo sapien
cttattactccccaacagactaacttaacagaa

SEQ ID NO: 966130 - DNA, 33 bp, Homo sapien
cttattactccccaaccgactaacttaacagaa

SEQ ID NO: 966131 - DNA, 33 bp, Homo sapien
ccttttctgattcaccacaccattagaatctca

SEQ ID NO: 966132 - DNA, 33 bp, Homo sapien
ccttttctgattcaccgcaccattagaatctca

SEQ ID NO: 966133 - DNA, 33 bp, Homo sapien
tatactagatgtagaactgatgttttatgatga

SEQ ID NO: 966134 - DNA, 33 bp, Homo sapien
tatactagatgtagaattgatgttttatgatga

SEQ ID NO: 966135 - DNA, 33 bp, Homo sapien
tatgattccaactacacgacattttagaaaagg

SEQ ID NO: 966136 - DNA, 33 bp, Homo sapien
tatgattccaactacatgacattttagaaaagg

SEQ ID NO: 966137 - DNA, 33 bp, Homo sapien
gcagagctccaaagtacgtcaaaggggtgtgtg

SEQ ID NO: 966138 - DNA, 33 bp, Homo sapien
gcagagctccaaagtatgtcaaaggggtgtgtg

SEQ ID NO: 966139 - DNA, 33 bp, Homo sapien
ttgaagcacacgaaaacgtgattctttaacacg

SEQ ID NO: 966140 - DNA, 33 bp, Homo sapien
ttgaagcacacgaaaatgtgattctttaacacg

SEQ ID NO: 966141 - DNA, 33 bp, Homo sapien
acaccccatgaagctcaatccacaccctgccat

SEQ ID NO: 966142 - DNA, 33 bp, Homo sapien
acaccccatgaagctcgatccacaccctgccat

SEQ ID NO: 966143 - DNA, 33 bp, Homo sapien
acccacttgtacctgacatttatctgttggctt

SEQ ID NO: 966144 - DNA, 33 bp, Homo sapien
acccacttgtacctgatatttatctgttggctt

SEQ ID NO: 966145 - DNA, 33 bp, Homo sapien
ttctcttaaggactgaaagcaaacaagtgatga

SEQ ID NO: 966146 - DNA, 33 bp, Homo sapien
ttctcttaaggactgagagcaaacaagtgatga

SEQ ID NO: 966147 - DNA, 33 bp, Homo sapien
tcagctctttgtggaaacttctttagtagagca

SEQ ID NO: 966148 - DNA, 33 bp, Homo sapien
tcagctctttgtggaaccttctttagtagagca

SEQ ID NO: 966149 - DNA, 33 bp, Homo sapien
gacaccaactgaatgcaaggagataccatatta

SEQ ID NO: 966150 - DNA, 33 bp, Homo sapien
gacaccaactgaatgcgaggagataccatatta

SEQ ID NO: 966151 - DNA, 33 bp, Homo sapien
tgagtttaaacagtcacccaagacagactcagc

SEQ ID NO: 966152 - DNA, 33 bp, Homo sapien
tgagtttaaacagtcatccaagacagactcagc

SEQ ID NO: 966153 - DNA, 33 bp, Homo sapien
atgaacgtagttaacactattttgactttttct

SEQ ID NO: 966154 - DNA, 33 bp, Homo sapien
atgaacgtagttaacattattttgactttttct

SEQ ID NO: 966155 - DNA, 33 bp, Homo sapien
acagagagagagtgaacgcatgaatgaacgtag

SEQ ID NO: 966156 - DNA, 33 bp, Homo sapien
acagagagagagtgaatgcatgaatgaacgtag

SEQ ID NO: 966157 - DNA, 33 bp, Homo sapien
ttaacattacagatggacaaagagtgaagccac

SEQ ID NO: 966158 - DNA, 33 bp, Homo sapien
ttaacattacagatggtcaaagagtgaagccac

SEQ ID NO: 966159 - DNA, 33 bp, Homo sapien
acagtgtgtgaacaaacgaatggacccaaacac

SEQ ID NO: 966160 - DNA, 33 bp, Homo sapien
acagtgtgtgaacaaatgaatggacccaaacac

SEQ ID NO: 966161 - DNA, 33 bp, Homo sapien
tctatctgtgaagtaaagacatatcactcattt

SEQ ID NO: 966162 - DNA, 33 bp, Homo sapien
tctatctgtgaagtaaggacatatcactcattt

SEQ ID NO: 966163 - DNA, 33 bp, Homo sapien
gttaatacaacagccaatagccataagcaagag

SEQ ID NO: 966164 - DNA, 33 bp, Homo sapien
gttaatacaacagccagtagccataagcaagag

SEQ ID NO: 966165 - DNA, 33 bp, Homo sapien
gtgggacaatattacccggattatgcattactg

SEQ ID NO: 966166 - DNA, 33 bp, Homo sapien
gtgggacaatattacctggattatgcattactg

SEQ ID NO: 966167 - DNA, 33 bp, Homo sapien
ggtatgttttagtatacgggttgctaaagaaga

SEQ ID NO: 966168 - DNA, 33 bp, Homo sapien
ggtatgttttagtatatgggttgctaaagaaga

SEQ ID NO: 966169 - DNA, 33 bp, Homo sapien
aggcatgaactagaagaaaaagaggcaggggta

SEQ ID NO: 966170 - DNA, 33 bp, Homo sapien
aggcatgaactagaagtaaaagaggcaggggta

SEQ ID NO: 966171 - DNA, 33 bp, Homo sapien
agatgggtctcaatgccgacagaattcaggaaa

SEQ ID NO: 966172 - DNA, 33 bp, Homo sapien
agatgggtctcaatgctgacagaattcaggaaa

SEQ ID NO: 966173 - DNA, 33 bp, Homo sapien
aggggtcatctcaccccccaaatagcaatagct

SEQ ID NO: 966174 - DNA, 33 bp, Homo sapien
aggggtcatctcaccctccaaatagcaatagct

SEQ ID NO: 966175 - DNA, 33 bp, Homo sapien
aaatgttggagtccccaaagctcaatcattgca

SEQ ID NO: 966176 - DNA, 33 bp, Homo sapien
aaatgttggagtcccccaagctcaatcattgca

SEQ ID NO: 966177 - DNA, 33 bp, Homo sapien
caacagactttctgtacgattctcttcttaaac

SEQ ID NO: 966178 - DNA, 33 bp, Homo sapien
caacagactttctgtatgattctcttcttaaac

SEQ ID NO: 966179 - DNA, 33 bp, Homo sapien
attttcatctgcatcacggagtcccctttgctt

SEQ ID NO: 966180 - DNA, 33 bp, Homo sapien
attttcatctgcatcatggagtcccctttgctt

SEQ ID NO: 966181 - DNA, 33 bp, Homo sapien
cacgtgaatgatgataagtttcaaaatgctgtc

SEQ ID NO: 966182 - DNA, 33 bp, Homo sapien
cacgtgaatgatgataggtttcaaaatgctgtc

SEQ ID NO: 966183 - DNA, 33 bp, Homo sapien
ttcattctatagagtgaaaactgaccattatat

SEQ ID NO: 966184 - DNA, 33 bp, Homo sapien
ttcattctatagagtgcaaactgaccattatat

SEQ ID NO: 966185 - DNA, 33 bp, Homo sapien
aagaccagctataccaactattgtgtgatcttg

SEQ ID NO: 966186 - DNA, 33 bp, Homo sapien
aagaccagctataccagctattgtgtgatcttg

SEQ ID NO: 966187 - DNA, 33 bp, Homo sapien
tgcacacagccaaacaatagtttctgcacataa

SEQ ID NO: 966188 - DNA, 33 bp, Homo sapien
tgcacacagccaaacagtagtttctgcacataa

SEQ ID NO: 966189 - DNA, 33 bp, Homo sapien
attgtctgtgcctaaccatacagggcaaacaat

SEQ ID NO: 966190 - DNA, 33 bp, Homo sapien
attgtctgtgcctaacgatacagggcaaacaat

SEQ ID NO: 966191 - DNA, 33 bp, Homo sapien
gctgctggtccagaacacaacatactttaaaac

SEQ ID NO: 966192 - DNA, 33 bp, Homo sapien
gctgctggtccagaacgcaacatactttaaaac

SEQ ID NO: 966193 - DNA, 33 bp, Homo sapien
accaacaaatcacaacaacaagcagcattaaaa

SEQ ID NO: 966194 - DNA, 33 bp, Homo sapien
accaacaaatcacaacgacaagcagcattaaaa

SEQ ID NO: 966195 - DNA, 33 bp, Homo sapien
ttgtgtgtgctgtggacgaaggaaattttacat

SEQ ID NO: 966196 - DNA, 33 bp, Homo sapien
ttgtgtgtgctgtggatgaaggaaattttacat

SEQ ID NO: 966197 - DNA, 33 bp, Homo sapien
ttacgattttgcagaaacattaatttttggtta

SEQ ID NO: 966198 - DNA, 33 bp, Homo sapien
ttacgattttgcagaatcattaatttttggtta

SEQ ID NO: 966199 - DNA, 33 bp, Homo sapien
gtttgcgctgaataaccggctgagtagctgcag

SEQ ID NO: 966200 - DNA, 33 bp, Homo sapien
gtttgcgctgaataactggctgagtagctgcag

SEQ ID NO: 966201 - DNA, 33 bp, Homo sapien
aaagatccatcgcagggccatgaatgaatcagc

SEQ ID NO: 966202 - DNA, 33 bp, Homo sapien
aaagatccatcgcaggtccatgaatgaatcagc

SEQ ID NO: 966203 - DNA, 33 bp, Homo sapien
gagcagagcagaatgcagaaatattagagaaca

SEQ ID NO: 966204 - DNA, 33 bp, Homo sapien
gagcagagcagaatgcggaaatattagagaaca

SEQ ID NO: 966205 - DNA, 33 bp, Homo sapien
ttttaaggaagagacactgattatctttgaatg

SEQ ID NO: 966206 - DNA, 33 bp, Homo sapien
ttttaaggaagagacagtgattatctttgaatg

SEQ ID NO: 966207 - DNA, 33 bp, Homo sapien
aaatcaggtgaagtaacagaaaatgaaatgatt

SEQ ID NO: 966208 - DNA, 33 bp, Homo sapien
aaatcaggtgaagtaatagaaaatgaaatgatt

SEQ ID NO: 966209 - DNA, 33 bp, Homo sapien
ggcactgcaagaaggaagcatagacaagattct

SEQ ID NO: 966210 - DNA, 33 bp, Homo sapien
ggcactgcaagaaggaggcatagacaagattct

SEQ ID NO: 966211 - DNA, 33 bp, Homo sapien
gtgatttcatagtttacacgactcagatgtgcc

SEQ ID NO: 966212 - DNA, 33 bp, Homo sapien
gtgatttcatagtttatacgactcagatgtgcc

SEQ ID NO: 966213 - DNA, 33 bp, Homo sapien
ttagttttattaaacaagactttggtgatttca

SEQ ID NO: 966214 - DNA, 33 bp, Homo sapien
ttagttttattaaacatgactttggtgatttca

SEQ ID NO: 966215 - DNA, 33 bp, Homo sapien
ctcaccaacggcccagaaattgagttccttggt

SEQ ID NO: 966216 - DNA, 33 bp, Homo sapien
ctcaccaacggcccagcaattgagttccttggt

SEQ ID NO: 966217 - DNA, 33 bp, Homo sapien
tacttatctgttactaagcttattacctgcatg

SEQ ID NO: 966218 - DNA, 33 bp, Homo sapien
tacttatctgttactatgcttattacctgcatg

SEQ ID NO: 966219 - DNA, 33 bp, Homo sapien
ctaaacattgagtacacgtagacacaaagaaag

SEQ ID NO: 966220 - DNA, 33 bp, Homo sapien
ctaaacattgagtacatgtagacacaaagaaag

SEQ ID NO: 966221 - DNA, 33 bp, Homo sapien
gatcagccatgtcagccgagtggcttatagaac

SEQ ID NO: 966222 - DNA, 33 bp, Homo sapien
gatcagccatgtcagctgagtggcttatagaac

SEQ ID NO: 966223 - DNA, 33 bp, Homo sapien
tagccaaacagtatctcaccagaataagaactt

SEQ ID NO: 966224 - DNA, 33 bp, Homo sapien
tagccaaacagtatctgaccagaataagaactt

SEQ ID NO: 966225 - DNA, 33 bp, Homo sapien
ggcatagcatagtaagcaaaattttcagatcac

SEQ ID NO: 966226 - DNA, 33 bp, Homo sapien
ggcatagcatagtaagtaaaattttcagatcac

SEQ ID NO: 966227 - DNA, 33 bp, Homo sapien
ccacacccagtgcaccaaatttaagctaaagcc

SEQ ID NO: 966228 - DNA, 33 bp, Homo sapien
ccacacccagtgcaccgaatttaagctaaagcc

SEQ ID NO: 966229 - DNA, 33 bp, Homo sapien
acatacaggtatttaccggaaattttgcactga

SEQ ID NO: 966230 - DNA, 33 bp, Homo sapien
acatacaggtatttactggaaattttgcactga

SEQ ID NO: 966231 - DNA, 33 bp, Homo sapien
ttcttcaaagacctaacatcctagacctagcca

SEQ ID NO: 966232 - DNA, 33 bp, Homo sapien
ttcttcaaagacctaatatcctagacctagcca

SEQ ID NO: 966233 - DNA, 33 bp, Homo sapien
tggtcattaatagatcaaagtgttacttctgga

SEQ ID NO: 966234 - DNA, 33 bp, Homo sapien
tggtcattaatagatcgaagtgttacttctgga

SEQ ID NO: 966235 - DNA, 33 bp, Homo sapien
gcatccatctagcctacgggacgcctccagccc

SEQ ID NO: 966236 - DNA, 33 bp, Homo sapien
gcatccatctagcctatgggacgcctccagccc

SEQ ID NO: 966237 - DNA, 33 bp, Homo sapien
tcttcaccatccagaacaggacccatggctgag

SEQ ID NO: 966238 - DNA, 33 bp, Homo sapien
tcttcaccatccagaataggacccatggctgag

SEQ ID NO: 966239 - DNA, 33 bp, Homo sapien
aaacttgctaccaatgacatctctgtttagcta

SEQ ID NO: 966240 - DNA, 33 bp, Homo sapien
aaacttgctaccaatgtcatctctgtttagcta

SEQ ID NO: 966241 - DNA, 33 bp, Homo sapien
accgattcatcaagacaggaattgctatagaga

SEQ ID NO: 966242 - DNA, 33 bp, Homo sapien
accgattcatcaagacgggaattgctatagaga

SEQ ID NO: 966243 - DNA, 33 bp, Homo sapien
tctgtactgagcttaaatattctccaagtataa

SEQ ID NO: 966244 - DNA, 33 bp, Homo sapien
tctgtactgagcttaagtattctccaagtataa

SEQ ID NO: 966245 - DNA, 33 bp, Homo sapien
aaatcttaagatactgcataaaaagatggaaca

SEQ ID NO: 966246 - DNA, 33 bp, Homo sapien
aaatcttaagatactggataaaaagatggaaca

SEQ ID NO: 966247 - DNA, 33 bp, Homo sapien
agaagtatgctaaaggaatattagacaaataaa

SEQ ID NO: 966248 - DNA, 33 bp, Homo sapien
agaagtatgctaaagggatattagacaaataaa

SEQ ID NO: 966249 - DNA, 33 bp, Homo sapien
accaaagcaggtgtctaactgatagaagtatgc

SEQ ID NO: 966250 - DNA, 33 bp, Homo sapien
accaaagcaggtgtcttactgatagaagtatgc

SEQ ID NO: 966251 - DNA, 33 bp, Homo sapien
attgggtaatattttcaacaggttttgcatgaa

SEQ ID NO: 966252 - DNA, 33 bp, Homo sapien
attgggtaatattttcgacaggttttgcatgaa

SEQ ID NO: 966253 - DNA, 33 bp, Homo sapien
tagattatttttatcacgaattatctcaactgg

SEQ ID NO: 966254 - DNA, 33 bp, Homo sapien
tagattatttttatcatgaattatctcaactgg

SEQ ID NO: 966255 - DNA, 33 bp, Homo sapien
ttttccgtctttctcacgtcattcattactacc

SEQ ID NO: 966256 - DNA, 33 bp, Homo sapien
ttttccgtctttctcatgtcattcattactacc

SEQ ID NO: 966257 - DNA, 33 bp, Homo sapien
tgttgagattagaagaaggaagtaacagtttta

SEQ ID NO: 966258 - DNA, 33 bp, Homo sapien
tgttgagattagaagatggaagtaacagtttta

SEQ ID NO: 966259 - DNA, 33 bp, Homo sapien
atgaagaaatagagaccctcaatcgttaagcat

SEQ ID NO: 966260 - DNA, 33 bp, Homo sapien
atgaagaaatagagacgctcaatcgttaagcat

SEQ ID NO: 966261 - DNA, 33 bp, Homo sapien
tattgataagggagtcactgaaatgatggatga

SEQ ID NO: 966262 - DNA, 33 bp, Homo sapien
tattgataagggagtcgctgaaatgatggatga

SEQ ID NO: 966263 - DNA, 33 bp, Homo sapien
ccatagactcactttccattccacgacccatct

SEQ ID NO: 966264 - DNA, 33 bp, Homo sapien
ccatagactcactttctattccacgacccatct

SEQ ID NO: 966265 - DNA, 33 bp, Homo sapien
taccatgtaagtaaaaattagtttcagtgtatt

SEQ ID NO: 966266 - DNA, 33 bp, Homo sapien
taccatgtaagtaaaagttagtttcagtgtatt

SEQ ID NO: 966267 - DNA, 33 bp, Homo sapien
agacctaggactaggcaatgagttcttagattt

SEQ ID NO: 966268 - DNA, 33 bp, Homo sapien
agacctaggactaggcgatgagttcttagattt

SEQ ID NO: 966269 - DNA, 33 bp, Homo sapien
ggctaaaattaagaacagtgacagcagcagttg

SEQ ID NO: 966270 - DNA, 33 bp, Homo sapien
ggctaaaattaagaacggtgacagcagcagttg

SEQ ID NO: 966271 - DNA, 33 bp, Homo sapien
ttctctgctataaggcacattcagacatatcat

SEQ ID NO: 966272 - DNA, 33 bp, Homo sapien
ttctctgctataaggcgcattcagacatatcat

SEQ ID NO: 966273 - DNA, 33 bp, Homo sapien
gccacacaattgctaaagaactcccaggagagg

SEQ ID NO: 966274 - DNA, 33 bp, Homo sapien
gccacacaattgctaaggaactcccaggagagg

SEQ ID NO: 966275 - DNA, 33 bp, Homo sapien
ggaacatgatagcatccctctgaaaatcctaaa

SEQ ID NO: 966276 - DNA, 33 bp, Homo sapien
ggaacatgatagcatctctctgaaaatcctaaa

SEQ ID NO: 966277 - DNA, 33 bp, Homo sapien
agggggccacattgaacgggttcatctgaaatt

SEQ ID NO: 966278 - DNA, 33 bp, Homo sapien
agggggccacattgaatgggttcatctgaaatt

SEQ ID NO: 966279 - DNA, 33 bp, Homo sapien
agtttgtcccaaactcaaccaaaccaaagtata

SEQ ID NO: 966280 - DNA, 33 bp, Homo sapien
agtttgtcccaaactcgaccaaaccaaagtata

SEQ ID NO: 966281 - DNA, 33 bp, Homo sapien
ggtccaggaatattgccgcaagtttgttcagat

SEQ ID NO: 966282 - DNA, 33 bp, Homo sapien
ggtccaggaatattgctgcaagtttgttcagat

SEQ ID NO: 966283 - DNA, 33 bp, Homo sapien
cctatggatgaaggacccagaaacagtatgaag

SEQ ID NO: 966284 - DNA, 33 bp, Homo sapien
cctatggatgaaggactcagaaacagtatgaag

SEQ ID NO: 966285 - DNA, 33 bp, Homo sapien
agtgaaagagaaagaacgacaaagggaaacgat

SEQ ID NO: 966286 - DNA, 33 bp, Homo sapien
agtgaaagagaaagaaggacaaagggaaacgat

SEQ ID NO: 966287 - DNA, 33 bp, Homo sapien
ttgagcatggaactcacgtaataccaatggtac

SEQ ID NO: 966288 - DNA, 33 bp, Homo sapien
ttgagcatggaactcatgtaataccaatggtac

SEQ ID NO: 966289 - DNA, 33 bp, Homo sapien
cccacctgccaggtaacgtaattctgaagggtt

SEQ ID NO: 966290 - DNA, 33 bp, Homo sapien
cccacctgccaggtaatgtaattctgaagggtt

SEQ ID NO: 966291 - DNA, 33 bp, Homo sapien
tctcttccttcccaagcccaagagtttgaaagc

SEQ ID NO: 966292 - DNA, 33 bp, Homo sapien
tctcttccttcccaaggccaagagtttgaaagc

SEQ ID NO: 966293 - DNA, 33 bp, Homo sapien
tcagaggtttaggtccaaatgcaatcattttgt

SEQ ID NO: 966294 - DNA, 33 bp, Homo sapien
tcagaggtttaggtccgaatgcaatcattttgt

SEQ ID NO: 966295 - DNA, 33 bp, Homo sapien
tagacagcaaattggaagaagaggaaagtggag

SEQ ID NO: 966296 - DNA, 33 bp, Homo sapien
tagacagcaaattggaggaagaggaaagtggag

SEQ ID NO: 966297 - DNA, 33 bp, Homo sapien
aaattcagaggactcaaaatgccacgttttgga

SEQ ID NO: 966298 - DNA, 33 bp, Homo sapien
aaattcagaggactcacaatgccacgttttgga

SEQ ID NO: 966299 - DNA, 33 bp, Homo sapien
tatgcatgaaggagaaagtataaatcaccttcc

SEQ ID NO: 966300 - DNA, 33 bp, Homo sapien
tatgcatgaaggagaaggtataaatcaccttcc

SEQ ID NO: 966301 - DNA, 33 bp, Homo sapien
gaggaagattgtgtgcacgtaatacctattcga

SEQ ID NO: 966302 - DNA, 33 bp, Homo sapien
gaggaagattgtgtgcgcgtaatacctattcga

SEQ ID NO: 966303 - DNA, 33 bp, Homo sapien
atattcaggtaatgagacctcttgaataatcaa

SEQ ID NO: 966304 - DNA, 33 bp, Homo sapien
atattcaggtaatgagccctcttgaataatcaa

SEQ ID NO: 966305 - DNA, 33 bp, Homo sapien
actgagtaccaatcaaacatcagattaataaca

SEQ ID NO: 966306 - DNA, 33 bp, Homo sapien
actgagtaccaatcaagcatcagattaataaca

SEQ ID NO: 966307 - DNA, 33 bp, Homo sapien
ccatcatgcctcccacgccttgtgtgctctggg

SEQ ID NO: 966308 - DNA, 33 bp, Homo sapien
ccatcatgcctcccactccttgtgtgctctggg

SEQ ID NO: 966309 - DNA, 33 bp, Homo sapien
ctgtgtttgctctgggaccaccttcacccatgc

SEQ ID NO: 966310 - DNA, 33 bp, Homo sapien
ctgtgtttgctctggggccaccttcacccatgc

SEQ ID NO: 966311 - DNA, 33 bp, Homo sapien
actaagacctatttgcacagtggttcatgttct

SEQ ID NO: 966312 - DNA, 33 bp, Homo sapien
actaagacctatttgcgcagtggttcatgttct

SEQ ID NO: 966313 - DNA, 33 bp, Homo sapien
ctgacctgaatatcgaccctgcatcactcgctc

SEQ ID NO: 966314 - DNA, 33 bp, Homo sapien
ctgacctgaatatcgatcctgcatcactcgctc

SEQ ID NO: 966315 - DNA, 33 bp, Homo sapien
gtatctgttaacattacgagggataaatgtgta

SEQ ID NO: 966316 - DNA, 33 bp, Homo sapien
gtatctgttaacattaggagggataaatgtgta

SEQ ID NO: 966317 - DNA, 33 bp, Homo sapien
gaatccgcagattccactgatggtagcacactc

SEQ ID NO: 966318 - DNA, 33 bp, Homo sapien
gaatccgcagattccattgatggtagcacactc

SEQ ID NO: 966319 - DNA, 33 bp, Homo sapien
tttaaaggcaaatgacagagaggaatcaactag

SEQ ID NO: 966320 - DNA, 33 bp, Homo sapien
tttaaaggcaaatgacggagaggaatcaactag

SEQ ID NO: 966321 - DNA, 33 bp, Homo sapien
ctcctcccttctccaccgatttccgggtccatc

SEQ ID NO: 966322 - DNA, 33 bp, Homo sapien
ctcctcccttctccactgatttccgggtccatc

SEQ ID NO: 966323 - DNA, 33 bp, Homo sapien
tctgacactaagaggaaacatccaggcatcgca

SEQ ID NO: 966324 - DNA, 33 bp, Homo sapien
tctgacactaagaggagacatccaggcatcgca

SEQ ID NO: 966325 - DNA, 33 bp, Homo sapien
ttacaaatgcaatacaaacagtagacatatagt

SEQ ID NO: 966326 - DNA, 33 bp, Homo sapien
ttacaaatgcaatacatacagtagacatatagt

SEQ ID NO: 966327 - DNA, 33 bp, Homo sapien
gtttattattaacgccgcagactttggggatag

SEQ ID NO: 966328 - DNA, 33 bp, Homo sapien
gtttattattaacgcctcagactttggggatag

SEQ ID NO: 966329 - DNA, 33 bp, Homo sapien
catatacacgagtcagccattaaaaataggctc

SEQ ID NO: 966330 - DNA, 33 bp, Homo sapien
catatacacgagtcaggcattaaaaataggctc

SEQ ID NO: 966331 - DNA, 33 bp, Homo sapien
acccaaactatgctaaaaagttaagcagttgaa

SEQ ID NO: 966332 - DNA, 33 bp, Homo sapien
acccaaactatgctaagaagttaagcagttgaa

SEQ ID NO: 966333 - DNA, 33 bp, Homo sapien
tatcaaaaacataagacagatagtgtgtacaac

SEQ ID NO: 966334 - DNA, 33 bp, Homo sapien
tatcaaaaacataagatagatagtgtgtacaac

SEQ ID NO: 966335 - DNA, 33 bp, Homo sapien
gcagcccatcatgcaactccttactccacaaaa

SEQ ID NO: 966336 - DNA, 33 bp, Homo sapien
gcagcccatcatgcaattccttactccacaaaa

SEQ ID NO: 966337 - DNA, 33 bp, Homo sapien
ggctccaagaagagaaatgatttgcatggtggt

SEQ ID NO: 966338 - DNA, 33 bp, Homo sapien
ggctccaagaagagaagtgatttgcatggtggt

SEQ ID NO: 966339 - DNA, 33 bp, Homo sapien
aaatatcacagagggcccggtagctggttccct

SEQ ID NO: 966340 - DNA, 33 bp, Homo sapien
aaatatcacagagggctcggtagctggttccct

SEQ ID NO: 966341 - DNA, 33 bp, Homo sapien
ctcttgctcttacaggaactctggctgttacgt

SEQ ID NO: 966342 - DNA, 33 bp, Homo sapien
ctcttgctcttacagggactctggctgttacgt

SEQ ID NO: 966343 - DNA, 33 bp, Homo sapien
aggctagcttcaaaaaactgctgaaggcatgtg

SEQ ID NO: 966344 - DNA, 33 bp, Homo sapien
aggctagcttcaaaaagctgctgaaggcatgtg

SEQ ID NO: 966345 - DNA, 33 bp, Homo sapien
gggccttaaagagtccaactacacctatgccgt

SEQ ID NO: 966346 - DNA, 33 bp, Homo sapien
gggccttaaagagtccgactacacctatgccgt

SEQ ID NO: 966347 - DNA, 33 bp, Homo sapien; identical to SEQ ID NO: 966345

SEQ ID NO: 966348 - DNA, 33 bp, Homo sapien; identical to SEQ ID NO: 966346

SEQ ID NO: 966349 - DNA, 33 bp, Homo sapien
caagaagtacaaccccaactcagctaggagcac

SEQ ID NO: 966350 - DNA, 33 bp, Homo sapien
caagaagtacaaccccgactcagctaggagcac

SEQ ID NO: 966351 - DNA, 33 bp, Homo sapien
taaccaggttccaggacagggttctgagggaag

SEQ ID NO: 966352 - DNA, 33 bp, Homo sapien
taaccaggttccaggagagggttctgagggaag

SEQ ID NO: 966353 - DNA, 33 bp, Homo sapien
ctgggctctacctacacacccggccagccaccc

SEQ ID NO: 966354 - DNA, 33 bp, Homo sapien
ctgggctctacctacatacccggccagccaccc

SEQ ID NO: 966355 - DNA, 33 bp, Homo sapien
gcaggaggtagctcacacagttggtatagtgga

SEQ ID NO: 966356 - DNA, 33 bp, Homo sapien
gcaggaggtagctcacgcagttggtatagtgga

SEQ ID NO: 966357 - DNA, 33 bp, Homo sapien
tgggtcaggaagcacactcagagtcctcccatt

SEQ ID NO: 966358 - DNA, 33 bp, Homo sapien
tgggtcaggaagcacattcagagtcctcccatt

SEQ ID NO: 966359 - DNA, 33 bp, Homo sapien
ctttgtctgcataactcagagatcagtcaagat

SEQ ID NO: 966360 - DNA, 33 bp, Homo sapien
ctttgtctgcataacttagagatcagtcaagat

SEQ ID NO: 966361 - DNA, 33 bp, Homo sapien
agtcagtgtgatatgaataggaggtactaggta

SEQ ID NO: 966362 - DNA, 33 bp, Homo sapien
agtcagtgtgatatgagtaggaggtactaggta

SEQ ID NO: 966363 - DNA, 33 bp, Homo sapien
catcatttgttgaaatcactctccttttctaat

SEQ ID NO: 966364 - DNA, 33 bp, Homo sapien
catcatttgttgaaattactctccttttctaat

SEQ ID NO: 966365 - DNA, 33 bp, Homo sapien
tggccttggagacacacattttcctattgtgga

SEQ ID NO: 966366 - DNA, 33 bp, Homo sapien
tggccttggagacacatattttcctattgtgga

SEQ ID NO: 966367 - DNA, 33 bp, Homo sapien
ttgaatcttggctgaaatatttaatagccatgt

SEQ ID NO: 966368 - DNA, 33 bp, Homo sapien
ttgaatcttggctgaagtatttaatagccatgt

SEQ ID NO: 966369 - DNA, 33 bp, Homo sapien
acccagcctcacactcactatttttctaatttt

SEQ ID NO: 966370 - DNA, 33 bp, Homo sapien
acccagcctcacactcgctatttttctaatttt

SEQ ID NO: 966371 - DNA, 33 bp, Homo sapien
ttcctagatatatgtcacccatgaatataaaca

SEQ ID NO: 966372 - DNA, 33 bp, Homo sapien
ttcctagatatatgtcgcccatgaatataaaca

SEQ ID NO: 966373 - DNA, 33 bp, Homo sapien
aaaagttgtaactattaaaaccagaaaacctca

SEQ ID NO: 966374 - DNA, 33 bp, Homo sapien
aaaagttgtaactatttaaaccagaaaacctca

SEQ ID NO: 966375 - DNA, 33 bp, Homo sapien
tgtgggagctaaaggaccaaaaattgggaaagt

SEQ ID NO: 966376 - DNA, 33 bp, Homo sapien
tgtgggagctaaaggagcaaaaattgggaaagt

SEQ ID NO: 966377 - DNA, 33 bp, Homo sapien
aaacatcagaaaatcacagcatcctaccaggag

SEQ ID NO: 966378 - DNA, 33 bp, Homo sapien
aaacatcagaaaatcatagcatcctaccaggag

SEQ ID NO: 966379 - DNA, 33 bp, Homo sapien
gtgacctattgtgagacggcccctgggactgat

SEQ ID NO: 966380 - DNA, 33 bp, Homo sapien
gtgacctattgtgagatggcccctgggactgat

SEQ ID NO: 966381 - DNA, 33 bp, Homo sapien
ttacaatctcatttaaccctgcaaaacccctaa

SEQ ID NO: 966382 - DNA, 33 bp, Homo sapien
ttacaatctcatttaatcctgcaaaacccctaa

SEQ ID NO: 966383 - DNA, 33 bp, Homo sapien
tttgaaactcaagtaactctatcttgcatctct

SEQ ID NO: 966384 - DNA, 33 bp, Homo sapien
tttgaaactcaagtaagtctatcttgcatctct

SEQ ID NO: 966385 - DNA, 33 bp, Homo sapien
ttcagtttgggaagacaaaacatttctggagat

SEQ ID NO: 966386 - DNA, 33 bp, Homo sapien
ttcagtttgggaagacgaaacatttctggagat

SEQ ID NO: 966387 - DNA, 33 bp, Homo sapien
tattaaagaagccaagactaagttctcaataaa

SEQ ID NO: 966388 - DNA, 33 bp, Homo sapien
tattaaagaagccaagtctaagttctcaataaa

SEQ ID NO: 966389 - DNA, 33 bp, Homo sapien
tttccatttaaaagtccctgtcttgagaaatta

SEQ ID NO: 966390 - DNA, 33 bp, Homo sapien
tttccatttaaaagtctctgtcttgagaaatta

SEQ ID NO: 966391 - DNA, 33 bp, Homo sapien
acttgcagagtgaacaagcatgataggttcagg

SEQ ID NO: 966392 - DNA, 33 bp, Homo sapien
acttgcagagtgaacaggcatgataggttcagg

SEQ ID NO: 966393 - DNA, 33 bp, Homo sapien
tcatatttcctcccaaaaaagccagcagaacaa

SEQ ID NO: 966394 - DNA, 33 bp, Homo sapien
tcatatttcctcccaataaagccagcagaacaa

SEQ ID NO: 966395 - DNA, 33 bp, Homo sapien
cagatggggatcctcgaatctgtcttctctaag

SEQ ID NO: 966396 - DNA, 33 bp, Homo sapien
cagatggggatcctcgtatctgtcttctctaag

SEQ ID NO: 966397 - DNA, 33 bp, Homo sapien
tgtcatcgtggggacacagtctctggatgacac

SEQ ID NO: 966398 - DNA, 33 bp, Homo sapien
tgtcatcgtggggacagagtctctggatgacac

SEQ ID NO: 966399 - DNA, 33 bp, Homo sapien
aatcatagttttctgacgccagctcttactctt

SEQ ID NO: 966400 - DNA, 33 bp, Homo sapien
aatcatagttttctgatgccagctcttactctt

SEQ ID NO: 966401 - DNA, 33 bp, Homo sapien
agaaagatttgagctacgagataagaatgaagt

SEQ ID NO: 966402 - DNA, 33 bp, Homo sapien
agaaagatttgagctatgagataagaatgaagt

SEQ ID NO: 966403 - DNA, 33 bp, Homo sapien
aagaccttctaatgaaaaggccattattttttc

SEQ ID NO: 966404 - DNA, 33 bp, Homo sapien
aagaccttctaatgaagaggccattattttttc

SEQ ID NO: 966405 - DNA, 33 bp, Homo sapien
cctggaagggttgtagaaatccaggaggagatg

SEQ ID NO: 966406 - DNA, 33 bp, Homo sapien
cctggaagggttgtagcaatccaggaggagatg

SEQ ID NO: 966407 - DNA, 33 bp, Homo sapien
tccagtccatctcacagagaaaccagaacagtc

SEQ ID NO: 966408 - DNA, 33 bp, Homo sapien
tccagtccatctcacatagaaaccagaacagtc

SEQ ID NO: 966409 - DNA, 33 bp, Homo sapien
tagaagaatcaaattagggtagaaaaatgaaat

SEQ ID NO: 966410 - DNA, 33 bp, Homo sapien
tagaagaatcaaattatggtagaaaaatgaaat

SEQ ID NO: 966411 - DNA, 33 bp, Homo sapien
catgtggtgtgactcaagtagctgcaggaggga

SEQ ID NO: 966412 - DNA, 33 bp, Homo sapien
catgtggtgtgactcaggtagctgcaggaggga

SEQ ID NO: 966413 - DNA, 33 bp, Homo sapien
taaggctcaaggtcggaaatattgagctccctt

SEQ ID NO: 966414 - DNA, 33 bp, Homo sapien
taaggctcaaggtcggcaatattgagctccctt

SEQ ID NO: 966415 - DNA, 33 bp, Homo sapien
tgcctggaaaagtgtaggagagggtcctcttcc

SEQ ID NO: 966416 - DNA, 33 bp, Homo sapien
tgcctggaaaagtgtatgagagggtcctcttcc

SEQ ID NO: 966417 - DNA, 33 bp, Homo sapien
atatctgtgtctaccaagctgctgtacacttct

SEQ ID NO: 966418 - DNA, 33 bp, Homo sapien
atatctgtgtctaccaggctgctgtacacttct

SEQ ID NO: 966419 - DNA, 33 bp, Homo sapien
gacagctaccagtataacttttatacagtggac

SEQ ID NO: 966420 - DNA, 33 bp, Homo sapien
gacagctaccagtatatcttttatacagtggac

SEQ ID NO: 966421 - DNA, 33 bp, Homo sapien
gacttctgagaactcaagaaaactagaatctat

SEQ ID NO: 966422 - DNA, 33 bp, Homo sapien
gacttctgagaactcaggaaaactagaatctat

SEQ ID NO: 966423 - DNA, 33 bp, Homo sapien
tgaaacagtgacaccacatttgctaccttctgt

SEQ ID NO: 966424 - DNA, 33 bp, Homo sapien
tgaaacagtgacaccatatttgctaccttctgt

SEQ ID NO: 966425 - DNA, 33 bp, Homo sapien
gggtccaaaggcaagaagaacccgagatctagg

SEQ ID NO: 966426 - DNA, 33 bp, Homo sapien
gggtccaaaggcaagaggaacccgagatctagg

SEQ ID NO: 966427 - DNA, 33 bp, Homo sapien
aggtcctggtcagggacgggatgagttctgcag

SEQ ID NO: 966428 - DNA, 33 bp, Homo sapien
aggtcctggtcagggatgggatgagttctgcag

SEQ ID NO: 966429 - DNA, 33 bp, Homo sapien
ctgattgttggtcctacgcttcatgctcaggat

SEQ ID NO: 966430 - DNA, 33 bp, Homo sapien
ctgattgttggtcctatgcttcatgctcaggat

SEQ ID NO: 966431 - DNA, 33 bp, Homo sapien
gcccaagtcccacggaaagcacatcacatctcc

SEQ ID NO: 966432 - DNA, 33 bp, Homo sapien
gcccaagtcccacggagagcacatcacatctcc

SEQ ID NO: 966433 - DNA, 33 bp, Homo sapien
cgagtagctggaattacaggaatgtgtcaccaa

SEQ ID NO: 966434 - DNA, 33 bp, Homo sapien
cgagtagctggaattataggaatgtgtcaccaa

SEQ ID NO: 966435 - DNA, 33 bp, Homo sapien
ttaatgggtggtaaatcaagaccttttgaatat

SEQ ID NO: 966436 - DNA, 33 bp, Homo sapien
ttaatgggtggtaaatgaagaccttttgaatat

SEQ ID NO: 966437 - DNA, 33 bp, Homo sapien
caccttgtgtcaaccacatcattattgtataat

SEQ ID NO: 966438 - DNA, 33 bp, Homo sapien
caccttgtgtcaaccatatcattattgtataat

SEQ ID NO: 966439 - DNA, 33 bp, Homo sapien
gtgtgatcctaacgcacctaaaaacagttcaaa

SEQ ID NO: 966440 - DNA, 33 bp, Homo sapien
gtgtgatcctaacgcatctaaaaacagttcaaa

SEQ ID NO: 966441 - DNA, 33 bp, Homo sapien
tactcaattcctttcacctgattctgaccaact

SEQ ID NO: 966442 - DNA, 33 bp, Homo sapien
tactcaattcctttcatctgattctgaccaact

SEQ ID NO: 966443 - DNA, 33 bp, Homo sapien
ctgtgtgacaacataagctgtacaataaacttc

SEQ ID NO: 966444 - DNA, 33 bp, Homo sapien
ctgtgtgacaacataatctgtacaataaacttc

SEQ ID NO: 966445 - DNA, 33 bp, Homo sapien
gaaccacaatgcgatgaagtgtgttagtagcat

SEQ ID NO: 966446 - DNA, 33 bp, Homo sapien
gaaccacaatgcgatggagtgtgttagtagcat

SEQ ID NO: 966447 - DNA, 33 bp, Homo sapien
attgctaggtgctttaagtgttatgccttttaa

SEQ ID NO: 966448 - DNA, 33 bp, Homo sapien
attgctaggtgctttatgtgttatgccttttaa

SEQ ID NO: 966449 - DNA, 33 bp, Homo sapien
caacttggaggaggtgaagctaggaaactatct

SEQ ID NO: 966450 - DNA, 33 bp, Homo sapien
caacttggaggaggtggagctaggaaactatct

SEQ ID NO: 966451 - DNA, 33 bp, Homo sapien
aggtttaaacaagacaaaaatgcattggctcac

SEQ ID NO: 966452 - DNA, 33 bp, Homo sapien
aggtttaaacaagacagaaatgcattggctcac

SEQ ID NO: 966453 - DNA, 33 bp, Homo sapien
gtgcaataaatccagaaaaagaaagggtcattt

SEQ ID NO: 966454 - DNA, 33 bp, Homo sapien
gtgcaataaatccagagaaagaaagggtcattt

SEQ ID NO: 966455 - DNA, 33 bp, Homo sapien
ttctctggcagaaataacgtataaatgatgttg

SEQ ID NO: 966456 - DNA, 33 bp, Homo sapien
ttctctggcagaaataccgtataaatgatgttg

SEQ ID NO: 966457 - DNA, 33 bp, Homo sapien
tacatcagagtagctaacccccaggacaagtca

SEQ ID NO: 966458 - DNA, 33 bp, Homo sapien
tacatcagagtagctaccccccaggacaagtca

SEQ ID NO: 966459 - DNA, 33 bp, Homo sapien
agctcataacttaaaacgaagaatcaagtacaa

SEQ ID NO: 966460 - DNA, 33 bp, Homo sapien
agctcataacttaaaaggaagaatcaagtacaa

SEQ ID NO: 966461 - DNA, 33 bp, Homo sapien
ttttcatcttgcaaaacggactatacctgttga

SEQ ID NO: 966462 - DNA, 33 bp, Homo sapien
ttttcatcttgcaaaatggactatacctgttga

SEQ ID NO: 966463 - DNA, 33 bp, Homo sapien
ggtcacaaggcaaccaagcgaactgaacttcaa

SEQ ID NO: 966464 - DNA, 33 bp, Homo sapien
ggtcacaaggcaaccaggcgaactgaacttcaa

SEQ ID NO: 966465 - DNA, 33 bp, Homo sapien
ccagatagtcactctccaactcttctccacaga

SEQ ID NO: 966466 - DNA, 33 bp, Homo sapien
ccagatagtcactctctaactcttctccacaga

SEQ ID NO: 966467 - DNA, 33 bp, Homo sapien
tttacctcagttgtcactcttttacaaacaatg

SEQ ID NO: 966468 - DNA, 33 bp, Homo sapien
tttacctcagttgtcattcttttacaaacaatg

SEQ ID NO: 966469 - DNA, 33 bp, Homo sapien
atacattttctgagcaataaagaaactcctttg

SEQ ID NO: 966470 - DNA, 33 bp, Homo sapien
atacattttctgagcattaaagaaactcctttg

SEQ ID NO: 966471 - DNA, 33 bp, Homo sapien
aactgtgtcactcttaaagcagatgtgatcata

SEQ ID NO: 966472 - DNA, 33 bp, Homo sapien
aactgtgtcactcttagagcagatgtgatcata

SEQ ID NO: 966473 - DNA, 33 bp, Homo sapien
taacctggaattttgagaactaaaatattgtat

SEQ ID NO: 966474 - DNA, 33 bp, Homo sapien
taacctggaattttgataactaaaatattgtat

SEQ ID NO: 966475 - DNA, 33 bp, Homo sapien
atcctcccgctcctcaatgaagagaaacatttc

SEQ ID NO: 966476 - DNA, 33 bp, Homo sapien
atcctcccgctcctcagtgaagagaaacatttc

SEQ ID NO: 966477 - DNA, 33 bp, Homo sapien
ctagcagagaagatcaatattaagataactggt

SEQ ID NO: 966478 - DNA, 33 bp, Homo sapien
ctagcagagaagatcagtattaagataactggt

SEQ ID NO: 966479 - DNA, 33 bp, Homo sapien
ccaatgaagaatcaacagaagaatcaatttctt

SEQ ID NO: 966480 - DNA, 33 bp, Homo sapien
ccaatgaagaatcaacggaagaatcaatttctt

SEQ ID NO: 966481 - DNA, 33 bp, Homo sapien
caaataatccaaatgcccttcaattgttgcatg

SEQ ID NO: 966482 - DNA, 33 bp, Homo sapien
caaataatccaaatgctcttcaattgttgcatg

SEQ ID NO: 966483 - DNA, 33 bp, Homo sapien
atttccatgacaaccacgccgtaagcgtaacgg

SEQ ID NO: 966484 - DNA, 33 bp, Homo sapien
atttccatgacaaccatgccgtaagcgtaacgg

SEQ ID NO: 966485 - DNA, 33 bp, Homo sapien
gtgcttaaaaactttacagtcatcagccaggcg

SEQ ID NO: 966486 - DNA, 33 bp, Homo sapien
gtgcttaaaaactttagagtcatcagccaggcg

SEQ ID NO: 966487 - DNA, 33 bp, Homo sapien
tgtggttcctctcacaaactgaaataatctctg

SEQ ID NO: 966488 - DNA, 33 bp, Homo sapien
tgtggttcctctcacagactgaaataatctctg

SEQ ID NO: 966489 - DNA, 33 bp, Homo sapien
ccccaaaatcacatgaatcaattccttagaata

SEQ ID NO: 966490 - DNA, 33 bp, Homo sapien
ccccaaaatcacatgagtcaattccttagaata

SEQ ID NO: 966491 - DNA, 33 bp, Homo sapien
aaaaagttgcctatcaataggagctttaaataa

SEQ ID NO: 966492 - DNA, 33 bp, Homo sapien
aaaaagttgcctatcagtaggagctttaaataa

SEQ ID NO: 966493 - DNA, 33 bp, Homo sapien
tgaaaaccagtcagcaaggccaaaacaagagag

SEQ ID NO: 966494 - DNA, 33 bp, Homo sapien
tgaaaaccagtcagcatggccaaaacaagagag

SEQ ID NO: 966495 - DNA, 33 bp, Homo sapien
gttaatgcagaaaactcaactggcttgacactc

SEQ ID NO: 966496 - DNA, 33 bp, Homo sapien
gttaatgcagaaaacttaactggcttgacactc

SEQ ID NO: 966497 - DNA, 33 bp, Homo sapien
ctttcacaaccaaccccgattaaatcctgatca

SEQ ID NO: 966498 - DNA, 33 bp, Homo sapien
ctttcacaaccaaccctgattaaatcctgatca

SEQ ID NO: 966499 - DNA, 33 bp, Homo sapien
aaataaatgaaatgtaccccagttgaacaacag

SEQ ID NO: 966500 - DNA, 33 bp, Homo sapien
aaataaatgaaatgtatcccagttgaacaacag

SEQ ID NO: 966501 - DNA, 33 bp, Homo sapien
actaggagtattcaagcctgatttctttccttg

SEQ ID NO: 966502 - DNA, 33 bp, Homo sapien
actaggagtattcaaggctgatttctttccttg

SEQ ID NO: 966503 - DNA, 33 bp, Homo sapien
tgggaaataagagaaaagcaggccaggtcagag

SEQ ID NO: 966504 - DNA, 33 bp, Homo sapien
tgggaaataagagaaaggcaggccaggtcagag

SEQ ID NO: 966505 - DNA, 33 bp, Homo sapien
cttatctattatctgcgctttcttttgaaaatc

SEQ ID NO: 966506 - DNA, 33 bp, Homo sapien
cttatctattatctgctctttcttttgaaaatc

SEQ ID NO: 966507 - DNA, 33 bp, Homo sapien
tgttgcagctgtccaacctctctggcattctag

SEQ ID NO: 966508 - DNA, 33 bp, Homo sapien
tgttgcagctgtccaatctctctggcattctag

SEQ ID NO: 966509 - DNA, 33 bp, Homo sapien
accactgctctagctaacctagactcctgatga

SEQ ID NO: 966510 - DNA, 33 bp, Homo sapien
accactgctctagctaccctagactcctgatga

SEQ ID NO: 966511 - DNA, 33 bp, Homo sapien
aacagcttaagtttgccaacagggtttgaatct

SEQ ID NO: 966512 - DNA, 33 bp, Homo sapien
aacagcttaagtttgcgaacagggtttgaatct

SEQ ID NO: 966513 - DNA, 33 bp, Homo sapien
ctgacacctaaccatcaaagcagctctgtggtg

SEQ ID NO: 966514 - DNA, 33 bp, Homo sapien
ctgacacctaaccatcgaagcagctctgtggtg

SEQ ID NO: 966515 - DNA, 33 bp, Homo sapien
catgcatttcaaaatacccattgtatggcaaag

SEQ ID NO: 966516 - DNA, 33 bp, Homo sapien
catgcatttcaaaatagccattgtatggcaaag

SEQ ID NO: 966517 - DNA, 33 bp, Homo sapien
tctctggacactgtcccggaaactcttctgggg

SEQ ID NO: 966518 - DNA, 33 bp, Homo sapien
tctctggacactgtccgggaaactcttctgggg

SEQ ID NO: 966519 - DNA, 33 bp, Homo sapien
ctttgccacaagaatacgagcagagttagagct

SEQ ID NO: 966520 - DNA, 33 bp, Homo sapien
ctttgccacaagaatatgagcagagttagagct

SEQ ID NO: 966521 - DNA, 33 bp, Homo sapien
tacccttagaactcaaactaggctgggcccatg

SEQ ID NO: 966522 - DNA, 33 bp, Homo sapien
tacccttagaactcaagctaggctgggcccatg

SEQ ID NO: 966523 - DNA, 33 bp, Homo sapien
aactcctttgttcaaacatctagttatcataga

SEQ ID NO: 966524 - DNA, 33 bp, Homo sapien
aactcctttgttcaaatatctagttatcataga

SEQ ID NO: 966525 - DNA, 33 bp, Homo sapien
aggagtttataatgcaggaactgtggaccagta

SEQ ID NO: 966526 - DNA, 33 bp, Homo sapien
aggagtttataatgcatgaactgtggaccagta

SEQ ID NO: 966527 - DNA, 33 bp, Homo sapien
gatgctacaacagggacgaactttgaaaacatt

SEQ ID NO: 966528 - DNA, 33 bp, Homo sapien
gatgctacaacagggatgaactttgaaaacatt

SEQ ID NO: 966529 - DNA, 33 bp, Homo sapien
cacaactaatcactgaagtttgttatttgttat

SEQ ID NO: 966530 - DNA, 33 bp, Homo sapien
cacaactaatcactgaggtttgttatttgttat

SEQ ID NO: 966531 - DNA, 33 bp, Homo sapien
atcccctggaaaaagcaactgctataatcttgc

SEQ ID NO: 966532 - DNA, 33 bp, Homo sapien
atcccctggaaaaagccactgctataatcttgc

SEQ ID NO: 966533 - DNA, 33 bp, Homo sapien
tgttgagtgaaagcaaatgtgatttctaaatgg

SEQ ID NO: 966534 - DNA, 33 bp, Homo sapien
tgttgagtgaaagcaactgtgatttctaaatgg

SEQ ID NO: 966535 - DNA, 33 bp, Homo sapien
atcattaattaattctcactgcactgtaagtct

SEQ ID NO: 966536 - DNA, 33 bp, Homo sapien
atcattaattaattcttactgcactgtaagtct

SEQ ID NO: 966537 - DNA, 33 bp, Homo sapien
ctgatttgcactgccaaccagttctgacacatg

SEQ ID NO: 966538 - DNA, 33 bp, Homo sapien
ctgatttgcactgccagccagttctgacacatg

SEQ ID NO: 966539 - DNA, 33 bp, Homo sapien
actgcttaggtgcttaaacactcttcacaaaac

SEQ ID NO: 966540 - DNA, 33 bp, Homo sapien
actgcttaggtgcttagacactcttcacaaaac

SEQ ID NO: 966541 - DNA, 33 bp, Homo sapien
gagtaaaaagttgccacggagaaactaaattta

SEQ ID NO: 966542 - DNA, 33 bp, Homo sapien
gagtaaaaagttgccatggagaaactaaattta

SEQ ID NO: 966543 - DNA, 33 bp, Homo sapien
ccttgaatgaccttgaataagttgcttatctga

SEQ ID NO: 966544 - DNA, 33 bp, Homo sapien
ccttgaatgaccttgagtaagttgcttatctga

SEQ ID NO: 966545 - DNA, 33 bp, Homo sapien
aatacaccaaaatataacttccaataactagaa

SEQ ID NO: 966546 - DNA, 33 bp, Homo sapien
aatacaccaaaatatagcttccaataactagaa

SEQ ID NO: 966547 - DNA, 33 bp, Homo sapien
tgcaaaggctatacagcagaggaaagaaattgc

SEQ ID NO: 966548 - DNA, 33 bp, Homo sapien
tgcaaaggctatacagtagaggaaagaaattgc

SEQ ID NO: 966549 - DNA, 33 bp, Homo sapien
tactcaatcttattagcaaccagagaaatgcaa

SEQ ID NO: 966550 - DNA, 33 bp, Homo sapien
tactcaatcttattagtaaccagagaaatgcaa

SEQ ID NO: 966551 - DNA, 33 bp, Homo sapien
gaaaaatgcagtacaaaataagtgttagaacat

SEQ ID NO: 966552 - DNA, 33 bp, Homo sapien
gaaaaatgcagtacaagataagtgttagaacat

SEQ ID NO: 966553 - DNA, 33 bp, Homo sapien
gtctttttctcataaccgctgctgggaaacatt

SEQ ID NO: 966554 - DNA, 33 bp, Homo sapien
gtctttttctcataactgctgctgggaaacatt

SEQ ID NO: 966555 - DNA, 33 bp, Homo sapien
atagggaccagtcttccctagaacttctataaa

SEQ ID NO: 966556 - DNA, 33 bp, Homo sapien
atagggaccagtcttctctagaacttctataaa

SEQ ID NO: 966557 - DNA, 33 bp, Homo sapien
tgagaatctagctctgaattgaaaaagctcaga

SEQ ID NO: 966558 - DNA, 33 bp, Homo sapien
tgagaatctagctctgtattgaaaaagctcaga

SEQ ID NO: 966559 - DNA, 33 bp, Homo sapien
agatgggaacctcagcaaaacctggggaatgca

SEQ ID NO: 966560 - DNA, 33 bp, Homo sapien
agatgggaacctcagcgaaacctggggaatgca

SEQ ID NO: 966561 - DNA, 33 bp, Homo sapien
gaaatgggcggggaccaagactgaggagaatgg

SEQ ID NO: 966562 - DNA, 33 bp, Homo sapien
gaaatgggcggggaccgagactgaggagaatgg

SEQ ID NO: 966563 - DNA, 33 bp, Homo sapien
gttggggaggaagtccagatgcaactcagctta

SEQ ID NO: 966564 - DNA, 33 bp, Homo sapien
gttggggaggaagtccggatgcaactcagctta

SEQ ID NO: 966565 - DNA, 33 bp, Homo sapien
attctttaaggccaaacctgaatgtcactttat

SEQ ID NO: 966566 - DNA, 33 bp, Homo sapien
attctttaaggccaaatctgaatgtcactttat

SEQ ID NO: 966567 - DNA, 33 bp, Homo sapien
gcatttcactggtgatcagttggtcattttacc

SEQ ID NO: 966568 - DNA, 33 bp, Homo sapien
gcatttcactggtgattagttggtcattttacc

SEQ ID NO: 966569 - DNA, 33 bp, Homo sapien
gtgactaagtattaccacagtacaagaatttgg

SEQ ID NO: 966570 - DNA, 33 bp, Homo sapien
gtgactaagtattaccgcagtacaagaatttgg

SEQ ID NO: 966571 - DNA, 33 bp, Homo sapien
aagtgatgcctctgaccgaggaaataagggcat

SEQ ID NO: 966572 - DNA, 33 bp, Homo sapien
aagtgatgcctctgactgaggaaataagggcat

SEQ ID NO: 966573 - DNA, 33 bp, Homo sapien
ggacagaaaggaaaaaggctgtgagatggagat

SEQ ID NO: 966574 - DNA, 33 bp, Homo sapien
ggacagaaaggaaaaatgctgtgagatggagat

SEQ ID NO: 966575 - DNA, 33 bp, Homo sapien
agagatggggtgtaacaaacaaaatgcagtaac

SEQ ID NO: 966576 - DNA, 33 bp, Homo sapien
agagatggggtgtaaccaacaaaatgcagtaac

SEQ ID NO: 966577 - DNA, 33 bp, Homo sapien
cccacctgacaaaataggcccactggctgctgt

SEQ ID NO: 966578 - DNA, 33 bp, Homo sapien
cccacctgacaaaatatgcccactggctgctgt

SEQ ID NO: 966579 - DNA, 33 bp, Homo sapien
ctcttgacccttataaacattttgcaaagaaaa

SEQ ID NO: 966580 - DNA, 33 bp, Homo sapien
ctcttgacccttataatcattttgcaaagaaaa

SEQ ID NO: 966581 - DNA, 33 bp, Homo sapien
taaaaattatagacaacgaaagtgtttccttat

SEQ ID NO: 966582 - DNA, 33 bp, Homo sapien
taaaaattatagacaatgaaagtgtttccttat

SEQ ID NO: 966583 - DNA, 33 bp, Homo sapien
tgagcagtcagtggaacgtgtgcacacctgtag

SEQ ID NO: 966584 - DNA, 33 bp, Homo sapien
tgagcagtcagtggaatgtgtgcacacctgtag

SEQ ID NO: 966585 - DNA, 33 bp, Homo sapien
caggcacacaccaatacactggcaagcaatata

SEQ ID NO: 966586 - DNA, 33 bp, Homo sapien
caggcacacaccaatatactggcaagcaatata

SEQ ID NO: 966587 - DNA, 33 bp, Homo sapien
agtgggcgttgggatacagaaagcactatcact

SEQ ID NO: 966588 - DNA, 33 bp, Homo sapien
agtgggcgttgggatagagaaagcactatcact

SEQ ID NO: 966589 - DNA, 33 bp, Homo sapien
tccttagacttcaagccagttggttgccttaag

SEQ ID NO: 966590 - DNA, 33 bp, Homo sapien
tccttagacttcaagctagttggttgccttaag

SEQ ID NO: 966591 - DNA, 33 bp, Homo sapien
aatggactagtagttgcaataatcacaaaagga

SEQ ID NO: 966592 - DNA, 33 bp, Homo sapien
aatggactagtagttgtaataatcacaaaagga

SEQ ID NO: 966593 - DNA, 33 bp, Homo sapien
actcatgtgacacttacctttttcagtggtccc

SEQ ID NO: 966594 - DNA, 33 bp, Homo sapien
actcatgtgacacttatctttttcagtggtccc

SEQ ID NO: 966595 - DNA, 33 bp, Homo sapien
ttacttatttttgcctcacatattgtgcatatc

SEQ ID NO: 966596 - DNA, 33 bp, Homo sapien
ttacttatttttgccttacatattgtgcatatc

SEQ ID NO: 966597 - DNA, 33 bp, Homo sapien
tgagacttcagtagacaatggattcagactagg

SEQ ID NO: 966598 - DNA, 33 bp, Homo sapien
tgagacttcagtagaccatggattcagactagg

SEQ ID NO: 966599 - DNA, 33 bp, Homo sapien
ctttgagaatcactacaagaaaaactccttgtg

SEQ ID NO: 966600 - DNA, 33 bp, Homo sapien
ctttgagaatcactacgagaaaaactccttgtg

SEQ ID NO: 966601 - DNA, 33 bp, Homo sapien; identical to SEQ ID NO: 966599

SEQ ID NO: 966602 - DNA, 33 bp, Homo sapien; identical to SEQ ID NO: 966600

SEQ ID NO: 966603 - DNA, 33 bp, Homo sapien
taacaattttggcagccgaactccttaaagaac

SEQ ID NO: 966604 - DNA, 33 bp, Homo sapien
taacaattttggcagcggaactccttaaagaac

SEQ ID NO: 966605 - DNA, 33 bp, Homo sapien
ctccccagcctgcataaaatctgaaaagtcact

SEQ ID NO: 966606 - DNA, 33 bp, Homo sapien
ctccccagcctgcatacaatctgaaaagtcact

SEQ ID NO: 966607 - DNA, 33 bp, Homo sapien
agatgctttgatacaacataattcaaaccagta

SEQ ID NO: 966608 - DNA, 33 bp, Homo sapien
agatgctttgatacaatataattcaaaccagta

SEQ ID NO: 966609 - DNA, 33 bp, Homo sapien
caatagataatgctgaaaactataataatagta

SEQ ID NO: 966610 - DNA, 33 bp, Homo sapien
caatagataatgctgacaactataataatagta

SEQ ID NO: 966611 - DNA, 33 bp, Homo sapien
ctcttaaatagaaccaatgagcctaatttattt

SEQ ID NO: 966612 - DNA, 33 bp, Homo sapien
ctcttaaatagaaccagtgagcctaatttattt

SEQ ID NO: 966613 - DNA, 33 bp, Homo sapien
tcttaacagaaaaaaaatagaagttcacagatg

SEQ ID NO: 966614 - DNA, 33 bp, Homo sapien
tcttaacagaaaaaaagtagaagttcacagatg

SEQ ID NO: 966615 - DNA, 33 bp, Homo sapien
attctgttttggtaacgggcaactcactttttc

SEQ ID NO: 966616 - DNA, 33 bp, Homo sapien
attctgttttggtaactggcaactcactttttc

SEQ ID NO: 966617 - DNA, 33 bp, Homo sapien
tccgaaaggggcctaaaattgtcacttccataa

SEQ ID NO: 966618 - DNA, 33 bp, Homo sapien
tccgaaaggggcctaagattgtcacttccataa

SEQ ID NO: 966619 - DNA, 33 bp, Homo sapien
tataaaagttaatatacgttgacctgataattc

SEQ ID NO: 966620 - DNA, 33 bp, Homo sapien
tataaaagttaatatatgttgacctgataattc

SEQ ID NO: 966621 - DNA, 33 bp, Homo sapien
atgggattcagttccacgcaacctcttgccaaa

SEQ ID NO: 966622 - DNA, 33 bp, Homo sapien
atgggattcagttccatgcaacctcttgccaaa

SEQ ID NO: 966623 - DNA, 33 bp, Homo sapien
ccatgctcctccacaacgttagcctagcatttt

SEQ ID NO: 966624 - DNA, 33 bp, Homo sapien
ccatgctcctccacaatgttagcctagcatttt

SEQ ID NO: 966625 - DNA, 33 bp, Homo sapien
tcattgcaccacgctgaaatgggggccaagatg

SEQ ID NO: 966626 - DNA, 33 bp, Homo sapien
tcattgcaccacgctggaatgggggccaagatg

SEQ ID NO: 966627 - DNA, 33 bp, Homo sapien
ccgtgactggagtcccaaatcatgctcttggcc

SEQ ID NO: 966628 - DNA, 33 bp, Homo sapien
ccgtgactggagtccctaatcatgctcttggcc

SEQ ID NO: 966629 - DNA, 33 bp, Homo sapien
ggaaatgataaaaatcaaagctaaatgaaaaat

SEQ ID NO: 966630 - DNA, 33 bp, Homo sapien
ggaaatgataaaaatccaagctaaatgaaaaat

SEQ ID NO: 966631 - DNA, 33 bp, Homo sapien
gacccagaaactagaaatagaaaaagtgagaca

SEQ ID NO: 966632 - DNA, 33 bp, Homo sapien
gacccagaaactagaactagaaaaagtgagaca

SEQ ID NO: 966633 - DNA, 33 bp, Homo sapien
ccagtcaagatagtaaatcaataccaaagtcac

SEQ ID NO: 966634 - DNA, 33 bp, Homo sapien
ccagtcaagatagtaattcaataccaaagtcac

SEQ ID NO: 966635 - DNA, 33 bp, Homo sapien
ggatccagtggacccacgtgaaatggacctgag

SEQ ID NO: 966636 - DNA, 33 bp, Homo sapien
ggatccagtggacccatgtgaaatggacctgag

SEQ ID NO: 966637 - DNA, 33 bp, Homo sapien
gtgagttagttctcacaggatttgatcatttaa

SEQ ID NO: 966638 - DNA, 33 bp, Homo sapien
gtgagttagttctcacgggatttgatcatttaa

SEQ ID NO: 966639 - DNA, 33 bp, Homo sapien
tctagcatctttattccactaggttgctcagta

SEQ ID NO: 966640 - DNA, 33 bp, Homo sapien
tctagcatctttattctactaggttgctcagta

SEQ ID NO: 966641 - DNA, 33 bp, Homo sapien
agccttggtgctatttaaaaagaccctcatcac

SEQ ID NO: 966642 - DNA, 33 bp, Homo sapien
agccttggtgctatttgaaaagaccctcatcac

SEQ ID NO: 966643 - DNA, 33 bp, Homo sapien
atattatactagggtcaaaaactttgaatgtca

SEQ ID NO: 966644 - DNA, 33 bp, Homo sapien
atattatactagggtccaaaactttgaatgtca

SEQ ID NO: 966645 - DNA, 33 bp, Homo sapien
atactaaatagattgtaaaaaggacagttgttt

SEQ ID NO: 966646 - DNA, 33 bp, Homo sapien
atactaaatagattgttaaaaggacagttgttt

SEQ ID NO: 966647 - DNA, 33 bp, Homo sapien
cagcaatttgttgaaaacttcatgtcaaggctc

SEQ ID NO: 966648 - DNA, 33 bp, Homo sapien
cagcaatttgttgaaatcttcatgtcaaggctc

SEQ ID NO: 966649 - DNA, 33 bp, Homo sapien
agaaacttgaagaacacaaacaatttaaggagt

SEQ ID NO: 966650 - DNA, 33 bp, Homo sapien
agaaacttgaagaacataaacaatttaaggagt

SEQ ID NO: 966651 - DNA, 33 bp, Homo sapien
gtgatgctttggaaaccgaaatgagaagtgaat

SEQ ID NO: 966652 - DNA, 33 bp, Homo sapien
gtgatgctttggaaactgaaatgagaagtgaat

SEQ ID NO: 966653 - DNA, 33 bp, Homo sapien
ccctgagttctgtggaaagactatgtatatcct

SEQ ID NO: 966654 - DNA, 33 bp, Homo sapien
ccctgagttctgtggagagactatgtatatcct

SEQ ID NO: 966655 - DNA, 33 bp, Homo sapien
attacaatgtgcatccaagatgaagaaccattg

SEQ ID NO: 966656 - DNA, 33 bp, Homo sapien
attacaatgtgcatccgagatgaagaaccattg

SEQ ID NO: 966657 - DNA, 33 bp, Homo sapien
cgggtgaaatgagtgcgccaaaaaccagggtca

SEQ ID NO: 966658 - DNA, 33 bp, Homo sapien
cgggtgaaatgagtgctccaaaaaccagggtca

SEQ ID NO: 966659 - DNA, 33 bp, Homo sapien
acagagcttaaggtctcaccgtcaagaaatact

SEQ ID NO: 966660 - DNA, 33 bp, Homo sapien
acagagcttaaggtcttaccgtcaagaaatact

SEQ ID NO: 966661 - DNA, 33 bp, Homo sapien
aaggaagtgaattttacggtatatgaattattt

SEQ ID NO: 966662 - DNA, 33 bp, Homo sapien
aaggaagtgaattttatggtatatgaattattt

SEQ ID NO: 966663 - DNA, 33 bp, Homo sapien
tcccaggatataatgaatagtttgataatgcaa

SEQ ID NO: 966664 - DNA, 33 bp, Homo sapien
tcccaggatataatgagtagtttgataatgcaa

SEQ ID NO: 966665 - DNA, 33 bp, Homo sapien
gcacccattacaatcacatcacaaatctataaa

SEQ ID NO: 966666 - DNA, 33 bp, Homo sapien
gcacccattacaatcatatcacaaatctataaa

SEQ ID NO: 966667 - DNA, 33 bp, Homo sapien
tcttgtaaatgccatcactcatttctgggtaaa

SEQ ID NO: 966668 - DNA, 33 bp, Homo sapien
tcttgtaaatgccatctctcatttctgggtaaa

SEQ ID NO: 966669 - DNA, 33 bp, Homo sapien
tctaactccacattaaatattgacaaatactct

SEQ ID NO: 966670 - DNA, 33 bp, Homo sapien
tctaactccacattaactattgacaaatactct

SEQ ID NO: 966671 - DNA, 33 bp, Homo sapien
cagtggtttgtgattccaatgcatcatatccat

SEQ ID NO: 966672 - DNA, 33 bp, Homo sapien
cagtggtttgtgattctaatgcatcatatccat

SEQ ID NO: 966673 - DNA, 33 bp, Homo sapien
cttttagcttcacgacaactgtcatctgcagag

SEQ ID NO: 966674 - DNA, 33 bp, Homo sapien
cttttagcttcacgaccactgtcatctgcagag

SEQ ID NO: 966675 - DNA, 33 bp, Homo sapien
aagagatgacatttctcaacttcctctgcagat

SEQ ID NO: 966676 - DNA, 33 bp, Homo sapien
aagagatgacatttctgaacttcctctgcagat

SEQ ID NO: 966677 - DNA, 33 bp, Homo sapien
gggcatgacatttgggaagcccactgtccagct

SEQ ID NO: 966678 - DNA, 33 bp, Homo sapien
gggcatgacatttggggagcccactgtccagct

SEQ ID NO: 966679 - DNA, 33 bp, Homo sapien
aaagggaatgcctatacactactggaaggaaca

SEQ ID NO: 966680 - DNA, 33 bp, Homo sapien
aaagggaatgcctatatactactggaaggaaca

SEQ ID NO: 966681 - DNA, 33 bp, Homo sapien
atcaggtagactcacaagttgatgtagaaatat

SEQ ID NO: 966682 - DNA, 33 bp, Homo sapien
atcaggtagactcacatgttgatgtagaaatat

SEQ ID NO: 966683 - DNA, 33 bp, Homo sapien
caatagcctaaacacaaccatccatgtttcatg

SEQ ID NO: 966684 - DNA, 33 bp, Homo sapien
caatagcctaaacacagccatccatgtttcatg

SEQ ID NO: 966685 - DNA, 33 bp, Homo sapien
cactgtctcccacaaaaaacaagttttatctct

SEQ ID NO: 966686 - DNA, 33 bp, Homo sapien
cactgtctcccacaaagaacaagttttatctct

SEQ ID NO: 966687 - DNA, 33 bp, Homo sapien
tcgagggggttgcgtaagcctcactcactctcc

SEQ ID NO: 966688 - DNA, 33 bp, Homo sapien
tcgagggggttgcgtaggcctcactcactctcc

SEQ ID NO: 966689 - DNA, 33 bp, Homo sapien
tacctaaaatggtatccagtattcctgcaaata

SEQ ID NO: 966690 - DNA, 33 bp, Homo sapien
tacctaaaatggtatcgagtattcctgcaaata

SEQ ID NO: 966691 - DNA, 33 bp, Homo sapien
tttcaggagttttttacagccctctgaagtctt

SEQ ID NO: 966692 - DNA, 33 bp, Homo sapien
tttcaggagttttttatagccctctgaagtctt

SEQ ID NO: 966693 - DNA, 33 bp, Homo sapien
tcttttgcatccgagccaaaatcccagaatgtt

SEQ ID NO: 966694 - DNA, 33 bp, Homo sapien
tcttttgcatccgagctaaaatcccagaatgtt

SEQ ID NO: 966695 - DNA, 33 bp, Homo sapien
agcttggtgaatcaaacagattaagtatgaaaa

SEQ ID NO: 966696 - DNA, 33 bp, Homo sapien
agcttggtgaatcaaatagattaagtatgaaaa

SEQ ID NO: 966697 - DNA, 33 bp, Homo sapien
aatcatgcctattcaaatgggtttttttcatac

SEQ ID NO: 966698 - DNA, 33 bp, Homo sapien
aatcatgcctattcaagtgggtttttttcatac

SEQ ID NO: 966699 - DNA, 33 bp, Homo sapien
ttcttaggtgatcccaggttcgcaagtgctcag

SEQ ID NO: 966700 - DNA, 33 bp, Homo sapien
ttcttaggtgatcccatgttcgcaagtgctcag

SEQ ID NO: 966701 - DNA, 33 bp, Homo sapien
gggacctgtatagaagccattcaaaaatattca

SEQ ID NO: 966702 - DNA, 33 bp, Homo sapien
gggacctgtatagaaggcattcaaaaatattca

SEQ ID NO: 966703 - DNA, 33 bp, Homo sapien
agcagtgcaaaacagactaatacaacctctcat

SEQ ID NO: 966704 - DNA, 33 bp, Homo sapien
agcagtgcaaaacagattaatacaacctctcat

SEQ ID NO: 966705 - DNA, 33 bp, Homo sapien
ttgtcaatttctacgaaaaaaagcctgctggga

SEQ ID NO: 966706 - DNA, 33 bp, Homo sapien
ttgtcaatttctacgataaaaagcctgctggga

SEQ ID NO: 966707 - DNA, 33 bp, Homo sapien
ttctccacatgtaggcacaggtactgatatata

SEQ ID NO: 966708 - DNA, 33 bp, Homo sapien
ttctccacatgtaggcgcaggtactgatatata

SEQ ID NO: 966709 - DNA, 33 bp, Homo sapien
gtccagttcctcaccaaacactaaacttgtcag

SEQ ID NO: 966710 - DNA, 33 bp, Homo sapien
gtccagttcctcaccagacactaaacttgtcag

SEQ ID NO: 966711 - DNA, 33 bp, Homo sapien
gtccttcccagaagccacttattcattgctgca

SEQ ID NO: 966712 - DNA, 33 bp, Homo sapien
gtccttcccagaagccgcttattcattgctgca

SEQ ID NO: 966713 - DNA, 33 bp, Homo sapien
ggaagtatggatgagacaaaagtcggaaacaag

SEQ ID NO: 966714 - DNA, 33 bp, Homo sapien
ggaagtatggatgagataaaagtcggaaacaag

SEQ ID NO: 966715 - DNA, 33 bp, Homo sapien; identical to SEQ ID NO: 966713

SEQ ID NO: 966716 - DNA, 33 bp, Homo sapien; identical to SEQ ID NO: 966714

SEQ ID NO: 966717 - DNA, 33 bp, Homo sapien
gttcgattgaaattgaccattgtgaatacagtg

SEQ ID NO: 966718 - DNA, 33 bp, Homo sapien
gttcgattgaaattgatcattgtgaatacagtg

SEQ ID NO: 966719 - DNA, 33 bp, Homo sapien
tccttgtgaagacatacaagttgttttcgttgc

SEQ ID NO: 966720 - DNA, 33 bp, Homo sapien
tccttgtgaagacatagaagttgttttcgttgc

SEQ ID NO: 966721 - DNA, 33 bp, Homo sapien
gtagtgataatagcccaataagtcttattcttg

SEQ ID NO: 966722 - DNA, 33 bp, Homo sapien
gtagtgataatagcccgataagtcttattcttg

SEQ ID NO: 966723 - DNA, 33 bp, Homo sapien
catagaattttgaaagcaatctgtctactttaa

SEQ ID NO: 966724 - DNA, 33 bp, Homo sapien
catagaattttgaaaggaatctgtctactttaa

SEQ ID NO: 966725 - DNA, 33 bp, Homo sapien
ttttctaacttattcaagtgcctctccactgaa

SEQ ID NO: 966726 - DNA, 33 bp, Homo sapien
ttttctaacttattcatgtgcctctccactgaa

SEQ ID NO: 966727 - DNA, 33 bp, Homo sapien
ccagtggaagccaatgaaagttccacagtctgc

SEQ ID NO: 966728 - DNA, 33 bp, Homo sapien
ccagtggaagccaatggaagttccacagtctgc

SEQ ID NO: 966729 - DNA, 33 bp, Homo sapien
ggacttttagaaatgcaagaatatgaggaatat

SEQ ID NO: 966730 - DNA, 33 bp, Homo sapien
ggacttttagaaatgcgagaatatgaggaatat

SEQ ID NO: 966731 - DNA, 33 bp, Homo sapien
gaaattccaccacatccaggaatgcaacaagca

SEQ ID NO: 966732 - DNA, 33 bp, Homo sapien
gaaattccaccacatctaggaatgcaacaagca

SEQ ID NO: 966733 - DNA, 33 bp, Homo sapien
ctatcaaaaaaccctacctcaactggacagatt

SEQ ID NO: 966734 - DNA, 33 bp, Homo sapien
ctatcaaaaaaccctatctcaactggacagatt

SEQ ID NO: 966735 - DNA, 33 bp, Homo sapien
acaacctgatagaaaaaaatgggcgagaggtaa

SEQ ID NO: 966736 - DNA, 33 bp, Homo sapien
acaacctgatagaaaagaatgggcgagaggtaa

SEQ ID NO: 966737 - DNA, 33 bp, Homo sapien
cttaattacctgaaaacgcataagtattcctaa

SEQ ID NO: 966738 - DNA, 33 bp, Homo sapien
cttaattacctgaaaatgcataagtattcctaa

SEQ ID NO: 966739 - DNA, 33 bp, Homo sapien
agtagagttcccaacagtaagcatgagagagac

SEQ ID NO: 966740 - DNA, 33 bp, Homo sapien
agtagagttcccaacattaagcatgagagagac

SEQ ID NO: 966741 - DNA, 33 bp, Homo sapien
tagatatcccaaggtccgaattctaattgtaat

SEQ ID NO: 966742 - DNA, 33 bp, Homo sapien
tagatatcccaaggtctgaattctaattgtaat

SEQ ID NO: 966743 - DNA, 33 bp, Homo sapien
aacacaccaaattgaggactggaggtgttatgt

SEQ ID NO: 966744 - DNA, 33 bp, Homo sapien
aacacaccaaattgagtactggaggtgttatgt

SEQ ID NO: 966745 - DNA, 33 bp, Homo sapien
ctcccatgtggcccaaatgctccaaactaggcc

SEQ ID NO: 966746 - DNA, 33 bp, Homo sapien
ctcccatgtggcccaagtgctccaaactaggcc

SEQ ID NO: 966747 - DNA, 33 bp, Homo sapien
agccagagatgtagcaaggaagcaaaagtgcag

SEQ ID NO: 966748 - DNA, 33 bp, Homo sapien
agccagagatgtagcagggaagcaaaagtgcag

SEQ ID NO: 966749 - DNA, 33 bp, Homo sapien
ttcagaggcgaatcacagcacccgtccggaaga

SEQ ID NO: 966750 - DNA, 33 bp, Homo sapien
ttcagaggcgaatcacggcacccgtccggaaga

SEQ ID NO: 966751 - DNA, 33 bp, Homo sapien
tgtagcaagaggaacagtcagtttgttagggaa

SEQ ID NO: 966752 - DNA, 33 bp, Homo sapien
tgtagcaagaggaacattcagtttgttagggaa

SEQ ID NO: 966753 - DNA, 33 bp, Homo sapien
ctgtgtggcgttcatgcatctcagagggtgtag

SEQ ID NO: 966754 - DNA, 33 bp, Homo sapien
ctgtgtggcgttcatgtatctcagagggtgtag

SEQ ID NO: 966755 - DNA, 33 bp, Homo sapien
tgaatcctaagttctaaccaggacaattttcta

SEQ ID NO: 966756 - DNA, 33 bp, Homo sapien
tgaatcctaagttctagccaggacaattttcta

SEQ ID NO: 966757 - DNA, 33 bp, Homo sapien
ggaagtgtgttgctaaaaatgctaaaaatttaa

SEQ ID NO: 966758 - DNA, 33 bp, Homo sapien
ggaagtgtgttgctaagaatgctaaaaatttaa

SEQ ID NO: 966759 - DNA, 33 bp, Homo sapien
catctggtgatgtactaaattttaaaccaggct

SEQ ID NO: 966760 - DNA, 33 bp, Homo sapien
catctggtgatgtactgaattttaaaccaggct

SEQ ID NO: 966761 - DNA, 33 bp, Homo sapien
ccccacctcatagaccactctgggacaacacct

SEQ ID NO: 966762 - DNA, 33 bp, Homo sapien
ccccacctcatagacctctctgggacaacacct

SEQ ID NO: 966763 - DNA, 33 bp, Homo sapien
tggggggcagtgcatacagggaagcgtcagggt

SEQ ID NO: 966764 - DNA, 33 bp, Homo sapien
tggggggcagtgcatagagggaagcgtcagggt

SEQ ID NO: 966765 - DNA, 33 bp, Homo sapien
tctgttggccttgccaaacctaaatgataaaaa

SEQ ID NO: 966766 - DNA, 33 bp, Homo sapien
tctgttggccttgccagacctaaatgataaaaa

SEQ ID NO: 966767 - DNA, 33 bp, Homo sapien
ttttaatgactcagagacatccaatttgaattg

SEQ ID NO: 966768 - DNA, 33 bp, Homo sapien
ttttaatgactcagagccatccaatttgaattg

SEQ ID NO: 966769 - DNA, 33 bp, Homo sapien
atgtgtcaatttttcaatccctgagtaatccca

SEQ ID NO: 966770 - DNA, 33 bp, Homo sapien
atgtgtcaatttttcactccctgagtaatccca

SEQ ID NO: 966771 - DNA, 33 bp, Homo sapien
tccatgatcttgtgaaactcttcaaacttctgc

SEQ ID NO: 966772 - DNA, 33 bp, Homo sapien
tccatgatcttgtgaagctcttcaaacttctgc

SEQ ID NO: 966773 - DNA, 33 bp, Homo sapien
gaaagactaagttcaccggagaaaacaattaat

SEQ ID NO: 966774 - DNA, 33 bp, Homo sapien
gaaagactaagttcactggagaaaacaattaat

SEQ ID NO: 966775 - DNA, 33 bp, Homo sapien
tcaaatgtccaacttacagaatccccacgttgc

SEQ ID NO: 966776 - DNA, 33 bp, Homo sapien
tcaaatgtccaacttagagaatccccacgttgc

SEQ ID NO: 966777 - DNA, 33 bp, Homo sapien
atgagaatatcccatccaattaaacatcctgac

SEQ ID NO: 966778 - DNA, 33 bp, Homo sapien
atgagaatatcccatcgaattaaacatcctgac

SEQ ID NO: 966779 - DNA, 33 bp, Homo sapien
ataaggttacaaatgaccaacaagcacacgaaa

SEQ ID NO: 966780 - DNA, 33 bp, Homo sapien
ataaggttacaaatgatcaacaagcacacgaaa

SEQ ID NO: 966781 - DNA, 33 bp, Homo sapien
gatgtatacagcccaacgttaatgcagttaaat

SEQ ID NO: 966782 - DNA, 33 bp, Homo sapien
gatgtatacagcccaatgttaatgcagttaaat

SEQ ID NO: 966783 - DNA, 33 bp, Homo sapien
gtgctccacagggtccaaccagaactggaagag

SEQ ID NO: 966784 - DNA, 33 bp, Homo sapien
gtgctccacagggtccgaccagaactggaagag

SEQ ID NO: 966785 - DNA, 33 bp, Homo sapien
acaattaagcctaaaaagtatgagggtaaccag

SEQ ID NO: 966786 - DNA, 33 bp, Homo sapien
acaattaagcctaaaaggtatgagggtaaccag

SEQ ID NO: 966787 - DNA, 33 bp, Homo sapien
tgtccatctggactccagagaagaatgagaggt

SEQ ID NO: 966788 - DNA, 33 bp, Homo sapien
tgtccatctggactccggagaagaatgagaggt

SEQ ID NO: 966789 - DNA, 33 bp, Homo sapien
atatgtttttaatcgcaataagaagcattatta

SEQ ID NO: 966790 - DNA, 33 bp, Homo sapien
atatgtttttaatcgcgataagaagcattatta

SEQ ID NO: 966791 - DNA, 33 bp, Homo sapien
acaaagacatagcaggaattatagcagtatctg

SEQ ID NO: 966792 - DNA, 33 bp, Homo sapien
acaaagacatagcaggcattatagcagtatctg

SEQ ID NO: 966793 - DNA, 33 bp, Homo sapien
aggtgaggaagaagcaagtttgaaggatagttc

SEQ ID NO: 966794 - DNA, 33 bp, Homo sapien
aggtgaggaagaagcaggtttgaaggatagttc

SEQ ID NO: 966795 - DNA, 33 bp, Homo sapien
ggactcacatcccaagcctgcaagaggtaggtc

SEQ ID NO: 966796 - DNA, 33 bp, Homo sapien
ggactcacatcccaagtctgcaagaggtaggtc

SEQ ID NO: 966797 - DNA, 33 bp, Homo sapien
gtaacagagcttaggaaatgtggaagaaaatta

SEQ ID NO: 966798 - DNA, 33 bp, Homo sapien
gtaacagagcttaggacatgtggaagaaaatta

SEQ ID NO: 966799 - DNA, 33 bp, Homo sapien
cttggacatcttctcaagctgaagtatcaacaa

SEQ ID NO: 966800 - DNA, 33 bp, Homo sapien
cttggacatcttctcaggctgaagtatcaacaa

SEQ ID NO: 966801 - DNA, 33 bp, Homo sapien
ttcttccatgtgtaaccgtgagactaggttgaa

SEQ ID NO: 966802 - DNA, 33 bp, Homo sapien
ttcttccatgtgtaactgtgagactaggttgaa

SEQ ID NO: 966803 - DNA, 33 bp, Homo sapien
cacatttggatcagaaactcccattcaaactaa

SEQ ID NO: 966804 - DNA, 33 bp, Homo sapien
cacatttggatcagaagctcccattcaaactaa

SEQ ID NO: 966805 - DNA, 33 bp, Homo sapien
tttgctctgctttctacgggtttgaacagaagc

SEQ ID NO: 966806 - DNA, 33 bp, Homo sapien
tttgctctgctttctatgggtttgaacagaagc

SEQ ID NO: 966807 - DNA, 33 bp, Homo sapien
tctggagccctctatggatggaacagtttcctg

SEQ ID NO: 966808 - DNA, 33 bp, Homo sapien
tctggagccctctatgtatggaacagtttcctg

SEQ ID NO: 966809 - DNA, 33 bp, Homo sapien
cccctgcctcgggacaacagaggaccagtcctc

SEQ ID NO: 966810 - DNA, 33 bp, Homo sapien
cccctgcctcgggacaccagaggaccagtcctc

SEQ ID NO: 966811 - DNA, 33 bp, Homo sapien
ttctcagttatttacacgcttacctggagaata

SEQ ID NO: 966812 - DNA, 33 bp, Homo sapien
ttctcagttatttacatgcttacctggagaata

SEQ ID NO: 966813 - DNA, 33 bp, Homo sapien
aatacatactgaaaaaatgacaggcaaacttgt

SEQ ID NO: 966814 - DNA, 33 bp, Homo sapien
aatacatactgaaaaagtgacaggcaaacttgt

SEQ ID NO: 966815 - DNA, 33 bp, Homo sapien
ctgaaatatttgattaacctggtaggattgctc

SEQ ID NO: 966816 - DNA, 33 bp, Homo sapien
ctgaaatatttgattagcctggtaggattgctc

SEQ ID NO: 966817 - DNA, 33 bp, Homo sapien
tgtgttcatcttccaacagggtcatgctgttgc

SEQ ID NO: 966818 - DNA, 33 bp, Homo sapien
tgtgttcatcttccaagagggtcatgctgttgc

SEQ ID NO: 966819 - DNA, 33 bp, Homo sapien
gtgctttgtcatagaacattccagtctatgtgt

SEQ ID NO: 966820 - DNA, 33 bp, Homo sapien
gtgctttgtcatagaatattccagtctatgtgt

SEQ ID NO: 966821 - DNA, 33 bp, Homo sapien
tgttgtttcatgaagaacattgtgtgttgcagc

SEQ ID NO: 966822 - DNA, 33 bp, Homo sapien
tgttgtttcatgaagagcattgtgtgttgcagc

SEQ ID NO: 966823 - DNA, 33 bp, Homo sapien
tcccatcagatgtcacaggcaactttcaccccc

SEQ ID NO: 966824 - DNA, 33 bp, Homo sapien
tcccatcagatgtcacgggcaactttcaccccc

SEQ ID NO: 966825 - DNA, 33 bp, Homo sapien
tctcaggattacaaccacggcgagtgcctccta

SEQ ID NO: 966826 - DNA, 33 bp, Homo sapien
tctcaggattacaacctcggcgagtgcctccta

SEQ ID NO: 966827 - DNA, 33 bp, Homo sapien
aaggcaagaacctaccaactcttcaaatcaaac

SEQ ID NO: 966828 - DNA, 33 bp, Homo sapien
aaggcaagaacctaccgactcttcaaatcaaac

SEQ ID NO: 966829 - DNA, 33 bp, Homo sapien
gacataggagccttcaaaaggaaacgaagaccc

SEQ ID NO: 966830 - DNA, 33 bp, Homo sapien
gacataggagccttcataaggaaacgaagaccc

SEQ ID NO: 966831 - DNA, 33 bp, Homo sapien
actccatcatctcagcccaaaatttccttaagc

SEQ ID NO: 966832 - DNA, 33 bp, Homo sapien
actccatcatctcagctcaaaatttccttaagc

SEQ ID NO: 966833 - DNA, 33 bp, Homo sapien
agctgggcagctctctcacaatgcaatttactg

SEQ ID NO: 966834 - DNA, 33 bp, Homo sapien
agctgggcagctctctgacaatgcaatttactg

SEQ ID NO: 966835 - DNA, 33 bp, Homo sapien
gagaagggctctttgaaggatgagatttcacag

SEQ ID NO: 966836 - DNA, 33 bp, Homo sapien
gagaagggctctttgagggatgagatttcacag

SEQ ID NO: 966837 - DNA, 33 bp, Homo sapien
tagatgtcacaaataaaagggatgacagagcca

SEQ ID NO: 966838 - DNA, 33 bp, Homo sapien
tagatgtcacaaataagagggatgacagagcca

SEQ ID NO: 966839 - DNA, 33 bp, Homo sapien
tgcctcacccaaataacagaaatggactaaaaa

SEQ ID NO: 966840 - DNA, 33 bp, Homo sapien
tgcctcacccaaataatagaaatggactaaaaa

SEQ ID NO: 966841 - DNA, 33 bp, Homo sapien
gcaacccgtgtgggaacgctaaggtaagctgca

SEQ ID NO: 966842 - DNA, 33 bp, Homo sapien
gcaacccgtgtgggaatgctaaggtaagctgca

SEQ ID NO: 966843 - DNA, 33 bp, Homo sapien
cgggtgtgtgcagtcacgcccggataatcttta

SEQ ID NO: 966844 - DNA, 33 bp, Homo sapien
cgggtgtgtgcagtcatgcccggataatcttta

SEQ ID NO: 966845 - DNA, 33 bp, Homo sapien
aattggatatccatacagaagaaagctagcatc

SEQ ID NO: 966846 - DNA, 33 bp, Homo sapien
aattggatatccatacggaagaaagctagcatc

SEQ ID NO: 966847 - DNA, 33 bp, Homo sapien
gatttggtgaacctcaataagaaggtcaaaaac

SEQ ID NO: 966848 - DNA, 33 bp, Homo sapien
gatttggtgaacctcagtaagaaggtcaaaaac

SEQ ID NO: 966849 - DNA, 33 bp, Homo sapien
aataacaaaactacacagggaagtaagaagata

SEQ ID NO: 966850 - DNA, 33 bp, Homo sapien
aataacaaaactacacggggaagtaagaagata

SEQ ID NO: 966851 - DNA, 33 bp, Homo sapien
aacccatcttactgtaggaaaaatcaattctcc

SEQ ID NO: 966852 - DNA, 33 bp, Homo sapien
aacccatcttactgtatgaaaaatcaattctcc

SEQ ID NO: 966853 - DNA, 33 bp, Homo sapien
ccttttccatctgagcccatttttaagatgcca

SEQ ID NO: 966854 - DNA, 33 bp, Homo sapien
ccttttccatctgagctcatttttaagatgcca

SEQ ID NO: 966855 - DNA, 33 bp, Homo sapien
tctcataagacttcccaacccactctgcagtgt

SEQ ID NO: 966856 - DNA, 33 bp, Homo sapien
tctcataagacttcccgacccactctgcagtgt

SEQ ID NO: 966857 - DNA, 33 bp, Homo sapien
tgtatatttcttgcaccctctacctgctactgt

SEQ ID NO: 966858 - DNA, 33 bp, Homo sapien
tgtatatttcttgcactctctacctgctactgt

SEQ ID NO: 966859 - DNA, 33 bp, Homo sapien
gtttaataggtcagtcaaaggttgatgttagtc

SEQ ID NO: 966860 - DNA, 33 bp, Homo sapien
gtttaataggtcagtcgaaggttgatgttagtc

SEQ ID NO: 966861 - DNA, 33 bp, Homo sapien
aagagaaacaccactccgagggaaaatcaaaac

SEQ ID NO: 966862 - DNA, 33 bp, Homo sapien
aagagaaacaccactctgagggaaaatcaaaac

SEQ ID NO: 966863 - DNA, 33 bp, Homo sapien
taattttttacactcaagttatgtaagtacatg

SEQ ID NO: 966864 - DNA, 33 bp, Homo sapien
taattttttacactcaggttatgtaagtacatg

SEQ ID NO: 966865 - DNA, 33 bp, Homo sapien
ttctagtccacctcctaaactcctacaagcaaa

SEQ ID NO: 966866 - DNA, 33 bp, Homo sapien
ttctagtccacctcctgaactcctacaagcaaa

SEQ ID NO: 966867 - DNA, 33 bp, Homo sapien
gctaatgtatttgaaaagtcaccctggtattcc

SEQ ID NO: 966868 - DNA, 33 bp, Homo sapien
gctaatgtatttgaaatgtcaccctggtattcc

SEQ ID NO: 966869 - DNA, 33 bp, Homo sapien
cttttatataactttacgcccaaggaaagcaaa

SEQ ID NO: 966870 - DNA, 33 bp, Homo sapien
cttttatataactttatgcccaaggaaagcaaa

SEQ ID NO: 966871 - DNA, 33 bp, Homo sapien
ataaagaatcacagccgattgaaagatgaagaa

SEQ ID NO: 966872 - DNA, 33 bp, Homo sapien
ataaagaatcacagcctattgaaagatgaagaa

SEQ ID NO: 966873 - DNA, 33 bp, Homo sapien
tcatttattcaaacacactttcattaaacaatt

SEQ ID NO: 966874 - DNA, 33 bp, Homo sapien
tcatttattcaaacacgctttcattaaacaatt

SEQ ID NO: 966875 - DNA, 33 bp, Homo sapien
aggcatttgaacagagcagggtccaatctaaag

SEQ ID NO: 966876 - DNA, 33 bp, Homo sapien
aggcatttgaacagagtagggtccaatctaaag

SEQ ID NO: 966877 - DNA, 33 bp, Homo sapien
accatgtatgtaaatcaagtcaattatttagtt

SEQ ID NO: 966878 - DNA, 33 bp, Homo sapien
accatgtatgtaaatcgagtcaattatttagtt

SEQ ID NO: 966879 - DNA, 33 bp, Homo sapien
tggaatcaatgcatcaaatggaacctgtaagaa

SEQ ID NO: 966880 - DNA, 33 bp, Homo sapien
tggaatcaatgcatcagatggaacctgtaagaa

SEQ ID NO: 966881 - DNA, 33 bp, Homo sapien
atttctagctcagattaaagtgttgaaggggca

SEQ ID NO: 966882 - DNA, 33 bp, Homo sapien
atttctagctcagattgaagtgttgaaggggca

SEQ ID NO: 966883 - DNA, 33 bp, Homo sapien
atattccacatcgtgcagaagcttttcattttt

SEQ ID NO: 966884 - DNA, 33 bp, Homo sapien
atattccacatcgtgcggaagcttttcattttt

SEQ ID NO: 966885 - DNA, 33 bp, Homo sapien
gaagataagaatctcacagaagatcaagcaggt

SEQ ID NO: 966886 - DNA, 33 bp, Homo sapien
gaagataagaatctcatagaagatcaagcaggt

SEQ ID NO: 966887 - DNA, 33 bp, Homo sapien
ctgaccttcctagaaacgatgatactggaaaga

SEQ ID NO: 966888 - DNA, 33 bp, Homo sapien
ctgaccttcctagaaatgatgatactggaaaga

SEQ ID NO: 966889 - DNA, 33 bp, Homo sapien
ctatgcttggccctaaatatatcacccatcggc

SEQ ID NO: 966890 - DNA, 33 bp, Homo sapien
ctatgcttggccctaagtatatcacccatcggc

SEQ ID NO: 966891 - DNA, 33 bp, Homo sapien
atgttaacaatggttaccgctggagaatggact

SEQ ID NO: 966892 - DNA, 33 bp, Homo sapien
atgttaacaatggttatcgctggagaatggact

SEQ ID NO: 966893 - DNA, 33 bp, Homo sapien
actgagacttttcacggagccatttacctccca

SEQ ID NO: 966894 - DNA, 33 bp, Homo sapien
actgagacttttcacgtagccatttacctccca

SEQ ID NO: 966895 - DNA, 33 bp, Homo sapien
ttcctcttgtgtcagtcaacaggatgcctttcc

SEQ ID NO: 966896 - DNA, 33 bp, Homo sapien
ttcctcttgtgtcagttaacaggatgcctttcc

SEQ ID NO: 966897 - DNA, 33 bp, Homo sapien
ccagaatttctattaactgacaaatgaataaat

SEQ ID NO: 966898 - DNA, 33 bp, Homo sapien
ccagaatttctattaagtgacaaatgaataaat

SEQ ID NO: 966899 - DNA, 33 bp, Homo sapien
ggtatgaggtcttttacggggctaatgaaaatg

SEQ ID NO: 966900 - DNA, 33 bp, Homo sapien
ggtatgaggtcttttatggggctaatgaaaatg

SEQ ID NO: 966901 - DNA, 33 bp, Homo sapien
ggaggggcttgagtaaagcatgacccaaaggtc

SEQ ID NO: 966902 - DNA, 33 bp, Homo sapien
ggaggggcttgagtaaggcatgacccaaaggtc

SEQ ID NO: 966903 - DNA, 33 bp, Homo sapien
agctctccaatgaagacggtagtgagttccccg

SEQ ID NO: 966904 - DNA, 33 bp, Homo sapien
agctctccaatgaagatggtagtgagttccccg

SEQ ID NO: 966905 - DNA, 33 bp, Homo sapien
gtccctgtttcaaccaatggaggactgactaag

SEQ ID NO: 966906 - DNA, 33 bp, Homo sapien
gtccctgtttcaaccagtggaggactgactaag

SEQ ID NO: 966907 - DNA, 33 bp, Homo sapien
aagaaacaaaacttaccgaagctgatgcactca

SEQ ID NO: 966908 - DNA, 33 bp, Homo sapien
aagaaacaaaacttactgaagctgatgcactca

SEQ ID NO: 966909 - DNA, 33 bp, Homo sapien
ttattttgccaaagtcaagtacatgtccaggta

SEQ ID NO: 966910 - DNA, 33 bp, Homo sapien
ttattttgccaaagtcgagtacatgtccaggta

SEQ ID NO: 966911 - DNA, 33 bp, Homo sapien
tgcatctttgtcaaaaccagtttaccatacttg

SEQ ID NO: 966912 - DNA, 33 bp, Homo sapien
tgcatctttgtcaaaatcagtttaccatacttg

SEQ ID NO: 966913 - DNA, 33 bp, Homo sapien
tactagtcctaacaccaccgtcagtctagttga

SEQ ID NO: 966914 - DNA, 33 bp, Homo sapien
tactagtcctaacaccgccgtcagtctagttga

SEQ ID NO: 966915 - DNA, 33 bp, Homo sapien
caggctgagaacatccaaggaatagcaaggagc

SEQ ID NO: 966916 - DNA, 33 bp, Homo sapien
caggctgagaacatccgaggaatagcaaggagc

SEQ ID NO: 966917 - DNA, 33 bp, Homo sapien
tcaaaggaaaccaatcaaaatgcaaatcagcta

SEQ ID NO: 966918 - DNA, 33 bp, Homo sapien
tcaaaggaaaccaatcgaaatgcaaatcagcta

SEQ ID NO: 966919 - DNA, 33 bp, Homo sapien
ctcatccagaatctaaccacattttgctctgtt

SEQ ID NO: 966920 - DNA, 33 bp, Homo sapien
ctcatccagaatctaagcacattttgctctgtt

SEQ ID NO: 966921 - DNA, 33 bp, Homo sapien
tcttcaagcaatcttaacagaattttcagtcat

SEQ ID NO: 966922 - DNA, 33 bp, Homo sapien
tcttcaagcaatcttagcagaattttcagtcat

SEQ ID NO: 966923 - DNA, 33 bp, Homo sapien
gcccagtctccatcaactgttgaatctcccaat

SEQ ID NO: 966924 - DNA, 33 bp, Homo sapien
gcccagtctccatcaagtgttgaatctcccaat

SEQ ID NO: 966925 - DNA, 33 bp, Homo sapien
gactcaaacaccattacacaactcagggcttcc

SEQ ID NO: 966926 - DNA, 33 bp, Homo sapien
gactcaaacaccattatacaactcagggcttcc

SEQ ID NO: 966927 - DNA, 33 bp, Homo sapien
ttgtgagaaatacttacgtgttgtttaagccac

SEQ ID NO: 966928 - DNA, 33 bp, Homo sapien
ttgtgagaaatacttatgtgttgtttaagccac

SEQ ID NO: 966929 - DNA, 33 bp, Homo sapien
ggccacatccttatcaactcattgaaccttact

SEQ ID NO: 966930 - DNA, 33 bp, Homo sapien
ggccacatccttatcagctcattgaaccttact

SEQ ID NO: 966931 - DNA, 33 bp, Homo sapien
gaaagggattaatgctaaaaaagaagttcaatt

SEQ ID NO: 966932 - DNA, 33 bp, Homo sapien
gaaagggattaatgctgaaaaagaagttcaatt

SEQ ID NO: 966933 - DNA, 33 bp, Homo sapien
tgtttatttacttatcacttgtacttggaagtt

SEQ ID NO: 966934 - DNA, 33 bp, Homo sapien
tgtttatttacttatcgcttgtacttggaagtt

SEQ ID NO: 966935 - DNA, 33 bp, Homo sapien
taatgatttgcttcacgctgtgctagagttggt

SEQ ID NO: 966936 - DNA, 33 bp, Homo sapien
taatgatttgcttcactctgtgctagagttggt

SEQ ID NO: 966937 - DNA, 33 bp, Homo sapien
gacataatgtaatgtaacagcttaggtcctctg

SEQ ID NO: 966938 - DNA, 33 bp, Homo sapien
gacataatgtaatgtatcagcttaggtcctctg

SEQ ID NO: 966939 - DNA, 33 bp, Homo sapien
attatctaacagctacacattgctactcagttt

SEQ ID NO: 966940 - DNA, 33 bp, Homo sapien
attatctaacagctacgcattgctactcagttt

SEQ ID NO: 966941 - DNA, 33 bp, Homo sapien
aggactatgagaaagacagatgctgcggaggcc

SEQ ID NO: 966942 - DNA, 33 bp, Homo sapien
aggactatgagaaagatagatgctgcggaggcc

SEQ ID NO: 966943 - DNA, 33 bp, Homo sapien
tcctcagattatcattcaaatcctctgaactgt

SEQ ID NO: 966944 - DNA, 33 bp, Homo sapien
tcctcagattatcatttaaatcctctgaactgt

SEQ ID NO: 966945 - DNA, 33 bp, Homo sapien
caggaggtgggaaaacaagattgagacatgaaa

SEQ ID NO: 966946 - DNA, 33 bp, Homo sapien
caggaggtgggaaaaccagattgagacatgaaa

SEQ ID NO: 966947 - DNA, 33 bp, Homo sapien
actacaaagtgttctcccttctctgcctgactt

SEQ ID NO: 966948 - DNA, 33 bp, Homo sapien
actacaaagtgttctcgcttctctgcctgactt

SEQ ID NO: 966949 - DNA, 33 bp, Homo sapien
taaacacacatcctacaagtttgcatctcaaac

SEQ ID NO: 966950 - DNA, 33 bp, Homo sapien
taaacacacatcctactagtttgcatctcaaac

SEQ ID NO: 966951 - DNA, 33 bp, Homo sapien
agaacccagaactcccggagctgcaggtggcgg

SEQ ID NO: 966952 - DNA, 33 bp, Homo sapien
agaacccagaactccctgagctgcaggtggcgg

SEQ ID NO: 966953 - DNA, 33 bp, Homo sapien
atttggagagacaatacgtgaatagttcatgct

SEQ ID NO: 966954 - DNA, 33 bp, Homo sapien
atttggagagacaatatgtgaatagttcatgct

SEQ ID NO: 966955 - DNA, 33 bp, Homo sapien
ggcggatgataacaaaatcaggttggaatatta

SEQ ID NO: 966956 - DNA, 33 bp, Homo sapien
ggcggatgataacaaagtcaggttggaatatta

SEQ ID NO: 966957 - DNA, 33 bp, Homo sapien
ttttaggaactattaaacatagaggcatggcag

SEQ ID NO: 966958 - DNA, 33 bp, Homo sapien
ttttaggaactattaagcatagaggcatggcag

SEQ ID NO: 966959 - DNA, 33 bp, Homo sapien
cactgtattagtatcaaggaggggcagagttgt

SEQ ID NO: 966960 - DNA, 33 bp, Homo sapien
cactgtattagtatcagggaggggcagagttgt

SEQ ID NO: 966961 - DNA, 33 bp, Homo sapien
ggatatagcacaataaggaaatggattactatg

SEQ ID NO: 966962 - DNA, 33 bp, Homo sapien
ggatatagcacaataatgaaatggattactatg

SEQ ID NO: 966963 - DNA, 33 bp, Homo sapien
aaggaatgtcacaagacggttggcaaactatca

SEQ ID NO: 966964 - DNA, 33 bp, Homo sapien
aaggaatgtcacaagatggttggcaaactatca

SEQ ID NO: 966965 - DNA, 33 bp, Homo sapien
gacttactaagcaggactcccttgccttctaga

SEQ ID NO: 966966 - DNA, 33 bp, Homo sapien
gacttactaagcaggattcccttgccttctaga

SEQ ID NO: 966967 - DNA, 33 bp, Homo sapien
tttgttgtctgacagaccttgcaattttaaata

SEQ ID NO: 966968 - DNA, 33 bp, Homo sapien
tttgttgtctgacagatcttgcaattttaaata

SEQ ID NO: 966969 - DNA, 33 bp, Homo sapien
tcaggtatcaggaaaaaaacactcagagaactt

SEQ ID NO: 966970 - DNA, 33 bp, Homo sapien
tcaggtatcaggaaaagaacactcagagaactt

SEQ ID NO: 966971 - DNA, 33 bp, Homo sapien
aattctaaactaagacacatacatttgagaggg

SEQ ID NO: 966972 - DNA, 33 bp, Homo sapien
aattctaaactaagacgcatacatttgagaggg

SEQ ID NO: 966973 - DNA, 33 bp, Homo sapien
atgtagctcttttatccctgtacctatcttatt

SEQ ID NO: 966974 - DNA, 33 bp, Homo sapien
atgtagctcttttatctctgtacctatcttatt

SEQ ID NO: 966975 - DNA, 33 bp, Homo sapien
tgaactttgctgtggccaattaatgctttctgg

SEQ ID NO: 966976 - DNA, 33 bp, Homo sapien
tgaactttgctgtggctaattaatgctttctgg

SEQ ID NO: 966977 - DNA, 33 bp, Homo sapien
ggaaatacaaaaacaccaagatgcaatccctct

SEQ ID NO: 966978 - DNA, 33 bp, Homo sapien
ggaaatacaaaaacactaagatgcaatccctct

SEQ ID NO: 966979 - DNA, 33 bp, Homo sapien
ctaaggtaatctattacaggacaagctttatcc

SEQ ID NO: 966980 - DNA, 33 bp, Homo sapien
ctaaggtaatctattagaggacaagctttatcc

SEQ ID NO: 966981 - DNA, 33 bp, Homo sapien
aggcctggaaaaggcaccacatatctccacact

SEQ ID NO: 966982 - DNA, 33 bp, Homo sapien
aggcctggaaaaggcatcacatatctccacact

SEQ ID NO: 966983 - DNA, 33 bp, Homo sapien
gagttctgcagtcctcacttcttaataaagcaa

SEQ ID NO: 966984 - DNA, 33 bp, Homo sapien
gagttctgcagtcctcgcttcttaataaagcaa

SEQ ID NO: 966985 - DNA, 33 bp, Homo sapien
ctacaagtgttttagccgatgtttcatgtattt

SEQ ID NO: 966986 - DNA, 33 bp, Homo sapien
ctacaagtgttttagctgatgtttcatgtattt

SEQ ID NO: 966987 - DNA, 33 bp, Homo sapien
tttcaaagtttcaagcccaagtctatttaaata

SEQ ID NO: 966988 - DNA, 33 bp, Homo sapien
tttcaaagtttcaagctcaagtctatttaaata

SEQ ID NO: 966989 - DNA, 33 bp, Homo sapien
ttgtgaactttttatcaaattctcatgttatga

SEQ ID NO: 966990 - DNA, 33 bp, Homo sapien
ttgtgaactttttatcgaattctcatgttatga

SEQ ID NO: 966991 - DNA, 33 bp, Homo sapien
ttactcacatctctcacgctttatgtctctgtt

SEQ ID NO: 966992 - DNA, 33 bp, Homo sapien
ttactcacatctctcatgctttatgtctctgtt

SEQ ID NO: 966993 - DNA, 33 bp, Homo sapien
tgagagatgtgagtaactggaggtcagaggtga

SEQ ID NO: 966994 - DNA, 33 bp, Homo sapien
tgagagatgtgagtaattggaggtcagaggtga

SEQ ID NO: 966995 - DNA, 33 bp, Homo sapien
caaacctgcacatctcaaccttctgagcactta

SEQ ID NO: 966996 - DNA, 33 bp, Homo sapien
caaacctgcacatctccaccttctgagcactta

SEQ ID NO: 966997 - DNA, 33 bp, Homo sapien
ttgaaggcagaagccacgagattttcaaggatg

SEQ ID NO: 966998 - DNA, 33 bp, Homo sapien
ttgaaggcagaagccatgagattttcaaggatg

SEQ ID NO: 966999 - DNA, 33 bp, Homo sapien
ctcctgccagcaagcactgagaaatctgatcag

SEQ ID NO: 967000 - DNA, 33 bp, Homo sapien
ctcctgccagcaagcattgagaaatctgatcag

SEQ ID NO: 967001 - DNA, 33 bp, Homo sapien
gctaacactgctggggaacaaaattccaggaaa

SEQ ID NO: 967002 - DNA, 33 bp, Homo sapien
gctaacactgctggggtacaaaattccaggaaa

SEQ ID NO: 967003 - DNA, 33 bp, Homo sapien
gaacctacgggccctaaacaaaggcctgagatg

SEQ ID NO: 967004 - DNA, 33 bp, Homo sapien
gaacctacgggccctagacaaaggcctgagatg

SEQ ID NO: 967005 - DNA, 33 bp, Homo sapien
atcgaagcagggatatcaacattttcaaagacc

SEQ ID NO: 967006 - DNA, 33 bp, Homo sapien
atcgaagcagggatattaacattttcaaagacc

SEQ ID NO: 967007 - DNA, 33 bp, Homo sapien
aacattttcaaagaccaaaaagtcactcttcta

SEQ ID NO: 967008 - DNA, 33 bp, Homo sapien
aacattttcaaagacctaaaagtcactcttcta

SEQ ID NO: 967009 - DNA, 33 bp, Homo sapien
atcctgaattaatcacccccttcccttgcctaa

SEQ ID NO: 967010 - DNA, 33 bp, Homo sapien
atcctgaattaatcactcccttcccttgcctaa

SEQ ID NO: 967011 - DNA, 33 bp, Homo sapien
cattaagtgcatcaatcaagagacaagaaagaa

SEQ ID NO: 967012 - DNA, 33 bp, Homo sapien
cattaagtgcatcaattaagagacaagaaagaa

SEQ ID NO: 967013 - DNA, 33 bp, Homo sapien
atacccagaagtgaaccggctggatcatcaggt

SEQ ID NO: 967014 - DNA, 33 bp, Homo sapien
atacccagaagtgaactggctggatcatcaggt

SEQ ID NO: 967015 - DNA, 33 bp, Homo sapien
aatcagtcttccgaacaattttaaaactgtatg

SEQ ID NO: 967016 - DNA, 33 bp, Homo sapien
aatcagtcttccgaaccattttaaaactgtatg

SEQ ID NO: 967017 - DNA, 33 bp, Homo sapien
cattcagactttctacccagtatagcagtctgt

SEQ ID NO: 967018 - DNA, 33 bp, Homo sapien
cattcagactttctactcagtatagcagtctgt

SEQ ID NO: 967019 - DNA, 33 bp, Homo sapien
agagagtatagcagaaaatcagtaatgacacag

SEQ ID NO: 967020 - DNA, 33 bp, Homo sapien
agagagtatagcagaatatcagtaatgacacag

SEQ ID NO: 967021 - DNA, 33 bp, Homo sapien
aactgatatttgaagaaagaactgactcaatcg

SEQ ID NO: 967022 - DNA, 33 bp, Homo sapien
aactgatatttgaagacagaactgactcaatcg

SEQ ID NO: 967023 - DNA, 33 bp, Homo sapien
gaccgtcttcaaccctaagggctacttagaaat

SEQ ID NO: 967024 - DNA, 33 bp, Homo sapien
gaccgtcttcaacccttagggctacttagaaat

SEQ ID NO: 967025 - DNA, 33 bp, Homo sapien
tggatctaatatgtaaagcttggacactgtcac

SEQ ID NO: 967026 - DNA, 33 bp, Homo sapien
tggatctaatatgtaatgcttggacactgtcac

SEQ ID NO: 967027 - DNA, 33 bp, Homo sapien
ttcttagtgatccacactgtctttgttctccta

SEQ ID NO: 967028 - DNA, 33 bp, Homo sapien
ttcttagtgatccacattgtctttgttctccta

SEQ ID NO: 967029 - DNA, 33 bp, Homo sapien
tccagcttgggagtcacacacacttgagtttaa

SEQ ID NO: 967030 - DNA, 33 bp, Homo sapien
tccagcttgggagtcagacacacttgagtttaa

SEQ ID NO: 967031 - DNA, 33 bp, Homo sapien
tttggtaatgtgaaaacatggattgaagaatga

SEQ ID NO: 967032 - DNA, 33 bp, Homo sapien
tttggtaatgtgaaaatatggattgaagaatga

SEQ ID NO: 967033 - DNA, 33 bp, Homo sapien
gggaatgaagatatcacggaagatcaagatagg

SEQ ID NO: 967034 - DNA, 33 bp, Homo sapien
gggaatgaagatatcatggaagatcaagatagg

SEQ ID NO: 967035 - DNA, 33 bp, Homo sapien
ggcaaatgtccatctacatattcaactaaaaga

SEQ ID NO: 967036 - DNA, 33 bp, Homo sapien
ggcaaatgtccatctatatattcaactaaaaga

SEQ ID NO: 967037 - DNA, 33 bp, Homo sapien
ttcttttgcaggttatgagcacatttatacaat

SEQ ID NO: 967038 - DNA, 33 bp, Homo sapien
ttcttttgcaggttattagcacatttatacaat

SEQ ID NO: 967039 - DNA, 33 bp, Homo sapien
tttagagtagatactacggtagaatgcagatat

SEQ ID NO: 967040 - DNA, 33 bp, Homo sapien
tttagagtagatactatggtagaatgcagatat

SEQ ID NO: 967041 - DNA, 33 bp, Homo sapien
tagaaatagtaaccagaactcttatgactcata

SEQ ID NO: 967042 - DNA, 33 bp, Homo sapien
tagaaatagtaaccaggactcttatgactcata

SEQ ID NO: 967043 - DNA, 33 bp, Homo sapien
taaacttgagtctaaccactgattattaagaaa

SEQ ID NO: 967044 - DNA, 33 bp, Homo sapien
taaacttgagtctaactactgattattaagaaa

SEQ ID NO: 967045 - DNA, 33 bp, Homo sapien
ctatacgtggctgtacaaatttatagtagtccc

SEQ ID NO: 967046 - DNA, 33 bp, Homo sapien
ctatacgtggctgtaccaatttatagtagtccc

SEQ ID NO: 967047 - DNA, 33 bp, Homo sapien
agcccttctataaagacagttcggagtgtgtct

SEQ ID NO: 967048 - DNA, 33 bp, Homo sapien
agcccttctataaagatagttcggagtgtgtct

SEQ ID NO: 967049 - DNA, 33 bp, Homo sapien
gatatattaaggaaataagctcttggcgatgtg

SEQ ID NO: 967050 - DNA, 33 bp, Homo sapien
gatatattaaggaaattagctcttggcgatgtg

SEQ ID NO: 967051 - DNA, 33 bp, Homo sapien
ttttatgaattttgtaagcattcctagacaaat

SEQ ID NO: 967052 - DNA, 33 bp, Homo sapien
ttttatgaattttgtaggcattcctagacaaat

SEQ ID NO: 967053 - DNA, 33 bp, Homo sapien
ctaggaaggacaaggacagccagaccatggcag

SEQ ID NO: 967054 - DNA, 33 bp, Homo sapien
ctaggaaggacaaggagagccagaccatggcag

SEQ ID NO: 967055 - DNA, 33 bp, Homo sapien
tgttctttcagaaccacgtctttgtatctcctg

SEQ ID NO: 967056 - DNA, 33 bp, Homo sapien
tgttctttcagaaccatgtctttgtatctcctg

SEQ ID NO: 967057 - DNA, 33 bp, Homo sapien
catgaagcttaagtcacacatttatccagtaac

SEQ ID NO: 967058 - DNA, 33 bp, Homo sapien
catgaagcttaagtcagacatttatccagtaac

SEQ ID NO: 967059 - DNA, 33 bp, Homo sapien
actttattgacgacatcagtgaaagtcaagagg

SEQ ID NO: 967060 - DNA, 33 bp, Homo sapien
actttattgacgacattagtgaaagtcaagagg

SEQ ID NO: 967061 - DNA, 33 bp, Homo sapien
gaggaagcaatttttaaaccattatgaccctat

SEQ ID NO: 967062 - DNA, 33 bp, Homo sapien
gaggaagcaatttttataccattatgaccctat

SEQ ID NO: 967063 - DNA, 33 bp, Homo sapien
acagatgacaggttcacggtgatgctgcagtta

SEQ ID NO: 967064 - DNA, 33 bp, Homo sapien
acagatgacaggttcatggtgatgctgcagtta

SEQ ID NO: 967065 - DNA, 33 bp, Homo sapien
actttttcatcagatactaactgcagcatcacc

SEQ ID NO: 967066 - DNA, 33 bp, Homo sapien
actttttcatcagatattaactgcagcatcacc

SEQ ID NO: 967067 - DNA, 33 bp, Homo sapien
caactgaaaagcatgaagttacttttgctttag

SEQ ID NO: 967068 - DNA, 33 bp, Homo sapien
caactgaaaagcatgatgttacttttgctttag

SEQ ID NO: 967069 - DNA, 33 bp, Homo sapien
tgtaagtctctagagcagcactatccaatatcg

SEQ ID NO: 967070 - DNA, 33 bp, Homo sapien
tgtaagtctctagagcggcactatccaatatcg

SEQ ID NO: 967071 - DNA, 33 bp, Homo sapien
aatagcatcaaaaagaacaatatgcttaggaat

SEQ ID NO: 967072 - DNA, 33 bp, Homo sapien
aatagcatcaaaaagagcaatatgcttaggaat

SEQ ID NO: 967073 - DNA, 33 bp, Homo sapien
tacactggaaataaaaagcattgctgagagaaa

SEQ ID NO: 967074 - DNA, 33 bp, Homo sapien
tacactggaaataaaatgcattgctgagagaaa

SEQ ID NO: 967075 - DNA, 33 bp, Homo sapien
gaagctagacacaagactagtttatatgatccc

SEQ ID NO: 967076 - DNA, 33 bp, Homo sapien
gaagctagacacaagattagtttatatgatccc

SEQ ID NO: 967077 - DNA, 33 bp, Homo sapien
ttgacactgcagtccaagtttagaatcctccca

SEQ ID NO: 967078 - DNA, 33 bp, Homo sapien
ttgacactgcagtccaggtttagaatcctccca

SEQ ID NO: 967079 - DNA, 33 bp, Homo sapien
aaggtacacatggcccaaggaaggatgacctta

SEQ ID NO: 967080 - DNA, 33 bp, Homo sapien
aaggtacacatggcccgaggaaggatgacctta

SEQ ID NO: 967081 - DNA, 33 bp, Homo sapien
attaaaggtatcagcaaacagaatctttcttga

SEQ ID NO: 967082 - DNA, 33 bp, Homo sapien
attaaaggtatcagcagacagaatctttcttga

SEQ ID NO: 967083 - DNA, 33 bp, Homo sapien
tgtgctaagggatatcaacatagggctaaattc

SEQ ID NO: 967084 - DNA, 33 bp, Homo sapien
tgtgctaagggatatcgacatagggctaaattc

SEQ ID NO: 967085 - DNA, 33 bp, Homo sapien
actgcaacttctatgcacctattttattttctg

SEQ ID NO: 967086 - DNA, 33 bp, Homo sapien
actgcaacttctatgcgcctattttattttctg

SEQ ID NO: 967087 - DNA, 33 bp, Homo sapien
agagagtgaagtatagaccagcaacagatattc

SEQ ID NO: 967088 - DNA, 33 bp, Homo sapien
agagagtgaagtatagtccagcaacagatattc

SEQ ID NO: 967089 - DNA, 33 bp, Homo sapien
atgtgtttcaggcatacccaattggaaaaagac

SEQ ID NO: 967090 - DNA, 33 bp, Homo sapien
atgtgtttcaggcatagccaattggaaaaagac

SEQ ID NO: 967091 - DNA, 33 bp, Homo sapien
actcttcccactttaaccatcccatgtttctgc

SEQ ID NO: 967092 - DNA, 33 bp, Homo sapien
actcttcccactttaatcatcccatgtttctgc

SEQ ID NO: 967093 - DNA, 33 bp, Homo sapien
atactccaattttaaaactctcagcttgctctc

SEQ ID NO: 967094 - DNA, 33 bp, Homo sapien
atactccaattttaaacctctcagcttgctctc

SEQ ID NO: 967095 - DNA, 33 bp, Homo sapien
gattaatgcatttgaagaagtagatgtgcattg

SEQ ID NO: 967096 - DNA, 33 bp, Homo sapien
gattaatgcatttgaataagtagatgtgcattg

SEQ ID NO: 967097 - DNA, 33 bp, Homo sapien
ttaaacacttccacaacggacgctttaccagag

SEQ ID NO: 967098 - DNA, 33 bp, Homo sapien
ttaaacacttccacaatggacgctttaccagag

SEQ ID NO: 967099 - DNA, 33 bp, Homo sapien
ttagggctccgggaagcattggccttactgtgt

SEQ ID NO: 967100 - DNA, 33 bp, Homo sapien
ttagggctccgggaagtattggccttactgtgt

SEQ ID NO: 967101 - DNA, 33 bp, Homo sapien
acgcctcaagcgaccacgcgaacaactccagtg

SEQ ID NO: 967102 - DNA, 33 bp, Homo sapien
acgcctcaagcgaccatgcgaacaactccagtg

SEQ ID NO: 967103 - DNA, 33 bp, Homo sapien
ccaggggaaaacatcccagatcagtgaaccttc

SEQ ID NO: 967104 - DNA, 33 bp, Homo sapien
ccaggggaaaacatcctagatcagtgaaccttc

SEQ ID NO: 967105 - DNA, 33 bp, Homo sapien
aggggagggagcggacacaactagctgtttggc

SEQ ID NO: 967106 - DNA, 33 bp, Homo sapien
aggggagggagcggacgcaactagctgtttggc

SEQ ID NO: 967107 - DNA, 33 bp, Homo sapien
tgccatccatctcttacatgtgcccctaaataa

SEQ ID NO: 967108 - DNA, 33 bp, Homo sapien
tgccatccatctcttatatgtgcccctaaataa

SEQ ID NO: 967109 - DNA, 33 bp, Homo sapien
ttccctggttccctaacgctcaagtctagcccc

SEQ ID NO: 967110 - DNA, 33 bp, Homo sapien
ttccctggttccctaatgctcaagtctagcccc

SEQ ID NO: 967111 - DNA, 33 bp, Homo sapien
gactacaacattccccaaggtactaacagtaac

SEQ ID NO: 967112 - DNA, 33 bp, Homo sapien
gactacaacattccccgaggtactaacagtaac

SEQ ID NO: 967113 - DNA, 33 bp, Homo sapien
ttaatgcaaatcaccaggatcacttaacccatg

SEQ ID NO: 967114 - DNA, 33 bp, Homo sapien
ttaatgcaaatcaccatgatcacttaacccatg

SEQ ID NO: 967115 - DNA, 33 bp, Homo sapien
gcctgtcagtattagaacaagaaacacattgta

SEQ ID NO: 967116 - DNA, 33 bp, Homo sapien
gcctgtcagtattagaccaagaaacacattgta

SEQ ID NO: 967117 - DNA, 33 bp, Homo sapien
catgtctgctaaggaaagcttgaaataactatg

SEQ ID NO: 967118 - DNA, 33 bp, Homo sapien
catgtctgctaaggaaggcttgaaataactatg

SEQ ID NO: 967119 - DNA, 33 bp, Homo sapien
tttaaaattcctgggcaatagtcccatgcctga

SEQ ID NO: 967120 - DNA, 33 bp, Homo sapien
tttaaaattcctgggcgatagtcccatgcctga

SEQ ID NO: 967121 - DNA, 33 bp, Homo sapien
gtcctctgtttctgaagggaaaaggcttgaaat

SEQ ID NO: 967122 - DNA, 33 bp, Homo sapien
gtcctctgtttctgaatggaaaaggcttgaaat

SEQ ID NO: 967123 - DNA, 33 bp, Homo sapien
agtggtaaatttgtgacgtgccagctagaaaac

SEQ ID NO: 967124 - DNA, 33 bp, Homo sapien
agtggtaaatttgtgatgtgccagctagaaaac

SEQ ID NO: 967125 - DNA, 33 bp, Homo sapien
actgtccaaagggaagcagattacattgatgtt

SEQ ID NO: 967126 - DNA, 33 bp, Homo sapien
actgtccaaagggaaggagattacattgatgtt

SEQ ID NO: 967127 - DNA, 33 bp, Homo sapien
caggatgaagggaaaaacaaggtgccttcagaa

SEQ ID NO: 967128 - DNA, 33 bp, Homo sapien
caggatgaagggaaaaccaaggtgccttcagaa

SEQ ID NO: 967129 - DNA, 33 bp, Homo sapien
agctcatattttccaaaccttccttttgcttta

SEQ ID NO: 967130 - DNA, 33 bp, Homo sapien
agctcatattttccaagccttccttttgcttta

SEQ ID NO: 967131 - DNA, 33 bp, Homo sapien
ctataatgaacctttccgaaacctgtccattag

SEQ ID NO: 967132 - DNA, 33 bp, Homo sapien
ctataatgaacctttctgaaacctgtccattag

SEQ ID NO: 967133 - DNA, 33 bp, Homo sapien
cattgtttttcacttcaatgtttgtcttgtgtg

SEQ ID NO: 967134 - DNA, 33 bp, Homo sapien
cattgtttttcacttcgatgtttgtcttgtgtg

SEQ ID NO: 967135 - DNA, 33 bp, Homo sapien
agattgctcttatttaccttactcctaactgat

SEQ ID NO: 967136 - DNA, 33 bp, Homo sapien
agattgctcttatttatcttactcctaactgat

SEQ ID NO: 967137 - DNA, 33 bp, Homo sapien
tttgcagctacatacacagggtcagagaatgtt

SEQ ID NO: 967138 - DNA, 33 bp, Homo sapien
tttgcagctacatacatagggtcagagaatgtt

SEQ ID NO: 967139 - DNA, 33 bp, Homo sapien
atggttgacagagggaacatttaagaagattgc

SEQ ID NO: 967140 - DNA, 33 bp, Homo sapien
atggttgacagagggagcatttaagaagattgc

SEQ ID NO: 967141 - DNA, 33 bp, Homo sapien
tgtctgacagaagaaacatctgtaaaggttgga

SEQ ID NO: 967142 - DNA, 33 bp, Homo sapien
tgtctgacagaagaaatatctgtaaaggttgga

SEQ ID NO: 967143 - DNA, 33 bp, Homo sapien
attgacaaagagacatcagagagttttgaatct

SEQ ID NO: 967144 - DNA, 33 bp, Homo sapien
attgacaaagagacattagagagttttgaatct

SEQ ID NO: 967145 - DNA, 33 bp, Homo sapien
gcagagctggacaagtaaaaaagcagtgcagca

SEQ ID NO: 967146 - DNA, 33 bp, Homo sapien
gcagagctggacaagtgaaaaagcagtgcagca

SEQ ID NO: 967147 - DNA, 33 bp, Homo sapien
tgggaagagatgtccacccagacttgaccctaa

SEQ ID NO: 967148 - DNA, 33 bp, Homo sapien
tgggaagagatgtccatccagacttgaccctaa

SEQ ID NO: 967149 - DNA, 33 bp, Homo sapien
gtatgaaatccattagacaccaaatgaaaatta

SEQ ID NO: 967150 - DNA, 33 bp, Homo sapien
gtatgaaatccattaggcaccaaatgaaaatta

SEQ ID NO: 967151 - DNA, 33 bp, Homo sapien
caggctccatccatgcaccacagacaatgacaa

SEQ ID NO: 967152 - DNA, 33 bp, Homo sapien
caggctccatccatgcgccacagacaatgacaa

SEQ ID NO: 967153 - DNA, 33 bp, Homo sapien
tctgtccagcaactcaaccatcaggtttgaaac

SEQ ID NO: 967154 - DNA, 33 bp, Homo sapien
tctgtccagcaactcatccatcaggtttgaaac

SEQ ID NO: 967155 - DNA, 33 bp, Homo sapien
aaaatttagaaacctgaatatacgcaagtgttg

SEQ ID NO: 967156 - DNA, 33 bp, Homo sapien
aaaatttagaaacctgcatatacgcaagtgttg

SEQ ID NO: 967157 - DNA, 33 bp, Homo sapien
attagggcgagtggccagaatggctggttgtcc

SEQ ID NO: 967158 - DNA, 33 bp, Homo sapien
attagggcgagtggccggaatggctggttgtcc

SEQ ID NO: 967159 - DNA, 33 bp, Homo sapien
cggcagtgatgcaccacgtgaccttctcagttg

SEQ ID NO: 967160 - DNA, 33 bp, Homo sapien
cggcagtgatgcaccatgtgaccttctcagttg

SEQ ID NO: 967161 - DNA, 33 bp, Homo sapien
actagagtgatgtttccagaggcccaggaacat

SEQ ID NO: 967162 - DNA, 33 bp, Homo sapien
actagagtgatgtttctagaggcccaggaacat

SEQ ID NO: 967163 - DNA, 33 bp, Homo sapien
aggaatactgaaggtaccatgtgagaggatgct

SEQ ID NO: 967164 - DNA, 33 bp, Homo sapien
aggaatactgaaggtatcatgtgagaggatgct

SEQ ID NO: 967165 - DNA, 33 bp, Homo sapien
agtggctggatataagactctccccactgagag

SEQ ID NO: 967166 - DNA, 33 bp, Homo sapien
agtggctggatataagtctctccccactgagag

SEQ ID NO: 967167 - DNA, 33 bp, Homo sapien
cttcagctcaacacaacggttttacaatctagg

SEQ ID NO: 967168 - DNA, 33 bp, Homo sapien
cttcagctcaacacaatggttttacaatctagg

SEQ ID NO: 967169 - DNA, 33 bp, Homo sapien
gctcctgaggttacataaggagtggttacatga

SEQ ID NO: 967170 - DNA, 33 bp, Homo sapien
gctcctgaggttacatgaggagtggttacatga

SEQ ID NO: 967171 - DNA, 33 bp, Homo sapien
actggcccataccagaagcttgataaggattca

SEQ ID NO: 967172 - DNA, 33 bp, Homo sapien
actggcccataccagaggcttgataaggattca

SEQ ID NO: 967173 - DNA, 33 bp, Homo sapien
ttaagattcgggaaccgctgattcacatccaaa

SEQ ID NO: 967174 - DNA, 33 bp, Homo sapien
ttaagattcgggaacctctgattcacatccaaa

SEQ ID NO: 967175 - DNA, 33 bp, Homo sapien
agttagggcacatgaaaagtctttgtagtgtac

SEQ ID NO: 967176 - DNA, 33 bp, Homo sapien
agttagggcacatgaagagtctttgtagtgtac

SEQ ID NO: 967177 - DNA, 33 bp, Homo sapien
tgtccaaatcaagtgaaaatcaacccaaatcag

SEQ ID NO: 967178 - DNA, 33 bp, Homo sapien
tgtccaaatcaagtgagaatcaacccaaatcag

SEQ ID NO: 967179 - DNA, 33 bp, Homo sapien
agtcactgcggagtaacggatacataattggtg

SEQ ID NO: 967180 - DNA, 33 bp, Homo sapien
agtcactgcggagtaatggatacataattggtg

SEQ ID NO: 967181 - DNA, 33 bp, Homo sapien
aggaatgcttgccctgaaaaatagctcacgata

SEQ ID NO: 967182 - DNA, 33 bp, Homo sapien
aggaatgcttgccctgtaaaatagctcacgata

SEQ ID NO: 967183 - DNA, 33 bp, Homo sapien
agctaatgctattatcaatttctctggagctcc

SEQ ID NO: 967184 - DNA, 33 bp, Homo sapien
agctaatgctattatccatttctctggagctcc

SEQ ID NO: 967185 - DNA, 33 bp, Homo sapien
aacaaaaagttctagcaatagctgacagaatca

SEQ ID NO: 967186 - DNA, 33 bp, Homo sapien
aacaaaaagttctagcgatagctgacagaatca

SEQ ID NO: 967187 - DNA, 33 bp, Homo sapien
ggatgagccaataaccaacttcaaaggataagg

SEQ ID NO: 967188 - DNA, 33 bp, Homo sapien
ggatgagccaataaccgacttcaaaggataagg

SEQ ID NO: 967189 - DNA, 33 bp, Homo sapien
attataggggttggtacgttactgtcctggttc

SEQ ID NO: 967190 - DNA, 33 bp, Homo sapien
attataggggttggtatgttactgtcctggttc

SEQ ID NO: 967191 - DNA, 33 bp, Homo sapien
atcagcttcataaagaacccacatcttctgaaa

SEQ ID NO: 967192 - DNA, 33 bp, Homo sapien
atcagcttcataaagatcccacatcttctgaaa

SEQ ID NO: 967193 - DNA, 33 bp, Homo sapien
aattggctgatacccaatgaagatgggcaaatg

SEQ ID NO: 967194 - DNA, 33 bp, Homo sapien
aattggctgatacccagtgaagatgggcaaatg

SEQ ID NO: 967195 - DNA, 33 bp, Homo sapien
atatcaaaattctaaaacacagattgaaatggc

SEQ ID NO: 967196 - DNA, 33 bp, Homo sapien
atatcaaaattctaaagcacagattgaaatggc

SEQ ID NO: 967197 - DNA, 33 bp, Homo sapien
aaaactgtggggtcaaatcataggttctttaag

SEQ ID NO: 967198 - DNA, 33 bp, Homo sapien
aaaactgtggggtcaagtcataggttctttaag

SEQ ID NO: 967199 - DNA, 33 bp, Homo sapien
tggacctgctgtaatcacaatctgagtcctggg

SEQ ID NO: 967200 - DNA, 33 bp, Homo sapien
tggacctgctgtaatctcaatctgagtcctggg

SEQ ID NO: 967201 - DNA, 33 bp, Homo sapien
cagaaacatatactaacgtctaggaggtcatgg

SEQ ID NO: 967202 - DNA, 33 bp, Homo sapien
cagaaacatatactaaggtctaggaggtcatgg

SEQ ID NO: 967203 - DNA, 33 bp, Homo sapien
ctgaacacagttcttacgagtttgaactttgtt

SEQ ID NO: 967204 - DNA, 33 bp, Homo sapien
ctgaacacagttcttaggagtttgaactttgtt

SEQ ID NO: 967205 - DNA, 33 bp, Homo sapien
gctcattcttctaccaaccacgccttcgctcac

SEQ ID NO: 967206 - DNA, 33 bp, Homo sapien
gctcattcttctaccagccacgccttcgctcac

SEQ ID NO: 967207 - DNA, 33 bp, Homo sapien
gtttgtataacagttgcaaaatgataattttcc

SEQ ID NO: 967208 - DNA, 33 bp, Homo sapien
gtttgtataacagttggaaaatgataattttcc

SEQ ID NO: 967209 - DNA, 33 bp, Homo sapien
cataccaaattgtcccagcaccatttattgaaa

SEQ ID NO: 967210 - DNA, 33 bp, Homo sapien
cataccaaattgtcccggcaccatttattgaaa

SEQ ID NO: 967211 - DNA, 33 bp, Homo sapien
aaacctatcagctaatcaatctatcacttccca

SEQ ID NO: 967212 - DNA, 33 bp, Homo sapien
aaacctatcagctaattaatctatcacttccca

SEQ ID NO: 967213 - DNA, 33 bp, Homo sapien
aagtgatgtgacttaacagagttatcgacctaa

SEQ ID NO: 967214 - DNA, 33 bp, Homo sapien
aagtgatgtgacttaatagagttatcgacctaa

SEQ ID NO: 967215 - DNA, 33 bp, Homo sapien
gcattataggataaacaagcaaatgaataagac

SEQ ID NO: 967216 - DNA, 33 bp, Homo sapien
gcattataggataaacgagcaaatgaataagac

SEQ ID NO: 967217 - DNA, 33 bp, Homo sapien
catgggcactaattaaatgagaattgatattaa

SEQ ID NO: 967218 - DNA, 33 bp, Homo sapien
catgggcactaattaagtgagaattgatattaa

SEQ ID NO: 967219 - DNA, 33 bp, Homo sapien
atcttgtcgctccccaacatattccaaagcagc

SEQ ID NO: 967220 - DNA, 33 bp, Homo sapien
atcttgtcgctccccagcatattccaaagcagc

SEQ ID NO: 967221 - DNA, 33 bp, Homo sapien
aagttgtgattgcaaacggtgagttcttaaagg

SEQ ID NO: 967222 - DNA, 33 bp, Homo sapien
aagttgtgattgcaaatggtgagttcttaaagg

SEQ ID NO: 967223 - DNA, 33 bp, Homo sapien
atattgcaggtttagaggcagactattgcaata

SEQ ID NO: 967224 - DNA, 33 bp, Homo sapien
atattgcaggtttagatgcagactattgcaata

SEQ ID NO: 967225 - DNA, 33 bp, Homo sapien
agacaatggttgccaaatctgcttgtacagtaa

SEQ ID NO: 967226 - DNA, 33 bp, Homo sapien
agacaatggttgccaagtctgcttgtacagtaa

SEQ ID NO: 967227 - DNA, 33 bp, Homo sapien
tgaaaccaccatcttaaagtgcttcctttcctc

SEQ ID NO: 967228 - DNA, 33 bp, Homo sapien
tgaaaccaccatcttagagtgcttcctttcctc

SEQ ID NO: 967229 - DNA, 33 bp, Homo sapien
tgggtagagaaataaaaaagtaaatactctacc

SEQ ID NO: 967230 - DNA, 33 bp, Homo sapien
tgggtagagaaataaacaagtaaatactctacc

SEQ ID NO: 967231 - DNA, 33 bp, Homo sapien
gtgtcggtggactgacaagagggacagcccatc

SEQ ID NO: 967232 - DNA, 33 bp, Homo sapien
gtgtcggtggactgacgagagggacagcccatc

SEQ ID NO: 967233 - DNA, 33 bp, Homo sapien
ttgagttaatgtaaaaaatatcagagactcatc

SEQ ID NO: 967234 - DNA, 33 bp, Homo sapien
ttgagttaatgtaaaacatatcagagactcatc

SEQ ID NO: 967235 - DNA, 33 bp, Homo sapien
cttcatccaagtatgacgatcgactcgcctttg

SEQ ID NO: 967236 - DNA, 33 bp, Homo sapien
cttcatccaagtatgatgatcgactcgcctttg

SEQ ID NO: 967237 - DNA, 33 bp, Homo sapien
ttaggcagatatcatgaaggtaagccttgtgtg

SEQ ID NO: 967238 - DNA, 33 bp, Homo sapien
ttaggcagatatcatgcaggtaagccttgtgtg

SEQ ID NO: 967239 - DNA, 33 bp, Homo sapien
tacaatttgcaagtaacgacactgaacatttag

SEQ ID NO: 967240 - DNA, 33 bp, Homo sapien
tacaatttgcaagtaatgacactgaacatttag

SEQ ID NO: 967241 - DNA, 33 bp, Homo sapien
aattatcagtgaaataatagaggagataccaaa

SEQ ID NO: 967242 - DNA, 33 bp, Homo sapien
aattatcagtgaaatagtagaggagataccaaa

SEQ ID NO: 967243 - DNA, 33 bp, Homo sapien
caggagtatgaacaaagaatccctttctcagaa

SEQ ID NO: 967244 - DNA, 33 bp, Homo sapien
caggagtatgaacaaataatccctttctcagaa

SEQ ID NO: 967245 - DNA, 33 bp, Homo sapien
ttggagcactgggctacgtttaaatcctaaaga

SEQ ID NO: 967246 - DNA, 33 bp, Homo sapien
ttggagcactgggctatgtttaaatcctaaaga

SEQ ID NO: 967247 - DNA, 33 bp, Homo sapien
ggactgttggagggaagatgtgccctgaattac

SEQ ID NO: 967248 - DNA, 33 bp, Homo sapien
ggactgttggagggaatatgtgccctgaattac

SEQ ID NO: 967249 - DNA, 33 bp, Homo sapien
cagactgctgcaaaataaatcttcagttgaggt

SEQ ID NO: 967250 - DNA, 33 bp, Homo sapien
cagactgctgcaaaatgaatcttcagttgaggt

SEQ ID NO: 967251 - DNA, 33 bp, Homo sapien
tcaggcaggccaaaaactgatcccaagaaaatt

SEQ ID NO: 967252 - DNA, 33 bp, Homo sapien
tcaggcaggccaaaaattgatcccaagaaaatt

SEQ ID NO: 967253 - DNA, 33 bp, Homo sapien
agggatatggggagaacactaacttcttaatga

SEQ ID NO: 967254 - DNA, 33 bp, Homo sapien
agggatatggggagaatactaacttcttaatga

SEQ ID NO: 967255 - DNA, 33 bp, Homo sapien
tgttgaccttcaacaacagagataagctgctat

SEQ ID NO: 967256 - DNA, 33 bp, Homo sapien
tgttgaccttcaacaagagagataagctgctat

SEQ ID NO: 967257 - DNA, 33 bp, Homo sapien
tttaagagtgtttccccgccttatggagaaagc

SEQ ID NO: 967258 - DNA, 33 bp, Homo sapien
tttaagagtgtttccctgccttatggagaaagc

SEQ ID NO: 967259 - DNA, 33 bp, Homo sapien
ggaggccttagtcagacacatgtaggagataaa

SEQ ID NO: 967260 - DNA, 33 bp, Homo sapien
ggaggccttagtcagatacatgtaggagataaa

SEQ ID NO: 967261 - DNA, 33 bp, Homo sapien
catctgagaatcaacgccatcctgaattttgtg

SEQ ID NO: 967262 - DNA, 33 bp, Homo sapien
catctgagaatcaacgtcatcctgaattttgtg

SEQ ID NO: 967263 - DNA, 33 bp, Homo sapien
tgtcctctcgggctaacctgagggcccaagtcc

SEQ ID NO: 967264 - DNA, 33 bp, Homo sapien
tgtcctctcgggctaatctgagggcccaagtcc

SEQ ID NO: 967265 - DNA, 33 bp, Homo sapien
gaaaaaagctatcccaatacgatcttcctgatg

SEQ ID NO: 967266 - DNA, 33 bp, Homo sapien
gaaaaaagctatcccagtacgatcttcctgatg

SEQ ID NO: 967267 - DNA, 33 bp, Homo sapien
taggttgtttgaaaagccccacaacttgcttgt

SEQ ID NO: 967268 - DNA, 33 bp, Homo sapien
taggttgtttgaaaagtcccacaacttgcttgt

SEQ ID NO: 967269 - DNA, 33 bp, Homo sapien
gaggcacaaatattgaaaaagggactgaagggc

SEQ ID NO: 967270 - DNA, 33 bp, Homo sapien
gaggcacaaatattgacaaagggactgaagggc

SEQ ID NO: 967271 - DNA, 33 bp, Homo sapien
attatgatttgagcacactataattcacatcgg

SEQ ID NO: 967272 - DNA, 33 bp, Homo sapien
attatgatttgagcacgctataattcacatcgg

SEQ ID NO: 967273 - DNA, 33 bp, Homo sapien
ttattagattgttgtgaaacttcagtgatggga

SEQ ID NO: 967274 - DNA, 33 bp, Homo sapien
ttattagattgttgtggaacttcagtgatggga

SEQ ID NO: 967275 - DNA, 33 bp, Homo sapien
agctctcctgattttacgctattggggtggctt

SEQ ID NO: 967276 - DNA, 33 bp, Homo sapien
agctctcctgattttatgctattggggtggctt

SEQ ID NO: 967277 - DNA, 33 bp, Homo sapien
agaggctcataaaaaggccttgagctcacaaaa

SEQ ID NO: 967278 - DNA, 33 bp, Homo sapien
agaggctcataaaaagtccttgagctcacaaaa

SEQ ID NO: 967279 - DNA, 33 bp, Homo sapien
ctaaattaacattaaacgtgcttggggaaagag

SEQ ID NO: 967280 - DNA, 33 bp, Homo sapien
ctaaattaacattaaatgtgcttggggaaagag

SEQ ID NO: 967281 - DNA, 33 bp, Homo sapien
ctcttccagcacccgaaatgaataattctaact

SEQ ID NO: 967282 - DNA, 33 bp, Homo sapien
ctcttccagcacccgacatgaataattctaact

SEQ ID NO: 967283 - DNA, 33 bp, Homo sapien
tcatggtttattactacgtgtagagacaaagta

SEQ ID NO: 967284 - DNA, 33 bp, Homo sapien
tcatggtttattactatgtgtagagacaaagta

SEQ ID NO: 967285 - DNA, 33 bp, Homo sapien
aagatacaggtacaaaatgctattaagaaaaga

SEQ ID NO: 967286 - DNA, 33 bp, Homo sapien
aagatacaggtacaaactgctattaagaaaaga

SEQ ID NO: 967287 - DNA, 33 bp, Homo sapien
aaaatctgctgaggataaaatcgtgaagggatt

SEQ ID NO: 967288 - DNA, 33 bp, Homo sapien
aaaatctgctgaggatgaaatcgtgaagggatt

SEQ ID NO: 967289 - DNA, 33 bp, Homo sapien
agatcactcagtaagacctatgggctttggcca

SEQ ID NO: 967290 - DNA, 33 bp, Homo sapien
agatcactcagtaagagctatgggctttggcca

SEQ ID NO: 967291 - DNA, 33 bp, Homo sapien
cagctctgaatgtgaaatacttttagtaacacc

SEQ ID NO: 967292 - DNA, 33 bp, Homo sapien
cagctctgaatgtgaagtacttttagtaacacc

SEQ ID NO: 967293 - DNA, 33 bp, Homo sapien
tgttcttttcttgaaagcaccttcattaactta

SEQ ID NO: 967294 - DNA, 33 bp, Homo sapien
tgttcttttcttgaaatcaccttcattaactta

SEQ ID NO: 967295 - DNA, 33 bp, Homo sapien
ttctgccttttgtctaaacatttcatattttta

SEQ ID NO: 967296 - DNA, 33 bp, Homo sapien
ttctgccttttgtctagacatttcatattttta

SEQ ID NO: 967297 - DNA, 33 bp, Homo sapien
cagcgtggttctgggaactcaaacaaggagcag

SEQ ID NO: 967298 - DNA, 33 bp, Homo sapien
cagcgtggttctgggagctcaaacaaggagcag

SEQ ID NO: 967299 - DNA, 33 bp, Homo sapien
ccaagttcacatagtcaactcagagctgggatt

SEQ ID NO: 967300 - DNA, 33 bp, Homo sapien
ccaagttcacatagtcgactcagagctgggatt

SEQ ID NO: 967301 - DNA, 33 bp, Homo sapien
tttcttctgcctttcactcctgctggcctctgt

SEQ ID NO: 967302 - DNA, 33 bp, Homo sapien
tttcttctgcctttcattcctgctggcctctgt

SEQ ID NO: 967303 - DNA, 33 bp, Homo sapien
gctccataaattggctcactgagaacaaagcaa

SEQ ID NO: 967304 - DNA, 33 bp, Homo sapien
gctccataaattggcttactgagaacaaagcaa

SEQ ID NO: 967305 - DNA, 33 bp, Homo sapien
tgggaatctcattaacactaaagattctgctga

SEQ ID NO: 967306 - DNA, 33 bp, Homo sapien
tgggaatctcattaactctaaagattctgctga

SEQ ID NO: 967307 - DNA, 33 bp, Homo sapien
cagtcaggcgtaatccagcttctcctaaagtac

SEQ ID NO: 967308 - DNA, 33 bp, Homo sapien
cagtcaggcgtaatccggcttctcctaaagtac

SEQ ID NO: 967309 - DNA, 33 bp, Homo sapien
ggtcacaagcagtttacgggaatgaattaaaaa

SEQ ID NO: 967310 - DNA, 33 bp, Homo sapien
ggtcacaagcagtttatgggaatgaattaaaaa

SEQ ID NO: 967311 - DNA, 33 bp, Homo sapien
aacgcaagcttaagagaatatgagagaaggcaa

SEQ ID NO: 967312 - DNA, 33 bp, Homo sapien
aacgcaagcttaagaggatatgagagaaggcaa

SEQ ID NO: 967313 - DNA, 33 bp, Homo sapien
ggtgtctcacagttgggaattgctggaagtctc

SEQ ID NO: 967314 - DNA, 33 bp, Homo sapien
ggtgtctcacagttggtaattgctggaagtctc

SEQ ID NO: 967315 - DNA, 33 bp, Homo sapien
tgaaagctgttggcacaatgcaatgcaccttag

SEQ ID NO: 967316 - DNA, 33 bp, Homo sapien
tgaaagctgttggcacgatgcaatgcaccttag

SEQ ID NO: 967317 - DNA, 33 bp, Homo sapien
tttgcaggtcacaggaagaactccaaagacaag

SEQ ID NO: 967318 - DNA, 33 bp, Homo sapien
tttgcaggtcacaggaggaactccaaagacaag

SEQ ID NO: 967319 - DNA, 33 bp, Homo sapien
acaaatagtacagcacagtaatagcctgtttaa

SEQ ID NO: 967320 - DNA, 33 bp, Homo sapien
acaaatagtacagcactgtaatagcctgtttaa

SEQ ID NO: 967321 - DNA, 33 bp, Homo sapien
acccactggtgatagacagaaatgttcttgatg

SEQ ID NO: 967322 - DNA, 33 bp, Homo sapien
acccactggtgatagatagaaatgttcttgatg

SEQ ID NO: 967323 - DNA, 33 bp, Homo sapien
aagtacagaagacaaaaaagcatgtgtttccct

SEQ ID NO: 967324 - DNA, 33 bp, Homo sapien
aagtacagaagacaaataagcatgtgtttccct

SEQ ID NO: 967325 - DNA, 33 bp, Homo sapien
caaattatctaattaacgtagctgggcaaatgc

SEQ ID NO: 967326 - DNA, 33 bp, Homo sapien
caaattatctaattaatgtagctgggcaaatgc

SEQ ID NO: 967327 - DNA, 33 bp, Homo sapien
cattgaactgaagaagcctctttcaataattta

SEQ ID NO: 967328 - DNA, 33 bp, Homo sapien
cattgaactgaagaaggctctttcaataattta

SEQ ID NO: 967329 - DNA, 33 bp, Homo sapien
ttccgaagctaccaagacctaaaatgtcaacat

SEQ ID NO: 967330 - DNA, 33 bp, Homo sapien
ttccgaagctaccaagccctaaaatgtcaacat

SEQ ID NO: 967331 - DNA, 33 bp, Homo sapien
ttaagacagtgcccatagacggccataatccca

SEQ ID NO: 967332 - DNA, 33 bp, Homo sapien
ttaagacagtgcccatggacggccataatccca

SEQ ID NO: 967333 - DNA, 33 bp, Homo sapien
acaagccaggagataaaggggtaatacatttaa

SEQ ID NO: 967334 - DNA, 33 bp, Homo sapien
acaagccaggagataatggggtaatacatttaa

SEQ ID NO: 967335 - DNA, 33 bp, Homo sapien
ggtccagaatctttatgactttcatctctgcca

SEQ ID NO: 967336 - DNA, 33 bp, Homo sapien
ggtccagaatctttattactttcatctctgcca

SEQ ID NO: 967337 - DNA, 33 bp, Homo sapien
agattatgtgacctaacgttggttaatgagaaa

SEQ ID NO: 967338 - DNA, 33 bp, Homo sapien
agattatgtgacctaatgttggttaatgagaaa

SEQ ID NO: 967339 - DNA, 33 bp, Homo sapien
tacttagtagagccccacgttgtatttctaggt

SEQ ID NO: 967340 - DNA, 33 bp, Homo sapien
tacttagtagagccccgcgttgtatttctaggt

SEQ ID NO: 967341 - DNA, 33 bp, Homo sapien
gctggtgtctttccaacccttcattttgtccct

SEQ ID NO: 967342 - DNA, 33 bp, Homo sapien
gctggtgtctttccaatccttcattttgtccct

SEQ ID NO: 967343 - DNA, 33 bp, Homo sapien
tcaacatagagccctgcagttaagcaaatacat

SEQ ID NO: 967344 - DNA, 33 bp, Homo sapien
tcaacatagagccctgtagttaagcaaatacat

SEQ ID NO: 967345 - DNA, 33 bp, Homo sapien
cttttattctcagctacgtagttcttgatactt

SEQ ID NO: 967346 - DNA, 33 bp, Homo sapien
cttttattctcagctatgtagttcttgatactt

SEQ ID NO: 967347 - DNA, 33 bp, Homo sapien
gaccctatatctgtgtaaagtcacattctaagc

SEQ ID NO: 967348 - DNA, 33 bp, Homo sapien
gaccctatatctgtgtgaagtcacattctaagc

SEQ ID NO: 967349 - DNA, 33 bp, Homo sapien
atgaatgtgtattaagcaagtgtttgcaaaact

SEQ ID NO: 967350 - DNA, 33 bp, Homo sapien
atgaatgtgtattaagtaagtgtttgcaaaact

SEQ ID NO: 967351 - DNA, 33 bp, Homo sapien
agagctgtaatcccagaaaagaccattatacta

SEQ ID NO: 967352 - DNA, 33 bp, Homo sapien
agagctgtaatcccaggaaagaccattatacta

SEQ ID NO: 967353 - DNA, 33 bp, Homo sapien
gctgactttaaacataaagcaggcagcattttt

SEQ ID NO: 967354 - DNA, 33 bp, Homo sapien
gctgactttaaacatagagcaggcagcattttt

SEQ ID NO: 967355 - DNA, 33 bp, Homo sapien
acagaagtcttttggcagatggcagtaaaacaa

SEQ ID NO: 967356 - DNA, 33 bp, Homo sapien
acagaagtcttttggccgatggcagtaaaacaa

SEQ ID NO: 967357 - DNA, 33 bp, Homo sapien
catcacactgcactgagtattgcatcttctagc

SEQ ID NO: 967358 - DNA, 33 bp, Homo sapien
catcacactgcactgattattgcatcttctagc

SEQ ID NO: 967359 - DNA, 33 bp, Homo sapien
actgattacacgaccacaatttgggtccactgt

SEQ ID NO: 967360 - DNA, 33 bp, Homo sapien
actgattacacgaccataatttgggtccactgt

SEQ ID NO: 967361 - DNA, 33 bp, Homo sapien
gtctgtctccactaggaatctgatgatcctcta

SEQ ID NO: 967362 - DNA, 33 bp, Homo sapien
gtctgtctccactaggtatctgatgatcctcta

SEQ ID NO: 967363 - DNA, 33 bp, Homo sapien
tacattaagggctggcaacaaaacaaggcagga

SEQ ID NO: 967364 - DNA, 33 bp, Homo sapien
tacattaagggctggcgacaaaacaaggcagga

SEQ ID NO: 967365 - DNA, 33 bp, Homo sapien
ctttttgctttttttcaccctaagacaatgtct

SEQ ID NO: 967366 - DNA, 33 bp, Homo sapien
ctttttgctttttttcgccctaagacaatgtct

SEQ ID NO: 967367 - DNA, 33 bp, Homo sapien
tcaaggtctaccaggaggctggtaatggtttct

SEQ ID NO: 967368 - DNA, 33 bp, Homo sapien
tcaaggtctaccaggatgctggtaatggtttct

SEQ ID NO: 967369 - DNA, 33 bp, Homo sapien
gcacaaatcttaagtaaccagctgaatgaacac

SEQ ID NO: 967370 - DNA, 33 bp, Homo sapien
gcacaaatcttaagtagccagctgaatgaacac

SEQ ID NO: 967371 - DNA, 33 bp, Homo sapien
gaatgacatctacagaaacctacagcaatatca

SEQ ID NO: 967372 - DNA, 33 bp, Homo sapien
gaatgacatctacagagacctacagcaatatca

SEQ ID NO: 967373 - DNA, 33 bp, Homo sapien
taccaaatccgactaagatatgaatgcaattta

SEQ ID NO: 967374 - DNA, 33 bp, Homo sapien
taccaaatccgactaatatatgaatgcaattta

SEQ ID NO: 967375 - DNA, 33 bp, Homo sapien
tactgaagtctggttcaaattccaaagcaaata

SEQ ID NO: 967376 - DNA, 33 bp, Homo sapien
tactgaagtctggttcgaattccaaagcaaata

SEQ ID NO: 967377 - DNA, 33 bp, Homo sapien
ttctccccatcctgaacctttctccatccagct

SEQ ID NO: 967378 - DNA, 33 bp, Homo sapien
ttctccccatcctgaagctttctccatccagct

SEQ ID NO: 967379 - DNA, 33 bp, Homo sapien
agagaaactgggaagagagttaactagagccct

SEQ ID NO: 967380 - DNA, 33 bp, Homo sapien
agagaaactgggaagatagttaactagagccct

SEQ ID NO: 967381 - DNA, 33 bp, Homo sapien
accagatatagccaagaagagtagtggaggtga

SEQ ID NO: 967382 - DNA, 33 bp, Homo sapien
accagatatagccaaggagagtagtggaggtga

SEQ ID NO: 967383 - DNA, 33 bp, Homo sapien
aagcctagctaactcacgatgagccagaagtaa

SEQ ID NO: 967384 - DNA, 33 bp, Homo sapien
aagcctagctaactcatgatgagccagaagtaa

SEQ ID NO: 967385 - DNA, 33 bp, Homo sapien
ggcagttattgttgacagaaagacagatcaatg

SEQ ID NO: 967386 - DNA, 33 bp, Homo sapien
ggcagttattgttgacggaaagacagatcaatg

SEQ ID NO: 967387 - DNA, 33 bp, Homo sapien
tggcaacttccacattgaaaataaaagggtaag

SEQ ID NO: 967388 - DNA, 33 bp, Homo sapien
tggcaacttccacatttaaaataaaagggtaag

SEQ ID NO: 967389 - DNA, 33 bp, Homo sapien
aagacttcaaagaggacgagaaacaaaatcgtg

SEQ ID NO: 967390 - DNA, 33 bp, Homo sapien
aagacttcaaagaggaggagaaacaaaatcgtg

SEQ ID NO: 967391 - DNA, 33 bp, Homo sapien
agacttcatttcatccgaagtgtaatgatccag

SEQ ID NO: 967392 - DNA, 33 bp, Homo sapien
agacttcatttcatcctaagtgtaatgatccag

SEQ ID NO: 967393 - DNA, 33 bp, Homo sapien
gaaatgaatctaaaaaggtcacttgtagccaga

SEQ ID NO: 967394 - DNA, 33 bp, Homo sapien
gaaatgaatctaaaaatgtcacttgtagccaga

SEQ ID NO: 967395 - DNA, 33 bp, Homo sapien
cccagactacatgtgaaaatataactctgaccc

SEQ ID NO: 967396 - DNA, 33 bp, Homo sapien
cccagactacatgtgacaatataactctgaccc

SEQ ID NO: 967397 - DNA, 33 bp, Homo sapien
ggctgacacttcaaaacgtccctgagcccagcc

SEQ ID NO: 967398 - DNA, 33 bp, Homo sapien
ggctgacacttcaaaatgtccctgagcccagcc

SEQ ID NO: 967399 - DNA, 33 bp, Homo sapien
cagacactgtgatacagcagggccttttcctcc

SEQ ID NO: 967400 - DNA, 33 bp, Homo sapien
cagacactgtgatacatcagggccttttcctcc

SEQ ID NO: 967401 - DNA, 33 bp, Homo sapien
ggaaaagtgcaatttacagccgaggagcagggt

SEQ ID NO: 967402 - DNA, 33 bp, Homo sapien
ggaaaagtgcaatttatagccgaggagcagggt

SEQ ID NO: 967403 - DNA, 33 bp, Homo sapien
gatattcagtatgtaccggtgtgtagaagaaga

SEQ ID NO: 967404 - DNA, 33 bp, Homo sapien
gatattcagtatgtactggtgtgtagaagaaga

SEQ ID NO: 967405 - DNA, 33 bp, Homo sapien
tggggatgccttttcacgcttgtttgagtgggg

SEQ ID NO: 967406 - DNA, 33 bp, Homo sapien
tggggatgccttttcatgcttgtttgagtgggg

SEQ ID NO: 967407 - DNA, 33 bp, Homo sapien
cactttggctaaggcaaggtccacttcaagttc

SEQ ID NO: 967408 - DNA, 33 bp, Homo sapien
cactttggctaaggcagggtccacttcaagttc

SEQ ID NO: 967409 - DNA, 33 bp, Homo sapien
tcaatcagtaagtacaaaaaaatcagagaaatg

SEQ ID NO: 967410 - DNA, 33 bp, Homo sapien
tcaatcagtaagtacacaaaaatcagagaaatg

SEQ ID NO: 967411 - DNA, 33 bp, Homo sapien
gcaggaaatgttgcaaagcagagattccatagc

SEQ ID NO: 967412 - DNA, 33 bp, Homo sapien
gcaggaaatgttgcaatgcagagattccatagc

SEQ ID NO: 967413 - DNA, 33 bp, Homo sapien
ttccagcttagacataaaatgcaatacaataca

SEQ ID NO: 967414 - DNA, 33 bp, Homo sapien
ttccagcttagacatacaatgcaatacaataca

SEQ ID NO: 967415 - DNA, 33 bp, Homo sapien
attttgggaaataccaatgaatcctgattacgc

SEQ ID NO: 967416 - DNA, 33 bp, Homo sapien
attttgggaaataccagtgaatcctgattacgc

SEQ ID NO: 967417 - DNA, 33 bp, Homo sapien
ttctttactacttgacacctaaactctcagaaa

SEQ ID NO: 967418 - DNA, 33 bp, Homo sapien
ttctttactacttgacgcctaaactctcagaaa

SEQ ID NO: 967419 - DNA, 33 bp, Homo sapien
gaggcataaaacctgaccagtcctcccatcttt

SEQ ID NO: 967420 - DNA, 33 bp, Homo sapien
gaggcataaaacctgagcagtcctcccatcttt

SEQ ID NO: 967421 - DNA, 33 bp, Homo sapien
ggaaagattctgtaacagcaggcatttgccatc

SEQ ID NO: 967422 - DNA, 33 bp, Homo sapien
ggaaagattctgtaacggcaggcatttgccatc

SEQ ID NO: 967423 - DNA, 33 bp, Homo sapien
tttattttggtgttaaagagagaagtgacctta

SEQ ID NO: 967424 - DNA, 33 bp, Homo sapien
tttattttggtgttaatgagagaagtgacctta

SEQ ID NO: 967425 - DNA, 33 bp, Homo sapien
gaactgacatgggttacgccaatttaggtctga

SEQ ID NO: 967426 - DNA, 33 bp, Homo sapien
gaactgacatgggttatgccaatttaggtctga

SEQ ID NO: 967427 - DNA, 33 bp, Homo sapien
ccacagaatgtgaagacagaaaatctgtattat

SEQ ID NO: 967428 - DNA, 33 bp, Homo sapien
ccacagaatgtgaagagagaaaatctgtattat

SEQ ID NO: 967429 - DNA, 33 bp, Homo sapien
atgtttgagttagggaaagatgccaggactgga

SEQ ID NO: 967430 - DNA, 33 bp, Homo sapien
atgtttgagttagggagagatgccaggactgga

SEQ ID NO: 967431 - DNA, 33 bp, Homo sapien
ccttgctcatctccacaaaaacatttgccccag

SEQ ID NO: 967432 - DNA, 33 bp, Homo sapien
ccttgctcatctccacgaaaacatttgccccag

SEQ ID NO: 967433 - DNA, 33 bp, Homo sapien
aaacaggctttgaacccagtttatccttagata

SEQ ID NO: 967434 - DNA, 33 bp, Homo sapien
aaacaggctttgaacctagtttatccttagata

SEQ ID NO: 967435 - DNA, 33 bp, Homo sapien
tattaaaatcatgtagaaatctggttataaagt

SEQ ID NO: 967436 - DNA, 33 bp, Homo sapien
tattaaaatcatgtaggaatctggttataaagt

SEQ ID NO: 967437 - DNA, 33 bp, Homo sapien
tgttgaaatttcactcactagtactcttctcac

SEQ ID NO: 967438 - DNA, 33 bp, Homo sapien
tgttgaaatttcactctctagtactcttctcac

SEQ ID NO: 967439 - DNA, 33 bp, Homo sapien
ttttaacatgttcacacctgtgagtttaggtga

SEQ ID NO: 967440 - DNA, 33 bp, Homo sapien
ttttaacatgttcacatctgtgagtttaggtga

SEQ ID NO: 967441 - DNA, 33 bp, Homo sapien
tatctagaaattctggaacttaactaagcgcaa

SEQ ID NO: 967442 - DNA, 33 bp, Homo sapien
tatctagaaattctgggacttaactaagcgcaa

SEQ ID NO: 967443 - DNA, 33 bp, Homo sapien
cttctggctaccaggggcaagacaactggcggg

SEQ ID NO: 967444 - DNA, 33 bp, Homo sapien
cttctggctaccagggtcaagacaactggcggg

SEQ ID NO: 967445 - DNA, 33 bp, Homo sapien
ggaaaagaaaagagtacccaggctgtgaaagtc

SEQ ID NO: 967446 - DNA, 33 bp, Homo sapien
ggaaaagaaaagagtatccaggctgtgaaagtc

SEQ ID NO: 967447 - DNA, 33 bp, Homo sapien
aatttttccttttacaataacttctgagatccc

SEQ ID NO: 967448 - DNA, 33 bp, Homo sapien
aatttttccttttacagtaacttctgagatccc

SEQ ID NO: 967449 - DNA, 33 bp, Homo sapien
aaacacggccatgcgtgaaatgaagtatgttca

SEQ ID NO: 967450 - DNA, 33 bp, Homo sapien
aaacacggccatgcgttaaatgaagtatgttca

SEQ ID NO: 967451 - DNA, 33 bp, Homo sapien
catgtaagagtttccacggcaatatctataggt

SEQ ID NO: 967452 - DNA, 33 bp, Homo sapien
catgtaagagtttccatggcaatatctataggt

SEQ ID NO: 967453 - DNA, 33 bp, Homo sapien
agtgtttggtgatttacctaagatgcatttcta

SEQ ID NO: 967454 - DNA, 33 bp, Homo sapien
agtgtttggtgatttatctaagatgcatttcta

SEQ ID NO: 967455 - DNA, 33 bp, Homo sapien
actatgcaggtagtaacacagaatctgtcttac

SEQ ID NO: 967456 - DNA, 33 bp, Homo sapien
actatgcaggtagtaatacagaatctgtcttac

SEQ ID NO: 967457 - DNA, 33 bp, Homo sapien
aacaaagggcaggagaagctaaagtaaaaacct

SEQ ID NO: 967458 - DNA, 33 bp, Homo sapien
aacaaagggcaggagaggctaaagtaaaaacct

SEQ ID NO: 967459 - DNA, 33 bp, Homo sapien
tagagaaataaatctccgactggaaatgattca

SEQ ID NO: 967460 - DNA, 33 bp, Homo sapien
tagagaaataaatctctgactggaaatgattca

SEQ ID NO: 967461 - DNA, 33 bp, Homo sapien
tgaaacttcataaagcaaggaaagaagataaat

SEQ ID NO: 967462 - DNA, 33 bp, Homo sapien
tgaaacttcataaagcgaggaaagaagataaat

SEQ ID NO: 967463 - DNA, 33 bp, Homo sapien
atcctgttaaacaagtcaacgaactggccaggg

SEQ ID NO: 967464 - DNA, 33 bp, Homo sapien
atcctgttaaacaagtgaacgaactggccaggg

SEQ ID NO: 967465 - DNA, 33 bp, Homo sapien
tgctgctgctttgtaaataaaagtgtgaaggca

SEQ ID NO: 967466 - DNA, 33 bp, Homo sapien
tgctgctgctttgtaactaaaagtgtgaaggca

SEQ ID NO: 967467 - DNA, 33 bp, Homo sapien
acaaatgttgactgaaagtatgaatttggaagt

SEQ ID NO: 967468 - DNA, 33 bp, Homo sapien
acaaatgttgactgaaggtatgaatttggaagt

SEQ ID NO: 967469 - DNA, 33 bp, Homo sapien
actaagtccaggacacaattctgggatgtacaa

SEQ ID NO: 967470 - DNA, 33 bp, Homo sapien
actaagtccaggacacgattctgggatgtacaa

SEQ ID NO: 967471 - DNA, 33 bp, Homo sapien
cctgccaggcttttcaataactatcacctattc

SEQ ID NO: 967472 - DNA, 33 bp, Homo sapien
cctgccaggcttttcagtaactatcacctattc

SEQ ID NO: 967473 - DNA, 33 bp, Homo sapien
attgacatgtttctcaagtcataagacatttta

SEQ ID NO: 967474 - DNA, 33 bp, Homo sapien
attgacatgtttctcaggtcataagacatttta

SEQ ID NO: 967475 - DNA, 33 bp, Homo sapien
cgttgtttacacatcaacgtctaagaatattcc

SEQ ID NO: 967476 - DNA, 33 bp, Homo sapien
cgttgtttacacatcagcgtctaagaatattcc

SEQ ID NO: 967477 - DNA, 33 bp, Homo sapien
gattcatttacaatacaagagtactgactgaat

SEQ ID NO: 967478 - DNA, 33 bp, Homo sapien
gattcatttacaatacgagagtactgactgaat

SEQ ID NO: 967479 - DNA, 33 bp, Homo sapien
tttgcttcattgcaaaagagataattcacgacg

SEQ ID NO: 967480 - DNA, 33 bp, Homo sapien
tttgcttcattgcaaacgagataattcacgacg

SEQ ID NO: 967481 - DNA, 33 bp, Homo sapien
cttttaagttgagagcagaatctttttgaaata

SEQ ID NO: 967482 - DNA, 33 bp, Homo sapien
cttttaagttgagagcggaatctttttgaaata

SEQ ID NO: 967483 - DNA, 33 bp, Homo sapien
ctttgaaggcaactgcacaaggagtgaaaaata

SEQ ID NO: 967484 - DNA, 33 bp, Homo sapien
ctttgaaggcaactgcgcaaggagtgaaaaata

SEQ ID NO: 967485 - DNA, 33 bp, Homo sapien
acctgttggctatttaccaataagtgtcaatgg

SEQ ID NO: 967486 - DNA, 33 bp, Homo sapien
acctgttggctatttagcaataagtgtcaatgg

SEQ ID NO: 967487 - DNA, 33 bp, Homo sapien
agattaaaggctccgaagaaaatcccgcagaac

SEQ ID NO: 967488 - DNA, 33 bp, Homo sapien
agattaaaggctccgatgaaaatcccgcagaac

SEQ ID NO: 967489 - DNA, 33 bp, Homo sapien
aacctcatcattcctcacacatccattagttcc

SEQ ID NO: 967490 - DNA, 33 bp, Homo sapien
aacctcatcattcctcgcacatccattagttcc

SEQ ID NO: 967491 - DNA, 33 bp, Homo sapien
aatgagaactgacagaataagaacacactcacc

SEQ ID NO: 967492 - DNA, 33 bp, Homo sapien
aatgagaactgacagagtaagaacacactcacc

SEQ ID NO: 967493 - DNA, 33 bp, Homo sapien
caggactctccataaacttcttgataatccaga

SEQ ID NO: 967494 - DNA, 33 bp, Homo sapien
caggactctccataaatttcttgataatccaga

SEQ ID NO: 967495 - DNA, 33 bp, Homo sapien
gctgtggttgaaggataagtttgctgttttgtt

SEQ ID NO: 967496 - DNA, 33 bp, Homo sapien
gctgtggttgaaggatcagtttgctgttttgtt

SEQ ID NO: 967497 - DNA, 33 bp, Homo sapien
gggaatattggctagaaggagtgtgaggaagcc

SEQ ID NO: 967498 - DNA, 33 bp, Homo sapien
gggaatattggctagacggagtgtgaggaagcc

SEQ ID NO: 967499 - DNA, 33 bp, Homo sapien
atggtttttgtcaagacaatggcaggaccaaga

SEQ ID NO: 967500 - DNA, 33 bp, Homo sapien
atggtttttgtcaagataatggcaggaccaaga

SEQ ID NO: 967501 - DNA, 33 bp, Homo sapien
gtgctgaatgaatataagtctagaaagcctaat

SEQ ID NO: 967502 - DNA, 33 bp, Homo sapien
gtgctgaatgaatatatgtctagaaagcctaat

SEQ ID NO: 967503 - DNA, 33 bp, Homo sapien
gaataattacaagatcaaaatccttgaggaggt

SEQ ID NO: 967504 - DNA, 33 bp, Homo sapien
gaataattacaagatcgaaatccttgaggaggt

SEQ ID NO: 967505 - DNA, 33 bp, Homo sapien
ctagaactttacacacaaaagttatctgtttat

SEQ ID NO: 967506 - DNA, 33 bp, Homo sapien
ctagaactttacacacgaaagttatctgtttat

SEQ ID NO: 967507 - DNA, 33 bp, Homo sapien
caataaatggtgctccaataactggctagcaat

SEQ ID NO: 967508 - DNA, 33 bp, Homo sapien
caataaatggtgctccgataactggctagcaat

SEQ ID NO: 967509 - DNA, 33 bp, Homo sapien
aaaacattttttgcaacgaatgagaacaaagac

SEQ ID NO: 967510 - DNA, 33 bp, Homo sapien
aaaacattttttgcaatgaatgagaacaaagac

SEQ ID NO: 967511 - DNA, 33 bp, Homo sapien
caaacagtttccaggacgaagaagatgaaatta

SEQ ID NO: 967512 - DNA, 33 bp, Homo sapien
caaacagtttccaggatgaagaagatgaaatta

SEQ ID NO: 967513 - DNA, 33 bp, Homo sapien
atctaactgataaatacaaaaaggcatatataa

SEQ ID NO: 967514 - DNA, 33 bp, Homo sapien
atctaactgataaatagaaaaaggcatatataa

SEQ ID NO: 967515 - DNA, 33 bp, Homo sapien
caaaaaaatgcatcataaaaataaggaaactca

SEQ ID NO: 967516 - DNA, 33 bp, Homo sapien
caaaaaaatgcatcatgaaaataaggaaactca

SEQ ID NO: 967517 - DNA, 33 bp, Homo sapien
ctttacattaaaaccaatgaaggaagagaggtc

SEQ ID NO: 967518 - DNA, 33 bp, Homo sapien
ctttacattaaaaccagtgaaggaagagaggtc

SEQ ID NO: 967519 - DNA, 33 bp, Homo sapien
tcaatctttcttcatacggtcaatcccaataaa

SEQ ID NO: 967520 - DNA, 33 bp, Homo sapien
tcaatctttcttcatatggtcaatcccaataaa

SEQ ID NO: 967521 - DNA, 33 bp, Homo sapien
aactatgagtgggaaacctttgggcatttaagc

SEQ ID NO: 967522 - DNA, 33 bp, Homo sapien
aactatgagtgggaaatctttgggcatttaagc

SEQ ID NO: 967523 - DNA, 33 bp, Homo sapien
gagtgagctcaaagtacgtggcttttaaaaata

SEQ ID NO: 967524 - DNA, 33 bp, Homo sapien
gagtgagctcaaagtatgtggcttttaaaaata

SEQ ID NO: 967525 - DNA, 33 bp, Homo sapien
gatgcttagttaattccagagaccaagacatct

SEQ ID NO: 967526 - DNA, 33 bp, Homo sapien
gatgcttagttaattctagagaccaagacatct

SEQ ID NO: 967527 - DNA, 33 bp, Homo sapien
cttagataacctgacaagcagtcacatctcttc

SEQ ID NO: 967528 - DNA, 33 bp, Homo sapien
cttagataacctgacaggcagtcacatctcttc

SEQ ID NO: 967529 - DNA, 33 bp, Homo sapien
tacttcaactgtgaaacggaggtaataaaagaa

SEQ ID NO: 967530 - DNA, 33 bp, Homo sapien
tacttcaactgtgaaatggaggtaataaaagaa

SEQ ID NO: 967531 - DNA, 33 bp, Homo sapien
ctccactgtctgcatagaaacacagataggcac

SEQ ID NO: 967532 - DNA, 33 bp, Homo sapien
ctccactgtctgcatataaacacagataggcac

SEQ ID NO: 967533 - DNA, 33 bp, Homo sapien
gatagacacaaaggaaagaggaaatgtaaccac

SEQ ID NO: 967534 - DNA, 33 bp, Homo sapien
gatagacacaaaggaaggaggaaatgtaaccac

SEQ ID NO: 967535 - DNA, 33 bp, Homo sapien
actaatacaaataaagacctgagtgtacactta

SEQ ID NO: 967536 - DNA, 33 bp, Homo sapien
actaatacaaataaagccctgagtgtacactta

SEQ ID NO: 967537 - DNA, 33 bp, Homo sapien
gtttctaaactgaaacacatattgaacctaagc

SEQ ID NO: 967538 - DNA, 33 bp, Homo sapien
gtttctaaactgaaacgcatattgaacctaagc

SEQ ID NO: 967539 - DNA, 33 bp, Homo sapien
gaacatccataggcataaaagtaacctagaatt

SEQ ID NO: 967540 - DNA, 33 bp, Homo sapien
gaacatccataggcatcaaagtaacctagaatt

SEQ ID NO: 967541 - DNA, 33 bp, Homo sapien
gtatgtgagaatttcaataaagcaaagtgcaac

SEQ ID NO: 967542 - DNA, 33 bp, Homo sapien
gtatgtgagaatttcagtaaagcaaagtgcaac

SEQ ID NO: 967543 - DNA, 33 bp, Homo sapien
gaatggcagaggtcaacggtacacagaagagca

SEQ ID NO: 967544 - DNA, 33 bp, Homo sapien
gaatggcagaggtcaatggtacacagaagagca

SEQ ID NO: 967545 - DNA, 33 bp, Homo sapien
gttttagaaatgagcaatgcatgaatatgtcat

SEQ ID NO: 967546 - DNA, 33 bp, Homo sapien
gttttagaaatgagcattgcatgaatatgtcat

SEQ ID NO: 967547 - DNA, 33 bp, Homo sapien
gcaccagttattcatgacataccatacatcaca

SEQ ID NO: 967548 - DNA, 33 bp, Homo sapien
gcaccagttattcatggcataccatacatcaca

SEQ ID NO: 967549 - DNA, 33 bp, Homo sapien
ctgctatttttcctcccctgtggtaggacaaac

SEQ ID NO: 967550 - DNA, 33 bp, Homo sapien
ctgctatttttcctcctctgtggtaggacaaac

SEQ ID NO: 967551 - DNA, 33 bp, Homo sapien
tttgcttgggtcctccagaaagctgactcacta

SEQ ID NO: 967552 - DNA, 33 bp, Homo sapien
tttgcttgggtcctccggaaagctgactcacta

SEQ ID NO: 967553 - DNA, 33 bp, Homo sapien
gtcttagaatacactgaaaatttttaagaaagc

SEQ ID NO: 967554 - DNA, 33 bp, Homo sapien
gtcttagaatacactgcaaatttttaagaaagc

SEQ ID NO: 967555 - DNA, 33 bp, Homo sapien
atcagccctagtcaggacaaaccagcaaattgt

SEQ ID NO: 967556 - DNA, 33 bp, Homo sapien
atcagccctagtcagggcaaaccagcaaattgt

SEQ ID NO: 967557 - DNA, 33 bp, Homo sapien
gcaggatccctccacacgctctcctgaggaaag

SEQ ID NO: 967558 - DNA, 33 bp, Homo sapien
gcaggatccctccacatgctctcctgaggaaag

SEQ ID NO: 967559 - DNA, 33 bp, Homo sapien
ggtgggggtgttatcaaaatgaggcattcatga

SEQ ID NO: 967560 - DNA, 33 bp, Homo sapien
ggtgggggtgttatcacaatgaggcattcatga

SEQ ID NO: 967561 - DNA, 33 bp, Homo sapien
cacaatcagtccataacgcctccagaatgatag

SEQ ID NO: 967562 - DNA, 33 bp, Homo sapien
cacaatcagtccataaggcctccagaatgatag

SEQ ID NO: 967563 - DNA, 33 bp, Homo sapien
ttctcctctgtgtaaacacgttggatcattctg

SEQ ID NO: 967564 - DNA, 33 bp, Homo sapien
ttctcctctgtgtaaatacgttggatcattctg

SEQ ID NO: 967565 - DNA, 33 bp, Homo sapien
cccacatgataaagagcatagtgcttagaaagc

SEQ ID NO: 967566 - DNA, 33 bp, Homo sapien
cccacatgataaagaggatagtgcttagaaagc

SEQ ID NO: 967567 - DNA, 33 bp, Homo sapien
tgaggaagaagaaacaagtgtgagagttattta

SEQ ID NO: 967568 - DNA, 33 bp, Homo sapien
tgaggaagaagaaacaggtgtgagagttattta

SEQ ID NO: 967569 - DNA, 33 bp, Homo sapien
ggaaggcatggttaaacattatgacagcacaga

SEQ ID NO: 967570 - DNA, 33 bp, Homo sapien
ggaaggcatggttaaatattatgacagcacaga

SEQ ID NO: 967571 - DNA, 33 bp, Homo sapien
gtttccttcttcccaccgaacacgctttcttaa

SEQ ID NO: 967572 - DNA, 33 bp, Homo sapien
gtttccttcttcccactgaacacgctttcttaa

SEQ ID NO: 967573 - DNA, 33 bp, Homo sapien
ctgttctctggcagaaataagatagatttggtc

SEQ ID NO: 967574 - DNA, 33 bp, Homo sapien
ctgttctctggcagaagtaagatagatttggtc

SEQ ID NO: 967575 - DNA, 33 bp, Homo sapien
aatggtaaaatacagcaaaagtttcttactcag

SEQ ID NO: 967576 - DNA, 33 bp, Homo sapien
aatggtaaaatacagcgaaagtttcttactcag

SEQ ID NO: 967577 - DNA, 33 bp, Homo sapien
ggtttcaggcctaccaagacctaagtctataaa

SEQ ID NO: 967578 - DNA, 33 bp, Homo sapien
ggtttcaggcctaccaggacctaagtctataaa

SEQ ID NO: 967579 - DNA, 33 bp, Homo sapien
aggaaatgcttggctgcagaaaaaatgccagct

SEQ ID NO: 967580 - DNA, 33 bp, Homo sapien
aggaaatgcttggctgtagaaaaaatgccagct

SEQ ID NO: 967581 - DNA, 33 bp, Homo sapien
gaggataggaatggaactgactgcaaatggaag

SEQ ID NO: 967582 - DNA, 33 bp, Homo sapien
gaggataggaatggaattgactgcaaatggaag

SEQ ID NO: 967583 - DNA, 33 bp, Homo sapien
gtttactgtttgtataacctctagtaaaatgcc

SEQ ID NO: 967584 - DNA, 33 bp, Homo sapien
gtttactgtttgtatatcctctagtaaaatgcc

SEQ ID NO: 967585 - DNA, 33 bp, Homo sapien
aagctcctggttttcacgaccagccctgttagg

SEQ ID NO: 967586 - DNA, 33 bp, Homo sapien
aagctcctggttttcatgaccagccctgttagg

SEQ ID NO: 967587 - DNA, 33 bp, Homo sapien
ttctactccattgggaaaactggacttgggtgg

SEQ ID NO: 967588 - DNA, 33 bp, Homo sapien
ttctactccattgggagaactggacttgggtgg

SEQ ID NO: 967589 - DNA, 33 bp, Homo sapien
cctactgaggagtatcaatgaaaagaacacttg

SEQ ID NO: 967590 - DNA, 33 bp, Homo sapien
cctactgaggagtatcgatgaaaagaacacttg

SEQ ID NO: 967591 - DNA, 33 bp, Homo sapien
cacacaggtagggtaacagcaatgttttggccc

SEQ ID NO: 967592 - DNA, 33 bp, Homo sapien
cacacaggtagggtaatagcaatgttttggccc

SEQ ID NO: 967593 - DNA, 33 bp, Homo sapien
ttggcagatggattgaagtcaaaatgagagctg

SEQ ID NO: 967594 - DNA, 33 bp, Homo sapien
ttggcagatggattgaggtcaaaatgagagctg

SEQ ID NO: 967595 - DNA, 33 bp, Homo sapien
ttattggccagagcgacccatagttgtttttgc

SEQ ID NO: 967596 - DNA, 33 bp, Homo sapien
ttattggccagagcgatccatagttgtttttgc

SEQ ID NO: 967597 - DNA, 33 bp, Homo sapien
ttcatcatttggtagcagataacaattccagcc

SEQ ID NO: 967598 - DNA, 33 bp, Homo sapien
ttcatcatttggtagctgataacaattccagcc

SEQ ID NO: 967599 - DNA, 33 bp, Homo sapien
taaagtactttgggcacgaaataatcacaattc

SEQ ID NO: 967600 - DNA, 33 bp, Homo sapien
taaagtactttgggcatgaaataatcacaattc

SEQ ID NO: 967601 - DNA, 33 bp, Homo sapien
tagagataagtgtgtccgaaaggtgagatgtaa

SEQ ID NO: 967602 - DNA, 33 bp, Homo sapien
tagagataagtgtgtctgaaaggtgagatgtaa

SEQ ID NO: 967603 - DNA, 33 bp, Homo sapien
tgtttaccccttgcaccggactccaagttcctt

SEQ ID NO: 967604 - DNA, 33 bp, Homo sapien
tgtttaccccttgcactggactccaagttcctt

SEQ ID NO: 967605 - DNA, 33 bp, Homo sapien
tataaagaccaattaaactgggatcctcttgta

SEQ ID NO: 967606 - DNA, 33 bp, Homo sapien
tataaagaccaattaagctgggatcctcttgta

SEQ ID NO: 967607 - DNA, 33 bp, Homo sapien
atttagaacataggaaccacttcacaatagtat

SEQ ID NO: 967608 - DNA, 33 bp, Homo sapien
atttagaacataggaagcacttcacaatagtat

SEQ ID NO: 967609 - DNA, 33 bp, Homo sapien
ctgtactagcagtttacggtgtggagaaaatgg

SEQ ID NO: 967610 - DNA, 33 bp, Homo sapien
ctgtactagcagtttatggtgtggagaaaatgg

SEQ ID NO: 967611 - DNA, 33 bp, Homo sapien
tgcatggctgccatgacctatctcctggtggga

SEQ ID NO: 967612 - DNA, 33 bp, Homo sapien
tgcatggctgccatgatctatctcctggtggga

SEQ ID NO: 967613 - DNA, 33 bp, Homo sapien
ctaatgcttcacttcgacaatgaagagtaacct

SEQ ID NO: 967614 - DNA, 33 bp, Homo sapien
ctaatgcttcacttcggcaatgaagagtaacct

SEQ ID NO: 967615 - DNA, 33 bp, Homo sapien
acaggtcagaacattgaaacccctcaaattaca

SEQ ID NO: 967616 - DNA, 33 bp, Homo sapien
acaggtcagaacattgcaacccctcaaattaca

SEQ ID NO: 967617 - DNA, 33 bp, Homo sapien
gttgaacttacacttacagggacaacacaggtc

SEQ ID NO: 967618 - DNA, 33 bp, Homo sapien
gttgaacttacacttatagggacaacacaggtc

SEQ ID NO: 967619 - DNA, 33 bp, Homo sapien
tttcttgttgccaggaatattttcattaacatc

SEQ ID NO: 967620 - DNA, 33 bp, Homo sapien
tttcttgttgccaggagtattttcattaacatc

SEQ ID NO: 967621 - DNA, 33 bp, Homo sapien
ataagtattttaacaactgaagtttgattgtca

SEQ ID NO: 967622 - DNA, 33 bp, Homo sapien
ataagtattttaacaagtgaagtttgattgtca

SEQ ID NO: 967623 - DNA, 33 bp, Homo sapien
gcaacaatatgtggacaagtagagggtaacttt

SEQ ID NO: 967624 - DNA, 33 bp, Homo sapien
gcaacaatatgtggacgagtagagggtaacttt

SEQ ID NO: 967625 - DNA, 33 bp, Homo sapien
ctcgtctctctttacacgtcaggcttctctttc

SEQ ID NO: 967626 - DNA, 33 bp, Homo sapien
ctcgtctctctttacatgtcaggcttctctttc

SEQ ID NO: 967627 - DNA, 33 bp, Homo sapien
tacttccattcaaaaaacttctctctcagagta

SEQ ID NO: 967628 - DNA, 33 bp, Homo sapien
tacttccattcaaaaagcttctctctcagagta

SEQ ID NO: 967629 - DNA, 33 bp, Homo sapien
agaaatccattgtggcaaaaaagaagcacctga

SEQ ID NO: 967630 - DNA, 33 bp, Homo sapien
agaaatccattgtggcgaaaaagaagcacctga

SEQ ID NO: 967631 - DNA, 33 bp, Homo sapien
ttatcatttttatcagaaacggtaaaaactgta

SEQ ID NO: 967632 - DNA, 33 bp, Homo sapien
ttatcatttttatcaggaacggtaaaaactgta

SEQ ID NO: 967633 - DNA, 33 bp, Homo sapien
aagggagaggatcaaaattacctgttcaaataa

SEQ ID NO: 967634 - DNA, 33 bp, Homo sapien
aagggagaggatcaaagttacctgttcaaataa

SEQ ID NO: 967635 - DNA, 33 bp, Homo sapien
tggtctctagtccttcactcttcccacctctgc

SEQ ID NO: 967636 - DNA, 33 bp, Homo sapien
tggtctctagtccttcgctcttcccacctctgc

SEQ ID NO: 967637 - DNA, 33 bp, Homo sapien
tagccattttgtcaaacctagctggtatacctc

SEQ ID NO: 967638 - DNA, 33 bp, Homo sapien
tagccattttgtcaaatctagctggtatacctc

SEQ ID NO: 967639 - DNA, 33 bp, Homo sapien
tagagatgtatttctcagacctactaaatttat

SEQ ID NO: 967640 - DNA, 33 bp, Homo sapien
tagagatgtatttctcggacctactaaatttat

SEQ ID NO: 967641 - DNA, 33 bp, Homo sapien
ttgctcagtgggctccactctgttcacttggca

SEQ ID NO: 967642 - DNA, 33 bp, Homo sapien
ttgctcagtgggctccgctctgttcacttggca

SEQ ID NO: 967643 - DNA, 33 bp, Homo sapien
acatatatttgagagaacttcaacttatcaagt

SEQ ID NO: 967644 - DNA, 33 bp, Homo sapien
acatatatttgagagaccttcaacttatcaagt

SEQ ID NO: 967645 - DNA, 33 bp, Homo sapien
catgaagcagcagaaacgtttttcccagttctc

SEQ ID NO: 967646 - DNA, 33 bp, Homo sapien
catgaagcagcagaaatgtttttcccagttctc

SEQ ID NO: 967647 - DNA, 33 bp, Homo sapien
cctgctaggcatttacaatctcaaaaccatgta

SEQ ID NO: 967648 - DNA, 33 bp, Homo sapien
cctgctaggcatttaccatctcaaaaccatgta

SEQ ID NO: 967649 - DNA, 33 bp, Homo sapien
cagagttaagtggaaacgctagaaatagaaaac

SEQ ID NO: 967650 - DNA, 33 bp, Homo sapien
cagagttaagtggaaatgctagaaatagaaaac

SEQ ID NO: 967651 - DNA, 33 bp, Homo sapien
agttcttgggagaggaaatcctgctctttagct

SEQ ID NO: 967652 - DNA, 33 bp, Homo sapien
agttcttgggagaggagatcctgctctttagct

SEQ ID NO: 967653 - DNA, 33 bp, Homo sapien
taccacacattttgcagtccacttcattctgat

SEQ ID NO: 967654 - DNA, 33 bp, Homo sapien
taccacacattttgcattccacttcattctgat

SEQ ID NO: 967655 - DNA, 33 bp, Homo sapien
agtggatactggagctaaatgcaccctggtgta

SEQ ID NO: 967656 - DNA, 33 bp, Homo sapien
agtggatactggagctgaatgcaccctggtgta

SEQ ID NO: 967657 - DNA, 33 bp, Homo sapien
gggaggtgcagcaataaggcttcctgaccatgc

SEQ ID NO: 967658 - DNA, 33 bp, Homo sapien
gggaggtgcagcaatagggcttcctgaccatgc

SEQ ID NO: 967659 - DNA, 33 bp, Homo sapien
caggtgactgactttcccgtgtcttattaaggc

SEQ ID NO: 967660 - DNA, 33 bp, Homo sapien
caggtgactgactttctcgtgtcttattaaggc

SEQ ID NO: 967661 - DNA, 33 bp, Homo sapien
agtgacacttgacctacgcctcaaggctaacta

SEQ ID NO: 967662 - DNA, 33 bp, Homo sapien
agtgacacttgacctatgcctcaaggctaacta

SEQ ID NO: 967663 - DNA, 33 bp, Homo sapien
tgattttatacattcacggaacatctttgtgta

SEQ ID NO: 967664 - DNA, 33 bp, Homo sapien
tgattttatacattcatggaacatctttgtgta

SEQ ID NO: 967665 - DNA, 33 bp, Homo sapien
accttgttcagatttcaaaatagttgtagcctt

SEQ ID NO: 967666 - DNA, 33 bp, Homo sapien
accttgttcagatttccaaatagttgtagcctt

SEQ ID NO: 967667 - DNA, 33 bp, Homo sapien; identical to SEQ ID NO: 967665

SEQ ID NO: 967668 - DNA, 33 bp, Homo sapien; identical to SEQ ID NO: 967666

SEQ ID NO: 967669 - DNA, 33 bp, Homo sapien
ccatgatcagaaatatcagttgattatagttaa

SEQ ID NO: 967670 - DNA, 33 bp, Homo sapien
ccatgatcagaaatattagttgattatagttaa

SEQ ID NO: 967671 - DNA, 33 bp, Homo sapien
gacagatggttgacgacgtggagcttccccctt

SEQ ID NO: 967672 - DNA, 33 bp, Homo sapien
gacagatggttgacgatgtggagcttccccctt

SEQ ID NO: 967673 - DNA, 33 bp, Homo sapien
tggaactgtttatacacagctgaacaaatactt

SEQ ID NO: 967674 - DNA, 33 bp, Homo sapien
tggaactgtttatacatagctgaacaaatactt

SEQ ID NO: 967675 - DNA, 33 bp, Homo sapien
caaagaggcgattctacaaatagcatttttctt

SEQ ID NO: 967676 - DNA, 33 bp, Homo sapien
caaagaggcgattctagaaatagcatttttctt

SEQ ID NO: 967677 - DNA, 33 bp, Homo sapien
cctgtggaagagaaagcctttatcactccctca

SEQ ID NO: 967678 - DNA, 33 bp, Homo sapien
cctgtggaagagaaagtctttatcactccctca

SEQ ID NO: 967679 - DNA, 33 bp, Homo sapien
gaagagttgaggaagccctagagagttctcctg

SEQ ID NO: 967680 - DNA, 33 bp, Homo sapien
gaagagttgaggaagcgctagagagttctcctg

SEQ ID NO: 967681 - DNA, 33 bp, Homo sapien
acacaaatttttataccggctttgatgtggtta

SEQ ID NO: 967682 - DNA, 33 bp, Homo sapien
acacaaatttttatactggctttgatgtggtta

SEQ ID NO: 967683 - DNA, 33 bp, Homo sapien
tgggtgaagatgcaaagggtacccaagtgctta

SEQ ID NO: 967684 - DNA, 33 bp, Homo sapien
tgggtgaagatgcaaatggtacccaagtgctta

SEQ ID NO: 967685 - DNA, 33 bp, Homo sapien
ctgtcaccaaaaatgccctgggaactatacata

SEQ ID NO: 967686 - DNA, 33 bp, Homo sapien
ctgtcaccaaaaatgctctgggaactatacata

SEQ ID NO: 967687 - DNA, 33 bp, Homo sapien
ctacaaattcctgtgacggctaattttgtgtgt

SEQ ID NO: 967688 - DNA, 33 bp, Homo sapien
ctacaaattcctgtgatggctaattttgtgtgt

SEQ ID NO: 967689 - DNA, 33 bp, Homo sapien
gtgcctttctgacttcccatttttaaaatatct

SEQ ID NO: 967690 - DNA, 33 bp, Homo sapien
gtgcctttctgacttcgcatttttaaaatatct

SEQ ID NO: 967691 - DNA, 33 bp, Homo sapien
ttcttccagcttgtaacggaaatcagatgagaa

SEQ ID NO: 967692 - DNA, 33 bp, Homo sapien
ttcttccagcttgtaatggaaatcagatgagaa

SEQ ID NO: 967693 - DNA, 33 bp, Homo sapien
ccagcctcagtatgaacgcagacacgttcctta

SEQ ID NO: 967694 - DNA, 33 bp, Homo sapien
ccagcctcagtatgaatgcagacacgttcctta

SEQ ID NO: 967695 - DNA, 33 bp, Homo sapien
aggggttgtaatattgaacctttgtcttttgga

SEQ ID NO: 967696 - DNA, 33 bp, Homo sapien
aggggttgtaatattggacctttgtcttttgga

SEQ ID NO: 967697 - DNA, 33 bp, Homo sapien
tggacaggatcctggcacagaaaaatgacaata

SEQ ID NO: 967698 - DNA, 33 bp, Homo sapien
tggacaggatcctggcgcagaaaaatgacaata

SEQ ID NO: 967699 - DNA, 33 bp, Homo sapien
caagttacctcacttacgtttgcatttaagaag

SEQ ID NO: 967700 - DNA, 33 bp, Homo sapien
caagttacctcacttatgtttgcatttaagaag

SEQ ID NO: 967701 - DNA, 33 bp, Homo sapien
aagcttaaaccaacttaaaactttgcatttgcc

SEQ ID NO: 967702 - DNA, 33 bp, Homo sapien
aagcttaaaccaacttcaaactttgcatttgcc

SEQ ID NO: 967703 - DNA, 33 bp, Homo sapien
gctcaatagcacataaggtctgtgagggcccag

SEQ ID NO: 967704 - DNA, 33 bp, Homo sapien
gctcaatagcacataatgtctgtgagggcccag

SEQ ID NO: 967705 - DNA, 33 bp, Homo sapien
ggtgagtgccatggaaagtagtacagtgcctgg

SEQ ID NO: 967706 - DNA, 33 bp, Homo sapien
ggtgagtgccatggaaggtagtacagtgcctgg

SEQ ID NO: 967707 - DNA, 33 bp, Homo sapien
agatagagcctataagacattaaggactggatg

SEQ ID NO: 967708 - DNA, 33 bp, Homo sapien
agatagagcctataaggcattaaggactggatg

SEQ ID NO: 967709 - DNA, 33 bp, Homo sapien
tttgaagtcccaatgacgatcacaatttactct

SEQ ID NO: 967710 - DNA, 33 bp, Homo sapien
tttgaagtcccaatgatgatcacaatttactct

SEQ ID NO: 967711 - DNA, 33 bp, Homo sapien
ggtttatcttcttttaactatggtctaggagag

SEQ ID NO: 967712 - DNA, 33 bp, Homo sapien
ggtttatcttcttttagctatggtctaggagag

SEQ ID NO: 967713 - DNA, 33 bp, Homo sapien
tgctatcagggaggttaaaaccattcatgaata

SEQ ID NO: 967714 - DNA, 33 bp, Homo sapien
tgctatcagggaggtttaaaccattcatgaata

SEQ ID NO: 967715 - DNA, 33 bp, Homo sapien
gaaaggaattggatggaaaaagaagacttggct

SEQ ID NO: 967716 - DNA, 33 bp, Homo sapien
gaaaggaattggatgggaaaagaagacttggct

SEQ ID NO: 967717 - DNA, 33 bp, Homo sapien
ctcaaacatcacagacaattacttcttgctcac

SEQ ID NO: 967718 - DNA, 33 bp, Homo sapien
ctcaaacatcacagacgattacttcttgctcac

SEQ ID NO: 967719 - DNA, 33 bp, Homo sapien
aaattctaatcataccgaagggagtctaccagg

SEQ ID NO: 967720 - DNA, 33 bp, Homo sapien
aaattctaatcatacctaagggagtctaccagg

SEQ ID NO: 967721 - DNA, 33 bp, Homo sapien
cttcaaatataaggaaagttgtcataaactgct

SEQ ID NO: 967722 - DNA, 33 bp, Homo sapien
cttcaaatataaggaacgttgtcataaactgct

SEQ ID NO: 967723 - DNA, 33 bp, Homo sapien
aaatctaactgcattaacctccatccatggtcc

SEQ ID NO: 967724 - DNA, 33 bp, Homo sapien
aaatctaactgcattatcctccatccatggtcc

SEQ ID NO: 967725 - DNA, 33 bp, Homo sapien
aggataaagaatgactcaaactctggaatgtca

SEQ ID NO: 967726 - DNA, 33 bp, Homo sapien
aggataaagaatgacttaaactctggaatgtca

SEQ ID NO: 967727 - DNA, 33 bp, Homo sapien
gttcaaggtctcttaaacatccttacttcactt

SEQ ID NO: 967728 - DNA, 33 bp, Homo sapien
gttcaaggtctcttaaccatccttacttcactt

SEQ ID NO: 967729 - DNA, 33 bp, Homo sapien
ttgaaagttggtaccaatggaattcacatctta

SEQ ID NO: 967730 - DNA, 33 bp, Homo sapien
ttgaaagttggtaccagtggaattcacatctta

SEQ ID NO: 967731 - DNA, 33 bp, Homo sapien
taggaattgattgaaactggggtacggaattga

SEQ ID NO: 967732 - DNA, 33 bp, Homo sapien
taggaattgattgaaagtggggtacggaattga

SEQ ID NO: 967733 - DNA, 33 bp, Homo sapien
ctattagatggatgaaccatattggtagcatct

SEQ ID NO: 967734 - DNA, 33 bp, Homo sapien
ctattagatggatgaatcatattggtagcatct

SEQ ID NO: 967735 - DNA, 33 bp, Homo sapien
atcttggtcccaatccactcacaattttagctt

SEQ ID NO: 967736 - DNA, 33 bp, Homo sapien
atcttggtcccaatccgctcacaattttagctt

SEQ ID NO: 967737 - DNA, 33 bp, Homo sapien
aagatatcaccttaaccctaagtcataggctaa

SEQ ID NO: 967738 - DNA, 33 bp, Homo sapien
aagatatcaccttaactctaagtcataggctaa

SEQ ID NO: 967739 - DNA, 33 bp, Homo sapien
tactttaccccttcaacgagattagcacttgtt

SEQ ID NO: 967740 - DNA, 33 bp, Homo sapien
tactttaccccttcaatgagattagcacttgtt

SEQ ID NO: 967741 - DNA, 33 bp, Homo sapien
acaggtgaggcattagcatggacccctgggatc

SEQ ID NO: 967742 - DNA, 33 bp, Homo sapien
acaggtgaggcattagtatggacccctgggatc

SEQ ID NO: 967743 - DNA, 33 bp, Homo sapien
aacgccactcttctctaaaaacaattggtatca

SEQ ID NO: 967744 - DNA, 33 bp, Homo sapien
aacgccactcttctctgaaaacaattggtatca

SEQ ID NO: 967745 - DNA, 33 bp, Homo sapien
ctgtacagctgcatcacatagaattctcagtta

SEQ ID NO: 967746 - DNA, 33 bp, Homo sapien
ctgtacagctgcatcagatagaattctcagtta

SEQ ID NO: 967747 - DNA, 33 bp, Homo sapien
atggcctcatcacacaaaattgatccaaaaggc

SEQ ID NO: 967748 - DNA, 33 bp, Homo sapien
atggcctcatcacacagaattgatccaaaaggc

SEQ ID NO: 967749 - DNA, 33 bp, Homo sapien
tctctgctacttttgaccatactgaaactctcc

SEQ ID NO: 967750 - DNA, 33 bp, Homo sapien
tctctgctacttttgagcatactgaaactctcc

SEQ ID NO: 967751 - DNA, 33 bp, Homo sapien
cattcccagatagtccaatgcagttagtctata

SEQ ID NO: 967752 - DNA, 33 bp, Homo sapien
cattcccagatagtccgatgcagttagtctata

SEQ ID NO: 967753 - DNA, 33 bp, Homo sapien
gaagcaaccaaacttacaaaagagctatgaaga

SEQ ID NO: 967754 - DNA, 33 bp, Homo sapien
gaagcaaccaaacttataaaagagctatgaaga

SEQ ID NO: 967755 - DNA, 33 bp, Homo sapien
ccagagatttgctaggaaaccaaaagtgcttga

SEQ ID NO: 967756 - DNA, 33 bp, Homo sapien
ccagagatttgctagggaaccaaaagtgcttga

SEQ ID NO: 967757 - DNA, 33 bp, Homo sapien
aatgagtagtagcttgcagaggcacaaaagaca

SEQ ID NO: 967758 - DNA, 33 bp, Homo sapien
aatgagtagtagcttgtagaggcacaaaagaca

SEQ ID NO: 967759 - DNA, 33 bp, Homo sapien
gtttttggaaacaagaaaacgatcaactaggga

SEQ ID NO: 967760 - DNA, 33 bp, Homo sapien
gtttttggaaacaagagaacgatcaactaggga

SEQ ID NO: 967761 - DNA, 33 bp, Homo sapien
ccttgatcatggtaaggagtcaaaataattgtt

SEQ ID NO: 967762 - DNA, 33 bp, Homo sapien
ccttgatcatggtaagtagtcaaaataattgtt

SEQ ID NO: 967763 - DNA, 33 bp, Homo sapien
gtgactactttgaatgcaacactcattttggga

SEQ ID NO: 967764 - DNA, 33 bp, Homo sapien
gtgactactttgaatgtaacactcattttggga

SEQ ID NO: 967765 - DNA, 33 bp, Homo sapien
tacttgaaaggcctgaagtgatcctttaaaatt

SEQ ID NO: 967766 - DNA, 33 bp, Homo sapien
tacttgaaaggcctgacgtgatcctttaaaatt

SEQ ID NO: 967767 - DNA, 33 bp, Homo sapien
gactgtgactatgacacggccacaaattagtga

SEQ ID NO: 967768 - DNA, 33 bp, Homo sapien
gactgtgactatgacatggccacaaattagtga

SEQ ID NO: 967769 - DNA, 33 bp, Homo sapien
ttgtggccatctcggcacagactttgatagtca

SEQ ID NO: 967770 - DNA, 33 bp, Homo sapien
ttgtggccatctcggcgcagactttgatagtca

SEQ ID NO: 967771 - DNA, 33 bp, Homo sapien
cagttgtatgtcttgaaagaagaatcaaaagga

SEQ ID NO: 967772 - DNA, 33 bp, Homo sapien
cagttgtatgtcttgagagaagaatcaaaagga

SEQ ID NO: 967773 - DNA, 33 bp, Homo sapien
actaagttgtttaaaaggcaccagatggagaag

SEQ ID NO: 967774 - DNA, 33 bp, Homo sapien
actaagttgtttaaaatgcaccagatggagaag

SEQ ID NO: 967775 - DNA, 33 bp, Homo sapien
taattacaattatgtgcaaggctttttaattgt

SEQ ID NO: 967776 - DNA, 33 bp, Homo sapien
taattacaattatgtggaaggctttttaattgt

SEQ ID NO: 967777 - DNA, 33 bp, Homo sapien
gtatgaaagatatacccaagcaccgaaaagaga

SEQ ID NO: 967778 - DNA, 33 bp, Homo sapien
gtatgaaagatatacctaagcaccgaaaagaga

SEQ ID NO: 967779 - DNA, 33 bp, Homo sapien
tgcagcctctgcaaccgacttccgtgtgctttc

SEQ ID NO: 967780 - DNA, 33 bp, Homo sapien
tgcagcctctgcaacctacttccgtgtgctttc

SEQ ID NO: 967781 - DNA, 33 bp, Homo sapien
ttcacccttgcactgacagtctaatcttttacg

SEQ ID NO: 967782 - DNA, 33 bp, Homo sapien
ttcacccttgcactgatagtctaatcttttacg

SEQ ID NO: 967783 - DNA, 33 bp, Homo sapien
tgtagcctgaacatacactatgtgggtggtctg

SEQ ID NO: 967784 - DNA, 33 bp, Homo sapien
tgtagcctgaacatactctatgtgggtggtctg

SEQ ID NO: 967785 - DNA, 33 bp, Homo sapien
gacggggatcatggctgaattatgtgaaagctt

SEQ ID NO: 967786 - DNA, 33 bp, Homo sapien
gacggggatcatggcttaattatgtgaaagctt

SEQ ID NO: 967787 - DNA, 33 bp, Homo sapien
tgcattaacaagtacaatgagcaagaacattat

SEQ ID NO: 967788 - DNA, 33 bp, Homo sapien
tgcattaacaagtacagtgagcaagaacattat

SEQ ID NO: 967789 - DNA, 33 bp, Homo sapien
agcccacatcaaatcacaacacattttattctg

SEQ ID NO: 967790 - DNA, 33 bp, Homo sapien
agcccacatcaaatcataacacattttattctg

SEQ ID NO: 967791 - DNA, 33 bp, Homo sapien
tgttgattcaaattaaggaatgcgtaaaatagt

SEQ ID NO: 967792 - DNA, 33 bp, Homo sapien
tgttgattcaaattaatgaatgcgtaaaatagt

SEQ ID NO: 967793 - DNA, 33 bp, Homo sapien
ttacaaagggaaccaaagctagaaccaaatttc

SEQ ID NO: 967794 - DNA, 33 bp, Homo sapien
ttacaaagggaaccaatgctagaaccaaatttc

SEQ ID NO: 967795 - DNA, 33 bp, Homo sapien
gactgcatataacctacaggatgttctttcaga

SEQ ID NO: 967796 - DNA, 33 bp, Homo sapien
gactgcatataacctagaggatgttctttcaga

SEQ ID NO: 967797 - DNA, 33 bp, Homo sapien
gggtggaggaaagtcaatagtgtgcaagttggt

SEQ ID NO: 967798 - DNA, 33 bp, Homo sapien
gggtggaggaaagtcagtagtgtgcaagttggt

SEQ ID NO: 967799 - DNA, 33 bp, Homo sapien
aactttaggatttcaccgaccacaaagtatttc

SEQ ID NO: 967800 - DNA, 33 bp, Homo sapien
aactttaggatttcactgaccacaaagtatttc

SEQ ID NO: 967801 - DNA, 33 bp, Homo sapien
aattatccagctgttaaggaggaggtatggata

SEQ ID NO: 967802 - DNA, 33 bp, Homo sapien
aattatccagctgttagggaggaggtatggata

SEQ ID NO: 967803 - DNA, 33 bp, Homo sapien
tcagtagaatgttagaaagcagaagtcgggaaa

SEQ ID NO: 967804 - DNA, 33 bp, Homo sapien
tcagtagaatgttagagagcagaagtcgggaaa

SEQ ID NO: 967805 - DNA, 33 bp, Homo sapien
tacgtgagacactagcaatctttaggaacagcg

SEQ ID NO: 967806 - DNA, 33 bp, Homo sapien
tacgtgagacactagcgatctttaggaacagcg

SEQ ID NO: 967807 - DNA, 33 bp, Homo sapien
agaaaccgggtgatgccagtagctgaccaaaat

SEQ ID NO: 967808 - DNA, 33 bp, Homo sapien
agaaaccgggtgatgcgagtagctgaccaaaat

SEQ ID NO: 967809 - DNA, 33 bp, Homo sapien
acatatggtgttggaccaacaaattcatctgct

SEQ ID NO: 967810 - DNA, 33 bp, Homo sapien
acatatggtgttggactaacaaattcatctgct

SEQ ID NO: 967811 - DNA, 33 bp, Homo sapien
agggtgtgagtggtaactggagaaaatgatgat

SEQ ID NO: 967812 - DNA, 33 bp, Homo sapien
agggtgtgagtggtaattggagaaaatgatgat

SEQ ID NO: 967813 - DNA, 33 bp, Homo sapien
attttaaagtgaaattcaatgtacctgtcctac

SEQ ID NO: 967814 - DNA, 33 bp, Homo sapien
attttaaagtgaaattgaatgtacctgtcctac

SEQ ID NO: 967815 - DNA, 33 bp, Homo sapien
atcaaacatatgaataaatcaaacattaatcac

SEQ ID NO: 967816 - DNA, 33 bp, Homo sapien
atcaaacatatgaatagatcaaacattaatcac

SEQ ID NO: 967817 - DNA, 33 bp, Homo sapien
aataaaaaatgcatgaaacaaataaatgcactt

SEQ ID NO: 967818 - DNA, 33 bp, Homo sapien
aataaaaaatgcatgagacaaataaatgcactt

SEQ ID NO: 967819 - DNA, 33 bp, Homo sapien
ataaaacttggacacacgaatgtcactactata

SEQ ID NO: 967820 - DNA, 33 bp, Homo sapien
ataaaacttggacacaggaatgtcactactata

SEQ ID NO: 967821 - DNA, 33 bp, Homo sapien
cattcttgtttgtccacgaattggctgtataac

SEQ ID NO: 967822 - DNA, 33 bp, Homo sapien
cattcttgtttgtccatgaattggctgtataac

SEQ ID NO: 967823 - DNA, 33 bp, Homo sapien
catctacagaacatgcacctcggataaccaaag

SEQ ID NO: 967824 - DNA, 33 bp, Homo sapien
catctacagaacatgcgcctcggataaccaaag

SEQ ID NO: 967825 - DNA, 33 bp, Homo sapien
ttcattttactagccacgattaggttttatcct

SEQ ID NO: 967826 - DNA, 33 bp, Homo sapien
ttcattttactagccatgattaggttttatcct

SEQ ID NO: 967827 - DNA, 33 bp, Homo sapien
taggcaggagtaaaccgaaaccatttgagatat

SEQ ID NO: 967828 - DNA, 33 bp, Homo sapien
taggcaggagtaaacctaaaccatttgagatat

SEQ ID NO: 967829 - DNA, 33 bp, Homo sapien
taagagactggattaactaggtcccagagtttg

SEQ ID NO: 967830 - DNA, 33 bp, Homo sapien
taagagactggattaagtaggtcccagagtttg

SEQ ID NO: 967831 - DNA, 33 bp, Homo sapien
aaatgtttagcaattacagcctgtttttttttt

SEQ ID NO: 967832 - DNA, 33 bp, Homo sapien
aaatgtttagcaattatagcctgtttttttttt

SEQ ID NO: 967833 - DNA, 33 bp, Homo sapien
atcatttttcttctgtcaaagtggcaaaattat

SEQ ID NO: 967834 - DNA, 33 bp, Homo sapien
atcatttttcttctgttaaagtggcaaaattat

SEQ ID NO: 967835 - DNA, 33 bp, Homo sapien
agaggctctttgtttcacacaggaattagtaga

SEQ ID NO: 967836 - DNA, 33 bp, Homo sapien
agaggctctttgtttctcacaggaattagtaga

SEQ ID NO: 967837 - DNA, 33 bp, Homo sapien
gctgaaccttacccaccgtctcaccaacacggg

SEQ ID NO: 967838 - DNA, 33 bp, Homo sapien
gctgaaccttacccactgtctcaccaacacggg

SEQ ID NO: 967839 - DNA, 33 bp, Homo sapien
tgtgcatcactctgcgaatgggaagcaggatcc

SEQ ID NO: 967840 - DNA, 33 bp, Homo sapien
tgtgcatcactctgcggatgggaagcaggatcc

SEQ ID NO: 967841 - DNA, 33 bp, Homo sapien
tcaggaattatgttacagattaaaaattagtgc

SEQ ID NO: 967842 - DNA, 33 bp, Homo sapien
tcaggaattatgttaccgattaaaaattagtgc

SEQ ID NO: 967843 - DNA, 33 bp, Homo sapien
acctgaagcagatcaaatgagggtggggcaggg

SEQ ID NO: 967844 - DNA, 33 bp, Homo sapien
acctgaagcagatcaagtgagggtggggcaggg

SEQ ID NO: 967845 - DNA, 33 bp, Homo sapien
cagactgcagtagtgccacaactcctccctcca

SEQ ID NO: 967846 - DNA, 33 bp, Homo sapien
cagactgcagtagtgctacaactcctccctcca

SEQ ID NO: 967847 - DNA, 33 bp, Homo sapien
aaggtgcctttagccacggtttggaaacacaaa

SEQ ID NO: 967848 - DNA, 33 bp, Homo sapien
aaggtgcctttagccagggtttggaaacacaaa

SEQ ID NO: 967849 - DNA, 33 bp, Homo sapien
atcttgactgcgggtaggtttggtttttatttg

SEQ ID NO: 967850 - DNA, 33 bp, Homo sapien
atcttgactgcgggtatgtttggtttttatttg

SEQ ID NO: 967851 - DNA, 33 bp, Homo sapien
atagaaattcatacgcaaattttcaagttagga

SEQ ID NO: 967852 - DNA, 33 bp, Homo sapien
atagaaattcatacgccaattttcaagttagga

SEQ ID NO: 967853 - DNA, 33 bp, Homo sapien
cacattgtattgcctacaaagggaaaaatctta

SEQ ID NO: 967854 - DNA, 33 bp, Homo sapien
cacattgtattgcctataaagggaaaaatctta

SEQ ID NO: 967855 - DNA, 33 bp, Homo sapien
tcacacataagatgtccccttcacaaggcatat

SEQ ID NO: 967856 - DNA, 33 bp, Homo sapien
tcacacataagatgtctccttcacaaggcatat

SEQ ID NO: 967857 - DNA, 33 bp, Homo sapien
cttgcttctactcaaaaccttatttattctgca

SEQ ID NO: 967858 - DNA, 33 bp, Homo sapien
cttgcttctactcaaagccttatttattctgca

SEQ ID NO: 967859 - DNA, 33 bp, Homo sapien
acattttatttagtcaatgacattaaatgaatc

SEQ ID NO: 967860 - DNA, 33 bp, Homo sapien
acattttatttagtcattgacattaaatgaatc

SEQ ID NO: 967861 - DNA, 33 bp, Homo sapien
aatggatgttatgctaacaggcacgaaaacaac

SEQ ID NO: 967862 - DNA, 33 bp, Homo sapien
aatggatgttatgctagcaggcacgaaaacaac

SEQ ID NO: 967863 - DNA, 33 bp, Homo sapien
cttactgttaaacccacacattgaaatgtatat

SEQ ID NO: 967864 - DNA, 33 bp, Homo sapien
cttactgttaaacccagacattgaaatgtatat

SEQ ID NO: 967865 - DNA, 33 bp, Homo sapien
ccacaacttctccaaaagtgtgcaaatataccg

SEQ ID NO: 967866 - DNA, 33 bp, Homo sapien
ccacaacttctccaaacgtgtgcaaatataccg

SEQ ID NO: 967867 - DNA, 33 bp, Homo sapien
tgcagagtatccatgaaagaagggtgcattcct

SEQ ID NO: 967868 - DNA, 33 bp, Homo sapien
tgcagagtatccatgagagaagggtgcattcct

SEQ ID NO: 967869 - DNA, 33 bp, Homo sapien
aggtagacatcagaaaactgtagcagtctatga

SEQ ID NO: 967870 - DNA, 33 bp, Homo sapien
aggtagacatcagaaagctgtagcagtctatga

SEQ ID NO: 967871 - DNA, 33 bp, Homo sapien
tggctgaagatgtctacattgctccttcactgt

SEQ ID NO: 967872 - DNA, 33 bp, Homo sapien
tggctgaagatgtctatattgctccttcactgt

SEQ ID NO: 967873 - DNA, 33 bp, Homo sapien
attacctggtgaattgaagttaaaaactggtgt

SEQ ID NO: 967874 - DNA, 33 bp, Homo sapien
attacctggtgaattgcagttaaaaactggtgt

SEQ ID NO: 967875 - DNA, 33 bp, Homo sapien
caaccccaatggcaaacgatagatacaaagcac

SEQ ID NO: 967876 - DNA, 33 bp, Homo sapien
caaccccaatggcaaatgatagatacaaagcac

SEQ ID NO: 967877 - DNA, 33 bp, Homo sapien
tctcttctgttatagaaccacaaggaaatattg

SEQ ID NO: 967878 - DNA, 33 bp, Homo sapien
tctcttctgttatagatccacaaggaaatattg

SEQ ID NO: 967879 - DNA, 33 bp, Homo sapien
tcttgaaggatgacagcaaaacccagcttacag

SEQ ID NO: 967880 - DNA, 33 bp, Homo sapien
tcttgaaggatgacagtaaaacccagcttacag

SEQ ID NO: 967881 - DNA, 33 bp, Homo sapien
atatctctcttaagaaacctctcctcgtggcca

SEQ ID NO: 967882 - DNA, 33 bp, Homo sapien
atatctctcttaagaagcctctcctcgtggcca

SEQ ID NO: 967883 - DNA, 33 bp, Homo sapien
actgttaccatctgaaccaaactgtgttgctct

SEQ ID NO: 967884 - DNA, 33 bp, Homo sapien
actgttaccatctgaatcaaactgtgttgctct

SEQ ID NO: 967885 - DNA, 33 bp, Homo sapien
acagcaaggtcacgacaaattctggagcatttt

SEQ ID NO: 967886 - DNA, 33 bp, Homo sapien
acagcaaggtcacgacgaattctggagcatttt

SEQ ID NO: 967887 - DNA, 33 bp, Homo sapien
gaatgtggactacaggacaatccaggctctaga

SEQ ID NO: 967888 - DNA, 33 bp, Homo sapien
gaatgtggactacaggtcaatccaggctctaga

SEQ ID NO: 967889 - DNA, 33 bp, Homo sapien
caatcttttcatcaaacgccttttatctcaaca

SEQ ID NO: 967890 - DNA, 33 bp, Homo sapien
caatcttttcatcaaatgccttttatctcaaca

SEQ ID NO: 967891 - DNA, 33 bp, Homo sapien
atgtgtaacacggtaccctgacctgtatagcgc

SEQ ID NO: 967892 - DNA, 33 bp, Homo sapien
atgtgtaacacggtacgctgacctgtatagcgc

SEQ ID NO: 967893 - DNA, 33 bp, Homo sapien
atcagactgaaggccccatcagattcagaacgt

SEQ ID NO: 967894 - DNA, 33 bp, Homo sapien
atcagactgaaggccctatcagattcagaacgt

SEQ ID NO: 967895 - DNA, 33 bp, Homo sapien
acatctattctacaacacatcagttctgctgaa

SEQ ID NO: 967896 - DNA, 33 bp, Homo sapien
acatctattctacaacccatcagttctgctgaa

SEQ ID NO: 967897 - DNA, 33 bp, Homo sapien
aggttttgtaacctaaactaggtcgtagaagag

SEQ ID NO: 967898 - DNA, 33 bp, Homo sapien
aggttttgtaacctaagctaggtcgtagaagag

SEQ ID NO: 967899 - DNA, 33 bp, Homo sapien
atacttggctaaagcaaaaccatttaaatctcc

SEQ ID NO: 967900 - DNA, 33 bp, Homo sapien
atacttggctaaagcagaaccatttaaatctcc

SEQ ID NO: 967901 - DNA, 33 bp, Homo sapien
tgattcgaagtgtaaagagggaaacaatcatca

SEQ ID NO: 967902 - DNA, 33 bp, Homo sapien
tgattcgaagtgtaaatagggaaacaatcatca

SEQ ID NO: 967903 - DNA, 33 bp, Homo sapien
tagatattcaactttccccaacttttagtacaa

SEQ ID NO: 967904 - DNA, 33 bp, Homo sapien
tagatattcaactttctccaacttttagtacaa

SEQ ID NO: 967905 - DNA, 33 bp, Homo sapien
atttatccatgatgtgaagttgaatgtccagga

SEQ ID NO: 967906 - DNA, 33 bp, Homo sapien
atttatccatgatgtggagttgaatgtccagga

SEQ ID NO: 967907 - DNA, 33 bp, Homo sapien
gtaattacaaaccacacggagcatttgattttg

SEQ ID NO: 967908 - DNA, 33 bp, Homo sapien
gtaattacaaaccacatggagcatttgattttg

SEQ ID NO: 967909 - DNA, 33 bp, Homo sapien
aactccaaaatctagcaaagaatgcctgccagg

SEQ ID NO: 967910 - DNA, 33 bp, Homo sapien
aactccaaaatctagcgaagaatgcctgccagg

SEQ ID NO: 967911 - DNA, 33 bp, Homo sapien
acaccaggtaaaggaaataacagaaaccaggca

SEQ ID NO: 967912 - DNA, 33 bp, Homo sapien
acaccaggtaaaggaactaacagaaaccaggca

SEQ ID NO: 967913 - DNA, 33 bp, Homo sapien
gagctcttcatgccaaaaccagggaaaagggca

SEQ ID NO: 967914 - DNA, 33 bp, Homo sapien
gagctcttcatgccaagaccagggaaaagggca

SEQ ID NO: 967915 - DNA, 33 bp, Homo sapien
ctctgtcctctctcaactaaaacaatttttaat

SEQ ID NO: 967916 - DNA, 33 bp, Homo sapien
ctctgtcctctctcaagtaaaacaatttttaat

SEQ ID NO: 967917 - DNA, 33 bp, Homo sapien
gcacccattttttcttcaacccacagcagtttg

SEQ ID NO: 967918 - DNA, 33 bp, Homo sapien
gcacccattttttctttaacccacagcagtttg

SEQ ID NO: 967919 - DNA, 33 bp, Homo sapien
aagtgcaattgtgttacgtgcatagattacatg

SEQ ID NO: 967920 - DNA, 33 bp, Homo sapien
aagtgcaattgtgttatgtgcatagattacatg

SEQ ID NO: 967921 - DNA, 33 bp, Homo sapien
aggtaaacattgctaacaatttggagtttatcc

SEQ ID NO: 967922 - DNA, 33 bp, Homo sapien
aggtaaacattgctaataatttggagtttatcc

SEQ ID NO: 967923 - DNA, 33 bp, Homo sapien
acattgttgttcagtaagataacgcttgtacat

SEQ ID NO: 967924 - DNA, 33 bp, Homo sapien
acattgttgttcagtaggataacgcttgtacat

SEQ ID NO: 967925 - DNA, 33 bp, Homo sapien
cttttgaacacttgtacacttaatgaatgtatt

SEQ ID NO: 967926 - DNA, 33 bp, Homo sapien
cttttgaacacttgtatacttaatgaatgtatt

SEQ ID NO: 967927 - DNA, 33 bp, Homo sapien
tcagcattatttcttgaagggattcatccaagt

SEQ ID NO: 967928 - DNA, 33 bp, Homo sapien
tcagcattatttcttggagggattcatccaagt

SEQ ID NO: 967929 - DNA, 33 bp, Homo sapien
aagaataatagcctgacgaaaggttaacgtttt

SEQ ID NO: 967930 - DNA, 33 bp, Homo sapien
aagaataatagcctgatgaaaggttaacgtttt

SEQ ID NO: 967931 - DNA, 33 bp, Homo sapien
ggtttatagatcctgaactaaagagagggtaca

SEQ ID NO: 967932 - DNA, 33 bp, Homo sapien
ggtttatagatcctgagctaaagagagggtaca

SEQ ID NO: 967933 - DNA, 33 bp, Homo sapien
ctgtctagtaagatgacggaaattttcgtgacc

SEQ ID NO: 967934 - DNA, 33 bp, Homo sapien
ctgtctagtaagatgatggaaattttcgtgacc

SEQ ID NO: 967935 - DNA, 33 bp, Homo sapien
gttttgttgtcggccaaagagcagttcagcaac

SEQ ID NO: 967936 - DNA, 33 bp, Homo sapien
gttttgttgtcggccagagagcagttcagcaac

SEQ ID NO: 967937 - DNA, 33 bp, Homo sapien
gagttctgtaaagttcaatcagatccatttggc

SEQ ID NO: 967938 - DNA, 33 bp, Homo sapien
gagttctgtaaagttcgatcagatccatttggc

SEQ ID NO: 967939 - DNA, 33 bp, Homo sapien
ggtcatgctggaactcagagtagggtgtgtgtg

SEQ ID NO: 967940 - DNA, 33 bp, Homo sapien
ggtcatgctggaactcggagtagggtgtgtgtg

SEQ ID NO: 967941 - DNA, 33 bp, Homo sapien
ctctgcctgaaaattgcatcatctgttgatagt

SEQ ID NO: 967942 - DNA, 33 bp, Homo sapien
ctctgcctgaaaattggatcatctgttgatagt

SEQ ID NO: 967943 - DNA, 33 bp, Homo sapien
gagactgccttcgccacgacacactatcaacag

SEQ ID NO: 967944 - DNA, 33 bp, Homo sapien
gagactgccttcgccatgacacactatcaacag

SEQ ID NO: 967945 - DNA, 33 bp, Homo sapien
catgttttggtttgcaacataacagtcttgggt

SEQ ID NO: 967946 - DNA, 33 bp, Homo sapien
catgttttggtttgcagcataacagtcttgggt

SEQ ID NO: 967947 - DNA, 33 bp, Homo sapien
ggtgcttcccccagcaagtctagcatagagagt

SEQ ID NO: 967948 - DNA, 33 bp, Homo sapien
ggtgcttcccccagcaggtctagcatagagagt

SEQ ID NO: 967949 - DNA, 33 bp, Homo sapien
ccctcttaaagttgacacagaccaactgtttgc

SEQ ID NO: 967950 - DNA, 33 bp, Homo sapien
ccctcttaaagttgactcagaccaactgtttgc

SEQ ID NO: 967951 - DNA, 33 bp, Homo sapien
acacagaatactattcccctaaaaggctctatt

SEQ ID NO: 967952 - DNA, 33 bp, Homo sapien
acacagaatactattctcctaaaaggctctatt

SEQ ID NO: 967953 - DNA, 33 bp, Homo sapien
gcattattactcatacaacaacaaagtccatga

SEQ ID NO: 967954 - DNA, 33 bp, Homo sapien
gcattattactcatacgacaacaaagtccatga

SEQ ID NO: 967955 - DNA, 33 bp, Homo sapien
ttctctgtaagttctcactttagcaaaaaatgc

SEQ ID NO: 967956 - DNA, 33 bp, Homo sapien
ttctctgtaagttctctctttagcaaaaaatgc

SEQ ID NO: 967957 - DNA, 33 bp, Homo sapien
agaaattatactgggcaaaagtatcagttaata

SEQ ID NO: 967958 - DNA, 33 bp, Homo sapien
agaaattatactgggcgaaagtatcagttaata

SEQ ID NO: 967959 - DNA, 33 bp, Homo sapien
ttcttccaccctgagacagatggactgcctaga

SEQ ID NO: 967960 - DNA, 33 bp, Homo sapien
ttcttccaccctgagagagatggactgcctaga

SEQ ID NO: 967961 - DNA, 33 bp, Homo sapien
tggtttatagttcttacggtcatgactaggttt

SEQ ID NO: 967962 - DNA, 33 bp, Homo sapien
tggtttatagttcttatggtcatgactaggttt

SEQ ID NO: 967963 - DNA, 33 bp, Homo sapien
ataaaaccagcacagaaacatttttcagggtgg

SEQ ID NO: 967964 - DNA, 33 bp, Homo sapien
ataaaaccagcacagatacatttttcagggtgg

SEQ ID NO: 967965 - DNA, 33 bp, Homo sapien
acactccagaccaggacgtaagcaagacaatcc

SEQ ID NO: 967966 - DNA, 33 bp, Homo sapien
acactccagaccaggatgtaagcaagacaatcc

SEQ ID NO: 967967 - DNA, 33 bp, Homo sapien
gggtagaaagtatacaaaaatgtttgacactgt

SEQ ID NO: 967968 - DNA, 33 bp, Homo sapien
gggtagaaagtatacagaaatgtttgacactgt

SEQ ID NO: 967969 - DNA, 33 bp, Homo sapien
ggctgtgtattggcacactttgagatgtttagg

SEQ ID NO: 967970 - DNA, 33 bp, Homo sapien
ggctgtgtattggcacgctttgagatgtttagg

SEQ ID NO: 967971 - DNA, 33 bp, Homo sapien
actttatactgttgaccggtaagaattctttgt

SEQ ID NO: 967972 - DNA, 33 bp, Homo sapien
actttatactgttgactggtaagaattctttgt

SEQ ID NO: 967973 - DNA, 33 bp, Homo sapien
aatgtcaggaagctaaaaattattagagcattc

SEQ ID NO: 967974 - DNA, 33 bp, Homo sapien
aatgtcaggaagctaagaattattagagcattc

SEQ ID NO: 967975 - DNA, 33 bp, Homo sapien
gaatggtataagaaggaacatatggccttcagc

SEQ ID NO: 967976 - DNA, 33 bp, Homo sapien
gaatggtataagaagggacatatggccttcagc

SEQ ID NO: 967977 - DNA, 33 bp, Homo sapien
tatatttacgccagacagactttgccagtacaa

SEQ ID NO: 967978 - DNA, 33 bp, Homo sapien
tatatttacgccagacggactttgccagtacaa

SEQ ID NO: 967979 - DNA, 33 bp, Homo sapien
tccgaagtcctcctgggcaatatcggcctgggc

SEQ ID NO: 967980 - DNA, 33 bp, Homo sapien
tccgaagtcctcctggtcaatatcggcctgggc

SEQ ID NO: 967981 - DNA, 33 bp, Homo sapien
ttactgtggaattgaacgccagtggcccccagc

SEQ ID NO: 967982 - DNA, 33 bp, Homo sapien
ttactgtggaattgaatgccagtggcccccagc

SEQ ID NO: 967983 - DNA, 33 bp, Homo sapien
agattcttttaaaaaacgagatcttgcctgaac

SEQ ID NO: 967984 - DNA, 33 bp, Homo sapien
agattcttttaaaaaatgagatcttgcctgaac

SEQ ID NO: 967985 - DNA, 33 bp, Homo sapien
gataacttgaaagttacatggtcatcattttaa

SEQ ID NO: 967986 - DNA, 33 bp, Homo sapien
gataacttgaaagttatatggtcatcattttaa

SEQ ID NO: 967987 - DNA, 33 bp, Homo sapien
ataacccccaaattgaaacacagattcaaagca

SEQ ID NO: 967988 - DNA, 33 bp, Homo sapien
ataacccccaaattgatacacagattcaaagca

SEQ ID NO: 967989 - DNA, 33 bp, Homo sapien
taaaggttgctgtctcaattatcatctttttca

SEQ ID NO: 967990 - DNA, 33 bp, Homo sapien
taaaggttgctgtctcgattatcatctttttca

SEQ ID NO: 967991 - DNA, 33 bp, Homo sapien
ggtctggataaataaaagatctggtttgatttg

SEQ ID NO: 967992 - DNA, 33 bp, Homo sapien
ggtctggataaataaaggatctggtttgatttg

SEQ ID NO: 967993 - DNA, 33 bp, Homo sapien
cagtaactattatccactgagccactccaagtg

SEQ ID NO: 967994 - DNA, 33 bp, Homo sapien
cagtaactattatccagtgagccactccaagtg

SEQ ID NO: 967995 - DNA, 33 bp, Homo sapien
tctttcaccttcttataacgtaatcttgggcaa

SEQ ID NO: 967996 - DNA, 33 bp, Homo sapien
tctttcaccttcttatgacgtaatcttgggcaa

SEQ ID NO: 967997 - DNA, 33 bp, Homo sapien
gcagacagcttccaaaatgtagtgtaggtttaa

SEQ ID NO: 967998 - DNA, 33 bp, Homo sapien
gcagacagcttccaaagtgtagtgtaggtttaa

SEQ ID NO: 967999 - DNA, 33 bp, Homo sapien
cttgtccacatagccaataaatagcagggtgaa

SEQ ID NO: 968000 - DNA, 33 bp, Homo sapien
cttgtccacatagccagtaaatagcagggtgaa

SEQ ID NO: 968001 - DNA, 33 bp, Homo sapien
attactttcagataaccagaatgatgagtaaaa

SEQ ID NO: 968002 - DNA, 33 bp, Homo sapien
attactttcagataacgagaatgatgagtaaaa

SEQ ID NO: 968003 - DNA, 33 bp, Homo sapien
gtgaagggcccccataactagaattgagtggca

SEQ ID NO: 968004 - DNA, 33 bp, Homo sapien
gtgaagggcccccatagctagaattgagtggca

SEQ ID NO: 968005 - DNA, 33 bp, Homo sapien
gtccattattgtagacaaaaattactctaatga

SEQ ID NO: 968006 - DNA, 33 bp, Homo sapien
gtccattattgtagacgaaaattactctaatga

SEQ ID NO: 968007 - DNA, 33 bp, Homo sapien
atggtgtttctttcaacggactgtgagctcctc

SEQ ID NO: 968008 - DNA, 33 bp, Homo sapien
atggtgtttctttcaatggactgtgagctcctc

SEQ ID NO: 968009 - DNA, 33 bp, Homo sapien
tgtgcacaatcactacagatttgaatgaggccc

SEQ ID NO: 968010 - DNA, 33 bp, Homo sapien
tgtgcacaatcactacggatttgaatgaggccc

SEQ ID NO: 968011 - DNA, 33 bp, Homo sapien
gagcaaggagaaaaaagtgcacggggctagagg

SEQ ID NO: 968012 - DNA, 33 bp, Homo sapien
gagcaaggagaaaaaattgcacggggctagagg

SEQ ID NO: 968013 - DNA, 33 bp, Homo sapien
tgtttatcacatggtagccttctaaaaaaccaa

SEQ ID NO: 968014 - DNA, 33 bp, Homo sapien
tgtttatcacatggtatccttctaaaaaaccaa

SEQ ID NO: 968015 - DNA, 33 bp, Homo sapien
cttacacatggacaagcagaaaagagggcatat

SEQ ID NO: 968016 - DNA, 33 bp, Homo sapien
cttacacatggacaagtagaaaagagggcatat

SEQ ID NO: 968017 - DNA, 33 bp, Homo sapien
tgctctgaaccactaactatgctgcctacagtc

SEQ ID NO: 968018 - DNA, 33 bp, Homo sapien
tgctctgaaccactaattatgctgcctacagtc

SEQ ID NO: 968019 - DNA, 33 bp, Homo sapien
aatacaaactaagctacgctgataaattatttt

SEQ ID NO: 968020 - DNA, 33 bp, Homo sapien
aatacaaactaagctatgctgataaattatttt

SEQ ID NO: 968021 - DNA, 33 bp, Homo sapien
cagagaggttagaagactccaagagaaagaatt

SEQ ID NO: 968022 - DNA, 33 bp, Homo sapien
cagagaggttagaagattccaagagaaagaatt

SEQ ID NO: 968023 - DNA, 33 bp, Homo sapien
ctcagtgagaagataaaataggagccttcaagt

SEQ ID NO: 968024 - DNA, 33 bp, Homo sapien
ctcagtgagaagataatataggagccttcaagt

SEQ ID NO: 968025 - DNA, 33 bp, Homo sapien
taaaaccaagataaccactgctttgcttgctct

SEQ ID NO: 968026 - DNA, 33 bp, Homo sapien
taaaaccaagataaccgctgctttgcttgctct

SEQ ID NO: 968027 - DNA, 33 bp, Homo sapien
ctatgaaacttggtaagaaaaacattcaacaga

SEQ ID NO: 968028 - DNA, 33 bp, Homo sapien
ctatgaaacttggtaataaaaacattcaacaga

SEQ ID NO: 968029 - DNA, 33 bp, Homo sapien
tatatatttgtatgaacaaagaggacaaacaat

SEQ ID NO: 968030 - DNA, 33 bp, Homo sapien
tatatatttgtatgaataaagaggacaaacaat

SEQ ID NO: 968031 - DNA, 33 bp, Homo sapien
tatgtgaccagcaaaaatgaggtttatgttcaa

SEQ ID NO: 968032 - DNA, 33 bp, Homo sapien
tatgtgaccagcaaaagtgaggtttatgttcaa

SEQ ID NO: 968033 - DNA, 33 bp, Homo sapien
aacagtaattacctcacctaccaacatatggcc

SEQ ID NO: 968034 - DNA, 33 bp, Homo sapien
aacagtaattacctcatctaccaacatatggcc

SEQ ID NO: 968035 - DNA, 33 bp, Homo sapien
actgtctggctgaacaacctaaggtgctttaaa

SEQ ID NO: 968036 - DNA, 33 bp, Homo sapien
actgtctggctgaacatcctaaggtgctttaaa

SEQ ID NO: 968037 - DNA, 33 bp, Homo sapien
tattagttagtgaaaactttctcaacaacaact

SEQ ID NO: 968038 - DNA, 33 bp, Homo sapien
tattagttagtgaaaagtttctcaacaacaact

SEQ ID NO: 968039 - DNA, 33 bp, Homo sapien
ggaggtttaattacacaaatggactgggaattc

SEQ ID NO: 968040 - DNA, 33 bp, Homo sapien
ggaggtttaattacacgaatggactgggaattc

SEQ ID NO: 968041 - DNA, 33 bp, Homo sapien
ccaaaatgaagagagacgtcaactgtaggaacc

SEQ ID NO: 968042 - DNA, 33 bp, Homo sapien
ccaaaatgaagagagatgtcaactgtaggaacc

SEQ ID NO: 968043 - DNA, 33 bp, Homo sapien
tctccacatgttcagacgcatcaggtattttat

SEQ ID NO: 968044 - DNA, 33 bp, Homo sapien
tctccacatgttcagatgcatcaggtattttat

SEQ ID NO: 968045 - DNA, 33 bp, Homo sapien
caaaactacgaaatcaatgagctccaaagtgaa

SEQ ID NO: 968046 - DNA, 33 bp, Homo sapien
caaaactacgaaatcagtgagctccaaagtgaa

SEQ ID NO: 968047 - DNA, 33 bp, Homo sapien
caataactcatggatcaaagaaaaaatcacaag

SEQ ID NO: 968048 - DNA, 33 bp, Homo sapien
caataactcatggatcgaagaaaaaatcacaag

SEQ ID NO: 968049 - DNA, 33 bp, Homo sapien
ttctatgaagatgctcaaatattctgcaaaatt

SEQ ID NO: 968050 - DNA, 33 bp, Homo sapien
ttctatgaagatgctcgaatattctgcaaaatt

SEQ ID NO: 968051 - DNA, 33 bp, Homo sapien
tgctaatccaagtagaacaaaaaattaagtacc

SEQ ID NO: 968052 - DNA, 33 bp, Homo sapien
tgctaatccaagtagagcaaaaaattaagtacc

SEQ ID NO: 968053 - DNA, 33 bp, Homo sapien
tccaaatgaacaagaacacactgaagtggattg

SEQ ID NO: 968054 - DNA, 33 bp, Homo sapien
tccaaatgaacaagaatacactgaagtggattg

SEQ ID NO: 968055 - DNA, 33 bp, Homo sapien
cacttaggtaggaaaaaatcattggctaagttc

SEQ ID NO: 968056 - DNA, 33 bp, Homo sapien
cacttaggtaggaaaatatcattggctaagttc

SEQ ID NO: 968057 - DNA, 33 bp, Homo sapien
gaatttccagaagctaaattttacaacctctgc

SEQ ID NO: 968058 - DNA, 33 bp, Homo sapien
gaatttccagaagctacattttacaacctctgc

SEQ ID NO: 968059 - DNA, 33 bp, Homo sapien
aaacccagtttggagcagaaacttgctcaaaga

SEQ ID NO: 968060 - DNA, 33 bp, Homo sapien
aaacccagtttggagcggaaacttgctcaaaga

SEQ ID NO: 968061 - DNA, 33 bp, Homo sapien
ctgtaaaaaacactcaacatttaacagttaaca

SEQ ID NO: 968062 - DNA, 33 bp, Homo sapien
ctgtaaaaaacactcagcatttaacagttaaca

SEQ ID NO: 968063 - DNA, 33 bp, Homo sapien
caataaaggactaaaacataagctctgtaaaaa

SEQ ID NO: 968064 - DNA, 33 bp, Homo sapien
caataaaggactaaaatataagctctgtaaaaa

SEQ ID NO: 968065 - DNA, 33 bp, Homo sapien
ccaacaaacgtataaaaaagctcatcatcactg

SEQ ID NO: 968066 - DNA, 33 bp, Homo sapien
ccaacaaacgtataaacaagctcatcatcactg

SEQ ID NO: 968067 - DNA, 33 bp, Homo sapien
gacaaccatcttaaagcctctgaaaatggtctt

SEQ ID NO: 968068 - DNA, 33 bp, Homo sapien
gacaaccatcttaaagtctctgaaaatggtctt

SEQ ID NO: 968069 - DNA, 33 bp, Homo sapien
tcagtcttccccagtacgaaaattgctcaaaga

SEQ ID NO: 968070 - DNA, 33 bp, Homo sapien
tcagtcttccccagtatgaaaattgctcaaaga

SEQ ID NO: 968071 - DNA, 33 bp, Homo sapien
cactatcatttctaccaatgaactagtcctcca

SEQ ID NO: 968072 - DNA, 33 bp, Homo sapien
cactatcatttctaccgatgaactagtcctcca

SEQ ID NO: 968073 - DNA, 33 bp, Homo sapien
gcctgggagagacaacaaaaccctgtctaaaaa

SEQ ID NO: 968074 - DNA, 33 bp, Homo sapien
gcctgggagagacaacgaaaccctgtctaaaaa

SEQ ID NO: 968075 - DNA, 33 bp, Homo sapien
ttctcatatattttcactacgtgggaaagggta

SEQ ID NO: 968076 - DNA, 33 bp, Homo sapien
ttctcatatattttcattacgtgggaaagggta

SEQ ID NO: 968077 - DNA, 33 bp, Homo sapien
ctgacaaaaacgagcaacaggaaaaagactccc

SEQ ID NO: 968078 - DNA, 33 bp, Homo sapien
ctgacaaaaacgagcatcaggaaaaagactccc

SEQ ID NO: 968079 - DNA, 33 bp, Homo sapien
actaaaggcgtaagtacgaaggtagcaacatgg

SEQ ID NO: 968080 - DNA, 33 bp, Homo sapien
actaaaggcgtaagtatgaaggtagcaacatgg

SEQ ID NO: 968081 - DNA, 33 bp, Homo sapien
atgttgattacatatgcaaacggtgatatcgtg

SEQ ID NO: 968082 - DNA, 33 bp, Homo sapien
atgttgattacatatggaaacggtgatatcgtg

SEQ ID NO: 968083 - DNA, 33 bp, Homo sapien
acactgtattgaacaacggcgtgttagacactt

SEQ ID NO: 968084 - DNA, 33 bp, Homo sapien
acactgtattgaacaatggcgtgttagacactt

SEQ ID NO: 968085 - DNA, 33 bp, Homo sapien
tgagatcttgtcattcacaataaaaggatagaa

SEQ ID NO: 968086 - DNA, 33 bp, Homo sapien
tgagatcttgtcattcgcaataaaaggatagaa

SEQ ID NO: 968087 - DNA, 33 bp, Homo sapien
actgatttgcaccttaaagaaggatgtaaaagt

SEQ ID NO: 968088 - DNA, 33 bp, Homo sapien
actgatttgcaccttagagaaggatgtaaaagt

SEQ ID NO: 968089 - DNA, 33 bp, Homo sapien
gaaatggttgtgagtacatatttcccattctaa

SEQ ID NO: 968090 - DNA, 33 bp, Homo sapien
gaaatggttgtgagtatatatttcccattctaa

SEQ ID NO: 968091 - DNA, 33 bp, Homo sapien
agtcagtttgacacatcatatgaacagaatgaa

SEQ ID NO: 968092 - DNA, 33 bp, Homo sapien
agtcagtttgacacatgatatgaacagaatgaa

SEQ ID NO: 968093 - DNA, 33 bp, Homo sapien
ccaatgaccagaaataagtagcactgtacagct

SEQ ID NO: 968094 - DNA, 33 bp, Homo sapien
ccaatgaccagaaataggtagcactgtacagct

SEQ ID NO: 968095 - DNA, 33 bp, Homo sapien
atttctaggtatccagcatagcaattactgcca

SEQ ID NO: 968096 - DNA, 33 bp, Homo sapien
atttctaggtatccaggatagcaattactgcca

SEQ ID NO: 968097 - DNA, 33 bp, Homo sapien
gcaggtatacagtagacgtggatgaacaaatga

SEQ ID NO: 968098 - DNA, 33 bp, Homo sapien
gcaggtatacagtagatgtggatgaacaaatga

SEQ ID NO: 968099 - DNA, 33 bp, Homo sapien
tggatcccagactggcacatcttaccactctgg

SEQ ID NO: 968100 - DNA, 33 bp, Homo sapien
tggatcccagactggcgcatcttaccactctgg

SEQ ID NO: 968101 - DNA, 33 bp, Homo sapien
gacctcaccagtacacaatatatgcatgaaaga

SEQ ID NO: 968102 - DNA, 33 bp, Homo sapien
gacctcaccagtacaccatatatgcatgaaaga

SEQ ID NO: 968103 - DNA, 33 bp, Homo sapien
catacctactactaacacgtgtcattaacacca

SEQ ID NO: 968104 - DNA, 33 bp, Homo sapien
catacctactactaacgcgtgtcattaacacca

SEQ ID NO: 968105 - DNA, 33 bp, Homo sapien
tcaaatgctagttctgaaacttcatattgatat

SEQ ID NO: 968106 - DNA, 33 bp, Homo sapien
tcaaatgctagttctgcaacttcatattgatat

SEQ ID NO: 968107 - DNA, 33 bp, Homo sapien
actgtttgacatagaagtacgtgtggtgtctca

SEQ ID NO: 968108 - DNA, 33 bp, Homo sapien
actgtttgacatagaattacgtgtggtgtctca

SEQ ID NO: 968109 - DNA, 33 bp, Homo sapien
taaggagcaaatatcaatatgtggcttgattgt

SEQ ID NO: 968110 - DNA, 33 bp, Homo sapien
taaggagcaaatatcagtatgtggcttgattgt

SEQ ID NO: 968111 - DNA, 33 bp, Homo sapien
cagctaattagtctgaacattggttaagagtat

SEQ ID NO: 968112 - DNA, 33 bp, Homo sapien
cagctaattagtctgagcattggttaagagtat

SEQ ID NO: 968113 - DNA, 33 bp, Homo sapien
taattttacatattccagaagtcctcctagtgt

SEQ ID NO: 968114 - DNA, 33 bp, Homo sapien
taattttacatattccggaagtcctcctagtgt

SEQ ID NO: 968115 - DNA, 33 bp, Homo sapien
aattggggatgatgctaagaactcctagttaaa

SEQ ID NO: 968116 - DNA, 33 bp, Homo sapien
aattggggatgatgctgagaactcctagttaaa

SEQ ID NO: 968117 - DNA, 33 bp, Homo sapien
tttctaagtcctcatagcagctatttcaaaatt

SEQ ID NO: 968118 - DNA, 33 bp, Homo sapien
tttctaagtcctcatatcagctatttcaaaatt

SEQ ID NO: 968119 - DNA, 33 bp, Homo sapien
tcattttgtgaccacacggcctaatttccaaat

SEQ ID NO: 968120 - DNA, 33 bp, Homo sapien
tcattttgtgaccacatggcctaatttccaaat

SEQ ID NO: 968121 - DNA, 33 bp, Homo sapien
ttttaactctaatgtaacaaccatttttaaaaa

SEQ ID NO: 968122 - DNA, 33 bp, Homo sapien
ttttaactctaatgtagcaaccatttttaaaaa

SEQ ID NO: 968123 - DNA, 33 bp, Homo sapien
ttaggagggagtaatcaagattgagcactagga

SEQ ID NO: 968124 - DNA, 33 bp, Homo sapien
ttaggagggagtaatcgagattgagcactagga

SEQ ID NO: 968125 - DNA, 33 bp, Homo sapien; identical to SEQ ID NO: 968123

SEQ ID NO: 968126 - DNA, 33 bp, Homo sapien; identical to SEQ ID NO: 968124

SEQ ID NO: 968127 - DNA, 33 bp, Homo sapien
ctttgctttctaccagactaagaaaataaagca

SEQ ID NO: 968128 - DNA, 33 bp, Homo sapien
ctttgctttctaccagtctaagaaaataaagca

SEQ ID NO: 968129 - DNA, 33 bp, Homo sapien
tacacgaacaacaaaccatctgaagaagaaatc

SEQ ID NO: 968130 - DNA, 33 bp, Homo sapien
tacacgaacaacaaactatctgaagaagaaatc

SEQ ID NO: 968131 - DNA, 33 bp, Homo sapien
gcagcccttaaatagccagataaaggtgcagcc

SEQ ID NO: 968132 - DNA, 33 bp, Homo sapien
gcagcccttaaatagctagataaaggtgcagcc

SEQ ID NO: 968133 - DNA, 33 bp, Homo sapien
tcaaacacaagttaaaaagtgctattatgacta

SEQ ID NO: 968134 - DNA, 33 bp, Homo sapien
tcaaacacaagttaaagagtgctattatgacta

SEQ ID NO: 968135 - DNA, 33 bp, Homo sapien
tttaaatgatctttctaaatcttccatgagtgg

SEQ ID NO: 968136 - DNA, 33 bp, Homo sapien
tttaaatgatctttctgaatcttccatgagtgg

SEQ ID NO: 968137 - DNA, 33 bp, Homo sapien
gaggcatcagacatcaagaagaagagaactagc

SEQ ID NO: 968138 - DNA, 33 bp, Homo sapien
gaggcatcagacatcacgaagaagagaactagc

SEQ ID NO: 968139 - DNA, 33 bp, Homo sapien
ttgggatacatcattaagcaaaacaggcaaaaa

SEQ ID NO: 968140 - DNA, 33 bp, Homo sapien
ttgggatacatcattacgcaaaacaggcaaaaa

SEQ ID NO: 968141 - DNA, 33 bp, Homo sapien
atatacgggaactcgaggtactatttttaactt

SEQ ID NO: 968142 - DNA, 33 bp, Homo sapien
atatacgggaactcgatgtactatttttaactt

SEQ ID NO: 968143 - DNA, 33 bp, Homo sapien
tgtctagttccaaatactatctgggctctctca

SEQ ID NO: 968144 - DNA, 33 bp, Homo sapien
tgtctagttccaaatattatctgggctctctca

SEQ ID NO: 968145 - DNA, 33 bp, Homo sapien
tgaggtaggaatcaaacgataaagcatcactgg

SEQ ID NO: 968146 - DNA, 33 bp, Homo sapien
tgaggtaggaatcaaatgataaagcatcactgg

SEQ ID NO: 968147 - DNA, 33 bp, Homo sapien
gtagaagatatctacaaggaagcaggcaaatct

SEQ ID NO: 968148 - DNA, 33 bp, Homo sapien
gtagaagatatctacagggaagcaggcaaatct

SEQ ID NO: 968149 - DNA, 33 bp, Homo sapien
tgaagaatgctttctcacattttagtaccataa

SEQ ID NO: 968150 - DNA, 33 bp, Homo sapien
tgaagaatgctttctcccattttagtaccataa

SEQ ID NO: 968151 - DNA, 33 bp, Homo sapien
atactgaaagtgttcacagagtcacaaaagact

SEQ ID NO: 968152 - DNA, 33 bp, Homo sapien
atactgaaagtgttcagagagtcacaaaagact

SEQ ID NO: 968153 - DNA, 33 bp, Homo sapien
tgattgagaaaagcatcagaaaggaacaaaagt

SEQ ID NO: 968154 - DNA, 33 bp, Homo sapien
tgattgagaaaagcattagaaaggaacaaaagt

SEQ ID NO: 968155 - DNA, 33 bp, Homo sapien
tgaggcttgaggcaaaatggattacacattttt

SEQ ID NO: 968156 - DNA, 33 bp, Homo sapien
tgaggcttgaggcaaagtggattacacattttt

SEQ ID NO: 968157 - DNA, 33 bp, Homo sapien
ctgctgtagcatcaaaagtgtgctggcaaatct

SEQ ID NO: 968158 - DNA, 33 bp, Homo sapien
ctgctgtagcatcaaaggtgtgctggcaaatct

SEQ ID NO: 968159 - DNA, 33 bp, Homo sapien
gttcaaagcaacaagacattggtgttccttaga

SEQ ID NO: 968160 - DNA, 33 bp, Homo sapien
gttcaaagcaacaagatattggtgttccttaga

SEQ ID NO: 968161 - DNA, 33 bp, Homo sapien
attctgagtacaaaaaattcttactatcgtgtg

SEQ ID NO: 968162 - DNA, 33 bp, Homo sapien
attctgagtacaaaaagttcttactatcgtgtg

SEQ ID NO: 968163 - DNA, 33 bp, Homo sapien
aactgtgagacacactaaactgctggtgtccat

SEQ ID NO: 968164 - DNA, 33 bp, Homo sapien
aactgtgagacacactgaactgctggtgtccat

SEQ ID NO: 968165 - DNA, 33 bp, Homo sapien
gtgagcaaagtccaaaatgccacaggagcacag

SEQ ID NO: 968166 - DNA, 33 bp, Homo sapien
gtgagcaaagtccaaagtgccacaggagcacag

SEQ ID NO: 968167 - DNA, 33 bp, Homo sapien
aatcccctcgtcttaactagatgtcttaaaaat

SEQ ID NO: 968168 - DNA, 33 bp, Homo sapien
aatcccctcgtcttaattagatgtcttaaaaat

SEQ ID NO: 968169 - DNA, 33 bp, Homo sapien
tctttgtttcttgcacaaatggaaatagacttt

SEQ ID NO: 968170 - DNA, 33 bp, Homo sapien
tctttgtttcttgcactaatggaaatagacttt

SEQ ID NO: 968171 - DNA, 33 bp, Homo sapien
ttaagaagctactcacaggatttcatttatgct

SEQ ID NO: 968172 - DNA, 33 bp, Homo sapien
ttaagaagctactcacgggatttcatttatgct

SEQ ID NO: 968173 - DNA, 33 bp, Homo sapien
caatgtgtttggttaccatgtgcatgtcataat

SEQ ID NO: 968174 - DNA, 33 bp, Homo sapien
caatgtgtttggttactatgtgcatgtcataat

SEQ ID NO: 968175 - DNA, 33 bp, Homo sapien
tccattaggcaaatgaaccattgtttttctctg

SEQ ID NO: 968176 - DNA, 33 bp, Homo sapien
tccattaggcaaatgacccattgtttttctctg

SEQ ID NO: 968177 - DNA, 33 bp, Homo sapien
gtcagttcttttattcactcaagcaaacattta

SEQ ID NO: 968178 - DNA, 33 bp, Homo sapien
gtcagttcttttattcgctcaagcaaacattta

SEQ ID NO: 968179 - DNA, 33 bp, Homo sapien
tacattcaagagaataagacatgtcctttgaca

SEQ ID NO: 968180 - DNA, 33 bp, Homo sapien
tacattcaagagaatacgacatgtcctttgaca

SEQ ID NO: 968181 - DNA, 33 bp, Homo sapien
aagatatatccctaccactcaagtaactaaaat

SEQ ID NO: 968182 - DNA, 33 bp, Homo sapien
aagatatatccctaccgctcaagtaactaaaat

SEQ ID NO: 968183 - DNA, 33 bp, Homo sapien
tttcctgctttctgtacacaacgctgttacagc

SEQ ID NO: 968184 - DNA, 33 bp, Homo sapien
tttcctgctttctgtatacaacgctgttacagc

SEQ ID NO: 968185 - DNA, 33 bp, Homo sapien
ctgttacagcaattacaaaactgttgcaactat

SEQ ID NO: 968186 - DNA, 33 bp, Homo sapien
ctgttacagcaattaccaaactgttgcaactat

SEQ ID NO: 968187 - DNA, 33 bp, Homo sapien
ttatagaaaagtaaacaaaatccatagaaatca

SEQ ID NO: 968188 - DNA, 33 bp, Homo sapien
ttatagaaaagtaaaccaaatccatagaaatca

SEQ ID NO: 968189 - DNA, 33 bp, Homo sapien
gacgcttttatcctgaacaacttttaggtggcg

SEQ ID NO: 968190 - DNA, 33 bp, Homo sapien
gacgcttttatcctgaccaacttttaggtggcg

SEQ ID NO: 968191 - DNA, 33 bp, Homo sapien
acacaatctccagaaaattgcccttcatgtgga

SEQ ID NO: 968192 - DNA, 33 bp, Homo sapien
acacaatctccagaaagttgcccttcatgtgga

SEQ ID NO: 968193 - DNA, 33 bp, Homo sapien
tgatggctgagggaaagaaaccaatgaagaagg

SEQ ID NO: 968194 - DNA, 33 bp, Homo sapien
tgatggctgagggaaataaaccaatgaagaagg

SEQ ID NO: 968195 - DNA, 33 bp, Homo sapien
aaaatcagattttaaagttaactctctacaaaa

SEQ ID NO: 968196 - DNA, 33 bp, Homo sapien
aaaatcagattttaaatttaactctctacaaaa

SEQ ID NO: 968197 - DNA, 33 bp, Homo sapien
ttcctagtgagcagaaactatgctggttgtttt

SEQ ID NO: 968198 - DNA, 33 bp, Homo sapien
ttcctagtgagcagaagctatgctggttgtttt

SEQ ID NO: 968199 - DNA, 33 bp, Homo sapien
gcttctgcctccccaaactacaacttctgtctc

SEQ ID NO: 968200 - DNA, 33 bp, Homo sapien
gcttctgcctccccaagctacaacttctgtctc

SEQ ID NO: 968201 - DNA, 33 bp, Homo sapien
tgggatatttaagagaagaataggccataaggg

SEQ ID NO: 968202 - DNA, 33 bp, Homo sapien
tgggatatttaagagatgaataggccataaggg

SEQ ID NO: 968203 - DNA, 33 bp, Homo sapien
gaattatctgtgatgaaaaagacattatcacga

SEQ ID NO: 968204 - DNA, 33 bp, Homo sapien
gaattatctgtgatgagaaagacattatcacga

SEQ ID NO: 968205 - DNA, 33 bp, Homo sapien
aatgtgacatatttgacaatgacaacacaaagg

SEQ ID NO: 968206 - DNA, 33 bp, Homo sapien
aatgtgacatatttgataatgacaacacaaagg

SEQ ID NO: 968207 - DNA, 33 bp, Homo sapien
ttttcagttaatctggcatttgcagtaaacaag

SEQ ID NO: 968208 - DNA, 33 bp, Homo sapien
ttttcagttaatctggtatttgcagtaaacaag

SEQ ID NO: 968209 - DNA, 33 bp, Homo sapien
ataattgattcaaccacatttactatatagcca

SEQ ID NO: 968210 - DNA, 33 bp, Homo sapien
ataattgattcaaccagatttactatatagcca

SEQ ID NO: 968211 - DNA, 33 bp, Homo sapien
tgtggatgacaataacaaaccaccacaatcctc

SEQ ID NO: 968212 - DNA, 33 bp, Homo sapien
tgtggatgacaataactaaccaccacaatcctc

SEQ ID NO: 968213 - DNA, 33 bp, Homo sapien
ctcccctgagaaacaaaaggatcaattctgcag

SEQ ID NO: 968214 - DNA, 33 bp, Homo sapien
ctcccctgagaaacaagaggatcaattctgcag

SEQ ID NO: 968215 - DNA, 33 bp, Homo sapien
aaaagaagaatatcacagtgagggcagtggact

SEQ ID NO: 968216 - DNA, 33 bp, Homo sapien
aaaagaagaatatcacggtgagggcagtggact

SEQ ID NO: 968217 - DNA, 33 bp, Homo sapien
ccacctaagacccaaaagatcaaatgacttcac

SEQ ID NO: 968218 - DNA, 33 bp, Homo sapien
ccacctaagacccaaacgatcaaatgacttcac

SEQ ID NO: 968219 - DNA, 33 bp, Homo sapien
ttgggaacatttgttacagattttcaatgactg

SEQ ID NO: 968220 - DNA, 33 bp, Homo sapien
ttgggaacatttgttatagattttcaatgactg

SEQ ID NO: 968221 - DNA, 33 bp, Homo sapien
tggtaagataatatccaagagaaggtgatccac

SEQ ID NO: 968222 - DNA, 33 bp, Homo sapien
tggtaagataatatccgagagaaggtgatccac

SEQ ID NO: 968223 - DNA, 33 bp, Homo sapien
agaatgtaaacatatcgacagctactctggctt

SEQ ID NO: 968224 - DNA, 33 bp, Homo sapien
agaatgtaaacatatctacagctactctggctt

SEQ ID NO: 968225 - DNA, 33 bp, Homo sapien
cactggacatcatcgccagttattgccccatct

SEQ ID NO: 968226 - DNA, 33 bp, Homo sapien
cactggacatcatcgctagttattgccccatct

SEQ ID NO: 968227 - DNA, 33 bp, Homo sapien
cagctttaattgttacagaaaaccactttcttc

SEQ ID NO: 968228 - DNA, 33 bp, Homo sapien
cagctttaattgttacggaaaaccactttcttc

SEQ ID NO: 968229 - DNA, 33 bp, Homo sapien
ccaccctggactgtcaacgcctttgccctgcct

SEQ ID NO: 968230 - DNA, 33 bp, Homo sapien
ccaccctggactgtcagcgcctttgccctgcct

SEQ ID NO: 968231 - DNA, 33 bp, Homo sapien
tgttggattcagtccacgtcttgatgttatttc

SEQ ID NO: 968232 - DNA, 33 bp, Homo sapien
tgttggattcagtccaggtcttgatgttatttc

SEQ ID NO: 968233 - DNA, 33 bp, Homo sapien
tcatgaatttgctccaaaataccctctctattc

SEQ ID NO: 968234 - DNA, 33 bp, Homo sapien
tcatgaatttgctccataataccctctctattc

SEQ ID NO: 968235 - DNA, 33 bp, Homo sapien
ggatgaaaggctgtcacgtgagcaacagctgaa

SEQ ID NO: 968236 - DNA, 33 bp, Homo sapien
ggatgaaaggctgtcatgtgagcaacagctgaa

SEQ ID NO: 968237 - DNA, 33 bp, Homo sapien
taactctcatgctagtaaatagacgccccttat

SEQ ID NO: 968238 - DNA, 33 bp, Homo sapien
taactctcatgctagtgaatagacgccccttat

SEQ ID NO: 968239 - DNA, 33 bp, Homo sapien
tgaagcctgctagcaacgctcaagtctttctaa

SEQ ID NO: 968240 - DNA, 33 bp, Homo sapien
tgaagcctgctagcaatgctcaagtctttctaa

SEQ ID NO: 968241 - DNA, 33 bp, Homo sapien
attcgtttttggcttgaagactttggggagaaa

SEQ ID NO: 968242 - DNA, 33 bp, Homo sapien
attcgtttttggcttggagactttggggagaaa

SEQ ID NO: 968243 - DNA, 33 bp, Homo sapien
aatccatgctcctggccaccaaaccctactgcc

SEQ ID NO: 968244 - DNA, 33 bp, Homo sapien
aatccatgctcctggctaccaaaccctactgcc

SEQ ID NO: 968245 - DNA, 33 bp, Homo sapien
atagcttgatatttcccaccttgacagtggaga

SEQ ID NO: 968246 - DNA, 33 bp, Homo sapien
atagcttgatatttcctaccttgacagtggaga

SEQ ID NO: 968247 - DNA, 33 bp, Homo sapien
tggcaataacaatcacagggtttatggggaaaa

SEQ ID NO: 968248 - DNA, 33 bp, Homo sapien
tggcaataacaatcaccgggtttatggggaaaa

SEQ ID NO: 968249 - DNA, 33 bp, Homo sapien
tgtagaagctccatgcacctactttttgggggt

SEQ ID NO: 968250 - DNA, 33 bp, Homo sapien
tgtagaagctccatgcgcctactttttgggggt

SEQ ID NO: 968251 - DNA, 33 bp, Homo sapien
atctccattctttgcccacaaataacttccaaa

SEQ ID NO: 968252 - DNA, 33 bp, Homo sapien
atctccattctttgcctacaaataacttccaaa

SEQ ID NO: 968253 - DNA, 33 bp, Homo sapien
agaagcaatccacatgaaaagtaacagttaaag

SEQ ID NO: 968254 - DNA, 33 bp, Homo sapien
agaagcaatccacatggaaagtaacagttaaag

SEQ ID NO: 968255 - DNA, 33 bp, Homo sapien
tgcagcggtgtttggaataaaacattttgccaa

SEQ ID NO: 968256 - DNA, 33 bp, Homo sapien
tgcagcggtgtttggactaaaacattttgccaa

SEQ ID NO: 968257 - DNA, 33 bp, Homo sapien
agcagacagaatgacccggcctattgacatcag

SEQ ID NO: 968258 - DNA, 33 bp, Homo sapien
agcagacagaatgacctggcctattgacatcag

SEQ ID NO: 968259 - DNA, 33 bp, Homo sapien
ggatgtactcctttaaaccaaattaaagataaa

SEQ ID NO: 968260 - DNA, 33 bp, Homo sapien
ggatgtactcctttaagccaaattaaagataaa

SEQ ID NO: 968261 - DNA, 33 bp, Homo sapien
gccttgaagcacttcaaatctccatattgtagt

SEQ ID NO: 968262 - DNA, 33 bp, Homo sapien
gccttgaagcacttcagatctccatattgtagt

SEQ ID NO: 968263 - DNA, 33 bp, Homo sapien
tgacctcacaaggaaaagtgactatgggggcct

SEQ ID NO: 968264 - DNA, 33 bp, Homo sapien
tgacctcacaaggaaaggtgactatgggggcct

SEQ ID NO: 968265 - DNA, 33 bp, Homo sapien
cattttcctttgattaccatgttctagtcaatc

SEQ ID NO: 968266 - DNA, 33 bp, Homo sapien
cattttcctttgattatcatgttctagtcaatc

SEQ ID NO: 968267 - DNA, 33 bp, Homo sapien
aaggcaaatacccacacaagtgaagtaagtaag

SEQ ID NO: 968268 - DNA, 33 bp, Homo sapien
aaggcaaatacccacataagtgaagtaagtaag

SEQ ID NO: 968269 - DNA, 33 bp, Homo sapien
taagtgaataacaccacagagtcggttttagga

SEQ ID NO: 968270 - DNA, 33 bp, Homo sapien
taagtgaataacaccatagagtcggttttagga

SEQ ID NO: 968271 - DNA, 33 bp, Homo sapien
tagaattatagaaagtcaactcaaatcatctgg

SEQ ID NO: 968272 - DNA, 33 bp, Homo sapien
tagaattatagaaagtgaactcaaatcatctgg

SEQ ID NO: 968273 - DNA, 33 bp, Homo sapien
tagcctggcagctacaagaggaggcagaaaagg

SEQ ID NO: 968274 - DNA, 33 bp, Homo sapien
tagcctggcagctacaggaggaggcagaaaagg

SEQ ID NO: 968275 - DNA, 33 bp, Homo sapien
tttcctttccttttaaatccttggatgaatttt

SEQ ID NO: 968276 - DNA, 33 bp, Homo sapien
tttcctttccttttaagtccttggatgaatttt

SEQ ID NO: 968277 - DNA, 33 bp, Homo sapien
agaagggaagtgtaaaggattgttcttgattgg

SEQ ID NO: 968278 - DNA, 33 bp, Homo sapien
agaagggaagtgtaaatgattgttcttgattgg

SEQ ID NO: 968279 - DNA, 33 bp, Homo sapien
agtttctaacttggtccccaaattgcttattga

SEQ ID NO: 968280 - DNA, 33 bp, Homo sapien
agtttctaacttggtctccaaattgcttattga

SEQ ID NO: 968281 - DNA, 33 bp, Homo sapien
tcagactttagtcccaaattggaagctacacca

SEQ ID NO: 968282 - DNA, 33 bp, Homo sapien
tcagactttagtcccagattggaagctacacca

SEQ ID NO: 968283 - DNA, 33 bp, Homo sapien
aattcttgacaactataaaaggcttgtacagtc

SEQ ID NO: 968284 - DNA, 33 bp, Homo sapien
aattcttgacaactattaaaggcttgtacagtc

SEQ ID NO: 968285 - DNA, 33 bp, Homo sapien
cttcagaccatagcaacgcttgtggttttattt

SEQ ID NO: 968286 - DNA, 33 bp, Homo sapien
cttcagaccatagcaatgcttgtggttttattt

SEQ ID NO: 968287 - DNA, 33 bp, Homo sapien
gtccaatgtgcacttacaatgtggctattgagt

SEQ ID NO: 968288 - DNA, 33 bp, Homo sapien
gtccaatgtgcacttataatgtggctattgagt

SEQ ID NO: 968289 - DNA, 33 bp, Homo sapien
cacagaatcattactcaccaccctgagagctgg

SEQ ID NO: 968290 - DNA, 33 bp, Homo sapien
cacagaatcattactcgccaccctgagagctgg

SEQ ID NO: 968291 - DNA, 33 bp, Homo sapien
aataaggagacaagtacctgcaaggatagcaag

SEQ ID NO: 968292 - DNA, 33 bp, Homo sapien
aataaggagacaagtagctgcaaggatagcaag

SEQ ID NO: 968293 - DNA, 33 bp, Homo sapien
ccccagtacctcagaacgtttattgcatttgga

SEQ ID NO: 968294 - DNA, 33 bp, Homo sapien
ccccagtacctcagaatgtttattgcatttgga

SEQ ID NO: 968295 - DNA, 33 bp, Homo sapien
ctaacaggatgctcccactgtgattgagaatgt

SEQ ID NO: 968296 - DNA, 33 bp, Homo sapien
ctaacaggatgctcccgctgtgattgagaatgt

SEQ ID NO: 968297 - DNA, 33 bp, Homo sapien
ccattaggtttctgcactcctaaaattggagta

SEQ ID NO: 968298 - DNA, 33 bp, Homo sapien
ccattaggtttctgcattcctaaaattggagta

SEQ ID NO: 968299 - DNA, 33 bp, Homo sapien; identical to SEQ ID NO: 968297

SEQ ID NO: 968300 - DNA, 33 bp, Homo sapien; identical to SEQ ID NO: 968298

SEQ ID NO: 968301 - DNA, 33 bp, Homo sapien
gtagtgaagtgccataggtaccaactttctttt

SEQ ID NO: 968302 - DNA, 33 bp, Homo sapien
gtagtgaagtgccatatgtaccaactttctttt

SEQ ID NO: 968303 - DNA, 33 bp, Homo sapien; identical to SEQ ID NO: 968301

SEQ ID NO: 968304 - DNA, 33 bp, Homo sapien; identical to SEQ ID NO: 968302

SEQ ID NO: 968305 - DNA, 33 bp, Homo sapien
acttttcaaaacaaaccactacatcattatctc

SEQ ID NO: 968306 - DNA, 33 bp, Homo sapien
acttttcaaaacaaactactacatcattatctc

SEQ ID NO: 968307 - DNA, 33 bp, Homo sapien
gtgaagtatcccctgcacttgtaaaggatcttt

SEQ ID NO: 968308 - DNA, 33 bp, Homo sapien
gtgaagtatcccctgcgcttgtaaaggatcttt

SEQ ID NO: 968309 - DNA, 33 bp, Homo sapien
ccttaaattatttccaaccacttacctagtaaa

SEQ ID NO: 968310 - DNA, 33 bp, Homo sapien
ccttaaattatttccatccacttacctagtaaa

SEQ ID NO: 968311 - DNA, 33 bp, Homo sapien
ttctaatgtgtctgaaatgcataattgttagaa

SEQ ID NO: 968312 - DNA, 33 bp, Homo sapien
ttctaatgtgtctgaagtgcataattgttagaa

SEQ ID NO: 968313 - DNA, 33 bp, Homo sapien
tccatcaatgagttgcagatgaagaatatgagc

SEQ ID NO: 968314 - DNA, 33 bp, Homo sapien
tccatcaatgagttgctgatgaagaatatgagc

SEQ ID NO: 968315 - DNA, 33 bp, Homo sapien
ttgtaaacacctcctccaatgacaactgaaact

SEQ ID NO: 968316 - DNA, 33 bp, Homo sapien
ttgtaaacacctcctctaatgacaactgaaact

SEQ ID NO: 968317 - DNA, 33 bp, Homo sapien
acaatttttagagacccacatgacagtcacaat

SEQ ID NO: 968318 - DNA, 33 bp, Homo sapien
acaatttttagagacctacatgacagtcacaat

SEQ ID NO: 968319 - DNA, 33 bp, Homo sapien
gctaattcgttttctcacccattaggaggagag

SEQ ID NO: 968320 - DNA, 33 bp, Homo sapien
gctaattcgttttctcgcccattaggaggagag

SEQ ID NO: 968321 - DNA, 33 bp, Homo sapien
tccctcctggtttgtaccttaaacttgcttggc

SEQ ID NO: 968322 - DNA, 33 bp, Homo sapien
tccctcctggtttgtatcttaaacttgcttggc

SEQ ID NO: 968323 - DNA, 33 bp, Homo sapien
gttattttgtctggggaacttttcttgaaaaat

SEQ ID NO: 968324 - DNA, 33 bp, Homo sapien
gttattttgtctgggggacttttcttgaaaaat

SEQ ID NO: 968325 - DNA, 33 bp, Homo sapien
tgaacactgcaaaaaacgtcaaactgcacaaaa

SEQ ID NO: 968326 - DNA, 33 bp, Homo sapien
tgaacactgcaaaaaatgtcaaactgcacaaaa

SEQ ID NO: 968327 - DNA, 33 bp, Homo sapien
acagaaacttaacagaccaaacagtaagccaac

SEQ ID NO: 968328 - DNA, 33 bp, Homo sapien
acagaaacttaacagagcaaacagtaagccaac

SEQ ID NO: 968329 - DNA, 33 bp, Homo sapien
atgattgcgtgcaaagaccaagtagtttttcca

SEQ ID NO: 968330 - DNA, 33 bp, Homo sapien
atgattgcgtgcaaaggccaagtagtttttcca

SEQ ID NO: 968331 - DNA, 33 bp, Homo sapien
aggaagatgtgttattaaaccaggtagtccctc

SEQ ID NO: 968332 - DNA, 33 bp, Homo sapien
aggaagatgtgttatttaaccaggtagtccctc

SEQ ID NO: 968333 - DNA, 33 bp, Homo sapien
ggaggactaatcctgactatgaacaatggattt

SEQ ID NO: 968334 - DNA, 33 bp, Homo sapien
ggaggactaatcctgattatgaacaatggattt

SEQ ID NO: 968335 - DNA, 33 bp, Homo sapien
tcgacaatgaacattaagcacctatcagtatgc

SEQ ID NO: 968336 - DNA, 33 bp, Homo sapien
tcgacaatgaacattacgcacctatcagtatgc

SEQ ID NO: 968337 - DNA, 33 bp, Homo sapien
tggacagtttgaccaacgttagtctagcggcta

SEQ ID NO: 968338 - DNA, 33 bp, Homo sapien
tggacagtttgaccaatgttagtctagcggcta

SEQ ID NO: 968339 - DNA, 33 bp, Homo sapien
gcatcactccccgacaatgtcaggtaaatgagg

SEQ ID NO: 968340 - DNA, 33 bp, Homo sapien
gcatcactccccgacagtgtcaggtaaatgagg

SEQ ID NO: 968341 - DNA, 33 bp, Homo sapien
tcaagatatcaattccagagagggagcatctgc

SEQ ID NO: 968342 - DNA, 33 bp, Homo sapien
tcaagatatcaattccggagagggagcatctgc

SEQ ID NO: 968343 - DNA, 33 bp, Homo sapien
ttatatctgagtgaaacgggattttccatagca

SEQ ID NO: 968344 - DNA, 33 bp, Homo sapien
ttatatctgagtgaaatgggattttccatagca

SEQ ID NO: 968345 - DNA, 33 bp, Homo sapien
ttactttgctttaatacgtcaaggtagttaacc

SEQ ID NO: 968346 - DNA, 33 bp, Homo sapien
ttactttgctttaatatgtcaaggtagttaacc

SEQ ID NO: 968347 - DNA, 33 bp, Homo sapien
acctactacacacttcccttagtagaccttggt

SEQ ID NO: 968348 - DNA, 33 bp, Homo sapien
acctactacacacttctcttagtagaccttggt

SEQ ID NO: 968349 - DNA, 33 bp, Homo sapien
tgtccaggggtgcaacagctaggatgtatggta

SEQ ID NO: 968350 - DNA, 33 bp, Homo sapien
tgtccaggggtgcaactgctaggatgtatggta

SEQ ID NO: 968351 - DNA, 33 bp, Homo sapien
ttgagaattattcacaacccagctgatccttgg

SEQ ID NO: 968352 - DNA, 33 bp, Homo sapien
ttgagaattattcacatcccagctgatccttgg

SEQ ID NO: 968353 - DNA, 33 bp, Homo sapien
tgtgttccatgacaccagcatgtcttccttctg

SEQ ID NO: 968354 - DNA, 33 bp, Homo sapien
tgtgttccatgacaccggcatgtcttccttctg

SEQ ID NO: 968355 - DNA, 33 bp, Homo sapien
aacacaggaataaggaaaagaagaagtctatca

SEQ ID NO: 968356 - DNA, 33 bp, Homo sapien
aacacaggaataaggagaagaagaagtctatca

SEQ ID NO: 968357 - DNA, 33 bp, Homo sapien
gtcatgtcggcccaccaaaaggattgagttctt

SEQ ID NO: 968358 - DNA, 33 bp, Homo sapien
gtcatgtcggcccaccgaaaggattgagttctt

SEQ ID NO: 968359 - DNA, 33 bp, Homo sapien
ataaggtttaggacagaattctacctacatgta

SEQ ID NO: 968360 - DNA, 33 bp, Homo sapien
ataaggtttaggacagtattctacctacatgta

SEQ ID NO: 968361 - DNA, 33 bp, Homo sapien
actgagacagaatgcaagtattagcaaggggac

SEQ ID NO: 968362 - DNA, 33 bp, Homo sapien
actgagacagaatgcaggtattagcaaggggac

SEQ ID NO: 968363 - DNA, 33 bp, Homo sapien
cttaggcaaatggataactgtaatgttcatagc

SEQ ID NO: 968364 - DNA, 33 bp, Homo sapien
cttaggcaaatggatacctgtaatgttcatagc

SEQ ID NO: 968365 - DNA, 33 bp, Homo sapien
taaatctatcagatggaaaatcctgttacaaag

SEQ ID NO: 968366 - DNA, 33 bp, Homo sapien
taaatctatcagatgggaaatcctgttacaaag

SEQ ID NO: 968367 - DNA, 33 bp, Homo sapien
ttctcttcttggtatacagcagtacctgtccta

SEQ ID NO: 968368 - DNA, 33 bp, Homo sapien
ttctcttcttggtatagagcagtacctgtccta

SEQ ID NO: 968369 - DNA, 33 bp, Homo sapien
actattgagaagtccacctgctgccccagactg

SEQ ID NO: 968370 - DNA, 33 bp, Homo sapien
actattgagaagtccatctgctgccccagactg

SEQ ID NO: 968371 - DNA, 33 bp, Homo sapien
ataacatattccttaacggtagatgtgatttgt

SEQ ID NO: 968372 - DNA, 33 bp, Homo sapien
ataacatattccttaatggtagatgtgatttgt

SEQ ID NO: 968373 - DNA, 33 bp, Homo sapien
tcccctttactagctacagcctttgtgatcatt

SEQ ID NO: 968374 - DNA, 33 bp, Homo sapien
tcccctttactagctatagcctttgtgatcatt

SEQ ID NO: 968375 - DNA, 33 bp, Homo sapien
aagaaatcagcattagcagaaggaaaaataagg

SEQ ID NO: 968376 - DNA, 33 bp, Homo sapien
aagaaatcagcattagtagaaggaaaaataagg

SEQ ID NO: 968377 - DNA, 33 bp, Homo sapien
ccaaatattgccgtcaaaattagctaaaagaat

SEQ ID NO: 968378 - DNA, 33 bp, Homo sapien
ccaaatattgccgtcataattagctaaaagaat

SEQ ID NO: 968379 - DNA, 33 bp, Homo sapien
tgtttgttgaatggacacaaaatcttatttata

SEQ ID NO: 968380 - DNA, 33 bp, Homo sapien
tgtttgttgaatggacgcaaaatcttatttata

SEQ ID NO: 968381 - DNA, 33 bp, Homo sapien
agatgaggcagaagtacagaattgggatcattg

SEQ ID NO: 968382 - DNA, 33 bp, Homo sapien
agatgaggcagaagtatagaattgggatcattg

SEQ ID NO: 968383 - DNA, 33 bp, Homo sapien
caaaaaaacactaaaacgatacttctgagtcaa

SEQ ID NO: 968384 - DNA, 33 bp, Homo sapien
caaaaaaacactaaaatgatacttctgagtcaa

SEQ ID NO: 968385 - DNA, 33 bp, Homo sapien
gactgagatctggaccccaagtgatttaaaaga

SEQ ID NO: 968386 - DNA, 33 bp, Homo sapien
gactgagatctggaccgcaagtgatttaaaaga

SEQ ID NO: 968387 - DNA, 33 bp, Homo sapien
ctggagatgggcggtaacgatggtagcacaatg

SEQ ID NO: 968388 - DNA, 33 bp, Homo sapien
ctggagatgggcggtagcgatggtagcacaatg

SEQ ID NO: 968389 - DNA, 33 bp, Homo sapien
gaccacctgtgaacatgacaatctcagcaggtg

SEQ ID NO: 968390 - DNA, 33 bp, Homo sapien
gaccacctgtgaacattacaatctcagcaggtg

SEQ ID NO: 968391 - DNA, 33 bp, Homo sapien
atttttcctttcagaccgatctctgttaatttt

SEQ ID NO: 968392 - DNA, 33 bp, Homo sapien
atttttcctttcagactgatctctgttaatttt

SEQ ID NO: 968393 - DNA, 33 bp, Homo sapien
tacttatctagtctaacctactacctccttacc

SEQ ID NO: 968394 - DNA, 33 bp, Homo sapien
tacttatctagtctaatctactacctccttacc

SEQ ID NO: 968395 - DNA, 33 bp, Homo sapien
tgagtgaacaagacaactgaaagggtcccacag

SEQ ID NO: 968396 - DNA, 33 bp, Homo sapien
tgagtgaacaagacaattgaaagggtcccacag

SEQ ID NO: 968397 - DNA, 33 bp, Homo sapien
cagtcatatgctacaacaactcatgagcttcct

SEQ ID NO: 968398 - DNA, 33 bp, Homo sapien
cagtcatatgctacaagaactcatgagcttcct

SEQ ID NO: 968399 - DNA, 33 bp, Homo sapien
aactccccacgtccaacatcttttggttaaagc

SEQ ID NO: 968400 - DNA, 33 bp, Homo sapien
aactccccacgtccaatatcttttggttaaagc

SEQ ID NO: 968401 - DNA, 33 bp, Homo sapien
tgtgttcacagaagcaatatgcaaatatctcac

SEQ ID NO: 968402 - DNA, 33 bp, Homo sapien
tgtgttcacagaagcagtatgcaaatatctcac

SEQ ID NO: 968403 - DNA, 33 bp, Homo sapien
ggcacatctacatttccaaaagccaaaaagatt

SEQ ID NO: 968404 - DNA, 33 bp, Homo sapien
ggcacatctacatttctaaaagccaaaaagatt

SEQ ID NO: 968405 - DNA, 33 bp, Homo sapien
aataacatttttcaccaggcacatctacatttc

SEQ ID NO: 968406 - DNA, 33 bp, Homo sapien
aataacatttttcaccgggcacatctacatttc

SEQ ID NO: 968407 - DNA, 33 bp, Homo sapien
atgccttggggcttaacattgtctttatcttct

SEQ ID NO: 968408 - DNA, 33 bp, Homo sapien
atgccttggggcttaatattgtctttatcttct

SEQ ID NO: 968409 - DNA, 33 bp, Homo sapien
aaggcatcagcaccacagaagattactacattt

SEQ ID NO: 968410 - DNA, 33 bp, Homo sapien
aaggcatcagcaccacggaagattactacattt

SEQ ID NO: 968411 - DNA, 33 bp, Homo sapien
cacactgtaagtgcaacgaggacgatgatggca

SEQ ID NO: 968412 - DNA, 33 bp, Homo sapien
cacactgtaagtgcaatgaggacgatgatggca

SEQ ID NO: 968413 - DNA, 33 bp, Homo sapien
ggctgctttacgcaccacccttcgacctttatc

SEQ ID NO: 968414 - DNA, 33 bp, Homo sapien
ggctgctttacgcaccgcccttcgacctttatc

SEQ ID NO: 968415 - DNA, 33 bp, Homo sapien
atttttacactgggaagggtgacagctgagctg

SEQ ID NO: 968416 - DNA, 33 bp, Homo sapien
atttttacactgggaatggtgacagctgagctg

SEQ ID NO: 968417 - DNA, 33 bp, Homo sapien
ccaacattctggatacagaggattgcaacagga

SEQ ID NO: 968418 - DNA, 33 bp, Homo sapien
ccaacattctggatacggaggattgcaacagga

SEQ ID NO: 968419 - DNA, 33 bp, Homo sapien
cttgtccacaagatctgagaggtacttgtacat

SEQ ID NO: 968420 - DNA, 33 bp, Homo sapien
cttgtccacaagatcttagaggtacttgtacat

SEQ ID NO: 968421 - DNA, 33 bp, Homo sapien
agaagaatttttacaacgtttgaggactctgag

SEQ ID NO: 968422 - DNA, 33 bp, Homo sapien
agaagaatttttacaatgtttgaggactctgag

SEQ ID NO: 968423 - DNA, 33 bp, Homo sapien
tgtgatgaaggttctgaaaacaatggtctcgga

SEQ ID NO: 968424 - DNA, 33 bp, Homo sapien
tgtgatgaaggttctggaaacaatggtctcgga

SEQ ID NO: 968425 - DNA, 33 bp, Homo sapien
cgaggtagaggagaagcagattgcataactgag

SEQ ID NO: 968426 - DNA, 33 bp, Homo sapien
cgaggtagaggagaagtagattgcataactgag

SEQ ID NO: 968427 - DNA, 33 bp, Homo sapien
gtcagtggtgtatatcagaaaagactgtttaca

SEQ ID NO: 968428 - DNA, 33 bp, Homo sapien
gtcagtggtgtatatcggaaaagactgtttaca

SEQ ID NO: 968429 - DNA, 33 bp, Homo sapien
tccctctctttctggcaactggagccttgccat

SEQ ID NO: 968430 - DNA, 33 bp, Homo sapien
tccctctctttctggcgactggagccttgccat

SEQ ID NO: 968431 - DNA, 33 bp, Homo sapien
tggtggtactgctagcaagggctttgaaatcag

SEQ ID NO: 968432 - DNA, 33 bp, Homo sapien
tggtggtactgctagcgagggctttgaaatcag

SEQ ID NO: 968433 - DNA, 33 bp, Homo sapien
ctaaaatgttttgtagaagaagtttactcctct

SEQ ID NO: 968434 - DNA, 33 bp, Homo sapien
ctaaaatgttttgtaggagaagtttactcctct

SEQ ID NO: 968435 - DNA, 33 bp, Homo sapien
ccttaaaaaggaatccaagatcacaacaatctg

SEQ ID NO: 968436 - DNA, 33 bp, Homo sapien
ccttaaaaaggaatcccagatcacaacaatctg

SEQ ID NO: 968437 - DNA, 33 bp, Homo sapien
cagacttctcattccgacatcctctgtcttcac

SEQ ID NO: 968438 - DNA, 33 bp, Homo sapien
cagacttctcattccggcatcctctgtcttcac

SEQ ID NO: 968439 - DNA, 33 bp, Homo sapien
ggtgatcttaggcaaaagatttaacttctcttt

SEQ ID NO: 968440 - DNA, 33 bp, Homo sapien
ggtgatcttaggcaaaggatttaacttctcttt

SEQ ID NO: 968441 - DNA, 33 bp, Homo sapien
accttggttgaagttacaaagaaacacttagaa

SEQ ID NO: 968442 - DNA, 33 bp, Homo sapien
accttggttgaagttagaaagaaacacttagaa

SEQ ID NO: 968443 - DNA, 33 bp, Homo sapien
caggatctgatatgagcactgttgtattctctt

SEQ ID NO: 968444 - DNA, 33 bp, Homo sapien
caggatctgatatgagtactgttgtattctctt

SEQ ID NO: 968445 - DNA, 33 bp, Homo sapien
gacaaattcaaaagtacgttggtaggtcacttt

SEQ ID NO: 968446 - DNA, 33 bp, Homo sapien
gacaaattcaaaagtaggttggtaggtcacttt

SEQ ID NO: 968447 - DNA, 33 bp, Homo sapien
acaacagaagctggaacgtatgaaaagggccac

SEQ ID NO: 968448 - DNA, 33 bp, Homo sapien
acaacagaagctggaatgtatgaaaagggccac

SEQ ID NO: 968449 - DNA, 33 bp, Homo sapien
acttggatatttttggacaaagcagttttaata

SEQ ID NO: 968450 - DNA, 33 bp, Homo sapien
acttggatatttttgggcaaagcagttttaata

SEQ ID NO: 968451 - DNA, 33 bp, Homo sapien
tgactgactgaggaaccagatttgttatttcca

SEQ ID NO: 968452 - DNA, 33 bp, Homo sapien
tgactgactgaggaactagatttgttatttcca

SEQ ID NO: 968453 - DNA, 33 bp, Homo sapien
ggagacaggcaaaagcacaatggtagctttccc

SEQ ID NO: 968454 - DNA, 33 bp, Homo sapien
ggagacaggcaaaagcgcaatggtagctttccc

SEQ ID NO: 968455 - DNA, 33 bp, Homo sapien
cacgtgtgtttacctaagtctagaagcttttga

SEQ ID NO: 968456 - DNA, 33 bp, Homo sapien
cacgtgtgtttacctacgtctagaagcttttga

SEQ ID NO: 968457 - DNA, 33 bp, Homo sapien
ttcttaatatctaccaagtcatatctgttaatg

SEQ ID NO: 968458 - DNA, 33 bp, Homo sapien
ttcttaatatctaccatgtcatatctgttaatg

SEQ ID NO: 968459 - DNA, 33 bp, Homo sapien
tgagaatgaacagtacgggccctggagcaacct

SEQ ID NO: 968460 - DNA, 33 bp, Homo sapien
tgagaatgaacagtactggccctggagcaacct

SEQ ID NO: 968461 - DNA, 33 bp, Homo sapien
cagtcacctaaaggtacgctctcctgcaacttg

SEQ ID NO: 968462 - DNA, 33 bp, Homo sapien
cagtcacctaaaggtatgctctcctgcaacttg

SEQ ID NO: 968463 - DNA, 33 bp, Homo sapien
actttggaaaagagtacgtaaagagttctaaat

SEQ ID NO: 968464 - DNA, 33 bp, Homo sapien
actttggaaaagagtatgtaaagagttctaaat

SEQ ID NO: 968465 - DNA, 33 bp, Homo sapien
gtttgggaaactgaaaattgagattgagggaag

SEQ ID NO: 968466 - DNA, 33 bp, Homo sapien
gtttgggaaactgaaatttgagattgagggaag

SEQ ID NO: 968467 - DNA, 33 bp, Homo sapien
catgttttctgtaagtcaaaatgccatttctag

SEQ ID NO: 968468 - DNA, 33 bp, Homo sapien
catgttttctgtaagttaaaatgccatttctag

SEQ ID NO: 968469 - DNA, 33 bp, Homo sapien
ttcagtatttggatcacgacacagctttgtctc

SEQ ID NO: 968470 - DNA, 33 bp, Homo sapien
ttcagtatttggatcatgacacagctttgtctc

SEQ ID NO: 968471 - DNA, 33 bp, Homo sapien
gaaaagatgtaaaggccagcagtgttacctgga

SEQ ID NO: 968472 - DNA, 33 bp, Homo sapien
gaaaagatgtaaaggcgagcagtgttacctgga

SEQ ID NO: 968473 - DNA, 33 bp, Homo sapien
ataaggataactgaaagttcgctgtttattccc

SEQ ID NO: 968474 - DNA, 33 bp, Homo sapien
ataaggataactgaaatttcgctgtttattccc

SEQ ID NO: 968475 - DNA, 33 bp, Homo sapien
atggcccacagctagccatcacgtccgctggaa

SEQ ID NO: 968476 - DNA, 33 bp, Homo sapien
atggcccacagctagctatcacgtccgctggaa

SEQ ID NO: 968477 - DNA, 33 bp, Homo sapien
gccgtggcaactcaacaacaaagtgctggctcg

SEQ ID NO: 968478 - DNA, 33 bp, Homo sapien
gccgtggcaactcaacgacaaagtgctggctcg

SEQ ID NO: 968479 - DNA, 33 bp, Homo sapien
tcatggattgtatgtacggggcattacgtgctc

SEQ ID NO: 968480 - DNA, 33 bp, Homo sapien
tcatggattgtatgtatggggcattacgtgctc

SEQ ID NO: 968481 - DNA, 33 bp, Homo sapien
ggatgactttagggaacgtctttccagataatt

SEQ ID NO: 968482 - DNA, 33 bp, Homo sapien
ggatgactttagggaatgtctttccagataatt

SEQ ID NO: 968483 - DNA, 33 bp, Homo sapien
aggttacagtatgcaacgtatttatgtcaggtt

SEQ ID NO: 968484 - DNA, 33 bp, Homo sapien
aggttacagtatgcaatgtatttatgtcaggtt

SEQ ID NO: 968485 - DNA, 33 bp, Homo sapien
tgagcatgtcagtggaatactagcagcaggacc

SEQ ID NO: 968486 - DNA, 33 bp, Homo sapien
tgagcatgtcagtggactactagcagcaggacc

SEQ ID NO: 968487 - DNA, 33 bp, Homo sapien
ccagaactgtaccctgaaagccactttctttcc

SEQ ID NO: 968488 - DNA, 33 bp, Homo sapien
ccagaactgtaccctgtaagccactttctttcc

SEQ ID NO: 968489 - DNA, 33 bp, Homo sapien
tggacacagctcgaggcactagcttaaccatat

SEQ ID NO: 968490 - DNA, 33 bp, Homo sapien
tggacacagctcgagggactagcttaaccatat

SEQ ID NO: 968491 - DNA, 33 bp, Homo sapien
gatctaaatctccttacgcaaaacccagatgag

SEQ ID NO: 968492 - DNA, 33 bp, Homo sapien
gatctaaatctccttatgcaaaacccagatgag

SEQ ID NO: 968493 - DNA, 33 bp, Homo sapien
gaaataaagacgctcacaacacagttgctgctt

SEQ ID NO: 968494 - DNA, 33 bp, Homo sapien
gaaataaagacgctcagaacacagttgctgctt

SEQ ID NO: 968495 - DNA, 33 bp, Homo sapien
tatgtatataattccaaaacaatgcctgctgaa

SEQ ID NO: 968496 - DNA, 33 bp, Homo sapien
tatgtatataattccagaacaatgcctgctgaa

SEQ ID NO: 968497 - DNA, 33 bp, Homo sapien
tgttcctcttttacagcctcacattgagttccc

SEQ ID NO: 968498 - DNA, 33 bp, Homo sapien
tgttcctcttttacagtctcacattgagttccc

SEQ ID NO: 968499 - DNA, 33 bp, Homo sapien
taaacagaatgatcataaggatgtgcagaacca

SEQ ID NO: 968500 - DNA, 33 bp, Homo sapien
taaacagaatgatcatgaggatgtgcagaacca

SEQ ID NO: 968501 - DNA, 33 bp, Homo sapien
tgcctcctgttctatcaatagacttggaagatc

SEQ ID NO: 968502 - DNA, 33 bp, Homo sapien
tgcctcctgttctatcgatagacttggaagatc

SEQ ID NO: 968503 - DNA, 33 bp, Homo sapien
tacagggagtttacagacaaaccagggagaaag

SEQ ID NO: 968504 - DNA, 33 bp, Homo sapien
tacagggagtttacagtcaaaccagggagaaag

SEQ ID NO: 968505 - DNA, 33 bp, Homo sapien
ttgacaagacaaaggcaagtggctctatcttta

SEQ ID NO: 968506 - DNA, 33 bp, Homo sapien
ttgacaagacaaaggcgagtggctctatcttta

SEQ ID NO: 968507 - DNA, 33 bp, Homo sapien
cgagaagagacaagaaatggaaaaggcggagga

SEQ ID NO: 968508 - DNA, 33 bp, Homo sapien
cgagaagagacaagaagtggaaaaggcggagga

SEQ ID NO: 968509 - DNA, 33 bp, Homo sapien
gatagccaacaagcaactggatattgtgtctgg

SEQ ID NO: 968510 - DNA, 33 bp, Homo sapien
gatagccaacaagcaattggatattgtgtctgg

SEQ ID NO: 968511 - DNA, 33 bp, Homo sapien
aggatctcatgggccacgttaaggaatttgaac

SEQ ID NO: 968512 - DNA, 33 bp, Homo sapien
aggatctcatgggccatgttaaggaatttgaac

SEQ ID NO: 968513 - DNA, 33 bp, Homo sapien
gaacagaacttttaagcaggagatgacctctcc

SEQ ID NO: 968514 - DNA, 33 bp, Homo sapien
gaacagaacttttaagtaggagatgacctctcc

SEQ ID NO: 968515 - DNA, 33 bp, Homo sapien
gctgtgacttgaacacccctatcctagtcccct

SEQ ID NO: 968516 - DNA, 33 bp, Homo sapien
gctgtgacttgaacactcctatcctagtcccct

SEQ ID NO: 968517 - DNA, 33 bp, Homo sapien
tatagcagctggaaaggactaaaacaataccat

SEQ ID NO: 968518 - DNA, 33 bp, Homo sapien
tatagcagctggaaagtactaaaacaataccat

SEQ ID NO: 968519 - DNA, 33 bp, Homo sapien
aggtgtttaggtcatgaatagattaatgccatt

SEQ ID NO: 968520 - DNA, 33 bp, Homo sapien
aggtgtttaggtcatggatagattaatgccatt

SEQ ID NO: 968521 - DNA, 33 bp, Homo sapien
cataaaataccctccccatcatctagctctcct

SEQ ID NO: 968522 - DNA, 33 bp, Homo sapien
cataaaataccctccctatcatctagctctcct

SEQ ID NO: 968523 - DNA, 33 bp, Homo sapien
agcacatgaatcaagacggtgcatttcacatac

SEQ ID NO: 968524 - DNA, 33 bp, Homo sapien
agcacatgaatcaagatggtgcatttcacatac

SEQ ID NO: 968525 - DNA, 33 bp, Homo sapien
ggcacaccagctccacaagggggaatatcttaa

SEQ ID NO: 968526 - DNA, 33 bp, Homo sapien
ggcacaccagctccacgagggggaatatcttaa

SEQ ID NO: 968527 - DNA, 33 bp, Homo sapien
ctttcaagagcctgcaatataaacagctctaaa

SEQ ID NO: 968528 - DNA, 33 bp, Homo sapien
ctttcaagagcctgcagtataaacagctctaaa

SEQ ID NO: 968529 - DNA, 33 bp, Homo sapien
aaaagcacatagctagaacttgtcagcacaggc

SEQ ID NO: 968530 - DNA, 33 bp, Homo sapien
aaaagcacatagctaggacttgtcagcacaggc

SEQ ID NO: 968531 - DNA, 33 bp, Homo sapien
atgtcattttttgttcccactttacatccttgt

SEQ ID NO: 968532 - DNA, 33 bp, Homo sapien
atgtcattttttgttctcactttacatccttgt

SEQ ID NO: 968533 - DNA, 33 bp, Homo sapien
cttttagaactaatgccattgtagctaatatac

SEQ ID NO: 968534 - DNA, 33 bp, Homo sapien
cttttagaactaatgctattgtagctaatatac

SEQ ID NO: 968535 - DNA, 33 bp, Homo sapien
aggggttgctccgtaaagtttcatgtaggaggc

SEQ ID NO: 968536 - DNA, 33 bp, Homo sapien
aggggttgctccgtaaggtttcatgtaggaggc

SEQ ID NO: 968537 - DNA, 33 bp, Homo sapien
aacctgtttatctgcacgtggacccaaagaata

SEQ ID NO: 968538 - DNA, 33 bp, Homo sapien
aacctgtttatctgcatgtggacccaaagaata

SEQ ID NO: 968539 - DNA, 33 bp, Homo sapien
gagagagatgaggaagcctgaataacctgttta

SEQ ID NO: 968540 - DNA, 33 bp, Homo sapien
gagagagatgaggaaggctgaataacctgttta

SEQ ID NO: 968541 - DNA, 33 bp, Homo sapien
ttattggagaccaagacgttaagatgtttactt

SEQ ID NO: 968542 - DNA, 33 bp, Homo sapien
ttattggagaccaagatgttaagatgtttactt

SEQ ID NO: 968543 - DNA, 33 bp, Homo sapien
ctagtggtctgaggcaaacaagatcatgattac

SEQ ID NO: 968544 - DNA, 33 bp, Homo sapien
ctagtggtctgaggcagacaagatcatgattac

SEQ ID NO: 968545 - DNA, 33 bp, Homo sapien
acaccttcatatcagcaagtgcctgactcataa

SEQ ID NO: 968546 - DNA, 33 bp, Homo sapien
acaccttcatatcagcgagtgcctgactcataa

SEQ ID NO: 968547 - DNA, 33 bp, Homo sapien
ttctagctaggtcgacactttggtcatatacta

SEQ ID NO: 968548 - DNA, 33 bp, Homo sapien
ttctagctaggtcgacgctttggtcatatacta

SEQ ID NO: 968549 - DNA, 33 bp, Homo sapien
aattagaaaactgtacactttccacatttgtgg

SEQ ID NO: 968550 - DNA, 33 bp, Homo sapien
aattagaaaactgtacgctttccacatttgtgg

SEQ ID NO: 968551 - DNA, 33 bp, Homo sapien
cacatggagtgtgctcaacaaatatatattaaa

SEQ ID NO: 968552 - DNA, 33 bp, Homo sapien
cacatggagtgtgctcgacaaatatatattaaa

SEQ ID NO: 968553 - DNA, 33 bp, Homo sapien
attttttaaaaagctaacacttcaggtcctggc

SEQ ID NO: 968554 - DNA, 33 bp, Homo sapien
attttttaaaaagctagcacttcaggtcctggc

SEQ ID NO: 968555 - DNA, 33 bp, Homo sapien
ggggcatcggtaggaacagaaggaacaattcga

SEQ ID NO: 968556 - DNA, 33 bp, Homo sapien
ggggcatcggtaggaagagaaggaacaattcga

SEQ ID NO: 968557 - DNA, 33 bp, Homo sapien
aaaagtcagtgcgcttaaagaaatgtcaataga

SEQ ID NO: 968558 - DNA, 33 bp, Homo sapien
aaaagtcagtgcgcttgaagaaatgtcaataga

SEQ ID NO: 968559 - DNA, 33 bp, Homo sapien
acgtcacagtatgccacctaggttctactcctc

SEQ ID NO: 968560 - DNA, 33 bp, Homo sapien
acgtcacagtatgccatctaggttctactcctc

SEQ ID NO: 968561 - DNA, 33 bp, Homo sapien
ttaattatcctgtccacgctgtctgtgtcaggc

SEQ ID NO: 968562 - DNA, 33 bp, Homo sapien
ttaattatcctgtccatgctgtctgtgtcaggc

SEQ ID NO: 968563 - DNA, 33 bp, Homo sapien
ccaacatcttaactcactacagcttcaagtcca

SEQ ID NO: 968564 - DNA, 33 bp, Homo sapien
ccaacatcttaactcattacagcttcaagtcca

SEQ ID NO: 968565 - DNA, 33 bp, Homo sapien
actctagagaaatgcacaagcaacacgtcctag

SEQ ID NO: 968566 - DNA, 33 bp, Homo sapien
actctagagaaatgcagaagcaacacgtcctag

SEQ ID NO: 968567 - DNA, 33 bp, Homo sapien
taactgagaagagctaacatctgtcttttaagt

SEQ ID NO: 968568 - DNA, 33 bp, Homo sapien
taactgagaagagctagcatctgtcttttaagt

SEQ ID NO: 968569 - DNA, 33 bp, Homo sapien
ataactttcaagtcacaatttgccttgaacacg

SEQ ID NO: 968570 - DNA, 33 bp, Homo sapien
ataactttcaagtcacgatttgccttgaacacg

SEQ ID NO: 968571 - DNA, 33 bp, Homo sapien
catgagcgggagaacaactaaaactggagcggt

SEQ ID NO: 968572 - DNA, 33 bp, Homo sapien
catgagcgggagaacacctaaaactggagcggt

SEQ ID NO: 968573 - DNA, 33 bp, Homo sapien
cacagcaaaggaagacagaactacaaccggctt

SEQ ID NO: 968574 - DNA, 33 bp, Homo sapien
cacagcaaaggaagacggaactacaaccggctt

SEQ ID NO: 968575 - DNA, 33 bp, Homo sapien
gcatgtggcttcacagcaaaaaaaaattaaatg

SEQ ID NO: 968576 - DNA, 33 bp, Homo sapien
gcatgtggcttcacaggaaaaaaaaattaaatg

SEQ ID NO: 968577 - DNA, 33 bp, Homo sapien
cattctataacatcaaaccttatcagctaagcc

SEQ ID NO: 968578 - DNA, 33 bp, Homo sapien
cattctataacatcaagccttatcagctaagcc

SEQ ID NO: 968579 - DNA, 33 bp, Homo sapien
ctttctccatacaaacaaacccaccggagcctt

SEQ ID NO: 968580 - DNA, 33 bp, Homo sapien
ctttctccatacaaacgaacccaccggagcctt

SEQ ID NO: 968581 - DNA, 33 bp, Homo sapien
agatggcagcgaacaccgtaagcagggcacaga

SEQ ID NO: 968582 - DNA, 33 bp, Homo sapien
agatggcagcgaacactgtaagcagggcacaga

SEQ ID NO: 968583 - DNA, 33 bp, Homo sapien
cctaaaacataaaataccatgctccaccagcaa

SEQ ID NO: 968584 - DNA, 33 bp, Homo sapien
cctaaaacataaaatatcatgctccaccagcaa

SEQ ID NO: 968585 - DNA, 33 bp, Homo sapien
tctatattgttgcctacatcaatagtttgttcc

SEQ ID NO: 968586 - DNA, 33 bp, Homo sapien
tctatattgttgcctatatcaatagtttgttcc

SEQ ID NO: 968587 - DNA, 33 bp, Homo sapien
aatactcccccaccccaaatgagtaagtagaag

SEQ ID NO: 968588 - DNA, 33 bp, Homo sapien
aatactcccccaccccgaatgagtaagtagaag

SEQ ID NO: 968589 - DNA, 33 bp, Homo sapien
ctaggcaacttccaagaaaatcagctacagctt

SEQ ID NO: 968590 - DNA, 33 bp, Homo sapien
ctaggcaacttccaaggaaatcagctacagctt

SEQ ID NO: 968591 - DNA, 33 bp, Homo sapien
gacagaagtaaaaccacacttgcattaagatag

SEQ ID NO: 968592 - DNA, 33 bp, Homo sapien
gacagaagtaaaaccagacttgcattaagatag

SEQ ID NO: 968593 - DNA, 33 bp, Homo sapien
atgctggttgagatcacaattttattctagaag

SEQ ID NO: 968594 - DNA, 33 bp, Homo sapien
atgctggttgagatcataattttattctagaag

SEQ ID NO: 968595 - DNA, 33 bp, Homo sapien
catgaactctttggcccatcacattactgacca

SEQ ID NO: 968596 - DNA, 33 bp, Homo sapien
catgaactctttggcctatcacattactgacca

SEQ ID NO: 968597 - DNA, 33 bp, Homo sapien
aattgattatcttacaacttctcttgctttctg

SEQ ID NO: 968598 - DNA, 33 bp, Homo sapien
aattgattatcttacagcttctcttgctttctg

SEQ ID NO: 968599 - DNA, 33 bp, Homo sapien
gtttcttggcatcaaaactggtgctcttttcac

SEQ ID NO: 968600 - DNA, 33 bp, Homo sapien
gtttcttggcatcaaagctggtgctcttttcac

SEQ ID NO: 968601 - DNA, 33 bp, Homo sapien
caattcagatggcaacactatttattaagagaa

SEQ ID NO: 968602 - DNA, 33 bp, Homo sapien
caattcagatggcaacgctatttattaagagaa

SEQ ID NO: 968603 - DNA, 33 bp, Homo sapien
tcatctttctgaggaaactgaaagacaaatact

SEQ ID NO: 968604 - DNA, 33 bp, Homo sapien
tcatctttctgaggaagctgaaagacaaatact

SEQ ID NO: 968605 - DNA, 33 bp, Homo sapien
ctcttctctgttcaaacgcacagacacattgga

SEQ ID NO: 968606 - DNA, 33 bp, Homo sapien
ctcttctctgttcaaatgcacagacacattgga

SEQ ID NO: 968607 - DNA, 33 bp, Homo sapien
tgtagctgtattcaaaaatagtcacaatatgga

SEQ ID NO: 968608 - DNA, 33 bp, Homo sapien
tgtagctgtattcaaagatagtcacaatatgga

SEQ ID NO: 968609 - DNA, 33 bp, Homo sapien
agagatcctatgaacaactctgtctgagcatta

SEQ ID NO: 968610 - DNA, 33 bp, Homo sapien
agagatcctatgaacacctctgtctgagcatta

SEQ ID NO: 968611 - DNA, 33 bp, Homo sapien
aaaaaataaaaaataaatgactgcagccatcag

SEQ ID NO: 968612 - DNA, 33 bp, Homo sapien
aaaaaataaaaaataagtgactgcagccatcag

SEQ ID NO: 968613 - DNA, 33 bp, Homo sapien
attggccctcacaaagaaaagtagaaacaggct

SEQ ID NO: 968614 - DNA, 33 bp, Homo sapien
attggccctcacaaagcaaagtagaaacaggct

SEQ ID NO: 968615 - DNA, 33 bp, Homo sapien
caaacagcttttaggaaagtcagcctccctgag

SEQ ID NO: 968616 - DNA, 33 bp, Homo sapien
caaacagcttttaggatagtcagcctccctgag

SEQ ID NO: 968617 - DNA, 33 bp, Homo sapien
aacaagtgacgtcaggaactggtcgaaccaggc

SEQ ID NO: 968618 - DNA, 33 bp, Homo sapien
aacaagtgacgtcaggcactggtcgaaccaggc

SEQ ID NO: 968619 - DNA, 33 bp, Homo sapien
cctggctcattgtgaccggatatatgcacttct

SEQ ID NO: 968620 - DNA, 33 bp, Homo sapien
cctggctcattgtgactggatatatgcacttct

SEQ ID NO: 968621 - DNA, 33 bp, Homo sapien
aggcatgggtactttcgctggtcacttttggga

SEQ ID NO: 968622 - DNA, 33 bp, Homo sapien
aggcatgggtactttctctggtcacttttggga

SEQ ID NO: 968623 - DNA, 33 bp, Homo sapien
gaaggaagctcgcctcagaatctatggcacagc

SEQ ID NO: 968624 - DNA, 33 bp, Homo sapien
gaaggaagctcgcctcggaatctatggcacagc

SEQ ID NO: 968625 - DNA, 33 bp, Homo sapien
cagctcttccattggacctaattccctgcgcca

SEQ ID NO: 968626 - DNA, 33 bp, Homo sapien
cagctcttccattggagctaattccctgcgcca

SEQ ID NO: 968627 - DNA, 33 bp, Homo sapien
ggtagcaagctactggccactgtgatagagtcc

SEQ ID NO: 968628 - DNA, 33 bp, Homo sapien
ggtagcaagctactggtcactgtgatagagtcc

SEQ ID NO: 968629 - DNA, 33 bp, Homo sapien
tattgcggtctagagaagtaaagtgaattatcc

SEQ ID NO: 968630 - DNA, 33 bp, Homo sapien
tattgcggtctagagaggtaaagtgaattatcc

SEQ ID NO: 968631 - DNA, 33 bp, Homo sapien
aagaaaacaagatcaacaaacaatgagaggtag

SEQ ID NO: 968632 - DNA, 33 bp, Homo sapien
aagaaaacaagatcaataaacaatgagaggtag

SEQ ID NO: 968633 - DNA, 33 bp, Homo sapien
ggcggagttcattcctaacttagggcctcatct

SEQ ID NO: 968634 - DNA, 33 bp, Homo sapien
ggcggagttcattcctgacttagggcctcatct

SEQ ID NO: 968635 - DNA, 33 bp, Homo sapien
ggaagtccaggcactgacactagatgaggccct

SEQ ID NO: 968636 - DNA, 33 bp, Homo sapien
ggaagtccaggcactggcactagatgaggccct

SEQ ID NO: 968637 - DNA, 33 bp, Homo sapien
ccattttgtcaaacaacttctatgtgaaacacg

SEQ ID NO: 968638 - DNA, 33 bp, Homo sapien
ccattttgtcaaacaatttctatgtgaaacacg

SEQ ID NO: 968639 - DNA, 33 bp, Homo sapien
atatcatctctgtttaaaaactgaggcatatca

SEQ ID NO: 968640 - DNA, 33 bp, Homo sapien
atatcatctctgtttagaaactgaggcatatca

SEQ ID NO: 968641 - DNA, 33 bp, Homo sapien
tccctccgtcatgtaaagtaggatggcagttac

SEQ ID NO: 968642 - DNA, 33 bp, Homo sapien
tccctccgtcatgtaacgtaggatggcagttac

SEQ ID NO: 968643 - DNA, 33 bp, Homo sapien
ccactcatcaaacgtacagtccttccaggcaca

SEQ ID NO: 968644 - DNA, 33 bp, Homo sapien
ccactcatcaaacgtatagtccttccaggcaca

SEQ ID NO: 968645 - DNA, 33 bp, Homo sapien
gtgtagagaaataggaagaaagaggatttcaac

SEQ ID NO: 968646 - DNA, 33 bp, Homo sapien
gtgtagagaaataggatgaaagaggatttcaac

SEQ ID NO: 968647 - DNA, 33 bp, Homo sapien
ccaggccaagcccagaagtctcctgtttgcaat

SEQ ID NO: 968648 - DNA, 33 bp, Homo sapien
ccaggccaagcccagaggtctcctgtttgcaat

SEQ ID NO: 968649 - DNA, 33 bp, Homo sapien
cctcaccctgtgcataacattttcctaggatga

SEQ ID NO: 968650 - DNA, 33 bp, Homo sapien
cctcaccctgtgcatagcattttcctaggatga

SEQ ID NO: 968651 - DNA, 33 bp, Homo sapien
actgcaggtctttttacctactacaagagtttg

SEQ ID NO: 968652 - DNA, 33 bp, Homo sapien
actgcaggtctttttagctactacaagagtttg

SEQ ID NO: 968653 - DNA, 33 bp, Homo sapien
aacctcaatgtgatgacacttggaaatggggcc

SEQ ID NO: 968654 - DNA, 33 bp, Homo sapien
aacctcaatgtgatgatacttggaaatggggcc

SEQ ID NO: 968655 - DNA, 33 bp, Homo sapien
cttctctgtttatgcacattcctaatgtctctt

SEQ ID NO: 968656 - DNA, 33 bp, Homo sapien
cttctctgtttatgcatattcctaatgtctctt

SEQ ID NO: 968657 - DNA, 33 bp, Homo sapien
ctgggattgtaatccacgtccgcttgttctcaa

SEQ ID NO: 968658 - DNA, 33 bp, Homo sapien
ctgggattgtaatccatgtccgcttgttctcaa

SEQ ID NO: 968659 - DNA, 33 bp, Homo sapien
gatctatttcctgcaaactgaaagggactaaca

SEQ ID NO: 968660 - DNA, 33 bp, Homo sapien
gatctatttcctgcaacctgaaagggactaaca

SEQ ID NO: 968661 - DNA, 33 bp, Homo sapien
gaatatctcatgtgaaaggtttactaagattaa

SEQ ID NO: 968662 - DNA, 33 bp, Homo sapien
gaatatctcatgtgaagggtttactaagattaa

SEQ ID NO: 968663 - DNA, 33 bp, Homo sapien
ttgaggctgccaggccaaaccaaaaccagatgg

SEQ ID NO: 968664 - DNA, 33 bp, Homo sapien
ttgaggctgccaggccgaaccaaaaccagatgg

SEQ ID NO: 968665 - DNA, 33 bp, Homo sapien
caaatagaaaagtgatgaagtgcacaaactctg

SEQ ID NO: 968666 - DNA, 33 bp, Homo sapien
caaatagaaaagtgattaagtgcacaaactctg

SEQ ID NO: 968667 - DNA, 33 bp, Homo sapien
cttcagatgcctttggaatgagcttgtaattgg

SEQ ID NO: 968668 - DNA, 33 bp, Homo sapien
cttcagatgcctttgggatgagcttgtaattgg

SEQ ID NO: 968669 - DNA, 33 bp, Homo sapien
ttgacgaggcttgttacgctttaatggaatgaa

SEQ ID NO: 968670 - DNA, 33 bp, Homo sapien
ttgacgaggcttgttatgctttaatggaatgaa

SEQ ID NO: 968671 - DNA, 33 bp, Homo sapien
agatttctgtaacgtcaaagcctttcttaactc

SEQ ID NO: 968672 - DNA, 33 bp, Homo sapien
agatttctgtaacgtcgaagcctttcttaactc

SEQ ID NO: 968673 - DNA, 33 bp, Homo sapien
aacaatgatatcaaaaacatcttaacacaacta

SEQ ID NO: 968674 - DNA, 33 bp, Homo sapien
aacaatgatatcaaaagcatcttaacacaacta

SEQ ID NO: 968675 - DNA, 33 bp, Homo sapien
acaattttgaagtccaactgggccatattgcct

SEQ ID NO: 968676 - DNA, 33 bp, Homo sapien
acaattttgaagtccagctgggccatattgcct

SEQ ID NO: 968677 - DNA, 33 bp, Homo sapien
catattgcctactttaaggacagaaaatgttct

SEQ ID NO: 968678 - DNA, 33 bp, Homo sapien
catattgcctactttagggacagaaaatgttct

SEQ ID NO: 968679 - DNA, 33 bp, Homo sapien
ggtgctttaaaggcaaagtctacatattatcta

SEQ ID NO: 968680 - DNA, 33 bp, Homo sapien
ggtgctttaaaggcaacgtctacatattatcta

SEQ ID NO: 968681 - DNA, 33 bp, Homo sapien
ctagccccttagcatacattaccagctgtcccc

SEQ ID NO: 968682 - DNA, 33 bp, Homo sapien
ctagccccttagcatatattaccagctgtcccc

SEQ ID NO: 968683 - DNA, 33 bp, Homo sapien
ccagtgtgtgtgcactaaagattaattcacctt

SEQ ID NO: 968684 - DNA, 33 bp, Homo sapien
ccagtgtgtgtgcacttaagattaattcacctt

SEQ ID NO: 968685 - DNA, 33 bp, Homo sapien
ctccaaaattctgaagaaaagcaatttccaacc

SEQ ID NO: 968686 - DNA, 33 bp, Homo sapien
ctccaaaattctgaaggaaagcaatttccaacc

SEQ ID NO: 968687 - DNA, 33 bp, Homo sapien
ttttaaatgaagaggacataaactcacaatttc

SEQ ID NO: 968688 - DNA, 33 bp, Homo sapien
ttttaaatgaagaggagataaactcacaatttc

SEQ ID NO: 968689 - DNA, 33 bp, Homo sapien
ctgacagcatggctaccgagttataaaacaaaa

SEQ ID NO: 968690 - DNA, 33 bp, Homo sapien
ctgacagcatggctactgagttataaaacaaaa

SEQ ID NO: 968691 - DNA, 33 bp, Homo sapien
agaagtgagtatgtgaataacttgggcagaaaa

SEQ ID NO: 968692 - DNA, 33 bp, Homo sapien
agaagtgagtatgtgattaacttgggcagaaaa

SEQ ID NO: 968693 - DNA, 33 bp, Homo sapien
ggaagggtttatttcacgtagctctctggatag

SEQ ID NO: 968694 - DNA, 33 bp, Homo sapien
ggaagggtttatttcatgtagctctctggatag

SEQ ID NO: 968695 - DNA, 33 bp, Homo sapien
gagttaaggaacgcacaaagtgttcagaatggc

SEQ ID NO: 968696 - DNA, 33 bp, Homo sapien
gagttaaggaacgcaccaagtgttcagaatggc

SEQ ID NO: 968697 - DNA, 33 bp, Homo sapien
atgtctgcatatctgacgtatggactgcagaat

SEQ ID NO: 968698 - DNA, 33 bp, Homo sapien
atgtctgcatatctgatgtatggactgcagaat

SEQ ID NO: 968699 - DNA, 33 bp, Homo sapien
tgggtgaggagtataaggatccctaggaagata

SEQ ID NO: 968700 - DNA, 33 bp, Homo sapien
tgggtgaggagtataatgatccctaggaagata

SEQ ID NO: 968701 - DNA, 33 bp, Homo sapien
tatggagctgctggcgaataaatatggatgggt

SEQ ID NO: 968702 - DNA, 33 bp, Homo sapien
tatggagctgctggcggataaatatggatgggt

SEQ ID NO: 968703 - DNA, 33 bp, Homo sapien
agctgccgcgccaggccgacataaaattctttc

SEQ ID NO: 968704 - DNA, 33 bp, Homo sapien
agctgccgcgccaggctgacataaaattctttc

SEQ ID NO: 968705 - DNA, 33 bp, Homo sapien
gaaaactttggcacttcaagcagtcttgccaga

SEQ ID NO: 968706 - DNA, 33 bp, Homo sapien
gaaaactttggcacttgaagcagtcttgccaga

SEQ ID NO: 968707 - DNA, 33 bp, Homo sapien
tgccacatacagaaaaatattattctcatattt

SEQ ID NO: 968708 - DNA, 33 bp, Homo sapien
tgccacatacagaaaattattattctcatattt

SEQ ID NO: 968709 - DNA, 33 bp, Homo sapien
ctttgtttttaactatcaatgtaagcttccctt

SEQ ID NO: 968710 - DNA, 33 bp, Homo sapien
ctttgtttttaactatgaatgtaagcttccctt

SEQ ID NO: 968711 - DNA, 33 bp, Homo sapien
agatcttacagttcaacgtcttatttcctctac

SEQ ID NO: 968712 - DNA, 33 bp, Homo sapien
agatcttacagttcaaggtcttatttcctctac

SEQ ID NO: 968713 - DNA, 33 bp, Homo sapien
tatttatgagtatctactacatgacgaacagtt

SEQ ID NO: 968714 - DNA, 33 bp, Homo sapien
tatttatgagtatctagtacatgacgaacagtt

SEQ ID NO: 968715 - DNA, 33 bp, Homo sapien
aatccagatcagcttacgttttagatgctagga

SEQ ID NO: 968716 - DNA, 33 bp, Homo sapien
aatccagatcagcttatgttttagatgctagga

SEQ ID NO: 968717 - DNA, 33 bp, Homo sapien
aatgtattagtgctataaagaatgattacaatt

SEQ ID NO: 968718 - DNA, 33 bp, Homo sapien
aatgtattagtgctatgaagaatgattacaatt

SEQ ID NO: 968719 - DNA, 33 bp, Homo sapien
ccagcacagaacatcaaccagcctccgcttgca

SEQ ID NO: 968720 - DNA, 33 bp, Homo sapien
ccagcacagaacatcagccagcctccgcttgca

SEQ ID NO: 968721 - DNA, 33 bp, Homo sapien
ccaaaagccagattacaaaaagtgattgggtcc

SEQ ID NO: 968722 - DNA, 33 bp, Homo sapien
ccaaaagccagattacgaaaagtgattgggtcc

SEQ ID NO: 968723 - DNA, 33 bp, Homo sapien
tgctttctggtatccacgtagagtaaaagccaa

SEQ ID NO: 968724 - DNA, 33 bp, Homo sapien
tgctttctggtatccatgtagagtaaaagccaa

SEQ ID NO: 968725 - DNA, 33 bp, Homo sapien
cgaagaatcatgcagaagtcttctaatgtgggc

SEQ ID NO: 968726 - DNA, 33 bp, Homo sapien
cgaagaatcatgcagaggtcttctaatgtgggc

SEQ ID NO: 968727 - DNA, 33 bp, Homo sapien
tacccctcctagatcccgcatggaagaattgag

SEQ ID NO: 968728 - DNA, 33 bp, Homo sapien
tacccctcctagatcctgcatggaagaattgag

SEQ ID NO: 968729 - DNA, 33 bp, Homo sapien
tctccttacaagcacaacctgtacagctgtgta

SEQ ID NO: 968730 - DNA, 33 bp, Homo sapien
tctccttacaagcacatcctgtacagctgtgta

SEQ ID NO: 968731 - DNA, 33 bp, Homo sapien
ttcatatgctcattacagctcctaagacagatt

SEQ ID NO: 968732 - DNA, 33 bp, Homo sapien
ttcatatgctcattacggctcctaagacagatt

SEQ ID NO: 968733 - DNA, 33 bp, Homo sapien
atgtcatacagcgcaaaacaccattctccaaca

SEQ ID NO: 968734 - DNA, 33 bp, Homo sapien
atgtcatacagcgcaagacaccattctccaaca

SEQ ID NO: 968735 - DNA, 33 bp, Homo sapien
atcactgactgtcagaaaaatgtaaatcaaaac

SEQ ID NO: 968736 - DNA, 33 bp, Homo sapien
atcactgactgtcagagaaatgtaaatcaaaac

SEQ ID NO: 968737 - DNA, 33 bp, Homo sapien
ccagtctagtagtatgaacagaaacttgtggct

SEQ ID NO: 968738 - DNA, 33 bp, Homo sapien
ccagtctagtagtatgcacagaaacttgtggct

SEQ ID NO: 968739 - DNA, 33 bp, Homo sapien
tcatactggcacagcaagttagtgacatgagtg

SEQ ID NO: 968740 - DNA, 33 bp, Homo sapien
tcatactggcacagcaggttagtgacatgagtg

SEQ ID NO: 968741 - DNA, 33 bp, Homo sapien
tacaaatggaaaaagcacagatgattgttactt

SEQ ID NO: 968742 - DNA, 33 bp, Homo sapien
tacaaatggaaaaagcgcagatgattgttactt

SEQ ID NO: 968743 - DNA, 33 bp, Homo sapien
cagtttgagaactaaacgagctaatacatggaa

SEQ ID NO: 968744 - DNA, 33 bp, Homo sapien
cagtttgagaactaaatgagctaatacatggaa

SEQ ID NO: 968745 - DNA, 33 bp, Homo sapien
tgtcaccaaaactcttcaacatgactatagatt

SEQ ID NO: 968746 - DNA, 33 bp, Homo sapien
tgtcaccaaaactctttaacatgactatagatt

SEQ ID NO: 968747 - DNA, 33 bp, Homo sapien
gtatgcaacggactatgagcaatgtgccaaaac

SEQ ID NO: 968748 - DNA, 33 bp, Homo sapien
gtatgcaacggactattagcaatgtgccaaaac

SEQ ID NO: 968749 - DNA, 33 bp, Homo sapien
cctcttcttgaacataactaacttgaggaacct

SEQ ID NO: 968750 - DNA, 33 bp, Homo sapien
cctcttcttgaacatagctaacttgaggaacct

SEQ ID NO: 968751 - DNA, 33 bp, Homo sapien
ctgaacctttgaaagcaaaatggactcatggac

SEQ ID NO: 968752 - DNA, 33 bp, Homo sapien
ctgaacctttgaaagcgaaatggactcatggac

SEQ ID NO: 968753 - DNA, 33 bp, Homo sapien
caatgactctgagagacaaaaggtttaaaaggt

SEQ ID NO: 968754 - DNA, 33 bp, Homo sapien
caatgactctgagagataaaaggtttaaaaggt

SEQ ID NO: 968755 - DNA, 33 bp, Homo sapien
ttatttggttatgtcccaaaggttgttaccaaa

SEQ ID NO: 968756 - DNA, 33 bp, Homo sapien
ttatttggttatgtcctaaaggttgttaccaaa

SEQ ID NO: 968757 - DNA, 33 bp, Homo sapien
ctagtagttaaattcacagagagagaaaggaga

SEQ ID NO: 968758 - DNA, 33 bp, Homo sapien
ctagtagttaaattcatagagagagaaaggaga

SEQ ID NO: 968759 - DNA, 33 bp, Homo sapien
agaaagaaagaagcaacacaggaagatggaaat

SEQ ID NO: 968760 - DNA, 33 bp, Homo sapien
agaaagaaagaagcaatacaggaagatggaaat

SEQ ID NO: 968761 - DNA, 33 bp, Homo sapien
atttctgtcatccttccattgtctcaagcttcc

SEQ ID NO: 968762 - DNA, 33 bp, Homo sapien
atttctgtcatccttcgattgtctcaagcttcc

SEQ ID NO: 968763 - DNA, 33 bp, Homo sapien
gctggaaagaaatggaaactagagagcagatgc

SEQ ID NO: 968764 - DNA, 33 bp, Homo sapien
gctggaaagaaatggagactagagagcagatgc

SEQ ID NO: 968765 - DNA, 33 bp, Homo sapien
tttcctaatcctgacaggtttattcatgatctt

SEQ ID NO: 968766 - DNA, 33 bp, Homo sapien
tttcctaatcctgacatgtttattcatgatctt

SEQ ID NO: 968767 - DNA, 33 bp, Homo sapien
gttcttcagttagggggacttcttgtagtcatg

SEQ ID NO: 968768 - DNA, 33 bp, Homo sapien
gttcttcagttaggggtacttcttgtagtcatg

SEQ ID NO: 968769 - DNA, 33 bp, Homo sapien
gcaccaagaagggatacagacttaagagtttgg

SEQ ID NO: 968770 - DNA, 33 bp, Homo sapien
gcaccaagaagggatatagacttaagagtttgg

SEQ ID NO: 968771 - DNA, 33 bp, Homo sapien
tttctggtctgtaaacccagattctctgtgcag

SEQ ID NO: 968772 - DNA, 33 bp, Homo sapien
tttctggtctgtaaacgcagattctctgtgcag

SEQ ID NO: 968773 - DNA, 33 bp, Homo sapien
gagggctattcatggaactgatatcctgggttg

SEQ ID NO: 968774 - DNA, 33 bp, Homo sapien
gagggctattcatggagctgatatcctgggttg

SEQ ID NO: 968775 - DNA, 33 bp, Homo sapien
tagcaactgatcagaactgtcatgcaagatgga

SEQ ID NO: 968776 - DNA, 33 bp, Homo sapien
tagcaactgatcagaattgtcatgcaagatgga

SEQ ID NO: 968777 - DNA, 33 bp, Homo sapien
gaattgctcctctaacacataaaattacttttc

SEQ ID NO: 968778 - DNA, 33 bp, Homo sapien
gaattgctcctctaactcataaaattacttttc

SEQ ID NO: 968779 - DNA, 33 bp, Homo sapien
ttcagctagattaacaatatggttccttcccaa

SEQ ID NO: 968780 - DNA, 33 bp, Homo sapien
ttcagctagattaacagtatggttccttcccaa

SEQ ID NO: 968781 - DNA, 33 bp, Homo sapien
gtaatgcacttcatacgatttcttcactaactc

SEQ ID NO: 968782 - DNA, 33 bp, Homo sapien
gtaatgcacttcatactatttcttcactaactc

SEQ ID NO: 968783 - DNA, 33 bp, Homo sapien
aacagctagtcacaaacagttactaacctaatc

SEQ ID NO: 968784 - DNA, 33 bp, Homo sapien
aacagctagtcacaaagagttactaacctaatc

SEQ ID NO: 968785 - DNA, 33 bp, Homo sapien
gaaaacaacatgattgaaactatgagttaatta

SEQ ID NO: 968786 - DNA, 33 bp, Homo sapien
gaaaacaacatgattggaactatgagttaatta

SEQ ID NO: 968787 - DNA, 33 bp, Homo sapien
tgtagggcatgaatccactatccagagagactg

SEQ ID NO: 968788 - DNA, 33 bp, Homo sapien
tgtagggcatgaatccgctatccagagagactg

SEQ ID NO: 968789 - DNA, 33 bp, Homo sapien
agtcaaattaatttcaaagatatatgctatttt

SEQ ID NO: 968790 - DNA, 33 bp, Homo sapien
agtcaaattaatttcagagatatatgctatttt

SEQ ID NO: 968791 - DNA, 33 bp, Homo sapien
ccaaaaacatgagaaaaccagatctccatagct

SEQ ID NO: 968792 - DNA, 33 bp, Homo sapien
ccaaaaacatgagaaagccagatctccatagct

SEQ ID NO: 968793 - DNA, 33 bp, Homo sapien
ttgaactaaattgacacagatgatgattctgcc

SEQ ID NO: 968794 - DNA, 33 bp, Homo sapien
ttgaactaaattgacatagatgatgattctgcc

SEQ ID NO: 968795 - DNA, 33 bp, Homo sapien
gaggtgagctatatcacgtcattacactccagt

SEQ ID NO: 968796 - DNA, 33 bp, Homo sapien
gaggtgagctatatcatgtcattacactccagt

SEQ ID NO: 968797 - DNA, 33 bp, Homo sapien
aagatggagaaagttaacgcctctgtaaaagaa

SEQ ID NO: 968798 - DNA, 33 bp, Homo sapien
aagatggagaaagttagcgcctctgtaaaagaa

SEQ ID NO: 968799 - DNA, 33 bp, Homo sapien
aagttgaaggctttaaagtactaagtgttaact

SEQ ID NO: 968800 - DNA, 33 bp, Homo sapien
aagttgaaggctttaatgtactaagtgttaact

SEQ ID NO: 968801 - DNA, 33 bp, Homo sapien
agaatgtaagtcatgacagactattcaccagag

SEQ ID NO: 968802 - DNA, 33 bp, Homo sapien
agaatgtaagtcatgagagactattcaccagag

SEQ ID NO: 968803 - DNA, 33 bp, Homo sapien
aaaggtatagaaaaggaagcccagatttgttag

SEQ ID NO: 968804 - DNA, 33 bp, Homo sapien
aaaggtatagaaaaggtagcccagatttgttag

SEQ ID NO: 968805 - DNA, 33 bp, Homo sapien
taaagcaagttcactcaaggaggctctgaggca

SEQ ID NO: 968806 - DNA, 33 bp, Homo sapien
taaagcaagttcactcgaggaggctctgaggca

SEQ ID NO: 968807 - DNA, 33 bp, Homo sapien
ctgaatttgtgctgcacgtttttgttctgctgc

SEQ ID NO: 968808 - DNA, 33 bp, Homo sapien
ctgaatttgtgctgcatgtttttgttctgctgc

SEQ ID NO: 968809 - DNA, 33 bp, Homo sapien
cttcattctaatcctcagaaaactgataggagg

SEQ ID NO: 968810 - DNA, 33 bp, Homo sapien
cttcattctaatcctcggaaaactgataggagg

SEQ ID NO: 968811 - DNA, 33 bp, Homo sapien
cccagcagggttgacaatcttgacctctaggca

SEQ ID NO: 968812 - DNA, 33 bp, Homo sapien
cccagcagggttgacattcttgacctctaggca

SEQ ID NO: 968813 - DNA, 33 bp, Homo sapien
aatgcttgtagtggcaactcattaaagcgttaa

SEQ ID NO: 968814 - DNA, 33 bp, Homo sapien
aatgcttgtagtggcatctcattaaagcgttaa

SEQ ID NO: 968815 - DNA, 33 bp, Homo sapien
gaaaaatgcaggagtgcaggtagaattatctcc

SEQ ID NO: 968816 - DNA, 33 bp, Homo sapien
gaaaaatgcaggagtgtaggtagaattatctcc

SEQ ID NO: 968817 - DNA, 33 bp, Homo sapien
agcatcacatttagccacacactttaatctaaa

SEQ ID NO: 968818 - DNA, 33 bp, Homo sapien
agcatcacatttagcctcacactttaatctaaa

SEQ ID NO: 968819 - DNA, 33 bp, Homo sapien
aatgagcctttgaaaacataatgcaatcatatc

SEQ ID NO: 968820 - DNA, 33 bp, Homo sapien
aatgagcctttgaaaatataatgcaatcatatc

SEQ ID NO: 968821 - DNA, 33 bp, Homo sapien
gtctctaaggtacaaaaacatgtggatggggag

SEQ ID NO: 968822 - DNA, 33 bp, Homo sapien
gtctctaaggtacaaagacatgtggatggggag

SEQ ID NO: 968823 - DNA, 33 bp, Homo sapien
ctcttatgtagagtctaaaaggagcaagaacac

SEQ ID NO: 968824 - DNA, 33 bp, Homo sapien
ctcttatgtagagtctcaaaggagcaagaacac

SEQ ID NO: 968825 - DNA, 33 bp, Homo sapien
taccgtaggctaagccaaaaatggtgggagctt

SEQ ID NO: 968826 - DNA, 33 bp, Homo sapien
taccgtaggctaagccgaaaatggtgggagctt

SEQ ID NO: 968827 - DNA, 33 bp, Homo sapien
gatttaataccatctccacgacaatggctccca

SEQ ID NO: 968828 - DNA, 33 bp, Homo sapien
gatttaataccatctctacgacaatggctccca

SEQ ID NO: 968829 - DNA, 33 bp, Homo sapien
ttggaatgcaatttgaagactaaatctagagga

SEQ ID NO: 968830 - DNA, 33 bp, Homo sapien
ttggaatgcaatttgaggactaaatctagagga

SEQ ID NO: 968831 - DNA, 33 bp, Homo sapien
agggcctggaattcaaatatgagtaacataggg

SEQ ID NO: 968832 - DNA, 33 bp, Homo sapien
agggcctggaattcaattatgagtaacataggg

SEQ ID NO: 968833 - DNA, 33 bp, Homo sapien
taggacaggtcgaggaaatagcacattctagtg

SEQ ID NO: 968834 - DNA, 33 bp, Homo sapien
taggacaggtcgaggagatagcacattctagtg

SEQ ID NO: 968835 - DNA, 33 bp, Homo sapien
gcatttcctgttctaaacaataggcatggatat

SEQ ID NO: 968836 - DNA, 33 bp, Homo sapien
gcatttcctgttctaatcaataggcatggatat

SEQ ID NO: 968837 - DNA, 33 bp, Homo sapien
gagcaataaatagatacacaaagtgaaatcaaa

SEQ ID NO: 968838 - DNA, 33 bp, Homo sapien
gagcaataaatagatagacaaagtgaaatcaaa

SEQ ID NO: 968839 - DNA, 33 bp, Homo sapien
aaaatatcaaacacagcaaattctatgtcaatg

SEQ ID NO: 968840 - DNA, 33 bp, Homo sapien
aaaatatcaaacacagtaaattctatgtcaatg

SEQ ID NO: 968841 - DNA, 33 bp, Homo sapien
ttctataacaaacctacgctaacaaaagtcttc

SEQ ID NO: 968842 - DNA, 33 bp, Homo sapien
ttctataacaaacctatgctaacaaaagtcttc

SEQ ID NO: 968843 - DNA, 33 bp, Homo sapien
acccatattttgattcacattctctgctgcagt

SEQ ID NO: 968844 - DNA, 33 bp, Homo sapien
acccatattttgattcgcattctctgctgcagt

SEQ ID NO: 968845 - DNA, 33 bp, Homo sapien
aactaagaaacaaaaaagcttaatcctgcttta

SEQ ID NO: 968846 - DNA, 33 bp, Homo sapien
aactaagaaacaaaaaggcttaatcctgcttta

SEQ ID NO: 968847 - DNA, 33 bp, Homo sapien
caagagataggtttagaaaatgcagtaacttaa

SEQ ID NO: 968848 - DNA, 33 bp, Homo sapien
caagagataggtttaggaaatgcagtaacttaa

SEQ ID NO: 968849 - DNA, 33 bp, Homo sapien
ggagacatccattaaccgaaaagggagccaggt

SEQ ID NO: 968850 - DNA, 33 bp, Homo sapien
ggagacatccattaactgaaaagggagccaggt

SEQ ID NO: 968851 - DNA, 33 bp, Homo sapien
catgtgtgcatgaacaataagaacttggtaaat

SEQ ID NO: 968852 - DNA, 33 bp, Homo sapien
catgtgtgcatgaacactaagaacttggtaaat

SEQ ID NO: 968853 - DNA, 33 bp, Homo sapien
aattttagtgcacaacaaattttctgcttgtaa

SEQ ID NO: 968854 - DNA, 33 bp, Homo sapien
aattttagtgcacaacgaattttctgcttgtaa

SEQ ID NO: 968855 - DNA, 33 bp, Homo sapien
cgaggcaagcacccttcaaaggcagtctgaggg

SEQ ID NO: 968856 - DNA, 33 bp, Homo sapien
cgaggcaagcacccttgaaaggcagtctgaggg

SEQ ID NO: 968857 - DNA, 33 bp, Homo sapien
tctgggctattttcaaacacctcactaggtgtc

SEQ ID NO: 968858 - DNA, 33 bp, Homo sapien
tctgggctattttcaatcacctcactaggtgtc

SEQ ID NO: 968859 - DNA, 33 bp, Homo sapien
tccagctcatggacacagactaactaaacccct

SEQ ID NO: 968860 - DNA, 33 bp, Homo sapien
tccagctcatggacacggactaactaaacccct

SEQ ID NO: 968861 - DNA, 33 bp, Homo sapien
aaaacagataaaatagaatcttcgtggtaataa

SEQ ID NO: 968862 - DNA, 33 bp, Homo sapien
aaaacagataaaataggatcttcgtggtaataa

SEQ ID NO: 968863 - DNA, 33 bp, Homo sapien
agtgtttatgtctaaactccagaagagaatggg

SEQ ID NO: 968864 - DNA, 33 bp, Homo sapien
agtgtttatgtctaaattccagaagagaatggg

SEQ ID NO: 968865 - DNA, 33 bp, Homo sapien
tttgctgaagtcctaacagtaactggatattta

SEQ ID NO: 968866 - DNA, 33 bp, Homo sapien
tttgctgaagtcctaatagtaactggatattta

SEQ ID NO: 968867 - DNA, 33 bp, Homo sapien
gaatggttcatgacctcaagttcataaaacaca

SEQ ID NO: 968868 - DNA, 33 bp, Homo sapien
gaatggttcatgacctgaagttcataaaacaca

SEQ ID NO: 968869 - DNA, 33 bp, Homo sapien
aggatagacattagccactcatcacatggtagg

SEQ ID NO: 968870 - DNA, 33 bp, Homo sapien
aggatagacattagcctctcatcacatggtagg

SEQ ID NO: 968871 - DNA, 33 bp, Homo sapien
ttgtcatttcataagtcacttaagcaataagga

SEQ ID NO: 968872 - DNA, 33 bp, Homo sapien
ttgtcatttcataagtgacttaagcaataagga

SEQ ID NO: 968873 - DNA, 33 bp, Homo sapien
gtaagtctacaaaacacctccagtggactcatg

SEQ ID NO: 968874 - DNA, 33 bp, Homo sapien
gtaagtctacaaaacatctccagtggactcatg

SEQ ID NO: 968875 - DNA, 33 bp, Homo sapien
taaagatttaggctctcaaccaagcactgacct

SEQ ID NO: 968876 - DNA, 33 bp, Homo sapien
taaagatttaggctctgaaccaagcactgacct

SEQ ID NO: 968877 - DNA, 33 bp, Homo sapien
ctttcacagcataatcactgcacctgcagactc

SEQ ID NO: 968878 - DNA, 33 bp, Homo sapien
ctttcacagcataatctctgcacctgcagactc

SEQ ID NO: 968879 - DNA, 33 bp, Homo sapien
gggacatttatggtaactgggataaaaaagtca

SEQ ID NO: 968880 - DNA, 33 bp, Homo sapien
gggacatttatggtaattgggataaaaaagtca

SEQ ID NO: 968881 - DNA, 33 bp, Homo sapien
tatgtatccacagaaaacgaaattagtatgttg

SEQ ID NO: 968882 - DNA, 33 bp, Homo sapien
tatgtatccacagaaagcgaaattagtatgttg

SEQ ID NO: 968883 - DNA, 33 bp, Homo sapien
gagcccagacaggatccatgtttgcttgagccc

SEQ ID NO: 968884 - DNA, 33 bp, Homo sapien
gagcccagacaggatctatgtttgcttgagccc

SEQ ID NO: 968885 - DNA, 33 bp, Homo sapien
cattaggactgcctaactacaccaggatttgtt

SEQ ID NO: 968886 - DNA, 33 bp, Homo sapien
cattaggactgcctaattacaccaggatttgtt

SEQ ID NO: 968887 - DNA, 33 bp, Homo sapien
aatacaaagaatcctcccaacttgcaataaaaa

SEQ ID NO: 968888 - DNA, 33 bp, Homo sapien
aatacaaagaatcctctcaacttgcaataaaaa

SEQ ID NO: 968889 - DNA, 33 bp, Homo sapien
tccccccatcctagtacgcaggcaaatcctgaa

SEQ ID NO: 968890 - DNA, 33 bp, Homo sapien
tccccccatcctagtatgcaggcaaatcctgaa

SEQ ID NO: 968891 - DNA, 33 bp, Homo sapien
tttgaattctttgaaaacattcttctctttata

SEQ ID NO: 968892 - DNA, 33 bp, Homo sapien
tttgaattctttgaaagcattcttctctttata

SEQ ID NO: 968893 - DNA, 33 bp, Homo sapien
accctttaggaatgaaagtagaatcaccccctc

SEQ ID NO: 968894 - DNA, 33 bp, Homo sapien
accctttaggaatgaaggtagaatcaccccctc

SEQ ID NO: 968895 - DNA, 33 bp, Homo sapien
aatgtttgtcctgaaaacttaagtcttttaaat

SEQ ID NO: 968896 - DNA, 33 bp, Homo sapien
aatgtttgtcctgaaagcttaagtcttttaaat

SEQ ID NO: 968897 - DNA, 33 bp, Homo sapien
actgagtgctgtttccagaatcactcactctct

SEQ ID NO: 968898 - DNA, 33 bp, Homo sapien
actgagtgctgtttccggaatcactcactctct

SEQ ID NO: 968899 - DNA, 33 bp, Homo sapien
aactagatatggaaacagtctgtaaagtactct

SEQ ID NO: 968900 - DNA, 33 bp, Homo sapien
aactagatatggaaacggtctgtaaagtactct

SEQ ID NO: 968901 - DNA, 33 bp, Homo sapien
atagcatcatatgatacgtagcaggctctgaaa

SEQ ID NO: 968902 - DNA, 33 bp, Homo sapien
atagcatcatatgataggtagcaggctctgaaa

SEQ ID NO: 968903 - DNA, 33 bp, Homo sapien
aaaggatattataagcccttccttctgctgtgt

SEQ ID NO: 968904 - DNA, 33 bp, Homo sapien
aaaggatattataagctcttccttctgctgtgt

SEQ ID NO: 968905 - DNA, 33 bp, Homo sapien
aggctaccgtagatagcccagtatttcttattt

SEQ ID NO: 968906 - DNA, 33 bp, Homo sapien
aggctaccgtagatagtccagtatttcttattt

SEQ ID NO: 968907 - DNA, 33 bp, Homo sapien
tgttatcataaccagcaagggtagttggagagt

SEQ ID NO: 968908 - DNA, 33 bp, Homo sapien
tgttatcataaccagccagggtagttggagagt

SEQ ID NO: 968909 - DNA, 33 bp, Homo sapien
gtgctttctagctctactacttcagatatatag

SEQ ID NO: 968910 - DNA, 33 bp, Homo sapien
gtgctttctagctctagtacttcagatatatag

SEQ ID NO: 968911 - DNA, 33 bp, Homo sapien
aagcattgatgtaacacattatctgcagcaaat

SEQ ID NO: 968912 - DNA, 33 bp, Homo sapien
aagcattgatgtaacatattatctgcagcaaat

SEQ ID NO: 968913 - DNA, 33 bp, Homo sapien
tgttttggtgataacactgagttgtctgtgttc

SEQ ID NO: 968914 - DNA, 33 bp, Homo sapien
tgttttggtgataacattgagttgtctgtgttc

SEQ ID NO: 968915 - DNA, 33 bp, Homo sapien
tctttgacaaagttacaggatcaaaattgaaag

SEQ ID NO: 968916 - DNA, 33 bp, Homo sapien
tctttgacaaagttacgggatcaaaattgaaag

SEQ ID NO: 968917 - DNA, 33 bp, Homo sapien
aattgaaacacttccaactacataattatattt

SEQ ID NO: 968918 - DNA, 33 bp, Homo sapien
aattgaaacacttccagctacataattatattt

SEQ ID NO: 968919 - DNA, 33 bp, Homo sapien
tttgccagcaagtaaagcttgaggaaaagctgt

SEQ ID NO: 968920 - DNA, 33 bp, Homo sapien
tttgccagcaagtaaatcttgaggaaaagctgt

SEQ ID NO: 968921 - DNA, 33 bp, Homo sapien
ggaattgttggctgacaggagttttttgattat

SEQ ID NO: 968922 - DNA, 33 bp, Homo sapien
ggaattgttggctgacgggagttttttgattat

SEQ ID NO: 968923 - DNA, 33 bp, Homo sapien
ctcaaatgtttagtaaatggaacagagtcagag

SEQ ID NO: 968924 - DNA, 33 bp, Homo sapien
ctcaaatgtttagtaagtggaacagagtcagag

SEQ ID NO: 968925 - DNA, 33 bp, Homo sapien
tcatgatcatgtgtggaaggtttcatagggggc

SEQ ID NO: 968926 - DNA, 33 bp, Homo sapien
tcatgatcatgtgtgggaggtttcatagggggc

SEQ ID NO: 968927 - DNA, 33 bp, Homo sapien
acaatggagttactgacggataccaactgaaat

SEQ ID NO: 968928 - DNA, 33 bp, Homo sapien
acaatggagttactgatggataccaactgaaat

SEQ ID NO: 968929 - DNA, 33 bp, Homo sapien
aaacaatttgtgcaaaacttagaataacagtta

SEQ ID NO: 968930 - DNA, 33 bp, Homo sapien
aaacaatttgtgcaaatcttagaataacagtta

SEQ ID NO: 968931 - DNA, 33 bp, Homo sapien
cctctgggctaggcaccgaagcctccaagcaca

SEQ ID NO: 968932 - DNA, 33 bp, Homo sapien
cctctgggctaggcactgaagcctccaagcaca

SEQ ID NO: 968933 - DNA, 33 bp, Homo sapien
gtttttgaaaaccgcaagcagcaatttatagaa

SEQ ID NO: 968934 - DNA, 33 bp, Homo sapien
gtttttgaaaaccgcaggcagcaatttatagaa

SEQ ID NO: 968935 - DNA, 33 bp, Homo sapien
cctgcgtaaggaaaaagatctagaaaggaaagg

SEQ ID NO: 968936 - DNA, 33 bp, Homo sapien
cctgcgtaaggaaaaatatctagaaaggaaagg

SEQ ID NO: 968937 - DNA, 33 bp, Homo sapien
ttgcccctgccttgaaatatctgttttgagctt

SEQ ID NO: 968938 - DNA, 33 bp, Homo sapien
ttgcccctgccttgaagtatctgttttgagctt

SEQ ID NO: 968939 - DNA, 33 bp, Homo sapien
tcatgaagattcataaaattttagtggccaagc

SEQ ID NO: 968940 - DNA, 33 bp, Homo sapien
tcatgaagattcataacattttagtggccaagc

SEQ ID NO: 968941 - DNA, 33 bp, Homo sapien
gctgatgtttaagtcactctcaaagctctctga

SEQ ID NO: 968942 - DNA, 33 bp, Homo sapien
gctgatgtttaagtcattctcaaagctctctga

SEQ ID NO: 968943 - DNA, 33 bp, Homo sapien
ggatatttatgcaaaagtaacagattacagaac

SEQ ID NO: 968944 - DNA, 33 bp, Homo sapien
ggatatttatgcaaaattaacagattacagaac

SEQ ID NO: 968945 - DNA, 33 bp, Homo sapien
aatacactgatcacgaaagaataaactataaag

SEQ ID NO: 968946 - DNA, 33 bp, Homo sapien
aatacactgatcacgagagaataaactataaag

SEQ ID NO: 968947 - DNA, 33 bp, Homo sapien
gtgaggtgtggagagaatttttatgggcagagc

SEQ ID NO: 968948 - DNA, 33 bp, Homo sapien
gtgaggtgtggagagactttttatgggcagagc

SEQ ID NO: 968949 - DNA, 33 bp, Homo sapien
agctgaatgtgtagcaatcagtcaacttgtctg

SEQ ID NO: 968950 - DNA, 33 bp, Homo sapien
agctgaatgtgtagcagtcagtcaacttgtctg

SEQ ID NO: 968951 - DNA, 33 bp, Homo sapien
cattaattttgtaatgacataatatactcaatg

SEQ ID NO: 968952 - DNA, 33 bp, Homo sapien
cattaattttgtaatgtcataatatactcaatg

SEQ ID NO: 968953 - DNA, 33 bp, Homo sapien
tgttgttgaatgtgtaggcacttccattctttt

SEQ ID NO: 968954 - DNA, 33 bp, Homo sapien
tgttgttgaatgtgtatgcacttccattctttt

SEQ ID NO: 968955 - DNA, 33 bp, Homo sapien
tggacttactgtgccacgttatgtccaagttaa

SEQ ID NO: 968956 - DNA, 33 bp, Homo sapien
tggacttactgtgccatgttatgtccaagttaa

SEQ ID NO: 968957 - DNA, 33 bp, Homo sapien
ttatacatatttgaccaataaactaaagctgag

SEQ ID NO: 968958 - DNA, 33 bp, Homo sapien
ttatacatatttgaccgataaactaaagctgag

SEQ ID NO: 968959 - DNA, 33 bp, Homo sapien
gctgtcaagtgataaaccaataaagagaaactg

SEQ ID NO: 968960 - DNA, 33 bp, Homo sapien
gctgtcaagtgataaatcaataaagagaaactg

SEQ ID NO: 968961 - DNA, 33 bp, Homo sapien
tttactcttggttttaaaaaaatatatcagtgg

SEQ ID NO: 968962 - DNA, 33 bp, Homo sapien
tttactcttggttttagaaaaatatatcagtgg

SEQ ID NO: 968963 - DNA, 33 bp, Homo sapien
ggctaatagtctgtcacgaaaagagcttgtcaa

SEQ ID NO: 968964 - DNA, 33 bp, Homo sapien
ggctaatagtctgtcatgaaaagagcttgtcaa

SEQ ID NO: 968965 - DNA, 33 bp, Homo sapien
ttcactaacagaatcagtattttttatggagga

SEQ ID NO: 968966 - DNA, 33 bp, Homo sapien
ttcactaacagaatcattattttttatggagga

SEQ ID NO: 968967 - DNA, 33 bp, Homo sapien
taaagtcacttgtttacctaagagctaaccact

SEQ ID NO: 968968 - DNA, 33 bp, Homo sapien
taaagtcacttgtttatctaagagctaaccact

SEQ ID NO: 968969 - DNA, 33 bp, Homo sapien
taacacgcaacagcaacggtgtctttgttcatc

SEQ ID NO: 968970 - DNA, 33 bp, Homo sapien
taacacgcaacagcaatggtgtctttgttcatc

SEQ ID NO: 968971 - DNA, 33 bp, Homo sapien
ctgtggtgaagaaagaaacccacatacctaaca

SEQ ID NO: 968972 - DNA, 33 bp, Homo sapien
ctgtggtgaagaaagacacccacatacctaaca

SEQ ID NO: 968973 - DNA, 33 bp, Homo sapien
tgacaaacgcagcaaactggaacaacatgaacc

SEQ ID NO: 968974 - DNA, 33 bp, Homo sapien
tgacaaacgcagcaaattggaacaacatgaacc

SEQ ID NO: 968975 - DNA, 33 bp, Homo sapien
ttgatgtcaagcagtacacacaagagcaagact

SEQ ID NO: 968976 - DNA, 33 bp, Homo sapien
ttgatgtcaagcagtatacacaagagcaagact

SEQ ID NO: 968977 - DNA, 33 bp, Homo sapien
acatgatactacaaaaaaaaaagtcatacaata

SEQ ID NO: 968978 - DNA, 33 bp, Homo sapien
acatgatactacaaaagaaaaagtcatacaata

SEQ ID NO: 968979 - DNA, 33 bp, Homo sapien
tattatatgccgattaaataggacttctcatga

SEQ ID NO: 968980 - DNA, 33 bp, Homo sapien
tattatatgccgattagataggacttctcatga

SEQ ID NO: 968981 - DNA, 33 bp, Homo sapien
taaatgttgtgctataaactttccttagagaag

SEQ ID NO: 968982 - DNA, 33 bp, Homo sapien
taaatgttgtgctatagactttccttagagaag

SEQ ID NO: 968983 - DNA, 33 bp, Homo sapien
ggaaacaaacgttggaccttattgaagcaaaga

SEQ ID NO: 968984 - DNA, 33 bp, Homo sapien
ggaaacaaacgttggatcttattgaagcaaaga

SEQ ID NO: 968985 - DNA, 33 bp, Homo sapien
ttttatccagctaaaaaaattatgatgatgaca

SEQ ID NO: 968986 - DNA, 33 bp, Homo sapien
ttttatccagctaaaagaattatgatgatgaca

SEQ ID NO: 968987 - DNA, 33 bp, Homo sapien
caatacaaatcttcaactaggcaattttgaaat

SEQ ID NO: 968988 - DNA, 33 bp, Homo sapien
caatacaaatcttcaagtaggcaattttgaaat

SEQ ID NO: 968989 - DNA, 33 bp, Homo sapien
aaatgtgtaaagtctacgctaatcacacaaatg

SEQ ID NO: 968990 - DNA, 33 bp, Homo sapien
aaatgtgtaaagtctatgctaatcacacaaatg

SEQ ID NO: 968991 - DNA, 33 bp, Homo sapien
tagaaaagtacagtccacagtaaaccaggcacc

SEQ ID NO: 968992 - DNA, 33 bp, Homo sapien
tagaaaagtacagtccgcagtaaaccaggcacc

SEQ ID NO: 968993 - DNA, 33 bp, Homo sapien
tgaactgaatggtttacaggtattcagatacag

SEQ ID NO: 968994 - DNA, 33 bp, Homo sapien
tgaactgaatggtttataggtattcagatacag

SEQ ID NO: 968995 - DNA, 33 bp, Homo sapien
cacaggggaggaagtaactgtggagtcagagaa

SEQ ID NO: 968996 - DNA, 33 bp, Homo sapien
cacaggggaggaagtacctgtggagtcagagaa

SEQ ID NO: 968997 - DNA, 33 bp, Homo sapien
tttcctcctctgcaagacactagctggatgaaa

SEQ ID NO: 968998 - DNA, 33 bp, Homo sapien
tttcctcctctgcaaggcactagctggatgaaa

SEQ ID NO: 968999 - DNA, 33 bp, Homo sapien
attacattgccactaccctatctattgtcatca

SEQ ID NO: 969000 - DNA, 33 bp, Homo sapien
attacattgccactactctatctattgtcatca

SEQ ID NO: 969001 - DNA, 33 bp, Homo sapien
aagccaactttatgaccaaaagctgactaccaa

SEQ ID NO: 969002 - DNA, 33 bp, Homo sapien
aagccaactttatgactaaaagctgactaccaa

SEQ ID NO: 969003 - DNA, 33 bp, Homo sapien
cttggctcttactacccatgagactctgggcag

SEQ ID NO: 969004 - DNA, 33 bp, Homo sapien
cttggctcttactacctatgagactctgggcag

SEQ ID NO: 969005 - DNA, 33 bp, Homo sapien
gcagccatgagtgatacacaaaggaagggcaca

SEQ ID NO: 969006 - DNA, 33 bp, Homo sapien
gcagccatgagtgatatacaaaggaagggcaca

SEQ ID NO: 969007 - DNA, 33 bp, Homo sapien
acctcataagcataccaactcactagaaatcta

SEQ ID NO: 969008 - DNA, 33 bp, Homo sapien
acctcataagcataccgactcactagaaatcta

SEQ ID NO: 969009 - DNA, 33 bp, Homo sapien
accacatgggcagtgacgtctttacttgtggtc

SEQ ID NO: 969010 - DNA, 33 bp, Homo sapien
accacatgggcagtgatgtctttacttgtggtc

SEQ ID NO: 969011 - DNA, 33 bp, Homo sapien
tgtttctgagttagaccgaagtgaatggagact

SEQ ID NO: 969012 - DNA, 33 bp, Homo sapien
tgtttctgagttagactgaagtgaatggagact

SEQ ID NO: 969013 - DNA, 33 bp, Homo sapien
tatgctgggcctattaataaaggtcttccctgc

SEQ ID NO: 969014 - DNA, 33 bp, Homo sapien
tatgctgggcctattagtaaaggtcttccctgc

SEQ ID NO: 969015 - DNA, 33 bp, Homo sapien
caacatgtgctgtagccccctgtggcaaggttt

SEQ ID NO: 969016 - DNA, 33 bp, Homo sapien
caacatgtgctgtagcgccctgtggcaaggttt

SEQ ID NO: 969017 - DNA, 33 bp, Homo sapien
aagggtttatataaaaaagttgcacagaagggt

SEQ ID NO: 969018 - DNA, 33 bp, Homo sapien
aagggtttatataaaagagttgcacagaagggt

SEQ ID NO: 969019 - DNA, 33 bp, Homo sapien
gatcatctttgtttcaaattatacctttgttcc

SEQ ID NO: 969020 - DNA, 33 bp, Homo sapien
gatcatctttgtttcagattatacctttgttcc

SEQ ID NO: 969021 - DNA, 33 bp, Homo sapien
caaatatggattgcttaaaaattattgaattct

SEQ ID NO: 969022 - DNA, 33 bp, Homo sapien
caaatatggattgctttaaaattattgaattct

SEQ ID NO: 969023 - DNA, 33 bp, Homo sapien
gcaaactataggataccgggtgaagtggttgat

SEQ ID NO: 969024 - DNA, 33 bp, Homo sapien
gcaaactataggatactgggtgaagtggttgat

SEQ ID NO: 969025 - DNA, 33 bp, Homo sapien
cccaagatggggtgaaattagcatatccatggg

SEQ ID NO: 969026 - DNA, 33 bp, Homo sapien
cccaagatggggtgaacttagcatatccatggg

SEQ ID NO: 969027 - DNA, 33 bp, Homo sapien
tggctccatttatcacaaactagacagcaatcc

SEQ ID NO: 969028 - DNA, 33 bp, Homo sapien
tggctccatttatcacgaactagacagcaatcc

SEQ ID NO: 969029 - DNA, 33 bp, Homo sapien
gagactttggagtgtggactgttcggttaatat

SEQ ID NO: 969030 - DNA, 33 bp, Homo sapien
gagactttggagtgtgtactgttcggttaatat

SEQ ID NO: 969031 - DNA, 33 bp, Homo sapien; identical to SEQ ID NO: 969029

SEQ ID NO: 969032 - DNA, 33 bp, Homo sapien; identical to SEQ ID NO: 969030

SEQ ID NO: 969033 - DNA, 33 bp, Homo sapien
aatcattaaaacttaaatctccaaaatgatcca

SEQ ID NO: 969034 - DNA, 33 bp, Homo sapien
aatcattaaaacttaagtctccaaaatgatcca

SEQ ID NO: 969035 - DNA, 33 bp, Homo sapien
tgaattttacctcccaaaatcctcatacatcat

SEQ ID NO: 969036 - DNA, 33 bp, Homo sapien
tgaattttacctcccataatcctcatacatcat

SEQ ID NO: 969037 - DNA, 33 bp, Homo sapien
caccatggattagcaaactattatttccaggac

SEQ ID NO: 969038 - DNA, 33 bp, Homo sapien
caccatggattagcaacctattatttccaggac

SEQ ID NO: 969039 - DNA, 33 bp, Homo sapien
catgtaaaattccaaacggcttcgtgagtgatt

SEQ ID NO: 969040 - DNA, 33 bp, Homo sapien
catgtaaaattccaaatggcttcgtgagtgatt

SEQ ID NO: 969041 - DNA, 33 bp, Homo sapien
ggaaaagttgaccaggaaatagcaaattcctcc

SEQ ID NO: 969042 - DNA, 33 bp, Homo sapien
ggaaaagttgaccaggcaatagcaaattcctcc

SEQ ID NO: 969043 - DNA, 33 bp, Homo sapien
atctccttctcttcccccataattactaatagc

SEQ ID NO: 969044 - DNA, 33 bp, Homo sapien
atctccttctcttccctcataattactaatagc

SEQ ID NO: 969045 - DNA, 33 bp, Homo sapien
ttggttgattgaagaacagtcagacaactctaa

SEQ ID NO: 969046 - DNA, 33 bp, Homo sapien
ttggttgattgaagaatagtcagacaactctaa

SEQ ID NO: 969047 - DNA, 33 bp, Homo sapien
ctgaaattgtcagtcaaattcaagttactcaaa

SEQ ID NO: 969048 - DNA, 33 bp, Homo sapien
ctgaaattgtcagtcagattcaagttactcaaa

SEQ ID NO: 969049 - DNA, 33 bp, Homo sapien
tattaggaaaatcgcccctgtcctctgcagggt

SEQ ID NO: 969050 - DNA, 33 bp, Homo sapien
tattaggaaaatcgccgctgtcctctgcagggt

SEQ ID NO: 969051 - DNA, 33 bp, Homo sapien
taaaatggtgagaaggaaagtagctaaataagt

SEQ ID NO: 969052 - DNA, 33 bp, Homo sapien
taaaatggtgagaagggaagtagctaaataagt

SEQ ID NO: 969053 - DNA, 33 bp, Homo sapien
aaagttaaatgtacaacgacaatattctaagaa

SEQ ID NO: 969054 - DNA, 33 bp, Homo sapien
aaagttaaatgtacaatgacaatattctaagaa

SEQ ID NO: 969055 - DNA, 33 bp, Homo sapien
ttcaccctgcctcacaatataattacccttcca

SEQ ID NO: 969056 - DNA, 33 bp, Homo sapien
ttcaccctgcctcacagtataattacccttcca

SEQ ID NO: 969057 - DNA, 33 bp, Homo sapien
gacagacatcactgctcactggatacagcaggc

SEQ ID NO: 969058 - DNA, 33 bp, Homo sapien
gacagacatcactgcttactggatacagcaggc

SEQ ID NO: 969059 - DNA, 33 bp, Homo sapien
gttgagaggaaagggacaaagctgtagaactca

SEQ ID NO: 969060 - DNA, 33 bp, Homo sapien
gttgagaggaaagggataaagctgtagaactca

SEQ ID NO: 969061 - DNA, 33 bp, Homo sapien
ggggattcttacctgccctttcctagcatctgg

SEQ ID NO: 969062 - DNA, 33 bp, Homo sapien
ggggattcttacctgcgctttcctagcatctgg

SEQ ID NO: 969063 - DNA, 33 bp, Homo sapien
gtaacaaaccacaatccccacagctaaccacct

SEQ ID NO: 969064 - DNA, 33 bp, Homo sapien
gtaacaaaccacaatctccacagctaaccacct

SEQ ID NO: 969065 - DNA, 33 bp, Homo sapien
tgtcactctccaagtacaaggcatgagagtgaa

SEQ ID NO: 969066 - DNA, 33 bp, Homo sapien
tgtcactctccaagtataaggcatgagagtgaa

SEQ ID NO: 969067 - DNA, 33 bp, Homo sapien
tatgaggtctgttgtcaaccaatatatccttat

SEQ ID NO: 969068 - DNA, 33 bp, Homo sapien
tatgaggtctgttgtcgaccaatatatccttat

SEQ ID NO: 969069 - DNA, 33 bp, Homo sapien
tctcatgcaactttccactttgctcgctgaatt

SEQ ID NO: 969070 - DNA, 33 bp, Homo sapien
tctcatgcaactttccgctttgctcgctgaatt

SEQ ID NO: 969071 - DNA, 33 bp, Homo sapien
cacacatattttaggcaagaaaaacctgcaaag

SEQ ID NO: 969072 - DNA, 33 bp, Homo sapien
cacacatattttaggccagaaaaacctgcaaag

SEQ ID NO: 969073 - DNA, 33 bp, Homo sapien
tctcaaaattaatgtcagacaccaaagtacaga

SEQ ID NO: 969074 - DNA, 33 bp, Homo sapien
tctcaaaattaatgtcggacaccaaagtacaga

SEQ ID NO: 969075 - DNA, 33 bp, Homo sapien
ctggagctggtttcagacatacatgtggtggct

SEQ ID NO: 969076 - DNA, 33 bp, Homo sapien
ctggagctggtttcaggcatacatgtggtggct

SEQ ID NO: 969077 - DNA, 33 bp, Homo sapien
ctaagcctaggttgatcagctagaagttgatag

SEQ ID NO: 969078 - DNA, 33 bp, Homo sapien
ctaagcctaggttgatgagctagaagttgatag

SEQ ID NO: 969079 - DNA, 33 bp, Homo sapien
gaggtgcattctgggaagatagagaagatggca

SEQ ID NO: 969080 - DNA, 33 bp, Homo sapien
gaggtgcattctgggacgatagagaagatggca

SEQ ID NO: 969081 - DNA, 33 bp, Homo sapien
catgcctgacctggaacggctaactgcagtctc

SEQ ID NO: 969082 - DNA, 33 bp, Homo sapien
catgcctgacctggaatggctaactgcagtctc

SEQ ID NO: 969083 - DNA, 33 bp, Homo sapien
gacaagttggtacctacacttggtgacctgtct

SEQ ID NO: 969084 - DNA, 33 bp, Homo sapien
gacaagttggtacctatacttggtgacctgtct

SEQ ID NO: 969085 - DNA, 33 bp, Homo sapien
tgaacagcctggctaaccaacttcatttaattc

SEQ ID NO: 969086 - DNA, 33 bp, Homo sapien
tgaacagcctggctaagcaacttcatttaattc

SEQ ID NO: 969087 - DNA, 33 bp, Homo sapien
gagtgcattatcatcaagactgaatacataaac

SEQ ID NO: 969088 - DNA, 33 bp, Homo sapien
gagtgcattatcatcaggactgaatacataaac

SEQ ID NO: 969089 - DNA, 33 bp, Homo sapien
ataggctagagccccaacaattgacagtaacaa

SEQ ID NO: 969090 - DNA, 33 bp, Homo sapien
ataggctagagccccagcaattgacagtaacaa

SEQ ID NO: 969091 - DNA, 33 bp, Homo sapien
tttttttgtggcaagacatttgaaatttactcc

SEQ ID NO: 969092 - DNA, 33 bp, Homo sapien
tttttttgtggcaagatatttgaaatttactcc

SEQ ID NO: 969093 - DNA, 33 bp, Homo sapien
ctgccaatctccaacccatggtagccagcattt

SEQ ID NO: 969094 - DNA, 33 bp, Homo sapien
ctgccaatctccaacctatggtagccagcattt

SEQ ID NO: 969095 - DNA, 33 bp, Homo sapien
gggcaacatgggtaaacgagttgtaagaataac

SEQ ID NO: 969096 - DNA, 33 bp, Homo sapien
gggcaacatgggtaaatgagttgtaagaataac

SEQ ID NO: 969097 - DNA, 33 bp, Homo sapien
aggatggagagctgaaaagactcaggtcatgta

SEQ ID NO: 969098 - DNA, 33 bp, Homo sapien
aggatggagagctgaagagactcaggtcatgta

SEQ ID NO: 969099 - DNA, 33 bp, Homo sapien
atttactgagtgcctacaatatacgtagtactt

SEQ ID NO: 969100 - DNA, 33 bp, Homo sapien
atttactgagtgcctataatatacgtagtactt

SEQ ID NO: 969101 - DNA, 33 bp, Homo sapien
tttgaaagatccttcccagtgtttcaatacttt

SEQ ID NO: 969102 - DNA, 33 bp, Homo sapien
tttgaaagatccttcctagtgtttcaatacttt

SEQ ID NO: 969103 - DNA, 33 bp, Homo sapien
atgatggtggagtttccagtcagacaggcatta

SEQ ID NO: 969104 - DNA, 33 bp, Homo sapien
atgatggtggagtttcgagtcagacaggcatta

SEQ ID NO: 969105 - DNA, 33 bp, Homo sapien
acatggagcagaaggaactctcagtcaagctca

SEQ ID NO: 969106 - DNA, 33 bp, Homo sapien
acatggagcagaaggacctctcagtcaagctca

SEQ ID NO: 969107 - DNA, 33 bp, Homo sapien
gcacataaaatacaaccattaatcggtgttgtt

SEQ ID NO: 969108 - DNA, 33 bp, Homo sapien
gcacataaaatacaactattaatcggtgttgtt

SEQ ID NO: 969109 - DNA, 33 bp, Homo sapien
taaataagatgttcaactgactatagaatagta

SEQ ID NO: 969110 - DNA, 33 bp, Homo sapien
taaataagatgttcaattgactatagaatagta

SEQ ID NO: 969111 - DNA, 33 bp, Homo sapien
agaaaattcaatctaactcttatagtttgcagt

SEQ ID NO: 969112 - DNA, 33 bp, Homo sapien
agaaaattcaatctaagtcttatagtttgcagt

SEQ ID NO: 969113 - DNA, 33 bp, Homo sapien
gaaaatgcataactaaacaaggattaaaaaata

SEQ ID NO: 969114 - DNA, 33 bp, Homo sapien
gaaaatgcataactaagcaaggattaaaaaata

SEQ ID NO: 969115 - DNA, 33 bp, Homo sapien
cctctgcctgtttttaccttaatgttgttacac

SEQ ID NO: 969116 - DNA, 33 bp, Homo sapien
cctctgcctgtttttatcttaatgttgttacac

SEQ ID NO: 969117 - DNA, 33 bp, Homo sapien
aaatcttaggctgctcaatgggactatctagct

SEQ ID NO: 969118 - DNA, 33 bp, Homo sapien
aaatcttaggctgctctatgggactatctagct

SEQ ID NO: 969119 - DNA, 33 bp, Homo sapien
gtactaagaattagacaagagccagaacaggtc

SEQ ID NO: 969120 - DNA, 33 bp, Homo sapien
gtactaagaattagaccagagccagaacaggtc

SEQ ID NO: 969121 - DNA, 33 bp, Homo sapien
acaaaagactgctgtaaagaattatactccaac

SEQ ID NO: 969122 - DNA, 33 bp, Homo sapien
acaaaagactgctgtacagaattatactccaac

SEQ ID NO: 969123 - DNA, 33 bp, Homo sapien
aggtccatgaatcctaggaagtacagttcaaat

SEQ ID NO: 969124 - DNA, 33 bp, Homo sapien
aggtccatgaatcctatgaagtacagttcaaat

SEQ ID NO: 969125 - DNA, 33 bp, Homo sapien
aaatctgaaccacaggacatgacaatcattcaa

SEQ ID NO: 969126 - DNA, 33 bp, Homo sapien
aaatctgaaccacaggccatgacaatcattcaa

SEQ ID NO: 969127 - DNA, 33 bp, Homo sapien
atatttaggactgtcaaatgttaactctaccac

SEQ ID NO: 969128 - DNA, 33 bp, Homo sapien
atatttaggactgtcatatgttaactctaccac

SEQ ID NO: 969129 - DNA, 33 bp, Homo sapien
cttattgagagttatacagtcattgatattaac

SEQ ID NO: 969130 - DNA, 33 bp, Homo sapien
cttattgagagttatatagtcattgatattaac

SEQ ID NO: 969131 - DNA, 33 bp, Homo sapien
gaatggatgaacaaacgatggtgcatgtacaga

SEQ ID NO: 969132 - DNA, 33 bp, Homo sapien
gaatggatgaacaaactatggtgcatgtacaga

SEQ ID NO: 969133 - DNA, 33 bp, Homo sapien
acaaacacgttacaagcctcaatagggagatta

SEQ ID NO: 969134 - DNA, 33 bp, Homo sapien
acaaacacgttacaaggctcaatagggagatta

SEQ ID NO: 969135 - DNA, 33 bp, Homo sapien
ttacaggcatacatcaacacaaccagctaattt

SEQ ID NO: 969136 - DNA, 33 bp, Homo sapien
ttacaggcatacatcaccacaaccagctaattt

SEQ ID NO: 969137 - DNA, 33 bp, Homo sapien
tcactgtgtaggattaagatcatgtgttttgaa

SEQ ID NO: 969138 - DNA, 33 bp, Homo sapien
tcactgtgtaggattaggatcatgtgttttgaa

SEQ ID NO: 969139 - DNA, 33 bp, Homo sapien
taccacacaactttgaaaaagaaacaccgcaca

SEQ ID NO: 969140 - DNA, 33 bp, Homo sapien
taccacacaactttgacaaagaaacaccgcaca

SEQ ID NO: 969141 - DNA, 33 bp, Homo sapien
agaggttagtaccaacaggcacaggagagctga

SEQ ID NO: 969142 - DNA, 33 bp, Homo sapien
agaggttagtaccaacgggcacaggagagctga

SEQ ID NO: 969143 - DNA, 33 bp, Homo sapien
tattagtaaagctgtaaaaaaataagaatgcca

SEQ ID NO: 969144 - DNA, 33 bp, Homo sapien
tattagtaaagctgtagaaaaataagaatgcca

SEQ ID NO: 969145 - DNA, 33 bp, Homo sapien
taaatgtgccagtaataaaaaaggtattagttg

SEQ ID NO: 969146 - DNA, 33 bp, Homo sapien
taaatgtgccagtaatgaaaaaggtattagttg

SEQ ID NO: 969147 - DNA, 33 bp, Homo sapien
ttactttaatcggttaagaagcagatattaata

SEQ ID NO: 969148 - DNA, 33 bp, Homo sapien
ttactttaatcggttaggaagcagatattaata

SEQ ID NO: 969149 - DNA, 33 bp, Homo sapien
ccacctatgcctaattcaatgcactaaaaatat

SEQ ID NO: 969150 - DNA, 33 bp, Homo sapien
ccacctatgcctaatttaatgcactaaaaatat

SEQ ID NO: 969151 - DNA, 33 bp, Homo sapien
tacagccatcacataacctaattttagaatgtt

SEQ ID NO: 969152 - DNA, 33 bp, Homo sapien
tacagccatcacataagctaattttagaatgtt

SEQ ID NO: 969153 - DNA, 33 bp, Homo sapien
ccaattaggatcccagaatccaccctcaactga

SEQ ID NO: 969154 - DNA, 33 bp, Homo sapien
ccaattaggatcccagtatccaccctcaactga

SEQ ID NO: 969155 - DNA, 33 bp, Homo sapien
ttaactatattaactacaatgatgatagtaatt

SEQ ID NO: 969156 - DNA, 33 bp, Homo sapien
ttaactatattaactagaatgatgatagtaatt

SEQ ID NO: 969157 - DNA, 33 bp, Homo sapien
ctgtctaacatgtgcacgggtctacaattcttt

SEQ ID NO: 969158 - DNA, 33 bp, Homo sapien
ctgtctaacatgtgcatgggtctacaattcttt

SEQ ID NO: 969159 - DNA, 33 bp, Homo sapien
cttcagggtggaaagagatgcggtttgactaca

SEQ ID NO: 969160 - DNA, 33 bp, Homo sapien
cttcagggtggaaagatatgcggtttgactaca

SEQ ID NO: 969161 - DNA, 33 bp, Homo sapien
gtttaaatactggagcaactactaactagctgg

SEQ ID NO: 969162 - DNA, 33 bp, Homo sapien
gtttaaatactggagcgactactaactagctgg

SEQ ID NO: 969163 - DNA, 33 bp, Homo sapien
atgacatggtaagtccaatgatagagttatgca

SEQ ID NO: 969164 - DNA, 33 bp, Homo sapien
atgacatggtaagtcctatgatagagttatgca

SEQ ID NO: 969165 - DNA, 33 bp, Homo sapien
gaggaggctagaaaacgataaccaacagtgaaa

SEQ ID NO: 969166 - DNA, 33 bp, Homo sapien
gaggaggctagaaaactataaccaacagtgaaa

SEQ ID NO: 969167 - DNA, 33 bp, Homo sapien
ttatttcacacaaaaaagcaggcaaaacaatat

SEQ ID NO: 969168 - DNA, 33 bp, Homo sapien
ttatttcacacaaaaaggcaggcaaaacaatat

SEQ ID NO: 969169 - DNA, 33 bp, Homo sapien
agctcatctgtcaccaagctccatcccagtgtg

SEQ ID NO: 969170 - DNA, 33 bp, Homo sapien
agctcatctgtcaccaggctccatcccagtgtg

SEQ ID NO: 969171 - DNA, 33 bp, Homo sapien
cataaaataaaaagccacataaagctgacccca

SEQ ID NO: 969172 - DNA, 33 bp, Homo sapien
cataaaataaaaagccgcataaagctgacccca

SEQ ID NO: 969173 - DNA, 33 bp, Homo sapien
ttcatacaggaaagaacaagggctttgaaataa

SEQ ID NO: 969174 - DNA, 33 bp, Homo sapien
ttcatacaggaaagaataagggctttgaaataa

SEQ ID NO: 969175 - DNA, 33 bp, Homo sapien
tattaacagtttaggcagcatatattttaagga

SEQ ID NO: 969176 - DNA, 33 bp, Homo sapien
tattaacagtttaggcggcatatattttaagga

SEQ ID NO: 969177 - DNA, 33 bp, Homo sapien
atgcaagtagaagagacatcactaaattctttt

SEQ ID NO: 969178 - DNA, 33 bp, Homo sapien
atgcaagtagaagagatatcactaaattctttt

SEQ ID NO: 969179 - DNA, 33 bp, Homo sapien
gaagagaggacctggacagaaacctgggagcac

SEQ ID NO: 969180 - DNA, 33 bp, Homo sapien
gaagagaggacctggagagaaacctgggagcac

SEQ ID NO: 969181 - DNA, 33 bp, Homo sapien
agagaccttgagagacgattggtgcgatccgct

SEQ ID NO: 969182 - DNA, 33 bp, Homo sapien
agagaccttgagagactattggtgcgatccgct

SEQ ID NO: 969183 - DNA, 33 bp, Homo sapien
aagagcctaaaaaggcagcagtctaggattttc

SEQ ID NO: 969184 - DNA, 33 bp, Homo sapien
aagagcctaaaaaggcggcagtctaggattttc

SEQ ID NO: 969185 - DNA, 33 bp, Homo sapien
gccaaaggagagctgacgtacctgtacccgcga

SEQ ID NO: 969186 - DNA, 33 bp, Homo sapien
gccaaaggagagctgatgtacctgtacccgcga

SEQ ID NO: 969187 - DNA, 33 bp, Homo sapien
ttccaagcctcaggaacaggaggatgaattaga

SEQ ID NO: 969188 - DNA, 33 bp, Homo sapien
ttccaagcctcaggaagaggaggatgaattaga

SEQ ID NO: 969189 - DNA, 33 bp, Homo sapien
ttcagctgaaagacataaatcagtaccttctaa

SEQ ID NO: 969190 - DNA, 33 bp, Homo sapien
ttcagctgaaagacattaatcagtaccttctaa

SEQ ID NO: 969191 - DNA, 33 bp, Homo sapien
tgactgaaatgttgagccgtttggctgagactg

SEQ ID NO: 969192 - DNA, 33 bp, Homo sapien
tgactgaaatgttgagtcgtttggctgagactg

SEQ ID NO: 969193 - DNA, 33 bp, Homo sapien
aggagaatcatcctctaaagaacatgaattaca

SEQ ID NO: 969194 - DNA, 33 bp, Homo sapien
aggagaatcatcctctgaagaacatgaattaca

SEQ ID NO: 969195 - DNA, 33 bp, Homo sapien
ctgtttcttattgaaaacataacacagcggttt

SEQ ID NO: 969196 - DNA, 33 bp, Homo sapien
ctgtttcttattgaaatcataacacagcggttt

SEQ ID NO: 969197 - DNA, 33 bp, Homo sapien
atgtcttttttgggcacagttgtaactcattaa

SEQ ID NO: 969198 - DNA, 33 bp, Homo sapien
atgtcttttttgggcatagttgtaactcattaa

SEQ ID NO: 969199 - DNA, 33 bp, Homo sapien
tgctaccctaaattaaatacgtagcagcttctt

SEQ ID NO: 969200 - DNA, 33 bp, Homo sapien
tgctaccctaaattaattacgtagcagcttctt

SEQ ID NO: 969201 - DNA, 33 bp, Homo sapien
cttgtgcactgactcaaaatatcaactggcaga

SEQ ID NO: 969202 - DNA, 33 bp, Homo sapien
cttgtgcactgactcagaatatcaactggcaga

SEQ ID NO: 969203 - DNA, 33 bp, Homo sapien
tctgtctagcatagtgacaagtctccaggttat

SEQ ID NO: 969204 - DNA, 33 bp, Homo sapien
tctgtctagcatagtggcaagtctccaggttat

SEQ ID NO: 969205 - DNA, 33 bp, Homo sapien
attgtttatatgaagcaaaatgataaaaataag

SEQ ID NO: 969206 - DNA, 33 bp, Homo sapien
attgtttatatgaagcgaaatgataaaaataag

SEQ ID NO: 969207 - DNA, 33 bp, Homo sapien
taccttcttccatacacgttaatggtgaatcac

SEQ ID NO: 969208 - DNA, 33 bp, Homo sapien
taccttcttccatacatgttaatggtgaatcac

SEQ ID NO: 969209 - DNA, 33 bp, Homo sapien
attaataaaatatgtacgttcactgagacaatt

SEQ ID NO: 969210 - DNA, 33 bp, Homo sapien
attaataaaatatgtatgttcactgagacaatt

SEQ ID NO: 969211 - DNA, 33 bp, Homo sapien
tagattcatggcaagacaaccagtcaccaaatt

SEQ ID NO: 969212 - DNA, 33 bp, Homo sapien
tagattcatggcaagataaccagtcaccaaatt

SEQ ID NO: 969213 - DNA, 33 bp, Homo sapien
actccatggagccaaaggatttgcctcagagtt

SEQ ID NO: 969214 - DNA, 33 bp, Homo sapien
actccatggagccaaatgatttgcctcagagtt

SEQ ID NO: 969215 - DNA, 33 bp, Homo sapien
aacaggagatgttaaacgcttctgatacatttt

SEQ ID NO: 969216 - DNA, 33 bp, Homo sapien
aacaggagatgttaaaggcttctgatacatttt

SEQ ID NO: 969217 - DNA, 33 bp, Homo sapien
gtaaatagctttttgacatacatctgcagccag

SEQ ID NO: 969218 - DNA, 33 bp, Homo sapien
gtaaatagctttttgatatacatctgcagccag

SEQ ID NO: 969219 - DNA, 33 bp, Homo sapien
gtaggtgtaggtatgggcatctaagtaagttct

SEQ ID NO: 969220 - DNA, 33 bp, Homo sapien
gtaggtgtaggtatggtcatctaagtaagttct

SEQ ID NO: 969221 - DNA, 33 bp, Homo sapien
ggctttcatctttctacgcaacaggagaaaggg

SEQ ID NO: 969222 - DNA, 33 bp, Homo sapien
ggctttcatctttctatgcaacaggagaaaggg

SEQ ID NO: 969223 - DNA, 33 bp, Homo sapien
atcctaatgacagaaccgtgagaatataatctt

SEQ ID NO: 969224 - DNA, 33 bp, Homo sapien
atcctaatgacagaactgtgagaatataatctt

SEQ ID NO: 969225 - DNA, 33 bp, Homo sapien
tctttacacgaaatcacctgttacactgcactg

SEQ ID NO: 969226 - DNA, 33 bp, Homo sapien
tctttacacgaaatcatctgttacactgcactg

SEQ ID NO: 969227 - DNA, 33 bp, Homo sapien
ttgctgtggttcaaacacttctgaaaatttcag

SEQ ID NO: 969228 - DNA, 33 bp, Homo sapien
ttgctgtggttcaaacgcttctgaaaatttcag

SEQ ID NO: 969229 - DNA, 33 bp, Homo sapien
agtatccagtctaccaatgagtccataaaaaca

SEQ ID NO: 969230 - DNA, 33 bp, Homo sapien
agtatccagtctaccagtgagtccataaaaaca

SEQ ID NO: 969231 - DNA, 33 bp, Homo sapien
ctatgaaaagaacacaataatagcactttctat

SEQ ID NO: 969232 - DNA, 33 bp, Homo sapien
ctatgaaaagaacacattaatagcactttctat

SEQ ID NO: 969233 - DNA, 33 bp, Homo sapien
ctccatctgttccaaacttatgttagcttccag

SEQ ID NO: 969234 - DNA, 33 bp, Homo sapien
ctccatctgttccaaagttatgttagcttccag

SEQ ID NO: 969235 - DNA, 33 bp, Homo sapien
aggagagaggggcaccacagataacagagagaa

SEQ ID NO: 969236 - DNA, 33 bp, Homo sapien
aggagagaggggcaccgcagataacagagagaa

SEQ ID NO: 969237 - DNA, 33 bp, Homo sapien
acaacaaaaaatcatgccactggtatacagttt

SEQ ID NO: 969238 - DNA, 33 bp, Homo sapien
acaacaaaaaatcatgtcactggtatacagttt

SEQ ID NO: 969239 - DNA, 33 bp, Homo sapien
tgcacttacagaataccggtgactgaggtacac

SEQ ID NO: 969240 - DNA, 33 bp, Homo sapien
tgcacttacagaatactggtgactgaggtacac

SEQ ID NO: 969241 - DNA, 33 bp, Homo sapien
taaaggtaggacagacagtacaccactaaaggc

SEQ ID NO: 969242 - DNA, 33 bp, Homo sapien
taaaggtaggacagactgtacaccactaaaggc

SEQ ID NO: 969243 - DNA, 33 bp, Homo sapien
agatttgaagcacgtacgccatccttccaggct

SEQ ID NO: 969244 - DNA, 33 bp, Homo sapien
agatttgaagcacgtatgccatccttccaggct

SEQ ID NO: 969245 - DNA, 33 bp, Homo sapien
aatagaaggccataagaaaaagcattaactttg

SEQ ID NO: 969246 - DNA, 33 bp, Homo sapien
aatagaaggccataagtaaaagcattaactttg

SEQ ID NO: 969247 - DNA, 33 bp, Homo sapien
actccctttctgagtccaaacataccaagattc

SEQ ID NO: 969248 - DNA, 33 bp, Homo sapien
actccctttctgagtcgaaacataccaagattc

SEQ ID NO: 969249 - DNA, 33 bp, Homo sapien
tataaggagacatctgaactaagtacctatagt

SEQ ID NO: 969250 - DNA, 33 bp, Homo sapien
tataaggagacatctgcactaagtacctatagt

SEQ ID NO: 969251 - DNA, 33 bp, Homo sapien
aaatactgaagtgtgcagaaggagggagagacc

SEQ ID NO: 969252 - DNA, 33 bp, Homo sapien
aaatactgaagtgtgcggaaggagggagagacc

SEQ ID NO: 969253 - DNA, 33 bp, Homo sapien
ttacttgtacattttgcatttcaggcctggaat

SEQ ID NO: 969254 - DNA, 33 bp, Homo sapien
ttacttgtacattttgtatttcaggcctggaat

SEQ ID NO: 969255 - DNA, 33 bp, Homo sapien
aattcgtcactggaaaacatggagtattcagca

SEQ ID NO: 969256 - DNA, 33 bp, Homo sapien
aattcgtcactggaaagcatggagtattcagca

SEQ ID NO: 969257 - DNA, 33 bp, Homo sapien
gagattacagccttgaccatgactaccctcagt

SEQ ID NO: 969258 - DNA, 33 bp, Homo sapien
gagattacagccttgatcatgactaccctcagt

SEQ ID NO: 969259 - DNA, 33 bp, Homo sapien
tttaaaggattacgccggctgcagttttgaaaa

SEQ ID NO: 969260 - DNA, 33 bp, Homo sapien
tttaaaggattacgcctgctgcagttttgaaaa

SEQ ID NO: 969261 - DNA, 33 bp, Homo sapien
ggagctggcttctagaccccttcctgtagatag

SEQ ID NO: 969262 - DNA, 33 bp, Homo sapien
ggagctggcttctagatcccttcctgtagatag

SEQ ID NO: 969263 - DNA, 33 bp, Homo sapien
tctgcctggaaacacaatcagggctgttggcag

SEQ ID NO: 969264 - DNA, 33 bp, Homo sapien
tctgcctggaaacacactcagggctgttggcag

SEQ ID NO: 969265 - DNA, 33 bp, Homo sapien
tgtataatcgaaataagcgagacagtatacaat

SEQ ID NO: 969266 - DNA, 33 bp, Homo sapien
tgtataatcgaaataatcgagacagtatacaat

SEQ ID NO: 969267 - DNA, 33 bp, Homo sapien
cccagattctgtccagaaaaacttcgcattcag

SEQ ID NO: 969268 - DNA, 33 bp, Homo sapien
cccagattctgtccaggaaaacttcgcattcag

SEQ ID NO: 969269 - DNA, 33 bp, Homo sapien
tgttttcagttgaagacgttatttaagcctgaa

SEQ ID NO: 969270 - DNA, 33 bp, Homo sapien
tgttttcagttgaagatgttatttaagcctgaa

SEQ ID NO: 969271 - DNA, 33 bp, Homo sapien
taatattttcccttcaaagagtaactgcaaatg

SEQ ID NO: 969272 - DNA, 33 bp, Homo sapien
taatattttcccttcagagagtaactgcaaatg

SEQ ID NO: 969273 - DNA, 33 bp, Homo sapien
aactgcaaatgatacaagtagcaaaccaacaac

SEQ ID NO: 969274 - DNA, 33 bp, Homo sapien
aactgcaaatgatacaggtagcaaaccaacaac

SEQ ID NO: 969275 - DNA, 33 bp, Homo sapien
agtatcattggtggagacaattattcagcctgc

SEQ ID NO: 969276 - DNA, 33 bp, Homo sapien
agtatcattggtggaggcaattattcagcctgc

SEQ ID NO: 969277 - DNA, 33 bp, Homo sapien
tcaatttcaagtgaaaagtaacaaaagacaaag

SEQ ID NO: 969278 - DNA, 33 bp, Homo sapien
tcaatttcaagtgaaaggtaacaaaagacaaag

SEQ ID NO: 969279 - DNA, 33 bp, Homo sapien
aggtactggaagtcaacgatgcagcctgtgaca

SEQ ID NO: 969280 - DNA, 33 bp, Homo sapien
aggtactggaagtcaatgatgcagcctgtgaca

SEQ ID NO: 969281 - DNA, 33 bp, Homo sapien
cctttctatggattccacgctgattttcacctt

SEQ ID NO: 969282 - DNA, 33 bp, Homo sapien
cctttctatggattccgcgctgattttcacctt

SEQ ID NO: 969283 - DNA, 33 bp, Homo sapien
atatttattagcaagcagcataaaagcagttac

SEQ ID NO: 969284 - DNA, 33 bp, Homo sapien
atatttattagcaagccgcataaaagcagttac

SEQ ID NO: 969285 - DNA, 33 bp, Homo sapien
ggatggaacctaagataactcaataatctcccc

SEQ ID NO: 969286 - DNA, 33 bp, Homo sapien
ggatggaacctaagatgactcaataatctcccc

SEQ ID NO: 969287 - DNA, 33 bp, Homo sapien
tggcccagaacaggacaagaaatgctttgagag

SEQ ID NO: 969288 - DNA, 33 bp, Homo sapien
tggcccagaacaggaccagaaatgctttgagag

SEQ ID NO: 969289 - DNA, 33 bp, Homo sapien
gcagcctggaagaagaccctcagcagaatccaa

SEQ ID NO: 969290 - DNA, 33 bp, Homo sapien
gcagcctggaagaagatcctcagcagaatccaa

SEQ ID NO: 969291 - DNA, 33 bp, Homo sapien
tatgagaaataaggatcatattctgatttccat

SEQ ID NO: 969292 - DNA, 33 bp, Homo sapien
tatgagaaataaggatgatattctgatttccat

SEQ ID NO: 969293 - DNA, 33 bp, Homo sapien
tttattgctgaactaaaaaaagcaacataagct

SEQ ID NO: 969294 - DNA, 33 bp, Homo sapien
tttattgctgaactaagaaaagcaacataagct

SEQ ID NO: 969295 - DNA, 33 bp, Homo sapien
aactttgaatggttgaatacagggatcaatccg

SEQ ID NO: 969296 - DNA, 33 bp, Homo sapien
aactttgaatggttgagtacagggatcaatccg

SEQ ID NO: 969297 - DNA, 33 bp, Homo sapien
aggaaaagtggattgaagaagggatctggtgaa

SEQ ID NO: 969298 - DNA, 33 bp, Homo sapien
aggaaaagtggattgaggaagggatctggtgaa

SEQ ID NO: 969299 - DNA, 33 bp, Homo sapien
ctaatctccaacattgaagtttcagctctaaga

SEQ ID NO: 969300 - DNA, 33 bp, Homo sapien
ctaatctccaacattgtagtttcagctctaaga

SEQ ID NO: 969301 - DNA, 33 bp, Homo sapien
tgtccattagcacttcaagtgtgattttattca

SEQ ID NO: 969302 - DNA, 33 bp, Homo sapien
tgtccattagcacttcgagtgtgattttattca

SEQ ID NO: 969303 - DNA, 33 bp, Homo sapien
gaaaacaagatgcaaggctgctttaatggtatc

SEQ ID NO: 969304 - DNA, 33 bp, Homo sapien
gaaaacaagatgcaagtctgctttaatggtatc

SEQ ID NO: 969305 - DNA, 33 bp, Homo sapien
acaataggctatgccacataacctaagtgtgta

SEQ ID NO: 969306 - DNA, 33 bp, Homo sapien
acaataggctatgccatataacctaagtgtgta

SEQ ID NO: 969307 - DNA, 33 bp, Homo sapien
tgtttctcccatgaagactgactaaatttcccc

SEQ ID NO: 969308 - DNA, 33 bp, Homo sapien
tgtttctcccatgaagtctgactaaatttcccc

SEQ ID NO: 969309 - DNA, 33 bp, Homo sapien
cttgtggtagagttagaactggtcagagccata

SEQ ID NO: 969310 - DNA, 33 bp, Homo sapien
cttgtggtagagttaggactggtcagagccata

SEQ ID NO: 969311 - DNA, 33 bp, Homo sapien
cataaagtgggttaaagagtggtagatataaag

SEQ ID NO: 969312 - DNA, 33 bp, Homo sapien
cataaagtgggttaaatagtggtagatataaag

SEQ ID NO: 969313 - DNA, 33 bp, Homo sapien
atagacaaactttatcaagctgagtgatcttat

SEQ ID NO: 969314 - DNA, 33 bp, Homo sapien
atagacaaactttatccagctgagtgatcttat

SEQ ID NO: 969315 - DNA, 33 bp, Homo sapien
tctgccatcataataaatgcataaggccttact

SEQ ID NO: 969316 - DNA, 33 bp, Homo sapien
tctgccatcataataactgcataaggccttact

SEQ ID NO: 969317 - DNA, 33 bp, Homo sapien
gaaccagtagactagactacctctaagttctct

SEQ ID NO: 969318 - DNA, 33 bp, Homo sapien
gaaccagtagactagattacctctaagttctct

SEQ ID NO: 969319 - DNA, 33 bp, Homo sapien
tgactttgacaaagctaacaaaaataagcaatg

SEQ ID NO: 969320 - DNA, 33 bp, Homo sapien
tgactttgacaaagcttacaaaaataagcaatg

SEQ ID NO: 969321 - DNA, 33 bp, Homo sapien
atacctacctttcacacatacaatactgaaaat

SEQ ID NO: 969322 - DNA, 33 bp, Homo sapien
atacctacctttcacatatacaatactgaaaat

SEQ ID NO: 969323 - DNA, 33 bp, Homo sapien
gaaatgccatgcaagaagtaaaaagtttgagaa

SEQ ID NO: 969324 - DNA, 33 bp, Homo sapien
gaaatgccatgcaagaggtaaaaagtttgagaa

SEQ ID NO: 969325 - DNA, 33 bp, Homo sapien
tagtgcttccttcatacgctcctgtaaggcaga

SEQ ID NO: 969326 - DNA, 33 bp, Homo sapien
tagtgcttccttcatatgctcctgtaaggcaga

SEQ ID NO: 969327 - DNA, 33 bp, Homo sapien
gcctcaaaaatgtaaaatccctcaacttctatt

SEQ ID NO: 969328 - DNA, 33 bp, Homo sapien
gcctcaaaaatgtaaagtccctcaacttctatt

SEQ ID NO: 969329 - DNA, 33 bp, Homo sapien
tgaagattttggaagcaaaagacccaagatgaa

SEQ ID NO: 969330 - DNA, 33 bp, Homo sapien
tgaagattttggaagcgaaagacccaagatgaa

SEQ ID NO: 969331 - DNA, 33 bp, Homo sapien
gtgactatggagactccaggtgctttgatcctc

SEQ ID NO: 969332 - DNA, 33 bp, Homo sapien
gtgactatggagactctaggtgctttgatcctc

SEQ ID NO: 969333 - DNA, 33 bp, Homo sapien
tttatgctctctgataacaaataagtatactca

SEQ ID NO: 969334 - DNA, 33 bp, Homo sapien
tttatgctctctgatagcaaataagtatactca

SEQ ID NO: 969335 - DNA, 33 bp, Homo sapien
attcaactccagctaactccctggttttatctt

SEQ ID NO: 969336 - DNA, 33 bp, Homo sapien
attcaactccagctaattccctggttttatctt

SEQ ID NO: 969337 - DNA, 33 bp, Homo sapien
tgaggtgagtgttggaacccaggaacaaggctg

SEQ ID NO: 969338 - DNA, 33 bp, Homo sapien
tgaggtgagtgttggatcccaggaacaaggctg

SEQ ID NO: 969339 - DNA, 33 bp, Homo sapien
tctgcatcgaggggctaaacagtctactgagtt

SEQ ID NO: 969340 - DNA, 33 bp, Homo sapien
tctgcatcgaggggctgaacagtctactgagtt

SEQ ID NO: 969341 - DNA, 33 bp, Homo sapien
gatatcaaaaatgctacggatatttcagaatgc

SEQ ID NO: 969342 - DNA, 33 bp, Homo sapien
gatatcaaaaatgctatggatatttcagaatgc

SEQ ID NO: 969343 - DNA, 33 bp, Homo sapien
aaagtgaggtaagggaagaaaaccagggtgtct

SEQ ID NO: 969344 - DNA, 33 bp, Homo sapien
aaagtgaggtaagggaggaaaaccagggtgtct

SEQ ID NO: 969345 - DNA, 33 bp, Homo sapien
atttgcaccagtgaaacaatctttgttactgag

SEQ ID NO: 969346 - DNA, 33 bp, Homo sapien
atttgcaccagtgaaataatctttgttactgag

SEQ ID NO: 969347 - DNA, 33 bp, Homo sapien
agacagtaccattagccgaaaacaataagacaa

SEQ ID NO: 969348 - DNA, 33 bp, Homo sapien
agacagtaccattagctgaaaacaataagacaa

SEQ ID NO: 969349 - DNA, 33 bp, Homo sapien
atccattcttgtcagcaaatgccatcttttgat

SEQ ID NO: 969350 - DNA, 33 bp, Homo sapien
atccattcttgtcagctaatgccatcttttgat

SEQ ID NO: 969351 - DNA, 33 bp, Homo sapien
caagtcacagttcataacaatccattcttgtca

SEQ ID NO: 969352 - DNA, 33 bp, Homo sapien
caagtcacagttcatagcaatccattcttgtca

SEQ ID NO: 969353 - DNA, 33 bp, Homo sapien
gaccttaacatggaggaattgtcctaagttgtc

SEQ ID NO: 969354 - DNA, 33 bp, Homo sapien
gaccttaacatggagggattgtcctaagttgtc

SEQ ID NO: 969355 - DNA, 33 bp, Homo sapien
aacaatgactgcaatgcaatctctggtttggtt

SEQ ID NO: 969356 - DNA, 33 bp, Homo sapien
aacaatgactgcaatgtaatctctggtttggtt

SEQ ID NO: 969357 - DNA, 33 bp, Homo sapien
agaaggctaatagaaagttaacagaagtatcca

SEQ ID NO: 969358 - DNA, 33 bp, Homo sapien
agaaggctaatagaaatttaacagaagtatcca

SEQ ID NO: 969359 - DNA, 33 bp, Homo sapien
aaaagtaatgtctgaaaccaattgcaatgatct

SEQ ID NO: 969360 - DNA, 33 bp, Homo sapien
aaaagtaatgtctgaagccaattgcaatgatct

SEQ ID NO: 969361 - DNA, 33 bp, Homo sapien
tagcttttaggtgcaaaaatgaactgccccttg

SEQ ID NO: 969362 - DNA, 33 bp, Homo sapien
tagcttttaggtgcaacaatgaactgccccttg

SEQ ID NO: 969363 - DNA, 33 bp, Homo sapien
aaaagcacagtgtgcaatgaaagcatctcacaa

SEQ ID NO: 969364 - DNA, 33 bp, Homo sapien
aaaagcacagtgtgcagtgaaagcatctcacaa

SEQ ID NO: 969365 - DNA, 33 bp, Homo sapien
tcttattttctcctgaataaaaggttcctccaa

SEQ ID NO: 969366 - DNA, 33 bp, Homo sapien
tcttattttctcctgagtaaaaggttcctccaa

SEQ ID NO: 969367 - DNA, 33 bp, Homo sapien
gtattcttctatttcacaatttcactggatagc

SEQ ID NO: 969368 - DNA, 33 bp, Homo sapien
gtattcttctatttcataatttcactggatagc

SEQ ID NO: 969369 - DNA, 33 bp, Homo sapien
cataaaagaacatcaccgccccaagaaaggaga

SEQ ID NO: 969370 - DNA, 33 bp, Homo sapien
cataaaagaacatcactgccccaagaaaggaga

SEQ ID NO: 969371 - DNA, 33 bp, Homo sapien
atgtgcagaaggttgacctgtagataaagaggc

SEQ ID NO: 969372 - DNA, 33 bp, Homo sapien
atgtgcagaaggttgatctgtagataaagaggc

SEQ ID NO: 969373 - DNA, 33 bp, Homo sapien
taatagctactaataaaaaggtagctggctttc

SEQ ID NO: 969374 - DNA, 33 bp, Homo sapien
taatagctactaataacaaggtagctggctttc

SEQ ID NO: 969375 - DNA, 33 bp, Homo sapien
tggtggtggctagagcgagtaaccacaaagata

SEQ ID NO: 969376 - DNA, 33 bp, Homo sapien
tggtggtggctagagctagtaaccacaaagata

SEQ ID NO: 969377 - DNA, 33 bp, Homo sapien
ggctctctccaggggaactttgatggtaacacc

SEQ ID NO: 969378 - DNA, 33 bp, Homo sapien
ggctctctccaggggatctttgatggtaacacc

SEQ ID NO: 969379 - DNA, 33 bp, Homo sapien
gtttatttatccatccaatacatgaatcccttc

SEQ ID NO: 969380 - DNA, 33 bp, Homo sapien
gtttatttatccatccgatacatgaatcccttc

SEQ ID NO: 969381 - DNA, 33 bp, Homo sapien
gcagctctagattcaacagctctcctcagaagt

SEQ ID NO: 969382 - DNA, 33 bp, Homo sapien
gcagctctagattcaatagctctcctcagaagt

SEQ ID NO: 969383 - DNA, 33 bp, Homo sapien
ttttgatgaaggaaccagaaagctaatcaacat

SEQ ID NO: 969384 - DNA, 33 bp, Homo sapien
ttttgatgaaggaaccggaaagctaatcaacat

SEQ ID NO: 969385 - DNA, 33 bp, Homo sapien
aacttgtgatctgaaaacactaaggaatttctg

SEQ ID NO: 969386 - DNA, 33 bp, Homo sapien
aacttgtgatctgaaagcactaaggaatttctg

SEQ ID NO: 969387 - DNA, 33 bp, Homo sapien
ctgtagtctccacaaaaattatttaaaagaaca

SEQ ID NO: 969388 - DNA, 33 bp, Homo sapien
ctgtagtctccacaaagattatttaaaagaaca

SEQ ID NO: 969389 - DNA, 33 bp, Homo sapien
ctcattgtcttagtgactagcatttcagctcct

SEQ ID NO: 969390 - DNA, 33 bp, Homo sapien
ctcattgtcttagtgattagcatttcagctcct

SEQ ID NO: 969391 - DNA, 33 bp, Homo sapien
aggctttcacaaaaccagaacacagaatgagac

SEQ ID NO: 969392 - DNA, 33 bp, Homo sapien
aggctttcacaaaaccggaacacagaatgagac

SEQ ID NO: 969393 - DNA, 33 bp, Homo sapien
cagaacataatcatagcatcccaccagacagca

SEQ ID NO: 969394 - DNA, 33 bp, Homo sapien
cagaacataatcatagtatcccaccagacagca

SEQ ID NO: 969395 - DNA, 33 bp, Homo sapien
cagcctttttgcaaacaaatcactcttgtcctt

SEQ ID NO: 969396 - DNA, 33 bp, Homo sapien
cagcctttttgcaaacgaatcactcttgtcctt

SEQ ID NO: 969397 - DNA, 33 bp, Homo sapien
tctgatagctgcataacgacccattgcatggca

SEQ ID NO: 969398 - DNA, 33 bp, Homo sapien
tctgatagctgcataatgacccattgcatggca

SEQ ID NO: 969399 - DNA, 33 bp, Homo sapien
cccagctttggaaaaaagttgcttctggcacat

SEQ ID NO: 969400 - DNA, 33 bp, Homo sapien
cccagctttggaaaaaggttgcttctggcacat

SEQ ID NO: 969401 - DNA, 33 bp, Homo sapien
ataccatttcaatgtcagaatgattcagcttcc

SEQ ID NO: 969402 - DNA, 33 bp, Homo sapien
ataccatttcaatgtcggaatgattcagcttcc

SEQ ID NO: 969403 - DNA, 33 bp, Homo sapien
caaggtgatagtattacggtgtggggcctttgg

SEQ ID NO: 969404 - DNA, 33 bp, Homo sapien
caaggtgatagtattagggtgtggggcctttgg

SEQ ID NO: 969405 - DNA, 33 bp, Homo sapien
cttctgaacaccataaagtaagttgcgatctcc

SEQ ID NO: 969406 - DNA, 33 bp, Homo sapien
cttctgaacaccataaggtaagttgcgatctcc

SEQ ID NO: 969407 - DNA, 33 bp, Homo sapien
agcattcggagatcaaataacccacaataatca

SEQ ID NO: 969408 - DNA, 33 bp, Homo sapien
agcattcggagatcaagtaacccacaataatca

SEQ ID NO: 969409 - DNA, 33 bp, Homo sapien
atacagagtgatatcactaagaatctatctggt

SEQ ID NO: 969410 - DNA, 33 bp, Homo sapien
atacagagtgatatcattaagaatctatctggt

SEQ ID NO: 969411 - DNA, 33 bp, Homo sapien
aaaaattcagagtttaaaggatgagtagaagag

SEQ ID NO: 969412 - DNA, 33 bp, Homo sapien
aaaaattcagagtttagaggatgagtagaagag

SEQ ID NO: 969413 - DNA, 33 bp, Homo sapien
tgtggatggtggacatcactaacaaagagaggg

SEQ ID NO: 969414 - DNA, 33 bp, Homo sapien
tgtggatggtggacattactaacaaagagaggg

SEQ ID NO: 969415 - DNA, 33 bp, Homo sapien
aacttagtgatggtcaaaacaggaaggtatgtt

SEQ ID NO: 969416 - DNA, 33 bp, Homo sapien
aacttagtgatggtcagaacaggaaggtatgtt

SEQ ID NO: 969417 - DNA, 33 bp, Homo sapien
tgggtggtgaatgaaaattgctcagctctgaat

SEQ ID NO: 969418 - DNA, 33 bp, Homo sapien
tgggtggtgaatgaaagttgctcagctctgaat

SEQ ID NO: 969419 - DNA, 33 bp, Homo sapien
ccaggctttcatagacacaatcatataacagct

SEQ ID NO: 969420 - DNA, 33 bp, Homo sapien
ccaggctttcatagactcaatcatataacagct

SEQ ID NO: 969421 - DNA, 33 bp, Homo sapien
aaagccaaaaagatcacggaactcaagatgtat

SEQ ID NO: 969422 - DNA, 33 bp, Homo sapien
aaagccaaaaagatcatggaactcaagatgtat

SEQ ID NO: 969423 - DNA, 33 bp, Homo sapien
acttcctaaagtgatccaggaaacgaatatgct

SEQ ID NO: 969424 - DNA, 33 bp, Homo sapien
acttcctaaagtgatcgaggaaacgaatatgct

SEQ ID NO: 969425 - DNA, 33 bp, Homo sapien
gctcggcttctatacactcttttgagcaccctc

SEQ ID NO: 969426 - DNA, 33 bp, Homo sapien
gctcggcttctatacagtcttttgagcaccctc

SEQ ID NO: 969427 - DNA, 33 bp, Homo sapien
actttgtgctgaattagaaataacttgagggaa

SEQ ID NO: 969428 - DNA, 33 bp, Homo sapien
actttgtgctgaattataaataacttgagggaa

SEQ ID NO: 969429 - DNA, 33 bp, Homo sapien
aaagcagatgccaagcgatttggaatgtttttt

SEQ ID NO: 969430 - DNA, 33 bp, Homo sapien
aaagcagatgccaagctatttggaatgtttttt

SEQ ID NO: 969431 - DNA, 33 bp, Homo sapien
ctgcaggatatgacaaaacagtgatcaaccaag

SEQ ID NO: 969432 - DNA, 33 bp, Homo sapien
ctgcaggatatgacaacacagtgatcaaccaag

SEQ ID NO: 969433 - DNA, 33 bp, Homo sapien
tacatgggaaaggtagaaagaagatgattgatt

SEQ ID NO: 969434 - DNA, 33 bp, Homo sapien
tacatgggaaaggtaggaagaagatgattgatt

SEQ ID NO: 969435 - DNA, 33 bp, Homo sapien
agattagatgcaaggacaatgtacagttggtat

SEQ ID NO: 969436 - DNA, 33 bp, Homo sapien
agattagatgcaaggagaatgtacagttggtat

SEQ ID NO: 969437 - DNA, 33 bp, Homo sapien
agagctgccatagggacgcaaatgttttattta

SEQ ID NO: 969438 - DNA, 33 bp, Homo sapien
agagctgccatagggatgcaaatgttttattta

SEQ ID NO: 969439 - DNA, 33 bp, Homo sapien
ccatagacagaaagcaaactagtggttttcagg

SEQ ID NO: 969440 - DNA, 33 bp, Homo sapien
ccatagacagaaagcagactagtggttttcagg

SEQ ID NO: 969441 - DNA, 33 bp, Homo sapien
acgggctcctaatccagtcacagagggtcaaga

SEQ ID NO: 969442 - DNA, 33 bp, Homo sapien
acgggctcctaatccattcacagagggtcaaga

SEQ ID NO: 969443 - DNA, 33 bp, Homo sapien
ccgttttctgcatctcaattgtatccacgaaat

SEQ ID NO: 969444 - DNA, 33 bp, Homo sapien
ccgttttctgcatctctattgtatccacgaaat

SEQ ID NO: 969445 - DNA, 33 bp, Homo sapien
ggggcattttaggttacgaaacatctctgagtt

SEQ ID NO: 969446 - DNA, 33 bp, Homo sapien
ggggcattttaggttaggaaacatctctgagtt

SEQ ID NO: 969447 - DNA, 33 bp, Homo sapien
tgagatttcttctgggaaggtcatcctggtgaa

SEQ ID NO: 969448 - DNA, 33 bp, Homo sapien
tgagatttcttctggggaggtcatcctggtgaa

SEQ ID NO: 969449 - DNA, 33 bp, Homo sapien
ccttaacgatgtgttagatttcaaaagtatcaa

SEQ ID NO: 969450 - DNA, 33 bp, Homo sapien
ccttaacgatgtgttatatttcaaaagtatcaa

SEQ ID NO: 969451 - DNA, 33 bp, Homo sapien
tagagtaccatgctaacacaatactttgaaaag

SEQ ID NO: 969452 - DNA, 33 bp, Homo sapien
tagagtaccatgctaatacaatactttgaaaag

SEQ ID NO: 969453 - DNA, 33 bp, Homo sapien
taatgtagcagttcaccaacctaagtaagaaat

SEQ ID NO: 969454 - DNA, 33 bp, Homo sapien
taatgtagcagttcacgaacctaagtaagaaat

SEQ ID NO: 969455 - DNA, 33 bp, Homo sapien
catggacagtgcataactctctcactaacaagg

SEQ ID NO: 969456 - DNA, 33 bp, Homo sapien
catggacagtgcataattctctcactaacaagg

SEQ ID NO: 969457 - DNA, 33 bp, Homo sapien
ttgaggttgatattagaataagaggtgtctgtg

SEQ ID NO: 969458 - DNA, 33 bp, Homo sapien
ttgaggttgatattaggataagaggtgtctgtg

SEQ ID NO: 969459 - DNA, 33 bp, Homo sapien
acaaattactgagagccatggaaattagatact

SEQ ID NO: 969460 - DNA, 33 bp, Homo sapien
acaaattactgagagctatggaaattagatact

SEQ ID NO: 969461 - DNA, 33 bp, Homo sapien
catgggccacagagaaagggtttgaaaattgca

SEQ ID NO: 969462 - DNA, 33 bp, Homo sapien
catgggccacagagaacgggtttgaaaattgca

SEQ ID NO: 969463 - DNA, 33 bp, Homo sapien
tggctgtaccgaagaccggagtttgattactac

SEQ ID NO: 969464 - DNA, 33 bp, Homo sapien
tggctgtaccgaagactggagtttgattactac

SEQ ID NO: 969465 - DNA, 33 bp, Homo sapien
gctgctcatactaaaaatctgtgattacatttt

SEQ ID NO: 969466 - DNA, 33 bp, Homo sapien
gctgctcatactaaaactctgtgattacatttt

SEQ ID NO: 969467 - DNA, 33 bp, Homo sapien
tttagataaaagagtaaccagtcattgtgtaac

SEQ ID NO: 969468 - DNA, 33 bp, Homo sapien
tttagataaaagagtagccagtcattgtgtaac

SEQ ID NO: 969469 - DNA, 33 bp, Homo sapien
acttgctgcattacaactagagttatttctcta

SEQ ID NO: 969470 - DNA, 33 bp, Homo sapien
acttgctgcattacaagtagagttatttctcta

SEQ ID NO: 969471 - DNA, 33 bp, Homo sapien
attcactagcatgagaacaattaggaaaacctg

SEQ ID NO: 969472 - DNA, 33 bp, Homo sapien
attcactagcatgagagcaattaggaaaacctg

SEQ ID NO: 969473 - DNA, 33 bp, Homo sapien
ttaattgaaaaaaaagactcagtggatagacac

SEQ ID NO: 969474 - DNA, 33 bp, Homo sapien
ttaattgaaaaaaaagtctcagtggatagacac

SEQ ID NO: 969475 - DNA, 33 bp, Homo sapien
tcatcccagtgttcccaagtacatcatcctctg

SEQ ID NO: 969476 - DNA, 33 bp, Homo sapien
tcatcccagtgttcccgagtacatcatcctctg

SEQ ID NO: 969477 - DNA, 33 bp, Homo sapien
tcgatatccttattgccatttcccttacttaat

SEQ ID NO: 969478 - DNA, 33 bp, Homo sapien
tcgatatccttattgctatttcccttacttaat

SEQ ID NO: 969479 - DNA, 33 bp, Homo sapien
tgtgtgctatcacaaaagacagtggaagcaaaa

SEQ ID NO: 969480 - DNA, 33 bp, Homo sapien
tgtgtgctatcacaaaggacagtggaagcaaaa

SEQ ID NO: 969481 - DNA, 33 bp, Homo sapien
atagggctctctccagaaaaaaaaatgtggtgc

SEQ ID NO: 969482 - DNA, 33 bp, Homo sapien
atagggctctctccaggaaaaaaaatgtggtgc

SEQ ID NO: 969483 - DNA, 33 bp, Homo sapien
agcagggaaagccacaatgggaaagcaatgact

SEQ ID NO: 969484 - DNA, 33 bp, Homo sapien
agcagggaaagccacagtgggaaagcaatgact

SEQ ID NO: 969485 - DNA, 33 bp, Homo sapien
agacaatgaaatgaaacaccttctccctacaac

SEQ ID NO: 969486 - DNA, 33 bp, Homo sapien
agacaatgaaatgaaagaccttctccctacaac

SEQ ID NO: 969487 - DNA, 33 bp, Homo sapien
atttcagcaggaagacaagatattaagcagcta

SEQ ID NO: 969488 - DNA, 33 bp, Homo sapien
atttcagcaggaagaccagatattaagcagcta

SEQ ID NO: 969489 - DNA, 33 bp, Homo sapien
ggagaagctcacagaaactttgaagtgtttatt

SEQ ID NO: 969490 - DNA, 33 bp, Homo sapien
ggagaagctcacagaagctttgaagtgtttatt

SEQ ID NO: 969491 - DNA, 33 bp, Homo sapien
aggctagaatagaccacatgttgccaaatgtat

SEQ ID NO: 969492 - DNA, 33 bp, Homo sapien
aggctagaatagaccatatgttgccaaatgtat

SEQ ID NO: 969493 - DNA, 33 bp, Homo sapien
tttatagataagggcaacccaatttggagatat

SEQ ID NO: 969494 - DNA, 33 bp, Homo sapien
tttatagataagggcatcccaatttggagatat

SEQ ID NO: 969495 - DNA, 33 bp, Homo sapien
ggcagttgactccacaagcatagtaaccaggtg

SEQ ID NO: 969496 - DNA, 33 bp, Homo sapien
ggcagttgactccacaggcatagtaaccaggtg

SEQ ID NO: 969497 - DNA, 33 bp, Homo sapien
tactaataacatgtgaccacaaaataaatgcat

SEQ ID NO: 969498 - DNA, 33 bp, Homo sapien
tactaataacatgtgagcacaaaataaatgcat

SEQ ID NO: 969499 - DNA, 33 bp, Homo sapien
tgagctcttgccattcaaatccagtaccaaata

SEQ ID NO: 969500 - DNA, 33 bp, Homo sapien
tgagctcttgccattcgaatccagtaccaaata

SEQ ID NO: 969501 - DNA, 33 bp, Homo sapien
atttatttattttgccaagactgatctatagtt

SEQ ID NO: 969502 - DNA, 33 bp, Homo sapien
atttatttattttgccgagactgatctatagtt

SEQ ID NO: 969503 - DNA, 33 bp, Homo sapien
gacacattgttgatacaggtgtcaagggggaag

SEQ ID NO: 969504 - DNA, 33 bp, Homo sapien
gacacattgttgatacgggtgtcaagggggaag

SEQ ID NO: 969505 - DNA, 33 bp, Homo sapien
gtttaacctcttcctacagtccacaatatcctg

SEQ ID NO: 969506 - DNA, 33 bp, Homo sapien
gtttaacctcttcctatagtccacaatatcctg

SEQ ID NO: 969507 - DNA, 33 bp, Homo sapien
ttaattcacagttgtaacaaaaaccattccctt

SEQ ID NO: 969508 - DNA, 33 bp, Homo sapien
ttaattcacagttgtagcaaaaaccattccctt

SEQ ID NO: 969509 - DNA, 33 bp, Homo sapien
agtttcatctttacacactatatgcctatagac

SEQ ID NO: 969510 - DNA, 33 bp, Homo sapien
agtttcatctttacacgctatatgcctatagac

SEQ ID NO: 969511 - DNA, 33 bp, Homo sapien
gagtttggtagaagatcagtaccatcccttagt

SEQ ID NO: 969512 - DNA, 33 bp, Homo sapien
gagtttggtagaagatgagtaccatcccttagt

SEQ ID NO: 969513 - DNA, 33 bp, Homo sapien
tatcacaagaaaaatcaaaaataggcacagtga

SEQ ID NO: 969514 - DNA, 33 bp, Homo sapien
tatcacaagaaaaatcgaaaataggcacagtga

SEQ ID NO: 969515 - DNA, 33 bp, Homo sapien
cacataatgtgggaccaatgtcaggtataatag

SEQ ID NO: 969516 - DNA, 33 bp, Homo sapien
cacataatgtgggacctatgtcaggtataatag

SEQ ID NO: 969517 - DNA, 33 bp, Homo sapien
agcttaggccgtaccacaaaattgtaatttagc

SEQ ID NO: 969518 - DNA, 33 bp, Homo sapien
agcttaggccgtaccataaaattgtaatttagc

SEQ ID NO: 969519 - DNA, 33 bp, Homo sapien
ataccaagttgcttgacgtaaaattaataagac

SEQ ID NO: 969520 - DNA, 33 bp, Homo sapien
ataccaagttgcttgatgtaaaattaataagac

SEQ ID NO: 969521 - DNA, 33 bp, Homo sapien
ctttccacttgagggaaacacttcatgccttct

SEQ ID NO: 969522 - DNA, 33 bp, Homo sapien
ctttccacttgagggagacacttcatgccttct

SEQ ID NO: 969523 - DNA, 33 bp, Homo sapien
ataaagttccaatcaaattagaaaattctttta

SEQ ID NO: 969524 - DNA, 33 bp, Homo sapien
ataaagttccaatcaatttagaaaattctttta

SEQ ID NO: 969525 - DNA, 33 bp, Homo sapien
gaggtcacagaaattgaaaagcaaaacagatga

SEQ ID NO: 969526 - DNA, 33 bp, Homo sapien
gaggtcacagaaattggaaagcaaaacagatga

SEQ ID NO: 969527 - DNA, 33 bp, Homo sapien
aactctatctttaggcccatttcttcctgtcag

SEQ ID NO: 969528 - DNA, 33 bp, Homo sapien
aactctatctttaggctcatttcttcctgtcag

SEQ ID NO: 969529 - DNA, 33 bp, Homo sapien
aatgtgagaatccacaaaataatattccatcaa

SEQ ID NO: 969530 - DNA, 33 bp, Homo sapien
aatgtgagaatccacagaataatattccatcaa

SEQ ID NO: 969531 - DNA, 33 bp, Homo sapien
aggccctttgttattgcaatgtttcagtaaaat

SEQ ID NO: 969532 - DNA, 33 bp, Homo sapien
aggccctttgttattgtaatgtttcagtaaaat

SEQ ID NO: 969533 - DNA, 33 bp, Homo sapien
accagggaaatgcatacggtgtgagctccttta

SEQ ID NO: 969534 - DNA, 33 bp, Homo sapien
accagggaaatgcatatggtgtgagctccttta

SEQ ID NO: 969535 - DNA, 33 bp, Homo sapien
gataacatttataaccccctcacaaagatactg

SEQ ID NO: 969536 - DNA, 33 bp, Homo sapien
gataacatttataacctcctcacaaagatactg

SEQ ID NO: 969537 - DNA, 33 bp, Homo sapien
tgagagcaaatacataaatttctgcagttagag

SEQ ID NO: 969538 - DNA, 33 bp, Homo sapien
tgagagcaaatacatacatttctgcagttagag

SEQ ID NO: 969539 - DNA, 33 bp, Homo sapien
aattagcaagaagaaaagatacagttccatcaa

SEQ ID NO: 969540 - DNA, 33 bp, Homo sapien
aattagcaagaagaaacgatacagttccatcaa

SEQ ID NO: 969541 - DNA, 33 bp, Homo sapien
ctcacaccaataattacatacatggcaagtcat

SEQ ID NO: 969542 - DNA, 33 bp, Homo sapien
ctcacaccaataattagatacatggcaagtcat

SEQ ID NO: 969543 - DNA, 33 bp, Homo sapien
cattactatggttcatgatactgtttgcaactg

SEQ ID NO: 969544 - DNA, 33 bp, Homo sapien
cattactatggttcattatactgtttgcaactg

SEQ ID NO: 969545 - DNA, 33 bp, Homo sapien
tttgtgtgctccttaaacctggcatccacaaaa

SEQ ID NO: 969546 - DNA, 33 bp, Homo sapien
tttgtgtgctccttaaccctggcatccacaaaa

SEQ ID NO: 969547 - DNA, 33 bp, Homo sapien
ttcttctaaacccatacgagaaaactagtagtt

SEQ ID NO: 969548 - DNA, 33 bp, Homo sapien
ttcttctaaacccatatgagaaaactagtagtt

SEQ ID NO: 969549 - DNA, 33 bp, Homo sapien
tctctgcaaccttcataaaacagtttccaggtc

SEQ ID NO: 969550 - DNA, 33 bp, Homo sapien
tctctgcaaccttcatcaaacagtttccaggtc

SEQ ID NO: 969551 - DNA, 33 bp, Homo sapien
aaggtaatcacttataaattgtgttctgacatg

SEQ ID NO: 969552 - DNA, 33 bp, Homo sapien
aaggtaatcacttatacattgtgttctgacatg

SEQ ID NO: 969553 - DNA, 33 bp, Homo sapien
aatagacagataagtaagaaaatgttttggatt

SEQ ID NO: 969554 - DNA, 33 bp, Homo sapien
aatagacagataagtaggaaaatgttttggatt

SEQ ID NO: 969555 - DNA, 33 bp, Homo sapien
tatgagggaaaaagaacgctgaagtttgatcaa

SEQ ID NO: 969556 - DNA, 33 bp, Homo sapien
tatgagggaaaaagaatgctgaagtttgatcaa

SEQ ID NO: 969557 - DNA, 33 bp, Homo sapien
cgttacttcctgtatacaatgggggtacaagca

SEQ ID NO: 969558 - DNA, 33 bp, Homo sapien
cgttacttcctgtatagaatgggggtacaagca

SEQ ID NO: 969559 - DNA, 33 bp, Homo sapien
tgggagcttagaaaacaatggccaagcttggga

SEQ ID NO: 969560 - DNA, 33 bp, Homo sapien
tgggagcttagaaaacgatggccaagcttggga

SEQ ID NO: 969561 - DNA, 33 bp, Homo sapien
ttcctagagttgaatcccaatagttatgcaggg

SEQ ID NO: 969562 - DNA, 33 bp, Homo sapien
ttcctagagttgaatctcaatagttatgcaggg

SEQ ID NO: 969563 - DNA, 33 bp, Homo sapien
tcgtctcatcattcacagctctttcagagaaaa

SEQ ID NO: 969564 - DNA, 33 bp, Homo sapien
tcgtctcatcattcacggctctttcagagaaaa

SEQ ID NO: 969565 - DNA, 33 bp, Homo sapien
tgcattcacttaacaccctcatttgaaaatttt

SEQ ID NO: 969566 - DNA, 33 bp, Homo sapien
tgcattcacttaacactctcatttgaaaatttt

SEQ ID NO: 969567 - DNA, 33 bp, Homo sapien
ggactttgtcatccataagaatcttctggagac

SEQ ID NO: 969568 - DNA, 33 bp, Homo sapien
ggactttgtcatccatcagaatcttctggagac

SEQ ID NO: 969569 - DNA, 33 bp, Homo sapien
agggcgctgtgaagatcacagaactaagggaca

SEQ ID NO: 969570 - DNA, 33 bp, Homo sapien
agggcgctgtgaagattacagaactaagggaca

SEQ ID NO: 969571 - DNA, 33 bp, Homo sapien
gccatgatggtataaagaatgtgatggattctg

SEQ ID NO: 969572 - DNA, 33 bp, Homo sapien
gccatgatggtataaataatgtgatggattctg

SEQ ID NO: 969573 - DNA, 33 bp, Homo sapien
aaacaaagttgtgatgcaacgtggtaagttcta

SEQ ID NO: 969574 - DNA, 33 bp, Homo sapien
aaacaaagttgtgatgtaacgtggtaagttcta

SEQ ID NO: 969575 - DNA, 33 bp, Homo sapien
gcctccaaattatacactcatcaattcaaaata

SEQ ID NO: 969576 - DNA, 33 bp, Homo sapien
gcctccaaattatacattcatcaattcaaaata

SEQ ID NO: 969577 - DNA, 33 bp, Homo sapien
ggaaagttgaagattagaaatacctctggagag

SEQ ID NO: 969578 - DNA, 33 bp, Homo sapien
ggaaagttgaagattataaatacctctggagag

SEQ ID NO: 969579 - DNA, 33 bp, Homo sapien
gcttttgctaaacttcactcattttttctggaa

SEQ ID NO: 969580 - DNA, 33 bp, Homo sapien
gcttttgctaaacttcgctcattttttctggaa

SEQ ID NO: 969581 - DNA, 33 bp, Homo sapien
acaaacattgagaaagacttaactcagtagaaa

SEQ ID NO: 969582 - DNA, 33 bp, Homo sapien
acaaacattgagaaaggcttaactcagtagaaa

SEQ ID NO: 969583 - DNA, 33 bp, Homo sapien
accaatgttttaaatggcatatgctacaattat

SEQ ID NO: 969584 - DNA, 33 bp, Homo sapien
accaatgttttaaatgtcatatgctacaattat

SEQ ID NO: 969585 - DNA, 33 bp, Homo sapien
agctggtcttggaaaacggagtgcatgatttgg

SEQ ID NO: 969586 - DNA, 33 bp, Homo sapien
agctggtcttggaaaatggagtgcatgatttgg

SEQ ID NO: 969587 - DNA, 33 bp, Homo sapien
cattttttttatgtaaacagcatgtattgtatt

SEQ ID NO: 969588 - DNA, 33 bp, Homo sapien
cattttttttatgtaaccagcatgtattgtatt

SEQ ID NO: 969589 - DNA, 33 bp, Homo sapien
ctgaaaggagaaaaggccataaatttgggcaaa

SEQ ID NO: 969590 - DNA, 33 bp, Homo sapien
ctgaaaggagaaaaggtcataaatttgggcaaa

SEQ ID NO: 969591 - DNA, 33 bp, Homo sapien
accttgctgagctatacgctggtgctacggata

SEQ ID NO: 969592 - DNA, 33 bp, Homo sapien
accttgctgagctatatgctggtgctacggata

SEQ ID NO: 969593 - DNA, 33 bp, Homo sapien
gtggctacattaaataaagtcaacagaaaaaga

SEQ ID NO: 969594 - DNA, 33 bp, Homo sapien
gtggctacattaaatatagtcaacagaaaaaga

SEQ ID NO: 969595 - DNA, 33 bp, Homo sapien
tgactaccatatattaagtacttggtcgccaat

SEQ ID NO: 969596 - DNA, 33 bp, Homo sapien
tgactaccatatattaggtacttggtcgccaat

SEQ ID NO: 969597 - DNA, 33 bp, Homo sapien
ctcctgtatgagtcaggattctggcatagtgca

SEQ ID NO: 969598 - DNA, 33 bp, Homo sapien
ctcctgtatgagtcagtattctggcatagtgca

SEQ ID NO: 969599 - DNA, 33 bp, Homo sapien
gacacctgagtagatacgcaactcccggtttca

SEQ ID NO: 969600 - DNA, 33 bp, Homo sapien
gacacctgagtagatatgcaactcccggtttca

SEQ ID NO: 969601 - DNA, 33 bp, Homo sapien
agagaaaagtcaaataacctggcaatgtttgtt

SEQ ID NO: 969602 - DNA, 33 bp, Homo sapien
agagaaaagtcaaataccctggcaatgtttgtt

SEQ ID NO: 969603 - DNA, 33 bp, Homo sapien
gtgtgaaaaaggtgtcaaggattggaaatgctt

SEQ ID NO: 969604 - DNA, 33 bp, Homo sapien
gtgtgaaaaaggtgtccaggattggaaatgctt

SEQ ID NO: 969605 - DNA, 33 bp, Homo sapien
gaagtggctatgaataaggatgcaccagtcact

SEQ ID NO: 969606 - DNA, 33 bp, Homo sapien
gaagtggctatgaatacggatgcaccagtcact

SEQ ID NO: 969607 - DNA, 33 bp, Homo sapien
ggttttgtcattatcaatatttgcttccctgaa

SEQ ID NO: 969608 - DNA, 33 bp, Homo sapien
ggttttgtcattatcagtatttgcttccctgaa

SEQ ID NO: 969609 - DNA, 33 bp, Homo sapien
tagtcacctggctgtacaagatatggcaaaact

SEQ ID NO: 969610 - DNA, 33 bp, Homo sapien
tagtcacctggctgtataagatatggcaaaact

SEQ ID NO: 969611 - DNA, 33 bp, Homo sapien
agttgaaaagacaaagactgaagctcaaggggc

SEQ ID NO: 969612 - DNA, 33 bp, Homo sapien
agttgaaaagacaaaggctgaagctcaaggggc

SEQ ID NO: 969613 - DNA, 33 bp, Homo sapien
taaaataaacggaaaaacctgcctaggaagagc

SEQ ID NO: 969614 - DNA, 33 bp, Homo sapien
taaaataaacggaaaagcctgcctaggaagagc

SEQ ID NO: 969615 - DNA, 33 bp, Homo sapien
aaagtgtgatatcctccaagtcctttggtagta

SEQ ID NO: 969616 - DNA, 33 bp, Homo sapien
aaagtgtgatatcctcgaagtcctttggtagta

SEQ ID NO: 969617 - DNA, 33 bp, Homo sapien
gttgtgcatagctctcaatactggaattcaact

SEQ ID NO: 969618 - DNA, 33 bp, Homo sapien
gttgtgcatagctctcgatactggaattcaact

SEQ ID NO: 969619 - DNA, 33 bp, Homo sapien
gtgtatctacacaaaaattctcaagaagattga

SEQ ID NO: 969620 - DNA, 33 bp, Homo sapien
gtgtatctacacaaaagttctcaagaagattga

SEQ ID NO: 969621 - DNA, 33 bp, Homo sapien
acacaaacatcatctcaacatacaaaacaacaa

SEQ ID NO: 969622 - DNA, 33 bp, Homo sapien
acacaaacatcatctctacatacaaaacaacaa

SEQ ID NO: 969623 - DNA, 33 bp, Homo sapien
gtaaaatgtctctaaacacctgcaaaaccctat

SEQ ID NO: 969624 - DNA, 33 bp, Homo sapien
gtaaaatgtctctaaagacctgcaaaaccctat

SEQ ID NO: 969625 - DNA, 33 bp, Homo sapien
cagaagatggcctgtacaaccataggtagttgg

SEQ ID NO: 969626 - DNA, 33 bp, Homo sapien
cagaagatggcctgtataaccataggtagttgg

SEQ ID NO: 969627 - DNA, 33 bp, Homo sapien
gagcctcttgctgatacgtggacagttttggga

SEQ ID NO: 969628 - DNA, 33 bp, Homo sapien
gagcctcttgctgatatgtggacagttttggga

SEQ ID NO: 969629 - DNA, 33 bp, Homo sapien
ggtccagcatgaatgaaggaagatgcactgttc

SEQ ID NO: 969630 - DNA, 33 bp, Homo sapien
ggtccagcatgaatgagggaagatgcactgttc

SEQ ID NO: 969631 - DNA, 33 bp, Homo sapien
ataggggagtccttatcacattcactccagttt

SEQ ID NO: 969632 - DNA, 33 bp, Homo sapien
ataggggagtccttattacattcactccagttt

SEQ ID NO: 969633 - DNA, 33 bp, Homo sapien
caaatatttatagcagcattattgatgataccc

SEQ ID NO: 969634 - DNA, 33 bp, Homo sapien
caaatatttatagcaggattattgatgataccc

SEQ ID NO: 969635 - DNA, 33 bp, Homo sapien
ttctggtcataaaaatgagcttcatgatattgt

SEQ ID NO: 969636 - DNA, 33 bp, Homo sapien
ttctggtcataaaaattagcttcatgatattgt

SEQ ID NO: 969637 - DNA, 33 bp, Homo sapien
catctcatgcaatcatcaaaatattactacaaa

SEQ ID NO: 969638 - DNA, 33 bp, Homo sapien
catctcatgcaatcattaaaatattactacaaa

SEQ ID NO: 969639 - DNA, 33 bp, Homo sapien
actacatcaatgcacccagtttaccaaatatat

SEQ ID NO: 969640 - DNA, 33 bp, Homo sapien
actacatcaatgcacctagtttaccaaatatat

SEQ ID NO: 969641 - DNA, 33 bp, Homo sapien
aaaagctgttctgaaaattgtttagatttaagt

SEQ ID NO: 969642 - DNA, 33 bp, Homo sapien
aaaagctgttctgaaagttgtttagatttaagt

SEQ ID NO: 969643 - DNA, 33 bp, Homo sapien
tagaatccaaactcatcaaaggcctattttttt

SEQ ID NO: 969644 - DNA, 33 bp, Homo sapien
tagaatccaaactcatgaaaggcctattttttt

SEQ ID NO: 969645 - DNA, 33 bp, Homo sapien
atcaaatggaatgatgcataaatggtttgtagg

SEQ ID NO: 969646 - DNA, 33 bp, Homo sapien
atcaaatggaatgatgtataaatggtttgtagg

SEQ ID NO: 969647 - DNA, 33 bp, Homo sapien
ctagcaggagtaacaacgttgaaggcagagttt

SEQ ID NO: 969648 - DNA, 33 bp, Homo sapien
ctagcaggagtaacaatgttgaaggcagagttt

SEQ ID NO: 969649 - DNA, 33 bp, Homo sapien
tggtaagactatttcaagatttccatttattta

SEQ ID NO: 969650 - DNA, 33 bp, Homo sapien
tggtaagactatttcaggatttccatttattta

SEQ ID NO: 969651 - DNA, 33 bp, Homo sapien
gttaaaaggctcaaatcagcaattactagcata

SEQ ID NO: 969652 - DNA, 33 bp, Homo sapien
gttaaaaggctcaaattagcaattactagcata

SEQ ID NO: 969653 - DNA, 33 bp, Homo sapien
tgtgttcctgggagtacacatcagaagtgttat

SEQ ID NO: 969654 - DNA, 33 bp, Homo sapien
tgtgttcctgggagtatacatcagaagtgttat

SEQ ID NO: 969655 - DNA, 33 bp, Homo sapien
gccaagcagtgctgaactggccttgaatatggt

SEQ ID NO: 969656 - DNA, 33 bp, Homo sapien
gccaagcagtgctgaattggccttgaatatggt

SEQ ID NO: 969657 - DNA, 33 bp, Homo sapien
tactggaaacattctgaactacctttaggctaa

SEQ ID NO: 969658 - DNA, 33 bp, Homo sapien
tactggaaacattctggactacctttaggctaa

SEQ ID NO: 969659 - DNA, 33 bp, Homo sapien
tcataaagcctgggccactgctatgtcccacca

SEQ ID NO: 969660 - DNA, 33 bp, Homo sapien
tcataaagcctgggccgctgctatgtcccacca

SEQ ID NO: 969661 - DNA, 33 bp, Homo sapien
acaaggtattgatagacattgacccattgtcta

SEQ ID NO: 969662 - DNA, 33 bp, Homo sapien
acaaggtattgatagatattgacccattgtcta

SEQ ID NO: 969663 - DNA, 33 bp, Homo sapien
tgtctgagtgaaaaaacttagagccaaaggaga

SEQ ID NO: 969664 - DNA, 33 bp, Homo sapien
tgtctgagtgaaaaaatttagagccaaaggaga

SEQ ID NO: 969665 - DNA, 33 bp, Homo sapien
tttttagcctattaacacttaaatcacctactg

SEQ ID NO: 969666 - DNA, 33 bp, Homo sapien
tttttagcctattaactcttaaatcacctactg

SEQ ID NO: 969667 - DNA, 33 bp, Homo sapien
tggagtgtgctcaggaatatatacagttagtct

SEQ ID NO: 969668 - DNA, 33 bp, Homo sapien
tggagtgtgctcaggactatatacagttagtct

SEQ ID NO: 969669 - DNA, 33 bp, Homo sapien
tatatcatgtaaattaacaagtggttacagtgc

SEQ ID NO: 969670 - DNA, 33 bp, Homo sapien
tatatcatgtaaattagcaagtggttacagtgc

SEQ ID NO: 969671 - DNA, 33 bp, Homo sapien
atatactcactctaggccattagtctttaacga

SEQ ID NO: 969672 - DNA, 33 bp, Homo sapien
atatactcactctaggtcattagtctttaacga

SEQ ID NO: 969673 - DNA, 33 bp, Homo sapien
tggacatagttatctaacaatccgtacaaaagc

SEQ ID NO: 969674 - DNA, 33 bp, Homo sapien
tggacatagttatctagcaatccgtacaaaagc

SEQ ID NO: 969675 - DNA, 33 bp, Homo sapien
ggcatattgatttttccatctgagagcagaaat

SEQ ID NO: 969676 - DNA, 33 bp, Homo sapien
ggcatattgatttttctatctgagagcagaaat

SEQ ID NO: 969677 - DNA, 33 bp, Homo sapien
tatcagatcttatttaaaaccaggttctcaaac

SEQ ID NO: 969678 - DNA, 33 bp, Homo sapien
tatcagatcttatttataaccaggttctcaaac

SEQ ID NO: 969679 - DNA, 33 bp, Homo sapien
aacttgtttgtgtttacccttttgaatctgaca

SEQ ID NO: 969680 - DNA, 33 bp, Homo sapien
aacttgtttgtgtttatccttttgaatctgaca

SEQ ID NO: 969681 - DNA, 33 bp, Homo sapien
tctaacaatatgaaatcacagacccttgaccag

SEQ ID NO: 969682 - DNA, 33 bp, Homo sapien
tctaacaatatgaaattacagacccttgaccag

SEQ ID NO: 969683 - DNA, 33 bp, Homo sapien
tatattttctccaggaacacagcattctagtta

SEQ ID NO: 969684 - DNA, 33 bp, Homo sapien
tatattttctccaggatcacagcattctagtta

SEQ ID NO: 969685 - DNA, 33 bp, Homo sapien
gtctactgttcctttaacctgatatataattaa

SEQ ID NO: 969686 - DNA, 33 bp, Homo sapien
gtctactgttcctttatcctgatatataattaa

SEQ ID NO: 969687 - DNA, 33 bp, Homo sapien
gcaagaagaaacaagacgctcataggactattt

SEQ ID NO: 969688 - DNA, 33 bp, Homo sapien
gcaagaagaaacaagatgctcataggactattt

SEQ ID NO: 969689 - DNA, 33 bp, Homo sapien
ctttctgtaagcaatccaatctaagtggaaaga

SEQ ID NO: 969690 - DNA, 33 bp, Homo sapien
ctttctgtaagcaatctaatctaagtggaaaga

SEQ ID NO: 969691 - DNA, 33 bp, Homo sapien
agaatcagctatgcttaaaactatcttaggtgt

SEQ ID NO: 969692 - DNA, 33 bp, Homo sapien
agaatcagctatgcttgaaactatcttaggtgt

SEQ ID NO: 969693 - DNA, 33 bp, Homo sapien
gcagaaaagacttcctaagaagaatggccaata

SEQ ID NO: 969694 - DNA, 33 bp, Homo sapien
gcagaaaagacttcctgagaagaatggccaata

SEQ ID NO: 969695 - DNA, 33 bp, Homo sapien
agacttaatttcttcccatttcactctattttg

SEQ ID NO: 969696 - DNA, 33 bp, Homo sapien
agacttaatttcttcctatttcactctattttg

SEQ ID NO: 969697 - DNA, 33 bp, Homo sapien
ttgaataatgaaaggaaggaattgactatccaa

SEQ ID NO: 969698 - DNA, 33 bp, Homo sapien
ttgaataatgaaaggatggaattgactatccaa

SEQ ID NO: 969699 - DNA, 33 bp, Homo sapien
aaccagcttcttagttcaacatatgcagtcact

SEQ ID NO: 969700 - DNA, 33 bp, Homo sapien
aaccagcttcttagtttaacatatgcagtcact

SEQ ID NO: 969701 - DNA, 33 bp, Homo sapien
gcttcctgaacaagcaaggacactgtcaaacac

SEQ ID NO: 969702 - DNA, 33 bp, Homo sapien
gcttcctgaacaagcagggacactgtcaaacac

SEQ ID NO: 969703 - DNA, 33 bp, Homo sapien
agagggctagtatgcaatgacttcttattgaaa

SEQ ID NO: 969704 - DNA, 33 bp, Homo sapien
agagggctagtatgcagtgacttcttattgaaa

SEQ ID NO: 969705 - DNA, 33 bp, Homo sapien
tataattatgctccacaggaactcaattatatt

SEQ ID NO: 969706 - DNA, 33 bp, Homo sapien
tataattatgctccacgggaactcaattatatt

SEQ ID NO: 969707 - DNA, 33 bp, Homo sapien
tttgttctctaataaaccactattagccatata

SEQ ID NO: 969708 - DNA, 33 bp, Homo sapien
tttgttctctaataaatcactattagccatata

SEQ ID NO: 969709 - DNA, 33 bp, Homo sapien
atataagatataacacggagtattttaggatgt

SEQ ID NO: 969710 - DNA, 33 bp, Homo sapien
atataagatataacactgagtattttaggatgt

SEQ ID NO: 969711 - DNA, 33 bp, Homo sapien
tgctatgttttctaaactgtctcagtcaagccc

SEQ ID NO: 969712 - DNA, 33 bp, Homo sapien
tgctatgttttctaaattgtctcagtcaagccc

SEQ ID NO: 969713 - DNA, 33 bp, Homo sapien
cccaatcacttgctacagcattatcatatttta

SEQ ID NO: 969714 - DNA, 33 bp, Homo sapien
cccaatcacttgctacggcattatcatatttta

SEQ ID NO: 969715 - DNA, 33 bp, Homo sapien
aatctcctcccagtcacggaaaactctatcccc

SEQ ID NO: 969716 - DNA, 33 bp, Homo sapien
aatctcctcccagtcatggaaaactctatcccc

SEQ ID NO: 969717 - DNA, 33 bp, Homo sapien
gattgggaacctaacaatgggagaaacaagtta

SEQ ID NO: 969718 - DNA, 33 bp, Homo sapien
gattgggaacctaacagtgggagaaacaagtta

SEQ ID NO: 969719 - DNA, 33 bp, Homo sapien
tgagtgttcagctttaaggtaacaactggcagc

SEQ ID NO: 969720 - DNA, 33 bp, Homo sapien
tgagtgttcagctttagggtaacaactggcagc

SEQ ID NO: 969721 - DNA, 33 bp, Homo sapien
ggctttttggagacaccgagaagctgtgccctg

SEQ ID NO: 969722 - DNA, 33 bp, Homo sapien
ggctttttggagacactgagaagctgtgccctg

SEQ ID NO: 969723 - DNA, 33 bp, Homo sapien
accgcaaccttccaaacggtagctcttctaaaa

SEQ ID NO: 969724 - DNA, 33 bp, Homo sapien
accgcaaccttccaaatggtagctcttctaaaa

SEQ ID NO: 969725 - DNA, 33 bp, Homo sapien
ttgtagcacattgtgaatcctccataaatggtt

SEQ ID NO: 969726 - DNA, 33 bp, Homo sapien
ttgtagcacattgtgagtcctccataaatggtt

SEQ ID NO: 969727 - DNA, 33 bp, Homo sapien
tatttattgggattcagctgtattgcctctttt

SEQ ID NO: 969728 - DNA, 33 bp, Homo sapien
tatttattgggattcatctgtattgcctctttt

SEQ ID NO: 969729 - DNA, 33 bp, Homo sapien
atttctggcagctgaacgttgacttttcattaa

SEQ ID NO: 969730 - DNA, 33 bp, Homo sapien
atttctggcagctgaaggttgacttttcattaa

SEQ ID NO: 969731 - DNA, 33 bp, Homo sapien
taaattttgtcttcaaaaacaatcccaaagata

SEQ ID NO: 969732 - DNA, 33 bp, Homo sapien
taaattttgtcttcaagaacaatcccaaagata

SEQ ID NO: 969733 - DNA, 33 bp, Homo sapien
ttccccactcaaaaggaatatgctgggagaata

SEQ ID NO: 969734 - DNA, 33 bp, Homo sapien
ttccccactcaaaaggtatatgctgggagaata

SEQ ID NO: 969735 - DNA, 33 bp, Homo sapien
gtgagatgctggatatcagtgagctgaacttct

SEQ ID NO: 969736 - DNA, 33 bp, Homo sapien
gtgagatgctggatattagtgagctgaacttct

SEQ ID NO: 969737 - DNA, 33 bp, Homo sapien
taatatccttcatgacccaagagtgatgccact

SEQ ID NO: 969738 - DNA, 33 bp, Homo sapien
taatatccttcatgactcaagagtgatgccact

SEQ ID NO: 969739 - DNA, 33 bp, Homo sapien
tttgccttcaaaatagccatggtctaaagaaat

SEQ ID NO: 969740 - DNA, 33 bp, Homo sapien
tttgccttcaaaatagtcatggtctaaagaaat

SEQ ID NO: 969741 - DNA, 33 bp, Homo sapien
ctcaattcatcattagcagtccacacctaaatg

SEQ ID NO: 969742 - DNA, 33 bp, Homo sapien
ctcaattcatcattagtagtccacacctaaatg

SEQ ID NO: 969743 - DNA, 33 bp, Homo sapien
catagcagttttcaaacgcaaaagtgttcccta

SEQ ID NO: 969744 - DNA, 33 bp, Homo sapien
catagcagttttcaaatgcaaaagtgttcccta

SEQ ID NO: 969745 - DNA, 33 bp, Homo sapien
atgtcttaaagctttcacaatggcatgaatgag

SEQ ID NO: 969746 - DNA, 33 bp, Homo sapien
atgtcttaaagctttcgcaatggcatgaatgag

SEQ ID NO: 969747 - DNA, 33 bp, Homo sapien
catgtaagaagttcagcctcattataaactgaa

SEQ ID NO: 969748 - DNA, 33 bp, Homo sapien
catgtaagaagttcaggctcattataaactgaa

SEQ ID NO: 969749 - DNA, 33 bp, Homo sapien
catcaaaaccatactaccttgagtcatgtagct

SEQ ID NO: 969750 - DNA, 33 bp, Homo sapien
catcaaaaccatactatcttgagtcatgtagct

SEQ ID NO: 969751 - DNA, 33 bp, Homo sapien
tccataatttacaaacacttcaaatgttcaatg

SEQ ID NO: 969752 - DNA, 33 bp, Homo sapien
tccataatttacaaactcttcaaatgttcaatg

SEQ ID NO: 969753 - DNA, 33 bp, Homo sapien
gcagaatagattccacaaaaaaaaaatgtaatt

SEQ ID NO: 969754 - DNA, 33 bp, Homo sapien
gcagaatagattccacgaaaaaaaaatgtaatt

SEQ ID NO: 969755 - DNA, 33 bp, Homo sapien
ctctctcattttctcaaggaactcttctgcatc

SEQ ID NO: 969756 - DNA, 33 bp, Homo sapien
ctctctcattttctcagggaactcttctgcatc

SEQ ID NO: 969757 - DNA, 33 bp, Homo sapien
atctgcacataagacccatgactttaacacatg

SEQ ID NO: 969758 - DNA, 33 bp, Homo sapien
atctgcacataagacctatgactttaacacatg

SEQ ID NO: 969759 - DNA, 33 bp, Homo sapien
ttctgtggtttagttacgtgatcctccctgccc

SEQ ID NO: 969760 - DNA, 33 bp, Homo sapien
ttctgtggtttagttaggtgatcctccctgccc

SEQ ID NO: 969761 - DNA, 33 bp, Homo sapien
tagtgtttgatcctagcataaaagaatggcaat

SEQ ID NO: 969762 - DNA, 33 bp, Homo sapien
tagtgtttgatcctagtataaaagaatggcaat

SEQ ID NO: 969763 - DNA, 33 bp, Homo sapien
tctcaaaacagtagcaaatttctgaaatattag

SEQ ID NO: 969764 - DNA, 33 bp, Homo sapien
tctcaaaacagtagcagatttctgaaatattag

SEQ ID NO: 969765 - DNA, 33 bp, Homo sapien
gtaaatcattgagaaaagtaggtacatttggta

SEQ ID NO: 969766 - DNA, 33 bp, Homo sapien
gtaaatcattgagaaacgtaggtacatttggta

SEQ ID NO: 969767 - DNA, 33 bp, Homo sapien
accatctcggatcatccagttcccatccagagt

SEQ ID NO: 969768 - DNA, 33 bp, Homo sapien
accatctcggatcatctagttcccatccagagt

SEQ ID NO: 969769 - DNA, 33 bp, Homo sapien
ccgaaaataaactggcaagactaaatcaaatgg

SEQ ID NO: 969770 - DNA, 33 bp, Homo sapien
ccgaaaataaactggcgagactaaatcaaatgg

SEQ ID NO: 969771 - DNA, 33 bp, Homo sapien
gaaagaaactctaacactctaggctttgtattc

SEQ ID NO: 969772 - DNA, 33 bp, Homo sapien
gaaagaaactctaacattctaggctttgtattc

SEQ ID NO: 969773 - DNA, 33 bp, Homo sapien
gatcttaggagaaagccagtcaaaaatgtttca

SEQ ID NO: 969774 - DNA, 33 bp, Homo sapien
gatcttaggagaaagcgagtcaaaaatgtttca

SEQ ID NO: 969775 - DNA, 33 bp, Homo sapien
agattatggagaattacctgactcttccatatc

SEQ ID NO: 969776 - DNA, 33 bp, Homo sapien
agattatggagaattatctgactcttccatatc

SEQ ID NO: 969777 - DNA, 33 bp, Homo sapien
atttgttctccccaagccttatttttgatagat

SEQ ID NO: 969778 - DNA, 33 bp, Homo sapien
atttgttctccccaaggcttatttttgatagat

SEQ ID NO: 969779 - DNA, 33 bp, Homo sapien
ctcccttgcctttgaacatgactactctattca

SEQ ID NO: 969780 - DNA, 33 bp, Homo sapien
ctcccttgcctttgaagatgactactctattca

SEQ ID NO: 969781 - DNA, 33 bp, Homo sapien
ctcctgatattcacacactgtgcagttttcttc

SEQ ID NO: 969782 - DNA, 33 bp, Homo sapien
ctcctgatattcacaccctgtgcagttttcttc

SEQ ID NO: 969783 - DNA, 33 bp, Homo sapien
actttaaaaaatgcacacttgctcacttttgtc

SEQ ID NO: 969784 - DNA, 33 bp, Homo sapien
actttaaaaaatgcacgcttgctcacttttgtc

SEQ ID NO: 969785 - DNA, 33 bp, Homo sapien
gtctagaaagcccaacaagaacaatctaaagtt

SEQ ID NO: 969786 - DNA, 33 bp, Homo sapien
gtctagaaagcccaacgagaacaatctaaagtt

SEQ ID NO: 969787 - DNA, 33 bp, Homo sapien
ggtgttaactcctccacgctctccagagtcaca

SEQ ID NO: 969788 - DNA, 33 bp, Homo sapien
ggtgttaactcctccatgctctccagagtcaca

SEQ ID NO: 969789 - DNA, 33 bp, Homo sapien
gaatgagaaggagaacacagttgagagagagag

SEQ ID NO: 969790 - DNA, 33 bp, Homo sapien
gaatgagaaggagaacgcagttgagagagagag

SEQ ID NO: 969791 - DNA, 33 bp, Homo sapien
gtcgttttcactgtaccaccttgccctccttag

SEQ ID NO: 969792 - DNA, 33 bp, Homo sapien
gtcgttttcactgtactaccttgccctccttag

SEQ ID NO: 969793 - DNA, 33 bp, Homo sapien
gccttcctaaactcacacagaaattgaagtgaa

SEQ ID NO: 969794 - DNA, 33 bp, Homo sapien
gccttcctaaactcacgcagaaattgaagtgaa

SEQ ID NO: 969795 - DNA, 33 bp, Homo sapien
ctcacaaccaaacttacctcatattacaaaaca

SEQ ID NO: 969796 - DNA, 33 bp, Homo sapien
ctcacaaccaaacttatctcatattacaaaaca

SEQ ID NO: 969797 - DNA, 33 bp, Homo sapien
caatactattgataacgctccattaaacctaca

SEQ ID NO: 969798 - DNA, 33 bp, Homo sapien
caatactattgataactctccattaaacctaca

SEQ ID NO: 969799 - DNA, 33 bp, Homo sapien
atatagccactacctcaccgctacctcaagaat

SEQ ID NO: 969800 - DNA, 33 bp, Homo sapien
atatagccactacctcgccgctacctcaagaat

SEQ ID NO: 969801 - DNA, 33 bp, Homo sapien
aactttgatgaccaacaaggttgatttcgtgcc

SEQ ID NO: 969802 - DNA, 33 bp, Homo sapien
aactttgatgaccaactaggttgatttcgtgcc

SEQ ID NO: 969803 - DNA, 33 bp, Homo sapien
tcttatgtggaatatgaaagtcctcaggtataa

SEQ ID NO: 969804 - DNA, 33 bp, Homo sapien
tcttatgtggaatatggaagtcctcaggtataa

SEQ ID NO: 969805 - DNA, 33 bp, Homo sapien
tttctctagcacgataacttcacactaagcttc

SEQ ID NO: 969806 - DNA, 33 bp, Homo sapien
tttctctagcacgatagcttcacactaagcttc

SEQ ID NO: 969807 - DNA, 33 bp, Homo sapien
gagaatcccaatgtaactgaaattcaaaaaaaa

SEQ ID NO: 969808 - DNA, 33 bp, Homo sapien
gagaatcccaatgtaagtgaaattcaaaaaaaa

SEQ ID NO: 969809 - DNA, 33 bp, Homo sapien
ctagctgctccctaaaagtgaggcacaatgtat

SEQ ID NO: 969810 - DNA, 33 bp, Homo sapien
ctagctgctccctaaaggtgaggcacaatgtat

SEQ ID NO: 969811 - DNA, 33 bp, Homo sapien
tctataattattcaacaaattctcagggaccta

SEQ ID NO: 969812 - DNA, 33 bp, Homo sapien
tctataattattcaaccaattctcagggaccta

SEQ ID NO: 969813 - DNA, 33 bp, Homo sapien
gaatgtaaaaacagttaaacagttgcataagta

SEQ ID NO: 969814 - DNA, 33 bp, Homo sapien
gaatgtaaaaacagtttaacagttgcataagta

SEQ ID NO: 969815 - DNA, 33 bp, Homo sapien
ctaggaacacagtaaactccaaaacaagctttg

SEQ ID NO: 969816 - DNA, 33 bp, Homo sapien
ctaggaacacagtaaagtccaaaacaagctttg

SEQ ID NO: 969817 - DNA, 33 bp, Homo sapien
ctcatgtgtgatctgagatgagagccagctggg

SEQ ID NO: 969818 - DNA, 33 bp, Homo sapien
ctcatgtgtgatctgatatgagagccagctggg

SEQ ID NO: 969819 - DNA, 33 bp, Homo sapien
gccagctgggcttggaaacctcgctagcagctt

SEQ ID NO: 969820 - DNA, 33 bp, Homo sapien
gccagctgggcttggagacctcgctagcagctt

SEQ ID NO: 969821 - DNA, 33 bp, Homo sapien
ggaattccatacataaatagtcagtcctcatcc

SEQ ID NO: 969822 - DNA, 33 bp, Homo sapien
ggaattccatacataagtagtcagtcctcatcc

SEQ ID NO: 969823 - DNA, 33 bp, Homo sapien
ctggctgagctatctgaaagtcaaactgtaaaa

SEQ ID NO: 969824 - DNA, 33 bp, Homo sapien
ctggctgagctatctgtaagtcaaactgtaaaa

SEQ ID NO: 969825 - DNA, 33 bp, Homo sapien
gtcaagtatgccctaccatgttgtacttgtaga

SEQ ID NO: 969826 - DNA, 33 bp, Homo sapien
gtcaagtatgccctactatgttgtacttgtaga

SEQ ID NO: 969827 - DNA, 33 bp, Homo sapien
ttatctgaagattttaccagggagatcagacgt

SEQ ID NO: 969828 - DNA, 33 bp, Homo sapien
ttatctgaagattttatcagggagatcagacgt

SEQ ID NO: 969829 - DNA, 33 bp, Homo sapien
acaaagttttggcaaaaaaacatgcctaatgag

SEQ ID NO: 969830 - DNA, 33 bp, Homo sapien
acaaagttttggcaaagaaacatgcctaatgag

SEQ ID NO: 969831 - DNA, 33 bp, Homo sapien
aactcaccattgcctccgaagtgggattgatct

SEQ ID NO: 969832 - DNA, 33 bp, Homo sapien
aactcaccattgcctctgaagtgggattgatct

SEQ ID NO: 969833 - DNA, 33 bp, Homo sapien
ttattcttatgtaacacaaattgttttgttgca

SEQ ID NO: 969834 - DNA, 33 bp, Homo sapien
ttattcttatgtaacagaaattgttttgttgca

SEQ ID NO: 969835 - DNA, 33 bp, Homo sapien
aacaatccctttccccaacttagatgttaagca

SEQ ID NO: 969836 - DNA, 33 bp, Homo sapien
aacaatccctttcccccacttagatgttaagca

SEQ ID NO: 969837 - DNA, 33 bp, Homo sapien
taatgccttagggcaaaaaagtagctgggtttc

SEQ ID NO: 969838 - DNA, 33 bp, Homo sapien
taatgccttagggcaataaagtagctgggtttc

SEQ ID NO: 969839 - DNA, 33 bp, Homo sapien
gttatttaagcaaaaagtatgcaactggcatta

SEQ ID NO: 969840 - DNA, 33 bp, Homo sapien
gttatttaagcaaaaattatgcaactggcatta

SEQ ID NO: 969841 - DNA, 33 bp, Homo sapien
agatcagatttctaaaataccagtattagccta

SEQ ID NO: 969842 - DNA, 33 bp, Homo sapien
agatcagatttctaaagtaccagtattagccta

SEQ ID NO: 969843 - DNA, 33 bp, Homo sapien
taaatctcagtttacccatatctacgctttctg

SEQ ID NO: 969844 - DNA, 33 bp, Homo sapien
taaatctcagtttacctatatctacgctttctg

SEQ ID NO: 969845 - DNA, 33 bp, Homo sapien
aattactaatcgtgctaacataaaataatacat

SEQ ID NO: 969846 - DNA, 33 bp, Homo sapien
aattactaatcgtgcttacataaaataatacat

SEQ ID NO: 969847 - DNA, 33 bp, Homo sapien
ggctcagagcagaacacggtggtcagcacttac

SEQ ID NO: 969848 - DNA, 33 bp, Homo sapien
ggctcagagcagaacatggtggtcagcacttac

SEQ ID NO: 969849 - DNA, 33 bp, Homo sapien
gatttttttgcagctgaatactttcaatcatac

SEQ ID NO: 969850 - DNA, 33 bp, Homo sapien
gatttttttgcagctgcatactttcaatcatac

SEQ ID NO: 969851 - DNA, 33 bp, Homo sapien
gggcttcttagatccacattattcctgtcattc

SEQ ID NO: 969852 - DNA, 33 bp, Homo sapien
gggcttcttagatccatattattcctgtcattc

SEQ ID NO: 969853 - DNA, 33 bp, Homo sapien
tcttttctaagtaaaaggtgttagattgcataa

SEQ ID NO: 969854 - DNA, 33 bp, Homo sapien
tcttttctaagtaaaatgtgttagattgcataa

SEQ ID NO: 969855 - DNA, 33 bp, Homo sapien
tagaaataccttaacaatcatcattctaaacaa

SEQ ID NO: 969856 - DNA, 33 bp, Homo sapien
tagaaataccttaacactcatcattctaaacaa

SEQ ID NO: 969857 - DNA, 33 bp, Homo sapien
gacagcagtcattttaaggtagtgtcatggcat

SEQ ID NO: 969858 - DNA, 33 bp, Homo sapien
gacagcagtcattttagggtagtgtcatggcat

SEQ ID NO: 969859 - DNA, 33 bp, Homo sapien
gactgaccaagaaataggtacaaagaatgaggc

SEQ ID NO: 969860 - DNA, 33 bp, Homo sapien
gactgaccaagaaatatgtacaaagaatgaggc

SEQ ID NO: 969861 - DNA, 33 bp, Homo sapien
ggaagtgggattaaaactttgatgcagagtaaa

SEQ ID NO: 969862 - DNA, 33 bp, Homo sapien
ggaagtgggattaaaattttgatgcagagtaaa

SEQ ID NO: 969863 - DNA, 33 bp, Homo sapien
agtaatatatgtgaaggcccctagaaaactgtc

SEQ ID NO: 969864 - DNA, 33 bp, Homo sapien
agtaatatatgtgaagtcccctagaaaactgtc

SEQ ID NO: 969865 - DNA, 33 bp, Homo sapien
tgtttatccattatacaaaactgccagtctaaa

SEQ ID NO: 969866 - DNA, 33 bp, Homo sapien
tgtttatccattatacgaaactgccagtctaaa

SEQ ID NO: 969867 - DNA, 33 bp, Homo sapien
aatatggaacgtgtcacggaagagtatgttata

SEQ ID NO: 969868 - DNA, 33 bp, Homo sapien
aatatggaacgtgtcatggaagagtatgttata

SEQ ID NO: 969869 - DNA, 33 bp, Homo sapien
ttactaagctatatcaaatctctctctctctct

SEQ ID NO: 969870 - DNA, 33 bp, Homo sapien
ttactaagctatatcacatctctctctctctct

SEQ ID NO: 969871 - DNA, 33 bp, Homo sapien
ttgaatttcatggaatgagctggatagagatca

SEQ ID NO: 969872 - DNA, 33 bp, Homo sapien
ttgaatttcatggaattagctggatagagatca

SEQ ID NO: 969873 - DNA, 33 bp, Homo sapien
aggtgaacaagcaccactatagtaagaggagag

SEQ ID NO: 969874 - DNA, 33 bp, Homo sapien
aggtgaacaagcaccattatagtaagaggagag

SEQ ID NO: 969875 - DNA, 33 bp, Homo sapien
caatcagttaggtcaacacgaatctaacactat

SEQ ID NO: 969876 - DNA, 33 bp, Homo sapien
caatcagttaggtcaatacgaatctaacactat

SEQ ID NO: 969877 - DNA, 33 bp, Homo sapien
agatctctatagaccaactttcttttaacccac

SEQ ID NO: 969878 - DNA, 33 bp, Homo sapien
agatctctatagaccagctttcttttaacccac

SEQ ID NO: 969879 - DNA, 33 bp, Homo sapien
tacattcagtctctcacaaaagtcacctggagt

SEQ ID NO: 969880 - DNA, 33 bp, Homo sapien
tacattcagtctctcagaaaagtcacctggagt

SEQ ID NO: 969881 - DNA, 33 bp, Homo sapien
cctcccttcagcactcgcgagttggatgtagaa

SEQ ID NO: 969882 - DNA, 33 bp, Homo sapien
cctcccttcagcactctcgagttggatgtagaa

SEQ ID NO: 969883 - DNA, 33 bp, Homo sapien
caaactttctgtaaaaagccataaggtgaaatt

SEQ ID NO: 969884 - DNA, 33 bp, Homo sapien
caaactttctgtaaaaggccataaggtgaaatt

SEQ ID NO: 969885 - DNA, 33 bp, Homo sapien
aactagagtagtcagacgattccattcgcatac

SEQ ID NO: 969886 - DNA, 33 bp, Homo sapien
aactagagtagtcagatgattccattcgcatac

SEQ ID NO: 969887 - DNA, 33 bp, Homo sapien
cctcattgtgccgtgcaataaatgagaagttgc

SEQ ID NO: 969888 - DNA, 33 bp, Homo sapien
cctcattgtgccgtgcgataaatgagaagttgc

SEQ ID NO: 969889 - DNA, 33 bp, Homo sapien
atttaacctctcttaccctccttcaacaagcta

SEQ ID NO: 969890 - DNA, 33 bp, Homo sapien
atttaacctctcttactctccttcaacaagcta

SEQ ID NO: 969891 - DNA, 33 bp, Homo sapien
attggtttaggatagcgacatccagctgcatcc

SEQ ID NO: 969892 - DNA, 33 bp, Homo sapien
attggtttaggatagctacatccagctgcatcc

SEQ ID NO: 969893 - DNA, 33 bp, Homo sapien
ctgagctccaaattgaatatacttctcaactcc

SEQ ID NO: 969894 - DNA, 33 bp, Homo sapien
ctgagctccaaattgagtatacttctcaactcc

SEQ ID NO: 969895 - DNA, 33 bp, Homo sapien
tgtttcagcaacagagacagattaaaaaccaat

SEQ ID NO: 969896 - DNA, 33 bp, Homo sapien
tgtttcagcaacagaggcagattaaaaaccaat

SEQ ID NO: 969897 - DNA, 33 bp, Homo sapien
cacagggaagaaaagccgagttcagagaggaca

SEQ ID NO: 969898 - DNA, 33 bp, Homo sapien
cacagggaagaaaagctgagttcagagaggaca

SEQ ID NO: 969899 - DNA, 33 bp, Homo sapien
gaatgacaataaggataagaaatctagacacac

SEQ ID NO: 969900 - DNA, 33 bp, Homo sapien
gaatgacaataaggatcagaaatctagacacac

SEQ ID NO: 969901 - DNA, 33 bp, Homo sapien
agaatacaagatatggacactgattatagaggt

SEQ ID NO: 969902 - DNA, 33 bp, Homo sapien
agaatacaagatatgggcactgattatagaggt

SEQ ID NO: 969903 - DNA, 33 bp, Homo sapien
agagaacaagccaagaaaaggaagattctggta

SEQ ID NO: 969904 - DNA, 33 bp, Homo sapien
agagaacaagccaagagaaggaagattctggta

SEQ ID NO: 969905 - DNA, 33 bp, Homo sapien
tccttctttgaacatccctgatcatgcatccca

SEQ ID NO: 969906 - DNA, 33 bp, Homo sapien
tccttctttgaacatctctgatcatgcatccca

SEQ ID NO: 969907 - DNA, 33 bp, Homo sapien
agatcctatatcatgggacctatcatcttttgg

SEQ ID NO: 969908 - DNA, 33 bp, Homo sapien
agatcctatatcatggtacctatcatcttttgg

SEQ ID NO: 969909 - DNA, 33 bp, Homo sapien
gagctcccaaataaaacgatttgctaagacttc

SEQ ID NO: 969910 - DNA, 33 bp, Homo sapien
gagctcccaaataaaatgatttgctaagacttc

SEQ ID NO: 969911 - DNA, 33 bp, Homo sapien
ggtttcccagtgtatacagaagctttatttaca

SEQ ID NO: 969912 - DNA, 33 bp, Homo sapien
ggtttcccagtgtatatagaagctttatttaca

SEQ ID NO: 969913 - DNA, 33 bp, Homo sapien
aaactcctagactcaaactatctgcccacctca

SEQ ID NO: 969914 - DNA, 33 bp, Homo sapien
aaactcctagactcaagctatctgcccacctca

SEQ ID NO: 969915 - DNA, 33 bp, Homo sapien
attctgaaatgtggacacaaaggctctggggag

SEQ ID NO: 969916 - DNA, 33 bp, Homo sapien
attctgaaatgtggacgcaaaggctctggggag

SEQ ID NO: 969917 - DNA, 33 bp, Homo sapien
gttctggaggctggaaatccatgatggaggtgc

SEQ ID NO: 969918 - DNA, 33 bp, Homo sapien
gttctggaggctggaagtccatgatggaggtgc

SEQ ID NO: 969919 - DNA, 33 bp, Homo sapien
gagggagatggagggaaagagagtcaaaggaaa

SEQ ID NO: 969920 - DNA, 33 bp, Homo sapien
gagggagatggagggagagagagtcaaaggaaa

SEQ ID NO: 969921 - DNA, 33 bp, Homo sapien
ttcctgctgtggcaaccgaagtgaccatgtgtt

SEQ ID NO: 969922 - DNA, 33 bp, Homo sapien
ttcctgctgtggcaactgaagtgaccatgtgtt

SEQ ID NO: 969923 - DNA, 33 bp, Homo sapien
aagcatattgtaccatgagcctctggtggtcag

SEQ ID NO: 969924 - DNA, 33 bp, Homo sapien
aagcatattgtaccattagcctctggtggtcag

SEQ ID NO: 969925 - DNA, 33 bp, Homo sapien
aggagcaataggttccacagagagcatatcaca

SEQ ID NO: 969926 - DNA, 33 bp, Homo sapien
aggagcaataggttccgcagagagcatatcaca

SEQ ID NO: 969927 - DNA, 33 bp, Homo sapien
aaccctactgagatcacaggcattatttttgcc

SEQ ID NO: 969928 - DNA, 33 bp, Homo sapien
aaccctactgagatcagaggcattatttttgcc

SEQ ID NO: 969929 - DNA, 33 bp, Homo sapien
agggtaatccaaacccgcatgctgacagttgat

SEQ ID NO: 969930 - DNA, 33 bp, Homo sapien
agggtaatccaaaccctcatgctgacagttgat

SEQ ID NO: 969931 - DNA, 33 bp, Homo sapien
tgtactgagaaatctacggcaggtataataaac

SEQ ID NO: 969932 - DNA, 33 bp, Homo sapien
tgtactgagaaatctatggcaggtataataaac

SEQ ID NO: 969933 - DNA, 33 bp, Homo sapien
ggtcagctctatctaacggcttttgaaccaaaa

SEQ ID NO: 969934 - DNA, 33 bp, Homo sapien
ggtcagctctatctaatggcttttgaaccaaaa

SEQ ID NO: 969935 - DNA, 33 bp, Homo sapien
agtgtatcagtgatgactagaaccatacatcca

SEQ ID NO: 969936 - DNA, 33 bp, Homo sapien
agtgtatcagtgatgattagaaccatacatcca

SEQ ID NO: 969937 - DNA, 33 bp, Homo sapien
taagggcagaaaaggacgatataaacatcacat

SEQ ID NO: 969938 - DNA, 33 bp, Homo sapien
taagggcagaaaaggatgatataaacatcacat

SEQ ID NO: 969939 - DNA, 33 bp, Homo sapien
atatccacactatcataacagagatgaaacaca

SEQ ID NO: 969940 - DNA, 33 bp, Homo sapien
atatccacactatcatcacagagatgaaacaca

SEQ ID NO: 969941 - DNA, 33 bp, Homo sapien
aatcctcaataagatacgaacaaacagaatcca

SEQ ID NO: 969942 - DNA, 33 bp, Homo sapien
aatcctcaataagatatgaacaaacagaatcca

SEQ ID NO: 969943 - DNA, 33 bp, Homo sapien
gagtagaggaaaaacaatgtagagagagctctc

SEQ ID NO: 969944 - DNA, 33 bp, Homo sapien
gagtagaggaaaaacactgtagagagagctctc

SEQ ID NO: 969945 - DNA, 33 bp, Homo sapien
aagaccacgcaaaagacggcatctgagatggaa

SEQ ID NO: 969946 - DNA, 33 bp, Homo sapien
aagaccacgcaaaagatggcatctgagatggaa

SEQ ID NO: 969947 - DNA, 33 bp, Homo sapien
attgtcacaacatagaatcacagcccctcatct

SEQ ID NO: 969948 - DNA, 33 bp, Homo sapien
attgtcacaacatagagtcacagcccctcatct

SEQ ID NO: 969949 - DNA, 33 bp, Homo sapien
ctgagttaatagaagacggttggactgtcatat

SEQ ID NO: 969950 - DNA, 33 bp, Homo sapien
ctgagttaatagaagatggttggactgtcatat

SEQ ID NO: 969951 - DNA, 33 bp, Homo sapien
caaaccttaatgacaacgcaaaatgaaaattaa

SEQ ID NO: 969952 - DNA, 33 bp, Homo sapien
caaaccttaatgacaatgcaaaatgaaaattaa

SEQ ID NO: 969953 - DNA, 33 bp, Homo sapien
cctcataagagaaggaagaaaaggctgtcagat

SEQ ID NO: 969954 - DNA, 33 bp, Homo sapien
cctcataagagaaggaggaaaaggctgtcagat

SEQ ID NO: 969955 - DNA, 33 bp, Homo sapien
atcaatcactgaagaagacataacttgactaaa

SEQ ID NO: 969956 - DNA, 33 bp, Homo sapien
atcaatcactgaagaatacataacttgactaaa

SEQ ID NO: 969957 - DNA, 33 bp, Homo sapien
atggtaagtacaaatagctggctaaggagggat

SEQ ID NO: 969958 - DNA, 33 bp, Homo sapien
atggtaagtacaaatatctggctaaggagggat

SEQ ID NO: 969959 - DNA, 33 bp, Homo sapien
cgtggtagtgtgtctacatctaaggtcttattt

SEQ ID NO: 969960 - DNA, 33 bp, Homo sapien
cgtggtagtgtgtctatatctaaggtcttattt

SEQ ID NO: 969961 - DNA, 33 bp, Homo sapien
taaaaaaacagttcaaaagtatataggtgggaa

SEQ ID NO: 969962 - DNA, 33 bp, Homo sapien
taaaaaaacagttcaagagtatataggtgggaa

SEQ ID NO: 969963 - DNA, 33 bp, Homo sapien
ttggagaagcttctcagggctcaatactacagc

SEQ ID NO: 969964 - DNA, 33 bp, Homo sapien
ttggagaagcttctcatggctcaatactacagc

SEQ ID NO: 969965 - DNA, 33 bp, Homo sapien
ttgatcaccttaatccacaatgctcgctacacc

SEQ ID NO: 969966 - DNA, 33 bp, Homo sapien
ttgatcaccttaatccccaatgctcgctacacc

SEQ ID NO: 969967 - DNA, 33 bp, Homo sapien
catgtttatataacaactcacaatgtgctcatc

SEQ ID NO: 969968 - DNA, 33 bp, Homo sapien
catgtttatataacaattcacaatgtgctcatc

SEQ ID NO: 969969 - DNA, 33 bp, Homo sapien
tgtgtctaaacttgaacgaagactgttcactta

SEQ ID NO: 969970 - DNA, 33 bp, Homo sapien
tgtgtctaaacttgaatgaagactgttcactta

SEQ ID NO: 969971 - DNA, 33 bp, Homo sapien
ccaaataaatgtagaaatatggcatattctttg

SEQ ID NO: 969972 - DNA, 33 bp, Homo sapien
ccaaataaatgtagaattatggcatattctttg

SEQ ID NO: 969973 - DNA, 33 bp, Homo sapien
ggacgattctgtgttaagagttaggcaaaattc

SEQ ID NO: 969974 - DNA, 33 bp, Homo sapien
ggacgattctgtgttaggagttaggcaaaattc

SEQ ID NO: 969975 - DNA, 33 bp, Homo sapien
ggaactagtttgagaacagaaaatgtgcctgaa

SEQ ID NO: 969976 - DNA, 33 bp, Homo sapien
ggaactagtttgagaatagaaaatgtgcctgaa

SEQ ID NO: 969977 - DNA, 33 bp, Homo sapien
tttacatatacacccaatgcttacacacagtca

SEQ ID NO: 969978 - DNA, 33 bp, Homo sapien
tttacatatacacccagtgcttacacacagtca

SEQ ID NO: 969979 - DNA, 33 bp, Homo sapien
ttttatgcattttttgaaaattcgactcctcaa

SEQ ID NO: 969980 - DNA, 33 bp, Homo sapien
ttttatgcattttttgcaaattcgactcctcaa

SEQ ID NO: 969981 - DNA, 33 bp, Homo sapien
agcctgtgtgctaatcaccttgtgcctaggcat

SEQ ID NO: 969982 - DNA, 33 bp, Homo sapien
agcctgtgtgctaatctccttgtgcctaggcat

SEQ ID NO: 969983 - DNA, 33 bp, Homo sapien
acaatatttggcataccatttcacgcctctctt

SEQ ID NO: 969984 - DNA, 33 bp, Homo sapien
acaatatttggcatactatttcacgcctctctt

SEQ ID NO: 969985 - DNA, 33 bp, Homo sapien
agcatccatccaagaaatgctctctccaggacc

SEQ ID NO: 969986 - DNA, 33 bp, Homo sapien
agcatccatccaagaagtgctctctccaggacc

SEQ ID NO: 969987 - DNA, 33 bp, Homo sapien
aaatttctgtccctaccgagcttacactctagt

SEQ ID NO: 969988 - DNA, 33 bp, Homo sapien
aaatttctgtccctactgagcttacactctagt

SEQ ID NO: 969989 - DNA, 33 bp, Homo sapien
agtggtaagtggttaacgctgactgtaagggtt

SEQ ID NO: 969990 - DNA, 33 bp, Homo sapien
agtggtaagtggttaatgctgactgtaagggtt

SEQ ID NO: 969991 - DNA, 33 bp, Homo sapien
aggtgacaaatattcaaatgttagcaccctccg

SEQ ID NO: 969992 - DNA, 33 bp, Homo sapien
aggtgacaaatattcacatgttagcaccctccg

SEQ ID NO: 969993 - DNA, 33 bp, Homo sapien
aaccagtggcaaacggcaacatagttcagacct

SEQ ID NO: 969994 - DNA, 33 bp, Homo sapien
aaccagtggcaaacggtaacatagttcagacct

SEQ ID NO: 969995 - DNA, 33 bp, Homo sapien
aaatatgtaagaagaaacttgagacttactgcc

SEQ ID NO: 969996 - DNA, 33 bp, Homo sapien
aaatatgtaagaagaaccttgagacttactgcc

SEQ ID NO: 969997 - DNA, 33 bp, Homo sapien
cctaattagaaaaaggaaatggtcattgcagtg

SEQ ID NO: 969998 - DNA, 33 bp, Homo sapien
cctaattagaaaaagggaatggtcattgcagtg

SEQ ID NO: 969999 - DNA, 33 bp, Homo sapien
ggcagaacttggcaaccaatttagcattctgag

SEQ ID NO: 970000 - DNA, 33 bp, Homo sapien
ggcagaacttggcaactaatttagcattctgag

SEQ ID NO: 970001 - DNA, 33 bp, Homo sapien
tatggagaggttgctacaagtgcactttaacaa

SEQ ID NO: 970002 - DNA, 33 bp, Homo sapien
tatggagaggttgctataagtgcactttaacaa

SEQ ID NO: 970003 - DNA, 33 bp, Homo sapien
ataatcactaaaagtaacgagatcacaccattg

SEQ ID NO: 970004 - DNA, 33 bp, Homo sapien
ataatcactaaaagtatcgagatcacaccattg

SEQ ID NO: 970005 - DNA, 33 bp, Homo sapien
acacccttctcttcccacagaaccatctaaatt

SEQ ID NO: 970006 - DNA, 33 bp, Homo sapien
acacccttctcttcccccagaaccatctaaatt

SEQ ID NO: 970007 - DNA, 33 bp, Homo sapien
catctcagtaaaatgcccaatactcatttacct

SEQ ID NO: 970008 - DNA, 33 bp, Homo sapien
catctcagtaaaatgctcaatactcatttacct

SEQ ID NO: 970009 - DNA, 33 bp, Homo sapien
cctacttattcaaaacacccaatatttatctat

SEQ ID NO: 970010 - DNA, 33 bp, Homo sapien
cctacttattcaaaacgcccaatatttatctat

SEQ ID NO: 970011 - DNA, 33 bp, Homo sapien
catccagctcctgtacacatgattgggggtttt

SEQ ID NO: 970012 - DNA, 33 bp, Homo sapien
catccagctcctgtacgcatgattgggggtttt

SEQ ID NO: 970013 - DNA, 33 bp, Homo sapien
aactgccaccccattccaagtgtccatagtcct

SEQ ID NO: 970014 - DNA, 33 bp, Homo sapien
aactgccaccccattctaagtgtccatagtcct

SEQ ID NO: 970015 - DNA, 33 bp, Homo sapien
tggattccaaaacctcaaatatgcctcagatgg

SEQ ID NO: 970016 - DNA, 33 bp, Homo sapien
tggattccaaaacctcgaatatgcctcagatgg

SEQ ID NO: 970017 - DNA, 33 bp, Homo sapien
aaagcatttatattcacgtttgttgattagttg

SEQ ID NO: 970018 - DNA, 33 bp, Homo sapien
aaagcatttatattcatgtttgttgattagttg

SEQ ID NO: 970019 - DNA, 33 bp, Homo sapien
agaagagtatctgctgccaaatagctgatcaga

SEQ ID NO: 970020 - DNA, 33 bp, Homo sapien
agaagagtatctgctgtcaaatagctgatcaga

SEQ ID NO: 970021 - DNA, 33 bp, Homo sapien
tttgctttaatggctacagaaagaaggtggttt

SEQ ID NO: 970022 - DNA, 33 bp, Homo sapien
tttgctttaatggctatagaaagaaggtggttt

SEQ ID NO: 970023 - DNA, 33 bp, Homo sapien
ttatttttttctagccagagataacgtataatc

SEQ ID NO: 970024 - DNA, 33 bp, Homo sapien
ttatttttttctagccggagataacgtataatc

SEQ ID NO: 970025 - DNA, 33 bp, Homo sapien; identical to SEQ ID NO: 970023

SEQ ID NO: 970026 - DNA, 33 bp, Homo sapien; identical to SEQ ID NO: 970024

SEQ ID NO: 970027 - DNA, 33 bp, Homo sapien
cttcaaacctcagaagactattctcatcacttt

SEQ ID NO: 970028 - DNA, 33 bp, Homo sapien
cttcaaacctcagaaggctattctcatcacttt

SEQ ID NO: 970029 - DNA, 33 bp, Homo sapien
gctactgaggctactcacactattttaattata

SEQ ID NO: 970030 - DNA, 33 bp, Homo sapien
gctactgaggctactcgcactattttaattata

SEQ ID NO: 970031 - DNA, 33 bp, Homo sapien
acaataaagtaacagaaacagtggtgaaataga

SEQ ID NO: 970032 - DNA, 33 bp, Homo sapien
acaataaagtaacagacacagtggtgaaataga

SEQ ID NO: 970033 - DNA, 33 bp, Homo sapien
atgcttatggtgtaaacgctactttccttttat

SEQ ID NO: 970034 - DNA, 33 bp, Homo sapien
atgcttatggtgtaaatgctactttccttttat

SEQ ID NO: 970035 - DNA, 33 bp, Homo sapien
tcacgtgtaagaccttcaaacctctacctactt

SEQ ID NO: 970036 - DNA, 33 bp, Homo sapien
tcacgtgtaagacctttaaacctctacctactt

SEQ ID NO: 970037 - DNA, 33 bp, Homo sapien
tagcagtagataaacacagggattgcaggatta

SEQ ID NO: 970038 - DNA, 33 bp, Homo sapien
tagcagtagataaacagagggattgcaggatta

SEQ ID NO: 970039 - DNA, 33 bp, Homo sapien
tggccacagttctacacgctcttcccttctcta

SEQ ID NO: 970040 - DNA, 33 bp, Homo sapien
tggccacagttctacatgctcttcccttctcta

SEQ ID NO: 970041 - DNA, 33 bp, Homo sapien
ctcctgagcctttgcacagcatcacgttttata

SEQ ID NO: 970042 - DNA, 33 bp, Homo sapien
ctcctgagcctttgcatagcatcacgttttata

SEQ ID NO: 970043 - DNA, 33 bp, Homo sapien
attatcacaagttacacctttatatgtgtgtgc

SEQ ID NO: 970044 - DNA, 33 bp, Homo sapien
attatcacaagttacatctttatatgtgtgtgc

SEQ ID NO: 970045 - DNA, 33 bp, Homo sapien
tctgggcagggacctaaaggaagtgaggcagtg

SEQ ID NO: 970046 - DNA, 33 bp, Homo sapien
tctgggcagggacctacaggaagtgaggcagtg

SEQ ID NO: 970047 - DNA, 33 bp, Homo sapien
gaacactcaaattacacatctagcttacaaaac

SEQ ID NO: 970048 - DNA, 33 bp, Homo sapien
gaacactcaaattacatatctagcttacaaaac

SEQ ID NO: 970049 - DNA, 33 bp, Homo sapien
gcatcccaggctgacacgacttctacgtagtac

SEQ ID NO: 970050 - DNA, 33 bp, Homo sapien
gcatcccaggctgacatgacttctacgtagtac

SEQ ID NO: 970051 - DNA, 33 bp, Homo sapien
aagaccagagtgtgtacattctaagtgcccact

SEQ ID NO: 970052 - DNA, 33 bp, Homo sapien
aagaccagagtgtgtatattctaagtgcccact

SEQ ID NO: 970053 - DNA, 33 bp, Homo sapien
gagccaaacaatatcaataagtatcttgaccac

SEQ ID NO: 970054 - DNA, 33 bp, Homo sapien
gagccaaacaatatcagtaagtatcttgaccac

SEQ ID NO: 970055 - DNA, 33 bp, Homo sapien
tgcagaattataattcaagatgaggtttcgggt

SEQ ID NO: 970056 - DNA, 33 bp, Homo sapien
tgcagaattataattcgagatgaggtttcgggt

SEQ ID NO: 970057 - DNA, 33 bp, Homo sapien
ttctattgctaactacaaaactaggaagcactg

SEQ ID NO: 970058 - DNA, 33 bp, Homo sapien
ttctattgctaactaccaaactaggaagcactg

SEQ ID NO: 970059 - DNA, 33 bp, Homo sapien
aaaatttctttgtcccaaacaactcacacagcc

SEQ ID NO: 970060 - DNA, 33 bp, Homo sapien
aaaatttctttgtcccgaacaactcacacagcc

SEQ ID NO: 970061 - DNA, 33 bp, Homo sapien
cccaagagtcctagtcaaggaaagattcatccc

SEQ ID NO: 970062 - DNA, 33 bp, Homo sapien
cccaagagtcctagtcgaggaaagattcatccc

SEQ ID NO: 970063 - DNA, 33 bp, Homo sapien
ctgaacatatatctcacgatagaaaaaagaaat

SEQ ID NO: 970064 - DNA, 33 bp, Homo sapien
ctgaacatatatctcaggatagaaaaaagaaat

SEQ ID NO: 970065 - DNA, 33 bp, Homo sapien
atgaggtgttcagtaaatatctgctcccccact

SEQ ID NO: 970066 - DNA, 33 bp, Homo sapien
atgaggtgttcagtaagtatctgctcccccact

SEQ ID NO: 970067 - DNA, 33 bp, Homo sapien
tatttcttctcactggaaagtcacagttgcata

SEQ ID NO: 970068 - DNA, 33 bp, Homo sapien
tatttcttctcactgggaagtcacagttgcata

SEQ ID NO: 970069 - DNA, 33 bp, Homo sapien
tggctgctaattcagaataacattagcgagagg

SEQ ID NO: 970070 - DNA, 33 bp, Homo sapien
tggctgctaattcagactaacattagcgagagg

SEQ ID NO: 970071 - DNA, 33 bp, Homo sapien
gcccacttatatagtacgtggtgaccagatatc

SEQ ID NO: 970072 - DNA, 33 bp, Homo sapien
gcccacttatatagtatgtggtgaccagatatc

SEQ ID NO: 970073 - DNA, 33 bp, Homo sapien
agaaatctctggtgccactctagtaactcaaaa

SEQ ID NO: 970074 - DNA, 33 bp, Homo sapien
agaaatctctggtgccgctctagtaactcaaaa

SEQ ID NO: 970075 - DNA, 33 bp, Homo sapien
cgctccctttaaaaaaatgtcttgtatgagtct

SEQ ID NO: 970076 - DNA, 33 bp, Homo sapien
cgctccctttaaaaaagtgtcttgtatgagtct

SEQ ID NO: 970077 - DNA, 33 bp, Homo sapien
tttgcatagtaagtagccaacaaaaataaatac

SEQ ID NO: 970078 - DNA, 33 bp, Homo sapien
tttgcatagtaagtagtcaacaaaaataaatac

SEQ ID NO: 970079 - DNA, 33 bp, Homo sapien
tttctgagttttttgcagaggagatgaggctca

SEQ ID NO: 970080 - DNA, 33 bp, Homo sapien
tttctgagttttttgcggaggagatgaggctca

SEQ ID NO: 970081 - DNA, 33 bp, Homo sapien
tttgcttggttttcaaagcctctcaccttctct

SEQ ID NO: 970082 - DNA, 33 bp, Homo sapien
tttgcttggttttcaaggcctctcaccttctct

SEQ ID NO: 970083 - DNA, 33 bp, Homo sapien
aatcctggaggaggccagattaggagttcaact

SEQ ID NO: 970084 - DNA, 33 bp, Homo sapien
aatcctggaggaggccggattaggagttcaact

SEQ ID NO: 970085 - DNA, 33 bp, Homo sapien
aattgtggcaatatcactaccttaaactctggg

SEQ ID NO: 970086 - DNA, 33 bp, Homo sapien
aattgtggcaatatcattaccttaaactctggg

SEQ ID NO: 970087 - DNA, 33 bp, Homo sapien
gtgagaagaacagaaaagttgtgaatattaaat

SEQ ID NO: 970088 - DNA, 33 bp, Homo sapien
gtgagaagaacagaaatgttgtgaatattaaat

SEQ ID NO: 970089 - DNA, 33 bp, Homo sapien
tgttcatgtggaagaacttccatgccctcctgc

SEQ ID NO: 970090 - DNA, 33 bp, Homo sapien
tgttcatgtggaagaatttccatgccctcctgc

SEQ ID NO: 970091 - DNA, 33 bp, Homo sapien
ttttgtatagtatgtcaacctatttcaatcttt

SEQ ID NO: 970092 - DNA, 33 bp, Homo sapien
ttttgtatagtatgtcgacctatttcaatcttt

SEQ ID NO: 970093 - DNA, 33 bp, Homo sapien
ccacattgacaggtgaccaagagtgtagagaca

SEQ ID NO: 970094 - DNA, 33 bp, Homo sapien
ccacattgacaggtgatcaagagtgtagagaca

SEQ ID NO: 970095 - DNA, 33 bp, Homo sapien
ttatatgaatgtgaacagtccacaaaatatgtt

SEQ ID NO: 970096 - DNA, 33 bp, Homo sapien
ttatatgaatgtgaaccgtccacaaaatatgtt

SEQ ID NO: 970097 - DNA, 33 bp, Homo sapien
caaacagatactactagtaaacctgccttttta

SEQ ID NO: 970098 - DNA, 33 bp, Homo sapien
caaacagatactactattaaacctgccttttta

SEQ ID NO: 970099 - DNA, 33 bp, Homo sapien
ctctatgcctggtaaaagtatctatcttttcat

SEQ ID NO: 970100 - DNA, 33 bp, Homo sapien
ctctatgcctggtaaaggtatctatcttttcat

SEQ ID NO: 970101 - DNA, 33 bp, Homo sapien
gcagaagaccagagctcaactttgggatcctcc

SEQ ID NO: 970102 - DNA, 33 bp, Homo sapien
gcagaagaccagagctgaactttgggatcctcc

SEQ ID NO: 970103 - DNA, 33 bp, Homo sapien
aggtgagaagagaataacctttaatagatgaaa

SEQ ID NO: 970104 - DNA, 33 bp, Homo sapien
aggtgagaagagaataccctttaatagatgaaa

SEQ ID NO: 970105 - DNA, 33 bp, Homo sapien
tgtccccaggaaagcaaagatgaaatgtaacta

SEQ ID NO: 970106 - DNA, 33 bp, Homo sapien
tgtccccaggaaagcagagatgaaatgtaacta

SEQ ID NO: 970107 - DNA, 33 bp, Homo sapien
aagctggagctcgcccgactcttcacctgactt

SEQ ID NO: 970108 - DNA, 33 bp, Homo sapien
aagctggagctcgccctactcttcacctgactt

SEQ ID NO: 970109 - DNA, 33 bp, Homo sapien
ttttaacacttaataaattaagcagcaggaagt

SEQ ID NO: 970110 - DNA, 33 bp, Homo sapien
ttttaacacttaataagttaagcagcaggaagt

SEQ ID NO: 970111 - DNA, 33 bp, Homo sapien
gcttagagatgttcacaaaacctgtggtgattc

SEQ ID NO: 970112 - DNA, 33 bp, Homo sapien
gcttagagatgttcacgaaacctgtggtgattc

SEQ ID NO: 970113 - DNA, 33 bp, Homo sapien
tgtaacagaactaagacgcaactcaagtaggtc

SEQ ID NO: 970114 - DNA, 33 bp, Homo sapien
tgtaacagaactaagatgcaactcaagtaggtc

SEQ ID NO: 970115 - DNA, 33 bp, Homo sapien
tgtatacactgagaacaatttcccatattcctc

SEQ ID NO: 970116 - DNA, 33 bp, Homo sapien
tgtatacactgagaacgatttcccatattcctc

SEQ ID NO: 970117 - DNA, 33 bp, Homo sapien
ttgtaagaaaattgcacggacttccagtttcaa

SEQ ID NO: 970118 - DNA, 33 bp, Homo sapien
ttgtaagaaaattgcatggacttccagtttcaa

SEQ ID NO: 970119 - DNA, 33 bp, Homo sapien
taagttgctaggtggaagtcaattacttgagat

SEQ ID NO: 970120 - DNA, 33 bp, Homo sapien
taagttgctaggtggacgtcaattacttgagat

SEQ ID NO: 970121 - DNA, 33 bp, Homo sapien
ctgtgatgctcacacaatggaactgcctaagga

SEQ ID NO: 970122 - DNA, 33 bp, Homo sapien
ctgtgatgctcacacagtggaactgcctaagga

SEQ ID NO: 970123 - DNA, 33 bp, Homo sapien
tgtgaatacaggaatacataagggaggcagtga

SEQ ID NO: 970124 - DNA, 33 bp, Homo sapien
tgtgaatacaggaatatataagggaggcagtga

SEQ ID NO: 970125 - DNA, 33 bp, Homo sapien
ttaatgtgtcaagaggaattcataaagtcggag

SEQ ID NO: 970126 - DNA, 33 bp, Homo sapien
ttaatgtgtcaagagggattcataaagtcggag

SEQ ID NO: 970127 - DNA, 33 bp, Homo sapien
tattagtagctttccaatcaaactctctttcac

SEQ ID NO: 970128 - DNA, 33 bp, Homo sapien
tattagtagctttccagtcaaactctctttcac

SEQ ID NO: 970129 - DNA, 33 bp, Homo sapien
tttctggctcccctcaaagttcctccacctaca

SEQ ID NO: 970130 - DNA, 33 bp, Homo sapien
tttctggctcccctcagagttcctccacctaca

SEQ ID NO: 970131 - DNA, 33 bp, Homo sapien
aaagaacagaagattgaaaaaccattgattcat

SEQ ID NO: 970132 - DNA, 33 bp, Homo sapien
aaagaacagaagattggaaaaccattgattcat

SEQ ID NO: 970133 - DNA, 33 bp, Homo sapien
ggtcaccatgcaccagcagagtgaactcaaatt

SEQ ID NO: 970134 - DNA, 33 bp, Homo sapien
ggtcaccatgcaccaggagagtgaactcaaatt

SEQ ID NO: 970135 - DNA, 33 bp, Homo sapien
actcggaaataatataaatggactgcttgatga

SEQ ID NO: 970136 - DNA, 33 bp, Homo sapien
actcggaaataatatacatggactgcttgatga

SEQ ID NO: 970137 - DNA, 33 bp, Homo sapien
atgggctcagtggatcacagccttgaagcatga

SEQ ID NO: 970138 - DNA, 33 bp, Homo sapien
atgggctcagtggatcgcagccttgaagcatga

SEQ ID NO: 970139 - DNA, 33 bp, Homo sapien
actaggcttaccttgaatatttaggatgtggta

SEQ ID NO: 970140 - DNA, 33 bp, Homo sapien
actaggcttaccttgagtatttaggatgtggta

SEQ ID NO: 970141 - DNA, 33 bp, Homo sapien
cctggtgctttccttacatccatgtacacagtg

SEQ ID NO: 970142 - DNA, 33 bp, Homo sapien
cctggtgctttccttatatccatgtacacagtg

SEQ ID NO: 970143 - DNA, 33 bp, Homo sapien
gtgatggacaggaccactactttttgttagatc

SEQ ID NO: 970144 - DNA, 33 bp, Homo sapien
gtgatggacaggaccattactttttgttagatc

SEQ ID NO: 970145 - DNA, 33 bp, Homo sapien
ccatccttggagaagcagataaacaaaatgtca

SEQ ID NO: 970146 - DNA, 33 bp, Homo sapien
ccatccttggagaagcggataaacaaaatgtca

SEQ ID NO: 970147 - DNA, 33 bp, Homo sapien
caaggaaggagttggacgtgtaaaaataggtgc

SEQ ID NO: 970148 - DNA, 33 bp, Homo sapien
caaggaaggagttggatgtgtaaaaataggtgc

SEQ ID NO: 970149 - DNA, 33 bp, Homo sapien
gattctgtcaggataaggtttattttacttcac

SEQ ID NO: 970150 - DNA, 33 bp, Homo sapien
gattctgtcaggataatgtttattttacttcac

SEQ ID NO: 970151 - DNA, 33 bp, Homo sapien
atgagaggtaaacacacaagcattttggaaaga

SEQ ID NO: 970152 - DNA, 33 bp, Homo sapien
atgagaggtaaacacagaagcattttggaaaga

SEQ ID NO: 970153 - DNA, 33 bp, Homo sapien
ctcaaacagaacaatcaatgtattatgatgtaa

SEQ ID NO: 970154 - DNA, 33 bp, Homo sapien
ctcaaacagaacaatcgatgtattatgatgtaa

SEQ ID NO: 970155 - DNA, 33 bp, Homo sapien
agttgaccattttatgcatggtaagcagaggtt

SEQ ID NO: 970156 - DNA, 33 bp, Homo sapien
agttgaccattttatggatggtaagcagaggtt

SEQ ID NO: 970157 - DNA, 33 bp, Homo sapien
aacaaattccattacaaacaagaatcagatatg

SEQ ID NO: 970158 - DNA, 33 bp, Homo sapien
aacaaattccattacagacaagaatcagatatg

SEQ ID NO: 970159 - DNA, 33 bp, Homo sapien
agcttgttgggctagacggacatgtcaaataaa

SEQ ID NO: 970160 - DNA, 33 bp, Homo sapien
agcttgttgggctagatggacatgtcaaataaa

SEQ ID NO: 970161 - DNA, 33 bp, Homo sapien
agtcatcttcttaccacatgggctcattcattt

SEQ ID NO: 970162 - DNA, 33 bp, Homo sapien
agtcatcttcttaccatatgggctcattcattt

SEQ ID NO: 970163 - DNA, 33 bp, Homo sapien
tagtgttttattgaaaatcattcagaataatgg

SEQ ID NO: 970164 - DNA, 33 bp, Homo sapien
tagtgttttattgaaagtcattcagaataatgg

SEQ ID NO: 970165 - DNA, 33 bp, Homo sapien
ataattggaattagaaaggccaagagagacgat

SEQ ID NO: 970166 - DNA, 33 bp, Homo sapien
ataattggaattagaagggccaagagagacgat

SEQ ID NO: 970167 - DNA, 33 bp, Homo sapien
atatataggcttcacaagtagggagatggcacc

SEQ ID NO: 970168 - DNA, 33 bp, Homo sapien
atatataggcttcacacgtagggagatggcacc

SEQ ID NO: 970169 - DNA, 33 bp, Homo sapien
ggtggaaagagttccaaattctcctagttcccc

SEQ ID NO: 970170 - DNA, 33 bp, Homo sapien
ggtggaaagagttccagattctcctagttcccc

SEQ ID NO: 970171 - DNA, 33 bp, Homo sapien
cgcatcagctggctgaacttttctaggaactgt

SEQ ID NO: 970172 - DNA, 33 bp, Homo sapien
cgcatcagctggctgagcttttctaggaactgt

SEQ ID NO: 970173 - DNA, 33 bp, Homo sapien
ggcaaacacagtggacaatccagagtgttaact

SEQ ID NO: 970174 - DNA, 33 bp, Homo sapien
ggcaaacacagtggacgatccagagtgttaact

SEQ ID NO: 970175 - DNA, 33 bp, Homo sapien
gtgaatggtttaaaaaatgtgatataacaatat

SEQ ID NO: 970176 - DNA, 33 bp, Homo sapien
gtgaatggtttaaaaactgtgatataacaatat

SEQ ID NO: 970177 - DNA, 33 bp, Homo sapien
caacatagtgacatcccgactctgaaaagaaaa

SEQ ID NO: 970178 - DNA, 33 bp, Homo sapien
caacatagtgacatcctgactctgaaaagaaaa

SEQ ID NO: 970179 - DNA, 33 bp, Homo sapien
gggtcccatgaggtccaaaacaggcttgctgcc

SEQ ID NO: 970180 - DNA, 33 bp, Homo sapien
gggtcccatgaggtccgaaacaggcttgctgcc

SEQ ID NO: 970181 - DNA, 33 bp, Homo sapien
aaacaagcataggaaaacttgtcatttgagcta

SEQ ID NO: 970182 - DNA, 33 bp, Homo sapien
aaacaagcataggaaaccttgtcatttgagcta

SEQ ID NO: 970183 - DNA, 33 bp, Homo sapien
gccattcatgatcacaacttgaaagatgacatt

SEQ ID NO: 970184 - DNA, 33 bp, Homo sapien
gccattcatgatcacagcttgaaagatgacatt

SEQ ID NO: 970185 - DNA, 33 bp, Homo sapien
gccctagaattgaaccacccggggccagactcc

SEQ ID NO: 970186 - DNA, 33 bp, Homo sapien
gccctagaattgaaccgcccggggccagactcc

SEQ ID NO: 970187 - DNA, 33 bp, Homo sapien
aattgagccacacagaactaatcagagccttat

SEQ ID NO: 970188 - DNA, 33 bp, Homo sapien
aattgagccacacagatctaatcagagccttat

SEQ ID NO: 970189 - DNA, 33 bp, Homo sapien
agatgtttgctcttaccacttatttagcatagt

SEQ ID NO: 970190 - DNA, 33 bp, Homo sapien
agatgtttgctcttactacttatttagcatagt

SEQ ID NO: 970191 - DNA, 33 bp, Homo sapien
gtggaggagtcatatgcatcattcctcatgtga

SEQ ID NO: 970192 - DNA, 33 bp, Homo sapien
gtggaggagtcatatggatcattcctcatgtga

SEQ ID NO: 970193 - DNA, 33 bp, Homo sapien
aagtatggtgctactcccatcttttactgcctt

SEQ ID NO: 970194 - DNA, 33 bp, Homo sapien
aagtatggtgctactctcatcttttactgcctt

SEQ ID NO: 970195 - DNA, 33 bp, Homo sapien
tttgcccaatatcatacatccagtaactggggg

SEQ ID NO: 970196 - DNA, 33 bp, Homo sapien
tttgcccaatatcatatatccagtaactggggg

SEQ ID NO: 970197 - DNA, 33 bp, Homo sapien
agtagggaatggtgcactatatgttcttatgct

SEQ ID NO: 970198 - DNA, 33 bp, Homo sapien
agtagggaatggtgcattatatgttcttatgct

SEQ ID NO: 970199 - DNA, 33 bp, Homo sapien
attagtgaagggcatgaacactgacatgtaaca

SEQ ID NO: 970200 - DNA, 33 bp, Homo sapien
attagtgaagggcatgcacactgacatgtaaca

SEQ ID NO: 970201 - DNA, 33 bp, Homo sapien
gtttctgttggaatcacgctgtctctttccata

SEQ ID NO: 970202 - DNA, 33 bp, Homo sapien
gtttctgttggaatcatgctgtctctttccata

SEQ ID NO: 970203 - DNA, 33 bp, Homo sapien
atggccttacaggagaaaataattgctatcatt

SEQ ID NO: 970204 - DNA, 33 bp, Homo sapien
atggccttacaggagataataattgctatcatt

SEQ ID NO: 970205 - DNA, 33 bp, Homo sapien
gatggtgtctaagatcacaagaaaatgatttcg

SEQ ID NO: 970206 - DNA, 33 bp, Homo sapien
gatggtgtctaagatcgcaagaaaatgatttcg

SEQ ID NO: 970207 - DNA, 33 bp, Homo sapien
ggcctactcatattaccctacctcctaactcag

SEQ ID NO: 970208 - DNA, 33 bp, Homo sapien
ggcctactcatattactctacctcctaactcag

SEQ ID NO: 970209 - DNA, 33 bp, Homo sapien
cagcctggattaaatcactgggaatcaggaact

SEQ ID NO: 970210 - DNA, 33 bp, Homo sapien
cagcctggattaaatcgctgggaatcaggaact

SEQ ID NO: 970211 - DNA, 33 bp, Homo sapien
atctgagtttccgcacagtagccaagtttactc

SEQ ID NO: 970212 - DNA, 33 bp, Homo sapien
atctgagtttccgcacggtagccaagtttactc

SEQ ID NO: 970213 - DNA, 33 bp, Homo sapien
aacaatgcaccaatgacgaatttcactccagaa

SEQ ID NO: 970214 - DNA, 33 bp, Homo sapien
aacaatgcaccaatgatgaatttcactccagaa

SEQ ID NO: 970215 - DNA, 33 bp, Homo sapien
gtgtccatcaatttaacgttcacttcaaggttg

SEQ ID NO: 970216 - DNA, 33 bp, Homo sapien
gtgtccatcaatttaatgttcacttcaaggttg

SEQ ID NO: 970217 - DNA, 33 bp, Homo sapien
aaaaattcttacaataccccatgaagtaggcat

SEQ ID NO: 970218 - DNA, 33 bp, Homo sapien
aaaaattcttacaatatcccatgaagtaggcat

SEQ ID NO: 970219 - DNA, 33 bp, Homo sapien
aaataaaataaaaacagtgtctaacttctaaac

SEQ ID NO: 970220 - DNA, 33 bp, Homo sapien
aaataaaataaaaacattgtctaacttctaaac

SEQ ID NO: 970221 - DNA, 33 bp, Homo sapien
ccactctccaatttgaagaagagaggagagtag

SEQ ID NO: 970222 - DNA, 33 bp, Homo sapien
ccactctccaatttgaggaagagaggagagtag

SEQ ID NO: 970223 - DNA, 33 bp, Homo sapien
acctgagggagtacccggaagacagcacacaga

SEQ ID NO: 970224 - DNA, 33 bp, Homo sapien
acctgagggagtaccctgaagacagcacacaga

SEQ ID NO: 970225 - DNA, 33 bp, Homo sapien
ttttggtgaaaccacaaaacccgaagacactgc

SEQ ID NO: 970226 - DNA, 33 bp, Homo sapien
ttttggtgaaaccacagaacccgaagacactgc

SEQ ID NO: 970227 - DNA, 33 bp, Homo sapien
cttttccagtttgatcgcagtaaattcatttct

SEQ ID NO: 970228 - DNA, 33 bp, Homo sapien
cttttccagtttgatctcagtaaattcatttct

SEQ ID NO: 970229 - DNA, 33 bp, Homo sapien
gtaaagatggagaagacggctgataaaagacca

SEQ ID NO: 970230 - DNA, 33 bp, Homo sapien
gtaaagatggagaagatggctgataaaagacca

SEQ ID NO: 970231 - DNA, 33 bp, Homo sapien
ggaaaatagatcagaactggacaacaatctacc

SEQ ID NO: 970232 - DNA, 33 bp, Homo sapien
ggaaaatagatcagaagtggacaacaatctacc

SEQ ID NO: 970233 - DNA, 33 bp, Homo sapien
cacaccactggtcctcactctgcaacttacttt

SEQ ID NO: 970234 - DNA, 33 bp, Homo sapien
cacaccactggtcctcgctctgcaacttacttt

SEQ ID NO: 970235 - DNA, 33 bp, Homo sapien
taaactggctctctggaatttaataataaacaa

SEQ ID NO: 970236 - DNA, 33 bp, Homo sapien
taaactggctctctggcatttaataataaacaa

SEQ ID NO: 970237 - DNA, 33 bp, Homo sapien
atgtgcgttgagcaacaaaatactatccataga

SEQ ID NO: 970238 - DNA, 33 bp, Homo sapien
atgtgcgttgagcaacgaaatactatccataga

SEQ ID NO: 970239 - DNA, 33 bp, Homo sapien
tgtcataaagcattaaactgacttccaggcttt

SEQ ID NO: 970240 - DNA, 33 bp, Homo sapien
tgtcataaagcattaagctgacttccaggcttt

SEQ ID NO: 970241 - DNA, 33 bp, Homo sapien
ttattacagaaacttcaaagtgaattaccgagt

SEQ ID NO: 970242 - DNA, 33 bp, Homo sapien
ttattacagaaacttcgaagtgaattaccgagt

SEQ ID NO: 970243 - DNA, 33 bp, Homo sapien
atcacagatagcaaaaccttaattggacaaaac

SEQ ID NO: 970244 - DNA, 33 bp, Homo sapien
atcacagatagcaaaatcttaattggacaaaac

SEQ ID NO: 970245 - DNA, 33 bp, Homo sapien
aggctgtattcataaaacaccccaaggcatctg

SEQ ID NO: 970246 - DNA, 33 bp, Homo sapien
aggctgtattcataaatcaccccaaggcatctg

SEQ ID NO: 970247 - DNA, 33 bp, Homo sapien
acaccaagtcttcctaaatctgtttcttcatgc

SEQ ID NO: 970248 - DNA, 33 bp, Homo sapien
acaccaagtcttcctagatctgtttcttcatgc

SEQ ID NO: 970249 - DNA, 33 bp, Homo sapien
ttttaatccacataaacggagctgcgactctta

SEQ ID NO: 970250 - DNA, 33 bp, Homo sapien
ttttaatccacataaatggagctgcgactctta

SEQ ID NO: 970251 - DNA, 33 bp, Homo sapien
taagtgaaaatgccaccgtatgatgatagtttt

SEQ ID NO: 970252 - DNA, 33 bp, Homo sapien
taagtgaaaatgccactgtatgatgatagtttt

SEQ ID NO: 970253 - DNA, 33 bp, Homo sapien
agattacaccacccaaatggaaaagatggaaag

SEQ ID NO: 970254 - DNA, 33 bp, Homo sapien
agattacaccacccaagtggaaaagatggaaag

SEQ ID NO: 970255 - DNA, 33 bp, Homo sapien
ctctgaagttgggcaggcccttcagagttactc

SEQ ID NO: 970256 - DNA, 33 bp, Homo sapien
ctctgaagttgggcagtcccttcagagttactc

SEQ ID NO: 970257 - DNA, 33 bp, Homo sapien
actgctgagggtttcacgctgactgcacaccag

SEQ ID NO: 970258 - DNA, 33 bp, Homo sapien
actgctgagggtttcatgctgactgcacaccag

SEQ ID NO: 970259 - DNA, 33 bp, Homo sapien
agtcttaattttttgccgaaatgatcttgtttg

SEQ ID NO: 970260 - DNA, 33 bp, Homo sapien
agtcttaattttttgctgaaatgatcttgtttg

SEQ ID NO: 970261 - DNA, 33 bp, Homo sapien
ccattttcattcatggccacttccttgtggtac

SEQ ID NO: 970262 - DNA, 33 bp, Homo sapien
ccattttcattcatggtcacttccttgtggtac

SEQ ID NO: 970263 - DNA, 33 bp, Homo sapien
ggcagtacatctttgcactttaaagttgaaact

SEQ ID NO: 970264 - DNA, 33 bp, Homo sapien
ggcagtacatctttgcgctttaaagttgaaact

SEQ ID NO: 970265 - DNA, 33 bp, Homo sapien
tcttcattcttattccccctctttgtaactaca

SEQ ID NO: 970266 - DNA, 33 bp, Homo sapien
tcttcattcttattcctcctctttgtaactaca

SEQ ID NO: 970267 - DNA, 33 bp, Homo sapien
taactagggtccaggaacaaattgaaatgacaa

SEQ ID NO: 970268 - DNA, 33 bp, Homo sapien
taactagggtccaggagcaaattgaaatgacaa

SEQ ID NO: 970269 - DNA, 33 bp, Homo sapien
gtggtatctctaggcacctggaaaaaagctccc

SEQ ID NO: 970270 - DNA, 33 bp, Homo sapien
gtggtatctctaggcagctggaaaaaagctccc

SEQ ID NO: 970271 - DNA, 33 bp, Homo sapien
gattctcagaaaagaaacaaccctcaccaagca

SEQ ID NO: 970272 - DNA, 33 bp, Homo sapien
gattctcagaaaagaagcaaccctcaccaagca

SEQ ID NO: 970273 - DNA, 33 bp, Homo sapien
gtagaaataatgataaaaataggtaggaagcaa

SEQ ID NO: 970274 - DNA, 33 bp, Homo sapien
gtagaaataatgataagaataggtaggaagcaa

SEQ ID NO: 970275 - DNA, 33 bp, Homo sapien
gtggagccacttggcagtccttaagtacatcct

SEQ ID NO: 970276 - DNA, 33 bp, Homo sapien
gtggagccacttggcattccttaagtacatcct

SEQ ID NO: 970277 - DNA, 33 bp, Homo sapien
cagttagtaagagatgaagctgatgttttctga

SEQ ID NO: 970278 - DNA, 33 bp, Homo sapien
cagttagtaagagatggagctgatgttttctga

SEQ ID NO: 970279 - DNA, 33 bp, Homo sapien
ggactgacaaaaattacagctttcccttgaaca

SEQ ID NO: 970280 - DNA, 33 bp, Homo sapien
ggactgacaaaaattatagctttcccttgaaca

SEQ ID NO: 970281 - DNA, 33 bp, Homo sapien
tgccgtgcggtgcgtccagctgcacttcctcct

SEQ ID NO: 970282 - DNA, 33 bp, Homo sapien
tgccgtgcggtgcgtctagctgcacttcctcct

SEQ ID NO: 970283 - DNA, 33 bp, Homo sapien
gaacagaagactccagaagcctttggacagtct

SEQ ID NO: 970284 - DNA, 33 bp, Homo sapien
gaacagaagactccaggagcctttggacagtct

SEQ ID NO: 970285 - DNA, 33 bp, Homo sapien
gaccctttatgctaaagtcattgcaacatttca

SEQ ID NO: 970286 - DNA, 33 bp, Homo sapien
gaccctttatgctaaattcattgcaacatttca

SEQ ID NO: 970287 - DNA, 33 bp, Homo sapien
cctcactagaaacaggcaacagccactagtcca

SEQ ID NO: 970288 - DNA, 33 bp, Homo sapien
cctcactagaaacagggaacagccactagtcca

SEQ ID NO: 970289 - DNA, 33 bp, Homo sapien
atcaagaatcggataaataaaaggtgcttaaat

SEQ ID NO: 970290 - DNA, 33 bp, Homo sapien
atcaagaatcggataagtaaaaggtgcttaaat

SEQ ID NO: 970291 - DNA, 33 bp, Homo sapien
ctcaagtgagagaaataactacaccttgcacca

SEQ ID NO: 970292 - DNA, 33 bp, Homo sapien
ctcaagtgagagaaattactacaccttgcacca

SEQ ID NO: 970293 - DNA, 33 bp, Homo sapien
catggtctacaagtcaaagtgggacttccagag

SEQ ID NO: 970294 - DNA, 33 bp, Homo sapien
catggtctacaagtcagagtgggacttccagag

SEQ ID NO: 970295 - DNA, 33 bp, Homo sapien
actgcagtataagaacacaaaaagataagcaaa

SEQ ID NO: 970296 - DNA, 33 bp, Homo sapien
actgcagtataagaactcaaaaagataagcaaa

SEQ ID NO: 970297 - DNA, 33 bp, Homo sapien
gaatttcactgtaagcaccacagttttcaataa

SEQ ID NO: 970298 - DNA, 33 bp, Homo sapien
gaatttcactgtaagcgccacagttttcaataa

SEQ ID NO: 970299 - DNA, 33 bp, Homo sapien
aatatgaacttttgaactgctttctcagatatt

SEQ ID NO: 970300 - DNA, 33 bp, Homo sapien
aatatgaacttttgaattgctttctcagatatt

SEQ ID NO: 970301 - DNA, 33 bp, Homo sapien
aagctcatttgtggaaatactaggtactaatga

SEQ ID NO: 970302 - DNA, 33 bp, Homo sapien
aagctcatttgtggaattactaggtactaatga

SEQ ID NO: 970303 - DNA, 33 bp, Homo sapien
tactaaaaaacaaaacagaccaggagaagttat

SEQ ID NO: 970304 - DNA, 33 bp, Homo sapien
tactaaaaaacaaaacggaccaggagaagttat

SEQ ID NO: 970305 - DNA, 33 bp, Homo sapien
acaaagtactgaggaaagagtgacactggatag

SEQ ID NO: 970306 - DNA, 33 bp, Homo sapien
acaaagtactgaggaaggagtgacactggatag

SEQ ID NO: 970307 - DNA, 33 bp, Homo sapien
attggcctgataaactgaagcaaatttggtctt

SEQ ID NO: 970308 - DNA, 33 bp, Homo sapien
attggcctgataaacttaagcaaatttggtctt

SEQ ID NO: 970309 - DNA, 33 bp, Homo sapien
ggaaacctagcgaggtaaagttgcgtcttggtt

SEQ ID NO: 970310 - DNA, 33 bp, Homo sapien
ggaaacctagcgaggtgaagttgcgtcttggtt

SEQ ID NO: 970311 - DNA, 33 bp, Homo sapien
aaagacttgggcgaataataaactgagagaaag

SEQ ID NO: 970312 - DNA, 33 bp, Homo sapien
aaagacttgggcgaatgataaactgagagaaag

SEQ ID NO: 970313 - DNA, 33 bp, Homo sapien
tttgttcagtttctcacatacacctatatggta

SEQ ID NO: 970314 - DNA, 33 bp, Homo sapien
tttgttcagtttctcagatacacctatatggta

SEQ ID NO: 970315 - DNA, 33 bp, Homo sapien
gagagtagttttaaacagttaggcatagaagca

SEQ ID NO: 970316 - DNA, 33 bp, Homo sapien
gagagtagttttaaacggttaggcatagaagca

SEQ ID NO: 970317 - DNA, 33 bp, Homo sapien
aaggagaagaaagtccaaaataaggagcagtag

SEQ ID NO: 970318 - DNA, 33 bp, Homo sapien
aaggagaagaaagtccgaaataaggagcagtag

SEQ ID NO: 970319 - DNA, 33 bp, Homo sapien
caccaggtaaggtagacagagactgagtgaaaa

SEQ ID NO: 970320 - DNA, 33 bp, Homo sapien
caccaggtaaggtagagagagactgagtgaaaa

SEQ ID NO: 970321 - DNA, 33 bp, Homo sapien
ccacaactctgctttacgttccttgtactcaaa

SEQ ID NO: 970322 - DNA, 33 bp, Homo sapien
ccacaactctgctttatgttccttgtactcaaa

SEQ ID NO: 970323 - DNA, 33 bp, Homo sapien
gaatctgaataatccaaaaactgcagggtatat

SEQ ID NO: 970324 - DNA, 33 bp, Homo sapien
gaatctgaataatccacaaactgcagggtatat

SEQ ID NO: 970325 - DNA, 33 bp, Homo sapien
ttcagttgaaaaatcactacctggtttctattc

SEQ ID NO: 970326 - DNA, 33 bp, Homo sapien
ttcagttgaaaaatcagtacctggtttctattc

SEQ ID NO: 970327 - DNA, 33 bp, Homo sapien; identical to SEQ ID NO: 970325

SEQ ID NO: 970328 - DNA, 33 bp, Homo sapien; identical to SEQ ID NO: 970326

SEQ ID NO: 970329 - DNA, 33 bp, Homo sapien
atcagtatttaaaagaagcaaggagtataacag

SEQ ID NO: 970330 - DNA, 33 bp, Homo sapien
atcagtatttaaaagaggcaaggagtataacag

SEQ ID NO: 970331 - DNA, 33 bp, Homo sapien
ctaaatgttaattaaacagtctaaggcaacagt

SEQ ID NO: 970332 - DNA, 33 bp, Homo sapien
ctaaatgttaattaaatagtctaaggcaacagt

SEQ ID NO: 970333 - DNA, 33 bp, Homo sapien
gttacaactgcatcacaaagcagcgcagtgaca

SEQ ID NO: 970334 - DNA, 33 bp, Homo sapien
gttacaactgcatcacgaagcagcgcagtgaca

SEQ ID NO: 970335 - DNA, 33 bp, Homo sapien
actgattatgagatgcacagtagtaaccaacca

SEQ ID NO: 970336 - DNA, 33 bp, Homo sapien
actgattatgagatgcgcagtagtaaccaacca

SEQ ID NO: 970337 - DNA, 33 bp, Homo sapien
agtgaattactacaaaaggggaggtctacactc

SEQ ID NO: 970338 - DNA, 33 bp, Homo sapien
agtgaattactacaaagggggaggtctacactc

SEQ ID NO: 970339 - DNA, 33 bp, Homo sapien
acaggtagctaaaataatatgaattaccactct

SEQ ID NO: 970340 - DNA, 33 bp, Homo sapien
acaggtagctaaaatactatgaattaccactct

SEQ ID NO: 970341 - DNA, 33 bp, Homo sapien
taattactgtcccgtaagtcttctataggcacc

SEQ ID NO: 970342 - DNA, 33 bp, Homo sapien
taattactgtcccgtatgtcttctataggcacc

SEQ ID NO: 970343 - DNA, 33 bp, Homo sapien
ggtgagattgtgtccccattcagagagattaaa

SEQ ID NO: 970344 - DNA, 33 bp, Homo sapien
ggtgagattgtgtccctattcagagagattaaa

SEQ ID NO: 970345 - DNA, 33 bp, Homo sapien
gagatttctggctgacaaagtggtaccgaagga

SEQ ID NO: 970346 - DNA, 33 bp, Homo sapien
gagatttctggctgacgaagtggtaccgaagga

SEQ ID NO: 970347 - DNA, 33 bp, Homo sapien
gcaaaagatcctaaacaaagatccaagaaagct

SEQ ID NO: 970348 - DNA, 33 bp, Homo sapien
gcaaaagatcctaaacgaagatccaagaaagct

SEQ ID NO: 970349 - DNA, 33 bp, Homo sapien
aagctctccaagaatccatagcaaaagatccta

SEQ ID NO: 970350 - DNA, 33 bp, Homo sapien
aagctctccaagaatctatagcaaaagatccta

SEQ ID NO: 970351 - DNA, 33 bp, Homo sapien
gagagagacttagaaacgacttattatggaatt

SEQ ID NO: 970352 - DNA, 33 bp, Homo sapien
gagagagacttagaaaggacttattatggaatt

SEQ ID NO: 970353 - DNA, 33 bp, Homo sapien
ggaacactccccactccaatatagctagaaaat

SEQ ID NO: 970354 - DNA, 33 bp, Homo sapien
ggaacactccccactctaatatagctagaaaat

SEQ ID NO: 970355 - DNA, 33 bp, Homo sapien
tccgaactatagtgcccgaattcatttagaaat

SEQ ID NO: 970356 - DNA, 33 bp, Homo sapien
tccgaactatagtgcctgaattcatttagaaat

SEQ ID NO: 970357 - DNA, 33 bp, Homo sapien
ttttatgcaaacaaccaattagatcaggggtcg

SEQ ID NO: 970358 - DNA, 33 bp, Homo sapien
ttttatgcaaacaaccgattagatcaggggtcg

SEQ ID NO: 970359 - DNA, 33 bp, Homo sapien
gcagcaaactctcggcactgccgctcttgtctg

SEQ ID NO: 970360 - DNA, 33 bp, Homo sapien
gcagcaaactctcggcgctgccgctcttgtctg

SEQ ID NO: 970361 - DNA, 33 bp, Homo sapien
cgtagaaccacaaaaccaatgcagagtaaggag

SEQ ID NO: 970362 - DNA, 33 bp, Homo sapien
cgtagaaccacaaaacgaatgcagagtaaggag

SEQ ID NO: 970363 - DNA, 33 bp, Homo sapien
tctacgaattgtctacacagtacatcaactcac

SEQ ID NO: 970364 - DNA, 33 bp, Homo sapien
tctacgaattgtctacccagtacatcaactcac

SEQ ID NO: 970365 - DNA, 33 bp, Homo sapien
gggatatccatgttgacgagggatgtcttgact

SEQ ID NO: 970366 - DNA, 33 bp, Homo sapien
gggatatccatgttgatgagggatgtcttgact

SEQ ID NO: 970367 - DNA, 33 bp, Homo sapien
tgaccattgagtaaaggcctattctgaatctta

SEQ ID NO: 970368 - DNA, 33 bp, Homo sapien
tgaccattgagtaaagtcctattctgaatctta

SEQ ID NO: 970369 - DNA, 33 bp, Homo sapien
gatatataagtattaacgtgtttttctcgtgta

SEQ ID NO: 970370 - DNA, 33 bp, Homo sapien
gatatataagtattaatgtgtttttctcgtgta

SEQ ID NO: 970371 - DNA, 33 bp, Homo sapien
cttacgtatcatatcaacatatcaaaccttcct

SEQ ID NO: 970372 - DNA, 33 bp, Homo sapien
cttacgtatcatatcagcatatcaaaccttcct

SEQ ID NO: 970373 - DNA, 33 bp, Homo sapien
tgtatgctaatcacaacgaaggacacttacgta

SEQ ID NO: 970374 - DNA, 33 bp, Homo sapien
tgtatgctaatcacaatgaaggacacttacgta

SEQ ID NO: 970375 - DNA, 33 bp, Homo sapien
ctactattctgcctagcaaactcaaactatgag

SEQ ID NO: 970376 - DNA, 33 bp, Homo sapien
ctactattctgcctaggaaactcaaactatgag

SEQ ID NO: 970377 - DNA, 33 bp, Homo sapien
aattagatacatttgaagtttagaagtggtctt

SEQ ID NO: 970378 - DNA, 33 bp, Homo sapien
aattagatacatttgaggtttagaagtggtctt

SEQ ID NO: 970379 - DNA, 33 bp, Homo sapien
ctgtcttccttttaataacattcttcattccac

SEQ ID NO: 970380 - DNA, 33 bp, Homo sapien
ctgtcttccttttaatgacattcttcattccac

SEQ ID NO: 970381 - DNA, 33 bp, Homo sapien
aatcagaaggacaaaaagtgttaatgacaccat

SEQ ID NO: 970382 - DNA, 33 bp, Homo sapien
aatcagaaggacaaaacgtgttaatgacaccat

SEQ ID NO: 970383 - DNA, 33 bp, Homo sapien
aatatgtgaatatggaacccatggatgtgggga

SEQ ID NO: 970384 - DNA, 33 bp, Homo sapien
aatatgtgaatatggatcccatggatgtgggga

SEQ ID NO: 970385 - DNA, 33 bp, Homo sapien
acctagtgatctgtgacagtcagtggatccaca

SEQ ID NO: 970386 - DNA, 33 bp, Homo sapien
acctagtgatctgtgatagtcagtggatccaca

SEQ ID NO: 970387 - DNA, 33 bp, Homo sapien
atctttgagatctgcaatcttccattagagcct

SEQ ID NO: 970388 - DNA, 33 bp, Homo sapien
atctttgagatctgcagtcttccattagagcct

SEQ ID NO: 970389 - DNA, 33 bp, Homo sapien
tttcctcaattactaacgaagttttatggagga

SEQ ID NO: 970390 - DNA, 33 bp, Homo sapien
tttcctcaattactaatgaagttttatggagga

SEQ ID NO: 970391 - DNA, 33 bp, Homo sapien
taaaatgatggagcaaacaggtatcatgaaata

SEQ ID NO: 970392 - DNA, 33 bp, Homo sapien
taaaatgatggagcaagcaggtatcatgaaata

SEQ ID NO: 970393 - DNA, 33 bp, Homo sapien
agactcttccatgtaccgatgaaagggagagtt

SEQ ID NO: 970394 - DNA, 33 bp, Homo sapien
agactcttccatgtactgatgaaagggagagtt

SEQ ID NO: 970395 - DNA, 33 bp, Homo sapien
aagcttcctatgtgtaccctgggttgggaatta

SEQ ID NO: 970396 - DNA, 33 bp, Homo sapien
aagcttcctatgtgtatcctgggttgggaatta

SEQ ID NO: 970397 - DNA, 33 bp, Homo sapien
aatggtaaggtatgtaaaagagagtctgtggtc

SEQ ID NO: 970398 - DNA, 33 bp, Homo sapien
aatggtaaggtatgtacaagagagtctgtggtc

SEQ ID NO: 970399 - DNA, 33 bp, Homo sapien
tacagtcctacctgaaagagtgttagggaatga

SEQ ID NO: 970400 - DNA, 33 bp, Homo sapien
tacagtcctacctgaaggagtgttagggaatga

SEQ ID NO: 970401 - DNA, 33 bp, Homo sapien
tgtcctctaggcaacccgaaagtcctgttgaaa

SEQ ID NO: 970402 - DNA, 33 bp, Homo sapien
tgtcctctaggcaacctgaaagtcctgttgaaa

SEQ ID NO: 970403 - DNA, 33 bp, Homo sapien
tacgttacagaatttacgaacctacacttgtaa

SEQ ID NO: 970404 - DNA, 33 bp, Homo sapien
tacgttacagaatttatgaacctacacttgtaa

SEQ ID NO: 970405 - DNA, 33 bp, Homo sapien
gttagacactgtttcacgtaaagtcacaatttc

SEQ ID NO: 970406 - DNA, 33 bp, Homo sapien
gttagacactgtttcatgtaaagtcacaatttc

SEQ ID NO: 970407 - DNA, 33 bp, Homo sapien
tttggtgaatctgtgacggatagcggttgttgc

SEQ ID NO: 970408 - DNA, 33 bp, Homo sapien
tttggtgaatctgtgatggatagcggttgttgc

SEQ ID NO: 970409 - DNA, 33 bp, Homo sapien
atattctcaaggaaaacaggacagtttaaaata

SEQ ID NO: 970410 - DNA, 33 bp, Homo sapien
atattctcaaggaaaataggacagtttaaaata

SEQ ID NO: 970411 - DNA, 33 bp, Homo sapien
gaaacaacaaagagcacaattaggcctgtagag

SEQ ID NO: 970412 - DNA, 33 bp, Homo sapien
gaaacaacaaagagcagaattaggcctgtagag

SEQ ID NO: 970413 - DNA, 33 bp, Homo sapien
agttgaaaacaggggaaagaaggaaggcattca

SEQ ID NO: 970414 - DNA, 33 bp, Homo sapien
agttgaaaacaggggagagaaggaaggcattca

SEQ ID NO: 970415 - DNA, 33 bp, Homo sapien
cttcaagcgaccagcaaaaactaagactgccat

SEQ ID NO: 970416 - DNA, 33 bp, Homo sapien
cttcaagcgaccagcagaaactaagactgccat

SEQ ID NO: 970417 - DNA, 33 bp, Homo sapien
actccaagtacaagaactgaaaacaaaagatga

SEQ ID NO: 970418 - DNA, 33 bp, Homo sapien
actccaagtacaagaagtgaaaacaaaagatga

SEQ ID NO: 970419 - DNA, 33 bp, Homo sapien
tggcaatgattctcaaacatgcaggcaataaag

SEQ ID NO: 970420 - DNA, 33 bp, Homo sapien
tggcaatgattctcaagcatgcaggcaataaag

SEQ ID NO: 970421 - DNA, 33 bp, Homo sapien
tttaaatctgcaaaatcagaggaaatgagaaga

SEQ ID NO: 970422 - DNA, 33 bp, Homo sapien
tttaaatctgcaaaatgagaggaaatgagaaga

SEQ ID NO: 970423 - DNA, 33 bp, Homo sapien
ttgccacacgtaagaacaagcatacaggtaagg

SEQ ID NO: 970424 - DNA, 33 bp, Homo sapien
ttgccacacgtaagaataagcatacaggtaagg

SEQ ID NO: 970425 - DNA, 33 bp, Homo sapien
agggcactgttgatccaaaacacatttactcct

SEQ ID NO: 970426 - DNA, 33 bp, Homo sapien
agggcactgttgatccgaaacacatttactcct

SEQ ID NO: 970427 - DNA, 33 bp, Homo sapien
accatgaaaaacgatacacagctcctaatacac

SEQ ID NO: 970428 - DNA, 33 bp, Homo sapien
accatgaaaaacgatagacagctcctaatacac

SEQ ID NO: 970429 - DNA, 33 bp, Homo sapien
tcttttgcagtatacaatgggtttgcggtcatc

SEQ ID NO: 970430 - DNA, 33 bp, Homo sapien
tcttttgcagtatacagtgggtttgcggtcatc

SEQ ID NO: 970431 - DNA, 33 bp, Homo sapien
ttacttattgttgtgacgctaggcaagtcagtt

SEQ ID NO: 970432 - DNA, 33 bp, Homo sapien
ttacttattgttgtgatgctaggcaagtcagtt

SEQ ID NO: 970433 - DNA, 33 bp, Homo sapien
agcacgattcaaatgcaaggttttgtaagattt

SEQ ID NO: 970434 - DNA, 33 bp, Homo sapien
agcacgattcaaatgcgaggttttgtaagattt

SEQ ID NO: 970435 - DNA, 33 bp, Homo sapien
cacgtctggacatctgaacatttctctccaagc

SEQ ID NO: 970436 - DNA, 33 bp, Homo sapien
cacgtctggacatctggacatttctctccaagc

SEQ ID NO: 970437 - DNA, 33 bp, Homo sapien
aatcaacaggccaaaaagggagttacagtctag

SEQ ID NO: 970438 - DNA, 33 bp, Homo sapien
aatcaacaggccaaaacgggagttacagtctag

SEQ ID NO: 970439 - DNA, 33 bp, Homo sapien
gtacagggattgaacacctccagccaaaggagg

SEQ ID NO: 970440 - DNA, 33 bp, Homo sapien
gtacagggattgaacatctccagccaaaggagg

SEQ ID NO: 970441 - DNA, 33 bp, Homo sapien
ccaaagttaaggtacacggtaagactggttcat

SEQ ID NO: 970442 - DNA, 33 bp, Homo sapien
ccaaagttaaggtacatggtaagactggttcat

SEQ ID NO: 970443 - DNA, 33 bp, Homo sapien; identical to SEQ ID NO: 970441

SEQ ID NO: 970444 - DNA, 33 bp, Homo sapien; identical to SEQ ID NO: 970442

SEQ ID NO: 970445 - DNA, 33 bp, Homo sapien
acacagaaataagaaacaggctcaactattggc

SEQ ID NO: 970446 - DNA, 33 bp, Homo sapien
acacagaaataagaaataggctcaactattggc

SEQ ID NO: 970447 - DNA, 33 bp, Homo sapien; identical to SEQ ID NO: 970445

SEQ ID NO: 970448 - DNA, 33 bp, Homo sapien; identical to SEQ ID NO: 970446

SEQ ID NO: 970449 - DNA, 33 bp, Homo sapien
gggctagtgcccactccacaaactggatctatc

SEQ ID NO: 970450 - DNA, 33 bp, Homo sapien
gggctagtgcccactcgacaaactggatctatc

SEQ ID NO: 970451 - DNA, 33 bp, Homo sapien
tttgcaaagattttgaagtaccttgtcacccag

SEQ ID NO: 970452 - DNA, 33 bp, Homo sapien
tttgcaaagattttgatgtaccttgtcacccag

SEQ ID NO: 970453 - DNA, 33 bp, Homo sapien
aattttatcctagaggaccatttacagaagaga

SEQ ID NO: 970454 - DNA, 33 bp, Homo sapien
aattttatcctagagggccatttacagaagaga

SEQ ID NO: 970455 - DNA, 33 bp, Homo sapien
ctatgtttgcacttacagaagctggaaccattt

SEQ ID NO: 970456 - DNA, 33 bp, Homo sapien
ctatgtttgcacttaccgaagctggaaccattt

SEQ ID NO: 970457 - DNA, 33 bp, Homo sapien
tttaataagatgatcactactttgtaaatcaga

SEQ ID NO: 970458 - DNA, 33 bp, Homo sapien
tttaataagatgatcagtactttgtaaatcaga

SEQ ID NO: 970459 - DNA, 33 bp, Homo sapien
ctgatctcagtcatcaagaacaactagaaatta

SEQ ID NO: 970460 - DNA, 33 bp, Homo sapien
ctgatctcagtcatcaggaacaactagaaatta

SEQ ID NO: 970461 - DNA, 33 bp, Homo sapien
ttagttttgctatgacaaagaatcctaaacctc

SEQ ID NO: 970462 - DNA, 33 bp, Homo sapien
ttagttttgctatgacgaagaatcctaaacctc

SEQ ID NO: 970463 - DNA, 33 bp, Homo sapien
tgaataaacaaagcaaacaggcgccattcatag

SEQ ID NO: 970464 - DNA, 33 bp, Homo sapien
tgaataaacaaagcaagcaggcgccattcatag

SEQ ID NO: 970465 - DNA, 33 bp, Homo sapien
cttttatattcttcacaatgtttgcatccttaa

SEQ ID NO: 970466 - DNA, 33 bp, Homo sapien
cttttatattcttcactatgtttgcatccttaa

SEQ ID NO: 970467 - DNA, 33 bp, Homo sapien
agtagagaaaattgcccacacatcaaattacta

SEQ ID NO: 970468 - DNA, 33 bp, Homo sapien
agtagagaaaattgcctacacatcaaattacta

SEQ ID NO: 970469 - DNA, 33 bp, Homo sapien
gaagtgagtctcactcaaccattgcaatacaag

SEQ ID NO: 970470 - DNA, 33 bp, Homo sapien
gaagtgagtctcactcgaccattgcaatacaag

SEQ ID NO: 970471 - DNA, 33 bp, Homo sapien
agccagaccttgaaaacagaaaccgtggtggtg

SEQ ID NO: 970472 - DNA, 33 bp, Homo sapien
agccagaccttgaaaatagaaaccgtggtggtg

SEQ ID NO: 970473 - DNA, 33 bp, Homo sapien
gactctccaggaagcccgaaaagttttgtgagt

SEQ ID NO: 970474 - DNA, 33 bp, Homo sapien
gactctccaggaagcctgaaaagttttgtgagt

SEQ ID NO: 970475 - DNA, 33 bp, Homo sapien
gaagagagagcacccaatctttcccatcttctc

SEQ ID NO: 970476 - DNA, 33 bp, Homo sapien
gaagagagagcacccagtctttcccatcttctc

SEQ ID NO: 970477 - DNA, 33 bp, Homo sapien
gacattgaatctgtcaaaggagttttggttcaa

SEQ ID NO: 970478 - DNA, 33 bp, Homo sapien
gacattgaatctgtcagaggagttttggttcaa

SEQ ID NO: 970479 - DNA, 33 bp, Homo sapien
ctgaagcttcccttaacaacacctcactgacga

SEQ ID NO: 970480 - DNA, 33 bp, Homo sapien
ctgaagcttcccttaataacacctcactgacga

SEQ ID NO: 970481 - DNA, 33 bp, Homo sapien
agcggcttgtgtttaaagatgaaagaactgtgg

SEQ ID NO: 970482 - DNA, 33 bp, Homo sapien
agcggcttgtgtttaaggatgaaagaactgtgg

SEQ ID NO: 970483 - DNA, 33 bp, Homo sapien
agaaggtgaccactgcagatagaaatggattgg

SEQ ID NO: 970484 - DNA, 33 bp, Homo sapien
agaaggtgaccactgcggatagaaatggattgg

SEQ ID NO: 970485 - DNA, 33 bp, Homo sapien
ggcactgtggagtacaaagacagacataatcga

SEQ ID NO: 970486 - DNA, 33 bp, Homo sapien
ggcactgtggagtacagagacagacataatcga

SEQ ID NO: 970487 - DNA, 33 bp, Homo sapien
gacaaaagctgttacgaagaatgaaggaagtca

SEQ ID NO: 970488 - DNA, 33 bp, Homo sapien
gacaaaagctgttacgcagaatgaaggaagtca

SEQ ID NO: 970489 - DNA, 33 bp, Homo sapien
agccccagtttgttccagaatattaaagagcac

SEQ ID NO: 970490 - DNA, 33 bp, Homo sapien
agccccagtttgttccggaatattaaagagcac

SEQ ID NO: 970491 - DNA, 33 bp, Homo sapien
cccgaagtttgctgcacattgaattcacttgaa

SEQ ID NO: 970492 - DNA, 33 bp, Homo sapien
cccgaagtttgctgcatattgaattcacttgaa

SEQ ID NO: 970493 - DNA, 33 bp, Homo sapien
tagctccatccctaggcactgattaagagttca

SEQ ID NO: 970494 - DNA, 33 bp, Homo sapien
tagctccatccctaggtactgattaagagttca

SEQ ID NO: 970495 - DNA, 33 bp, Homo sapien
acaaatcccagccctaccacttactatcagtga

SEQ ID NO: 970496 - DNA, 33 bp, Homo sapien
acaaatcccagccctagcacttactatcagtga

SEQ ID NO: 970497 - DNA, 33 bp, Homo sapien
tttgcctaaaatgctccagtaattttcccaaac

SEQ ID NO: 970498 - DNA, 33 bp, Homo sapien
tttgcctaaaatgctctagtaattttcccaaac

SEQ ID NO: 970499 - DNA, 33 bp, Homo sapien
gtctgataactctgagcagtaaaagccaagaca

SEQ ID NO: 970500 - DNA, 33 bp, Homo sapien
gtctgataactctgagtagtaaaagccaagaca

SEQ ID NO: 970501 - DNA, 33 bp, Homo sapien
acttggatcttaaacagcgaagaagaccttacc

SEQ ID NO: 970502 - DNA, 33 bp, Homo sapien
acttggatcttaaacatcgaagaagaccttacc

SEQ ID NO: 970503 - DNA, 33 bp, Homo sapien
aattgtctagggaagtaaacgtatatatatata

SEQ ID NO: 970504 - DNA, 33 bp, Homo sapien
aattgtctagggaagttaacgtatatatatata

SEQ ID NO: 970505 - DNA, 33 bp, Homo sapien
aggtaatgacgttggaagtaataatagtaacaa

SEQ ID NO: 970506 - DNA, 33 bp, Homo sapien
aggtaatgacgttggacgtaataatagtaacaa

SEQ ID NO: 970507 - DNA, 33 bp, Homo sapien
atgatgtaggaaaaaacgaagcagaaaattgag

SEQ ID NO: 970508 - DNA, 33 bp, Homo sapien
atgatgtaggaaaaaatgaagcagaaaattgag

SEQ ID NO: 970509 - DNA, 33 bp, Homo sapien
acctcattagggctcacctcttttcctgtaaca

SEQ ID NO: 970510 - DNA, 33 bp, Homo sapien
acctcattagggctcagctcttttcctgtaaca

SEQ ID NO: 970511 - DNA, 33 bp, Homo sapien
cttcacaaaatgtgccaagacctatatgaagtc

SEQ ID NO: 970512 - DNA, 33 bp, Homo sapien
cttcacaaaatgtgccgagacctatatgaagtc

SEQ ID NO: 970513 - DNA, 33 bp, Homo sapien
agcttataatataaccagcaagacaatttaaac

SEQ ID NO: 970514 - DNA, 33 bp, Homo sapien
agcttataatataaccggcaagacaatttaaac

SEQ ID NO: 970515 - DNA, 33 bp, Homo sapien
taacaatgtgaagaaacatggcataagtgctac

SEQ ID NO: 970516 - DNA, 33 bp, Homo sapien
taacaatgtgaagaaatatggcataagtgctac

SEQ ID NO: 970517 - DNA, 33 bp, Homo sapien
tttatctaattcacaaccatctgtagagatatt

SEQ ID NO: 970518 - DNA, 33 bp, Homo sapien
tttatctaattcacaatcatctgtagagatatt

SEQ ID NO: 970519 - DNA, 33 bp, Homo sapien
gaaagccatattccagacagttccttagtttga

SEQ ID NO: 970520 - DNA, 33 bp, Homo sapien
gaaagccatattccaggcagttccttagtttga

SEQ ID NO: 970521 - DNA, 33 bp, Homo sapien
gttcttatccttactaccattgtcttatcttac

SEQ ID NO: 970522 - DNA, 33 bp, Homo sapien
gttcttatccttactagcattgtcttatcttac

SEQ ID NO: 970523 - DNA, 33 bp, Homo sapien
cctcctgacactctccacaactttagaaggccc

SEQ ID NO: 970524 - DNA, 33 bp, Homo sapien
cctcctgacactctccgcaactttagaaggccc

SEQ ID NO: 970525 - DNA, 33 bp, Homo sapien
ggccaactctatgtcacgcctactggttgctct

SEQ ID NO: 970526 - DNA, 33 bp, Homo sapien
ggccaactctatgtcatgcctactggttgctct

SEQ ID NO: 970527 - DNA, 33 bp, Homo sapien
catgcagagaccatgacagggatgccagtgggt

SEQ ID NO: 970528 - DNA, 33 bp, Homo sapien
catgcagagaccatgagagggatgccagtgggt

SEQ ID NO: 970529 - DNA, 33 bp, Homo sapien
tgtgttcttggaactacggcttaggtgtgttgt

SEQ ID NO: 970530 - DNA, 33 bp, Homo sapien
tgtgttcttggaactatggcttaggtgtgttgt

SEQ ID NO: 970531 - DNA, 33 bp, Homo sapien
ctttcagacttttgtaagaatgataatatgtaa

SEQ ID NO: 970532 - DNA, 33 bp, Homo sapien
ctttcagacttttgtaggaatgataatatgtaa

SEQ ID NO: 970533 - DNA, 33 bp, Homo sapien
ttgtcctgtgccataaagtgatatatttaatat

SEQ ID NO: 970534 - DNA, 33 bp, Homo sapien
ttgtcctgtgccataaggtgatatatttaatat

SEQ ID NO: 970535 - DNA, 33 bp, Homo sapien
tccgattttacagaaacgacaccgataagagtc

SEQ ID NO: 970536 - DNA, 33 bp, Homo sapien
tccgattttacagaaatgacaccgataagagtc

SEQ ID NO: 970537 - DNA, 33 bp, Homo sapien
tctttctcttctttgaaacagtcatcattaata

SEQ ID NO: 970538 - DNA, 33 bp, Homo sapien
tctttctcttctttgagacagtcatcattaata

SEQ ID NO: 970539 - DNA, 33 bp, Homo sapien
gtaggagttttgggaacgttcgatgtatatttc

SEQ ID NO: 970540 - DNA, 33 bp, Homo sapien
gtaggagttttgggaatgttcgatgtatatttc

SEQ ID NO: 970541 - DNA, 33 bp, Homo sapien
atcctccatccttgaccatttcagatacagtca

SEQ ID NO: 970542 - DNA, 33 bp, Homo sapien
atcctccatccttgactatttcagatacagtca

SEQ ID NO: 970543 - DNA, 33 bp, Homo sapien
tctaaccaaatcaccaatcaaaggtgagggcaa

SEQ ID NO: 970544 - DNA, 33 bp, Homo sapien
tctaaccaaatcaccagtcaaaggtgagggcaa

SEQ ID NO: 970545 - DNA, 33 bp, Homo sapien
atcctgggtattgtccactaccaaaacagcttg

SEQ ID NO: 970546 - DNA, 33 bp, Homo sapien
atcctgggtattgtccgctaccaaaacagcttg

SEQ ID NO: 970547 - DNA, 33 bp, Homo sapien
aaagctaatttttagcaagttgagaagtcttgt

SEQ ID NO: 970548 - DNA, 33 bp, Homo sapien
aaagctaatttttagccagttgagaagtcttgt

SEQ ID NO: 970549 - DNA, 33 bp, Homo sapien
tcccacccacctacataagacattgaggatgcc

SEQ ID NO: 970550 - DNA, 33 bp, Homo sapien
tcccacccacctacatcagacattgaggatgcc

SEQ ID NO: 970551 - DNA, 33 bp, Homo sapien
aagttttcattaaacaatctttccagtggagaa

SEQ ID NO: 970552 - DNA, 33 bp, Homo sapien
aagttttcattaaacagtctttccagtggagaa

SEQ ID NO: 970553 - DNA, 33 bp, Homo sapien
gagagagagctaaaacacatccttcatccacct

SEQ ID NO: 970554 - DNA, 33 bp, Homo sapien
gagagagagctaaaacgcatccttcatccacct

SEQ ID NO: 970555 - DNA, 33 bp, Homo sapien
gattagatgatgcccgcccacattaaggaagga

SEQ ID NO: 970556 - DNA, 33 bp, Homo sapien
gattagatgatgcccgtccacattaaggaagga

SEQ ID NO: 970557 - DNA, 33 bp, Homo sapien
atcaccagttttaaggaatgagcagtagatgtg

SEQ ID NO: 970558 - DNA, 33 bp, Homo sapien
atcaccagttttaagggatgagcagtagatgtg

SEQ ID NO: 970559 - DNA, 33 bp, Homo sapien
ctacagtgtactgatacgtaaaataaatcaatg

SEQ ID NO: 970560 - DNA, 33 bp, Homo sapien
ctacagtgtactgatatgtaaaataaatcaatg

SEQ ID NO: 970561 - DNA, 33 bp, Homo sapien
tttcaacaaaaatatcaaaggcaaaaacacagc

SEQ ID NO: 970562 - DNA, 33 bp, Homo sapien
tttcaacaaaaatatccaaggcaaaaacacagc

SEQ ID NO: 970563 - DNA, 33 bp, Homo sapien
taaggagcttgttgaaaatcactgaactggtga

SEQ ID NO: 970564 - DNA, 33 bp, Homo sapien
taaggagcttgttgaagatcactgaactggtga

SEQ ID NO: 970565 - DNA, 33 bp, Homo sapien
aacttttacagacaacacaagaacacgctaaaa

SEQ ID NO: 970566 - DNA, 33 bp, Homo sapien
aacttttacagacaacgcaagaacacgctaaaa

SEQ ID NO: 970567 - DNA, 33 bp, Homo sapien
gttggaacctcagctaccgtgctttcctccctc

SEQ ID NO: 970568 - DNA, 33 bp, Homo sapien
gttggaacctcagctatcgtgctttcctccctc

SEQ ID NO: 970569 - DNA, 33 bp, Homo sapien
ctttagacacaaaatgccaggcaaaaaataaaa

SEQ ID NO: 970570 - DNA, 33 bp, Homo sapien
ctttagacacaaaatgtcaggcaaaaaataaaa

SEQ ID NO: 970571 - DNA, 33 bp, Homo sapien
aggcagagaatgcaaactgtcatatgggaactc

SEQ ID NO: 970572 - DNA, 33 bp, Homo sapien
aggcagagaatgcaaattgtcatatgggaactc

SEQ ID NO: 970573 - DNA, 33 bp, Homo sapien
cacaaaacgaaaagacaagtctgtggtccatgc

SEQ ID NO: 970574 - DNA, 33 bp, Homo sapien
cacaaaacgaaaagaccagtctgtggtccatgc

SEQ ID NO: 970575 - DNA, 33 bp, Homo sapien
atattcatgaaaaaaaaatccatttcccctatg

SEQ ID NO: 970576 - DNA, 33 bp, Homo sapien
atattcatgaaaaaaagatccatttcccctatg

SEQ ID NO: 970577 - DNA, 33 bp, Homo sapien
gacatgatcttcaaaaataaataggtaattcat

SEQ ID NO: 970578 - DNA, 33 bp, Homo sapien
gacatgatcttcaaaagtaaataggtaattcat

SEQ ID NO: 970579 - DNA, 33 bp, Homo sapien
gaaggcaatcatgaaaataggaagtggcaaata

SEQ ID NO: 970580 - DNA, 33 bp, Homo sapien
gaaggcaatcatgaaagtaggaagtggcaaata

SEQ ID NO: 970581 - DNA, 33 bp, Homo sapien
aaaataaaacgttaaacgtctctatgtgtctct

SEQ ID NO: 970582 - DNA, 33 bp, Homo sapien
aaaataaaacgttaaaggtctctatgtgtctct

SEQ ID NO: 970583 - DNA, 33 bp, Homo sapien
tatattgattgaaaaacccatttcgtgtaatag

SEQ ID NO: 970584 - DNA, 33 bp, Homo sapien
tatattgattgaaaaatccatttcgtgtaatag

SEQ ID NO: 970585 - DNA, 33 bp, Homo sapien
aactgggctaaagctacgcagatagaaatgaat

SEQ ID NO: 970586 - DNA, 33 bp, Homo sapien
aactgggctaaagctatgcagatagaaatgaat

SEQ ID NO: 970587 - DNA, 33 bp, Homo sapien
aatgtttatcggataaataagttacctatttgc

SEQ ID NO: 970588 - DNA, 33 bp, Homo sapien
aatgtttatcggataattaagttacctatttgc

SEQ ID NO: 970589 - DNA, 33 bp, Homo sapien
tatttgccagacaccgcatatggtttagctctt

SEQ ID NO: 970590 - DNA, 33 bp, Homo sapien
tatttgccagacaccgtatatggtttagctctt

SEQ ID NO: 970591 - DNA, 33 bp, Homo sapien
tctcaaaaattgagtcaatgggcacgcaagtct

SEQ ID NO: 970592 - DNA, 33 bp, Homo sapien
tctcaaaaattgagtcgatgggcacgcaagtct

SEQ ID NO: 970593 - DNA, 33 bp, Homo sapien
ccctgggccacaatggcagaagaagaattgtct

SEQ ID NO: 970594 - DNA, 33 bp, Homo sapien
ccctgggccacaatggtagaagaagaattgtct

SEQ ID NO: 970595 - DNA, 33 bp, Homo sapien
aaagggtatagggatccgaagaacgagagaaca

SEQ ID NO: 970596 - DNA, 33 bp, Homo sapien
aaagggtatagggatctgaagaacgagagaaca

SEQ ID NO: 970597 - DNA, 33 bp, Homo sapien
gcctcggatcattgtaaactcacacctggggac

SEQ ID NO: 970598 - DNA, 33 bp, Homo sapien
gcctcggatcattgtagactcacacctggggac

SEQ ID NO: 970599 - DNA, 33 bp, Homo sapien
tagaccaaactctaaacgcggcctcactcccca

SEQ ID NO: 970600 - DNA, 33 bp, Homo sapien
tagaccaaactctaaatgcggcctcactcccca

SEQ ID NO: 970601 - DNA, 33 bp, Homo sapien
cagacttgatgtatgaagaaggtcccagcagct

SEQ ID NO: 970602 - DNA, 33 bp, Homo sapien
cagacttgatgtatgaggaaggtcccagcagct

SEQ ID NO: 970603 - DNA, 33 bp, Homo sapien
aagccggcctcccagacgacgctttctgaacca

SEQ ID NO: 970604 - DNA, 33 bp, Homo sapien
aagccggcctcccagatgacgctttctgaacca

SEQ ID NO: 970605 - DNA, 33 bp, Homo sapien
aaaaatcacaatatcacgacaggtgtgtttaac

SEQ ID NO: 970606 - DNA, 33 bp, Homo sapien
aaaaatcacaatatcatgacaggtgtgtttaac

SEQ ID NO: 970607 - DNA, 33 bp, Homo sapien
tctttctgactgtttacctgtatcttttgtaat

SEQ ID NO: 970608 - DNA, 33 bp, Homo sapien
tctttctgactgtttatctgtatcttttgtaat

SEQ ID NO: 970609 - DNA, 33 bp, Homo sapien
agccaaagctaagatacgagtgctggaatgcca

SEQ ID NO: 970610 - DNA, 33 bp, Homo sapien
agccaaagctaagatatgagtgctggaatgcca

SEQ ID NO: 970611 - DNA, 33 bp, Homo sapien
gcatttaggctgagaaccatttaagaacttaga

SEQ ID NO: 970612 - DNA, 33 bp, Homo sapien
gcatttaggctgagaagcatttaagaacttaga

SEQ ID NO: 970613 - DNA, 33 bp, Homo sapien
gttctagtacagcatacagtggtttaggcattc

SEQ ID NO: 970614 - DNA, 33 bp, Homo sapien
gttctagtacagcatatagtggtttaggcattc

SEQ ID NO: 970615 - DNA, 33 bp, Homo sapien
ttatgatttccaaatgaatgctattatctggaa

SEQ ID NO: 970616 - DNA, 33 bp, Homo sapien
ttatgatttccaaatggatgctattatctggaa

SEQ ID NO: 970617 - DNA, 33 bp, Homo sapien
cctatccttcgaatcccagatcaaagcccactt

SEQ ID NO: 970618 - DNA, 33 bp, Homo sapien
cctatccttcgaatcctagatcaaagcccactt

SEQ ID NO: 970619 - DNA, 33 bp, Homo sapien
ccttgtttgcgtttgacaggcatttcacactgg

SEQ ID NO: 970620 - DNA, 33 bp, Homo sapien
ccttgtttgcgtttgagaggcatttcacactgg

SEQ ID NO: 970621 - DNA, 33 bp, Homo sapien
cttgaagacaatgatacagctgctgatttattc

SEQ ID NO: 970622 - DNA, 33 bp, Homo sapien
cttgaagacaatgatatagctgctgatttattc

SEQ ID NO: 970623 - DNA, 33 bp, Homo sapien
gctctgtcagccataccggagtgcagtggtgtg

SEQ ID NO: 970624 - DNA, 33 bp, Homo sapien
gctctgtcagccatactggagtgcagtggtgtg

SEQ ID NO: 970625 - DNA, 33 bp, Homo sapien
aggtgagccaaagacaaggaagcaatatctaca

SEQ ID NO: 970626 - DNA, 33 bp, Homo sapien
aggtgagccaaagacagggaagcaatatctaca

SEQ ID NO: 970627 - DNA, 33 bp, Homo sapien
ctgtacctttataacaagtcttgaaatcaggga

SEQ ID NO: 970628 - DNA, 33 bp, Homo sapien
ctgtacctttataacaggtcttgaaatcaggga

SEQ ID NO: 970629 - DNA, 33 bp, Homo sapien
gagtcaagtgaggattaaatccaggctccttca

SEQ ID NO: 970630 - DNA, 33 bp, Homo sapien
gagtcaagtgaggattgaatccaggctccttca

SEQ ID NO: 970631 - DNA, 33 bp, Homo sapien
cacctagaaatacgcactcaaacacatacagat

SEQ ID NO: 970632 - DNA, 33 bp, Homo sapien
cacctagaaatacgcattcaaacacatacagat

SEQ ID NO: 970633 - DNA, 33 bp, Homo sapien
taatgttagcaattgaatcaatgttttaaccac

SEQ ID NO: 970634 - DNA, 33 bp, Homo sapien
taatgttagcaattgagtcaatgttttaaccac

SEQ ID NO: 970635 - DNA, 33 bp, Homo sapien
gttatccacaatggaaaagaagaagtaaaatca

SEQ ID NO: 970636 - DNA, 33 bp, Homo sapien
gttatccacaatggaagagaagaagtaaaatca

SEQ ID NO: 970637 - DNA, 33 bp, Homo sapien
atttaaaataaaaggccctgcaaaatgctatat

SEQ ID NO: 970638 - DNA, 33 bp, Homo sapien
atttaaaataaaaggctctgcaaaatgctatat

SEQ ID NO: 970639 - DNA, 33 bp, Homo sapien
tattctggcatgagcaacattcaacaagatctt

SEQ ID NO: 970640 - DNA, 33 bp, Homo sapien
tattctggcatgagcagcattcaacaagatctt

SEQ ID NO: 970641 - DNA, 33 bp, Homo sapien
tgttagcacgggagtacctgcaactgcattaca

SEQ ID NO: 970642 - DNA, 33 bp, Homo sapien
tgttagcacgggagtatctgcaactgcattaca

SEQ ID NO: 970643 - DNA, 33 bp, Homo sapien
acaaaactttcaggtcgaattgaatccaagaac

SEQ ID NO: 970644 - DNA, 33 bp, Homo sapien
acaaaactttcaggtctaattgaatccaagaac

SEQ ID NO: 970645 - DNA, 33 bp, Homo sapien
cataaattagttgtccgatggaacctcttgaca

SEQ ID NO: 970646 - DNA, 33 bp, Homo sapien
cataaattagttgtcctatggaacctcttgaca

SEQ ID NO: 970647 - DNA, 33 bp, Homo sapien
atagaaattttgaagaaggataggatcttggtg

SEQ ID NO: 970648 - DNA, 33 bp, Homo sapien
atagaaattttgaagatggataggatcttggtg

SEQ ID NO: 970649 - DNA, 33 bp, Homo sapien
tgacatagagaaggaccaagtggagagcagtga

SEQ ID NO: 970650 - DNA, 33 bp, Homo sapien
tgacatagagaaggacgaagtggagagcagtga

SEQ ID NO: 970651 - DNA, 33 bp, Homo sapien
tttctttttgatgagcccaggttttaagtctgc

SEQ ID NO: 970652 - DNA, 33 bp, Homo sapien
tttctttttgatgagctcaggttttaagtctgc

SEQ ID NO: 970653 - DNA, 33 bp, Homo sapien
tgtgctttccaaaagaaatttgtatgcacaggc

SEQ ID NO: 970654 - DNA, 33 bp, Homo sapien
tgtgctttccaaaagagatttgtatgcacaggc

SEQ ID NO: 970655 - DNA, 33 bp, Homo sapien
agggtagtgcaggaaaaaaagttgtgttgcttt

SEQ ID NO: 970656 - DNA, 33 bp, Homo sapien
agggtagtgcaggaaagaaagttgtgttgcttt

SEQ ID NO: 970657 - DNA, 33 bp, Homo sapien
cacaaattcgctgcaacagaaagtcagtgaaaa

SEQ ID NO: 970658 - DNA, 33 bp, Homo sapien
cacaaattcgctgcaagagaaagtcagtgaaaa

SEQ ID NO: 970659 - DNA, 33 bp, Homo sapien
ttttcagtacctaataagtgtagaacagtgtct

SEQ ID NO: 970660 - DNA, 33 bp, Homo sapien
ttttcagtacctaatacgtgtagaacagtgtct

SEQ ID NO: 970661 - DNA, 33 bp, Homo sapien
tgagcttcaccccaaactctcaaccgcttgctg

SEQ ID NO: 970662 - DNA, 33 bp, Homo sapien
tgagcttcaccccaaattctcaaccgcttgctg

SEQ ID NO: 970663 - DNA, 33 bp, Homo sapien
tcaaaataccatagccaaacatccatatttatt

SEQ ID NO: 970664 - DNA, 33 bp, Homo sapien
tcaaaataccatagcctaacatccatatttatt

SEQ ID NO: 970665 - DNA, 33 bp, Homo sapien
tactagcacatttggcgcatacctcttcattct

SEQ ID NO: 970666 - DNA, 33 bp, Homo sapien
tactagcacatttggctcatacctcttcattct

SEQ ID NO: 970667 - DNA, 33 bp, Homo sapien
tgtagtagagtctgaaatcagtaatgtcatgcc

SEQ ID NO: 970668 - DNA, 33 bp, Homo sapien
tgtagtagagtctgaagtcagtaatgtcatgcc

SEQ ID NO: 970669 - DNA, 33 bp, Homo sapien
agcattgtgaagaaacagaaaacacaaaatcat

SEQ ID NO: 970670 - DNA, 33 bp, Homo sapien
agcattgtgaagaaaccgaaaacacaaaatcat

SEQ ID NO: 970671 - DNA, 33 bp, Homo sapien
aattaattcactgtcaatattttagaatcatca

SEQ ID NO: 970672 - DNA, 33 bp, Homo sapien
aattaattcactgtcagtattttagaatcatca

SEQ ID NO: 970673 - DNA, 33 bp, Homo sapien
tatgttttggaggcacacatttttggattcatt

SEQ ID NO: 970674 - DNA, 33 bp, Homo sapien
tatgttttggaggcacgcatttttggattcatt

SEQ ID NO: 970675 - DNA, 33 bp, Homo sapien
ggaaaacagaagacacagctcttgacagaaagg

SEQ ID NO: 970676 - DNA, 33 bp, Homo sapien
ggaaaacagaagacacggctcttgacagaaagg

SEQ ID NO: 970677 - DNA, 33 bp, Homo sapien
cacactgaaaagaaaaacccgttagagactgga

SEQ ID NO: 970678 - DNA, 33 bp, Homo sapien
cacactgaaaagaaaaccccgttagagactgga

SEQ ID NO: 970679 - DNA, 33 bp, Homo sapien
aggttattgacaaattcaacactatggccatca

SEQ ID NO: 970680 - DNA, 33 bp, Homo sapien
aggttattgacaaatttaacactatggccatca

SEQ ID NO: 970681 - DNA, 33 bp, Homo sapien
ttttacttcaaagcacagtcatgttttatagag

SEQ ID NO: 970682 - DNA, 33 bp, Homo sapien
ttttacttcaaagcacggtcatgttttatagag

SEQ ID NO: 970683 - DNA, 33 bp, Homo sapien
caacaaaaaagtggaagtagcttaaagaagtat

SEQ ID NO: 970684 - DNA, 33 bp, Homo sapien
caacaaaaaagtggaattagcttaaagaagtat

SEQ ID NO: 970685 - DNA, 33 bp, Homo sapien
aaattatgaatggaccaagttaaccaacaaggc

SEQ ID NO: 970686 - DNA, 33 bp, Homo sapien
aaattatgaatggaccgagttaaccaacaaggc

SEQ ID NO: 970687 - DNA, 33 bp, Homo sapien
aatacctttggtaaagaatggatacttgtaaat

SEQ ID NO: 970688 - DNA, 33 bp, Homo sapien
aatacctttggtaaaggatggatacttgtaaat

SEQ ID NO: 970689 - DNA, 33 bp, Homo sapien
tttgttacataaatacaacaaaatctactaact

SEQ ID NO: 970690 - DNA, 33 bp, Homo sapien
tttgttacataaataccacaaaatctactaact

SEQ ID NO: 970691 - DNA, 33 bp, Homo sapien
catctgctttcaaccaaccattctaagccatat

SEQ ID NO: 970692 - DNA, 33 bp, Homo sapien
catctgctttcaaccacccattctaagccatat

SEQ ID NO: 970693 - DNA, 33 bp, Homo sapien
tctatggtgaccagaacaagagccccagtactt

SEQ ID NO: 970694 - DNA, 33 bp, Homo sapien
tctatggtgaccagaagaagagccccagtactt

SEQ ID NO: 970695 - DNA, 33 bp, Homo sapien
agatttaccaagaacactgaacatctgttttta

SEQ ID NO: 970696 - DNA, 33 bp, Homo sapien
agatttaccaagaacattgaacatctgttttta

SEQ ID NO: 970697 - DNA, 33 bp, Homo sapien
tgtttgacaacagcaaagaaaatgagatggaaa

SEQ ID NO: 970698 - DNA, 33 bp, Homo sapien
tgtttgacaacagcaaggaaaatgagatggaaa

SEQ ID NO: 970699 - DNA, 33 bp, Homo sapien
gtggctgctaaaagctaagaaagcctccatctg

SEQ ID NO: 970700 - DNA, 33 bp, Homo sapien
gtggctgctaaaagctgagaaagcctccatctg

SEQ ID NO: 970701 - DNA, 33 bp, Homo sapien
attaaagtaaaagcaccggcacttgattagaca

SEQ ID NO: 970702 - DNA, 33 bp, Homo sapien
attaaagtaaaagcactggcacttgattagaca

SEQ ID NO: 970703 - DNA, 33 bp, Homo sapien
aagatcttgatggttcaactttggccagaatgg

SEQ ID NO: 970704 - DNA, 33 bp, Homo sapien
aagatcttgatggttcgactttggccagaatgg

SEQ ID NO: 970705 - DNA, 33 bp, Homo sapien
cctaatttaattccaaagagatactgattatgc

SEQ ID NO: 970706 - DNA, 33 bp, Homo sapien
cctaatttaattccaatgagatactgattatgc

SEQ ID NO: 970707 - DNA, 33 bp, Homo sapien
gatgtattagagtaaaattccagtttctgctgt

SEQ ID NO: 970708 - DNA, 33 bp, Homo sapien
gatgtattagagtaaatttccagtttctgctgt

SEQ ID NO: 970709 - DNA, 33 bp, Homo sapien
cacaagctgctatttaggaaaggtaaatatccc

SEQ ID NO: 970710 - DNA, 33 bp, Homo sapien
cacaagctgctatttatgaaaggtaaatatccc

SEQ ID NO: 970711 - DNA, 33 bp, Homo sapien
caaaaataggaaagtacctgcaatgttttaaag

SEQ ID NO: 970712 - DNA, 33 bp, Homo sapien
caaaaataggaaagtatctgcaatgttttaaag

SEQ ID NO: 970713 - DNA, 33 bp, Homo sapien
ttggactggaataaaacctgagcactagaattt

SEQ ID NO: 970714 - DNA, 33 bp, Homo sapien
ttggactggaataaaagctgagcactagaattt

SEQ ID NO: 970715 - DNA, 33 bp, Homo sapien
tatgtacgtgaatgctcaaaagccagagcaacc

SEQ ID NO: 970716 - DNA, 33 bp, Homo sapien
tatgtacgtgaatgctgaaaagccagagcaacc

SEQ ID NO: 970717 - DNA, 33 bp, Homo sapien
cccctgaaaatgtaatgatgttgtgagaggtag

SEQ ID NO: 970718 - DNA, 33 bp, Homo sapien
cccctgaaaatgtaattatgttgtgagaggtag

SEQ ID NO: 970719 - DNA, 33 bp, Homo sapien
ggctaaaaattgtccaatgatgcttcccactgt

SEQ ID NO: 970720 - DNA, 33 bp, Homo sapien
ggctaaaaattgtccagtgatgcttcccactgt

SEQ ID NO: 970721 - DNA, 33 bp, Homo sapien
aactctgtttgaattacggtaatacttgaaata

SEQ ID NO: 970722 - DNA, 33 bp, Homo sapien
aactctgtttgaattatggtaatacttgaaata

SEQ ID NO: 970723 - DNA, 33 bp, Homo sapien
aaatcccagtttctcaaatctcatcatatttca

SEQ ID NO: 970724 - DNA, 33 bp, Homo sapien
aaatcccagtttctcagatctcatcatatttca

SEQ ID NO: 970725 - DNA, 33 bp, Homo sapien
ggcagctgacaacagaagggtttgaagacaatc

SEQ ID NO: 970726 - DNA, 33 bp, Homo sapien
ggcagctgacaacagacgggtttgaagacaatc

SEQ ID NO: 970727 - DNA, 33 bp, Homo sapien
ccaacactgaagttggaactcaaactgtggctg

SEQ ID NO: 970728 - DNA, 33 bp, Homo sapien
ccaacactgaagttgggactcaaactgtggctg

SEQ ID NO: 970729 - DNA, 33 bp, Homo sapien
atatttccctgaatcacccagatagccaacact

SEQ ID NO: 970730 - DNA, 33 bp, Homo sapien
atatttccctgaatcatccagatagccaacact

SEQ ID NO: 970731 - DNA, 33 bp, Homo sapien
taaaaacactcgaaacaaaacgcaataaaatga

SEQ ID NO: 970732 - DNA, 33 bp, Homo sapien
taaaaacactcgaaacgaaacgcaataaaatga

SEQ ID NO: 970733 - DNA, 33 bp, Homo sapien
catagttctcaaaacaacacttcttctgtggtc

SEQ ID NO: 970734 - DNA, 33 bp, Homo sapien
catagttctcaaaacatcacttcttctgtggtc

SEQ ID NO: 970735 - DNA, 33 bp, Homo sapien
ctacctcctaaatatcaaagactcataggacta

SEQ ID NO: 970736 - DNA, 33 bp, Homo sapien
ctacctcctaaatatcgaagactcataggacta

SEQ ID NO: 970737 - DNA, 33 bp, Homo sapien
tgataacagcagaaccaaagtaaaagggaacat

SEQ ID NO: 970738 - DNA, 33 bp, Homo sapien
tgataacagcagaaccgaagtaaaagggaacat

SEQ ID NO: 970739 - DNA, 33 bp, Homo sapien
ttttgtgagaagtccacatacaatgaaaaacaa

SEQ ID NO: 970740 - DNA, 33 bp, Homo sapien
ttttgtgagaagtccatatacaatgaaaaacaa

SEQ ID NO: 970741 - DNA, 33 bp, Homo sapien
taacatcagagttttcaagaaaaagttgaacat

SEQ ID NO: 970742 - DNA, 33 bp, Homo sapien
taacatcagagttttcgagaaaaagttgaacat

SEQ ID NO: 970743 - DNA, 33 bp, Homo sapien
ttattgcttcacttaaacctcataataatgacg

SEQ ID NO: 970744 - DNA, 33 bp, Homo sapien
ttattgcttcacttaatcctcataataatgacg

SEQ ID NO: 970745 - DNA, 33 bp, Homo sapien
ttttagatagtacatcgcatacaactttattat

SEQ ID NO: 970746 - DNA, 33 bp, Homo sapien
ttttagatagtacatctcatacaactttattat

SEQ ID NO: 970747 - DNA, 33 bp, Homo sapien
catgcactgagatgaaaaagcaccagatatttt

SEQ ID NO: 970748 - DNA, 33 bp, Homo sapien
catgcactgagatgaagaagcaccagatatttt

SEQ ID NO: 970749 - DNA, 33 bp, Homo sapien
ctaagaagtcaggacactggacattatgagcat

SEQ ID NO: 970750 - DNA, 33 bp, Homo sapien
ctaagaagtcaggacattggacattatgagcat

SEQ ID NO: 970751 - DNA, 33 bp, Homo sapien
gctgttctgaaataaagaagctacacctgctga

SEQ ID NO: 970752 - DNA, 33 bp, Homo sapien
gctgttctgaaataaataagctacacctgctga

SEQ ID NO: 970753 - DNA, 33 bp, Homo sapien
catattagaaggctgaagtgattaaaaaggaga

SEQ ID NO: 970754 - DNA, 33 bp, Homo sapien
catattagaaggctgaggtgattaaaaaggaga

SEQ ID NO: 970755 - DNA, 33 bp, Homo sapien
ttattcaaacagtgtaagtaaaggtaggcgaga

SEQ ID NO: 970756 - DNA, 33 bp, Homo sapien
ttattcaaacagtgtacgtaaaggtaggcgaga

SEQ ID NO: 970757 - DNA, 33 bp, Homo sapien
agattttaataacttacgcagaaaccatgaaga

SEQ ID NO: 970758 - DNA, 33 bp, Homo sapien
agattttaataacttaggcagaaaccatgaaga

SEQ ID NO: 970759 - DNA, 33 bp, Homo sapien
gttctcagtgctgaacacagtacaaatggtaat

SEQ ID NO: 970760 - DNA, 33 bp, Homo sapien
gttctcagtgctgaacgcagtacaaatggtaat

SEQ ID NO: 970761 - DNA, 33 bp, Homo sapien
tggtgtctgaaactacccactaagctaactata

SEQ ID NO: 970762 - DNA, 33 bp, Homo sapien
tggtgtctgaaactactcactaagctaactata

SEQ ID NO: 970763 - DNA, 33 bp, Homo sapien
cacttccttctcccataaaaagacaccaggcat

SEQ ID NO: 970764 - DNA, 33 bp, Homo sapien
cacttccttctcccatgaaaagacaccaggcat

SEQ ID NO: 970765 - DNA, 33 bp, Homo sapien
ggaggccctgagagaagatatctatcacaacaa

SEQ ID NO: 970766 - DNA, 33 bp, Homo sapien
ggaggccctgagagaatatatctatcacaacaa

SEQ ID NO: 970767 - DNA, 33 bp, Homo sapien
tttgcttataatttccaagagcgtattgtcttg

SEQ ID NO: 970768 - DNA, 33 bp, Homo sapien
tttgcttataatttccgagagcgtattgtcttg

SEQ ID NO: 970769 - DNA, 33 bp, Homo sapien
ttcatgctgtatccaacccaaaaacggcgaaag

SEQ ID NO: 970770 - DNA, 33 bp, Homo sapien
ttcatgctgtatccaagccaaaaacggcgaaag

SEQ ID NO: 970771 - DNA, 33 bp, Homo sapien
ggttacagggtagagaacagaaatagcttcagc

SEQ ID NO: 970772 - DNA, 33 bp, Homo sapien
ggttacagggtagagagcagaaatagcttcagc

SEQ ID NO: 970773 - DNA, 33 bp, Homo sapien
aaaactgtttccatcaatctgaaaatttatatt

SEQ ID NO: 970774 - DNA, 33 bp, Homo sapien
aaaactgtttccatcattctgaaaatttatatt

SEQ ID NO: 970775 - DNA, 33 bp, Homo sapien
taaactatgcacatccccctgtatgcttttaat

SEQ ID NO: 970776 - DNA, 33 bp, Homo sapien
taaactatgcacatcctcctgtatgcttttaat

SEQ ID NO: 970777 - DNA, 33 bp, Homo sapien
agcatttatttagggagtacttatatgcctaga

SEQ ID NO: 970778 - DNA, 33 bp, Homo sapien
agcatttatttagggattacttatatgcctaga

SEQ ID NO: 970779 - DNA, 33 bp, Homo sapien
cctgcctgacactgaaatcggtccatgtgcaga

SEQ ID NO: 970780 - DNA, 33 bp, Homo sapien
cctgcctgacactgaagtcggtccatgtgcaga

SEQ ID NO: 970781 - DNA, 33 bp, Homo sapien
tttagatttcaataaacgatgagataggtagat

SEQ ID NO: 970782 - DNA, 33 bp, Homo sapien
tttagatttcaataaatgatgagataggtagat

SEQ ID NO: 970783 - DNA, 33 bp, Homo sapien
gtgggtaaacggtaaactgaatgtctgttttat

SEQ ID NO: 970784 - DNA, 33 bp, Homo sapien
gtgggtaaacggtaaattgaatgtctgttttat

SEQ ID NO: 970785 - DNA, 33 bp, Homo sapien
ttgatctttcttgatacagatcagttgcccagt

SEQ ID NO: 970786 - DNA, 33 bp, Homo sapien
ttgatctttcttgatagagatcagttgcccagt

SEQ ID NO: 970787 - DNA, 33 bp, Homo sapien
tattcaatatataacacgctccatgaggacaat

SEQ ID NO: 970788 - DNA, 33 bp, Homo sapien
tattcaatatataacaggctccatgaggacaat

SEQ ID NO: 970789 - DNA, 33 bp, Homo sapien
cacagtaagtgggcaactataaagttcaaagac

SEQ ID NO: 970790 - DNA, 33 bp, Homo sapien
cacagtaagtgggcaattataaagttcaaagac

SEQ ID NO: 970791 - DNA, 33 bp, Homo sapien
atgaaagttggatagaggtaaccatgaatggtc

SEQ ID NO: 970792 - DNA, 33 bp, Homo sapien
atgaaagttggatagatgtaaccatgaatggtc

SEQ ID NO: 970793 - DNA, 33 bp, Homo sapien
tcttaaagactcctgccgagagtgacataaatc

SEQ ID NO: 970794 - DNA, 33 bp, Homo sapien
tcttaaagactcctgctgagagtgacataaatc

SEQ ID NO: 970795 - DNA, 33 bp, Homo sapien
aatgatcatcaaaccaccttaagaatgtactcc

SEQ ID NO: 970796 - DNA, 33 bp, Homo sapien
aatgatcatcaaaccatcttaagaatgtactcc

SEQ ID NO: 970797 - DNA, 33 bp, Homo sapien
taaacaagctacctataaatatatgcaacctta

SEQ ID NO: 970798 - DNA, 33 bp, Homo sapien
taaacaagctacctatgaatatatgcaacctta

SEQ ID NO: 970799 - DNA, 33 bp, Homo sapien
ggaagcctgattgctaacctctctacccaactc

SEQ ID NO: 970800 - DNA, 33 bp, Homo sapien
ggaagcctgattgctaccctctctacccaactc

SEQ ID NO: 970801 - DNA, 33 bp, Homo sapien
atgcatacaattacagcactatttacgatagca

SEQ ID NO: 970802 - DNA, 33 bp, Homo sapien
atgcatacaattacagtactatttacgatagca

SEQ ID NO: 970803 - DNA, 33 bp, Homo sapien
gtgaagcacaaaaatactaatcttcggagttga

SEQ ID NO: 970804 - DNA, 33 bp, Homo sapien
gtgaagcacaaaaatattaatcttcggagttga

SEQ ID NO: 970805 - DNA, 33 bp, Homo sapien
ttttgtttcagggcagaagtgctcttatcactt

SEQ ID NO: 970806 - DNA, 33 bp, Homo sapien
ttttgtttcagggcaggagtgctcttatcactt

SEQ ID NO: 970807 - DNA, 33 bp, Homo sapien
aaattaatagaacaacaaagtgataagagcact

SEQ ID NO: 970808 - DNA, 33 bp, Homo sapien
aaattaatagaacaacgaagtgataagagcact

SEQ ID NO: 970809 - DNA, 33 bp, Homo sapien
ttcttctttgaggccacgatggagtagctgtct

SEQ ID NO: 970810 - DNA, 33 bp, Homo sapien
ttcttctttgaggccatgatggagtagctgtct

SEQ ID NO: 970811 - DNA, 33 bp, Homo sapien
taattttcctgatagcccttattcctagagagt

SEQ ID NO: 970812 - DNA, 33 bp, Homo sapien
taattttcctgatagcgcttattcctagagagt

SEQ ID NO: 970813 - DNA, 33 bp, Homo sapien
gctggtatgcagtggacggaagaaggaatggac

SEQ ID NO: 970814 - DNA, 33 bp, Homo sapien
gctggtatgcagtggatggaagaaggaatggac

SEQ ID NO: 970815 - DNA, 33 bp, Homo sapien
gctcatttggaatttacatggcttatatggaat

SEQ ID NO: 970816 - DNA, 33 bp, Homo sapien
gctcatttggaatttatatggcttatatggaat

SEQ ID NO: 970817 - DNA, 33 bp, Homo sapien
tcagctttgctcaaaacgagataaatgcaaatt

SEQ ID NO: 970818 - DNA, 33 bp, Homo sapien
tcagctttgctcaaaatgagataaatgcaaatt

SEQ ID NO: 970819 - DNA, 33 bp, Homo sapien
acaaggtacagccacacatataggtctttttgt

SEQ ID NO: 970820 - DNA, 33 bp, Homo sapien
acaaggtacagccacagatataggtctttttgt

SEQ ID NO: 970821 - DNA, 33 bp, Homo sapien
agagtacctcccactagagacaatcaaatcact

SEQ ID NO: 970822 - DNA, 33 bp, Homo sapien
agagtacctcccactatagacaatcaaatcact

SEQ ID NO: 970823 - DNA, 33 bp, Homo sapien
ttatggtaaaccacaaagataaccaaacttctt

SEQ ID NO: 970824 - DNA, 33 bp, Homo sapien
ttatggtaaaccacaaggataaccaaacttctt

SEQ ID NO: 970825 - DNA, 33 bp, Homo sapien; identical to SEQ ID NO: 970823

SEQ ID NO: 970826 - DNA, 33 bp, Homo sapien; identical to SEQ ID NO: 970824

SEQ ID NO: 970827 - DNA, 33 bp, Homo sapien
ttctctcaaagcttacaaatttctgcagtatgg

SEQ ID NO: 970828 - DNA, 33 bp, Homo sapien
ttctctcaaagcttaccaatttctgcagtatgg

SEQ ID NO: 970829 - DNA, 33 bp, Homo sapien
ttggatcaagcagaaaaggttggagaaaatttt

SEQ ID NO: 970830 - DNA, 33 bp, Homo sapien
ttggatcaagcagaaagggttggagaaaatttt

SEQ ID NO: 970831 - DNA, 33 bp, Homo sapien
actttcaacctgtccaaatgacttcatcaatga

SEQ ID NO: 970832 - DNA, 33 bp, Homo sapien
actttcaacctgtccagatgacttcatcaatga

SEQ ID NO: 970833 - DNA, 33 bp, Homo sapien
tcccttctagtagtcaaaatcaaaagcgaatgg

SEQ ID NO: 970834 - DNA, 33 bp, Homo sapien
tcccttctagtagtcataatcaaaagcgaatgg

SEQ ID NO: 970835 - DNA, 33 bp, Homo sapien
taaagatgctaggagaactgagtggcgacaatg

SEQ ID NO: 970836 - DNA, 33 bp, Homo sapien
taaagatgctaggagagctgagtggcgacaatg

SEQ ID NO: 970837 - DNA, 33 bp, Homo sapien
gtcattaagtgccagacataaaaaataaataca

SEQ ID NO: 970838 - DNA, 33 bp, Homo sapien
gtcattaagtgccagagataaaaaataaataca

SEQ ID NO: 970839 - DNA, 33 bp, Homo sapien
tccacctgtattcctgcaatcagtgacctctgg

SEQ ID NO: 970840 - DNA, 33 bp, Homo sapien
tccacctgtattcctgtaatcagtgacctctgg

SEQ ID NO: 970841 - DNA, 33 bp, Homo sapien
gcttaaggtattacatcatatgatctggcagtg

SEQ ID NO: 970842 - DNA, 33 bp, Homo sapien
gcttaaggtattacattatatgatctggcagtg

SEQ ID NO: 970843 - DNA, 33 bp, Homo sapien
taaatagaatgtttgaaatgagatttagagagt

SEQ ID NO: 970844 - DNA, 33 bp, Homo sapien
taaatagaatgtttgacatgagatttagagagt

SEQ ID NO: 970845 - DNA, 33 bp, Homo sapien
tttgaaatttgtgccaacgatactaggccaagt

SEQ ID NO: 970846 - DNA, 33 bp, Homo sapien
tttgaaatttgtgccaccgatactaggccaagt

SEQ ID NO: 970847 - DNA, 33 bp, Homo sapien
gtataccaaagcaccaaattttaggtattactc

SEQ ID NO: 970848 - DNA, 33 bp, Homo sapien
gtataccaaagcaccatattttaggtattactc

SEQ ID NO: 970849 - DNA, 33 bp, Homo sapien
ggccagccgttagtaacagtctgatcatgggca

SEQ ID NO: 970850 - DNA, 33 bp, Homo sapien
ggccagccgttagtaatagtctgatcatgggca

SEQ ID NO: 970851 - DNA, 33 bp, Homo sapien
ttttttaaaagcgcaaatagctgtgattttact

SEQ ID NO: 970852 - DNA, 33 bp, Homo sapien
ttttttaaaagcgcaattagctgtgattttact

SEQ ID NO: 970853 - DNA, 33 bp, Homo sapien
atctatctgctgaatcaaaaaaatgttggagta

SEQ ID NO: 970854 - DNA, 33 bp, Homo sapien
atctatctgctgaatcgaaaaaatgttggagta

SEQ ID NO: 970855 - DNA, 33 bp, Homo sapien
atttatcacagtctacaggtattgatgttttac

SEQ ID NO: 970856 - DNA, 33 bp, Homo sapien
atttatcacagtctactggtattgatgttttac

SEQ ID NO: 970857 - DNA, 33 bp, Homo sapien
ttatgaatatagtcagaagcatctcatttattt

SEQ ID NO: 970858 - DNA, 33 bp, Homo sapien
ttatgaatatagtcaggagcatctcatttattt

SEQ ID NO: 970859 - DNA, 33 bp, Homo sapien
ccctagctctcagtaactatctctttccattgg

SEQ ID NO: 970860 - DNA, 33 bp, Homo sapien
ccctagctctcagtaattatctctttccattgg

SEQ ID NO: 970861 - DNA, 33 bp, Homo sapien
tattctggttgaaagacgaaggaaagatgttca

SEQ ID NO: 970862 - DNA, 33 bp, Homo sapien
tattctggttgaaagatgaaggaaagatgttca

SEQ ID NO: 970863 - DNA, 33 bp, Homo sapien
actagaaactatcttaagcaattggttttggga

SEQ ID NO: 970864 - DNA, 33 bp, Homo sapien
actagaaactatcttatgcaattggttttggga

SEQ ID NO: 970865 - DNA, 33 bp, Homo sapien
aaaaaagagagtgaccaaaggaagggagattga

SEQ ID NO: 970866 - DNA, 33 bp, Homo sapien
aaaaaagagagtgaccgaaggaagggagattga

SEQ ID NO: 970867 - DNA, 33 bp, Homo sapien
atttccagaatatagacccagtgttatcagctg

SEQ ID NO: 970868 - DNA, 33 bp, Homo sapien
atttccagaatatagatccagtgttatcagctg

SEQ ID NO: 970869 - DNA, 33 bp, Homo sapien
tgttgttgtttcttaaaagtttcaaggtcaaga

SEQ ID NO: 970870 - DNA, 33 bp, Homo sapien
tgttgttgtttcttaagagtttcaaggtcaaga

SEQ ID NO: 970871 - DNA, 33 bp, Homo sapien
ttgcatatggtatatccagaaccttattgcttt

SEQ ID NO: 970872 - DNA, 33 bp, Homo sapien
ttgcatatggtatatctagaaccttattgcttt

SEQ ID NO: 970873 - DNA, 33 bp, Homo sapien
ttattgctttttttgacctacaaatacatcgta

SEQ ID NO: 970874 - DNA, 33 bp, Homo sapien
ttattgctttttttgatctacaaatacatcgta

SEQ ID NO: 970875 - DNA, 33 bp, Homo sapien
attaccagtgcctacactctagaaagatggaaa

SEQ ID NO: 970876 - DNA, 33 bp, Homo sapien
attaccagtgcctacattctagaaagatggaaa

SEQ ID NO: 970877 - DNA, 33 bp, Homo sapien
aatccaccagcaacaacgatggccaaaaaacaa

SEQ ID NO: 970878 - DNA, 33 bp, Homo sapien
aatccaccagcaacaatgatggccaaaaaacaa

SEQ ID NO: 970879 - DNA, 33 bp, Homo sapien
cccacttaatgtaagcacagcaaaatgactatt

SEQ ID NO: 970880 - DNA, 33 bp, Homo sapien
cccacttaatgtaagcgcagcaaaatgactatt

SEQ ID NO: 970881 - DNA, 33 bp, Homo sapien
gttgccaatatttccacctgtattttgaatcaa

SEQ ID NO: 970882 - DNA, 33 bp, Homo sapien
gttgccaatatttccatctgtattttgaatcaa

SEQ ID NO: 970883 - DNA, 33 bp, Homo sapien
tgaaatgacagtggcccgagatgaaaattcacc

SEQ ID NO: 970884 - DNA, 33 bp, Homo sapien
tgaaatgacagtggcctgagatgaaaattcacc

SEQ ID NO: 970885 - DNA, 33 bp, Homo sapien
ttttgttgttgaagacagtaacatgaatggctg

SEQ ID NO: 970886 - DNA, 33 bp, Homo sapien
ttttgttgttgaagactgtaacatgaatggctg

SEQ ID NO: 970887 - DNA, 33 bp, Homo sapien
atcaattcagttaaaactgtccgtgtataaatc

SEQ ID NO: 970888 - DNA, 33 bp, Homo sapien
atcaattcagttaaaattgtccgtgtataaatc

SEQ ID NO: 970889 - DNA, 33 bp, Homo sapien
tgttttagaactctacaggaatctcagattttt

SEQ ID NO: 970890 - DNA, 33 bp, Homo sapien
tgttttagaactctacgggaatctcagattttt

SEQ ID NO: 970891 - DNA, 33 bp, Homo sapien
ctgtgtcattatactactacctctggcagaata

SEQ ID NO: 970892 - DNA, 33 bp, Homo sapien
ctgtgtcattatactattacctctggcagaata

SEQ ID NO: 970893 - DNA, 33 bp, Homo sapien
tcatcttcatgttttccaattatagttgtgaaa

SEQ ID NO: 970894 - DNA, 33 bp, Homo sapien
tcatcttcatgttttctaattatagttgtgaaa

SEQ ID NO: 970895 - DNA, 33 bp, Homo sapien
gtacatattttgctcaatcctaaaggtttttgc

SEQ ID NO: 970896 - DNA, 33 bp, Homo sapien
gtacatattttgctcagtcctaaaggtttttgc

SEQ ID NO: 970897 - DNA, 33 bp, Homo sapien
ttatgcttttatactccatgacgagagacattt

SEQ ID NO: 970898 - DNA, 33 bp, Homo sapien
ttatgcttttatactctatgacgagagacattt

SEQ ID NO: 970899 - DNA, 33 bp, Homo sapien
atgttaagaaccgcctaaaaggattttgtggtt

SEQ ID NO: 970900 - DNA, 33 bp, Homo sapien
atgttaagaaccgcctgaaaggattttgtggtt

SEQ ID NO: 970901 - DNA, 33 bp, Homo sapien
acacttatatggacaaaaggcatttgcactgct

SEQ ID NO: 970902 - DNA, 33 bp, Homo sapien
acacttatatggacaagaggcatttgcactgct

SEQ ID NO: 970903 - DNA, 33 bp, Homo sapien
caacgcatgtggtttgcagaacagctggctaga

SEQ ID NO: 970904 - DNA, 33 bp, Homo sapien
caacgcatgtggtttgtagaacagctggctaga

SEQ ID NO: 970905 - DNA, 33 bp, Homo sapien
acactacgcacaagtaaactaaatgagttaaac

SEQ ID NO: 970906 - DNA, 33 bp, Homo sapien
acactacgcacaagtagactaaatgagttaaac

SEQ ID NO: 970907 - DNA, 33 bp, Homo sapien
aaaatgatatctttgacgtgctgaaagaaaaaa

SEQ ID NO: 970908 - DNA, 33 bp, Homo sapien
aaaatgatatctttgatgtgctgaaagaaaaaa

SEQ ID NO: 970909 - DNA, 33 bp, Homo sapien
gattaatgatggtataacactgggtcccccatt

SEQ ID NO: 970910 - DNA, 33 bp, Homo sapien
gattaatgatggtatagcactgggtcccccatt

SEQ ID NO: 970911 - DNA, 33 bp, Homo sapien
tttaatggagagctaactgaataataaattgag

SEQ ID NO: 970912 - DNA, 33 bp, Homo sapien
tttaatggagagctaattgaataataaattgag

SEQ ID NO: 970913 - DNA, 33 bp, Homo sapien
tgcgggctacgagaaggagagaagagagaagga

SEQ ID NO: 970914 - DNA, 33 bp, Homo sapien
tgcgggctacgagaagtagagaagagagaagga

SEQ ID NO: 970915 - DNA, 33 bp, Homo sapien
ttaatatttttgattcaccaattagaccataaa

SEQ ID NO: 970916 - DNA, 33 bp, Homo sapien
ttaatatttttgattcgccaattagaccataaa

SEQ ID NO: 970917 - DNA, 33 bp, Homo sapien
atatgccatgctcatccatgtaactgaatcttg

SEQ ID NO: 970918 - DNA, 33 bp, Homo sapien
atatgccatgctcatctatgtaactgaatcttg

SEQ ID NO: 970919 - DNA, 33 bp, Homo sapien
aggattttgaccttccacttactagaaacagtg

SEQ ID NO: 970920 - DNA, 33 bp, Homo sapien
aggattttgaccttccgcttactagaaacagtg

SEQ ID NO: 970921 - DNA, 33 bp, Homo sapien
ctaacacatttaggatcaagcttacaaatgact

SEQ ID NO: 970922 - DNA, 33 bp, Homo sapien
ctaacacatttaggattaagcttacaaatgact

SEQ ID NO: 970923 - DNA, 33 bp, Homo sapien
tgaacttggagtcctgcaagacactacttttca

SEQ ID NO: 970924 - DNA, 33 bp, Homo sapien
tgaacttggagtcctgtaagacactacttttca

SEQ ID NO: 970925 - DNA, 33 bp, Homo sapien
gagaaacctggatctcaccatttgccatttatt

SEQ ID NO: 970926 - DNA, 33 bp, Homo sapien
gagaaacctggatctcgccatttgccatttatt

SEQ ID NO: 970927 - DNA, 33 bp, Homo sapien
cttgcatatctccggaaacaaagtgagtgtacc

SEQ ID NO: 970928 - DNA, 33 bp, Homo sapien
cttgcatatctccggagacaaagtgagtgtacc

SEQ ID NO: 970929 - DNA, 33 bp, Homo sapien
ccaactgcattccacaaggacccaatttgtttg

SEQ ID NO: 970930 - DNA, 33 bp, Homo sapien
ccaactgcattccacagggacccaatttgtttg

SEQ ID NO: 970931 - DNA, 33 bp, Homo sapien
tttctcttccacagccactaactcagcttttag

SEQ ID NO: 970932 - DNA, 33 bp, Homo sapien
tttctcttccacagcctctaactcagcttttag

SEQ ID NO: 970933 - DNA, 33 bp, Homo sapien
ataataataatgggcacaatttatgcagatcgt

SEQ ID NO: 970934 - DNA, 33 bp, Homo sapien
ataataataatgggcagaatttatgcagatcgt

SEQ ID NO: 970935 - DNA, 33 bp, Homo sapien
tagtacacatgacagcaatcattacagcttcct

SEQ ID NO: 970936 - DNA, 33 bp, Homo sapien
tagtacacatgacagcgatcattacagcttcct

SEQ ID NO: 970937 - DNA, 33 bp, Homo sapien
tcttctacgttttacacagaagggcagcataac

SEQ ID NO: 970938 - DNA, 33 bp, Homo sapien
tcttctacgttttacatagaagggcagcataac

SEQ ID NO: 970939 - DNA, 33 bp, Homo sapien
aagaattctacccaccacaggttgtactgcatg

SEQ ID NO: 970940 - DNA, 33 bp, Homo sapien
aagaattctacccacctcaggttgtactgcatg

SEQ ID NO: 970941 - DNA, 33 bp, Homo sapien
ataaaagggtgttgttcaaatcagtaagttttt

SEQ ID NO: 970942 - DNA, 33 bp, Homo sapien
ataaaagggtgttgtttaaatcagtaagttttt

SEQ ID NO: 970943 - DNA, 33 bp, Homo sapien
tcagatttctattataggaatgtccactcaaag

SEQ ID NO: 970944 - DNA, 33 bp, Homo sapien
tcagatttctattatatgaatgtccactcaaag

SEQ ID NO: 970945 - DNA, 33 bp, Homo sapien
taaaccagcattctaccggactgcttttgctca

SEQ ID NO: 970946 - DNA, 33 bp, Homo sapien
taaaccagcattctactggactgcttttgctca

SEQ ID NO: 970947 - DNA, 33 bp, Homo sapien
agttaatagacatcagaattggttccagattag

SEQ ID NO: 970948 - DNA, 33 bp, Homo sapien
agttaatagacatcaggattggttccagattag

SEQ ID NO: 970949 - DNA, 33 bp, Homo sapien
taacctgttaacattacgagcaaaggaaaatgt

SEQ ID NO: 970950 - DNA, 33 bp, Homo sapien
taacctgttaacattatgagcaaaggaaaatgt

SEQ ID NO: 970951 - DNA, 33 bp, Homo sapien
gccaaccactgtaaaacgcaacatctattgggg

SEQ ID NO: 970952 - DNA, 33 bp, Homo sapien
gccaaccactgtaaaatgcaacatctattgggg

SEQ ID NO: 970953 - DNA, 33 bp, Homo sapien
agatactggaatatacagataccttgattttgg

SEQ ID NO: 970954 - DNA, 33 bp, Homo sapien
agatactggaatatacggataccttgattttgg

SEQ ID NO: 970955 - DNA, 33 bp, Homo sapien
cttttgcttgctactccaccattttttgtatct

SEQ ID NO: 970956 - DNA, 33 bp, Homo sapien
cttttgcttgctactctaccattttttgtatct

SEQ ID NO: 970957 - DNA, 33 bp, Homo sapien
tgtatgtgagtggtgaaattttaaacctgtaca

SEQ ID NO: 970958 - DNA, 33 bp, Homo sapien
tgtatgtgagtggtgacattttaaacctgtaca

SEQ ID NO: 970959 - DNA, 33 bp, Homo sapien
gttagaggacaagttccataccagctatttcag

SEQ ID NO: 970960 - DNA, 33 bp, Homo sapien
gttagaggacaagttctataccagctatttcag

SEQ ID NO: 970961 - DNA, 33 bp, Homo sapien
tttctttcagggatcacaattctaatctgtcta

SEQ ID NO: 970962 - DNA, 33 bp, Homo sapien
tttctttcagggatcataattctaatctgtcta

SEQ ID NO: 970963 - DNA, 33 bp, Homo sapien
agcaggatggtataaactgatgaaaggagaatg

SEQ ID NO: 970964 - DNA, 33 bp, Homo sapien
agcaggatggtataaattgatgaaaggagaatg

SEQ ID NO: 970965 - DNA, 33 bp, Homo sapien
ttggaatctgtttcaaaggatttggaggtgggc

SEQ ID NO: 970966 - DNA, 33 bp, Homo sapien
ttggaatctgtttcaacggatttggaggtgggc

SEQ ID NO: 970967 - DNA, 33 bp, Homo sapien
tttgtcatgttttcaacgcctagtaaaagatga

SEQ ID NO: 970968 - DNA, 33 bp, Homo sapien
tttgtcatgttttcaatgcctagtaaaagatga

SEQ ID NO: 970969 - DNA, 33 bp, Homo sapien
gagtggttgcaagaaacgattgacgagaactgg

SEQ ID NO: 970970 - DNA, 33 bp, Homo sapien
gagtggttgcaagaaatgattgacgagaactgg

SEQ ID NO: 970971 - DNA, 33 bp, Homo sapien
catgacttcagggatgcaaatgagggctgtgta

SEQ ID NO: 970972 - DNA, 33 bp, Homo sapien
catgacttcagggatggaaatgagggctgtgta

SEQ ID NO: 970973 - DNA, 33 bp, Homo sapien
atgattaactttcctacggccagatgatgagca

SEQ ID NO: 970974 - DNA, 33 bp, Homo sapien
atgattaactttcctatggccagatgatgagca

SEQ ID NO: 970975 - DNA, 33 bp, Homo sapien
catcatctgcatttcactttaatgaatctctat

SEQ ID NO: 970976 - DNA, 33 bp, Homo sapien
catcatctgcatttcagtttaatgaatctctat

SEQ ID NO: 970977 - DNA, 33 bp, Homo sapien
aacaaggaacttaagaagaatccagacctaagt

SEQ ID NO: 970978 - DNA, 33 bp, Homo sapien
aacaaggaacttaagaggaatccagacctaagt

SEQ ID NO: 970979 - DNA, 33 bp, Homo sapien
caggaatagtccttaaataacagaaatccttaa

SEQ ID NO: 970980 - DNA, 33 bp, Homo sapien
caggaatagtccttaagtaacagaaatccttaa

SEQ ID NO: 970981 - DNA, 33 bp, Homo sapien
tacaagaagttggaaacaattcagatttccatc

SEQ ID NO: 970982 - DNA, 33 bp, Homo sapien
tacaagaagttggaaagaattcagatttccatc

SEQ ID NO: 970983 - DNA, 33 bp, Homo sapien
ttaagtgtgagggaataataaggaccatctcag

SEQ ID NO: 970984 - DNA, 33 bp, Homo sapien
ttaagtgtgagggaatgataaggaccatctcag

SEQ ID NO: 970985 - DNA, 33 bp, Homo sapien
acccctggtgttgatacggtagaataaatctga

SEQ ID NO: 970986 - DNA, 33 bp, Homo sapien
acccctggtgttgatatggtagaataaatctga

SEQ ID NO: 970987 - DNA, 33 bp, Homo sapien
aggtcaccagcccagacagaagaagctgcttgt

SEQ ID NO: 970988 - DNA, 33 bp, Homo sapien
aggtcaccagcccagagagaagaagctgcttgt

SEQ ID NO: 970989 - DNA, 33 bp, Homo sapien
taggccataaccaaataaggttctgtttttcaa

SEQ ID NO: 970990 - DNA, 33 bp, Homo sapien
taggccataaccaaatgaggttctgtttttcaa

SEQ ID NO: 970991 - DNA, 33 bp, Homo sapien
aaaatcaaaagagtaaagcatccaactcaaaaa

SEQ ID NO: 970992 - DNA, 33 bp, Homo sapien
aaaatcaaaagagtaaggcatccaactcaaaaa

SEQ ID NO: 970993 - DNA, 33 bp, Homo sapien
ttggttgttttactaagtctgtggcctctgaat

SEQ ID NO: 970994 - DNA, 33 bp, Homo sapien
ttggttgttttactaattctgtggcctctgaat

SEQ ID NO: 970995 - DNA, 33 bp, Homo sapien
cagtgaccaagaaagacgaagtggaatagagag

SEQ ID NO: 970996 - DNA, 33 bp, Homo sapien
cagtgaccaagaaagatgaagtggaatagagag

SEQ ID NO: 970997 - DNA, 33 bp, Homo sapien
gacaagaagtgtgtctcactcattttttaaacc

SEQ ID NO: 970998 - DNA, 33 bp, Homo sapien
gacaagaagtgtgtcttactcattttttaaacc

SEQ ID NO: 970999 - DNA, 33 bp, Homo sapien
cattgcagacaaatcaagagtggctatagctta

SEQ ID NO: 971000 - DNA, 33 bp, Homo sapien
cattgcagacaaatcaggagtggctatagctta

SEQ ID NO: 971001 - DNA, 33 bp, Homo sapien
gcagggagaccatttcacttaggggaccaggct

SEQ ID NO: 971002 - DNA, 33 bp, Homo sapien
gcagggagaccatttctcttaggggaccaggct

SEQ ID NO: 971003 - DNA, 33 bp, Homo sapien
tgaaaatcagaagagcagctattttggaaagga

SEQ ID NO: 971004 - DNA, 33 bp, Homo sapien
tgaaaatcagaagagcggctattttggaaagga

SEQ ID NO: 971005 - DNA, 33 bp, Homo sapien
ctccatctaccattgcaatgtctttgtggtgga

SEQ ID NO: 971006 - DNA, 33 bp, Homo sapien
ctccatctaccattgctatgtctttgtggtgga

SEQ ID NO: 971007 - DNA, 33 bp, Homo sapien
acacagcagagttgaccgattattgctaagttg

SEQ ID NO: 971008 - DNA, 33 bp, Homo sapien
acacagcagagttgactgattattgctaagttg

SEQ ID NO: 971009 - DNA, 33 bp, Homo sapien
ggatctctgaatcaccacttggagaaaaacttc

SEQ ID NO: 971010 - DNA, 33 bp, Homo sapien
ggatctctgaatcaccgcttggagaaaaacttc

SEQ ID NO: 971011 - DNA, 33 bp, Homo sapien
acatagatatgaatggccactagctttctttat

SEQ ID NO: 971012 - DNA, 33 bp, Homo sapien
acatagatatgaatggtcactagctttctttat

SEQ ID NO: 971013 - DNA, 33 bp, Homo sapien
tgtctcctaagtggacactgactgatttatgcc

SEQ ID NO: 971014 - DNA, 33 bp, Homo sapien
tgtctcctaagtggaccctgactgatttatgcc

SEQ ID NO: 971015 - DNA, 33 bp, Homo sapien
cacattttacttctgcgcctttcatttataaac

SEQ ID NO: 971016 - DNA, 33 bp, Homo sapien
cacattttacttctgctcctttcatttataaac

SEQ ID NO: 971017 - DNA, 33 bp, Homo sapien
tcactgatataattgaaaagttcttgccaaatg

SEQ ID NO: 971018 - DNA, 33 bp, Homo sapien
tcactgatataattgagaagttcttgccaaatg

SEQ ID NO: 971019 - DNA, 33 bp, Homo sapien
ggtaaaagaacaataacgtgcataataataaag

SEQ ID NO: 971020 - DNA, 33 bp, Homo sapien
ggtaaaagaacaataatgtgcataataataaag

SEQ ID NO: 971021 - DNA, 33 bp, Homo sapien
gcattcaagtatataaagcaaaaactgttaaat

SEQ ID NO: 971022 - DNA, 33 bp, Homo sapien
gcattcaagtatataaggcaaaaactgttaaat

SEQ ID NO: 971023 - DNA, 33 bp, Homo sapien
tgccatattattcagaacataaagacacatggc

SEQ ID NO: 971024 - DNA, 33 bp, Homo sapien
tgccatattattcagagcataaagacacatggc

SEQ ID NO: 971025 - DNA, 33 bp, Homo sapien
actcagtgttagaagacgaaatttagcaaaagc

SEQ ID NO: 971026 - DNA, 33 bp, Homo sapien
actcagtgttagaagatgaaatttagcaaaagc

SEQ ID NO: 971027 - DNA, 33 bp, Homo sapien
tatggcaataactgatcaaataagtgaaaaagt

SEQ ID NO: 971028 - DNA, 33 bp, Homo sapien
tatggcaataactgatgaaataagtgaaaaagt

SEQ ID NO: 971029 - DNA, 33 bp, Homo sapien
tttataatcattattgaaagtagagtgggctaa

SEQ ID NO: 971030 - DNA, 33 bp, Homo sapien
tttataatcattattgcaagtagagtgggctaa

SEQ ID NO: 971031 - DNA, 33 bp, Homo sapien
atgtttttcagacttgaatgggttttttgattc

SEQ ID NO: 971032 - DNA, 33 bp, Homo sapien
atgtttttcagacttggatgggttttttgattc

SEQ ID NO: 971033 - DNA, 33 bp, Homo sapien
tgaaccaatttttccaatcgagtttcttactta

SEQ ID NO: 971034 - DNA, 33 bp, Homo sapien
tgaaccaatttttccagtcgagtttcttactta

SEQ ID NO: 971035 - DNA, 33 bp, Homo sapien
tgaagaaaactctcaaattagtttcttgacttg

SEQ ID NO: 971036 - DNA, 33 bp, Homo sapien
tgaagaaaactctcaagttagtttcttgacttg

SEQ ID NO: 971037 - DNA, 33 bp, Homo sapien
caaatcatagatagaccgagcatctagtgtttt

SEQ ID NO: 971038 - DNA, 33 bp, Homo sapien
caaatcatagatagactgagcatctagtgtttt

SEQ ID NO: 971039 - DNA, 33 bp, Homo sapien
gaaagtgaaataggaaggatgtaaattcaaata

SEQ ID NO: 971040 - DNA, 33 bp, Homo sapien
gaaagtgaaataggaatgatgtaaattcaaata

SEQ ID NO: 971041 - DNA, 33 bp, Homo sapien
caaacttccttttgtaaacaattggcatgatat

SEQ ID NO: 971042 - DNA, 33 bp, Homo sapien
caaacttccttttgtagacaattggcatgatat

SEQ ID NO: 971043 - DNA, 33 bp, Homo sapien
aagtacatgagaccataagaaaaactttacctc

SEQ ID NO: 971044 - DNA, 33 bp, Homo sapien
aagtacatgagaccatgagaaaaactttacctc

SEQ ID NO: 971045 - DNA, 33 bp, Homo sapien
gccatttggttcacagaatgaataagcctgttt

SEQ ID NO: 971046 - DNA, 33 bp, Homo sapien
gccatttggttcacaggatgaataagcctgttt

SEQ ID NO: 971047 - DNA, 33 bp, Homo sapien
tctggttcaggatccaatcatttagttgtcgca

SEQ ID NO: 971048 - DNA, 33 bp, Homo sapien
tctggttcaggatccagtcatttagttgtcgca

SEQ ID NO: 971049 - DNA, 33 bp, Homo sapien
cacctgtgtgtatccaacagcaagaagactgaa

SEQ ID NO: 971050 - DNA, 33 bp, Homo sapien
cacctgtgtgtatccagcagcaagaagactgaa

SEQ ID NO: 971051 - DNA, 33 bp, Homo sapien
ggcaggatcagttagcactccacttaccactgg

SEQ ID NO: 971052 - DNA, 33 bp, Homo sapien
ggcaggatcagttagcgctccacttaccactgg

SEQ ID NO: 971053 - DNA, 33 bp, Homo sapien
gattgggtttaatcacagaatggagatgacaga

SEQ ID NO: 971054 - DNA, 33 bp, Homo sapien
gattgggtttaatcacggaatggagatgacaga

SEQ ID NO: 971055 - DNA, 33 bp, Homo sapien
gtcttataaaaacaaacgttggcttgatagtgc

SEQ ID NO: 971056 - DNA, 33 bp, Homo sapien
gtcttataaaaacaaatgttggcttgatagtgc

SEQ ID NO: 971057 - DNA, 33 bp, Homo sapien
tagtcactatgaagatcaattgagataatattt

SEQ ID NO: 971058 - DNA, 33 bp, Homo sapien
tagtcactatgaagattaattgagataatattt

SEQ ID NO: 971059 - DNA, 33 bp, Homo sapien
cctgaacactgtaatgacagtagccgcccagct

SEQ ID NO: 971060 - DNA, 33 bp, Homo sapien
cctgaacactgtaatggcagtagccgcccagct

SEQ ID NO: 971061 - DNA, 33 bp, Homo sapien
atcaaaccaaagagaagaatgtagccacatgaa

SEQ ID NO: 971062 - DNA, 33 bp, Homo sapien
atcaaaccaaagagaataatgtagccacatgaa

SEQ ID NO: 971063 - DNA, 33 bp, Homo sapien
ggatctgaagacacccacttctaagtcattcat

SEQ ID NO: 971064 - DNA, 33 bp, Homo sapien
ggatctgaagacacccgcttctaagtcattcat

SEQ ID NO: 971065 - DNA, 33 bp, Homo sapien
aagttggattccagagaccccactatcactcaa

SEQ ID NO: 971066 - DNA, 33 bp, Homo sapien
aagttggattccagagtccccactatcactcaa

SEQ ID NO: 971067 - DNA, 33 bp, Homo sapien
tggaactactcacagaaaggctgcaaagtcaat

SEQ ID NO: 971068 - DNA, 33 bp, Homo sapien
tggaactactcacagagaggctgcaaagtcaat

SEQ ID NO: 971069 - DNA, 33 bp, Homo sapien
atgggacaggttctaaagatcttggtaaagaga

SEQ ID NO: 971070 - DNA, 33 bp, Homo sapien
atgggacaggttctaaggatcttggtaaagaga

SEQ ID NO: 971071 - DNA, 33 bp, Homo sapien
tggtttagattaattcactcaatttctaatcct

SEQ ID NO: 971072 - DNA, 33 bp, Homo sapien
tggtttagattaattcgctcaatttctaatcct

SEQ ID NO: 971073 - DNA, 33 bp, Homo sapien
ccacctggtattccaaccagaagtgacaaaaat

SEQ ID NO: 971074 - DNA, 33 bp, Homo sapien
ccacctggtattccaatcagaagtgacaaaaat

SEQ ID NO: 971075 - DNA, 33 bp, Homo sapien
tccaagagacttattagctagctggggaagcag

SEQ ID NO: 971076 - DNA, 33 bp, Homo sapien
tccaagagacttattatctagctggggaagcag

SEQ ID NO: 971077 - DNA, 33 bp, Homo sapien
aagaatatacaaaatgcagtgcgcttctattcc

SEQ ID NO: 971078 - DNA, 33 bp, Homo sapien
aagaatatacaaaatgtagtgcgcttctattcc

SEQ ID NO: 971079 - DNA, 33 bp, Homo sapien
catttccatgctactgaaagcctgtcattcctc

SEQ ID NO: 971080 - DNA, 33 bp, Homo sapien
catttccatgctactggaagcctgtcattcctc

SEQ ID NO: 971081 - DNA, 33 bp, Homo sapien
aaccaggaatcagggccagtgtctgtctggaag

SEQ ID NO: 971082 - DNA, 33 bp, Homo sapien
aaccaggaatcagggcgagtgtctgtctggaag

SEQ ID NO: 971083 - DNA, 33 bp, Homo sapien
taccatttgtaggacaaggcttcagtaaacagc

SEQ ID NO: 971084 - DNA, 33 bp, Homo sapien
taccatttgtaggacagggcttcagtaaacagc

SEQ ID NO: 971085 - DNA, 33 bp, Homo sapien
gcttgtttgtagtaacaagagcaacaaagttat

SEQ ID NO: 971086 - DNA, 33 bp, Homo sapien
gcttgtttgtagtaacgagagcaacaaagttat

SEQ ID NO: 971087 - DNA, 33 bp, Homo sapien
aacattaactgatggactagattcaattacaat

SEQ ID NO: 971088 - DNA, 33 bp, Homo sapien
aacattaactgatggagtagattcaattacaat

SEQ ID NO: 971089 - DNA, 33 bp, Homo sapien
tgctttcaattttaacacagtcaaaaccctaag

SEQ ID NO: 971090 - DNA, 33 bp, Homo sapien
tgctttcaattttaacgcagtcaaaaccctaag

SEQ ID NO: 971091 - DNA, 33 bp, Homo sapien
actttggacaatatggacatcttaacaatatta

SEQ ID NO: 971092 - DNA, 33 bp, Homo sapien
actttggacaatatggtcatcttaacaatatta

SEQ ID NO: 971093 - DNA, 33 bp, Homo sapien
agcatcctcactcaagaagacaggtgaagagga

SEQ ID NO: 971094 - DNA, 33 bp, Homo sapien
agcatcctcactcaaggagacaggtgaagagga

SEQ ID NO: 971095 - DNA, 33 bp, Homo sapien
aagatgaaggcttctacctacattgcatctctt

SEQ ID NO: 971096 - DNA, 33 bp, Homo sapien
aagatgaaggcttctatctacattgcatctctt

SEQ ID NO: 971097 - DNA, 33 bp, Homo sapien
tttgcagaaaagcaacaagctgaaaggtacaaa

SEQ ID NO: 971098 - DNA, 33 bp, Homo sapien
tttgcagaaaagcaacgagctgaaaggtacaaa

SEQ ID NO: 971099 - DNA, 33 bp, Homo sapien
aatccacaaagtgttaccaggctatttctttag

SEQ ID NO: 971100 - DNA, 33 bp, Homo sapien
aatccacaaagtgttatcaggctatttctttag

SEQ ID NO: 971101 - DNA, 33 bp, Homo sapien
agaattgtgaaagtgaaaagagaaaagcaacta

SEQ ID NO: 971102 - DNA, 33 bp, Homo sapien
agaattgtgaaagtgacaagagaaaagcaacta

SEQ ID NO: 971103 - DNA, 33 bp, Homo sapien
caatcaggtaagacacggaaggtaagacataag

SEQ ID NO: 971104 - DNA, 33 bp, Homo sapien
caatcaggtaagacactgaaggtaagacataag

SEQ ID NO: 971105 - DNA, 33 bp, Homo sapien
tttcctcaactttgccgagctaaatcttatcct

SEQ ID NO: 971106 - DNA, 33 bp, Homo sapien
tttcctcaactttgcctagctaaatcttatcct

SEQ ID NO: 971107 - DNA, 33 bp, Homo sapien
atccttctcatgcagacgaaatcctagcaaagg

SEQ ID NO: 971108 - DNA, 33 bp, Homo sapien
atccttctcatgcagatgaaatcctagcaaagg

SEQ ID NO: 971109 - DNA, 33 bp, Homo sapien
tgatctgtgcggctaaccaacatggcgcacatt

SEQ ID NO: 971110 - DNA, 33 bp, Homo sapien
tgatctgtgcggctaagcaacatggcgcacatt

SEQ ID NO: 971111 - DNA, 33 bp, Homo sapien
tagccccagggaattacggaatgattgaaagaa

SEQ ID NO: 971112 - DNA, 33 bp, Homo sapien
tagccccagggaattatggaatgattgaaagaa

SEQ ID NO: 971113 - DNA, 33 bp, Homo sapien
ccactttggtattgtacagatacgttcctacca

SEQ ID NO: 971114 - DNA, 33 bp, Homo sapien
ccactttggtattgtatagatacgttcctacca

SEQ ID NO: 971115 - DNA, 33 bp, Homo sapien
agtatgtcaatactaaagcaccaatacggcagt

SEQ ID NO: 971116 - DNA, 33 bp, Homo sapien
agtatgtcaatactaaggcaccaatacggcagt

SEQ ID NO: 971117 - DNA, 33 bp, Homo sapien
gagctctaaagcaaaagattggtatagttgtct

SEQ ID NO: 971118 - DNA, 33 bp, Homo sapien
gagctctaaagcaaaatattggtatagttgtct

SEQ ID NO: 971119 - DNA, 33 bp, Homo sapien
tgctgaaatagcaatacgtatctgtacactggg

SEQ ID NO: 971120 - DNA, 33 bp, Homo sapien
tgctgaaatagcaatatgtatctgtacactggg

SEQ ID NO: 971121 - DNA, 33 bp, Homo sapien
caatcactctagaggcagaagtctactcatttg

SEQ ID NO: 971122 - DNA, 33 bp, Homo sapien
caatcactctagaggcggaagtctactcatttg

SEQ ID NO: 971123 - DNA, 33 bp, Homo sapien
aaagtgataactcagcactacaacagctcaatt

SEQ ID NO: 971124 - DNA, 33 bp, Homo sapien
aaagtgataactcagcgctacaacagctcaatt

SEQ ID NO: 971125 - DNA, 33 bp, Homo sapien
atgtaacaatgtttgacgagataaagaccaaga

SEQ ID NO: 971126 - DNA, 33 bp, Homo sapien
atgtaacaatgtttgatgagataaagaccaaga

SEQ ID NO: 971127 - DNA, 33 bp, Homo sapien
tccttcagatatcgccaagtctcacaggcccac

SEQ ID NO: 971128 - DNA, 33 bp, Homo sapien
tccttcagatatcgccgagtctcacaggcccac

SEQ ID NO: 971129 - DNA, 33 bp, Homo sapien
actgagacttcttccaaatacagcaacataact

SEQ ID NO: 971130 - DNA, 33 bp, Homo sapien
actgagacttcttccagatacagcaacataact

SEQ ID NO: 971131 - DNA, 33 bp, Homo sapien
ttttccatgtgcactgacaaattttacagggta

SEQ ID NO: 971132 - DNA, 33 bp, Homo sapien
ttttccatgtgcactggcaaattttacagggta

SEQ ID NO: 971133 - DNA, 33 bp, Homo sapien
acctaaactattttcacagcacaaaaggcacaa

SEQ ID NO: 971134 - DNA, 33 bp, Homo sapien
acctaaactattttcatagcacaaaaggcacaa

SEQ ID NO: 971135 - DNA, 33 bp, Homo sapien
caatcttcacttcccaagttgaacagcaattct

SEQ ID NO: 971136 - DNA, 33 bp, Homo sapien
caatcttcacttcccatgttgaacagcaattct

SEQ ID NO: 971137 - DNA, 33 bp, Homo sapien
ggcagtgagagagagcaagcaacaggtcgtaac

SEQ ID NO: 971138 - DNA, 33 bp, Homo sapien
ggcagtgagagagagcgagcaacaggtcgtaac

SEQ ID NO: 971139 - DNA, 33 bp, Homo sapien
cacaagccgtattgtgcattgggctcttactat

SEQ ID NO: 971140 - DNA, 33 bp, Homo sapien
cacaagccgtattgtgtattgggctcttactat

SEQ ID NO: 971141 - DNA, 33 bp, Homo sapien
gcaatcttacctaatgcagaacatccaagaatg

SEQ ID NO: 971142 - DNA, 33 bp, Homo sapien
gcaatcttacctaatgtagaacatccaagaatg

SEQ ID NO: 971143 - DNA, 33 bp, Homo sapien
atagtagtgaagtcgtcaagccaaaaaaacctt

SEQ ID NO: 971144 - DNA, 33 bp, Homo sapien
atagtagtgaagtcgtgaagccaaaaaaacctt

SEQ ID NO: 971145 - DNA, 33 bp, Homo sapien
ctcagaggaaaagttacagtacctggctttgag

SEQ ID NO: 971146 - DNA, 33 bp, Homo sapien
ctcagaggaaaagttatagtacctggctttgag

SEQ ID NO: 971147 - DNA, 33 bp, Homo sapien
taccacctttagattccctagccactcttccag

SEQ ID NO: 971148 - DNA, 33 bp, Homo sapien
taccacctttagattctctagccactcttccag

SEQ ID NO: 971149 - DNA, 33 bp, Homo sapien
aaagtttctattgtatcaagtgccttcccctac

SEQ ID NO: 971150 - DNA, 33 bp, Homo sapien
aaagtttctattgtattaagtgccttcccctac

SEQ ID NO: 971151 - DNA, 33 bp, Homo sapien
tggggcatttttgtcgccaatgccctcacaacc

SEQ ID NO: 971152 - DNA, 33 bp, Homo sapien
tggggcatttttgtcggcaatgccctcacaacc

SEQ ID NO: 971153 - DNA, 33 bp, Homo sapien; identical to SEQ ID NO: 971151

SEQ ID NO: 971154 - DNA, 33 bp, Homo sapien; identical to SEQ ID NO: 971152

SEQ ID NO: 971155 - DNA, 33 bp, Homo sapien
gcatcaaatcgctggacatagaaactacttcaa

SEQ ID NO: 971156 - DNA, 33 bp, Homo sapien
gcatcaaatcgctggatatagaaactacttcaa

SEQ ID NO: 971157 - DNA, 33 bp, Homo sapien
ttatcctttaaatgcaccaaagttctcctaaat

SEQ ID NO: 971158 - DNA, 33 bp, Homo sapien
ttatcctttaaatgcagcaaagttctcctaaat

SEQ ID NO: 971159 - DNA, 33 bp, Homo sapien
gaatgccaaggtgccacatgacaatagaaaata

SEQ ID NO: 971160 - DNA, 33 bp, Homo sapien
gaatgccaaggtgccatatgacaatagaaaata

SEQ ID NO: 971161 - DNA, 33 bp, Homo sapien
atatacaaaaatgacaatgctttattgctttaa

SEQ ID NO: 971162 - DNA, 33 bp, Homo sapien
atatacaaaaatgacagtgctttattgctttaa

SEQ ID NO: 971163 - DNA, 33 bp, Homo sapien
ataacctgcttatctactaaaaagagaaacata

SEQ ID NO: 971164 - DNA, 33 bp, Homo sapien
ataacctgcttatctattaaaaagagaaacata

SEQ ID NO: 971165 - DNA, 33 bp, Homo sapien
caatatcagagtcacaagttttaagttgtttct

SEQ ID NO: 971166 - DNA, 33 bp, Homo sapien
caatatcagagtcacaggttttaagttgtttct

SEQ ID NO: 971167 - DNA, 33 bp, Homo sapien
ttccagttgctctgaaaatgcagtcaatatctt

SEQ ID NO: 971168 - DNA, 33 bp, Homo sapien
ttccagttgctctgaagatgcagtcaatatctt

SEQ ID NO: 971169 - DNA, 33 bp, Homo sapien
atattattgtgatgaacagtaaatgaaaatgaa

SEQ ID NO: 971170 - DNA, 33 bp, Homo sapien
atattattgtgatgaagagtaaatgaaaatgaa

SEQ ID NO: 971171 - DNA, 33 bp, Homo sapien
ctaaaattgaaggaacaaattccaactggtaat

SEQ ID NO: 971172 - DNA, 33 bp, Homo sapien
ctaaaattgaaggaaccaattccaactggtaat

SEQ ID NO: 971173 - DNA, 33 bp, Homo sapien
taattcaacttcaaggccagtctaaatttcatg

SEQ ID NO: 971174 - DNA, 33 bp, Homo sapien
taattcaacttcaaggtcagtctaaatttcatg

SEQ ID NO: 971175 - DNA, 33 bp, Homo sapien
cttgaaaatattgtgaaaagtgaaagaagacag

SEQ ID NO: 971176 - DNA, 33 bp, Homo sapien
cttgaaaatattgtgacaagtgaaagaagacag

SEQ ID NO: 971177 - DNA, 33 bp, Homo sapien
taaagaagaattttcccataactatctgtgtct

SEQ ID NO: 971178 - DNA, 33 bp, Homo sapien
taaagaagaattttcctataactatctgtgtct

SEQ ID NO: 971179 - DNA, 33 bp, Homo sapien
ctttatgatacaaatgacaatgagctaatagtt

SEQ ID NO: 971180 - DNA, 33 bp, Homo sapien
ctttatgatacaaatggcaatgagctaatagtt

SEQ ID NO: 971181 - DNA, 33 bp, Homo sapien
gaaaagaaagtgtcagcataaggagcatcacag

SEQ ID NO: 971182 - DNA, 33 bp, Homo sapien
gaaaagaaagtgtcagtataaggagcatcacag

SEQ ID NO: 971183 - DNA, 33 bp, Homo sapien
tgtacttgaaaattcgccatatcatcttttaga

SEQ ID NO: 971184 - DNA, 33 bp, Homo sapien
tgtacttgaaaattcggcatatcatcttttaga

SEQ ID NO: 971185 - DNA, 33 bp, Homo sapien
ggacaggactttgacaatatgggacaattcccc

SEQ ID NO: 971186 - DNA, 33 bp, Homo sapien
ggacaggactttgacagtatgggacaattcccc

SEQ ID NO: 971187 - DNA, 33 bp, Homo sapien
attgttttaagtgcaagccatagataaccagtg

SEQ ID NO: 971188 - DNA, 33 bp, Homo sapien
attgttttaagtgcaatccatagataaccagtg

SEQ ID NO: 971189 - DNA, 33 bp, Homo sapien
ccttaaccttcacctgccaataatcaatcttct

SEQ ID NO: 971190 - DNA, 33 bp, Homo sapien
ccttaaccttcacctgtcaataatcaatcttct

SEQ ID NO: 971191 - DNA, 33 bp, Homo sapien
ccaaatctcaactttacagtaaagcacacagtt

SEQ ID NO: 971192 - DNA, 33 bp, Homo sapien
ccaaatctcaactttatagtaaagcacacagtt

SEQ ID NO: 971193 - DNA, 33 bp, Homo sapien
ctcactcaaggcagataatactgaacaagtgct

SEQ ID NO: 971194 - DNA, 33 bp, Homo sapien
ctcactcaaggcagatgatactgaacaagtgct

SEQ ID NO: 971195 - DNA, 33 bp, Homo sapien
atcctgaaacctgaccagagagatgagaccatc

SEQ ID NO: 971196 - DNA, 33 bp, Homo sapien
atcctgaaacctgaccggagagatgagaccatc

SEQ ID NO: 971197 - DNA, 33 bp, Homo sapien
atgcaggccatagagacggtaaactaagtacca

SEQ ID NO: 971198 - DNA, 33 bp, Homo sapien
atgcaggccatagagatggtaaactaagtacca

SEQ ID NO: 971199 - DNA, 33 bp, Homo sapien
attttctgacagcctcgattttcattaatccct

SEQ ID NO: 971200 - DNA, 33 bp, Homo sapien
attttctgacagcctctattttcattaatccct

SEQ ID NO: 971201 - DNA, 33 bp, Homo sapien
aattgttaagaactggcagaaactgaaaagtca

SEQ ID NO: 971202 - DNA, 33 bp, Homo sapien
aattgttaagaactggtagaaactgaaaagtca

SEQ ID NO: 971203 - DNA, 33 bp, Homo sapien
agtcactttagtgcccaacaggagccaatcaac

SEQ ID NO: 971204 - DNA, 33 bp, Homo sapien
agtcactttagtgcccgacaggagccaatcaac

SEQ ID NO: 971205 - DNA, 33 bp, Homo sapien
gagagtttagtgagaaatacagctacataaaga

SEQ ID NO: 971206 - DNA, 33 bp, Homo sapien
gagagtttagtgagaagtacagctacataaaga

SEQ ID NO: 971207 - DNA, 33 bp, Homo sapien
agcatgttacaaagtactactgtggaagaccat

SEQ ID NO: 971208 - DNA, 33 bp, Homo sapien
agcatgttacaaagtattactgtggaagaccat

SEQ ID NO: 971209 - DNA, 33 bp, Homo sapien
agcactaaagtctaaccgccgaaatactccagc

SEQ ID NO: 971210 - DNA, 33 bp, Homo sapien
agcactaaagtctaactgccgaaatactccagc

SEQ ID NO: 971211 - DNA, 33 bp, Homo sapien
ggtggtgtgaaacagacatttgagagaatggaa

SEQ ID NO: 971212 - DNA, 33 bp, Homo sapien
ggtggtgtgaaacagatatttgagagaatggaa

SEQ ID NO: 971213 - DNA, 33 bp, Homo sapien
tttcagctcctgcttcactgtcatttcttcctg

SEQ ID NO: 971214 - DNA, 33 bp, Homo sapien
tttcagctcctgcttcgctgtcatttcttcctg

SEQ ID NO: 971215 - DNA, 33 bp, Homo sapien
gtctccgattatcacaacaggaatttcagtgcc

SEQ ID NO: 971216 - DNA, 33 bp, Homo sapien
gtctccgattatcacaccaggaatttcagtgcc

SEQ ID NO: 971217 - DNA, 33 bp, Homo sapien
gttcatctggttactaaggtagaggaaaagcaa

SEQ ID NO: 971218 - DNA, 33 bp, Homo sapien
gttcatctggttactacggtagaggaaaagcaa

SEQ ID NO: 971219 - DNA, 33 bp, Homo sapien
ccaaccattcttggacaaatcaccctcagtttt

SEQ ID NO: 971220 - DNA, 33 bp, Homo sapien
ccaaccattcttggactaatcaccctcagtttt

SEQ ID NO: 971221 - DNA, 33 bp, Homo sapien
aatgaacagttttcaaatacattgttatctcct

SEQ ID NO: 971222 - DNA, 33 bp, Homo sapien
aatgaacagttttcaagtacattgttatctcct

SEQ ID NO: 971223 - DNA, 33 bp, Homo sapien
tacatcttttttttgacaaatagccacatcatt

SEQ ID NO: 971224 - DNA, 33 bp, Homo sapien
tacatcttttttttgagaaatagccacatcatt

SEQ ID NO: 971225 - DNA, 33 bp, Homo sapien
aagagagtacgtagaaagagatgttagctggtc

SEQ ID NO: 971226 - DNA, 33 bp, Homo sapien
aagagagtacgtagaaggagatgttagctggtc

SEQ ID NO: 971227 - DNA, 33 bp, Homo sapien
ccttcacctccttcaacaagtatccagaagtgt

SEQ ID NO: 971228 - DNA, 33 bp, Homo sapien
ccttcacctccttcaagaagtatccagaagtgt

SEQ ID NO: 971229 - DNA, 33 bp, Homo sapien
agtacacacgaaaggaaaaatgtaaatgatcat

SEQ ID NO: 971230 - DNA, 33 bp, Homo sapien
agtacacacgaaaggataaatgtaaatgatcat

SEQ ID NO: 971231 - DNA, 33 bp, Homo sapien
ctactctttctcaagacaaattgttagtctcta

SEQ ID NO: 971232 - DNA, 33 bp, Homo sapien
ctactctttctcaagataaattgttagtctcta

SEQ ID NO: 971233 - DNA, 33 bp, Homo sapien
attgtatgtttcaaaaatgctaacagaatagat

SEQ ID NO: 971234 - DNA, 33 bp, Homo sapien
attgtatgtttcaaaactgctaacagaatagat

SEQ ID NO: 971235 - DNA, 33 bp, Homo sapien
catgggtcaggctaaacagttaaatacagaaat

SEQ ID NO: 971236 - DNA, 33 bp, Homo sapien
catgggtcaggctaaatagttaaatacagaaat

SEQ ID NO: 971237 - DNA, 33 bp, Homo sapien
gatacaggcatgaaggaacaggaaaactaaagt

SEQ ID NO: 971238 - DNA, 33 bp, Homo sapien
gatacaggcatgaagggacaggaaaactaaagt

SEQ ID NO: 971239 - DNA, 33 bp, Homo sapien
caaaatactgagcagaatagaccattgatctga

SEQ ID NO: 971240 - DNA, 33 bp, Homo sapien
caaaatactgagcagattagaccattgatctga

SEQ ID NO: 971241 - DNA, 33 bp, Homo sapien
tcagattcctgcacaccgtcatctgtctctacc

SEQ ID NO: 971242 - DNA, 33 bp, Homo sapien
tcagattcctgcacactgtcatctgtctctacc

SEQ ID NO: 971243 - DNA, 33 bp, Homo sapien
ttgtggtgggtgctagcagctattattcctata

SEQ ID NO: 971244 - DNA, 33 bp, Homo sapien
ttgtggtgggtgctagtagctattattcctata

SEQ ID NO: 971245 - DNA, 33 bp, Homo sapien
ataggcactgttaagaatacagctccaccactg

SEQ ID NO: 971246 - DNA, 33 bp, Homo sapien
ataggcactgttaagagtacagctccaccactg

SEQ ID NO: 971247 - DNA, 33 bp, Homo sapien
caactgactgacgttccaatgggaagagccggc

SEQ ID NO: 971248 - DNA, 33 bp, Homo sapien
caactgactgacgttctaatgggaagagccggc

SEQ ID NO: 971249 - DNA, 33 bp, Homo sapien
taaagccagcaatagtaactaacccaaagatct

SEQ ID NO: 971250 - DNA, 33 bp, Homo sapien
taaagccagcaatagtgactaacccaaagatct

SEQ ID NO: 971251 - DNA, 33 bp, Homo sapien
gaggaaaataattagaaggccagataatcaatt

SEQ ID NO: 971252 - DNA, 33 bp, Homo sapien
gaggaaaataattagagggccagataatcaatt

SEQ ID NO: 971253 - DNA, 33 bp, Homo sapien
catgttgtggatttaaagaccagaacagctgca

SEQ ID NO: 971254 - DNA, 33 bp, Homo sapien
catgttgtggatttaaggaccagaacagctgca

SEQ ID NO: 971255 - DNA, 33 bp, Homo sapien
cagcccagcagggatacagataagcgtgaggaa

SEQ ID NO: 971256 - DNA, 33 bp, Homo sapien
cagcccagcagggatatagataagcgtgaggaa

SEQ ID NO: 971257 - DNA, 33 bp, Homo sapien
tgaatccttcaaacaaccacatgaattttcatt

SEQ ID NO: 971258 - DNA, 33 bp, Homo sapien
tgaatccttcaaacaatcacatgaattttcatt

SEQ ID NO: 971259 - DNA, 33 bp, Homo sapien
agtttttcctttgacaacctatgtttattcaaa

SEQ ID NO: 971260 - DNA, 33 bp, Homo sapien
agtttttcctttgacatcctatgtttattcaaa

SEQ ID NO: 971261 - DNA, 33 bp, Homo sapien
aaaaaatctgatttggacagaactcattgctcc

SEQ ID NO: 971262 - DNA, 33 bp, Homo sapien
aaaaaatctgatttgggcagaactcattgctcc

SEQ ID NO: 971263 - DNA, 33 bp, Homo sapien
gttaacatcatatgagaatattcccttgtacct

SEQ ID NO: 971264 - DNA, 33 bp, Homo sapien
gttaacatcatatgaggatattcccttgtacct

SEQ ID NO: 971265 - DNA, 33 bp, Homo sapien
tttgggggcaatcgtgacaacactattgagcat

SEQ ID NO: 971266 - DNA, 33 bp, Homo sapien
tttgggggcaatcgtggcaacactattgagcat

SEQ ID NO: 971267 - DNA, 33 bp, Homo sapien
aacaagtcagaatcaactgtgctggtataagat

SEQ ID NO: 971268 - DNA, 33 bp, Homo sapien
aacaagtcagaatcaattgtgctggtataagat

SEQ ID NO: 971269 - DNA, 33 bp, Homo sapien
ggtaattgaattatctcagacacacttgaggta

SEQ ID NO: 971270 - DNA, 33 bp, Homo sapien
ggtaattgaattatcttagacacacttgaggta

SEQ ID NO: 971271 - DNA, 33 bp, Homo sapien
tttattctttttggggaatgtggagtcgtcatt

SEQ ID NO: 971272 - DNA, 33 bp, Homo sapien
tttattctttttgggggatgtggagtcgtcatt

SEQ ID NO: 971273 - DNA, 33 bp, Homo sapien
aaaacaaggcaatgggcattaatgaaccaaaag

SEQ ID NO: 971274 - DNA, 33 bp, Homo sapien
aaaacaaggcaatgggtattaatgaaccaaaag

SEQ ID NO: 971275 - DNA, 33 bp, Homo sapien
gtcttacatcaggcacagtacgcaggattttgt

SEQ ID NO: 971276 - DNA, 33 bp, Homo sapien
gtcttacatcaggcacggtacgcaggattttgt

SEQ ID NO: 971277 - DNA, 33 bp, Homo sapien
tctcaaagaaaacaggccaggagataaatcctc

SEQ ID NO: 971278 - DNA, 33 bp, Homo sapien
tctcaaagaaaacaggtcaggagataaatcctc

SEQ ID NO: 971279 - DNA, 33 bp, Homo sapien
agaccagcatcaatgggaatattgagaggtgac

SEQ ID NO: 971280 - DNA, 33 bp, Homo sapien
agaccagcatcaatggtaatattgagaggtgac

SEQ ID NO: 971281 - DNA, 33 bp, Homo sapien
gccgagtttgagtttgcaatatatctgacagtc

SEQ ID NO: 971282 - DNA, 33 bp, Homo sapien
gccgagtttgagtttggaatatatctgacagtc

SEQ ID NO: 971283 - DNA, 33 bp, Homo sapien
ggaatacagtatcatacagacatggttttttat

SEQ ID NO: 971284 - DNA, 33 bp, Homo sapien
ggaatacagtatcatagagacatggttttttat

SEQ ID NO: 971285 - DNA, 33 bp, Homo sapien
tcttgtacacaggagcaaattaggaactgatcc

SEQ ID NO: 971286 - DNA, 33 bp, Homo sapien
tcttgtacacaggagcgaattaggaactgatcc

SEQ ID NO: 971287 - DNA, 33 bp, Homo sapien
ctgtcacggaactgatcataagtccccacacga

SEQ ID NO: 971288 - DNA, 33 bp, Homo sapien
ctgtcacggaactgatgataagtccccacacga

SEQ ID NO: 971289 - DNA, 33 bp, Homo sapien
aaaagccgtgaatccactaagacaaattcaaga

SEQ ID NO: 971290 - DNA, 33 bp, Homo sapien
aaaagccgtgaatccattaagacaaattcaaga

SEQ ID NO: 971291 - DNA, 33 bp, Homo sapien
aggctgcagcccattcacaggcacccgaaagaa

SEQ ID NO: 971292 - DNA, 33 bp, Homo sapien
aggctgcagcccattcgcaggcacccgaaagaa

SEQ ID NO: 971293 - DNA, 33 bp, Homo sapien
ttctggacctgagtgccagaaggaggcccactg

SEQ ID NO: 971294 - DNA, 33 bp, Homo sapien
ttctggacctgagtgcgagaaggaggcccactg

SEQ ID NO: 971295 - DNA, 33 bp, Homo sapien
tataattggctaccacccgaggcttgggcttgc

SEQ ID NO: 971296 - DNA, 33 bp, Homo sapien
tataattggctaccactcgaggcttgggcttgc

SEQ ID NO: 971297 - DNA, 33 bp, Homo sapien
cttcccatggttttgcgaaccgtgtacctcagc

SEQ ID NO: 971298 - DNA, 33 bp, Homo sapien
cttcccatggttttgctaaccgtgtacctcagc

SEQ ID NO: 971299 - DNA, 33 bp, Homo sapien
tatggaggcctgccacactgatacattcacatc

SEQ ID NO: 971300 - DNA, 33 bp, Homo sapien
tatggaggcctgccacgctgatacattcacatc

SEQ ID NO: 971301 - DNA, 33 bp, Homo sapien
acaaaaatgagcctgcagaacgtgaatggtatt

SEQ ID NO: 971302 - DNA, 33 bp, Homo sapien
acaaaaatgagcctgcggaacgtgaatggtatt

SEQ ID NO: 971303 - DNA, 33 bp, Homo sapien
tggggcgattgggaaaagggttgttactaatca

SEQ ID NO: 971304 - DNA, 33 bp, Homo sapien
tggggcgattgggaaatgggttgttactaatca

SEQ ID NO: 971305 - DNA, 33 bp, Homo sapien
tattcctttgctacaaattataaagttccttta

SEQ ID NO: 971306 - DNA, 33 bp, Homo sapien
tattcctttgctacaatttataaagttccttta

SEQ ID NO: 971307 - DNA, 33 bp, Homo sapien
agaacaagtaacctgactaagagtgctggaagc

SEQ ID NO: 971308 - DNA, 33 bp, Homo sapien
agaacaagtaacctgattaagagtgctggaagc

SEQ ID NO: 971309 - DNA, 33 bp, Homo sapien
ggtaaatcattccttaagaaatttcacaacacc

SEQ ID NO: 971310 - DNA, 33 bp, Homo sapien
ggtaaatcattccttatgaaatttcacaacacc

SEQ ID NO: 971311 - DNA, 33 bp, Homo sapien
catgcctttgaccaaagaatgatcctcctctgt

SEQ ID NO: 971312 - DNA, 33 bp, Homo sapien
catgcctttgaccaaataatgatcctcctctgt

SEQ ID NO: 971313 - DNA, 33 bp, Homo sapien
aacaagaacaagaaaaagagagatcaatgaagg

SEQ ID NO: 971314 - DNA, 33 bp, Homo sapien
aacaagaacaagaaaaggagagatcaatgaagg

SEQ ID NO: 971315 - DNA, 33 bp, Homo sapien
gtatgtggcttcttgacagtgcctaataggatg

SEQ ID NO: 971316 - DNA, 33 bp, Homo sapien
gtatgtggcttcttgatagtgcctaataggatg

SEQ ID NO: 971317 - DNA, 33 bp, Homo sapien
tgatcacatgtaaccaatggactgctgacaaat

SEQ ID NO: 971318 - DNA, 33 bp, Homo sapien
tgatcacatgtaaccagtggactgctgacaaat

SEQ ID NO: 971319 - DNA, 33 bp, Homo sapien
cagtcatggtaaggggaagttatgcttcagatt

SEQ ID NO: 971320 - DNA, 33 bp, Homo sapien
cagtcatggtaagggggagttatgcttcagatt

SEQ ID NO: 971321 - DNA, 33 bp, Homo sapien
ttcatttttttgcatacccttccaaggcttctt

SEQ ID NO: 971322 - DNA, 33 bp, Homo sapien
ttcatttttttgcatatccttccaaggcttctt

SEQ ID NO: 971323 - DNA, 33 bp, Homo sapien
tcctgggttttcttcacagttgtactacctgtt

SEQ ID NO: 971324 - DNA, 33 bp, Homo sapien
tcctgggttttcttcatagttgtactacctgtt

SEQ ID NO: 971325 - DNA, 33 bp, Homo sapien
agacagaatctgcccaatggaccagcacagaga

SEQ ID NO: 971326 - DNA, 33 bp, Homo sapien
agacagaatctgcccagtggaccagcacagaga

SEQ ID NO: 971327 - DNA, 33 bp, Homo sapien
gagaggtagggaaaacagagaccatgaaagacc

SEQ ID NO: 971328 - DNA, 33 bp, Homo sapien
gagaggtagggaaaacggagaccatgaaagacc

SEQ ID NO: 971329 - DNA, 33 bp, Homo sapien
agggctaagttgattacctgtgctattaattct

SEQ ID NO: 971330 - DNA, 33 bp, Homo sapien
agggctaagttgattatctgtgctattaattct

SEQ ID NO: 971331 - DNA, 33 bp, Homo sapien
ctggcaagatgcaccacgattttgagttattat

SEQ ID NO: 971332 - DNA, 33 bp, Homo sapien
ctggcaagatgcaccatgattttgagttattat

SEQ ID NO: 971333 - DNA, 33 bp, Homo sapien
tggtcataaataggaaggaagaactcacacatg

SEQ ID NO: 971334 - DNA, 33 bp, Homo sapien
tggtcataaataggaatgaagaactcacacatg

SEQ ID NO: 971335 - DNA, 33 bp, Homo sapien
ttctccaaaaaagatgcaccaatgtccaacaat

SEQ ID NO: 971336 - DNA, 33 bp, Homo sapien
ttctccaaaaaagatgtaccaatgtccaacaat

SEQ ID NO: 971337 - DNA, 33 bp, Homo sapien
tagttttacattttgacgaactccaactcatct

SEQ ID NO: 971338 - DNA, 33 bp, Homo sapien
tagttttacattttgatgaactccaactcatct

SEQ ID NO: 971339 - DNA, 33 bp, Homo sapien
tcagaaataaacatagacataactctttgtgac

SEQ ID NO: 971340 - DNA, 33 bp, Homo sapien
tcagaaataaacataggcataactctttgtgac

SEQ ID NO: 971341 - DNA, 33 bp, Homo sapien
tagggttgatgttctccacagatgctccgacca

SEQ ID NO: 971342 - DNA, 33 bp, Homo sapien
tagggttgatgttctctacagatgctccgacca

SEQ ID NO: 971343 - DNA, 33 bp, Homo sapien
ttccaatataaatggccacttttcacaactctt

SEQ ID NO: 971344 - DNA, 33 bp, Homo sapien
ttccaatataaatggctacttttcacaactctt

SEQ ID NO: 971345 - DNA, 33 bp, Homo sapien
ctgaggaataatctcacctgaactgaaggaggc

SEQ ID NO: 971346 - DNA, 33 bp, Homo sapien
ctgaggaataatctcatctgaactgaaggaggc

SEQ ID NO: 971347 - DNA, 33 bp, Homo sapien
atgcatccacctagcaaccaattcttgatttct

SEQ ID NO: 971348 - DNA, 33 bp, Homo sapien
atgcatccacctagcacccaattcttgatttct

SEQ ID NO: 971349 - DNA, 33 bp, Homo sapien
aaagggatctcacttaacagctctgtcaaatgc

SEQ ID NO: 971350 - DNA, 33 bp, Homo sapien
aaagggatctcacttagcagctctgtcaaatgc

SEQ ID NO: 971351 - DNA, 33 bp, Homo sapien
gatagcttctttcatgccagaggaactattttg

SEQ ID NO: 971352 - DNA, 33 bp, Homo sapien
gatagcttctttcatgtcagaggaactattttg

SEQ ID NO: 971353 - DNA, 33 bp, Homo sapien
ttaacaacctccctaaaggctccctctccacat

SEQ ID NO: 971354 - DNA, 33 bp, Homo sapien
ttaacaacctccctaagggctccctctccacat

SEQ ID NO: 971355 - DNA, 33 bp, Homo sapien
gagtgtgtgacctatacggagaatgaaatgata

SEQ ID NO: 971356 - DNA, 33 bp, Homo sapien
gagtgtgtgacctatatggagaatgaaatgata

SEQ ID NO: 971357 - DNA, 33 bp, Homo sapien
gtagaaccagaaagaaaaaaggccagaggcata

SEQ ID NO: 971358 - DNA, 33 bp, Homo sapien
gtagaaccagaaagaacaaaggccagaggcata

SEQ ID NO: 971359 - DNA, 33 bp, Homo sapien
tattatgcctaaattaacaagatgaaccagaac

SEQ ID NO: 971360 - DNA, 33 bp, Homo sapien
tattatgcctaaattatcaagatgaaccagaac

SEQ ID NO: 971361 - DNA, 33 bp, Homo sapien
aacttctgttttcccactctacatcatgtttat

SEQ ID NO: 971362 - DNA, 33 bp, Homo sapien
aacttctgttttcccagtctacatcatgtttat

SEQ ID NO: 971363 - DNA, 33 bp, Homo sapien
tcccagagcatagaagaataattaacacaagat

SEQ ID NO: 971364 - DNA, 33 bp, Homo sapien
tcccagagcatagaagtataattaacacaagat

SEQ ID NO: 971365 - DNA, 33 bp, Homo sapien
cctggcaataattttccagtctggagctaatcc

SEQ ID NO: 971366 - DNA, 33 bp, Homo sapien
cctggcaataattttctagtctggagctaatcc

SEQ ID NO: 971367 - DNA, 33 bp, Homo sapien
tcaataattccaccaccgctcaagaattcacaa

SEQ ID NO: 971368 - DNA, 33 bp, Homo sapien
tcaataattccaccactgctcaagaattcacaa

SEQ ID NO: 971369 - DNA, 33 bp, Homo sapien
tgatgtttgtgatttgaaatctcaggaagccag

SEQ ID NO: 971370 - DNA, 33 bp, Homo sapien
tgatgtttgtgatttggaatctcaggaagccag

SEQ ID NO: 971371 - DNA, 33 bp, Homo sapien
agtcttggtcttaaaaatgcagagggctgatag

SEQ ID NO: 971372 - DNA, 33 bp, Homo sapien
agtcttggtcttaaaattgcagagggctgatag

SEQ ID NO: 971373 - DNA, 33 bp, Homo sapien
tcaaccttctgggcaccaatgatccttccacct

SEQ ID NO: 971374 - DNA, 33 bp, Homo sapien
tcaaccttctgggcacgaatgatccttccacct

SEQ ID NO: 971375 - DNA, 33 bp, Homo sapien
gaaaggaacatttaatcagttagacgtggtgtc

SEQ ID NO: 971376 - DNA, 33 bp, Homo sapien
gaaaggaacatttaattagttagacgtggtgtc

SEQ ID NO: 971377 - DNA, 33 bp, Homo sapien
acagccatgttccataaccatgttccatgttcc

SEQ ID NO: 971378 - DNA, 33 bp, Homo sapien
acagccatgttccatagccatgttccatgttcc

SEQ ID NO: 971379 - DNA, 33 bp, Homo sapien
gaaacaattgttaagccaataaatagccagcaa

SEQ ID NO: 971380 - DNA, 33 bp, Homo sapien
gaaacaattgttaagcgaataaatagccagcaa

SEQ ID NO: 971381 - DNA, 33 bp, Homo sapien
caccactcagtctataacctaatgcattccttg

SEQ ID NO: 971382 - DNA, 33 bp, Homo sapien
caccactcagtctatagcctaatgcattccttg

SEQ ID NO: 971383 - DNA, 33 bp, Homo sapien
ttcttgttctatactcactgattatatccagtt

SEQ ID NO: 971384 - DNA, 33 bp, Homo sapien
ttcttgttctatactccctgattatatccagtt

SEQ ID NO: 971385 - DNA, 33 bp, Homo sapien
caatgttggaacaaacaaatacgacattacaca

SEQ ID NO: 971386 - DNA, 33 bp, Homo sapien
caatgttggaacaaacgaatacgacattacaca

SEQ ID NO: 971387 - DNA, 33 bp, Homo sapien
attctcagcttacccaaaattatgatttaaaag

SEQ ID NO: 971388 - DNA, 33 bp, Homo sapien
attctcagcttacccacaattatgatttaaaag

SEQ ID NO: 971389 - DNA, 33 bp, Homo sapien
ctttcgactatcctaactgaacaagtctaagga

SEQ ID NO: 971390 - DNA, 33 bp, Homo sapien
ctttcgactatcctaattgaacaagtctaagga

SEQ ID NO: 971391 - DNA, 33 bp, Homo sapien
taggttttggaaggaaagacatctgtgtgttgc

SEQ ID NO: 971392 - DNA, 33 bp, Homo sapien
taggttttggaaggaaggacatctgtgtgttgc

SEQ ID NO: 971393 - DNA, 33 bp, Homo sapien
agtgatgctttatcccaatttttttcttctttt

SEQ ID NO: 971394 - DNA, 33 bp, Homo sapien
agtgatgctttatcccgatttttttcttctttt

SEQ ID NO: 971395 - DNA, 33 bp, Homo sapien
gaaaatttccaagagcagaatggctttttgagc

SEQ ID NO: 971396 - DNA, 33 bp, Homo sapien
gaaaatttccaagagcggaatggctttttgagc

SEQ ID NO: 971397 - DNA, 33 bp, Homo sapien
tccctcacaaagatctaaatgtgtaagcagatg

SEQ ID NO: 971398 - DNA, 33 bp, Homo sapien
tccctcacaaagatctgaatgtgtaagcagatg

SEQ ID NO: 971399 - DNA, 33 bp, Homo sapien
aaatgagcaatctgcccacagaaaggctgcgag

SEQ ID NO: 971400 - DNA, 33 bp, Homo sapien
aaatgagcaatctgcctacagaaaggctgcgag

SEQ ID NO: 971401 - DNA, 33 bp, Homo sapien
tttctcctttggaagaagaaattgcagtcttgt

SEQ ID NO: 971402 - DNA, 33 bp, Homo sapien
tttctcctttggaagaggaaattgcagtcttgt

SEQ ID NO: 971403 - DNA, 33 bp, Homo sapien
tatggtgagcatcagaatctcctcagctgtagc

SEQ ID NO: 971404 - DNA, 33 bp, Homo sapien
tatggtgagcatcagagtctcctcagctgtagc

SEQ ID NO: 971405 - DNA, 33 bp, Homo sapien
ttccaggcaaaagaagacagagtgctgtaccta

SEQ ID NO: 971406 - DNA, 33 bp, Homo sapien
ttccaggcaaaagaaggcagagtgctgtaccta

SEQ ID NO: 971407 - DNA, 33 bp, Homo sapien
catggtattctggcctaacagctttgtcctctt

SEQ ID NO: 971408 - DNA, 33 bp, Homo sapien
catggtattctggcctgacagctttgtcctctt

SEQ ID NO: 971409 - DNA, 33 bp, Homo sapien
gtcagaagtcaccgtacagaagaggacaaagct

SEQ ID NO: 971410 - DNA, 33 bp, Homo sapien
gtcagaagtcaccgtatagaagaggacaaagct

SEQ ID NO: 971411 - DNA, 33 bp, Homo sapien
agatgaaggtcctgaaaaagatcctgctttctc

SEQ ID NO: 971412 - DNA, 33 bp, Homo sapien
agatgaaggtcctgaagaagatcctgctttctc

SEQ ID NO: 971413 - DNA, 33 bp, Homo sapien
ccactgtacctggcccaaaattctaaaacttaa

SEQ ID NO: 971414 - DNA, 33 bp, Homo sapien
ccactgtacctggcccgaaattctaaaacttaa

SEQ ID NO: 971415 - DNA, 33 bp, Homo sapien
tacttagtgctttcatgatctgtctctgcaggg

SEQ ID NO: 971416 - DNA, 33 bp, Homo sapien
tacttagtgctttcattatctgtctctgcaggg

SEQ ID NO: 971417 - DNA, 33 bp, Homo sapien
gtaaacaaccagacttcggaatagttggacaga

SEQ ID NO: 971418 - DNA, 33 bp, Homo sapien
gtaaacaaccagactttggaatagttggacaga

SEQ ID NO: 971419 - DNA, 33 bp, Homo sapien
ttactttcgcaattacccagcttcacaacagct

SEQ ID NO: 971420 - DNA, 33 bp, Homo sapien
ttactttcgcaattactcagcttcacaacagct

SEQ ID NO: 971421 - DNA, 33 bp, Homo sapien
ccaggctagcatcaaacaataattttcataggt

SEQ ID NO: 971422 - DNA, 33 bp, Homo sapien
ccaggctagcatcaaataataattttcataggt

SEQ ID NO: 971423 - DNA, 33 bp, Homo sapien
ttcagatactgtcatacgtttgttttggtttat

SEQ ID NO: 971424 - DNA, 33 bp, Homo sapien
ttcagatactgtcatatgtttgttttggtttat

SEQ ID NO: 971425 - DNA, 33 bp, Homo sapien
ttttcttttcaaaatcacaacctgttcctaaaa

SEQ ID NO: 971426 - DNA, 33 bp, Homo sapien
ttttcttttcaaaatcgcaacctgttcctaaaa

SEQ ID NO: 971427 - DNA, 33 bp, Homo sapien
caatttcttctgaaaacgcgagtgtgggtggga

SEQ ID NO: 971428 - DNA, 33 bp, Homo sapien
caatttcttctgaaaatgcgagtgtgggtggga

SEQ ID NO: 971429 - DNA, 33 bp, Homo sapien
aaatgacagtagatgaacgatttcaacctagtt

SEQ ID NO: 971430 - DNA, 33 bp, Homo sapien
aaatgacagtagatgagcgatttcaacctagtt

SEQ ID NO: 971431 - DNA, 33 bp, Homo sapien
atttaatgaaagaacacattttgctgtcaacat

SEQ ID NO: 971432 - DNA, 33 bp, Homo sapien
atttaatgaaagaacatattttgctgtcaacat

SEQ ID NO: 971433 - DNA, 33 bp, Homo sapien
aaaacaccttatgtgacatggatcatttaaaat

SEQ ID NO: 971434 - DNA, 33 bp, Homo sapien
aaaacaccttatgtgagatggatcatttaaaat

SEQ ID NO: 971435 - DNA, 33 bp, Homo sapien
ttcccattaggataaactactcagacttcagca

SEQ ID NO: 971436 - DNA, 33 bp, Homo sapien
ttcccattaggataaattactcagacttcagca

SEQ ID NO: 971437 - DNA, 33 bp, Homo sapien
ggaatcttagtttcccaatcttgctcatgggca

SEQ ID NO: 971438 - DNA, 33 bp, Homo sapien
ggaatcttagtttcccgatcttgctcatgggca

SEQ ID NO: 971439 - DNA, 33 bp, Homo sapien
gccttcacttccttctcacctatacctgtcaac

SEQ ID NO: 971440 - DNA, 33 bp, Homo sapien
gccttcacttccttcttacctatacctgtcaac

SEQ ID NO: 971441 - DNA, 33 bp, Homo sapien
tctcctgtctggaacaactcgactctttcctgc

SEQ ID NO: 971442 - DNA, 33 bp, Homo sapien
tctcctgtctggaacagctcgactctttcctgc

SEQ ID NO: 971443 - DNA, 33 bp, Homo sapien
ccaagctcctgaacaccgggagttgccttgtag

SEQ ID NO: 971444 - DNA, 33 bp, Homo sapien
ccaagctcctgaacacggggagttgccttgtag

SEQ ID NO: 971445 - DNA, 33 bp, Homo sapien
gtcttcctctcagtcactacgcactgggatcca

SEQ ID NO: 971446 - DNA, 33 bp, Homo sapien
gtcttcctctcagtcagtacgcactgggatcca

SEQ ID NO: 971447 - DNA, 33 bp, Homo sapien
caagagtaaaagaaaacgtactaaatggatgta

SEQ ID NO: 971448 - DNA, 33 bp, Homo sapien
caagagtaaaagaaaatgtactaaatggatgta

SEQ ID NO: 971449 - DNA, 33 bp, Homo sapien
attaatatgcatgaaaactaactgggagtaaaa

SEQ ID NO: 971450 - DNA, 33 bp, Homo sapien
attaatatgcatgaaacctaactgggagtaaaa

SEQ ID NO: 971451 - DNA, 33 bp, Homo sapien
atacagaccttcttcactaggcttttaagggga

SEQ ID NO: 971452 - DNA, 33 bp, Homo sapien
atacagaccttcttcattaggcttttaagggga

SEQ ID NO: 971453 - DNA, 33 bp, Homo sapien
attagctatgatttgactatgaatagagacacc

SEQ ID NO: 971454 - DNA, 33 bp, Homo sapien
attagctatgatttgattatgaatagagacacc

SEQ ID NO: 971455 - DNA, 33 bp, Homo sapien
cagctcatgcggaatcaatgagctctctcacaa

SEQ ID NO: 971456 - DNA, 33 bp, Homo sapien
cagctcatgcggaatcgatgagctctctcacaa

SEQ ID NO: 971457 - DNA, 33 bp, Homo sapien
attgcagtcattcttacgccgttcacctgtgtg

SEQ ID NO: 971458 - DNA, 33 bp, Homo sapien
attgcagtcattcttatgccgttcacctgtgtg

SEQ ID NO: 971459 - DNA, 33 bp, Homo sapien
ccatcccttgagtcccagatccacatattctct

SEQ ID NO: 971460 - DNA, 33 bp, Homo sapien
ccatcccttgagtcccggatccacatattctct

SEQ ID NO: 971461 - DNA, 33 bp, Homo sapien
acagagcttgggagcaacttcctgaaaaacaac

SEQ ID NO: 971462 - DNA, 33 bp, Homo sapien
acagagcttgggagcagcttcctgaaaaacaac

SEQ ID NO: 971463 - DNA, 33 bp, Homo sapien
atttgatagaccaaaactggcatagatatattg

SEQ ID NO: 971464 - DNA, 33 bp, Homo sapien
atttgatagaccaaaagtggcatagatatattg

SEQ ID NO: 971465 - DNA, 33 bp, Homo sapien
atttatgcaaagagacagacacagataatccaa

SEQ ID NO: 971466 - DNA, 33 bp, Homo sapien
atttatgcaaagagaccgacacagataatccaa

SEQ ID NO: 971467 - DNA, 33 bp, Homo sapien
acttgactctgaggcccggagtaccaacacagg

SEQ ID NO: 971468 - DNA, 33 bp, Homo sapien
acttgactctgaggcctggagtaccaacacagg

SEQ ID NO: 971469 - DNA, 33 bp, Homo sapien
tagtggagcagtctgagcacatttggtttaaag

SEQ ID NO: 971470 - DNA, 33 bp, Homo sapien
tagtggagcagtctgatcacatttggtttaaag

SEQ ID NO: 971471 - DNA, 33 bp, Homo sapien
catccaaaaacaactaacaggtggtggatttaa

SEQ ID NO: 971472 - DNA, 33 bp, Homo sapien
catccaaaaacaactatcaggtggtggatttaa

SEQ ID NO: 971473 - DNA, 33 bp, Homo sapien
ttgaaagaacttatgacgctctcttttctaaga

SEQ ID NO: 971474 - DNA, 33 bp, Homo sapien
ttgaaagaacttatgatgctctcttttctaaga

SEQ ID NO: 971475 - DNA, 33 bp, Homo sapien
tttgtacagcaatcaacaggagatacaattaac

SEQ ID NO: 971476 - DNA, 33 bp, Homo sapien
tttgtacagcaatcaataggagatacaattaac

SEQ ID NO: 971477 - DNA, 33 bp, Homo sapien
gtattctttcaaacttaaagaaaaatgacggaa

SEQ ID NO: 971478 - DNA, 33 bp, Homo sapien
gtattctttcaaacttgaagaaaaatgacggaa

SEQ ID NO: 971479 - DNA, 33 bp, Homo sapien
ataagtgcataatccaacaacttgtgtcttccg

SEQ ID NO: 971480 - DNA, 33 bp, Homo sapien
ataagtgcataatccagcaacttgtgtcttccg

SEQ ID NO: 971481 - DNA, 33 bp, Homo sapien
acttgtccaatgtcacacaaaccttcggcaaag

SEQ ID NO: 971482 - DNA, 33 bp, Homo sapien
acttgtccaatgtcacgcaaaccttcggcaaag

SEQ ID NO: 971483 - DNA, 33 bp, Homo sapien
ttaaatatactttcaacgggttaatggaatcca

SEQ ID NO: 971484 - DNA, 33 bp, Homo sapien
ttaaatatactttcaaggggttaatggaatcca

SEQ ID NO: 971485 - DNA, 33 bp, Homo sapien
tcaggaagttgagataataacagtggctgtgga

SEQ ID NO: 971486 - DNA, 33 bp, Homo sapien
tcaggaagttgagatagtaacagtggctgtgga

SEQ ID NO: 971487 - DNA, 33 bp, Homo sapien
tcaagctcaaactcagccactaagaagtatgac

SEQ ID NO: 971488 - DNA, 33 bp, Homo sapien
tcaagctcaaactcagtcactaagaagtatgac

SEQ ID NO: 971489 - DNA, 33 bp, Homo sapien
gcatagctactgtagcaagatggcccttgaaaa

SEQ ID NO: 971490 - DNA, 33 bp, Homo sapien
gcatagctactgtagcgagatggcccttgaaaa

SEQ ID NO: 971491 - DNA, 33 bp, Homo sapien
ttgggctccactcactaaagttttggaagttac

SEQ ID NO: 971492 - DNA, 33 bp, Homo sapien
ttgggctccactcactgaagttttggaagttac

SEQ ID NO: 971493 - DNA, 33 bp, Homo sapien
atctcctaaatcacaactctgtttattagcgca

SEQ ID NO: 971494 - DNA, 33 bp, Homo sapien
atctcctaaatcacaattctgtttattagcgca

SEQ ID NO: 971495 - DNA, 33 bp, Homo sapien
tctttcaagattttgaccattctctcagattgt

SEQ ID NO: 971496 - DNA, 33 bp, Homo sapien
tctttcaagattttgagcattctctcagattgt

SEQ ID NO: 971497 - DNA, 33 bp, Homo sapien
tatttctttttcctccagacacgcccagccaaa

SEQ ID NO: 971498 - DNA, 33 bp, Homo sapien
tatttctttttcctccggacacgcccagccaaa

SEQ ID NO: 971499 - DNA, 33 bp, Homo sapien
atgaatgaggagagaactagccagatggaaacc

SEQ ID NO: 971500 - DNA, 33 bp, Homo sapien
atgaatgaggagagaagtagccagatggaaacc

SEQ ID NO: 971501 - DNA, 33 bp, Homo sapien
atagctataatgtctccaaagtgttcattatgc

SEQ ID NO: 971502 - DNA, 33 bp, Homo sapien
atagctataatgtctctaaagtgttcattatgc

SEQ ID NO: 971503 - DNA, 33 bp, Homo sapien; identical to SEQ ID NO: 971501

SEQ ID NO: 971504 - DNA, 33 bp, Homo sapien; identical to SEQ ID NO: 971502

SEQ ID NO: 971505 - DNA, 33 bp, Homo sapien
atataaatctgacaaacctggcataatgaacac

SEQ ID NO: 971506 - DNA, 33 bp, Homo sapien
atataaatctgacaaatctggcataatgaacac

SEQ ID NO: 971507 - DNA, 33 bp, Homo sapien
ctataatcaataggaactggcaccagagattga

SEQ ID NO: 971508 - DNA, 33 bp, Homo sapien
ctataatcaataggaattggcaccagagattga

SEQ ID NO: 971509 - DNA, 33 bp, Homo sapien
ctgttctgaaccaacgcatagcctctctcacta

SEQ ID NO: 971510 - DNA, 33 bp, Homo sapien
ctgttctgaaccaacgtatagcctctctcacta

SEQ ID NO: 971511 - DNA, 33 bp, Homo sapien
ttaaatcatattgtcacgtaggtagttctggaa

SEQ ID NO: 971512 - DNA, 33 bp, Homo sapien
ttaaatcatattgtcaggtaggtagttctggaa

SEQ ID NO: 971513 - DNA, 33 bp, Homo sapien
tgtctttgtgaacaaaatgcttcgctgtaaatg

SEQ ID NO: 971514 - DNA, 33 bp, Homo sapien
tgtctttgtgaacaaagtgcttcgctgtaaatg

SEQ ID NO: 971515 - DNA, 33 bp, Homo sapien
aagctttccttgcctaacttcaaagttttccat

SEQ ID NO: 971516 - DNA, 33 bp, Homo sapien
aagctttccttgcctagcttcaaagttttccat

SEQ ID NO: 971517 - DNA, 33 bp, Homo sapien
agtgatgacagaagccaaatgtattaatctcct

SEQ ID NO: 971518 - DNA, 33 bp, Homo sapien
agtgatgacagaagccgaatgtattaatctcct

SEQ ID NO: 971519 - DNA, 33 bp, Homo sapien
aatccttgctttgccactatcattgagacccca

SEQ ID NO: 971520 - DNA, 33 bp, Homo sapien
aatccttgctttgccattatcattgagacccca

SEQ ID NO: 971521 - DNA, 33 bp, Homo sapien
agatataacctagccccgctacagcacaatcaa

SEQ ID NO: 971522 - DNA, 33 bp, Homo sapien
agatataacctagccctgctacagcacaatcaa

SEQ ID NO: 971523 - DNA, 33 bp, Homo sapien
aaatattaagcaagtaaacaattggctacaata

SEQ ID NO: 971524 - DNA, 33 bp, Homo sapien
aaatattaagcaagtacacaattggctacaata

SEQ ID NO: 971525 - DNA, 33 bp, Homo sapien
ttgttgttcactgtcaataagttcagtcagcga

SEQ ID NO: 971526 - DNA, 33 bp, Homo sapien
ttgttgttcactgtcagtaagttcagtcagcga

SEQ ID NO: 971527 - DNA, 33 bp, Homo sapien
tttaaacctatttatccaaggcagaagttctta

SEQ ID NO: 971528 - DNA, 33 bp, Homo sapien
tttaaacctatttatctaaggcagaagttctta

SEQ ID NO: 971529 - DNA, 33 bp, Homo sapien
caggaatttagcttagcagtgtgcccaaagcaa

SEQ ID NO: 971530 - DNA, 33 bp, Homo sapien
caggaatttagcttagtagtgtgcccaaagcaa

SEQ ID NO: 971531 - DNA, 33 bp, Homo sapien
cacagtaagtagctgacatgaagtgatagcttt

SEQ ID NO: 971532 - DNA, 33 bp, Homo sapien
cacagtaagtagctgagatgaagtgatagcttt

SEQ ID NO: 971533 - DNA, 33 bp, Homo sapien
actggcagttggccaaccaaaattgaactcaga

SEQ ID NO: 971534 - DNA, 33 bp, Homo sapien
actggcagttggccaagcaaaattgaactcaga

SEQ ID NO: 971535 - DNA, 33 bp, Homo sapien
tttgtaagcattaccaaaattctagataaaacc

SEQ ID NO: 971536 - DNA, 33 bp, Homo sapien
tttgtaagcattaccacaattctagataaaacc

SEQ ID NO: 971537 - DNA, 33 bp, Homo sapien
tagtattatatagccaacgtttattacatgtgt

SEQ ID NO: 971538 - DNA, 33 bp, Homo sapien
tagtattatatagccagcgtttattacatgtgt

SEQ ID NO: 971539 - DNA, 33 bp, Homo sapien
gtttcccagtgcataaaacaatacattcatgga

SEQ ID NO: 971540 - DNA, 33 bp, Homo sapien
gtttcccagtgcataagacaatacattcatgga

SEQ ID NO: 971541 - DNA, 33 bp, Homo sapien
caagacaagccagaaaagttcaattaagtaaat

SEQ ID NO: 971542 - DNA, 33 bp, Homo sapien
caagacaagccagaaaggttcaattaagtaaat

SEQ ID NO: 971543 - DNA, 33 bp, Homo sapien
ttgaggacattttgacaagtatattgaaggaaa

SEQ ID NO: 971544 - DNA, 33 bp, Homo sapien
ttgaggacattttgacgagtatattgaaggaaa

SEQ ID NO: 971545 - DNA, 33 bp, Homo sapien
tttgggtctcatttacaaggggttttctgcaga

SEQ ID NO: 971546 - DNA, 33 bp, Homo sapien
tttgggtctcatttacgaggggttttctgcaga

SEQ ID NO: 971547 - DNA, 33 bp, Homo sapien
ctaactcatgagaccaatggaaaatgttcctga

SEQ ID NO: 971548 - DNA, 33 bp, Homo sapien
ctaactcatgagaccagtggaaaatgttcctga

SEQ ID NO: 971549 - DNA, 33 bp, Homo sapien
atgttagcacactcaaatgtgacccctggcaga

SEQ ID NO: 971550 - DNA, 33 bp, Homo sapien
atgttagcacactcaactgtgacccctggcaga

SEQ ID NO: 971551 - DNA, 33 bp, Homo sapien
agtagttgggcctagactcatgccaccacatcc

SEQ ID NO: 971552 - DNA, 33 bp, Homo sapien
agtagttgggcctagagtcatgccaccacatcc

SEQ ID NO: 971553 - DNA, 33 bp, Homo sapien
ctttatagttctgctccacaaagtacttaggga

SEQ ID NO: 971554 - DNA, 33 bp, Homo sapien
ctttatagttctgctctacaaagtacttaggga

SEQ ID NO: 971555 - DNA, 33 bp, Homo sapien
taatttgctttaagaacgcaggcagtgcttctg

SEQ ID NO: 971556 - DNA, 33 bp, Homo sapien
taatttgctttaagaatgcaggcagtgcttctg

SEQ ID NO: 971557 - DNA, 33 bp, Homo sapien
tatttttctgactgcaaaaatccaactaattta

SEQ ID NO: 971558 - DNA, 33 bp, Homo sapien
tatttttctgactgcagaaatccaactaattta

SEQ ID NO: 971559 - DNA, 33 bp, Homo sapien
acagttgtaggccataaaaagtcactttcaatg

SEQ ID NO: 971560 - DNA, 33 bp, Homo sapien
acagttgtaggccatacaaagtcactttcaatg

SEQ ID NO: 971561 - DNA, 33 bp, Homo sapien
gtaagagttgaggtaacaagaatggaggaaggg

SEQ ID NO: 971562 - DNA, 33 bp, Homo sapien
gtaagagttgaggtaagaagaatggaggaaggg

SEQ ID NO: 971563 - DNA, 33 bp, Homo sapien
tgtgacagtcccaccactggacaagacccctgg

SEQ ID NO: 971564 - DNA, 33 bp, Homo sapien
tgtgacagtcccaccattggacaagacccctgg

SEQ ID NO: 971565 - DNA, 33 bp, Homo sapien
accagctctctccgaactgccagatctacctct

SEQ ID NO: 971566 - DNA, 33 bp, Homo sapien
accagctctctccgaattgccagatctacctct

SEQ ID NO: 971567 - DNA, 33 bp, Homo sapien
tggttggtaatggctacgaagattctgtgaccc

SEQ ID NO: 971568 - DNA, 33 bp, Homo sapien
tggttggtaatggctatgaagattctgtgaccc

SEQ ID NO: 971569 - DNA, 33 bp, Homo sapien
tagcagatggcacaaaattgcatgcttaataaa

SEQ ID NO: 971570 - DNA, 33 bp, Homo sapien
tagcagatggcacaaagttgcatgcttaataaa

SEQ ID NO: 971571 - DNA, 33 bp, Homo sapien
aatttcttgaagaaaagtcaatctgacagtttt

SEQ ID NO: 971572 - DNA, 33 bp, Homo sapien
aatttcttgaagaaaattcaatctgacagtttt

SEQ ID NO: 971573 - DNA, 33 bp, Homo sapien
agtcagaaaagcccaactgttttcaatattaac

SEQ ID NO: 971574 - DNA, 33 bp, Homo sapien
agtcagaaaagcccaattgttttcaatattaac

SEQ ID NO: 971575 - DNA, 33 bp, Homo sapien
ctctgcaagaaaatagcaagaaagagcaagaaa

SEQ ID NO: 971576 - DNA, 33 bp, Homo sapien
ctctgcaagaaaatagtaagaaagagcaagaaa

SEQ ID NO: 971577 - DNA, 33 bp, Homo sapien
gctagcttcggcatcccgacaagtgttgaagag

SEQ ID NO: 971578 - DNA, 33 bp, Homo sapien
gctagcttcggcatcctgacaagtgttgaagag

SEQ ID NO: 971579 - DNA, 33 bp, Homo sapien
aagtgttgaagaggcactaatacagaacctgga

SEQ ID NO: 971580 - DNA, 33 bp, Homo sapien
aagtgttgaagaggcagtaatacagaacctgga

SEQ ID NO: 971581 - DNA, 33 bp, Homo sapien
ataaaatcgtgaggaaaggcaaacaaaatataa

SEQ ID NO: 971582 - DNA, 33 bp, Homo sapien
ataaaatcgtgaggaagggcaaacaaaatataa

SEQ ID NO: 971583 - DNA, 33 bp, Homo sapien
cttatctcaatgataaggaaatgatttttttgt

SEQ ID NO: 971584 - DNA, 33 bp, Homo sapien
cttatctcaatgataatgaaatgatttttttgt

SEQ ID NO: 971585 - DNA, 33 bp, Homo sapien
gacaaggtacagacagaaggtatagtatgccac

SEQ ID NO: 971586 - DNA, 33 bp, Homo sapien
gacaaggtacagacaggaggtatagtatgccac

SEQ ID NO: 971587 - DNA, 33 bp, Homo sapien
agtaaaaccctcagagcataattgccttcagag

SEQ ID NO: 971588 - DNA, 33 bp, Homo sapien
agtaaaaccctcagagtataattgccttcagag

SEQ ID NO: 971589 - DNA, 33 bp, Homo sapien
gaattgaaaggaacaaattagcagattagacag

SEQ ID NO: 971590 - DNA, 33 bp, Homo sapien
gaattgaaaggaacaacttagcagattagacag

SEQ ID NO: 971591 - DNA, 33 bp, Homo sapien
taaaggttcctcaaaacaaccaccatatgatca

SEQ ID NO: 971592 - DNA, 33 bp, Homo sapien
taaaggttcctcaaaataaccaccatatgatca

SEQ ID NO: 971593 - DNA, 33 bp, Homo sapien
gaaagttaagcagtgtcaaccatttactctttt

SEQ ID NO: 971594 - DNA, 33 bp, Homo sapien
gaaagttaagcagtgtgaaccatttactctttt

SEQ ID NO: 971595 - DNA, 33 bp, Homo sapien
acagataccaagaaaaactaaatcactcctctg

SEQ ID NO: 971596 - DNA, 33 bp, Homo sapien
acagataccaagaaaacctaaatcactcctctg

SEQ ID NO: 971597 - DNA, 33 bp, Homo sapien
gtcaaaaatgttgtacgggatatttctgtgtag

SEQ ID NO: 971598 - DNA, 33 bp, Homo sapien
gtcaaaaatgttgtactggatatttctgtgtag

SEQ ID NO: 971599 - DNA, 33 bp, Homo sapien
acacaggttggactacaagggcctgaaaaatct

SEQ ID NO: 971600 - DNA, 33 bp, Homo sapien
acacaggttggactaccagggcctgaaaaatct

SEQ ID NO: 971601 - DNA, 33 bp, Homo sapien
aagacagcagtcatgacataggttatctcataa

SEQ ID NO: 971602 - DNA, 33 bp, Homo sapien
aagacagcagtcatgatataggttatctcataa

SEQ ID NO: 971603 - DNA, 33 bp, Homo sapien
tatgaaagtctatgatcaagatgaccagatctg

SEQ ID NO: 971604 - DNA, 33 bp, Homo sapien
tatgaaagtctatgattaagatgaccagatctg

SEQ ID NO: 971605 - DNA, 33 bp, Homo sapien
tactatgatgatgttcactttcctgttctgtag

SEQ ID NO: 971606 - DNA, 33 bp, Homo sapien
tactatgatgatgttcgctttcctgttctgtag

SEQ ID NO: 971607 - DNA, 33 bp, Homo sapien
tgtcatatgcaagctaaaatgactaaaacagtc

SEQ ID NO: 971608 - DNA, 33 bp, Homo sapien
tgtcatatgcaagctagaatgactaaaacagtc

SEQ ID NO: 971609 - DNA, 33 bp, Homo sapien
aatggcaaggataaagcattgttggtttcagtc

SEQ ID NO: 971610 - DNA, 33 bp, Homo sapien
aatggcaaggataaagtattgttggtttcagtc

SEQ ID NO: 971611 - DNA, 33 bp, Homo sapien
ttacacaatgggaaacagttcaattcaataaga

SEQ ID NO: 971612 - DNA, 33 bp, Homo sapien
ttacacaatgggaaacggttcaattcaataaga

SEQ ID NO: 971613 - DNA, 33 bp, Homo sapien
gttcatcagtgctttacacttgtccttatagag

SEQ ID NO: 971614 - DNA, 33 bp, Homo sapien
gttcatcagtgctttatacttgtccttatagag

SEQ ID NO: 971615 - DNA, 33 bp, Homo sapien
caacttttctatatagacccctgtccacttgat

SEQ ID NO: 971616 - DNA, 33 bp, Homo sapien
caacttttctatatagtcccctgtccacttgat

SEQ ID NO: 971617 - DNA, 33 bp, Homo sapien
cagaatagtagataaacccatgttgataaaagt

SEQ ID NO: 971618 - DNA, 33 bp, Homo sapien
cagaatagtagataaatccatgttgataaaagt

SEQ ID NO: 971619 - DNA, 33 bp, Homo sapien
gtttgaggagtagaaaagaagttagtgttgtca

SEQ ID NO: 971620 - DNA, 33 bp, Homo sapien
gtttgaggagtagaaaggaagttagtgttgtca

SEQ ID NO: 971621 - DNA, 33 bp, Homo sapien
ttgatcccgagtgtatcagtttattttcacgct

SEQ ID NO: 971622 - DNA, 33 bp, Homo sapien
ttgatcccgagtgtattagtttattttcacgct

SEQ ID NO: 971623 - DNA, 33 bp, Homo sapien
gatacagtggaaagaacgaaaacttggtgatat

SEQ ID NO: 971624 - DNA, 33 bp, Homo sapien
gatacagtggaaagaatgaaaacttggtgatat

SEQ ID NO: 971625 - DNA, 33 bp, Homo sapien
gtttttgcattcctaaagacgaaaattctttaa

SEQ ID NO: 971626 - DNA, 33 bp, Homo sapien
gtttttgcattcctaaggacgaaaattctttaa

SEQ ID NO: 971627 - DNA, 33 bp, Homo sapien
ataaagtttaatagtacgctaacctcaagtcta

SEQ ID NO: 971628 - DNA, 33 bp, Homo sapien
ataaagtttaatagtatgctaacctcaagtcta

SEQ ID NO: 971629 - DNA, 33 bp, Homo sapien
cccctgctctagaacaacttataaacctaagag

SEQ ID NO: 971630 - DNA, 33 bp, Homo sapien
cccctgctctagaacagcttataaacctaagag

SEQ ID NO: 971631 - DNA, 33 bp, Homo sapien
ttgttatttcagaagacgtagtagactttttaa

SEQ ID NO: 971632 - DNA, 33 bp, Homo sapien
ttgttatttcagaagatgtagtagactttttaa

SEQ ID NO: 971633 - DNA, 33 bp, Homo sapien
atgcagtgtggccacaagatgcatagcaactac

SEQ ID NO: 971634 - DNA, 33 bp, Homo sapien
atgcagtgtggccacaggatgcatagcaactac

SEQ ID NO: 971635 - DNA, 33 bp, Homo sapien
gaaaattttgagtggcccttctaaatgtttacc

SEQ ID NO: 971636 - DNA, 33 bp, Homo sapien
gaaaattttgagtggcgcttctaaatgtttacc

SEQ ID NO: 971637 - DNA, 33 bp, Homo sapien
tggaaccaataattagaaagtcaggagaccgct

SEQ ID NO: 971638 - DNA, 33 bp, Homo sapien
tggaaccaataattagcaagtcaggagaccgct

SEQ ID NO: 971639 - DNA, 33 bp, Homo sapien
gtcacagcccatttcacgattttaaaagccttc

SEQ ID NO: 971640 - DNA, 33 bp, Homo sapien
gtcacagcccatttcatgattttaaaagccttc

SEQ ID NO: 971641 - DNA, 33 bp, Homo sapien
gtaacatgaagcattgaatcacaacaggcatca

SEQ ID NO: 971642 - DNA, 33 bp, Homo sapien
gtaacatgaagcattggatcacaacaggcatca

SEQ ID NO: 971643 - DNA, 33 bp, Homo sapien
tcagctttggagagaaccaacagtgggtctatt

SEQ ID NO: 971644 - DNA, 33 bp, Homo sapien
tcagctttggagagaatcaacagtgggtctatt

SEQ ID NO: 971645 - DNA, 33 bp, Homo sapien
gagccatgtggcatgtatcgtggcaatctttat

SEQ ID NO: 971646 - DNA, 33 bp, Homo sapien
gagccatgtggcatgtctcgtggcaatctttat

SEQ ID NO: 971647 - DNA, 33 bp, Homo sapien
tggcatgatgagcaaactcctactattatttat

SEQ ID NO: 971648 - DNA, 33 bp, Homo sapien
tggcatgatgagcaaattcctactattatttat

SEQ ID NO: 971649 - DNA, 33 bp, Homo sapien
ggaaaatgtgtacttccctgcagagcttaagat

SEQ ID NO: 971650 - DNA, 33 bp, Homo sapien
ggaaaatgtgtacttctctgcagagcttaagat

SEQ ID NO: 971651 - DNA, 33 bp, Homo sapien
gttcctgtgggtcggaatcagatgcaagcctct

SEQ ID NO: 971652 - DNA, 33 bp, Homo sapien
gttcctgtgggtcggagtcagatgcaagcctct

SEQ ID NO: 971653 - DNA, 33 bp, Homo sapien
caagagttagcatagaaagaagggcactgagga

SEQ ID NO: 971654 - DNA, 33 bp, Homo sapien
caagagttagcatagagagaagggcactgagga

SEQ ID NO: 971655 - DNA, 33 bp, Homo sapien
ctgctaatccacaaaccgttaccttctttatgg

SEQ ID NO: 971656 - DNA, 33 bp, Homo sapien
ctgctaatccacaaactgttaccttctttatgg

SEQ ID NO: 971657 - DNA, 33 bp, Homo sapien
catgacttgatgtgaaatgagcagtctaatcta

SEQ ID NO: 971658 - DNA, 33 bp, Homo sapien
catgacttgatgtgaagtgagcagtctaatcta

SEQ ID NO: 971659 - DNA, 33 bp, Homo sapien
ggaatatctctcataacgtcaatgtccactctc

SEQ ID NO: 971660 - DNA, 33 bp, Homo sapien
ggaatatctctcataatgtcaatgtccactctc

SEQ ID NO: 971661 - DNA, 33 bp, Homo sapien
ccaagttgagaatttacctgttcaagtagtttc

SEQ ID NO: 971662 - DNA, 33 bp, Homo sapien
ccaagttgagaatttatctgttcaagtagtttc

SEQ ID NO: 971663 - DNA, 33 bp, Homo sapien
gacgattaacatggacccttttgaagaatttgt

SEQ ID NO: 971664 - DNA, 33 bp, Homo sapien
gacgattaacatggactcttttgaagaatttgt

SEQ ID NO: 971665 - DNA, 33 bp, Homo sapien
aaacagtatcattacacggaccccgattctatt

SEQ ID NO: 971666 - DNA, 33 bp, Homo sapien
aaacagtatcattacatggaccccgattctatt

SEQ ID NO: 971667 - DNA, 33 bp, Homo sapien
atgtttctagggaaaacagtggcacaaaaatta

SEQ ID NO: 971668 - DNA, 33 bp, Homo sapien
atgtttctagggaaaatagtggcacaaaaatta

SEQ ID NO: 971669 - DNA, 33 bp, Homo sapien
ctgctttagctgaataccaggttcagtactttt

SEQ ID NO: 971670 - DNA, 33 bp, Homo sapien
ctgctttagctgaatatcaggttcagtactttt

SEQ ID NO: 971671 - DNA, 33 bp, Homo sapien
agctgcgaaatgtgtaaaagacttttatctgat

SEQ ID NO: 971672 - DNA, 33 bp, Homo sapien
agctgcgaaatgtgtagaagacttttatctgat

SEQ ID NO: 971673 - DNA, 33 bp, Homo sapien
actatatatacggctcagaacagagttttatat

SEQ ID NO: 971674 - DNA, 33 bp, Homo sapien
actatatatacggctcggaacagagttttatat

SEQ ID NO: 971675 - DNA, 33 bp, Homo sapien
caatgtgtttgggtgacagtgcagtaatggcag

SEQ ID NO: 971676 - DNA, 33 bp, Homo sapien
caatgtgtttgggtgatagtgcagtaatggcag

SEQ ID NO: 971677 - DNA, 33 bp, Homo sapien
tgtcctgcacactagcaaaagggtgatacaaca

SEQ ID NO: 971678 - DNA, 33 bp, Homo sapien
tgtcctgcacactagccaaagggtgatacaaca

SEQ ID NO: 971679 - DNA, 33 bp, Homo sapien
tccacaaaatggtgagaataactcataagactg

SEQ ID NO: 971680 - DNA, 33 bp, Homo sapien
tccacaaaatggtgaggataactcataagactg

SEQ ID NO: 971681 - DNA, 33 bp, Homo sapien
tggtattctattcaaaagtcatcattcttgttt

SEQ ID NO: 971682 - DNA, 33 bp, Homo sapien
tggtattctattcaaaggtcatcattcttgttt

SEQ ID NO: 971683 - DNA, 33 bp, Homo sapien
cctaaataagataaaacgatcgaactcatgctg

SEQ ID NO: 971684 - DNA, 33 bp, Homo sapien
cctaaataagataaaatgatcgaactcatgctg

SEQ ID NO: 971685 - DNA, 33 bp, Homo sapien
tatactatgctgcctcaatctggaataactagc

SEQ ID NO: 971686 - DNA, 33 bp, Homo sapien
tatactatgctgcctcgatctggaataactagc

SEQ ID NO: 971687 - DNA, 33 bp, Homo sapien
tattatggattcttaaatggggagatataataa

SEQ ID NO: 971688 - DNA, 33 bp, Homo sapien
tattatggattcttaagtggggagatataataa

SEQ ID NO: 971689 - DNA, 33 bp, Homo sapien
tgacacagtaagcccactgaagaattaagaagt

SEQ ID NO: 971690 - DNA, 33 bp, Homo sapien
tgacacagtaagcccattgaagaattaagaagt

SEQ ID NO: 971691 - DNA, 33 bp, Homo sapien
aaggctttgaaatccccgacagtgggcctgctg

SEQ ID NO: 971692 - DNA, 33 bp, Homo sapien
aaggctttgaaatccctgacagtgggcctgctg

SEQ ID NO: 971693 - DNA, 33 bp, Homo sapien
atgcatgccagcagaaaggagagaaatgcccag

SEQ ID NO: 971694 - DNA, 33 bp, Homo sapien
atgcatgccagcagaagggagagaaatgcccag

SEQ ID NO: 971695 - DNA, 33 bp, Homo sapien
ggccaacttcaacatccacaaatactgtcttta

SEQ ID NO: 971696 - DNA, 33 bp, Homo sapien
ggccaacttcaacatctacaaatactgtcttta

SEQ ID NO: 971697 - DNA, 33 bp, Homo sapien
atggatcacaagatgaataatgctagctattga

SEQ ID NO: 971698 - DNA, 33 bp, Homo sapien
atggatcacaagatgagtaatgctagctattga

SEQ ID NO: 971699 - DNA, 33 bp, Homo sapien
acagcttgcccaagacaagatcacacagacaga

SEQ ID NO: 971700 - DNA, 33 bp, Homo sapien
acagcttgcccaagacgagatcacacagacaga

SEQ ID NO: 971701 - DNA, 33 bp, Homo sapien
taacatcttgatttcagatatcaggcctctaga

SEQ ID NO: 971702 - DNA, 33 bp, Homo sapien
taacatcttgatttcatatatcaggcctctaga

SEQ ID NO: 971703 - DNA, 33 bp, Homo sapien
tttacttatagaaccacgcttgcctttctgtaa

SEQ ID NO: 971704 - DNA, 33 bp, Homo sapien
tttacttatagaaccatgcttgcctttctgtaa

SEQ ID NO: 971705 - DNA, 33 bp, Homo sapien
aataaacccatgcactgacagtcaattgacctt

SEQ ID NO: 971706 - DNA, 33 bp, Homo sapien
aataaacccatgcacttacagtcaattgacctt

SEQ ID NO: 971707 - DNA, 33 bp, Homo sapien
gaattattgctcaatacgtgtgtttgtgaggag

SEQ ID NO: 971708 - DNA, 33 bp, Homo sapien
gaattattgctcaatatgtgtgtttgtgaggag

SEQ ID NO: 971709 - DNA, 33 bp, Homo sapien
tgctgaatgcttcttcaacaacagcagtatgtc

SEQ ID NO: 971710 - DNA, 33 bp, Homo sapien
tgctgaatgcttcttccacaacagcagtatgtc

SEQ ID NO: 971711 - DNA, 33 bp, Homo sapien
gtgttagaatactttacgttgtctcctcttcgt

SEQ ID NO: 971712 - DNA, 33 bp, Homo sapien
gtgttagaatactttatgttgtctcctcttcgt

SEQ ID NO: 971713 - DNA, 33 bp, Homo sapien
tgccaagtaattttggcactccttctattcatt

SEQ ID NO: 971714 - DNA, 33 bp, Homo sapien
tgccaagtaattttggtactccttctattcatt

SEQ ID NO: 971715 - DNA, 33 bp, Homo sapien
ctgaggactaggtaaaagaggccactgagagag

SEQ ID NO: 971716 - DNA, 33 bp, Homo sapien
ctgaggactaggtaaaggaggccactgagagag

SEQ ID NO: 971717 - DNA, 33 bp, Homo sapien
ctaggtttctctccacaagcttcatttcaggat

SEQ ID NO: 971718 - DNA, 33 bp, Homo sapien
ctaggtttctctccacgagcttcatttcaggat

SEQ ID NO: 971719 - DNA, 33 bp, Homo sapien
cttaacgtactggtaaccatgtgcccagaccct

SEQ ID NO: 971720 - DNA, 33 bp, Homo sapien
cttaacgtactggtaatcatgtgcccagaccct

SEQ ID NO: 971721 - DNA, 33 bp, Homo sapien
atagtcacagatacgaatcaaatactttcctga

SEQ ID NO: 971722 - DNA, 33 bp, Homo sapien
atagtcacagatacgagtcaaatactttcctga

SEQ ID NO: 971723 - DNA, 33 bp, Homo sapien
tttccttcaacagcagaagtggcttttggagat

SEQ ID NO: 971724 - DNA, 33 bp, Homo sapien
tttccttcaacagcaggagtggcttttggagat

SEQ ID NO: 971725 - DNA, 33 bp, Homo sapien
gtaagcaaatgtgcccagaggaatagctaagga

SEQ ID NO: 971726 - DNA, 33 bp, Homo sapien
gtaagcaaatgtgcccggaggaatagctaagga

SEQ ID NO: 971727 - DNA, 33 bp, Homo sapien
gttctgggagggcctaaaactacagggttaagg

SEQ ID NO: 971728 - DNA, 33 bp, Homo sapien
gttctgggagggcctacaactacagggttaagg

SEQ ID NO: 971729 - DNA, 33 bp, Homo sapien
ttttccatcttccagcagagttccttatataaa

SEQ ID NO: 971730 - DNA, 33 bp, Homo sapien
ttttccatcttccagcggagttccttatataaa

SEQ ID NO: 971731 - DNA, 33 bp, Homo sapien
gttctctcacaaataacgcgccgattttttgtc

SEQ ID NO: 971732 - DNA, 33 bp, Homo sapien
gttctctcacaaataatgcgccgattttttgtc

SEQ ID NO: 971733 - DNA, 33 bp, Homo sapien
ttgccctgctatatcactctgcattggaactaa

SEQ ID NO: 971734 - DNA, 33 bp, Homo sapien
ttgccctgctatatcagtctgcattggaactaa

SEQ ID NO: 971735 - DNA, 33 bp, Homo sapien
tcagcatggggtaaaaacggtccttcctgagtt

SEQ ID NO: 971736 - DNA, 33 bp, Homo sapien
tcagcatggggtaaaagcggtccttcctgagtt

SEQ ID NO: 971737 - DNA, 33 bp, Homo sapien
aagggacttagctgtcacactaatttttaaatt

SEQ ID NO: 971738 - DNA, 33 bp, Homo sapien
aagggacttagctgtcgcactaatttttaaatt

SEQ ID NO: 971739 - DNA, 33 bp, Homo sapien
tgggtcttcctataaacataataatgtgcagaa

SEQ ID NO: 971740 - DNA, 33 bp, Homo sapien
tgggtcttcctataaagataataatgtgcagaa

SEQ ID NO: 971741 - DNA, 33 bp, Homo sapien
tacacagacagtaagcacctaaagagacacaca

SEQ ID NO: 971742 - DNA, 33 bp, Homo sapien
tacacagacagtaagcgcctaaagagacacaca

SEQ ID NO: 971743 - DNA, 33 bp, Homo sapien
taccgcttatggcaggaaagttaaaggaggctt

SEQ ID NO: 971744 - DNA, 33 bp, Homo sapien
taccgcttatggcaggcaagttaaaggaggctt

SEQ ID NO: 971745 - DNA, 33 bp, Homo sapien
actttgtgaattgttacgtgtaggctgttgtat

SEQ ID NO: 971746 - DNA, 33 bp, Homo sapien
actttgtgaattgttatgtgtaggctgttgtat

SEQ ID NO: 971747 - DNA, 33 bp, Homo sapien
aaggattgaggtaacaggttggacagatagata

SEQ ID NO: 971748 - DNA, 33 bp, Homo sapien
aaggattgaggtaacatgttggacagatagata

SEQ ID NO: 971749 - DNA, 33 bp, Homo sapien
gatctctctgaattacactgttgattactttct

SEQ ID NO: 971750 - DNA, 33 bp, Homo sapien
gatctctctgaattacgctgttgattactttct

SEQ ID NO: 971751 - DNA, 33 bp, Homo sapien
gtttggatcctatttaccttcctattacatcaa

SEQ ID NO: 971752 - DNA, 33 bp, Homo sapien
gtttggatcctatttatcttcctattacatcaa

SEQ ID NO: 971753 - DNA, 33 bp, Homo sapien
tgcctccctcaaatcaaaggccaatctgtcatt

SEQ ID NO: 971754 - DNA, 33 bp, Homo sapien
tgcctccctcaaatcacaggccaatctgtcatt

SEQ ID NO: 971755 - DNA, 33 bp, Homo sapien
tatatttacttaaatcacctgccatagaaattc

SEQ ID NO: 971756 - DNA, 33 bp, Homo sapien
tatatttacttaaatcgcctgccatagaaattc

SEQ ID NO: 971757 - DNA, 33 bp, Homo sapien
gaagcctacttccaaacgccacagctggaacca

SEQ ID NO: 971758 - DNA, 33 bp, Homo sapien
gaagcctacttccaaatgccacagctggaacca

SEQ ID NO: 971759 - DNA, 33 bp, Homo sapien
caaccaagaagaacagcacccagtggtagataa

SEQ ID NO: 971760 - DNA, 33 bp, Homo sapien
caaccaagaagaacaggacccagtggtagataa

SEQ ID NO: 971761 - DNA, 33 bp, Homo sapien
accacagagatgggtacgaaagaaaaacattgg

SEQ ID NO: 971762 - DNA, 33 bp, Homo sapien
accacagagatgggtatgaaagaaaaacattgg

SEQ ID NO: 971763 - DNA, 33 bp, Homo sapien
ttttcctacagacttactaaaaactttgacaaa

SEQ ID NO: 971764 - DNA, 33 bp, Homo sapien
ttttcctacagacttattaaaaactttgacaaa

SEQ ID NO: 971765 - DNA, 33 bp, Homo sapien
tgaaggtgaagaaaagcaaattaggtgatagga

SEQ ID NO: 971766 - DNA, 33 bp, Homo sapien
tgaaggtgaagaaaaggaaattaggtgatagga

SEQ ID NO: 971767 - DNA, 33 bp, Homo sapien
taaggcatttctaaaccagtagcagaggaaaaa

SEQ ID NO: 971768 - DNA, 33 bp, Homo sapien
taaggcatttctaaactagtagcagaggaaaaa

SEQ ID NO: 971769 - DNA, 33 bp, Homo sapien
atacagtgtatatttcaattctatggctaaagt

SEQ ID NO: 971770 - DNA, 33 bp, Homo sapien
atacagtgtatatttcgattctatggctaaagt

SEQ ID NO: 971771 - DNA, 33 bp, Homo sapien
tcgcagtctgagcaataagtatataacctgcaa

SEQ ID NO: 971772 - DNA, 33 bp, Homo sapien
tcgcagtctgagcaatgagtatataacctgcaa

SEQ ID NO: 971773 - DNA, 33 bp, Homo sapien
ctggctatcagtccacagtaacttattctgtgt

SEQ ID NO: 971774 - DNA, 33 bp, Homo sapien
ctggctatcagtccaccgtaacttattctgtgt

SEQ ID NO: 971775 - DNA, 33 bp, Homo sapien
tggtgctctattgctaggaaccaccagtttcac

SEQ ID NO: 971776 - DNA, 33 bp, Homo sapien
tggtgctctattgctatgaaccaccagtttcac

SEQ ID NO: 971777 - DNA, 33 bp, Homo sapien
catggtggtaggtcacaggcattgagagaagac

SEQ ID NO: 971778 - DNA, 33 bp, Homo sapien
catggtggtaggtcactggcattgagagaagac

SEQ ID NO: 971779 - DNA, 33 bp, Homo sapien
ttgggcctcaggtgcacgtgagcttccattttt

SEQ ID NO: 971780 - DNA, 33 bp, Homo sapien
ttgggcctcaggtgcatgtgagcttccattttt

SEQ ID NO: 971781 - DNA, 33 bp, Homo sapien
gaggtctgtgtcccataaaggttgagcactcct

SEQ ID NO: 971782 - DNA, 33 bp, Homo sapien
gaggtctgtgtcccatgaaggttgagcactcct

SEQ ID NO: 971783 - DNA, 33 bp, Homo sapien
gagcactcctggcctacgtaaaagtgaattatc

SEQ ID NO: 971784 - DNA, 33 bp, Homo sapien
gagcactcctggcctatgtaaaagtgaattatc

SEQ ID NO: 971785 - DNA, 33 bp, Homo sapien
gaggataatcaaatcaagtgtatattcatttta

SEQ ID NO: 971786 - DNA, 33 bp, Homo sapien
gaggataatcaaatcaggtgtatattcatttta

SEQ ID NO: 971787 - DNA, 33 bp, Homo sapien
cctactagcataaggagattagagttttcaggg

SEQ ID NO: 971788 - DNA, 33 bp, Homo sapien
cctactagcataaggatattagagttttcaggg

SEQ ID NO: 971789 - DNA, 33 bp, Homo sapien
tcagattaatcattcacagagagctataaaaca

SEQ ID NO: 971790 - DNA, 33 bp, Homo sapien
tcagattaatcattcagagagagctataaaaca

SEQ ID NO: 971791 - DNA, 33 bp, Homo sapien
attgtttcatcagttacatcttgcctgctggtc

SEQ ID NO: 971792 - DNA, 33 bp, Homo sapien
attgtttcatcagttatatcttgcctgctggtc

SEQ ID NO: 971793 - DNA, 33 bp, Homo sapien
aaattataaggtgtacaaaactattctattaca

SEQ ID NO: 971794 - DNA, 33 bp, Homo sapien
aaattataaggtgtacgaaactattctattaca

SEQ ID NO: 971795 - DNA, 33 bp, Homo sapien
acctgttgtaagtccagcagctctcaaatgaga

SEQ ID NO: 971796 - DNA, 33 bp, Homo sapien
acctgttgtaagtccatcagctctcaaatgaga

SEQ ID NO: 971797 - DNA, 33 bp, Homo sapien
tatttagccaattttcacatacaggtagttagc

SEQ ID NO: 971798 - DNA, 33 bp, Homo sapien
tatttagccaattttcccatacaggtagttagc

SEQ ID NO: 971799 - DNA, 33 bp, Homo sapien
tgagtttgtcactaaaatactagaactacccat

SEQ ID NO: 971800 - DNA, 33 bp, Homo sapien
tgagtttgtcactaaagtactagaactacccat

SEQ ID NO: 971801 - DNA, 33 bp, Homo sapien
tatattttcaagtttaaaagtgatcagtctaca

SEQ ID NO: 971802 - DNA, 33 bp, Homo sapien
tatattttcaagtttagaagtgatcagtctaca

SEQ ID NO: 971803 - DNA, 33 bp, Homo sapien
attttttaaaagccaccacgatatattttcaag

SEQ ID NO: 971804 - DNA, 33 bp, Homo sapien
attttttaaaagccacgacgatatattttcaag

SEQ ID NO: 971805 - DNA, 33 bp, Homo sapien
acttattatccaatgaactccttctttttgcca

SEQ ID NO: 971806 - DNA, 33 bp, Homo sapien
acttattatccaatgagctccttctttttgcca

SEQ ID NO: 971807 - DNA, 33 bp, Homo sapien
aggggattagacttgaagaagaatagtagcaga

SEQ ID NO: 971808 - DNA, 33 bp, Homo sapien
aggggattagacttgaggaagaatagtagcaga

SEQ ID NO: 971809 - DNA, 33 bp, Homo sapien
aacttgttgatagggaggattccttttggtaca

SEQ ID NO: 971810 - DNA, 33 bp, Homo sapien
aacttgttgatagggatgattccttttggtaca

SEQ ID NO: 971811 - DNA, 33 bp, Homo sapien
atgtattcaactgccacattttgactcttgact

SEQ ID NO: 971812 - DNA, 33 bp, Homo sapien
atgtattcaactgccatattttgactcttgact

SEQ ID NO: 971813 - DNA, 33 bp, Homo sapien
gtgacttttgctgtacactgtaaggcagtagag

SEQ ID NO: 971814 - DNA, 33 bp, Homo sapien
gtgacttttgctgtaccctgtaaggcagtagag

SEQ ID NO: 971815 - DNA, 33 bp, Homo sapien
aatccttctcatgcccacaaggccttctactac

SEQ ID NO: 971816 - DNA, 33 bp, Homo sapien
aatccttctcatgcccgcaaggccttctactac

SEQ ID NO: 971817 - DNA, 33 bp, Homo sapien
aacagcattgtttctcaaagccgtaagtctcac

SEQ ID NO: 971818 - DNA, 33 bp, Homo sapien
aacagcattgtttctccaagccgtaagtctcac

SEQ ID NO: 971819 - DNA, 33 bp, Homo sapien
tcatgcacaccatgagccatagaactgttcctg

SEQ ID NO: 971820 - DNA, 33 bp, Homo sapien
tcatgcacaccatgagtcatagaactgttcctg

SEQ ID NO: 971821 - DNA, 33 bp, Homo sapien
tttatacctgggtgaacggggcacacctccact

SEQ ID NO: 971822 - DNA, 33 bp, Homo sapien
tttatacctgggtgaatggggcacacctccact

SEQ ID NO: 971823 - DNA, 33 bp, Homo sapien
acactcaattctcaatgagtactgtcatatcaa

SEQ ID NO: 971824 - DNA, 33 bp, Homo sapien
acactcaattctcaattagtactgtcatatcaa

SEQ ID NO: 971825 - DNA, 33 bp, Homo sapien
gtcatatcaaaaatcacaaaagacttaaagtag

SEQ ID NO: 971826 - DNA, 33 bp, Homo sapien
gtcatatcaaaaatcagaaaagacttaaagtag

SEQ ID NO: 971827 - DNA, 33 bp, Homo sapien
attttaacctgacttgcagcaatggagtgggct

SEQ ID NO: 971828 - DNA, 33 bp, Homo sapien
attttaacctgacttgtagcaatggagtgggct

SEQ ID NO: 971829 - DNA, 33 bp, Homo sapien
ttttgtcattagtctacataagttactaacatc

SEQ ID NO: 971830 - DNA, 33 bp, Homo sapien
ttttgtcattagtctatataagttactaacatc

SEQ ID NO: 971831 - DNA, 33 bp, Homo sapien
atactacttccaagaacttaaaatgctttcaga

SEQ ID NO: 971832 - DNA, 33 bp, Homo sapien
atactacttccaagaatttaaaatgctttcaga

SEQ ID NO: 971833 - DNA, 33 bp, Homo sapien
tgatttacttggtcagaccctaagtcctatgtg

SEQ ID NO: 971834 - DNA, 33 bp, Homo sapien
tgatttacttggtcaggccctaagtcctatgtg

SEQ ID NO: 971835 - DNA, 33 bp, Homo sapien
cattcaaaaagtagagaatggataaggtgacca

SEQ ID NO: 971836 - DNA, 33 bp, Homo sapien
cattcaaaaagtagaggatggataaggtgacca

SEQ ID NO: 971837 - DNA, 33 bp, Homo sapien
attgatattctgggacaataaaacactcagaaa

SEQ ID NO: 971838 - DNA, 33 bp, Homo sapien
attgatattctgggacgataaaacactcagaaa

SEQ ID NO: 971839 - DNA, 33 bp, Homo sapien
agcttctttcattgtaaacacagtgaatctaca

SEQ ID NO: 971840 - DNA, 33 bp, Homo sapien
agcttctttcattgtatacacagtgaatctaca

SEQ ID NO: 971841 - DNA, 33 bp, Homo sapien
tgggttatacatccacggcttttctcagtctgt

SEQ ID NO: 971842 - DNA, 33 bp, Homo sapien
tgggttatacatccactgcttttctcagtctgt

SEQ ID NO: 971843 - DNA, 33 bp, Homo sapien
tttctacccgtcttgaatacatgaaaaattatt

SEQ ID NO: 971844 - DNA, 33 bp, Homo sapien
tttctacccgtcttgactacatgaaaaattatt

SEQ ID NO: 971845 - DNA, 33 bp, Homo sapien
attgttgcataaagtacgaaagtggaaaaaagc

SEQ ID NO: 971846 - DNA, 33 bp, Homo sapien
attgttgcataaagtatgaaagtggaaaaaagc

SEQ ID NO: 971847 - DNA, 33 bp, Homo sapien
gcaaaaatccaacaaaatgcagtattcctaaat

SEQ ID NO: 971848 - DNA, 33 bp, Homo sapien
gcaaaaatccaacaaagtgcagtattcctaaat

SEQ ID NO: 971849 - DNA, 33 bp, Homo sapien
aactgaatgtctaccaatattttgtgaaatgtt

SEQ ID NO: 971850 - DNA, 33 bp, Homo sapien
aactgaatgtctaccagtattttgtgaaatgtt

SEQ ID NO: 971851 - DNA, 33 bp, Homo sapien
aaagccaccatataccacattctagctatgtca

SEQ ID NO: 971852 - DNA, 33 bp, Homo sapien
aaagccaccatataccgcattctagctatgtca

SEQ ID NO: 971853 - DNA, 33 bp, Homo sapien
acaaatatttatcatgcatctagtatgtgccag

SEQ ID NO: 971854 - DNA, 33 bp, Homo sapien
acaaatatttatcatgtatctagtatgtgccag

SEQ ID NO: 971855 - DNA, 33 bp, Homo sapien
atgtatgggaatgagagcacatgggagaagatg

SEQ ID NO: 971856 - DNA, 33 bp, Homo sapien
atgtatgggaatgagatcacatgggagaagatg

SEQ ID NO: 971857 - DNA, 33 bp, Homo sapien
ttgacatttataaagacggtctggtagtgtggg

SEQ ID NO: 971858 - DNA, 33 bp, Homo sapien
ttgacatttataaagatggtctggtagtgtggg

SEQ ID NO: 971859 - DNA, 33 bp, Homo sapien
ggtgctctgtacactgaataaattgaggatttt

SEQ ID NO: 971860 - DNA, 33 bp, Homo sapien
ggtgctctgtacactggataaattgaggatttt

SEQ ID NO: 971861 - DNA, 33 bp, Homo sapien
ctccttgggaactccacgtagctcatagttttt

SEQ ID NO: 971862 - DNA, 33 bp, Homo sapien
ctccttgggaactccatgtagctcatagttttt

SEQ ID NO: 971863 - DNA, 33 bp, Homo sapien
caaagattatcaaagcccgaatccataaagcag

SEQ ID NO: 971864 - DNA, 33 bp, Homo sapien
caaagattatcaaagctcgaatccataaagcag

SEQ ID NO: 971865 - DNA, 33 bp, Homo sapien
ataggtgctgttagaaaacaatgtaactgagga

SEQ ID NO: 971866 - DNA, 33 bp, Homo sapien
ataggtgctgttagaacacaatgtaactgagga

SEQ ID NO: 971867 - DNA, 33 bp, Homo sapien
tcaaatggtccatgtacgactggtgacagatac

SEQ ID NO: 971868 - DNA, 33 bp, Homo sapien
tcaaatggtccatgtatgactggtgacagatac

SEQ ID NO: 971869 - DNA, 33 bp, Homo sapien
gactggacagttcttacggtcagagatatcact

SEQ ID NO: 971870 - DNA, 33 bp, Homo sapien
gactggacagttcttatggtcagagatatcact

SEQ ID NO: 971871 - DNA, 33 bp, Homo sapien
cttactttgtggaaaaatttgacatatgtttga

SEQ ID NO: 971872 - DNA, 33 bp, Homo sapien
cttactttgtggaaaattttgacatatgtttga

SEQ ID NO: 971873 - DNA, 33 bp, Homo sapien
gtctgtgttactgaaagagactccacagggcat

SEQ ID NO: 971874 - DNA, 33 bp, Homo sapien
gtctgtgttactgaaatagactccacagggcat

SEQ ID NO: 971875 - DNA, 33 bp, Homo sapien
tgtggaccctgggataacctaggatgcatgagt

SEQ ID NO: 971876 - DNA, 33 bp, Homo sapien
tgtggaccctgggatagcctaggatgcatgagt

SEQ ID NO: 971877 - DNA, 33 bp, Homo sapien
aaaattgtgccaagaacgaaactgttgaaaaat

SEQ ID NO: 971878 - DNA, 33 bp, Homo sapien
aaaattgtgccaagaatgaaactgttgaaaaat

SEQ ID NO: 971879 - DNA, 33 bp, Homo sapien
cctgggcatctttgcaactctgtacacttgagg

SEQ ID NO: 971880 - DNA, 33 bp, Homo sapien
cctgggcatctttgcacctctgtacacttgagg

SEQ ID NO: 971881 - DNA, 33 bp, Homo sapien
gtgatttaaccagtgacgaggatagaaaacagc

SEQ ID NO: 971882 - DNA, 33 bp, Homo sapien
gtgatttaaccagtgatgaggatagaaaacagc

SEQ ID NO: 971883 - DNA, 33 bp, Homo sapien
catctattgtttgctcaactttgggcctgtgag

SEQ ID NO: 971884 - DNA, 33 bp, Homo sapien
catctattgtttgctcgactttgggcctgtgag

SEQ ID NO: 971885 - DNA, 33 bp, Homo sapien
ttgatgtgtcctttaacgagagaagagttgata

SEQ ID NO: 971886 - DNA, 33 bp, Homo sapien
ttgatgtgtcctttaatgagagaagagttgata

SEQ ID NO: 971887 - DNA, 33 bp, Homo sapien
tttacttatgcattcaaattactcttatggcct

SEQ ID NO: 971888 - DNA, 33 bp, Homo sapien
tttacttatgcattcatattactcttatggcct

SEQ ID NO: 971889 - DNA, 33 bp, Homo sapien
atcactggtgtcttcaaataatgcaataccaga

SEQ ID NO: 971890 - DNA, 33 bp, Homo sapien
atcactggtgtcttcagataatgcaataccaga

SEQ ID NO: 971891 - DNA, 33 bp, Homo sapien
tggtgaataaagaggaccaacttaaggggctgg

SEQ ID NO: 971892 - DNA, 33 bp, Homo sapien
tggtgaataaagaggatcaacttaaggggctgg

SEQ ID NO: 971893 - DNA, 33 bp, Homo sapien
gattttgtaagttctacccactcttctcttcac

SEQ ID NO: 971894 - DNA, 33 bp, Homo sapien
gattttgtaagttctatccactcttctcttcac

SEQ ID NO: 971895 - DNA, 33 bp, Homo sapien
acataggatcaaaataagaagtaacttcacctc

SEQ ID NO: 971896 - DNA, 33 bp, Homo sapien
acataggatcaaaataggaagtaacttcacctc

SEQ ID NO: 971897 - DNA, 33 bp, Homo sapien
catatgtgacaagatcaaaagagaaggtggcga

SEQ ID NO: 971898 - DNA, 33 bp, Homo sapien
catatgtgacaagatcgaaagagaaggtggcga

SEQ ID NO: 971899 - DNA, 33 bp, Homo sapien
tagatgtggtttctacagaagtaaatgtataca

SEQ ID NO: 971900 - DNA, 33 bp, Homo sapien
tagatgtggtttctaccgaagtaaatgtataca

SEQ ID NO: 971901 - DNA, 33 bp, Homo sapien
atattctgcctacactcacaggttaggtatgtt

SEQ ID NO: 971902 - DNA, 33 bp, Homo sapien
atattctgcctacactgacaggttaggtatgtt

SEQ ID NO: 971903 - DNA, 33 bp, Homo sapien
gtcttggtggaccacaatgtgctttggattaat

SEQ ID NO: 971904 - DNA, 33 bp, Homo sapien
gtcttggtggaccacagtgtgctttggattaat

SEQ ID NO: 971905 - DNA, 33 bp, Homo sapien
gaaaagtagggctaacaaggtaaagtcaggaat

SEQ ID NO: 971906 - DNA, 33 bp, Homo sapien
gaaaagtagggctaacgaggtaaagtcaggaat

SEQ ID NO: 971907 - DNA, 33 bp, Homo sapien
aatctttgtgtcagagaactgaaagcatattaa

SEQ ID NO: 971908 - DNA, 33 bp, Homo sapien
aatctttgtgtcagaggactgaaagcatattaa

SEQ ID NO: 971909 - DNA, 33 bp, Homo sapien
tatttatttcctctggcaagcactatgttgtat

SEQ ID NO: 971910 - DNA, 33 bp, Homo sapien
tatttatttcctctggtaagcactatgttgtat

SEQ ID NO: 971911 - DNA, 33 bp, Homo sapien
aagttgtgttcaaccacggggatattttttgtt

SEQ ID NO: 971912 - DNA, 33 bp, Homo sapien
aagttgtgttcaaccatggggatattttttgtt

SEQ ID NO: 971913 - DNA, 33 bp, Homo sapien
atcatgcttatattgaaatttatttgcagagag

SEQ ID NO: 971914 - DNA, 33 bp, Homo sapien
atcatgcttatattgacatttatttgcagagag

SEQ ID NO: 971915 - DNA, 33 bp, Homo sapien
agaaaatcgcgtaagaagtcaatatgctgttta

SEQ ID NO: 971916 - DNA, 33 bp, Homo sapien
agaaaatcgcgtaagatgtcaatatgctgttta

SEQ ID NO: 971917 - DNA, 33 bp, Homo sapien
ttttagtaagggataaatggtagtgatgatgtg

SEQ ID NO: 971918 - DNA, 33 bp, Homo sapien
ttttagtaagggataactggtagtgatgatgtg

SEQ ID NO: 971919 - DNA, 33 bp, Homo sapien
tatatgttggtgcctacgtatatacacacacgc

SEQ ID NO: 971920 - DNA, 33 bp, Homo sapien
tatatgttggtgcctatgtatatacacacacgc

SEQ ID NO: 971921 - DNA, 33 bp, Homo sapien
gttggcaagggataaaactttgagaaaggagaa

SEQ ID NO: 971922 - DNA, 33 bp, Homo sapien
gttggcaagggataaatctttgagaaaggagaa

SEQ ID NO: 971923 - DNA, 33 bp, Homo sapien
atagaccaccagggataagacatcttaacagag

SEQ ID NO: 971924 - DNA, 33 bp, Homo sapien
atagaccaccagggatgagacatcttaacagag

SEQ ID NO: 971925 - DNA, 33 bp, Homo sapien
ttctttattacaagcactacatacaggaatagg

SEQ ID NO: 971926 - DNA, 33 bp, Homo sapien
ttctttattacaagcagtacatacaggaatagg

SEQ ID NO: 971927 - DNA, 33 bp, Homo sapien
ttctaatgccttaataccattcaattttccttt

SEQ ID NO: 971928 - DNA, 33 bp, Homo sapien
ttctaatgccttaatatcattcaattttccttt

SEQ ID NO: 971929 - DNA, 33 bp, Homo sapien
gagcaggaaagaggaaatccccacttggtttcc

SEQ ID NO: 971930 - DNA, 33 bp, Homo sapien
gagcaggaaagaggaactccccacttggtttcc

SEQ ID NO: 971931 - DNA, 33 bp, Homo sapien
ggtgagagtaatgtccaatctatatagcaatct

SEQ ID NO: 971932 - DNA, 33 bp, Homo sapien
ggtgagagtaatgtcccatctatatagcaatct

SEQ ID NO: 971933 - DNA, 33 bp, Homo sapien
agcaatttctcaaaaccgttcatctgctgactc

SEQ ID NO: 971934 - DNA, 33 bp, Homo sapien
agcaatttctcaaaactgttcatctgctgactc

SEQ ID NO: 971935 - DNA, 33 bp, Homo sapien
actcagagctctttcgaatgtgtattgtgatca

SEQ ID NO: 971936 - DNA, 33 bp, Homo sapien
actcagagctctttcgtatgtgtattgtgatca

SEQ ID NO: 971937 - DNA, 33 bp, Homo sapien
ggaattctagttaatacgaacagcttcctaagg

SEQ ID NO: 971938 - DNA, 33 bp, Homo sapien
ggaattctagttaatatgaacagcttcctaagg

SEQ ID NO: 971939 - DNA, 33 bp, Homo sapien
tccttcttgcagagacaattggaagaatgagta

SEQ ID NO: 971940 - DNA, 33 bp, Homo sapien
tccttcttgcagagactattggaagaatgagta

SEQ ID NO: 971941 - DNA, 33 bp, Homo sapien
attttgccatagttgacagtaaacactgctacc

SEQ ID NO: 971942 - DNA, 33 bp, Homo sapien
attttgccatagttgatagtaaacactgctacc

SEQ ID NO: 971943 - DNA, 33 bp, Homo sapien
agtcttcacctttggaataagaatgcagagtag

SEQ ID NO: 971944 - DNA, 33 bp, Homo sapien
agtcttcacctttggagtaagaatgcagagtag

SEQ ID NO: 971945 - DNA, 33 bp, Homo sapien
cctgttcccactaagacaccattattctgtaaa

SEQ ID NO: 971946 - DNA, 33 bp, Homo sapien
cctgttcccactaagataccattattctgtaaa

SEQ ID NO: 971947 - DNA, 33 bp, Homo sapien
ttcacatcatgccaacaggaaactatttggtga

SEQ ID NO: 971948 - DNA, 33 bp, Homo sapien
ttcacatcatgccaacgggaaactatttggtga

SEQ ID NO: 971949 - DNA, 33 bp, Homo sapien
tttttaaaagacgatgaatccaaagaagtttcc

SEQ ID NO: 971950 - DNA, 33 bp, Homo sapien
tttttaaaagacgatggatccaaagaagtttcc

SEQ ID NO: 971951 - DNA, 33 bp, Homo sapien
gcagagaggattataccgaaaaaagtaactggt

SEQ ID NO: 971952 - DNA, 33 bp, Homo sapien
gcagagaggattatactgaaaaaagtaactggt

SEQ ID NO: 971953 - DNA, 33 bp, Homo sapien
taattcagggcattggccatgaggacctgtctt

SEQ ID NO: 971954 - DNA, 33 bp, Homo sapien
taattcagggcattggtcatgaggacctgtctt

SEQ ID NO: 971955 - DNA, 33 bp, Homo sapien
cagaggtgtctgattccctcagagatagataca

SEQ ID NO: 971956 - DNA, 33 bp, Homo sapien
cagaggtgtctgattctctcagagatagataca

SEQ ID NO: 971957 - DNA, 33 bp, Homo sapien
atcgtatacttgccaccaactttacaagcgcaa

SEQ ID NO: 971958 - DNA, 33 bp, Homo sapien
atcgtatacttgccactaactttacaagcgcaa

SEQ ID NO: 971959 - DNA, 33 bp, Homo sapien
gaacaagctagactcaatagcaaggcttttgtt

SEQ ID NO: 971960 - DNA, 33 bp, Homo sapien
gaacaagctagactcagtagcaaggcttttgtt

SEQ ID NO: 971961 - DNA, 33 bp, Homo sapien
tgtggagaccactctaccagaaaaagtatgtat

SEQ ID NO: 971962 - DNA, 33 bp, Homo sapien
tgtggagaccactctatcagaaaaagtatgtat

SEQ ID NO: 971963 - DNA, 33 bp, Homo sapien
ctggctcttagtggaaaggtgctttaaaagtcc

SEQ ID NO: 971964 - DNA, 33 bp, Homo sapien
ctggctcttagtggaatggtgctttaaaagtcc

SEQ ID NO: 971965 - DNA, 33 bp, Homo sapien
tcaaagtgacttaaaaacacagtaatttgccaa

SEQ ID NO: 971966 - DNA, 33 bp, Homo sapien
tcaaagtgacttaaaagcacagtaatttgccaa

SEQ ID NO: 971967 - DNA, 33 bp, Homo sapien
ggggagaactgtgagaagctaaaagacaaattg

SEQ ID NO: 971968 - DNA, 33 bp, Homo sapien
ggggagaactgtgagaggctaaaagacaaattg

SEQ ID NO: 971969 - DNA, 33 bp, Homo sapien
acttaccaacagtgtcacgggaagtcagggacc

SEQ ID NO: 971970 - DNA, 33 bp, Homo sapien
acttaccaacagtgtcgcgggaagtcagggacc

SEQ ID NO: 971971 - DNA, 33 bp, Homo sapien
gaaaatatgtgagaaccaaaagatttatgtaat

SEQ ID NO: 971972 - DNA, 33 bp, Homo sapien
gaaaatatgtgagaacgaaaagatttatgtaat

SEQ ID NO: 971973 - DNA, 33 bp, Homo sapien
tgctgctccctgtgtaaaacatcaaggatatga

SEQ ID NO: 971974 - DNA, 33 bp, Homo sapien
tgctgctccctgtgtagaacatcaaggatatga

SEQ ID NO: 971975 - DNA, 33 bp, Homo sapien
cactggcaggtacaaaatgaagacacagagaga

SEQ ID NO: 971976 - DNA, 33 bp, Homo sapien
cactggcaggtacaaagtgaagacacagagaga

SEQ ID NO: 971977 - DNA, 33 bp, Homo sapien
gcagctgaaatagtcacatgagagacgagggat

SEQ ID NO: 971978 - DNA, 33 bp, Homo sapien
gcagctgaaatagtcagatgagagacgagggat

SEQ ID NO: 971979 - DNA, 33 bp, Homo sapien
tatttgatggttaaaactgcagaatgtcgctta

SEQ ID NO: 971980 - DNA, 33 bp, Homo sapien
tatttgatggttaaaagtgcagaatgtcgctta

SEQ ID NO: 971981 - DNA, 33 bp, Homo sapien
tagatccacaagtccaactgctatcaatgtttc

SEQ ID NO: 971982 - DNA, 33 bp, Homo sapien
tagatccacaagtccagctgctatcaatgtttc

SEQ ID NO: 971983 - DNA, 33 bp, Homo sapien
tttatcgtatgcattacagtcagaatcatctgc

SEQ ID NO: 971984 - DNA, 33 bp, Homo sapien
tttatcgtatgcattatagtcagaatcatctgc

SEQ ID NO: 971985 - DNA, 33 bp, Homo sapien
ctcctgcatgtaaaaccgggttctgtcagaata

SEQ ID NO: 971986 - DNA, 33 bp, Homo sapien
ctcctgcatgtaaaactgggttctgtcagaata

SEQ ID NO: 971987 - DNA, 33 bp, Homo sapien
gaactcctgtgtgtccaagacacttatccctgg

SEQ ID NO: 971988 - DNA, 33 bp, Homo sapien
gaactcctgtgtgtccgagacacttatccctgg

SEQ ID NO: 971989 - DNA, 33 bp, Homo sapien
tgaatgcctagtaaatcaacgtcctttttcacc

SEQ ID NO: 971990 - DNA, 33 bp, Homo sapien
tgaatgcctagtaaattaacgtcctttttcacc

SEQ ID NO: 971991 - DNA, 33 bp, Homo sapien
ttctactggcttctaaacaaaacaagaaactag

SEQ ID NO: 971992 - DNA, 33 bp, Homo sapien
ttctactggcttctaatcaaaacaagaaactag

SEQ ID NO: 971993 - DNA, 33 bp, Homo sapien
ctcttattcaaggccaatcttcaccacccactc

SEQ ID NO: 971994 - DNA, 33 bp, Homo sapien
ctcttattcaaggccactcttcaccacccactc

SEQ ID NO: 971995 - DNA, 33 bp, Homo sapien
catgcacacctcaatgcatcaaggttagattac

SEQ ID NO: 971996 - DNA, 33 bp, Homo sapien
catgcacacctcaatggatcaaggttagattac

SEQ ID NO: 971997 - DNA, 33 bp, Homo sapien
aatgagtgtaaaataacagtcattggacacttg

SEQ ID NO: 971998 - DNA, 33 bp, Homo sapien
aatgagtgtaaaataatagtcattggacacttg

SEQ ID NO: 971999 - DNA, 33 bp, Homo sapien
attcatagccgagggaaaatgaagacgttagag

SEQ ID NO: 972000 - DNA, 33 bp, Homo sapien
attcatagccgagggagaatgaagacgttagag

SEQ ID NO: 972001 - DNA, 33 bp, Homo sapien
gcactggtgcagaacacgatctccacggcacaa

SEQ ID NO: 972002 - DNA, 33 bp, Homo sapien
gcactggtgcagaacatgatctccacggcacaa

SEQ ID NO: 972003 - DNA, 33 bp, Homo sapien
ttacacattgctgtacacctgccaaaagcttgt

SEQ ID NO: 972004 - DNA, 33 bp, Homo sapien
ttacacattgctgtacgcctgccaaaagcttgt

SEQ ID NO: 972005 - DNA, 33 bp, Homo sapien
ttttatcctgtaataaactttgaatgcctctta

SEQ ID NO: 972006 - DNA, 33 bp, Homo sapien
ttttatcctgtaataacctttgaatgcctctta

SEQ ID NO: 972007 - DNA, 33 bp, Homo sapien
atgtgtgagtttgcagcaacttgtggtagacaa

SEQ ID NO: 972008 - DNA, 33 bp, Homo sapien
atgtgtgagtttgcagtaacttgtggtagacaa

SEQ ID NO: 972009 - DNA, 33 bp, Homo sapien
tgagtagatggaatcacgactgtgtttgaaaag

SEQ ID NO: 972010 - DNA, 33 bp, Homo sapien
tgagtagatggaatcatgactgtgtttgaaaag

SEQ ID NO: 972011 - DNA, 33 bp, Homo sapien
ttacagtaactacaaccgatggagcctcaaggt

SEQ ID NO: 972012 - DNA, 33 bp, Homo sapien
ttacagtaactacaactgatggagcctcaaggt

SEQ ID NO: 972013 - DNA, 33 bp, Homo sapien
actcaaaatacctagaaaccaatccaaatcttt

SEQ ID NO: 972014 - DNA, 33 bp, Homo sapien
actcaaaatacctagagaccaatccaaatcttt

SEQ ID NO: 972015 - DNA, 33 bp, Homo sapien
tgtggaaacatctaccaattgataagatttcag

SEQ ID NO: 972016 - DNA, 33 bp, Homo sapien
tgtggaaacatctaccgattgataagatttcag

SEQ ID NO: 972017 - DNA, 33 bp, Homo sapien
cagatcattctgctaccagattatcaatgttgt

SEQ ID NO: 972018 - DNA, 33 bp, Homo sapien
cagatcattctgctactagattatcaatgttgt

SEQ ID NO: 972019 - DNA, 33 bp, Homo sapien
tcaaacaagaccatcaagacatgacttgaatcc

SEQ ID NO: 972020 - DNA, 33 bp, Homo sapien
tcaaacaagaccatcaggacatgacttgaatcc

SEQ ID NO: 972021 - DNA, 33 bp, Homo sapien
ggcttgctctttgaaaagtcttctgaaggtaca

SEQ ID NO: 972022 - DNA, 33 bp, Homo sapien
ggcttgctctttgaaaggtcttctgaaggtaca

SEQ ID NO: 972023 - DNA, 33 bp, Homo sapien
ataaagtagtccaacacgaagcatttctgtctc

SEQ ID NO: 972024 - DNA, 33 bp, Homo sapien
ataaagtagtccaacatgaagcatttctgtctc

SEQ ID NO: 972025 - DNA, 33 bp, Homo sapien
gagaagggttcaaacactggcaaggtcatgttt

SEQ ID NO: 972026 - DNA, 33 bp, Homo sapien
gagaagggttcaaacattggcaaggtcatgttt

SEQ ID NO: 972027 - DNA, 33 bp, Homo sapien
gccccatcagaattcacagatagagagcgttgt

SEQ ID NO: 972028 - DNA, 33 bp, Homo sapien
gccccatcagaattcatagatagagagcgttgt

SEQ ID NO: 972029 - DNA, 33 bp, Homo sapien
agccaccgagtttataataatttgtaacagtcc

SEQ ID NO: 972030 - DNA, 33 bp, Homo sapien
agccaccgagtttatagtaatttgtaacagtcc

SEQ ID NO: 972031 - DNA, 33 bp, Homo sapien
gttaatataggattcaaagttgtgtgtctgtgt

SEQ ID NO: 972032 - DNA, 33 bp, Homo sapien
gttaatataggattcagagttgtgtgtctgtgt

SEQ ID NO: 972033 - DNA, 33 bp, Homo sapien
tgttgggaagattaaacgcaatattggaagtga

SEQ ID NO: 972034 - DNA, 33 bp, Homo sapien
tgttgggaagattaaatgcaatattggaagtga

SEQ ID NO: 972035 - DNA, 33 bp, Homo sapien
ggaaaaggacaaatggcccaacaattgaagtgc

SEQ ID NO: 972036 - DNA, 33 bp, Homo sapien
ggaaaaggacaaatggtccaacaattgaagtgc

SEQ ID NO: 972037 - DNA, 33 bp, Homo sapien
gatagcagaggtgcaccattcccgctaggtcct

SEQ ID NO: 972038 - DNA, 33 bp, Homo sapien
gatagcagaggtgcactattcccgctaggtcct

SEQ ID NO: 972039 - DNA, 33 bp, Homo sapien
agtggaatgagaagaaaccttacaggacagata

SEQ ID NO: 972040 - DNA, 33 bp, Homo sapien
agtggaatgagaagaagccttacaggacagata

SEQ ID NO: 972041 - DNA, 33 bp, Homo sapien
aaggaagactgatcccaagaaggtggatagctt

SEQ ID NO: 972042 - DNA, 33 bp, Homo sapien
aaggaagactgatcccgagaaggtggatagctt

SEQ ID NO: 972043 - DNA, 33 bp, Homo sapien
ttactcccatatccaacctatacatgatccaca

SEQ ID NO: 972044 - DNA, 33 bp, Homo sapien
ttactcccatatccaatctatacatgatccaca

SEQ ID NO: 972045 - DNA, 33 bp, Homo sapien
atgtaggaattaaaaaatgtgagctcacagata

SEQ ID NO: 972046 - DNA, 33 bp, Homo sapien
atgtaggaattaaaaactgtgagctcacagata

SEQ ID NO: 972047 - DNA, 33 bp, Homo sapien
ccaccactcttcagacaaggaaaggaagaaaac

SEQ ID NO: 972048 - DNA, 33 bp, Homo sapien
ccaccactcttcagaccaggaaaggaagaaaac

SEQ ID NO: 972049 - DNA, 33 bp, Homo sapien
cccgggctctaccagccatcaggttgggcatcc

SEQ ID NO: 972050 - DNA, 33 bp, Homo sapien
cccgggctctaccagctatcaggttgggcatcc

SEQ ID NO: 972051 - DNA, 33 bp, Homo sapien
caggagaaaagaaaaaagccctcattgattgtc

SEQ ID NO: 972052 - DNA, 33 bp, Homo sapien
caggagaaaagaaaaacgccctcattgattgtc

SEQ ID NO: 972053 - DNA, 33 bp, Homo sapien
ggcttctatactaggccaattgagtaatcaaag

SEQ ID NO: 972054 - DNA, 33 bp, Homo sapien
ggcttctatactaggctaattgagtaatcaaag

SEQ ID NO: 972055 - DNA, 33 bp, Homo sapien
ctgatgagttagccttcaagaagaggatgtaca

SEQ ID NO: 972056 - DNA, 33 bp, Homo sapien
ctgatgagttagccttgaagaagaggatgtaca

SEQ ID NO: 972057 - DNA, 33 bp, Homo sapien
tgtaaaatggacttaacgacaaaatacatgaat

SEQ ID NO: 972058 - DNA, 33 bp, Homo sapien
tgtaaaatggacttaaggacaaaatacatgaat

SEQ ID NO: 972059 - DNA, 33 bp, Homo sapien
ttgctgctgtaagccacgaagttacagagtagt

SEQ ID NO: 972060 - DNA, 33 bp, Homo sapien
ttgctgctgtaagccatgaagttacagagtagt

SEQ ID NO: 972061 - DNA, 33 bp, Homo sapien
tttcctatgtcttgaaaggtattatccagttgt

SEQ ID NO: 972062 - DNA, 33 bp, Homo sapien
tttcctatgtcttgaatggtattatccagttgt

SEQ ID NO: 972063 - DNA, 33 bp, Homo sapien
ctgtaggcccaagaacggacctgcctagacatg

SEQ ID NO: 972064 - DNA, 33 bp, Homo sapien
ctgtaggcccaagaactgacctgcctagacatg

SEQ ID NO: 972065 - DNA, 33 bp, Homo sapien
gccgctatcacccaaacatgctttccacaagtc

SEQ ID NO: 972066 - DNA, 33 bp, Homo sapien
gccgctatcacccaaatatgctttccacaagtc

SEQ ID NO: 972067 - DNA, 33 bp, Homo sapien
catttactaaaatgtcccccaaaatggtaactt

SEQ ID NO: 972068 - DNA, 33 bp, Homo sapien
catttactaaaatgtctcccaaaatggtaactt

SEQ ID NO: 972069 - DNA, 33 bp, Homo sapien
tagcagccaggagagcaaaatgctaccttcata

SEQ ID NO: 972070 - DNA, 33 bp, Homo sapien
tagcagccaggagagcgaaatgctaccttcata

SEQ ID NO: 972071 - DNA, 33 bp, Homo sapien
ttggaggaattaatgcactgttgcttgcatgga

SEQ ID NO: 972072 - DNA, 33 bp, Homo sapien
ttggaggaattaatgcgctgttgcttgcatgga

SEQ ID NO: 972073 - DNA, 33 bp, Homo sapien
ttggagtgaatgtttgaacttcaagtgctatgt

SEQ ID NO: 972074 - DNA, 33 bp, Homo sapien
ttggagtgaatgtttggacttcaagtgctatgt

SEQ ID NO: 972075 - DNA, 33 bp, Homo sapien
atcttttcagcttctaaagtatgagatcagctc

SEQ ID NO: 972076 - DNA, 33 bp, Homo sapien
atcttttcagcttctagagtatgagatcagctc

SEQ ID NO: 972077 - DNA, 33 bp, Homo sapien
ttgacaaaaatactgagacacaacaaattggaa

SEQ ID NO: 972078 - DNA, 33 bp, Homo sapien
ttgacaaaaatactgatacacaacaaattggaa

SEQ ID NO: 972079 - DNA, 33 bp, Homo sapien
cagtgcctacacaccaataaagaggatggatga

SEQ ID NO: 972080 - DNA, 33 bp, Homo sapien
cagtgcctacacaccagtaaagaggatggatga

SEQ ID NO: 972081 - DNA, 33 bp, Homo sapien
cattaattgttctcacaggcaggccttttgaac

SEQ ID NO: 972082 - DNA, 33 bp, Homo sapien
cattaattgttctcacgggcaggccttttgaac

SEQ ID NO: 972083 - DNA, 33 bp, Homo sapien
cagtttttaggacatacagtgtcgtctatttat

SEQ ID NO: 972084 - DNA, 33 bp, Homo sapien
cagtttttaggacatatagtgtcgtctatttat

SEQ ID NO: 972085 - DNA, 33 bp, Homo sapien
atttaacctcacctaccatgtcagctaccatgt

SEQ ID NO: 972086 - DNA, 33 bp, Homo sapien
atttaacctcacctactatgtcagctaccatgt

SEQ ID NO: 972087 - DNA, 33 bp, Homo sapien
actccagtgcatttacagaagatacttgactac

SEQ ID NO: 972088 - DNA, 33 bp, Homo sapien
actccagtgcatttactgaagatacttgactac

SEQ ID NO: 972089 - DNA, 33 bp, Homo sapien
gcaaacctggccaatacgatcaatacctggatg

SEQ ID NO: 972090 - DNA, 33 bp, Homo sapien
gcaaacctggccaatatgatcaatacctggatg

SEQ ID NO: 972091 - DNA, 33 bp, Homo sapien
ctcatttaacactgtcccatgaagtgcctgccc

SEQ ID NO: 972092 - DNA, 33 bp, Homo sapien
ctcatttaacactgtctcatgaagtgcctgccc

SEQ ID NO: 972093 - DNA, 33 bp, Homo sapien
tagtgtagtacagccacctagactggagctgct

SEQ ID NO: 972094 - DNA, 33 bp, Homo sapien
tagtgtagtacagccatctagactggagctgct

SEQ ID NO: 972095 - DNA, 33 bp, Homo sapien
gattatacttagatcactgaaatcagcaaatgt

SEQ ID NO: 972096 - DNA, 33 bp, Homo sapien
gattatacttagatcagtgaaatcagcaaatgt

SEQ ID NO: 972097 - DNA, 33 bp, Homo sapien
tttcctctctcatgaccgctttcggtagctttg

SEQ ID NO: 972098 - DNA, 33 bp, Homo sapien
tttcctctctcatgactgctttcggtagctttg

SEQ ID NO: 972099 - DNA, 33 bp, Homo sapien
ctaagtttccaggtcaaagcagggaccagatga

SEQ ID NO: 972100 - DNA, 33 bp, Homo sapien
ctaagtttccaggtcagagcagggaccagatga

SEQ ID NO: 972101 - DNA, 33 bp, Homo sapien
tgaaagtttccatcaactagtcaatgacaacgc

SEQ ID NO: 972102 - DNA, 33 bp, Homo sapien
tgaaagtttccatcaattagtcaatgacaacgc

SEQ ID NO: 972103 - DNA, 33 bp, Homo sapien
gtttgagatttgaaaaaaacatggctccatcac

SEQ ID NO: 972104 - DNA, 33 bp, Homo sapien
gtttgagatttgaaaacaacatggctccatcac

SEQ ID NO: 972105 - DNA, 33 bp, Homo sapien
cttctgaatgtaggaacgcataggttttaacct

SEQ ID NO: 972106 - DNA, 33 bp, Homo sapien
cttctgaatgtaggaaggcataggttttaacct

SEQ ID NO: 972107 - DNA, 33 bp, Homo sapien
taaaaaacagaatatacgctgtcggataaaaaa

SEQ ID NO: 972108 - DNA, 33 bp, Homo sapien
taaaaaacagaatatatgctgtcggataaaaaa

SEQ ID NO: 972109 - DNA, 33 bp, Homo sapien
taattatctaaaactgcactgcacattatccaa

SEQ ID NO: 972110 - DNA, 33 bp, Homo sapien
taattatctaaaactgtactgcacattatccaa

SEQ ID NO: 972111 - DNA, 33 bp, Homo sapien
aaatcagttggagagagactgtggcgttagaat

SEQ ID NO: 972112 - DNA, 33 bp, Homo sapien
aaatcagttggagagatactgtggcgttagaat

SEQ ID NO: 972113 - DNA, 33 bp, Homo sapien
ccccagggtattttaaagagctgttagggcagt

SEQ ID NO: 972114 - DNA, 33 bp, Homo sapien
ccccagggtattttaaggagctgttagggcagt

SEQ ID NO: 972115 - DNA, 33 bp, Homo sapien
caggttattactgtcacaaagatggtgtttagg

SEQ ID NO: 972116 - DNA, 33 bp, Homo sapien
caggttattactgtcagaaagatggtgtttagg

SEQ ID NO: 972117 - DNA, 33 bp, Homo sapien
aagtaactgtgctcttaaaaaaggaagtaacga

SEQ ID NO: 972118 - DNA, 33 bp, Homo sapien
aagtaactgtgctctttaaaaaggaagtaacga

SEQ ID NO: 972119 - DNA, 33 bp, Homo sapien
agctcagttctactcaatctgatgaaattagct

SEQ ID NO: 972120 - DNA, 33 bp, Homo sapien
agctcagttctactcagtctgatgaaattagct

SEQ ID NO: 972121 - DNA, 33 bp, Homo sapien
ccctctccaattaactaactctattggatgttc

SEQ ID NO: 972122 - DNA, 33 bp, Homo sapien
ccctctccaattaacttactctattggatgttc

SEQ ID NO: 972123 - DNA, 33 bp, Homo sapien
ccaacaccgattcataacccggggactctgaag

SEQ ID NO: 972124 - DNA, 33 bp, Homo sapien
ccaacaccgattcataccccggggactctgaag

SEQ ID NO: 972125 - DNA, 33 bp, Homo sapien
tcctattaaaatacaacggttgattgaatggat

SEQ ID NO: 972126 - DNA, 33 bp, Homo sapien
tcctattaaaatacaatggttgattgaatggat

SEQ ID NO: 972127 - DNA, 33 bp, Homo sapien
gaaagttctattagacaacactgctctaggcca

SEQ ID NO: 972128 - DNA, 33 bp, Homo sapien
gaaagttctattagacgacactgctctaggcca

SEQ ID NO: 972129 - DNA, 33 bp, Homo sapien
tttaaaatgtggctagagttactggaaaacaaa

SEQ ID NO: 972130 - DNA, 33 bp, Homo sapien
tttaaaatgtggctagtgttactggaaaacaaa

SEQ ID NO: 972131 - DNA, 33 bp, Homo sapien
cttaaaagcctgcttccaatggggttcattcat

SEQ ID NO: 972132 - DNA, 33 bp, Homo sapien
cttaaaagcctgcttctaatggggttcattcat

SEQ ID NO: 972133 - DNA, 33 bp, Homo sapien
tttgtagtctctgttacaggtgtagattattta

SEQ ID NO: 972134 - DNA, 33 bp, Homo sapien
tttgtagtctctgttataggtgtagattattta

SEQ ID NO: 972135 - DNA, 33 bp, Homo sapien
tacatagcacttaaaactggtgttcagaatcaa

SEQ ID NO: 972136 - DNA, 33 bp, Homo sapien
tacatagcacttaaaattggtgttcagaatcaa

SEQ ID NO: 972137 - DNA, 33 bp, Homo sapien
cctaccagggagtaaacgctttaccatcaaatt

SEQ ID NO: 972138 - DNA, 33 bp, Homo sapien
cctaccagggagtaaatgctttaccatcaaatt

SEQ ID NO: 972139 - DNA, 33 bp, Homo sapien
tttgggtaagcatgagaaccgcagtacataccc

SEQ ID NO: 972140 - DNA, 33 bp, Homo sapien
tttgggtaagcatgaggaccgcagtacataccc

SEQ ID NO: 972141 - DNA, 33 bp, Homo sapien
accccgtcttcatccaagcgatctgtgcacttc

SEQ ID NO: 972142 - DNA, 33 bp, Homo sapien
accccgtcttcatccaggcgatctgtgcacttc

SEQ ID NO: 972143 - DNA, 33 bp, Homo sapien
atggtaatgtacactaaatgaagacagagcatt

SEQ ID NO: 972144 - DNA, 33 bp, Homo sapien
atggtaatgtacactacatgaagacagagcatt

SEQ ID NO: 972145 - DNA, 33 bp, Homo sapien
ttactgcccaagcatccataggtctttgactag

SEQ ID NO: 972146 - DNA, 33 bp, Homo sapien
ttactgcccaagcatctataggtctttgactag

SEQ ID NO: 972147 - DNA, 33 bp, Homo sapien
gaaaagcctccagtagaccaattcaaagatttg

SEQ ID NO: 972148 - DNA, 33 bp, Homo sapien
gaaaagcctccagtaggccaattcaaagatttg

SEQ ID NO: 972149 - DNA, 33 bp, Homo sapien
cctctatttgaccgaacttactcttacaccttg

SEQ ID NO: 972150 - DNA, 33 bp, Homo sapien
cctctatttgaccgaatttactcttacaccttg

SEQ ID NO: 972151 - DNA, 33 bp, Homo sapien
tctctcattaccttccaccttttagtcattaaa

SEQ ID NO: 972152 - DNA, 33 bp, Homo sapien
tctctcattaccttcctccttttagtcattaaa

SEQ ID NO: 972153 - DNA, 33 bp, Homo sapien
agaaatgttcataacaatggtggtaaatttata

SEQ ID NO: 972154 - DNA, 33 bp, Homo sapien
agaaatgttcataacagtggtggtaaatttata

SEQ ID NO: 972155 - DNA, 33 bp, Homo sapien
tggaactcagttgtcaccaaactaaagacacag

SEQ ID NO: 972156 - DNA, 33 bp, Homo sapien
tggaactcagttgtcatcaaactaaagacacag

SEQ ID NO: 972157 - DNA, 33 bp, Homo sapien
tattaaatagcaaagactcttcatgagataaga

SEQ ID NO: 972158 - DNA, 33 bp, Homo sapien
tattaaatagcaaagattcttcatgagataaga

SEQ ID NO: 972159 - DNA, 33 bp, Homo sapien
aatgttattttgtttcaatctgacatagttacc

SEQ ID NO: 972160 - DNA, 33 bp, Homo sapien
aatgttattttgtttcgatctgacatagttacc

SEQ ID NO: 972161 - DNA, 33 bp, Homo sapien
catagaaaaccatgaactgaagatgaaagaggt

SEQ ID NO: 972162 - DNA, 33 bp, Homo sapien
catagaaaaccatgaattgaagatgaaagaggt

SEQ ID NO: 972163 - DNA, 33 bp, Homo sapien
gcctctaagccccaaaagagagagtactaccag

SEQ ID NO: 972164 - DNA, 33 bp, Homo sapien
gcctctaagccccaaacgagagagtactaccag

SEQ ID NO: 972165 - DNA, 33 bp, Homo sapien
tgttgtggaaggcatcactgttgcatattgctc

SEQ ID NO: 972166 - DNA, 33 bp, Homo sapien
tgttgtggaaggcatcgctgttgcatattgctc

SEQ ID NO: 972167 - DNA, 33 bp, Homo sapien
accaggaaggccttccactaaaccttgatgcaa

SEQ ID NO: 972168 - DNA, 33 bp, Homo sapien
accaggaaggccttccgctaaaccttgatgcaa

SEQ ID NO: 972169 - DNA, 33 bp, Homo sapien
taaggttgaactatcacattttttctaaagtta

SEQ ID NO: 972170 - DNA, 33 bp, Homo sapien
taaggttgaactatcagattttttctaaagtta

SEQ ID NO: 972171 - DNA, 33 bp, Homo sapien
ttcaagtttccaaacaaagcatatatgcaagtt

SEQ ID NO: 972172 - DNA, 33 bp, Homo sapien
ttcaagtttccaaacagagcatatatgcaagtt

SEQ ID NO: 972173 - DNA, 33 bp, Homo sapien
gaagcaagcaacaaaaatatctcaattaagatc

SEQ ID NO: 972174 - DNA, 33 bp, Homo sapien
gaagcaagcaacaaaagtatctcaattaagatc

SEQ ID NO: 972175 - DNA, 33 bp, Homo sapien
tcacttccaggtcaagaatgttctaaaacaaac

SEQ ID NO: 972176 - DNA, 33 bp, Homo sapien
tcacttccaggtcaagcatgttctaaaacaaac

SEQ ID NO: 972177 - DNA, 33 bp, Homo sapien
actgaagaaaaacacacactgaactgattttgt

SEQ ID NO: 972178 - DNA, 33 bp, Homo sapien
actgaagaaaaacacatactgaactgattttgt

SEQ ID NO: 972179 - DNA, 33 bp, Homo sapien
gaggctgccaccaaaccggtaacccatctgcct

SEQ ID NO: 972180 - DNA, 33 bp, Homo sapien
gaggctgccaccaaactggtaacccatctgcct

SEQ ID NO: 972181 - DNA, 33 bp, Homo sapien
gagtacctgagtgtcaatcaatgagggtctcct

SEQ ID NO: 972182 - DNA, 33 bp, Homo sapien
gagtacctgagtgtcagtcaatgagggtctcct

SEQ ID NO: 972183 - DNA, 33 bp, Homo sapien
ttaggaaaataatgacccctaactccaggtcag

SEQ ID NO: 972184 - DNA, 33 bp, Homo sapien
ttaggaaaataatgactcctaactccaggtcag

SEQ ID NO: 972185 - DNA, 33 bp, Homo sapien
tttggtgcattaggtaaactaccattgttagtg

SEQ ID NO: 972186 - DNA, 33 bp, Homo sapien
tttggtgcattaggtagactaccattgttagtg

SEQ ID NO: 972187 - DNA, 33 bp, Homo sapien
aactgaccatcacctacctgacggttgcctgac

SEQ ID NO: 972188 - DNA, 33 bp, Homo sapien
aactgaccatcacctatctgacggttgcctgac

SEQ ID NO: 972189 - DNA, 33 bp, Homo sapien
ccctctctgcagcaggaaactattctctttctt

SEQ ID NO: 972190 - DNA, 33 bp, Homo sapien
ccctctctgcagcagggaactattctctttctt

SEQ ID NO: 972191 - DNA, 33 bp, Homo sapien
aaaaaaataagaaaaaagtgactgaaaaaagtg

SEQ ID NO: 972192 - DNA, 33 bp, Homo sapien
aaaaaaataagaaaaaggtgactgaaaaaagtg

SEQ ID NO: 972193 - DNA, 33 bp, Homo sapien
gaaagtgatgcagggaaaattccaagagagaat

SEQ ID NO: 972194 - DNA, 33 bp, Homo sapien
gaaagtgatgcagggagaattccaagagagaat

SEQ ID NO: 972195 - DNA, 33 bp, Homo sapien
ggaggtgattggtaaaagaatgcttcaggagga

SEQ ID NO: 972196 - DNA, 33 bp, Homo sapien
ggaggtgattggtaaaggaatgcttcaggagga

SEQ ID NO: 972197 - DNA, 33 bp, Homo sapien
aacagtaacaagtccgaagagcaagaggcagtt

SEQ ID NO: 972198 - DNA, 33 bp, Homo sapien
aacagtaacaagtccgtagagcaagaggcagtt

SEQ ID NO: 972199 - DNA, 33 bp, Homo sapien
tgatttataacaaaacactggacgctaatgaaa

SEQ ID NO: 972200 - DNA, 33 bp, Homo sapien
tgatttataacaaaactctggacgctaatgaaa

SEQ ID NO: 972201 - DNA, 33 bp, Homo sapien
attgtacccataggacagaagagaaatcaagat

SEQ ID NO: 972202 - DNA, 33 bp, Homo sapien
attgtacccataggactgaagagaaatcaagat

SEQ ID NO: 972203 - DNA, 33 bp, Homo sapien
aagtatcactttgtccaagaggtttttcctgat

SEQ ID NO: 972204 - DNA, 33 bp, Homo sapien
aagtatcactttgtccgagaggtttttcctgat

SEQ ID NO: 972205 - DNA, 33 bp, Homo sapien
ggagaagaaactgataaagaaggagagtgcata

SEQ ID NO: 972206 - DNA, 33 bp, Homo sapien
ggagaagaaactgatagagaaggagagtgcata

SEQ ID NO: 972207 - DNA, 33 bp, Homo sapien
cccaccttaaatagcacgtgtatcattttaact

SEQ ID NO: 972208 - DNA, 33 bp, Homo sapien
cccaccttaaatagcatgtgtatcattttaact

SEQ ID NO: 972209 - DNA, 33 bp, Homo sapien
tcagagaaatgctaacactgacttgtcttggag

SEQ ID NO: 972210 - DNA, 33 bp, Homo sapien
tcagagaaatgctaacgctgacttgtcttggag

SEQ ID NO: 972211 - DNA, 33 bp, Homo sapien
tacatgcaagtaaataagacttggacatgagcc

SEQ ID NO: 972212 - DNA, 33 bp, Homo sapien
tacatgcaagtaaatacgacttggacatgagcc

SEQ ID NO: 972213 - DNA, 33 bp, Homo sapien
gtgtcctccagcgattcaaaaatatagatgtct

SEQ ID NO: 972214 - DNA, 33 bp, Homo sapien
gtgtcctccagcgatttaaaaatatagatgtct

SEQ ID NO: 972215 - DNA, 33 bp, Homo sapien
gaagacaccgttttcaacttgggctgcacaata

SEQ ID NO: 972216 - DNA, 33 bp, Homo sapien
gaagacaccgttttcagcttgggctgcacaata

SEQ ID NO: 972217 - DNA, 33 bp, Homo sapien
tttttcttggacatcactactttgttttgcgtt

SEQ ID NO: 972218 - DNA, 33 bp, Homo sapien
tttttcttggacatcattactttgttttgcgtt

SEQ ID NO: 972219 - DNA, 33 bp, Homo sapien
agtattgcccaggtaaaggttgctgcttctaca

SEQ ID NO: 972220 - DNA, 33 bp, Homo sapien
agtattgcccaggtaagggttgctgcttctaca

SEQ ID NO: 972221 - DNA, 33 bp, Homo sapien
attttcagtgggcttaccatactattgcttagc

SEQ ID NO: 972222 - DNA, 33 bp, Homo sapien
attttcagtgggcttatcatactattgcttagc

SEQ ID NO: 972223 - DNA, 33 bp, Homo sapien
cacctggaattaaggaagttctgaaagagtaat

SEQ ID NO: 972224 - DNA, 33 bp, Homo sapien
cacctggaattaaggaggttctgaaagagtaat

SEQ ID NO: 972225 - DNA, 33 bp, Homo sapien
agaggaaaggattagaataatgagataactttc

SEQ ID NO: 972226 - DNA, 33 bp, Homo sapien
agaggaaaggattagagtaatgagataactttc

SEQ ID NO: 972227 - DNA, 33 bp, Homo sapien
ggctgagaagagatgaaatgatcctggatcgtt

SEQ ID NO: 972228 - DNA, 33 bp, Homo sapien
ggctgagaagagatgacatgatcctggatcgtt

SEQ ID NO: 972229 - DNA, 33 bp, Homo sapien
aactttgaaatcagataaaacactaccaactca

SEQ ID NO: 972230 - DNA, 33 bp, Homo sapien
aactttgaaatcagatgaaacactaccaactca

SEQ ID NO: 972231 - DNA, 33 bp, Homo sapien
gagttatacaactgcagacttttcatttgctta

SEQ ID NO: 972232 - DNA, 33 bp, Homo sapien
gagttatacaactgcatacttttcatttgctta

SEQ ID NO: 972233 - DNA, 33 bp, Homo sapien
acccaggtagctagccacttgatcaagagcatc

SEQ ID NO: 972234 - DNA, 33 bp, Homo sapien
acccaggtagctagccgcttgatcaagagcatc

SEQ ID NO: 972235 - DNA, 33 bp, Homo sapien
tcaagccttttctaggcattcatcttctctggg

SEQ ID NO: 972236 - DNA, 33 bp, Homo sapien
tcaagccttttctagggattcatcttctctggg

SEQ ID NO: 972237 - DNA, 33 bp, Homo sapien
atgcccagaattggggcataggtgtggtgagaa

SEQ ID NO: 972238 - DNA, 33 bp, Homo sapien
atgcccagaattggggtataggtgtggtgagaa

SEQ ID NO: 972239 - DNA, 33 bp, Homo sapien
aactacagagaaaacaataatagacgagtaact

SEQ ID NO: 972240 - DNA, 33 bp, Homo sapien
aactacagagaaaacagtaatagacgagtaact

SEQ ID NO: 972241 - DNA, 33 bp, Homo sapien
tttggagcaggtcttaagtgaacattagaaaag

SEQ ID NO: 972242 - DNA, 33 bp, Homo sapien
tttggagcaggtcttacgtgaacattagaaaag

SEQ ID NO: 972243 - DNA, 33 bp, Homo sapien
tgcttgagttcctttaagtataatgaagttcag

SEQ ID NO: 972244 - DNA, 33 bp, Homo sapien
tgcttgagttcctttaggtataatgaagttcag

SEQ ID NO: 972245 - DNA, 33 bp, Homo sapien
gtctataaacttcaaaatctttgtcagttggaa

SEQ ID NO: 972246 - DNA, 33 bp, Homo sapien
gtctataaacttcaaagtctttgtcagttggaa

SEQ ID NO: 972247 - DNA, 33 bp, Homo sapien
tcaacagcttttgtaaataataataatccatgt

SEQ ID NO: 972248 - DNA, 33 bp, Homo sapien
tcaacagcttttgtaagtaataataatccatgt

SEQ ID NO: 972249 - DNA, 33 bp, Homo sapien
cctcttagaaacatagaccacaaaagtgtagca

SEQ ID NO: 972250 - DNA, 33 bp, Homo sapien
cctcttagaaacataggccacaaaagtgtagca

SEQ ID NO: 972251 - DNA, 33 bp, Homo sapien
gtgatgaacataaaacaaattttcctgatgaca

SEQ ID NO: 972252 - DNA, 33 bp, Homo sapien
gtgatgaacataaaaccaattttcctgatgaca

SEQ ID NO: 972253 - DNA, 33 bp, Homo sapien
gctccatgaggaaatacgtgacatctctgtggg

SEQ ID NO: 972254 - DNA, 33 bp, Homo sapien
gctccatgaggaaatatgtgacatctctgtggg

SEQ ID NO: 972255 - DNA, 33 bp, Homo sapien
agtgattcttcttgatcagacggaacagtcaag

SEQ ID NO: 972256 - DNA, 33 bp, Homo sapien
agtgattcttcttgatgagacggaacagtcaag

SEQ ID NO: 972257 - DNA, 33 bp, Homo sapien
tacaaacaccaagagacagatagcagaggaaaa

SEQ ID NO: 972258 - DNA, 33 bp, Homo sapien
tacaaacaccaagagagagatagcagaggaaaa

SEQ ID NO: 972259 - DNA, 33 bp, Homo sapien
ggcataggtgcactcaataaccgtttgtggact

SEQ ID NO: 972260 - DNA, 33 bp, Homo sapien
ggcataggtgcactcagtaaccgtttgtggact

SEQ ID NO: 972261 - DNA, 33 bp, Homo sapien
actgttctcctttccacccactcagtgattaaa

SEQ ID NO: 972262 - DNA, 33 bp, Homo sapien
actgttctcctttccatccactcagtgattaaa

SEQ ID NO: 972263 - DNA, 33 bp, Homo sapien
ttagttatttccagtaagaacagtgaattagga

SEQ ID NO: 972264 - DNA, 33 bp, Homo sapien
ttagttatttccagtaggaacagtgaattagga

SEQ ID NO: 972265 - DNA, 33 bp, Homo sapien
aggttttccaggtgtacggtgtaagctgtcagt

SEQ ID NO: 972266 - DNA, 33 bp, Homo sapien
aggttttccaggtgtatggtgtaagctgtcagt

SEQ ID NO: 972267 - DNA, 33 bp, Homo sapien
aaactgtattaatctacatgttcagaatgccac

SEQ ID NO: 972268 - DNA, 33 bp, Homo sapien
aaactgtattaatctatatgttcagaatgccac

SEQ ID NO: 972269 - DNA, 33 bp, Homo sapien
aagtttctaggctgcaccacagaaaactataac

SEQ ID NO: 972270 - DNA, 33 bp, Homo sapien
aagtttctaggctgcatcacagaaaactataac

SEQ ID NO: 972271 - DNA, 33 bp, Homo sapien
taccttatgcaccaaacacattaatcttgagag

SEQ ID NO: 972272 - DNA, 33 bp, Homo sapien
taccttatgcaccaaatacattaatcttgagag

SEQ ID NO: 972273 - DNA, 33 bp, Homo sapien
aaacaaaataaggaagacatcaagtgaaccatt

SEQ ID NO: 972274 - DNA, 33 bp, Homo sapien
aaacaaaataaggaagccatcaagtgaaccatt

SEQ ID NO: 972275 - DNA, 33 bp, Homo sapien
tcaaaatttgtatcacaggttggtgtatgaaac

SEQ ID NO: 972276 - DNA, 33 bp, Homo sapien
tcaaaatttgtatcacgggttggtgtatgaaac

SEQ ID NO: 972277 - DNA, 33 bp, Homo sapien
catgtgtagaattgaactgccttaccaccccta

SEQ ID NO: 972278 - DNA, 33 bp, Homo sapien
catgtgtagaattgaattgccttaccaccccta

SEQ ID NO: 972279 - DNA, 33 bp, Homo sapien
tcagctccaaagtttcaaattctgtagggctgg

SEQ ID NO: 972280 - DNA, 33 bp, Homo sapien
tcagctccaaagtttccaattctgtagggctgg

SEQ ID NO: 972281 - DNA, 33 bp, Homo sapien
aattcatgtatttagcaaagcaactgcttggga

SEQ ID NO: 972282 - DNA, 33 bp, Homo sapien
aattcatgtatttagcgaagcaactgcttggga

SEQ ID NO: 972283 - DNA, 33 bp, Homo sapien
aatttgaaaatgtctacaaacactatgttaata

SEQ ID NO: 972284 - DNA, 33 bp, Homo sapien
aatttgaaaatgtctagaaacactatgttaata

SEQ ID NO: 972285 - DNA, 33 bp, Homo sapien
gcagactctctgtaaaactcagatgtatatttc

SEQ ID NO: 972286 - DNA, 33 bp, Homo sapien
gcagactctctgtaaacctcagatgtatatttc

SEQ ID NO: 972287 - DNA, 33 bp, Homo sapien
gcacatccacatctgcaactttaatgttccttg

SEQ ID NO: 972288 - DNA, 33 bp, Homo sapien
gcacatccacatctgcgactttaatgttccttg

SEQ ID NO: 972289 - DNA, 33 bp, Homo sapien
gtgatatggaggagaacgatctattaatgctgg

SEQ ID NO: 972290 - DNA, 33 bp, Homo sapien
gtgatatggaggagaatgatctattaatgctgg

SEQ ID NO: 972291 - DNA, 33 bp, Homo sapien
tttcaggtaggcatcaaataccggtcgctacct

SEQ ID NO: 972292 - DNA, 33 bp, Homo sapien
tttcaggtaggcatcagataccggtcgctacct

SEQ ID NO: 972293 - DNA, 33 bp, Homo sapien
tgagtaggagttgctagggaaaaaagttttggg

SEQ ID NO: 972294 - DNA, 33 bp, Homo sapien
tgagtaggagttgctatggaaaaaagttttggg

SEQ ID NO: 972295 - DNA, 33 bp, Homo sapien
aattatcgctggatagaacaggataatccctta

SEQ ID NO: 972296 - DNA, 33 bp, Homo sapien
aattatcgctggatagtacaggataatccctta

SEQ ID NO: 972297 - DNA, 33 bp, Homo sapien
taatatactacagctccgaaagtaatagacaga

SEQ ID NO: 972298 - DNA, 33 bp, Homo sapien
taatatactacagctctgaaagtaatagacaga

SEQ ID NO: 972299 - DNA, 33 bp, Homo sapien
caggcacagcatcatgaaggttttaggttctcc

SEQ ID NO: 972300 - DNA, 33 bp, Homo sapien
caggcacagcatcatgcaggttttaggttctcc

SEQ ID NO: 972301 - DNA, 33 bp, Homo sapien
ggaacttgtgtggcctcacaaggacttttattt

SEQ ID NO: 972302 - DNA, 33 bp, Homo sapien
ggaacttgtgtggccttacaaggacttttattt

SEQ ID NO: 972303 - DNA, 33 bp, Homo sapien
agaacctgaccgcccaatgggaacttgtgtggc

SEQ ID NO: 972304 - DNA, 33 bp, Homo sapien
agaacctgaccgcccagtgggaacttgtgtggc

SEQ ID NO: 972305 - DNA, 33 bp, Homo sapien
taatcaatcctgaagcccacctcacctttggac

SEQ ID NO: 972306 - DNA, 33 bp, Homo sapien
taatcaatcctgaagctcacctcacctttggac

SEQ ID NO: 972307 - DNA, 33 bp, Homo sapien
tacaaaatatgctactcagatatcctcaaatat

SEQ ID NO: 972308 - DNA, 33 bp, Homo sapien
tacaaaatatgctacttagatatcctcaaatat

SEQ ID NO: 972309 - DNA, 33 bp, Homo sapien
ttggctaatatgtcaccccccaataagggtgtg

SEQ ID NO: 972310 - DNA, 33 bp, Homo sapien
ttggctaatatgtcactccccaataagggtgtg

SEQ ID NO: 972311 - DNA, 33 bp, Homo sapien
gaaatacgtatggaagcacccttggtatggaac

SEQ ID NO: 972312 - DNA, 33 bp, Homo sapien
gaaatacgtatggaaggacccttggtatggaac

SEQ ID NO: 972313 - DNA, 33 bp, Homo sapien
aggcaaatatgaagccagctagaagctccaagt

SEQ ID NO: 972314 - DNA, 33 bp, Homo sapien
aggcaaatatgaagccggctagaagctccaagt

SEQ ID NO: 972315 - DNA, 33 bp, Homo sapien
tggctgttctgctaaaatactgctagcaaaggg

SEQ ID NO: 972316 - DNA, 33 bp, Homo sapien
tggctgttctgctaaactactgctagcaaaggg

SEQ ID NO: 972317 - DNA, 33 bp, Homo sapien
tagagtggctcttgggaataatgcttaatcgac

SEQ ID NO: 972318 - DNA, 33 bp, Homo sapien
tagagtggctcttgggtataatgcttaatcgac

SEQ ID NO: 972319 - DNA, 33 bp, Homo sapien
gccaaagcaagtcacacggctaagcccaggacc

SEQ ID NO: 972320 - DNA, 33 bp, Homo sapien
gccaaagcaagtcacatggctaagcccaggacc

SEQ ID NO: 972321 - DNA, 33 bp, Homo sapien
tccagtacaatagaggaatgaggacactgtggt

SEQ ID NO: 972322 - DNA, 33 bp, Homo sapien
tccagtacaatagagggatgaggacactgtggt

SEQ ID NO: 972323 - DNA, 33 bp, Homo sapien
gaagtatatgcacgtaataagtggaggagctat

SEQ ID NO: 972324 - DNA, 33 bp, Homo sapien
gaagtatatgcacgtagtaagtggaggagctat

SEQ ID NO: 972325 - DNA, 33 bp, Homo sapien
atggcgtcatggtttacattcaagattgcgatc

SEQ ID NO: 972326 - DNA, 33 bp, Homo sapien
atggcgtcatggtttatattcaagattgcgatc

SEQ ID NO: 972327 - DNA, 33 bp, Homo sapien
cttttctgtgtgacaccatttttaccatttatg

SEQ ID NO: 972328 - DNA, 33 bp, Homo sapien
cttttctgtgtgacactatttttaccatttatg

SEQ ID NO: 972329 - DNA, 33 bp, Homo sapien
cataggaattatgtcacgtttcttgattgtaga

SEQ ID NO: 972330 - DNA, 33 bp, Homo sapien
cataggaattatgtcaggtttcttgattgtaga

SEQ ID NO: 972331 - DNA, 33 bp, Homo sapien
ttgaatgcttaataagacgctaactgcttaaaa

SEQ ID NO: 972332 - DNA, 33 bp, Homo sapien
ttgaatgcttaataagccgctaactgcttaaaa

SEQ ID NO: 972333 - DNA, 33 bp, Homo sapien
gttaggaaaggccaaactatgtagacccttgca

SEQ ID NO: 972334 - DNA, 33 bp, Homo sapien
gttaggaaaggccaaattatgtagacccttgca

SEQ ID NO: 972335 - DNA, 33 bp, Homo sapien
atgctatgggacaatacatattaacccaataat

SEQ ID NO: 972336 - DNA, 33 bp, Homo sapien
atgctatgggacaatagatattaacccaataat

SEQ ID NO: 972337 - DNA, 33 bp, Homo sapien
agatgcgtgaaccaataaatttgcttacactgg

SEQ ID NO: 972338 - DNA, 33 bp, Homo sapien
agatgcgtgaaccaatgaatttgcttacactgg

SEQ ID NO: 972339 - DNA, 33 bp, Homo sapien
tcatcactggggactcagaagggtagaagaagg

SEQ ID NO: 972340 - DNA, 33 bp, Homo sapien
tcatcactggggactccgaagggtagaagaagg

SEQ ID NO: 972341 - DNA, 33 bp, Homo sapien
ctcaacaaccttatacaatcagtatgcctatta

SEQ ID NO: 972342 - DNA, 33 bp, Homo sapien
ctcaacaaccttatacgatcagtatgcctatta

SEQ ID NO: 972343 - DNA, 33 bp, Homo sapien
cagagatgatttcctccaccgtgtgcagagtac

SEQ ID NO: 972344 - DNA, 33 bp, Homo sapien
cagagatgatttcctcgaccgtgtgcagagtac

SEQ ID NO: 972345 - DNA, 33 bp, Homo sapien
tttatagattttccaaggctaagccactttgaa

SEQ ID NO: 972346 - DNA, 33 bp, Homo sapien
tttatagattttccaatgctaagccactttgaa

SEQ ID NO: 972347 - DNA, 33 bp, Homo sapien
gaagacaggcacagacaaaagggaaaatgaaga

SEQ ID NO: 972348 - DNA, 33 bp, Homo sapien
gaagacaggcacagacgaaagggaaaatgaaga

SEQ ID NO: 972349 - DNA, 33 bp, Homo sapien
caaaggatactaagtgacaaccaaggagaagag

SEQ ID NO: 972350 - DNA, 33 bp, Homo sapien
caaaggatactaagtggcaaccaaggagaagag

SEQ ID NO: 972351 - DNA, 33 bp, Homo sapien
tgcataaggaaggggaagagtgaagaaatagaa

SEQ ID NO: 972352 - DNA, 33 bp, Homo sapien
tgcataaggaaggggaggagtgaagaaatagaa

SEQ ID NO: 972353 - DNA, 33 bp, Homo sapien
atggtctctgtgctccaaattttacccatcctc

SEQ ID NO: 972354 - DNA, 33 bp, Homo sapien
atggtctctgtgctccgaattttacccatcctc

SEQ ID NO: 972355 - DNA, 33 bp, Homo sapien
atatgtgccttgtggacagtattttgcatcttg

SEQ ID NO: 972356 - DNA, 33 bp, Homo sapien
atatgtgccttgtggatagtattttgcatcttg

SEQ ID NO: 972357 - DNA, 33 bp, Homo sapien
acaaaatatcagtaaccatgcaaacagcttccc

SEQ ID NO: 972358 - DNA, 33 bp, Homo sapien
acaaaatatcagtaactatgcaaacagcttccc

SEQ ID NO: 972359 - DNA, 33 bp, Homo sapien
ttggtcctgagtggaactgacacttagaccaga

SEQ ID NO: 972360 - DNA, 33 bp, Homo sapien
ttggtcctgagtggaattgacacttagaccaga

SEQ ID NO: 972361 - DNA, 33 bp, Homo sapien
aggtaacctgcctttccaagaagagtaagggaa

SEQ ID NO: 972362 - DNA, 33 bp, Homo sapien
aggtaacctgcctttctaagaagagtaagggaa

SEQ ID NO: 972363 - DNA, 33 bp, Homo sapien
gttggttacagcttaacgtttgccttattgaac

SEQ ID NO: 972364 - DNA, 33 bp, Homo sapien
gttggttacagcttaatgtttgccttattgaac

SEQ ID NO: 972365 - DNA, 33 bp, Homo sapien
ttataggcatttgcaaaatatcaagggatcagc

SEQ ID NO: 972366 - DNA, 33 bp, Homo sapien
ttataggcatttgcaatatatcaagggatcagc

SEQ ID NO: 972367 - DNA, 33 bp, Homo sapien
caggtcaccaccagtgaaaactttagcaatgga

SEQ ID NO: 972368 - DNA, 33 bp, Homo sapien
caggtcaccaccagtggaaactttagcaatgga

SEQ ID NO: 972369 - DNA, 33 bp, Homo sapien
atggtagtatgtatgtaaaaatttaaaaacaca

SEQ ID NO: 972370 - DNA, 33 bp, Homo sapien
atggtagtatgtatgtgaaaatttaaaaacaca

SEQ ID NO: 972371 - DNA, 33 bp, Homo sapien
ctcactaagtcataaagagtagagctgggatat

SEQ ID NO: 972372 - DNA, 33 bp, Homo sapien
ctcactaagtcataaatagtagagctgggatat

SEQ ID NO: 972373 - DNA, 33 bp, Homo sapien
ggtttggatccatacactggaacacttgtactg

SEQ ID NO: 972374 - DNA, 33 bp, Homo sapien
ggtttggatccatacattggaacacttgtactg

SEQ ID NO: 972375 - DNA, 33 bp, Homo sapien
aaatagaaacatagcaaaaacaggacattatag

SEQ ID NO: 972376 - DNA, 33 bp, Homo sapien
aaatagaaacatagcagaaacaggacattatag

SEQ ID NO: 972377 - DNA, 33 bp, Homo sapien
ctaattaattgaatccccttctctccctaagac

SEQ ID NO: 972378 - DNA, 33 bp, Homo sapien
ctaattaattgaatcctcttctctccctaagac

SEQ ID NO: 972379 - DNA, 33 bp, Homo sapien
tgaactttctcagttacgtaatttcaactaccc

SEQ ID NO: 972380 - DNA, 33 bp, Homo sapien
tgaactttctcagttatgtaatttcaactaccc

SEQ ID NO: 972381 - DNA, 33 bp, Homo sapien
aaacaccacctcaaacagcaattaaatgcgcat

SEQ ID NO: 972382 - DNA, 33 bp, Homo sapien
aaacaccacctcaaacggcaattaaatgcgcat

SEQ ID NO: 972383 - DNA, 33 bp, Homo sapien
tgcaaaatagtttcaacggatgcatggattgat

SEQ ID NO: 972384 - DNA, 33 bp, Homo sapien
tgcaaaatagtttcaatggatgcatggattgat

SEQ ID NO: 972385 - DNA, 33 bp, Homo sapien
atgctgctcctgttaactgattcattaatccag

SEQ ID NO: 972386 - DNA, 33 bp, Homo sapien
atgctgctcctgttaattgattcattaatccag

SEQ ID NO: 972387 - DNA, 33 bp, Homo sapien
agaatttcttccaagagagcaaaccagggtcca

SEQ ID NO: 972388 - DNA, 33 bp, Homo sapien
agaatttcttccaagatagcaaaccagggtcca

SEQ ID NO: 972389 - DNA, 33 bp, Homo sapien
cctggactacacagaacaaagaacaaagaattt

SEQ ID NO: 972390 - DNA, 33 bp, Homo sapien
cctggactacacagaataaagaacaaagaattt

SEQ ID NO: 972391 - DNA, 33 bp, Homo sapien
gggttttctattatgacggtaaaagtgcccttt

SEQ ID NO: 972392 - DNA, 33 bp, Homo sapien
gggttttctattatgatggtaaaagtgcccttt

SEQ ID NO: 972393 - DNA, 33 bp, Homo sapien
cccccatgtctgttaacgccacatgctaccttt

SEQ ID NO: 972394 - DNA, 33 bp, Homo sapien
cccccatgtctgttaatgccacatgctaccttt

SEQ ID NO: 972395 - DNA, 33 bp, Homo sapien
ggccgtaaatctgagacggagaatgatcaggaa

SEQ ID NO: 972396 - DNA, 33 bp, Homo sapien
ggccgtaaatctgagatggagaatgatcaggaa

SEQ ID NO: 972397 - DNA, 33 bp, Homo sapien
catacttttggagatacgtgtctttgctttagg

SEQ ID NO: 972398 - DNA, 33 bp, Homo sapien
catacttttggagatatgtgtctttgctttagg

SEQ ID NO: 972399 - DNA, 33 bp, Homo sapien
ataacacttacgcttacctaaaagagtagatca

SEQ ID NO: 972400 - DNA, 33 bp, Homo sapien
ataacacttacgcttatctaaaagagtagatca

SEQ ID NO: 972401 - DNA, 33 bp, Homo sapien
ctagatatatgcacagccaaaaataaatactat

SEQ ID NO: 972402 - DNA, 33 bp, Homo sapien
ctagatatatgcacagtcaaaaataaatactat

SEQ ID NO: 972403 - DNA, 33 bp, Homo sapien
tatatcaatcctatgaaaacacatcattaattg

SEQ ID NO: 972404 - DNA, 33 bp, Homo sapien
tatatcaatcctatgagaacacatcattaattg

SEQ ID NO: 972405 - DNA, 33 bp, Homo sapien
atacctagcaaccttcaagaggatcatatgtta

SEQ ID NO: 972406 - DNA, 33 bp, Homo sapien
atacctagcaaccttcgagaggatcatatgtta

SEQ ID NO: 972407 - DNA, 33 bp, Homo sapien
agctcagctgaataggcagtccagagcccacac

SEQ ID NO: 972408 - DNA, 33 bp, Homo sapien
agctcagctgaataggtagtccagagcccacac

SEQ ID NO: 972409 - DNA, 33 bp, Homo sapien
aatcctctccttaaaagcttgagaattcaagtc

SEQ ID NO: 972410 - DNA, 33 bp, Homo sapien
aatcctctccttaaaatcttgagaattcaagtc

SEQ ID NO: 972411 - DNA, 33 bp, Homo sapien
tgaggccacctccccaaatttaggctggtacaa

SEQ ID NO: 972412 - DNA, 33 bp, Homo sapien
tgaggccacctccccatatttaggctggtacaa

SEQ ID NO: 972413 - DNA, 33 bp, Homo sapien
ttgttatttcaccatcagaaacaaacaggccat

SEQ ID NO: 972414 - DNA, 33 bp, Homo sapien
ttgttatttcaccatcggaaacaaacaggccat

SEQ ID NO: 972415 - DNA, 33 bp, Homo sapien
gagtaaaagttaaggcagaaaagtgtatctgaa

SEQ ID NO: 972416 - DNA, 33 bp, Homo sapien
gagtaaaagttaaggcggaaaagtgtatctgaa

SEQ ID NO: 972417 - DNA, 33 bp, Homo sapien
gtattactgttaggcacagagacacttacatgt

SEQ ID NO: 972418 - DNA, 33 bp, Homo sapien
gtattactgttaggcatagagacacttacatgt

SEQ ID NO: 972419 - DNA, 33 bp, Homo sapien
gtaaggacatacttgacctaagaaacatggacc

SEQ ID NO: 972420 - DNA, 33 bp, Homo sapien
gtaaggacatacttgatctaagaaacatggacc

SEQ ID NO: 972421 - DNA, 33 bp, Homo sapien
gaggaagaaatcccacagatttaagcaagaaca

SEQ ID NO: 972422 - DNA, 33 bp, Homo sapien
gaggaagaaatcccactgatttaagcaagaaca

SEQ ID NO: 972423 - DNA, 33 bp, Homo sapien
aaatactacttggtgaacataaataagaaaaaa

SEQ ID NO: 972424 - DNA, 33 bp, Homo sapien
aaatactacttggtgagcataaataagaaaaaa

SEQ ID NO: 972425 - DNA, 33 bp, Homo sapien
ctttgatcaacatgcaacaaatacgaaaataaa

SEQ ID NO: 972426 - DNA, 33 bp, Homo sapien
ctttgatcaacatgcaccaaatacgaaaataaa

SEQ ID NO: 972427 - DNA, 33 bp, Homo sapien
ggaagctctgcaaagaacctgctttcacgctct

SEQ ID NO: 972428 - DNA, 33 bp, Homo sapien
ggaagctctgcaaagatcctgctttcacgctct

SEQ ID NO: 972429 - DNA, 33 bp, Homo sapien
tatcagaaatcagaccaattctctctaaagcct

SEQ ID NO: 972430 - DNA, 33 bp, Homo sapien
tatcagaaatcagaccgattctctctaaagcct

SEQ ID NO: 972431 - DNA, 33 bp, Homo sapien
tgatacaataacattgaaactgagcatatcaga

SEQ ID NO: 972432 - DNA, 33 bp, Homo sapien
tgatacaataacattggaactgagcatatcaga

SEQ ID NO: 972433 - DNA, 33 bp, Homo sapien
catgtagttttctgtaaagtgccagctagcacg

SEQ ID NO: 972434 - DNA, 33 bp, Homo sapien
catgtagttttctgtagagtgccagctagcacg

SEQ ID NO: 972435 - DNA, 33 bp, Homo sapien
gacttctcctctctaactatcaaactcctagat

SEQ ID NO: 972436 - DNA, 33 bp, Homo sapien
gacttctcctctctaattatcaaactcctagat

SEQ ID NO: 972437 - DNA, 33 bp, Homo sapien
ttctgtgacctccataagtaggatgacatctcc

SEQ ID NO: 972438 - DNA, 33 bp, Homo sapien
ttctgtgacctccataggtaggatgacatctcc

SEQ ID NO: 972439 - DNA, 33 bp, Homo sapien
tggagggatggtgagaagtcaatggatactggt

SEQ ID NO: 972440 - DNA, 33 bp, Homo sapien
tggagggatggtgagaggtcaatggatactggt

SEQ ID NO: 972441 - DNA, 33 bp, Homo sapien
aaacaaggaggtctccaaggcttttagctgcaa

SEQ ID NO: 972442 - DNA, 33 bp, Homo sapien
aaacaaggaggtctccgaggcttttagctgcaa

SEQ ID NO: 972443 - DNA, 33 bp, Homo sapien
catgaggaatctctgacgtgaaggttctaaagg

SEQ ID NO: 972444 - DNA, 33 bp, Homo sapien
catgaggaatctctgatgtgaaggttctaaagg

SEQ ID NO: 972445 - DNA, 33 bp, Homo sapien
gagagtggagaggttcggaaaaagagagagctg

SEQ ID NO: 972446 - DNA, 33 bp, Homo sapien
gagagtggagaggttctgaaaaagagagagctg

SEQ ID NO: 972447 - DNA, 33 bp, Homo sapien
tgtttaaatatctaaaagtggctagatccaata

SEQ ID NO: 972448 - DNA, 33 bp, Homo sapien
tgtttaaatatctaaaggtggctagatccaata

SEQ ID NO: 972449 - DNA, 33 bp, Homo sapien
tcacaattgcccaaagccttatggtgccactag

SEQ ID NO: 972450 - DNA, 33 bp, Homo sapien
tcacaattgcccaaaggcttatggtgccactag

SEQ ID NO: 972451 - DNA, 33 bp, Homo sapien
aagccattgtcttctccatcctcaggacaattt

SEQ ID NO: 972452 - DNA, 33 bp, Homo sapien
aagccattgtcttctcgatcctcaggacaattt

SEQ ID NO: 972453 - DNA, 33 bp, Homo sapien
gactcacataaggcaaatatcaactttgttcct

SEQ ID NO: 972454 - DNA, 33 bp, Homo sapien
gactcacataaggcaagtatcaactttgttcct

SEQ ID NO: 972455 - DNA, 33 bp, Homo sapien
attcatcctgttctataaagctaagatcgataa

SEQ ID NO: 972456 - DNA, 33 bp, Homo sapien
attcatcctgttctattaagctaagatcgataa

SEQ ID NO: 972457 - DNA, 33 bp, Homo sapien
gtaggagctgcaaatacagcggtgctctcagtg

SEQ ID NO: 972458 - DNA, 33 bp, Homo sapien
gtaggagctgcaaatatagcggtgctctcagtg

SEQ ID NO: 972459 - DNA, 33 bp, Homo sapien
caagttctccaagagactaatgttttccttaat

SEQ ID NO: 972460 - DNA, 33 bp, Homo sapien
caagttctccaagagattaatgttttccttaat

SEQ ID NO: 972461 - DNA, 33 bp, Homo sapien
aaagcctataatcaaaataaacagactggtaca

SEQ ID NO: 972462 - DNA, 33 bp, Homo sapien
aaagcctataatcaaactaaacagactggtaca

SEQ ID NO: 972463 - DNA, 33 bp, Homo sapien
gtcatttaatgacaaaattatctattcataaca

SEQ ID NO: 972464 - DNA, 33 bp, Homo sapien
gtcatttaatgacaaagttatctattcataaca

SEQ ID NO: 972465 - DNA, 33 bp, Homo sapien
gccatctcaagaaaaacgttccagggataacaa

SEQ ID NO: 972466 - DNA, 33 bp, Homo sapien
gccatctcaagaaaaatgttccagggataacaa

SEQ ID NO: 972467 - DNA, 33 bp, Homo sapien
tgatgaagttaatggacgggagatggttcctgc

SEQ ID NO: 972468 - DNA, 33 bp, Homo sapien
tgatgaagttaatggatgggagatggttcctgc

SEQ ID NO: 972469 - DNA, 33 bp, Homo sapien
tcttcctccaccagccaacaaattttgagtgag

SEQ ID NO: 972470 - DNA, 33 bp, Homo sapien
tcttcctccaccagcccacaaattttgagtgag

SEQ ID NO: 972471 - DNA, 33 bp, Homo sapien
gtcaggaaccctgtgcaccatctttgtctttgc

SEQ ID NO: 972472 - DNA, 33 bp, Homo sapien
gtcaggaaccctgtgcgccatctttgtctttgc

SEQ ID NO: 972473 - DNA, 33 bp, Homo sapien
taataaccatctcttgacaaacctcagactgtg

SEQ ID NO: 972474 - DNA, 33 bp, Homo sapien
taataaccatctcttggcaaacctcagactgtg

SEQ ID NO: 972475 - DNA, 33 bp, Homo sapien
aaaatatgaccacaccaggccttttgtatttgg

SEQ ID NO: 972476 - DNA, 33 bp, Homo sapien
aaaatatgaccacaccgggccttttgtatttgg

SEQ ID NO: 972477 - DNA, 33 bp, Homo sapien
aagtagaacagaaggaaggaaggtcatacaaac

SEQ ID NO: 972478 - DNA, 33 bp, Homo sapien
aagtagaacagaaggagggaaggtcatacaaac

SEQ ID NO: 972479 - DNA, 33 bp, Homo sapien
tgcagtagagtgctcccaaagaaatctctgaca

SEQ ID NO: 972480 - DNA, 33 bp, Homo sapien
tgcagtagagtgctccgaaagaaatctctgaca

SEQ ID NO: 972481 - DNA, 33 bp, Homo sapien
aaatgagggctcttaaactttcttgaggtgtca

SEQ ID NO: 972482 - DNA, 33 bp, Homo sapien
aaatgagggctcttaacctttcttgaggtgtca

SEQ ID NO: 972483 - DNA, 33 bp, Homo sapien
ggctctgaaggatagacgcaaacactggagaga

SEQ ID NO: 972484 - DNA, 33 bp, Homo sapien
ggctctgaaggatagatgcaaacactggagaga

SEQ ID NO: 972485 - DNA, 33 bp, Homo sapien
gtttcttaaagtcataatatactacagctagaa

SEQ ID NO: 972486 - DNA, 33 bp, Homo sapien
gtttcttaaagtcatagtatactacagctagaa

SEQ ID NO: 972487 - DNA, 33 bp, Homo sapien
tcagatttgtaatcaactatctgttctgtgtac

SEQ ID NO: 972488 - DNA, 33 bp, Homo sapien
tcagatttgtaatcaattatctgttctgtgtac

SEQ ID NO: 972489 - DNA, 33 bp, Homo sapien
ttgtccttttgtccaactgagagtggtcataaa

SEQ ID NO: 972490 - DNA, 33 bp, Homo sapien
ttgtccttttgtccaattgagagtggtcataaa

SEQ ID NO: 972491 - DNA, 33 bp, Homo sapien
aattccaaattcagcactgaaaaactagcttag

SEQ ID NO: 972492 - DNA, 33 bp, Homo sapien
aattccaaattcagcattgaaaaactagcttag

SEQ ID NO: 972493 - DNA, 33 bp, Homo sapien
gagtctccctgggaaaatacaaagacagattgg

SEQ ID NO: 972494 - DNA, 33 bp, Homo sapien
gagtctccctgggaaagtacaaagacagattgg

SEQ ID NO: 972495 - DNA, 33 bp, Homo sapien
attcaaacttgatagccccagttcagagtgggc

SEQ ID NO: 972496 - DNA, 33 bp, Homo sapien
attcaaacttgatagctccagttcagagtgggc

SEQ ID NO: 972497 - DNA, 33 bp, Homo sapien
tactggaggactctgaaaaataaattgtaacag

SEQ ID NO: 972498 - DNA, 33 bp, Homo sapien
tactggaggactctgataaataaattgtaacag

SEQ ID NO: 972499 - DNA, 33 bp, Homo sapien
taataaaatctgaatgcatggcctcctctagac

SEQ ID NO: 972500 - DNA, 33 bp, Homo sapien
taataaaatctgaatgtatggcctcctctagac

SEQ ID NO: 972501 - DNA, 33 bp, Homo sapien
cattttagctgaccacaatggggttggagaggg

SEQ ID NO: 972502 - DNA, 33 bp, Homo sapien
cattttagctgaccaccatggggttggagaggg

SEQ ID NO: 972503 - DNA, 33 bp, Homo sapien
tcattggcaggtagtacaatgtatttcataaag

SEQ ID NO: 972504 - DNA, 33 bp, Homo sapien
tcattggcaggtagtataatgtatttcataaag

SEQ ID NO: 972505 - DNA, 33 bp, Homo sapien
ctatcctaaagctgagaaactgatatcaggtag

SEQ ID NO: 972506 - DNA, 33 bp, Homo sapien
ctatcctaaagctgaggaactgatatcaggtag

SEQ ID NO: 972507 - DNA, 33 bp, Homo sapien
cgatgcccatctagacactggatttttcaaaag

SEQ ID NO: 972508 - DNA, 33 bp, Homo sapien
cgatgcccatctagactctggatttttcaaaag

SEQ ID NO: 972509 - DNA, 33 bp, Homo sapien
tatgaacaaactcttcacaatttcttctttctt

SEQ ID NO: 972510 - DNA, 33 bp, Homo sapien
tatgaacaaactcttcccaatttcttctttctt

SEQ ID NO: 972511 - DNA, 33 bp, Homo sapien
aggagcgggaaatgaaagagatatcctcagcac

SEQ ID NO: 972512 - DNA, 33 bp, Homo sapien
aggagcgggaaatgaaggagatatcctcagcac

SEQ ID NO: 972513 - DNA, 33 bp, Homo sapien
gcttattatatgctacgggaccaagggctttta

SEQ ID NO: 972514 - DNA, 33 bp, Homo sapien
gcttattatatgctactggaccaagggctttta

SEQ ID NO: 972515 - DNA, 33 bp, Homo sapien
gactcatcataggcaaattactttctgtgcctc

SEQ ID NO: 972516 - DNA, 33 bp, Homo sapien
gactcatcataggcaagttactttctgtgcctc

SEQ ID NO: 972517 - DNA, 33 bp, Homo sapien
agagcagcccattaacaattggccaggtaagaa

SEQ ID NO: 972518 - DNA, 33 bp, Homo sapien
agagcagcccattaaccattggccaggtaagaa

SEQ ID NO: 972519 - DNA, 33 bp, Homo sapien
tttccataattagaaaactaagctgcagaactg

SEQ ID NO: 972520 - DNA, 33 bp, Homo sapien
tttccataattagaaatctaagctgcagaactg

SEQ ID NO: 972521 - DNA, 33 bp, Homo sapien
cacagcttagtctgtcactttctgagtagatgc

SEQ ID NO: 972522 - DNA, 33 bp, Homo sapien
cacagcttagtctgtcgctttctgagtagatgc

SEQ ID NO: 972523 - DNA, 33 bp, Homo sapien
agtggtggatattgaaaaccgagtcactgggaa

SEQ ID NO: 972524 - DNA, 33 bp, Homo sapien
agtggtggatattgaataccgagtcactgggaa

SEQ ID NO: 972525 - DNA, 33 bp, Homo sapien
tatttattctgtgacaatgggccaaaactgttt

SEQ ID NO: 972526 - DNA, 33 bp, Homo sapien
tatttattctgtgacagtgggccaaaactgttt

SEQ ID NO: 972527 - DNA, 33 bp, Homo sapien
tagcaaatgtgtaaaactgaaaatgagggcagg

SEQ ID NO: 972528 - DNA, 33 bp, Homo sapien
tagcaaatgtgtaaaattgaaaatgagggcagg

SEQ ID NO: 972529 - DNA, 33 bp, Homo sapien
tctgggcaggctaacaggactaataataaactt

SEQ ID NO: 972530 - DNA, 33 bp, Homo sapien
tctgggcaggctaacatgactaataataaactt

SEQ ID NO: 972531 - DNA, 33 bp, Homo sapien
acaacaggtgttccaacagtgtttgctcaatga

SEQ ID NO: 972532 - DNA, 33 bp, Homo sapien
acaacaggtgttccaatagtgtttgctcaatga

SEQ ID NO: 972533 - DNA, 33 bp, Homo sapien
gaaccatatactgtgtaaaagccaatacaagca

SEQ ID NO: 972534 - DNA, 33 bp, Homo sapien
gaaccatatactgtgtgaaagccaatacaagca

SEQ ID NO: 972535 - DNA, 33 bp, Homo sapien
tttatgctcattctcaatcgttctaaaatctaa

SEQ ID NO: 972536 - DNA, 33 bp, Homo sapien
tttatgctcattctcagtcgttctaaaatctaa

SEQ ID NO: 972537 - DNA, 33 bp, Homo sapien
gaatgaatatattttacgatgctagttaagaga

SEQ ID NO: 972538 - DNA, 33 bp, Homo sapien
gaatgaatatattttatgatgctagttaagaga

SEQ ID NO: 972539 - DNA, 33 bp, Homo sapien
gtttaccactgtttgaccctttctctgcagcat

SEQ ID NO: 972540 - DNA, 33 bp, Homo sapien
gtttaccactgtttgatcctttctctgcagcat

SEQ ID NO: 972541 - DNA, 33 bp, Homo sapien
gccagtcaaaagatgacgataatagcaaagaaa

SEQ ID NO: 972542 - DNA, 33 bp, Homo sapien
gccagtcaaaagatgatgataatagcaaagaaa

SEQ ID NO: 972543 - DNA, 33 bp, Homo sapien
aggcacaccagaactaataatcaacacctggtc

SEQ ID NO: 972544 - DNA, 33 bp, Homo sapien
aggcacaccagaactagtaatcaacacctggtc

SEQ ID NO: 972545 - DNA, 33 bp, Homo sapien
ttgcaaacaatctacagtccttctagagtttta

SEQ ID NO: 972546 - DNA, 33 bp, Homo sapien
ttgcaaacaatctacattccttctagagtttta

SEQ ID NO: 972547 - DNA, 33 bp, Homo sapien
gggacactgaagattacactttgtgggtgtgat

SEQ ID NO: 972548 - DNA, 33 bp, Homo sapien
gggacactgaagattatactttgtgggtgtgat

SEQ ID NO: 972549 - DNA, 33 bp, Homo sapien
gtcacatttttcatagcaggtatctaaaacttt

SEQ ID NO: 972550 - DNA, 33 bp, Homo sapien
gtcacatttttcatagtaggtatctaaaacttt

SEQ ID NO: 972551 - DNA, 33 bp, Homo sapien
caatctacctctcctacgctagaacctcactat

SEQ ID NO: 972552 - DNA, 33 bp, Homo sapien
caatctacctctcctatgctagaacctcactat

SEQ ID NO: 972553 - DNA, 33 bp, Homo sapien
cctccccctgtagcaacggttctccaaatatat

SEQ ID NO: 972554 - DNA, 33 bp, Homo sapien
cctccccctgtagcaatggttctccaaatatat

SEQ ID NO: 972555 - DNA, 33 bp, Homo sapien
tttaagagaatatgaaggatgagtactttccta

SEQ ID NO: 972556 - DNA, 33 bp, Homo sapien
tttaagagaatatgaatgatgagtactttccta

SEQ ID NO: 972557 - DNA, 33 bp, Homo sapien
acctcttcctgagaaaatgtccttttattctgt

SEQ ID NO: 972558 - DNA, 33 bp, Homo sapien
acctcttcctgagaaagtgtccttttattctgt

SEQ ID NO: 972559 - DNA, 33 bp, Homo sapien
aggaggctgttatttacaccagtgaggcccaat

SEQ ID NO: 972560 - DNA, 33 bp, Homo sapien
aggaggctgttatttataccagtgaggcccaat

SEQ ID NO: 972561 - DNA, 33 bp, Homo sapien
ctctctctgagactgacgctttaaaaattggag

SEQ ID NO: 972562 - DNA, 33 bp, Homo sapien
ctctctctgagactgatgctttaaaaattggag

SEQ ID NO: 972563 - DNA, 33 bp, Homo sapien
agaccagcctcgggaaatggtgctgtaattacc

SEQ ID NO: 972564 - DNA, 33 bp, Homo sapien
agaccagcctcgggaagtggtgctgtaattacc

SEQ ID NO: 972565 - DNA, 33 bp, Homo sapien
ctttggccacaggagacgtaaactatccctatt

SEQ ID NO: 972566 - DNA, 33 bp, Homo sapien
ctttggccacaggagatgtaaactatccctatt

SEQ ID NO: 972567 - DNA, 33 bp, Homo sapien
tttgcacacttacccacgtgacagaggagggaa

SEQ ID NO: 972568 - DNA, 33 bp, Homo sapien
tttgcacacttacccatgtgacagaggagggaa

SEQ ID NO: 972569 - DNA, 33 bp, Homo sapien
gtgtgtgatctatagaactatgtaaaaagtagt

SEQ ID NO: 972570 - DNA, 33 bp, Homo sapien
gtgtgtgatctatagacctatgtaaaaagtagt

SEQ ID NO: 972571 - DNA, 33 bp, Homo sapien
gtcctaaaaatcaccaatgaattgtcacgagtg

SEQ ID NO: 972572 - DNA, 33 bp, Homo sapien
gtcctaaaaatcaccagtgaattgtcacgagtg

SEQ ID NO: 972573 - DNA, 33 bp, Homo sapien
ccttgccgttcaccaacgaagcagccttaatcc

SEQ ID NO: 972574 - DNA, 33 bp, Homo sapien
ccttgccgttcaccaatgaagcagccttaatcc

SEQ ID NO: 972575 - DNA, 33 bp, Homo sapien
tgaactagcaggagaaggtaagtccacagttgc

SEQ ID NO: 972576 - DNA, 33 bp, Homo sapien
tgaactagcaggagaatgtaagtccacagttgc

SEQ ID NO: 972577 - DNA, 33 bp, Homo sapien
gattatcctgggtgagaagagaacagacacacc

SEQ ID NO: 972578 - DNA, 33 bp, Homo sapien
gattatcctgggtgagtagagaacagacacacc

SEQ ID NO: 972579 - DNA, 33 bp, Homo sapien
acttttggctaggagcaagaggactgtcacaag

SEQ ID NO: 972580 - DNA, 33 bp, Homo sapien
acttttggctaggagccagaggactgtcacaag

SEQ ID NO: 972581 - DNA, 33 bp, Homo sapien
caaacaaaatagtagcaatttaaacagatcatc

SEQ ID NO: 972582 - DNA, 33 bp, Homo sapien
caaacaaaatagtagcgatttaaacagatcatc

SEQ ID NO: 972583 - DNA, 33 bp, Homo sapien
tttatgagctgtaaataacaacttaaatagtta

SEQ ID NO: 972584 - DNA, 33 bp, Homo sapien
tttatgagctgtaaatgacaacttaaatagtta

SEQ ID NO: 972585 - DNA, 33 bp, Homo sapien
agcatgacccatgacaactggcctgttttctgg

SEQ ID NO: 972586 - DNA, 33 bp, Homo sapien
agcatgacccatgacacctggcctgttttctgg

SEQ ID NO: 972587 - DNA, 33 bp, Homo sapien
aaaggggagataaaaccgtgcagaaatataaac

SEQ ID NO: 972588 - DNA, 33 bp, Homo sapien
aaaggggagataaaactgtgcagaaatataaac

SEQ ID NO: 972589 - DNA, 33 bp, Homo sapien
gagctgtacactatgcaaagaagaagatggatg

SEQ ID NO: 972590 - DNA, 33 bp, Homo sapien
gagctgtacactatgcgaagaagaagatggatg

SEQ ID NO: 972591 - DNA, 33 bp, Homo sapien
ctaaggagagagatccaaatcatctgtgtgact

SEQ ID NO: 972592 - DNA, 33 bp, Homo sapien
ctaaggagagagatcccaatcatctgtgtgact

SEQ ID NO: 972593 - DNA, 33 bp, Homo sapien
cctagtagctatggacaatttacttaatctctt

SEQ ID NO: 972594 - DNA, 33 bp, Homo sapien
cctagtagctatggactatttacttaatctctt

SEQ ID NO: 972595 - DNA, 33 bp, Homo sapien
gcttacttatgattgaaaactcttaatggcttt

SEQ ID NO: 972596 - DNA, 33 bp, Homo sapien
gcttacttatgattgataactcttaatggcttt

SEQ ID NO: 972597 - DNA, 33 bp, Homo sapien
tccatcttcatcagtacaatttcaggcaatgga

SEQ ID NO: 972598 - DNA, 33 bp, Homo sapien
tccatcttcatcagtagaatttcaggcaatgga

SEQ ID NO: 972599 - DNA, 33 bp, Homo sapien
gaagtagaatctcgaccctgcttgctatggaga

SEQ ID NO: 972600 - DNA, 33 bp, Homo sapien
gaagtagaatctcgactctgcttgctatggaga

SEQ ID NO: 972601 - DNA, 33 bp, Homo sapien
aatggttgtggtaagtaaagcaatacctaagtg

SEQ ID NO: 972602 - DNA, 33 bp, Homo sapien
aatggttgtggtaagtgaagcaatacctaagtg

SEQ ID NO: 972603 - DNA, 33 bp, Homo sapien
aaaactaatcattcaaacccttaagccattcca

SEQ ID NO: 972604 - DNA, 33 bp, Homo sapien
aaaactaatcattcaagcccttaagccattcca

SEQ ID NO: 972605 - DNA, 33 bp, Homo sapien
ggcatgatgtcagacacggaaggaaagaggaac

SEQ ID NO: 972606 - DNA, 33 bp, Homo sapien
ggcatgatgtcagacatggaaggaaagaggaac

SEQ ID NO: 972607 - DNA, 33 bp, Homo sapien
agtccaagtcagcaaaacctcttagttgcttag

SEQ ID NO: 972608 - DNA, 33 bp, Homo sapien
agtccaagtcagcaaatcctcttagttgcttag

SEQ ID NO: 972609 - DNA, 33 bp, Homo sapien
gctgctttgaagcaagcatttgatcaagtgtta

SEQ ID NO: 972610 - DNA, 33 bp, Homo sapien
gctgctttgaagcaaggatttgatcaagtgtta

SEQ ID NO: 972611 - DNA, 33 bp, Homo sapien
catgcacctgcataaaatttagactaaatactt

SEQ ID NO: 972612 - DNA, 33 bp, Homo sapien
catgcacctgcataaagtttagactaaatactt

SEQ ID NO: 972613 - DNA, 33 bp, Homo sapien
tgaaatctagtgacaaagtatttgaatgaagac

SEQ ID NO: 972614 - DNA, 33 bp, Homo sapien
tgaaatctagtgacaatgtatttgaatgaagac

SEQ ID NO: 972615 - DNA, 33 bp, Homo sapien
agggtgcagccaacaccaatgctaaagacaggc

SEQ ID NO: 972616 - DNA, 33 bp, Homo sapien
agggtgcagccaacactaatgctaaagacaggc

SEQ ID NO: 972617 - DNA, 33 bp, Homo sapien
ccagtgcaatggagggaaaaaaagtacacaaga

SEQ ID NO: 972618 - DNA, 33 bp, Homo sapien
ccagtgcaatggaggggaaaaaagtacacaaga

SEQ ID NO: 972619 - DNA, 33 bp, Homo sapien
tgaactaatacatggccctactaaccaaacaca

SEQ ID NO: 972620 - DNA, 33 bp, Homo sapien
tgaactaatacatggctctactaaccaaacaca

SEQ ID NO: 972621 - DNA, 33 bp, Homo sapien
gcttccaggaatactacagagagatctgataca

SEQ ID NO: 972622 - DNA, 33 bp, Homo sapien
gcttccaggaatactatagagagatctgataca

SEQ ID NO: 972623 - DNA, 33 bp, Homo sapien
tatcatttcaatgggaagggagaattattgcat

SEQ ID NO: 972624 - DNA, 33 bp, Homo sapien
tatcatttcaatgggaggggagaattattgcat

SEQ ID NO: 972625 - DNA, 33 bp, Homo sapien
cttagaaagccacgagaaaggggcattgtggag

SEQ ID NO: 972626 - DNA, 33 bp, Homo sapien
cttagaaagccacgaggaaggggcattgtggag

SEQ ID NO: 972627 - DNA, 33 bp, Homo sapien
acaattcagaccataccgcatacttagcattta

SEQ ID NO: 972628 - DNA, 33 bp, Homo sapien
acaattcagaccatactgcatacttagcattta

SEQ ID NO: 972629 - DNA, 33 bp, Homo sapien
tacccttgagcaaatcaattagacactttactc

SEQ ID NO: 972630 - DNA, 33 bp, Homo sapien
tacccttgagcaaatcgattagacactttactc

SEQ ID NO: 972631 - DNA, 33 bp, Homo sapien
cacggatcctgtaatgaataaaacaacttaaaa

SEQ ID NO: 972632 - DNA, 33 bp, Homo sapien
cacggatcctgtaatgcataaaacaacttaaaa

SEQ ID NO: 972633 - DNA, 33 bp, Homo sapien
aaatcttaaggcccttaaaatgatatatcaact

SEQ ID NO: 972634 - DNA, 33 bp, Homo sapien
aaatcttaaggcccttcaaatgatatatcaact

SEQ ID NO: 972635 - DNA, 33 bp, Homo sapien
accaagccctgggttaagtataatggtagtagt

SEQ ID NO: 972636 - DNA, 33 bp, Homo sapien
accaagccctgggttaggtataatggtagtagt

SEQ ID NO: 972637 - DNA, 33 bp, Homo sapien
tgagacaagcgattgaactactgaagtaaaaat

SEQ ID NO: 972638 - DNA, 33 bp, Homo sapien
tgagacaagcgattgagctactgaagtaaaaat

SEQ ID NO: 972639 - DNA, 33 bp, Homo sapien
tagaaagatgatggaaaaggcaagtagttgtct

SEQ ID NO: 972640 - DNA, 33 bp, Homo sapien
tagaaagatgatggaagaggcaagtagttgtct

SEQ ID NO: 972641 - DNA, 33 bp, Homo sapien
atttgctaattagttaccagctgttgtgagtct

SEQ ID NO: 972642 - DNA, 33 bp, Homo sapien
atttgctaattagttatcagctgttgtgagtct

SEQ ID NO: 972643 - DNA, 33 bp, Homo sapien
ggcatgaagaatggataaataagtgatgttttt

SEQ ID NO: 972644 - DNA, 33 bp, Homo sapien
ggcatgaagaatggatgaataagtgatgttttt

SEQ ID NO: 972645 - DNA, 33 bp, Homo sapien
gtttatcagcgttacgaaggtggtctttccttg

SEQ ID NO: 972646 - DNA, 33 bp, Homo sapien
gtttatcagcgttacgcaggtggtctttccttg

SEQ ID NO: 972647 - DNA, 33 bp, Homo sapien
caagtttctccaaacagaagcataattaatggt

SEQ ID NO: 972648 - DNA, 33 bp, Homo sapien
caagtttctccaaacataagcataattaatggt

SEQ ID NO: 972649 - DNA, 33 bp, Homo sapien
taagccttggaaataaccttagatgcaaatggt

SEQ ID NO: 972650 - DNA, 33 bp, Homo sapien
taagccttggaaataatcttagatgcaaatggt

SEQ ID NO: 972651 - DNA, 33 bp, Homo sapien
acaagacatagtaaaaactccgagtattgtaac

SEQ ID NO: 972652 - DNA, 33 bp, Homo sapien
acaagacatagtaaaatctccgagtattgtaac

SEQ ID NO: 972653 - DNA, 33 bp, Homo sapien
atggaactgaaaatgcaacaagtttctgttaca

SEQ ID NO: 972654 - DNA, 33 bp, Homo sapien
atggaactgaaaatgccacaagtttctgttaca

SEQ ID NO: 972655 - DNA, 33 bp, Homo sapien
cctctggagagctagcactgttcatatggttgc

SEQ ID NO: 972656 - DNA, 33 bp, Homo sapien
cctctggagagctagcgctgttcatatggttgc

SEQ ID NO: 972657 - DNA, 33 bp, Homo sapien
atcagcctacaaattaccccatacagaatggga

SEQ ID NO: 972658 - DNA, 33 bp, Homo sapien
atcagcctacaaattatcccatacagaatggga

SEQ ID NO: 972659 - DNA, 33 bp, Homo sapien
gaatttgaatattaacaattgaaacaggaaaat

SEQ ID NO: 972660 - DNA, 33 bp, Homo sapien
gaatttgaatattaacgattgaaacaggaaaat

SEQ ID NO: 972661 - DNA, 33 bp, Homo sapien
agactgacaagatgtcacagaatccaaaccagc

SEQ ID NO: 972662 - DNA, 33 bp, Homo sapien
agactgacaagatgtcgcagaatccaaaccagc

SEQ ID NO: 972663 - DNA, 33 bp, Homo sapien
tacaacaaccctcttccagtacccaccacggct

SEQ ID NO: 972664 - DNA, 33 bp, Homo sapien
tacaacaaccctcttctagtacccaccacggct

SEQ ID NO: 972665 - DNA, 33 bp, Homo sapien
ggaaggtgtattaccaactagtcaaccaggagt

SEQ ID NO: 972666 - DNA, 33 bp, Homo sapien
ggaaggtgtattaccagctagtcaaccaggagt

SEQ ID NO: 972667 - DNA, 33 bp, Homo sapien
attactcttaaataaacccactatgctacagat

SEQ ID NO: 972668 - DNA, 33 bp, Homo sapien
attactcttaaataaatccactatgctacagat

SEQ ID NO: 972669 - DNA, 33 bp, Homo sapien
atgtttttagtggaaagatactgcataaatggc

SEQ ID NO: 972670 - DNA, 33 bp, Homo sapien
atgtttttagtggaaatatactgcataaatggc

SEQ ID NO: 972671 - DNA, 33 bp, Homo sapien
taatgatcaggtaacacgtatttttgcagttca

SEQ ID NO: 972672 - DNA, 33 bp, Homo sapien
taatgatcaggtaacatgtatttttgcagttca

SEQ ID NO: 972673 - DNA, 33 bp, Homo sapien
atgtagtggtatcttaacacggtcttgatttgc

SEQ ID NO: 972674 - DNA, 33 bp, Homo sapien
atgtagtggtatcttatcacggtcttgatttgc

SEQ ID NO: 972675 - DNA, 33 bp, Homo sapien
caagaggtgtaaaatgccaatgtatagagcagt

SEQ ID NO: 972676 - DNA, 33 bp, Homo sapien
caagaggtgtaaaatgtcaatgtatagagcagt

SEQ ID NO: 972677 - DNA, 33 bp, Homo sapien
tttttaagctcaaaatcagttctgtatgctgaa

SEQ ID NO: 972678 - DNA, 33 bp, Homo sapien
tttttaagctcaaaatgagttctgtatgctgaa

SEQ ID NO: 972679 - DNA, 33 bp, Homo sapien
taccctaagcgtgcacagagaagtttgtaaaag

SEQ ID NO: 972680 - DNA, 33 bp, Homo sapien
taccctaagcgtgcacggagaagtttgtaaaag

SEQ ID NO: 972681 - DNA, 33 bp, Homo sapien
gactcatataaataaactggtcctactgagatc

SEQ ID NO: 972682 - DNA, 33 bp, Homo sapien
gactcatataaataaattggtcctactgagatc

SEQ ID NO: 972683 - DNA, 33 bp, Homo sapien
atctatgtgaagataacagaaagcactgaacaa

SEQ ID NO: 972684 - DNA, 33 bp, Homo sapien
atctatgtgaagataatagaaagcactgaacaa

SEQ ID NO: 972685 - DNA, 33 bp, Homo sapien
gaaattaggaaaattcaatcatgtatggggctg

SEQ ID NO: 972686 - DNA, 33 bp, Homo sapien
gaaattaggaaaattctatcatgtatggggctg

SEQ ID NO: 972687 - DNA, 33 bp, Homo sapien
gagagagacatctctaagctttgttatcttgga

SEQ ID NO: 972688 - DNA, 33 bp, Homo sapien
gagagagacatctctacgctttgttatcttgga

SEQ ID NO: 972689 - DNA, 33 bp, Homo sapien
atatctgttaaatgaacgttgaatctgtaacat

SEQ ID NO: 972690 - DNA, 33 bp, Homo sapien
atatctgttaaatgaatgttgaatctgtaacat

SEQ ID NO: 972691 - DNA, 33 bp, Homo sapien
ggcactatatctacaaggtacactcaaatttcc

SEQ ID NO: 972692 - DNA, 33 bp, Homo sapien
ggcactatatctacaatgtacactcaaatttcc

SEQ ID NO: 972693 - DNA, 33 bp, Homo sapien
tacagtgagcccagacaccaaaaggcagatggg

SEQ ID NO: 972694 - DNA, 33 bp, Homo sapien
tacagtgagcccagacgccaaaaggcagatggg

SEQ ID NO: 972695 - DNA, 33 bp, Homo sapien
ttttctgccaggctaggagttagggctctgtgc

SEQ ID NO: 972696 - DNA, 33 bp, Homo sapien
ttttctgccaggctagtagttagggctctgtgc

SEQ ID NO: 972697 - DNA, 33 bp, Homo sapien
actcagcaagtatttacgaggcccctactgtat

SEQ ID NO: 972698 - DNA, 33 bp, Homo sapien
actcagcaagtatttatgaggcccctactgtat

SEQ ID NO: 972699 - DNA, 33 bp, Homo sapien
aaacactggcctcggacgaagagagaatacaca

SEQ ID NO: 972700 - DNA, 33 bp, Homo sapien
aaacactggcctcggatgaagagagaatacaca

SEQ ID NO: 972701 - DNA, 33 bp, Homo sapien
ctcactcgacagaagaagaaatatcgcatttgc

SEQ ID NO: 972702 - DNA, 33 bp, Homo sapien
ctcactcgacagaagacgaaatatcgcatttgc

SEQ ID NO: 972703 - DNA, 33 bp, Homo sapien
aaacaaatagtacaaaatagcctgtaaacatcc

SEQ ID NO: 972704 - DNA, 33 bp, Homo sapien
aaacaaatagtacaaagtagcctgtaaacatcc

SEQ ID NO: 972705 - DNA, 33 bp, Homo sapien
tgtttcttctttctcacgactttatgggcctcc

SEQ ID NO: 972706 - DNA, 33 bp, Homo sapien
tgtttcttctttctcatgactttatgggcctcc

SEQ ID NO: 972707 - DNA, 33 bp, Homo sapien
acccatccagattgcacgtaaacacaactatgt

SEQ ID NO: 972708 - DNA, 33 bp, Homo sapien
acccatccagattgcatgtaaacacaactatgt

SEQ ID NO: 972709 - DNA, 33 bp, Homo sapien
gctaaactggactttccatttaagacgttagag

SEQ ID NO: 972710 - DNA, 33 bp, Homo sapien
gctaaactggactttctatttaagacgttagag

SEQ ID NO: 972711 - DNA, 33 bp, Homo sapien
ttgagctccatttagcaatgctacgtaacactt

SEQ ID NO: 972712 - DNA, 33 bp, Homo sapien
ttgagctccatttagcgatgctacgtaacactt

SEQ ID NO: 972713 - DNA, 33 bp, Homo sapien
tctatagaagtagaccgatctgcctcctgccct

SEQ ID NO: 972714 - DNA, 33 bp, Homo sapien
tctatagaagtagacctatctgcctcctgccct

SEQ ID NO: 972715 - DNA, 33 bp, Homo sapien
atcaatttctgatacaatgctagcacagagtta

SEQ ID NO: 972716 - DNA, 33 bp, Homo sapien
atcaatttctgatacagtgctagcacagagtta

SEQ ID NO: 972717 - DNA, 33 bp, Homo sapien
aaagccaaggttggaaatgtagaatttggaatt

SEQ ID NO: 972718 - DNA, 33 bp, Homo sapien
aaagccaaggttggaagtgtagaatttggaatt

SEQ ID NO: 972719 - DNA, 33 bp, Homo sapien
gccactttacaccatgaacagtttgatagagga

SEQ ID NO: 972720 - DNA, 33 bp, Homo sapien
gccactttacaccatgcacagtttgatagagga

SEQ ID NO: 972721 - DNA, 33 bp, Homo sapien
tagagaaatagagccaacagcggagagagcttc

SEQ ID NO: 972722 - DNA, 33 bp, Homo sapien
tagagaaatagagccagcagcggagagagcttc

SEQ ID NO: 972723 - DNA, 33 bp, Homo sapien
agcatacaacaaaaaaaccggcaagcaggatgg

SEQ ID NO: 972724 - DNA, 33 bp, Homo sapien
agcatacaacaaaaaagccggcaagcaggatgg

SEQ ID NO: 972725 - DNA, 33 bp, Homo sapien
caagagcctcggagacaatttgtaggtgcaggg

SEQ ID NO: 972726 - DNA, 33 bp, Homo sapien
caagagcctcggagactatttgtaggtgcaggg

SEQ ID NO: 972727 - DNA, 33 bp, Homo sapien
ctttctggtagagaggcaacgatggacatcata

SEQ ID NO: 972728 - DNA, 33 bp, Homo sapien
ctttctggtagagaggtaacgatggacatcata

SEQ ID NO: 972729 - DNA, 33 bp, Homo sapien
cattattattctcagacagcagctaagtcaatg

SEQ ID NO: 972730 - DNA, 33 bp, Homo sapien
cattattattctcagatagcagctaagtcaatg

SEQ ID NO: 972731 - DNA, 33 bp, Homo sapien
atcctatgaggtatagcagcaacttaatattta

SEQ ID NO: 972732 - DNA, 33 bp, Homo sapien
atcctatgaggtatagtagcaacttaatattta

SEQ ID NO: 972733 - DNA, 33 bp, Homo sapien
aatcaacaggtttccaaaacattcaggccaaac

SEQ ID NO: 972734 - DNA, 33 bp, Homo sapien
aatcaacaggtttccacaacattcaggccaaac

SEQ ID NO: 972735 - DNA, 33 bp, Homo sapien
tcacagaaatgcctgaactaactaaaaataatg

SEQ ID NO: 972736 - DNA, 33 bp, Homo sapien
tcacagaaatgcctgagctaactaaaaataatg

SEQ ID NO: 972737 - DNA, 33 bp, Homo sapien
cttcatttggagctcaataagatttctggtagt

SEQ ID NO: 972738 - DNA, 33 bp, Homo sapien
cttcatttggagctcagtaagatttctggtagt

SEQ ID NO: 972739 - DNA, 33 bp, Homo sapien
ttctgcatacaagtaacatcatgcagtattttc

SEQ ID NO: 972740 - DNA, 33 bp, Homo sapien
ttctgcatacaagtaagatcatgcagtattttc

SEQ ID NO: 972741 - DNA, 33 bp, Homo sapien
ctgtaaatgtcaattaagccatttgtttaatag

SEQ ID NO: 972742 - DNA, 33 bp, Homo sapien
ctgtaaatgtcaattaggccatttgtttaatag

SEQ ID NO: 972743 - DNA, 33 bp, Homo sapien
ccagcatttttttctaagctgtgtagtctatgg

SEQ ID NO: 972744 - DNA, 33 bp, Homo sapien
ccagcatttttttctacgctgtgtagtctatgg

SEQ ID NO: 972745 - DNA, 33 bp, Homo sapien
tgtagaaattcagttcaattctacacacaggca

SEQ ID NO: 972746 - DNA, 33 bp, Homo sapien
tgtagaaattcagttctattctacacacaggca

SEQ ID NO: 972747 - DNA, 33 bp, Homo sapien
ccaaatgacttctaggaataagtgtgtgcttgt

SEQ ID NO: 972748 - DNA, 33 bp, Homo sapien
ccaaatgacttctaggcataagtgtgtgcttgt

SEQ ID NO: 972749 - DNA, 33 bp, Homo sapien
ttattgtggcttaagaaatgtctctgacaggtt

SEQ ID NO: 972750 - DNA, 33 bp, Homo sapien
ttattgtggcttaagagatgtctctgacaggtt

SEQ ID NO: 972751 - DNA, 33 bp, Homo sapien
ataccttcaagccaacaaatgggctgtgtttcc

SEQ ID NO: 972752 - DNA, 33 bp, Homo sapien
ataccttcaagccaaccaatgggctgtgtttcc

SEQ ID NO: 972753 - DNA, 33 bp, Homo sapien
ggctgttttgtcataacaattagcttaaaacac

SEQ ID NO: 972754 - DNA, 33 bp, Homo sapien
ggctgttttgtcataataattagcttaaaacac

SEQ ID NO: 972755 - DNA, 33 bp, Homo sapien
agccttctcttcaatacgacggtatcaggaggt

SEQ ID NO: 972756 - DNA, 33 bp, Homo sapien
agccttctcttcaatatgacggtatcaggaggt

SEQ ID NO: 972757 - DNA, 33 bp, Homo sapien
ttaagtaagcagggtaagtgattgattttcctt

SEQ ID NO: 972758 - DNA, 33 bp, Homo sapien
ttaagtaagcagggtacgtgattgattttcctt

SEQ ID NO: 972759 - DNA, 33 bp, Homo sapien
aagtgaggatggagacaagacagtaaggagcta

SEQ ID NO: 972760 - DNA, 33 bp, Homo sapien
aagtgaggatggagaccagacagtaaggagcta

SEQ ID NO: 972761 - DNA, 33 bp, Homo sapien
ttccttgaatactcaccgtaccaagcactatga

SEQ ID NO: 972762 - DNA, 33 bp, Homo sapien
ttccttgaatactcactgtaccaagcactatga

SEQ ID NO: 972763 - DNA, 33 bp, Homo sapien
agttaatatctttgtaaatgactcctaatacac

SEQ ID NO: 972764 - DNA, 33 bp, Homo sapien
agttaatatctttgtatatgactcctaatacac

SEQ ID NO: 972765 - DNA, 33 bp, Homo sapien
ctggatctatgcagtacgaattgaggtacacag

SEQ ID NO: 972766 - DNA, 33 bp, Homo sapien
ctggatctatgcagtatgaattgaggtacacag

SEQ ID NO: 972767 - DNA, 33 bp, Homo sapien
gaagctgaaaaccaataatcagttattcataat

SEQ ID NO: 972768 - DNA, 33 bp, Homo sapien
gaagctgaaaaccaattatcagttattcataat

SEQ ID NO: 972769 - DNA, 33 bp, Homo sapien
agattgtaacattagggagctaagcaattactc

SEQ ID NO: 972770 - DNA, 33 bp, Homo sapien
agattgtaacattaggtagctaagcaattactc

SEQ ID NO: 972771 - DNA, 33 bp, Homo sapien
atgtctatttaccttggatccatttttagcact

SEQ ID NO: 972772 - DNA, 33 bp, Homo sapien
atgtctatttaccttgtatccatttttagcact

SEQ ID NO: 972773 - DNA, 33 bp, Homo sapien
gtaactacttccatgacgcataaacacatgcat

SEQ ID NO: 972774 - DNA, 33 bp, Homo sapien
gtaactacttccatgatgcataaacacatgcat

SEQ ID NO: 972775 - DNA, 33 bp, Homo sapien
gtcagctggtagcagaatatggtattggaatct

SEQ ID NO: 972776 - DNA, 33 bp, Homo sapien
gtcagctggtagcagattatggtattggaatct

SEQ ID NO: 972777 - DNA, 33 bp, Homo sapien
gtgttacatcaagtataaggatggatagatcag

SEQ ID NO: 972778 - DNA, 33 bp, Homo sapien
gtgttacatcaagtatgaggatggatagatcag

SEQ ID NO: 972779 - DNA, 33 bp, Homo sapien
ctcacagcgtcaacaaccaccaaagagctgcgc

SEQ ID NO: 972780 - DNA, 33 bp, Homo sapien
ctcacagcgtcaacaagcaccaaagagctgcgc

SEQ ID NO: 972781 - DNA, 33 bp, Homo sapien
gaggatttgctggctaaggtatcactgagtttt

SEQ ID NO: 972782 - DNA, 33 bp, Homo sapien
gaggatttgctggctacggtatcactgagtttt

SEQ ID NO: 972783 - DNA, 33 bp, Homo sapien
ttctttgtaaggcgaacttaaaatgaaaatgat

SEQ ID NO: 972784 - DNA, 33 bp, Homo sapien
ttctttgtaaggcgaagttaaaatgaaaatgat

SEQ ID NO: 972785 - DNA, 33 bp, Homo sapien
ctgtctcaacaacgaaaaaagatgaggtaattt

SEQ ID NO: 972786 - DNA, 33 bp, Homo sapien
ctgtctcaacaacgaagaaagatgaggtaattt

SEQ ID NO: 972787 - DNA, 33 bp, Homo sapien
gcaaaacaataattccaaaaccgtcactcgcca

SEQ ID NO: 972788 - DNA, 33 bp, Homo sapien
gcaaaacaataattcccaaaccgtcactcgcca

SEQ ID NO: 972789 - DNA, 33 bp, Homo sapien
ctccctggcagctgcactcagttaagactttag

SEQ ID NO: 972790 - DNA, 33 bp, Homo sapien
ctccctggcagctgcattcagttaagactttag

SEQ ID NO: 972791 - DNA, 33 bp, Homo sapien
gcaaacctacctcaaactctgaggaaactgaga

SEQ ID NO: 972792 - DNA, 33 bp, Homo sapien
gcaaacctacctcaaagtctgaggaaactgaga

SEQ ID NO: 972793 - DNA, 33 bp, Homo sapien
gcagcctcttggcttacggaattcaaattggac

SEQ ID NO: 972794 - DNA, 33 bp, Homo sapien
gcagcctcttggcttatggaattcaaattggac

SEQ ID NO: 972795 - DNA, 33 bp, Homo sapien
cttataaacagtggccaagaacctcagtgagct

SEQ ID NO: 972796 - DNA, 33 bp, Homo sapien
cttataaacagtggccgagaacctcagtgagct

SEQ ID NO: 972797 - DNA, 33 bp, Homo sapien
tttactgacacttccagctgggtgctattgtca

SEQ ID NO: 972798 - DNA, 33 bp, Homo sapien
tttactgacacttccatctgggtgctattgtca

SEQ ID NO: 972799 - DNA, 33 bp, Homo sapien
ttatttgtacagtgtaaggtgctcatcttctag

SEQ ID NO: 972800 - DNA, 33 bp, Homo sapien
ttatttgtacagtgtatggtgctcatcttctag

SEQ ID NO: 972801 - DNA, 33 bp, Homo sapien
ataagatgtggaaatcacatgtaatcaacataa

SEQ ID NO: 972802 - DNA, 33 bp, Homo sapien
ataagatgtggaaatctcatgtaatcaacataa

SEQ ID NO: 972803 - DNA, 33 bp, Homo sapien
ggcctgggcagccaaactataaatgacttaagt

SEQ ID NO: 972804 - DNA, 33 bp, Homo sapien
ggcctgggcagccaaagtataaatgacttaagt

SEQ ID NO: 972805 - DNA, 33 bp, Homo sapien
aatggaggggatttcaagcactgttgtgaattc

SEQ ID NO: 972806 - DNA, 33 bp, Homo sapien
aatggaggggatttcaggcactgttgtgaattc

SEQ ID NO: 972807 - DNA, 33 bp, Homo sapien
caactagcacactaaactcattatttcaaatat

SEQ ID NO: 972808 - DNA, 33 bp, Homo sapien
caactagcacactaaagtcattatttcaaatat

SEQ ID NO: 972809 - DNA, 33 bp, Homo sapien
cttttgtactagaatcacagggttgcatcgagt

SEQ ID NO: 972810 - DNA, 33 bp, Homo sapien
cttttgtactagaatcgcagggttgcatcgagt

SEQ ID NO: 972811 - DNA, 33 bp, Homo sapien
agctgtacattaagccaggagaatatatggaac

SEQ ID NO: 972812 - DNA, 33 bp, Homo sapien
agctgtacattaagcccggagaatatatggaac

SEQ ID NO: 972813 - DNA, 33 bp, Homo sapien
gtagtgctggtgaagacgtgggcaaagagagat

SEQ ID NO: 972814 - DNA, 33 bp, Homo sapien
gtagtgctggtgaagatgtgggcaaagagagat

SEQ ID NO: 972815 - DNA, 33 bp, Homo sapien
agggctcgaatcctaaccctattcatgagggct

SEQ ID NO: 972816 - DNA, 33 bp, Homo sapien
agggctcgaatcctaatcctattcatgagggct

SEQ ID NO: 972817 - DNA, 33 bp, Homo sapien
ttcaaggaaattcaggaacatttttggaaatat

SEQ ID NO: 972818 - DNA, 33 bp, Homo sapien
ttcaaggaaattcagggacatttttggaaatat

SEQ ID NO: 972819 - DNA, 33 bp, Homo sapien
cagtcccacgggagcgaccaatcaaaacgtcgt

SEQ ID NO: 972820 - DNA, 33 bp, Homo sapien
cagtcccacgggagcggccaatcaaaacgtcgt

SEQ ID NO: 972821 - DNA, 33 bp, Homo sapien
aactgacagtgtattaactagtgacactgggag

SEQ ID NO: 972822 - DNA, 33 bp, Homo sapien
aactgacagtgtattagctagtgacactgggag

SEQ ID NO: 972823 - DNA, 33 bp, Homo sapien
atcctgctaccaaaaaatatcttgcattttgaa

SEQ ID NO: 972824 - DNA, 33 bp, Homo sapien
atcctgctaccaaaaagtatcttgcattttgaa

SEQ ID NO: 972825 - DNA, 33 bp, Homo sapien
cagccagtttggagcacgttgttctgtggccca

SEQ ID NO: 972826 - DNA, 33 bp, Homo sapien
cagccagtttggagcatgttgttctgtggccca

SEQ ID NO: 972827 - DNA, 33 bp, Homo sapien
gttggtatgtttcttacaggtaaagagaaggaa

SEQ ID NO: 972828 - DNA, 33 bp, Homo sapien
gttggtatgtttcttagaggtaaagagaaggaa

SEQ ID NO: 972829 - DNA, 33 bp, Homo sapien
cctctaattcactctacgtgtttagtaagttac

SEQ ID NO: 972830 - DNA, 33 bp, Homo sapien
cctctaattcactctatgtgtttagtaagttac

SEQ ID NO: 972831 - DNA, 33 bp, Homo sapien
agactcctgctttttcaaatctgtgacctgacc

SEQ ID NO: 972832 - DNA, 33 bp, Homo sapien
agactcctgctttttctaatctgtgacctgacc

SEQ ID NO: 972833 - DNA, 33 bp, Homo sapien
tgtttaaaagttaccacgttgaggaagcttgct

SEQ ID NO: 972834 - DNA, 33 bp, Homo sapien
tgtttaaaagttaccatgttgaggaagcttgct

SEQ ID NO: 972835 - DNA, 33 bp, Homo sapien
ggaatgtatctgggatcagaatgaaatctgcca

SEQ ID NO: 972836 - DNA, 33 bp, Homo sapien
ggaatgtatctgggattagaatgaaatctgcca

SEQ ID NO: 972837 - DNA, 33 bp, Homo sapien
cactcttgatgcaaaccgtgagtggctacaaca

SEQ ID NO: 972838 - DNA, 33 bp, Homo sapien
cactcttgatgcaaactgtgagtggctacaaca

SEQ ID NO: 972839 - DNA, 33 bp, Homo sapien
agtgttggtatcacacaggatatcgataggata

SEQ ID NO: 972840 - DNA, 33 bp, Homo sapien
agtgttggtatcacaccggatatcgataggata

SEQ ID NO: 972841 - DNA, 33 bp, Homo sapien
aactgttttgtgagtaaagccccacaggtttta

SEQ ID NO: 972842 - DNA, 33 bp, Homo sapien
aactgttttgtgagtagagccccacaggtttta

SEQ ID NO: 972843 - DNA, 33 bp, Homo sapien
tatcgcttgttttgtacgtagttatagcaatgg

SEQ ID NO: 972844 - DNA, 33 bp, Homo sapien
tatcgcttgttttgtaggtagttatagcaatgg

SEQ ID NO: 972845 - DNA, 33 bp, Homo sapien
agcaatggagaaacataatgccaataagatact

SEQ ID NO: 972846 - DNA, 33 bp, Homo sapien
agcaatggagaaacatgatgccaataagatact

SEQ ID NO: 972847 - DNA, 33 bp, Homo sapien
ccttaacctcctcttacacctgattttacacgt

SEQ ID NO: 972848 - DNA, 33 bp, Homo sapien
ccttaacctcctcttatacctgattttacacgt

SEQ ID NO: 972849 - DNA, 33 bp, Homo sapien
aggtggtgctcaagtcaccctggaggaaatgga

SEQ ID NO: 972850 - DNA, 33 bp, Homo sapien
aggtggtgctcaagtcgccctggaggaaatgga

SEQ ID NO: 972851 - DNA, 33 bp, Homo sapien
tttcaaagctgtggtgcagtaaagggcaatgcc

SEQ ID NO: 972852 - DNA, 33 bp, Homo sapien
tttcaaagctgtggtgtagtaaagggcaatgcc

SEQ ID NO: 972853 - DNA, 33 bp, Homo sapien
gtgtccagcgagggcaagctagatgctaagact

SEQ ID NO: 972854 - DNA, 33 bp, Homo sapien
gtgtccagcgagggcacgctagatgctaagact

SEQ ID NO: 972855 - DNA, 33 bp, Homo sapien
caaccctttgcatataaccagagtgattttttt

SEQ ID NO: 972856 - DNA, 33 bp, Homo sapien
caaccctttgcatatatccagagtgattttttt

SEQ ID NO: 972857 - DNA, 33 bp, Homo sapien
tctagagtgtgtttgccgaatctatttgcacat

SEQ ID NO: 972858 - DNA, 33 bp, Homo sapien
tctagagtgtgtttgctgaatctatttgcacat

SEQ ID NO: 972859 - DNA, 33 bp, Homo sapien
tgcaaaggacagacacaaaatttggagagcact

SEQ ID NO: 972860 - DNA, 33 bp, Homo sapien
tgcaaaggacagacacgaaatttggagagcact

SEQ ID NO: 972861 - DNA, 33 bp, Homo sapien
tcaaatggaaaatggcaagaatactaaagagat

SEQ ID NO: 972862 - DNA, 33 bp, Homo sapien
tcaaatggaaaatggcgagaatactaaagagat

SEQ ID NO: 972863 - DNA, 33 bp, Homo sapien
atacactctcaaagtaagagcaccctttaaatg

SEQ ID NO: 972864 - DNA, 33 bp, Homo sapien
atacactctcaaagtaggagcaccctttaaatg

SEQ ID NO: 972865 - DNA, 33 bp, Homo sapien
ctgtcatcacacccacgctgttgtcacaacacc

SEQ ID NO: 972866 - DNA, 33 bp, Homo sapien
ctgtcatcacacccactctgttgtcacaacacc

SEQ ID NO: 972867 - DNA, 33 bp, Homo sapien
gaattaagagcccccaagtattgaatcagtaat

SEQ ID NO: 972868 - DNA, 33 bp, Homo sapien
gaattaagagcccccaggtattgaatcagtaat

SEQ ID NO: 972869 - DNA, 33 bp, Homo sapien
acccaacagaggtaaaagatggctaaataatta

SEQ ID NO: 972870 - DNA, 33 bp, Homo sapien
acccaacagaggtaaaggatggctaaataatta

SEQ ID NO: 972871 - DNA, 33 bp, Homo sapien
ttgagaggctacccaaccttctaagctcacgtc

SEQ ID NO: 972872 - DNA, 33 bp, Homo sapien
ttgagaggctacccaatcttctaagctcacgtc

SEQ ID NO: 972873 - DNA, 33 bp, Homo sapien
aacggccagaggcttgaatttgccagtgatgcc

SEQ ID NO: 972874 - DNA, 33 bp, Homo sapien
aacggccagaggcttggatttgccagtgatgcc

SEQ ID NO: 972875 - DNA, 33 bp, Homo sapien
aatatacttatgtaaacagtttgcattgctgca

SEQ ID NO: 972876 - DNA, 33 bp, Homo sapien
aatatacttatgtaaatagtttgcattgctgca

SEQ ID NO: 972877 - DNA, 33 bp, Homo sapien
cattttaatatgtctacgttcctgaagatactt

SEQ ID NO: 972878 - DNA, 33 bp, Homo sapien
cattttaatatgtctatgttcctgaagatactt

SEQ ID NO: 972879 - DNA, 33 bp, Homo sapien
gtttttcctgaagcgactcattttaatatgtct

SEQ ID NO: 972880 - DNA, 33 bp, Homo sapien
gtttttcctgaagcgattcattttaatatgtct

SEQ ID NO: 972881 - DNA, 33 bp, Homo sapien
catgtcttacttaaaagtcttccattgttcacc

SEQ ID NO: 972882 - DNA, 33 bp, Homo sapien
catgtcttacttaaaattcttccattgttcacc

SEQ ID NO: 972883 - DNA, 33 bp, Homo sapien
atttacatgatttaaacgatgtcagagtgaatg

SEQ ID NO: 972884 - DNA, 33 bp, Homo sapien
atttacatgatttaaatgatgtcagagtgaatg

SEQ ID NO: 972885 - DNA, 33 bp, Homo sapien
aatgtttcaacaagcaatatttcctacctttaa

SEQ ID NO: 972886 - DNA, 33 bp, Homo sapien
aatgtttcaacaagcagtatttcctacctttaa

SEQ ID NO: 972887 - DNA, 33 bp, Homo sapien
aaactggactcagaaaatggcccacctactgta

SEQ ID NO: 972888 - DNA, 33 bp, Homo sapien
aaactggactcagaaattggcccacctactgta

SEQ ID NO: 972889 - DNA, 33 bp, Homo sapien
cactttgcaaactgaccacttgcaaacacacac

SEQ ID NO: 972890 - DNA, 33 bp, Homo sapien
cactttgcaaactgactacttgcaaacacacac

SEQ ID NO: 972891 - DNA, 33 bp, Homo sapien
ccttggtgtaagtacacagtagctggtcctaat

SEQ ID NO: 972892 - DNA, 33 bp, Homo sapien
ccttggtgtaagtacatagtagctggtcctaat

SEQ ID NO: 972893 - DNA, 33 bp, Homo sapien
ggaggtgtgattgatacgcaggacttggagatt

SEQ ID NO: 972894 - DNA, 33 bp, Homo sapien
ggaggtgtgattgatatgcaggacttggagatt

SEQ ID NO: 972895 - DNA, 33 bp, Homo sapien
aatttcagttatgtaacggcaaatcttgcatat

SEQ ID NO: 972896 - DNA, 33 bp, Homo sapien
aatttcagttatgtaatggcaaatcttgcatat

SEQ ID NO: 972897 - DNA, 33 bp, Homo sapien
gcagagaactgtagcaaattaacaaaggttgta

SEQ ID NO: 972898 - DNA, 33 bp, Homo sapien
gcagagaactgtagcacattaacaaaggttgta

SEQ ID NO: 972899 - DNA, 33 bp, Homo sapien
gtgccagtttaaggtacgtttaaatctccagat

SEQ ID NO: 972900 - DNA, 33 bp, Homo sapien
gtgccagtttaaggtatgtttaaatctccagat

SEQ ID NO: 972901 - DNA, 33 bp, Homo sapien
taagcctaaaattctacctcattcaacatttac

SEQ ID NO: 972902 - DNA, 33 bp, Homo sapien
taagcctaaaattctatctcattcaacatttac

SEQ ID NO: 972903 - DNA, 33 bp, Homo sapien
tgtgttttgtataagacaccatttgacactccc

SEQ ID NO: 972904 - DNA, 33 bp, Homo sapien
tgtgttttgtataagagaccatttgacactccc

SEQ ID NO: 972905 - DNA, 33 bp, Homo sapien
aaattatggatacacaaaacagggctgaatgtc

SEQ ID NO: 972906 - DNA, 33 bp, Homo sapien
aaattatggatacacagaacagggctgaatgtc

SEQ ID NO: 972907 - DNA, 33 bp, Homo sapien
cattacatttcatttacataagggctggaacaa

SEQ ID NO: 972908 - DNA, 33 bp, Homo sapien
cattacatttcatttatataagggctggaacaa

SEQ ID NO: 972909 - DNA, 33 bp, Homo sapien
acttgcatcacaggacaacttttcgagttatca

SEQ ID NO: 972910 - DNA, 33 bp, Homo sapien
acttgcatcacaggacgacttttcgagttatca

SEQ ID NO: 972911 - DNA, 33 bp, Homo sapien
tagagatttgcagaaacaccttttgtattttga

SEQ ID NO: 972912 - DNA, 33 bp, Homo sapien
tagagatttgcagaaagaccttttgtattttga

SEQ ID NO: 972913 - DNA, 33 bp, Homo sapien
catgaccgtaggaataaatggttagagacttaa

SEQ ID NO: 972914 - DNA, 33 bp, Homo sapien
catgaccgtaggaatagatggttagagacttaa

SEQ ID NO: 972915 - DNA, 33 bp, Homo sapien
ataaagttagctacaccgtacttgcccagtatt

SEQ ID NO: 972916 - DNA, 33 bp, Homo sapien
ataaagttagctacactgtacttgcccagtatt

SEQ ID NO: 972917 - DNA, 33 bp, Homo sapien
tgtgacaagcatattgcatttagagtgaaacat

SEQ ID NO: 972918 - DNA, 33 bp, Homo sapien
tgtgacaagcatattggatttagagtgaaacat

SEQ ID NO: 972919 - DNA, 33 bp, Homo sapien
caagtctcttccaatcaagtatcagttctttgg

SEQ ID NO: 972920 - DNA, 33 bp, Homo sapien
caagtctcttccaatccagtatcagttctttgg

SEQ ID NO: 972921 - DNA, 33 bp, Homo sapien
aaaaggacattagtagcaaaactggcaaaattt

SEQ ID NO: 972922 - DNA, 33 bp, Homo sapien
aaaaggacattagtaggaaaactggcaaaattt

SEQ ID NO: 972923 - DNA, 33 bp, Homo sapien
ctgcagttataaggtaaaaatactgagtagact

SEQ ID NO: 972924 - DNA, 33 bp, Homo sapien
ctgcagttataaggtagaaatactgagtagact

SEQ ID NO: 972925 - DNA, 33 bp, Homo sapien
acaggtagtatttgtaagtgactccacctcttc

SEQ ID NO: 972926 - DNA, 33 bp, Homo sapien
acaggtagtatttgtatgtgactccacctcttc

SEQ ID NO: 972927 - DNA, 33 bp, Homo sapien
tgtctacttatagttaagtgctatgccagatta

SEQ ID NO: 972928 - DNA, 33 bp, Homo sapien
tgtctacttatagttaggtgctatgccagatta

SEQ ID NO: 972929 - DNA, 33 bp, Homo sapien
cctgcacttaaagaacaatcagctccttgagtg

SEQ ID NO: 972930 - DNA, 33 bp, Homo sapien
cctgcacttaaagaacgatcagctccttgagtg

SEQ ID NO: 972931 - DNA, 33 bp, Homo sapien
agtgggaattttccagcagactgtttttggact

SEQ ID NO: 972932 - DNA, 33 bp, Homo sapien
agtgggaattttccagtagactgtttttggact

SEQ ID NO: 972933 - DNA, 33 bp, Homo sapien
tggcagaaaataaacaacctatgagttcacctt

SEQ ID NO: 972934 - DNA, 33 bp, Homo sapien
tggcagaaaataaacaccctatgagttcacctt

SEQ ID NO: 972935 - DNA, 33 bp, Homo sapien
tttgaaacctggttccacctaggccaagcaact

SEQ ID NO: 972936 - DNA, 33 bp, Homo sapien
tttgaaacctggttccgcctaggccaagcaact

SEQ ID NO: 972937 - DNA, 33 bp, Homo sapien
ttgttgagaccccagcaaactaactgcctgcct

SEQ ID NO: 972938 - DNA, 33 bp, Homo sapien
ttgttgagaccccagccaactaactgcctgcct

SEQ ID NO: 972939 - DNA, 33 bp, Homo sapien
tgtgctctgccggagaagggatgcattttgagg

SEQ ID NO: 972940 - DNA, 33 bp, Homo sapien
tgtgctctgccggagacgggatgcattttgagg

SEQ ID NO: 972941 - DNA, 33 bp, Homo sapien
tattttatagccttcagtatacaggttgtgtac

SEQ ID NO: 972942 - DNA, 33 bp, Homo sapien
tattttatagccttcattatacaggttgtgtac

SEQ ID NO: 972943 - DNA, 33 bp, Homo sapien
tcttaggcctttgaataagttcaagtggagaaa

SEQ ID NO: 972944 - DNA, 33 bp, Homo sapien
tcttaggcctttgaatgagttcaagtggagaaa

SEQ ID NO: 972945 - DNA, 33 bp, Homo sapien
caccctctactgatgaggtttctccacttgaac

SEQ ID NO: 972946 - DNA, 33 bp, Homo sapien
caccctctactgatgatgtttctccacttgaac

SEQ ID NO: 972947 - DNA, 33 bp, Homo sapien
tggcttggtagcttaccagtactttccgatatt

SEQ ID NO: 972948 - DNA, 33 bp, Homo sapien
tggcttggtagcttactagtactttccgatatt

SEQ ID NO: 972949 - DNA, 33 bp, Homo sapien
ttctctcagcttactacaacactcaaccatgga

SEQ ID NO: 972950 - DNA, 33 bp, Homo sapien
ttctctcagcttactataacactcaaccatgga

SEQ ID NO: 972951 - DNA, 33 bp, Homo sapien
ttgttatggaggttaaaaaagattttgtgcctg

SEQ ID NO: 972952 - DNA, 33 bp, Homo sapien
ttgttatggaggttaagaaagattttgtgcctg

SEQ ID NO: 972953 - DNA, 33 bp, Homo sapien
aattaacaactactgactcaacttaaatgtttt

SEQ ID NO: 972954 - DNA, 33 bp, Homo sapien
aattaacaactactgattcaacttaaatgtttt

SEQ ID NO: 972955 - DNA, 33 bp, Homo sapien
cttagccacaatagaaaaaaacatcaggtaaat

SEQ ID NO: 972956 - DNA, 33 bp, Homo sapien
cttagccacaatagaagaaaacatcaggtaaat

SEQ ID NO: 972957 - DNA, 33 bp, Homo sapien
atgagtggctgaaggacagtagagaacaagatc

SEQ ID NO: 972958 - DNA, 33 bp, Homo sapien
atgagtggctgaaggagagtagagaacaagatc

SEQ ID NO: 972959 - DNA, 33 bp, Homo sapien
gctgagtgctcaacaacgagtaagggcaaaagc

SEQ ID NO: 972960 - DNA, 33 bp, Homo sapien
gctgagtgctcaacaatgagtaagggcaaaagc

SEQ ID NO: 972961 - DNA, 33 bp, Homo sapien
ttctatggcacatttaaatcttggctattggag

SEQ ID NO: 972962 - DNA, 33 bp, Homo sapien
ttctatggcacatttatatcttggctattggag

SEQ ID NO: 972963 - DNA, 33 bp, Homo sapien
tcctcttctaccgaaaatattagtcacatgaaa

SEQ ID NO: 972964 - DNA, 33 bp, Homo sapien
tcctcttctaccgaaagtattagtcacatgaaa

SEQ ID NO: 972965 - DNA, 33 bp, Homo sapien
agccgagatgaaggagcaagttggaagctggag

SEQ ID NO: 972966 - DNA, 33 bp, Homo sapien
agccgagatgaaggagtaagttggaagctggag

SEQ ID NO: 972967 - DNA, 33 bp, Homo sapien
ccaggaactttgatgaaggggcagacaagtaga

SEQ ID NO: 972968 - DNA, 33 bp, Homo sapien
ccaggaactttgatgacggggcagacaagtaga

SEQ ID NO: 972969 - DNA, 33 bp, Homo sapien
gctctatctcttcctacgtgccagttgagcttt

SEQ ID NO: 972970 - DNA, 33 bp, Homo sapien
gctctatctcttcctatgtgccagttgagcttt

SEQ ID NO: 972971 - DNA, 33 bp, Homo sapien
ggtggcactggttaaactgaagccaagaagaat

SEQ ID NO: 972972 - DNA, 33 bp, Homo sapien
ggtggcactggttaaattgaagccaagaagaat

SEQ ID NO: 972973 - DNA, 33 bp, Homo sapien
gagccatcgcgtctgacgcacatagccttttaa

SEQ ID NO: 972974 - DNA, 33 bp, Homo sapien
gagccatcgcgtctgatgcacatagccttttaa

SEQ ID NO: 972975 - DNA, 33 bp, Homo sapien
tcacaaggatagttgcccaggatatgcctaaaa

SEQ ID NO: 972976 - DNA, 33 bp, Homo sapien
tcacaaggatagttgctcaggatatgcctaaaa

SEQ ID NO: 972977 - DNA, 33 bp, Homo sapien
caggctttaaattgtaagtttcaggcttcaaaa

SEQ ID NO: 972978 - DNA, 33 bp, Homo sapien
caggctttaaattgtacgtttcaggcttcaaaa

SEQ ID NO: 972979 - DNA, 33 bp, Homo sapien
taaaatttaggcaaaaatcactatcaaatggtt

SEQ ID NO: 972980 - DNA, 33 bp, Homo sapien
taaaatttaggcaaaagtcactatcaaatggtt

SEQ ID NO: 972981 - DNA, 33 bp, Homo sapien
ggtacaaggccttctacgttcctgttacgctta

SEQ ID NO: 972982 - DNA, 33 bp, Homo sapien
ggtacaaggccttctatgttcctgttacgctta

SEQ ID NO: 972983 - DNA, 33 bp, Homo sapien
ttgcttattgctgttacattttctcctctcacc

SEQ ID NO: 972984 - DNA, 33 bp, Homo sapien
ttgcttattgctgttatattttctcctctcacc

SEQ ID NO: 972985 - DNA, 33 bp, Homo sapien
gagaaggaagctatgacgcacttttctgaggct

SEQ ID NO: 972986 - DNA, 33 bp, Homo sapien
gagaaggaagctatgatgcacttttctgaggct

SEQ ID NO: 972987 - DNA, 33 bp, Homo sapien
gatcttttcactcaacaaaaagatcctggaaga

SEQ ID NO: 972988 - DNA, 33 bp, Homo sapien
gatcttttcactcaacgaaaagatcctggaaga

SEQ ID NO: 972989 - DNA, 33 bp, Homo sapien
ctgcttaaagtttgacgaggtttgttgttgttt

SEQ ID NO: 972990 - DNA, 33 bp, Homo sapien
ctgcttaaagtttgactaggtttgttgttgttt

SEQ ID NO: 972991 - DNA, 33 bp, Homo sapien
atgtggacacccaatcaacatagtgcatgacag

SEQ ID NO: 972992 - DNA, 33 bp, Homo sapien
atgtggacacccaatcgacatagtgcatgacag

SEQ ID NO: 972993 - DNA, 33 bp, Homo sapien
ggtctcaattactcagcagacaggagactaagg

SEQ ID NO: 972994 - DNA, 33 bp, Homo sapien
ggtctcaattactcaggagacaggagactaagg

SEQ ID NO: 972995 - DNA, 33 bp, Homo sapien
acccttatgatctagtcacctcgcaaaggctcc

SEQ ID NO: 972996 - DNA, 33 bp, Homo sapien
acccttatgatctagttacctcgcaaaggctcc

SEQ ID NO: 972997 - DNA, 33 bp, Homo sapien
aaatctgttcatccaccagaacaatcattctaa

SEQ ID NO: 972998 - DNA, 33 bp, Homo sapien
aaatctgttcatccactagaacaatcattctaa

SEQ ID NO: 972999 - DNA, 33 bp, Homo sapien
caaaacaaggccctgacaaatagagccagggaa

SEQ ID NO: 973000 - DNA, 33 bp, Homo sapien
caaaacaaggccctgagaaatagagccagggaa

SEQ ID NO: 973001 - DNA, 33 bp, Homo sapien
gaaattctgtgtgtaaccaagttgactacaata

SEQ ID NO: 973002 - DNA, 33 bp, Homo sapien
gaaattctgtgtgtaatcaagttgactacaata

SEQ ID NO: 973003 - DNA, 33 bp, Homo sapien
agaatatagtctagaaattcatgtagcaatata

SEQ ID NO: 973004 - DNA, 33 bp, Homo sapien
agaatatagtctagaatttcatgtagcaatata

SEQ ID NO: 973005 - DNA, 33 bp, Homo sapien
acacataaggaacacacactgagatactgacca

SEQ ID NO: 973006 - DNA, 33 bp, Homo sapien
acacataaggaacacatactgagatactgacca

SEQ ID NO: 973007 - DNA, 33 bp, Homo sapien
ttgattttcattcaaccgggctagttcttaatt

SEQ ID NO: 973008 - DNA, 33 bp, Homo sapien
ttgattttcattcaactgggctagttcttaatt

SEQ ID NO: 973009 - DNA, 33 bp, Homo sapien
atccatctccacatctcaatttctactctgttt

SEQ ID NO: 973010 - DNA, 33 bp, Homo sapien
atccatctccacatctgaatttctactctgttt

SEQ ID NO: 973011 - DNA, 33 bp, Homo sapien
ctccaaatagctcccaatgagccttacctcctg

SEQ ID NO: 973012 - DNA, 33 bp, Homo sapien
ctccaaatagctcccagtgagccttacctcctg

SEQ ID NO: 973013 - DNA, 33 bp, Homo sapien
aaattgaggattttaactcggattgtgctgaat

SEQ ID NO: 973014 - DNA, 33 bp, Homo sapien
aaattgaggattttaattcggattgtgctgaat

SEQ ID NO: 973015 - DNA, 33 bp, Homo sapien
tttgtatgttatggaccgacagaaatgtgtcct

SEQ ID NO: 973016 - DNA, 33 bp, Homo sapien
tttgtatgttatggactgacagaaatgtgtcct

SEQ ID NO: 973017 - DNA, 33 bp, Homo sapien
tgaaagaccattttcacaaggaattcctggaga

SEQ ID NO: 973018 - DNA, 33 bp, Homo sapien
tgaaagaccattttcataaggaattcctggaga

SEQ ID NO: 973019 - DNA, 33 bp, Homo sapien
cttcagataaccagaacgtaaatcacgatttgc

SEQ ID NO: 973020 - DNA, 33 bp, Homo sapien
cttcagataaccagaatgtaaatcacgatttgc

SEQ ID NO: 973021 - DNA, 33 bp, Homo sapien
atactgtggagtcattcaatcacccaagtctgg

SEQ ID NO: 973022 - DNA, 33 bp, Homo sapien
atactgtggagtcattgaatcacccaagtctgg

SEQ ID NO: 973023 - DNA, 33 bp, Homo sapien
aagaaactgcctctacaagattccagcactcat

SEQ ID NO: 973024 - DNA, 33 bp, Homo sapien
aagaaactgcctctacgagattccagcactcat

SEQ ID NO: 973025 - DNA, 33 bp, Homo sapien
gggcatgatgctttacacaactttcaaagtaga

SEQ ID NO: 973026 - DNA, 33 bp, Homo sapien
gggcatgatgctttacccaactttcaaagtaga

SEQ ID NO: 973027 - DNA, 33 bp, Homo sapien
attgctaggcaatcacaagtggtatggtctggc

SEQ ID NO: 973028 - DNA, 33 bp, Homo sapien
attgctaggcaatcacgagtggtatggtctggc

SEQ ID NO: 973029 - DNA, 33 bp, Homo sapien
ctcagaggctcttcaaacacagccatgtctcat

SEQ ID NO: 973030 - DNA, 33 bp, Homo sapien
ctcagaggctcttcaatcacagccatgtctcat

SEQ ID NO: 973031 - DNA, 33 bp, Homo sapien
cttcttaggccttcaacacttcgtgagcctaag

SEQ ID NO: 973032 - DNA, 33 bp, Homo sapien
cttcttaggccttcaatacttcgtgagcctaag

SEQ ID NO: 973033 - DNA, 33 bp, Homo sapien
ctgctacggcaaaaccagaaaactggattacca

SEQ ID NO: 973034 - DNA, 33 bp, Homo sapien
ctgctacggcaaaaccggaaaactggattacca

SEQ ID NO: 973035 - DNA, 33 bp, Homo sapien
cagatagccttatttacactacaggtgtgatga

SEQ ID NO: 973036 - DNA, 33 bp, Homo sapien
cagatagccttatttatactacaggtgtgatga

SEQ ID NO: 973037 - DNA, 33 bp, Homo sapien
gcttattctaaggaaaggttgaggacagaaagc

SEQ ID NO: 973038 - DNA, 33 bp, Homo sapien
gcttattctaaggaaatgttgaggacagaaagc

SEQ ID NO: 973039 - DNA, 33 bp, Homo sapien
ctggtgaaaaaccataactgctctaaaatttaa

SEQ ID NO: 973040 - DNA, 33 bp, Homo sapien
ctggtgaaaaaccatacctgctctaaaatttaa

SEQ ID NO: 973041 - DNA, 33 bp, Homo sapien
aaaacagactaatacaacactcctatcagatta

SEQ ID NO: 973042 - DNA, 33 bp, Homo sapien
aaaacagactaatacaccactcctatcagatta

SEQ ID NO: 973043 - DNA, 33 bp, Homo sapien
gaaccgaccctgcagaagcaatacacctccagg

SEQ ID NO: 973044 - DNA, 33 bp, Homo sapien
gaaccgaccctgcagaggcaatacacctccagg

SEQ ID NO: 973045 - DNA, 33 bp, Homo sapien
ggtgggtaaaatgaccaattctgtctccttagc

SEQ ID NO: 973046 - DNA, 33 bp, Homo sapien
ggtgggtaaaatgaccgattctgtctccttagc

SEQ ID NO: 973047 - DNA, 33 bp, Homo sapien
tatacctggtccattcaaagaattcatccacaa

SEQ ID NO: 973048 - DNA, 33 bp, Homo sapien
tatacctggtccattcgaagaattcatccacaa

SEQ ID NO: 973049 - DNA, 33 bp, Homo sapien
ggatggaaagcaaggtaaaattacagggtgaaa

SEQ ID NO: 973050 - DNA, 33 bp, Homo sapien
ggatggaaagcaaggttaaattacagggtgaaa

SEQ ID NO: 973051 - DNA, 33 bp, Homo sapien
tttgtcccatttttacagagcaataaatgcaac

SEQ ID NO: 973052 - DNA, 33 bp, Homo sapien
tttgtcccatttttacggagcaataaatgcaac

SEQ ID NO: 973053 - DNA, 33 bp, Homo sapien
attgtatcagttaatcaatcaatatgtacaaga

SEQ ID NO: 973054 - DNA, 33 bp, Homo sapien
attgtatcagttaatccatcaatatgtacaaga

SEQ ID NO: 973055 - DNA, 33 bp, Homo sapien
agcctaagatgggccacaatttagccatggaaa

SEQ ID NO: 973056 - DNA, 33 bp, Homo sapien
agcctaagatgggccataatttagccatggaaa

SEQ ID NO: 973057 - DNA, 33 bp, Homo sapien
aaaatagccaaaaacaatctgaggcaggggcag

SEQ ID NO: 973058 - DNA, 33 bp, Homo sapien
aaaatagccaaaaacagtctgaggcaggggcag

SEQ ID NO: 973059 - DNA, 33 bp, Homo sapien
tatctcaggattttgaaagggccaaactaaagg

SEQ ID NO: 973060 - DNA, 33 bp, Homo sapien
tatctcaggattttgagagggccaaactaaagg

SEQ ID NO: 973061 - DNA, 33 bp, Homo sapien
acacttggaaaattgaaagacggatacagaaat

SEQ ID NO: 973062 - DNA, 33 bp, Homo sapien
acacttggaaaattgagagacggatacagaaat

SEQ ID NO: 973063 - DNA, 33 bp, Homo sapien
cagttgtggtgtcgaacactagtactgtgcttt

SEQ ID NO: 973064 - DNA, 33 bp, Homo sapien
cagttgtggtgtcgaatactagtactgtgcttt

SEQ ID NO: 973065 - DNA, 33 bp, Homo sapien
ctgttcagtgacttccagagagtttttccacac

SEQ ID NO: 973066 - DNA, 33 bp, Homo sapien
ctgttcagtgacttccggagagtttttccacac

SEQ ID NO: 973067 - DNA, 33 bp, Homo sapien
aaaggttacataaatgacatgcctggtcaaacc

SEQ ID NO: 973068 - DNA, 33 bp, Homo sapien
aaaggttacataaatgccatgcctggtcaaacc

SEQ ID NO: 973069 - DNA, 33 bp, Homo sapien
tataactgttatatgcactggaaacatttaaaa

SEQ ID NO: 973070 - DNA, 33 bp, Homo sapien
tataactgttatatgccctggaaacatttaaaa

SEQ ID NO: 973071 - DNA, 33 bp, Homo sapien
ttgcttaagaactaaacaaaatcagagttcagt

SEQ ID NO: 973072 - DNA, 33 bp, Homo sapien
ttgcttaagaactaaagaaaatcagagttcagt

SEQ ID NO: 973073 - DNA, 33 bp, Homo sapien
ttcttgaccacctaacacactttctatggggac

SEQ ID NO: 973074 - DNA, 33 bp, Homo sapien
ttcttgaccacctaacgcactttctatggggac

SEQ ID NO: 973075 - DNA, 33 bp, Homo sapien
atagaacattttattcaaagaaaagtcattgca

SEQ ID NO: 973076 - DNA, 33 bp, Homo sapien
atagaacattttattcgaagaaaagtcattgca

SEQ ID NO: 973077 - DNA, 33 bp, Homo sapien
tgcttctcgaatgaataaaagaatgactcaaat

SEQ ID NO: 973078 - DNA, 33 bp, Homo sapien
tgcttctcgaatgaatgaaagaatgactcaaat

SEQ ID NO: 973079 - DNA, 33 bp, Homo sapien
gctgctgcaaggagacaaaggagactgaacccc

SEQ ID NO: 973080 - DNA, 33 bp, Homo sapien
gctgctgcaaggagacgaaggagactgaacccc

SEQ ID NO: 973081 - DNA, 33 bp, Homo sapien
ttctagactttaaattcaagggtgagagataaa

SEQ ID NO: 973082 - DNA, 33 bp, Homo sapien
ttctagactttaaatttaagggtgagagataaa

SEQ ID NO: 973083 - DNA, 33 bp, Homo sapien
atgtgatatgctcttagagtaattatgacattg

SEQ ID NO: 973084 - DNA, 33 bp, Homo sapien
atgtgatatgctcttatagtaattatgacattg

SEQ ID NO: 973085 - DNA, 33 bp, Homo sapien
ggtaagaaactctttaaaagatggaatcaacag

SEQ ID NO: 973086 - DNA, 33 bp, Homo sapien
ggtaagaaactctttagaagatggaatcaacag

SEQ ID NO: 973087 - DNA, 33 bp, Homo sapien
tccttcttctcatttcacctttcattccttctg

SEQ ID NO: 973088 - DNA, 33 bp, Homo sapien
tccttcttctcatttcgcctttcattccttctg

SEQ ID NO: 973089 - DNA, 33 bp, Homo sapien
accacccactacccaacgtgatggcctcatgcc

SEQ ID NO: 973090 - DNA, 33 bp, Homo sapien
accacccactacccaatgtgatggcctcatgcc

SEQ ID NO: 973091 - DNA, 33 bp, Homo sapien
aaataataatacagtaaatgacttctatgtgat

SEQ ID NO: 973092 - DNA, 33 bp, Homo sapien
aaataataatacagtagatgacttctatgtgat

SEQ ID NO: 973093 - DNA, 33 bp, Homo sapien
gatgatgacttagaaacacttggaatttgctgt

SEQ ID NO: 973094 - DNA, 33 bp, Homo sapien
gatgatgacttagaaatacttggaatttgctgt

SEQ ID NO: 973095 - DNA, 33 bp, Homo sapien
atgtataaagctgaaacttccctacaccttata

SEQ ID NO: 973096 - DNA, 33 bp, Homo sapien
atgtataaagctgaaagttccctacaccttata

SEQ ID NO: 973097 - DNA, 33 bp, Homo sapien
cagattcctactgttcgactgcagttaccatat

SEQ ID NO: 973098 - DNA, 33 bp, Homo sapien
cagattcctactgttctactgcagttaccatat

SEQ ID NO: 973099 - DNA, 33 bp, Homo sapien
tgattaccatcataataagactataacactgct

SEQ ID NO: 973100 - DNA, 33 bp, Homo sapien
tgattaccatcataatgagactataacactgct

SEQ ID NO: 973101 - DNA, 33 bp, Homo sapien
tccagtttaaagctccaacttatagtcaatttg

SEQ ID NO: 973102 - DNA, 33 bp, Homo sapien
tccagtttaaagctccgacttatagtcaatttg

SEQ ID NO: 973103 - DNA, 33 bp, Homo sapien
aactttacagagaccaaactcatgaaagaagcc

SEQ ID NO: 973104 - DNA, 33 bp, Homo sapien
aactttacagagaccacactcatgaaagaagcc

SEQ ID NO: 973105 - DNA, 33 bp, Homo sapien
caacaaaccaaagagaagcatagctggaccctc

SEQ ID NO: 973106 - DNA, 33 bp, Homo sapien
caacaaaccaaagagaggcatagctggaccctc

SEQ ID NO: 973107 - DNA, 33 bp, Homo sapien
gaagccaacaagatgcacaaaaggacacaaatg

SEQ ID NO: 973108 - DNA, 33 bp, Homo sapien
gaagccaacaagatgcgcaaaaggacacaaatg

SEQ ID NO: 973109 - DNA, 33 bp, Homo sapien
cagtgaagttcataagaccggaaagaatacgag

SEQ ID NO: 973110 - DNA, 33 bp, Homo sapien
cagtgaagttcataagcccggaaagaatacgag

SEQ ID NO: 973111 - DNA, 33 bp, Homo sapien
acgaagattttgagtagagcagggtttctctct

SEQ ID NO: 973112 - DNA, 33 bp, Homo sapien
acgaagattttgagtatagcagggtttctctct

SEQ ID NO: 973113 - DNA, 33 bp, Homo sapien
ctgctttgtactcccaacgtttcaaagagagtt

SEQ ID NO: 973114 - DNA, 33 bp, Homo sapien
ctgctttgtactcccagcgtttcaaagagagtt

SEQ ID NO: 973115 - DNA, 33 bp, Homo sapien
taattgtagggaggagaaacttttcaggaatca

SEQ ID NO: 973116 - DNA, 33 bp, Homo sapien
taattgtagggaggaggaacttttcaggaatca

SEQ ID NO: 973117 - DNA, 33 bp, Homo sapien
ggattttgaatccagacggggagaaataaagat

SEQ ID NO: 973118 - DNA, 33 bp, Homo sapien
ggattttgaatccagatggggagaaataaagat

SEQ ID NO: 973119 - DNA, 33 bp, Homo sapien
taataaggaaaccctacgttgccccaaatcatt

SEQ ID NO: 973120 - DNA, 33 bp, Homo sapien
taataaggaaaccctatgttgccccaaatcatt

SEQ ID NO: 973121 - DNA, 33 bp, Homo sapien
cagggctatttaataacttaggccatcagctat

SEQ ID NO: 973122 - DNA, 33 bp, Homo sapien
cagggctatttaataatttaggccatcagctat

SEQ ID NO: 973123 - DNA, 33 bp, Homo sapien
cattgccatgaattacaaaatgaataaaaggta

SEQ ID NO: 973124 - DNA, 33 bp, Homo sapien
cattgccatgaattactaaatgaataaaaggta

SEQ ID NO: 973125 - DNA, 33 bp, Homo sapien
ttttacacatgtccctcacttcatgttcctggg

SEQ ID NO: 973126 - DNA, 33 bp, Homo sapien
ttttacacatgtcccttacttcatgttcctggg

SEQ ID NO: 973127 - DNA, 33 bp, Homo sapien
atcaatgattccaaagaccgcaggcccatccca

SEQ ID NO: 973128 - DNA, 33 bp, Homo sapien
atcaatgattccaaagtccgcaggcccatccca

SEQ ID NO: 973129 - DNA, 33 bp, Homo sapien
gggctttgtgatatgaaacacaggagagagaac

SEQ ID NO: 973130 - DNA, 33 bp, Homo sapien
gggctttgtgatatgagacacaggagagagaac

SEQ ID NO: 973131 - DNA, 33 bp, Homo sapien
catagttaaaaacaacagcagtcacataggtga

SEQ ID NO: 973132 - DNA, 33 bp, Homo sapien
catagttaaaaacaacggcagtcacataggtga

SEQ ID NO: 973133 - DNA, 33 bp, Homo sapien
cagcatgttgggggaaatgcaagtgtagctggg

SEQ ID NO: 973134 - DNA, 33 bp, Homo sapien
cagcatgttgggggaactgcaagtgtagctggg

SEQ ID NO: 973135 - DNA, 33 bp, Homo sapien
tttacatctggacaaaattagtcaaggtccctg

SEQ ID NO: 973136 - DNA, 33 bp, Homo sapien
tttacatctggacaaagttagtcaaggtccctg

SEQ ID NO: 973137 - DNA, 33 bp, Homo sapien
cgttagacactagtaccattgtctgttattgtt

SEQ ID NO: 973138 - DNA, 33 bp, Homo sapien
cgttagacactagtacgattgtctgttattgtt

SEQ ID NO: 973139 - DNA, 33 bp, Homo sapien
aaattcatttgcacaaatcatgttgtgcctgta

SEQ ID NO: 973140 - DNA, 33 bp, Homo sapien
aaattcatttgcacaattcatgttgtgcctgta

SEQ ID NO: 973141 - DNA, 33 bp, Homo sapien
gcattgtacctcccaagtaagcagtagcacttc

SEQ ID NO: 973142 - DNA, 33 bp, Homo sapien
gcattgtacctcccaattaagcagtagcacttc

SEQ ID NO: 973143 - DNA, 33 bp, Homo sapien
atttcagaagatgttgaaaacgcctgcatgccc

SEQ ID NO: 973144 - DNA, 33 bp, Homo sapien
atttcagaagatgttggaaacgcctgcatgccc

SEQ ID NO: 973145 - DNA, 33 bp, Homo sapien
ggaataaagctgacaccgagacatgaaaattat

SEQ ID NO: 973146 - DNA, 33 bp, Homo sapien
ggaataaagctgacactgagacatgaaaattat

SEQ ID NO: 973147 - DNA, 33 bp, Homo sapien
cgacttgacaccttcacgcgaagattctaataa

SEQ ID NO: 973148 - DNA, 33 bp, Homo sapien
cgacttgacaccttcatgcgaagattctaataa

SEQ ID NO: 973149 - DNA, 33 bp, Homo sapien
taaagccttgctaaaacgtgctaagatgctgtg

SEQ ID NO: 973150 - DNA, 33 bp, Homo sapien
taaagccttgctaaaatgtgctaagatgctgtg

SEQ ID NO: 973151 - DNA, 33 bp, Homo sapien
agagtgtgtgccacaaaatgtccaggccctggg

SEQ ID NO: 973152 - DNA, 33 bp, Homo sapien
agagtgtgtgccacaagatgtccaggccctggg

SEQ ID NO: 973153 - DNA, 33 bp, Homo sapien
agtggtagccaaagtacgcacatgacttgctga

SEQ ID NO: 973154 - DNA, 33 bp, Homo sapien
agtggtagccaaagtatgcacatgacttgctga

SEQ ID NO: 973155 - DNA, 33 bp, Homo sapien
tcagctgatgaaagataacttttttgtgctcat

SEQ ID NO: 973156 - DNA, 33 bp, Homo sapien
tcagctgatgaaagatgacttttttgtgctcat

SEQ ID NO: 973157 - DNA, 33 bp, Homo sapien
attcctaccagaggtcactgcaaaaaatggaaa

SEQ ID NO: 973158 - DNA, 33 bp, Homo sapien
attcctaccagaggtcgctgcaaaaaatggaaa

SEQ ID NO: 973159 - DNA, 33 bp, Homo sapien
ttgtgatttgctttgacgtacaagtatttcaag

SEQ ID NO: 973160 - DNA, 33 bp, Homo sapien
ttgtgatttgctttgatgtacaagtatttcaag

SEQ ID NO: 973161 - DNA, 33 bp, Homo sapien
aatctaatagaggaaacagctgtaatgtatagc

SEQ ID NO: 973162 - DNA, 33 bp, Homo sapien
aatctaatagaggaaatagctgtaatgtatagc

SEQ ID NO: 973163 - DNA, 33 bp, Homo sapien
aagcccaggatttatgaaagaacaagaactgtg

SEQ ID NO: 973164 - DNA, 33 bp, Homo sapien
aagcccaggatttatgcaagaacaagaactgtg

SEQ ID NO: 973165 - DNA, 33 bp, Homo sapien
agcccacaacactttacgtcttttttgagctta

SEQ ID NO: 973166 - DNA, 33 bp, Homo sapien
agcccacaacactttaggtcttttttgagctta

SEQ ID NO: 973167 - DNA, 33 bp, Homo sapien
agcatcatgtgtgttacgtctttaggcaaaagt

SEQ ID NO: 973168 - DNA, 33 bp, Homo sapien
agcatcatgtgtgttaggtctttaggcaaaagt

SEQ ID NO: 973169 - DNA, 33 bp, Homo sapien
tttaacttaacatttccaagatggttttcctgc

SEQ ID NO: 973170 - DNA, 33 bp, Homo sapien
tttaacttaacatttctaagatggttttcctgc

SEQ ID NO: 973171 - DNA, 33 bp, Homo sapien
ctctgttttgctactacgtagataagtttgaaa

SEQ ID NO: 973172 - DNA, 33 bp, Homo sapien
ctctgttttgctactatgtagataagtttgaaa

SEQ ID NO: 973173 - DNA, 33 bp, Homo sapien
caaaggtacataagtgcattagtccgggtcaat

SEQ ID NO: 973174 - DNA, 33 bp, Homo sapien
caaaggtacataagtgtattagtccgggtcaat

SEQ ID NO: 973175 - DNA, 33 bp, Homo sapien
caaagacctggtgtgaagtggactctgacttag

SEQ ID NO: 973176 - DNA, 33 bp, Homo sapien
caaagacctggtgtgaggtggactctgacttag

SEQ ID NO: 973177 - DNA, 33 bp, Homo sapien
ccagtgtcaggaacacagagggaataaagtctg

SEQ ID NO: 973178 - DNA, 33 bp, Homo sapien
ccagtgtcaggaacacggagggaataaagtctg

SEQ ID NO: 973179 - DNA, 33 bp, Homo sapien
gcctgccttgcaattacggagcatctatatttt

SEQ ID NO: 973180 - DNA, 33 bp, Homo sapien
gcctgccttgcaattatggagcatctatatttt

SEQ ID NO: 973181 - DNA, 33 bp, Homo sapien
tttccttatacataaagtagagcgaataataac

SEQ ID NO: 973182 - DNA, 33 bp, Homo sapien
tttccttatacataaattagagcgaataataac

SEQ ID NO: 973183 - DNA, 33 bp, Homo sapien
tcatgttctttcctccacgtggttctgtctttc

SEQ ID NO: 973184 - DNA, 33 bp, Homo sapien
tcatgttctttcctccgcgtggttctgtctttc

SEQ ID NO: 973185 - DNA, 33 bp, Homo sapien
gtttggttaagagtgacgaaaatactaagtgga

SEQ ID NO: 973186 - DNA, 33 bp, Homo sapien
gtttggttaagagtgatgaaaatactaagtgga

SEQ ID NO: 973187 - DNA, 33 bp, Homo sapien
gaactagattgatgaacgactttggggtgaaaa

SEQ ID NO: 973188 - DNA, 33 bp, Homo sapien
gaactagattgatgaatgactttggggtgaaaa

SEQ ID NO: 973189 - DNA, 33 bp, Homo sapien
agaacactctgaggacaaacactgtcttttcac

SEQ ID NO: 973190 - DNA, 33 bp, Homo sapien
agaacactctgaggacgaacactgtcttttcac

SEQ ID NO: 973191 - DNA, 33 bp, Homo sapien
tctgttcctcctttccccattcattgcatcact

SEQ ID NO: 973192 - DNA, 33 bp, Homo sapien
tctgttcctcctttcctcattcattgcatcact

SEQ ID NO: 973193 - DNA, 33 bp, Homo sapien
atatttgtaacagttaaagatgtgccactgtat

SEQ ID NO: 973194 - DNA, 33 bp, Homo sapien
atatttgtaacagttacagatgtgccactgtat

SEQ ID NO: 973195 - DNA, 33 bp, Homo sapien
ttgaattgtgtaggcacggacttccattttgat

SEQ ID NO: 973196 - DNA, 33 bp, Homo sapien
ttgaattgtgtaggcatggacttccattttgat

SEQ ID NO: 973197 - DNA, 33 bp, Homo sapien
tattcttctaggagcaaattccagaagtttggt

SEQ ID NO: 973198 - DNA, 33 bp, Homo sapien
tattcttctaggagcagattccagaagtttggt

SEQ ID NO: 973199 - DNA, 33 bp, Homo sapien
tacagtacagacataaagatagcttataaacag

SEQ ID NO: 973200 - DNA, 33 bp, Homo sapien
tacagtacagacataacgatagcttataaacag

SEQ ID NO: 973201 - DNA, 33 bp, Homo sapien
ggtgctgtcaaatacaaaagctaagccaatgtt

SEQ ID NO: 973202 - DNA, 33 bp, Homo sapien
ggtgctgtcaaatacagaagctaagccaatgtt

SEQ ID NO: 973203 - DNA, 33 bp, Homo sapien
cagctcaatacttatgaagaatggaaataacag

SEQ ID NO: 973204 - DNA, 33 bp, Homo sapien
cagctcaatacttatgcagaatggaaataacag

SEQ ID NO: 973205 - DNA, 33 bp, Homo sapien
caaaaccacattttaaagatggaaacttagctc

SEQ ID NO: 973206 - DNA, 33 bp, Homo sapien
caaaaccacattttaaggatggaaacttagctc

SEQ ID NO: 973207 - DNA, 33 bp, Homo sapien
tagtggaagttttcctcaaccccgcttctctta

SEQ ID NO: 973208 - DNA, 33 bp, Homo sapien
tagtggaagttttcctgaaccccgcttctctta

SEQ ID NO: 973209 - DNA, 33 bp, Homo sapien
tggcatggttgaaccactctgagtatgggggag

SEQ ID NO: 973210 - DNA, 33 bp, Homo sapien
tggcatggttgaaccattctgagtatgggggag

SEQ ID NO: 973211 - DNA, 33 bp, Homo sapien
gtcggtgaaccacaaagatggcagagcggaaaa

SEQ ID NO: 973212 - DNA, 33 bp, Homo sapien
gtcggtgaaccacaaatatggcagagcggaaaa

SEQ ID NO: 973213 - DNA, 33 bp, Homo sapien
ttcattgtgtgtaaaaaatggatacataaaaat

SEQ ID NO: 973214 - DNA, 33 bp, Homo sapien
ttcattgtgtgtaaaacatggatacataaaaat

SEQ ID NO: 973215 - DNA, 33 bp, Homo sapien
atgcgagagagcaaaagaagagatcgcagatta

SEQ ID NO: 973216 - DNA, 33 bp, Homo sapien
atgcgagagagcaaaataagagatcgcagatta

SEQ ID NO: 973217 - DNA, 33 bp, Homo sapien
agtctaagtaaaataaacagcaaagggctagag

SEQ ID NO: 973218 - DNA, 33 bp, Homo sapien
agtctaagtaaaataaccagcaaagggctagag

SEQ ID NO: 973219 - DNA, 33 bp, Homo sapien
gggctatgtcccttcacaatctcttcctatctc

SEQ ID NO: 973220 - DNA, 33 bp, Homo sapien
gggctatgtcccttcagaatctcttcctatctc

SEQ ID NO: 973221 - DNA, 33 bp, Homo sapien
ggggaaaaaagatgcaatgaattacagtgtgat

SEQ ID NO: 973222 - DNA, 33 bp, Homo sapien
ggggaaaaaagatgcagtgaattacagtgtgat

SEQ ID NO: 973223 - DNA, 33 bp, Homo sapien
ttgaaaatgttaatgacgagtggatagtgtttt

SEQ ID NO: 973224 - DNA, 33 bp, Homo sapien
ttgaaaatgttaatgatgagtggatagtgtttt

SEQ ID NO: 973225 - DNA, 33 bp, Homo sapien
caagtttcttcagctcagactctgtgtttccaa

SEQ ID NO: 973226 - DNA, 33 bp, Homo sapien
caagtttcttcagctccgactctgtgtttccaa

SEQ ID NO: 973227 - DNA, 33 bp, Homo sapien
caagaacaaagggcaacaatactgaatacttat

SEQ ID NO: 973228 - DNA, 33 bp, Homo sapien
caagaacaaagggcaagaatactgaatacttat

SEQ ID NO: 973229 - DNA, 33 bp, Homo sapien
caatatgatggttataactgaatactgatttat

SEQ ID NO: 973230 - DNA, 33 bp, Homo sapien
caatatgatggttatatctgaatactgatttat

SEQ ID NO: 973231 - DNA, 33 bp, Homo sapien
tacatactagcagcataatctacccttgacagg

SEQ ID NO: 973232 - DNA, 33 bp, Homo sapien
tacatactagcagcatgatctacccttgacagg

SEQ ID NO: 973233 - DNA, 33 bp, Homo sapien
tattgtgtgagattcacggtataaaaatattgc

SEQ ID NO: 973234 - DNA, 33 bp, Homo sapien
tattgtgtgagattcatggtataaaaatattgc

SEQ ID NO: 973235 - DNA, 33 bp, Homo sapien
taaatgagtgtattcacagtcaaaatttatcaa

SEQ ID NO: 973236 - DNA, 33 bp, Homo sapien
taaatgagtgtattcatagtcaaaatttatcaa

SEQ ID NO: 973237 - DNA, 33 bp, Homo sapien
aatatctaattcctaccgcagaagatgtaccat

SEQ ID NO: 973238 - DNA, 33 bp, Homo sapien
aatatctaattcctactgcagaagatgtaccat

SEQ ID NO: 973239 - DNA, 33 bp, Homo sapien
caatgcgctagtgtcactcatatgaaagcagga

SEQ ID NO: 973240 - DNA, 33 bp, Homo sapien
caatgcgctagtgtcattcatatgaaagcagga

SEQ ID NO: 973241 - DNA, 33 bp, Homo sapien
aaaattacagcattcacggggagaagaaaaata

SEQ ID NO: 973242 - DNA, 33 bp, Homo sapien
aaaattacagcattcatggggagaagaaaaata

SEQ ID NO: 973243 - DNA, 33 bp, Homo sapien
tgacacattcaagagacggtagctgcaggtgtt

SEQ ID NO: 973244 - DNA, 33 bp, Homo sapien
tgacacattcaagagatggtagctgcaggtgtt

SEQ ID NO: 973245 - DNA, 33 bp, Homo sapien
tccatttccagtgctgcagtctgatttgcatcc

SEQ ID NO: 973246 - DNA, 33 bp, Homo sapien
tccatttccagtgctgtagtctgatttgcatcc

SEQ ID NO: 973247 - DNA, 33 bp, Homo sapien
agaggccacacacaggaacggatgcaaagaagg

SEQ ID NO: 973248 - DNA, 33 bp, Homo sapien
agaggccacacacaggtacggatgcaaagaagg

SEQ ID NO: 973249 - DNA, 33 bp, Homo sapien
attcccagagtgagatcagtatcaaagaagatg

SEQ ID NO: 973250 - DNA, 33 bp, Homo sapien
attcccagagtgagatgagtatcaaagaagatg

SEQ ID NO: 973251 - DNA, 33 bp, Homo sapien
aagtaaaggattacccagatatccctcacaatg

SEQ ID NO: 973252 - DNA, 33 bp, Homo sapien
aagtaaaggattacccggatatccctcacaatg

SEQ ID NO: 973253 - DNA, 33 bp, Homo sapien
ctcctctccttacagaccattttcttatcccaa

SEQ ID NO: 973254 - DNA, 33 bp, Homo sapien
ctcctctccttacagatcattttcttatcccaa

SEQ ID NO: 973255 - DNA, 33 bp, Homo sapien
tgcagaagattgaaaccgaaccctttccataca

SEQ ID NO: 973256 - DNA, 33 bp, Homo sapien
tgcagaagattgaaactgaaccctttccataca

SEQ ID NO: 973257 - DNA, 33 bp, Homo sapien
caactctctcccgaataataacataacactttg

SEQ ID NO: 973258 - DNA, 33 bp, Homo sapien
caactctctcccgaatgataacataacactttg

SEQ ID NO: 973259 - DNA, 33 bp, Homo sapien
ggtattaataatacacaatgacaacaataattg

SEQ ID NO: 973260 - DNA, 33 bp, Homo sapien
ggtattaataatacacgatgacaacaataattg

SEQ ID NO: 973261 - DNA, 33 bp, Homo sapien
acagggattaatatccaggagtgaacacaaagt

SEQ ID NO: 973262 - DNA, 33 bp, Homo sapien
acagggattaatatccgggagtgaacacaaagt

SEQ ID NO: 973263 - DNA, 33 bp, Homo sapien
taatagtaagacctgacagttgatggccaaatg

SEQ ID NO: 973264 - DNA, 33 bp, Homo sapien
taatagtaagacctgatagttgatggccaaatg

SEQ ID NO: 973265 - DNA, 33 bp, Homo sapien
gactatttcttaccaacaccttccaatgcttca

SEQ ID NO: 973266 - DNA, 33 bp, Homo sapien
gactatttcttaccaataccttccaatgcttca

SEQ ID NO: 973267 - DNA, 33 bp, Homo sapien
aaagtgctttacaaaaatgaggtaagagacaga

SEQ ID NO: 973268 - DNA, 33 bp, Homo sapien
aaagtgctttacaaaactgaggtaagagacaga

SEQ ID NO: 973269 - DNA, 33 bp, Homo sapien
tcagagtgttttgctacattcctacataaacaa

SEQ ID NO: 973270 - DNA, 33 bp, Homo sapien
tcagagtgttttgctagattcctacataaacaa

SEQ ID NO: 973271 - DNA, 33 bp, Homo sapien
tggtatttcctgagaaacaatctttataattcc

SEQ ID NO: 973272 - DNA, 33 bp, Homo sapien
tggtatttcctgagaagcaatctttataattcc

SEQ ID NO: 973273 - DNA, 33 bp, Homo sapien
gtactcaagtgcaaacacataccaggcattcaa

SEQ ID NO: 973274 - DNA, 33 bp, Homo sapien
gtactcaagtgcaaacccataccaggcattcaa

SEQ ID NO: 973275 - DNA, 33 bp, Homo sapien
ccccccatcctttacccacataaagtccgagcc

SEQ ID NO: 973276 - DNA, 33 bp, Homo sapien
ccccccatcctttaccgacataaagtccgagcc

SEQ ID NO: 973277 - DNA, 33 bp, Homo sapien
acatcaagttaacggaacagtgctataaacaat

SEQ ID NO: 973278 - DNA, 33 bp, Homo sapien
acatcaagttaacggaccagtgctataaacaat

SEQ ID NO: 973279 - DNA, 33 bp, Homo sapien
gcaaaaacttaagatgacactaggtgtgaattt

SEQ ID NO: 973280 - DNA, 33 bp, Homo sapien
gcaaaaacttaagatgccactaggtgtgaattt

SEQ ID NO: 973281 - DNA, 33 bp, Homo sapien
gatatccagcacatcaccttaacatttaatcac

SEQ ID NO: 973282 - DNA, 33 bp, Homo sapien
gatatccagcacatcatcttaacatttaatcac

SEQ ID NO: 973283 - DNA, 33 bp, Homo sapien
atgttattcattgctccagtacttttgttcaga

SEQ ID NO: 973284 - DNA, 33 bp, Homo sapien
atgttattcattgctctagtacttttgttcaga

SEQ ID NO: 973285 - DNA, 33 bp, Homo sapien
aatgttccatgctatacgaatttttttttccca

SEQ ID NO: 973286 - DNA, 33 bp, Homo sapien
aatgttccatgctatatgaatttttttttccca

SEQ ID NO: 973287 - DNA, 33 bp, Homo sapien
agccggttggatttccccaaagactcagctctg

SEQ ID NO: 973288 - DNA, 33 bp, Homo sapien
agccggttggatttccgcaaagactcagctctg

SEQ ID NO: 973289 - DNA, 33 bp, Homo sapien
gaaagataagtgacagactgctagaaaatattt

SEQ ID NO: 973290 - DNA, 33 bp, Homo sapien
gaaagataagtgacagtctgctagaaaatattt

SEQ ID NO: 973291 - DNA, 33 bp, Homo sapien
cctgttgtttcatttaccttttcgaaaatgtct

SEQ ID NO: 973292 - DNA, 33 bp, Homo sapien
cctgttgtttcatttatcttttcgaaaatgtct

SEQ ID NO: 973293 - DNA, 33 bp, Homo sapien
gctgcagtgtagacaacgtactggggaatggag

SEQ ID NO: 973294 - DNA, 33 bp, Homo sapien
gctgcagtgtagacaatgtactggggaatggag

SEQ ID NO: 973295 - DNA, 33 bp, Homo sapien
aagtaattcagatcacagatttttttaaaaagt

SEQ ID NO: 973296 - DNA, 33 bp, Homo sapien
aagtaattcagatcacggatttttttaaaaagt

SEQ ID NO: 973297 - DNA, 33 bp, Homo sapien
agtctgatgggagagaacattttacttgaaaaa

SEQ ID NO: 973298 - DNA, 33 bp, Homo sapien
agtctgatgggagagagcattttacttgaaaaa

SEQ ID NO: 973299 - DNA, 33 bp, Homo sapien
atggcataacatagcaactacatctccttagcc

SEQ ID NO: 973300 - DNA, 33 bp, Homo sapien
atggcataacatagcacctacatctccttagcc

SEQ ID NO: 973301 - DNA, 33 bp, Homo sapien
taatagtttctttcctcaaatatctgggagcct

SEQ ID NO: 973302 - DNA, 33 bp, Homo sapien
taatagtttctttccttaaatatctgggagcct

SEQ ID NO: 973303 - DNA, 33 bp, Homo sapien
gctgctacttgaaaacaatagtaaaactcaaaa

SEQ ID NO: 973304 - DNA, 33 bp, Homo sapien
gctgctacttgaaaacgatagtaaaactcaaaa

SEQ ID NO: 973305 - DNA, 33 bp, Homo sapien
ttcttacatcagtttaactttcaacagaagcac

SEQ ID NO: 973306 - DNA, 33 bp, Homo sapien
ttcttacatcagtttacctttcaacagaagcac

SEQ ID NO: 973307 - DNA, 33 bp, Homo sapien
gagaccaatacacaatgaagcttgcatttagaa

SEQ ID NO: 973308 - DNA, 33 bp, Homo sapien
gagaccaatacacaattaagcttgcatttagaa

SEQ ID NO: 973309 - DNA, 33 bp, Homo sapien
tctgtctggattttgagaaaacaacaacatcat

SEQ ID NO: 973310 - DNA, 33 bp, Homo sapien
tctgtctggattttgataaaacaacaacatcat

SEQ ID NO: 973311 - DNA, 33 bp, Homo sapien
catgaagaggaaaggccctaggatgaactggag

SEQ ID NO: 973312 - DNA, 33 bp, Homo sapien
catgaagaggaaaggcgctaggatgaactggag

SEQ ID NO: 973313 - DNA, 33 bp, Homo sapien
tcaggaattctaggagaagatattaagaacacc

SEQ ID NO: 973314 - DNA, 33 bp, Homo sapien
tcaggaattctaggagcagatattaagaacacc

SEQ ID NO: 973315 - DNA, 33 bp, Homo sapien
tgggcttatctgaggccatctttggagcctggc

SEQ ID NO: 973316 - DNA, 33 bp, Homo sapien
tgggcttatctgaggctatctttggagcctggc

SEQ ID NO: 973317 - DNA, 33 bp, Homo sapien
aaaaaatgcactctggaaaaagcaatgtgtcag

SEQ ID NO: 973318 - DNA, 33 bp, Homo sapien
aaaaaatgcactctggcaaaagcaatgtgtcag

SEQ ID NO: 973319 - DNA, 33 bp, Homo sapien
gtattggcatataacccattcataccttctgga

SEQ ID NO: 973320 - DNA, 33 bp, Homo sapien
gtattggcatataacctattcataccttctgga

SEQ ID NO: 973321 - DNA, 33 bp, Homo sapien
ttttctggtgccagacaaagcaagagaaatgaa

SEQ ID NO: 973322 - DNA, 33 bp, Homo sapien
ttttctggtgccagacgaagcaagagaaatgaa

SEQ ID NO: 973323 - DNA, 33 bp, Homo sapien
gcacagatataaagacacggccaaattacctca

SEQ ID NO: 973324 - DNA, 33 bp, Homo sapien
gcacagatataaagacgcggccaaattacctca

SEQ ID NO: 973325 - DNA, 33 bp, Homo sapien
agactgacaagttataagatcatgggcaactca

SEQ ID NO: 973326 - DNA, 33 bp, Homo sapien
agactgacaagttatatgatcatgggcaactca

SEQ ID NO: 973327 - DNA, 33 bp, Homo sapien
cttttgatatcatccaatataactatgcatatt

SEQ ID NO: 973328 - DNA, 33 bp, Homo sapien
cttttgatatcatccagtataactatgcatatt

SEQ ID NO: 973329 - DNA, 33 bp, Homo sapien
ctatgtactcttacgccaccaacaatccccaag

SEQ ID NO: 973330 - DNA, 33 bp, Homo sapien
ctatgtactcttacgctaccaacaatccccaag

SEQ ID NO: 973331 - DNA, 33 bp, Homo sapien
tcactgaactgtaagacagaaaatgagtcccgc

SEQ ID NO: 973332 - DNA, 33 bp, Homo sapien
tcactgaactgtaagatagaaaatgagtcccgc

SEQ ID NO: 973333 - DNA, 33 bp, Homo sapien
cacccaaactggcttacatctgcggttataatt

SEQ ID NO: 973334 - DNA, 33 bp, Homo sapien
cacccaaactggcttatatctgcggttataatt

SEQ ID NO: 973335 - DNA, 33 bp, Homo sapien
tccaccctgagaaaaagaagatggtggcattta

SEQ ID NO: 973336 - DNA, 33 bp, Homo sapien
tccaccctgagaaaaataagatggtggcattta

SEQ ID NO: 973337 - DNA, 33 bp, Homo sapien
attgcatattactacaacaggttttgaatttat

SEQ ID NO: 973338 - DNA, 33 bp, Homo sapien
attgcatattactacatcaggttttgaatttat

SEQ ID NO: 973339 - DNA, 33 bp, Homo sapien
aaacatattagtaaggacacagattttggtaag

SEQ ID NO: 973340 - DNA, 33 bp, Homo sapien
aaacatattagtaagggcacagattttggtaag

SEQ ID NO: 973341 - DNA, 33 bp, Homo sapien
tcacctgttagaaccaaaaatgtcagcatgggg

SEQ ID NO: 973342 - DNA, 33 bp, Homo sapien
tcacctgttagaaccagaaatgtcagcatgggg

SEQ ID NO: 973343 - DNA, 33 bp, Homo sapien
agataaccaagaagaccatgttcagatcttctg

SEQ ID NO: 973344 - DNA, 33 bp, Homo sapien
agataaccaagaagacgatgttcagatcttctg

SEQ ID NO: 973345 - DNA, 33 bp, Homo sapien
ctttcctacctatggaacctcaactagcattat

SEQ ID NO: 973346 - DNA, 33 bp, Homo sapien
ctttcctacctatggagcctcaactagcattat

SEQ ID NO: 973347 - DNA, 33 bp, Homo sapien
aagaagaataattatacaagtagaaccccataa

SEQ ID NO: 973348 - DNA, 33 bp, Homo sapien
aagaagaataattatagaagtagaaccccataa

SEQ ID NO: 973349 - DNA, 33 bp, Homo sapien
tactatgtagatgtcacgcaaatagctgttata

SEQ ID NO: 973350 - DNA, 33 bp, Homo sapien
tactatgtagatgtcatgcaaatagctgttata

SEQ ID NO: 973351 - DNA, 33 bp, Homo sapien
tttggttgtggaaaaaaaatgagacatggtaca

SEQ ID NO: 973352 - DNA, 33 bp, Homo sapien
tttggttgtggaaaaagaatgagacatggtaca

SEQ ID NO: 973353 - DNA, 33 bp, Homo sapien
tttttaggacctcttacagtggaacattcaagg

SEQ ID NO: 973354 - DNA, 33 bp, Homo sapien
tttttaggacctcttagagtggaacattcaagg

SEQ ID NO: 973355 - DNA, 33 bp, Homo sapien
ttcttgcatctctggtcacaacatttttaccaa

SEQ ID NO: 973356 - DNA, 33 bp, Homo sapien
ttcttgcatctctggtgacaacatttttaccaa

SEQ ID NO: 973357 - DNA, 33 bp, Homo sapien
gaatggccatcagagaagcagaattaaatgaaa

SEQ ID NO: 973358 - DNA, 33 bp, Homo sapien
gaatggccatcagagacgcagaattaaatgaaa

SEQ ID NO: 973359 - DNA, 33 bp, Homo sapien
tcagttcacaacatggccacaacccctctctcc

SEQ ID NO: 973360 - DNA, 33 bp, Homo sapien
tcagttcacaacatggtcacaacccctctctcc

SEQ ID NO: 973361 - DNA, 33 bp, Homo sapien
cagatcaaatcatgcacaagtctaaaactcact

SEQ ID NO: 973362 - DNA, 33 bp, Homo sapien
cagatcaaatcatgcagaagtctaaaactcact

SEQ ID NO: 973363 - DNA, 33 bp, Homo sapien
ctactgaaaaggctggaaagggaaggaatactt

SEQ ID NO: 973364 - DNA, 33 bp, Homo sapien
ctactgaaaaggctgggaagggaaggaatactt

SEQ ID NO: 973365 - DNA, 33 bp, Homo sapien
agtgaggacgatcagaaagctcaatggagaggt

SEQ ID NO: 973366 - DNA, 33 bp, Homo sapien
agtgaggacgatcagacagctcaatggagaggt

SEQ ID NO: 973367 - DNA, 33 bp, Homo sapien
agtttgcaagaaatgcacaaagtaactgtaaat

SEQ ID NO: 973368 - DNA, 33 bp, Homo sapien
agtttgcaagaaatgcgcaaagtaactgtaaat

SEQ ID NO: 973369 - DNA, 33 bp, Homo sapien
agaatttccctacatgcatttcatctgaggata

SEQ ID NO: 973370 - DNA, 33 bp, Homo sapien
agaatttccctacatggatttcatctgaggata

SEQ ID NO: 973371 - DNA, 33 bp, Homo sapien
ttcagaaagtttcatacaattctcacgtgttac

SEQ ID NO: 973372 - DNA, 33 bp, Homo sapien
ttcagaaagtttcatataattctcacgtgttac

SEQ ID NO: 973373 - DNA, 33 bp, Homo sapien
ttctgccactgtgcaaagtcgttatccaacact

SEQ ID NO: 973374 - DNA, 33 bp, Homo sapien
ttctgccactgtgcaatgtcgttatccaacact

SEQ ID NO: 973375 - DNA, 33 bp, Homo sapien
ggatttgaggattagaagccattatagctaagc

SEQ ID NO: 973376 - DNA, 33 bp, Homo sapien
ggatttgaggattagaggccattatagctaagc

SEQ ID NO: 973377 - DNA, 33 bp, Homo sapien
gaatgaataaaatgagactaagcggaaggcatg

SEQ ID NO: 973378 - DNA, 33 bp, Homo sapien
gaatgaataaaatgagtctaagcggaaggcatg

SEQ ID NO: 973379 - DNA, 33 bp, Homo sapien
tgttcagttgtctaagcatcatcccttctgtgg

SEQ ID NO: 973380 - DNA, 33 bp, Homo sapien
tgttcagttgtctaagtatcatcccttctgtgg

SEQ ID NO: 973381 - DNA, 33 bp, Homo sapien
tcttcctgtgtagccacatacccaggctctgca

SEQ ID NO: 973382 - DNA, 33 bp, Homo sapien
tcttcctgtgtagccatatacccaggctctgca

SEQ ID NO: 973383 - DNA, 33 bp, Homo sapien
ttctgaatcaggaatcaaatggataacactaaa

SEQ ID NO: 973384 - DNA, 33 bp, Homo sapien
ttctgaatcaggaatcgaatggataacactaaa

SEQ ID NO: 973385 - DNA, 33 bp, Homo sapien
caatgtccaaagtcaaatatcacctaaactggt

SEQ ID NO: 973386 - DNA, 33 bp, Homo sapien
caatgtccaaagtcaagtatcacctaaactggt

SEQ ID NO: 973387 - DNA, 33 bp, Homo sapien
tatatatgtacacactcacaatactatatcaca

SEQ ID NO: 973388 - DNA, 33 bp, Homo sapien
tatatatgtacacactgacaatactatatcaca

SEQ ID NO: 973389 - DNA, 33 bp, Homo sapien
tagattctggtctttcccaactggcctgtgaga

SEQ ID NO: 973390 - DNA, 33 bp, Homo sapien
tagattctggtctttctcaactggcctgtgaga

SEQ ID NO: 973391 - DNA, 33 bp, Homo sapien
atagcgatgaaactcacatttccttatgagtgc

SEQ ID NO: 973392 - DNA, 33 bp, Homo sapien
atagcgatgaaactcagatttccttatgagtgc

SEQ ID NO: 973393 - DNA, 33 bp, Homo sapien
tcttacttaaccatcaatagaacataccataag

SEQ ID NO: 973394 - DNA, 33 bp, Homo sapien
tcttacttaaccatcagtagaacataccataag

SEQ ID NO: 973395 - DNA, 33 bp, Homo sapien
cactagaaaagtataaatggaactgtttcatag

SEQ ID NO: 973396 - DNA, 33 bp, Homo sapien
cactagaaaagtataagtggaactgtttcatag

SEQ ID NO: 973397 - DNA, 33 bp, Homo sapien
gaactctttgttatgccccctgcaaagcaaaac

SEQ ID NO: 973398 - DNA, 33 bp, Homo sapien
gaactctttgttatgcgccctgcaaagcaaaac

SEQ ID NO: 973399 - DNA, 33 bp, Homo sapien
gttacttctataaatcaaacctgtaaataaata

SEQ ID NO: 973400 - DNA, 33 bp, Homo sapien
gttacttctataaatcgaacctgtaaataaata

SEQ ID NO: 973401 - DNA, 33 bp, Homo sapien
ttatttttctctaatcaaatgcaccataaaaag

SEQ ID NO: 973402 - DNA, 33 bp, Homo sapien
ttatttttctctaatcgaatgcaccataaaaag

SEQ ID NO: 973403 - DNA, 33 bp, Homo sapien
tctgataggtgtgtcaccatttgttctttctga

SEQ ID NO: 973404 - DNA, 33 bp, Homo sapien
tctgataggtgtgtcatcatttgttctttctga

SEQ ID NO: 973405 - DNA, 33 bp, Homo sapien
ggaggagatgaggagaaaaaaggaagtaataga

SEQ ID NO: 973406 - DNA, 33 bp, Homo sapien
ggaggagatgaggagataaaaggaagtaataga

SEQ ID NO: 973407 - DNA, 33 bp, Homo sapien
taatgtgattacaaaagaattggtttcatctgt

SEQ ID NO: 973408 - DNA, 33 bp, Homo sapien
taatgtgattacaaaataattggtttcatctgt

SEQ ID NO: 973409 - DNA, 33 bp, Homo sapien
tctatgaaacagaagacggttttcctttgtgtt

SEQ ID NO: 973410 - DNA, 33 bp, Homo sapien
tctatgaaacagaagatggttttcctttgtgtt

SEQ ID NO: 973411 - DNA, 33 bp, Homo sapien
ttccattgggaaaacacgaagccttagctacta

SEQ ID NO: 973412 - DNA, 33 bp, Homo sapien
ttccattgggaaaacatgaagccttagctacta

SEQ ID NO: 973413 - DNA, 33 bp, Homo sapien
gagaaaagcatggttccacagttccgcgactcc

SEQ ID NO: 973414 - DNA, 33 bp, Homo sapien
gagaaaagcatggttctacagttccgcgactcc

SEQ ID NO: 973415 - DNA, 33 bp, Homo sapien
cttaatttagacatgaagatgagcagtaaattc

SEQ ID NO: 973416 - DNA, 33 bp, Homo sapien
cttaatttagacatgaggatgagcagtaaattc

SEQ ID NO: 973417 - DNA, 33 bp, Homo sapien
gcagtggcaatcacccaaaaccagaattgtccc

SEQ ID NO: 973418 - DNA, 33 bp, Homo sapien
gcagtggcaatcacccgaaaccagaattgtccc

SEQ ID NO: 973419 - DNA, 33 bp, Homo sapien
agccactgaattttgacgtagtttattagacag

SEQ ID NO: 973420 - DNA, 33 bp, Homo sapien
agccactgaattttgaggtagtttattagacag

SEQ ID NO: 973421 - DNA, 33 bp, Homo sapien
ggagagctggatttcacgctgagccctatttct

SEQ ID NO: 973422 - DNA, 33 bp, Homo sapien
ggagagctggatttcatgctgagccctatttct

SEQ ID NO: 973423 - DNA, 33 bp, Homo sapien
tgtgattataaccagcaagtatatttggcacag

SEQ ID NO: 973424 - DNA, 33 bp, Homo sapien
tgtgattataaccagcgagtatatttggcacag

SEQ ID NO: 973425 - DNA, 33 bp, Homo sapien
taattcacctgcgttgaatccataccttccctt

SEQ ID NO: 973426 - DNA, 33 bp, Homo sapien
taattcacctgcgttgcatccataccttccctt

SEQ ID NO: 973427 - DNA, 33 bp, Homo sapien
agcattcctcaccactaaaattactctcagaaa

SEQ ID NO: 973428 - DNA, 33 bp, Homo sapien
agcattcctcaccactgaaattactctcagaaa

SEQ ID NO: 973429 - DNA, 33 bp, Homo sapien
catctggagactagaaagagataatcaaagaca

SEQ ID NO: 973430 - DNA, 33 bp, Homo sapien
catctggagactagaacgagataatcaaagaca

SEQ ID NO: 973431 - DNA, 33 bp, Homo sapien
agaacacagagcattaataagtgaagagaaaga

SEQ ID NO: 973432 - DNA, 33 bp, Homo sapien
agaacacagagcattactaagtgaagagaaaga

SEQ ID NO: 973433 - DNA, 33 bp, Homo sapien
ggaaatagggaaagagaaatagatggttgtaat

SEQ ID NO: 973434 - DNA, 33 bp, Homo sapien
ggaaatagggaaagaggaatagatggttgtaat

SEQ ID NO: 973435 - DNA, 33 bp, Homo sapien
ctaaacccaggacttgcaaaattatttcagtaa

SEQ ID NO: 973436 - DNA, 33 bp, Homo sapien
ctaaacccaggacttggaaaattatttcagtaa

SEQ ID NO: 973437 - DNA, 33 bp, Homo sapien
gatagatatgtaagcaaatactgatattacaat

SEQ ID NO: 973438 - DNA, 33 bp, Homo sapien
gatagatatgtaagcagatactgatattacaat

SEQ ID NO: 973439 - DNA, 33 bp, Homo sapien
gcaaaatacattggtacaatttggtagaaagac

SEQ ID NO: 973440 - DNA, 33 bp, Homo sapien
gcaaaatacattggtataatttggtagaaagac

SEQ ID NO: 973441 - DNA, 33 bp, Homo sapien
tatatgactagtgcaacgtaatcataggacttt

SEQ ID NO: 973442 - DNA, 33 bp, Homo sapien
tatatgactagtgcaatgtaatcataggacttt

SEQ ID NO: 973443 - DNA, 33 bp, Homo sapien
aagtgccaaaggatcaatagtatatgacagatg

SEQ ID NO: 973444 - DNA, 33 bp, Homo sapien
aagtgccaaaggatcactagtatatgacagatg

SEQ ID NO: 973445 - DNA, 33 bp, Homo sapien
tggctaagtattttagcagcaatagtcagcaca

SEQ ID NO: 973446 - DNA, 33 bp, Homo sapien
tggctaagtattttagtagcaatagtcagcaca

SEQ ID NO: 973447 - DNA, 33 bp, Homo sapien
acggtcagtttatctcacattttgaacttcatt

SEQ ID NO: 973448 - DNA, 33 bp, Homo sapien
acggtcagtttatctcgcattttgaacttcatt

SEQ ID NO: 973449 - DNA, 33 bp, Homo sapien
cctaggttgagcctagacagagaataatgagga

SEQ ID NO: 973450 - DNA, 33 bp, Homo sapien
cctaggttgagcctagccagagaataatgagga

SEQ ID NO: 973451 - DNA, 33 bp, Homo sapien
acaggatttgtcataccccattttcatgagaag

SEQ ID NO: 973452 - DNA, 33 bp, Homo sapien
acaggatttgtcatactccattttcatgagaag

SEQ ID NO: 973453 - DNA, 33 bp, Homo sapien
tcagatacaaattcagaatatcctctcacttta

SEQ ID NO: 973454 - DNA, 33 bp, Homo sapien
tcagatacaaattcaggatatcctctcacttta

SEQ ID NO: 973455 - DNA, 33 bp, Homo sapien
cggttttctgatcctgcattagattgcttagga

SEQ ID NO: 973456 - DNA, 33 bp, Homo sapien
cggttttctgatcctgtattagattgcttagga

SEQ ID NO: 973457 - DNA, 33 bp, Homo sapien
aggccatgctcagattcaacttagggcaatgac

SEQ ID NO: 973458 - DNA, 33 bp, Homo sapien
aggccatgctcagatttaacttagggcaatgac

SEQ ID NO: 973459 - DNA, 33 bp, Homo sapien
acatcttaaaccaaacaaccacagatgatatat

SEQ ID NO: 973460 - DNA, 33 bp, Homo sapien
acatcttaaaccaaacgaccacagatgatatat

SEQ ID NO: 973461 - DNA, 33 bp, Homo sapien
ccctctctgggtcccactaatttgctagagcag

SEQ ID NO: 973462 - DNA, 33 bp, Homo sapien
ccctctctgggtcccattaatttgctagagcag

SEQ ID NO: 973463 - DNA, 33 bp, Homo sapien
ataggaagttctcaataaattgaatcgtagcag

SEQ ID NO: 973464 - DNA, 33 bp, Homo sapien
ataggaagttctcaatgaattgaatcgtagcag

SEQ ID NO: 973465 - DNA, 33 bp, Homo sapien
tgcatttgcaaccaagacatcagctgatcatac

SEQ ID NO: 973466 - DNA, 33 bp, Homo sapien
tgcatttgcaaccaaggcatcagctgatcatac

SEQ ID NO: 973467 - DNA, 33 bp, Homo sapien
tcccccaaaatcaaccaaaagtaaatgtcatat

SEQ ID NO: 973468 - DNA, 33 bp, Homo sapien
tcccccaaaatcaaccgaaagtaaatgtcatat

SEQ ID NO: 973469 - DNA, 33 bp, Homo sapien
tagtatggatctttcacctcattgattgaattt

SEQ ID NO: 973470 - DNA, 33 bp, Homo sapien
tagtatggatctttcatctcattgattgaattt

SEQ ID NO: 973471 - DNA, 33 bp, Homo sapien
caaagcttctgatctacagtgttttaaaatccc

SEQ ID NO: 973472 - DNA, 33 bp, Homo sapien
caaagcttctgatctatagtgttttaaaatccc

SEQ ID NO: 973473 - DNA, 33 bp, Homo sapien
tagccctgttgtctaacgagatgagatagcctg

SEQ ID NO: 973474 - DNA, 33 bp, Homo sapien
tagccctgttgtctaaggagatgagatagcctg

SEQ ID NO: 973475 - DNA, 33 bp, Homo sapien
cgctcacagccaggaagaggagagaatatcgta

SEQ ID NO: 973476 - DNA, 33 bp, Homo sapien
cgctcacagccaggaataggagagaatatcgta

SEQ ID NO: 973477 - DNA, 33 bp, Homo sapien
ttcacagtttcagttacctgcaatcaaccacaa

SEQ ID NO: 973478 - DNA, 33 bp, Homo sapien
ttcacagtttcagttagctgcaatcaaccacaa

SEQ ID NO: 973479 - DNA, 33 bp, Homo sapien
gggtttgagaaagaaacagcatggagccaacat

SEQ ID NO: 973480 - DNA, 33 bp, Homo sapien
gggtttgagaaagaaagagcatggagccaacat

SEQ ID NO: 973481 - DNA, 33 bp, Homo sapien
taaattaatatgcccgacataaaacgcatcctg

SEQ ID NO: 973482 - DNA, 33 bp, Homo sapien
taaattaatatgcccgtcataaaacgcatcctg

SEQ ID NO: 973483 - DNA, 33 bp, Homo sapien
aactctgaaaggtagtcaaaggtttatagcaaa

SEQ ID NO: 973484 - DNA, 33 bp, Homo sapien
aactctgaaaggtagttaaaggtttatagcaaa

SEQ ID NO: 973485 - DNA, 33 bp, Homo sapien
tattcccttccccttcaacaactcaactccagc

SEQ ID NO: 973486 - DNA, 33 bp, Homo sapien
tattcccttccccttcgacaactcaactccagc

SEQ ID NO: 973487 - DNA, 33 bp, Homo sapien
ctgctaaaagtgaggacgtgaaaaagaccaaaa

SEQ ID NO: 973488 - DNA, 33 bp, Homo sapien
ctgctaaaagtgaggatgtgaaaaagaccaaaa

SEQ ID NO: 973489 - DNA, 33 bp, Homo sapien
atgcagaagttttggcaatccattttggacatg

SEQ ID NO: 973490 - DNA, 33 bp, Homo sapien
atgcagaagttttggccatccattttggacatg

SEQ ID NO: 973491 - DNA, 33 bp, Homo sapien
tttggtgaggtgctagaaaactctggaggacta

SEQ ID NO: 973492 - DNA, 33 bp, Homo sapien
tttggtgaggtgctaggaaactctggaggacta

SEQ ID NO: 973493 - DNA, 33 bp, Homo sapien
gcgctgttagcaaaaacgttactactatcagtc

SEQ ID NO: 973494 - DNA, 33 bp, Homo sapien
gcgctgttagcaaaaatgttactactatcagtc

SEQ ID NO: 973495 - DNA, 33 bp, Homo sapien
aaataatttcatcttcacagtttaagaaggtgg

SEQ ID NO: 973496 - DNA, 33 bp, Homo sapien
aaataatttcatcttcgcagtttaagaaggtgg

SEQ ID NO: 973497 - DNA, 33 bp, Homo sapien
cattaaatcatggaggaaggattcaaacgcagt

SEQ ID NO: 973498 - DNA, 33 bp, Homo sapien
cattaaatcatggaggtaggattcaaacgcagt

SEQ ID NO: 973499 - DNA, 33 bp, Homo sapien
taatgtgtgatttctacgtctttaagttaaaat

SEQ ID NO: 973500 - DNA, 33 bp, Homo sapien
taatgtgtgatttctatgtctttaagttaaaat

SEQ ID NO: 973501 - DNA, 33 bp, Homo sapien
taaaagtgtgacagaaaaactaataacaacaag

SEQ ID NO: 973502 - DNA, 33 bp, Homo sapien
taaaagtgtgacagaataactaataacaacaag

SEQ ID NO: 973503 - DNA, 33 bp, Homo sapien
taagtaatcacttttccccatctgaaacaaatt

SEQ ID NO: 973504 - DNA, 33 bp, Homo sapien
taagtaatcacttttctccatctgaaacaaatt

SEQ ID NO: 973505 - DNA, 33 bp, Homo sapien
gagagggcatttctgacccattgactttaactt

SEQ ID NO: 973506 - DNA, 33 bp, Homo sapien
gagagggcatttctgatccattgactttaactt

SEQ ID NO: 973507 - DNA, 33 bp, Homo sapien
ctctgataaagcaagcgcatgttgcgaactcca

SEQ ID NO: 973508 - DNA, 33 bp, Homo sapien
ctctgataaagcaagctcatgttgcgaactcca

SEQ ID NO: 973509 - DNA, 33 bp, Homo sapien
ataaagagagtagttccaatagccttgtggggc

SEQ ID NO: 973510 - DNA, 33 bp, Homo sapien
ataaagagagtagttctaatagccttgtggggc

SEQ ID NO: 973511 - DNA, 33 bp, Homo sapien
acttcaggaaaaagcaagggaaataccctcatt

SEQ ID NO: 973512 - DNA, 33 bp, Homo sapien
acttcaggaaaaagcaggggaaataccctcatt

SEQ ID NO: 973513 - DNA, 33 bp, Homo sapien
ctctagtcttgctggagaattctactttacata

SEQ ID NO: 973514 - DNA, 33 bp, Homo sapien
ctctagtcttgctggataattctactttacata

SEQ ID NO: 973515 - DNA, 33 bp, Homo sapien
caagcagactgtaacaatgaggaacagagtact

SEQ ID NO: 973516 - DNA, 33 bp, Homo sapien
caagcagactgtaacagtgaggaacagagtact

SEQ ID NO: 973517 - DNA, 33 bp, Homo sapien
ctcactatgcagacttcaaaggttgttctattt

SEQ ID NO: 973518 - DNA, 33 bp, Homo sapien
ctcactatgcagactttaaaggttgttctattt

SEQ ID NO: 973519 - DNA, 33 bp, Homo sapien
atcaatacttaccctaaagctgcagtaattcag

SEQ ID NO: 973520 - DNA, 33 bp, Homo sapien
atcaatacttaccctacagctgcagtaattcag

SEQ ID NO: 973521 - DNA, 33 bp, Homo sapien
tgatgacattataaaaagaagagagacaggagc

SEQ ID NO: 973522 - DNA, 33 bp, Homo sapien
tgatgacattataaaaggaagagagacaggagc

SEQ ID NO: 973523 - DNA, 33 bp, Homo sapien
agctagacaccagggaccctttgctggtcagtg

SEQ ID NO: 973524 - DNA, 33 bp, Homo sapien
agctagacaccagggatcctttgctggtcagtg

SEQ ID NO: 973525 - DNA, 33 bp, Homo sapien
gcagctacacttgttcaatctttgtcttcaagc

SEQ ID NO: 973526 - DNA, 33 bp, Homo sapien
gcagctacacttgttccatctttgtcttcaagc

SEQ ID NO: 973527 - DNA, 33 bp, Homo sapien
ttaatctgtattcgcaactgctccccagtgcta

SEQ ID NO: 973528 - DNA, 33 bp, Homo sapien
ttaatctgtattcgcatctgctccccagtgcta

SEQ ID NO: 973529 - DNA, 33 bp, Homo sapien
cagattgtatattcaacggtgtagcctttctca

SEQ ID NO: 973530 - DNA, 33 bp, Homo sapien
cagattgtatattcaatggtgtagcctttctca

SEQ ID NO: 973531 - DNA, 33 bp, Homo sapien
cctacgaatatgttcacgtacatccaaaggaag

SEQ ID NO: 973532 - DNA, 33 bp, Homo sapien
cctacgaatatgttcatgtacatccaaaggaag

SEQ ID NO: 973533 - DNA, 33 bp, Homo sapien
ctctgttctatagcaaatctaaaatcctgctga

SEQ ID NO: 973534 - DNA, 33 bp, Homo sapien
ctctgttctatagcaattctaaaatcctgctga

SEQ ID NO: 973535 - DNA, 33 bp, Homo sapien
taggcctttggtgtaaacttaactgtgtctgcc

SEQ ID NO: 973536 - DNA, 33 bp, Homo sapien
taggcctttggtgtaaccttaactgtgtctgcc

SEQ ID NO: 973537 - DNA, 33 bp, Homo sapien
tgttaaattatattaaacttgccgaagaataat

SEQ ID NO: 973538 - DNA, 33 bp, Homo sapien
tgttaaattatattaaccttgccgaagaataat

SEQ ID NO: 973539 - DNA, 33 bp, Homo sapien
attaccacaatgaagacaaagaacatttctgca

SEQ ID NO: 973540 - DNA, 33 bp, Homo sapien
attaccacaatgaagataaagaacatttctgca

SEQ ID NO: 973541 - DNA, 33 bp, Homo sapien
atatccatggggtcacacagtattattttgtgt

SEQ ID NO: 973542 - DNA, 33 bp, Homo sapien
atatccatggggtcacgcagtattattttgtgt

SEQ ID NO: 973543 - DNA, 33 bp, Homo sapien
ttaggctgtaaagaaactgaaactctcaagccc

SEQ ID NO: 973544 - DNA, 33 bp, Homo sapien
ttaggctgtaaagaaattgaaactctcaagccc

SEQ ID NO: 973545 - DNA, 33 bp, Homo sapien
acaactatgtgaaggcacagagactcggggcca

SEQ ID NO: 973546 - DNA, 33 bp, Homo sapien
acaactatgtgaaggcgcagagactcggggcca

SEQ ID NO: 973547 - DNA, 33 bp, Homo sapien
ttataaccgagagaaactgaagtctacttgcca

SEQ ID NO: 973548 - DNA, 33 bp, Homo sapien
ttataaccgagagaaattgaagtctacttgcca

SEQ ID NO: 973549 - DNA, 33 bp, Homo sapien
aaaatctattctaacacgtctcagaagtcaatc

SEQ ID NO: 973550 - DNA, 33 bp, Homo sapien
aaaatctattctaacatgtctcagaagtcaatc

SEQ ID NO: 973551 - DNA, 33 bp, Homo sapien
tttatctagttttgcacgataaattttgaatac

SEQ ID NO: 973552 - DNA, 33 bp, Homo sapien
tttatctagttttgcatgataaattttgaatac

SEQ ID NO: 973553 - DNA, 33 bp, Homo sapien
ttttcaattgaatctacccatgaatattagaaa

SEQ ID NO: 973554 - DNA, 33 bp, Homo sapien
ttttcaattgaatctatccatgaatattagaaa

SEQ ID NO: 973555 - DNA, 33 bp, Homo sapien
tcctacaaactctgctaaaggtgttatcaatta

SEQ ID NO: 973556 - DNA, 33 bp, Homo sapien
tcctacaaactctgctgaaggtgttatcaatta

SEQ ID NO: 973557 - DNA, 33 bp, Homo sapien
tttatctaaaggaataaaaaacaattgcccttg

SEQ ID NO: 973558 - DNA, 33 bp, Homo sapien
tttatctaaaggaatagaaaacaattgcccttg

SEQ ID NO: 973559 - DNA, 33 bp, Homo sapien
tatggtaccaatcaaaccttttatttcttgcat

SEQ ID NO: 973560 - DNA, 33 bp, Homo sapien
tatggtaccaatcaaatcttttatttcttgcat

SEQ ID NO: 973561 - DNA, 33 bp, Homo sapien
caacctgtatttgaaaatcgtattatctgcaaa

SEQ ID NO: 973562 - DNA, 33 bp, Homo sapien
caacctgtatttgaaattcgtattatctgcaaa

SEQ ID NO: 973563 - DNA, 33 bp, Homo sapien
tccccttctttgagcaccgcacattttaattgt

SEQ ID NO: 973564 - DNA, 33 bp, Homo sapien
tccccttctttgagcagcgcacattttaattgt

SEQ ID NO: 973565 - DNA, 33 bp, Homo sapien
cacaggaagttccacacagaacaacaagtcaac

SEQ ID NO: 973566 - DNA, 33 bp, Homo sapien
cacaggaagttccacatagaacaacaagtcaac

SEQ ID NO: 973567 - DNA, 33 bp, Homo sapien
gcacgcctttttctaaacactcttcaggatggg

SEQ ID NO: 973568 - DNA, 33 bp, Homo sapien
gcacgcctttttctaagcactcttcaggatggg

SEQ ID NO: 973569 - DNA, 33 bp, Homo sapien
tatttgtacaggatgacgcgttttagtatatgt

SEQ ID NO: 973570 - DNA, 33 bp, Homo sapien
tatttgtacaggatgaggcgttttagtatatgt

SEQ ID NO: 973571 - DNA, 33 bp, Homo sapien
ttgagaatgatttacccatgaagttttctatat

SEQ ID NO: 973572 - DNA, 33 bp, Homo sapien
ttgagaatgatttacctatgaagttttctatat

SEQ ID NO: 973573 - DNA, 33 bp, Homo sapien
tctaaaattcattcgtcacatcattcactcaaa

SEQ ID NO: 973574 - DNA, 33 bp, Homo sapien
tctaaaattcattcgtgacatcattcactcaaa

SEQ ID NO: 973575 - DNA, 33 bp, Homo sapien
ataatttgcttgtgtcgcactgtaaaatatctt

SEQ ID NO: 973576 - DNA, 33 bp, Homo sapien
ataatttgcttgtgtctcactgtaaaatatctt

SEQ ID NO: 973577 - DNA, 33 bp, Homo sapien
agattatactggtaagaaaactgaagtgtggat

SEQ ID NO: 973578 - DNA, 33 bp, Homo sapien
agattatactggtaaggaaactgaagtgtggat

SEQ ID NO: 973579 - DNA, 33 bp, Homo sapien
accacaatcacgaatgaatgggaaacacaaaga

SEQ ID NO: 973580 - DNA, 33 bp, Homo sapien
accacaatcacgaatggatgggaaacacaaaga

SEQ ID NO: 973581 - DNA, 33 bp, Homo sapien
ctgtaaatacttggtacatacagaacagaccct

SEQ ID NO: 973582 - DNA, 33 bp, Homo sapien
ctgtaaatacttggtagatacagaacagaccct

SEQ ID NO: 973583 - DNA, 33 bp, Homo sapien
aatgttgtatgcaatgcaacaacaatttaccag

SEQ ID NO: 973584 - DNA, 33 bp, Homo sapien
aatgttgtatgcaatgtaacaacaatttaccag

SEQ ID NO: 973585 - DNA, 33 bp, Homo sapien
caagaagaatctcttacggacagtctgtggtaa

SEQ ID NO: 973586 - DNA, 33 bp, Homo sapien
caagaagaatctcttatggacagtctgtggtaa

SEQ ID NO: 973587 - DNA, 33 bp, Homo sapien
aacatacatcttcaaagaaagtcagatttcaaa

SEQ ID NO: 973588 - DNA, 33 bp, Homo sapien
aacatacatcttcaaataaagtcagatttcaaa

SEQ ID NO: 973589 - DNA, 33 bp, Homo sapien
cctcttgcctcaattccgaaaaactctgaaagc

SEQ ID NO: 973590 - DNA, 33 bp, Homo sapien
cctcttgcctcaattctgaaaaactctgaaagc

SEQ ID NO: 973591 - DNA, 33 bp, Homo sapien
tcactgtgggattggcagaccctcttgttgagt

SEQ ID NO: 973592 - DNA, 33 bp, Homo sapien
tcactgtgggattggcggaccctcttgttgagt

SEQ ID NO: 973593 - DNA, 33 bp, Homo sapien
ctctgagatttgtgtgaaggatatttactagga

SEQ ID NO: 973594 - DNA, 33 bp, Homo sapien
ctctgagatttgtgtgtaggatatttactagga

SEQ ID NO: 973595 - DNA, 33 bp, Homo sapien
cctgtgtaattatttacggcacttagaccagca

SEQ ID NO: 973596 - DNA, 33 bp, Homo sapien
cctgtgtaattatttatggcacttagaccagca

SEQ ID NO: 973597 - DNA, 33 bp, Homo sapien
ttcatgctgatgcaaacggtgtaatcttgttct

SEQ ID NO: 973598 - DNA, 33 bp, Homo sapien
ttcatgctgatgcaaatggtgtaatcttgttct

SEQ ID NO: 973599 - DNA, 33 bp, Homo sapien
aaagcttattgaaactcaatgccactttcagat

SEQ ID NO: 973600 - DNA, 33 bp, Homo sapien
aaagcttattgaaactgaatgccactttcagat

SEQ ID NO: 973601 - DNA, 33 bp, Homo sapien
taaagatggggataaagttggtcactaaaaaaa

SEQ ID NO: 973602 - DNA, 33 bp, Homo sapien
taaagatggggataaatttggtcactaaaaaaa

SEQ ID NO: 973603 - DNA, 33 bp, Homo sapien
gaggccaccagtataacggttgacagtcttctt

SEQ ID NO: 973604 - DNA, 33 bp, Homo sapien
gaggccaccagtataatggttgacagtcttctt

SEQ ID NO: 973605 - DNA, 33 bp, Homo sapien
taccatgtagaggaaactgctaataattgaaac

SEQ ID NO: 973606 - DNA, 33 bp, Homo sapien
taccatgtagaggaaagtgctaataattgaaac

SEQ ID NO: 973607 - DNA, 33 bp, Homo sapien
actggagcaaaaattcaaaaactctcttcagag

SEQ ID NO: 973608 - DNA, 33 bp, Homo sapien
actggagcaaaaattcgaaaactctcttcagag

SEQ ID NO: 973609 - DNA, 33 bp, Homo sapien
gtcttttcaagtgaaacaaatgagaactgctgc

SEQ ID NO: 973610 - DNA, 33 bp, Homo sapien
gtcttttcaagtgaaataaatgagaactgctgc

SEQ ID NO: 973611 - DNA, 33 bp, Homo sapien
ctcctactagatgttacgtaagggatttgagat

SEQ ID NO: 973612 - DNA, 33 bp, Homo sapien
ctcctactagatgttatgtaagggatttgagat

SEQ ID NO: 973613 - DNA, 33 bp, Homo sapien
agcaattatgaagatacgtgttaagcagatgtt

SEQ ID NO: 973614 - DNA, 33 bp, Homo sapien
agcaattatgaagatatgtgttaagcagatgtt

SEQ ID NO: 973615 - DNA, 33 bp, Homo sapien
cctttccatgaatagccctagtgatctggcttg

SEQ ID NO: 973616 - DNA, 33 bp, Homo sapien
cctttccatgaatagctctagtgatctggcttg

SEQ ID NO: 973617 - DNA, 33 bp, Homo sapien
tggggatataatacacaaggcagctatgtcaga

SEQ ID NO: 973618 - DNA, 33 bp, Homo sapien
tggggatataatacactaggcagctatgtcaga

SEQ ID NO: 973619 - DNA, 33 bp, Homo sapien
tcagaattatcctaccgaagggcaagtgaactg

SEQ ID NO: 973620 - DNA, 33 bp, Homo sapien
tcagaattatcctacctaagggcaagtgaactg

SEQ ID NO: 973621 - DNA, 33 bp, Homo sapien
atcctgctgtgtattaaggctgcactttagcta

SEQ ID NO: 973622 - DNA, 33 bp, Homo sapien
atcctgctgtgtattagggctgcactttagcta

SEQ ID NO: 973623 - DNA, 33 bp, Homo sapien
ttgagaccatgtcaccaaaaaagtagaagaaaa

SEQ ID NO: 973624 - DNA, 33 bp, Homo sapien
ttgagaccatgtcacccaaaaagtagaagaaaa

SEQ ID NO: 973625 - DNA, 33 bp, Homo sapien
aaatacaagaaaattaaagtagaccaaattggc

SEQ ID NO: 973626 - DNA, 33 bp, Homo sapien
aaatacaagaaaattacagtagaccaaattggc

SEQ ID NO: 973627 - DNA, 33 bp, Homo sapien
aggcacaatttgatcacgtggtaatgaagagtg

SEQ ID NO: 973628 - DNA, 33 bp, Homo sapien
aggcacaatttgatcatgtggtaatgaagagtg

SEQ ID NO: 973629 - DNA, 33 bp, Homo sapien
actgtggctgggttacactttgaggatttacat

SEQ ID NO: 973630 - DNA, 33 bp, Homo sapien
actgtggctgggttacgctttgaggatttacat

SEQ ID NO: 973631 - DNA, 33 bp, Homo sapien
tgtgataaaagagagacggataaaaatgtactt

SEQ ID NO: 973632 - DNA, 33 bp, Homo sapien
tgtgataaaagagagatggataaaaatgtactt

SEQ ID NO: 973633 - DNA, 33 bp, Homo sapien
tcaatattgttgtccaatagaaggccattcaac

SEQ ID NO: 973634 - DNA, 33 bp, Homo sapien
tcaatattgttgtccagtagaaggccattcaac

SEQ ID NO: 973635 - DNA, 33 bp, Homo sapien
tattctatccttgtgacggctgtgattgctgtc

SEQ ID NO: 973636 - DNA, 33 bp, Homo sapien
tattctatccttgtgatggctgtgattgctgtc

SEQ ID NO: 973637 - DNA, 33 bp, Homo sapien
ccaaccaggatcatacactatttcctgacctaa

SEQ ID NO: 973638 - DNA, 33 bp, Homo sapien
ccaaccaggatcatacgctatttcctgacctaa

SEQ ID NO: 973639 - DNA, 33 bp, Homo sapien
tgtttgaactgaataacgtactgaatggataca

SEQ ID NO: 973640 - DNA, 33 bp, Homo sapien
tgtttgaactgaataatgtactgaatggataca

SEQ ID NO: 973641 - DNA, 33 bp, Homo sapien
tctaaatctcaacttaacgctttctatcataaa

SEQ ID NO: 973642 - DNA, 33 bp, Homo sapien
tctaaatctcaacttagcgctttctatcataaa

SEQ ID NO: 973643 - DNA, 33 bp, Homo sapien
ttaggtactaagggcaacaatgctgtgattcag

SEQ ID NO: 973644 - DNA, 33 bp, Homo sapien
ttaggtactaagggcagcaatgctgtgattcag

SEQ ID NO: 973645 - DNA, 33 bp, Homo sapien
cattgttgactcctacgaaatgtgcaaagtaac

SEQ ID NO: 973646 - DNA, 33 bp, Homo sapien
cattgttgactcctactaaatgtgcaaagtaac

SEQ ID NO: 973647 - DNA, 33 bp, Homo sapien
ggacaagctttgaaaaatttggatctaaatgtc

SEQ ID NO: 973648 - DNA, 33 bp, Homo sapien
ggacaagctttgaaaattttggatctaaatgtc

SEQ ID NO: 973649 - DNA, 33 bp, Homo sapien
cagagtttaggagacacgcagggtctgtaggta

SEQ ID NO: 973650 - DNA, 33 bp, Homo sapien
cagagtttaggagacatgcagggtctgtaggta

SEQ ID NO: 973651 - DNA, 33 bp, Homo sapien
atgtgcccttgctacaaatattctagaggtagg

SEQ ID NO: 973652 - DNA, 33 bp, Homo sapien
atgtgcccttgctacagatattctagaggtagg

SEQ ID NO: 973653 - DNA, 33 bp, Homo sapien
ttgggtcaatgatcacaatttacattctgtggt

SEQ ID NO: 973654 - DNA, 33 bp, Homo sapien
ttgggtcaatgatcactatttacattctgtggt

SEQ ID NO: 973655 - DNA, 33 bp, Homo sapien
cagatgtgtctgcatgaaacattggcactagtc

SEQ ID NO: 973656 - DNA, 33 bp, Homo sapien
cagatgtgtctgcatggaacattggcactagtc

SEQ ID NO: 973657 - DNA, 33 bp, Homo sapien
tggcccctttgtaccacattatgctgctgcact

SEQ ID NO: 973658 - DNA, 33 bp, Homo sapien
tggcccctttgtaccatattatgctgctgcact

SEQ ID NO: 973659 - DNA, 33 bp, Homo sapien
tagagaataaaaatcactagaataggctctcaa

SEQ ID NO: 973660 - DNA, 33 bp, Homo sapien
tagagaataaaaatcattagaataggctctcaa

SEQ ID NO: 973661 - DNA, 33 bp, Homo sapien
tattttgcattcactaacctccactcaatactt

SEQ ID NO: 973662 - DNA, 33 bp, Homo sapien
tattttgcattcactagcctccactcaatactt

SEQ ID NO: 973663 - DNA, 33 bp, Homo sapien
ttagagactcaagagaactcgacagtaatcaga

SEQ ID NO: 973664 - DNA, 33 bp, Homo sapien
ttagagactcaagagacctcgacagtaatcaga

SEQ ID NO: 973665 - DNA, 33 bp, Homo sapien
agatacttacaaattacattagtgcctactgca

SEQ ID NO: 973666 - DNA, 33 bp, Homo sapien
agatacttacaaattagattagtgcctactgca

SEQ ID NO: 973667 - DNA, 33 bp, Homo sapien
ataaataaagttggagcataaggcagtgtagtc

SEQ ID NO: 973668 - DNA, 33 bp, Homo sapien
ataaataaagttggagtataaggcagtgtagtc

SEQ ID NO: 973669 - DNA, 33 bp, Homo sapien
aagggatgtcatcatgaaacataaataaagttg

SEQ ID NO: 973670 - DNA, 33 bp, Homo sapien
aagggatgtcatcatgtaacataaataaagttg

SEQ ID NO: 973671 - DNA, 33 bp, Homo sapien
aacactgcttgatatacaaacttagaaaatgtg

SEQ ID NO: 973672 - DNA, 33 bp, Homo sapien
aacactgcttgatatagaaacttagaaaatgtg

SEQ ID NO: 973673 - DNA, 33 bp, Homo sapien
gagaaaaccaaggctcaaagtgataaactcatt

SEQ ID NO: 973674 - DNA, 33 bp, Homo sapien
gagaaaaccaaggctcgaagtgataaactcatt

SEQ ID NO: 973675 - DNA, 33 bp, Homo sapien
atagtctaggaggacagagagaggtaaacaaac

SEQ ID NO: 973676 - DNA, 33 bp, Homo sapien
atagtctaggaggacatagagaggtaaacaaac

SEQ ID NO: 973677 - DNA, 33 bp, Homo sapien
gacagaaataaaactacagactgatcaacagca

SEQ ID NO: 973678 - DNA, 33 bp, Homo sapien
gacagaaataaaactatagactgatcaacagca

SEQ ID NO: 973679 - DNA, 33 bp, Homo sapien
tgtccaagttgataagcagatatagctttcaca

SEQ ID NO: 973680 - DNA, 33 bp, Homo sapien
tgtccaagttgataagtagatatagctttcaca

SEQ ID NO: 973681 - DNA, 33 bp, Homo sapien
aagggctaaagagtaaacattctcattttatgt

SEQ ID NO: 973682 - DNA, 33 bp, Homo sapien
aagggctaaagagtaatcattctcattttatgt

SEQ ID NO: 973683 - DNA, 33 bp, Homo sapien
agaacatagagtaaaaattctgaatatctgggt

SEQ ID NO: 973684 - DNA, 33 bp, Homo sapien
agaacatagagtaaaagttctgaatatctgggt

SEQ ID NO: 973685 - DNA, 33 bp, Homo sapien
aaaagttgtacaaaaacatttcaatgatgtcag

SEQ ID NO: 973686 - DNA, 33 bp, Homo sapien
aaaagttgtacaaaaatatttcaatgatgtcag

SEQ ID NO: 973687 - DNA, 33 bp, Homo sapien
agttaaatagtaatgtcaaattcatgtttcttt

SEQ ID NO: 973688 - DNA, 33 bp, Homo sapien
agttaaatagtaatgtgaaattcatgtttcttt

SEQ ID NO: 973689 - DNA, 33 bp, Homo sapien
taggggataaatgataagacaatgtggcaaaga

SEQ ID NO: 973690 - DNA, 33 bp, Homo sapien
taggggataaatgatacgacaatgtggcaaaga

SEQ ID NO: 973691 - DNA, 33 bp, Homo sapien
atggaactgtggacaacagccatatgtgtgtgg

SEQ ID NO: 973692 - DNA, 33 bp, Homo sapien
atggaactgtggacaatagccatatgtgtgtgg

SEQ ID NO: 973693 - DNA, 33 bp, Homo sapien
ttaaatctgtattcaggccttgcctcattcatt

SEQ ID NO: 973694 - DNA, 33 bp, Homo sapien
ttaaatctgtattcagtccttgcctcattcatt

SEQ ID NO: 973695 - DNA, 33 bp, Homo sapien
tacatcatattctggcacaaaattaagtcactc

SEQ ID NO: 973696 - DNA, 33 bp, Homo sapien
tacatcatattctggcgcaaaattaagtcactc

SEQ ID NO: 973697 - DNA, 33 bp, Homo sapien
atgtttctttctagaccaagtgacagtagtaac

SEQ ID NO: 973698 - DNA, 33 bp, Homo sapien
atgtttctttctagactaagtgacagtagtaac

SEQ ID NO: 973699 - DNA, 33 bp, Homo sapien
agtaaaacacagcttgaaacttttatgagctcc

SEQ ID NO: 973700 - DNA, 33 bp, Homo sapien
agtaaaacacagcttgcaacttttatgagctcc

SEQ ID NO: 973701 - DNA, 33 bp, Homo sapien
ttaacatttgtaatccaaagaagtaaatgtttt

SEQ ID NO: 973702 - DNA, 33 bp, Homo sapien
ttaacatttgtaatccgaagaagtaaatgtttt

SEQ ID NO: 973703 - DNA, 33 bp, Homo sapien
aaagcaatttaagacaatgctaaatgttacaac

SEQ ID NO: 973704 - DNA, 33 bp, Homo sapien
aaagcaatttaagacagtgctaaatgttacaac

SEQ ID NO: 973705 - DNA, 33 bp, Homo sapien
atttaagagatttgacagagcttgacaaaggaa

SEQ ID NO: 973706 - DNA, 33 bp, Homo sapien
atttaagagatttgacggagcttgacaaaggaa

SEQ ID NO: 973707 - DNA, 33 bp, Homo sapien
tggaagacacttaggaaggttgttggaccctga

SEQ ID NO: 973708 - DNA, 33 bp, Homo sapien
tggaagacacttaggagggttgttggaccctga

SEQ ID NO: 973709 - DNA, 33 bp, Homo sapien
tggttagcacagtgtccgacacattaatatagt

SEQ ID NO: 973710 - DNA, 33 bp, Homo sapien
tggttagcacagtgtctgacacattaatatagt

SEQ ID NO: 973711 - DNA, 33 bp, Homo sapien
tacagtatctgttaaacctgcatctcagttcag

SEQ ID NO: 973712 - DNA, 33 bp, Homo sapien
tacagtatctgttaaatctgcatctcagttcag

SEQ ID NO: 973713 - DNA, 33 bp, Homo sapien
attcagtgacacataaatcaattattatacatg

SEQ ID NO: 973714 - DNA, 33 bp, Homo sapien
attcagtgacacataactcaattattatacatg

SEQ ID NO: 973715 - DNA, 33 bp, Homo sapien
gatgtatgccagcttacgatgtatctctgaaat

SEQ ID NO: 973716 - DNA, 33 bp, Homo sapien
gatgtatgccagcttaggatgtatctctgaaat

SEQ ID NO: 973717 - DNA, 33 bp, Homo sapien
aaattaaacccctgaaataatacattgtgaata

SEQ ID NO: 973718 - DNA, 33 bp, Homo sapien
aaattaaacccctgaagtaatacattgtgaata

SEQ ID NO: 973719 - DNA, 33 bp, Homo sapien
gtctgctcttcaattacattgccctgattgcat

SEQ ID NO: 973720 - DNA, 33 bp, Homo sapien
gtctgctcttcaattatattgccctgattgcat

SEQ ID NO: 973721 - DNA, 33 bp, Homo sapien
cagaacctttgtgccacgttgaagagaaaacat

SEQ ID NO: 973722 - DNA, 33 bp, Homo sapien
cagaacctttgtgccatgttgaagagaaaacat

SEQ ID NO: 973723 - DNA, 33 bp, Homo sapien
ttatagagaaggattacggagacagaaaatgac

SEQ ID NO: 973724 - DNA, 33 bp, Homo sapien
ttatagagaaggattatggagacagaaaatgac

SEQ ID NO: 973725 - DNA, 33 bp, Homo sapien
tgctaattggaactacaagtaagaataagatta

SEQ ID NO: 973726 - DNA, 33 bp, Homo sapien
tgctaattggaactacgagtaagaataagatta

SEQ ID NO: 973727 - DNA, 33 bp, Homo sapien
aaacaaaagaagataaagtaaggcaagaagtta

SEQ ID NO: 973728 - DNA, 33 bp, Homo sapien
aaacaaaagaagataaggtaaggcaagaagtta

SEQ ID NO: 973729 - DNA, 33 bp, Homo sapien
atggaatgtaatgcagcaattaaaaataaacac

SEQ ID NO: 973730 - DNA, 33 bp, Homo sapien
atggaatgtaatgcaggaattaaaaataaacac

SEQ ID NO: 973731 - DNA, 33 bp, Homo sapien
catctggctccatgtagcaggatgcctgtcatc

SEQ ID NO: 973732 - DNA, 33 bp, Homo sapien
catctggctccatgtatcaggatgcctgtcatc

SEQ ID NO: 973733 - DNA, 33 bp, Homo sapien
atgagttgctatcacaaaccaaaaagctttctg

SEQ ID NO: 973734 - DNA, 33 bp, Homo sapien
atgagttgctatcacataccaaaaagctttctg

SEQ ID NO: 973735 - DNA, 33 bp, Homo sapien
aatcaacaactactcaacaaatgtttaatattt

SEQ ID NO: 973736 - DNA, 33 bp, Homo sapien
aatcaacaactactcaccaaatgtttaatattt

SEQ ID NO: 973737 - DNA, 33 bp, Homo sapien
tttgctaggagaccaacgctttctaaacgatag

SEQ ID NO: 973738 - DNA, 33 bp, Homo sapien
tttgctaggagaccaatgctttctaaacgatag

SEQ ID NO: 973739 - DNA, 33 bp, Homo sapien
gtcaagatgatgggaaagtaatatctaggatga

SEQ ID NO: 973740 - DNA, 33 bp, Homo sapien
gtcaagatgatgggaaggtaatatctaggatga

SEQ ID NO: 973741 - DNA, 33 bp, Homo sapien
ttcaataaataacttccaccactgagtaacatg

SEQ ID NO: 973742 - DNA, 33 bp, Homo sapien
ttcaataaataacttctaccactgagtaacatg

SEQ ID NO: 973743 - DNA, 33 bp, Homo sapien
tcagtgtttctcaatacgagacaaagcatttcc

SEQ ID NO: 973744 - DNA, 33 bp, Homo sapien
tcagtgtttctcaatatgagacaaagcatttcc

SEQ ID NO: 973745 - DNA, 33 bp, Homo sapien
aggctacaaatgctgacaagaaaacttttgcaa

SEQ ID NO: 973746 - DNA, 33 bp, Homo sapien
aggctacaaatgctgataagaaaacttttgcaa

SEQ ID NO: 973747 - DNA, 33 bp, Homo sapien
tctagattgaaaaaaaaattctgttcagcaggt

SEQ ID NO: 973748 - DNA, 33 bp, Homo sapien
tctagattgaaaaaaacattctgttcagcaggt

SEQ ID NO: 973749 - DNA, 33 bp, Homo sapien
cctcattcccacagaaactcacaagctaaaacc

SEQ ID NO: 973750 - DNA, 33 bp, Homo sapien
cctcattcccacagaacctcacaagctaaaacc

SEQ ID NO: 973751 - DNA, 33 bp, Homo sapien
tgcaaagccacatggacggagtttcccaagacc

SEQ ID NO: 973752 - DNA, 33 bp, Homo sapien
tgcaaagccacatggatggagtttcccaagacc

SEQ ID NO: 973753 - DNA, 33 bp, Homo sapien
gaaagggtatagcataagtcagaatggaaaatt

SEQ ID NO: 973754 - DNA, 33 bp, Homo sapien
gaaagggtatagcataggtcagaatggaaaatt

SEQ ID NO: 973755 - DNA, 33 bp, Homo sapien
cggcttccagatttcacagtgacaataggatcc

SEQ ID NO: 973756 - DNA, 33 bp, Homo sapien
cggcttccagatttcatagtgacaataggatcc

SEQ ID NO: 973757 - DNA, 33 bp, Homo sapien
gaagcatacgcgttataaattgcccatgcattg

SEQ ID NO: 973758 - DNA, 33 bp, Homo sapien
gaagcatacgcgttatgaattgcccatgcattg

SEQ ID NO: 973759 - DNA, 33 bp, Homo sapien
cttacaatacaggaacacaatttcaagctaaca

SEQ ID NO: 973760 - DNA, 33 bp, Homo sapien
cttacaatacaggaacgcaatttcaagctaaca

SEQ ID NO: 973761 - DNA, 33 bp, Homo sapien
tggtgccgttttgtcacatgaacattgaaaccc

SEQ ID NO: 973762 - DNA, 33 bp, Homo sapien
tggtgccgttttgtcatatgaacattgaaaccc

SEQ ID NO: 973763 - DNA, 33 bp, Homo sapien
ttttggctgtagccgaataaaaaacactttttg

SEQ ID NO: 973764 - DNA, 33 bp, Homo sapien
ttttggctgtagccgattaaaaaacactttttg

SEQ ID NO: 973765 - DNA, 33 bp, Homo sapien
aactacaacctccaaaagatatatagcagcagt

SEQ ID NO: 973766 - DNA, 33 bp, Homo sapien
aactacaacctccaaatgatatatagcagcagt

SEQ ID NO: 973767 - DNA, 33 bp, Homo sapien
gtacaaatagtcagtcaagtgaaataatacaaa

SEQ ID NO: 973768 - DNA, 33 bp, Homo sapien
gtacaaatagtcagtctagtgaaataatacaaa

SEQ ID NO: 973769 - DNA, 33 bp, Homo sapien
attttacagatactcaatcagacacaagttatt

SEQ ID NO: 973770 - DNA, 33 bp, Homo sapien
attttacagatactcagtcagacacaagttatt

SEQ ID NO: 973771 - DNA, 33 bp, Homo sapien
tgatttcatggacttaagaataattagaaaggc

SEQ ID NO: 973772 - DNA, 33 bp, Homo sapien
tgatttcatggacttaggaataattagaaaggc

SEQ ID NO: 973773 - DNA, 33 bp, Homo sapien
tccaggcatcattctacctattaatgatgctgg

SEQ ID NO: 973774 - DNA, 33 bp, Homo sapien
tccaggcatcattctagctattaatgatgctgg

SEQ ID NO: 973775 - DNA, 33 bp, Homo sapien
ttttttcaactctctcacctctcatctcccaaa

SEQ ID NO: 973776 - DNA, 33 bp, Homo sapien
ttttttcaactctctctcctctcatctcccaaa

SEQ ID NO: 973777 - DNA, 33 bp, Homo sapien
caatatcttgtgttaacggttaaactgacaaat

SEQ ID NO: 973778 - DNA, 33 bp, Homo sapien
caatatcttgtgttaatggttaaactgacaaat

SEQ ID NO: 973779 - DNA, 33 bp, Homo sapien
gcatcagcttctggggcacatgatagtcttttt

SEQ ID NO: 973780 - DNA, 33 bp, Homo sapien
gcatcagcttctgggggacatgatagtcttttt

SEQ ID NO: 973781 - DNA, 33 bp, Homo sapien
gttggaagctccaaaacgcacaggcactggggc

SEQ ID NO: 973782 - DNA, 33 bp, Homo sapien
gttggaagctccaaaaggcacaggcactggggc

SEQ ID NO: 973783 - DNA, 33 bp, Homo sapien
ataagatcaagtcatcaataaataaggataatc

SEQ ID NO: 973784 - DNA, 33 bp, Homo sapien
ataagatcaagtcatccataaataaggataatc

SEQ ID NO: 973785 - DNA, 33 bp, Homo sapien
gtcttgatcagtagcagctggcttccttgtatc

SEQ ID NO: 973786 - DNA, 33 bp, Homo sapien
gtcttgatcagtagcatctggcttccttgtatc

SEQ ID NO: 973787 - DNA, 33 bp, Homo sapien
aagaactcaaaaacatcagcagaaaaatgacaa

SEQ ID NO: 973788 - DNA, 33 bp, Homo sapien
aagaactcaaaaacatgagcagaaaaatgacaa

SEQ ID NO: 973789 - DNA, 33 bp, Homo sapien
tcatgaaggatgggtacgcggtttactaggaga

SEQ ID NO: 973790 - DNA, 33 bp, Homo sapien
tcatgaaggatgggtatgcggtttactaggaga

SEQ ID NO: 973791 - DNA, 33 bp, Homo sapien
gtgacacatctttatacatccaaatcactcact

SEQ ID NO: 973792 - DNA, 33 bp, Homo sapien
gtgacacatctttatatatccaaatcactcact

SEQ ID NO: 973793 - DNA, 33 bp, Homo sapien
tgggagaacaccctcaaaaatgtacagatttta

SEQ ID NO: 973794 - DNA, 33 bp, Homo sapien
tgggagaacaccctcagaaatgtacagatttta

SEQ ID NO: 973795 - DNA, 33 bp, Homo sapien
agaaaaggccaaaaatcaagactgactgattaa

SEQ ID NO: 973796 - DNA, 33 bp, Homo sapien
agaaaaggccaaaaattaagactgactgattaa

SEQ ID NO: 973797 - DNA, 33 bp, Homo sapien
aataaatgttgaataaatgagctgaaattttca

SEQ ID NO: 973798 - DNA, 33 bp, Homo sapien
aataaatgttgaataagtgagctgaaattttca

SEQ ID NO: 973799 - DNA, 33 bp, Homo sapien
gctgacatagtgaccaactgaagtccttagagg

SEQ ID NO: 973800 - DNA, 33 bp, Homo sapien
gctgacatagtgaccagctgaagtccttagagg

SEQ ID NO: 973801 - DNA, 33 bp, Homo sapien
gattctgccacttctcaattttcattttccttg

SEQ ID NO: 973802 - DNA, 33 bp, Homo sapien
gattctgccacttctcgattttcattttccttg

SEQ ID NO: 973803 - DNA, 33 bp, Homo sapien
atgatgatttaaacaacagtgcagtggatatct

SEQ ID NO: 973804 - DNA, 33 bp, Homo sapien
atgatgatttaaacaatagtgcagtggatatct

SEQ ID NO: 973805 - DNA, 33 bp, Homo sapien
cctcatcagataaaaaacatttgaagcaattgt

SEQ ID NO: 973806 - DNA, 33 bp, Homo sapien
cctcatcagataaaaagcatttgaagcaattgt

SEQ ID NO: 973807 - DNA, 33 bp, Homo sapien
catttttttaaccttcacataaatccagaacta

SEQ ID NO: 973808 - DNA, 33 bp, Homo sapien
catttttttaaccttcgcataaatccagaacta

SEQ ID NO: 973809 - DNA, 33 bp, Homo sapien
ccagacaacttcgtcaagcaattttgcacatgc

SEQ ID NO: 973810 - DNA, 33 bp, Homo sapien
ccagacaacttcgtcaggcaattttgcacatgc

SEQ ID NO: 973811 - DNA, 33 bp, Homo sapien
gactgatgtgcattcccaaaaatggtaataatt

SEQ ID NO: 973812 - DNA, 33 bp, Homo sapien
gactgatgtgcattcctaaaaatggtaataatt

SEQ ID NO: 973813 - DNA, 33 bp, Homo sapien
attggataatgatcagactcttggctcccttca

SEQ ID NO: 973814 - DNA, 33 bp, Homo sapien
attggataatgatcaggctcttggctcccttca

SEQ ID NO: 973815 - DNA, 33 bp, Homo sapien
tagtgtccaggacagaagtgcacgtctgaaggt

SEQ ID NO: 973816 - DNA, 33 bp, Homo sapien
tagtgtccaggacagaggtgcacgtctgaaggt

SEQ ID NO: 973817 - DNA, 33 bp, Homo sapien
ctatccttggaaaaaactggcagctgaacaaca

SEQ ID NO: 973818 - DNA, 33 bp, Homo sapien
ctatccttggaaaaaattggcagctgaacaaca

SEQ ID NO: 973819 - DNA, 33 bp, Homo sapien
agatgaacaaatggaaaagcagaacatcgaggt

SEQ ID NO: 973820 - DNA, 33 bp, Homo sapien
agatgaacaaatggaagagcagaacatcgaggt

SEQ ID NO: 973821 - DNA, 33 bp, Homo sapien
ggtagttcatgccttaaaatctctattttctgt

SEQ ID NO: 973822 - DNA, 33 bp, Homo sapien
ggtagttcatgccttataatctctattttctgt

SEQ ID NO: 973823 - DNA, 33 bp, Homo sapien
gctataatctgtagctaactcagaaattccagt

SEQ ID NO: 973824 - DNA, 33 bp, Homo sapien
gctataatctgtagctgactcagaaattccagt

SEQ ID NO: 973825 - DNA, 33 bp, Homo sapien
agctaatgctggaatcacttcagaggtgctcac

SEQ ID NO: 973826 - DNA, 33 bp, Homo sapien
agctaatgctggaatcgcttcagaggtgctcac

SEQ ID NO: 973827 - DNA, 33 bp, Homo sapien
tcaaatcattgaaaaactcattagtagcttcac

SEQ ID NO: 973828 - DNA, 33 bp, Homo sapien
tcaaatcattgaaaaattcattagtagcttcac

SEQ ID NO: 973829 - DNA, 33 bp, Homo sapien
ataatatggccaaaaaaatgatatgcgactcct

SEQ ID NO: 973830 - DNA, 33 bp, Homo sapien
ataatatggccaaaaagatgatatgcgactcct

SEQ ID NO: 973831 - DNA, 33 bp, Homo sapien
caatctgtgagaaaaaaattcatcttgttcatg

SEQ ID NO: 973832 - DNA, 33 bp, Homo sapien
caatctgtgagaaaaatattcatcttgttcatg

SEQ ID NO: 973833 - DNA, 33 bp, Homo sapien
gtctgtacagaacagaatctagctggaggcatt

SEQ ID NO: 973834 - DNA, 33 bp, Homo sapien
gtctgtacagaacagagtctagctggaggcatt

SEQ ID NO: 973835 - DNA, 33 bp, Homo sapien
tactcagctgtctaacgcagaagaatcacttaa

SEQ ID NO: 973836 - DNA, 33 bp, Homo sapien
tactcagctgtctaactcagaagaatcacttaa

SEQ ID NO: 973837 - DNA, 33 bp, Homo sapien
gtctcaaccgccaatacatcaaaatgtgactat

SEQ ID NO: 973838 - DNA, 33 bp, Homo sapien
gtctcaaccgccaatatatcaaaatgtgactat

SEQ ID NO: 973839 - DNA, 33 bp, Homo sapien
tgttaccattctactcaaagccatcattaactc

SEQ ID NO: 973840 - DNA, 33 bp, Homo sapien
tgttaccattctactcgaagccatcattaactc

SEQ ID NO: 973841 - DNA, 33 bp, Homo sapien
tgttttcctgactatgaaagaaatacagtccta

SEQ ID NO: 973842 - DNA, 33 bp, Homo sapien
tgttttcctgactatggaagaaatacagtccta

SEQ ID NO: 973843 - DNA, 33 bp, Homo sapien
tgactgagtacctaaactataatgggacctcaa

SEQ ID NO: 973844 - DNA, 33 bp, Homo sapien
tgactgagtacctaaagtataatgggacctcaa

SEQ ID NO: 973845 - DNA, 33 bp, Homo sapien
tactggacccatgaacactccaagttagataag

SEQ ID NO: 973846 - DNA, 33 bp, Homo sapien
tactggacccatgaacgctccaagttagataag

SEQ ID NO: 973847 - DNA, 33 bp, Homo sapien
atattatttgtggctaccatggcaattatataa

SEQ ID NO: 973848 - DNA, 33 bp, Homo sapien
atattatttgtggctatcatggcaattatataa

SEQ ID NO: 973849 - DNA, 33 bp, Homo sapien
agctccattcttaaaactggcaggttggagact

SEQ ID NO: 973850 - DNA, 33 bp, Homo sapien
agctccattcttaaaagtggcaggttggagact

SEQ ID NO: 973851 - DNA, 33 bp, Homo sapien
gttaatgaaaggaaaacgcaacctatggatgat

SEQ ID NO: 973852 - DNA, 33 bp, Homo sapien
gttaatgaaaggaaaatgcaacctatggatgat

SEQ ID NO: 973853 - DNA, 33 bp, Homo sapien
cactatggagtagccaatcattctttctttgct

SEQ ID NO: 973854 - DNA, 33 bp, Homo sapien
cactatggagtagccagtcattctttctttgct

SEQ ID NO: 973855 - DNA, 33 bp, Homo sapien
gctataaccaggagaactgatagcaggatctca

SEQ ID NO: 973856 - DNA, 33 bp, Homo sapien
gctataaccaggagaattgatagcaggatctca

SEQ ID NO: 973857 - DNA, 33 bp, Homo sapien
catttaattgtatgtacaaaatggttcagatgg

SEQ ID NO: 973858 - DNA, 33 bp, Homo sapien
catttaattgtatgtataaaatggttcagatgg

SEQ ID NO: 973859 - DNA, 33 bp, Homo sapien
tttagagattttggaaatattagtgcactttga

SEQ ID NO: 973860 - DNA, 33 bp, Homo sapien
tttagagattttggaattattagtgcactttga

SEQ ID NO: 973861 - DNA, 33 bp, Homo sapien
agaagtatcagagaatcactacagccatatttt

SEQ ID NO: 973862 - DNA, 33 bp, Homo sapien
agaagtatcagagaattactacagccatatttt

SEQ ID NO: 973863 - DNA, 33 bp, Homo sapien
agtacaaggtgagaaagagcttacaaaaattat

SEQ ID NO: 973864 - DNA, 33 bp, Homo sapien
agtacaaggtgagaaatagcttacaaaaattat

SEQ ID NO: 973865 - DNA, 33 bp, Homo sapien
agttcacctgtgaatccatataggcctggtgtt

SEQ ID NO: 973866 - DNA, 33 bp, Homo sapien
agttcacctgtgaatctatataggcctggtgtt

SEQ ID NO: 973867 - DNA, 33 bp, Homo sapien
atgggtgtttattttacactttgagccataacc

SEQ ID NO: 973868 - DNA, 33 bp, Homo sapien
atgggtgtttattttatactttgagccataacc

SEQ ID NO: 973869 - DNA, 33 bp, Homo sapien
attttgttagtcaaaacgttctggtcttttcca

SEQ ID NO: 973870 - DNA, 33 bp, Homo sapien
attttgttagtcaaaatgttctggtcttttcca

SEQ ID NO: 973871 - DNA, 33 bp, Homo sapien
cagtttccttgttctccccacacattggagctt

SEQ ID NO: 973872 - DNA, 33 bp, Homo sapien
cagtttccttgttctctccacacattggagctt

SEQ ID NO: 973873 - DNA, 33 bp, Homo sapien
cagctattgctctaacaagtctgcaggacgtct

SEQ ID NO: 973874 - DNA, 33 bp, Homo sapien
cagctattgctctaaccagtctgcaggacgtct

SEQ ID NO: 973875 - DNA, 33 bp, Homo sapien
ctacagagattatcaaagcaaagggacatttcc

SEQ ID NO: 973876 - DNA, 33 bp, Homo sapien
ctacagagattatcaaggcaaagggacatttcc

SEQ ID NO: 973877 - DNA, 33 bp, Homo sapien
catgaaaatggtgctccacaaatcagggagtag

SEQ ID NO: 973878 - DNA, 33 bp, Homo sapien
catgaaaatggtgctctacaaatcagggagtag

SEQ ID NO: 973879 - DNA, 33 bp, Homo sapien
ctatgtacgggcacaacccattttaaatatcca

SEQ ID NO: 973880 - DNA, 33 bp, Homo sapien
ctatgtacgggcacaatccattttaaatatcca

SEQ ID NO: 973881 - DNA, 33 bp, Homo sapien
ggggaagctgaatctcccgtgtgacagaagtgt

SEQ ID NO: 973882 - DNA, 33 bp, Homo sapien
ggggaagctgaatctctcgtgtgacagaagtgt

SEQ ID NO: 973883 - DNA, 33 bp, Homo sapien
tacacgggagctcctacctttgatggttccaga

SEQ ID NO: 973884 - DNA, 33 bp, Homo sapien
tacacgggagctcctatctttgatggttccaga

SEQ ID NO: 973885 - DNA, 33 bp, Homo sapien
gaagggctattgaaaaactgagctagtaagagc

SEQ ID NO: 973886 - DNA, 33 bp, Homo sapien
gaagggctattgaaaacctgagctagtaagagc

SEQ ID NO: 973887 - DNA, 33 bp, Homo sapien
actgacttttatgaaacactggcagactgttct

SEQ ID NO: 973888 - DNA, 33 bp, Homo sapien
actgacttttatgaaatactggcagactgttct

SEQ ID NO: 973889 - DNA, 33 bp, Homo sapien
actgggatctctagccactttatagtgtgaata

SEQ ID NO: 973890 - DNA, 33 bp, Homo sapien
actgggatctctagcctctttatagtgtgaata

SEQ ID NO: 973891 - DNA, 33 bp, Homo sapien
gctgtcacatagactgcattcatatgagaatta

SEQ ID NO: 973892 - DNA, 33 bp, Homo sapien
gctgtcacatagactgtattcatatgagaatta

SEQ ID NO: 973893 - DNA, 33 bp, Homo sapien
cagtacttattccgtgaagcattaagttttgaa

SEQ ID NO: 973894 - DNA, 33 bp, Homo sapien
cagtacttattccgtggagcattaagttttgaa

SEQ ID NO: 973895 - DNA, 33 bp, Homo sapien
caaccgagttcatttacgtggctaaagcttgtg

SEQ ID NO: 973896 - DNA, 33 bp, Homo sapien
caaccgagttcatttatgtggctaaagcttgtg

SEQ ID NO: 973897 - DNA, 33 bp, Homo sapien
acacacatgagaaagacagctaagagtcttata

SEQ ID NO: 973898 - DNA, 33 bp, Homo sapien
acacacatgagaaagagagctaagagtcttata

SEQ ID NO: 973899 - DNA, 33 bp, Homo sapien
ttgatgaaggcataaacctgctcaagaaataac

SEQ ID NO: 973900 - DNA, 33 bp, Homo sapien
ttgatgaaggcataaagctgctcaagaaataac

SEQ ID NO: 973901 - DNA, 33 bp, Homo sapien
cattttttactctagaacttaggagtcttaata

SEQ ID NO: 973902 - DNA, 33 bp, Homo sapien
cattttttactctagagcttaggagtcttaata

SEQ ID NO: 973903 - DNA, 33 bp, Homo sapien
tgacagtaaaggaagtaaaggtagaggcattgt

SEQ ID NO: 973904 - DNA, 33 bp, Homo sapien
tgacagtaaaggaagttaaggtagaggcattgt

SEQ ID NO: 973905 - DNA, 33 bp, Homo sapien
atgtaaagctttcagaaggaagtatgcaggtct

SEQ ID NO: 973906 - DNA, 33 bp, Homo sapien
atgtaaagctttcagagggaagtatgcaggtct

SEQ ID NO: 973907 - DNA, 33 bp, Homo sapien
tgctaagactaggaaccatacatagcattggca

SEQ ID NO: 973908 - DNA, 33 bp, Homo sapien
tgctaagactaggaacgatacatagcattggca

SEQ ID NO: 973909 - DNA, 33 bp, Homo sapien
tccagctcaatcagtaggcaaatgactctatct

SEQ ID NO: 973910 - DNA, 33 bp, Homo sapien
tccagctcaatcagtatgcaaatgactctatct

SEQ ID NO: 973911 - DNA, 33 bp, Homo sapien
gtttctcagttttataaatcaacaattcacaat

SEQ ID NO: 973912 - DNA, 33 bp, Homo sapien
gtttctcagttttatacatcaacaattcacaat

SEQ ID NO: 973913 - DNA, 33 bp, Homo sapien
ttctgaatatggttagacaatttttccagcatc

SEQ ID NO: 973914 - DNA, 33 bp, Homo sapien
ttctgaatatggttagccaatttttccagcatc

SEQ ID NO: 973915 - DNA, 33 bp, Homo sapien
caaattcacaattttaaatactagagtcacagt

SEQ ID NO: 973916 - DNA, 33 bp, Homo sapien
caaattcacaattttacatactagagtcacagt

SEQ ID NO: 973917 - DNA, 33 bp, Homo sapien
tctgggtagcatgatacgaccaaccaggcttca

SEQ ID NO: 973918 - DNA, 33 bp, Homo sapien
tctgggtagcatgatatgaccaaccaggcttca

SEQ ID NO: 973919 - DNA, 33 bp, Homo sapien
ttacttgctgcaaccccagaccttttaagaatc

SEQ ID NO: 973920 - DNA, 33 bp, Homo sapien
ttacttgctgcaaccctagaccttttaagaatc

SEQ ID NO: 973921 - DNA, 33 bp, Homo sapien
gacttaggacaagaaaaactcataggagactaa

SEQ ID NO: 973922 - DNA, 33 bp, Homo sapien
gacttaggacaagaaacactcataggagactaa

SEQ ID NO: 973923 - DNA, 33 bp, Homo sapien
aggatgaatgtggaaaactatagtaaagatgta

SEQ ID NO: 973924 - DNA, 33 bp, Homo sapien
aggatgaatgtggaaatctatagtaaagatgta

SEQ ID NO: 973925 - DNA, 33 bp, Homo sapien
gtttctcaatgtaatacatggacacagttaaaa

SEQ ID NO: 973926 - DNA, 33 bp, Homo sapien
gtttctcaatgtaatatatggacacagttaaaa

SEQ ID NO: 973927 - DNA, 33 bp, Homo sapien
ccaatacagatctacaatctttgcccaaggacc

SEQ ID NO: 973928 - DNA, 33 bp, Homo sapien
ccaatacagatctacagtctttgcccaaggacc

SEQ ID NO: 973929 - DNA, 33 bp, Homo sapien
cctggatcctagctacaattacagcctgaggta

SEQ ID NO: 973930 - DNA, 33 bp, Homo sapien
cctggatcctagctacgattacagcctgaggta

SEQ ID NO: 973931 - DNA, 33 bp, Homo sapien
ttgttctttgactccaataaacatcattatctt

SEQ ID NO: 973932 - DNA, 33 bp, Homo sapien
ttgttctttgactccagtaaacatcattatctt

SEQ ID NO: 973933 - DNA, 33 bp, Homo sapien
cacctatcctaaggtgaatcattagaataagat

SEQ ID NO: 973934 - DNA, 33 bp, Homo sapien
cacctatcctaaggtgcatcattagaataagat

SEQ ID NO: 973935 - DNA, 33 bp, Homo sapien
ggaggagaggcttaaaataaacatcttaaaatt

SEQ ID NO: 973936 - DNA, 33 bp, Homo sapien
ggaggagaggcttaaagtaaacatcttaaaatt

SEQ ID NO: 973937 - DNA, 33 bp, Homo sapien
atagagtagagcaagaaacagcaatgagggtgt

SEQ ID NO: 973938 - DNA, 33 bp, Homo sapien
atagagtagagcaagagacagcaatgagggtgt

SEQ ID NO: 973939 - DNA, 33 bp, Homo sapien
ttctttgaataaaggacaccatcttacatatta

SEQ ID NO: 973940 - DNA, 33 bp, Homo sapien
ttctttgaataaaggagaccatcttacatatta

SEQ ID NO: 973941 - DNA, 33 bp, Homo sapien
aatggcatatgctctaccaacgaactgaaagac

SEQ ID NO: 973942 - DNA, 33 bp, Homo sapien
aatggcatatgctctatcaacgaactgaaagac

SEQ ID NO: 973943 - DNA, 33 bp, Homo sapien
aaacaaaatgaacaaaagtaaacaggtgaggaa

SEQ ID NO: 973944 - DNA, 33 bp, Homo sapien
aaacaaaatgaacaaaggtaaacaggtgaggaa

SEQ ID NO: 973945 - DNA, 33 bp, Homo sapien
gccacaaaaccactcaccatttctccatgccat

SEQ ID NO: 973946 - DNA, 33 bp, Homo sapien
gccacaaaaccactcagcatttctccatgccat

SEQ ID NO: 973947 - DNA, 33 bp, Homo sapien
tagagacggaaagtaaaggagcagttaccaggg

SEQ ID NO: 973948 - DNA, 33 bp, Homo sapien
tagagacggaaagtaagggagcagttaccaggg

SEQ ID NO: 973949 - DNA, 33 bp, Homo sapien
aaactttttaatatcacgtagccagaataaatg

SEQ ID NO: 973950 - DNA, 33 bp, Homo sapien
aaactttttaatatcatgtagccagaataaatg

SEQ ID NO: 973951 - DNA, 33 bp, Homo sapien
agggaacatttggatgaagtaagacaccttagc

SEQ ID NO: 973952 - DNA, 33 bp, Homo sapien
agggaacatttggatgcagtaagacaccttagc

SEQ ID NO: 973953 - DNA, 33 bp, Homo sapien
atagtggcatgcaatcacttctctgtcatttgt

SEQ ID NO: 973954 - DNA, 33 bp, Homo sapien
atagtggcatgcaatcgcttctctgtcatttgt

SEQ ID NO: 973955 - DNA, 33 bp, Homo sapien
gaaatatattgtttagcatgcatgtttgacact

SEQ ID NO: 973956 - DNA, 33 bp, Homo sapien
gaaatatattgtttagtatgcatgtttgacact

SEQ ID NO: 973957 - DNA, 33 bp, Homo sapien
cctgtgtatttcatcacgtaagtactggagtct

SEQ ID NO: 973958 - DNA, 33 bp, Homo sapien
cctgtgtatttcatcaggtaagtactggagtct

SEQ ID NO: 973959 - DNA, 33 bp, Homo sapien
tcaggtacacagtgaaatattggatttatagga

SEQ ID NO: 973960 - DNA, 33 bp, Homo sapien
tcaggtacacagtgaagtattggatttatagga

SEQ ID NO: 973961 - DNA, 33 bp, Homo sapien
gctgtattatatattagctgagtgtctgagcaa

SEQ ID NO: 973962 - DNA, 33 bp, Homo sapien
gctgtattatatattatctgagtgtctgagcaa

SEQ ID NO: 973963 - DNA, 33 bp, Homo sapien
gagttgccatatacagaaaaactaaaggtgcta

SEQ ID NO: 973964 - DNA, 33 bp, Homo sapien
gagttgccatatacagcaaaactaaaggtgcta

SEQ ID NO: 973965 - DNA, 33 bp, Homo sapien
atttttttttactagcactcttgctccttatat

SEQ ID NO: 973966 - DNA, 33 bp, Homo sapien
atttttttttactagcgctcttgctccttatat

SEQ ID NO: 973967 - DNA, 33 bp, Homo sapien
gtattagaaaatctgaagtcacaatttgtcatc

SEQ ID NO: 973968 - DNA, 33 bp, Homo sapien
gtattagaaaatctgatgtcacaatttgtcatc

SEQ ID NO: 973969 - DNA, 33 bp, Homo sapien
tttttttcatagcctgacagaaattggcaataa

SEQ ID NO: 973970 - DNA, 33 bp, Homo sapien
tttttttcatagcctggcagaaattggcaataa

SEQ ID NO: 973971 - DNA, 33 bp, Homo sapien
attgcaattcattaaaattaaagcaatgataac

SEQ ID NO: 973972 - DNA, 33 bp, Homo sapien
attgcaattcattaaacttaaagcaatgataac

SEQ ID NO: 973973 - DNA, 33 bp, Homo sapien
aagcttatttccactgcactgcagttttcatta

SEQ ID NO: 973974 - DNA, 33 bp, Homo sapien
aagcttatttccactgtactgcagttttcatta

SEQ ID NO: 973975 - DNA, 33 bp, Homo sapien
ggagggagagagagcacacctaaatcttctacc

SEQ ID NO: 973976 - DNA, 33 bp, Homo sapien
ggagggagagagagcagacctaaatcttctacc

SEQ ID NO: 973977 - DNA, 33 bp, Homo sapien
gttgtatttctcagtcacccaatctcctttcac

SEQ ID NO: 973978 - DNA, 33 bp, Homo sapien
gttgtatttctcagtcgcccaatctcctttcac

SEQ ID NO: 973979 - DNA, 33 bp, Homo sapien
tccagcaacatttccaacaaagttcaggaagtc

SEQ ID NO: 973980 - DNA, 33 bp, Homo sapien
tccagcaacatttccagcaaagttcaggaagtc

SEQ ID NO: 973981 - DNA, 33 bp, Homo sapien
aacagcatggaaactcccaataactatggttga

SEQ ID NO: 973982 - DNA, 33 bp, Homo sapien
aacagcatggaaactcgcaataactatggttga

SEQ ID NO: 973983 - DNA, 33 bp, Homo sapien
ttttagaccctaaggacatatgctagtgttatt

SEQ ID NO: 973984 - DNA, 33 bp, Homo sapien
ttttagaccctaaggatatatgctagtgttatt

SEQ ID NO: 973985 - DNA, 33 bp, Homo sapien
tagaaattatgcagtaagcactccctgtcaatc

SEQ ID NO: 973986 - DNA, 33 bp, Homo sapien
tagaaattatgcagtaggcactccctgtcaatc

SEQ ID NO: 973987 - DNA, 33 bp, Homo sapien
agataatattccaaagaaaccatgaggtagtta

SEQ ID NO: 973988 - DNA, 33 bp, Homo sapien
agataatattccaaaggaaccatgaggtagtta

SEQ ID NO: 973989 - DNA, 33 bp, Homo sapien
aatgatccacaatactaactagcaatctgagac

SEQ ID NO: 973990 - DNA, 33 bp, Homo sapien
aatgatccacaatactgactagcaatctgagac

SEQ ID NO: 973991 - DNA, 33 bp, Homo sapien
tcaatctgaaggcctgaaatctgtggctgtgtt

SEQ ID NO: 973992 - DNA, 33 bp, Homo sapien
tcaatctgaaggcctgcaatctgtggctgtgtt

SEQ ID NO: 973993 - DNA, 33 bp, Homo sapien
aaagaatccattagtcgagtttgcggccatgta

SEQ ID NO: 973994 - DNA, 33 bp, Homo sapien
aaagaatccattagtctagtttgcggccatgta

SEQ ID NO: 973995 - DNA, 33 bp, Homo sapien
ccagtagttcaatgaaaacagattgagttgctt

SEQ ID NO: 973996 - DNA, 33 bp, Homo sapien
ccagtagttcaatgaagacagattgagttgctt

SEQ ID NO: 973997 - DNA, 33 bp, Homo sapien
attggagcatttagaccgcaacaggggtcctct

SEQ ID NO: 973998 - DNA, 33 bp, Homo sapien
attggagcatttagactgcaacaggggtcctct

SEQ ID NO: 973999 - DNA, 33 bp, Homo sapien
gaaggcacagaggagcagatgcaggactaaaag

SEQ ID NO: 974000 - DNA, 33 bp, Homo sapien
gaaggcacagaggagccgatgcaggactaaaag

SEQ ID NO: 974001 - DNA, 33 bp, Homo sapien
gagaagcgtcaaggtcacctttctcaactgagc

SEQ ID NO: 974002 - DNA, 33 bp, Homo sapien
gagaagcgtcaaggtcgcctttctcaactgagc

SEQ ID NO: 974003 - DNA, 33 bp, Homo sapien
ctctattctgattcaccgatgctgatttgattt

SEQ ID NO: 974004 - DNA, 33 bp, Homo sapien
ctctattctgattcactgatgctgatttgattt

SEQ ID NO: 974005 - DNA, 33 bp, Homo sapien
tcatgccaaatgtcagcaatgtcgatagtcttc

SEQ ID NO: 974006 - DNA, 33 bp, Homo sapien
tcatgccaaatgtcaggaatgtcgatagtcttc

SEQ ID NO: 974007 - DNA, 33 bp, Homo sapien
tctttataagattcacactatcatttatgtaca

SEQ ID NO: 974008 - DNA, 33 bp, Homo sapien
tctttataagattcacgctatcatttatgtaca

SEQ ID NO: 974009 - DNA, 33 bp, Homo sapien
taattgtgttcccataagtagaacttcgggcag

SEQ ID NO: 974010 - DNA, 33 bp, Homo sapien
taattgtgttcccataggtagaacttcgggcag

SEQ ID NO: 974011 - DNA, 33 bp, Homo sapien
aacaggtcatgagaacccagataaggtagctaa

SEQ ID NO: 974012 - DNA, 33 bp, Homo sapien
aacaggtcatgagaacgcagataaggtagctaa

SEQ ID NO: 974013 - DNA, 33 bp, Homo sapien
ttgtgtaaatcatttaacctaaaagcattctca

SEQ ID NO: 974014 - DNA, 33 bp, Homo sapien
ttgtgtaaatcatttagcctaaaagcattctca

SEQ ID NO: 974015 - DNA, 33 bp, Homo sapien
taaaaaaaatcacagactcaaatgttcagataa

SEQ ID NO: 974016 - DNA, 33 bp, Homo sapien
taaaaaaaatcacagattcaaatgttcagataa

SEQ ID NO: 974017 - DNA, 33 bp, Homo sapien
gcatcctgcctgcgtgaacaaacctcctttccc

SEQ ID NO: 974018 - DNA, 33 bp, Homo sapien
gcatcctgcctgcgtggacaaacctcctttccc

SEQ ID NO: 974019 - DNA, 33 bp, Homo sapien
tctgagattgttcgtaacttctcatcaagtttt

SEQ ID NO: 974020 - DNA, 33 bp, Homo sapien
tctgagattgttcgtatcttctcatcaagtttt

SEQ ID NO: 974021 - DNA, 33 bp, Homo sapien
agcagcagttgagatcaacctcaggtaatggtt

SEQ ID NO: 974022 - DNA, 33 bp, Homo sapien
agcagcagttgagatcgacctcaggtaatggtt

SEQ ID NO: 974023 - DNA, 33 bp, Homo sapien
taatgttgtgtcaatacagattcatcactgaac

SEQ ID NO: 974024 - DNA, 33 bp, Homo sapien
taatgttgtgtcaatatagattcatcactgaac

SEQ ID NO: 974025 - DNA, 33 bp, Homo sapien
ttgagacctggcataaggtcatatacctcggga

SEQ ID NO: 974026 - DNA, 33 bp, Homo sapien
ttgagacctggcataatgtcatatacctcggga

SEQ ID NO: 974027 - DNA, 33 bp, Homo sapien
gttgactgcaaaaggaacagaccagaagtctaa

SEQ ID NO: 974028 - DNA, 33 bp, Homo sapien
gttgactgcaaaaggagcagaccagaagtctaa

SEQ ID NO: 974029 - DNA, 33 bp, Homo sapien
aaagcccccaaagaaacgaattctgtgttataa

SEQ ID NO: 974030 - DNA, 33 bp, Homo sapien
aaagcccccaaagaaatgaattctgtgttataa

SEQ ID NO: 974031 - DNA, 33 bp, Homo sapien
acatttaacacactacccttgtacctctgagac

SEQ ID NO: 974032 - DNA, 33 bp, Homo sapien
acatttaacacactacgcttgtacctctgagac

SEQ ID NO: 974033 - DNA, 33 bp, Homo sapien
ctccaaacaacaagcaccagcgtcctcgtggtg

SEQ ID NO: 974034 - DNA, 33 bp, Homo sapien
ctccaaacaacaagcatcagcgtcctcgtggtg

SEQ ID NO: 974035 - DNA, 33 bp, Homo sapien
ttatgtagaagtgaagcgtaaaatctaatctct

SEQ ID NO: 974036 - DNA, 33 bp, Homo sapien
ttatgtagaagtgaagtgtaaaatctaatctct

SEQ ID NO: 974037 - DNA, 33 bp, Homo sapien
tatttagataactgccccaaagacctagaaatt

SEQ ID NO: 974038 - DNA, 33 bp, Homo sapien
tatttagataactgcctcaaagacctagaaatt

SEQ ID NO: 974039 - DNA, 33 bp, Homo sapien
atgcgaccactgaatactactgagtttcttctg

SEQ ID NO: 974040 - DNA, 33 bp, Homo sapien
atgcgaccactgaatattactgagtttcttctg

SEQ ID NO: 974041 - DNA, 33 bp, Homo sapien
gctgaatgtctgccaactattactactgctaat

SEQ ID NO: 974042 - DNA, 33 bp, Homo sapien
gctgaatgtctgccaagtattactactgctaat

SEQ ID NO: 974043 - DNA, 33 bp, Homo sapien
tcacactacatggaaacatttgtttatacatct

SEQ ID NO: 974044 - DNA, 33 bp, Homo sapien
tcacactacatggaaatatttgtttatacatct

SEQ ID NO: 974045 - DNA, 33 bp, Homo sapien
gaatataaatgaaagaacctaactcagtcttga

SEQ ID NO: 974046 - DNA, 33 bp, Homo sapien
gaatataaatgaaagagcctaactcagtcttga

SEQ ID NO: 974047 - DNA, 33 bp, Homo sapien
gtgattgtgggctgaaaaccataaaactggtgt

SEQ ID NO: 974048 - DNA, 33 bp, Homo sapien
gtgattgtgggctgaagaccataaaactggtgt

SEQ ID NO: 974049 - DNA, 33 bp, Homo sapien
cattgcaaagtcaccaagtacccagaggcatgc

SEQ ID NO: 974050 - DNA, 33 bp, Homo sapien
cattgcaaagtcaccaggtacccagaggcatgc

SEQ ID NO: 974051 - DNA, 33 bp, Homo sapien
acaaagaccaatgttacggaacagacagcagag

SEQ ID NO: 974052 - DNA, 33 bp, Homo sapien
acaaagaccaatgttatggaacagacagcagag

SEQ ID NO: 974053 - DNA, 33 bp, Homo sapien
tgaaacaagaaatacacgaggcaatacaggttt

SEQ ID NO: 974054 - DNA, 33 bp, Homo sapien
tgaaacaagaaatacatgaggcaatacaggttt

SEQ ID NO: 974055 - DNA, 33 bp, Homo sapien
aaaggaccattcaaagaaccatgtcaaatctga

SEQ ID NO: 974056 - DNA, 33 bp, Homo sapien
aaaggaccattcaaaggaccatgtcaaatctga

SEQ ID NO: 974057 - DNA, 33 bp, Homo sapien
gctttagcggcgctgcggaaggcactggatggc

SEQ ID NO: 974058 - DNA, 33 bp, Homo sapien
gctttagcggcgctgctgaaggcactggatggc

SEQ ID NO: 974059 - DNA, 33 bp, Homo sapien
ctgagcctgcagagataaacagcctatcctccc

SEQ ID NO: 974060 - DNA, 33 bp, Homo sapien
ctgagcctgcagagattaacagcctatcctccc

SEQ ID NO: 974061 - DNA, 33 bp, Homo sapien
agaacgatagatgctaacctagagtgaggagaa

SEQ ID NO: 974062 - DNA, 33 bp, Homo sapien
agaacgatagatgctagcctagagtgaggagaa

SEQ ID NO: 974063 - DNA, 33 bp, Homo sapien
ctcattgaataatggcaaaaggaaaatatgtaa

SEQ ID NO: 974064 - DNA, 33 bp, Homo sapien
ctcattgaataatggcgaaaggaaaatatgtaa

SEQ ID NO: 974065 - DNA, 33 bp, Homo sapien
caggagtgaaccatctcacaagaacccaggcca

SEQ ID NO: 974066 - DNA, 33 bp, Homo sapien
caggagtgaaccatcttacaagaacccaggcca

SEQ ID NO: 974067 - DNA, 33 bp, Homo sapien
ctgagcccaaacttcaatgaagagctatgtcca

SEQ ID NO: 974068 - DNA, 33 bp, Homo sapien
ctgagcccaaacttcagtgaagagctatgtcca

SEQ ID NO: 974069 - DNA, 33 bp, Homo sapien
ctactccaaggcaatgaaggatgtatcactgga

SEQ ID NO: 974070 - DNA, 33 bp, Homo sapien
ctactccaaggcaatggaggatgtatcactgga

SEQ ID NO: 974071 - DNA, 33 bp, Homo sapien
ttctctgctttggaaccgtcctggagagattct

SEQ ID NO: 974072 - DNA, 33 bp, Homo sapien
ttctctgctttggaactgtcctggagagattct

SEQ ID NO: 974073 - DNA, 33 bp, Homo sapien
cttttttcctatgtcaaacattcccctttggcc

SEQ ID NO: 974074 - DNA, 33 bp, Homo sapien
cttttttcctatgtcatacattcccctttggcc

SEQ ID NO: 974075 - DNA, 33 bp, Homo sapien
caatggaaattccaaccgatgactgagaatttg

SEQ ID NO: 974076 - DNA, 33 bp, Homo sapien
caatggaaattccaactgatgactgagaatttg

SEQ ID NO: 974077 - DNA, 33 bp, Homo sapien
cttgtttccttcaagcagcatttgccgaatgta

SEQ ID NO: 974078 - DNA, 33 bp, Homo sapien
cttgtttccttcaagctgcatttgccgaatgta

SEQ ID NO: 974079 - DNA, 33 bp, Homo sapien
cctgttacagttgtcccgatcaagatttataat

SEQ ID NO: 974080 - DNA, 33 bp, Homo sapien
cctgttacagttgtcctgatcaagatttataat

SEQ ID NO: 974081 - DNA, 33 bp, Homo sapien
ctctcagtgcaaaacacaggtggcacacacaga

SEQ ID NO: 974082 - DNA, 33 bp, Homo sapien
ctctcagtgcaaaacagaggtggcacacacaga

SEQ ID NO: 974083 - DNA, 33 bp, Homo sapien
tctactaaatgtaaacagaatgaacacttcata

SEQ ID NO: 974084 - DNA, 33 bp, Homo sapien
tctactaaatgtaaacggaatgaacacttcata

SEQ ID NO: 974085 - DNA, 33 bp, Homo sapien
actccatctcggaaaaataatcataataacaat

SEQ ID NO: 974086 - DNA, 33 bp, Homo sapien
actccatctcggaaaagtaatcataataacaat

SEQ ID NO: 974087 - DNA, 33 bp, Homo sapien
tttttcttcctggccacctgtgagatttctctg

SEQ ID NO: 974088 - DNA, 33 bp, Homo sapien
tttttcttcctggccatctgtgagatttctctg

SEQ ID NO: 974089 - DNA, 33 bp, Homo sapien
gggtaaaaatcatgacaaaaaagacacaagact

SEQ ID NO: 974090 - DNA, 33 bp, Homo sapien
gggtaaaaatcatgacgaaaaagacacaagact

SEQ ID NO: 974091 - DNA, 33 bp, Homo sapien
aatcttttgaacactacaaagtttctcacatat

SEQ ID NO: 974092 - DNA, 33 bp, Homo sapien
aatcttttgaacactagaaagtttctcacatat

SEQ ID NO: 974093 - DNA, 33 bp, Homo sapien
atcagcacatccattacgttctcaattgacttt

SEQ ID NO: 974094 - DNA, 33 bp, Homo sapien
atcagcacatccattatgttctcaattgacttt

SEQ ID NO: 974095 - DNA, 33 bp, Homo sapien
agtctctgtctcaaacaaatggggacactgagg

SEQ ID NO: 974096 - DNA, 33 bp, Homo sapien
agtctctgtctcaaacgaatggggacactgagg

SEQ ID NO: 974097 - DNA, 33 bp, Homo sapien
ctaacaggactctaaacatctactgagaagacc

SEQ ID NO: 974098 - DNA, 33 bp, Homo sapien
ctaacaggactctaaatatctactgagaagacc

SEQ ID NO: 974099 - DNA, 33 bp, Homo sapien
tttccattggttttcaactggatcgagtatttg

SEQ ID NO: 974100 - DNA, 33 bp, Homo sapien
tttccattggttttcagctggatcgagtatttg

SEQ ID NO: 974101 - DNA, 33 bp, Homo sapien
ttgaatatgtgtagaaatatgtgaaatgatgca

SEQ ID NO: 974102 - DNA, 33 bp, Homo sapien
ttgaatatgtgtagaagtatgtgaaatgatgca

SEQ ID NO: 974103 - DNA, 33 bp, Homo sapien
gaaacccttcaaagaacgtctgtattacaaatt

SEQ ID NO: 974104 - DNA, 33 bp, Homo sapien
gaaacccttcaaagaatgtctgtattacaaatt

SEQ ID NO: 974105 - DNA, 33 bp, Homo sapien
ggatgaatgcataaataaggaggcatagtttta

SEQ ID NO: 974106 - DNA, 33 bp, Homo sapien
ggatgaatgcataaatgaggaggcatagtttta

SEQ ID NO: 974107 - DNA, 33 bp, Homo sapien
cctggaggctgataagcacaatgcctattagga

SEQ ID NO: 974108 - DNA, 33 bp, Homo sapien
cctggaggctgataagtacaatgcctattagga

SEQ ID NO: 974109 - DNA, 33 bp, Homo sapien
ttattgttcaaaaagcaaaattgatcatacctt

SEQ ID NO: 974110 - DNA, 33 bp, Homo sapien
ttattgttcaaaaagcgaaattgatcatacctt

SEQ ID NO: 974111 - DNA, 33 bp, Homo sapien
gtggaactttggattgaatgattctaggccaga

SEQ ID NO: 974112 - DNA, 33 bp, Homo sapien
gtggaactttggattgcatgattctaggccaga

SEQ ID NO: 974113 - DNA, 33 bp, Homo sapien
atgaaagtccaccagcaaagtgtaacagtgtta

SEQ ID NO: 974114 - DNA, 33 bp, Homo sapien
atgaaagtccaccagcgaagtgtaacagtgtta

SEQ ID NO: 974115 - DNA, 33 bp, Homo sapien
gttctccatcatacaactaacaagtagaagagc

SEQ ID NO: 974116 - DNA, 33 bp, Homo sapien
gttctccatcatacaattaacaagtagaagagc

SEQ ID NO: 974117 - DNA, 33 bp, Homo sapien
tttcatgcaatctttaaaatgcttcaaatgaat

SEQ ID NO: 974118 - DNA, 33 bp, Homo sapien
tttcatgcaatctttacaatgcttcaaatgaat

SEQ ID NO: 974119 - DNA, 33 bp, Homo sapien
tttcactgtgagagtggagtaattttctgtctt

SEQ ID NO: 974120 - DNA, 33 bp, Homo sapien
tttcactgtgagagtgtagtaattttctgtctt

SEQ ID NO: 974121 - DNA, 33 bp, Homo sapien
actgtaccaatcaagaagaagtctgcaagcaga

SEQ ID NO: 974122 - DNA, 33 bp, Homo sapien
actgtaccaatcaagaggaagtctgcaagcaga

SEQ ID NO: 974123 - DNA, 33 bp, Homo sapien
ggtgtaccttgtaggccaaaatgtgggacatgg

SEQ ID NO: 974124 - DNA, 33 bp, Homo sapien
ggtgtaccttgtaggctaaaatgtgggacatgg

SEQ ID NO: 974125 - DNA, 33 bp, Homo sapien
aaagctagtggaactcaattcactatacatacg

SEQ ID NO: 974126 - DNA, 33 bp, Homo sapien
aaagctagtggaactccattcactatacatacg

SEQ ID NO: 974127 - DNA, 33 bp, Homo sapien
ggactcataattaagacaggcatacctgtaatg

SEQ ID NO: 974128 - DNA, 33 bp, Homo sapien
ggactcataattaagataggcatacctgtaatg

SEQ ID NO: 974129 - DNA, 33 bp, Homo sapien
ttcaaaagaccaaaaacgtgttcactcatctat

SEQ ID NO: 974130 - DNA, 33 bp, Homo sapien
ttcaaaagaccaaaaatgtgttcactcatctat

SEQ ID NO: 974131 - DNA, 33 bp, Homo sapien
acaatgggtaattctgaatactcactgcagtat

SEQ ID NO: 974132 - DNA, 33 bp, Homo sapien
acaatgggtaattctgtatactcactgcagtat

SEQ ID NO: 974133 - DNA, 33 bp, Homo sapien
ccagagaatttcaggcaagtagtcagaagaaaa

SEQ ID NO: 974134 - DNA, 33 bp, Homo sapien
ccagagaatttcaggccagtagtcagaagaaaa

SEQ ID NO: 974135 - DNA, 33 bp, Homo sapien
ctgctgaagaaacactaactgtgaaacagatcc

SEQ ID NO: 974136 - DNA, 33 bp, Homo sapien
ctgctgaagaaacactgactgtgaaacagatcc

SEQ ID NO: 974137 - DNA, 33 bp, Homo sapien
tacacatgttatttaaaagttagtccagcacag

SEQ ID NO: 974138 - DNA, 33 bp, Homo sapien
tacacatgttatttaacagttagtccagcacag

SEQ ID NO: 974139 - DNA, 33 bp, Homo sapien
gtgatactgcacccaaatacttacataaagtgg

SEQ ID NO: 974140 - DNA, 33 bp, Homo sapien
gtgatactgcacccaattacttacataaagtgg

SEQ ID NO: 974141 - DNA, 33 bp, Homo sapien
tctctcattctaagtccatttgcaggaaatgtc

SEQ ID NO: 974142 - DNA, 33 bp, Homo sapien
tctctcattctaagtctatttgcaggaaatgtc

SEQ ID NO: 974143 - DNA, 33 bp, Homo sapien
atagtctagttatagcacagcattaaataaatg

SEQ ID NO: 974144 - DNA, 33 bp, Homo sapien
atagtctagttatagcgcagcattaaataaatg

SEQ ID NO: 974145 - DNA, 33 bp, Homo sapien
acaattctgaaggttccaaggttgttggtgata

SEQ ID NO: 974146 - DNA, 33 bp, Homo sapien
acaattctgaaggttctaaggttgttggtgata

SEQ ID NO: 974147 - DNA, 33 bp, Homo sapien
tcaggaaatctcagtggaggccaaagggtgtaa

SEQ ID NO: 974148 - DNA, 33 bp, Homo sapien
tcaggaaatctcagtgtaggccaaagggtgtaa

SEQ ID NO: 974149 - DNA, 33 bp, Homo sapien
tggccgccatatggaaacaataaagggtcaaag

SEQ ID NO: 974150 - DNA, 33 bp, Homo sapien
tggccgccatatggaaccaataaagggtcaaag

SEQ ID NO: 974151 - DNA, 33 bp, Homo sapien
tgtttagaacagcagaagctttatggagcagat

SEQ ID NO: 974152 - DNA, 33 bp, Homo sapien
tgtttagaacagcagacgctttatggagcagat

SEQ ID NO: 974153 - DNA, 33 bp, Homo sapien
ctagcctattttaatcaacattcttgaacaggg

SEQ ID NO: 974154 - DNA, 33 bp, Homo sapien
ctagcctattttaatccacattcttgaacaggg

SEQ ID NO: 974155 - DNA, 33 bp, Homo sapien
gctatcaacttagtatcactgaacaaggaattg

SEQ ID NO: 974156 - DNA, 33 bp, Homo sapien
gctatcaacttagtattactgaacaaggaattg

SEQ ID NO: 974157 - DNA, 33 bp, Homo sapien
aggctaaagttttatggacacagcaccacaatt

SEQ ID NO: 974158 - DNA, 33 bp, Homo sapien
aggctaaagttttatgtacacagcaccacaatt

SEQ ID NO: 974159 - DNA, 33 bp, Homo sapien
acaaaacttgcatagaaatactctgagtgagct

SEQ ID NO: 974160 - DNA, 33 bp, Homo sapien
acaaaacttgcatagacatactctgagtgagct

SEQ ID NO: 974161 - DNA, 33 bp, Homo sapien
acagtgtcttccacaagtcatccgtggcactga

SEQ ID NO: 974162 - DNA, 33 bp, Homo sapien
acagtgtcttccacaattcatccgtggcactga

SEQ ID NO: 974163 - DNA, 33 bp, Homo sapien
taaaagaaacacatgacgacttctctttggcat

SEQ ID NO: 974164 - DNA, 33 bp, Homo sapien
taaaagaaacacatgatgacttctctttggcat

SEQ ID NO: 974165 - DNA, 33 bp, Homo sapien
ggatgcctgaaatgacagtaccaaactgatcgc

SEQ ID NO: 974166 - DNA, 33 bp, Homo sapien
ggatgcctgaaatgacggtaccaaactgatcgc

SEQ ID NO: 974167 - DNA, 33 bp, Homo sapien
ccaaagtataactgagaaaagatctgcatgcca

SEQ ID NO: 974168 - DNA, 33 bp, Homo sapien
ccaaagtataactgagtaaagatctgcatgcca

SEQ ID NO: 974169 - DNA, 33 bp, Homo sapien
gggcaggggagtcagcagagagatgaacagtct

SEQ ID NO: 974170 - DNA, 33 bp, Homo sapien
gggcaggggagtcagcggagagatgaacagtct

SEQ ID NO: 974171 - DNA, 33 bp, Homo sapien
gcttaaaggtcatccaatcaagactgttcatct

SEQ ID NO: 974172 - DNA, 33 bp, Homo sapien
gcttaaaggtcatccagtcaagactgttcatct

SEQ ID NO: 974173 - DNA, 33 bp, Homo sapien
acacgtggtataaataaactgaccactcggaac

SEQ ID NO: 974174 - DNA, 33 bp, Homo sapien
acacgtggtataaatagactgaccactcggaac

SEQ ID NO: 974175 - DNA, 33 bp, Homo sapien
gctgagataaactgtaactggaaatttcccaac

SEQ ID NO: 974176 - DNA, 33 bp, Homo sapien
gctgagataaactgtagctggaaatttcccaac

SEQ ID NO: 974177 - DNA, 33 bp, Homo sapien
ctttttaagagaataacatatttccccgaaaag

SEQ ID NO: 974178 - DNA, 33 bp, Homo sapien
ctttttaagagaataagatatttccccgaaaag

SEQ ID NO: 974179 - DNA, 33 bp, Homo sapien
tcttgtcctggtcgtgaaaaaatgtaatttggc

SEQ ID NO: 974180 - DNA, 33 bp, Homo sapien
tcttgtcctggtcgtgcaaaaatgtaatttggc

SEQ ID NO: 974181 - DNA, 33 bp, Homo sapien
gaggactgaagtaagaaaacgtgccagaacatc

SEQ ID NO: 974182 - DNA, 33 bp, Homo sapien
gaggactgaagtaagagaacgtgccagaacatc

SEQ ID NO: 974183 - DNA, 33 bp, Homo sapien
tcttgatcctctgacccggtatgaaaatattga

SEQ ID NO: 974184 - DNA, 33 bp, Homo sapien
tcttgatcctctgacctggtatgaaaatattga

SEQ ID NO: 974185 - DNA, 33 bp, Homo sapien
aaatattgactccttaccagatactcggcttaa

SEQ ID NO: 974186 - DNA, 33 bp, Homo sapien
aaatattgactccttagcagatactcggcttaa

SEQ ID NO: 974187 - DNA, 33 bp, Homo sapien
ataattcataagcttaaactgagatgtaattaa

SEQ ID NO: 974188 - DNA, 33 bp, Homo sapien
ataattcataagcttagactgagatgtaattaa

SEQ ID NO: 974189 - DNA, 33 bp, Homo sapien
gtgtgctttcttaaaaactggttagagatgtgt

SEQ ID NO: 974190 - DNA, 33 bp, Homo sapien
gtgtgctttcttaaaacctggttagagatgtgt

SEQ ID NO: 974191 - DNA, 33 bp, Homo sapien
aattaaggaaggcttaaatgtaagcttaaacaa

SEQ ID NO: 974192 - DNA, 33 bp, Homo sapien
aattaaggaaggcttagatgtaagcttaaacaa

SEQ ID NO: 974193 - DNA, 33 bp, Homo sapien
tatatgaggctaccaaccaatgattatcatagt

SEQ ID NO: 974194 - DNA, 33 bp, Homo sapien
tatatgaggctaccaatcaatgattatcatagt

SEQ ID NO: 974195 - DNA, 33 bp, Homo sapien
actcttggttaatccaccatgatgcaatatata

SEQ ID NO: 974196 - DNA, 33 bp, Homo sapien
actcttggttaatccatcatgatgcaatatata

SEQ ID NO: 974197 - DNA, 33 bp, Homo sapien
gttgtgtgtgccttgaactacccaccagcacaa

SEQ ID NO: 974198 - DNA, 33 bp, Homo sapien
gttgtgtgtgccttgagctacccaccagcacaa

SEQ ID NO: 974199 - DNA, 33 bp, Homo sapien
tttttattctgtctaaatgaatatctcaatctc

SEQ ID NO: 974200 - DNA, 33 bp, Homo sapien
tttttattctgtctaagtgaatatctcaatctc

SEQ ID NO: 974201 - DNA, 33 bp, Homo sapien
tttgtatcctttcaccagcatctcccaaattcg

SEQ ID NO: 974202 - DNA, 33 bp, Homo sapien
tttgtatcctttcaccggcatctcccaaattcg

SEQ ID NO: 974203 - DNA, 33 bp, Homo sapien
cccatcttgctagtgaaggtatgaagacaagga

SEQ ID NO: 974204 - DNA, 33 bp, Homo sapien
cccatcttgctagtgagggtatgaagacaagga

SEQ ID NO: 974205 - DNA, 33 bp, Homo sapien
ccagactactcagggcaatacttggaataacga

SEQ ID NO: 974206 - DNA, 33 bp, Homo sapien
ccagactactcagggcgatacttggaataacga

SEQ ID NO: 974207 - DNA, 33 bp, Homo sapien
taactaccttgagttacggtgatcagaggaaga

SEQ ID NO: 974208 - DNA, 33 bp, Homo sapien
taactaccttgagttatggtgatcagaggaaga

SEQ ID NO: 974209 - DNA, 33 bp, Homo sapien
cagagttacaggaaagcctatggagttatttac

SEQ ID NO: 974210 - DNA, 33 bp, Homo sapien
cagagttacaggaaaggctatggagttatttac

SEQ ID NO: 974211 - DNA, 33 bp, Homo sapien
cctggcttgcccttgacaaatgtgagattcagg

SEQ ID NO: 974212 - DNA, 33 bp, Homo sapien
cctggcttgcccttgataaatgtgagattcagg

SEQ ID NO: 974213 - DNA, 33 bp, Homo sapien
cagagactcaaccagaggctgatattaagcaaa

SEQ ID NO: 974214 - DNA, 33 bp, Homo sapien
cagagactcaaccagatgctgatattaagcaaa

SEQ ID NO: 974215 - DNA, 33 bp, Homo sapien
gttgaagagcggatagcatagacagtaagcaga

SEQ ID NO: 974216 - DNA, 33 bp, Homo sapien
gttgaagagcggatagtatagacagtaagcaga

SEQ ID NO: 974217 - DNA, 33 bp, Homo sapien
ggtgagagggggccatgaatccatctagagcat

SEQ ID NO: 974218 - DNA, 33 bp, Homo sapien
ggtgagagggggccattaatccatctagagcat

SEQ ID NO: 974219 - DNA, 33 bp, Homo sapien
ccagcaactgatcaataaggtggcagtaattac

SEQ ID NO: 974220 - DNA, 33 bp, Homo sapien
ccagcaactgatcaattaggtggcagtaattac

SEQ ID NO: 974221 - DNA, 33 bp, Homo sapien
agtctggtttttggtacgatgactgacttttta

SEQ ID NO: 974222 - DNA, 33 bp, Homo sapien
agtctggtttttggtatgatgactgacttttta

SEQ ID NO: 974223 - DNA, 33 bp, Homo sapien
ctagtttcaaagattcaaagaataagctaactc

SEQ ID NO: 974224 - DNA, 33 bp, Homo sapien
ctagtttcaaagattcgaagaataagctaactc

SEQ ID NO: 974225 - DNA, 33 bp, Homo sapien
gtgtttctccatcctacgattctgccttataat

SEQ ID NO: 974226 - DNA, 33 bp, Homo sapien
gtgtttctccatcctaggattctgccttataat

SEQ ID NO: 974227 - DNA, 33 bp, Homo sapien
aacctcaaactaccagactaaagcgatcctgtt

SEQ ID NO: 974228 - DNA, 33 bp, Homo sapien
aacctcaaactaccagcctaaagcgatcctgtt

SEQ ID NO: 974229 - DNA, 33 bp, Homo sapien
gcaagacactattaaactgagagacgtttagag

SEQ ID NO: 974230 - DNA, 33 bp, Homo sapien
gcaagacactattaaattgagagacgtttagag

SEQ ID NO: 974231 - DNA, 33 bp, Homo sapien
ttaagggctgtgataaaaactctgggaacttta

SEQ ID NO: 974232 - DNA, 33 bp, Homo sapien
ttaagggctgtgataagaactctgggaacttta

SEQ ID NO: 974233 - DNA, 33 bp, Homo sapien
tcaagagtcaagaggaaggccaaaagaaaagat

SEQ ID NO: 974234 - DNA, 33 bp, Homo sapien
tcaagagtcaagaggagggccaaaagaaaagat

SEQ ID NO: 974235 - DNA, 33 bp, Homo sapien
tctatatttccatttcacataacttagtatgaa

SEQ ID NO: 974236 - DNA, 33 bp, Homo sapien
tctatatttccatttcgcataacttagtatgaa

SEQ ID NO: 974237 - DNA, 33 bp, Homo sapien
ggttgagagtgtctaccgattattgagaaccac

SEQ ID NO: 974238 - DNA, 33 bp, Homo sapien
ggttgagagtgtctactgattattgagaaccac

SEQ ID NO: 974239 - DNA, 33 bp, Homo sapien
actttcctagaacatcaacttcatccccatata

SEQ ID NO: 974240 - DNA, 33 bp, Homo sapien
actttcctagaacatcgacttcatccccatata

SEQ ID NO: 974241 - DNA, 33 bp, Homo sapien
tttgatgtactgattacgtgaaacctaaagtct

SEQ ID NO: 974242 - DNA, 33 bp, Homo sapien
tttgatgtactgattatgtgaaacctaaagtct

SEQ ID NO: 974243 - DNA, 33 bp, Homo sapien
aatatataaacagggaaaaattgtttgccaaaa

SEQ ID NO: 974244 - DNA, 33 bp, Homo sapien
aatatataaacagggacaaattgtttgccaaaa

SEQ ID NO: 974245 - DNA, 33 bp, Homo sapien
cataaaatttgctgaaaccctaaatgttgatgg

SEQ ID NO: 974246 - DNA, 33 bp, Homo sapien
cataaaatttgctgaagccctaaatgttgatgg

SEQ ID NO: 974247 - DNA, 33 bp, Homo sapien
agataatatgagcttccaatatgaaaacaggaa

SEQ ID NO: 974248 - DNA, 33 bp, Homo sapien
agataatatgagcttctaatatgaaaacaggaa

SEQ ID NO: 974249 - DNA, 33 bp, Homo sapien
gatttgtgatgctcaaatgattcagactcattt

SEQ ID NO: 974250 - DNA, 33 bp, Homo sapien
gatttgtgatgctcaagtgattcagactcattt

SEQ ID NO: 974251 - DNA, 33 bp, Homo sapien
acaaattaagtaaatacaaaccatgctctctct

SEQ ID NO: 974252 - DNA, 33 bp, Homo sapien
acaaattaagtaaatataaaccatgctctctct

SEQ ID NO: 974253 - DNA, 33 bp, Homo sapien
atctacatactatccagcctatcattaattaat

SEQ ID NO: 974254 - DNA, 33 bp, Homo sapien
atctacatactatccatcctatcattaattaat

SEQ ID NO: 974255 - DNA, 33 bp, Homo sapien
cactgagagcttaacaaggaaatgcaccaattg

SEQ ID NO: 974256 - DNA, 33 bp, Homo sapien
cactgagagcttaacagggaaatgcaccaattg

SEQ ID NO: 974257 - DNA, 33 bp, Homo sapien
tgttttatatgggacaataggtgtttgcttttt

SEQ ID NO: 974258 - DNA, 33 bp, Homo sapien
tgttttatatgggacagtaggtgtttgcttttt

SEQ ID NO: 974259 - DNA, 33 bp, Homo sapien
aatgaccaagtgttaaaattactgacattgtct

SEQ ID NO: 974260 - DNA, 33 bp, Homo sapien
aatgaccaagtgttaagattactgacattgtct

SEQ ID NO: 974261 - DNA, 33 bp, Homo sapien
gcatctcagcataatggaatcataacaataagc

SEQ ID NO: 974262 - DNA, 33 bp, Homo sapien
gcatctcagcataatgtaatcataacaataagc

SEQ ID NO: 974263 - DNA, 33 bp, Homo sapien
gcttaaaaactcaaagaaaatcttcagaacttt

SEQ ID NO: 974264 - DNA, 33 bp, Homo sapien
gcttaaaaactcaaaggaaatcttcagaacttt

SEQ ID NO: 974265 - DNA, 33 bp, Homo sapien
agagagttaacctgtaaaatctgatagataaag

SEQ ID NO: 974266 - DNA, 33 bp, Homo sapien
agagagttaacctgtagaatctgatagataaag

SEQ ID NO: 974267 - DNA, 33 bp, Homo sapien
attggtcacaaaattaacgtcgaaaatagaata

SEQ ID NO: 974268 - DNA, 33 bp, Homo sapien
attggtcacaaaattagcgtcgaaaatagaata

SEQ ID NO: 974269 - DNA, 33 bp, Homo sapien
aatgtggtgaaagctccctaactagcagtattg

SEQ ID NO: 974270 - DNA, 33 bp, Homo sapien
aatgtggtgaaagctctctaactagcagtattg

SEQ ID NO: 974271 - DNA, 33 bp, Homo sapien
agtatctgatcaaaaagtttcatccaattagag

SEQ ID NO: 974272 - DNA, 33 bp, Homo sapien
agtatctgatcaaaaattttcatccaattagag

SEQ ID NO: 974273 - DNA, 33 bp, Homo sapien
tttagagaaaagtatacgcctatgtattaaatt

SEQ ID NO: 974274 - DNA, 33 bp, Homo sapien
tttagagaaaagtatatgcctatgtattaaatt

SEQ ID NO: 974275 - DNA, 33 bp, Homo sapien
gtttttcagaatgcaaaaggttatgttgaccat

SEQ ID NO: 974276 - DNA, 33 bp, Homo sapien
gtttttcagaatgcaataggttatgttgaccat

SEQ ID NO: 974277 - DNA, 33 bp, Homo sapien
catgaggtattcctgaagaagaaactgtcatca

SEQ ID NO: 974278 - DNA, 33 bp, Homo sapien
catgaggtattcctgaggaagaaactgtcatca

SEQ ID NO: 974279 - DNA, 33 bp, Homo sapien
taaatcttgtccactgaaatgtcattagggcat

SEQ ID NO: 974280 - DNA, 33 bp, Homo sapien
taaatcttgtccactggaatgtcattagggcat

SEQ ID NO: 974281 - DNA, 33 bp, Homo sapien
ttctgggttgccaaagaatggttgcctttgttt

SEQ ID NO: 974282 - DNA, 33 bp, Homo sapien
ttctgggttgccaaagtatggttgcctttgttt

SEQ ID NO: 974283 - DNA, 33 bp, Homo sapien
gattttcaggattttggatgttatggattttga

SEQ ID NO: 974284 - DNA, 33 bp, Homo sapien
gattttcaggattttgtatgttatggattttga

SEQ ID NO: 974285 - DNA, 33 bp, Homo sapien
agtcacttcgagggcactaaattttcacaaaca

SEQ ID NO: 974286 - DNA, 33 bp, Homo sapien
agtcacttcgagggcagtaaattttcacaaaca

SEQ ID NO: 974287 - DNA, 33 bp, Homo sapien
tgaagattttttttaacgaagagcagcttagta

SEQ ID NO: 974288 - DNA, 33 bp, Homo sapien
tgaagattttttttaatgaagagcagcttagta

SEQ ID NO: 974289 - DNA, 33 bp, Homo sapien
aaaaatcttcattgacacaaacttacaataaat

SEQ ID NO: 974290 - DNA, 33 bp, Homo sapien
aaaaatcttcattgacgcaaacttacaataaat

SEQ ID NO: 974291 - DNA, 33 bp, Homo sapien
ctgctgccaccttctaacactgcataagacatg

SEQ ID NO: 974292 - DNA, 33 bp, Homo sapien
ctgctgccaccttctaccactgcataagacatg

SEQ ID NO: 974293 - DNA, 33 bp, Homo sapien
aacattctttcaacaaactaagggctctttagt

SEQ ID NO: 974294 - DNA, 33 bp, Homo sapien
aacattctttcaacaagctaagggctctttagt

SEQ ID NO: 974295 - DNA, 33 bp, Homo sapien
ttcatacttgccctgaacccaggaaactgtgta

SEQ ID NO: 974296 - DNA, 33 bp, Homo sapien
ttcatacttgccctgaccccaggaaactgtgta

SEQ ID NO: 974297 - DNA, 33 bp, Homo sapien
aaacattttgtctcccacagaaataccaaattc

SEQ ID NO: 974298 - DNA, 33 bp, Homo sapien
aaacattttgtctccctcagaaataccaaattc

SEQ ID NO: 974299 - DNA, 33 bp, Homo sapien
tttgtttcattttggaaaaacatggtcttacta

SEQ ID NO: 974300 - DNA, 33 bp, Homo sapien
tttgtttcattttggagaaacatggtcttacta

SEQ ID NO: 974301 - DNA, 33 bp, Homo sapien
atttttgcatcaaatcactcttatgtactgcac

SEQ ID NO: 974302 - DNA, 33 bp, Homo sapien
atttttgcatcaaatccctcttatgtactgcac

SEQ ID NO: 974303 - DNA, 33 bp, Homo sapien
gagtgaggaatttagacccttggaccagattga

SEQ ID NO: 974304 - DNA, 33 bp, Homo sapien
gagtgaggaatttagatccttggaccagattga

SEQ ID NO: 974305 - DNA, 33 bp, Homo sapien
ccttggaccagattgacgctgttaattaatttc

SEQ ID NO: 974306 - DNA, 33 bp, Homo sapien
ccttggaccagattgatgctgttaattaatttc

SEQ ID NO: 974307 - DNA, 33 bp, Homo sapien
aaatatattcaaatgccacatgattagtttctc

SEQ ID NO: 974308 - DNA, 33 bp, Homo sapien
aaatatattcaaatgctacatgattagtttctc

SEQ ID NO: 974309 - DNA, 33 bp, Homo sapien
tgaacttgagttgcggaccaaaagagaaaatga

SEQ ID NO: 974310 - DNA, 33 bp, Homo sapien
tgaacttgagttgcggcccaaaagagaaaatga

SEQ ID NO: 974311 - DNA, 33 bp, Homo sapien
ctcattgagatttctacggtctctcagggcata

SEQ ID NO: 974312 - DNA, 33 bp, Homo sapien
ctcattgagatttctatggtctctcagggcata

SEQ ID NO: 974313 - DNA, 33 bp, Homo sapien
tgttttggaaataaaccggcatattagtaagtg

SEQ ID NO: 974314 - DNA, 33 bp, Homo sapien
tgttttggaaataaactggcatattagtaagtg

SEQ ID NO: 974315 - DNA, 33 bp, Homo sapien
cttgggcttctgtagcacattgcaggcaagata

SEQ ID NO: 974316 - DNA, 33 bp, Homo sapien
cttgggcttctgtagctcattgcaggcaagata

SEQ ID NO: 974317 - DNA, 33 bp, Homo sapien
cttgtaccatagaataacacaacagtaggtctt

SEQ ID NO: 974318 - DNA, 33 bp, Homo sapien
cttgtaccatagaataccacaacagtaggtctt

SEQ ID NO: 974319 - DNA, 33 bp, Homo sapien
tatggtacaaggtgaaataaattcaggtaacat

SEQ ID NO: 974320 - DNA, 33 bp, Homo sapien
tatggtacaaggtgaagtaaattcaggtaacat

SEQ ID NO: 974321 - DNA, 33 bp, Homo sapien
attagtatctactctcaatgtgcttttacagtg

SEQ ID NO: 974322 - DNA, 33 bp, Homo sapien
attagtatctactctcgatgtgcttttacagtg

SEQ ID NO: 974323 - DNA, 33 bp, Homo sapien
caaaaaggaagcagaaaatgtttgatgaaccag

SEQ ID NO: 974324 - DNA, 33 bp, Homo sapien
caaaaaggaagcagaagatgtttgatgaaccag

SEQ ID NO: 974325 - DNA, 33 bp, Homo sapien
aaaattaactaggagccgatggcattaatttag

SEQ ID NO: 974326 - DNA, 33 bp, Homo sapien
aaaattaactaggagctgatggcattaatttag

SEQ ID NO: 974327 - DNA, 33 bp, Homo sapien
gacttttcctctcttccaggctttttctgttgt

SEQ ID NO: 974328 - DNA, 33 bp, Homo sapien
gacttttcctctcttctaggctttttctgttgt

SEQ ID NO: 974329 - DNA, 33 bp, Homo sapien
gtttgtttactaatccagagtacttttgcccat

SEQ ID NO: 974330 - DNA, 33 bp, Homo sapien
gtttgtttactaatccggagtacttttgcccat

SEQ ID NO: 974331 - DNA, 33 bp, Homo sapien
ctgttgagaccttcaacgtactggaaattctga

SEQ ID NO: 974332 - DNA, 33 bp, Homo sapien
ctgttgagaccttcaatgtactggaaattctga

SEQ ID NO: 974333 - DNA, 33 bp, Homo sapien
gagtgccaagatgcaacgtacagccaaccctca

SEQ ID NO: 974334 - DNA, 33 bp, Homo sapien
gagtgccaagatgcaatgtacagccaaccctca

SEQ ID NO: 974335 - DNA, 33 bp, Homo sapien
tacggagatccagatgcattgtttagatttcta

SEQ ID NO: 974336 - DNA, 33 bp, Homo sapien
tacggagatccagatgtattgtttagatttcta

SEQ ID NO: 974337 - DNA, 33 bp, Homo sapien
aacattgtaagtcaaccaaatgaacatctctgg

SEQ ID NO: 974338 - DNA, 33 bp, Homo sapien
aacattgtaagtcaactaaatgaacatctctgg

SEQ ID NO: 974339 - DNA, 33 bp, Homo sapien
attagagacatatctaagccctcaaactatgac

SEQ ID NO: 974340 - DNA, 33 bp, Homo sapien
attagagacatatctacgccctcaaactatgac

SEQ ID NO: 974341 - DNA, 33 bp, Homo sapien
tttttatgtaacaaaaggtatggattcaagaag

SEQ ID NO: 974342 - DNA, 33 bp, Homo sapien
tttttatgtaacaaaatgtatggattcaagaag

SEQ ID NO: 974343 - DNA, 33 bp, Homo sapien
tgatcataagcaggaaaagtaaaagaagtttaa

SEQ ID NO: 974344 - DNA, 33 bp, Homo sapien
tgatcataagcaggaagagtaaaagaagtttaa

SEQ ID NO: 974345 - DNA, 33 bp, Homo sapien
tttataaggagaatgaagaaacactaatgaaag

SEQ ID NO: 974346 - DNA, 33 bp, Homo sapien
tttataaggagaatgatgaaacactaatgaaag

SEQ ID NO: 974347 - DNA, 33 bp, Homo sapien
tctccttcaggacaaaatagattaacagccaaa

SEQ ID NO: 974348 - DNA, 33 bp, Homo sapien
tctccttcaggacaaagtagattaacagccaaa

SEQ ID NO: 974349 - DNA, 33 bp, Homo sapien
gcacaatccaggctgacgagtctactgatgttg

SEQ ID NO: 974350 - DNA, 33 bp, Homo sapien
gcacaatccaggctgatgagtctactgatgttg

SEQ ID NO: 974351 - DNA, 33 bp, Homo sapien
ggcacaattgttagaaagggttaatgagtcacc

SEQ ID NO: 974352 - DNA, 33 bp, Homo sapien
ggcacaattgttagaacgggttaatgagtcacc

SEQ ID NO: 974353 - DNA, 33 bp, Homo sapien
atgttctgtcatgagacattaatttttatccga

SEQ ID NO: 974354 - DNA, 33 bp, Homo sapien
atgttctgtcatgagatattaatttttatccga

SEQ ID NO: 974355 - DNA, 33 bp, Homo sapien
aacactgacaatgtcaaattctagcaaagatat

SEQ ID NO: 974356 - DNA, 33 bp, Homo sapien
aacactgacaatgtcatattctagcaaagatat

SEQ ID NO: 974357 - DNA, 33 bp, Homo sapien
gtcacgtttgttcccaatcaggaccctgttgta

SEQ ID NO: 974358 - DNA, 33 bp, Homo sapien
gtcacgtttgttcccactcaggaccctgttgta

SEQ ID NO: 974359 - DNA, 33 bp, Homo sapien
catggttacgtcctaactccaatgttgaaagta

SEQ ID NO: 974360 - DNA, 33 bp, Homo sapien
catggttacgtcctaattccaatgttgaaagta

SEQ ID NO: 974361 - DNA, 33 bp, Homo sapien
ggacacagcctcaagaggtcccgagatcatatg

SEQ ID NO: 974362 - DNA, 33 bp, Homo sapien
ggacacagcctcaagatgtcccgagatcatatg

SEQ ID NO: 974363 - DNA, 33 bp, Homo sapien
ttttgccaaggttgagaatattgacccaggaca

SEQ ID NO: 974364 - DNA, 33 bp, Homo sapien
ttttgccaaggttgaggatattgacccaggaca

SEQ ID NO: 974365 - DNA, 33 bp, Homo sapien
cctttaatagtcaaaagtgtatcatctttagat

SEQ ID NO: 974366 - DNA, 33 bp, Homo sapien
cctttaatagtcaaaattgtatcatctttagat

SEQ ID NO: 974367 - DNA, 33 bp, Homo sapien
ttgatatggtggttgagattttcagcaatgtgt

SEQ ID NO: 974368 - DNA, 33 bp, Homo sapien
ttgatatggtggttgatattttcagcaatgtgt

SEQ ID NO: 974369 - DNA, 33 bp, Homo sapien
aaaaatgtgtgcttcacctacaccctcaaacag

SEQ ID NO: 974370 - DNA, 33 bp, Homo sapien
aaaaatgtgtgcttcatctacaccctcaaacag

SEQ ID NO: 974371 - DNA, 33 bp, Homo sapien
tttctgatgctttgcgaatttctacttcaagct

SEQ ID NO: 974372 - DNA, 33 bp, Homo sapien
tttctgatgctttgcggatttctacttcaagct

SEQ ID NO: 974373 - DNA, 33 bp, Homo sapien
atcagaaacagcttgcaaaaaatggcaggcatg

SEQ ID NO: 974374 - DNA, 33 bp, Homo sapien
atcagaaacagcttgcgaaaaatggcaggcatg

SEQ ID NO: 974375 - DNA, 33 bp, Homo sapien
cttttctttgcttcaaccttctttatagttcat

SEQ ID NO: 974376 - DNA, 33 bp, Homo sapien
cttttctttgcttcaatcttctttatagttcat

SEQ ID NO: 974377 - DNA, 33 bp, Homo sapien
aaaacatacaaaagacacaaattgctaatataa

SEQ ID NO: 974378 - DNA, 33 bp, Homo sapien
aaaacatacaaaagacgcaaattgctaatataa

SEQ ID NO: 974379 - DNA, 33 bp, Homo sapien
tgaaatctgatctgtcggaaattaatatagctt

SEQ ID NO: 974380 - DNA, 33 bp, Homo sapien
tgaaatctgatctgtctgaaattaatatagctt

SEQ ID NO: 974381 - DNA, 33 bp, Homo sapien
ttccagcctcttgtaacgcagaaatggagtgga

SEQ ID NO: 974382 - DNA, 33 bp, Homo sapien
ttccagcctcttgtaatgcagaaatggagtgga

SEQ ID NO: 974383 - DNA, 33 bp, Homo sapien
caatgttgatttaaaggcttgatgcataatgcc

SEQ ID NO: 974384 - DNA, 33 bp, Homo sapien
caatgttgatttaaagtcttgatgcataatgcc

SEQ ID NO: 974385 - DNA, 33 bp, Homo sapien
agttgtgaaacaagagacatatttagagtccag

SEQ ID NO: 974386 - DNA, 33 bp, Homo sapien
agttgtgaaacaagagccatatttagagtccag

SEQ ID NO: 974387 - DNA, 33 bp, Homo sapien
atgtaaagatcacagcactgattttcataagca

SEQ ID NO: 974388 - DNA, 33 bp, Homo sapien
atgtaaagatcacagccctgattttcataagca

SEQ ID NO: 974389 - DNA, 33 bp, Homo sapien
gctctggagaaaggacagaagtgtgttaacagt

SEQ ID NO: 974390 - DNA, 33 bp, Homo sapien
gctctggagaaaggacggaagtgtgttaacagt

SEQ ID NO: 974391 - DNA, 33 bp, Homo sapien
catgagtttcaaaagacgcttattgcaatatta

SEQ ID NO: 974392 - DNA, 33 bp, Homo sapien
catgagtttcaaaagatgcttattgcaatatta

SEQ ID NO: 974393 - DNA, 33 bp, Homo sapien
taaatacataggtcacaaacaaaatgatatact

SEQ ID NO: 974394 - DNA, 33 bp, Homo sapien
taaatacataggtcacgaacaaaatgatatact

SEQ ID NO: 974395 - DNA, 33 bp, Homo sapien
gcaattatattgaatcacctatagcaaaactta

SEQ ID NO: 974396 - DNA, 33 bp, Homo sapien
gcaattatattgaatcgcctatagcaaaactta

SEQ ID NO: 974397 - DNA, 33 bp, Homo sapien
ctgcaaagagctaccacaatttcaagagaatct

SEQ ID NO: 974398 - DNA, 33 bp, Homo sapien
ctgcaaagagctaccataatttcaagagaatct

SEQ ID NO: 974399 - DNA, 33 bp, Homo sapien
tttctttgactgtccacgctacggaaatacata

SEQ ID NO: 974400 - DNA, 33 bp, Homo sapien
tttctttgactgtccatgctacggaaatacata

SEQ ID NO: 974401 - DNA, 33 bp, Homo sapien
ccattggttttccataactgacaagatgaatta

SEQ ID NO: 974402 - DNA, 33 bp, Homo sapien
ccattggttttccatacctgacaagatgaatta

SEQ ID NO: 974403 - DNA, 33 bp, Homo sapien
tcataagccactaagactcagtgtttacccatt

SEQ ID NO: 974404 - DNA, 33 bp, Homo sapien
tcataagccactaagattcagtgtttacccatt

SEQ ID NO: 974405 - DNA, 33 bp, Homo sapien
aagggaagagaaagagaaaggccaattaaacta

SEQ ID NO: 974406 - DNA, 33 bp, Homo sapien
aagggaagagaaagaggaaggccaattaaacta

SEQ ID NO: 974407 - DNA, 33 bp, Homo sapien
ctctccattgcactccaagtaaaagctagagtc

SEQ ID NO: 974408 - DNA, 33 bp, Homo sapien
ctctccattgcactccgagtaaaagctagagtc

SEQ ID NO: 974409 - DNA, 33 bp, Homo sapien
ctcatcagttaatccagcagtccttccctagct

SEQ ID NO: 974410 - DNA, 33 bp, Homo sapien
ctcatcagttaatccatcagtccttccctagct

SEQ ID NO: 974411 - DNA, 33 bp, Homo sapien
tgattaacatccagtagactttcaaatcttcag

SEQ ID NO: 974412 - DNA, 33 bp, Homo sapien
tgattaacatccagtatactttcaaatcttcag

SEQ ID NO: 974413 - DNA, 33 bp, Homo sapien
aatttctatttctaagcaagcagtgcattgaat

SEQ ID NO: 974414 - DNA, 33 bp, Homo sapien
aatttctatttctaagtaagcagtgcattgaat

SEQ ID NO: 974415 - DNA, 33 bp, Homo sapien
gttgcagaagttctcccagataatgtcctgaag

SEQ ID NO: 974416 - DNA, 33 bp, Homo sapien
gttgcagaagttctcctagataatgtcctgaag

SEQ ID NO: 974417 - DNA, 33 bp, Homo sapien
ttgagacccatcctaccccagaataacctcatc

SEQ ID NO: 974418 - DNA, 33 bp, Homo sapien
ttgagacccatcctactccagaataacctcatc

SEQ ID NO: 974419 - DNA, 33 bp, Homo sapien
tctactctgctgcttaccccctaacttcccaac

SEQ ID NO: 974420 - DNA, 33 bp, Homo sapien
tctactctgctgcttatcccctaacttcccaac

SEQ ID NO: 974421 - DNA, 33 bp, Homo sapien
gaataccaaagttgtcgaaaaagtgtacaaact

SEQ ID NO: 974422 - DNA, 33 bp, Homo sapien
gaataccaaagttgtctaaaaagtgtacaaact

SEQ ID NO: 974423 - DNA, 33 bp, Homo sapien
taattgatgaacttaagtgatgaagaattctct

SEQ ID NO: 974424 - DNA, 33 bp, Homo sapien
taattgatgaacttaattgatgaagaattctct

SEQ ID NO: 974425 - DNA, 33 bp, Homo sapien
ttggtaccctgaaaaagcttgccaagtactgca

SEQ ID NO: 974426 - DNA, 33 bp, Homo sapien
ttggtaccctgaaaaatcttgccaagtactgca

SEQ ID NO: 974427 - DNA, 33 bp, Homo sapien
gctctccattaaagctaagaccagacaataaaa

SEQ ID NO: 974428 - DNA, 33 bp, Homo sapien
gctctccattaaagctgagaccagacaataaaa

SEQ ID NO: 974429 - DNA, 33 bp, Homo sapien
ttctttaatgtgacaactacctaccttatatgt

SEQ ID NO: 974430 - DNA, 33 bp, Homo sapien
ttctttaatgtgacaagtacctaccttatatgt

SEQ ID NO: 974431 - DNA, 33 bp, Homo sapien
aagctgaaatacaagaccaaggatataagggca

SEQ ID NO: 974432 - DNA, 33 bp, Homo sapien
aagctgaaatacaagatcaaggatataagggca

SEQ ID NO: 974433 - DNA, 33 bp, Homo sapien
caatatcttccaaacaatgtcttataatcacta

SEQ ID NO: 974434 - DNA, 33 bp, Homo sapien
caatatcttccaaacagtgtcttataatcacta

SEQ ID NO: 974435 - DNA, 33 bp, Homo sapien
tcatagaatcaactaagctgcagaaagtctaat

SEQ ID NO: 974436 - DNA, 33 bp, Homo sapien
tcatagaatcaactaatctgcagaaagtctaat

SEQ ID NO: 974437 - DNA, 33 bp, Homo sapien
aattggttacttgagaagaagattaatcagatg

SEQ ID NO: 974438 - DNA, 33 bp, Homo sapien
aattggttacttgagaggaagattaatcagatg

SEQ ID NO: 974439 - DNA, 33 bp, Homo sapien
atatcaacgcttatcacaatgcactctaatttt

SEQ ID NO: 974440 - DNA, 33 bp, Homo sapien
atatcaacgcttatcataatgcactctaatttt

SEQ ID NO: 974441 - DNA, 33 bp, Homo sapien
gttttcttccattagaatccttggttcttgact

SEQ ID NO: 974442 - DNA, 33 bp, Homo sapien
gttttcttccattagagtccttggttcttgact

SEQ ID NO: 974443 - DNA, 33 bp, Homo sapien
ttccttacagccttaaatgttggagaagaggtc

SEQ ID NO: 974444 - DNA, 33 bp, Homo sapien
ttccttacagccttaagtgttggagaagaggtc

SEQ ID NO: 974445 - DNA, 33 bp, Homo sapien
accctctgctcttcacgcctactctaaataagg

SEQ ID NO: 974446 - DNA, 33 bp, Homo sapien
accctctgctcttcactcctactctaaataagg

SEQ ID NO: 974447 - DNA, 33 bp, Homo sapien
gttgcttgtttcactacgaacattatgattaac

SEQ ID NO: 974448 - DNA, 33 bp, Homo sapien
gttgcttgtttcactatgaacattatgattaac

SEQ ID NO: 974449 - DNA, 33 bp, Homo sapien
ggtggaaactgctaaacgctttaaagttcggca

SEQ ID NO: 974450 - DNA, 33 bp, Homo sapien
ggtggaaactgctaaatgctttaaagttcggca

SEQ ID NO: 974451 - DNA, 33 bp, Homo sapien
catacccaactatctaccctaaaatgacatgcc

SEQ ID NO: 974452 - DNA, 33 bp, Homo sapien
catacccaactatctatcctaaaatgacatgcc

SEQ ID NO: 974453 - DNA, 33 bp, Homo sapien
aggaatgcttttacccaattagtgggagtgcaa

SEQ ID NO: 974454 - DNA, 33 bp, Homo sapien
aggaatgcttttaccccattagtgggagtgcaa

SEQ ID NO: 974455 - DNA, 33 bp, Homo sapien; identical to SEQ ID NO: 974453

SEQ ID NO: 974456 - DNA, 33 bp, Homo sapien; identical to SEQ ID NO: 974454

SEQ ID NO: 974457 - DNA, 33 bp, Homo sapien
ttcttatgtgtcaccaagtatttttttatttgg

SEQ ID NO: 974458 - DNA, 33 bp, Homo sapien
ttcttatgtgtcaccaggtatttttttatttgg

SEQ ID NO: 974459 - DNA, 33 bp, Homo sapien
ctacaggaacatgaagcaaaaagggtaggttca

SEQ ID NO: 974460 - DNA, 33 bp, Homo sapien
ctacaggaacatgaaggaaaaagggtaggttca

SEQ ID NO: 974461 - DNA, 33 bp, Homo sapien
gttctgatcaggaaaccagttcgttaaaagaaa

SEQ ID NO: 974462 - DNA, 33 bp, Homo sapien
gttctgatcaggaaactagttcgttaaaagaaa

SEQ ID NO: 974463 - DNA, 33 bp, Homo sapien
aatttcctatggtagacggtttcatgctgacag

SEQ ID NO: 974464 - DNA, 33 bp, Homo sapien
aatttcctatggtagatggtttcatgctgacag

SEQ ID NO: 974465 - DNA, 33 bp, Homo sapien
tccatctattctagaggaagttaagagcaattt

SEQ ID NO: 974466 - DNA, 33 bp, Homo sapien
tccatctattctagagtaagttaagagcaattt

SEQ ID NO: 974467 - DNA, 33 bp, Homo sapien
ccataaagaaaacaccaaaagaagagctttagt

SEQ ID NO: 974468 - DNA, 33 bp, Homo sapien
ccataaagaaaacaccgaaagaagagctttagt

SEQ ID NO: 974469 - DNA, 33 bp, Homo sapien
aaaactggtaataggacgaacatttacctttgg

SEQ ID NO: 974470 - DNA, 33 bp, Homo sapien
aaaactggtaataggaggaacatttacctttgg

SEQ ID NO: 974471 - DNA, 33 bp, Homo sapien
gaattagctgtgggcaagaaaggactctttatt

SEQ ID NO: 974472 - DNA, 33 bp, Homo sapien
gaattagctgtgggcacgaaaggactctttatt

SEQ ID NO: 974473 - DNA, 33 bp, Homo sapien
atacagatagatattactaaaagcctgccaatc

SEQ ID NO: 974474 - DNA, 33 bp, Homo sapien
atacagatagatattattaaaagcctgccaatc

SEQ ID NO: 974475 - DNA, 33 bp, Homo sapien
acttattgcacttcaaatgtatctcttcctact

SEQ ID NO: 974476 - DNA, 33 bp, Homo sapien
acttattgcacttcaagtgtatctcttcctact

SEQ ID NO: 974477 - DNA, 33 bp, Homo sapien
atagaaagatggaagcaactgtatgggatcctc

SEQ ID NO: 974478 - DNA, 33 bp, Homo sapien
atagaaagatggaagcgactgtatgggatcctc

SEQ ID NO: 974479 - DNA, 33 bp, Homo sapien
aaaacatccattatgcaaaagccttgagctaca

SEQ ID NO: 974480 - DNA, 33 bp, Homo sapien
aaaacatccattatgcgaaagccttgagctaca

SEQ ID NO: 974481 - DNA, 33 bp, Homo sapien
gtatgtgtgcaagaaaggctaaataccaagaga

SEQ ID NO: 974482 - DNA, 33 bp, Homo sapien
gtatgtgtgcaagaaatgctaaataccaagaga

SEQ ID NO: 974483 - DNA, 33 bp, Homo sapien
ttaattcaaatgtacactatgagctgatcgata

SEQ ID NO: 974484 - DNA, 33 bp, Homo sapien
ttaattcaaatgtacagtatgagctgatcgata

SEQ ID NO: 974485 - DNA, 33 bp, Homo sapien
cttaacttggacaataagtgattgactcttaaa

SEQ ID NO: 974486 - DNA, 33 bp, Homo sapien
cttaacttggacaatatgtgattgactcttaaa

SEQ ID NO: 974487 - DNA, 33 bp, Homo sapien
cattgaccttaatcacagggaatggtaatacta

SEQ ID NO: 974488 - DNA, 33 bp, Homo sapien
cattgaccttaatcacggggaatggtaatacta

SEQ ID NO: 974489 - DNA, 33 bp, Homo sapien
gggacctgtcagtttaaagttcttggggttcca

SEQ ID NO: 974490 - DNA, 33 bp, Homo sapien
gggacctgtcagtttatagttcttggggttcca

SEQ ID NO: 974491 - DNA, 33 bp, Homo sapien
tctactctggacaaaaatttagagaatctctct

SEQ ID NO: 974492 - DNA, 33 bp, Homo sapien
tctactctggacaaaagtttagagaatctctct

SEQ ID NO: 974493 - DNA, 33 bp, Homo sapien
cactacagtgcttacgaaagtcatatcttaatg

SEQ ID NO: 974494 - DNA, 33 bp, Homo sapien
cactacagtgcttacggaagtcatatcttaatg

SEQ ID NO: 974495 - DNA, 33 bp, Homo sapien
ggaatcattgcacaaagaatagtcttcagtgag

SEQ ID NO: 974496 - DNA, 33 bp, Homo sapien
ggaatcattgcacaaataatagtcttcagtgag

SEQ ID NO: 974497 - DNA, 33 bp, Homo sapien
gtaaatgttacctgaaaattaagaaaatggaat

SEQ ID NO: 974498 - DNA, 33 bp, Homo sapien
gtaaatgttacctgaagattaagaaaatggaat

SEQ ID NO: 974499 - DNA, 33 bp, Homo sapien
atatctactcaagatacggaagtgttgctttct

SEQ ID NO: 974500 - DNA, 33 bp, Homo sapien
atatctactcaagatatggaagtgttgctttct

SEQ ID NO: 974501 - DNA, 33 bp, Homo sapien
ctcctctctcaacaataaagctgaacaagtttg

SEQ ID NO: 974502 - DNA, 33 bp, Homo sapien
ctcctctctcaacaatcaagctgaacaagtttg

SEQ ID NO: 974503 - DNA, 33 bp, Homo sapien
tgagtaatgcttaaaagaaagtgtatatcttgg

SEQ ID NO: 974504 - DNA, 33 bp, Homo sapien
tgagtaatgcttaaaataaagtgtatatcttgg

SEQ ID NO: 974505 - DNA, 33 bp, Homo sapien
aaagatagtagccaaaagaaagcagccttttgg

SEQ ID NO: 974506 - DNA, 33 bp, Homo sapien
aaagatagtagccaaaggaaagcagccttttgg

SEQ ID NO: 974507 - DNA, 33 bp, Homo sapien
gtagcagaataagtaacaaatagatcctttctg

SEQ ID NO: 974508 - DNA, 33 bp, Homo sapien
gtagcagaataagtaagaaatagatcctttctg

SEQ ID NO: 974509 - DNA, 33 bp, Homo sapien
ctcttatcagtggctacaatgactatgagaaaa

SEQ ID NO: 974510 - DNA, 33 bp, Homo sapien
ctcttatcagtggctataatgactatgagaaaa

SEQ ID NO: 974511 - DNA, 33 bp, Homo sapien
atcacagtctatatcacgaaacattttaagatc

SEQ ID NO: 974512 - DNA, 33 bp, Homo sapien
atcacagtctatatcatgaaacattttaagatc

SEQ ID NO: 974513 - DNA, 33 bp, Homo sapien
agacagagaaggtgaaaaagagaagacctaaca

SEQ ID NO: 974514 - DNA, 33 bp, Homo sapien
agacagagaaggtgaataagagaagacctaaca

SEQ ID NO: 974515 - DNA, 33 bp, Homo sapien
tatatgttgaactcttaaaaatttatgctctta

SEQ ID NO: 974516 - DNA, 33 bp, Homo sapien
tatatgttgaactcttgaaaatttatgctctta

SEQ ID NO: 974517 - DNA, 33 bp, Homo sapien
ttgcctcaaactccaacatagctcaggatggct

SEQ ID NO: 974518 - DNA, 33 bp, Homo sapien
ttgcctcaaactccaatatagctcaggatggct

SEQ ID NO: 974519 - DNA, 33 bp, Homo sapien
gttctggttttgggtaaggtcaaattctttaat

SEQ ID NO: 974520 - DNA, 33 bp, Homo sapien
gttctggttttgggtagggtcaaattctttaat

SEQ ID NO: 974521 - DNA, 33 bp, Homo sapien
gaataatacacaccaacatacctcaaatagtaa

SEQ ID NO: 974522 - DNA, 33 bp, Homo sapien
gaataatacacaccaatatacctcaaatagtaa

SEQ ID NO: 974523 - DNA, 33 bp, Homo sapien
gaataactttacagtacagaaacctgagaaacc

SEQ ID NO: 974524 - DNA, 33 bp, Homo sapien
gaataactttacagtagagaaacctgagaaacc

SEQ ID NO: 974525 - DNA, 33 bp, Homo sapien
gaaaggaaaagactgactatcctttggctaaag

SEQ ID NO: 974526 - DNA, 33 bp, Homo sapien
gaaaggaaaagactgattatcctttggctaaag

SEQ ID NO: 974527 - DNA, 33 bp, Homo sapien
aggagttctggaggtgaagaatttgtaggtcca

SEQ ID NO: 974528 - DNA, 33 bp, Homo sapien
aggagttctggaggtggagaatttgtaggtcca

SEQ ID NO: 974529 - DNA, 33 bp, Homo sapien
aaggagtgggctttcacgtgttcatatgccaaa

SEQ ID NO: 974530 - DNA, 33 bp, Homo sapien
aaggagtgggctttcatgtgttcatatgccaaa

SEQ ID NO: 974531 - DNA, 33 bp, Homo sapien
ataattttatcttgtaaacaactgctaaacata

SEQ ID NO: 974532 - DNA, 33 bp, Homo sapien
ataattttatcttgtatacaactgctaaacata

SEQ ID NO: 974533 - DNA, 33 bp, Homo sapien
atttttgaagtcagacaaatacaggctttcatc

SEQ ID NO: 974534 - DNA, 33 bp, Homo sapien
atttttgaagtcagacgaatacaggctttcatc

SEQ ID NO: 974535 - DNA, 33 bp, Homo sapien
cagtgaattcttcatggcaattgtggaattctc

SEQ ID NO: 974536 - DNA, 33 bp, Homo sapien
cagtgaattcttcatgtcaattgtggaattctc

SEQ ID NO: 974537 - DNA, 33 bp, Homo sapien
gatatatcttggattgcatcattgtctgcttat

SEQ ID NO: 974538 - DNA, 33 bp, Homo sapien
gatatatcttggattgtatcattgtctgcttat

SEQ ID NO: 974539 - DNA, 33 bp, Homo sapien
tagtcttattttctagcattctttcatgatcta

SEQ ID NO: 974540 - DNA, 33 bp, Homo sapien
tagtcttattttctaggattctttcatgatcta

SEQ ID NO: 974541 - DNA, 33 bp, Homo sapien
actccagtttgcgccaatgaaattcaactcata

SEQ ID NO: 974542 - DNA, 33 bp, Homo sapien
actccagtttgcgccagtgaaattcaactcata

SEQ ID NO: 974543 - DNA, 33 bp, Homo sapien
agaccatgaggagacaataaaggtcacgctaaa

SEQ ID NO: 974544 - DNA, 33 bp, Homo sapien
agaccatgaggagacagtaaaggtcacgctaaa

SEQ ID NO: 974545 - DNA, 33 bp, Homo sapien
ttaaatagctggaaaaatgaccaaatgactgac

SEQ ID NO: 974546 - DNA, 33 bp, Homo sapien
ttaaatagctggaaaagtgaccaaatgactgac

SEQ ID NO: 974547 - DNA, 33 bp, Homo sapien
tgaatggaatgctggacggaattagacatgtgt

SEQ ID NO: 974548 - DNA, 33 bp, Homo sapien
tgaatggaatgctggatggaattagacatgtgt

SEQ ID NO: 974549 - DNA, 33 bp, Homo sapien
agaagggaacagggaaaaaagtcagagattatc

SEQ ID NO: 974550 - DNA, 33 bp, Homo sapien
agaagggaacagggaagaaagtcagagattatc

SEQ ID NO: 974551 - DNA, 33 bp, Homo sapien
ttagggtttctgtaaaccttgtttggagctgta

SEQ ID NO: 974552 - DNA, 33 bp, Homo sapien
ttagggtttctgtaaagcttgtttggagctgta

SEQ ID NO: 974553 - DNA, 33 bp, Homo sapien
taaaaccatatgctcactagtaaaatatttttt

SEQ ID NO: 974554 - DNA, 33 bp, Homo sapien
taaaaccatatgctcagtagtaaaatatttttt

SEQ ID NO: 974555 - DNA, 33 bp, Homo sapien
tagccatgagtgacaacgatgggaaatgcttct

SEQ ID NO: 974556 - DNA, 33 bp, Homo sapien
tagccatgagtgacaatgatgggaaatgcttct

SEQ ID NO: 974557 - DNA, 33 bp, Homo sapien
cttaaatagtataaaacgtagatgccttactac

SEQ ID NO: 974558 - DNA, 33 bp, Homo sapien
cttaaatagtataaaatgtagatgccttactac

SEQ ID NO: 974559 - DNA, 33 bp, Homo sapien
aacctgttggtaaaaccgtcaagttgccaaaac

SEQ ID NO: 974560 - DNA, 33 bp, Homo sapien
aacctgttggtaaaactgtcaagttgccaaaac

SEQ ID NO: 974561 - DNA, 33 bp, Homo sapien
cagtgtcttgacaatacacttttgagcttacac

SEQ ID NO: 974562 - DNA, 33 bp, Homo sapien
cagtgtcttgacaatatacttttgagcttacac

SEQ ID NO: 974563 - DNA, 33 bp, Homo sapien
cctcatgtcttctaacacttaactttaaattct

SEQ ID NO: 974564 - DNA, 33 bp, Homo sapien
cctcatgtcttctaacgcttaactttaaattct

SEQ ID NO: 974565 - DNA, 33 bp, Homo sapien
ggtcacggagacaacccacgaaaatgatttgtt

SEQ ID NO: 974566 - DNA, 33 bp, Homo sapien
ggtcacggagacaacctacgaaaatgatttgtt

SEQ ID NO: 974567 - DNA, 33 bp, Homo sapien
atttgcaaagtgttaaagaagtagctgaagtaa

SEQ ID NO: 974568 - DNA, 33 bp, Homo sapien
atttgcaaagtgttaaggaagtagctgaagtaa

SEQ ID NO: 974569 - DNA, 33 bp, Homo sapien
ttgcaaaggcaggactaaaaattatgtccatct

SEQ ID NO: 974570 - DNA, 33 bp, Homo sapien
ttgcaaaggcaggactgaaaattatgtccatct

SEQ ID NO: 974571 - DNA, 33 bp, Homo sapien
tgctggtgagggtacaaagcatcagatattctc

SEQ ID NO: 974572 - DNA, 33 bp, Homo sapien
tgctggtgagggtacagagcatcagatattctc

SEQ ID NO: 974573 - DNA, 33 bp, Homo sapien
gagactaggtcaaagacgaacttattatttctt

SEQ ID NO: 974574 - DNA, 33 bp, Homo sapien
gagactaggtcaaagatgaacttattatttctt

SEQ ID NO: 974575 - DNA, 33 bp, Homo sapien
aaataaacagcaaaaacgaaaacagtgacagaa

SEQ ID NO: 974576 - DNA, 33 bp, Homo sapien
aaataaacagcaaaaaggaaaacagtgacagaa

SEQ ID NO: 974577 - DNA, 33 bp, Homo sapien
tttgtgaaacacaaacagcaccttgactccgct

SEQ ID NO: 974578 - DNA, 33 bp, Homo sapien
tttgtgaaacacaaaccgcaccttgactccgct

SEQ ID NO: 974579 - DNA, 33 bp, Homo sapien
gagtcattaagtttgacccatcccaaattttca

SEQ ID NO: 974580 - DNA, 33 bp, Homo sapien
gagtcattaagtttgatccatcccaaattttca

SEQ ID NO: 974581 - DNA, 33 bp, Homo sapien; identical to SEQ ID NO: 974579

SEQ ID NO: 974582 - DNA, 33 bp, Homo sapien; identical to SEQ ID NO: 974580

SEQ ID NO: 974583 - DNA, 33 bp, Homo sapien
tttgtgttttggaaacgaggcaatgagtttgtc

SEQ ID NO: 974584 - DNA, 33 bp, Homo sapien
tttgtgttttggaaactaggcaatgagtttgtc

SEQ ID NO: 974585 - DNA, 33 bp, Homo sapien
atttgtaattctgtgacgtctatatttactttt

SEQ ID NO: 974586 - DNA, 33 bp, Homo sapien
atttgtaattctgtgatgtctatatttactttt

SEQ ID NO: 974587 - DNA, 33 bp, Homo sapien
catgccgaaaaatggactagactggagaggaag

SEQ ID NO: 974588 - DNA, 33 bp, Homo sapien
catgccgaaaaatggattagactggagaggaag

SEQ ID NO: 974589 - DNA, 33 bp, Homo sapien
cctcctatgcactaggcacttagctaaatgttt

SEQ ID NO: 974590 - DNA, 33 bp, Homo sapien
cctcctatgcactaggtacttagctaaatgttt

SEQ ID NO: 974591 - DNA, 33 bp, Homo sapien
ttgtcaaatctgaagccctcttttgaatcccca

SEQ ID NO: 974592 - DNA, 33 bp, Homo sapien
ttgtcaaatctgaagctctcttttgaatcccca

SEQ ID NO: 974593 - DNA, 33 bp, Homo sapien
tcctttgtactcccaaaaccaatgttctccacc

SEQ ID NO: 974594 - DNA, 33 bp, Homo sapien
tcctttgtactcccaagaccaatgttctccacc

SEQ ID NO: 974595 - DNA, 33 bp, Homo sapien
ttgactgcttaactgccactacacaacattgcc

SEQ ID NO: 974596 - DNA, 33 bp, Homo sapien
ttgactgcttaactgctactacacaacattgcc

SEQ ID NO: 974597 - DNA, 33 bp, Homo sapien
catcctgtttcttttacaaggaattggggttgt

SEQ ID NO: 974598 - DNA, 33 bp, Homo sapien
catcctgtttcttttataaggaattggggttgt

SEQ ID NO: 974599 - DNA, 33 bp, Homo sapien
tatccacataagaaaccgaggtctggaattcta

SEQ ID NO: 974600 - DNA, 33 bp, Homo sapien
tatccacataagaaactgaggtctggaattcta

SEQ ID NO: 974601 - DNA, 33 bp, Homo sapien
tacatataatactttcacaggccttcaaaatac

SEQ ID NO: 974602 - DNA, 33 bp, Homo sapien
tacatataatactttcgcaggccttcaaaatac

SEQ ID NO: 974603 - DNA, 33 bp, Homo sapien
gaaagcagaaggctgacgctatttttgttgctg

SEQ ID NO: 974604 - DNA, 33 bp, Homo sapien
gaaagcagaaggctgatgctatttttgttgctg

SEQ ID NO: 974605 - DNA, 33 bp, Homo sapien; identical to SEQ ID NO: 974603

SEQ ID NO: 974606 - DNA, 33 bp, Homo sapien; identical to SEQ ID NO: 974604

SEQ ID NO: 974607 - DNA, 33 bp, Homo sapien
aagagtccaggtaatacaagcaaaggtttactc

SEQ ID NO: 974608 - DNA, 33 bp, Homo sapien
aagagtccaggtaatataagcaaaggtttactc

SEQ ID NO: 974609 - DNA, 33 bp, Homo sapien
aacaatagcatggcaaaatacctcttaaatatt

SEQ ID NO: 974610 - DNA, 33 bp, Homo sapien
aacaatagcatggcaacatacctcttaaatatt

SEQ ID NO: 974611 - DNA, 33 bp, Homo sapien
tagatacatggtgttgaaaagaaacttagatgg

SEQ ID NO: 974612 - DNA, 33 bp, Homo sapien
tagatacatggtgttggaaagaaacttagatgg

SEQ ID NO: 974613 - DNA, 33 bp, Homo sapien
catgtgtttcattctaagtcataagatggaagg

SEQ ID NO: 974614 - DNA, 33 bp, Homo sapien
catgtgtttcattctaggtcataagatggaagg

SEQ ID NO: 974615 - DNA, 33 bp, Homo sapien
aataaaggaaggaacaacatcagagaataagtg

SEQ ID NO: 974616 - DNA, 33 bp, Homo sapien
aataaaggaaggaacagcatcagagaataagtg

SEQ ID NO: 974617 - DNA, 33 bp, Homo sapien
atccaataaaaagatacggagtgactgaatgca

SEQ ID NO: 974618 - DNA, 33 bp, Homo sapien
atccaataaaaagatatggagtgactgaatgca

SEQ ID NO: 974619 - DNA, 33 bp, Homo sapien
gttccctatctggatacgttatgaataattata

SEQ ID NO: 974620 - DNA, 33 bp, Homo sapien
gttccctatctggatatgttatgaataattata

SEQ ID NO: 974621 - DNA, 33 bp, Homo sapien
gtgcagagagcaattacgtagtagggtattaac

SEQ ID NO: 974622 - DNA, 33 bp, Homo sapien
gtgcagagagcaattatgtagtagggtattaac

SEQ ID NO: 974623 - DNA, 33 bp, Homo sapien
gatgctgtggttaaaaccattggtgtggataaa

SEQ ID NO: 974624 - DNA, 33 bp, Homo sapien
gatgctgtggttaaaagcattggtgtggataaa

SEQ ID NO: 974625 - DNA, 33 bp, Homo sapien
gaataaataaattgctaactaaagaggtactga

SEQ ID NO: 974626 - DNA, 33 bp, Homo sapien
gaataaataaattgctgactaaagaggtactga

SEQ ID NO: 974627 - DNA, 33 bp, Homo sapien
acttccactatgcttacagaaaaacacacatag

SEQ ID NO: 974628 - DNA, 33 bp, Homo sapien
acttccactatgcttagagaaaaacacacatag

SEQ ID NO: 974629 - DNA, 33 bp, Homo sapien
tgcccttaatcacaaaatttgctaaaacacagc

SEQ ID NO: 974630 - DNA, 33 bp, Homo sapien
tgcccttaatcacaaagtttgctaaaacacagc

SEQ ID NO: 974631 - DNA, 33 bp, Homo sapien
aaacacgcttgcccaggaaacaatcacgatgga

SEQ ID NO: 974632 - DNA, 33 bp, Homo sapien
aaacacgcttgcccagtaaacaatcacgatgga

SEQ ID NO: 974633 - DNA, 33 bp, Homo sapien
atatacctcttccataagacaaatttacctgtt

SEQ ID NO: 974634 - DNA, 33 bp, Homo sapien
atatacctcttccatatgacaaatttacctgtt

SEQ ID NO: 974635 - DNA, 33 bp, Homo sapien
aattctgtaggaaactcaaatacccatagtgac

SEQ ID NO: 974636 - DNA, 33 bp, Homo sapien
aattctgtaggaaactgaaatacccatagtgac

SEQ ID NO: 974637 - DNA, 33 bp, Homo sapien
agaaaatgtaattgaaaaggttatcaaaaaagg

SEQ ID NO: 974638 - DNA, 33 bp, Homo sapien
agaaaatgtaattgaagaggttatcaaaaaagg

SEQ ID NO: 974639 - DNA, 33 bp, Homo sapien
agtttatcgtgatcaaatgtttttcagtatcta

SEQ ID NO: 974640 - DNA, 33 bp, Homo sapien
agtttatcgtgatcaagtgtttttcagtatcta

SEQ ID NO: 974641 - DNA, 33 bp, Homo sapien
ataggcaacgactttccatccagagccctcatt

SEQ ID NO: 974642 - DNA, 33 bp, Homo sapien
ataggcaacgactttctatccagagccctcatt

SEQ ID NO: 974643 - DNA, 33 bp, Homo sapien
gataaccagaataactaaaattgtcctgaagaa

SEQ ID NO: 974644 - DNA, 33 bp, Homo sapien
gataaccagaataactcaaattgtcctgaagaa

SEQ ID NO: 974645 - DNA, 33 bp, Homo sapien
actagaagtcgtttgaccattcaaaagatgtat

SEQ ID NO: 974646 - DNA, 33 bp, Homo sapien
actagaagtcgtttgatcattcaaaagatgtat

SEQ ID NO: 974647 - DNA, 33 bp, Homo sapien
agaattagggtctccacgtggcaaaggtaaggg

SEQ ID NO: 974648 - DNA, 33 bp, Homo sapien
agaattagggtctccatgtggcaaaggtaaggg

SEQ ID NO: 974649 - DNA, 33 bp, Homo sapien
aacaacttttttcacacaagatctaactgagga

SEQ ID NO: 974650 - DNA, 33 bp, Homo sapien
aacaacttttttcacagaagatctaactgagga

SEQ ID NO: 974651 - DNA, 33 bp, Homo sapien
ttctttcacctatgcagtaaaactcaaagatta

SEQ ID NO: 974652 - DNA, 33 bp, Homo sapien
ttctttcacctatgcattaaaactcaaagatta

SEQ ID NO: 974653 - DNA, 33 bp, Homo sapien
atttctgtgatttaaaggttctgtgctattacc

SEQ ID NO: 974654 - DNA, 33 bp, Homo sapien
atttctgtgatttaaatgttctgtgctattacc

SEQ ID NO: 974655 - DNA, 33 bp, Homo sapien
gtgatctaccattccaataattcaagttgtaat

SEQ ID NO: 974656 - DNA, 33 bp, Homo sapien
gtgatctaccattccagtaattcaagttgtaat

SEQ ID NO: 974657 - DNA, 33 bp, Homo sapien
tacttcctgtaattgaaaaaaaatgaaggaaat

SEQ ID NO: 974658 - DNA, 33 bp, Homo sapien
tacttcctgtaattgagaaaaaatgaaggaaat

SEQ ID NO: 974659 - DNA, 33 bp, Homo sapien
tcatccaatcaatccactcgctcatcagatatt

SEQ ID NO: 974660 - DNA, 33 bp, Homo sapien
tcatccaatcaatccagtcgctcatcagatatt

SEQ ID NO: 974661 - DNA, 33 bp, Homo sapien
atacaggtaaacgataaaaacagtgtaacatga

SEQ ID NO: 974662 - DNA, 33 bp, Homo sapien
atacaggtaaacgatagaaacagtgtaacatga

SEQ ID NO: 974663 - DNA, 33 bp, Homo sapien
ccagaggattgctagaagatgtcgagagtggaa

SEQ ID NO: 974664 - DNA, 33 bp, Homo sapien
ccagaggattgctagacgatgtcgagagtggaa

SEQ ID NO: 974665 - DNA, 33 bp, Homo sapien
aaagtagtttccagaacaaaggaagtaacagtc

SEQ ID NO: 974666 - DNA, 33 bp, Homo sapien
aaagtagtttccagaataaaggaagtaacagtc

SEQ ID NO: 974667 - DNA, 33 bp, Homo sapien
tttcattatgtagcaaatcaagagtgcatccat

SEQ ID NO: 974668 - DNA, 33 bp, Homo sapien
tttcattatgtagcaattcaagagtgcatccat

SEQ ID NO: 974669 - DNA, 33 bp, Homo sapien
ttaaaacttgagataccgaacatcattctttta

SEQ ID NO: 974670 - DNA, 33 bp, Homo sapien
ttaaaacttgagatacggaacatcattctttta

SEQ ID NO: 974671 - DNA, 33 bp, Homo sapien
aggcatttatgattccactttgcatatgagaaa

SEQ ID NO: 974672 - DNA, 33 bp, Homo sapien
aggcatttatgattccgctttgcatatgagaaa

SEQ ID NO: 974673 - DNA, 33 bp, Homo sapien
aaagtttgcttctaaaaaaattgccatttccca

SEQ ID NO: 974674 - DNA, 33 bp, Homo sapien
aaagtttgcttctaaacaaattgccatttccca

SEQ ID NO: 974675 - DNA, 33 bp, Homo sapien
gtgggctgagtattcagaataaaggagaaataa

SEQ ID NO: 974676 - DNA, 33 bp, Homo sapien
gtgggctgagtattcataataaaggagaaataa

SEQ ID NO: 974677 - DNA, 33 bp, Homo sapien
gcactgagcttaataaaaacactcttagccctg

SEQ ID NO: 974678 - DNA, 33 bp, Homo sapien
gcactgagcttaataacaacactcttagccctg

SEQ ID NO: 974679 - DNA, 33 bp, Homo sapien
tggattaaataccgacagatatcttgcgaatcg

SEQ ID NO: 974680 - DNA, 33 bp, Homo sapien
tggattaaataccgacggatatcttgcgaatcg

SEQ ID NO: 974681 - DNA, 33 bp, Homo sapien
agaaacatagcacttccagtcttgctccaatgc

SEQ ID NO: 974682 - DNA, 33 bp, Homo sapien
agaaacatagcacttctagtcttgctccaatgc

SEQ ID NO: 974683 - DNA, 33 bp, Homo sapien
gaatacccgaataccactcttcttcttctaaaa

SEQ ID NO: 974684 - DNA, 33 bp, Homo sapien
gaatacccgaataccagtcttcttcttctaaaa

SEQ ID NO: 974685 - DNA, 33 bp, Homo sapien
agaatgccttgcatatgataaattcttaacatg

SEQ ID NO: 974686 - DNA, 33 bp, Homo sapien
agaatgccttgcatattataaattcttaacatg

SEQ ID NO: 974687 - DNA, 33 bp, Homo sapien
aaaccagatagtcaccacaataaactgcagagt

SEQ ID NO: 974688 - DNA, 33 bp, Homo sapien
aaaccagatagtcaccgcaataaactgcagagt

SEQ ID NO: 974689 - DNA, 33 bp, Homo sapien
ggtggtaactttgaacaaatcccttatctccta

SEQ ID NO: 974690 - DNA, 33 bp, Homo sapien
ggtggtaactttgaaccaatcccttatctccta

SEQ ID NO: 974691 - DNA, 33 bp, Homo sapien
acaagggaaatttagaaagatgtggagattcaa

SEQ ID NO: 974692 - DNA, 33 bp, Homo sapien
acaagggaaatttagacagatgtggagattcaa

SEQ ID NO: 974693 - DNA, 33 bp, Homo sapien
aggctattacatggcaagaattatgctaatcta

SEQ ID NO: 974694 - DNA, 33 bp, Homo sapien
aggctattacatggcaggaattatgctaatcta

SEQ ID NO: 974695 - DNA, 33 bp, Homo sapien
ctcacggtgttattcaaggttcgcggtattgta

SEQ ID NO: 974696 - DNA, 33 bp, Homo sapien
ctcacggtgttattcagggttcgcggtattgta

SEQ ID NO: 974697 - DNA, 33 bp, Homo sapien
accttgtctgtttacaagatgcaacttccgtct

SEQ ID NO: 974698 - DNA, 33 bp, Homo sapien
accttgtctgtttacatgatgcaacttccgtct

SEQ ID NO: 974699 - DNA, 33 bp, Homo sapien
atagatctttgtcacacccaactttgcctttgt

SEQ ID NO: 974700 - DNA, 33 bp, Homo sapien
atagatctttgtcacatccaactttgcctttgt

SEQ ID NO: 974701 - DNA, 33 bp, Homo sapien
agaataaatatgctgaagtttgattatttggca

SEQ ID NO: 974702 - DNA, 33 bp, Homo sapien
agaataaatatgctgacgtttgattatttggca

SEQ ID NO: 974703 - DNA, 33 bp, Homo sapien
tttataagggaagctacgaatcagaacaaagga

SEQ ID NO: 974704 - DNA, 33 bp, Homo sapien
tttataagggaagctatgaatcagaacaaagga

SEQ ID NO: 974705 - DNA, 33 bp, Homo sapien
cttactaatcatgtaactcaactaaaaataaac

SEQ ID NO: 974706 - DNA, 33 bp, Homo sapien
cttactaatcatgtaagtcaactaaaaataaac

SEQ ID NO: 974707 - DNA, 33 bp, Homo sapien
gaggtatgaagaggaacgaagttgagggtctga

SEQ ID NO: 974708 - DNA, 33 bp, Homo sapien
gaggtatgaagaggaaggaagttgagggtctga

SEQ ID NO: 974709 - DNA, 33 bp, Homo sapien
ctgagaggttgtctggaaactttgtatgaagtc

SEQ ID NO: 974710 - DNA, 33 bp, Homo sapien
ctgagaggttgtctggcaactttgtatgaagtc

SEQ ID NO: 974711 - DNA, 33 bp, Homo sapien
ctgccattttctctaacgtctccacggtaacaa

SEQ ID NO: 974712 - DNA, 33 bp, Homo sapien
ctgccattttctctaatgtctccacggtaacaa

SEQ ID NO: 974713 - DNA, 33 bp, Homo sapien
caagactcagaaaataatatccatgtccacact

SEQ ID NO: 974714 - DNA, 33 bp, Homo sapien
caagactcagaaaatagtatccatgtccacact

SEQ ID NO: 974715 - DNA, 33 bp, Homo sapien
tgtgctgtggcctccaatgacctgtggcttgtc

SEQ ID NO: 974716 - DNA, 33 bp, Homo sapien
tgtgctgtggcctccactgacctgtggcttgtc

SEQ ID NO: 974717 - DNA, 33 bp, Homo sapien
atcttgctttaccccaatgattatgtgaaacca

SEQ ID NO: 974718 - DNA, 33 bp, Homo sapien
atcttgctttaccccagtgattatgtgaaacca

SEQ ID NO: 974719 - DNA, 33 bp, Homo sapien
tactgtgtgacaatttcaaacagaaagaaataa

SEQ ID NO: 974720 - DNA, 33 bp, Homo sapien
tactgtgtgacaattttaaacagaaagaaataa

SEQ ID NO: 974721 - DNA, 33 bp, Homo sapien
acttcctgtgaaagacagcaccttatctcagtc

SEQ ID NO: 974722 - DNA, 33 bp, Homo sapien
acttcctgtgaaagacggcaccttatctcagtc

SEQ ID NO: 974723 - DNA, 33 bp, Homo sapien
gggaatagaggcaatacgtatgtggtaatggtt

SEQ ID NO: 974724 - DNA, 33 bp, Homo sapien
gggaatagaggcaatatgtatgtggtaatggtt

SEQ ID NO: 974725 - DNA, 33 bp, Homo sapien
aacacaatatgcagtacacaatgtcctcaggaa

SEQ ID NO: 974726 - DNA, 33 bp, Homo sapien
aacacaatatgcagtatacaatgtcctcaggaa

SEQ ID NO: 974727 - DNA, 33 bp, Homo sapien
actaaaattaaccatcaaaggtagtcacttttc

SEQ ID NO: 974728 - DNA, 33 bp, Homo sapien
actaaaattaaccatcgaaggtagtcacttttc

SEQ ID NO: 974729 - DNA, 33 bp, Homo sapien
gagttgccatgtgatacagaataaaggtggaaa

SEQ ID NO: 974730 - DNA, 33 bp, Homo sapien
gagttgccatgtgatatagaataaaggtggaaa

SEQ ID NO: 974731 - DNA, 33 bp, Homo sapien
cccatcctcattctgcactttcaaggacaccag

SEQ ID NO: 974732 - DNA, 33 bp, Homo sapien
cccatcctcattctgcgctttcaaggacaccag

SEQ ID NO: 974733 - DNA, 33 bp, Homo sapien
attgcttagaggctcaccattgtaatttaaaag

SEQ ID NO: 974734 - DNA, 33 bp, Homo sapien
attgcttagaggctcatcattgtaatttaaaag

SEQ ID NO: 974735 - DNA, 33 bp, Homo sapien
gggagaaaaggaatgaccaaaagtttgaactta

SEQ ID NO: 974736 - DNA, 33 bp, Homo sapien
gggagaaaaggaatgatcaaaagtttgaactta

SEQ ID NO: 974737 - DNA, 33 bp, Homo sapien
gagcttaagtacataacgtggccttggattcta

SEQ ID NO: 974738 - DNA, 33 bp, Homo sapien
gagcttaagtacataatgtggccttggattcta

SEQ ID NO: 974739 - DNA, 33 bp, Homo sapien
gttgcaacaatatggtaaaattaatgtcaaata

SEQ ID NO: 974740 - DNA, 33 bp, Homo sapien
gttgcaacaatatggtgaaattaatgtcaaata

SEQ ID NO: 974741 - DNA, 33 bp, Homo sapien
tatctctgaatcacaactatctatatgagtatg

SEQ ID NO: 974742 - DNA, 33 bp, Homo sapien
tatctctgaatcacaagtatctatatgagtatg

SEQ ID NO: 974743 - DNA, 33 bp, Homo sapien
ttaggaccagctgcataagtgtgtctgtaattt

SEQ ID NO: 974744 - DNA, 33 bp, Homo sapien
ttaggaccagctgcatgagtgtgtctgtaattt

SEQ ID NO: 974745 - DNA, 33 bp, Homo sapien
aagcctgagccattaaccaaacatcttagaaca

SEQ ID NO: 974746 - DNA, 33 bp, Homo sapien
aagcctgagccattaagcaaacatcttagaaca

SEQ ID NO: 974747 - DNA, 33 bp, Homo sapien
gtgcctgaccgcagaaccccaaaagattatatg

SEQ ID NO: 974748 - DNA, 33 bp, Homo sapien
gtgcctgaccgcagaatcccaaaagattatatg

SEQ ID NO: 974749 - DNA, 33 bp, Homo sapien
agagttagaaatcccacgaggacttaagggtca

SEQ ID NO: 974750 - DNA, 33 bp, Homo sapien
agagttagaaatcccatgaggacttaagggtca

SEQ ID NO: 974751 - DNA, 33 bp, Homo sapien
acttggttaattctcactatctaacccacttga

SEQ ID NO: 974752 - DNA, 33 bp, Homo sapien
acttggttaattctcattatctaacccacttga

SEQ ID NO: 974753 - DNA, 33 bp, Homo sapien
ctgccagtcaaggacaatgaaaccctaggggat

SEQ ID NO: 974754 - DNA, 33 bp, Homo sapien
ctgccagtcaaggacattgaaaccctaggggat

SEQ ID NO: 974755 - DNA, 33 bp, Homo sapien
ggatccttagctttaaacactatttatgtgatg

SEQ ID NO: 974756 - DNA, 33 bp, Homo sapien
ggatccttagctttaagcactatttatgtgatg

SEQ ID NO: 974757 - DNA, 33 bp, Homo sapien
gaactgggtaaacaggaagtgaattggtggggt

SEQ ID NO: 974758 - DNA, 33 bp, Homo sapien
gaactgggtaaacaggcagtgaattggtggggt

SEQ ID NO: 974759 - DNA, 33 bp, Homo sapien
acttcaccctgctttcaaggatttggcaaactt

SEQ ID NO: 974760 - DNA, 33 bp, Homo sapien
acttcaccctgctttcgaggatttggcaaactt

SEQ ID NO: 974761 - DNA, 33 bp, Homo sapien
ttaacttggataggaacaatgaactggcaattt

SEQ ID NO: 974762 - DNA, 33 bp, Homo sapien
ttaacttggataggaataatgaactggcaattt

SEQ ID NO: 974763 - DNA, 33 bp, Homo sapien
tacatatcaaaggggcagagaaagaattcacaa

SEQ ID NO: 974764 - DNA, 33 bp, Homo sapien
tacatatcaaaggggcggagaaagaattcacaa

SEQ ID NO: 974765 - DNA, 33 bp, Homo sapien
gcacttgagaagcttgaagatgagaagaaaagt

SEQ ID NO: 974766 - DNA, 33 bp, Homo sapien
gcacttgagaagcttgcagatgagaagaaaagt

SEQ ID NO: 974767 - DNA, 33 bp, Homo sapien
ggtgaaaaggctacaacagattgcaatatggcc

SEQ ID NO: 974768 - DNA, 33 bp, Homo sapien
ggtgaaaaggctacaatagattgcaatatggcc

SEQ ID NO: 974769 - DNA, 33 bp, Homo sapien
atctatagactttaccacggttcccttgcaact

SEQ ID NO: 974770 - DNA, 33 bp, Homo sapien
atctatagactttaccgcggttcccttgcaact

SEQ ID NO: 974771 - DNA, 33 bp, Homo sapien
aattaaaagtcaaatgaaaaggacaacaattga

SEQ ID NO: 974772 - DNA, 33 bp, Homo sapien
aattaaaagtcaaatggaaaggacaacaattga

SEQ ID NO: 974773 - DNA, 33 bp, Homo sapien
aagagatgagataaggccattttagtagccaaa

SEQ ID NO: 974774 - DNA, 33 bp, Homo sapien
aagagatgagataaggtcattttagtagccaaa

SEQ ID NO: 974775 - DNA, 33 bp, Homo sapien
cataaaagttgacttagagcatctgtgtgtcct

SEQ ID NO: 974776 - DNA, 33 bp, Homo sapien
cataaaagttgacttatagcatctgtgtgtcct

SEQ ID NO: 974777 - DNA, 33 bp, Homo sapien
agaggctacacgaagaagtgggagaaggtgaga

SEQ ID NO: 974778 - DNA, 33 bp, Homo sapien
agaggctacacgaagaggtgggagaaggtgaga

SEQ ID NO: 974779 - DNA, 33 bp, Homo sapien
aagaatttcacaggtcaaagatatatgggtgtg

SEQ ID NO: 974780 - DNA, 33 bp, Homo sapien
aagaatttcacaggtcgaagatatatgggtgtg

SEQ ID NO: 974781 - DNA, 33 bp, Homo sapien
gctttctagtcacttaccccattccctggtgta

SEQ ID NO: 974782 - DNA, 33 bp, Homo sapien
gctttctagtcacttatcccattccctggtgta

SEQ ID NO: 974783 - DNA, 33 bp, Homo sapien
aaagctggagccttcacagtgcttgatttcaaa

SEQ ID NO: 974784 - DNA, 33 bp, Homo sapien
aaagctggagccttcatagtgcttgatttcaaa

SEQ ID NO: 974785 - DNA, 33 bp, Homo sapien
ttgaaactgattcacaagtgtttggttaacgat

SEQ ID NO: 974786 - DNA, 33 bp, Homo sapien
ttgaaactgattcacaggtgtttggttaacgat

SEQ ID NO: 974787 - DNA, 33 bp, Homo sapien
gaggattgtatgtacacgaaaaagagaataaga

SEQ ID NO: 974788 - DNA, 33 bp, Homo sapien
gaggattgtatgtacaggaaaaagagaataaga

SEQ ID NO: 974789 - DNA, 33 bp, Homo sapien
atgactgattttcttacgaggtatcatgtttac

SEQ ID NO: 974790 - DNA, 33 bp, Homo sapien
atgactgattttcttatgaggtatcatgtttac

SEQ ID NO: 974791 - DNA, 33 bp, Homo sapien
tgtacaaagatgccacaaatcagagcccacggg

SEQ ID NO: 974792 - DNA, 33 bp, Homo sapien
tgtacaaagatgccaccaatcagagcccacggg

SEQ ID NO: 974793 - DNA, 33 bp, Homo sapien
gaaggagattgcatgaccgttttatagaaggat

SEQ ID NO: 974794 - DNA, 33 bp, Homo sapien
gaaggagattgcatgatcgttttatagaaggat

SEQ ID NO: 974795 - DNA, 33 bp, Homo sapien
tgtcgggctttgataacaatagtaaataatatg

SEQ ID NO: 974796 - DNA, 33 bp, Homo sapien
tgtcgggctttgataataatagtaaataatatg

SEQ ID NO: 974797 - DNA, 33 bp, Homo sapien
ttagccaaagtatttaaactcaaatgaaaggat

SEQ ID NO: 974798 - DNA, 33 bp, Homo sapien
ttagccaaagtatttacactcaaatgaaaggat

SEQ ID NO: 974799 - DNA, 33 bp, Homo sapien
cattttcctcgaataactgaccagtcttttctt

SEQ ID NO: 974800 - DNA, 33 bp, Homo sapien
cattttcctcgaataagtgaccagtcttttctt

SEQ ID NO: 974801 - DNA, 33 bp, Homo sapien
caaatgaatttcaccaacagttaatattctgac

SEQ ID NO: 974802 - DNA, 33 bp, Homo sapien
caaatgaatttcaccagcagttaatattctgac

SEQ ID NO: 974803 - DNA, 33 bp, Homo sapien
atgacctcttcgtccaccttcagtcagcagggt

SEQ ID NO: 974804 - DNA, 33 bp, Homo sapien
atgacctcttcgtccatcttcagtcagcagggt

SEQ ID NO: 974805 - DNA, 33 bp, Homo sapien
tttctcatgactttcaaaaaaaacttctgtgaa

SEQ ID NO: 974806 - DNA, 33 bp, Homo sapien
tttctcatgactttcagaaaaaacttctgtgaa

SEQ ID NO: 974807 - DNA, 33 bp, Homo sapien
gaatgctaggaaacccaagcaggtgctggccag

SEQ ID NO: 974808 - DNA, 33 bp, Homo sapien
gaatgctaggaaacccgagcaggtgctggccag

SEQ ID NO: 974809 - DNA, 33 bp, Homo sapien
agactctttctctttcactgcatttactgcatc

SEQ ID NO: 974810 - DNA, 33 bp, Homo sapien
agactctttctctttccctgcatttactgcatc

SEQ ID NO: 974811 - DNA, 33 bp, Homo sapien
actggagtgactttctcaagtgggtctcacctt

SEQ ID NO: 974812 - DNA, 33 bp, Homo sapien
actggagtgactttcttaagtgggtctcacctt

SEQ ID NO: 974813 - DNA, 33 bp, Homo sapien
gaagcttcagaataaccgagattttctctatta

SEQ ID NO: 974814 - DNA, 33 bp, Homo sapien
gaagcttcagaataacggagattttctctatta

SEQ ID NO: 974815 - DNA, 33 bp, Homo sapien
ctgaagcatatccttcaatgggaactaggacat

SEQ ID NO: 974816 - DNA, 33 bp, Homo sapien
ctgaagcatatccttcgatgggaactaggacat

SEQ ID NO: 974817 - DNA, 33 bp, Homo sapien
ggaccattcactcattgaacctgtatacttatc

SEQ ID NO: 974818 - DNA, 33 bp, Homo sapien
ggaccattcactcatttaacctgtatacttatc

SEQ ID NO: 974819 - DNA, 33 bp, Homo sapien
tttgatgagcagtaatcataccttcctactcaa

SEQ ID NO: 974820 - DNA, 33 bp, Homo sapien
tttgatgagcagtaattataccttcctactcaa

SEQ ID NO: 974821 - DNA, 33 bp, Homo sapien
attttgtttgtgcaataagttatacttcctgga

SEQ ID NO: 974822 - DNA, 33 bp, Homo sapien
attttgtttgtgcaattagttatacttcctgga

SEQ ID NO: 974823 - DNA, 33 bp, Homo sapien
gttatgtgaacttctaccttttactgattttta

SEQ ID NO: 974824 - DNA, 33 bp, Homo sapien
gttatgtgaacttctatcttttactgattttta

SEQ ID NO: 974825 - DNA, 33 bp, Homo sapien
taaagaattgatcatacggtaaatttctcaaca

SEQ ID NO: 974826 - DNA, 33 bp, Homo sapien
taaagaattgatcatatggtaaatttctcaaca

SEQ ID NO: 974827 - DNA, 33 bp, Homo sapien
atagagacagatcagagcatcaaatacttgaaa

SEQ ID NO: 974828 - DNA, 33 bp, Homo sapien
atagagacagatcagatcatcaaatacttgaaa

SEQ ID NO: 974829 - DNA, 33 bp, Homo sapien
tgccacagtaagtaaccccaaatatgcacatgg

SEQ ID NO: 974830 - DNA, 33 bp, Homo sapien
tgccacagtaagtaactccaaatatgcacatgg

SEQ ID NO: 974831 - DNA, 33 bp, Homo sapien
tagcctagttgagtgacaggctatgccatttag

SEQ ID NO: 974832 - DNA, 33 bp, Homo sapien
tagcctagttgagtgataggctatgccatttag

SEQ ID NO: 974833 - DNA, 33 bp, Homo sapien
ggaggcgacttgatcacgggtgtggagttctca

SEQ ID NO: 974834 - DNA, 33 bp, Homo sapien
ggaggcgacttgatcatgggtgtggagttctca

SEQ ID NO: 974835 - DNA, 33 bp, Homo sapien
gaaagaaagaaagaaacctcaggaaccaaactc

SEQ ID NO: 974836 - DNA, 33 bp, Homo sapien
gaaagaaagaaagaaatctcaggaaccaaactc

SEQ ID NO: 974837 - DNA, 33 bp, Homo sapien
ctttagcaagcagtaaataacaggttcagtcta

SEQ ID NO: 974838 - DNA, 33 bp, Homo sapien
ctttagcaagcagtaagtaacaggttcagtcta

SEQ ID NO: 974839 - DNA, 33 bp, Homo sapien
gtatatagcataaagaaatatgattttcctcta

SEQ ID NO: 974840 - DNA, 33 bp, Homo sapien
gtatatagcataaagagatatgattttcctcta

SEQ ID NO: 974841 - DNA, 33 bp, Homo sapien
tcaatagaggtaaatcaagttcagaaatacaac

SEQ ID NO: 974842 - DNA, 33 bp, Homo sapien
tcaatagaggtaaatcgagttcagaaatacaac

SEQ ID NO: 974843 - DNA, 33 bp, Homo sapien
actaaaaatataaaaaaaattagcgaggcatgg

SEQ ID NO: 974844 - DNA, 33 bp, Homo sapien
actaaaaatataaaaagaattagcgaggcatgg

SEQ ID NO: 974845 - DNA, 33 bp, Homo sapien
ctcccaatggccttaaagaagtaaacatccatg

SEQ ID NO: 974846 - DNA, 33 bp, Homo sapien
ctcccaatggccttaacgaagtaaacatccatg

SEQ ID NO: 974847 - DNA, 33 bp, Homo sapien
catatgtcacaaacaagttacattaggatatta

SEQ ID NO: 974848 - DNA, 33 bp, Homo sapien
catatgtcacaaacaatttacattaggatatta

SEQ ID NO: 974849 - DNA, 33 bp, Homo sapien
taggatattatttgaaaacacatagtaaacata

SEQ ID NO: 974850 - DNA, 33 bp, Homo sapien
taggatattatttgaacacacatagtaaacata

SEQ ID NO: 974851 - DNA, 33 bp, Homo sapien
aattctcaggtctgtacgtgtattagtctgttc

SEQ ID NO: 974852 - DNA, 33 bp, Homo sapien
aattctcaggtctgtatgtgtattagtctgttc

SEQ ID NO: 974853 - DNA, 33 bp, Homo sapien
tccaaaaaaacagctaaaagtcgtatttttttc

SEQ ID NO: 974854 - DNA, 33 bp, Homo sapien
tccaaaaaaacagctagaagtcgtatttttttc

SEQ ID NO: 974855 - DNA, 33 bp, Homo sapien
tatttagtgcctaaaaattcaaccacttaggaa

SEQ ID NO: 974856 - DNA, 33 bp, Homo sapien
tatttagtgcctaaaagttcaaccacttaggaa

SEQ ID NO: 974857 - DNA, 33 bp, Homo sapien
tggttataggccatttcaaaactaaatacaaga

SEQ ID NO: 974858 - DNA, 33 bp, Homo sapien
tggttataggccattttaaaactaaatacaaga

SEQ ID NO: 974859 - DNA, 33 bp, Homo sapien
acgaaattttgtaaaaagcgcagtgtgcaacat

SEQ ID NO: 974860 - DNA, 33 bp, Homo sapien
acgaaattttgtaaaatgcgcagtgtgcaacat

SEQ ID NO: 974861 - DNA, 33 bp, Homo sapien
ccaagtaatatttatcaatgtttcaccaaaaag

SEQ ID NO: 974862 - DNA, 33 bp, Homo sapien
ccaagtaatatttatcgatgtttcaccaaaaag

SEQ ID NO: 974863 - DNA, 33 bp, Homo sapien
ctaaagacaatcaaccccatcccacggtgatag

SEQ ID NO: 974864 - DNA, 33 bp, Homo sapien
ctaaagacaatcaaccgcatcccacggtgatag

SEQ ID NO: 974865 - DNA, 33 bp, Homo sapien
gctcctggctccagccaagtacactagaggagg

SEQ ID NO: 974866 - DNA, 33 bp, Homo sapien
gctcctggctccagccgagtacactagaggagg

SEQ ID NO: 974867 - DNA, 33 bp, Homo sapien
atttatttgtttggaaattatcgtagctgtagg

SEQ ID NO: 974868 - DNA, 33 bp, Homo sapien
atttatttgtttggaagttatcgtagctgtagg

SEQ ID NO: 974869 - DNA, 33 bp, Homo sapien
tttattcctatctcccagaataacaacgctact

SEQ ID NO: 974870 - DNA, 33 bp, Homo sapien
tttattcctatctcccggaataacaacgctact

SEQ ID NO: 974871 - DNA, 33 bp, Homo sapien
ttctaagtgttctcaaataatacccttggctct

SEQ ID NO: 974872 - DNA, 33 bp, Homo sapien
ttctaagtgttctcaactaatacccttggctct

SEQ ID NO: 974873 - DNA, 33 bp, Homo sapien
attcaatttgtatctcccttctgttgccctgtt

SEQ ID NO: 974874 - DNA, 33 bp, Homo sapien
attcaatttgtatctctcttctgttgccctgtt

SEQ ID NO: 974875 - DNA, 33 bp, Homo sapien
aggtgctcaccaataacgtgcctcagttcccat

SEQ ID NO: 974876 - DNA, 33 bp, Homo sapien
aggtgctcaccaataatgtgcctcagttcccat

SEQ ID NO: 974877 - DNA, 33 bp, Homo sapien
aggtaccgttcctagcaacttcacttaattgtt

SEQ ID NO: 974878 - DNA, 33 bp, Homo sapien
aggtaccgttcctagccacttcacttaattgtt

SEQ ID NO: 974879 - DNA, 33 bp, Homo sapien
actgccttttgttctcacacattttgatataaa

SEQ ID NO: 974880 - DNA, 33 bp, Homo sapien
actgccttttgttctcccacattttgatataaa

SEQ ID NO: 974881 - DNA, 33 bp, Homo sapien
agtccaaagagtgatcgctgcccaatgctcagc

SEQ ID NO: 974882 - DNA, 33 bp, Homo sapien
agtccaaagagtgatctctgcccaatgctcagc

SEQ ID NO: 974883 - DNA, 33 bp, Homo sapien
aaaagcaaacctaaaaaacaaatgtagctatct

SEQ ID NO: 974884 - DNA, 33 bp, Homo sapien
aaaagcaaacctaaaacacaaatgtagctatct

SEQ ID NO: 974885 - DNA, 33 bp, Homo sapien
aaacttcaccctcccacgttaccaaacaatact

SEQ ID NO: 974886 - DNA, 33 bp, Homo sapien
aaacttcaccctcccatgttaccaaacaatact

SEQ ID NO: 974887 - DNA, 33 bp, Homo sapien
tcctcagatttaaacacgttgcgctcaaggtgc

SEQ ID NO: 974888 - DNA, 33 bp, Homo sapien
tcctcagatttaaacatgttgcgctcaaggtgc

SEQ ID NO: 974889 - DNA, 33 bp, Homo sapien
ttgcatgttttaaagaaggttttaccacatgaa

SEQ ID NO: 974890 - DNA, 33 bp, Homo sapien
ttgcatgttttaaagatggttttaccacatgaa

SEQ ID NO: 974891 - DNA, 33 bp, Homo sapien
atggaactggtatctacctgcatgactgtattt

SEQ ID NO: 974892 - DNA, 33 bp, Homo sapien
atggaactggtatctatctgcatgactgtattt

SEQ ID NO: 974893 - DNA, 33 bp, Homo sapien
atctttccttgattccagaaaacaaatagtaac

SEQ ID NO: 974894 - DNA, 33 bp, Homo sapien
atctttccttgattccggaaaacaaatagtaac

SEQ ID NO: 974895 - DNA, 33 bp, Homo sapien
actgaggaaaacagaaaacatctctagcacgtg

SEQ ID NO: 974896 - DNA, 33 bp, Homo sapien
actgaggaaaacagaacacatctctagcacgtg

SEQ ID NO: 974897 - DNA, 33 bp, Homo sapien
gcttaatttggtcctcaatacaagctcttgagg

SEQ ID NO: 974898 - DNA, 33 bp, Homo sapien
gcttaatttggtcctccatacaagctcttgagg

SEQ ID NO: 974899 - DNA, 33 bp, Homo sapien
ccccctttcctcctgagcctcactacagaatca

SEQ ID NO: 974900 - DNA, 33 bp, Homo sapien
ccccctttcctcctgatcctcactacagaatca

SEQ ID NO: 974901 - DNA, 33 bp, Homo sapien
cctcatttgtaagatacagtttgatcatgatta

SEQ ID NO: 974902 - DNA, 33 bp, Homo sapien
cctcatttgtaagatatagtttgatcatgatta

SEQ ID NO: 974903 - DNA, 33 bp, Homo sapien
cataagctcatctacacactggagagaggagtc

SEQ ID NO: 974904 - DNA, 33 bp, Homo sapien
cataagctcatctacagactggagagaggagtc

SEQ ID NO: 974905 - DNA, 33 bp, Homo sapien
ggctctctgctttctgaaatagtggttctcaat

SEQ ID NO: 974906 - DNA, 33 bp, Homo sapien
ggctctctgctttctgcaatagtggttctcaat

SEQ ID NO: 974907 - DNA, 33 bp, Homo sapien
tctgtctctagtatcacggaactggaaagatat

SEQ ID NO: 974908 - DNA, 33 bp, Homo sapien
tctgtctctagtatcatggaactggaaagatat

SEQ ID NO: 974909 - DNA, 33 bp, Homo sapien
agaacatgctgaaataaatccctgaatgtcctg

SEQ ID NO: 974910 - DNA, 33 bp, Homo sapien
agaacatgctgaaatagatccctgaatgtcctg

SEQ ID NO: 974911 - DNA, 33 bp, Homo sapien
atgtaaaatcagtgcccggaaaaataggccaag

SEQ ID NO: 974912 - DNA, 33 bp, Homo sapien
atgtaaaatcagtgcctggaaaaataggccaag

SEQ ID NO: 974913 - DNA, 33 bp, Homo sapien
tgcagtgttgagtggggacgtagcacagctggt

SEQ ID NO: 974914 - DNA, 33 bp, Homo sapien
tgcagtgttgagtgggtacgtagcacagctggt

SEQ ID NO: 974915 - DNA, 33 bp, Homo sapien
taagcaggttaaggagaaaccacttgctagaaa

SEQ ID NO: 974916 - DNA, 33 bp, Homo sapien
taagcaggttaaggagcaaccacttgctagaaa

SEQ ID NO: 974917 - DNA, 33 bp, Homo sapien
tagttactctcaagcccgatttttctgggtcag

SEQ ID NO: 974918 - DNA, 33 bp, Homo sapien
tagttactctcaagcctgatttttctgggtcag

SEQ ID NO: 974919 - DNA, 33 bp, Homo sapien
atgtgataaaatgccaaagagctagcccagatc

SEQ ID NO: 974920 - DNA, 33 bp, Homo sapien
atgtgataaaatgccagagagctagcccagatc

SEQ ID NO: 974921 - DNA, 33 bp, Homo sapien
tgttcttggcagccatgatgaagaatagttgac

SEQ ID NO: 974922 - DNA, 33 bp, Homo sapien
tgttcttggcagccattatgaagaatagttgac

SEQ ID NO: 974923 - DNA, 33 bp, Homo sapien
tgttaatacagggcaaagttttaagaggaatta

SEQ ID NO: 974924 - DNA, 33 bp, Homo sapien
tgttaatacagggcaacgttttaagaggaatta

SEQ ID NO: 974925 - DNA, 33 bp, Homo sapien
tccgtgctttgaatacactacaataaatgggta

SEQ ID NO: 974926 - DNA, 33 bp, Homo sapien
tccgtgctttgaatacgctacaataaatgggta

SEQ ID NO: 974927 - DNA, 33 bp, Homo sapien
ctgaaacactgcttcaaatgtggcccaatttca

SEQ ID NO: 974928 - DNA, 33 bp, Homo sapien
ctgaaacactgcttcagatgtggcccaatttca

SEQ ID NO: 974929 - DNA, 33 bp, Homo sapien
tgtgcatcacaagaggaatcgacgtctgaggcc

SEQ ID NO: 974930 - DNA, 33 bp, Homo sapien
tgtgcatcacaagagggatcgacgtctgaggcc

SEQ ID NO: 974931 - DNA, 33 bp, Homo sapien
tcctctatgtcaaaatcaaatgttcagacctct

SEQ ID NO: 974932 - DNA, 33 bp, Homo sapien
tcctctatgtcaaaatgaaatgttcagacctct

SEQ ID NO: 974933 - DNA, 33 bp, Homo sapien
tacaagccctagaataggacataaaataccaat

SEQ ID NO: 974934 - DNA, 33 bp, Homo sapien
tacaagccctagaatatgacataaaataccaat

SEQ ID NO: 974935 - DNA, 33 bp, Homo sapien
tgtggtgaacaggaccactattattccttagat

SEQ ID NO: 974936 - DNA, 33 bp, Homo sapien
tgtggtgaacaggaccgctattattccttagat

SEQ ID NO: 974937 - DNA, 33 bp, Homo sapien
ggaaatcaaactgtacaagggaagtccaccaga

SEQ ID NO: 974938 - DNA, 33 bp, Homo sapien
ggaaatcaaactgtacgagggaagtccaccaga

SEQ ID NO: 974939 - DNA, 33 bp, Homo sapien
aatatgatttcaagtaaggagttgtcaaagttt

SEQ ID NO: 974940 - DNA, 33 bp, Homo sapien
aatatgatttcaagtagggagttgtcaaagttt

SEQ ID NO: 974941 - DNA, 33 bp, Homo sapien
aatgagtggtctcagaagattagacataaagta

SEQ ID NO: 974942 - DNA, 33 bp, Homo sapien
aatgagtggtctcagaggattagacataaagta

SEQ ID NO: 974943 - DNA, 33 bp, Homo sapien
aaaaaaagatagcatacgtaccaaacctctctt

SEQ ID NO: 974944 - DNA, 33 bp, Homo sapien
aaaaaaagatagcatatgtaccaaacctctctt

SEQ ID NO: 974945 - DNA, 33 bp, Homo sapien
actatttgcatttccaaccaaaaaaatgaatgt

SEQ ID NO: 974946 - DNA, 33 bp, Homo sapien
actatttgcatttccagccaaaaaaatgaatgt

SEQ ID NO: 974947 - DNA, 33 bp, Homo sapien
gcagcgaacacagttacggtattgagagcttgc

SEQ ID NO: 974948 - DNA, 33 bp, Homo sapien
gcagcgaacacagttatggtattgagagcttgc

SEQ ID NO: 974949 - DNA, 33 bp, Homo sapien
attagaactgtgtgtaaagaggtttgaggaggt

SEQ ID NO: 974950 - DNA, 33 bp, Homo sapien
attagaactgtgtgtagagaggtttgaggaggt

SEQ ID NO: 974951 - DNA, 33 bp, Homo sapien
ccatagacactgaaaacgttccccaaacctgcc

SEQ ID NO: 974952 - DNA, 33 bp, Homo sapien
ccatagacactgaaaatgttccccaaacctgcc

SEQ ID NO: 974953 - DNA, 33 bp, Homo sapien
gttcctttgatggttacgtttgatttctcaagc

SEQ ID NO: 974954 - DNA, 33 bp, Homo sapien
gttcctttgatggttatgtttgatttctcaagc

SEQ ID NO: 974955 - DNA, 33 bp, Homo sapien
gttggcaatttcttacacagttaaacatacagc

SEQ ID NO: 974956 - DNA, 33 bp, Homo sapien
gttggcaatttcttacgcagttaaacatacagc

SEQ ID NO: 974957 - DNA, 33 bp, Homo sapien
aaaggatctggctctcacctctcattcccaccc

SEQ ID NO: 974958 - DNA, 33 bp, Homo sapien
aaaggatctggctctcgcctctcattcccaccc

SEQ ID NO: 974959 - DNA, 33 bp, Homo sapien
caagggctaccctaaccgaagccccataaggag

SEQ ID NO: 974960 - DNA, 33 bp, Homo sapien
caagggctaccctaactgaagccccataaggag

SEQ ID NO: 974961 - DNA, 33 bp, Homo sapien
aaatgcctgtcatgtaccagtattgctctctgc

SEQ ID NO: 974962 - DNA, 33 bp, Homo sapien
aaatgcctgtcatgtatcagtattgctctctgc

SEQ ID NO: 974963 - DNA, 33 bp, Homo sapien
aggcaaggaggaagaacttagtaacccagggct

SEQ ID NO: 974964 - DNA, 33 bp, Homo sapien
aggcaaggaggaagaatttagtaacccagggct

SEQ ID NO: 974965 - DNA, 33 bp, Homo sapien
gaaggattccctctctaaaagactgcaatatgg

SEQ ID NO: 974966 - DNA, 33 bp, Homo sapien
gaaggattccctctctgaaagactgcaatatgg

SEQ ID NO: 974967 - DNA, 33 bp, Homo sapien
catgttgtatatgatacgtaagggttcatactg

SEQ ID NO: 974968 - DNA, 33 bp, Homo sapien
catgttgtatatgatatgtaagggttcatactg

SEQ ID NO: 974969 - DNA, 33 bp, Homo sapien
ttctgcaactcaaagaaaagaaggcatagtcct

SEQ ID NO: 974970 - DNA, 33 bp, Homo sapien
ttctgcaactcaaagagaagaaggcatagtcct

SEQ ID NO: 974971 - DNA, 33 bp, Homo sapien
aagattcaaacttttcaaagtatcaatctagaa

SEQ ID NO: 974972 - DNA, 33 bp, Homo sapien
aagattcaaacttttcgaagtatcaatctagaa

SEQ ID NO: 974973 - DNA, 33 bp, Homo sapien
gtctgaggtttaactgaagcgcatccattggag

SEQ ID NO: 974974 - DNA, 33 bp, Homo sapien
gtctgaggtttaactggagcgcatccattggag

SEQ ID NO: 974975 - DNA, 33 bp, Homo sapien
aactccaaggttacaaatcctacctagcaacta

SEQ ID NO: 974976 - DNA, 33 bp, Homo sapien
aactccaaggttacaagtcctacctagcaacta

SEQ ID NO: 974977 - DNA, 33 bp, Homo sapien
aagttccatggttattaaagggaaatggacata

SEQ ID NO: 974978 - DNA, 33 bp, Homo sapien
aagttccatggttattgaagggaaatggacata

SEQ ID NO: 974979 - DNA, 33 bp, Homo sapien
ccacaggctggttagaccattgggctgacccag

SEQ ID NO: 974980 - DNA, 33 bp, Homo sapien
ccacaggctggttagatcattgggctgacccag

SEQ ID NO: 974981 - DNA, 33 bp, Homo sapien
agtgagagtccaatctcagagcattacttcttt

SEQ ID NO: 974982 - DNA, 33 bp, Homo sapien
agtgagagtccaatctgagagcattacttcttt

SEQ ID NO: 974983 - DNA, 33 bp, Homo sapien
gaaaggcaagacctcaaaataacttaaagcagt

SEQ ID NO: 974984 - DNA, 33 bp, Homo sapien
gaaaggcaagacctcagaataacttaaagcagt

SEQ ID NO: 974985 - DNA, 33 bp, Homo sapien
attcagacatgttgtaccacgtcttagtacttc

SEQ ID NO: 974986 - DNA, 33 bp, Homo sapien
attcagacatgttgtatcacgtcttagtacttc

SEQ ID NO: 974987 - DNA, 33 bp, Homo sapien
tttggctttaaaagtccatactgcttctctttc

SEQ ID NO: 974988 - DNA, 33 bp, Homo sapien
tttggctttaaaagtctatactgcttctctttc

SEQ ID NO: 974989 - DNA, 33 bp, Homo sapien
cattgtgttattttagaaacaggtcctagtgat

SEQ ID NO: 974990 - DNA, 33 bp, Homo sapien
cattgtgttattttaggaacaggtcctagtgat

SEQ ID NO: 974991 - DNA, 33 bp, Homo sapien
gaaccagaggtcattacgttacgtgaaataagc

SEQ ID NO: 974992 - DNA, 33 bp, Homo sapien
gaaccagaggtcattatgttacgtgaaataagc

SEQ ID NO: 974993 - DNA, 33 bp, Homo sapien
ttactagacttaaagaatcatttctatcactaa

SEQ ID NO: 974994 - DNA, 33 bp, Homo sapien
ttactagacttaaagagtcatttctatcactaa

SEQ ID NO: 974995 - DNA, 33 bp, Homo sapien
tttatagataagaccaaagccagtagctgtaaa

SEQ ID NO: 974996 - DNA, 33 bp, Homo sapien
tttatagataagaccatagccagtagctgtaaa

SEQ ID NO: 974997 - DNA, 33 bp, Homo sapien
ttcaatgtgttggaaactgtaaaatgatactgt

SEQ ID NO: 974998 - DNA, 33 bp, Homo sapien
ttcaatgtgttggaaattgtaaaatgatactgt

SEQ ID NO: 974999 - DNA, 33 bp, Homo sapien
ttcttcatggcgccaaaagaataaagctcctgg

SEQ ID NO: 975000 - DNA, 33 bp, Homo sapien
ttcttcatggcgccaagagaataaagctcctgg

SEQ ID NO: 975001 - DNA, 33 bp, Homo sapien
actgaaaatgatgagcaagttgaagctttgtgt

SEQ ID NO: 975002 - DNA, 33 bp, Homo sapien
actgaaaatgatgagcgagttgaagctttgtgt

SEQ ID NO: 975003 - DNA, 33 bp, Homo sapien
tattaccacagaactacatccaaaattccagtc

SEQ ID NO: 975004 - DNA, 33 bp, Homo sapien
tattaccacagaactatatccaaaattccagtc

SEQ ID NO: 975005 - DNA, 33 bp, Homo sapien
tacaggagagatcagcaagtaaccagtttactc

SEQ ID NO: 975006 - DNA, 33 bp, Homo sapien
tacaggagagatcagcgagtaaccagtttactc

SEQ ID NO: 975007 - DNA, 33 bp, Homo sapien
agttggaattaatgaagactgcttttgatctag

SEQ ID NO: 975008 - DNA, 33 bp, Homo sapien
agttggaattaatgaatactgcttttgatctag

SEQ ID NO: 975009 - DNA, 33 bp, Homo sapien
tattctttctgtgataccatttttgtcccacct

SEQ ID NO: 975010 - DNA, 33 bp, Homo sapien
tattctttctgtgatatcatttttgtcccacct

SEQ ID NO: 975011 - DNA, 33 bp, Homo sapien
tactgaagtttcttaccgcgactccggtcttaa

SEQ ID NO: 975012 - DNA, 33 bp, Homo sapien
tactgaagtttcttactgcgactccggtcttaa

SEQ ID NO: 975013 - DNA, 33 bp, Homo sapien
tagagcgtgtcacatgaatgtaaataccaaagg

SEQ ID NO: 975014 - DNA, 33 bp, Homo sapien
tagagcgtgtcacatggatgtaaataccaaagg

SEQ ID NO: 975015 - DNA, 33 bp, Homo sapien
tttaaaagcaagtttaactgcctaaatgtatga

SEQ ID NO: 975016 - DNA, 33 bp, Homo sapien
tttaaaagcaagtttagctgcctaaatgtatga

SEQ ID NO: 975017 - DNA, 33 bp, Homo sapien
acagaaaattgaacaaatagtgcagagttcctt

SEQ ID NO: 975018 - DNA, 33 bp, Homo sapien
acagaaaattgaacaagtagtgcagagttcctt

SEQ ID NO: 975019 - DNA, 33 bp, Homo sapien
ccccttggtaatgatcaagttctcacccggttg

SEQ ID NO: 975020 - DNA, 33 bp, Homo sapien
ccccttggtaatgatcgagttctcacccggttg

SEQ ID NO: 975021 - DNA, 33 bp, Homo sapien
ttgatcaaaatcttaacctcagagcaataataa

SEQ ID NO: 975022 - DNA, 33 bp, Homo sapien
ttgatcaaaatcttaatctcagagcaataataa

SEQ ID NO: 975023 - DNA, 33 bp, Homo sapien
ctatccatcaactgctaaatgctcaagctgttt

SEQ ID NO: 975024 - DNA, 33 bp, Homo sapien
ctatccatcaactgctgaatgctcaagctgttt

SEQ ID NO: 975025 - DNA, 33 bp, Homo sapien
atagtcactcagtaccacacagaatgcttctgt

SEQ ID NO: 975026 - DNA, 33 bp, Homo sapien
atagtcactcagtaccgcacagaatgcttctgt

SEQ ID NO: 975027 - DNA, 33 bp, Homo sapien
ttgtacaaatgcatctaactataaaatatatat

SEQ ID NO: 975028 - DNA, 33 bp, Homo sapien
ttgtacaaatgcatctgactataaaatatatat

SEQ ID NO: 975029 - DNA, 33 bp, Homo sapien
atttagcaacaaatgccactgtttactgtacat

SEQ ID NO: 975030 - DNA, 33 bp, Homo sapien
atttagcaacaaatgcgactgtttactgtacat

SEQ ID NO: 975031 - DNA, 33 bp, Homo sapien
aaggtgggcgatggtacctccgaccaagaaaga

SEQ ID NO: 975032 - DNA, 33 bp, Homo sapien
aaggtgggcgatggtatctccgaccaagaaaga

SEQ ID NO: 975033 - DNA, 33 bp, Homo sapien
tctttgaccagtaccaagaatgtagaaccaaga

SEQ ID NO: 975034 - DNA, 33 bp, Homo sapien
tctttgaccagtaccaggaatgtagaaccaaga

SEQ ID NO: 975035 - DNA, 33 bp, Homo sapien
ttcaacaatgttggaacggaatgaagggtagag

SEQ ID NO: 975036 - DNA, 33 bp, Homo sapien
ttcaacaatgttggaatggaatgaagggtagag

SEQ ID NO: 975037 - DNA, 33 bp, Homo sapien
tactgagggtaactaaactccaggtaacctttt

SEQ ID NO: 975038 - DNA, 33 bp, Homo sapien
tactgagggtaactaatctccaggtaacctttt

SEQ ID NO: 975039 - DNA, 33 bp, Homo sapien
tcaataattatcggcccctcttcctggaccact

SEQ ID NO: 975040 - DNA, 33 bp, Homo sapien
tcaataattatcggccgctcttcctggaccact

SEQ ID NO: 975041 - DNA, 33 bp, Homo sapien
ggaccacaggttgctaataaaaagagtaataaa

SEQ ID NO: 975042 - DNA, 33 bp, Homo sapien
ggaccacaggttgctattaaaaagagtaataaa

SEQ ID NO: 975043 - DNA, 33 bp, Homo sapien
atttgttaccaccttcaaccaattcatataaaa

SEQ ID NO: 975044 - DNA, 33 bp, Homo sapien
atttgttaccaccttcgaccaattcatataaaa

SEQ ID NO: 975045 - DNA, 33 bp, Homo sapien
gggtcagtctctaacaatgacgttattctgtca

SEQ ID NO: 975046 - DNA, 33 bp, Homo sapien
gggtcagtctctaacagtgacgttattctgtca

SEQ ID NO: 975047 - DNA, 33 bp, Homo sapien
ggctctgtcacaaaaacaaagcacaatcagact

SEQ ID NO: 975048 - DNA, 33 bp, Homo sapien
ggctctgtcacaaaaagaaagcacaatcagact

SEQ ID NO: 975049 - DNA, 33 bp, Homo sapien
taaaaaatgcacacaaaaagccatgtcaaggag

SEQ ID NO: 975050 - DNA, 33 bp, Homo sapien
taaaaaatgcacacaagaagccatgtcaaggag

SEQ ID NO: 975051 - DNA, 33 bp, Homo sapien
gaagcactggtgttaaaaactggtgcaaatttt

SEQ ID NO: 975052 - DNA, 33 bp, Homo sapien
gaagcactggtgttaagaactggtgcaaatttt

SEQ ID NO: 975053 - DNA, 33 bp, Homo sapien
tcccaggacatagaccactgtagtattgtcacg

SEQ ID NO: 975054 - DNA, 33 bp, Homo sapien
tcccaggacatagacctctgtagtattgtcacg

SEQ ID NO: 975055 - DNA, 33 bp, Homo sapien
gacctagtatataatcaatcaggccaagccact

SEQ ID NO: 975056 - DNA, 33 bp, Homo sapien
gacctagtatataatcgatcaggccaagccact

SEQ ID NO: 975057 - DNA, 33 bp, Homo sapien
aagaggaatgaagactcaaggaagtggcttggc

SEQ ID NO: 975058 - DNA, 33 bp, Homo sapien
aagaggaatgaagactgaaggaagtggcttggc

SEQ ID NO: 975059 - DNA, 33 bp, Homo sapien
caccatatggaaatcaagaaactgttgaccaaa

SEQ ID NO: 975060 - DNA, 33 bp, Homo sapien
caccatatggaaatcacgaaactgttgaccaaa

SEQ ID NO: 975061 - DNA, 33 bp, Homo sapien
caataattggttcactaaaaaactaaatggcca

SEQ ID NO: 975062 - DNA, 33 bp, Homo sapien
caataattggttcactgaaaaactaaatggcca

SEQ ID NO: 975063 - DNA, 33 bp, Homo sapien
atcgtccagcaagaaaatgaccgaatggataca

SEQ ID NO: 975064 - DNA, 33 bp, Homo sapien
atcgtccagcaagaaagtgaccgaatggataca

SEQ ID NO: 975065 - DNA, 33 bp, Homo sapien
caccatcacacagctaataaaatgtaaagtcca

SEQ ID NO: 975066 - DNA, 33 bp, Homo sapien
caccatcacacagctagtaaaatgtaaagtcca

SEQ ID NO: 975067 - DNA, 33 bp, Homo sapien
taccatatctcagagaaggaagcagtcagggaa

SEQ ID NO: 975068 - DNA, 33 bp, Homo sapien
taccatatctcagagagggaagcagtcagggaa

SEQ ID NO: 975069 - DNA, 33 bp, Homo sapien
gatggagagtctgtcaaatggaaagaaccaccc

SEQ ID NO: 975070 - DNA, 33 bp, Homo sapien
gatggagagtctgtcagatggaaagaaccaccc

SEQ ID NO: 975071 - DNA, 33 bp, Homo sapien
ctctaagaccctgcaccaacaatctgttttccc

SEQ ID NO: 975072 - DNA, 33 bp, Homo sapien
ctctaagaccctgcactaacaatctgttttccc

SEQ ID NO: 975073 - DNA, 33 bp, Homo sapien
acatttcatttctccacactttatgagcttcac

SEQ ID NO: 975074 - DNA, 33 bp, Homo sapien
acatttcatttctccatactttatgagcttcac

SEQ ID NO: 975075 - DNA, 33 bp, Homo sapien
aattgaaactatcctgaactgaaccagggtgta

SEQ ID NO: 975076 - DNA, 33 bp, Homo sapien
aattgaaactatcctggactgaaccagggtgta

SEQ ID NO: 975077 - DNA, 33 bp, Homo sapien
tgaggggctctgacaacgtgaagacactgcctt

SEQ ID NO: 975078 - DNA, 33 bp, Homo sapien
tgaggggctctgacaatgtgaagacactgcctt

SEQ ID NO: 975079 - DNA, 33 bp, Homo sapien
gtcctgtggcagccttcaagaatctctgagacc

SEQ ID NO: 975080 - DNA, 33 bp, Homo sapien
gtcctgtggcagccttgaagaatctctgagacc

SEQ ID NO: 975081 - DNA, 33 bp, Homo sapien
gacaagctacaaactacagagagatatttgcat

SEQ ID NO: 975082 - DNA, 33 bp, Homo sapien
gacaagctacaaactatagagagatatttgcat

SEQ ID NO: 975083 - DNA, 33 bp, Homo sapien
gggaggagaaaaaacaagtccaggagattgagg

SEQ ID NO: 975084 - DNA, 33 bp, Homo sapien
gggaggagaaaaaacacgtccaggagattgagg

SEQ ID NO: 975085 - DNA, 33 bp, Homo sapien
ggctagggtaaacgaaatcagtgaaagaggtca

SEQ ID NO: 975086 - DNA, 33 bp, Homo sapien
ggctagggtaaacgaagtcagtgaaagaggtca

SEQ ID NO: 975087 - DNA, 33 bp, Homo sapien
attcttttataataacacttagcttcaaacaca

SEQ ID NO: 975088 - DNA, 33 bp, Homo sapien
attcttttataataacgcttagcttcaaacaca

SEQ ID NO: 975089 - DNA, 33 bp, Homo sapien
ctgaattggaaagtaaaggatgcaaaggatgac

SEQ ID NO: 975090 - DNA, 33 bp, Homo sapien
ctgaattggaaagtaagggatgcaaaggatgac

SEQ ID NO: 975091 - DNA, 33 bp, Homo sapien
tgtgtccttctggtgacctgtctactgtggttt

SEQ ID NO: 975092 - DNA, 33 bp, Homo sapien
tgtgtccttctggtgatctgtctactgtggttt

SEQ ID NO: 975093 - DNA, 33 bp, Homo sapien
acacggggttgggcaacgggtaattcacaagag

SEQ ID NO: 975094 - DNA, 33 bp, Homo sapien
acacggggttgggcaatgggtaattcacaagag

SEQ ID NO: 975095 - DNA, 33 bp, Homo sapien
tcttactctacatttccccaaagcaaatggtaa

SEQ ID NO: 975096 - DNA, 33 bp, Homo sapien
tcttactctacatttctccaaagcaaatggtaa

SEQ ID NO: 975097 - DNA, 33 bp, Homo sapien
gactcagtataccttccagtggtccacctttct

SEQ ID NO: 975098 - DNA, 33 bp, Homo sapien
gactcagtataccttctagtggtccacctttct

SEQ ID NO: 975099 - DNA, 33 bp, Homo sapien
atgttcctagcagtcaagtcataactatagtga

SEQ ID NO: 975100 - DNA, 33 bp, Homo sapien
atgttcctagcagtcaggtcataactatagtga

SEQ ID NO: 975101 - DNA, 33 bp, Homo sapien
ccctctctaacccccacgctattttggaacaca

SEQ ID NO: 975102 - DNA, 33 bp, Homo sapien
ccctctctaacccccaggctattttggaacaca

SEQ ID NO: 975103 - DNA, 33 bp, Homo sapien
aacaatagcaaatataaaggctgagaccccttg

SEQ ID NO: 975104 - DNA, 33 bp, Homo sapien
aacaatagcaaatatagaggctgagaccccttg

SEQ ID NO: 975105 - DNA, 33 bp, Homo sapien
attagtaacactgtcacagaatactgggaaagt

SEQ ID NO: 975106 - DNA, 33 bp, Homo sapien
attagtaacactgtcatagaatactgggaaagt

SEQ ID NO: 975107 - DNA, 33 bp, Homo sapien
ttataattcatctcacactccttgatcatcaaa

SEQ ID NO: 975108 - DNA, 33 bp, Homo sapien
ttataattcatctcaccctccttgatcatcaaa

SEQ ID NO: 975109 - DNA, 33 bp, Homo sapien
aatatggccttgcatcacagtctggcaccactc

SEQ ID NO: 975110 - DNA, 33 bp, Homo sapien
aatatggccttgcatcgcagtctggcaccactc

SEQ ID NO: 975111 - DNA, 33 bp, Homo sapien
gtcttccatcccacaccgtagcaggagaggaga

SEQ ID NO: 975112 - DNA, 33 bp, Homo sapien
gtcttccatcccacactgtagcaggagaggaga

SEQ ID NO: 975113 - DNA, 33 bp, Homo sapien
ctggcaatgtcacttagacaagggatgtcattt

SEQ ID NO: 975114 - DNA, 33 bp, Homo sapien
ctggcaatgtcacttatacaagggatgtcattt

SEQ ID NO: 975115 - DNA, 33 bp, Homo sapien
cattgccagtaaaaaccgtaaagaatggggctt

SEQ ID NO: 975116 - DNA, 33 bp, Homo sapien
cattgccagtaaaaactgtaaagaatggggctt

SEQ ID NO: 975117 - DNA, 33 bp, Homo sapien
tatatggtgaataaacaactatatggtaaataa

SEQ ID NO: 975118 - DNA, 33 bp, Homo sapien
tatatggtgaataaacgactatatggtaaataa

SEQ ID NO: 975119 - DNA, 33 bp, Homo sapien
ccaatattgatagaggaccatatgaaaacatta

SEQ ID NO: 975120 - DNA, 33 bp, Homo sapien
ccaatattgatagagggccatatgaaaacatta

SEQ ID NO: 975121 - DNA, 33 bp, Homo sapien
tgtgtaagctgagatccgaaggacaggtagcag

SEQ ID NO: 975122 - DNA, 33 bp, Homo sapien
tgtgtaagctgagatctgaaggacaggtagcag

SEQ ID NO: 975123 - DNA, 33 bp, Homo sapien
tttctggtttggccaactgattggatggatgat

SEQ ID NO: 975124 - DNA, 33 bp, Homo sapien
tttctggtttggccaattgattggatggatgat

SEQ ID NO: 975125 - DNA, 33 bp, Homo sapien
taataaatgttagccacgtatgtaattgaaaca

SEQ ID NO: 975126 - DNA, 33 bp, Homo sapien
taataaatgttagccatgtatgtaattgaaaca

SEQ ID NO: 975127 - DNA, 33 bp, Homo sapien
attttcaagtgtcgaaagtctagacgctagagc

SEQ ID NO: 975128 - DNA, 33 bp, Homo sapien
attttcaagtgtcgaaggtctagacgctagagc

SEQ ID NO: 975129 - DNA, 33 bp, Homo sapien
gattagggcacctgatcacctttggattttgga

SEQ ID NO: 975130 - DNA, 33 bp, Homo sapien
gattagggcacctgatgacctttggattttgga

SEQ ID NO: 975131 - DNA, 33 bp, Homo sapien
acagtggatccctatcccaggctctagctttaa

SEQ ID NO: 975132 - DNA, 33 bp, Homo sapien
acagtggatccctatcgcaggctctagctttaa

SEQ ID NO: 975133 - DNA, 33 bp, Homo sapien
accctttctacctatactaccatcatcctgtta

SEQ ID NO: 975134 - DNA, 33 bp, Homo sapien
accctttctacctatattaccatcatcctgtta

SEQ ID NO: 975135 - DNA, 33 bp, Homo sapien
ttctcagttaagtgaacggctcatcaaccactg

SEQ ID NO: 975136 - DNA, 33 bp, Homo sapien
ttctcagttaagtgaatggctcatcaaccactg

SEQ ID NO: 975137 - DNA, 33 bp, Homo sapien
gagtcattcactctacccgacacagtgcatcca

SEQ ID NO: 975138 - DNA, 33 bp, Homo sapien
gagtcattcactctactcgacacagtgcatcca

SEQ ID NO: 975139 - DNA, 33 bp, Homo sapien
tttcacttgccaaatacgtcatttaacctctct

SEQ ID NO: 975140 - DNA, 33 bp, Homo sapien
tttcacttgccaaatatgtcatttaacctctct

SEQ ID NO: 975141 - DNA, 33 bp, Homo sapien
atacagaggtaactacgacatgatatccctcta

SEQ ID NO: 975142 - DNA, 33 bp, Homo sapien
atacagaggtaactactacatgatatccctcta

SEQ ID NO: 975143 - DNA, 33 bp, Homo sapien
tctaaaccaagaataactggtaatcactgttat

SEQ ID NO: 975144 - DNA, 33 bp, Homo sapien
tctaaaccaagaataagtggtaatcactgttat

SEQ ID NO: 975145 - DNA, 33 bp, Homo sapien
tggatattttaagttcaatcgggggagactgtt

SEQ ID NO: 975146 - DNA, 33 bp, Homo sapien
tggatattttaagttcgatcgggggagactgtt

SEQ ID NO: 975147 - DNA, 33 bp, Homo sapien
tcaaactttgtttagaaatgtgaaactaacagt

SEQ ID NO: 975148 - DNA, 33 bp, Homo sapien
tcaaactttgtttagagatgtgaaactaacagt

SEQ ID NO: 975149 - DNA, 33 bp, Homo sapien
gggataagcacacttcaaaagatgttttctagc

SEQ ID NO: 975150 - DNA, 33 bp, Homo sapien
gggataagcacacttcgaaagatgttttctagc

SEQ ID NO: 975151 - DNA, 33 bp, Homo sapien
aagtttccttcagttaaatgctaaccttcttgg

SEQ ID NO: 975152 - DNA, 33 bp, Homo sapien
aagtttccttcagttagatgctaaccttcttgg

SEQ ID NO: 975153 - DNA, 33 bp, Homo sapien
tcataatgtacctagaatagtacttggcatagt

SEQ ID NO: 975154 - DNA, 33 bp, Homo sapien
tcataatgtacctagactagtacttggcatagt

SEQ ID NO: 975155 - DNA, 33 bp, Homo sapien
tccatcaagttcacaacggtctttggcttagac

SEQ ID NO: 975156 - DNA, 33 bp, Homo sapien
tccatcaagttcacaatggtctttggcttagac

SEQ ID NO: 975157 - DNA, 33 bp, Homo sapien
aaatgcactttggaggacctcagtagaacacct

SEQ ID NO: 975158 - DNA, 33 bp, Homo sapien
aaatgcactttggagggcctcagtagaacacct

SEQ ID NO: 975159 - DNA, 33 bp, Homo sapien
ctttattctcctaagaatcttagccaagtgtgt

SEQ ID NO: 975160 - DNA, 33 bp, Homo sapien
ctttattctcctaagactcttagccaagtgtgt

SEQ ID NO: 975161 - DNA, 33 bp, Homo sapien
attaatttccagtcccactttattctcctaaga

SEQ ID NO: 975162 - DNA, 33 bp, Homo sapien
attaatttccagtccctctttattctcctaaga

SEQ ID NO: 975163 - DNA, 33 bp, Homo sapien
tgctatacttaggagacggtaaaatcactgact

SEQ ID NO: 975164 - DNA, 33 bp, Homo sapien
tgctatacttaggagatggtaaaatcactgact

SEQ ID NO: 975165 - DNA, 33 bp, Homo sapien
atccatactgccagataaaagtagtccacatgg

SEQ ID NO: 975166 - DNA, 33 bp, Homo sapien
atccatactgccagattaaagtagtccacatgg

SEQ ID NO: 975167 - DNA, 33 bp, Homo sapien
cttctagacttcatcacgggaccgattttcctt

SEQ ID NO: 975168 - DNA, 33 bp, Homo sapien
cttctagacttcatcatgggaccgattttcctt

SEQ ID NO: 975169 - DNA, 33 bp, Homo sapien
tattgtggttttgcacagcccaaagagagaaaa

SEQ ID NO: 975170 - DNA, 33 bp, Homo sapien
tattgtggttttgcacggcccaaagagagaaaa

SEQ ID NO: 975171 - DNA, 33 bp, Homo sapien
ttaaaacagttggcaaaacttgactgggtctga

SEQ ID NO: 975172 - DNA, 33 bp, Homo sapien
ttaaaacagttggcaatacttgactgggtctga

SEQ ID NO: 975173 - DNA, 33 bp, Homo sapien
tctgccaggcactgtaaaaatgctaccattaag

SEQ ID NO: 975174 - DNA, 33 bp, Homo sapien
tctgccaggcactgtacaaatgctaccattaag

SEQ ID NO: 975175 - DNA, 33 bp, Homo sapien
gaggcctgggaaaccacacggctcctgaggacc

SEQ ID NO: 975176 - DNA, 33 bp, Homo sapien
gaggcctgggaaaccagacggctcctgaggacc

SEQ ID NO: 975177 - DNA, 33 bp, Homo sapien
tgtacggttttgaaccaaatgagtctcatttcc

SEQ ID NO: 975178 - DNA, 33 bp, Homo sapien
tgtacggttttgaacccaatgagtctcatttcc

SEQ ID NO: 975179 - DNA, 33 bp, Homo sapien
agaagtagagtactgacgcttattaccaaagtg

SEQ ID NO: 975180 - DNA, 33 bp, Homo sapien
agaagtagagtactgatgcttattaccaaagtg

SEQ ID NO: 975181 - DNA, 33 bp, Homo sapien
aagaagtcaaatggaaaatacggaaaagattat

SEQ ID NO: 975182 - DNA, 33 bp, Homo sapien
aagaagtcaaatggaagatacggaaaagattat

SEQ ID NO: 975183 - DNA, 33 bp, Homo sapien
gatgctgtttttccaccgagttgtcttttactc

SEQ ID NO: 975184 - DNA, 33 bp, Homo sapien
gatgctgtttttccactgagttgtcttttactc

SEQ ID NO: 975185 - DNA, 33 bp, Homo sapien
tttaaccctctcaacaagtctatgtttatcctt

SEQ ID NO: 975186 - DNA, 33 bp, Homo sapien
tttaaccctctcaacaggtctatgtttatcctt

SEQ ID NO: 975187 - DNA, 33 bp, Homo sapien
caggagactctaatacaaagtcagattaagaat

SEQ ID NO: 975188 - DNA, 33 bp, Homo sapien
caggagactctaatacgaagtcagattaagaat

SEQ ID NO: 975189 - DNA, 33 bp, Homo sapien
attgaataacctaagacgtggtgactgatttaa

SEQ ID NO: 975190 - DNA, 33 bp, Homo sapien
attgaataacctaagatgtggtgactgatttaa

SEQ ID NO: 975191 - DNA, 33 bp, Homo sapien
catgatcacttacccaatctctaagaagatcca

SEQ ID NO: 975192 - DNA, 33 bp, Homo sapien
catgatcacttacccagtctctaagaagatcca

SEQ ID NO: 975193 - DNA, 33 bp, Homo sapien
gactaggactggttaaagaaaaggctgacacca

SEQ ID NO: 975194 - DNA, 33 bp, Homo sapien
gactaggactggttaaggaaaaggctgacacca

SEQ ID NO: 975195 - DNA, 33 bp, Homo sapien
tagacttgtagagagactaaaaggcaaattttc

SEQ ID NO: 975196 - DNA, 33 bp, Homo sapien
tagacttgtagagagattaaaaggcaaattttc

SEQ ID NO: 975197 - DNA, 33 bp, Homo sapien
caaaattgttgtcataacaagaggcaataagaa

SEQ ID NO: 975198 - DNA, 33 bp, Homo sapien
caaaattgttgtcatagcaagaggcaataagaa

SEQ ID NO: 975199 - DNA, 33 bp, Homo sapien
ggtgctactagattaaagaattctgtcaccaag

SEQ ID NO: 975200 - DNA, 33 bp, Homo sapien
ggtgctactagattaaggaattctgtcaccaag

SEQ ID NO: 975201 - DNA, 33 bp, Homo sapien
ttattcagtgcctaaaatccttaaggaaaagaa

SEQ ID NO: 975202 - DNA, 33 bp, Homo sapien
ttattcagtgcctaaagtccttaaggaaaagaa

SEQ ID NO: 975203 - DNA, 33 bp, Homo sapien
acttgtgtgcctcctacgtacaaggcactgtga

SEQ ID NO: 975204 - DNA, 33 bp, Homo sapien
acttgtgtgcctcctatgtacaaggcactgtga

SEQ ID NO: 975205 - DNA, 33 bp, Homo sapien
atatttacatttctgccctgctttctccgcctg

SEQ ID NO: 975206 - DNA, 33 bp, Homo sapien
atatttacatttctgctctgctttctccgcctg

SEQ ID NO: 975207 - DNA, 33 bp, Homo sapien
ttcacacacacacaaaactttttacatctattt

SEQ ID NO: 975208 - DNA, 33 bp, Homo sapien
ttcacacacacacaaacctttttacatctattt

SEQ ID NO: 975209 - DNA, 33 bp, Homo sapien
attccttccatgtccacagcagatgtcaaaacc

SEQ ID NO: 975210 - DNA, 33 bp, Homo sapien
attccttccatgtccatagcagatgtcaaaacc

SEQ ID NO: 975211 - DNA, 33 bp, Homo sapien
aatggtgtgagaatgggcaggacttctagacct

SEQ ID NO: 975212 - DNA, 33 bp, Homo sapien
aatggtgtgagaatggtcaggacttctagacct

SEQ ID NO: 975213 - DNA, 33 bp, Homo sapien
acttatgaagggagaaacacaagccattgattt

SEQ ID NO: 975214 - DNA, 33 bp, Homo sapien
acttatgaagggagaatcacaagccattgattt

SEQ ID NO: 975215 - DNA, 33 bp, Homo sapien
actgctgaggttaagacgggtgtgagtccttct

SEQ ID NO: 975216 - DNA, 33 bp, Homo sapien
actgctgaggttaagatgggtgtgagtccttct

SEQ ID NO: 975217 - DNA, 33 bp, Homo sapien
aatcattgttgtcaataatggtcaatggcaggg

SEQ ID NO: 975218 - DNA, 33 bp, Homo sapien
aatcattgttgtcaatgatggtcaatggcaggg

SEQ ID NO: 975219 - DNA, 33 bp, Homo sapien
agatctatttggaaagactaagccccttgagct

SEQ ID NO: 975220 - DNA, 33 bp, Homo sapien
agatctatttggaaagtctaagccccttgagct

SEQ ID NO: 975221 - DNA, 33 bp, Homo sapien
agatatagatggtaacaatgtttgcacaacatg

SEQ ID NO: 975222 - DNA, 33 bp, Homo sapien
agatatagatggtaacgatgtttgcacaacatg

SEQ ID NO: 975223 - DNA, 33 bp, Homo sapien
ggacaaggggtgctgcagaaacatccaggacat

SEQ ID NO: 975224 - DNA, 33 bp, Homo sapien
ggacaaggggtgctgcggaaacatccaggacat

SEQ ID NO: 975225 - DNA, 33 bp, Homo sapien
tctgaaatgaaaagcaacttcctctgtttccca

SEQ ID NO: 975226 - DNA, 33 bp, Homo sapien
tctgaaatgaaaagcagcttcctctgtttccca

SEQ ID NO: 975227 - DNA, 33 bp, Homo sapien
cagatgcattctttgccatcaataccagcatcg

SEQ ID NO: 975228 - DNA, 33 bp, Homo sapien
cagatgcattctttgctatcaataccagcatcg

SEQ ID NO: 975229 - DNA, 33 bp, Homo sapien
cttgtgtgagaagatcaaggttttcctggcttg

SEQ ID NO: 975230 - DNA, 33 bp, Homo sapien
cttgtgtgagaagatcgaggttttcctggcttg

SEQ ID NO: 975231 - DNA, 33 bp, Homo sapien
gtaaggtcctggataactcttcaaaactgaaaa

SEQ ID NO: 975232 - DNA, 33 bp, Homo sapien
gtaaggtcctggataattcttcaaaactgaaaa

SEQ ID NO: 975233 - DNA, 33 bp, Homo sapien
taattaaaggcacttaccaaattgtctttgttc

SEQ ID NO: 975234 - DNA, 33 bp, Homo sapien
taattaaaggcacttatcaaattgtctttgttc

SEQ ID NO: 975235 - DNA, 33 bp, Homo sapien
ttggttagagcacggcactaacatttctgcctc

SEQ ID NO: 975236 - DNA, 33 bp, Homo sapien
ttggttagagcacggcgctaacatttctgcctc

SEQ ID NO: 975237 - DNA, 33 bp, Homo sapien
aaagacattttttaaaaagcgttcaattcagta

SEQ ID NO: 975238 - DNA, 33 bp, Homo sapien
aaagacattttttaaagagcgttcaattcagta

SEQ ID NO: 975239 - DNA, 33 bp, Homo sapien
caaggaaagtaattcaacgttaacaatctaacc

SEQ ID NO: 975240 - DNA, 33 bp, Homo sapien
caaggaaagtaattcagcgttaacaatctaacc

SEQ ID NO: 975241 - DNA, 33 bp, Homo sapien
atgtatgatgttcggggatatctagtagtatta

SEQ ID NO: 975242 - DNA, 33 bp, Homo sapien
atgtatgatgttcgggtatatctagtagtatta

SEQ ID NO: 975243 - DNA, 33 bp, Homo sapien
ttttatttccagatgagtatttccagtttttaa

SEQ ID NO: 975244 - DNA, 33 bp, Homo sapien
ttttatttccagatgattatttccagtttttaa

SEQ ID NO: 975245 - DNA, 33 bp, Homo sapien
ttttgtttctgtccaccgaggcatattcagcaa

SEQ ID NO: 975246 - DNA, 33 bp, Homo sapien
ttttgtttctgtccactgaggcatattcagcaa

SEQ ID NO: 975247 - DNA, 33 bp, Homo sapien
tggataccatgctcacagcgagaagtgtggacg

SEQ ID NO: 975248 - DNA, 33 bp, Homo sapien
tggataccatgctcacggcgagaagtgtggacg

SEQ ID NO: 975249 - DNA, 33 bp, Homo sapien
tattagtttaaggcacaggtatatacactctgg

SEQ ID NO: 975250 - DNA, 33 bp, Homo sapien
tattagtttaaggcaccggtatatacactctgg

SEQ ID NO: 975251 - DNA, 33 bp, Homo sapien
taagggcagttaaaccaacacatgagggtccag

SEQ ID NO: 975252 - DNA, 33 bp, Homo sapien
taagggcagttaaaccgacacatgagggtccag

SEQ ID NO: 975253 - DNA, 33 bp, Homo sapien
catcaggtttgcctctaaattactaagactgtg

SEQ ID NO: 975254 - DNA, 33 bp, Homo sapien
catcaggtttgcctctgaattactaagactgtg

SEQ ID NO: 975255 - DNA, 33 bp, Homo sapien
tttcatcttctaatcaaaccatgaatatgaaac

SEQ ID NO: 975256 - DNA, 33 bp, Homo sapien
tttcatcttctaatcacaccatgaatatgaaac

SEQ ID NO: 975257 - DNA, 33 bp, Homo sapien
tttgaacctttaccaccctgaacaacacaaaac

SEQ ID NO: 975258 - DNA, 33 bp, Homo sapien
tttgaacctttaccactctgaacaacacaaaac

SEQ ID NO: 975259 - DNA, 33 bp, Homo sapien
gtgattttgtgaaaagcctgttggaaaccccga

SEQ ID NO: 975260 - DNA, 33 bp, Homo sapien
gtgattttgtgaaaaggctgttggaaaccccga

SEQ ID NO: 975261 - DNA, 33 bp, Homo sapien
catggatttgtctctcaagctaaacctttcaga

SEQ ID NO: 975262 - DNA, 33 bp, Homo sapien
catggatttgtctctcgagctaaacctttcaga

SEQ ID NO: 975263 - DNA, 33 bp, Homo sapien
tagccaagataaactacagagagaatcatgcaa

SEQ ID NO: 975264 - DNA, 33 bp, Homo sapien
tagccaagataaactatagagagaatcatgcaa

SEQ ID NO: 975265 - DNA, 33 bp, Homo sapien
gagttccttacccaagaagctttcggaaatggt

SEQ ID NO: 975266 - DNA, 33 bp, Homo sapien
gagttccttacccaaggagctttcggaaatggt

SEQ ID NO: 975267 - DNA, 33 bp, Homo sapien
ccctgtcattagcttcacaacatatctaaaagt

SEQ ID NO: 975268 - DNA, 33 bp, Homo sapien
ccctgtcattagcttcccaacatatctaaaagt

SEQ ID NO: 975269 - DNA, 33 bp, Homo sapien
aaacactgggcactaacaagcagcacatagcaa

SEQ ID NO: 975270 - DNA, 33 bp, Homo sapien
aaacactgggcactaataagcagcacatagcaa

SEQ ID NO: 975271 - DNA, 33 bp, Homo sapien
caagtaaacccagtgaaataatgtagagaaacc

SEQ ID NO: 975272 - DNA, 33 bp, Homo sapien
caagtaaacccagtgagataatgtagagaaacc

SEQ ID NO: 975273 - DNA, 33 bp, Homo sapien
aggactccaggcaaacaaaccctgacttacttc

SEQ ID NO: 975274 - DNA, 33 bp, Homo sapien
aggactccaggcaaacgaaccctgacttacttc

SEQ ID NO: 975275 - DNA, 33 bp, Homo sapien
tagttctggccattaacagagcaaaggcagtaa

SEQ ID NO: 975276 - DNA, 33 bp, Homo sapien
tagttctggccattaagagagcaaaggcagtaa

SEQ ID NO: 975277 - DNA, 33 bp, Homo sapien
tctgttttgcataaatgaagtagactttgtaga

SEQ ID NO: 975278 - DNA, 33 bp, Homo sapien
tctgttttgcataaattaagtagactttgtaga

SEQ ID NO: 975279 - DNA, 33 bp, Homo sapien
tattttacatgataataaatccagtcttttcta

SEQ ID NO: 975280 - DNA, 33 bp, Homo sapien
tattttacatgataatgaatccagtcttttcta

SEQ ID NO: 975281 - DNA, 33 bp, Homo sapien
caaaagtagttcttacaatcttctcaagacatc

SEQ ID NO: 975282 - DNA, 33 bp, Homo sapien
caaaagtagttcttacgatcttctcaagacatc

SEQ ID NO: 975283 - DNA, 33 bp, Homo sapien
tttgcctgccaatttcacatattctcacttatc

SEQ ID NO: 975284 - DNA, 33 bp, Homo sapien
tttgcctgccaatttcgcatattctcacttatc

SEQ ID NO: 975285 - DNA, 33 bp, Homo sapien
tacagaagggcaacataagtaatacttggtgat

SEQ ID NO: 975286 - DNA, 33 bp, Homo sapien
tacagaagggcaacatgagtaatacttggtgat

SEQ ID NO: 975287 - DNA, 33 bp, Homo sapien
atgtaagtagaaaccacatgcggaacctgggtt

SEQ ID NO: 975288 - DNA, 33 bp, Homo sapien
atgtaagtagaaaccatatgcggaacctgggtt

SEQ ID NO: 975289 - DNA, 33 bp, Homo sapien
gtaactacttgctagaagaattagaattgtgta

SEQ ID NO: 975290 - DNA, 33 bp, Homo sapien
gtaactacttgctagaggaattagaattgtgta

SEQ ID NO: 975291 - DNA, 33 bp, Homo sapien
aaaggcaaatcagcaaaggacagtttctttctt

SEQ ID NO: 975292 - DNA, 33 bp, Homo sapien
aaaggcaaatcagcaagggacagtttctttctt

SEQ ID NO: 975293 - DNA, 33 bp, Homo sapien
tcctttgtctcagacccaggagttttgtatctt

SEQ ID NO: 975294 - DNA, 33 bp, Homo sapien
tcctttgtctcagaccgaggagttttgtatctt

SEQ ID NO: 975295 - DNA, 33 bp, Homo sapien
ccttaaaacagctctgaatccttgttattaaca

SEQ ID NO: 975296 - DNA, 33 bp, Homo sapien
ccttaaaacagctctgcatccttgttattaaca

SEQ ID NO: 975297 - DNA, 33 bp, Homo sapien
taaaggagctgagaacacttacaacatgagtgc

SEQ ID NO: 975298 - DNA, 33 bp, Homo sapien
taaaggagctgagaacgcttacaacatgagtgc

SEQ ID NO: 975299 - DNA, 33 bp, Homo sapien
ctcaagagcatcatcaaggcagtactaagtttt

SEQ ID NO: 975300 - DNA, 33 bp, Homo sapien
ctcaagagcatcatcagggcagtactaagtttt

SEQ ID NO: 975301 - DNA, 33 bp, Homo sapien
tttctaagtactaccaatggaaatctggaaatt

SEQ ID NO: 975302 - DNA, 33 bp, Homo sapien
tttctaagtactaccactggaaatctggaaatt

SEQ ID NO: 975303 - DNA, 33 bp, Homo sapien
tggctgaaaactagaacggtgtcattgtattgc

SEQ ID NO: 975304 - DNA, 33 bp, Homo sapien
tggctgaaaactagaatggtgtcattgtattgc

SEQ ID NO: 975305 - DNA, 33 bp, Homo sapien
ccagtaaggactagaaatgtggtcatataaatt

SEQ ID NO: 975306 - DNA, 33 bp, Homo sapien
ccagtaaggactagaagtgtggtcatataaatt

SEQ ID NO: 975307 - DNA, 33 bp, Homo sapien
ttgtataacctcccaacgtgcctctcacaatgc

SEQ ID NO: 975308 - DNA, 33 bp, Homo sapien
ttgtataacctcccaatgtgcctctcacaatgc

SEQ ID NO: 975309 - DNA, 33 bp, Homo sapien
gaaaaggagggttcaaattgaaacagaagataa

SEQ ID NO: 975310 - DNA, 33 bp, Homo sapien
gaaaaggagggttcaagttgaaacagaagataa

SEQ ID NO: 975311 - DNA, 33 bp, Homo sapien
gaatggtgcttcaatacaaatgctcaaagttgg

SEQ ID NO: 975312 - DNA, 33 bp, Homo sapien
gaatggtgcttcaatataaatgctcaaagttgg

SEQ ID NO: 975313 - DNA, 33 bp, Homo sapien
gtaaaacagtttgaccagagaagaagattcagg

SEQ ID NO: 975314 - DNA, 33 bp, Homo sapien
gtaaaacagtttgaccggagaagaagattcagg

SEQ ID NO: 975315 - DNA, 33 bp, Homo sapien
ctgcagtccagcaggaaagaaggggtacatata

SEQ ID NO: 975316 - DNA, 33 bp, Homo sapien
ctgcagtccagcaggagagaaggggtacatata

SEQ ID NO: 975317 - DNA, 33 bp, Homo sapien
tcagaatcaggttctacatggaagtactttctc

SEQ ID NO: 975318 - DNA, 33 bp, Homo sapien
tcagaatcaggttctatatggaagtactttctc

SEQ ID NO: 975319 - DNA, 33 bp, Homo sapien
agagactgcgtcccaaatgtgtgtaaacttaag

SEQ ID NO: 975320 - DNA, 33 bp, Homo sapien
agagactgcgtcccaactgtgtgtaaacttaag

SEQ ID NO: 975321 - DNA, 33 bp, Homo sapien
cagagcttgtacggaacagatgcacatcaacat

SEQ ID NO: 975322 - DNA, 33 bp, Homo sapien
cagagcttgtacggaagagatgcacatcaacat

SEQ ID NO: 975323 - DNA, 33 bp, Homo sapien
atagatgggtttataccgattcagctgcattgt

SEQ ID NO: 975324 - DNA, 33 bp, Homo sapien
atagatgggtttatactgattcagctgcattgt

SEQ ID NO: 975325 - DNA, 33 bp, Homo sapien
ttatgtttgtaattatcagagtatttcttgaca

SEQ ID NO: 975326 - DNA, 33 bp, Homo sapien
ttatgtttgtaattatgagagtatttcttgaca

SEQ ID NO: 975327 - DNA, 33 bp, Homo sapien
acactgagctttaccactgaagaagcttcatgc

SEQ ID NO: 975328 - DNA, 33 bp, Homo sapien
acactgagctttaccattgaagaagcttcatgc

SEQ ID NO: 975329 - DNA, 33 bp, Homo sapien
gactttggagtaaataacattgtggtcacaaag

SEQ ID NO: 975330 - DNA, 33 bp, Homo sapien
gactttggagtaaataccattgtggtcacaaag

SEQ ID NO: 975331 - DNA, 33 bp, Homo sapien
atgggtaagttaaatgcagcaggggaaagaagt

SEQ ID NO: 975332 - DNA, 33 bp, Homo sapien
atgggtaagttaaatgtagcaggggaaagaagt

SEQ ID NO: 975333 - DNA, 33 bp, Homo sapien
acccagacgcatgggaaggttttctgcaggaga

SEQ ID NO: 975334 - DNA, 33 bp, Homo sapien
acccagacgcatgggagggttttctgcaggaga

SEQ ID NO: 975335 - DNA, 33 bp, Homo sapien
aaagaggctttatgaacgatgtggctgtcttgt

SEQ ID NO: 975336 - DNA, 33 bp, Homo sapien
aaagaggctttatgaatgatgtggctgtcttgt

SEQ ID NO: 975337 - DNA, 33 bp, Homo sapien
atgaaatccaatcaaaccagggagaggctagtt

SEQ ID NO: 975338 - DNA, 33 bp, Homo sapien
atgaaatccaatcaaagcagggagaggctagtt

SEQ ID NO: 975339 - DNA, 33 bp, Homo sapien
tctattttttattccaaggtcagtaaaggtgca

SEQ ID NO: 975340 - DNA, 33 bp, Homo sapien
tctattttttattccagggtcagtaaaggtgca

SEQ ID NO: 975341 - DNA, 33 bp, Homo sapien
gaagaattccaagttagcctggacaagagacca

SEQ ID NO: 975342 - DNA, 33 bp, Homo sapien
gaagaattccaagttatcctggacaagagacca

SEQ ID NO: 975343 - DNA, 33 bp, Homo sapien
attcatcccatatcaaatcatcttgtctatgag

SEQ ID NO: 975344 - DNA, 33 bp, Homo sapien
attcatcccatatcaagtcatcttgtctatgag

SEQ ID NO: 975345 - DNA, 33 bp, Homo sapien
ttgtttgccacagaaaaatactttgtatgtcaa

SEQ ID NO: 975346 - DNA, 33 bp, Homo sapien
ttgtttgccacagaaatatactttgtatgtcaa

SEQ ID NO: 975347 - DNA, 33 bp, Homo sapien
gataaattagaatacaatatcctctaactcagt

SEQ ID NO: 975348 - DNA, 33 bp, Homo sapien
gataaattagaatacagtatcctctaactcagt

SEQ ID NO: 975349 - DNA, 33 bp, Homo sapien
cctcagtgctttgacaatgggtggtaaatagaa

SEQ ID NO: 975350 - DNA, 33 bp, Homo sapien
cctcagtgctttgacagtgggtggtaaatagaa

SEQ ID NO: 975351 - DNA, 33 bp, Homo sapien
cctgttgattcaaatacgcttgtgctggttggg

SEQ ID NO: 975352 - DNA, 33 bp, Homo sapien
cctgttgattcaaatatgcttgtgctggttggg

SEQ ID NO: 975353 - DNA, 33 bp, Homo sapien
ctgagatttccatgagaccttcagagatccatt

SEQ ID NO: 975354 - DNA, 33 bp, Homo sapien
ctgagatttccatgaggccttcagagatccatt

SEQ ID NO: 975355 - DNA, 33 bp, Homo sapien
ctgagtttacaaaggacaatatgatgaggtgga

SEQ ID NO: 975356 - DNA, 33 bp, Homo sapien
ctgagtttacaaaggataatatgatgaggtgga

SEQ ID NO: 975357 - DNA, 33 bp, Homo sapien
tgaggcaccttccatacggtgagggtcctgggt

SEQ ID NO: 975358 - DNA, 33 bp, Homo sapien
tgaggcaccttccatatggtgagggtcctgggt

SEQ ID NO: 975359 - DNA, 33 bp, Homo sapien
agaagaactattcagaaccatgcggaatgaaac

SEQ ID NO: 975360 - DNA, 33 bp, Homo sapien
agaagaactattcagacccatgcggaatgaaac

SEQ ID NO: 975361 - DNA, 33 bp, Homo sapien
tagcttactgagaggaaccaataaacaaacaat

SEQ ID NO: 975362 - DNA, 33 bp, Homo sapien
tagcttactgagaggagccaataaacaaacaat

SEQ ID NO: 975363 - DNA, 33 bp, Homo sapien
tgccagatttttgaaacgtcaccatcgtattag

SEQ ID NO: 975364 - DNA, 33 bp, Homo sapien
tgccagatttttgaaatgtcaccatcgtattag

SEQ ID NO: 975365 - DNA, 33 bp, Homo sapien
caaatgtaaaatctaaatatgtttgcaggaata

SEQ ID NO: 975366 - DNA, 33 bp, Homo sapien
caaatgtaaaatctaagtatgtttgcaggaata

SEQ ID NO: 975367 - DNA, 33 bp, Homo sapien
tcttggtgatctcatcaagagagtcagtgtaga

SEQ ID NO: 975368 - DNA, 33 bp, Homo sapien
tcttggtgatctcatcgagagagtcagtgtaga

SEQ ID NO: 975369 - DNA, 33 bp, Homo sapien
tttgctaggagaaaggaaagtgagtcaaggtag

SEQ ID NO: 975370 - DNA, 33 bp, Homo sapien
tttgctaggagaaagggaagtgagtcaaggtag

SEQ ID NO: 975371 - DNA, 33 bp, Homo sapien
gaatgcctctagggaacgataaagtggagaaaa

SEQ ID NO: 975372 - DNA, 33 bp, Homo sapien
gaatgcctctagggaaggataaagtggagaaaa

SEQ ID NO: 975373 - DNA, 33 bp, Homo sapien
tacaaagctatagtaaatgaaaaagcatggtgc

SEQ ID NO: 975374 - DNA, 33 bp, Homo sapien
tacaaagctatagtaattgaaaaagcatggtgc

SEQ ID NO: 975375 - DNA, 33 bp, Homo sapien
gaactgctttttagcacaaaacttatccataga

SEQ ID NO: 975376 - DNA, 33 bp, Homo sapien
gaactgctttttagcagaaaacttatccataga

SEQ ID NO: 975377 - DNA, 33 bp, Homo sapien
cattgtatttttaatccaggcatatttggtgct

SEQ ID NO: 975378 - DNA, 33 bp, Homo sapien
cattgtatttttaatcgaggcatatttggtgct

SEQ ID NO: 975379 - DNA, 33 bp, Homo sapien
ttgcaaatttgcgttacgtcctggaacttcaat

SEQ ID NO: 975380 - DNA, 33 bp, Homo sapien
ttgcaaatttgcgttatgtcctggaacttcaat

SEQ ID NO: 975381 - DNA, 33 bp, Homo sapien
tcaaggtcctggcatacaccatgtgctcaataa

SEQ ID NO: 975382 - DNA, 33 bp, Homo sapien
tcaaggtcctggcatataccatgtgctcaataa

SEQ ID NO: 975383 - DNA, 33 bp, Homo sapien
tgaattaagccacatacagtaaagtcttcattt

SEQ ID NO: 975384 - DNA, 33 bp, Homo sapien
tgaattaagccacatatagtaaagtcttcattt

SEQ ID NO: 975385 - DNA, 33 bp, Homo sapien
gtaagaaaaaaacccactaggcttgtctaggac

SEQ ID NO: 975386 - DNA, 33 bp, Homo sapien
gtaagaaaaaaacccagtaggcttgtctaggac

SEQ ID NO: 975387 - DNA, 33 bp, Homo sapien
agaacggttttcccaaagagattgtaaatcaca

SEQ ID NO: 975388 - DNA, 33 bp, Homo sapien
agaacggttttcccaaggagattgtaaatcaca

SEQ ID NO: 975389 - DNA, 33 bp, Homo sapien
aggctattacaaatgacattgccctgaacattc

SEQ ID NO: 975390 - DNA, 33 bp, Homo sapien
aggctattacaaatgatattgccctgaacattc

SEQ ID NO: 975391 - DNA, 33 bp, Homo sapien
ttatacaatggaataacgcacaacaatgaggat

SEQ ID NO: 975392 - DNA, 33 bp, Homo sapien
ttatacaatggaataatgcacaacaatgaggat

SEQ ID NO: 975393 - DNA, 33 bp, Homo sapien
tcttaatttttattgacctaggacaaggaaagt

SEQ ID NO: 975394 - DNA, 33 bp, Homo sapien
tcttaatttttattgatctaggacaaggaaagt

SEQ ID NO: 975395 - DNA, 33 bp, Homo sapien
caaaataaccgtaaatcattctaatcaagactt

SEQ ID NO: 975396 - DNA, 33 bp, Homo sapien
caaaataaccgtaaatgattctaatcaagactt

SEQ ID NO: 975397 - DNA, 33 bp, Homo sapien
gtgtgctcaccagacactggatgtgccagcacc

SEQ ID NO: 975398 - DNA, 33 bp, Homo sapien
gtgtgctcaccagacattggatgtgccagcacc

SEQ ID NO: 975399 - DNA, 33 bp, Homo sapien
ggatgcagggctttcaatactaggatggtttgt

SEQ ID NO: 975400 - DNA, 33 bp, Homo sapien
ggatgcagggctttcagtactaggatggtttgt

SEQ ID NO: 975401 - DNA, 33 bp, Homo sapien
aggaaaaaatctgctacgaaagactgtgaagat

SEQ ID NO: 975402 - DNA, 33 bp, Homo sapien
aggaaaaaatctgctatgaaagactgtgaagat

SEQ ID NO: 975403 - DNA, 33 bp, Homo sapien
acacggctacttcaccaagttcccaatgggtct

SEQ ID NO: 975404 - DNA, 33 bp, Homo sapien
acacggctacttcaccgagttcccaatgggtct

SEQ ID NO: 975405 - DNA, 33 bp, Homo sapien
aatgtatgtgaagaacaaggcatccatcccttc

SEQ ID NO: 975406 - DNA, 33 bp, Homo sapien
aatgtatgtgaagaaccaggcatccatcccttc

SEQ ID NO: 975407 - DNA, 33 bp, Homo sapien
ggtgaatatcggagagcaaggatgaagagcaat

SEQ ID NO: 975408 - DNA, 33 bp, Homo sapien
ggtgaatatcggagaggaaggatgaagagcaat

SEQ ID NO: 975409 - DNA, 33 bp, Homo sapien
aagtttggaggatagaagtgaaattatgatcaa

SEQ ID NO: 975410 - DNA, 33 bp, Homo sapien
aagtttggaggatagaggtgaaattatgatcaa

SEQ ID NO: 975411 - DNA, 33 bp, Homo sapien
agttgatttatgaaagactgtggaaactccaat

SEQ ID NO: 975412 - DNA, 33 bp, Homo sapien
agttgatttatgaaaggctgtggaaactccaat

SEQ ID NO: 975413 - DNA, 33 bp, Homo sapien
aagtattttgaggtaaagggccataatgtatgc

SEQ ID NO: 975414 - DNA, 33 bp, Homo sapien
aagtattttgaggtaacgggccataatgtatgc

SEQ ID NO: 975415 - DNA, 33 bp, Homo sapien
aatatcctgctcctaagcgaaatttccccctag

SEQ ID NO: 975416 - DNA, 33 bp, Homo sapien
aatatcctgctcctaatcgaaatttccccctag

SEQ ID NO: 975417 - DNA, 33 bp, Homo sapien
gcttgaagacaatctacaaggaacacttacatg

SEQ ID NO: 975418 - DNA, 33 bp, Homo sapien
gcttgaagacaatctataaggaacacttacatg

SEQ ID NO: 975419 - DNA, 33 bp, Homo sapien
ggaccttttctgcctaaaatgagagtcactaaa

SEQ ID NO: 975420 - DNA, 33 bp, Homo sapien
ggaccttttctgcctacaatgagagtcactaaa

SEQ ID NO: 975421 - DNA, 33 bp, Homo sapien
gtttttcatttcaaaaatcttaaaatcattctc

SEQ ID NO: 975422 - DNA, 33 bp, Homo sapien
gtttttcatttcaaaactcttaaaatcattctc

SEQ ID NO: 975423 - DNA, 33 bp, Homo sapien
actttggaaaccacgacaataaaatttgaatct

SEQ ID NO: 975424 - DNA, 33 bp, Homo sapien
actttggaaaccacgagaataaaatttgaatct

SEQ ID NO: 975425 - DNA, 33 bp, Homo sapien
attaaatccttctttaccatagctacagttaag

SEQ ID NO: 975426 - DNA, 33 bp, Homo sapien
attaaatccttctttatcatagctacagttaag

SEQ ID NO: 975427 - DNA, 33 bp, Homo sapien
tatatatcttcccaacaacttaacctttataca

SEQ ID NO: 975428 - DNA, 33 bp, Homo sapien
tatatatcttcccaaccacttaacctttataca

SEQ ID NO: 975429 - DNA, 33 bp, Homo sapien
tcctcatattgagaaactgcattcaatttctga

SEQ ID NO: 975430 - DNA, 33 bp, Homo sapien
tcctcatattgagaaagtgcattcaatttctga

SEQ ID NO: 975431 - DNA, 33 bp, Homo sapien
ctttaaatggcattgaagtataaatggcagatg

SEQ ID NO: 975432 - DNA, 33 bp, Homo sapien
ctttaaatggcattgaggtataaatggcagatg

SEQ ID NO: 975433 - DNA, 33 bp, Homo sapien
gagcacagattaatggaaagagtaatggactca

SEQ ID NO: 975434 - DNA, 33 bp, Homo sapien
gagcacagattaatgggaagagtaatggactca

SEQ ID NO: 975435 - DNA, 33 bp, Homo sapien
tgtaggacactctccaatgaaatgcacttcaga

SEQ ID NO: 975436 - DNA, 33 bp, Homo sapien
tgtaggacactctccagtgaaatgcacttcaga

SEQ ID NO: 975437 - DNA, 33 bp, Homo sapien
tggatgaagctgcttaaacagatgagagttatc

SEQ ID NO: 975438 - DNA, 33 bp, Homo sapien
tggatgaagctgcttacacagatgagagttatc

SEQ ID NO: 975439 - DNA, 33 bp, Homo sapien
tgttgctgtggttttacgctaagtggttgatgt

SEQ ID NO: 975440 - DNA, 33 bp, Homo sapien
tgttgctgtggttttatgctaagtggttgatgt

SEQ ID NO: 975441 - DNA, 33 bp, Homo sapien
acactttttagattgcactcaagagaatagaca

SEQ ID NO: 975442 - DNA, 33 bp, Homo sapien
acactttttagattgccctcaagagaatagaca

SEQ ID NO: 975443 - DNA, 33 bp, Homo sapien
gaccaacatggtgaaactccatgtctgctgaaa

SEQ ID NO: 975444 - DNA, 33 bp, Homo sapien
gaccaacatggtgaaattccatgtctgctgaaa

SEQ ID NO: 975445 - DNA, 33 bp, Homo sapien
aggggtcaaggaatataacagcaaatccatcag

SEQ ID NO: 975446 - DNA, 33 bp, Homo sapien
aggggtcaaggaatatgacagcaaatccatcag

SEQ ID NO: 975447 - DNA, 33 bp, Homo sapien
agaacagagaaaattcacttaactccatagcta

SEQ ID NO: 975448 - DNA, 33 bp, Homo sapien
agaacagagaaaattcgcttaactccatagcta

SEQ ID NO: 975449 - DNA, 33 bp, Homo sapien
gagatttatcagtgaaaaaaatagacccaaaaa

SEQ ID NO: 975450 - DNA, 33 bp, Homo sapien
gagatttatcagtgaacaaaatagacccaaaaa

SEQ ID NO: 975451 - DNA, 33 bp, Homo sapien
ttgttttcaacctaacaaagattttggacacag

SEQ ID NO: 975452 - DNA, 33 bp, Homo sapien
ttgttttcaacctaacgaagattttggacacag

SEQ ID NO: 975453 - DNA, 33 bp, Homo sapien
aaatttcagtgtctgaagctctgttcctaagag

SEQ ID NO: 975454 - DNA, 33 bp, Homo sapien
aaatttcagtgtctgatgctctgttcctaagag

SEQ ID NO: 975455 - DNA, 33 bp, Homo sapien
aggcagcacttaacaacgagtcctctgaggtta

SEQ ID NO: 975456 - DNA, 33 bp, Homo sapien
aggcagcacttaacaatgagtcctctgaggtta

SEQ ID NO: 975457 - DNA, 33 bp, Homo sapien
gccactggaaaacttagagacaaatttgtgatt

SEQ ID NO: 975458 - DNA, 33 bp, Homo sapien
gccactggaaaacttatagacaaatttgtgatt

SEQ ID NO: 975459 - DNA, 33 bp, Homo sapien
ttgaagagaaacctagacaattacataattctg

SEQ ID NO: 975460 - DNA, 33 bp, Homo sapien
ttgaagagaaacctagtcaattacataattctg

SEQ ID NO: 975461 - DNA, 33 bp, Homo sapien
cttactcttggagccacataaaaatggaagcaa

SEQ ID NO: 975462 - DNA, 33 bp, Homo sapien
cttactcttggagccatataaaaatggaagcaa

SEQ ID NO: 975463 - DNA, 33 bp, Homo sapien
atttaacacatgtcagaacaaagtggttagaat

SEQ ID NO: 975464 - DNA, 33 bp, Homo sapien
atttaacacatgtcagcacaaagtggttagaat

SEQ ID NO: 975465 - DNA, 33 bp, Homo sapien
caatcatcaggtctccgccgctctactgcatcc

SEQ ID NO: 975466 - DNA, 33 bp, Homo sapien
caatcatcaggtctcctccgctctactgcatcc

SEQ ID NO: 975467 - DNA, 33 bp, Homo sapien
tattagctatcctggaaactccacccctgacca

SEQ ID NO: 975468 - DNA, 33 bp, Homo sapien
tattagctatcctggacactccacccctgacca

SEQ ID NO: 975469 - DNA, 33 bp, Homo sapien
ggttaataaatctgaacgacagctatcgtactc

SEQ ID NO: 975470 - DNA, 33 bp, Homo sapien
ggttaataaatctgaatgacagctatcgtactc

SEQ ID NO: 975471 - DNA, 33 bp, Homo sapien
gcacataggatttagacgttgttgaatagcagc

SEQ ID NO: 975472 - DNA, 33 bp, Homo sapien
gcacataggatttagaggttgttgaatagcagc

SEQ ID NO: 975473 - DNA, 33 bp, Homo sapien
ggtcaagattgagtcaatagaatggatatgatg

SEQ ID NO: 975474 - DNA, 33 bp, Homo sapien
ggtcaagattgagtcagtagaatggatatgatg

SEQ ID NO: 975475 - DNA, 33 bp, Homo sapien
tattttactatgtctaggtttgcaagaattgac

SEQ ID NO: 975476 - DNA, 33 bp, Homo sapien
tattttactatgtctatgtttgcaagaattgac

SEQ ID NO: 975477 - DNA, 33 bp, Homo sapien
agcttgtttctgcttcaaaaactgcagtataac

SEQ ID NO: 975478 - DNA, 33 bp, Homo sapien
agcttgtttctgcttcgaaaactgcagtataac

SEQ ID NO: 975479 - DNA, 33 bp, Homo sapien
aatctcagtcaactcacctacaaaataaggctg

SEQ ID NO: 975480 - DNA, 33 bp, Homo sapien
aatctcagtcaactcatctacaaaataaggctg

SEQ ID NO: 975481 - DNA, 33 bp, Homo sapien
attatcaaagttttcccagatttgtcaggcttt

SEQ ID NO: 975482 - DNA, 33 bp, Homo sapien
attatcaaagttttcctagatttgtcaggcttt

SEQ ID NO: 975483 - DNA, 33 bp, Homo sapien
aattgtcagggacataggtagtggctataggtt

SEQ ID NO: 975484 - DNA, 33 bp, Homo sapien
aattgtcagggacatatgtagtggctataggtt

SEQ ID NO: 975485 - DNA, 33 bp, Homo sapien
taccatgatcaaaggcaaaggaagggatctctt

SEQ ID NO: 975486 - DNA, 33 bp, Homo sapien
taccatgatcaaaggcgaaggaagggatctctt

SEQ ID NO: 975487 - DNA, 33 bp, Homo sapien
gaatacgagcttgaaaggctttatccagttgac

SEQ ID NO: 975488 - DNA, 33 bp, Homo sapien
gaatacgagcttgaaatgctttatccagttgac

SEQ ID NO: 975489 - DNA, 33 bp, Homo sapien
ggtattgtttaattaaggaggtgatttgtatat

SEQ ID NO: 975490 - DNA, 33 bp, Homo sapien
ggtattgtttaattaatgaggtgatttgtatat

SEQ ID NO: 975491 - DNA, 33 bp, Homo sapien
agcaatagtacataaacgacattgttcggcaac

SEQ ID NO: 975492 - DNA, 33 bp, Homo sapien
agcaatagtacataaaggacattgttcggcaac

SEQ ID NO: 975493 - DNA, 33 bp, Homo sapien
atacatatttggaaccaaacgggtacccattga

SEQ ID NO: 975494 - DNA, 33 bp, Homo sapien
atacatatttggaaccgaacgggtacccattga

SEQ ID NO: 975495 - DNA, 33 bp, Homo sapien
aaagcactggaatgaaccaatcaaatttgttgc

SEQ ID NO: 975496 - DNA, 33 bp, Homo sapien
aaagcactggaatgaatcaatcaaatttgttgc

SEQ ID NO: 975497 - DNA, 33 bp, Homo sapien
ggatgctttaacaaaaatgctgttagatggctg

SEQ ID NO: 975498 - DNA, 33 bp, Homo sapien
ggatgctttaacaaaactgctgttagatggctg

SEQ ID NO: 975499 - DNA, 33 bp, Homo sapien
ggcatcgggaacgttacaaatagaaagtcccaa

SEQ ID NO: 975500 - DNA, 33 bp, Homo sapien
ggcatcgggaacgttataaatagaaagtcccaa

SEQ ID NO: 975501 - DNA, 33 bp, Homo sapien
cctctcccaagacctcacacagagagggtgaag

SEQ ID NO: 975502 - DNA, 33 bp, Homo sapien
cctctcccaagacctcgcacagagagggtgaag

SEQ ID NO: 975503 - DNA, 33 bp, Homo sapien
tagagaggaaactccaacagacataggaagaag

SEQ ID NO: 975504 - DNA, 33 bp, Homo sapien
tagagaggaaactccatcagacataggaagaag

SEQ ID NO: 975505 - DNA, 33 bp, Homo sapien
ccttgtccctattccacgttccagttctacctc

SEQ ID NO: 975506 - DNA, 33 bp, Homo sapien
ccttgtccctattccatgttccagttctacctc

SEQ ID NO: 975507 - DNA, 33 bp, Homo sapien
ataacatttcaaaataaggtatatggaagtctt

SEQ ID NO: 975508 - DNA, 33 bp, Homo sapien
ataacatttcaaaatagggtatatggaagtctt

SEQ ID NO: 975509 - DNA, 33 bp, Homo sapien
aaggtgtaagaatgcacaattgggaaaggacag

SEQ ID NO: 975510 - DNA, 33 bp, Homo sapien
aaggtgtaagaatgcataattgggaaaggacag

SEQ ID NO: 975511 - DNA, 33 bp, Homo sapien
tgtgaagaacaagagaagaaatatctcctaatt

SEQ ID NO: 975512 - DNA, 33 bp, Homo sapien
tgtgaagaacaagagaggaaatatctcctaatt

SEQ ID NO: 975513 - DNA, 33 bp, Homo sapien
tccagattgcctgccacatttcaaaagcagcat

SEQ ID NO: 975514 - DNA, 33 bp, Homo sapien
tccagattgcctgccatatttcaaaagcagcat

SEQ ID NO: 975515 - DNA, 33 bp, Homo sapien
acaacttttctccttcactaacaaaatgtaaaa

SEQ ID NO: 975516 - DNA, 33 bp, Homo sapien
acaacttttctccttcgctaacaaaatgtaaaa

SEQ ID NO: 975517 - DNA, 33 bp, Homo sapien
actacaatttggcctacagctgcccaaaagaca

SEQ ID NO: 975518 - DNA, 33 bp, Homo sapien
actacaatttggcctagagctgcccaaaagaca

SEQ ID NO: 975519 - DNA, 33 bp, Homo sapien
ttccttcagagtgatgacaggtactatttggaa

SEQ ID NO: 975520 - DNA, 33 bp, Homo sapien
ttccttcagagtgatgccaggtactatttggaa

SEQ ID NO: 975521 - DNA, 33 bp, Homo sapien
tattctgtttcattcaacttccctaaaaatctt

SEQ ID NO: 975522 - DNA, 33 bp, Homo sapien
tattctgtttcattcaccttccctaaaaatctt

SEQ ID NO: 975523 - DNA, 33 bp, Homo sapien
gacataaaggtttaccaaacaagggacaagaga

SEQ ID NO: 975524 - DNA, 33 bp, Homo sapien
gacataaaggtttaccgaacaagggacaagaga

SEQ ID NO: 975525 - DNA, 33 bp, Homo sapien
ccaaccctgtaaactaagtgaagtcttcccttt

SEQ ID NO: 975526 - DNA, 33 bp, Homo sapien
ccaaccctgtaaactaggtgaagtcttcccttt

SEQ ID NO: 975527 - DNA, 33 bp, Homo sapien
ttacactttggattccactggaaagctttttaa

SEQ ID NO: 975528 - DNA, 33 bp, Homo sapien
ttacactttggattccgctggaaagctttttaa

SEQ ID NO: 975529 - DNA, 33 bp, Homo sapien
tgtagtaaaatggttcccaatcttaattacact

SEQ ID NO: 975530 - DNA, 33 bp, Homo sapien
tgtagtaaaatggttctcaatcttaattacact

SEQ ID NO: 975531 - DNA, 33 bp, Homo sapien
aatatgccaaccaagaaccctgagattcatact

SEQ ID NO: 975532 - DNA, 33 bp, Homo sapien
aatatgccaaccaagagccctgagattcatact

SEQ ID NO: 975533 - DNA, 33 bp, Homo sapien
caacatttcttgaacaacttttatgtgtgaaga

SEQ ID NO: 975534 - DNA, 33 bp, Homo sapien
caacatttcttgaacaccttttatgtgtgaaga

SEQ ID NO: 975535 - DNA, 33 bp, Homo sapien
ctggtgctttctataaagtgaggcttttagagt

SEQ ID NO: 975536 - DNA, 33 bp, Homo sapien
ctggtgctttctataacgtgaggcttttagagt

SEQ ID NO: 975537 - DNA, 33 bp, Homo sapien
tttcctcatcttctctaaaactcattacaacct

SEQ ID NO: 975538 - DNA, 33 bp, Homo sapien
tttcctcatcttctctgaaactcattacaacct

SEQ ID NO: 975539 - DNA, 33 bp, Homo sapien
gccataggtagactggaaagagacatatgaata

SEQ ID NO: 975540 - DNA, 33 bp, Homo sapien
gccataggtagactggtaagagacatatgaata

SEQ ID NO: 975541 - DNA, 33 bp, Homo sapien
acactagggctagaaacgagatcagtatttcag

SEQ ID NO: 975542 - DNA, 33 bp, Homo sapien
acactagggctagaaatgagatcagtatttcag

SEQ ID NO: 975543 - DNA, 33 bp, Homo sapien
atttctggaagatttacatttgaaagcagcata

SEQ ID NO: 975544 - DNA, 33 bp, Homo sapien
atttctggaagatttatatttgaaagcagcata

SEQ ID NO: 975545 - DNA, 33 bp, Homo sapien
acacaagttcagaagaagagatattgctgaagg

SEQ ID NO: 975546 - DNA, 33 bp, Homo sapien
acacaagttcagaagaggagatattgctgaagg

SEQ ID NO: 975547 - DNA, 33 bp, Homo sapien
attgccgcttgtattacatggtacaactctaca

SEQ ID NO: 975548 - DNA, 33 bp, Homo sapien
attgccgcttgtattagatggtacaactctaca

SEQ ID NO: 975549 - DNA, 33 bp, Homo sapien
cactctgatgtaccccaccaggtactcccttca

SEQ ID NO: 975550 - DNA, 33 bp, Homo sapien
cactctgatgtaccccgccaggtactcccttca

SEQ ID NO: 975551 - DNA, 33 bp, Homo sapien
aatactaagctgtgccgatgtaaaagaaactcc

SEQ ID NO: 975552 - DNA, 33 bp, Homo sapien
aatactaagctgtgcctatgtaaaagaaactcc

SEQ ID NO: 975553 - DNA, 33 bp, Homo sapien
catgactcagtttatcacacataccatgctatt

SEQ ID NO: 975554 - DNA, 33 bp, Homo sapien
catgactcagtttatcgcacataccatgctatt

SEQ ID NO: 975555 - DNA, 33 bp, Homo sapien
tgttagcaggagagaacatatccaagtcataca

SEQ ID NO: 975556 - DNA, 33 bp, Homo sapien
tgttagcaggagagaatatatccaagtcataca

SEQ ID NO: 975557 - DNA, 33 bp, Homo sapien
ttcaacagtgtagttccctgataaatgctgtgt

SEQ ID NO: 975558 - DNA, 33 bp, Homo sapien
ttcaacagtgtagttctctgataaatgctgtgt

SEQ ID NO: 975559 - DNA, 33 bp, Homo sapien
cagctttgttgttcatgaagtgtctcattagta

SEQ ID NO: 975560 - DNA, 33 bp, Homo sapien
cagctttgttgttcattaagtgtctcattagta

SEQ ID NO: 975561 - DNA, 33 bp, Homo sapien
ttaggtagacatgcaaagttttgattattttta

SEQ ID NO: 975562 - DNA, 33 bp, Homo sapien
ttaggtagacatgcaaggttttgattattttta

SEQ ID NO: 975563 - DNA, 33 bp, Homo sapien
catgcaaagatagagaggcagaataaagcaaaa

SEQ ID NO: 975564 - DNA, 33 bp, Homo sapien
catgcaaagatagagatgcagaataaagcaaaa

SEQ ID NO: 975565 - DNA, 33 bp, Homo sapien
tattgactctagcttcgaatgtcctagatgaca

SEQ ID NO: 975566 - DNA, 33 bp, Homo sapien
tattgactctagcttctaatgtcctagatgaca

SEQ ID NO: 975567 - DNA, 33 bp, Homo sapien
cctttctctggttaaacactatactgggtttct

SEQ ID NO: 975568 - DNA, 33 bp, Homo sapien
cctttctctggttaaatactatactgggtttct

SEQ ID NO: 975569 - DNA, 33 bp, Homo sapien
aaattctaggtgagcacgaaaggagaaattcta

SEQ ID NO: 975570 - DNA, 33 bp, Homo sapien
aaattctaggtgagcatgaaaggagaaattcta

SEQ ID NO: 975571 - DNA, 33 bp, Homo sapien
acctttgttgttttaagtacttgaaatttcaga

SEQ ID NO: 975572 - DNA, 33 bp, Homo sapien
acctttgttgttttaattacttgaaatttcaga

SEQ ID NO: 975573 - DNA, 33 bp, Homo sapien
ctggagtggtattcaccgactcataaaccagat

SEQ ID NO: 975574 - DNA, 33 bp, Homo sapien
ctggagtggtattcactgactcataaaccagat

SEQ ID NO: 975575 - DNA, 33 bp, Homo sapien
atactgttgaggaggaaagtagggtcatattta

SEQ ID NO: 975576 - DNA, 33 bp, Homo sapien
atactgttgaggaggagagtagggtcatattta

SEQ ID NO: 975577 - DNA, 33 bp, Homo sapien
agcacatacttacctgaaacaaattttgtagtt

SEQ ID NO: 975578 - DNA, 33 bp, Homo sapien
agcacatacttacctggaacaaattttgtagtt

SEQ ID NO: 975579 - DNA, 33 bp, Homo sapien
ttctgagccagttaaacctgagcttttttcata

SEQ ID NO: 975580 - DNA, 33 bp, Homo sapien
ttctgagccagttaaatctgagcttttttcata

SEQ ID NO: 975581 - DNA, 33 bp, Homo sapien
gaaagacccttcagaccatttgctttttacctg

SEQ ID NO: 975582 - DNA, 33 bp, Homo sapien
gaaagacccttcagactatttgctttttacctg

SEQ ID NO: 975583 - DNA, 33 bp, Homo sapien
tgtaatcctcatctgcccttttgtccccatcac

SEQ ID NO: 975584 - DNA, 33 bp, Homo sapien
tgtaatcctcatctgcgcttttgtccccatcac

SEQ ID NO: 975585 - DNA, 33 bp, Homo sapien
catcaaataaacttaacagcaaaagtgataata

SEQ ID NO: 975586 - DNA, 33 bp, Homo sapien
catcaaataaacttaagagcaaaagtgataata

SEQ ID NO: 975587 - DNA, 33 bp, Homo sapien
ttcatcttcccactacaataaatatctggaaac

SEQ ID NO: 975588 - DNA, 33 bp, Homo sapien
ttcatcttcccactaccataaatatctggaaac

SEQ ID NO: 975589 - DNA, 33 bp, Homo sapien
aacatctccattatatcacagttgcccgtatct

SEQ ID NO: 975590 - DNA, 33 bp, Homo sapien
aacatctccattatattacagttgcccgtatct

SEQ ID NO: 975591 - DNA, 33 bp, Homo sapien
ttgcattgagtgagaacgatggattaagaaata

SEQ ID NO: 975592 - DNA, 33 bp, Homo sapien
ttgcattgagtgagaatgatggattaagaaata

SEQ ID NO: 975593 - DNA, 33 bp, Homo sapien
atttaatggttttccaatatcctcagtctctcc

SEQ ID NO: 975594 - DNA, 33 bp, Homo sapien
atttaatggttttccagtatcctcagtctctcc

SEQ ID NO: 975595 - DNA, 33 bp, Homo sapien
caagaaatgttaacacagacctcttgtaatctt

SEQ ID NO: 975596 - DNA, 33 bp, Homo sapien
caagaaatgttaacacggacctcttgtaatctt

SEQ ID NO: 975597 - DNA, 33 bp, Homo sapien
tagttgttgcatgtaacgtgtagcctcccgaat

SEQ ID NO: 975598 - DNA, 33 bp, Homo sapien
tagttgttgcatgtaatgtgtagcctcccgaat

SEQ ID NO: 975599 - DNA, 33 bp, Homo sapien
tttagaaaaagcagaacgtgtaggtatagaaca

SEQ ID NO: 975600 - DNA, 33 bp, Homo sapien
tttagaaaaagcagaatgtgtaggtatagaaca

SEQ ID NO: 975601 - DNA, 33 bp, Homo sapien
aatctgatcaccttcaaaattcaaaagcatttt

SEQ ID NO: 975602 - DNA, 33 bp, Homo sapien
aatctgatcaccttcataattcaaaagcatttt

SEQ ID NO: 975603 - DNA, 33 bp, Homo sapien
gaaggctttcaagtagacagatggagagaagaa

SEQ ID NO: 975604 - DNA, 33 bp, Homo sapien
gaaggctttcaagtagtcagatggagagaagaa

SEQ ID NO: 975605 - DNA, 33 bp, Homo sapien
tcaaagtaccatcatcactcttcacaaaactag

SEQ ID NO: 975606 - DNA, 33 bp, Homo sapien
tcaaagtaccatcatccctcttcacaaaactag

SEQ ID NO: 975607 - DNA, 33 bp, Homo sapien
gactatctccactttaacgaaaagaaaattagt

SEQ ID NO: 975608 - DNA, 33 bp, Homo sapien
gactatctccactttaccgaaaagaaaattagt

SEQ ID NO: 975609 - DNA, 33 bp, Homo sapien
accttcaagccaagaacagcttatagcctgaaa

SEQ ID NO: 975610 - DNA, 33 bp, Homo sapien
accttcaagccaagaagagcttatagcctgaaa

SEQ ID NO: 975611 - DNA, 33 bp, Homo sapien
acaatattgtgaggaaagtgaaacaatgatcac

SEQ ID NO: 975612 - DNA, 33 bp, Homo sapien
acaatattgtgaggaaggtgaaacaatgatcac

SEQ ID NO: 975613 - DNA, 33 bp, Homo sapien
atgtagtttcacttaaatgttatgacagtccag

SEQ ID NO: 975614 - DNA, 33 bp, Homo sapien
atgtagtttcacttaattgttatgacagtccag

SEQ ID NO: 975615 - DNA, 33 bp, Homo sapien
tacccctacacttcaacgcaaccttctgaaaac

SEQ ID NO: 975616 - DNA, 33 bp, Homo sapien
tacccctacacttcaatgcaaccttctgaaaac

SEQ ID NO: 975617 - DNA, 33 bp, Homo sapien
ttttagaattcttacaacaattatcttgccctg

SEQ ID NO: 975618 - DNA, 33 bp, Homo sapien
ttttagaattcttacagcaattatcttgccctg

SEQ ID NO: 975619 - DNA, 33 bp, Homo sapien
gattatgttttctgcacagagctatgtcataac

SEQ ID NO: 975620 - DNA, 33 bp, Homo sapien
gattatgttttctgcagagagctatgtcataac

SEQ ID NO: 975621 - DNA, 33 bp, Homo sapien
ctttccatgacagaaaggctgtactgaccctct

SEQ ID NO: 975622 - DNA, 33 bp, Homo sapien
ctttccatgacagaaatgctgtactgaccctct

SEQ ID NO: 975623 - DNA, 33 bp, Homo sapien
aacaacacaatctccaatggaagcaaaggcatg

SEQ ID NO: 975624 - DNA, 33 bp, Homo sapien
aacaacacaatctccagtggaagcaaaggcatg

SEQ ID NO: 975625 - DNA, 33 bp, Homo sapien
ttatcttctccagctcaatggcaagtaaaaagg

SEQ ID NO: 975626 - DNA, 33 bp, Homo sapien
ttatcttctccagctcgatggcaagtaaaaagg

SEQ ID NO: 975627 - DNA, 33 bp, Homo sapien
ttcccaccttctgtcaaagttcaatagattatt

SEQ ID NO: 975628 - DNA, 33 bp, Homo sapien
ttcccaccttctgtcatagttcaatagattatt

SEQ ID NO: 975629 - DNA, 33 bp, Homo sapien
ttgctaaaccactttaaattttgcataaacaaa

SEQ ID NO: 975630 - DNA, 33 bp, Homo sapien
ttgctaaaccactttacattttgcataaacaaa

SEQ ID NO: 975631 - DNA, 33 bp, Homo sapien
atggtgtgattaagaactgagatggggaagagg

SEQ ID NO: 975632 - DNA, 33 bp, Homo sapien
atggtgtgattaagaattgagatggggaagagg

SEQ ID NO: 975633 - DNA, 33 bp, Homo sapien
tagtttccttcatggcacctttatcaagtaatt

SEQ ID NO: 975634 - DNA, 33 bp, Homo sapien
tagtttccttcatggcgcctttatcaagtaatt

SEQ ID NO: 975635 - DNA, 33 bp, Homo sapien
ttcctgagctgatggaactaactagcctgatct

SEQ ID NO: 975636 - DNA, 33 bp, Homo sapien
ttcctgagctgatggacctaactagcctgatct

SEQ ID NO: 975637 - DNA, 33 bp, Homo sapien
agtgtatccagtgagaaaagaaaggtgtgggga

SEQ ID NO: 975638 - DNA, 33 bp, Homo sapien
agtgtatccagtgagagaagaaaggtgtgggga

SEQ ID NO: 975639 - DNA, 33 bp, Homo sapien
tttgggcaaagaatatcactgaatttgcatatt

SEQ ID NO: 975640 - DNA, 33 bp, Homo sapien
tttgggcaaagaatatgactgaatttgcatatt

SEQ ID NO: 975641 - DNA, 33 bp, Homo sapien
tgttctgcaattctgaaaagttgtaagatgcaa

SEQ ID NO: 975642 - DNA, 33 bp, Homo sapien
tgttctgcaattctgagaagttgtaagatgcaa

SEQ ID NO: 975643 - DNA, 33 bp, Homo sapien
ctttcttttcttagacaccatttttcagcatca

SEQ ID NO: 975644 - DNA, 33 bp, Homo sapien
ctttcttttcttagacgccatttttcagcatca

SEQ ID NO: 975645 - DNA, 33 bp, Homo sapien
tcttactcatttcataagattctgaactcctgg

SEQ ID NO: 975646 - DNA, 33 bp, Homo sapien
tcttactcatttcataggattctgaactcctgg

SEQ ID NO: 975647 - DNA, 33 bp, Homo sapien
ttcccatagctcaaaccggcatattggtactag

SEQ ID NO: 975648 - DNA, 33 bp, Homo sapien
ttcccatagctcaaactggcatattggtactag

SEQ ID NO: 975649 - DNA, 33 bp, Homo sapien
aatggattgtgcttaagccaagaactattatta

SEQ ID NO: 975650 - DNA, 33 bp, Homo sapien
aatggattgtgcttaatccaagaactattatta

SEQ ID NO: 975651 - DNA, 33 bp, Homo sapien
cagccctaaagcttacgacatcattacaatgcc

SEQ ID NO: 975652 - DNA, 33 bp, Homo sapien
cagccctaaagcttactacatcattacaatgcc

SEQ ID NO: 975653 - DNA, 33 bp, Homo sapien
aagaatcaaattaaaactcgggtaatttcatac

SEQ ID NO: 975654 - DNA, 33 bp, Homo sapien
aagaatcaaattaaaagtcgggtaatttcatac

SEQ ID NO: 975655 - DNA, 33 bp, Homo sapien
taaaatgttcttttacccatccattactgttac

SEQ ID NO: 975656 - DNA, 33 bp, Homo sapien
taaaatgttcttttactcatccattactgttac

SEQ ID NO: 975657 - DNA, 33 bp, Homo sapien
ttctcttttgagcctgcacttaggatgaaatat

SEQ ID NO: 975658 - DNA, 33 bp, Homo sapien
ttctcttttgagcctggacttaggatgaaatat

SEQ ID NO: 975659 - DNA, 33 bp, Homo sapien
tgctgcttgtgctttacgtgaggagatttatga

SEQ ID NO: 975660 - DNA, 33 bp, Homo sapien
tgctgcttgtgctttatgtgaggagatttatga

SEQ ID NO: 975661 - DNA, 33 bp, Homo sapien
tttacatatcacagtaaatctaagaaccttggc

SEQ ID NO: 975662 - DNA, 33 bp, Homo sapien
tttacatatcacagtagatctaagaaccttggc

SEQ ID NO: 975663 - DNA, 33 bp, Homo sapien
agcctccttcagaacactgaaaacctgaataaa

SEQ ID NO: 975664 - DNA, 33 bp, Homo sapien
agcctccttcagaacattgaaaacctgaataaa

SEQ ID NO: 975665 - DNA, 33 bp, Homo sapien
gagtcgcatccaagaactggggcttgtgcactg

SEQ ID NO: 975666 - DNA, 33 bp, Homo sapien
gagtcgcatccaagaattggggcttgtgcactg

SEQ ID NO: 975667 - DNA, 33 bp, Homo sapien
tcccataaaagcacaaactcatcaattgaatac

SEQ ID NO: 975668 - DNA, 33 bp, Homo sapien
tcccataaaagcacaagctcatcaattgaatac

SEQ ID NO: 975669 - DNA, 33 bp, Homo sapien
gcaaaattagtctacaatgaaagatagtagaac

SEQ ID NO: 975670 - DNA, 33 bp, Homo sapien
gcaaaattagtctacagtgaaagatagtagaac

SEQ ID NO: 975671 - DNA, 33 bp, Homo sapien
tctactgttttatcaacggaatcagtcaggcct

SEQ ID NO: 975672 - DNA, 33 bp, Homo sapien
tctactgttttatcaatggaatcagtcaggcct

SEQ ID NO: 975673 - DNA, 33 bp, Homo sapien
aatgtctcatttaagacaagcaacttgcagact

SEQ ID NO: 975674 - DNA, 33 bp, Homo sapien
aatgtctcatttaagagaagcaacttgcagact

SEQ ID NO: 975675 - DNA, 33 bp, Homo sapien
gtaaggttaaacagaaagcatgtcatcaaataa

SEQ ID NO: 975676 - DNA, 33 bp, Homo sapien
gtaaggttaaacagaaggcatgtcatcaaataa

SEQ ID NO: 975677 - DNA, 33 bp, Homo sapien
gcaagctatctattgaccagttaaatgagttgg

SEQ ID NO: 975678 - DNA, 33 bp, Homo sapien
gcaagctatctattgagcagttaaatgagttgg

SEQ ID NO: 975679 - DNA, 33 bp, Homo sapien
cccactgacctttataacgcttaataaatggtg

SEQ ID NO: 975680 - DNA, 33 bp, Homo sapien
cccactgacctttatatcgcttaataaatggtg

SEQ ID NO: 975681 - DNA, 33 bp, Homo sapien
aatagtgaagtgacaacagtaataatagttcat

SEQ ID NO: 975682 - DNA, 33 bp, Homo sapien
aatagtgaagtgacaatagtaataatagttcat

SEQ ID NO: 975683 - DNA, 33 bp, Homo sapien
tgcaaattgtaccaatcataagtgaagcaactg

SEQ ID NO: 975684 - DNA, 33 bp, Homo sapien
tgcaaattgtaccaatgataagtgaagcaactg

SEQ ID NO: 975685 - DNA, 33 bp, Homo sapien
tatcagcttcagatcaactcaatctcatattaa

SEQ ID NO: 975686 - DNA, 33 bp, Homo sapien
tatcagcttcagatcagctcaatctcatattaa

SEQ ID NO: 975687 - DNA, 33 bp, Homo sapien
ctctgcgttcataatcaccagaaaaccctatta

SEQ ID NO: 975688 - DNA, 33 bp, Homo sapien
ctctgcgttcataatcgccagaaaaccctatta

SEQ ID NO: 975689 - DNA, 33 bp, Homo sapien
tttgctgctgcctatacgagaagaccccagctc

SEQ ID NO: 975690 - DNA, 33 bp, Homo sapien
tttgctgctgcctatatgagaagaccccagctc

SEQ ID NO: 975691 - DNA, 33 bp, Homo sapien
tctacctccttgatcaaacccaaattgacatga

SEQ ID NO: 975692 - DNA, 33 bp, Homo sapien
tctacctccttgatcacacccaaattgacatga

SEQ ID NO: 975693 - DNA, 33 bp, Homo sapien
agagaaatgcaaatccaaaagtacaatgagata

SEQ ID NO: 975694 - DNA, 33 bp, Homo sapien
agagaaatgcaaatccgaaagtacaatgagata

SEQ ID NO: 975695 - DNA, 33 bp, Homo sapien
ctaggaaaagagggaaaagaagagagttcataa

SEQ ID NO: 975696 - DNA, 33 bp, Homo sapien
ctaggaaaagagggaagagaagagagttcataa

SEQ ID NO: 975697 - DNA, 33 bp, Homo sapien
cctttcggctgtattaacgtacacctagcagtt

SEQ ID NO: 975698 - DNA, 33 bp, Homo sapien
cctttcggctgtattaccgtacacctagcagtt

SEQ ID NO: 975699 - DNA, 33 bp, Homo sapien
tttttgttcctaatcacgaacttggctagctca

SEQ ID NO: 975700 - DNA, 33 bp, Homo sapien
tttttgttcctaatcatgaacttggctagctca

SEQ ID NO: 975701 - DNA, 33 bp, Homo sapien
aacaaaaatgttctctcaatgctctgatgcagt

SEQ ID NO: 975702 - DNA, 33 bp, Homo sapien
aacaaaaatgttctctgaatgctctgatgcagt

SEQ ID NO: 975703 - DNA, 33 bp, Homo sapien
attgacccttcatcataagactcaggaaagaat

SEQ ID NO: 975704 - DNA, 33 bp, Homo sapien
attgacccttcatcatcagactcaggaaagaat

SEQ ID NO: 975705 - DNA, 33 bp, Homo sapien
cctaaacagactaatcaaaaaagtaaatacatg

SEQ ID NO: 975706 - DNA, 33 bp, Homo sapien
cctaaacagactaatccaaaaagtaaatacatg

SEQ ID NO: 975707 - DNA, 33 bp, Homo sapien
caaaatcacaccacagaattgatgccacgaaga

SEQ ID NO: 975708 - DNA, 33 bp, Homo sapien
caaaatcacaccacaggattgatgccacgaaga

SEQ ID NO: 975709 - DNA, 33 bp, Homo sapien
gtcttagacctctttccagttgaagactgatgg

SEQ ID NO: 975710 - DNA, 33 bp, Homo sapien
gtcttagacctctttctagttgaagactgatgg

SEQ ID NO: 975711 - DNA, 33 bp, Homo sapien
tgaccattggtaatgaacaacaaataatgtgtt

SEQ ID NO: 975712 - DNA, 33 bp, Homo sapien
tgaccattggtaatgaccaacaaataatgtgtt

SEQ ID NO: 975713 - DNA, 33 bp, Homo sapien
ttcttttgcgtctcacagaagttgatttctgct

SEQ ID NO: 975714 - DNA, 33 bp, Homo sapien
ttcttttgcgtctcacggaagttgatttctgct

SEQ ID NO: 975715 - DNA, 33 bp, Homo sapien
ctggtgcagagaaatgaaggccaaccagagtgt

SEQ ID NO: 975716 - DNA, 33 bp, Homo sapien
ctggtgcagagaaatggaggccaaccagagtgt

SEQ ID NO: 975717 - DNA, 33 bp, Homo sapien
ttttcagtagtgaacaatcctacttattatatc

SEQ ID NO: 975718 - DNA, 33 bp, Homo sapien
ttttcagtagtgaacagtcctacttattatatc

SEQ ID NO: 975719 - DNA, 33 bp, Homo sapien
attctgattccattacagaaaccaaactaacaa

SEQ ID NO: 975720 - DNA, 33 bp, Homo sapien
attctgattccattacggaaaccaaactaacaa

SEQ ID NO: 975721 - DNA, 33 bp, Homo sapien
atcttaaaggtttcaaatatgtgatcttttcaa

SEQ ID NO: 975722 - DNA, 33 bp, Homo sapien
atcttaaaggtttcaattatgtgatcttttcaa

SEQ ID NO: 975723 - DNA, 33 bp, Homo sapien
tatagctagccaaaaaacattcccttttatgtc

SEQ ID NO: 975724 - DNA, 33 bp, Homo sapien
tatagctagccaaaaaccattcccttttatgtc

SEQ ID NO: 975725 - DNA, 33 bp, Homo sapien
atgacaatcagcaaccaggcttcagaggaatgt

SEQ ID NO: 975726 - DNA, 33 bp, Homo sapien
atgacaatcagcaaccgggcttcagaggaatgt

SEQ ID NO: 975727 - DNA, 33 bp, Homo sapien
gacacatatataacccaacattttcttgcacac

SEQ ID NO: 975728 - DNA, 33 bp, Homo sapien
gacacatatataacccgacattttcttgcacac

SEQ ID NO: 975729 - DNA, 33 bp, Homo sapien
ggcttcatatatgtcaaccctctgtgtttttaa

SEQ ID NO: 975730 - DNA, 33 bp, Homo sapien
ggcttcatatatgtcacccctctgtgtttttaa

SEQ ID NO: 975731 - DNA, 33 bp, Homo sapien
gattcaaaagggcccaatggaaagtaacagcta

SEQ ID NO: 975732 - DNA, 33 bp, Homo sapien
gattcaaaagggcccagtggaaagtaacagcta

SEQ ID NO: 975733 - DNA, 33 bp, Homo sapien
aaagcttcttcgaagacctgaaagtaaaattaa

SEQ ID NO: 975734 - DNA, 33 bp, Homo sapien
aaagcttcttcgaagatctgaaagtaaaattaa

SEQ ID NO: 975735 - DNA, 33 bp, Homo sapien
gctttttatggctttacataagttttgacttat

SEQ ID NO: 975736 - DNA, 33 bp, Homo sapien
gctttttatggctttatataagttttgacttat

SEQ ID NO: 975737 - DNA, 33 bp, Homo sapien
tcctagcagtaaagtaaaagagtggaccaatga

SEQ ID NO: 975738 - DNA, 33 bp, Homo sapien
tcctagcagtaaagtagaagagtggaccaatga

SEQ ID NO: 975739 - DNA, 33 bp, Homo sapien
agtaaaacaatatatgaagtgactaagagaaaa

SEQ ID NO: 975740 - DNA, 33 bp, Homo sapien
agtaaaacaatatatggagtgactaagagaaaa

SEQ ID NO: 975741 - DNA, 33 bp, Homo sapien
atgagttaaacattcaaaaacagttgttagaga

SEQ ID NO: 975742 - DNA, 33 bp, Homo sapien
atgagttaaacattcagaaacagttgttagaga

SEQ ID NO: 975743 - DNA, 33 bp, Homo sapien
cagaggcatcatattacctggcttaaaactaca

SEQ ID NO: 975744 - DNA, 33 bp, Homo sapien
cagaggcatcatattatctggcttaaaactaca

SEQ ID NO: 975745 - DNA, 33 bp, Homo sapien
aatgtgttgtaaaagacagcagttacatgaaat

SEQ ID NO: 975746 - DNA, 33 bp, Homo sapien
aatgtgttgtaaaagatagcagttacatgaaat

SEQ ID NO: 975747 - DNA, 33 bp, Homo sapien
ggaactcccttgccaaatacaagtgttgaaatt

SEQ ID NO: 975748 - DNA, 33 bp, Homo sapien
ggaactcccttgccaactacaagtgttgaaatt

SEQ ID NO: 975749 - DNA, 33 bp, Homo sapien
aacatgaacaaatgtcagaaaagtattatgata

SEQ ID NO: 975750 - DNA, 33 bp, Homo sapien
aacatgaacaaatgtcggaaaagtattatgata

SEQ ID NO: 975751 - DNA, 33 bp, Homo sapien
attgcgttgtatttcccgactgctatttgtgta

SEQ ID NO: 975752 - DNA, 33 bp, Homo sapien
attgcgttgtatttcctgactgctatttgtgta

SEQ ID NO: 975753 - DNA, 33 bp, Homo sapien
atacataatctctcacaaatgaaaaagaattgc

SEQ ID NO: 975754 - DNA, 33 bp, Homo sapien
atacataatctctcacgaatgaaaaagaattgc

SEQ ID NO: 975755 - DNA, 33 bp, Homo sapien
aatgccttggaaaagacctgacacttgctacag

SEQ ID NO: 975756 - DNA, 33 bp, Homo sapien
aatgccttggaaaagatctgacacttgctacag

SEQ ID NO: 975757 - DNA, 33 bp, Homo sapien
agtcttgggttggcagcattaccacctaaaaat

SEQ ID NO: 975758 - DNA, 33 bp, Homo sapien
agtcttgggttggcaggattaccacctaaaaat

SEQ ID NO: 975759 - DNA, 33 bp, Homo sapien
catgcagccaaaaaagaattaaatcatgtcctt

SEQ ID NO: 975760 - DNA, 33 bp, Homo sapien
catgcagccaaaaaagtattaaatcatgtcctt

SEQ ID NO: 975761 - DNA, 33 bp, Homo sapien
caggtaagtacacagacgagagaaaccataaag

SEQ ID NO: 975762 - DNA, 33 bp, Homo sapien
caggtaagtacacagatgagagaaaccataaag

SEQ ID NO: 975763 - DNA, 33 bp, Homo sapien
tttagtgagtcaggtaacaactgcctgatctgt

SEQ ID NO: 975764 - DNA, 33 bp, Homo sapien
tttagtgagtcaggtagcaactgcctgatctgt

SEQ ID NO: 975765 - DNA, 33 bp, Homo sapien
tttcgcctactcatgagctttcctgaataaagc

SEQ ID NO: 975766 - DNA, 33 bp, Homo sapien
tttcgcctactcatgatctttcctgaataaagc

SEQ ID NO: 975767 - DNA, 33 bp, Homo sapien
aaaggaaatcttacccaggaacttaatacagaa

SEQ ID NO: 975768 - DNA, 33 bp, Homo sapien
aaaggaaatcttaccctggaacttaatacagaa

SEQ ID NO: 975769 - DNA, 33 bp, Homo sapien
tctgatttattacaagacttcatttcagagtat

SEQ ID NO: 975770 - DNA, 33 bp, Homo sapien
tctgatttattacaaggcttcatttcagagtat

SEQ ID NO: 975771 - DNA, 33 bp, Homo sapien
aactgctagggagattaaaaatagctacgatta

SEQ ID NO: 975772 - DNA, 33 bp, Homo sapien
aactgctagggagattgaaaatagctacgatta

SEQ ID NO: 975773 - DNA, 33 bp, Homo sapien
gattgatattggagaacgcatagtttttctgga

SEQ ID NO: 975774 - DNA, 33 bp, Homo sapien
gattgatattggagaatgcatagtttttctgga

SEQ ID NO: 975775 - DNA, 33 bp, Homo sapien
tcctctctctagacccaatatccagagttgtcc

SEQ ID NO: 975776 - DNA, 33 bp, Homo sapien
tcctctctctagacccgatatccagagttgtcc

SEQ ID NO: 975777 - DNA, 33 bp, Homo sapien
tggaggacataattcaaagagtaagaacaaggt

SEQ ID NO: 975778 - DNA, 33 bp, Homo sapien
tggaggacataattcagagagtaagaacaaggt

SEQ ID NO: 975779 - DNA, 33 bp, Homo sapien
ctctgagatcctgctacgaaactcaattcctgc

SEQ ID NO: 975780 - DNA, 33 bp, Homo sapien
ctctgagatcctgctatgaaactcaattcctgc

SEQ ID NO: 975781 - DNA, 33 bp, Homo sapien
agatttcggttttacacatctgaagagttcatg

SEQ ID NO: 975782 - DNA, 33 bp, Homo sapien
agatttcggttttacatatctgaagagttcatg

SEQ ID NO: 975783 - DNA, 33 bp, Homo sapien
tcatatcttttcaacaactacgtgagatagcca

SEQ ID NO: 975784 - DNA, 33 bp, Homo sapien
tcatatcttttcaacagctacgtgagatagcca

SEQ ID NO: 975785 - DNA, 33 bp, Homo sapien
acccaaatgttgaaaaatcttgatatattgaat

SEQ ID NO: 975786 - DNA, 33 bp, Homo sapien
acccaaatgttgaaaactcttgatatattgaat

SEQ ID NO: 975787 - DNA, 33 bp, Homo sapien
caaccatgtcagggtacggcaatgcttaacttg

SEQ ID NO: 975788 - DNA, 33 bp, Homo sapien
caaccatgtcagggtatggcaatgcttaacttg

SEQ ID NO: 975789 - DNA, 33 bp, Homo sapien
tttactacagatgtaaaccaatgcaagttatta

SEQ ID NO: 975790 - DNA, 33 bp, Homo sapien
tttactacagatgtaagccaatgcaagttatta

SEQ ID NO: 975791 - DNA, 33 bp, Homo sapien
ttgttttcagattgaagcaactaaatcatccca

SEQ ID NO: 975792 - DNA, 33 bp, Homo sapien
ttgttttcagattgaatcaactaaatcatccca

SEQ ID NO: 975793 - DNA, 33 bp, Homo sapien
gctgattttccggatgccactcaaatttttata

SEQ ID NO: 975794 - DNA, 33 bp, Homo sapien
gctgattttccggatggcactcaaatttttata

SEQ ID NO: 975795 - DNA, 33 bp, Homo sapien
cattatctacttcctacggccttcagcatgtgc

SEQ ID NO: 975796 - DNA, 33 bp, Homo sapien
cattatctacttcctatggccttcagcatgtgc

SEQ ID NO: 975797 - DNA, 33 bp, Homo sapien
catctcacgtggaaaaacggttcaatgtattta

SEQ ID NO: 975798 - DNA, 33 bp, Homo sapien
catctcacgtggaaaagcggttcaatgtattta

SEQ ID NO: 975799 - DNA, 33 bp, Homo sapien
gttctacagtttctgaatagtcaaaattgaggg

SEQ ID NO: 975800 - DNA, 33 bp, Homo sapien
gttctacagtttctgagtagtcaaaattgaggg

SEQ ID NO: 975801 - DNA, 33 bp, Homo sapien
catgccctgtaacaaacttagaaattgatatct

SEQ ID NO: 975802 - DNA, 33 bp, Homo sapien
catgccctgtaacaaagttagaaattgatatct

SEQ ID NO: 975803 - DNA, 33 bp, Homo sapien
cacatagaagactacccactttggatcccctct

SEQ ID NO: 975804 - DNA, 33 bp, Homo sapien
cacatagaagactacctactttggatcccctct

SEQ ID NO: 975805 - DNA, 33 bp, Homo sapien
aataaaatatgatctacggcttgaaaagtacaa

SEQ ID NO: 975806 - DNA, 33 bp, Homo sapien
aataaaatatgatctatggcttgaaaagtacaa

SEQ ID NO: 975807 - DNA, 33 bp, Homo sapien
tttacttgctcaaaaaagttatctaaatactca

SEQ ID NO: 975808 - DNA, 33 bp, Homo sapien
tttacttgctcaaaaatgttatctaaatactca

SEQ ID NO: 975809 - DNA, 33 bp, Homo sapien
gcataagtagtgagaacggaaacaatggaaata

SEQ ID NO: 975810 - DNA, 33 bp, Homo sapien
gcataagtagtgagaatggaaacaatggaaata

SEQ ID NO: 975811 - DNA, 33 bp, Homo sapien
caattttaatgtaaaccatagcttcatgtcagt

SEQ ID NO: 975812 - DNA, 33 bp, Homo sapien
caattttaatgtaaactatagcttcatgtcagt

SEQ ID NO: 975813 - DNA, 33 bp, Homo sapien
attgaatagtaacaacacatagtacctgtatgt

SEQ ID NO: 975814 - DNA, 33 bp, Homo sapien
attgaatagtaacaacccatagtacctgtatgt

SEQ ID NO: 975815 - DNA, 33 bp, Homo sapien
ttgatgacaggtgaagaaggttaaaaccataga

SEQ ID NO: 975816 - DNA, 33 bp, Homo sapien
ttgatgacaggtgaagtaggttaaaaccataga

SEQ ID NO: 975817 - DNA, 33 bp, Homo sapien
tacaaataggctcaacacagacttccaaactgt

SEQ ID NO: 975818 - DNA, 33 bp, Homo sapien
tacaaataggctcaacgcagacttccaaactgt

SEQ ID NO: 975819 - DNA, 33 bp, Homo sapien
agtagaatagtgtgcaaaaataacaggagatta

SEQ ID NO: 975820 - DNA, 33 bp, Homo sapien
agtagaatagtgtgcagaaataacaggagatta

SEQ ID NO: 975821 - DNA, 33 bp, Homo sapien
ctgtgtaaggaacgcccagagaatgctgaaatg

SEQ ID NO: 975822 - DNA, 33 bp, Homo sapien
ctgtgtaaggaacgcctagagaatgctgaaatg

SEQ ID NO: 975823 - DNA, 33 bp, Homo sapien
ttatcagaaattttggaagtcattgggctgata

SEQ ID NO: 975824 - DNA, 33 bp, Homo sapien
ttatcagaaattttgggagtcattgggctgata

SEQ ID NO: 975825 - DNA, 33 bp, Homo sapien
gagcaataactttaggaaaggcactgtgctaat

SEQ ID NO: 975826 - DNA, 33 bp, Homo sapien
gagcaataactttagggaaggcactgtgctaat

SEQ ID NO: 975827 - DNA, 33 bp, Homo sapien
atgctgacttgtgagagccaattttgtcttttc

SEQ ID NO: 975828 - DNA, 33 bp, Homo sapien
atgctgacttgtgagatccaattttgtcttttc

SEQ ID NO: 975829 - DNA, 33 bp, Homo sapien
cacagaaatttacaaacgccgcacgttgaaact

SEQ ID NO: 975830 - DNA, 33 bp, Homo sapien
cacagaaatttacaaatgccgcacgttgaaact

SEQ ID NO: 975831 - DNA, 33 bp, Homo sapien
atgctgttcagatttacagcctaagagcaatgg

SEQ ID NO: 975832 - DNA, 33 bp, Homo sapien
atgctgttcagatttatagcctaagagcaatgg

SEQ ID NO: 975833 - DNA, 33 bp, Homo sapien
ctatttttcctgcgaacgagtcatattttctca

SEQ ID NO: 975834 - DNA, 33 bp, Homo sapien
ctatttttcctgcgaatgagtcatattttctca

SEQ ID NO: 975835 - DNA, 33 bp, Homo sapien
ctggcaaggcaacctccagctaacttcttaaat

SEQ ID NO: 975836 - DNA, 33 bp, Homo sapien
ctggcaaggcaacctctagctaacttcttaaat

SEQ ID NO: 975837 - DNA, 33 bp, Homo sapien
tatgtactcaatgatacatggcagctaagctat

SEQ ID NO: 975838 - DNA, 33 bp, Homo sapien
tatgtactcaatgatatatggcagctaagctat

SEQ ID NO: 975839 - DNA, 33 bp, Homo sapien; identical to SEQ ID NO: 975837

SEQ ID NO: 975840 - DNA, 33 bp, Homo sapien; identical to SEQ ID NO: 975838

SEQ ID NO: 975841 - DNA, 33 bp, Homo sapien
ctaaattggcactataagatcaataactctgtc

SEQ ID NO: 975842 - DNA, 33 bp, Homo sapien
ctaaattggcactatacgatcaataactctgtc

SEQ ID NO: 975843 - DNA, 33 bp, Homo sapien
actctcatggccatcaactttccattacttaaa

SEQ ID NO: 975844 - DNA, 33 bp, Homo sapien
actctcatggccatcagctttccattacttaaa

SEQ ID NO: 975845 - DNA, 33 bp, Homo sapien
gccaacgacactctcaaattatagcacattaaa

SEQ ID NO: 975846 - DNA, 33 bp, Homo sapien
gccaacgacactctcagattatagcacattaaa

SEQ ID NO: 975847 - DNA, 33 bp, Homo sapien
accacaatttctgtgacacagctaaatcagtgt

SEQ ID NO: 975848 - DNA, 33 bp, Homo sapien
accacaatttctgtgatacagctaaatcagtgt

SEQ ID NO: 975849 - DNA, 33 bp, Homo sapien
gaaatactattttcttaaaactggcattcatat

SEQ ID NO: 975850 - DNA, 33 bp, Homo sapien
gaaatactattttcttgaaactggcattcatat

SEQ ID NO: 975851 - DNA, 33 bp, Homo sapien
atactagtaaaatcacactttaatacatcactc

SEQ ID NO: 975852 - DNA, 33 bp, Homo sapien
atactagtaaaatcactctttaatacatcactc

SEQ ID NO: 975853 - DNA, 33 bp, Homo sapien
gggtgcaagtaagcaactcaactgccaggttac

SEQ ID NO: 975854 - DNA, 33 bp, Homo sapien
gggtgcaagtaagcaattcaactgccaggttac

SEQ ID NO: 975855 - DNA, 33 bp, Homo sapien
gttgtggctgcatttcaaattggattaaagagc

SEQ ID NO: 975856 - DNA, 33 bp, Homo sapien
gttgtggctgcatttcgaattggattaaagagc

SEQ ID NO: 975857 - DNA, 33 bp, Homo sapien
gcaactgtgaatgcatcaatacacagaaacaaa

SEQ ID NO: 975858 - DNA, 33 bp, Homo sapien
gcaactgtgaatgcatgaatacacagaaacaaa

SEQ ID NO: 975859 - DNA, 33 bp, Homo sapien
gctaaatcagaaactcagaaaaatacaaccatt

SEQ ID NO: 975860 - DNA, 33 bp, Homo sapien
gctaaatcagaaactccgaaaaatacaaccatt

SEQ ID NO: 975861 - DNA, 33 bp, Homo sapien
gtgaacctgaaccaccacaaaaatgggtctgca

SEQ ID NO: 975862 - DNA, 33 bp, Homo sapien
gtgaacctgaaccaccgcaaaaatgggtctgca

SEQ ID NO: 975863 - DNA, 33 bp, Homo sapien
tttcttacatatacaacaaatatacctcagagt

SEQ ID NO: 975864 - DNA, 33 bp, Homo sapien
tttcttacatatacaagaaatatacctcagagt

SEQ ID NO: 975865 - DNA, 33 bp, Homo sapien
gaagtggaagatttcacgcctacctcacgtaat

SEQ ID NO: 975866 - DNA, 33 bp, Homo sapien
gaagtggaagatttcatgcctacctcacgtaat

SEQ ID NO: 975867 - DNA, 33 bp, Homo sapien
ccacagtctcatctgacattagccttctaccat

SEQ ID NO: 975868 - DNA, 33 bp, Homo sapien
ccacagtctcatctgagattagccttctaccat

SEQ ID NO: 975869 - DNA, 33 bp, Homo sapien
tttgtgaggtagaaaactgtgtgcagaaaccct

SEQ ID NO: 975870 - DNA, 33 bp, Homo sapien
tttgtgaggtagaaaattgtgtgcagaaaccct

SEQ ID NO: 975871 - DNA, 33 bp, Homo sapien
taccaatcaaaatcccagaaagttactttgtag

SEQ ID NO: 975872 - DNA, 33 bp, Homo sapien
taccaatcaaaatcccggaaagttactttgtag

SEQ ID NO: 975873 - DNA, 33 bp, Homo sapien
aattgaggacagcataacagctggaagcctggg

SEQ ID NO: 975874 - DNA, 33 bp, Homo sapien
aattgaggacagcatatcagctggaagcctggg

SEQ ID NO: 975875 - DNA, 33 bp, Homo sapien
gccattctgagaatacaatgcttatgattagtt

SEQ ID NO: 975876 - DNA, 33 bp, Homo sapien
gccattctgagaatacgatgcttatgattagtt

SEQ ID NO: 975877 - DNA, 33 bp, Homo sapien
tccctgaccactcaaaagtaaattgctcccatc

SEQ ID NO: 975878 - DNA, 33 bp, Homo sapien
tccctgaccactcaaacgtaaattgctcccatc

SEQ ID NO: 975879 - DNA, 33 bp, Homo sapien
gaagtgaagggcaaaactgtgattttcattttg

SEQ ID NO: 975880 - DNA, 33 bp, Homo sapien
gaagtgaagggcaaaagtgtgattttcattttg

SEQ ID NO: 975881 - DNA, 33 bp, Homo sapien
tgtagatgtggttcaacgtaatgtgggatgctt

SEQ ID NO: 975882 - DNA, 33 bp, Homo sapien
tgtagatgtggttcaatgtaatgtgggatgctt

SEQ ID NO: 975883 - DNA, 33 bp, Homo sapien
agaaaagcaggagaaactcacagaatcacttac

SEQ ID NO: 975884 - DNA, 33 bp, Homo sapien
agaaaagcaggagaaagtcacagaatcacttac

SEQ ID NO: 975885 - DNA, 33 bp, Homo sapien
gcttatttcttggctccattcgagatcttactc

SEQ ID NO: 975886 - DNA, 33 bp, Homo sapien
gcttatttcttggctctattcgagatcttactc

SEQ ID NO: 975887 - DNA, 33 bp, Homo sapien
agtatttcaaaatctgccaaaccgataggaata

SEQ ID NO: 975888 - DNA, 33 bp, Homo sapien
agtatttcaaaatctggcaaaccgataggaata

SEQ ID NO: 975889 - DNA, 33 bp, Homo sapien
ttgtccatgccagaaggcttcgtaatgacaact

SEQ ID NO: 975890 - DNA, 33 bp, Homo sapien
ttgtccatgccagaagtcttcgtaatgacaact

SEQ ID NO: 975891 - DNA, 33 bp, Homo sapien
ttaaaacttggctacgcatttttattcattatg

SEQ ID NO: 975892 - DNA, 33 bp, Homo sapien
ttaaaacttggctacgtatttttattcattatg

SEQ ID NO: 975893 - DNA, 33 bp, Homo sapien
ggtatgaatgacagcacctgaagacatctgata

SEQ ID NO: 975894 - DNA, 33 bp, Homo sapien
ggtatgaatgacagcatctgaagacatctgata

SEQ ID NO: 975895 - DNA, 33 bp, Homo sapien
agaagctctcaatgtcacctcttagagctacct

SEQ ID NO: 975896 - DNA, 33 bp, Homo sapien
agaagctctcaatgtcgcctcttagagctacct

SEQ ID NO: 975897 - DNA, 33 bp, Homo sapien
aattcatgaagtataagagggaataaagcactt

SEQ ID NO: 975898 - DNA, 33 bp, Homo sapien
aattcatgaagtataatagggaataaagcactt

SEQ ID NO: 975899 - DNA, 33 bp, Homo sapien
gtggatatacgtgtaacggtgagcaaaaaagga

SEQ ID NO: 975900 - DNA, 33 bp, Homo sapien
gtggatatacgtgtaagggtgagcaaaaaagga

SEQ ID NO: 975901 - DNA, 33 bp, Homo sapien
gcagttgatgcttgccaactactaaatgaaaat

SEQ ID NO: 975902 - DNA, 33 bp, Homo sapien
gcagttgatgcttgcctactactaaatgaaaat

SEQ ID NO: 975903 - DNA, 33 bp, Homo sapien
attatgccaacagggacaaggcggctgcaattg

SEQ ID NO: 975904 - DNA, 33 bp, Homo sapien
attatgccaacagggagaaggcggctgcaattg

SEQ ID NO: 975905 - DNA, 33 bp, Homo sapien
agcaacaagagaatgaaacagcaaaagtagata

SEQ ID NO: 975906 - DNA, 33 bp, Homo sapien
agcaacaagagaatgagacagcaaaagtagata

SEQ ID NO: 975907 - DNA, 33 bp, Homo sapien
aattaggcataaactcaagaagtacagatgtgg

SEQ ID NO: 975908 - DNA, 33 bp, Homo sapien
aattaggcataaactcgagaagtacagatgtgg

SEQ ID NO: 975909 - DNA, 33 bp, Homo sapien
atagaactaaaaaataccagccaatttaccatc

SEQ ID NO: 975910 - DNA, 33 bp, Homo sapien
atagaactaaaaaatagcagccaatttaccatc

SEQ ID NO: 975911 - DNA, 33 bp, Homo sapien
atggaagttgtaaatacgctgaagaaacacaaa

SEQ ID NO: 975912 - DNA, 33 bp, Homo sapien
atggaagttgtaaatatgctgaagaaacacaaa

SEQ ID NO: 975913 - DNA, 33 bp, Homo sapien
gtaaccagtattgccaagttcctgtgagagttc

SEQ ID NO: 975914 - DNA, 33 bp, Homo sapien
gtaaccagtattgccaggttcctgtgagagttc

SEQ ID NO: 975915 - DNA, 33 bp, Homo sapien
gcttgtcttcttgcagcaggaaaggagatgaaa

SEQ ID NO: 975916 - DNA, 33 bp, Homo sapien
gcttgtcttcttgcaggaggaaaggagatgaaa

SEQ ID NO: 975917 - DNA, 33 bp, Homo sapien
agagatgggtatacatgacactgcagttccctt

SEQ ID NO: 975918 - DNA, 33 bp, Homo sapien
agagatgggtatacattacactgcagttccctt

SEQ ID NO: 975919 - DNA, 33 bp, Homo sapien
tccccagcttagcagaaagccagcttagtagat

SEQ ID NO: 975920 - DNA, 33 bp, Homo sapien
tccccagcttagcagagagccagcttagtagat

SEQ ID NO: 975921 - DNA, 33 bp, Homo sapien
gaagtatttacattgcaacagctggactccttt

SEQ ID NO: 975922 - DNA, 33 bp, Homo sapien
gaagtatttacattgccacagctggactccttt

SEQ ID NO: 975923 - DNA, 33 bp, Homo sapien
gccattctcttacgtcaatcttccttctatccc

SEQ ID NO: 975924 - DNA, 33 bp, Homo sapien
gccattctcttacgtccatcttccttctatccc

SEQ ID NO: 975925 - DNA, 33 bp, Homo sapien
aattcaaatgataaacagttcaaaacaagcaaa

SEQ ID NO: 975926 - DNA, 33 bp, Homo sapien
aattcaaatgataaacggttcaaaacaagcaaa

SEQ ID NO: 975927 - DNA, 33 bp, Homo sapien
tcacagatacttgttaaagagtctacttgggtc

SEQ ID NO: 975928 - DNA, 33 bp, Homo sapien
tcacagatacttgttacagagtctacttgggtc

SEQ ID NO: 975929 - DNA, 33 bp, Homo sapien
atcaaggatgtaatgaactcacagatattactg

SEQ ID NO: 975930 - DNA, 33 bp, Homo sapien
atcaaggatgtaatgagctcacagatattactg

SEQ ID NO: 975931 - DNA, 33 bp, Homo sapien
tgcaaatttttacttaaaacagctctattgtac

SEQ ID NO: 975932 - DNA, 33 bp, Homo sapien
tgcaaatttttacttataacagctctattgtac

SEQ ID NO: 975933 - DNA, 33 bp, Homo sapien
tgtgttatcggttgctcacaattaacacatacc

SEQ ID NO: 975934 - DNA, 33 bp, Homo sapien
tgtgttatcggttgcttacaattaacacatacc

SEQ ID NO: 975935 - DNA, 33 bp, Homo sapien
gcacatactggcaaaacgtggtagaatgcaatg

SEQ ID NO: 975936 - DNA, 33 bp, Homo sapien
gcacatactggcaaaatgtggtagaatgcaatg

SEQ ID NO: 975937 - DNA, 33 bp, Homo sapien
tgactatctttgggaaagtagcaaggtaaagaa

SEQ ID NO: 975938 - DNA, 33 bp, Homo sapien
tgactatctttgggaacgtagcaaggtaaagaa

SEQ ID NO: 975939 - DNA, 33 bp, Homo sapien
tctctcttagaaccctcagagcaaccatgccct

SEQ ID NO: 975940 - DNA, 33 bp, Homo sapien
tctctcttagaaccctgagagcaaccatgccct

SEQ ID NO: 975941 - DNA, 33 bp, Homo sapien
taaaaatgatgggtgtccaaaaagtgttaacat

SEQ ID NO: 975942 - DNA, 33 bp, Homo sapien
taaaaatgatgggtgttcaaaaagtgttaacat

SEQ ID NO: 975943 - DNA, 33 bp, Homo sapien
gctgattgacgtaaaaaacatattgtacacctt

SEQ ID NO: 975944 - DNA, 33 bp, Homo sapien
gctgattgacgtaaaagacatattgtacacctt

SEQ ID NO: 975945 - DNA, 33 bp, Homo sapien
gagctgatgaccagccaaggctaacatattaca

SEQ ID NO: 975946 - DNA, 33 bp, Homo sapien
gagctgatgaccagccgaggctaacatattaca

SEQ ID NO: 975947 - DNA, 33 bp, Homo sapien
gcatttaaatactaacagtgaatggccaattct

SEQ ID NO: 975948 - DNA, 33 bp, Homo sapien
gcatttaaatactaacggtgaatggccaattct

SEQ ID NO: 975949 - DNA, 33 bp, Homo sapien
ttccacaaatctttagcacatgagcaaaatgcc

SEQ ID NO: 975950 - DNA, 33 bp, Homo sapien
ttccacaaatctttaggacatgagcaaaatgcc

SEQ ID NO: 975951 - DNA, 33 bp, Homo sapien
cagcctgggagacagacactccatttcaaaaaa

SEQ ID NO: 975952 - DNA, 33 bp, Homo sapien
cagcctgggagacagagactccatttcaaaaaa

SEQ ID NO: 975953 - DNA, 33 bp, Homo sapien
ctgaaacacatccccccactcattatgttgtgg

SEQ ID NO: 975954 - DNA, 33 bp, Homo sapien
ctgaaacacatccccctactcattatgttgtgg

SEQ ID NO: 975955 - DNA, 33 bp, Homo sapien
tctgcagttcctgacaactccaagcttctagac

SEQ ID NO: 975956 - DNA, 33 bp, Homo sapien
tctgcagttcctgacatctccaagcttctagac

SEQ ID NO: 975957 - DNA, 33 bp, Homo sapien
ttagttccagctcttacgcggaatgcttccagc

SEQ ID NO: 975958 - DNA, 33 bp, Homo sapien
ttagttccagctcttaggcggaatgcttccagc

SEQ ID NO: 975959 - DNA, 33 bp, Homo sapien
tcatatgaaccaagaaagtgcccaaataaatag

SEQ ID NO: 975960 - DNA, 33 bp, Homo sapien
tcatatgaaccaagaacgtgcccaaataaatag

SEQ ID NO: 975961 - DNA, 33 bp, Homo sapien
tatttccttagtaaacccaatggtcaggcatga

SEQ ID NO: 975962 - DNA, 33 bp, Homo sapien
tatttccttagtaaactcaatggtcaggcatga

SEQ ID NO: 975963 - DNA, 33 bp, Homo sapien
cactcacacacactcactcacttttctctatta

SEQ ID NO: 975964 - DNA, 33 bp, Homo sapien
cactcacacacactcattcacttttctctatta

SEQ ID NO: 975965 - DNA, 33 bp, Homo sapien
tgctgtcactgtaaacaggattattttcttagt

SEQ ID NO: 975966 - DNA, 33 bp, Homo sapien
tgctgtcactgtaaacgggattattttcttagt

SEQ ID NO: 975967 - DNA, 33 bp, Homo sapien
agaaaacaagggtgctcacttgactattttatt

SEQ ID NO: 975968 - DNA, 33 bp, Homo sapien
agaaaacaagggtgcttacttgactattttatt

SEQ ID NO: 975969 - DNA, 33 bp, Homo sapien
aactgtgcgggtgctacattccttacctctata

SEQ ID NO: 975970 - DNA, 33 bp, Homo sapien
aactgtgcgggtgctatattccttacctctata

SEQ ID NO: 975971 - DNA, 33 bp, Homo sapien
aagtgtacacttctcaataagtatttgctatgt

SEQ ID NO: 975972 - DNA, 33 bp, Homo sapien
aagtgtacacttctcagtaagtatttgctatgt

SEQ ID NO: 975973 - DNA, 33 bp, Homo sapien
ttctacattgttttgaaatttttacttgcataa

SEQ ID NO: 975974 - DNA, 33 bp, Homo sapien
ttctacattgttttgacatttttacttgcataa

SEQ ID NO: 975975 - DNA, 33 bp, Homo sapien
gtgcaaagaaaagagaacagacaaggatgactc

SEQ ID NO: 975976 - DNA, 33 bp, Homo sapien
gtgcaaagaaaagagagcagacaaggatgactc

SEQ ID NO: 975977 - DNA, 33 bp, Homo sapien
aaagtatagtcctagaagtgtagtttatagtat

SEQ ID NO: 975978 - DNA, 33 bp, Homo sapien
aaagtatagtcctagaggtgtagtttatagtat

SEQ ID NO: 975979 - DNA, 33 bp, Homo sapien
ctgaaatattaatggacgatgtgaagaaaaaca

SEQ ID NO: 975980 - DNA, 33 bp, Homo sapien
ctgaaatattaatggatgatgtgaagaaaaaca

SEQ ID NO: 975981 - DNA, 33 bp, Homo sapien
ctccccagaatgctacagctcttctttctttct

SEQ ID NO: 975982 - DNA, 33 bp, Homo sapien
ctccccagaatgctacggctcttctttctttct

SEQ ID NO: 975983 - DNA, 33 bp, Homo sapien
aaggttttagtgggaactgctatgaccaaccaa

SEQ ID NO: 975984 - DNA, 33 bp, Homo sapien
aaggttttagtgggaagtgctatgaccaaccaa

SEQ ID NO: 975985 - DNA, 33 bp, Homo sapien
aaaagtcaggacataacagatgctggagaggat

SEQ ID NO: 975986 - DNA, 33 bp, Homo sapien
aaaagtcaggacataagagatgctggagaggat

SEQ ID NO: 975987 - DNA, 33 bp, Homo sapien
cttaacatggtcataaaatccttcatagcaaac

SEQ ID NO: 975988 - DNA, 33 bp, Homo sapien
cttaacatggtcataacatccttcatagcaaac

SEQ ID NO: 975989 - DNA, 33 bp, Homo sapien
ggagaaagaaaatgtaagcttcaaaagaaaagc

SEQ ID NO: 975990 - DNA, 33 bp, Homo sapien
ggagaaagaaaatgtatgcttcaaaagaaaagc

SEQ ID NO: 975991 - DNA, 33 bp, Homo sapien
accactgagggaagataagactcccatggggga

SEQ ID NO: 975992 - DNA, 33 bp, Homo sapien
accactgagggaagatgagactcccatggggga

SEQ ID NO: 975993 - DNA, 33 bp, Homo sapien
ttttgtcttcttgacactcttgatgcccacaag

SEQ ID NO: 975994 - DNA, 33 bp, Homo sapien
ttttgtcttcttgacattcttgatgcccacaag

SEQ ID NO: 975995 - DNA, 33 bp, Homo sapien
cagctgatgatcaaggaactgaaaacaggcaga

SEQ ID NO: 975996 - DNA, 33 bp, Homo sapien
cagctgatgatcaagggactgaaaacaggcaga

SEQ ID NO: 975997 - DNA, 33 bp, Homo sapien
tagcctgaaattattacgaagattgtagacatt

SEQ ID NO: 975998 - DNA, 33 bp, Homo sapien
tagcctgaaattattatgaagattgtagacatt

SEQ ID NO: 975999 - DNA, 33 bp, Homo sapien
ctggagtgtgagcaagacaaagaagtgctttat

SEQ ID NO: 976000 - DNA, 33 bp, Homo sapien
ctggagtgtgagcaaggcaaagaagtgctttat

SEQ ID NO: 976001 - DNA, 33 bp, Homo sapien
acaacaagtgttaatggatatgtcaaaggggat

SEQ ID NO: 976002 - DNA, 33 bp, Homo sapien
acaacaagtgttaatgtatatgtcaaaggggat

SEQ ID NO: 976003 - DNA, 33 bp, Homo sapien
ttctcagctgtattgaagaataattgacaaatt

SEQ ID NO: 976004 - DNA, 33 bp, Homo sapien
ttctcagctgtattgaggaataattgacaaatt

SEQ ID NO: 976005 - DNA, 33 bp, Homo sapien
cctcattctataggtccatgattaccccaatat

SEQ ID NO: 976006 - DNA, 33 bp, Homo sapien
cctcattctataggtcgatgattaccccaatat

SEQ ID NO: 976007 - DNA, 33 bp, Homo sapien
tttcaggactgcaataggcaaacaattcctaac

SEQ ID NO: 976008 - DNA, 33 bp, Homo sapien
tttcaggactgcaatatgcaaacaattcctaac

SEQ ID NO: 976009 - DNA, 33 bp, Homo sapien
cctcaggaattcatgaagcttaggaagagcata

SEQ ID NO: 976010 - DNA, 33 bp, Homo sapien
cctcaggaattcatgacgcttaggaagagcata

SEQ ID NO: 976011 - DNA, 33 bp, Homo sapien
cttagtatatgaggtaaagatgcttgtaacata

SEQ ID NO: 976012 - DNA, 33 bp, Homo sapien
cttagtatatgaggtatagatgcttgtaacata

SEQ ID NO: 976013 - DNA, 33 bp, Homo sapien
caacttctgttcccaacaaaaatgaacaagagt

SEQ ID NO: 976014 - DNA, 33 bp, Homo sapien
caacttctgttcccaagaaaaatgaacaagagt

SEQ ID NO: 976015 - DNA, 33 bp, Homo sapien
tttttagtgttattgaactctgaagcagatttt

SEQ ID NO: 976016 - DNA, 33 bp, Homo sapien
tttttagtgttattgatctctgaagcagatttt

SEQ ID NO: 976017 - DNA, 33 bp, Homo sapien
actgcaaatacatttaaaggaaggaagaatatt

SEQ ID NO: 976018 - DNA, 33 bp, Homo sapien
actgcaaatacatttacaggaaggaagaatatt

SEQ ID NO: 976019 - DNA, 33 bp, Homo sapien
ttcttaatcacaaaagccagaaatctggaagtc

SEQ ID NO: 976020 - DNA, 33 bp, Homo sapien
ttcttaatcacaaaaggcagaaatctggaagtc

SEQ ID NO: 976021 - DNA, 33 bp, Homo sapien
aagactttggagaccaagattcttttgaagtct

SEQ ID NO: 976022 - DNA, 33 bp, Homo sapien
aagactttggagaccatgattcttttgaagtct

SEQ ID NO: 976023 - DNA, 33 bp, Homo sapien
aaataagcttggctcaatactgggaacaaatgc

SEQ ID NO: 976024 - DNA, 33 bp, Homo sapien
aaataagcttggctcagtactgggaacaaatgc

SEQ ID NO: 976025 - DNA, 33 bp, Homo sapien
atataatgttgatcccaaagaacaagacacggt

SEQ ID NO: 976026 - DNA, 33 bp, Homo sapien
atataatgttgatcccgaagaacaagacacggt

SEQ ID NO: 976027 - DNA, 33 bp, Homo sapien
ttgaaggttgtgagaactgtaaagggtaagtgg

SEQ ID NO: 976028 - DNA, 33 bp, Homo sapien
ttgaaggttgtgagaattgtaaagggtaagtgg

SEQ ID NO: 976029 - DNA, 33 bp, Homo sapien
ctatttgtcacacaccaatatagatattttcaa

SEQ ID NO: 976030 - DNA, 33 bp, Homo sapien
ctatttgtcacacaccgatatagatattttcaa

SEQ ID NO: 976031 - DNA, 33 bp, Homo sapien
gaaaacccacataagacctgaaaatcaaaacaa

SEQ ID NO: 976032 - DNA, 33 bp, Homo sapien
gaaaacccacataagatctgaaaatcaaaacaa

SEQ ID NO: 976033 - DNA, 33 bp, Homo sapien
cacctattcttagggtaacattttggatattgc

SEQ ID NO: 976034 - DNA, 33 bp, Homo sapien
cacctattcttagggtcacattttggatattgc

SEQ ID NO: 976035 - DNA, 33 bp, Homo sapien
ttggagctgccagttaaccccgccaatcatcag

SEQ ID NO: 976036 - DNA, 33 bp, Homo sapien
ttggagctgccagttatccccgccaatcatcag

SEQ ID NO: 976037 - DNA, 33 bp, Homo sapien
atatctgctaaacctaagactctcttggtgtta

SEQ ID NO: 976038 - DNA, 33 bp, Homo sapien
atatctgctaaacctaggactctcttggtgtta

SEQ ID NO: 976039 - DNA, 33 bp, Homo sapien
agttttgcaaaactcaagtctccttcactatta

SEQ ID NO: 976040 - DNA, 33 bp, Homo sapien
agttttgcaaaactcaggtctccttcactatta

SEQ ID NO: 976041 - DNA, 33 bp, Homo sapien
ggattaaaaacacataaaaaggtcttgtctttg

SEQ ID NO: 976042 - DNA, 33 bp, Homo sapien
ggattaaaaacacatacaaaggtcttgtctttg

SEQ ID NO: 976043 - DNA, 33 bp, Homo sapien
tgcttcacacatctagaacacagttgcttcact

SEQ ID NO: 976044 - DNA, 33 bp, Homo sapien
tgcttcacacatctaggacacagttgcttcact

SEQ ID NO: 976045 - DNA, 33 bp, Homo sapien
acattgctaagcatgaataggaaaattgtggaa

SEQ ID NO: 976046 - DNA, 33 bp, Homo sapien
acattgctaagcatgagtaggaaaattgtggaa

SEQ ID NO: 976047 - DNA, 33 bp, Homo sapien
ttagtatggatcttgcaatagtgagtatccaac

SEQ ID NO: 976048 - DNA, 33 bp, Homo sapien
ttagtatggatcttgccatagtgagtatccaac

SEQ ID NO: 976049 - DNA, 33 bp, Homo sapien
tctgaaatatcacactcaaggaaaatttgatct

SEQ ID NO: 976050 - DNA, 33 bp, Homo sapien
tctgaaatatcacacttaaggaaaatttgatct

SEQ ID NO: 976051 - DNA, 33 bp, Homo sapien
aatggcattgcttatcaaagggctaattccaca

SEQ ID NO: 976052 - DNA, 33 bp, Homo sapien
aatggcattgcttatcgaagggctaattccaca

SEQ ID NO: 976053 - DNA, 33 bp, Homo sapien
ggcttatttctcttaacataaagttctccagtg

SEQ ID NO: 976054 - DNA, 33 bp, Homo sapien
ggcttatttctcttaatataaagttctccagtg

SEQ ID NO: 976055 - DNA, 33 bp, Homo sapien
ggcttgtgaggttggaagaacaatatctgtcag

SEQ ID NO: 976056 - DNA, 33 bp, Homo sapien
ggcttgtgaggttggaggaacaatatctgtcag

SEQ ID NO: 976057 - DNA, 33 bp, Homo sapien
gcatgcaaagttataaatgtaagaattacagca

SEQ ID NO: 976058 - DNA, 33 bp, Homo sapien
gcatgcaaagttataattgtaagaattacagca

SEQ ID NO: 976059 - DNA, 33 bp, Homo sapien
ctagactctaataaaaagtatgctgtaattctt

SEQ ID NO: 976060 - DNA, 33 bp, Homo sapien
ctagactctaataaaacgtatgctgtaattctt

SEQ ID NO: 976061 - DNA, 33 bp, Homo sapien
tctcccaccagtcagactagctatcatgaaaaa

SEQ ID NO: 976062 - DNA, 33 bp, Homo sapien
tctcccaccagtcagagtagctatcatgaaaaa

SEQ ID NO: 976063 - DNA, 33 bp, Homo sapien
cacagtaatagtgagaaacaacgctccactggc

SEQ ID NO: 976064 - DNA, 33 bp, Homo sapien
cacagtaatagtgagagacaacgctccactggc

SEQ ID NO: 976065 - DNA, 33 bp, Homo sapien
ctcttaatttccaaccaatagtgtttacaacag

SEQ ID NO: 976066 - DNA, 33 bp, Homo sapien
ctcttaatttccaaccgatagtgtttacaacag

SEQ ID NO: 976067 - DNA, 33 bp, Homo sapien
cagacagtggagactaacattgcaactttagca

SEQ ID NO: 976068 - DNA, 33 bp, Homo sapien
cagacagtggagactagcattgcaactttagca

SEQ ID NO: 976069 - DNA, 33 bp, Homo sapien
gattgtgcatccatgtcaattgtcactgaagta

SEQ ID NO: 976070 - DNA, 33 bp, Homo sapien
gattgtgcatccatgttaattgtcactgaagta

SEQ ID NO: 976071 - DNA, 33 bp, Homo sapien
ccatgtaaacaatacaaatgttgccattggtaa

SEQ ID NO: 976072 - DNA, 33 bp, Homo sapien
ccatgtaaacaatacatatgttgccattggtaa

SEQ ID NO: 976073 - DNA, 33 bp, Homo sapien
tgattcagcataatttgaaagctgcttttattt

SEQ ID NO: 976074 - DNA, 33 bp, Homo sapien
tgattcagcataattttaaagctgcttttattt

SEQ ID NO: 976075 - DNA, 33 bp, Homo sapien
aaaaacccaacatctccaagccttaggtagtag

SEQ ID NO: 976076 - DNA, 33 bp, Homo sapien
aaaaacccaacatctctaagccttaggtagtag

SEQ ID NO: 976077 - DNA, 33 bp, Homo sapien
atgtataagatgaatacgttaggacaggaccca

SEQ ID NO: 976078 - DNA, 33 bp, Homo sapien
atgtataagatgaatatgttaggacaggaccca

SEQ ID NO: 976079 - DNA, 33 bp, Homo sapien
atcctccaccatcctccatgtgacatctgatca

SEQ ID NO: 976080 - DNA, 33 bp, Homo sapien
atcctccaccatcctctatgtgacatctgatca

SEQ ID NO: 976081 - DNA, 33 bp, Homo sapien
tgtctaggaagaacatgaggagcctaactaaag

SEQ ID NO: 976082 - DNA, 33 bp, Homo sapien
tgtctaggaagaacattaggagcctaactaaag

SEQ ID NO: 976083 - DNA, 33 bp, Homo sapien
atctcacaatgaaataaacttcatgcctactat

SEQ ID NO: 976084 - DNA, 33 bp, Homo sapien
atctcacaatgaaatacacttcatgcctactat

SEQ ID NO: 976085 - DNA, 33 bp, Homo sapien
tttgaaccaagtgacaatcatttgctacaaggg

SEQ ID NO: 976086 - DNA, 33 bp, Homo sapien
tttgaaccaagtgacagtcatttgctacaaggg

SEQ ID NO: 976087 - DNA, 33 bp, Homo sapien
ctgcctgtattttgtagagatagaatggggttc

SEQ ID NO: 976088 - DNA, 33 bp, Homo sapien
ctgcctgtattttgtatagatagaatggggttc

SEQ ID NO: 976089 - DNA, 33 bp, Homo sapien
ctcaaacaagccataccgtaaagaggtgacaag

SEQ ID NO: 976090 - DNA, 33 bp, Homo sapien
ctcaaacaagccatactgtaaagaggtgacaag

SEQ ID NO: 976091 - DNA, 33 bp, Homo sapien
gtcttccttgagagaaacagcactgtgatcatt

SEQ ID NO: 976092 - DNA, 33 bp, Homo sapien
gtcttccttgagagaaccagcactgtgatcatt

SEQ ID NO: 976093 - DNA, 33 bp, Homo sapien
ggttaccagaggaaggaagggctagtcaaggag

SEQ ID NO: 976094 - DNA, 33 bp, Homo sapien
ggttaccagaggaagggagggctagtcaaggag

SEQ ID NO: 976095 - DNA, 33 bp, Homo sapien
gcaagaaagagaaatccattgtggctgattaat

SEQ ID NO: 976096 - DNA, 33 bp, Homo sapien
gcaagaaagagaaatctattgtggctgattaat

SEQ ID NO: 976097 - DNA, 33 bp, Homo sapien
gtgagagacaggcaaaagtcttcatatttgttt

SEQ ID NO: 976098 - DNA, 33 bp, Homo sapien
gtgagagacaggcaaaggtcttcatatttgttt

SEQ ID NO: 976099 - DNA, 33 bp, Homo sapien
gccagcgtgaaacagtaacaagtggtcattgac

SEQ ID NO: 976100 - DNA, 33 bp, Homo sapien
gccagcgtgaaacagttacaagtggtcattgac

SEQ ID NO: 976101 - DNA, 33 bp, Homo sapien
ctggtttttgaactcacggagtagcagataatg

SEQ ID NO: 976102 - DNA, 33 bp, Homo sapien
ctggtttttgaactcatggagtagcagataatg

SEQ ID NO: 976103 - DNA, 33 bp, Homo sapien
ctgttcatctctcccccatttctccaattcaaa

SEQ ID NO: 976104 - DNA, 33 bp, Homo sapien
ctgttcatctctccccgatttctccaattcaaa

SEQ ID NO: 976105 - DNA, 33 bp, Homo sapien
actcatgtcatctttacgtgactctctagttgg

SEQ ID NO: 976106 - DNA, 33 bp, Homo sapien
actcatgtcatctttatgtgactctctagttgg

SEQ ID NO: 976107 - DNA, 33 bp, Homo sapien
caccttccatacagagacctaatattctgatta

SEQ ID NO: 976108 - DNA, 33 bp, Homo sapien
caccttccatacagagtcctaatattctgatta

SEQ ID NO: 976109 - DNA, 33 bp, Homo sapien
ctcacttcacttctaaattacatgacagggtcc

SEQ ID NO: 976110 - DNA, 33 bp, Homo sapien
ctcacttcacttctaagttacatgacagggtcc

SEQ ID NO: 976111 - DNA, 33 bp, Homo sapien
tttaaataacttgatcacttttacatagtggca

SEQ ID NO: 976112 - DNA, 33 bp, Homo sapien
tttaaataacttgatcccttttacatagtggca

SEQ ID NO: 976113 - DNA, 33 bp, Homo sapien
aacttggttgattttcacaagacttgatcatgt

SEQ ID NO: 976114 - DNA, 33 bp, Homo sapien
aacttggttgattttcccaagacttgatcatgt

SEQ ID NO: 976115 - DNA, 33 bp, Homo sapien
ttggctatatacattacggagacataagacttc

SEQ ID NO: 976116 - DNA, 33 bp, Homo sapien
ttggctatatacattagggagacataagacttc

SEQ ID NO: 976117 - DNA, 33 bp, Homo sapien
taccatttgatatttcaaataagtgacatacat

SEQ ID NO: 976118 - DNA, 33 bp, Homo sapien
taccatttgatatttctaataagtgacatacat

SEQ ID NO: 976119 - DNA, 33 bp, Homo sapien
tattaagaattaggtaacagtagtattcttgtt

SEQ ID NO: 976120 - DNA, 33 bp, Homo sapien
tattaagaattaggtaccagtagtattcttgtt

SEQ ID NO: 976121 - DNA, 33 bp, Homo sapien
tattttatcccatttacgtactgtatatgtgtg

SEQ ID NO: 976122 - DNA, 33 bp, Homo sapien
tattttatcccatttatgtactgtatatgtgtg

SEQ ID NO: 976123 - DNA, 33 bp, Homo sapien
atgcatcaaaatttaccccacatttcttctcat

SEQ ID NO: 976124 - DNA, 33 bp, Homo sapien
atgcatcaaaatttactccacatttcttctcat

SEQ ID NO: 976125 - DNA, 33 bp, Homo sapien
atttttttagccaccaagtgtcgctatttagct

SEQ ID NO: 976126 - DNA, 33 bp, Homo sapien
atttttttagccaccaggtgtcgctatttagct

SEQ ID NO: 976127 - DNA, 33 bp, Homo sapien
aaagtatctccacagaaatcaagaagtgaaggt

SEQ ID NO: 976128 - DNA, 33 bp, Homo sapien
aaagtatctccacagacatcaagaagtgaaggt

SEQ ID NO: 976129 - DNA, 33 bp, Homo sapien
ttctgagcattgcagaatatttacttttggctt

SEQ ID NO: 976130 - DNA, 33 bp, Homo sapien
ttctgagcattgcagagtatttacttttggctt

SEQ ID NO: 976131 - DNA, 33 bp, Homo sapien
gatgacctctctgcaaccaacatgacggcagtg

SEQ ID NO: 976132 - DNA, 33 bp, Homo sapien
gatgacctctctgcaagcaacatgacggcagtg

SEQ ID NO: 976133 - DNA, 33 bp, Homo sapien
ttgtgcctaagagttgcatatttttcagtttct

SEQ ID NO: 976134 - DNA, 33 bp, Homo sapien
ttgtgcctaagagttggatatttttcagtttct

SEQ ID NO: 976135 - DNA, 33 bp, Homo sapien
gaagacaatcacaaaaagccatatattgtatat

SEQ ID NO: 976136 - DNA, 33 bp, Homo sapien
gaagacaatcacaaaaggccatatattgtatat

SEQ ID NO: 976137 - DNA, 33 bp, Homo sapien
actctgttccatagaagccctttagtaaggcag

SEQ ID NO: 976138 - DNA, 33 bp, Homo sapien
actctgttccatagaatccctttagtaaggcag

SEQ ID NO: 976139 - DNA, 33 bp, Homo sapien
cattcaagagactatgaaatcctacattatgtt

SEQ ID NO: 976140 - DNA, 33 bp, Homo sapien
cattcaagagactatggaatcctacattatgtt

SEQ ID NO: 976141 - DNA, 33 bp, Homo sapien
gttactaaactcaaaacgccatgtcccttactc

SEQ ID NO: 976142 - DNA, 33 bp, Homo sapien
gttactaaactcaaaatgccatgtcccttactc

SEQ ID NO: 976143 - DNA, 33 bp, Homo sapien
cagcagtttattatgaaatttgaactattggat

SEQ ID NO: 976144 - DNA, 33 bp, Homo sapien
cagcagtttattatgatatttgaactattggat

SEQ ID NO: 976145 - DNA, 33 bp, Homo sapien
tatctttgcccaagataatatgccttcatcatt

SEQ ID NO: 976146 - DNA, 33 bp, Homo sapien
tatctttgcccaagatgatatgccttcatcatt

SEQ ID NO: 976147 - DNA, 33 bp, Homo sapien
ccaggagcctctgatacagacaaatccacctgt

SEQ ID NO: 976148 - DNA, 33 bp, Homo sapien
ccaggagcctctgatatagacaaatccacctgt

SEQ ID NO: 976149 - DNA, 33 bp, Homo sapien
gcaagttcatgatctaccataagtaatgttaca

SEQ ID NO: 976150 - DNA, 33 bp, Homo sapien
gcaagttcatgatctatcataagtaatgttaca

SEQ ID NO: 976151 - DNA, 33 bp, Homo sapien
ctgtcatcatgtactaagataaataacactaac

SEQ ID NO: 976152 - DNA, 33 bp, Homo sapien
ctgtcatcatgtactaggataaataacactaac

SEQ ID NO: 976153 - DNA, 33 bp, Homo sapien
tagtttcccaaggccactatcctttaaaattca

SEQ ID NO: 976154 - DNA, 33 bp, Homo sapien
tagtttcccaaggccattatcctttaaaattca

SEQ ID NO: 976155 - DNA, 33 bp, Homo sapien
atgtaaggcaaacaaaatctccaagtgtccttg

SEQ ID NO: 976156 - DNA, 33 bp, Homo sapien
atgtaaggcaaacaaagtctccaagtgtccttg

SEQ ID NO: 976157 - DNA, 33 bp, Homo sapien
gttttagctttttccaccattatggtctccaaa

SEQ ID NO: 976158 - DNA, 33 bp, Homo sapien
gttttagctttttccatcattatggtctccaaa

SEQ ID NO: 976159 - DNA, 33 bp, Homo sapien
aagcatgaaattggaaccttgtcttgcaccata

SEQ ID NO: 976160 - DNA, 33 bp, Homo sapien
aagcatgaaattggaatcttgtcttgcaccata

SEQ ID NO: 976161 - DNA, 33 bp, Homo sapien
tcaggaactggccataataggcaggaatgggat

SEQ ID NO: 976162 - DNA, 33 bp, Homo sapien
tcaggaactggccatagtaggcaggaatgggat

SEQ ID NO: 976163 - DNA, 33 bp, Homo sapien
atataagtcaaaacaaaagaagaggaatgaaca

SEQ ID NO: 976164 - DNA, 33 bp, Homo sapien
atataagtcaaaacaagagaagaggaatgaaca

SEQ ID NO: 976165 - DNA, 33 bp, Homo sapien
tagcacatcttcccataaggcctatagcgctag

SEQ ID NO: 976166 - DNA, 33 bp, Homo sapien
tagcacatcttcccattaggcctatagcgctag

SEQ ID NO: 976167 - DNA, 33 bp, Homo sapien
tattcctataacagtcacagattgcttatcttt

SEQ ID NO: 976168 - DNA, 33 bp, Homo sapien
tattcctataacagtcgcagattgcttatcttt

SEQ ID NO: 976169 - DNA, 33 bp, Homo sapien
tccctactatagatgacgccaaatagacagctg

SEQ ID NO: 976170 - DNA, 33 bp, Homo sapien
tccctactatagatgatgccaaatagacagctg

SEQ ID NO: 976171 - DNA, 33 bp, Homo sapien
atgattttcctggacccaaatatagtgctgggt

SEQ ID NO: 976172 - DNA, 33 bp, Homo sapien
atgattttcctggacctaaatatagtgctgggt

SEQ ID NO: 976173 - DNA, 33 bp, Homo sapien
taccatatacacccataatcggtaaaaacttta

SEQ ID NO: 976174 - DNA, 33 bp, Homo sapien
taccatatacacccatgatcggtaaaaacttta

SEQ ID NO: 976175 - DNA, 33 bp, Homo sapien
gtcttaacactaagcaccaatctattaaaaact

SEQ ID NO: 976176 - DNA, 33 bp, Homo sapien
gtcttaacactaagcatcaatctattaaaaact

SEQ ID NO: 976177 - DNA, 33 bp, Homo sapien
tcaaagaatacctggaagatgctatacaaggga

SEQ ID NO: 976178 - DNA, 33 bp, Homo sapien
tcaaagaatacctggaggatgctatacaaggga

SEQ ID NO: 976179 - DNA, 33 bp, Homo sapien
tttctcttggatctcactaagttcctaacattc

SEQ ID NO: 976180 - DNA, 33 bp, Homo sapien
tttctcttggatctcattaagttcctaacattc

SEQ ID NO: 976181 - DNA, 33 bp, Homo sapien
ttgtggataatgtcagactcactgtctcctaca

SEQ ID NO: 976182 - DNA, 33 bp, Homo sapien
ttgtggataatgtcaggctcactgtctcctaca

SEQ ID NO: 976183 - DNA, 33 bp, Homo sapien
ccacttactagccagaagatcaacctgcatggc

SEQ ID NO: 976184 - DNA, 33 bp, Homo sapien
ccacttactagccagaggatcaacctgcatggc

SEQ ID NO: 976185 - DNA, 33 bp, Homo sapien
aatctttcagctgaaaagaaacgttgaagatgt

SEQ ID NO: 976186 - DNA, 33 bp, Homo sapien
aatctttcagctgaaaggaaacgttgaagatgt

SEQ ID NO: 976187 - DNA, 33 bp, Homo sapien
tgccagtgaaaatcaaagatacgggctagttag

SEQ ID NO: 976188 - DNA, 33 bp, Homo sapien
tgccagtgaaaatcaatgatacgggctagttag

SEQ ID NO: 976189 - DNA, 33 bp, Homo sapien
tgctccccagtaaaaaagaaagatggcctcttc

SEQ ID NO: 976190 - DNA, 33 bp, Homo sapien
tgctccccagtaaaaaggaaagatggcctcttc

SEQ ID NO: 976191 - DNA, 33 bp, Homo sapien
atggcctacctgagatcaactactaaatgttat

SEQ ID NO: 976192 - DNA, 33 bp, Homo sapien
atggcctacctgagatgaactactaaatgttat

SEQ ID NO: 976193 - DNA, 33 bp, Homo sapien
taaggtctctggaaaacctcagattacctcact

SEQ ID NO: 976194 - DNA, 33 bp, Homo sapien
taaggtctctggaaaagctcagattacctcact

SEQ ID NO: 976195 - DNA, 33 bp, Homo sapien
tattgcatcagtagggaccatggaaccagttgt

SEQ ID NO: 976196 - DNA, 33 bp, Homo sapien
tattgcatcagtaggggccatggaaccagttgt

SEQ ID NO: 976197 - DNA, 33 bp, Homo sapien
tgtttttcaatccataagttacagagtgaatat

SEQ ID NO: 976198 - DNA, 33 bp, Homo sapien
tgtttttcaatccataggttacagagtgaatat

SEQ ID NO: 976199 - DNA, 33 bp, Homo sapien
tgaaagtaagtagagcaaagttgtgtttgtttt

SEQ ID NO: 976200 - DNA, 33 bp, Homo sapien
tgaaagtaagtagagcgaagttgtgtttgtttt

SEQ ID NO: 976201 - DNA, 33 bp, Homo sapien
tcactgagatatttaaagcaacattaaactgta

SEQ ID NO: 976202 - DNA, 33 bp, Homo sapien
tcactgagatatttaaggcaacattaaactgta

SEQ ID NO: 976203 - DNA, 33 bp, Homo sapien
ttctacatgataactaacattaatctaaaacct

SEQ ID NO: 976204 - DNA, 33 bp, Homo sapien
ttctacatgataactagcattaatctaaaacct

SEQ ID NO: 976205 - DNA, 33 bp, Homo sapien
caaattatacatcgcaaaaaatttaaaaccaga

SEQ ID NO: 976206 - DNA, 33 bp, Homo sapien
caaattatacatcgcagaaaatttaaaaccaga

SEQ ID NO: 976207 - DNA, 33 bp, Homo sapien
ctaatggtttataaagaatgtcctcagctggct

SEQ ID NO: 976208 - DNA, 33 bp, Homo sapien
ctaatggtttataaaggatgtcctcagctggct

SEQ ID NO: 976209 - DNA, 33 bp, Homo sapien
tgggaaattttctccactaaactttgattgcat

SEQ ID NO: 976210 - DNA, 33 bp, Homo sapien
tgggaaattttctccagtaaactttgattgcat

SEQ ID NO: 976211 - DNA, 33 bp, Homo sapien
atcaactgatataccacgtcctagagtgcattt

SEQ ID NO: 976212 - DNA, 33 bp, Homo sapien
atcaactgatataccatgtcctagagtgcattt

SEQ ID NO: 976213 - DNA, 33 bp, Homo sapien
aatgagaatcccatcaatcaccaacattcacta

SEQ ID NO: 976214 - DNA, 33 bp, Homo sapien
aatgagaatcccatcattcaccaacattcacta

SEQ ID NO: 976215 - DNA, 33 bp, Homo sapien
tgagctcttaagtcaaactgtctgagttcaaat

SEQ ID NO: 976216 - DNA, 33 bp, Homo sapien
tgagctcttaagtcaagctgtctgagttcaaat

SEQ ID NO: 976217 - DNA, 33 bp, Homo sapien
aatgtgaatgtctaagaaaaggaatatgtggta

SEQ ID NO: 976218 - DNA, 33 bp, Homo sapien
aatgtgaatgtctaagtaaaggaatatgtggta

SEQ ID NO: 976219 - DNA, 33 bp, Homo sapien
tagcatttctattcaccactaatgtccaggctt

SEQ ID NO: 976220 - DNA, 33 bp, Homo sapien
tagcatttctattcactactaatgtccaggctt

SEQ ID NO: 976221 - DNA, 33 bp, Homo sapien
tgtgtgctttgctttacctgagtatgttcccag

SEQ ID NO: 976222 - DNA, 33 bp, Homo sapien
tgtgtgctttgctttatctgagtatgttcccag

SEQ ID NO: 976223 - DNA, 33 bp, Homo sapien
tttccactttgacagaggaaaactatattgcta

SEQ ID NO: 976224 - DNA, 33 bp, Homo sapien
tttccactttgacagatgaaaactatattgcta

SEQ ID NO: 976225 - DNA, 33 bp, Homo sapien
aacaatgagctttttacacaatgtctgtgaagt

SEQ ID NO: 976226 - DNA, 33 bp, Homo sapien
aacaatgagctttttatacaatgtctgtgaagt

SEQ ID NO: 976227 - DNA, 33 bp, Homo sapien
tccttctttatacctcagaataaccaaaagaga

SEQ ID NO: 976228 - DNA, 33 bp, Homo sapien
tccttctttatacctcggaataaccaaaagaga

SEQ ID NO: 976229 - DNA, 33 bp, Homo sapien
accataaacattcacagacaggtttttatgggg

SEQ ID NO: 976230 - DNA, 33 bp, Homo sapien
accataaacattcacatacaggtttttatgggg

SEQ ID NO: 976231 - DNA, 33 bp, Homo sapien
gttcagtttgtttataaatgtaagtcatgcatt

SEQ ID NO: 976232 - DNA, 33 bp, Homo sapien
gttcagtttgtttatagatgtaagtcatgcatt

SEQ ID NO: 976233 - DNA, 33 bp, Homo sapien
tctcctattttttgaaccagctatctgtgggaa

SEQ ID NO: 976234 - DNA, 33 bp, Homo sapien
tctcctattttttgaatcagctatctgtgggaa

SEQ ID NO: 976235 - DNA, 33 bp, Homo sapien
tagtctgaccactgaaacagttcttgttaagtt

SEQ ID NO: 976236 - DNA, 33 bp, Homo sapien
tagtctgaccactgaatcagttcttgttaagtt

SEQ ID NO: 976237 - DNA, 33 bp, Homo sapien
tcaacacggaagccccaaaagaatcttcagaca

SEQ ID NO: 976238 - DNA, 33 bp, Homo sapien
tcaacacggaagccccgaaagaatcttcagaca

SEQ ID NO: 976239 - DNA, 33 bp, Homo sapien
ttctctaaaaagacacacgaggatctgagtcct

SEQ ID NO: 976240 - DNA, 33 bp, Homo sapien
ttctctaaaaagacacgcgaggatctgagtcct

SEQ ID NO: 976241 - DNA, 33 bp, Homo sapien
gatcacacagccacaaggtagaggtgtaaatgc

SEQ ID NO: 976242 - DNA, 33 bp, Homo sapien
gatcacacagccacaatgtagaggtgtaaatgc

SEQ ID NO: 976243 - DNA, 33 bp, Homo sapien
ttgtgctccattgactaaattacctgcaatttc

SEQ ID NO: 976244 - DNA, 33 bp, Homo sapien
ttgtgctccattgactgaattacctgcaatttc

SEQ ID NO: 976245 - DNA, 33 bp, Homo sapien
gagtactatacggtgaatataacaacaagttat

SEQ ID NO: 976246 - DNA, 33 bp, Homo sapien
gagtactatacggtgactataacaacaagttat

SEQ ID NO: 976247 - DNA, 33 bp, Homo sapien
aaatgtcagcaaacaaatctgtatatcattctt

SEQ ID NO: 976248 - DNA, 33 bp, Homo sapien
aaatgtcagcaaacaattctgtatatcattctt

SEQ ID NO: 976249 - DNA, 33 bp, Homo sapien
cacaggtactgttctcaatatgcaattactgaa

SEQ ID NO: 976250 - DNA, 33 bp, Homo sapien
cacaggtactgttctcgatatgcaattactgaa

SEQ ID NO: 976251 - DNA, 33 bp, Homo sapien
actgagggacttctaacacatagatttccagct

SEQ ID NO: 976252 - DNA, 33 bp, Homo sapien
actgagggacttctaatacatagatttccagct

SEQ ID NO: 976253 - DNA, 33 bp, Homo sapien
gaaagatttctatttacacattgctcacatttg

SEQ ID NO: 976254 - DNA, 33 bp, Homo sapien
gaaagatttctatttatacattgctcacatttg

SEQ ID NO: 976255 - DNA, 33 bp, Homo sapien
agagactagtcatagaaaatttatttaagccaa

SEQ ID NO: 976256 - DNA, 33 bp, Homo sapien
agagactagtcatagacaatttatttaagccaa

SEQ ID NO: 976257 - DNA, 33 bp, Homo sapien
taatttagtcatgtcaatgaatgttctactagg

SEQ ID NO: 976258 - DNA, 33 bp, Homo sapien
taatttagtcatgtcagtgaatgttctactagg

SEQ ID NO: 976259 - DNA, 33 bp, Homo sapien
gcttcataccaagatacctaattgtgtgtggta

SEQ ID NO: 976260 - DNA, 33 bp, Homo sapien
gcttcataccaagatagctaattgtgtgtggta

SEQ ID NO: 976261 - DNA, 33 bp, Homo sapien
ttgtgtagattaaggcaataaccaactcatggg

SEQ ID NO: 976262 - DNA, 33 bp, Homo sapien
ttgtgtagattaaggccataaccaactcatggg

SEQ ID NO: 976263 - DNA, 33 bp, Homo sapien
gcctgagtgttgggtacctgattccttttcatc

SEQ ID NO: 976264 - DNA, 33 bp, Homo sapien
gcctgagtgttgggtatctgattccttttcatc

SEQ ID NO: 976265 - DNA, 33 bp, Homo sapien
gtaagtagaaaggatacgacttctttgatgagc

SEQ ID NO: 976266 - DNA, 33 bp, Homo sapien
gtaagtagaaaggatatgacttctttgatgagc

SEQ ID NO: 976267 - DNA, 33 bp, Homo sapien
tttatattggtgtaaacggcggagtactgacca

SEQ ID NO: 976268 - DNA, 33 bp, Homo sapien
tttatattggtgtaaagggcggagtactgacca

SEQ ID NO: 976269 - DNA, 33 bp, Homo sapien
aaggaaaggacattccaatgaaggaaaatagct

SEQ ID NO: 976270 - DNA, 33 bp, Homo sapien
aaggaaaggacattccgatgaaggaaaatagct

SEQ ID NO: 976271 - DNA, 33 bp, Homo sapien
actaagcttgatggaaaaagctctaaaatttcc

SEQ ID NO: 976272 - DNA, 33 bp, Homo sapien
actaagcttgatggaagaagctctaaaatttcc

SEQ ID NO: 976273 - DNA, 33 bp, Homo sapien
aggtcattatggtgcccaacatggtataagatg

SEQ ID NO: 976274 - DNA, 33 bp, Homo sapien
aggtcattatggtgcctaacatggtataagatg

SEQ ID NO: 976275 - DNA, 33 bp, Homo sapien
ttgggacttgtgaagacggtgaagggtctgaga

SEQ ID NO: 976276 - DNA, 33 bp, Homo sapien
ttgggacttgtgaagatggtgaagggtctgaga

SEQ ID NO: 976277 - DNA, 33 bp, Homo sapien
tgaaccgctgtttgacggccataataaattttt

SEQ ID NO: 976278 - DNA, 33 bp, Homo sapien
tgaaccgctgtttgactgccataataaattttt

SEQ ID NO: 976279 - DNA, 33 bp, Homo sapien
taatttgtagaactcacgaaaattttcacaagc

SEQ ID NO: 976280 - DNA, 33 bp, Homo sapien
taatttgtagaactcaggaaaattttcacaagc

SEQ ID NO: 976281 - DNA, 33 bp, Homo sapien
aaaattaaaactcatgaaatatgtgagctcttg

SEQ ID NO: 976282 - DNA, 33 bp, Homo sapien
aaaattaaaactcatgcaatatgtgagctcttg

SEQ ID NO: 976283 - DNA, 33 bp, Homo sapien
gttttcctacatcatgaaaatcaattcattcaa

SEQ ID NO: 976284 - DNA, 33 bp, Homo sapien
gttttcctacatcatgtaaatcaattcattcaa

SEQ ID NO: 976285 - DNA, 33 bp, Homo sapien
gatggagaaactgaaaaaacaggtggaagagtt

SEQ ID NO: 976286 - DNA, 33 bp, Homo sapien
gatggagaaactgaaagaacaggtggaagagtt

SEQ ID NO: 976287 - DNA, 33 bp, Homo sapien
aacagctgtgaaaggaagaaaaaagaggatggg

SEQ ID NO: 976288 - DNA, 33 bp, Homo sapien
aacagctgtgaaaggaggaaaaaagaggatggg

SEQ ID NO: 976289 - DNA, 33 bp, Homo sapien
tgtcttcagatatcaacagtgtggattcctttt

SEQ ID NO: 976290 - DNA, 33 bp, Homo sapien
tgtcttcagatatcaagagtgtggattcctttt

SEQ ID NO: 976291 - DNA, 33 bp, Homo sapien
aacattgattggggaacagttctgaagtagagg

SEQ ID NO: 976292 - DNA, 33 bp, Homo sapien
aacattgattggggaatagttctgaagtagagg

SEQ ID NO: 976293 - DNA, 33 bp, Homo sapien
cataataatcaaatggacaaagctctcttacat

SEQ ID NO: 976294 - DNA, 33 bp, Homo sapien
cataataatcaaatgggcaaagctctcttacat

SEQ ID NO: 976295 - DNA, 33 bp, Homo sapien
actatctgtcctcttacagaaaatacttgcaaa

SEQ ID NO: 976296 - DNA, 33 bp, Homo sapien
actatctgtcctcttatagaaaatacttgcaaa

SEQ ID NO: 976297 - DNA, 33 bp, Homo sapien
aagaatttaaaccatcaatctaagtgatgctgt

SEQ ID NO: 976298 - DNA, 33 bp, Homo sapien
aagaatttaaaccatccatctaagtgatgctgt

SEQ ID NO: 976299 - DNA, 33 bp, Homo sapien
tgaactggatactaaaccgaggtaaggtgcaga

SEQ ID NO: 976300 - DNA, 33 bp, Homo sapien
tgaactggatactaaatcgaggtaaggtgcaga

SEQ ID NO: 976301 - DNA, 33 bp, Homo sapien
aagcacaaaacacttaaggtatatctgccattg

SEQ ID NO: 976302 - DNA, 33 bp, Homo sapien
aagcacaaaacacttagggtatatctgccattg

SEQ ID NO: 976303 - DNA, 33 bp, Homo sapien
catttccccaaagcttcaaaacgaaaagtgggt

SEQ ID NO: 976304 - DNA, 33 bp, Homo sapien
catttccccaaagcttgaaaacgaaaagtgggt

SEQ ID NO: 976305 - DNA, 33 bp, Homo sapien
tctgctgaagtctagaactattactcaagtgag

SEQ ID NO: 976306 - DNA, 33 bp, Homo sapien
tctgctgaagtctagagctattactcaagtgag

SEQ ID NO: 976307 - DNA, 33 bp, Homo sapien
gttgtcactgacaaacagtatcaattagctaat

SEQ ID NO: 976308 - DNA, 33 bp, Homo sapien
gttgtcactgacaaactgtatcaattagctaat

SEQ ID NO: 976309 - DNA, 33 bp, Homo sapien
gaattgcagcctataaagattttcttcatgatt

SEQ ID NO: 976310 - DNA, 33 bp, Homo sapien
gaattgcagcctataacgattttcttcatgatt

SEQ ID NO: 976311 - DNA, 33 bp, Homo sapien
aataccataccaaaaaattcaattccagaggta

SEQ ID NO: 976312 - DNA, 33 bp, Homo sapien
aataccataccaaaaagttcaattccagaggta

SEQ ID NO: 976313 - DNA, 33 bp, Homo sapien
aatacaaacgattagacgggcgtggtagcaggt

SEQ ID NO: 976314 - DNA, 33 bp, Homo sapien
aatacaaacgattagatgggcgtggtagcaggt

SEQ ID NO: 976315 - DNA, 33 bp, Homo sapien
gatctgaacaccgaccacaccgaccaaagcctg

SEQ ID NO: 976316 - DNA, 33 bp, Homo sapien
gatctgaacaccgaccgcaccgaccaaagcctg

SEQ ID NO: 976317 - DNA, 33 bp, Homo sapien
ctggtgccaggaaaagacttctttgtaaatata

SEQ ID NO: 976318 - DNA, 33 bp, Homo sapien
ctggtgccaggaaaaggcttctttgtaaatata

SEQ ID NO: 976319 - DNA, 33 bp, Homo sapien
attctgagaattggtgaactcacctttatagct

SEQ ID NO: 976320 - DNA, 33 bp, Homo sapien
attctgagaattggtgtactcacctttatagct

SEQ ID NO: 976321 - DNA, 33 bp, Homo sapien
cataccatattggaaacgctctatcaggctggt

SEQ ID NO: 976322 - DNA, 33 bp, Homo sapien
cataccatattggaaatgctctatcaggctggt

SEQ ID NO: 976323 - DNA, 33 bp, Homo sapien
ccttatcatggcataaagaaaggtgttttacca

SEQ ID NO: 976324 - DNA, 33 bp, Homo sapien
ccttatcatggcataaggaaaggtgttttacca

SEQ ID NO: 976325 - DNA, 33 bp, Homo sapien
ataagtggcatcaatactaaaactatgctattt

SEQ ID NO: 976326 - DNA, 33 bp, Homo sapien
ataagtggcatcaatattaaaactatgctattt

SEQ ID NO: 976327 - DNA, 33 bp, Homo sapien
tctagccactgtaacacctcattgccatgccac

SEQ ID NO: 976328 - DNA, 33 bp, Homo sapien
tctagccactgtaacatctcattgccatgccac

SEQ ID NO: 976329 - DNA, 33 bp, Homo sapien
caagataaaataaacaagtggtctagtattgtc

SEQ ID NO: 976330 - DNA, 33 bp, Homo sapien
caagataaaataaacacgtggtctagtattgtc

SEQ ID NO: 976331 - DNA, 33 bp, Homo sapien
gttgaatgtccagcagaaagagttgtgtaactc

SEQ ID NO: 976332 - DNA, 33 bp, Homo sapien
gttgaatgtccagcagcaagagttgtgtaactc

SEQ ID NO: 976333 - DNA, 33 bp, Homo sapien
agatcattaactattacgccaaattcagcacta

SEQ ID NO: 976334 - DNA, 33 bp, Homo sapien
agatcattaactattatgccaaattcagcacta

SEQ ID NO: 976335 - DNA, 33 bp, Homo sapien
cagcaatagcaatcaaacatagaatatgaaatt

SEQ ID NO: 976336 - DNA, 33 bp, Homo sapien
cagcaatagcaatcaaccatagaatatgaaatt

SEQ ID NO: 976337 - DNA, 33 bp, Homo sapien
tgtactaaacctttgaagattcatgtggggctt

SEQ ID NO: 976338 - DNA, 33 bp, Homo sapien
tgtactaaacctttgaggattcatgtggggctt

SEQ ID NO: 976339 - DNA, 33 bp, Homo sapien
ttgaaagtatttaatgaagttttgcacaagtaa

SEQ ID NO: 976340 - DNA, 33 bp, Homo sapien
ttgaaagtatttaatgcagttttgcacaagtaa

SEQ ID NO: 976341 - DNA, 33 bp, Homo sapien
cattaaatactttcaactgtatacagaatattt

SEQ ID NO: 976342 - DNA, 33 bp, Homo sapien
cattaaatactttcaattgtatacagaatattt

SEQ ID NO: 976343 - DNA, 33 bp, Homo sapien
tagtcttggccaattacctattatttctgtggg

SEQ ID NO: 976344 - DNA, 33 bp, Homo sapien
tagtcttggccaattatctattatttctgtggg

SEQ ID NO: 976345 - DNA, 33 bp, Homo sapien
atcaccagttttgtaagtcaatggttaaatcta

SEQ ID NO: 976346 - DNA, 33 bp, Homo sapien
atcaccagttttgtaattcaatggttaaatcta

SEQ ID NO: 976347 - DNA, 33 bp, Homo sapien
ttatcctggacccaaaatgaaattatcataact

SEQ ID NO: 976348 - DNA, 33 bp, Homo sapien
ttatcctggacccaaagtgaaattatcataact

SEQ ID NO: 976349 - DNA, 33 bp, Homo sapien
tttactagtacccttacacaatgaggttctctc

SEQ ID NO: 976350 - DNA, 33 bp, Homo sapien
tttactagtacccttatacaatgaggttctctc

SEQ ID NO: 976351 - DNA, 33 bp, Homo sapien
caatgaaaaatatcaacgagccggcatttcccc

SEQ ID NO: 976352 - DNA, 33 bp, Homo sapien
caatgaaaaatatcaatgagccggcatttcccc

SEQ ID NO: 976353 - DNA, 33 bp, Homo sapien
gttcctcttttttcacccattctctggcagtta

SEQ ID NO: 976354 - DNA, 33 bp, Homo sapien
gttcctcttttttcacgcattctctggcagtta

SEQ ID NO: 976355 - DNA, 33 bp, Homo sapien
aatggaacagaacagacgtctacaaccatatga

SEQ ID NO: 976356 - DNA, 33 bp, Homo sapien
aatggaacagaacagatgtctacaaccatatga

SEQ ID NO: 976357 - DNA, 33 bp, Homo sapien
gctgtatgtgtttcaccggctttgcttaacacc

SEQ ID NO: 976358 - DNA, 33 bp, Homo sapien
gctgtatgtgtttcactggctttgcttaacacc

SEQ ID NO: 976359 - DNA, 33 bp, Homo sapien
atggataactgtaggtaaattctgagatctacc

SEQ ID NO: 976360 - DNA, 33 bp, Homo sapien
atggataactgtaggtgaattctgagatctacc

SEQ ID NO: 976361 - DNA, 33 bp, Homo sapien
acataacataatcctaccagtattcttaaaaat

SEQ ID NO: 976362 - DNA, 33 bp, Homo sapien
acataacataatcctatcagtattcttaaaaat

SEQ ID NO: 976363 - DNA, 33 bp, Homo sapien
acacaataaatgctacactggccatatatttca

SEQ ID NO: 976364 - DNA, 33 bp, Homo sapien
acacaataaatgctacgctggccatatatttca

SEQ ID NO: 976365 - DNA, 33 bp, Homo sapien
gaaggttcatctaacaaaatcattactgagagc

SEQ ID NO: 976366 - DNA, 33 bp, Homo sapien
gaaggttcatctaacacaatcattactgagagc

SEQ ID NO: 976367 - DNA, 33 bp, Homo sapien
tatagctgcccacgaaatatctctaattgtaga

SEQ ID NO: 976368 - DNA, 33 bp, Homo sapien
tatagctgcccacgaactatctctaattgtaga

SEQ ID NO: 976369 - DNA, 33 bp, Homo sapien
cctcaaggtactgtcacattgtctgtctttata

SEQ ID NO: 976370 - DNA, 33 bp, Homo sapien
cctcaaggtactgtcagattgtctgtctttata

SEQ ID NO: 976371 - DNA, 33 bp, Homo sapien
ggaaaataaagtagtaccattatcgtgttgatg

SEQ ID NO: 976372 - DNA, 33 bp, Homo sapien
ggaaaataaagtagtatcattatcgtgttgatg

SEQ ID NO: 976373 - DNA, 33 bp, Homo sapien
tgtgagtccaaacaacgaaggcactaattactt

SEQ ID NO: 976374 - DNA, 33 bp, Homo sapien
tgtgagtccaaacaactaaggcactaattactt

SEQ ID NO: 976375 - DNA, 33 bp, Homo sapien
ttaagatttttaagaaagacagttgaaatgact

SEQ ID NO: 976376 - DNA, 33 bp, Homo sapien
ttaagatttttaagaaggacagttgaaatgact

SEQ ID NO: 976377 - DNA, 33 bp, Homo sapien
tacatgaacctgacaaaattattatacttgttt

SEQ ID NO: 976378 - DNA, 33 bp, Homo sapien
tacatgaacctgacaacattattatacttgttt

SEQ ID NO: 976379 - DNA, 33 bp, Homo sapien
gaggtcactgggctacagcaacaaaacatttta

SEQ ID NO: 976380 - DNA, 33 bp, Homo sapien
gaggtcactgggctacggcaacaaaacatttta

SEQ ID NO: 976381 - DNA, 33 bp, Homo sapien
gtttgaaaactcagaaaaataactccaaccttc

SEQ ID NO: 976382 - DNA, 33 bp, Homo sapien
gtttgaaaactcagaacaataactccaaccttc

SEQ ID NO: 976383 - DNA, 33 bp, Homo sapien
ttttcagagaacataaaagtgataactgaacca

SEQ ID NO: 976384 - DNA, 33 bp, Homo sapien
ttttcagagaacataagagtgataactgaacca

SEQ ID NO: 976385 - DNA, 33 bp, Homo sapien
attcagtgaggggtacagagcacatcaaaatgt

SEQ ID NO: 976386 - DNA, 33 bp, Homo sapien
attcagtgaggggtacggagcacatcaaaatgt

SEQ ID NO: 976387 - DNA, 33 bp, Homo sapien
gaaaaggcagattgataacgtgataacagtagt

SEQ ID NO: 976388 - DNA, 33 bp, Homo sapien
gaaaaggcagattgatgacgtgataacagtagt

SEQ ID NO: 976389 - DNA, 33 bp, Homo sapien
gccatgactgtatggtcaagccttgctctttca

SEQ ID NO: 976390 - DNA, 33 bp, Homo sapien
gccatgactgtatggttaagccttgctctttca

SEQ ID NO: 976391 - DNA, 33 bp, Homo sapien
gttccctaagcctccaatgataataccagggtt

SEQ ID NO: 976392 - DNA, 33 bp, Homo sapien
gttccctaagcctccagtgataataccagggtt

SEQ ID NO: 976393 - DNA, 33 bp, Homo sapien
tcagtccttgcaatccagattgaaactaaggag

SEQ ID NO: 976394 - DNA, 33 bp, Homo sapien
tcagtccttgcaatccggattgaaactaaggag

SEQ ID NO: 976395 - DNA, 33 bp, Homo sapien
tgcttattacactttccctcacatcaaaggctg

SEQ ID NO: 976396 - DNA, 33 bp, Homo sapien
tgcttattacactttctctcacatcaaaggctg

SEQ ID NO: 976397 - DNA, 33 bp, Homo sapien
catgatgactagactgaactttgataaagagga

SEQ ID NO: 976398 - DNA, 33 bp, Homo sapien
catgatgactagactgtactttgataaagagga

SEQ ID NO: 976399 - DNA, 33 bp, Homo sapien
atgtgtctgactatagaaaagactattaagtgg

SEQ ID NO: 976400 - DNA, 33 bp, Homo sapien
atgtgtctgactatagcaaagactattaagtgg

SEQ ID NO: 976401 - DNA, 33 bp, Homo sapien
aataatgcaagactcaatcagtggggaaaatta

SEQ ID NO: 976402 - DNA, 33 bp, Homo sapien
aataatgcaagactcactcagtggggaaaatta

SEQ ID NO: 976403 - DNA, 33 bp, Homo sapien
cctcctttgacttggaaaagagctcaggttgaa

SEQ ID NO: 976404 - DNA, 33 bp, Homo sapien
cctcctttgacttggacaagagctcaggttgaa

SEQ ID NO: 976405 - DNA, 33 bp, Homo sapien
ttgctgacctcaggcaataaattagctggatta

SEQ ID NO: 976406 - DNA, 33 bp, Homo sapien
ttgctgacctcaggcagtaaattagctggatta

SEQ ID NO: 976407 - DNA, 33 bp, Homo sapien
tccatggaatctcatacccagactgaagtaata

SEQ ID NO: 976408 - DNA, 33 bp, Homo sapien
tccatggaatctcatatccagactgaagtaata

SEQ ID NO: 976409 - DNA, 33 bp, Homo sapien
catctctctttctctaagttatattcttgccta

SEQ ID NO: 976410 - DNA, 33 bp, Homo sapien
catctctctttctctaggttatattcttgccta

SEQ ID NO: 976411 - DNA, 33 bp, Homo sapien
agagaaggaatgtgcacgtgaatttattttttt

SEQ ID NO: 976412 - DNA, 33 bp, Homo sapien
agagaaggaatgtgcatgtgaatttattttttt

SEQ ID NO: 976413 - DNA, 33 bp, Homo sapien
cactttttcccatccaatgcaaaataaaagcca

SEQ ID NO: 976414 - DNA, 33 bp, Homo sapien
cactttttcccatccattgcaaaataaaagcca

SEQ ID NO: 976415 - DNA, 33 bp, Homo sapien
ctaacatttcctgaaactgtcattcaagaatcc

SEQ ID NO: 976416 - DNA, 33 bp, Homo sapien
ctaacatttcctgaaagtgtcattcaagaatcc

SEQ ID NO: 976417 - DNA, 33 bp, Homo sapien
acatatgcagtattacccagccttaaaaagcaa

SEQ ID NO: 976418 - DNA, 33 bp, Homo sapien
acatatgcagtattacgcagccttaaaaagcaa

SEQ ID NO: 976419 - DNA, 33 bp, Homo sapien
tcctttatctagctaacagcatcactacccatc

SEQ ID NO: 976420 - DNA, 33 bp, Homo sapien
tcctttatctagctaatagcatcactacccatc

SEQ ID NO: 976421 - DNA, 33 bp, Homo sapien
atttgctttctggaaccattccgggtgatgtat

SEQ ID NO: 976422 - DNA, 33 bp, Homo sapien
atttgctttctggaactattccgggtgatgtat

SEQ ID NO: 976423 - DNA, 33 bp, Homo sapien
gatgaatttatttctgccaaatttactggttca

SEQ ID NO: 976424 - DNA, 33 bp, Homo sapien
gatgaatttatttctgtcaaatttactggttca

SEQ ID NO: 976425 - DNA, 33 bp, Homo sapien
taatccttctttaccccgctactgaatctctag

SEQ ID NO: 976426 - DNA, 33 bp, Homo sapien
taatccttctttaccctgctactgaatctctag

SEQ ID NO: 976427 - DNA, 33 bp, Homo sapien
ctctgctactgaactactagtgtttcagagttc

SEQ ID NO: 976428 - DNA, 33 bp, Homo sapien
ctctgctactgaactattagtgtttcagagttc

SEQ ID NO: 976429 - DNA, 33 bp, Homo sapien
taagacaagagaaaagcctgagggtatggtaac

SEQ ID NO: 976430 - DNA, 33 bp, Homo sapien
taagacaagagaaaagtctgagggtatggtaac

SEQ ID NO: 976431 - DNA, 33 bp, Homo sapien
tggttttagtaacagaagtaattaatgttccag

SEQ ID NO: 976432 - DNA, 33 bp, Homo sapien
tggttttagtaacagaggtaattaatgttccag

SEQ ID NO: 976433 - DNA, 33 bp, Homo sapien
tattgtccccaagcaactgagtgggtcaaattt

SEQ ID NO: 976434 - DNA, 33 bp, Homo sapien
tattgtccccaagcaattgagtgggtcaaattt

SEQ ID NO: 976435 - DNA, 33 bp, Homo sapien
ctaacttaagacagtaaaataagacaggcaaag

SEQ ID NO: 976436 - DNA, 33 bp, Homo sapien
ctaacttaagacagtacaataagacaggcaaag

SEQ ID NO: 976437 - DNA, 33 bp, Homo sapien
ttcctgcaatgagagcaacacacacaagaagac

SEQ ID NO: 976438 - DNA, 33 bp, Homo sapien
ttcctgcaatgagagcgacacacacaagaagac

SEQ ID NO: 976439 - DNA, 33 bp, Homo sapien
agtgctacaagaagacaaaaagtgttcttctag

SEQ ID NO: 976440 - DNA, 33 bp, Homo sapien
agtgctacaagaagacgaaaagtgttcttctag

SEQ ID NO: 976441 - DNA, 33 bp, Homo sapien
tgcaattcataaagggaaattcacgtagagccg

SEQ ID NO: 976442 - DNA, 33 bp, Homo sapien
tgcaattcataaagggtaattcacgtagagccg

SEQ ID NO: 976443 - DNA, 33 bp, Homo sapien
ctgctctccgcttctcacactgggctcccagga

SEQ ID NO: 976444 - DNA, 33 bp, Homo sapien
ctgctctccgcttctcgcactgggctcccagga

SEQ ID NO: 976445 - DNA, 33 bp, Homo sapien
caatgagtgactctgaaagagaaaaatggactt

SEQ ID NO: 976446 - DNA, 33 bp, Homo sapien
caatgagtgactctgagagagaaaaatggactt

SEQ ID NO: 976447 - DNA, 33 bp, Homo sapien
ttcatcacttgtataactaattggtcaggcatg

SEQ ID NO: 976448 - DNA, 33 bp, Homo sapien
ttcatcacttgtataattaattggtcaggcatg

SEQ ID NO: 976449 - DNA, 33 bp, Homo sapien
tcacacaattgaaaagcccaaaggtaaagctgg

SEQ ID NO: 976450 - DNA, 33 bp, Homo sapien
tcacacaattgaaaagtccaaaggtaaagctgg

SEQ ID NO: 976451 - DNA, 33 bp, Homo sapien
ttatataggaagatgacgcttctggatattgct

SEQ ID NO: 976452 - DNA, 33 bp, Homo sapien
ttatataggaagatgatgcttctggatattgct

SEQ ID NO: 976453 - DNA, 33 bp, Homo sapien
agcgctggtccagtgaagaaaggatgaggtgca

SEQ ID NO: 976454 - DNA, 33 bp, Homo sapien
agcgctggtccagtgacgaaaggatgaggtgca

SEQ ID NO: 976455 - DNA, 33 bp, Homo sapien
taaacaagcaaacaatcaatgactggatccaaa

SEQ ID NO: 976456 - DNA, 33 bp, Homo sapien
taaacaagcaaacaattaatgactggatccaaa

SEQ ID NO: 976457 - DNA, 33 bp, Homo sapien
ttgctggggaaaccaacacagctgagacatctg

SEQ ID NO: 976458 - DNA, 33 bp, Homo sapien
ttgctggggaaaccaatacagctgagacatctg

SEQ ID NO: 976459 - DNA, 33 bp, Homo sapien
cagcaaccagtgataaatccccagcccatgcat

SEQ ID NO: 976460 - DNA, 33 bp, Homo sapien
cagcaaccagtgataactccccagcccatgcat

SEQ ID NO: 976461 - DNA, 33 bp, Homo sapien
agacatcagcaggctaaggggaggagaagagcc

SEQ ID NO: 976462 - DNA, 33 bp, Homo sapien
agacatcagcaggctagggggaggagaagagcc

SEQ ID NO: 976463 - DNA, 33 bp, Homo sapien
gaccaacacttttctacagtctgtgatactggt

SEQ ID NO: 976464 - DNA, 33 bp, Homo sapien
gaccaacacttttctatagtctgtgatactggt

SEQ ID NO: 976465 - DNA, 33 bp, Homo sapien
gatatacagataagaaactataattccaaagat

SEQ ID NO: 976466 - DNA, 33 bp, Homo sapien
gatatacagataagaagctataattccaaagat

SEQ ID NO: 976467 - DNA, 33 bp, Homo sapien
tttctggcattatttaactcagtgtatacctaa

SEQ ID NO: 976468 - DNA, 33 bp, Homo sapien
tttctggcattatttatctcagtgtatacctaa

SEQ ID NO: 976469 - DNA, 33 bp, Homo sapien
gtataatgcaatacaaatcgtaattttaaaggc

SEQ ID NO: 976470 - DNA, 33 bp, Homo sapien
gtataatgcaatacaattcgtaattttaaaggc

SEQ ID NO: 976471 - DNA, 33 bp, Homo sapien
tatgattaattttaaacgcgcacaatagcacat

SEQ ID NO: 976472 - DNA, 33 bp, Homo sapien
tatgattaattttaaatgcgcacaatagcacat

SEQ ID NO: 976473 - DNA, 33 bp, Homo sapien
catttataccaagaacaatctagaaattcatca

SEQ ID NO: 976474 - DNA, 33 bp, Homo sapien
catttataccaagaacgatctagaaattcatca

SEQ ID NO: 976475 - DNA, 33 bp, Homo sapien
gttggcaatgcattcccgaaatggaacacgata

SEQ ID NO: 976476 - DNA, 33 bp, Homo sapien
gttggcaatgcattcctgaaatggaacacgata

SEQ ID NO: 976477 - DNA, 33 bp, Homo sapien
cctattaaccatgtgacgtgttgttcaagaagg

SEQ ID NO: 976478 - DNA, 33 bp, Homo sapien
cctattaaccatgtgatgtgttgttcaagaagg

SEQ ID NO: 976479 - DNA, 33 bp, Homo sapien
tcctgccaactggtccactttgttctgtcctgt

SEQ ID NO: 976480 - DNA, 33 bp, Homo sapien
tcctgccaactggtccgctttgttctgtcctgt

SEQ ID NO: 976481 - DNA, 33 bp, Homo sapien
gaacaggaggaaaaaacgtatttgtaatgccta

SEQ ID NO: 976482 - DNA, 33 bp, Homo sapien
gaacaggaggaaaaaatgtatttgtaatgccta

SEQ ID NO: 976483 - DNA, 33 bp, Homo sapien
tccagagtgagagagaactgagatttaatcctt

SEQ ID NO: 976484 - DNA, 33 bp, Homo sapien
tccagagtgagagagacctgagatttaatcctt

SEQ ID NO: 976485 - DNA, 33 bp, Homo sapien
ggctctgtctctgtgacgctaaaacaatgagtc

SEQ ID NO: 976486 - DNA, 33 bp, Homo sapien
ggctctgtctctgtgatgctaaaacaatgagtc

SEQ ID NO: 976487 - DNA, 33 bp, Homo sapien
tggaattctgttgtaacgaatcaaccctatata

SEQ ID NO: 976488 - DNA, 33 bp, Homo sapien
tggaattctgttgtaatgaatcaaccctatata

SEQ ID NO: 976489 - DNA, 33 bp, Homo sapien
agctcagccactgaagaacaggcaaatcaaagc

SEQ ID NO: 976490 - DNA, 33 bp, Homo sapien
agctcagccactgaaggacaggcaaatcaaagc

SEQ ID NO: 976491 - DNA, 33 bp, Homo sapien
tatttggatgtctcggacagaaggatcacataa

SEQ ID NO: 976492 - DNA, 33 bp, Homo sapien
tatttggatgtctcgggcagaaggatcacataa

SEQ ID NO: 976493 - DNA, 33 bp, Homo sapien
atactcccctccataacagctttcagtgccttc

SEQ ID NO: 976494 - DNA, 33 bp, Homo sapien
atactcccctccataatagctttcagtgccttc

SEQ ID NO: 976495 - DNA, 33 bp, Homo sapien
gctgggcatgatggcaagtgcccaaaatcccag

SEQ ID NO: 976496 - DNA, 33 bp, Homo sapien
gctgggcatgatggcaggtgcccaaaatcccag

SEQ ID NO: 976497 - DNA, 33 bp, Homo sapien
taagagtcacacggaaaaaatgaatggtgggat

SEQ ID NO: 976498 - DNA, 33 bp, Homo sapien
taagagtcacacggaagaaatgaatggtgggat

SEQ ID NO: 976499 - DNA, 33 bp, Homo sapien
cctaaaacagtcatgcaagaattaagaaccata

SEQ ID NO: 976500 - DNA, 33 bp, Homo sapien
cctaaaacagtcatgcgagaattaagaaccata

SEQ ID NO: 976501 - DNA, 33 bp, Homo sapien
tgagtgtgtatcattgcaaatttaaaccatggc

SEQ ID NO: 976502 - DNA, 33 bp, Homo sapien
tgagtgtgtatcattgtaaatttaaaccatggc

SEQ ID NO: 976503 - DNA, 33 bp, Homo sapien
ttgatttggtagccaccagtcataggtgtagct

SEQ ID NO: 976504 - DNA, 33 bp, Homo sapien
ttgatttggtagccactagtcataggtgtagct

SEQ ID NO: 976505 - DNA, 33 bp, Homo sapien
agaaacggaagaaatacgctacaggcagagtgt

SEQ ID NO: 976506 - DNA, 33 bp, Homo sapien
agaaacggaagaaatatgctacaggcagagtgt

SEQ ID NO: 976507 - DNA, 33 bp, Homo sapien
gaaatacacagttaggaatcaaatgttgagctg

SEQ ID NO: 976508 - DNA, 33 bp, Homo sapien
gaaatacacagttagggatcaaatgttgagctg

SEQ ID NO: 976509 - DNA, 33 bp, Homo sapien
acctcaccctgtccacaaggaaattaaagtaaa

SEQ ID NO: 976510 - DNA, 33 bp, Homo sapien
acctcaccctgtccacgaggaaattaaagtaaa

SEQ ID NO: 976511 - DNA, 33 bp, Homo sapien
aggcatatatatgatacggtgatgaccaattct

SEQ ID NO: 976512 - DNA, 33 bp, Homo sapien
aggcatatatatgatatggtgatgaccaattct

SEQ ID NO: 976513 - DNA, 33 bp, Homo sapien
cagggtctgctgataaagttccaagggcaattc

SEQ ID NO: 976514 - DNA, 33 bp, Homo sapien
cagggtctgctgataaggttccaagggcaattc

SEQ ID NO: 976515 - DNA, 33 bp, Homo sapien
taacttagcataaaccagggaacaactgaaaga

SEQ ID NO: 976516 - DNA, 33 bp, Homo sapien
taacttagcataaaccggggaacaactgaaaga

SEQ ID NO: 976517 - DNA, 33 bp, Homo sapien
caggctcaccacttagaacaattacggtgtgtg

SEQ ID NO: 976518 - DNA, 33 bp, Homo sapien
caggctcaccacttaggacaattacggtgtgtg

SEQ ID NO: 976519 - DNA, 33 bp, Homo sapien
cgtgatccctcctgttgaaaatttccactgata

SEQ ID NO: 976520 - DNA, 33 bp, Homo sapien
cgtgatccctcctgtttaaaatttccactgata

SEQ ID NO: 976521 - DNA, 33 bp, Homo sapien
gcccgaacaagttgaaaaacctccatgaacctc

SEQ ID NO: 976522 - DNA, 33 bp, Homo sapien
gcccgaacaagttgaacaacctccatgaacctc

SEQ ID NO: 976523 - DNA, 33 bp, Homo sapien
agactcctaggttaaaccaactcaaacaatatt

SEQ ID NO: 976524 - DNA, 33 bp, Homo sapien
agactcctaggttaaagcaactcaaacaatatt

SEQ ID NO: 976525 - DNA, 33 bp, Homo sapien
tacagaccttttacaacctgcataggcccttgg

SEQ ID NO: 976526 - DNA, 33 bp, Homo sapien
tacagaccttttacaatctgcataggcccttgg

SEQ ID NO: 976527 - DNA, 33 bp, Homo sapien
gtgaattactaaagataaaactagtagactgat

SEQ ID NO: 976528 - DNA, 33 bp, Homo sapien
gtgaattactaaagattaaactagtagactgat

SEQ ID NO: 976529 - DNA, 33 bp, Homo sapien
gctgcagctaataccactatggttgttaacaaa

SEQ ID NO: 976530 - DNA, 33 bp, Homo sapien
gctgcagctaataccattatggttgttaacaaa

SEQ ID NO: 976531 - DNA, 33 bp, Homo sapien
agcagtgtgctcctggaatatgaattgtgataa

SEQ ID NO: 976532 - DNA, 33 bp, Homo sapien
agcagtgtgctcctggtatatgaattgtgataa

SEQ ID NO: 976533 - DNA, 33 bp, Homo sapien
cataggacatcatctacaattagcagggccacc

SEQ ID NO: 976534 - DNA, 33 bp, Homo sapien
cataggacatcatctataattagcagggccacc

SEQ ID NO: 976535 - DNA, 33 bp, Homo sapien
tttatgatattcttcactctctcttcctcaatc

SEQ ID NO: 976536 - DNA, 33 bp, Homo sapien
tttatgatattcttcagtctctcttcctcaatc

SEQ ID NO: 976537 - DNA, 33 bp, Homo sapien
ttcatttaaaattcaacatcaaaacacttaatc

SEQ ID NO: 976538 - DNA, 33 bp, Homo sapien
ttcatttaaaattcaatatcaaaacacttaatc

SEQ ID NO: 976539 - DNA, 33 bp, Homo sapien
atcataggaagaaatacgagatgaaattcaagt

SEQ ID NO: 976540 - DNA, 33 bp, Homo sapien
atcataggaagaaatatgagatgaaattcaagt

SEQ ID NO: 976541 - DNA, 33 bp, Homo sapien
cacaatccctgccataagtacgtacaactcatg

SEQ ID NO: 976542 - DNA, 33 bp, Homo sapien
cacaatccctgccatatgtacgtacaactcatg

SEQ ID NO: 976543 - DNA, 33 bp, Homo sapien
ccaagattgtcactgaagtactctgagatctga

SEQ ID NO: 976544 - DNA, 33 bp, Homo sapien
ccaagattgtcactgacgtactctgagatctga

SEQ ID NO: 976545 - DNA, 33 bp, Homo sapien
gtggggaagctctcacagtcagtttaccacctt

SEQ ID NO: 976546 - DNA, 33 bp, Homo sapien
gtggggaagctctcaccgtcagtttaccacctt

SEQ ID NO: 976547 - DNA, 33 bp, Homo sapien
acaggtttacataagccgcaaagtctatctagt

SEQ ID NO: 976548 - DNA, 33 bp, Homo sapien
acaggtttacataagctgcaaagtctatctagt

SEQ ID NO: 976549 - DNA, 33 bp, Homo sapien
agcctgaggctggccactgataaattgtgtcta

SEQ ID NO: 976550 - DNA, 33 bp, Homo sapien
agcctgaggctggccattgataaattgtgtcta

SEQ ID NO: 976551 - DNA, 33 bp, Homo sapien
ctgaggcaagaggaagaacaaatgagcactgtt

SEQ ID NO: 976552 - DNA, 33 bp, Homo sapien
ctgaggcaagaggaaggacaaatgagcactgtt

SEQ ID NO: 976553 - DNA, 33 bp, Homo sapien
gctgagctcctgaaaaatgacaatagcatcttc

SEQ ID NO: 976554 - DNA, 33 bp, Homo sapien
gctgagctcctgaaaagtgacaatagcatcttc

SEQ ID NO: 976555 - DNA, 33 bp, Homo sapien
tccagatagaaaggaaatgaactatgtgcctac

SEQ ID NO: 976556 - DNA, 33 bp, Homo sapien
tccagatagaaaggaagtgaactatgtgcctac

SEQ ID NO: 976557 - DNA, 33 bp, Homo sapien
aaaagttgaccaacaagcctgtttgcctctcaa

SEQ ID NO: 976558 - DNA, 33 bp, Homo sapien
aaaagttgaccaacaatcctgtttgcctctcaa

SEQ ID NO: 976559 - DNA, 33 bp, Homo sapien
atatggtaagcagtcaataaatagcagttacct

SEQ ID NO: 976560 - DNA, 33 bp, Homo sapien
atatggtaagcagtcagtaaatagcagttacct

SEQ ID NO: 976561 - DNA, 33 bp, Homo sapien
accgggtctgatgaagaaagaagttaagaattg

SEQ ID NO: 976562 - DNA, 33 bp, Homo sapien
accgggtctgatgaagcaagaagttaagaattg

SEQ ID NO: 976563 - DNA, 33 bp, Homo sapien
aaattaccaattagaaaccattgagagacagca

SEQ ID NO: 976564 - DNA, 33 bp, Homo sapien
aaattaccaattagaatccattgagagacagca

SEQ ID NO: 976565 - DNA, 33 bp, Homo sapien
gaaggctttaatccaacgctacagaagaggaga

SEQ ID NO: 976566 - DNA, 33 bp, Homo sapien
gaaggctttaatccaatgctacagaagaggaga

SEQ ID NO: 976567 - DNA, 33 bp, Homo sapien
agcttccagaagagaacagaaacatctaagacc

SEQ ID NO: 976568 - DNA, 33 bp, Homo sapien
agcttccagaagagaatagaaacatctaagacc

SEQ ID NO: 976569 - DNA, 33 bp, Homo sapien
cagattgaatgagtgccgatttaggctttatgg

SEQ ID NO: 976570 - DNA, 33 bp, Homo sapien
cagattgaatgagtgctgatttaggctttatgg

SEQ ID NO: 976571 - DNA, 33 bp, Homo sapien
tttctactcttgtccagtcagatttacttagca

SEQ ID NO: 976572 - DNA, 33 bp, Homo sapien
tttctactcttgtccattcagatttacttagca

SEQ ID NO: 976573 - DNA, 33 bp, Homo sapien
atgaattagtgtgttacgtagaattaatatctt

SEQ ID NO: 976574 - DNA, 33 bp, Homo sapien
atgaattagtgtgttatgtagaattaatatctt

SEQ ID NO: 976575 - DNA, 33 bp, Homo sapien
tgtttccttccagaaccgcaaagccacatggaa

SEQ ID NO: 976576 - DNA, 33 bp, Homo sapien
tgtttccttccagaactgcaaagccacatggaa

SEQ ID NO: 976577 - DNA, 33 bp, Homo sapien
agatgacctctaaaaccatttttgcctatttta

SEQ ID NO: 976578 - DNA, 33 bp, Homo sapien
agatgacctctaaaactatttttgcctatttta

SEQ ID NO: 976579 - DNA, 33 bp, Homo sapien
tttttacttttgtaaacatagcttggattagta

SEQ ID NO: 976580 - DNA, 33 bp, Homo sapien
tttttacttttgtaaatatagcttggattagta

SEQ ID NO: 976581 - DNA, 33 bp, Homo sapien
acacggtgacaggagaaaaagagaggcggaaag

SEQ ID NO: 976582 - DNA, 33 bp, Homo sapien
acacggtgacaggagagaaagagaggcggaaag

SEQ ID NO: 976583 - DNA, 33 bp, Homo sapien
tttgagactgaggatcaagtttacatggtaatg

SEQ ID NO: 976584 - DNA, 33 bp, Homo sapien
tttgagactgaggatcgagtttacatggtaatg

SEQ ID NO: 976585 - DNA, 33 bp, Homo sapien
ggtttaggttttatagcagatgcttcctatttg

SEQ ID NO: 976586 - DNA, 33 bp, Homo sapien
ggtttaggttttatagtagatgcttcctatttg

SEQ ID NO: 976587 - DNA, 33 bp, Homo sapien
agtgattggacttgaaccttcagatcccttcca

SEQ ID NO: 976588 - DNA, 33 bp, Homo sapien
agtgattggacttgaatcttcagatcccttcca

SEQ ID NO: 976589 - DNA, 33 bp, Homo sapien
aaaaagctatttccccagagagaaagaattgtg

SEQ ID NO: 976590 - DNA, 33 bp, Homo sapien
aaaaagctatttccccggagagaaagaattgtg

SEQ ID NO: 976591 - DNA, 33 bp, Homo sapien
taagataaaatctttaacatgcttagcacaggt

SEQ ID NO: 976592 - DNA, 33 bp, Homo sapien
taagataaaatctttagcatgcttagcacaggt

SEQ ID NO: 976593 - DNA, 33 bp, Homo sapien
tattatttctattttaagcatgaaaacactggc

SEQ ID NO: 976594 - DNA, 33 bp, Homo sapien
tattatttctattttacgcatgaaaacactggc

SEQ ID NO: 976595 - DNA, 33 bp, Homo sapien
attttgaagtaagataccacactcatcctttat

SEQ ID NO: 976596 - DNA, 33 bp, Homo sapien
attttgaagtaagatatcacactcatcctttat

SEQ ID NO: 976597 - DNA, 33 bp, Homo sapien
tgaggaaactgagttcagaaaattcagataatt

SEQ ID NO: 976598 - DNA, 33 bp, Homo sapien
tgaggaaactgagttcggaaaattcagataatt

SEQ ID NO: 976599 - DNA, 33 bp, Homo sapien
cctcctgaacaaaccaggtattttctagcatcc

SEQ ID NO: 976600 - DNA, 33 bp, Homo sapien
cctcctgaacaaaccatgtattttctagcatcc

SEQ ID NO: 976601 - DNA, 33 bp, Homo sapien
tcctcagattgtatgacgcgatgtgaaattcca

SEQ ID NO: 976602 - DNA, 33 bp, Homo sapien
tcctcagattgtatgatgcgatgtgaaattcca

SEQ ID NO: 976603 - DNA, 33 bp, Homo sapien
ttcacctctacacaagaaccctgcaaaacaggt

SEQ ID NO: 976604 - DNA, 33 bp, Homo sapien
ttcacctctacacaaggaccctgcaaaacaggt

SEQ ID NO: 976605 - DNA, 33 bp, Homo sapien
acagaagaacttttccaaccagagactcaggat

SEQ ID NO: 976606 - DNA, 33 bp, Homo sapien
acagaagaacttttccgaccagagactcaggat

SEQ ID NO: 976607 - DNA, 33 bp, Homo sapien
attagaaacgaattgaatatagactttgttcat

SEQ ID NO: 976608 - DNA, 33 bp, Homo sapien
attagaaacgaattgattatagactttgttcat

SEQ ID NO: 976609 - DNA, 33 bp, Homo sapien
cattgactgcattccaaaacctagtaaatcatg

SEQ ID NO: 976610 - DNA, 33 bp, Homo sapien
cattgactgcattccagaacctagtaaatcatg

SEQ ID NO: 976611 - DNA, 33 bp, Homo sapien
tcatgaagcttttcaaatgtctccagctagagg

SEQ ID NO: 976612 - DNA, 33 bp, Homo sapien
tcatgaagcttttcaattgtctccagctagagg

SEQ ID NO: 976613 - DNA, 33 bp, Homo sapien
cacttgtttttccttgaagcaaaataaaatact

SEQ ID NO: 976614 - DNA, 33 bp, Homo sapien
cacttgtttttccttgtagcaaaataaaatact

SEQ ID NO: 976615 - DNA, 33 bp, Homo sapien
tttttgtagagaggcacctttgccatgttgccc

SEQ ID NO: 976616 - DNA, 33 bp, Homo sapien
tttttgtagagaggcagctttgccatgttgccc

SEQ ID NO: 976617 - DNA, 33 bp, Homo sapien
aggaggtaaccaagaggagatgtcaagtaagcc

SEQ ID NO: 976618 - DNA, 33 bp, Homo sapien
aggaggtaaccaagagtagatgtcaagtaagcc

SEQ ID NO: 976619 - DNA, 33 bp, Homo sapien
aataaatggctctataacctaactgtcaagccc

SEQ ID NO: 976620 - DNA, 33 bp, Homo sapien
aataaatggctctatagcctaactgtcaagccc

SEQ ID NO: 976621 - DNA, 33 bp, Homo sapien
ctacacatcaccccaaaaactaaaagcacataa

SEQ ID NO: 976622 - DNA, 33 bp, Homo sapien
ctacacatcaccccaacaactaaaagcacataa

SEQ ID NO: 976623 - DNA, 33 bp, Homo sapien
ggattacaagctctcaccaccatacccagctaa

SEQ ID NO: 976624 - DNA, 33 bp, Homo sapien
ggattacaagctctcatcaccatacccagctaa

SEQ ID NO: 976625 - DNA, 33 bp, Homo sapien
acagtgtgtacctaaacagtgtgtgttttttac

SEQ ID NO: 976626 - DNA, 33 bp, Homo sapien
acagtgtgtacctaaagagtgtgtgttttttac

SEQ ID NO: 976627 - DNA, 33 bp, Homo sapien
tgcaaagtggtacctaggatgcagtgtacacaa

SEQ ID NO: 976628 - DNA, 33 bp, Homo sapien
tgcaaagtggtacctatgatgcagtgtacacaa

SEQ ID NO: 976629 - DNA, 33 bp, Homo sapien
tataaattgcttagaacggtgccttctgttagt

SEQ ID NO: 976630 - DNA, 33 bp, Homo sapien
tataaattgcttagaatggtgccttctgttagt

SEQ ID NO: 976631 - DNA, 33 bp, Homo sapien
agttcttttctgagatcagtgaataattttaga

SEQ ID NO: 976632 - DNA, 33 bp, Homo sapien
agttcttttctgagatgagtgaataattttaga

SEQ ID NO: 976633 - DNA, 33 bp, Homo sapien
agtaaaaggaaagtcacgggactgccaacatac

SEQ ID NO: 976634 - DNA, 33 bp, Homo sapien
agtaaaaggaaagtcatgggactgccaacatac

SEQ ID NO: 976635 - DNA, 33 bp, Homo sapien
agctgcgtagcccaagaaaaccatggcaagccc

SEQ ID NO: 976636 - DNA, 33 bp, Homo sapien
agctgcgtagcccaaggaaaccatggcaagccc

SEQ ID NO: 976637 - DNA, 33 bp, Homo sapien
agatcatgtagccacactccagcatcttacaaa

SEQ ID NO: 976638 - DNA, 33 bp, Homo sapien
agatcatgtagccacattccagcatcttacaaa

SEQ ID NO: 976639 - DNA, 33 bp, Homo sapien
ctcaaagaaccatgaaaccttactgaccaaatc

SEQ ID NO: 976640 - DNA, 33 bp, Homo sapien
ctcaaagaaccatgaacccttactgaccaaatc

SEQ ID NO: 976641 - DNA, 33 bp, Homo sapien
gtaacacagatcatcaacttatttggaacatta

SEQ ID NO: 976642 - DNA, 33 bp, Homo sapien
gtaacacagatcatcagcttatttggaacatta

SEQ ID NO: 976643 - DNA, 33 bp, Homo sapien
gcaaattcttcaaatcacaatgtatatatcctt

SEQ ID NO: 976644 - DNA, 33 bp, Homo sapien
gcaaattcttcaaatcgcaatgtatatatcctt

SEQ ID NO: 976645 - DNA, 33 bp, Homo sapien
cagatgaattctaagcaatgaggcctgtcacct

SEQ ID NO: 976646 - DNA, 33 bp, Homo sapien
cagatgaattctaagccatgaggcctgtcacct

SEQ ID NO: 976647 - DNA, 33 bp, Homo sapien
gcttgtcttgcaattccagttactcctcctagc

SEQ ID NO: 976648 - DNA, 33 bp, Homo sapien
gcttgtcttgcaattctagttactcctcctagc

SEQ ID NO: 976649 - DNA, 33 bp, Homo sapien
acactaagctcataaaaaatcagggctaagact

SEQ ID NO: 976650 - DNA, 33 bp, Homo sapien
acactaagctcataaagaatcagggctaagact

SEQ ID NO: 976651 - DNA, 33 bp, Homo sapien
ttgactatagcatggactaaaatgggatgcaat

SEQ ID NO: 976652 - DNA, 33 bp, Homo sapien
ttgactatagcatggattaaaatgggatgcaat

SEQ ID NO: 976653 - DNA, 33 bp, Homo sapien
ggaatgaaagaacggtcaagcctggagagagaa

SEQ ID NO: 976654 - DNA, 33 bp, Homo sapien
ggaatgaaagaacggttaagcctggagagagaa

SEQ ID NO: 976655 - DNA, 33 bp, Homo sapien
gagataatttggacttaaaaccatgggagattg

SEQ ID NO: 976656 - DNA, 33 bp, Homo sapien
gagataatttggacttgaaaccatgggagattg

SEQ ID NO: 976657 - DNA, 33 bp, Homo sapien
attagactttctccctcaagctcatgcactaca

SEQ ID NO: 976658 - DNA, 33 bp, Homo sapien
attagactttctcccttaagctcatgcactaca

SEQ ID NO: 976659 - DNA, 33 bp, Homo sapien
ttctacattactgctaacatggccgtcattaat

SEQ ID NO: 976660 - DNA, 33 bp, Homo sapien
ttctacattactgctagcatggccgtcattaat

SEQ ID NO: 976661 - DNA, 33 bp, Homo sapien
gagaacattccaaagaactagggccacatgtca

SEQ ID NO: 976662 - DNA, 33 bp, Homo sapien
gagaacattccaaagagctagggccacatgtca

SEQ ID NO: 976663 - DNA, 33 bp, Homo sapien
aaagctcaaacgtgacagtcacctatgagtcta

SEQ ID NO: 976664 - DNA, 33 bp, Homo sapien
aaagctcaaacgtgactgtcacctatgagtcta

SEQ ID NO: 976665 - DNA, 33 bp, Homo sapien
ctttcaaaatacgacaataatacgcagcttagc

SEQ ID NO: 976666 - DNA, 33 bp, Homo sapien
ctttcaaaatacgacagtaatacgcagcttagc

SEQ ID NO: 976667 - DNA, 33 bp, Homo sapien
cagacacataatttggaaaaaagctctgattct

SEQ ID NO: 976668 - DNA, 33 bp, Homo sapien
cagacacataatttggcaaaaagctctgattct

SEQ ID NO: 976669 - DNA, 33 bp, Homo sapien
aatttctgatgttttaagagagaattatctttt

SEQ ID NO: 976670 - DNA, 33 bp, Homo sapien
aatttctgatgttttaggagagaattatctttt

SEQ ID NO: 976671 - DNA, 33 bp, Homo sapien
caacctattgttagaaccatgaaggaagacttt

SEQ ID NO: 976672 - DNA, 33 bp, Homo sapien
caacctattgttagaatcatgaaggaagacttt

SEQ ID NO: 976673 - DNA, 33 bp, Homo sapien
gtcttggtattagatacgattattaaggcaagt

SEQ ID NO: 976674 - DNA, 33 bp, Homo sapien
gtcttggtattagatatgattattaaggcaagt

SEQ ID NO: 976675 - DNA, 33 bp, Homo sapien
tttagaaaagattgaaagtgagaaaaaatgaaa

SEQ ID NO: 976676 - DNA, 33 bp, Homo sapien
tttagaaaagattgaaggtgagaaaaaatgaaa

SEQ ID NO: 976677 - DNA, 33 bp, Homo sapien
ttttacttgcacttgaccattttcacgtcaagc

SEQ ID NO: 976678 - DNA, 33 bp, Homo sapien
ttttacttgcacttgagcattttcacgtcaagc

SEQ ID NO: 976679 - DNA, 33 bp, Homo sapien
aaggaaacagattaacacagaagtcccatacct

SEQ ID NO: 976680 - DNA, 33 bp, Homo sapien
aaggaaacagattaacccagaagtcccatacct

SEQ ID NO: 976681 - DNA, 33 bp, Homo sapien
gtgtaaagcatgccccacctgaatatgcaaaat

SEQ ID NO: 976682 - DNA, 33 bp, Homo sapien
gtgtaaagcatgccccgcctgaatatgcaaaat

SEQ ID NO: 976683 - DNA, 33 bp, Homo sapien
accattgtgacccatacgtacatcaaagatggt

SEQ ID NO: 976684 - DNA, 33 bp, Homo sapien
accattgtgacccatatgtacatcaaagatggt

SEQ ID NO: 976685 - DNA, 33 bp, Homo sapien
taattcttgagggtcccagattttggaatggta

SEQ ID NO: 976686 - DNA, 33 bp, Homo sapien
taattcttgagggtcctagattttggaatggta

SEQ ID NO: 976687 - DNA, 33 bp, Homo sapien
taaacgttttcaacggaacaggatcaaaaccaa

SEQ ID NO: 976688 - DNA, 33 bp, Homo sapien
taaacgttttcaacgggacaggatcaaaaccaa

SEQ ID NO: 976689 - DNA, 33 bp, Homo sapien
agacacagaatctaagacaaagcaagaggaatg

SEQ ID NO: 976690 - DNA, 33 bp, Homo sapien
agacacagaatctaagccaaagcaagaggaatg

SEQ ID NO: 976691 - DNA, 33 bp, Homo sapien
atgtttggttagctgacccaacagttacctctc

SEQ ID NO: 976692 - DNA, 33 bp, Homo sapien
atgtttggttagctgagccaacagttacctctc

SEQ ID NO: 976693 - DNA, 33 bp, Homo sapien
ctttgtctcagtttcaccattttaaagtgaggg

SEQ ID NO: 976694 - DNA, 33 bp, Homo sapien
ctttgtctcagtttcatcattttaaagtgaggg

SEQ ID NO: 976695 - DNA, 33 bp, Homo sapien
cacatttaacggaatacgttttatgaccacaat

SEQ ID NO: 976696 - DNA, 33 bp, Homo sapien
cacatttaacggaatatgttttatgaccacaat

SEQ ID NO: 976697 - DNA, 33 bp, Homo sapien
tcataacagcattgcacagtagaaaaaaacagt

SEQ ID NO: 976698 - DNA, 33 bp, Homo sapien
tcataacagcattgcagagtagaaaaaaacagt

SEQ ID NO: 976699 - DNA, 33 bp, Homo sapien
tagtaagtgcctaagacgtcatcactatgaagg

SEQ ID NO: 976700 - DNA, 33 bp, Homo sapien
tagtaagtgcctaagatgtcatcactatgaagg

SEQ ID NO: 976701 - DNA, 33 bp, Homo sapien
tggtagggcatcctgaataagatatctaaacac

SEQ ID NO: 976702 - DNA, 33 bp, Homo sapien
tggtagggcatcctgagtaagatatctaaacac

SEQ ID NO: 976703 - DNA, 33 bp, Homo sapien
agtataagagtgaagacaagctatgcaataata

SEQ ID NO: 976704 - DNA, 33 bp, Homo sapien
agtataagagtgaagataagctatgcaataata

SEQ ID NO: 976705 - DNA, 33 bp, Homo sapien
gtgcatgcacatgtacacgctatctttgtaggc

SEQ ID NO: 976706 - DNA, 33 bp, Homo sapien
gtgcatgcacatgtacgcgctatctttgtaggc

SEQ ID NO: 976707 - DNA, 33 bp, Homo sapien
ctgaaaccacatacaacagagtatatactggat

SEQ ID NO: 976708 - DNA, 33 bp, Homo sapien
ctgaaaccacatacaagagagtatatactggat

SEQ ID NO: 976709 - DNA, 33 bp, Homo sapien
cactcccaattcaaaaccatctgtggaagcccc

SEQ ID NO: 976710 - DNA, 33 bp, Homo sapien
cactcccaattcaaaatcatctgtggaagcccc

SEQ ID NO: 976711 - DNA, 33 bp, Homo sapien
ggaacagacagcatcccatgcagaaaatgggcc

SEQ ID NO: 976712 - DNA, 33 bp, Homo sapien
ggaacagacagcatcctatgcagaaaatgggcc

SEQ ID NO: 976713 - DNA, 33 bp, Homo sapien
agctagctagaaaaataaactctgacagagcac

SEQ ID NO: 976714 - DNA, 33 bp, Homo sapien
agctagctagaaaaatgaactctgacagagcac

SEQ ID NO: 976715 - DNA, 33 bp, Homo sapien
aaaatataagcagataaatgtgcagtatacgta

SEQ ID NO: 976716 - DNA, 33 bp, Homo sapien
aaaatataagcagatacatgtgcagtatacgta

SEQ ID NO: 976717 - DNA, 33 bp, Homo sapien
atctctcctcttaatcccctaattcttgcatac

SEQ ID NO: 976718 - DNA, 33 bp, Homo sapien
atctctcctcttaatctcctaattcttgcatac

SEQ ID NO: 976719 - DNA, 33 bp, Homo sapien
taacactaaggaagaaggtctaggaggtacaaa

SEQ ID NO: 976720 - DNA, 33 bp, Homo sapien
taacactaaggaagaatgtctaggaggtacaaa

SEQ ID NO: 976721 - DNA, 33 bp, Homo sapien
cctttaggctagtcaaggtttgtcctgcttctt

SEQ ID NO: 976722 - DNA, 33 bp, Homo sapien
cctttaggctagtcaatgtttgtcctgcttctt

SEQ ID NO: 976723 - DNA, 33 bp, Homo sapien
cttccctcagacatcagtctaccatttcagaaa

SEQ ID NO: 976724 - DNA, 33 bp, Homo sapien
cttccctcagacatcattctaccatttcagaaa

SEQ ID NO: 976725 - DNA, 33 bp, Homo sapien
catgaacacccctcaaataggtgcaaattacca

SEQ ID NO: 976726 - DNA, 33 bp, Homo sapien
catgaacacccctcaactaggtgcaaattacca

SEQ ID NO: 976727 - DNA, 33 bp, Homo sapien
ttaactcaggataaaacagaaaagggcttcata

SEQ ID NO: 976728 - DNA, 33 bp, Homo sapien
ttaactcaggataaaagagaaaagggcttcata

SEQ ID NO: 976729 - DNA, 33 bp, Homo sapien
tgttaaaaggacaaaggataaggagtgatatga

SEQ ID NO: 976730 - DNA, 33 bp, Homo sapien
tgttaaaaggacaaagtataaggagtgatatga

SEQ ID NO: 976731 - DNA, 33 bp, Homo sapien
ttaactgattagctcaaggcaaataatcattaa

SEQ ID NO: 976732 - DNA, 33 bp, Homo sapien
ttaactgattagctcagggcaaataatcattaa

SEQ ID NO: 976733 - DNA, 33 bp, Homo sapien
acatgggtaaaataaactaccagagaatccttt

SEQ ID NO: 976734 - DNA, 33 bp, Homo sapien
acatgggtaaaataaagtaccagagaatccttt

SEQ ID NO: 976735 - DNA, 33 bp, Homo sapien
atacatggtaagttcaagaatcctaaatacgaa

SEQ ID NO: 976736 - DNA, 33 bp, Homo sapien
atacatggtaagttcaggaatcctaaatacgaa

SEQ ID NO: 976737 - DNA, 33 bp, Homo sapien
cttagaatcaatccaacttgaaaatccatcccc

SEQ ID NO: 976738 - DNA, 33 bp, Homo sapien
cttagaatcaatccaatttgaaaatccatcccc

SEQ ID NO: 976739 - DNA, 33 bp, Homo sapien
cttagtcctaagccaacattccaatgtgtatac

SEQ ID NO: 976740 - DNA, 33 bp, Homo sapien
cttagtcctaagccaagattccaatgtgtatac

SEQ ID NO: 976741 - DNA, 33 bp, Homo sapien
gggattggtggatcaaatagtggttctatttta

SEQ ID NO: 976742 - DNA, 33 bp, Homo sapien
gggattggtggatcaagtagtggttctatttta

SEQ ID NO: 976743 - DNA, 33 bp, Homo sapien
cacttgttaactgggcactaaacactgagtaca

SEQ ID NO: 976744 - DNA, 33 bp, Homo sapien
cacttgttaactgggcgctaaacactgagtaca

SEQ ID NO: 976745 - DNA, 33 bp, Homo sapien
agaaaaaaatggactacgataaagccaaaagta

SEQ ID NO: 976746 - DNA, 33 bp, Homo sapien
agaaaaaaatggactatgataaagccaaaagta

SEQ ID NO: 976747 - DNA, 33 bp, Homo sapien
agtatttgccaaaataaatcattcagccagtaa

SEQ ID NO: 976748 - DNA, 33 bp, Homo sapien
agtatttgccaaaatatatcattcagccagtaa

SEQ ID NO: 976749 - DNA, 33 bp, Homo sapien
caggctgcagtgcataacttactgtggcctcga

SEQ ID NO: 976750 - DNA, 33 bp, Homo sapien
caggctgcagtgcatagcttactgtggcctcga

SEQ ID NO: 976751 - DNA, 33 bp, Homo sapien
tacattcagtaaggcactcccattttaggcaaa

SEQ ID NO: 976752 - DNA, 33 bp, Homo sapien
tacattcagtaaggcattcccattttaggcaaa

SEQ ID NO: 976753 - DNA, 33 bp, Homo sapien
ttgaatgcataaatgacaaaaaaaggcaaaaga

SEQ ID NO: 976754 - DNA, 33 bp, Homo sapien
ttgaatgcataaatgagaaaaaaaggcaaaaga

SEQ ID NO: 976755 - DNA, 33 bp, Homo sapien
gtttgtcataatacaaagtcagggcaagataca

SEQ ID NO: 976756 - DNA, 33 bp, Homo sapien
gtttgtcataatacaacgtcagggcaagataca

SEQ ID NO: 976757 - DNA, 33 bp, Homo sapien
attaagcttaaggaaagttaccacatcagatgc

SEQ ID NO: 976758 - DNA, 33 bp, Homo sapien
attaagcttaaggaaatttaccacatcagatgc

SEQ ID NO: 976759 - DNA, 33 bp, Homo sapien
acaaccaggcagttgagtaggtgtgcagggtta

SEQ ID NO: 976760 - DNA, 33 bp, Homo sapien
acaaccaggcagttgattaggtgtgcagggtta

SEQ ID NO: 976761 - DNA, 33 bp, Homo sapien
atgagcaggaaaaggcacatactcagtttttta

SEQ ID NO: 976762 - DNA, 33 bp, Homo sapien
atgagcaggaaaaggcgcatactcagtttttta

SEQ ID NO: 976763 - DNA, 33 bp, Homo sapien
actgcatcatttgataaagtcaccgtttttgca

SEQ ID NO: 976764 - DNA, 33 bp, Homo sapien
actgcatcatttgatagagtcaccgtttttgca

SEQ ID NO: 976765 - DNA, 33 bp, Homo sapien
tctgactatcatttgacgaagtttctggtgtgc

SEQ ID NO: 976766 - DNA, 33 bp, Homo sapien
tctgactatcatttgatgaagtttctggtgtgc

SEQ ID NO: 976767 - DNA, 33 bp, Homo sapien
aggtggagtgaatggacggctgtcatggagaag

SEQ ID NO: 976768 - DNA, 33 bp, Homo sapien
aggtggagtgaatggagggctgtcatggagaag

SEQ ID NO: 976769 - DNA, 33 bp, Homo sapien
gttgcagaaaagggagcattccagttggctgtt

SEQ ID NO: 976770 - DNA, 33 bp, Homo sapien
gttgcagaaaagggaggattccagttggctgtt

SEQ ID NO: 976771 - DNA, 33 bp, Homo sapien
taaagttgcaaggaataaagtgtttcctaataa

SEQ ID NO: 976772 - DNA, 33 bp, Homo sapien
taaagttgcaaggaatgaagtgtttcctaataa

SEQ ID NO: 976773 - DNA, 33 bp, Homo sapien
taatacactagcctaactaaatgtttctttgga

SEQ ID NO: 976774 - DNA, 33 bp, Homo sapien
taatacactagcctaagtaaatgtttctttgga

SEQ ID NO: 976775 - DNA, 33 bp, Homo sapien
caacttccctgacctgacagatgtggacaagct

SEQ ID NO: 976776 - DNA, 33 bp, Homo sapien
caacttccctgacctgccagatgtggacaagct

SEQ ID NO: 976777 - DNA, 33 bp, Homo sapien
ctccgtggttttgtaactccacttttcaggaca

SEQ ID NO: 976778 - DNA, 33 bp, Homo sapien
ctccgtggttttgtaagtccacttttcaggaca

SEQ ID NO: 976779 - DNA, 33 bp, Homo sapien
ttgaaagtctgaatcacgtctggtcatgcagct

SEQ ID NO: 976780 - DNA, 33 bp, Homo sapien
ttgaaagtctgaatcatgtctggtcatgcagct

SEQ ID NO: 976781 - DNA, 33 bp, Homo sapien
tgttaaactctaaataagccagattgcataaca

SEQ ID NO: 976782 - DNA, 33 bp, Homo sapien
tgttaaactctaaataggccagattgcataaca

SEQ ID NO: 976783 - DNA, 33 bp, Homo sapien
agtgtgggtagtctgaaaaactgctctgtttaa

SEQ ID NO: 976784 - DNA, 33 bp, Homo sapien
agtgtgggtagtctgagaaactgctctgtttaa

SEQ ID NO: 976785 - DNA, 33 bp, Homo sapien
cctcctggtgaccaccgctctatggtacagctg

SEQ ID NO: 976786 - DNA, 33 bp, Homo sapien
cctcctggtgaccacctctctatggtacagctg

SEQ ID NO: 976787 - DNA, 33 bp, Homo sapien
gacgagcagatattccacagtaactacctgtca

SEQ ID NO: 976788 - DNA, 33 bp, Homo sapien
gacgagcagatattcctcagtaactacctgtca

SEQ ID NO: 976789 - DNA, 33 bp, Homo sapien
agcagcagtgaaggaaatcggatcaatgggaaa

SEQ ID NO: 976790 - DNA, 33 bp, Homo sapien
agcagcagtgaaggaagtcggatcaatgggaaa

SEQ ID NO: 976791 - DNA, 33 bp, Homo sapien
agagtttactttactacccctctctgtatttca

SEQ ID NO: 976792 - DNA, 33 bp, Homo sapien
agagtttactttactatccctctctgtatttca

SEQ ID NO: 976793 - DNA, 33 bp, Homo sapien
gagcaatgaggatgacaagagttcactttcatc

SEQ ID NO: 976794 - DNA, 33 bp, Homo sapien
gagcaatgaggatgacgagagttcactttcatc

SEQ ID NO: 976795 - DNA, 33 bp, Homo sapien
ggtacaacattttagacggaatttggcagggat

SEQ ID NO: 976796 - DNA, 33 bp, Homo sapien
ggtacaacattttagatggaatttggcagggat

SEQ ID NO: 976797 - DNA, 33 bp, Homo sapien
gttggatgtcgcatcaataataccatttgatat

SEQ ID NO: 976798 - DNA, 33 bp, Homo sapien
gttggatgtcgcatcagtaataccatttgatat

SEQ ID NO: 976799 - DNA, 33 bp, Homo sapien
aattcccatcaaaataccaacttttttttcaca

SEQ ID NO: 976800 - DNA, 33 bp, Homo sapien
aattcccatcaaaatatcaacttttttttcaca

SEQ ID NO: 976801 - DNA, 33 bp, Homo sapien
agacactgtgttaggaactgaggaaatagagga

SEQ ID NO: 976802 - DNA, 33 bp, Homo sapien
agacactgtgttaggacctgaggaaatagagga

SEQ ID NO: 976803 - DNA, 33 bp, Homo sapien
agggccacactagaacgcagaatagggtgtggt

SEQ ID NO: 976804 - DNA, 33 bp, Homo sapien
agggccacactagaactcagaatagggtgtggt

SEQ ID NO: 976805 - DNA, 33 bp, Homo sapien
agctctttcataagtccatctgaaacttgcact

SEQ ID NO: 976806 - DNA, 33 bp, Homo sapien
agctctttcataagtctatctgaaacttgcact

SEQ ID NO: 976807 - DNA, 33 bp, Homo sapien
cagatatgggcaaatcacaagtacgtagaacac

SEQ ID NO: 976808 - DNA, 33 bp, Homo sapien
cagatatgggcaaatcgcaagtacgtagaacac

SEQ ID NO: 976809 - DNA, 33 bp, Homo sapien
ggttgttgagttctgaaaatatgaacaatgtgg

SEQ ID NO: 976810 - DNA, 33 bp, Homo sapien
ggttgttgagttctgagaatatgaacaatgtgg

SEQ ID NO: 976811 - DNA, 33 bp, Homo sapien
aatagcacaattcaaacattaggtttaatggaa

SEQ ID NO: 976812 - DNA, 33 bp, Homo sapien
aatagcacaattcaaatattaggtttaatggaa

SEQ ID NO: 976813 - DNA, 33 bp, Homo sapien
tgatacaatgtaataacagaatcactgtcatca

SEQ ID NO: 976814 - DNA, 33 bp, Homo sapien
tgatacaatgtaataatagaatcactgtcatca

SEQ ID NO: 976815 - DNA, 33 bp, Homo sapien
cctaatgtctactctacgctccatgctaggctg

SEQ ID NO: 976816 - DNA, 33 bp, Homo sapien
cctaatgtctactctatgctccatgctaggctg

SEQ ID NO: 976817 - DNA, 33 bp, Homo sapien
ttgtgaaaactctacaatgctggaaagcaagac

SEQ ID NO: 976818 - DNA, 33 bp, Homo sapien
ttgtgaaaactctacagtgctggaaagcaagac

SEQ ID NO: 976819 - DNA, 33 bp, Homo sapien
atcaaaaggaatggggaactctatgcccagaca

SEQ ID NO: 976820 - DNA, 33 bp, Homo sapien
atcaaaaggaatgggggactctatgcccagaca

SEQ ID NO: 976821 - DNA, 33 bp, Homo sapien
tagtgtagaaagaatacggtcaagtgaacatca

SEQ ID NO: 976822 - DNA, 33 bp, Homo sapien
tagtgtagaaagaatatggtcaagtgaacatca

SEQ ID NO: 976823 - DNA, 33 bp, Homo sapien
cattcaaaacaattcaatcctctaaatgcaaac

SEQ ID NO: 976824 - DNA, 33 bp, Homo sapien
cattcaaaacaattcagtcctctaaatgcaaac

SEQ ID NO: 976825 - DNA, 33 bp, Homo sapien
cagagatctttctaaactgtgtgtgcatcaaga

SEQ ID NO: 976826 - DNA, 33 bp, Homo sapien
cagagatctttctaaattgtgtgtgcatcaaga

SEQ ID NO: 976827 - DNA, 33 bp, Homo sapien
ctattctccatctctacaattttgttatttcaa

SEQ ID NO: 976828 - DNA, 33 bp, Homo sapien
ctattctccatctctataattttgttatttcaa

SEQ ID NO: 976829 - DNA, 33 bp, Homo sapien
acaataatctcacaaccaggatattgaaaatga

SEQ ID NO: 976830 - DNA, 33 bp, Homo sapien
acaataatctcacaacgaggatattgaaaatga

SEQ ID NO: 976831 - DNA, 33 bp, Homo sapien
taacaaactggcaagacgaagtccttacttatg

SEQ ID NO: 976832 - DNA, 33 bp, Homo sapien
taacaaactggcaagatgaagtccttacttatg

SEQ ID NO: 976833 - DNA, 33 bp, Homo sapien
ttctggataattatcacggtccatatagtttaa

SEQ ID NO: 976834 - DNA, 33 bp, Homo sapien
ttctggataattatcatggtccatatagtttaa

SEQ ID NO: 976835 - DNA, 33 bp, Homo sapien
atattattataggtaacgaacaaacatattttg

SEQ ID NO: 976836 - DNA, 33 bp, Homo sapien
atattattataggtaatgaacaaacatattttg

SEQ ID NO: 976837 - DNA, 33 bp, Homo sapien
taaaatcacttgctaaaagaatctaggtaaaga

SEQ ID NO: 976838 - DNA, 33 bp, Homo sapien
taaaatcacttgctaacagaatctaggtaaaga

SEQ ID NO: 976839 - DNA, 33 bp, Homo sapien
tctcatatacctttgaccccacccttgcataac

SEQ ID NO: 976840 - DNA, 33 bp, Homo sapien
tctcatatacctttgatcccacccttgcataac

SEQ ID NO: 976841 - DNA, 33 bp, Homo sapien
tgtttatccacaaatcaaattaggctgaaatta

SEQ ID NO: 976842 - DNA, 33 bp, Homo sapien
tgtttatccacaaatctaattaggctgaaatta

SEQ ID NO: 976843 - DNA, 33 bp, Homo sapien
aagctgggaagaatcacaatgtgccgttgacaa

SEQ ID NO: 976844 - DNA, 33 bp, Homo sapien
aagctgggaagaatcataatgtgccgttgacaa

SEQ ID NO: 976845 - DNA, 33 bp, Homo sapien
actagatgtacacgacagtatattctactgcat

SEQ ID NO: 976846 - DNA, 33 bp, Homo sapien
actagatgtacacgacggtatattctactgcat

SEQ ID NO: 976847 - DNA, 33 bp, Homo sapien
tgtctcaatctttataactctgatgctcaataa

SEQ ID NO: 976848 - DNA, 33 bp, Homo sapien
tgtctcaatctttatatctctgatgctcaataa

SEQ ID NO: 976849 - DNA, 33 bp, Homo sapien
tataatacctgagctcaattactgcaattaatt

SEQ ID NO: 976850 - DNA, 33 bp, Homo sapien
tataatacctgagctctattactgcaattaatt

SEQ ID NO: 976851 - DNA, 33 bp, Homo sapien
tagaatgcgtaggttaaggtcctagttcaataa

SEQ ID NO: 976852 - DNA, 33 bp, Homo sapien
tagaatgcgtaggttatggtcctagttcaataa

SEQ ID NO: 976853 - DNA, 33 bp, Homo sapien
tcacagacacgaagtcacagatttatgaagccc

SEQ ID NO: 976854 - DNA, 33 bp, Homo sapien
tcacagacacgaagtcgcagatttatgaagccc

SEQ ID NO: 976855 - DNA, 33 bp, Homo sapien
aaactaataaaaggccacaagattaggattatg

SEQ ID NO: 976856 - DNA, 33 bp, Homo sapien
aaactaataaaaggccgcaagattaggattatg

SEQ ID NO: 976857 - DNA, 33 bp, Homo sapien
tgaattctctttcttcgcagtaaaattacataa

SEQ ID NO: 976858 - DNA, 33 bp, Homo sapien
tgaattctctttcttctcagtaaaattacataa

SEQ ID NO: 976859 - DNA, 33 bp, Homo sapien; identical to SEQ ID NO: 976857

SEQ ID NO: 976860 - DNA, 33 bp, Homo sapien; identical to SEQ ID NO: 976858

SEQ ID NO: 976861 - DNA, 33 bp, Homo sapien
gtaaccacttactccaaatacaaaaatatctaa

SEQ ID NO: 976862 - DNA, 33 bp, Homo sapien
gtaaccacttactccagatacaaaaatatctaa

SEQ ID NO: 976863 - DNA, 33 bp, Homo sapien
gaaaaggtcctataagcctcagagctcttatgc

SEQ ID NO: 976864 - DNA, 33 bp, Homo sapien
gaaaaggtcctataagtctcagagctcttatgc

SEQ ID NO: 976865 - DNA, 33 bp, Homo sapien
agcttttggactcttaaacctacaccagtggtt

SEQ ID NO: 976866 - DNA, 33 bp, Homo sapien
agcttttggactcttagacctacaccagtggtt

SEQ ID NO: 976867 - DNA, 33 bp, Homo sapien
agtgtcaatgcagaataaagaagtattggaggg

SEQ ID NO: 976868 - DNA, 33 bp, Homo sapien
agtgtcaatgcagaattaagaagtattggaggg

SEQ ID NO: 976869 - DNA, 33 bp, Homo sapien
ggctgtgcttacatacacaagggtttggaaagt

SEQ ID NO: 976870 - DNA, 33 bp, Homo sapien
ggctgtgcttacatacgcaagggtttggaaagt

SEQ ID NO: 976871 - DNA, 33 bp, Homo sapien
accaggtaaaaaaccacgatcatctgaggtgct

SEQ ID NO: 976872 - DNA, 33 bp, Homo sapien
accaggtaaaaaaccatgatcatctgaggtgct

SEQ ID NO: 976873 - DNA, 33 bp, Homo sapien
ttagcactagaactatcagcttagaggggatgg

SEQ ID NO: 976874 - DNA, 33 bp, Homo sapien
ttagcactagaactattagcttagaggggatgg

SEQ ID NO: 976875 - DNA, 33 bp, Homo sapien
gtgactggcaccttcaactatctactgcccaag

SEQ ID NO: 976876 - DNA, 33 bp, Homo sapien
gtgactggcaccttcatctatctactgcccaag

SEQ ID NO: 976877 - DNA, 33 bp, Homo sapien
taatatctcatctagaataccagctggcctttc

SEQ ID NO: 976878 - DNA, 33 bp, Homo sapien
taatatctcatctagagtaccagctggcctttc

SEQ ID NO: 976879 - DNA, 33 bp, Homo sapien
aaacttctgggccaaaattctagcaaatcttga

SEQ ID NO: 976880 - DNA, 33 bp, Homo sapien
aaacttctgggccaaagttctagcaaatcttga

SEQ ID NO: 976881 - DNA, 33 bp, Homo sapien
tctgtgttgttttcagaagctccaggcatccca

SEQ ID NO: 976882 - DNA, 33 bp, Homo sapien
tctgtgttgttttcagcagctccaggcatccca

SEQ ID NO: 976883 - DNA, 33 bp, Homo sapien
gttactccttttcatcagacatgacacctcaaa

SEQ ID NO: 976884 - DNA, 33 bp, Homo sapien
gttactccttttcatcggacatgacacctcaaa

SEQ ID NO: 976885 - DNA, 33 bp, Homo sapien
aaagactgcaaagtatcagaaatgacattaaac

SEQ ID NO: 976886 - DNA, 33 bp, Homo sapien
aaagactgcaaagtattagaaatgacattaaac

SEQ ID NO: 976887 - DNA, 33 bp, Homo sapien
agcaggaggtttagataaggaaggtccacagtg

SEQ ID NO: 976888 - DNA, 33 bp, Homo sapien
agcaggaggtttagatgaggaaggtccacagtg

SEQ ID NO: 976889 - DNA, 33 bp, Homo sapien
gttgtactatggacaaaatccaaaaccatttca

SEQ ID NO: 976890 - DNA, 33 bp, Homo sapien
gttgtactatggacaagatccaaaaccatttca

SEQ ID NO: 976891 - DNA, 33 bp, Homo sapien
agttccaattgcattccactgcatagctctcag

SEQ ID NO: 976892 - DNA, 33 bp, Homo sapien
agttccaattgcattcgactgcatagctctcag

SEQ ID NO: 976893 - DNA, 33 bp, Homo sapien
ttaaactcttgaataacgtgtttccccatctct

SEQ ID NO: 976894 - DNA, 33 bp, Homo sapien
ttaaactcttgaataatgtgtttccccatctct

SEQ ID NO: 976895 - DNA, 33 bp, Homo sapien
ataataagcatcttagacccttaacagacaccc

SEQ ID NO: 976896 - DNA, 33 bp, Homo sapien
ataataagcatcttagccccttaacagacaccc

SEQ ID NO: 976897 - DNA, 33 bp, Homo sapien
atcattagatacagaaagtctgggtcatatgtt

SEQ ID NO: 976898 - DNA, 33 bp, Homo sapien
atcattagatacagaatgtctgggtcatatgtt

SEQ ID NO: 976899 - DNA, 33 bp, Homo sapien
tgactgtatgtaaaaactccaccgcactgctca

SEQ ID NO: 976900 - DNA, 33 bp, Homo sapien
tgactgtatgtaaaaattccaccgcactgctca

SEQ ID NO: 976901 - DNA, 33 bp, Homo sapien
agaatactctgtaactcagtgaatctgtcattg

SEQ ID NO: 976902 - DNA, 33 bp, Homo sapien
agaatactctgtaactgagtgaatctgtcattg

SEQ ID NO: 976903 - DNA, 33 bp, Homo sapien
ttcttctggagcaatggaatatattttcactga

SEQ ID NO: 976904 - DNA, 33 bp, Homo sapien
ttcttctggagcaatgtaatatattttcactga

SEQ ID NO: 976905 - DNA, 33 bp, Homo sapien
gagaaaacgagagaaaaagagagcaacagagag

SEQ ID NO: 976906 - DNA, 33 bp, Homo sapien
gagaaaacgagagaaagagagagcaacagagag

SEQ ID NO: 976907 - DNA, 33 bp, Homo sapien
gtgtagatagttgttaaatttgctgttttttca

SEQ ID NO: 976908 - DNA, 33 bp, Homo sapien
gtgtagatagttgttacatttgctgttttttca

SEQ ID NO: 976909 - DNA, 33 bp, Homo sapien
gccacagaatgggagcaagatgacatctgtgat

SEQ ID NO: 976910 - DNA, 33 bp, Homo sapien
gccacagaatgggagcgagatgacatctgtgat

SEQ ID NO: 976911 - DNA, 33 bp, Homo sapien
tctagagaaagagatacgtgacacttccgataa

SEQ ID NO: 976912 - DNA, 33 bp, Homo sapien
tctagagaaagagatatgtgacacttccgataa

SEQ ID NO: 976913 - DNA, 33 bp, Homo sapien
gggtatacaagggatacacctcaacatgataaa

SEQ ID NO: 976914 - DNA, 33 bp, Homo sapien
gggtatacaagggatagacctcaacatgataaa

SEQ ID NO: 976915 - DNA, 33 bp, Homo sapien
cttctttcttgaacaacgaaaatgaattgtgta

SEQ ID NO: 976916 - DNA, 33 bp, Homo sapien
cttctttcttgaacaatgaaaatgaattgtgta

SEQ ID NO: 976917 - DNA, 33 bp, Homo sapien
tcaagaggcagaaaaacgatttgtgatcagggc

SEQ ID NO: 976918 - DNA, 33 bp, Homo sapien
tcaagaggcagaaaaatgatttgtgatcagggc

SEQ ID NO: 976919 - DNA, 33 bp, Homo sapien
aatacagatggagtaacgtaaatttagatcatt

SEQ ID NO: 976920 - DNA, 33 bp, Homo sapien
aatacagatggagtaaggtaaatttagatcatt

SEQ ID NO: 976921 - DNA, 33 bp, Homo sapien
tagcagatgctcacacacaattatgaatattac

SEQ ID NO: 976922 - DNA, 33 bp, Homo sapien
tagcagatgctcacacgcaattatgaatattac

SEQ ID NO: 976923 - DNA, 33 bp, Homo sapien
cagatgacgctacgagaagcctctgctacttaa

SEQ ID NO: 976924 - DNA, 33 bp, Homo sapien
cagatgacgctacgaggagcctctgctacttaa

SEQ ID NO: 976925 - DNA, 33 bp, Homo sapien
taaagttacagctttcaataaggacactgttag

SEQ ID NO: 976926 - DNA, 33 bp, Homo sapien
taaagttacagctttccataaggacactgttag

SEQ ID NO: 976927 - DNA, 33 bp, Homo sapien
gttgttgaaagatggcaagaatgagggcaggtg

SEQ ID NO: 976928 - DNA, 33 bp, Homo sapien
gttgttgaaagatggcgagaatgagggcaggtg

SEQ ID NO: 976929 - DNA, 33 bp, Homo sapien
gggacattagttaggccattattgtagtattac

SEQ ID NO: 976930 - DNA, 33 bp, Homo sapien
gggacattagttaggcgattattgtagtattac

SEQ ID NO: 976931 - DNA, 33 bp, Homo sapien
ttgccacagctcaataacttatttcaggttctc

SEQ ID NO: 976932 - DNA, 33 bp, Homo sapien
ttgccacagctcaatatcttatttcaggttctc

SEQ ID NO: 976933 - DNA, 33 bp, Homo sapien
ggtttccctgtgcagaatcaaccaacttgggat

SEQ ID NO: 976934 - DNA, 33 bp, Homo sapien
ggtttccctgtgcagactcaaccaacttgggat

SEQ ID NO: 976935 - DNA, 33 bp, Homo sapien
tgtttaatggctcgaacctcagatcatttcttt

SEQ ID NO: 976936 - DNA, 33 bp, Homo sapien
tgtttaatggctcgaagctcagatcatttcttt

SEQ ID NO: 976937 - DNA, 33 bp, Homo sapien
caataaaaactctcaagagcaccaaactaatag

SEQ ID NO: 976938 - DNA, 33 bp, Homo sapien
caataaaaactctcaatagcaccaaactaatag

SEQ ID NO: 976939 - DNA, 33 bp, Homo sapien
tgtctttggggcagtggatatctttctatttat

SEQ ID NO: 976940 - DNA, 33 bp, Homo sapien
tgtctttggggcagtgtatatctttctatttat

SEQ ID NO: 976941 - DNA, 33 bp, Homo sapien
ctgtcatgttaaatgcgattaagactgaaaaaa

SEQ ID NO: 976942 - DNA, 33 bp, Homo sapien
ctgtcatgttaaatgctattaagactgaaaaaa

SEQ ID NO: 976943 - DNA, 33 bp, Homo sapien
cttccatttctcatcagaggcaaaatctattag

SEQ ID NO: 976944 - DNA, 33 bp, Homo sapien
cttccatttctcatcataggcaaaatctattag

SEQ ID NO: 976945 - DNA, 33 bp, Homo sapien
aactccaacttcctcaagcagatgaaagggaaa

SEQ ID NO: 976946 - DNA, 33 bp, Homo sapien
aactccaacttcctcaggcagatgaaagggaaa

SEQ ID NO: 976947 - DNA, 33 bp, Homo sapien
atagcctggtaaatcacgaaaaacatcttcagg

SEQ ID NO: 976948 - DNA, 33 bp, Homo sapien
atagcctggtaaatcatgaaaaacatcttcagg

SEQ ID NO: 976949 - DNA, 33 bp, Homo sapien
caggctgcctttggcacattagagagtagccag

SEQ ID NO: 976950 - DNA, 33 bp, Homo sapien
caggctgcctttggcatattagagagtagccag

SEQ ID NO: 976951 - DNA, 33 bp, Homo sapien
agatccacactagcatcaaataagtacacttag

SEQ ID NO: 976952 - DNA, 33 bp, Homo sapien
agatccacactagcatgaaataagtacacttag

SEQ ID NO: 976953 - DNA, 33 bp, Homo sapien
caaaaccaaaagtgtcaagactaggaatgtttt

SEQ ID NO: 976954 - DNA, 33 bp, Homo sapien
caaaaccaaaagtgtcgagactaggaatgtttt

SEQ ID NO: 976955 - DNA, 33 bp, Homo sapien
aacaaaaaggaaacaacgaatactaatcacttt

SEQ ID NO: 976956 - DNA, 33 bp, Homo sapien
aacaaaaaggaaacaatgaatactaatcacttt

SEQ ID NO: 976957 - DNA, 33 bp, Homo sapien
aatctaaaaggcaaaaaccctgatgttcttcca

SEQ ID NO: 976958 - DNA, 33 bp, Homo sapien
aatctaaaaggcaaaagccctgatgttcttcca

SEQ ID NO: 976959 - DNA, 33 bp, Homo sapien
cgcttttagaataccaatctactgtcaatgagt

SEQ ID NO: 976960 - DNA, 33 bp, Homo sapien
cgcttttagaataccagtctactgtcaatgagt

SEQ ID NO: 976961 - DNA, 33 bp, Homo sapien
gtaatatttttgtacactcagacattaaatctt

SEQ ID NO: 976962 - DNA, 33 bp, Homo sapien
gtaatatttttgtacagtcagacattaaatctt

SEQ ID NO: 976963 - DNA, 33 bp, Homo sapien
tgtgcctcaaggtgctaagacctaagttgtcaa

SEQ ID NO: 976964 - DNA, 33 bp, Homo sapien
tgtgcctcaaggtgcttagacctaagttgtcaa

SEQ ID NO: 976965 - DNA, 33 bp, Homo sapien
tgctagacctccatgaagtgaaactgggttgga

SEQ ID NO: 976966 - DNA, 33 bp, Homo sapien
tgctagacctccatgacgtgaaactgggttgga

SEQ ID NO: 976967 - DNA, 33 bp, Homo sapien
gggcagaggacaaccacaggatgaagaaggcag

SEQ ID NO: 976968 - DNA, 33 bp, Homo sapien
gggcagaggacaaccagaggatgaagaaggcag

SEQ ID NO: 976969 - DNA, 33 bp, Homo sapien
tcaacaaaaaattacaaagctactagcaggcaa

SEQ ID NO: 976970 - DNA, 33 bp, Homo sapien
tcaacaaaaaattacagagctactagcaggcaa

SEQ ID NO: 976971 - DNA, 33 bp, Homo sapien
gaaaatcaaaattccacagtatcaagtcactct

SEQ ID NO: 976972 - DNA, 33 bp, Homo sapien
gaaaatcaaaattccatagtatcaagtcactct

SEQ ID NO: 976973 - DNA, 33 bp, Homo sapien
gttttaatgggcacaaaagacatataagtggca

SEQ ID NO: 976974 - DNA, 33 bp, Homo sapien
gttttaatgggcacaagagacatataagtggca

SEQ ID NO: 976975 - DNA, 33 bp, Homo sapien
atggacatttgaaataacaggctaatcttccca

SEQ ID NO: 976976 - DNA, 33 bp, Homo sapien
atggacatttgaaatagcaggctaatcttccca

SEQ ID NO: 976977 - DNA, 33 bp, Homo sapien
aaaaactaaaaaatccacataaattccagaaaa

SEQ ID NO: 976978 - DNA, 33 bp, Homo sapien
aaaaactaaaaaatccgcataaattccagaaaa

SEQ ID NO: 976979 - DNA, 33 bp, Homo sapien
agcttaaaatgtaaaacggtagtacaaggttca

SEQ ID NO: 976980 - DNA, 33 bp, Homo sapien
agcttaaaatgtaaaatggtagtacaaggttca

SEQ ID NO: 976981 - DNA, 33 bp, Homo sapien
ccagacatttatatgacagagaagcaaagttct

SEQ ID NO: 976982 - DNA, 33 bp, Homo sapien
ccagacatttatatgagagagaagcaaagttct

SEQ ID NO: 976983 - DNA, 33 bp, Homo sapien
gggccaaatcgcttaactactctaagctatcta

SEQ ID NO: 976984 - DNA, 33 bp, Homo sapien
gggccaaatcgcttaattactctaagctatcta

SEQ ID NO: 976985 - DNA, 33 bp, Homo sapien
aggacgtcttatttaacatgagacctaaagaaa

SEQ ID NO: 976986 - DNA, 33 bp, Homo sapien
aggacgtcttatttaagatgagacctaaagaaa

SEQ ID NO: 976987 - DNA, 33 bp, Homo sapien
gagatacgagagatacaaggtacagaaaacatg

SEQ ID NO: 976988 - DNA, 33 bp, Homo sapien
gagatacgagagatacgaggtacagaaaacatg

SEQ ID NO: 976989 - DNA, 33 bp, Homo sapien
tcaggggaagctttgacattcagtgtctacaga

SEQ ID NO: 976990 - DNA, 33 bp, Homo sapien
tcaggggaagctttgatattcagtgtctacaga

SEQ ID NO: 976991 - DNA, 33 bp, Homo sapien
agttagcccaaacttacaaccaatgtcatgccc

SEQ ID NO: 976992 - DNA, 33 bp, Homo sapien
agttagcccaaacttagaaccaatgtcatgccc

SEQ ID NO: 976993 - DNA, 33 bp, Homo sapien
gaatttgaaattcctacgttaagcttggaacct

SEQ ID NO: 976994 - DNA, 33 bp, Homo sapien
gaatttgaaattcctatgttaagcttggaacct

SEQ ID NO: 976995 - DNA, 33 bp, Homo sapien
aaaacaaaggtctgcaagttgattgaaatacta

SEQ ID NO: 976996 - DNA, 33 bp, Homo sapien
aaaacaaaggtctgcaggttgattgaaatacta

SEQ ID NO: 976997 - DNA, 33 bp, Homo sapien
agagaccatgccatcaagtacaccagcagactc

SEQ ID NO: 976998 - DNA, 33 bp, Homo sapien
agagaccatgccatcaggtacaccagcagactc

SEQ ID NO: 976999 - DNA, 33 bp, Homo sapien
gtattatataccataaaacaaacctcagtatat

SEQ ID NO: 977000 - DNA, 33 bp, Homo sapien
gtattatataccataagacaaacctcagtatat

SEQ ID NO: 977001 - DNA, 33 bp, Homo sapien
gaaatacatttggaatcatgtggaaaaaactga

SEQ ID NO: 977002 - DNA, 33 bp, Homo sapien
gaaatacatttggaattatgtggaaaaaactga

SEQ ID NO: 977003 - DNA, 33 bp, Homo sapien
ctgctgattttaaacaagtatcaatatagtttc

SEQ ID NO: 977004 - DNA, 33 bp, Homo sapien
ctgctgattttaaacaggtatcaatatagtttc

SEQ ID NO: 977005 - DNA, 33 bp, Homo sapien
ttattttcacattgaagttaggctgacacagtt

SEQ ID NO: 977006 - DNA, 33 bp, Homo sapien
ttattttcacattgaatttaggctgacacagtt

SEQ ID NO: 977007 - DNA, 33 bp, Homo sapien
tcctgtcttattcaaaagaaaacatttctccca

SEQ ID NO: 977008 - DNA, 33 bp, Homo sapien
tcctgtcttattcaaaggaaaacatttctccca

SEQ ID NO: 977009 - DNA, 33 bp, Homo sapien
tcatgctcgctcttccaaaaattgttaatatgc

SEQ ID NO: 977010 - DNA, 33 bp, Homo sapien
tcatgctcgctcttccgaaaattgttaatatgc

SEQ ID NO: 977011 - DNA, 33 bp, Homo sapien
aacagtagtacagtaacggcaatacagagaacc

SEQ ID NO: 977012 - DNA, 33 bp, Homo sapien
aacagtagtacagtaatggcaatacagagaacc

SEQ ID NO: 977013 - DNA, 33 bp, Homo sapien
taatgagagtaatgaagttaccattgattccta

SEQ ID NO: 977014 - DNA, 33 bp, Homo sapien
taatgagagtaatgaatttaccattgattccta

SEQ ID NO: 977015 - DNA, 33 bp, Homo sapien
tcaaaggtagttaaaaatcaaagtagacaaaaa

SEQ ID NO: 977016 - DNA, 33 bp, Homo sapien
tcaaaggtagttaaaagtcaaagtagacaaaaa

SEQ ID NO: 977017 - DNA, 33 bp, Homo sapien
ctttgtctgaatacaacgttattttgccttcat

SEQ ID NO: 977018 - DNA, 33 bp, Homo sapien
ctttgtctgaatacaatgttattttgccttcat

SEQ ID NO: 977019 - DNA, 33 bp, Homo sapien
atgtggataaatctaaatattagctgactgtat

SEQ ID NO: 977020 - DNA, 33 bp, Homo sapien
atgtggataaatctaagtattagctgactgtat

SEQ ID NO: 977021 - DNA, 33 bp, Homo sapien
ctttaggcaaggaggcacaattccaggctctca

SEQ ID NO: 977022 - DNA, 33 bp, Homo sapien
ctttaggcaaggaggcgcaattccaggctctca

SEQ ID NO: 977023 - DNA, 33 bp, Homo sapien
ctacatttatatttacccaggaaaaagtggagg

SEQ ID NO: 977024 - DNA, 33 bp, Homo sapien
ctacatttatatttactcaggaaaaagtggagg

SEQ ID NO: 977025 - DNA, 33 bp, Homo sapien
atatataagtgtacaaaatttcttcattctttc

SEQ ID NO: 977026 - DNA, 33 bp, Homo sapien
atatataagtgtacaatatttcttcattctttc

SEQ ID NO: 977027 - DNA, 33 bp, Homo sapien
tattagagtgcttggaatatagcagccattcaa

SEQ ID NO: 977028 - DNA, 33 bp, Homo sapien
tattagagtgcttggattatagcagccattcaa

SEQ ID NO: 977029 - DNA, 33 bp, Homo sapien
tcctttggatatcagaagaagtttgtataaata

SEQ ID NO: 977030 - DNA, 33 bp, Homo sapien
tcctttggatatcagaggaagtttgtataaata

SEQ ID NO: 977031 - DNA, 33 bp, Homo sapien
tcaatgcctcttccaaacacttctaaccaacct

SEQ ID NO: 977032 - DNA, 33 bp, Homo sapien
tcaatgcctcttccaagcacttctaaccaacct

SEQ ID NO: 977033 - DNA, 33 bp, Homo sapien
actctcttagctctagccactttttaggaagtt

SEQ ID NO: 977034 - DNA, 33 bp, Homo sapien
actctcttagctctagtcactttttaggaagtt

SEQ ID NO: 977035 - DNA, 33 bp, Homo sapien
cagcagcaatcaaagaatcccattggaaagata

SEQ ID NO: 977036 - DNA, 33 bp, Homo sapien
cagcagcaatcaaagactcccattggaaagata

SEQ ID NO: 977037 - DNA, 33 bp, Homo sapien
cattatgagagttcccaaaggagaagagagaga

SEQ ID NO: 977038 - DNA, 33 bp, Homo sapien
cattatgagagttcccgaaggagaagagagaga

SEQ ID NO: 977039 - DNA, 33 bp, Homo sapien
agacataatcttggaaatagagagcaaaacctt

SEQ ID NO: 977040 - DNA, 33 bp, Homo sapien
agacataatcttggaagtagagagcaaaacctt

SEQ ID NO: 977041 - DNA, 33 bp, Homo sapien
tctgtcttatgcagtcaagagaaggactgaaat

SEQ ID NO: 977042 - DNA, 33 bp, Homo sapien
tctgtcttatgcagtcgagagaaggactgaaat

SEQ ID NO: 977043 - DNA, 33 bp, Homo sapien
ctagaaaacaaataggaatgccttcaagtgatc

SEQ ID NO: 977044 - DNA, 33 bp, Homo sapien
ctagaaaacaaatagggatgccttcaagtgatc

SEQ ID NO: 977045 - DNA, 33 bp, Homo sapien
gacactaagccattcacaaaggatccatctcct

SEQ ID NO: 977046 - DNA, 33 bp, Homo sapien
gacactaagccattcataaaggatccatctcct

SEQ ID NO: 977047 - DNA, 33 bp, Homo sapien
cttttcggtatggcaaattaagcacattagcta

SEQ ID NO: 977048 - DNA, 33 bp, Homo sapien
cttttcggtatggcaagttaagcacattagcta

SEQ ID NO: 977049 - DNA, 33 bp, Homo sapien
ctaccttattaaggaactacaggcaaatattcc

SEQ ID NO: 977050 - DNA, 33 bp, Homo sapien
ctaccttattaaggaattacaggcaaatattcc

SEQ ID NO: 977051 - DNA, 33 bp, Homo sapien
actctatgaatacatacgtccaaatgtgtgcga

SEQ ID NO: 977052 - DNA, 33 bp, Homo sapien
actctatgaatacatatgtccaaatgtgtgcga

SEQ ID NO: 977053 - DNA, 33 bp, Homo sapien
gatgcatctagaataacacttcccatcgccttc

SEQ ID NO: 977054 - DNA, 33 bp, Homo sapien
gatgcatctagaataagacttcccatcgccttc

SEQ ID NO: 977055 - DNA, 33 bp, Homo sapien
aggaaatatttgaggaagtttgaatatagccct

SEQ ID NO: 977056 - DNA, 33 bp, Homo sapien
aggaaatatttgaggaggtttgaatatagccct

SEQ ID NO: 977057 - DNA, 33 bp, Homo sapien
aacaatagagttaaagaccaataagtcctagga

SEQ ID NO: 977058 - DNA, 33 bp, Homo sapien
aacaatagagttaaagcccaataagtcctagga

SEQ ID NO: 977059 - DNA, 33 bp, Homo sapien
atctgatgaaaggccagattcagggaaggtatt

SEQ ID NO: 977060 - DNA, 33 bp, Homo sapien
atctgatgaaaggccatattcagggaaggtatt

SEQ ID NO: 977061 - DNA, 33 bp, Homo sapien
ataaacaagctgttccaacttttgaacaaatcc

SEQ ID NO: 977062 - DNA, 33 bp, Homo sapien
ataaacaagctgttccgacttttgaacaaatcc

SEQ ID NO: 977063 - DNA, 33 bp, Homo sapien
ttttctatggtttgaactcttggtaattacctc

SEQ ID NO: 977064 - DNA, 33 bp, Homo sapien
ttttctatggtttgaagtcttggtaattacctc

SEQ ID NO: 977065 - DNA, 33 bp, Homo sapien
agtgatagaaataacactgtatctgggttcatt

SEQ ID NO: 977066 - DNA, 33 bp, Homo sapien
agtgatagaaataacattgtatctgggttcatt

SEQ ID NO: 977067 - DNA, 33 bp, Homo sapien
actttgtcaaataatgaagccaactgttagctt

SEQ ID NO: 977068 - DNA, 33 bp, Homo sapien
actttgtcaaataatggagccaactgttagctt

SEQ ID NO: 977069 - DNA, 33 bp, Homo sapien
attcaatttaggaccacagtattttgtgcacaa

SEQ ID NO: 977070 - DNA, 33 bp, Homo sapien
attcaatttaggaccatagtattttgtgcacaa

SEQ ID NO: 977071 - DNA, 33 bp, Homo sapien
tttgctgacataatgaagagtttgtttattctt

SEQ ID NO: 977072 - DNA, 33 bp, Homo sapien
tttgctgacataatgaggagtttgtttattctt

SEQ ID NO: 977073 - DNA, 33 bp, Homo sapien
atctgccagcggataaatgaatggctttgaggt

SEQ ID NO: 977074 - DNA, 33 bp, Homo sapien
atctgccagcggataagtgaatggctttgaggt

SEQ ID NO: 977075 - DNA, 33 bp, Homo sapien
gaaaaaggagcagagcaaatacgaaaaaaagca

SEQ ID NO: 977076 - DNA, 33 bp, Homo sapien
gaaaaaggagcagagcgaatacgaaaaaaagca

SEQ ID NO: 977077 - DNA, 33 bp, Homo sapien
gattcttaactgagtgaaaataagtgacggtta

SEQ ID NO: 977078 - DNA, 33 bp, Homo sapien
gattcttaactgagtggaaataagtgacggtta

SEQ ID NO: 977079 - DNA, 33 bp, Homo sapien
gtgtctcattcaaagccaggggttttaacaagg

SEQ ID NO: 977080 - DNA, 33 bp, Homo sapien
gtgtctcattcaaagcgaggggttttaacaagg

SEQ ID NO: 977081 - DNA, 33 bp, Homo sapien
ttgttccaaccaatgacgtatttagagatattc

SEQ ID NO: 977082 - DNA, 33 bp, Homo sapien
ttgttccaaccaatgatgtatttagagatattc

SEQ ID NO: 977083 - DNA, 33 bp, Homo sapien
ttctgggtctccactacgtttatccccacaatg

SEQ ID NO: 977084 - DNA, 33 bp, Homo sapien
ttctgggtctccactatgtttatccccacaatg

SEQ ID NO: 977085 - DNA, 33 bp, Homo sapien
ttatgtcatatctgctcaacatgacaatctgtt

SEQ ID NO: 977086 - DNA, 33 bp, Homo sapien
ttatgtcatatctgcttaacatgacaatctgtt

SEQ ID NO: 977087 - DNA, 33 bp, Homo sapien
ccactcacttatgttacagcctatggtaagtta

SEQ ID NO: 977088 - DNA, 33 bp, Homo sapien
ccactcacttatgttatagcctatggtaagtta

SEQ ID NO: 977089 - DNA, 33 bp, Homo sapien
taagctaaattttccaatagtacaaatgattgc

SEQ ID NO: 977090 - DNA, 33 bp, Homo sapien
taagctaaattttccagtagtacaaatgattgc

SEQ ID NO: 977091 - DNA, 33 bp, Homo sapien
caccacatgtctcctcgcattgcattgaccaaa

SEQ ID NO: 977092 - DNA, 33 bp, Homo sapien
caccacatgtctcctctcattgcattgaccaaa

SEQ ID NO: 977093 - DNA, 33 bp, Homo sapien
gaactgtaccaaggaccgcattatttataaagg

SEQ ID NO: 977094 - DNA, 33 bp, Homo sapien
gaactgtaccaaggactgcattatttataaagg

SEQ ID NO: 977095 - DNA, 33 bp, Homo sapien
aaacattatttctttcaatcttcaacagtcatg

SEQ ID NO: 977096 - DNA, 33 bp, Homo sapien
aaacattatttctttcgatcttcaacagtcatg

SEQ ID NO: 977097 - DNA, 33 bp, Homo sapien
agacagtagtgttagacagtgaaagaaagaaag

SEQ ID NO: 977098 - DNA, 33 bp, Homo sapien
agacagtagtgttagagagtgaaagaaagaaag

SEQ ID NO: 977099 - DNA, 33 bp, Homo sapien
aaagcagggcctttaacgttgaacctgggactt

SEQ ID NO: 977100 - DNA, 33 bp, Homo sapien
aaagcagggcctttaatgttgaacctgggactt

SEQ ID NO: 977101 - DNA, 33 bp, Homo sapien
aaaaattagcacaaaccgtcagtgattttagac

SEQ ID NO: 977102 - DNA, 33 bp, Homo sapien
aaaaattagcacaaactgtcagtgattttagac

SEQ ID NO: 977103 - DNA, 33 bp, Homo sapien
acatggaaatcttaaccatgttcataatctgat

SEQ ID NO: 977104 - DNA, 33 bp, Homo sapien
acatggaaatcttaactatgttcataatctgat

SEQ ID NO: 977105 - DNA, 33 bp, Homo sapien
ttctatatgcaccaacaaacttttcattaacat

SEQ ID NO: 977106 - DNA, 33 bp, Homo sapien
ttctatatgcaccaacgaacttttcattaacat

SEQ ID NO: 977107 - DNA, 33 bp, Homo sapien
gactgatgaaagttagcataatggccacaaaat

SEQ ID NO: 977108 - DNA, 33 bp, Homo sapien
gactgatgaaagttagtataatggccacaaaat

SEQ ID NO: 977109 - DNA, 33 bp, Homo sapien
atcatgttaatatgacaaaattgacacatactc

SEQ ID NO: 977110 - DNA, 33 bp, Homo sapien
atcatgttaatatgaccaaattgacacatactc

SEQ ID NO: 977111 - DNA, 33 bp, Homo sapien
cattttccaaacaatcaaaggccagatagcttc

SEQ ID NO: 977112 - DNA, 33 bp, Homo sapien
cattttccaaacaatcgaaggccagatagcttc

SEQ ID NO: 977113 - DNA, 33 bp, Homo sapien
ccaccaaatcctcctaccagcttaagaaaatta

SEQ ID NO: 977114 - DNA, 33 bp, Homo sapien
ccaccaaatcctcctatcagcttaagaaaatta

SEQ ID NO: 977115 - DNA, 33 bp, Homo sapien
aaaatttagtttttcaagtgcaaatgacaattc

SEQ ID NO: 977116 - DNA, 33 bp, Homo sapien
aaaatttagtttttcatgtgcaaatgacaattc

SEQ ID NO: 977117 - DNA, 33 bp, Homo sapien
tttcagttgacttgaactagactaaaattgcac

SEQ ID NO: 977118 - DNA, 33 bp, Homo sapien
tttcagttgacttgaattagactaaaattgcac

SEQ ID NO: 977119 - DNA, 33 bp, Homo sapien
cttaaactcaccatctaagagctatgtcacttc

SEQ ID NO: 977120 - DNA, 33 bp, Homo sapien
cttaaactcaccatctgagagctatgtcacttc

SEQ ID NO: 977121 - DNA, 33 bp, Homo sapien
agcaagttgcataagactacaaacagcctaaca

SEQ ID NO: 977122 - DNA, 33 bp, Homo sapien
agcaagttgcataagattacaaacagcctaaca

SEQ ID NO: 977123 - DNA, 33 bp, Homo sapien
acaatagagattcctacataaccaagcatatag

SEQ ID NO: 977124 - DNA, 33 bp, Homo sapien
acaatagagattcctatataaccaagcatatag

SEQ ID NO: 977125 - DNA, 33 bp, Homo sapien
gagactatgaaggaaccggcatcattttaaaaa

SEQ ID NO: 977126 - DNA, 33 bp, Homo sapien
gagactatgaaggaactggcatcattttaaaaa

SEQ ID NO: 977127 - DNA, 33 bp, Homo sapien
ttctccaattctttccaccagatgagaatatat

SEQ ID NO: 977128 - DNA, 33 bp, Homo sapien
ttctccaattctttccgccagatgagaatatat

SEQ ID NO: 977129 - DNA, 33 bp, Homo sapien
caaatgatgaaggtgaataagggagaagataat

SEQ ID NO: 977130 - DNA, 33 bp, Homo sapien
caaatgatgaaggtgagtaagggagaagataat

SEQ ID NO: 977131 - DNA, 33 bp, Homo sapien
cctcaggaaaagtgaaaaggtaaatagagcaac

SEQ ID NO: 977132 - DNA, 33 bp, Homo sapien
cctcaggaaaagtgaagaggtaaatagagcaac

SEQ ID NO: 977133 - DNA, 33 bp, Homo sapien
agaaccccgagtatgacctgtcaatagggggct

SEQ ID NO: 977134 - DNA, 33 bp, Homo sapien
agaaccccgagtatgatctgtcaatagggggct

SEQ ID NO: 977135 - DNA, 33 bp, Homo sapien
aattctggttcagccaactggattctcttttta

SEQ ID NO: 977136 - DNA, 33 bp, Homo sapien
aattctggttcagccacctggattctcttttta

SEQ ID NO: 977137 - DNA, 33 bp, Homo sapien
tcaattcaatttgtcccaaaaactggtttaagc

SEQ ID NO: 977138 - DNA, 33 bp, Homo sapien
tcaattcaatttgtccgaaaaactggtttaagc

SEQ ID NO: 977139 - DNA, 33 bp, Homo sapien
cttgcctaatttcaaacctctgctgaaattggc

SEQ ID NO: 977140 - DNA, 33 bp, Homo sapien
cttgcctaatttcaaatctctgctgaaattggc

SEQ ID NO: 977141 - DNA, 33 bp, Homo sapien
tcttttgttagccagaaattaatctgaatcctc

SEQ ID NO: 977142 - DNA, 33 bp, Homo sapien
tcttttgttagccagacattaatctgaatcctc

SEQ ID NO: 977143 - DNA, 33 bp, Homo sapien
tgaccagtcttaaacacgtcttgtgtatcttat

SEQ ID NO: 977144 - DNA, 33 bp, Homo sapien
tgaccagtcttaaacatgtcttgtgtatcttat

SEQ ID NO: 977145 - DNA, 33 bp, Homo sapien
taggaaagcctgcaaaagaaataactgggctct

SEQ ID NO: 977146 - DNA, 33 bp, Homo sapien
taggaaagcctgcaaaggaaataactgggctct

SEQ ID NO: 977147 - DNA, 33 bp, Homo sapien
aagtggcatgaagtggcagctgaaaataaatcc

SEQ ID NO: 977148 - DNA, 33 bp, Homo sapien
aagtggcatgaagtggtagctgaaaataaatcc

SEQ ID NO: 977149 - DNA, 33 bp, Homo sapien
taaatccatgaatctaaaagtcctatgcagtta

SEQ ID NO: 977150 - DNA, 33 bp, Homo sapien
taaatccatgaatctagaagtcctatgcagtta

SEQ ID NO: 977151 - DNA, 33 bp, Homo sapien
attagattgagccctccctctaatttcagtcag

SEQ ID NO: 977152 - DNA, 33 bp, Homo sapien
attagattgagccctctctctaatttcagtcag

SEQ ID NO: 977153 - DNA, 33 bp, Homo sapien
agcaagagctcctaaccgagagtgtgtgttaga

SEQ ID NO: 977154 - DNA, 33 bp, Homo sapien
agcaagagctcctaactgagagtgtgtgttaga

SEQ ID NO: 977155 - DNA, 33 bp, Homo sapien
accacataactccaaactggctttctctttttt

SEQ ID NO: 977156 - DNA, 33 bp, Homo sapien
accacataactccaaattggctttctctttttt

SEQ ID NO: 977157 - DNA, 33 bp, Homo sapien
ctaattacttattcatgagttcctcagataaat

SEQ ID NO: 977158 - DNA, 33 bp, Homo sapien
ctaattacttattcattagttcctcagataaat

SEQ ID NO: 977159 - DNA, 33 bp, Homo sapien
gttaaatcacagtcccaagtttacaatagttat

SEQ ID NO: 977160 - DNA, 33 bp, Homo sapien
gttaaatcacagtcccgagtttacaatagttat

SEQ ID NO: 977161 - DNA, 33 bp, Homo sapien
gccagctcagttcaccccagttttcatctttat

SEQ ID NO: 977162 - DNA, 33 bp, Homo sapien
gccagctcagttcaccgcagttttcatctttat

SEQ ID NO: 977163 - DNA, 33 bp, Homo sapien
aaaggatatataaccaagttgtagcaatctagt

SEQ ID NO: 977164 - DNA, 33 bp, Homo sapien
aaaggatatataaccacgttgtagcaatctagt

SEQ ID NO: 977165 - DNA, 33 bp, Homo sapien
ctttttgatcagtgagcagctagacctgagttc

SEQ ID NO: 977166 - DNA, 33 bp, Homo sapien
ctttttgatcagtgagtagctagacctgagttc

SEQ ID NO: 977167 - DNA, 33 bp, Homo sapien
gtcttgagaattgaaccaatgaactaatagtag

SEQ ID NO: 977168 - DNA, 33 bp, Homo sapien
gtcttgagaattgaactaatgaactaatagtag

SEQ ID NO: 977169 - DNA, 33 bp, Homo sapien
gcctcgtattcaccaacgtgcagctttttgtca

SEQ ID NO: 977170 - DNA, 33 bp, Homo sapien
gcctcgtattcaccaatgtgcagctttttgtca

SEQ ID NO: 977171 - DNA, 33 bp, Homo sapien
aatatggaatgccaagacacaagtagaaaagtt

SEQ ID NO: 977172 - DNA, 33 bp, Homo sapien
aatatggaatgccaagtcacaagtagaaaagtt

SEQ ID NO: 977173 - DNA, 33 bp, Homo sapien
atgttacctagaaaataaaatgcagggttataa

SEQ ID NO: 977174 - DNA, 33 bp, Homo sapien
atgttacctagaaaatgaaatgcagggttataa

SEQ ID NO: 977175 - DNA, 33 bp, Homo sapien
gtgaaaataaatgtcaatatagcagtgattatg

SEQ ID NO: 977176 - DNA, 33 bp, Homo sapien
gtgaaaataaatgtcagtatagcagtgattatg

SEQ ID NO: 977177 - DNA, 33 bp, Homo sapien
tcctcaactaattccactgaaactttaatatac

SEQ ID NO: 977178 - DNA, 33 bp, Homo sapien
tcctcaactaattccattgaaactttaatatac

SEQ ID NO: 977179 - DNA, 33 bp, Homo sapien
atcacatcacaatataactttggtgtgaaaagc

SEQ ID NO: 977180 - DNA, 33 bp, Homo sapien
atcacatcacaatatacctttggtgtgaaaagc

SEQ ID NO: 977181 - DNA, 33 bp, Homo sapien
gaaagcatcagagtaaaataacaacaaaaaatt

SEQ ID NO: 977182 - DNA, 33 bp, Homo sapien
gaaagcatcagagtaagataacaacaaaaaatt

SEQ ID NO: 977183 - DNA, 33 bp, Homo sapien
atgaacatggaaagaggatccctccataagact

SEQ ID NO: 977184 - DNA, 33 bp, Homo sapien
atgaacatggaaagagtatccctccataagact

SEQ ID NO: 977185 - DNA, 33 bp, Homo sapien
aggcagtttttcctcaagatgaattgtacctca

SEQ ID NO: 977186 - DNA, 33 bp, Homo sapien
aggcagtttttcctcaggatgaattgtacctca

SEQ ID NO: 977187 - DNA, 33 bp, Homo sapien
tacaaatggctttcatgaggagatgtgtccttt

SEQ ID NO: 977188 - DNA, 33 bp, Homo sapien
tacaaatggctttcattaggagatgtgtccttt

SEQ ID NO: 977189 - DNA, 33 bp, Homo sapien
gtttgctgtgggagaacgggattggcttgtttg

SEQ ID NO: 977190 - DNA, 33 bp, Homo sapien
gtttgctgtgggagaatgggattggcttgtttg

SEQ ID NO: 977191 - DNA, 33 bp, Homo sapien
gggcctcatgctggtaaatgtttaaaccactgg

SEQ ID NO: 977192 - DNA, 33 bp, Homo sapien
gggcctcatgctggtagatgtttaaaccactgg

SEQ ID NO: 977193 - DNA, 33 bp, Homo sapien
ccaaggctttttgagagggcaatttgttgtgat

SEQ ID NO: 977194 - DNA, 33 bp, Homo sapien
ccaaggctttttgagatggcaatttgttgtgat

SEQ ID NO: 977195 - DNA, 33 bp, Homo sapien
tgaaaccaacagaggaaaaaacgagattaatgt

SEQ ID NO: 977196 - DNA, 33 bp, Homo sapien
tgaaaccaacagaggagaaaacgagattaatgt

SEQ ID NO: 977197 - DNA, 33 bp, Homo sapien
acaggtctcttctttccaagtctcagaagctgt

SEQ ID NO: 977198 - DNA, 33 bp, Homo sapien
acaggtctcttctttctaagtctcagaagctgt

SEQ ID NO: 977199 - DNA, 33 bp, Homo sapien
gcgtttgtgatagaaaagtgctttcctgtaatc

SEQ ID NO: 977200 - DNA, 33 bp, Homo sapien
gcgtttgtgatagaaatgtgctttcctgtaatc

SEQ ID NO: 977201 - DNA, 33 bp, Homo sapien
tgtgttttcttccaccaatgtcttcctctcaac

SEQ ID NO: 977202 - DNA, 33 bp, Homo sapien
tgtgttttcttccaccgatgtcttcctctcaac

SEQ ID NO: 977203 - DNA, 33 bp, Homo sapien
acttcagctgaaaatcgcacagttactgaaagt

SEQ ID NO: 977204 - DNA, 33 bp, Homo sapien
acttcagctgaaaatctcacagttactgaaagt

SEQ ID NO: 977205 - DNA, 33 bp, Homo sapien
aatgtggcaaatactacgaaagtacctctaaga

SEQ ID NO: 977206 - DNA, 33 bp, Homo sapien
aatgtggcaaatactatgaaagtacctctaaga

SEQ ID NO: 977207 - DNA, 33 bp, Homo sapien
atgaaacggacaaaaaatttactcagctgtcaa

SEQ ID NO: 977208 - DNA, 33 bp, Homo sapien
atgaaacggacaaaaactttactcagctgtcaa

SEQ ID NO: 977209 - DNA, 33 bp, Homo sapien
aaagctattaagtttccagagggctatattgac

SEQ ID NO: 977210 - DNA, 33 bp, Homo sapien
aaagctattaagtttctagagggctatattgac

SEQ ID NO: 977211 - DNA, 33 bp, Homo sapien
cctttgaagctgatccacctttttattgctttc

SEQ ID NO: 977212 - DNA, 33 bp, Homo sapien
cctttgaagctgatcctcctttttattgctttc

SEQ ID NO: 977213 - DNA, 33 bp, Homo sapien
tgctgacggtgaacaactgagtatcctttaagg

SEQ ID NO: 977214 - DNA, 33 bp, Homo sapien
tgctgacggtgaacaattgagtatcctttaagg

SEQ ID NO: 977215 - DNA, 33 bp, Homo sapien
ttaggtattgatttcacggcacgctttcttaga

SEQ ID NO: 977216 - DNA, 33 bp, Homo sapien
ttaggtattgatttcatggcacgctttcttaga

SEQ ID NO: 977217 - DNA, 33 bp, Homo sapien
tgctactgtgtcctataaggtactgaaccacaa

SEQ ID NO: 977218 - DNA, 33 bp, Homo sapien
tgctactgtgtcctatgaggtactgaaccacaa

SEQ ID NO: 977219 - DNA, 33 bp, Homo sapien
gcattcctatgtccgtaaaaattttggatgtgt

SEQ ID NO: 977220 - DNA, 33 bp, Homo sapien
gcattcctatgtccgtgaaaattttggatgtgt

SEQ ID NO: 977221 - DNA, 33 bp, Homo sapien
tccttcctttgacgcacatgccccattcgacat

SEQ ID NO: 977222 - DNA, 33 bp, Homo sapien
tccttcctttgacgcatatgccccattcgacat

SEQ ID NO: 977223 - DNA, 33 bp, Homo sapien
tctaattttcatgctacgttgagtataaatata

SEQ ID NO: 977224 - DNA, 33 bp, Homo sapien
tctaattttcatgctatgttgagtataaatata

SEQ ID NO: 977225 - DNA, 33 bp, Homo sapien
tgtctagttactaggaaatagacagtgtaagca

SEQ ID NO: 977226 - DNA, 33 bp, Homo sapien
tgtctagttactaggagatagacagtgtaagca

SEQ ID NO: 977227 - DNA, 33 bp, Homo sapien
cttaatcttgcaatacacttaaggtcaatcaca

SEQ ID NO: 977228 - DNA, 33 bp, Homo sapien
cttaatcttgcaatacgcttaaggtcaatcaca

SEQ ID NO: 977229 - DNA, 33 bp, Homo sapien
gcagtactcatcattcactattgcgcaacttgg

SEQ ID NO: 977230 - DNA, 33 bp, Homo sapien
gcagtactcatcattcgctattgcgcaacttgg

SEQ ID NO: 977231 - DNA, 33 bp, Homo sapien
tccacttacttgtaccgataatcatttcacaaa

SEQ ID NO: 977232 - DNA, 33 bp, Homo sapien
tccacttacttgtacctataatcatttcacaaa

SEQ ID NO: 977233 - DNA, 33 bp, Homo sapien
catatttgtttgctgagaactatatggaaaagg

SEQ ID NO: 977234 - DNA, 33 bp, Homo sapien
catatttgtttgctgataactatatggaaaagg

SEQ ID NO: 977235 - DNA, 33 bp, Homo sapien
cctactgcatctagaacgaaactcaaacctgga

SEQ ID NO: 977236 - DNA, 33 bp, Homo sapien
cctactgcatctagaatgaaactcaaacctgga

SEQ ID NO: 977237 - DNA, 33 bp, Homo sapien
tccttaagacaccttgaaggcagtttgccctac

SEQ ID NO: 977238 - DNA, 33 bp, Homo sapien
tccttaagacaccttgcaggcagtttgccctac

SEQ ID NO: 977239 - DNA, 33 bp, Homo sapien
gacatagtcaaaagcaacacatagatagtcatt

SEQ ID NO: 977240 - DNA, 33 bp, Homo sapien
gacatagtcaaaagcagcacatagatagtcatt

SEQ ID NO: 977241 - DNA, 33 bp, Homo sapien
gcgaaacaaagttgtacgtatcatgaaatttca

SEQ ID NO: 977242 - DNA, 33 bp, Homo sapien
gcgaaacaaagttgtaggtatcatgaaatttca

SEQ ID NO: 977243 - DNA, 33 bp, Homo sapien
gccactttggcccatcgatcaaccataaccagt

SEQ ID NO: 977244 - DNA, 33 bp, Homo sapien
gccactttggcccatctatcaaccataaccagt

SEQ ID NO: 977245 - DNA, 33 bp, Homo sapien
atgttaagaacagttacctctggatgataaaat

SEQ ID NO: 977246 - DNA, 33 bp, Homo sapien
atgttaagaacagttatctctggatgataaaat

SEQ ID NO: 977247 - DNA, 33 bp, Homo sapien
ataaaaaaatgaattaagtggcaatgaactgaa

SEQ ID NO: 977248 - DNA, 33 bp, Homo sapien
ataaaaaaatgaattaggtggcaatgaactgaa

SEQ ID NO: 977249 - DNA, 33 bp, Homo sapien
gaacatgaagcaaatgaactaagtctatatgtc

SEQ ID NO: 977250 - DNA, 33 bp, Homo sapien
gaacatgaagcaaatggactaagtctatatgtc

SEQ ID NO: 977251 - DNA, 33 bp, Homo sapien
cattttaagactttgacacatttaataccagtt

SEQ ID NO: 977252 - DNA, 33 bp, Homo sapien
cattttaagactttgatacatttaataccagtt

SEQ ID NO: 977253 - DNA, 33 bp, Homo sapien
gtttgcattcatttctcacttgctagagagctg

SEQ ID NO: 977254 - DNA, 33 bp, Homo sapien
gtttgcattcatttcttacttgctagagagctg

SEQ ID NO: 977255 - DNA, 33 bp, Homo sapien
aagctacaggcaattacgtttatgaggaaagca

SEQ ID NO: 977256 - DNA, 33 bp, Homo sapien
aagctacaggcaattatgtttatgaggaaagca

SEQ ID NO: 977257 - DNA, 33 bp, Homo sapien
aggagttagtgttatacccagaacatatgcagc

SEQ ID NO: 977258 - DNA, 33 bp, Homo sapien
aggagttagtgttatatccagaacatatgcagc

SEQ ID NO: 977259 - DNA, 33 bp, Homo sapien
actggcaattagagaaactcttagaagtaggag

SEQ ID NO: 977260 - DNA, 33 bp, Homo sapien
actggcaattagagaagctcttagaagtaggag

SEQ ID NO: 977261 - DNA, 33 bp, Homo sapien
atggaagaaagatgtcaagtggcctttcaaaat

SEQ ID NO: 977262 - DNA, 33 bp, Homo sapien
atggaagaaagatgtccagtggcctttcaaaat

SEQ ID NO: 977263 - DNA, 33 bp, Homo sapien
agagagagattgacaacaaaaggtaggaaaacc

SEQ ID NO: 977264 - DNA, 33 bp, Homo sapien
agagagagattgacaataaaaggtaggaaaacc

SEQ ID NO: 977265 - DNA, 33 bp, Homo sapien
agggtagattgtactacggcctcttccacatat

SEQ ID NO: 977266 - DNA, 33 bp, Homo sapien
agggtagattgtactatggcctcttccacatat

SEQ ID NO: 977267 - DNA, 33 bp, Homo sapien
ggtttagaaacacaaccagaatgcatttgacac

SEQ ID NO: 977268 - DNA, 33 bp, Homo sapien
ggtttagaaacacaactagaatgcatttgacac

SEQ ID NO: 977269 - DNA, 33 bp, Homo sapien
acattgatgcgtgaggcagggtgctcagtagta

SEQ ID NO: 977270 - DNA, 33 bp, Homo sapien
acattgatgcgtgaggtagggtgctcagtagta

SEQ ID NO: 977271 - DNA, 33 bp, Homo sapien
agcattataattctaaactgcaatcccctaaaa

SEQ ID NO: 977272 - DNA, 33 bp, Homo sapien
agcattataattctaacctgcaatcccctaaaa

SEQ ID NO: 977273 - DNA, 33 bp, Homo sapien
gtatgatgatgatacgcagtctccatttcctgg

SEQ ID NO: 977274 - DNA, 33 bp, Homo sapien
gtatgatgatgatacgtagtctccatttcctgg

SEQ ID NO: 977275 - DNA, 33 bp, Homo sapien
accttagtcaataatccaagccacagctccatt

SEQ ID NO: 977276 - DNA, 33 bp, Homo sapien
accttagtcaataatcgaagccacagctccatt

SEQ ID NO: 977277 - DNA, 33 bp, Homo sapien
agagactaatcacaaaacttgttataaaacaca

SEQ ID NO: 977278 - DNA, 33 bp, Homo sapien
agagactaatcacaaagcttgttataaaacaca

SEQ ID NO: 977279 - DNA, 33 bp, Homo sapien
tatagtcgatccagaaagagaaaaggatgatac

SEQ ID NO: 977280 - DNA, 33 bp, Homo sapien
tatagtcgatccagaaggagaaaaggatgatac

SEQ ID NO: 977281 - DNA, 33 bp, Homo sapien
gataattccacctgccaaatttgaaactatcca

SEQ ID NO: 977282 - DNA, 33 bp, Homo sapien
gataattccacctgccgaatttgaaactatcca

SEQ ID NO: 977283 - DNA, 33 bp, Homo sapien
atgcttggttccacacacacttgccagtgcttt

SEQ ID NO: 977284 - DNA, 33 bp, Homo sapien
atgcttggttccacactcacttgccagtgcttt

SEQ ID NO: 977285 - DNA, 33 bp, Homo sapien
gttggttactaagaaccggattatatattcaat

SEQ ID NO: 977286 - DNA, 33 bp, Homo sapien
gttggttactaagaactggattatatattcaat

SEQ ID NO: 977287 - DNA, 33 bp, Homo sapien
tgatcacatagagtgaagtttgggaatctgtat

SEQ ID NO: 977288 - DNA, 33 bp, Homo sapien
tgatcacatagagtgaggtttgggaatctgtat

SEQ ID NO: 977289 - DNA, 33 bp, Homo sapien
gtaaccaaatcttcctcaatactttgaaaatca

SEQ ID NO: 977290 - DNA, 33 bp, Homo sapien
gtaaccaaatcttcctgaatactttgaaaatca

SEQ ID NO: 977291 - DNA, 33 bp, Homo sapien
gctgaacttgatattccatgatagtaacagatg

SEQ ID NO: 977292 - DNA, 33 bp, Homo sapien
gctgaacttgatattctatgatagtaacagatg

SEQ ID NO: 977293 - DNA, 33 bp, Homo sapien
agacctaggagcttatcagaaatgcggaatctc

SEQ ID NO: 977294 - DNA, 33 bp, Homo sapien
agacctaggagcttatgagaaatgcggaatctc

SEQ ID NO: 977295 - DNA, 33 bp, Homo sapien
atcaatcttagaacctaaccaaactgaattggt

SEQ ID NO: 977296 - DNA, 33 bp, Homo sapien
atcaatcttagaaccttaccaaactgaattggt

SEQ ID NO: 977297 - DNA, 33 bp, Homo sapien
gagaagaaaataacaaactactctggctccata

SEQ ID NO: 977298 - DNA, 33 bp, Homo sapien
gagaagaaaataacaagctactctggctccata

SEQ ID NO: 977299 - DNA, 33 bp, Homo sapien
ttgagcctgatgctccaaaattgctgtactcac

SEQ ID NO: 977300 - DNA, 33 bp, Homo sapien
ttgagcctgatgctccgaaattgctgtactcac

SEQ ID NO: 977301 - DNA, 33 bp, Homo sapien
ggattccaacttttgcacatctttgtcaacagt

SEQ ID NO: 977302 - DNA, 33 bp, Homo sapien
ggattccaacttttgcccatctttgtcaacagt

SEQ ID NO: 977303 - DNA, 33 bp, Homo sapien
atctgaaaatgtaaaactagtaggataaatcat

SEQ ID NO: 977304 - DNA, 33 bp, Homo sapien
atctgaaaatgtaaaagtagtaggataaatcat

SEQ ID NO: 977305 - DNA, 33 bp, Homo sapien
gcttgaaataatgttacagtcacttgaggaaga

SEQ ID NO: 977306 - DNA, 33 bp, Homo sapien
gcttgaaataatgttatagtcacttgaggaaga

SEQ ID NO: 977307 - DNA, 33 bp, Homo sapien
gacagcattctccactaaaatctgaaccaggta

SEQ ID NO: 977308 - DNA, 33 bp, Homo sapien
gacagcattctccacttaaatctgaaccaggta

SEQ ID NO: 977309 - DNA, 33 bp, Homo sapien
gcatttgttgatatgacgaatatttgggagagt

SEQ ID NO: 977310 - DNA, 33 bp, Homo sapien
gcatttgttgatatgatgaatatttgggagagt

SEQ ID NO: 977311 - DNA, 33 bp, Homo sapien
aaccatcactgttaaactcctaacacctaacat

SEQ ID NO: 977312 - DNA, 33 bp, Homo sapien
aaccatcactgttaaattcctaacacctaacat

SEQ ID NO: 977313 - DNA, 33 bp, Homo sapien
agcaaagatcagattacgtcacttcactgtgga

SEQ ID NO: 977314 - DNA, 33 bp, Homo sapien
agcaaagatcagattatgtcacttcactgtgga

SEQ ID NO: 977315 - DNA, 33 bp, Homo sapien
cataaccttcaagaccacacataacatggtact

SEQ ID NO: 977316 - DNA, 33 bp, Homo sapien
cataaccttcaagaccgcacataacatggtact

SEQ ID NO: 977317 - DNA, 33 bp, Homo sapien
acgaatatgtaagcaaagagaacaatttcagat

SEQ ID NO: 977318 - DNA, 33 bp, Homo sapien
acgaatatgtaagcaaggagaacaatttcagat

SEQ ID NO: 977319 - DNA, 33 bp, Homo sapien
ttttatttcgatgaacggagtaggtaaaaatgc

SEQ ID NO: 977320 - DNA, 33 bp, Homo sapien
ttttatttcgatgaactgagtaggtaaaaatgc

SEQ ID NO: 977321 - DNA, 33 bp, Homo sapien
tttcttatcccgcaaaacatctattacctggga

SEQ ID NO: 977322 - DNA, 33 bp, Homo sapien
tttcttatcccgcaaagcatctattacctggga

SEQ ID NO: 977323 - DNA, 33 bp, Homo sapien
cccagattcaacttcacaaattagtctaaaagg

SEQ ID NO: 977324 - DNA, 33 bp, Homo sapien
cccagattcaacttcagaaattagtctaaaagg

SEQ ID NO: 977325 - DNA, 33 bp, Homo sapien
gagctttctggaactacgcttgccaaaacttgt

SEQ ID NO: 977326 - DNA, 33 bp, Homo sapien
gagctttctggaactatgcttgccaaaacttgt

SEQ ID NO: 977327 - DNA, 33 bp, Homo sapien
gcagagagcaggaattaaagaaatgttggctaa

SEQ ID NO: 977328 - DNA, 33 bp, Homo sapien
gcagagagcaggaattgaagaaatgttggctaa

SEQ ID NO: 977329 - DNA, 33 bp, Homo sapien
attttgtatccagtaaccattgcaaactatcat

SEQ ID NO: 977330 - DNA, 33 bp, Homo sapien
attttgtatccagtaatcattgcaaactatcat

SEQ ID NO: 977331 - DNA, 33 bp, Homo sapien
cttctcatatctgaaaggttcatttttgttatt

SEQ ID NO: 977332 - DNA, 33 bp, Homo sapien
cttctcatatctgaaatgttcatttttgttatt

SEQ ID NO: 977333 - DNA, 33 bp, Homo sapien
atacatctctttgttaccattgtctcagattgt

SEQ ID NO: 977334 - DNA, 33 bp, Homo sapien
atacatctctttgttatcattgtctcagattgt

SEQ ID NO: 977335 - DNA, 33 bp, Homo sapien
taaaggagaaatagaaaaccaggatatgaagta

SEQ ID NO: 977336 - DNA, 33 bp, Homo sapien
taaaggagaaatagaacaccaggatatgaagta

SEQ ID NO: 977337 - DNA, 33 bp, Homo sapien
ttgtgctggttttcataacttaattctaggtct

SEQ ID NO: 977338 - DNA, 33 bp, Homo sapien
ttgtgctggttttcatgacttaattctaggtct

SEQ ID NO: 977339 - DNA, 33 bp, Homo sapien
acatattccattttcacctttagagacaacttc

SEQ ID NO: 977340 - DNA, 33 bp, Homo sapien
acatattccattttcagctttagagacaacttc

SEQ ID NO: 977341 - DNA, 33 bp, Homo sapien
ctatattaaagattgaaaagttgaaccttgtat

SEQ ID NO: 977342 - DNA, 33 bp, Homo sapien
ctatattaaagattgacaagttgaaccttgtat

SEQ ID NO: 977343 - DNA, 33 bp, Homo sapien
gcaatggttcatgggcaagaaaggctgcttttt

SEQ ID NO: 977344 - DNA, 33 bp, Homo sapien
gcaatggttcatgggcgagaaaggctgcttttt

SEQ ID NO: 977345 - DNA, 33 bp, Homo sapien
ggacagagaaacaatgaagttagtctagagaac

SEQ ID NO: 977346 - DNA, 33 bp, Homo sapien
ggacagagaaacaatgcagttagtctagagaac

SEQ ID NO: 977347 - DNA, 33 bp, Homo sapien
aagtgagaactaaacaatgggatctcagggaca

SEQ ID NO: 977348 - DNA, 33 bp, Homo sapien
aagtgagaactaaacagtgggatctcagggaca

SEQ ID NO: 977349 - DNA, 33 bp, Homo sapien
gtcctcagcttacttcaaggtaccagaatccta

SEQ ID NO: 977350 - DNA, 33 bp, Homo sapien
gtcctcagcttacttccaggtaccagaatccta

SEQ ID NO: 977351 - DNA, 33 bp, Homo sapien
tggttggcactactaaaatctacctgggcagaa

SEQ ID NO: 977352 - DNA, 33 bp, Homo sapien
tggttggcactactaacatctacctgggcagaa

SEQ ID NO: 977353 - DNA, 33 bp, Homo sapien
tcacttgccatgaatcaaaaagcctaccatgat

SEQ ID NO: 977354 - DNA, 33 bp, Homo sapien
tcacttgccatgaatccaaaagcctaccatgat

SEQ ID NO: 977355 - DNA, 33 bp, Homo sapien
gaagacagatagcctacgtgtgagaaaaagaaa

SEQ ID NO: 977356 - DNA, 33 bp, Homo sapien
gaagacagatagcctatgtgtgagaaaaagaaa

SEQ ID NO: 977357 - DNA, 33 bp, Homo sapien
acaaacaaaaatgacacatgacctagctatctg

SEQ ID NO: 977358 - DNA, 33 bp, Homo sapien
acaaacaaaaatgacatatgacctagctatctg

SEQ ID NO: 977359 - DNA, 33 bp, Homo sapien
agctaataacagatacactcaacaggctcacag

SEQ ID NO: 977360 - DNA, 33 bp, Homo sapien
agctaataacagatacgctcaacaggctcacag

SEQ ID NO: 977361 - DNA, 33 bp, Homo sapien
tgtctgcaaagactcaaagagttgggtttggcc

SEQ ID NO: 977362 - DNA, 33 bp, Homo sapien
tgtctgcaaagactcagagagttgggtttggcc

SEQ ID NO: 977363 - DNA, 33 bp, Homo sapien
ttaattgctcattaaacagataggttgctggac

SEQ ID NO: 977364 - DNA, 33 bp, Homo sapien
ttaattgctcattaaatagataggttgctggac

SEQ ID NO: 977365 - DNA, 33 bp, Homo sapien
aaacactgataaattacggtacttgccacattt

SEQ ID NO: 977366 - DNA, 33 bp, Homo sapien
aaacactgataaattatggtacttgccacattt

SEQ ID NO: 977367 - DNA, 33 bp, Homo sapien
atcttaatcaagacaccctacaagctatattgg

SEQ ID NO: 977368 - DNA, 33 bp, Homo sapien
atcttaatcaagacactctacaagctatattgg

SEQ ID NO: 977369 - DNA, 33 bp, Homo sapien
ataaaatgctttcctgaattactgaagagttta

SEQ ID NO: 977370 - DNA, 33 bp, Homo sapien
ataaaatgctttcctggattactgaagagttta

SEQ ID NO: 977371 - DNA, 33 bp, Homo sapien
agctttcttgagataaatctatggcttaagtaa

SEQ ID NO: 977372 - DNA, 33 bp, Homo sapien
agctttcttgagataattctatggcttaagtaa

SEQ ID NO: 977373 - DNA, 33 bp, Homo sapien
tgttttaatggatatacagcatgagtttttttc

SEQ ID NO: 977374 - DNA, 33 bp, Homo sapien
tgttttaatggatatagagcatgagtttttttc

SEQ ID NO: 977375 - DNA, 33 bp, Homo sapien
caatactatatcttaccacctttgtttttcata

SEQ ID NO: 977376 - DNA, 33 bp, Homo sapien
caatactatatcttacgacctttgtttttcata

SEQ ID NO: 977377 - DNA, 33 bp, Homo sapien
ggatacttagctctagaagtcatacgtgtgtag

SEQ ID NO: 977378 - DNA, 33 bp, Homo sapien
ggatacttagctctagcagtcatacgtgtgtag

SEQ ID NO: 977379 - DNA, 33 bp, Homo sapien
tcctcaatgaaaaacccaagtatactaagtaaa

SEQ ID NO: 977380 - DNA, 33 bp, Homo sapien
tcctcaatgaaaaaccgaagtatactaagtaaa

SEQ ID NO: 977381 - DNA, 33 bp, Homo sapien
ggaggtggagcattagccagatcaatcgctgga

SEQ ID NO: 977382 - DNA, 33 bp, Homo sapien
ggaggtggagcattagtcagatcaatcgctgga

SEQ ID NO: 977383 - DNA, 33 bp, Homo sapien
atcatcctactcactaccttcaagagatccact

SEQ ID NO: 977384 - DNA, 33 bp, Homo sapien
atcatcctactcactatcttcaagagatccact

SEQ ID NO: 977385 - DNA, 33 bp, Homo sapien
gaacacttagctgcagcaggaaacaaaaattta

SEQ ID NO: 977386 - DNA, 33 bp, Homo sapien
gaacacttagctgcagtaggaaacaaaaattta

SEQ ID NO: 977387 - DNA, 33 bp, Homo sapien
gattttgtcataaataagaaattagctatggca

SEQ ID NO: 977388 - DNA, 33 bp, Homo sapien
gattttgtcataaataggaaattagctatggca

SEQ ID NO: 977389 - DNA, 33 bp, Homo sapien
aaaaatcagcactcgtgaatatgtcaaaatact

SEQ ID NO: 977390 - DNA, 33 bp, Homo sapien
aaaaatcagcactcgttaatatgtcaaaatact

SEQ ID NO: 977391 - DNA, 33 bp, Homo sapien
agtcagacaagttcccagcttaatattccatta

SEQ ID NO: 977392 - DNA, 33 bp, Homo sapien
agtcagacaagttccctgcttaatattccatta

SEQ ID NO: 977393 - DNA, 33 bp, Homo sapien
atgattgtatgtgtgacgtatttcactaatatt

SEQ ID NO: 977394 - DNA, 33 bp, Homo sapien
atgattgtatgtgtgatgtatttcactaatatt

SEQ ID NO: 977395 - DNA, 33 bp, Homo sapien
gaatgaactagtagacagtccttccacttaatg

SEQ ID NO: 977396 - DNA, 33 bp, Homo sapien
gaatgaactagtagacggtccttccacttaatg

SEQ ID NO: 977397 - DNA, 33 bp, Homo sapien
ttgtcttctcgctctagaaccccagcttaatga

SEQ ID NO: 977398 - DNA, 33 bp, Homo sapien
ttgtcttctcgctctataaccccagcttaatga

SEQ ID NO: 977399 - DNA, 33 bp, Homo sapien
agagttgtgaagtcaccctcaatatttcccaag

SEQ ID NO: 977400 - DNA, 33 bp, Homo sapien
agagttgtgaagtcactctcaatatttcccaag

SEQ ID NO: 977401 - DNA, 33 bp, Homo sapien
tatccaattttgacaaaccttttcaacaatatt

SEQ ID NO: 977402 - DNA, 33 bp, Homo sapien
tatccaattttgacaagccttttcaacaatatt

SEQ ID NO: 977403 - DNA, 33 bp, Homo sapien
gccaattcagtagccaaagctttagaaaatcac

SEQ ID NO: 977404 - DNA, 33 bp, Homo sapien
gccaattcagtagccagagctttagaaaatcac

SEQ ID NO: 977405 - DNA, 33 bp, Homo sapien
atcctagaatatgggtcaaagtcctataaccaa

SEQ ID NO: 977406 - DNA, 33 bp, Homo sapien
atcctagaatatgggtgaaagtcctataaccaa

SEQ ID NO: 977407 - DNA, 33 bp, Homo sapien
aaaagtttatgtcttacgcttccttactcttta

SEQ ID NO: 977408 - DNA, 33 bp, Homo sapien
aaaagtttatgtcttatgcttccttactcttta

SEQ ID NO: 977409 - DNA, 33 bp, Homo sapien
gaatattcttggtttacgtacaatgagctttct

SEQ ID NO: 977410 - DNA, 33 bp, Homo sapien
gaatattcttggtttatgtacaatgagctttct

SEQ ID NO: 977411 - DNA, 33 bp, Homo sapien
atcaacaagttaatgacgcctctgtaaaatatc

SEQ ID NO: 977412 - DNA, 33 bp, Homo sapien
atcaacaagttaatgatgcctctgtaaaatatc

SEQ ID NO: 977413 - DNA, 33 bp, Homo sapien
tacctgaattcttcaaaagtcacatgtatcttc

SEQ ID NO: 977414 - DNA, 33 bp, Homo sapien
tacctgaattcttcaagagtcacatgtatcttc

SEQ ID NO: 977415 - DNA, 33 bp, Homo sapien
gctatggtacaaagataaagggagtgatccaat

SEQ ID NO: 977416 - DNA, 33 bp, Homo sapien
gctatggtacaaagatgaagggagtgatccaat

SEQ ID NO: 977417 - DNA, 33 bp, Homo sapien
tttcaacagataaatacagacttcagagaaacc

SEQ ID NO: 977418 - DNA, 33 bp, Homo sapien
tttcaacagataaatatagacttcagagaaacc

SEQ ID NO: 977419 - DNA, 33 bp, Homo sapien
ttaaattcaggagttcaatagaaaatatctaaa

SEQ ID NO: 977420 - DNA, 33 bp, Homo sapien
ttaaattcaggagttcgatagaaaatatctaaa

SEQ ID NO: 977421 - DNA, 33 bp, Homo sapien
gtgaaagacaagctgagaaatacctgaaatgtt

SEQ ID NO: 977422 - DNA, 33 bp, Homo sapien
gtgaaagacaagctgataaatacctgaaatgtt

SEQ ID NO: 977423 - DNA, 33 bp, Homo sapien
cccatgaagaattgccagatatgagtttactat

SEQ ID NO: 977424 - DNA, 33 bp, Homo sapien
cccatgaagaattgccggatatgagtttactat

SEQ ID NO: 977425 - DNA, 33 bp, Homo sapien
ctaattttgtagcaacagattcattttttcttc

SEQ ID NO: 977426 - DNA, 33 bp, Homo sapien
ctaattttgtagcaacggattcattttttcttc

SEQ ID NO: 977427 - DNA, 33 bp, Homo sapien
tttttctaattccaacaaaagtcaagaaacttt

SEQ ID NO: 977428 - DNA, 33 bp, Homo sapien
tttttctaattccaaccaaagtcaagaaacttt

SEQ ID NO: 977429 - DNA, 33 bp, Homo sapien
gaatgtaaattggtacaaccgttatggaaaaca

SEQ ID NO: 977430 - DNA, 33 bp, Homo sapien
gaatgtaaattggtaccaccgttatggaaaaca

SEQ ID NO: 977431 - DNA, 33 bp, Homo sapien
aaataaacaattgccacgtaactgtttctttta

SEQ ID NO: 977432 - DNA, 33 bp, Homo sapien
aaataaacaattgccatgtaactgtttctttta

SEQ ID NO: 977433 - DNA, 33 bp, Homo sapien
caaactcaagagagaaagctgggagttaccatt

SEQ ID NO: 977434 - DNA, 33 bp, Homo sapien
caaactcaagagagaacgctgggagttaccatt

SEQ ID NO: 977435 - DNA, 33 bp, Homo sapien
agggcccctggtttaacagaggtcatttacaat

SEQ ID NO: 977436 - DNA, 33 bp, Homo sapien
agggcccctggtttaatagaggtcatttacaat

SEQ ID NO: 977437 - DNA, 33 bp, Homo sapien
tttttatgaggtaataaattttctctgaattag

SEQ ID NO: 977438 - DNA, 33 bp, Homo sapien
tttttatgaggtaatacattttctctgaattag

SEQ ID NO: 977439 - DNA, 33 bp, Homo sapien
atcaaacctgtctgtaactactgctcttgcagt

SEQ ID NO: 977440 - DNA, 33 bp, Homo sapien
atcaaacctgtctgtagctactgctcttgcagt

SEQ ID NO: 977441 - DNA, 33 bp, Homo sapien
aaaaatagatgaatggaataacaacaaaataaa

SEQ ID NO: 977442 - DNA, 33 bp, Homo sapien
aaaaatagatgaatgggataacaacaaaataaa

SEQ ID NO: 977443 - DNA, 33 bp, Homo sapien
ggtggattcattggcaccttcctaatacctatt

SEQ ID NO: 977444 - DNA, 33 bp, Homo sapien
ggtggattcattggcagcttcctaatacctatt

SEQ ID NO: 977445 - DNA, 33 bp, Homo sapien
agtttttcagattccactcaccatcatctgttc

SEQ ID NO: 977446 - DNA, 33 bp, Homo sapien
agtttttcagattccattcaccatcatctgttc

SEQ ID NO: 977447 - DNA, 33 bp, Homo sapien
atattggctttttaccactgttgggcacagaag

SEQ ID NO: 977448 - DNA, 33 bp, Homo sapien
atattggctttttaccgctgttgggcacagaag

SEQ ID NO: 977449 - DNA, 33 bp, Homo sapien
tttatgtgttatactaaaggacttacacacaca

SEQ ID NO: 977450 - DNA, 33 bp, Homo sapien
tttatgtgttatactagaggacttacacacaca

SEQ ID NO: 977451 - DNA, 33 bp, Homo sapien
ccctggtgtactagacagaagtgtatataaacc

SEQ ID NO: 977452 - DNA, 33 bp, Homo sapien
ccctggtgtactagacggaagtgtatataaacc

SEQ ID NO: 977453 - DNA, 33 bp, Homo sapien
ttgataaatggtaacaatgagcttggaataaga

SEQ ID NO: 977454 - DNA, 33 bp, Homo sapien
ttgataaatggtaacagtgagcttggaataaga

SEQ ID NO: 977455 - DNA, 33 bp, Homo sapien
tatctttgcatttccaatctttcatctggagat

SEQ ID NO: 977456 - DNA, 33 bp, Homo sapien
tatctttgcatttccagtctttcatctggagat

SEQ ID NO: 977457 - DNA, 33 bp, Homo sapien
ctagaagattgggttcccaaaaagaaaatgatc

SEQ ID NO: 977458 - DNA, 33 bp, Homo sapien
ctagaagattgggttctcaaaaagaaaatgatc

SEQ ID NO: 977459 - DNA, 33 bp, Homo sapien
ctacctcagaatttccaatgcatcattgtatac

SEQ ID NO: 977460 - DNA, 33 bp, Homo sapien
ctacctcagaatttccgatgcatcattgtatac

SEQ ID NO: 977461 - DNA, 33 bp, Homo sapien
ggagaagaaaagcaagaagctcaaaacaaaaca

SEQ ID NO: 977462 - DNA, 33 bp, Homo sapien
ggagaagaaaagcaaggagctcaaaacaaaaca

SEQ ID NO: 977463 - DNA, 33 bp, Homo sapien
attacattagttgacaacagcattacactcacc

SEQ ID NO: 977464 - DNA, 33 bp, Homo sapien
attacattagttgacatcagcattacactcacc

SEQ ID NO: 977465 - DNA, 33 bp, Homo sapien
acatagggcttctccaatgattgcaggcctagt

SEQ ID NO: 977466 - DNA, 33 bp, Homo sapien
acatagggcttctccagtgattgcaggcctagt

SEQ ID NO: 977467 - DNA, 33 bp, Homo sapien
agcaggtaccctctaagcagactcttgtttggc

SEQ ID NO: 977468 - DNA, 33 bp, Homo sapien
agcaggtaccctctaatcagactcttgtttggc

SEQ ID NO: 977469 - DNA, 33 bp, Homo sapien
tcaacagaaaatgagcaaagagtaatctgtttg

SEQ ID NO: 977470 - DNA, 33 bp, Homo sapien
tcaacagaaaatgagcgaagagtaatctgtttg

SEQ ID NO: 977471 - DNA, 33 bp, Homo sapien
agccatttcatcatcaaccaaatcataaataat

SEQ ID NO: 977472 - DNA, 33 bp, Homo sapien
agccatttcatcatcacccaaatcataaataat

SEQ ID NO: 977473 - DNA, 33 bp, Homo sapien
gactaatctctcaaacggccattggtctattaa

SEQ ID NO: 977474 - DNA, 33 bp, Homo sapien
gactaatctctcaaactgccattggtctattaa

SEQ ID NO: 977475 - DNA, 33 bp, Homo sapien
tataaatatgatgataataattgacaaatggtt

SEQ ID NO: 977476 - DNA, 33 bp, Homo sapien
tataaatatgatgatagtaattgacaaatggtt

SEQ ID NO: 977477 - DNA, 33 bp, Homo sapien
tctacacaaagaaatgaaaaacacaaaatatga

SEQ ID NO: 977478 - DNA, 33 bp, Homo sapien
tctacacaaagaaatgcaaaacacaaaatatga

SEQ ID NO: 977479 - DNA, 33 bp, Homo sapien
aagtgatgaagtaaccgactattatgtgtgaga

SEQ ID NO: 977480 - DNA, 33 bp, Homo sapien
aagtgatgaagtaacctactattatgtgtgaga

SEQ ID NO: 977481 - DNA, 33 bp, Homo sapien
agatgtcaccagtgaaagcttcaaaacagcaaa

SEQ ID NO: 977482 - DNA, 33 bp, Homo sapien
agatgtcaccagtgaaggcttcaaaacagcaaa

SEQ ID NO: 977483 - DNA, 33 bp, Homo sapien
tgagcgatcgctcacaaaggtttgacatatacc

SEQ ID NO: 977484 - DNA, 33 bp, Homo sapien
tgagcgatcgctcacataggtttgacatatacc

SEQ ID NO: 977485 - DNA, 33 bp, Homo sapien
ctttgttttacttggaagcttagaggccattgt

SEQ ID NO: 977486 - DNA, 33 bp, Homo sapien
ctttgttttacttggaggcttagaggccattgt

SEQ ID NO: 977487 - DNA, 33 bp, Homo sapien
acatagggcatcattaaacttcaatccttgtca

SEQ ID NO: 977488 - DNA, 33 bp, Homo sapien
acatagggcatcattagacttcaatccttgtca

SEQ ID NO: 977489 - DNA, 33 bp, Homo sapien
ttgctattgtataaaaaggggcatggttgtaaa

SEQ ID NO: 977490 - DNA, 33 bp, Homo sapien
ttgctattgtataaaagggggcatggttgtaaa

SEQ ID NO: 977491 - DNA, 33 bp, Homo sapien
ttggctccaaatcataaccagatggacagttat

SEQ ID NO: 977492 - DNA, 33 bp, Homo sapien
ttggctccaaatcatagccagatggacagttat

SEQ ID NO: 977493 - DNA, 33 bp, Homo sapien
ctgtactccatccatcacttcttcaccctcata

SEQ ID NO: 977494 - DNA, 33 bp, Homo sapien
ctgtactccatccatcgcttcttcaccctcata

SEQ ID NO: 977495 - DNA, 33 bp, Homo sapien
tgcagtatgaagaatgcagtaagaaatagttga

SEQ ID NO: 977496 - DNA, 33 bp, Homo sapien
tgcagtatgaagaatggagtaagaaatagttga

SEQ ID NO: 977497 - DNA, 33 bp, Homo sapien
tttagcaggtggatgacaatatctttgccttca

SEQ ID NO: 977498 - DNA, 33 bp, Homo sapien
tttagcaggtggatgagaatatctttgccttca

SEQ ID NO: 977499 - DNA, 33 bp, Homo sapien
ccatcatagctctaaaccacctttcctgtgcag

SEQ ID NO: 977500 - DNA, 33 bp, Homo sapien
ccatcatagctctaaatcacctttcctgtgcag

SEQ ID NO: 977501 - DNA, 33 bp, Homo sapien
actggagagattcaccacctcattgtagatgca

SEQ ID NO: 977502 - DNA, 33 bp, Homo sapien
actggagagattcaccgcctcattgtagatgca

SEQ ID NO: 977503 - DNA, 33 bp, Homo sapien
tatcaaacattgaacagaagtgacagcctttta

SEQ ID NO: 977504 - DNA, 33 bp, Homo sapien
tatcaaacattgaacataagtgacagcctttta

SEQ ID NO: 977505 - DNA, 33 bp, Homo sapien
tatgcaagtatttatccacatttgagtaacact

SEQ ID NO: 977506 - DNA, 33 bp, Homo sapien
tatgcaagtatttatcgacatttgagtaacact

SEQ ID NO: 977507 - DNA, 33 bp, Homo sapien
aaaagctgaggctagaccattgttctgtctgca

SEQ ID NO: 977508 - DNA, 33 bp, Homo sapien
aaaagctgaggctagatcattgttctgtctgca

SEQ ID NO: 977509 - DNA, 33 bp, Homo sapien
cagcagcttgcaaatgaactaatatgatggtgt

SEQ ID NO: 977510 - DNA, 33 bp, Homo sapien
cagcagcttgcaaatggactaatatgatggtgt

SEQ ID NO: 977511 - DNA, 33 bp, Homo sapien
aggccattggttctagcaatcaaatagctcaca

SEQ ID NO: 977512 - DNA, 33 bp, Homo sapien
aggccattggttctaggaatcaaatagctcaca

SEQ ID NO: 977513 - DNA, 33 bp, Homo sapien
ccattttagttgggaactgactgtatgaattct

SEQ ID NO: 977514 - DNA, 33 bp, Homo sapien
ccattttagttgggaagtgactgtatgaattct

SEQ ID NO: 977515 - DNA, 33 bp, Homo sapien
tattcaatattcattgcatgtggactctgagaa

SEQ ID NO: 977516 - DNA, 33 bp, Homo sapien
tattcaatattcattgtatgtggactctgagaa

SEQ ID NO: 977517 - DNA, 33 bp, Homo sapien
gtccagaaagagagccacatatttattcttacc

SEQ ID NO: 977518 - DNA, 33 bp, Homo sapien
gtccagaaagagagccgcatatttattcttacc

SEQ ID NO: 977519 - DNA, 33 bp, Homo sapien
tcactgaacctcatcaaatggtgcccactgcac

SEQ ID NO: 977520 - DNA, 33 bp, Homo sapien
tcactgaacctcatcagatggtgcccactgcac

SEQ ID NO: 977521 - DNA, 33 bp, Homo sapien
ccaagtagtcttatgaagtggcaaattctgtat

SEQ ID NO: 977522 - DNA, 33 bp, Homo sapien
ccaagtagtcttatgaggtggcaaattctgtat

SEQ ID NO: 977523 - DNA, 33 bp, Homo sapien
attgcaggaagttacgaaagtcagtaaataaaa

SEQ ID NO: 977524 - DNA, 33 bp, Homo sapien
attgcaggaagttacggaagtcagtaaataaaa

SEQ ID NO: 977525 - DNA, 33 bp, Homo sapien
gaaaagattgggagtcagaagaagagaatggct

SEQ ID NO: 977526 - DNA, 33 bp, Homo sapien
gaaaagattgggagtcggaagaagagaatggct

SEQ ID NO: 977527 - DNA, 33 bp, Homo sapien
agaatttgagttcacacaggcattttataaatc

SEQ ID NO: 977528 - DNA, 33 bp, Homo sapien
agaatttgagttcacataggcattttataaatc

SEQ ID NO: 977529 - DNA, 33 bp, Homo sapien
aatgtaagaataataaaaaacagcaacctgcaa

SEQ ID NO: 977530 - DNA, 33 bp, Homo sapien
aatgtaagaataataataaacagcaacctgcaa

SEQ ID NO: 977531 - DNA, 33 bp, Homo sapien
gtaaaaacatggattgcaacatgctctaggatt

SEQ ID NO: 977532 - DNA, 33 bp, Homo sapien
gtaaaaacatggattggaacatgctctaggatt

SEQ ID NO: 977533 - DNA, 33 bp, Homo sapien
tgctctgtgaaagaaaatgtcaaggaaataaga

SEQ ID NO: 977534 - DNA, 33 bp, Homo sapien
tgctctgtgaaagaaagtgtcaaggaaataaga

SEQ ID NO: 977535 - DNA, 33 bp, Homo sapien
catgttgagaaagaaccgtccaggcagagaaaa

SEQ ID NO: 977536 - DNA, 33 bp, Homo sapien
catgttgagaaagaactgtccaggcagagaaaa

SEQ ID NO: 977537 - DNA, 33 bp, Homo sapien
ttcttgggaatagaaactgattttgataaaata

SEQ ID NO: 977538 - DNA, 33 bp, Homo sapien
ttcttgggaatagaaagtgattttgataaaata

SEQ ID NO: 977539 - DNA, 33 bp, Homo sapien
aggaatcaagaccacaacctaattcagcaattc

SEQ ID NO: 977540 - DNA, 33 bp, Homo sapien
aggaatcaagaccacagcctaattcagcaattc

SEQ ID NO: 977541 - DNA, 33 bp, Homo sapien
tacttaaaggcagcaactgcagtataagttttt

SEQ ID NO: 977542 - DNA, 33 bp, Homo sapien
tacttaaaggcagcaattgcagtataagttttt

SEQ ID NO: 977543 - DNA, 33 bp, Homo sapien
ctaaggataacataggaaaggttgtctaagcaa

SEQ ID NO: 977544 - DNA, 33 bp, Homo sapien
ctaaggataacatagggaaggttgtctaagcaa

SEQ ID NO: 977545 - DNA, 33 bp, Homo sapien
actactaaagaccttgacaaatttcccttagaa

SEQ ID NO: 977546 - DNA, 33 bp, Homo sapien
actactaaagaccttgccaaatttcccttagaa

SEQ ID NO: 977547 - DNA, 33 bp, Homo sapien
ctaccaatgttgtatacgcacaagtgtttacac

SEQ ID NO: 977548 - DNA, 33 bp, Homo sapien
ctaccaatgttgtatatgcacaagtgtttacac

SEQ ID NO: 977549 - DNA, 33 bp, Homo sapien
ggacagaaaaatagaaactggagctcactattc

SEQ ID NO: 977550 - DNA, 33 bp, Homo sapien
ggacagaaaaatagaacctggagctcactattc

SEQ ID NO: 977551 - DNA, 33 bp, Homo sapien
ggagtgagtttggaagacagttttctaaaagca

SEQ ID NO: 977552 - DNA, 33 bp, Homo sapien
ggagtgagtttggaaggcagttttctaaaagca

SEQ ID NO: 977553 - DNA, 33 bp, Homo sapien
tgcttatgccaaaaaaagtgtaaaagaaagaga

SEQ ID NO: 977554 - DNA, 33 bp, Homo sapien
tgcttatgccaaaaaatgtgtaaaagaaagaga

SEQ ID NO: 977555 - DNA, 33 bp, Homo sapien
aggtctttttgccccaatggactttgcaaataa

SEQ ID NO: 977556 - DNA, 33 bp, Homo sapien
aggtctttttgccccagtggactttgcaaataa

SEQ ID NO: 977557 - DNA, 33 bp, Homo sapien
tcacatgagattttcaaataaatggaatgttta

SEQ ID NO: 977558 - DNA, 33 bp, Homo sapien
tcacatgagattttcagataaatggaatgttta

SEQ ID NO: 977559 - DNA, 33 bp, Homo sapien
cagagggtagtaagaaatgcaatttggtctttt

SEQ ID NO: 977560 - DNA, 33 bp, Homo sapien
cagagggtagtaagaactgcaatttggtctttt

SEQ ID NO: 977561 - DNA, 33 bp, Homo sapien
acatgttatatagtaaaatcttttgtttagttc

SEQ ID NO: 977562 - DNA, 33 bp, Homo sapien
acatgttatatagtaagatcttttgtttagttc

SEQ ID NO: 977563 - DNA, 33 bp, Homo sapien
tcaaatgaggggttcaataatggcgtttgaagt

SEQ ID NO: 977564 - DNA, 33 bp, Homo sapien
tcaaatgaggggttcagtaatggcgtttgaagt

SEQ ID NO: 977565 - DNA, 33 bp, Homo sapien
gggagatttctgtcaactgaatgttcatttttg

SEQ ID NO: 977566 - DNA, 33 bp, Homo sapien
gggagatttctgtcaattgaatgttcatttttg

SEQ ID NO: 977567 - DNA, 33 bp, Homo sapien
ctactgaggaattatcaagagagcacaaatttt

SEQ ID NO: 977568 - DNA, 33 bp, Homo sapien
ctactgaggaattatccagagagcacaaatttt

SEQ ID NO: 977569 - DNA, 33 bp, Homo sapien
gtaacaacaaaactgaaggcataatatttcctg

SEQ ID NO: 977570 - DNA, 33 bp, Homo sapien
gtaacaacaaaactgagggcataatatttcctg

SEQ ID NO: 977571 - DNA, 33 bp, Homo sapien
ttcctttggatatatactaagaagtgagattgc

SEQ ID NO: 977572 - DNA, 33 bp, Homo sapien
ttcctttggatatatagtaagaagtgagattgc

SEQ ID NO: 977573 - DNA, 33 bp, Homo sapien
agcatgagctactttaggtcaaaaatatttata

SEQ ID NO: 977574 - DNA, 33 bp, Homo sapien
agcatgagctactttatgtcaaaaatatttata

SEQ ID NO: 977575 - DNA, 33 bp, Homo sapien
cagtccaaatgacctaaggtggtaatgatacaa

SEQ ID NO: 977576 - DNA, 33 bp, Homo sapien
cagtccaaatgacctatggtggtaatgatacaa

SEQ ID NO: 977577 - DNA, 33 bp, Homo sapien
ggtggtgtttcaaaaaccctggtacttcattca

SEQ ID NO: 977578 - DNA, 33 bp, Homo sapien
ggtggtgtttcaaaaatcctggtacttcattca

SEQ ID NO: 977579 - DNA, 33 bp, Homo sapien
agaagacaagaactccaagattcctaaaagcag

SEQ ID NO: 977580 - DNA, 33 bp, Homo sapien
agaagacaagaactccgagattcctaaaagcag

SEQ ID NO: 977581 - DNA, 33 bp, Homo sapien
taaaatagaaatttcaaagcagaacttatttaa

SEQ ID NO: 977582 - DNA, 33 bp, Homo sapien
taaaatagaaatttcagagcagaacttatttaa

SEQ ID NO: 977583 - DNA, 33 bp, Homo sapien
ggttctcaactagatcaccagtcatacctctct

SEQ ID NO: 977584 - DNA, 33 bp, Homo sapien
ggttctcaactagatcgccagtcatacctctct

SEQ ID NO: 977585 - DNA, 33 bp, Homo sapien
gatgccttctcactaaagaaagaaacaaaaaac

SEQ ID NO: 977586 - DNA, 33 bp, Homo sapien
gatgccttctcactaaggaaagaaacaaaaaac

SEQ ID NO: 977587 - DNA, 33 bp, Homo sapien
agtatggtcaaaatcacctatgaggtttagaga

SEQ ID NO: 977588 - DNA, 33 bp, Homo sapien
agtatggtcaaaatcatctatgaggtttagaga

SEQ ID NO: 977589 - DNA, 33 bp, Homo sapien
tgcagtcaagaagttcaacatcagactagatca

SEQ ID NO: 977590 - DNA, 33 bp, Homo sapien
tgcagtcaagaagttcgacatcagactagatca

SEQ ID NO: 977591 - DNA, 33 bp, Homo sapien
tttggatgatcttgccacacaaaattagtctct

SEQ ID NO: 977592 - DNA, 33 bp, Homo sapien
tttggatgatcttgccgcacaaaattagtctct

SEQ ID NO: 977593 - DNA, 33 bp, Homo sapien
ttgcaataaaatatgccaggttgggttggtaca

SEQ ID NO: 977594 - DNA, 33 bp, Homo sapien
ttgcaataaaatatgctaggttgggttggtaca

SEQ ID NO: 977595 - DNA, 33 bp, Homo sapien
taatcctaacagagtcactacatcatatgcaat

SEQ ID NO: 977596 - DNA, 33 bp, Homo sapien
taatcctaacagagtcgctacatcatatgcaat

SEQ ID NO: 977597 - DNA, 33 bp, Homo sapien
aaacagtttctaaaccacagcaaaactctattg

SEQ ID NO: 977598 - DNA, 33 bp, Homo sapien
aaacagtttctaaaccgcagcaaaactctattg

SEQ ID NO: 977599 - DNA, 33 bp, Homo sapien
ctctggcttcactaaccagttctttgatccttt

SEQ ID NO: 977600 - DNA, 33 bp, Homo sapien
ctctggcttcactaactagttctttgatccttt

SEQ ID NO: 977601 - DNA, 33 bp, Homo sapien
tctgtatgtccatgtgaaccaaagtttctttaa

SEQ ID NO: 977602 - DNA, 33 bp, Homo sapien
tctgtatgtccatgtgtaccaaagtttctttaa

SEQ ID NO: 977603 - DNA, 33 bp, Homo sapien
cattatttatgtaaaactcgatctcctctatct

SEQ ID NO: 977604 - DNA, 33 bp, Homo sapien
cattatttatgtaaaattcgatctcctctatct

SEQ ID NO: 977605 - DNA, 33 bp, Homo sapien
taagctttggtaattacgtctatctacacaaaa

SEQ ID NO: 977606 - DNA, 33 bp, Homo sapien
taagctttggtaattatgtctatctacacaaaa

SEQ ID NO: 977607 - DNA, 33 bp, Homo sapien
ccttgtcactctaagccgatctattcttgtacc

SEQ ID NO: 977608 - DNA, 33 bp, Homo sapien
ccttgtcactctaagctgatctattcttgtacc

SEQ ID NO: 977609 - DNA, 33 bp, Homo sapien
tatgtcagaacttaaactgtgtagttgaaatat

SEQ ID NO: 977610 - DNA, 33 bp, Homo sapien
tatgtcagaacttaaattgtgtagttgaaatat

SEQ ID NO: 977611 - DNA, 33 bp, Homo sapien
ctctggataattctgactaatataaaatcacat

SEQ ID NO: 977612 - DNA, 33 bp, Homo sapien
ctctggataattctgagtaatataaaatcacat

SEQ ID NO: 977613 - DNA, 33 bp, Homo sapien
ctattcaacaaacattaaaatgaatcacaaact

SEQ ID NO: 977614 - DNA, 33 bp, Homo sapien
ctattcaacaaacattgaaatgaatcacaaact

SEQ ID NO: 977615 - DNA, 33 bp, Homo sapien
aatcaggaaaacttcaatgaaagatcatattag

SEQ ID NO: 977616 - DNA, 33 bp, Homo sapien
aatcaggaaaacttcactgaaagatcatattag

SEQ ID NO: 977617 - DNA, 33 bp, Homo sapien
taagggaagaaaacagaaatgtcaaacaatttg

SEQ ID NO: 977618 - DNA, 33 bp, Homo sapien
taagggaagaaaacagtaatgtcaaacaatttg

SEQ ID NO: 977619 - DNA, 33 bp, Homo sapien
agttcaagtatccataactctttcccctgagca

SEQ ID NO: 977620 - DNA, 33 bp, Homo sapien
agttcaagtatccatacctctttcccctgagca

SEQ ID NO: 977621 - DNA, 33 bp, Homo sapien
gatatagttgattcaaatgtcccatgacagtta

SEQ ID NO: 977622 - DNA, 33 bp, Homo sapien
gatatagttgattcaattgtcccatgacagtta

SEQ ID NO: 977623 - DNA, 33 bp, Homo sapien
cacaagtattcacaggaaatggtgccactcatg

SEQ ID NO: 977624 - DNA, 33 bp, Homo sapien
cacaagtattcacaggtaatggtgccactcatg

SEQ ID NO: 977625 - DNA, 33 bp, Homo sapien; identical to SEQ ID NO: 977623

SEQ ID NO: 977626 - DNA, 33 bp, Homo sapien; identical to SEQ ID NO: 977624

SEQ ID NO: 977627 - DNA, 33 bp, Homo sapien
tctgtgtccatcagtacccaatttttagctccc

SEQ ID NO: 977628 - DNA, 33 bp, Homo sapien
tctgtgtccatcagtatccaatttttagctccc

SEQ ID NO: 977629 - DNA, 33 bp, Homo sapien
aagcatgagctccagaacaaaattatttagttc

SEQ ID NO: 977630 - DNA, 33 bp, Homo sapien
aagcatgagctccagagcaaaattatttagttc

SEQ ID NO: 977631 - DNA, 33 bp, Homo sapien
catagaaggtgtcccacgtttgtagagaaaagt

SEQ ID NO: 977632 - DNA, 33 bp, Homo sapien
catagaaggtgtcccatgtttgtagagaaaagt

SEQ ID NO: 977633 - DNA, 33 bp, Homo sapien
aagatggtagtggagacgaaaagaacatggaaa

SEQ ID NO: 977634 - DNA, 33 bp, Homo sapien
aagatggtagtggagatgaaaagaacatggaaa

SEQ ID NO: 977635 - DNA, 33 bp, Homo sapien
ctgttttgctaaactgcaaatctatgtcactgc

SEQ ID NO: 977636 - DNA, 33 bp, Homo sapien
ctgttttgctaaactgtaaatctatgtcactgc

SEQ ID NO: 977637 - DNA, 33 bp, Homo sapien
ctataaatctgatatgacacattaaccaaatga

SEQ ID NO: 977638 - DNA, 33 bp, Homo sapien
ctataaatctgatatgccacattaaccaaatga

SEQ ID NO: 977639 - DNA, 33 bp, Homo sapien
acaaaagtggtgatcaatgaaattttgttgagt

SEQ ID NO: 977640 - DNA, 33 bp, Homo sapien
acaaaagtggtgatcagtgaaattttgttgagt

SEQ ID NO: 977641 - DNA, 33 bp, Homo sapien
gcttcctttatgtcaactgtttagtaagccatt

SEQ ID NO: 977642 - DNA, 33 bp, Homo sapien
gcttcctttatgtcaattgtttagtaagccatt

SEQ ID NO: 977643 - DNA, 33 bp, Homo sapien
aacccaaacattgtacagctatacaaaaatatc

SEQ ID NO: 977644 - DNA, 33 bp, Homo sapien
aacccaaacattgtacggctatacaaaaatatc

SEQ ID NO: 977645 - DNA, 33 bp, Homo sapien
ataaagctgctttaaaaaattatacacagattt

SEQ ID NO: 977646 - DNA, 33 bp, Homo sapien
ataaagctgctttaaacaattatacacagattt

SEQ ID NO: 977647 - DNA, 33 bp, Homo sapien
gtacattctttcagtacctgcatatgataatgt

SEQ ID NO: 977648 - DNA, 33 bp, Homo sapien
gtacattctttcagtatctgcatatgataatgt

SEQ ID NO: 977649 - DNA, 33 bp, Homo sapien
tgacaatgatagtttacatggagaaaggatgag

SEQ ID NO: 977650 - DNA, 33 bp, Homo sapien
tgacaatgatagtttatatggagaaaggatgag

SEQ ID NO: 977651 - DNA, 33 bp, Homo sapien
ataaatttgtatgaaaccctgtctagactttgt

SEQ ID NO: 977652 - DNA, 33 bp, Homo sapien
ataaatttgtatgaaatcctgtctagactttgt

SEQ ID NO: 977653 - DNA, 33 bp, Homo sapien
caatttaaatgatgagaatagataagaaacaag

SEQ ID NO: 977654 - DNA, 33 bp, Homo sapien
caatttaaatgatgagcatagataagaaacaag

SEQ ID NO: 977655 - DNA, 33 bp, Homo sapien
tggtagccctagaaaactaatgcacatgctatc

SEQ ID NO: 977656 - DNA, 33 bp, Homo sapien
tggtagccctagaaaattaatgcacatgctatc

SEQ ID NO: 977657 - DNA, 33 bp, Homo sapien
caccagtatttccgaacgtgactgtgtttggag

SEQ ID NO: 977658 - DNA, 33 bp, Homo sapien
caccagtatttccgaatgtgactgtgtttggag

SEQ ID NO: 977659 - DNA, 33 bp, Homo sapien
taatgtgtatattctcaaacagaaaatcagata

SEQ ID NO: 977660 - DNA, 33 bp, Homo sapien
taatgtgtatattctccaacagaaaatcagata

SEQ ID NO: 977661 - DNA, 33 bp, Homo sapien
tgtgtggttcataaagcctgacagtaaagtaca

SEQ ID NO: 977662 - DNA, 33 bp, Homo sapien
tgtgtggttcataaagtctgacagtaaagtaca

SEQ ID NO: 977663 - DNA, 33 bp, Homo sapien
aataagtcgctcttaccagaaaattagtaaacc

SEQ ID NO: 977664 - DNA, 33 bp, Homo sapien
aataagtcgctcttactagaaaattagtaaacc

SEQ ID NO: 977665 - DNA, 33 bp, Homo sapien
tagaaggggattgagaactaaattgttttgtac

SEQ ID NO: 977666 - DNA, 33 bp, Homo sapien
tagaaggggattgagagctaaattgttttgtac

SEQ ID NO: 977667 - DNA, 33 bp, Homo sapien
acacactggagaaccaatacatctggcagaaga

SEQ ID NO: 977668 - DNA, 33 bp, Homo sapien
acacactggagaaccagtacatctggcagaaga

SEQ ID NO: 977669 - DNA, 33 bp, Homo sapien
gcactccaattgaaaccaccatttctcacacag

SEQ ID NO: 977670 - DNA, 33 bp, Homo sapien
gcactccaattgaaacgaccatttctcacacag

SEQ ID NO: 977671 - DNA, 33 bp, Homo sapien
ttctacctggctgacaaaccagtatctccaggc

SEQ ID NO: 977672 - DNA, 33 bp, Homo sapien
ttctacctggctgacacaccagtatctccaggc

SEQ ID NO: 977673 - DNA, 33 bp, Homo sapien
aggtgccatatcaagcaatggtatatttcagtt

SEQ ID NO: 977674 - DNA, 33 bp, Homo sapien
aggtgccatatcaagctatggtatatttcagtt

SEQ ID NO: 977675 - DNA, 33 bp, Homo sapien
aactcttgcccagaacaggattgctaaaaaaaa

SEQ ID NO: 977676 - DNA, 33 bp, Homo sapien
aactcttgcccagaactggattgctaaaaaaaa

SEQ ID NO: 977677 - DNA, 33 bp, Homo sapien
gaactcctccaggagagaaatcaggccttattg

SEQ ID NO: 977678 - DNA, 33 bp, Homo sapien
gaactcctccaggagataaatcaggccttattg

SEQ ID NO: 977679 - DNA, 33 bp, Homo sapien
gtattctaaacatttcagaaagaggatgtaaaa

SEQ ID NO: 977680 - DNA, 33 bp, Homo sapien
gtattctaaacatttcggaaagaggatgtaaaa

SEQ ID NO: 977681 - DNA, 33 bp, Homo sapien
atgaaaatgacctacagaagtgagttgacagta

SEQ ID NO: 977682 - DNA, 33 bp, Homo sapien
atgaaaatgacctacataagtgagttgacagta

SEQ ID NO: 977683 - DNA, 33 bp, Homo sapien
atggtttttatcggaaatgcaaagggcatggca

SEQ ID NO: 977684 - DNA, 33 bp, Homo sapien
atggtttttatcggaagtgcaaagggcatggca

SEQ ID NO: 977685 - DNA, 33 bp, Homo sapien
cacaacacctgaagaacagtgtgccttgaagtc

SEQ ID NO: 977686 - DNA, 33 bp, Homo sapien
cacaacacctgaagaatagtgtgccttgaagtc

SEQ ID NO: 977687 - DNA, 33 bp, Homo sapien
ataatagtgaatgccaaataagtgcaatggtcc

SEQ ID NO: 977688 - DNA, 33 bp, Homo sapien
ataatagtgaatgccagataagtgcaatggtcc

SEQ ID NO: 977689 - DNA, 33 bp, Homo sapien
tccacaattttacatgaaaatcttggattcact

SEQ ID NO: 977690 - DNA, 33 bp, Homo sapien
tccacaattttacatgcaaatcttggattcact

SEQ ID NO: 977691 - DNA, 33 bp, Homo sapien
ttcaagcttctgtaaaatattctcaccagtaag

SEQ ID NO: 977692 - DNA, 33 bp, Homo sapien
ttcaagcttctgtaaagtattctcaccagtaag

SEQ ID NO: 977693 - DNA, 33 bp, Homo sapien
tgctgtctttttaggaaccatacccctgcatat

SEQ ID NO: 977694 - DNA, 33 bp, Homo sapien
tgctgtctttttaggacccatacccctgcatat

SEQ ID NO: 977695 - DNA, 33 bp, Homo sapien
atggaaaaatgacaaagatatgatctctgtaca

SEQ ID NO: 977696 - DNA, 33 bp, Homo sapien
atggaaaaatgacaaatatatgatctctgtaca

SEQ ID NO: 977697 - DNA, 33 bp, Homo sapien
ttggccttggtttgaaaactgtttccattctac

SEQ ID NO: 977698 - DNA, 33 bp, Homo sapien
ttggccttggtttgaagactgtttccattctac

SEQ ID NO: 977699 - DNA, 33 bp, Homo sapien
ttattctggatgttaccgattgagatgtttcag

SEQ ID NO: 977700 - DNA, 33 bp, Homo sapien
ttattctggatgttactgattgagatgtttcag

SEQ ID NO: 977701 - DNA, 33 bp, Homo sapien
aagatcaccaagatttaaaagtcgcttttgtta

SEQ ID NO: 977702 - DNA, 33 bp, Homo sapien
aagatcaccaagattttaaagtcgcttttgtta

SEQ ID NO: 977703 - DNA, 33 bp, Homo sapien
acagcaaagtggaaatgacagggaagacaagga

SEQ ID NO: 977704 - DNA, 33 bp, Homo sapien
acagcaaagtggaaattacagggaagacaagga

SEQ ID NO: 977705 - DNA, 33 bp, Homo sapien
cacctgaaaaactgtaaaagtgagcatggcagg

SEQ ID NO: 977706 - DNA, 33 bp, Homo sapien
cacctgaaaaactgtagaagtgagcatggcagg

SEQ ID NO: 977707 - DNA, 33 bp, Homo sapien
gcagagataaccctcaaaaggttaggactgcag

SEQ ID NO: 977708 - DNA, 33 bp, Homo sapien
gcagagataaccctcataaggttaggactgcag

SEQ ID NO: 977709 - DNA, 33 bp, Homo sapien
tggtggatgaattctaaatgagctactgtttca

SEQ ID NO: 977710 - DNA, 33 bp, Homo sapien
tggtggatgaattctacatgagctactgtttca

SEQ ID NO: 977711 - DNA, 33 bp, Homo sapien
tggtgtctttcaccaaaataggaaagtgaaaag

SEQ ID NO: 977712 - DNA, 33 bp, Homo sapien
tggtgtctttcaccaatataggaaagtgaaaag

SEQ ID NO: 977713 - DNA, 33 bp, Homo sapien
cttccttctctatccactcactggctgttgtgg

SEQ ID NO: 977714 - DNA, 33 bp, Homo sapien
cttccttctctatccattcactggctgttgtgg

SEQ ID NO: 977715 - DNA, 33 bp, Homo sapien
gtggatttttcaactacaggttaatgccaaggc

SEQ ID NO: 977716 - DNA, 33 bp, Homo sapien
gtggatttttcaactataggttaatgccaaggc

SEQ ID NO: 977717 - DNA, 33 bp, Homo sapien
agaaaattttgggggacctagaagtaggcaaaa

SEQ ID NO: 977718 - DNA, 33 bp, Homo sapien
agaaaattttgggggatctagaagtaggcaaaa

SEQ ID NO: 977719 - DNA, 33 bp, Homo sapien
aaaccaggtaataggcgcctaagttatgcaaag

SEQ ID NO: 977720 - DNA, 33 bp, Homo sapien
aaaccaggtaataggctcctaagttatgcaaag

SEQ ID NO: 977721 - DNA, 33 bp, Homo sapien
tggcatccttgtagaacggtggctatagagtag

SEQ ID NO: 977722 - DNA, 33 bp, Homo sapien
tggcatccttgtagaatggtggctatagagtag

SEQ ID NO: 977723 - DNA, 33 bp, Homo sapien
atttgtgaaaaaactcaaaggccaggagagaga

SEQ ID NO: 977724 - DNA, 33 bp, Homo sapien
atttgtgaaaaaactcgaaggccaggagagaga

SEQ ID NO: 977725 - DNA, 33 bp, Homo sapien
attcctttcgagaacaactgatacttatcctcc

SEQ ID NO: 977726 - DNA, 33 bp, Homo sapien
attcctttcgagaacagctgatacttatcctcc

SEQ ID NO: 977727 - DNA, 33 bp, Homo sapien
tgttttgaggaggacaatgtcaggacttaaaaa

SEQ ID NO: 977728 - DNA, 33 bp, Homo sapien
tgttttgaggaggacattgtcaggacttaaaaa

SEQ ID NO: 977729 - DNA, 33 bp, Homo sapien
gtttagtattgaaaaactgaaattaggttacct

SEQ ID NO: 977730 - DNA, 33 bp, Homo sapien
gtttagtattgaaaaattgaaattaggttacct

SEQ ID NO: 977731 - DNA, 33 bp, Homo sapien
ccttttatggtcagcacaaagcaggtaacctaa

SEQ ID NO: 977732 - DNA, 33 bp, Homo sapien
ccttttatggtcagcagaaagcaggtaacctaa

SEQ ID NO: 977733 - DNA, 33 bp, Homo sapien
gtcttcccgtgctttaaaaggaagggtgtgctg

SEQ ID NO: 977734 - DNA, 33 bp, Homo sapien
gtcttcccgtgctttataaggaagggtgtgctg

SEQ ID NO: 977735 - DNA, 33 bp, Homo sapien
acaataaatgccctgaataccaaatataattag

SEQ ID NO: 977736 - DNA, 33 bp, Homo sapien
acaataaatgccctgactaccaaatataattag

SEQ ID NO: 977737 - DNA, 33 bp, Homo sapien
agacagactgtttataccatggactgtagttca

SEQ ID NO: 977738 - DNA, 33 bp, Homo sapien
agacagactgtttatatcatggactgtagttca

SEQ ID NO: 977739 - DNA, 33 bp, Homo sapien
gtcatccttgtacttacagcaactaacactgta

SEQ ID NO: 977740 - DNA, 33 bp, Homo sapien
gtcatccttgtacttatagcaactaacactgta

SEQ ID NO: 977741 - DNA, 33 bp, Homo sapien
gattctctaagcagaaaagcagtgtcattccat

SEQ ID NO: 977742 - DNA, 33 bp, Homo sapien
gattctctaagcagaagagcagtgtcattccat

SEQ ID NO: 977743 - DNA, 33 bp, Homo sapien
atggacttatgcacaccatgttgtaggaagaca

SEQ ID NO: 977744 - DNA, 33 bp, Homo sapien
atggacttatgcacacgatgttgtaggaagaca

SEQ ID NO: 977745 - DNA, 33 bp, Homo sapien
gacctggaggacttaacatatccatgtagttaa

SEQ ID NO: 977746 - DNA, 33 bp, Homo sapien
gacctggaggacttaagatatccatgtagttaa

SEQ ID NO: 977747 - DNA, 33 bp, Homo sapien
tgtgaaagcaactgaactatgtagtacttacat

SEQ ID NO: 977748 - DNA, 33 bp, Homo sapien
tgtgaaagcaactgaagtatgtagtacttacat

SEQ ID NO: 977749 - DNA, 33 bp, Homo sapien
aaaattgcttgaaggagaatagagactgtttgg

SEQ ID NO: 977750 - DNA, 33 bp, Homo sapien
aaaattgcttgaaggataatagagactgtttgg

SEQ ID NO: 977751 - DNA, 33 bp, Homo sapien
gcagctttaaagtggccctttgcaaacctctca

SEQ ID NO: 977752 - DNA, 33 bp, Homo sapien
gcagctttaaagtggctctttgcaaacctctca

SEQ ID NO: 977753 - DNA, 33 bp, Homo sapien
ccatgcgattcttagaagatacataggagagaa

SEQ ID NO: 977754 - DNA, 33 bp, Homo sapien
ccatgcgattcttagaggatacataggagagaa

SEQ ID NO: 977755 - DNA, 33 bp, Homo sapien
tgggctagtaatagaacgaaataagccactagg

SEQ ID NO: 977756 - DNA, 33 bp, Homo sapien
tgggctagtaatagaatgaaataagccactagg

SEQ ID NO: 977757 - DNA, 33 bp, Homo sapien
tctaaagacagatgagcatcttggatggaagca

SEQ ID NO: 977758 - DNA, 33 bp, Homo sapien
tctaaagacagatgagtatcttggatggaagca

SEQ ID NO: 977759 - DNA, 33 bp, Homo sapien
tcaacatgaaatgatacggtagttagcaagatg

SEQ ID NO: 977760 - DNA, 33 bp, Homo sapien
tcaacatgaaatgatatggtagttagcaagatg

SEQ ID NO: 977761 - DNA, 33 bp, Homo sapien
ctcagcacctaatacaaaccatgacacatttga

SEQ ID NO: 977762 - DNA, 33 bp, Homo sapien
ctcagcacctaatacagaccatgacacatttga

SEQ ID NO: 977763 - DNA, 33 bp, Homo sapien
tccattgccccaacagccaaattgtgaccttct

SEQ ID NO: 977764 - DNA, 33 bp, Homo sapien
tccattgccccaacagtcaaattgtgaccttct

SEQ ID NO: 977765 - DNA, 33 bp, Homo sapien
cttaccaatgacagataacaccctaagaaaagg

SEQ ID NO: 977766 - DNA, 33 bp, Homo sapien
cttaccaatgacagatgacaccctaagaaaagg

SEQ ID NO: 977767 - DNA, 33 bp, Homo sapien
ggaacgtgcactttgccgaacatggatcacagt

SEQ ID NO: 977768 - DNA, 33 bp, Homo sapien
ggaacgtgcactttgctgaacatggatcacagt

SEQ ID NO: 977769 - DNA, 33 bp, Homo sapien
tataagcttagtggagaaacataattacccact

SEQ ID NO: 977770 - DNA, 33 bp, Homo sapien
tataagcttagtggaggaacataattacccact

SEQ ID NO: 977771 - DNA, 33 bp, Homo sapien
gggatttatttacacacgttgttaccaatacac

SEQ ID NO: 977772 - DNA, 33 bp, Homo sapien
gggatttatttacacatgttgttaccaatacac

SEQ ID NO: 977773 - DNA, 33 bp, Homo sapien
gttttttgttttggtgacaatttggctatggaa

SEQ ID NO: 977774 - DNA, 33 bp, Homo sapien
gttttttgttttggtggcaatttggctatggaa

SEQ ID NO: 977775 - DNA, 33 bp, Homo sapien
aatcttggatactttgaagtgaaactgtgcaac

SEQ ID NO: 977776 - DNA, 33 bp, Homo sapien
aatcttggatactttggagtgaaactgtgcaac

SEQ ID NO: 977777 - DNA, 33 bp, Homo sapien
attattcatgtaaagaaatgttgctgatctttt

SEQ ID NO: 977778 - DNA, 33 bp, Homo sapien
attattcatgtaaagagatgttgctgatctttt

SEQ ID NO: 977779 - DNA, 33 bp, Homo sapien
aaattctagtgttctaaatcaatgtcagatgac

SEQ ID NO: 977780 - DNA, 33 bp, Homo sapien
aaattctagtgttctatatcaatgtcagatgac

SEQ ID NO: 977781 - DNA, 33 bp, Homo sapien
caaaaagctagaaggacgatactgaacggtcac

SEQ ID NO: 977782 - DNA, 33 bp, Homo sapien
caaaaagctagaaggatgatactgaacggtcac

SEQ ID NO: 977783 - DNA, 33 bp, Homo sapien
ggatttacaatgtaaacgataaagtcagaggat

SEQ ID NO: 977784 - DNA, 33 bp, Homo sapien
ggatttacaatgtaaaggataaagtcagaggat

SEQ ID NO: 977785 - DNA, 33 bp, Homo sapien
ggctgtattttttttcgcatctttgtatctcta

SEQ ID NO: 977786 - DNA, 33 bp, Homo sapien
ggctgtattttttttctcatctttgtatctcta

SEQ ID NO: 977787 - DNA, 33 bp, Homo sapien
tattctttttagcttgaaatcagaaatgtatct

SEQ ID NO: 977788 - DNA, 33 bp, Homo sapien
tattctttttagcttgtaatcagaaatgtatct

SEQ ID NO: 977789 - DNA, 33 bp, Homo sapien
gtcagccttaaaaaaggagcgtctgcaatgtga

SEQ ID NO: 977790 - DNA, 33 bp, Homo sapien
gtcagccttaaaaaagtagcgtctgcaatgtga

SEQ ID NO: 977791 - DNA, 33 bp, Homo sapien
cttgggagcaagaacaatcatttatcttttttc

SEQ ID NO: 977792 - DNA, 33 bp, Homo sapien
cttgggagcaagaacagtcatttatcttttttc

SEQ ID NO: 977793 - DNA, 33 bp, Homo sapien
tctgttgtttttaacaggtacggtagcatcttt

SEQ ID NO: 977794 - DNA, 33 bp, Homo sapien
tctgttgtttttaacatgtacggtagcatcttt

SEQ ID NO: 977795 - DNA, 33 bp, Homo sapien
tcaggcagtggtcttacgttggaagaagctccc

SEQ ID NO: 977796 - DNA, 33 bp, Homo sapien
tcaggcagtggtcttatgttggaagaagctccc

SEQ ID NO: 977797 - DNA, 33 bp, Homo sapien
tacccactattcactgaacactgtgtaaagtcc

SEQ ID NO: 977798 - DNA, 33 bp, Homo sapien
tacccactattcactgtacactgtgtaaagtcc

SEQ ID NO: 977799 - DNA, 33 bp, Homo sapien
tgtttgagaagttagactcacacgcttcccaaa

SEQ ID NO: 977800 - DNA, 33 bp, Homo sapien
tgtttgagaagttagattcacacgcttcccaaa

SEQ ID NO: 977801 - DNA, 33 bp, Homo sapien
ccaaactggctttcagcatctagttgtgacagt

SEQ ID NO: 977802 - DNA, 33 bp, Homo sapien
ccaaactggctttcaggatctagttgtgacagt

SEQ ID NO: 977803 - DNA, 33 bp, Homo sapien
ggagactgattcaccaatcattaaaataagagc

SEQ ID NO: 977804 - DNA, 33 bp, Homo sapien
ggagactgattcaccagtcattaaaataagagc

SEQ ID NO: 977805 - DNA, 33 bp, Homo sapien
tcaatcttgccaaaaacctaccttcaagaactt

SEQ ID NO: 977806 - DNA, 33 bp, Homo sapien
tcaatcttgccaaaaatctaccttcaagaactt

SEQ ID NO: 977807 - DNA, 33 bp, Homo sapien
tcatgtaattagttcaagcaccaattgttctaa

SEQ ID NO: 977808 - DNA, 33 bp, Homo sapien
tcatgtaattagttcaggcaccaattgttctaa

SEQ ID NO: 977809 - DNA, 33 bp, Homo sapien
gcaaattaaagttccacagaaatcatgactgct

SEQ ID NO: 977810 - DNA, 33 bp, Homo sapien
gcaaattaaagttccatagaaatcatgactgct

SEQ ID NO: 977811 - DNA, 33 bp, Homo sapien
agatgttagcaaaaaaattgagatattctcctt

SEQ ID NO: 977812 - DNA, 33 bp, Homo sapien
agatgttagcaaaaaatttgagatattctcctt

SEQ ID NO: 977813 - DNA, 33 bp, Homo sapien
ttaaggatgccaaccaaataaagaaactccaaa

SEQ ID NO: 977814 - DNA, 33 bp, Homo sapien
ttaaggatgccaaccacataaagaaactccaaa

SEQ ID NO: 977815 - DNA, 33 bp, Homo sapien
taggccaccaagtttacggtaatatgttaatga

SEQ ID NO: 977816 - DNA, 33 bp, Homo sapien
taggccaccaagtttatggtaatatgttaatga

SEQ ID NO: 977817 - DNA, 33 bp, Homo sapien
aaataaataaaataaaatcagccctttctgtct

SEQ ID NO: 977818 - DNA, 33 bp, Homo sapien
aaataaataaaataaagtcagccctttctgtct

SEQ ID NO: 977819 - DNA, 33 bp, Homo sapien
tccagtgatggagaacaaccagaaggcaagcaa

SEQ ID NO: 977820 - DNA, 33 bp, Homo sapien
tccagtgatggagaaccaccagaaggcaagcaa

SEQ ID NO: 977821 - DNA, 33 bp, Homo sapien
tctttctagtttgaaacggtgaatattaaagat

SEQ ID NO: 977822 - DNA, 33 bp, Homo sapien
tctttctagtttgaaatggtgaatattaaagat

SEQ ID NO: 977823 - DNA, 33 bp, Homo sapien
tttcttcatgaaataactgtgattgaaagtcgt

SEQ ID NO: 977824 - DNA, 33 bp, Homo sapien
tttcttcatgaaataattgtgattgaaagtcgt

SEQ ID NO: 977825 - DNA, 33 bp, Homo sapien
tctctgtccttagaaaaatcacttaaactctga

SEQ ID NO: 977826 - DNA, 33 bp, Homo sapien
tctctgtccttagaaagatcacttaaactctga

SEQ ID NO: 977827 - DNA, 33 bp, Homo sapien
ttaggttattcaaaacaaaagctgaaactggaa

SEQ ID NO: 977828 - DNA, 33 bp, Homo sapien
ttaggttattcaaaaccaaagctgaaactggaa

SEQ ID NO: 977829 - DNA, 33 bp, Homo sapien
ggagcccttgtaatcaatctgaagtgtttgctg

SEQ ID NO: 977830 - DNA, 33 bp, Homo sapien
ggagcccttgtaatcagtctgaagtgtttgctg

SEQ ID NO: 977831 - DNA, 33 bp, Homo sapien
gtatttatttgtaacgaagagcagagatggaaa

SEQ ID NO: 977832 - DNA, 33 bp, Homo sapien
gtatttatttgtaacggagagcagagatggaaa

SEQ ID NO: 977833 - DNA, 33 bp, Homo sapien
tcctagacctgctataagagaatatttgagaat

SEQ ID NO: 977834 - DNA, 33 bp, Homo sapien
tcctagacctgctatatgagaatatttgagaat

SEQ ID NO: 977835 - DNA, 33 bp, Homo sapien
acccttaaaattcataaaactgcctcattcccc

SEQ ID NO: 977836 - DNA, 33 bp, Homo sapien
acccttaaaattcatataactgcctcattcccc

SEQ ID NO: 977837 - DNA, 33 bp, Homo sapien
tgctggtttgtggtccacttctccattgctttt

SEQ ID NO: 977838 - DNA, 33 bp, Homo sapien
tgctggtttgtggtccgcttctccattgctttt

SEQ ID NO: 977839 - DNA, 33 bp, Homo sapien
cattccataagagtagaactagcaaaagccaag

SEQ ID NO: 977840 - DNA, 33 bp, Homo sapien
cattccataagagtaggactagcaaaagccaag

SEQ ID NO: 977841 - DNA, 33 bp, Homo sapien
acctggaccagttacaatgcaaacatctcagtt

SEQ ID NO: 977842 - DNA, 33 bp, Homo sapien
acctggaccagttacagtgcaaacatctcagtt

SEQ ID NO: 977843 - DNA, 33 bp, Homo sapien
ctggtccaggtatggcaaaatccatcagcctag

SEQ ID NO: 977844 - DNA, 33 bp, Homo sapien
ctggtccaggtatggcgaaatccatcagcctag

SEQ ID NO: 977845 - DNA, 33 bp, Homo sapien
gtcacacttgaagctagtacagcactgggtctc

SEQ ID NO: 977846 - DNA, 33 bp, Homo sapien
gtcacacttgaagctattacagcactgggtctc

SEQ ID NO: 977847 - DNA, 33 bp, Homo sapien
tgtagttttcagtgcacaagtattgcatttatt

SEQ ID NO: 977848 - DNA, 33 bp, Homo sapien
tgtagttttcagtgcataagtattgcatttatt

SEQ ID NO: 977849 - DNA, 33 bp, Homo sapien
aaatcagataaaccaagtactctccaaagattt

SEQ ID NO: 977850 - DNA, 33 bp, Homo sapien
aaatcagataaaccaattactctccaaagattt

SEQ ID NO: 977851 - DNA, 33 bp, Homo sapien
tatgcaagccattgaaataggtaagataaccca

SEQ ID NO: 977852 - DNA, 33 bp, Homo sapien
tatgcaagccattgaagtaggtaagataaccca

SEQ ID NO: 977853 - DNA, 33 bp, Homo sapien
tatctcaccatactccaatctagcccttattag

SEQ ID NO: 977854 - DNA, 33 bp, Homo sapien
tatctcaccatactccgatctagcccttattag

SEQ ID NO: 977855 - DNA, 33 bp, Homo sapien
cttgattccaaaatagaacagccttgaatctat

SEQ ID NO: 977856 - DNA, 33 bp, Homo sapien
cttgattccaaaatagtacagccttgaatctat

SEQ ID NO: 977857 - DNA, 33 bp, Homo sapien
tgggttgaactacttacccctgtgtgaacattg

SEQ ID NO: 977858 - DNA, 33 bp, Homo sapien
tgggttgaactacttatccctgtgtgaacattg

SEQ ID NO: 977859 - DNA, 33 bp, Homo sapien
tagccaataaacccaactgagaggtgcttaagt

SEQ ID NO: 977860 - DNA, 33 bp, Homo sapien
tagccaataaacccaattgagaggtgcttaagt

SEQ ID NO: 977861 - DNA, 33 bp, Homo sapien
ggtgtctatgaggacacaagaaacaaattctta

SEQ ID NO: 977862 - DNA, 33 bp, Homo sapien
ggtgtctatgaggacagaagaaacaaattctta

SEQ ID NO: 977863 - DNA, 33 bp, Homo sapien
tgtgttcttggtcccaaatcagggcttagaagc

SEQ ID NO: 977864 - DNA, 33 bp, Homo sapien
tgtgttcttggtcccacatcagggcttagaagc

SEQ ID NO: 977865 - DNA, 33 bp, Homo sapien
tgcccttatcatatgcaatttgaaacccttcgt

SEQ ID NO: 977866 - DNA, 33 bp, Homo sapien
tgcccttatcatatgccatttgaaacccttcgt

SEQ ID NO: 977867 - DNA, 33 bp, Homo sapien
gtatgccggttaaaacggaatcacacaaaaaag

SEQ ID NO: 977868 - DNA, 33 bp, Homo sapien
gtatgccggttaaaactgaatcacacaaaaaag

SEQ ID NO: 977869 - DNA, 33 bp, Homo sapien
tatgccatgtgccactaactgtttcagcataat

SEQ ID NO: 977870 - DNA, 33 bp, Homo sapien
tatgccatgtgccactgactgtttcagcataat

SEQ ID NO: 977871 - DNA, 33 bp, Homo sapien
gacatttaagacataactatcctttcattggat

SEQ ID NO: 977872 - DNA, 33 bp, Homo sapien
gacatttaagacataagtatcctttcattggat

SEQ ID NO: 977873 - DNA, 33 bp, Homo sapien
tacagacatgtagaaaataaaacagacagtttg

SEQ ID NO: 977874 - DNA, 33 bp, Homo sapien
tacagacatgtagaaagtaaaacagacagtttg

SEQ ID NO: 977875 - DNA, 33 bp, Homo sapien
atagctaggtttgacaactcggacttaaacaca

SEQ ID NO: 977876 - DNA, 33 bp, Homo sapien
atagctaggtttgacagctcggacttaaacaca

SEQ ID NO: 977877 - DNA, 33 bp, Homo sapien
ttcaataggatattaactgctgcattgtagggt

SEQ ID NO: 977878 - DNA, 33 bp, Homo sapien
ttcaataggatattaattgctgcattgtagggt

SEQ ID NO: 977879 - DNA, 33 bp, Homo sapien
tttaagaatttactaccgggtattgaaaaaatg

SEQ ID NO: 977880 - DNA, 33 bp, Homo sapien
tttaagaatttactactgggtattgaaaaaatg

SEQ ID NO: 977881 - DNA, 33 bp, Homo sapien
tctcaatgagagataccgcaattaaattgctat

SEQ ID NO: 977882 - DNA, 33 bp, Homo sapien
tctcaatgagagatactgcaattaaattgctat

SEQ ID NO: 977883 - DNA, 33 bp, Homo sapien
cagcagccctctttgcaagccacatagtccaga

SEQ ID NO: 977884 - DNA, 33 bp, Homo sapien
cagcagccctctttgcgagccacatagtccaga

SEQ ID NO: 977885 - DNA, 33 bp, Homo sapien
ctgcaccacacaattccagagctaactgtggcg

SEQ ID NO: 977886 - DNA, 33 bp, Homo sapien
ctgcaccacacaattctagagctaactgtggcg

SEQ ID NO: 977887 - DNA, 33 bp, Homo sapien
ggctgcttcttggactcaactgctttcaggaat

SEQ ID NO: 977888 - DNA, 33 bp, Homo sapien
ggctgcttcttggactgaactgctttcaggaat

SEQ ID NO: 977889 - DNA, 33 bp, Homo sapien
tatgatacatccaaaaaatatgacaaacattag

SEQ ID NO: 977890 - DNA, 33 bp, Homo sapien
tatgatacatccaaaacatatgacaaacattag

SEQ ID NO: 977891 - DNA, 33 bp, Homo sapien
gggagcataatttcatcacccgagtggcaggga

SEQ ID NO: 977892 - DNA, 33 bp, Homo sapien
gggagcataatttcattacccgagtggcaggga

SEQ ID NO: 977893 - DNA, 33 bp, Homo sapien
ctgttaggcttttgtaggtcaagtatgatgaat

SEQ ID NO: 977894 - DNA, 33 bp, Homo sapien
ctgttaggcttttgtatgtcaagtatgatgaat

SEQ ID NO: 977895 - DNA, 33 bp, Homo sapien
tctaataatcagagccaagaaaaaaattgaaga

SEQ ID NO: 977896 - DNA, 33 bp, Homo sapien
tctaataatcagagcccagaaaaaaattgaaga

SEQ ID NO: 977897 - DNA, 33 bp, Homo sapien
caattgcaattgtaacaagagcccccaaaaggg

SEQ ID NO: 977898 - DNA, 33 bp, Homo sapien
caattgcaattgtaactagagcccccaaaaggg

SEQ ID NO: 977899 - DNA, 33 bp, Homo sapien
tcctcaatgctccaacgtggtcttctcatgtca

SEQ ID NO: 977900 - DNA, 33 bp, Homo sapien
tcctcaatgctccaacttggtcttctcatgtca

SEQ ID NO: 977901 - DNA, 33 bp, Homo sapien
acttttgttcttgatcgatttcatcacattttt

SEQ ID NO: 977902 - DNA, 33 bp, Homo sapien
acttttgttcttgatctatttcatcacattttt

SEQ ID NO: 977903 - DNA, 33 bp, Homo sapien
atgtccattctctcctcaaaacttagaagatgt

SEQ ID NO: 977904 - DNA, 33 bp, Homo sapien
atgtccattctctccttaaaacttagaagatgt

SEQ ID NO: 977905 - DNA, 33 bp, Homo sapien
aattgggagagttctcaataccaaaataaggag

SEQ ID NO: 977906 - DNA, 33 bp, Homo sapien
aattgggagagttctcgataccaaaataaggag

SEQ ID NO: 977907 - DNA, 33 bp, Homo sapien
atagaagataacttcccaaagctgatgaaggat

SEQ ID NO: 977908 - DNA, 33 bp, Homo sapien
atagaagataacttcctaaagctgatgaaggat

SEQ ID NO: 977909 - DNA, 33 bp, Homo sapien
tctttttctctactagaccacttacaacaacta

SEQ ID NO: 977910 - DNA, 33 bp, Homo sapien
tctttttctctactagtccacttacaacaacta

SEQ ID NO: 977911 - DNA, 33 bp, Homo sapien
attctgtttttttcaaataaatgcacagagttg

SEQ ID NO: 977912 - DNA, 33 bp, Homo sapien
attctgtttttttcaagtaaatgcacagagttg

SEQ ID NO: 977913 - DNA, 33 bp, Homo sapien
ccccttcacttggaacacattctctttcctgct

SEQ ID NO: 977914 - DNA, 33 bp, Homo sapien
ccccttcacttggaactcattctctttcctgct

SEQ ID NO: 977915 - DNA, 33 bp, Homo sapien; identical to SEQ ID NO: 977913

SEQ ID NO: 977916 - DNA, 33 bp, Homo sapien; identical to SEQ ID NO: 977914

SEQ ID NO: 977917 - DNA, 33 bp, Homo sapien
gctttgtcttgttataagtaggtagcattttcc

SEQ ID NO: 977918 - DNA, 33 bp, Homo sapien
gctttgtcttgttataggtaggtagcattttcc

SEQ ID NO: 977919 - DNA, 33 bp, Homo sapien
tcaaaacaaccaaaaacgttttcatggtcatct

SEQ ID NO: 977920 - DNA, 33 bp, Homo sapien
tcaaaacaaccaaaaaggttttcatggtcatct

SEQ ID NO: 977921 - DNA, 33 bp, Homo sapien
tatgtggggaaatatgaatatcaacagttctag

SEQ ID NO: 977922 - DNA, 33 bp, Homo sapien
tatgtggggaaatatgcatatcaacagttctag

SEQ ID NO: 977923 - DNA, 33 bp, Homo sapien
attctcaaaaaaattaaaggcataactgataca

SEQ ID NO: 977924 - DNA, 33 bp, Homo sapien
attctcaaaaaaattacaggcataactgataca

SEQ ID NO: 977925 - DNA, 33 bp, Homo sapien
acctacctaaactgataaaggacagctatgaaa

SEQ ID NO: 977926 - DNA, 33 bp, Homo sapien
acctacctaaactgatcaaggacagctatgaaa

SEQ ID NO: 977927 - DNA, 33 bp, Homo sapien
ttccatgatccttccactatgcagtgttttctt

SEQ ID NO: 977928 - DNA, 33 bp, Homo sapien
ttccatgatccttccattatgcagtgttttctt

SEQ ID NO: 977929 - DNA, 33 bp, Homo sapien
aatcaataaaaactaacctggaactgatacagg

SEQ ID NO: 977930 - DNA, 33 bp, Homo sapien
aatcaataaaaactaagctggaactgatacagg

SEQ ID NO: 977931 - DNA, 33 bp, Homo sapien
ctagtatcctgctctgaaacattttgccattct

SEQ ID NO: 977932 - DNA, 33 bp, Homo sapien
ctagtatcctgctctggaacattttgccattct

SEQ ID NO: 977933 - DNA, 33 bp, Homo sapien
ctgtgcttgattataacggaaaagaccaaatga

SEQ ID NO: 977934 - DNA, 33 bp, Homo sapien
ctgtgcttgattataatggaaaagaccaaatga

SEQ ID NO: 977935 - DNA, 33 bp, Homo sapien
aaagagctagcctgaaaccactttaaattcttc

SEQ ID NO: 977936 - DNA, 33 bp, Homo sapien
aaagagctagcctgaagccactttaaattcttc

SEQ ID NO: 977937 - DNA, 33 bp, Homo sapien
ccatcgctgcttctgaaaatttccaagcaggag

SEQ ID NO: 977938 - DNA, 33 bp, Homo sapien
ccatcgctgcttctgagaatttccaagcaggag

SEQ ID NO: 977939 - DNA, 33 bp, Homo sapien
aacacgttttaatacacggagatagttaacctg

SEQ ID NO: 977940 - DNA, 33 bp, Homo sapien
aacacgttttaatacagggagatagttaacctg

SEQ ID NO: 977941 - DNA, 33 bp, Homo sapien
cgtgcactgcattcaaagtgattaaaatattca

SEQ ID NO: 977942 - DNA, 33 bp, Homo sapien
cgtgcactgcattcaaggtgattaaaatattca

SEQ ID NO: 977943 - DNA, 33 bp, Homo sapien
caaataaaagtctttcacttcatagaccaactg

SEQ ID NO: 977944 - DNA, 33 bp, Homo sapien
caaataaaagtctttcgcttcatagaccaactg

SEQ ID NO: 977945 - DNA, 33 bp, Homo sapien
ggttgatgtagggaaaataaaagatgccactct

SEQ ID NO: 977946 - DNA, 33 bp, Homo sapien
ggttgatgtagggaaagtaaaagatgccactct

SEQ ID NO: 977947 - DNA, 33 bp, Homo sapien
ggaaactctccacgtccacagtcattttatact

SEQ ID NO: 977948 - DNA, 33 bp, Homo sapien
ggaaactctccacgtctacagtcattttatact

SEQ ID NO: 977949 - DNA, 33 bp, Homo sapien
gtctgtatgaaaagaacagaactacatgatcac

SEQ ID NO: 977950 - DNA, 33 bp, Homo sapien
gtctgtatgaaaagaagagaactacatgatcac

SEQ ID NO: 977951 - DNA, 33 bp, Homo sapien
gaagctaggacaagggccattagcaataacttc

SEQ ID NO: 977952 - DNA, 33 bp, Homo sapien
gaagctaggacaagggtcattagcaataacttc

SEQ ID NO: 977953 - DNA, 33 bp, Homo sapien
ctgcatcaaggccatcaagaatgtgcaccactc

SEQ ID NO: 977954 - DNA, 33 bp, Homo sapien
ctgcatcaaggccatccagaatgtgcaccactc

SEQ ID NO: 977955 - DNA, 33 bp, Homo sapien
aagaaaaagctaaatacccaaagctgtacattg

SEQ ID NO: 977956 - DNA, 33 bp, Homo sapien
aagaaaaagctaaatatccaaagctgtacattg

SEQ ID NO: 977957 - DNA, 33 bp, Homo sapien
tacagttctgctttacaagttcctggagtcata

SEQ ID NO: 977958 - DNA, 33 bp, Homo sapien
tacagttctgctttacgagttcctggagtcata

SEQ ID NO: 977959 - DNA, 33 bp, Homo sapien
ggatgttaataggagcagatttttttccccata

SEQ ID NO: 977960 - DNA, 33 bp, Homo sapien
ggatgttaataggagccgatttttttccccata

SEQ ID NO: 977961 - DNA, 33 bp, Homo sapien
caaggaatttggcaaacgctattaatcagggct

SEQ ID NO: 977962 - DNA, 33 bp, Homo sapien
caaggaatttggcaaatgctattaatcagggct

SEQ ID NO: 977963 - DNA, 33 bp, Homo sapien
agtccttccctttataacattgctgctcttcac

SEQ ID NO: 977964 - DNA, 33 bp, Homo sapien
agtccttccctttatatcattgctgctcttcac

SEQ ID NO: 977965 - DNA, 33 bp, Homo sapien
aaactgctgtctaccaatgattctcaggcacta

SEQ ID NO: 977966 - DNA, 33 bp, Homo sapien
aaactgctgtctaccagtgattctcaggcacta

SEQ ID NO: 977967 - DNA, 33 bp, Homo sapien
atagatgcaaataacccgcttgacagataacta

SEQ ID NO: 977968 - DNA, 33 bp, Homo sapien
atagatgcaaataacctgcttgacagataacta

SEQ ID NO: 977969 - DNA, 33 bp, Homo sapien
tacatgaggaattatgacagcctggcttgaagg

SEQ ID NO: 977970 - DNA, 33 bp, Homo sapien
tacatgaggaattatgtcagcctggcttgaagg

SEQ ID NO: 977971 - DNA, 33 bp, Homo sapien
agaaactgccactgaaccatcactttttttgtt

SEQ ID NO: 977972 - DNA, 33 bp, Homo sapien
agaaactgccactgaatcatcactttttttgtt

SEQ ID NO: 977973 - DNA, 33 bp, Homo sapien
ttaaacaataagggccaatagaaagctctaggt

SEQ ID NO: 977974 - DNA, 33 bp, Homo sapien
ttaaacaataagggccgatagaaagctctaggt

SEQ ID NO: 977975 - DNA, 33 bp, Homo sapien
atagaaagctctaggtcacaatttttcaagttt

SEQ ID NO: 977976 - DNA, 33 bp, Homo sapien
atagaaagctctaggttacaatttttcaagttt

SEQ ID NO: 977977 - DNA, 33 bp, Homo sapien
ctgagttgctgcctaacgtaggcactgtgcaat

SEQ ID NO: 977978 - DNA, 33 bp, Homo sapien
ctgagttgctgcctaatgtaggcactgtgcaat

SEQ ID NO: 977979 - DNA, 33 bp, Homo sapien
ggattactagtgataacgaataagttaaaatgt

SEQ ID NO: 977980 - DNA, 33 bp, Homo sapien
ggattactagtgataatgaataagttaaaatgt

SEQ ID NO: 977981 - DNA, 33 bp, Homo sapien
tctgtaagaatggtgtcaattattttccttctg

SEQ ID NO: 977982 - DNA, 33 bp, Homo sapien
tctgtaagaatggtgtgaattattttccttctg

SEQ ID NO: 977983 - DNA, 33 bp, Homo sapien
cttccttttgtgaattaaaaacttacagctctt

SEQ ID NO: 977984 - DNA, 33 bp, Homo sapien
cttccttttgtgaattgaaaacttacagctctt

SEQ ID NO: 977985 - DNA, 33 bp, Homo sapien
aaaatgtgaggacaaaggaacacagactgggtc

SEQ ID NO: 977986 - DNA, 33 bp, Homo sapien
aaaatgtgaggacaaatgaacacagactgggtc

SEQ ID NO: 977987 - DNA, 33 bp, Homo sapien
catctatgttacaaatcatgctgcaaaaagtaa

SEQ ID NO: 977988 - DNA, 33 bp, Homo sapien
catctatgttacaaattatgctgcaaaaagtaa

SEQ ID NO: 977989 - DNA, 33 bp, Homo sapien
ttacttcacttgaggaaaaaagggagtatggca

SEQ ID NO: 977990 - DNA, 33 bp, Homo sapien
ttacttcacttgaggagaaaagggagtatggca

SEQ ID NO: 977991 - DNA, 33 bp, Homo sapien
gaacagtaacagactaagtcattcacttgtcag

SEQ ID NO: 977992 - DNA, 33 bp, Homo sapien
gaacagtaacagactacgtcattcacttgtcag

SEQ ID NO: 977993 - DNA, 33 bp, Homo sapien
cacacccaggaaaacactgtgatagcaaatatt

SEQ ID NO: 977994 - DNA, 33 bp, Homo sapien
cacacccaggaaaacattgtgatagcaaatatt

SEQ ID NO: 977995 - DNA, 33 bp, Homo sapien
gctagtaggatgccacaaataaagtgggtcatg

SEQ ID NO: 977996 - DNA, 33 bp, Homo sapien
gctagtaggatgccaccaataaagtgggtcatg

SEQ ID NO: 977997 - DNA, 33 bp, Homo sapien
tcaattcagtacagcaagaaatagtctaacaat

SEQ ID NO: 977998 - DNA, 33 bp, Homo sapien
tcaattcagtacagcaggaaatagtctaacaat

SEQ ID NO: 977999 - DNA, 33 bp, Homo sapien
ttaccattcggactaccgattgatcacatcttc

SEQ ID NO: 978000 - DNA, 33 bp, Homo sapien
ttaccattcggactactgattgatcacatcttc

SEQ ID NO: 978001 - DNA, 33 bp, Homo sapien
ggcttaaataaattgcccagccatgctccagtt

SEQ ID NO: 978002 - DNA, 33 bp, Homo sapien
ggcttaaataaattgcgcagccatgctccagtt

SEQ ID NO: 978003 - DNA, 33 bp, Homo sapien
aagtggaactatcatacgttgccaatgccaatg

SEQ ID NO: 978004 - DNA, 33 bp, Homo sapien
aagtggaactatcatatgttgccaatgccaatg

SEQ ID NO: 978005 - DNA, 33 bp, Homo sapien
aaatttatagatttaccgggcactaactaaagt

SEQ ID NO: 978006 - DNA, 33 bp, Homo sapien
aaatttatagatttactgggcactaactaaagt

SEQ ID NO: 978007 - DNA, 33 bp, Homo sapien
ggagcatcaatgtgtcacttcccaagaaagata

SEQ ID NO: 978008 - DNA, 33 bp, Homo sapien
ggagcatcaatgtgtcgcttcccaagaaagata

SEQ ID NO: 978009 - DNA, 33 bp, Homo sapien
agtccctggtgaagcacgataatttccctcatc

SEQ ID NO: 978010 - DNA, 33 bp, Homo sapien
agtccctggtgaagcatgataatttccctcatc

SEQ ID NO: 978011 - DNA, 33 bp, Homo sapien
ggccttagagtcaaagcatccaagttcaagtcc

SEQ ID NO: 978012 - DNA, 33 bp, Homo sapien
ggccttagagtcaaagtatccaagttcaagtcc

SEQ ID NO: 978013 - DNA, 33 bp, Homo sapien
ttctccatttgtagtaaaattttatgcttgctt

SEQ ID NO: 978014 - DNA, 33 bp, Homo sapien
ttctccatttgtagtataattttatgcttgctt

SEQ ID NO: 978015 - DNA, 33 bp, Homo sapien
gatccccaaagcaggccgagaccagaagaggga

SEQ ID NO: 978016 - DNA, 33 bp, Homo sapien
gatccccaaagcaggctgagaccagaagaggga

SEQ ID NO: 978017 - DNA, 33 bp, Homo sapien
atgcttaagcattcacacgaatcacttctttac

SEQ ID NO: 978018 - DNA, 33 bp, Homo sapien
atgcttaagcattcacgcgaatcacttctttac

SEQ ID NO: 978019 - DNA, 33 bp, Homo sapien
tgcggaggaatattgacaaaagattgaagaggt

SEQ ID NO: 978020 - DNA, 33 bp, Homo sapien
tgcggaggaatattgataaaagattgaagaggt

SEQ ID NO: 978021 - DNA, 33 bp, Homo sapien
ggcctcacacttctgtcaaattcccaggacatt

SEQ ID NO: 978022 - DNA, 33 bp, Homo sapien
ggcctcacacttctgttaaattcccaggacatt

SEQ ID NO: 978023 - DNA, 33 bp, Homo sapien
ttcattgaaatcatagacatagcccagcataaa

SEQ ID NO: 978024 - DNA, 33 bp, Homo sapien
ttcattgaaatcatagccatagcccagcataaa

SEQ ID NO: 978025 - DNA, 33 bp, Homo sapien
tatcataacaaggccaatggaaaactatgtaag

SEQ ID NO: 978026 - DNA, 33 bp, Homo sapien
tatcataacaaggccagtggaaaactatgtaag

SEQ ID NO: 978027 - DNA, 33 bp, Homo sapien
aggactgcacagaccaaccctaggaagtgaagg

SEQ ID NO: 978028 - DNA, 33 bp, Homo sapien
aggactgcacagaccagccctaggaagtgaagg

SEQ ID NO: 978029 - DNA, 33 bp, Homo sapien
tgctgcccgcatgagaaactcaaatctggttgg

SEQ ID NO: 978030 - DNA, 33 bp, Homo sapien
tgctgcccgcatgagagactcaaatctggttgg

SEQ ID NO: 978031 - DNA, 33 bp, Homo sapien
gctgccataacagtatcacaaattgggtgactt

SEQ ID NO: 978032 - DNA, 33 bp, Homo sapien
gctgccataacagtattacaaattgggtgactt

SEQ ID NO: 978033 - DNA, 33 bp, Homo sapien
catggataaattcctcaacagataaactctccc

SEQ ID NO: 978034 - DNA, 33 bp, Homo sapien
catggataaattcctcgacagataaactctccc

SEQ ID NO: 978035 - DNA, 33 bp, Homo sapien
agcatgatttataatacgttgcttatataccca

SEQ ID NO: 978036 - DNA, 33 bp, Homo sapien
agcatgatttataatatgttgcttatataccca

SEQ ID NO: 978037 - DNA, 33 bp, Homo sapien
cacattatgtaatggcgctctttatctgtgtgg

SEQ ID NO: 978038 - DNA, 33 bp, Homo sapien
cacattatgtaatggctctctttatctgtgtgg

SEQ ID NO: 978039 - DNA, 33 bp, Homo sapien
agttaatatttgcatacggctagagataggatt

SEQ ID NO: 978040 - DNA, 33 bp, Homo sapien
agttaatatttgcatatggctagagataggatt

SEQ ID NO: 978041 - DNA, 33 bp, Homo sapien
aaagaccatactgccaacttcaaaagtaatggc

SEQ ID NO: 978042 - DNA, 33 bp, Homo sapien
aaagaccatactgccagcttcaaaagtaatggc

SEQ ID NO: 978043 - DNA, 33 bp, Homo sapien
gtttagtagccctatacctgtttccatgttggc

SEQ ID NO: 978044 - DNA, 33 bp, Homo sapien
gtttagtagccctatatctgtttccatgttggc

SEQ ID NO: 978045 - DNA, 33 bp, Homo sapien
acaaaggtgagaataaactcagtgacccacagg

SEQ ID NO: 978046 - DNA, 33 bp, Homo sapien
acaaaggtgagaataagctcagtgacccacagg

SEQ ID NO: 978047 - DNA, 33 bp, Homo sapien
tgaggtcgggttctgacgttgtatctttgtcaa

SEQ ID NO: 978048 - DNA, 33 bp, Homo sapien
tgaggtcgggttctgatgttgtatctttgtcaa

SEQ ID NO: 978049 - DNA, 33 bp, Homo sapien
ccagtcatacttctgcactcaacttcctccttc

SEQ ID NO: 978050 - DNA, 33 bp, Homo sapien
ccagtcatacttctgcgctcaacttcctccttc

SEQ ID NO: 978051 - DNA, 33 bp, Homo sapien
ggcttaaaatattcacccaacgatgctctaaac

SEQ ID NO: 978052 - DNA, 33 bp, Homo sapien
ggcttaaaatattcactcaacgatgctctaaac

SEQ ID NO: 978053 - DNA, 33 bp, Homo sapien
tattatagcatgattacgtaactgtctacctgt

SEQ ID NO: 978054 - DNA, 33 bp, Homo sapien
tattatagcatgattatgtaactgtctacctgt

SEQ ID NO: 978055 - DNA, 33 bp, Homo sapien
atttgtatataacctacgtattatgcaattatt

SEQ ID NO: 978056 - DNA, 33 bp, Homo sapien
atttgtatataacctatgtattatgcaattatt

SEQ ID NO: 978057 - DNA, 33 bp, Homo sapien
ctaggatttgaaaccacatgcaactacacagcc

SEQ ID NO: 978058 - DNA, 33 bp, Homo sapien
ctaggatttgaaaccagatgcaactacacagcc

SEQ ID NO: 978059 - DNA, 33 bp, Homo sapien
aattagaaggaaaacaggtgcctaaaagattta

SEQ ID NO: 978060 - DNA, 33 bp, Homo sapien
aattagaaggaaaacatgtgcctaaaagattta

SEQ ID NO: 978061 - DNA, 33 bp, Homo sapien
tctgttttcatgactaccttgttggttttattg

SEQ ID NO: 978062 - DNA, 33 bp, Homo sapien
tctgttttcatgactagcttgttggttttattg

SEQ ID NO: 978063 - DNA, 33 bp, Homo sapien
atgagaatactgcaaactatggtaacttgagtt

SEQ ID NO: 978064 - DNA, 33 bp, Homo sapien
atgagaatactgcaaattatggtaacttgagtt

SEQ ID NO: 978065 - DNA, 33 bp, Homo sapien
gaactgagatctaaaaaatattgccacagttat

SEQ ID NO: 978066 - DNA, 33 bp, Homo sapien
gaactgagatctaaaacatattgccacagttat

SEQ ID NO: 978067 - DNA, 33 bp, Homo sapien
cagaggatagacagtacgtgttgcttttggtca

SEQ ID NO: 978068 - DNA, 33 bp, Homo sapien
cagaggatagacagtatgtgttgcttttggtca

SEQ ID NO: 978069 - DNA, 33 bp, Homo sapien
tttgaacttcgtactacagacaatcgattttat

SEQ ID NO: 978070 - DNA, 33 bp, Homo sapien
tttgaacttcgtactatagacaatcgattttat

SEQ ID NO: 978071 - DNA, 33 bp, Homo sapien
ggtcctaaaaagttaaactccactaatatcaag

SEQ ID NO: 978072 - DNA, 33 bp, Homo sapien
ggtcctaaaaagttaacctccactaatatcaag

SEQ ID NO: 978073 - DNA, 33 bp, Homo sapien
ttgacagaagcctaataataacagctattctcg

SEQ ID NO: 978074 - DNA, 33 bp, Homo sapien
ttgacagaagcctaattataacagctattctcg

SEQ ID NO: 978075 - DNA, 33 bp, Homo sapien
tgcctagtcgagctatcagaagagagccactgt

SEQ ID NO: 978076 - DNA, 33 bp, Homo sapien
tgcctagtcgagctatgagaagagagccactgt

SEQ ID NO: 978077 - DNA, 33 bp, Homo sapien
ttctccacctgcatatcagaagcaaagagtgag

SEQ ID NO: 978078 - DNA, 33 bp, Homo sapien
ttctccacctgcatatgagaagcaaagagtgag

SEQ ID NO: 978079 - DNA, 33 bp, Homo sapien
caatgtccccatttcagaccagtctttcctgat

SEQ ID NO: 978080 - DNA, 33 bp, Homo sapien
caatgtccccatttcataccagtctttcctgat

SEQ ID NO: 978081 - DNA, 33 bp, Homo sapien
atcctaatactttggacaaacagtcggtcaaac

SEQ ID NO: 978082 - DNA, 33 bp, Homo sapien
atcctaatactttggataaacagtcggtcaaac

SEQ ID NO: 978083 - DNA, 33 bp, Homo sapien
gaaggaaacattgacaataccaccaactgaccc

SEQ ID NO: 978084 - DNA, 33 bp, Homo sapien
gaaggaaacattgacagtaccaccaactgaccc

SEQ ID NO: 978085 - DNA, 33 bp, Homo sapien
gtgcatgccatttgtgcagttattgaagttaaa

SEQ ID NO: 978086 - DNA, 33 bp, Homo sapien
gtgcatgccatttgtgtagttattgaagttaaa

SEQ ID NO: 978087 - DNA, 33 bp, Homo sapien
atcagttaaagctttacagttcgtatacatttg

SEQ ID NO: 978088 - DNA, 33 bp, Homo sapien
atcagttaaagctttagagttcgtatacatttg

SEQ ID NO: 978089 - DNA, 33 bp, Homo sapien
tttgtgtgatctttaaatgagtagggctgatgc

SEQ ID NO: 978090 - DNA, 33 bp, Homo sapien
tttgtgtgatctttaagtgagtagggctgatgc

SEQ ID NO: 978091 - DNA, 33 bp, Homo sapien
cttgttacgactatgacagtggcagcagtgtga

SEQ ID NO: 978092 - DNA, 33 bp, Homo sapien
cttgttacgactatgatagtggcagcagtgtga

SEQ ID NO: 978093 - DNA, 33 bp, Homo sapien
catctacttcttcaaaatgattctgtctcttgg

SEQ ID NO: 978094 - DNA, 33 bp, Homo sapien
catctacttcttcaaagtgattctgtctcttgg

SEQ ID NO: 978095 - DNA, 33 bp, Homo sapien
gtgaatgaggttaataagggaacactttgtaaa

SEQ ID NO: 978096 - DNA, 33 bp, Homo sapien
gtgaatgaggttaatacgggaacactttgtaaa

SEQ ID NO: 978097 - DNA, 33 bp, Homo sapien
atgattctgctaaaaacgtggttgaaaactaaa

SEQ ID NO: 978098 - DNA, 33 bp, Homo sapien
atgattctgctaaaaaggtggttgaaaactaaa

SEQ ID NO: 978099 - DNA, 33 bp, Homo sapien
tcagcactgtggcaagacttctgtgttcccaag

SEQ ID NO: 978100 - DNA, 33 bp, Homo sapien
tcagcactgtggcaaggcttctgtgttcccaag

SEQ ID NO: 978101 - DNA, 33 bp, Homo sapien
gagatacactgtggaacgattgcactgtcttgt

SEQ ID NO: 978102 - DNA, 33 bp, Homo sapien
gagatacactgtggaatgattgcactgtcttgt

SEQ ID NO: 978103 - DNA, 33 bp, Homo sapien
tgtaggggtagcattacatgcatggtgatatta

SEQ ID NO: 978104 - DNA, 33 bp, Homo sapien
tgtaggggtagcattatatgcatggtgatatta

SEQ ID NO: 978105 - DNA, 33 bp, Homo sapien
gattacaacagaaatcaaccaatctaaaaatca

SEQ ID NO: 978106 - DNA, 33 bp, Homo sapien
gattacaacagaaatcgaccaatctaaaaatca

SEQ ID NO: 978107 - DNA, 33 bp, Homo sapien
gaagttgatgaaagagaaaaacactgccacata

SEQ ID NO: 978108 - DNA, 33 bp, Homo sapien
gaagttgatgaaagaggaaaacactgccacata

SEQ ID NO: 978109 - DNA, 33 bp, Homo sapien
gtttatgcatgggcaacggtcttgttgagttga

SEQ ID NO: 978110 - DNA, 33 bp, Homo sapien
gtttatgcatgggcaatggtcttgttgagttga

SEQ ID NO: 978111 - DNA, 33 bp, Homo sapien
tgtaaaaactttgaaaagtatagcaagtacaaa

SEQ ID NO: 978112 - DNA, 33 bp, Homo sapien
tgtaaaaactttgaaaggtatagcaagtacaaa

SEQ ID NO: 978113 - DNA, 33 bp, Homo sapien
aggccacacaccagcagaattaaaaactctggg

SEQ ID NO: 978114 - DNA, 33 bp, Homo sapien
aggccacacaccagcataattaaaaactctggg

SEQ ID NO: 978115 - DNA, 33 bp, Homo sapien
ttcttcctataatcaaatgggagtccctggaat

SEQ ID NO: 978116 - DNA, 33 bp, Homo sapien
ttcttcctataatcaagtgggagtccctggaat

SEQ ID NO: 978117 - DNA, 33 bp, Homo sapien
ctgaaagactgcagccaaagactgtgtttaata

SEQ ID NO: 978118 - DNA, 33 bp, Homo sapien
ctgaaagactgcagccgaagactgtgtttaata

SEQ ID NO: 978119 - DNA, 33 bp, Homo sapien
cagagtctgtgggctacgtatttaagtgtcttt

SEQ ID NO: 978120 - DNA, 33 bp, Homo sapien
cagagtctgtgggctatgtatttaagtgtcttt

SEQ ID NO: 978121 - DNA, 33 bp, Homo sapien
attctttgtcaacctaccagcctggctgtggaa

SEQ ID NO: 978122 - DNA, 33 bp, Homo sapien
attctttgtcaacctagcagcctggctgtggaa

SEQ ID NO: 978123 - DNA, 33 bp, Homo sapien
tgtaaaatttcaaccacatagctgcaaagtaac

SEQ ID NO: 978124 - DNA, 33 bp, Homo sapien
tgtaaaatttcaaccagatagctgcaaagtaac

SEQ ID NO: 978125 - DNA, 33 bp, Homo sapien
catgtctcctaaagcacagagtctttaaccaag

SEQ ID NO: 978126 - DNA, 33 bp, Homo sapien
catgtctcctaaagcatagagtctttaaccaag

SEQ ID NO: 978127 - DNA, 33 bp, Homo sapien
gggttatttgtgaccacgtgtaaatacaaaaat

SEQ ID NO: 978128 - DNA, 33 bp, Homo sapien
gggttatttgtgaccatgtgtaaatacaaaaat

SEQ ID NO: 978129 - DNA, 33 bp, Homo sapien
gaatttgataatgtcaaatctcagaatacagca

SEQ ID NO: 978130 - DNA, 33 bp, Homo sapien
gaatttgataatgtcagatctcagaatacagca

SEQ ID NO: 978131 - DNA, 33 bp, Homo sapien
atagggctaatttgtaactaaagacattcgtat

SEQ ID NO: 978132 - DNA, 33 bp, Homo sapien
atagggctaatttgtagctaaagacattcgtat

SEQ ID NO: 978133 - DNA, 33 bp, Homo sapien
cttgggtaatggttcagccctttgggaacacta

SEQ ID NO: 978134 - DNA, 33 bp, Homo sapien
cttgggtaatggttcatccctttgggaacacta

SEQ ID NO: 978135 - DNA, 33 bp, Homo sapien
tttcaggtttactttccaatgtccttgactgag

SEQ ID NO: 978136 - DNA, 33 bp, Homo sapien
tttcaggtttactttcgaatgtccttgactgag

SEQ ID NO: 978137 - DNA, 33 bp, Homo sapien
cttaaaagaactgctcaagtgctttatatgact

SEQ ID NO: 978138 - DNA, 33 bp, Homo sapien
cttaaaagaactgctcgagtgctttatatgact

SEQ ID NO: 978139 - DNA, 33 bp, Homo sapien
aggctacctttttcagacctgcagaaattgata

SEQ ID NO: 978140 - DNA, 33 bp, Homo sapien
aggctacctttttcaggcctgcagaaattgata

SEQ ID NO: 978141 - DNA, 33 bp, Homo sapien
acagcttcttgagtgaactcgagcagataattt

SEQ ID NO: 978142 - DNA, 33 bp, Homo sapien
acagcttcttgagtgacctcgagcagataattt

SEQ ID NO: 978143 - DNA, 33 bp, Homo sapien
aaaatttttaaaaagccaagatacagcaaataa

SEQ ID NO: 978144 - DNA, 33 bp, Homo sapien
aaaatttttaaaaagctaagatacagcaaataa

SEQ ID NO: 978145 - DNA, 33 bp, Homo sapien
acttcagcagttaggagaggtacatttcagggg

SEQ ID NO: 978146 - DNA, 33 bp, Homo sapien
acttcagcagttaggataggtacatttcagggg

SEQ ID NO: 978147 - DNA, 33 bp, Homo sapien
tgactttccaaaattcatctcaaattaaggtgt

SEQ ID NO: 978148 - DNA, 33 bp, Homo sapien
tgactttccaaaattcgtctcaaattaaggtgt

SEQ ID NO: 978149 - DNA, 33 bp, Homo sapien
ccagccaaactaagccgcataagcaaaggtgaa

SEQ ID NO: 978150 - DNA, 33 bp, Homo sapien
ccagccaaactaagcctcataagcaaaggtgaa

SEQ ID NO: 978151 - DNA, 33 bp, Homo sapien
aatagaaaatccaaagaaaatgaataagttcct

SEQ ID NO: 978152 - DNA, 33 bp, Homo sapien
aatagaaaatccaaaggaaatgaataagttcct

SEQ ID NO: 978153 - DNA, 33 bp, Homo sapien
ttgtaatgtctagaagcagttgtcttatgaatc

SEQ ID NO: 978154 - DNA, 33 bp, Homo sapien
ttgtaatgtctagaagtagttgtcttatgaatc

SEQ ID NO: 978155 - DNA, 33 bp, Homo sapien
aggcagctgggtcaaaaaacagaacctttatct

SEQ ID NO: 978156 - DNA, 33 bp, Homo sapien
aggcagctgggtcaaagaacagaacctttatct

SEQ ID NO: 978157 - DNA, 33 bp, Homo sapien
tacaattgtgcaatacagcaatccagatcaggc

SEQ ID NO: 978158 - DNA, 33 bp, Homo sapien
tacaattgtgcaatacggcaatccagatcaggc

SEQ ID NO: 978159 - DNA, 33 bp, Homo sapien
ttacaagcattgatccaatttgtaaaatcctaa

SEQ ID NO: 978160 - DNA, 33 bp, Homo sapien
ttacaagcattgatcccatttgtaaaatcctaa

SEQ ID NO: 978161 - DNA, 33 bp, Homo sapien
attaggtctacaaggacgaaattgacactcctt

SEQ ID NO: 978162 - DNA, 33 bp, Homo sapien
attaggtctacaaggatgaaattgacactcctt

SEQ ID NO: 978163 - DNA, 33 bp, Homo sapien
aaaatgtggagttccaagttacatgcttttaga

SEQ ID NO: 978164 - DNA, 33 bp, Homo sapien
aaaatgtggagttccaggttacatgcttttaga

SEQ ID NO: 978165 - DNA, 33 bp, Homo sapien
agaatctcaatctccaagcatgaatcctgacaa

SEQ ID NO: 978166 - DNA, 33 bp, Homo sapien
agaatctcaatctccacgcatgaatcctgacaa

SEQ ID NO: 978167 - DNA, 33 bp, Homo sapien
ctacttgtgtaatttgaatctctgagcataaaa

SEQ ID NO: 978168 - DNA, 33 bp, Homo sapien
ctacttgtgtaatttgtatctctgagcataaaa

SEQ ID NO: 978169 - DNA, 33 bp, Homo sapien
gagtgagaaaaccagaatagtacaggaatttga

SEQ ID NO: 978170 - DNA, 33 bp, Homo sapien
gagtgagaaaaccagagtagtacaggaatttga

SEQ ID NO: 978171 - DNA, 33 bp, Homo sapien
gcccttgattaccatacgcttatcaggccatag

SEQ ID NO: 978172 - DNA, 33 bp, Homo sapien
gcccttgattaccatatgcttatcaggccatag

SEQ ID NO: 978173 - DNA, 33 bp, Homo sapien
tgtgcagcaggtaccactcttatttctatttga

SEQ ID NO: 978174 - DNA, 33 bp, Homo sapien
tgtgcagcaggtaccattcttatttctatttga

SEQ ID NO: 978175 - DNA, 33 bp, Homo sapien
tacattaatcaactccactactgtgaaaaggga

SEQ ID NO: 978176 - DNA, 33 bp, Homo sapien
tacattaatcaactccgctactgtgaaaaggga

SEQ ID NO: 978177 - DNA, 33 bp, Homo sapien
ttccagcctctttcccactttagcagtgaagtg

SEQ ID NO: 978178 - DNA, 33 bp, Homo sapien
ttccagcctctttccctctttagcagtgaagtg

SEQ ID NO: 978179 - DNA, 33 bp, Homo sapien
agaatcaagttcattacgttatggtaccagaat

SEQ ID NO: 978180 - DNA, 33 bp, Homo sapien
agaatcaagttcattatgttatggtaccagaat

SEQ ID NO: 978181 - DNA, 33 bp, Homo sapien
ctcttgcattgtgaacccattgaaaattattga

SEQ ID NO: 978182 - DNA, 33 bp, Homo sapien
ctcttgcattgtgaacgcattgaaaattattga

SEQ ID NO: 978183 - DNA, 33 bp, Homo sapien
ctaaataattcatggaaatactcaaccatcaaa

SEQ ID NO: 978184 - DNA, 33 bp, Homo sapien
ctaaataattcatggagatactcaaccatcaaa

SEQ ID NO: 978185 - DNA, 33 bp, Homo sapien
aatgacttttcttcgactcattggacaactgaa

SEQ ID NO: 978186 - DNA, 33 bp, Homo sapien
aatgacttttcttcgattcattggacaactgaa

SEQ ID NO: 978187 - DNA, 33 bp, Homo sapien
atagtgttggagatggaaatagcaggtcgattt

SEQ ID NO: 978188 - DNA, 33 bp, Homo sapien
atagtgttggagatggcaatagcaggtcgattt

SEQ ID NO: 978189 - DNA, 33 bp, Homo sapien
aaggtctttctttttcactctttaacctcagtc

SEQ ID NO: 978190 - DNA, 33 bp, Homo sapien
aaggtctttctttttcgctctttaacctcagtc

SEQ ID NO: 978191 - DNA, 33 bp, Homo sapien
ggaaaaatactgtccacgaagtgagcaccatgt

SEQ ID NO: 978192 - DNA, 33 bp, Homo sapien
ggaaaaatactgtccatgaagtgagcaccatgt

SEQ ID NO: 978193 - DNA, 33 bp, Homo sapien
tgaccacactcagagacgtttccaatgtaaggc

SEQ ID NO: 978194 - DNA, 33 bp, Homo sapien
tgaccacactcagagatgtttccaatgtaaggc

SEQ ID NO: 978195 - DNA, 33 bp, Homo sapien
acaactgactattatacgctcatccgccagaac

SEQ ID NO: 978196 - DNA, 33 bp, Homo sapien
acaactgactattatatgctcatccgccagaac

SEQ ID NO: 978197 - DNA, 33 bp, Homo sapien
atgggttccaagctagcattcatcagtcataat

SEQ ID NO: 978198 - DNA, 33 bp, Homo sapien
atgggttccaagctaggattcatcagtcataat

SEQ ID NO: 978199 - DNA, 33 bp, Homo sapien
ggagggatggattcagaagacatgggttccaag

SEQ ID NO: 978200 - DNA, 33 bp, Homo sapien
ggagggatggattcaggagacatgggttccaag

SEQ ID NO: 978201 - DNA, 33 bp, Homo sapien
aggttttcaggattccctggtatttttaaagtt

SEQ ID NO: 978202 - DNA, 33 bp, Homo sapien
aggttttcaggattccttggtatttttaaagtt

SEQ ID NO: 978203 - DNA, 33 bp, Homo sapien
tgagaaatgatatcccaaagtctaatccaatca

SEQ ID NO: 978204 - DNA, 33 bp, Homo sapien
tgagaaatgatatcccgaagtctaatccaatca

SEQ ID NO: 978205 - DNA, 33 bp, Homo sapien
cacgttccaaataaaaatcatgagtggatttaa

SEQ ID NO: 978206 - DNA, 33 bp, Homo sapien
cacgttccaaataaaattcatgagtggatttaa

SEQ ID NO: 978207 - DNA, 33 bp, Homo sapien
taatttctatcagcaaagttaaaaatgtaatta

SEQ ID NO: 978208 - DNA, 33 bp, Homo sapien
taatttctatcagcaatgttaaaaatgtaatta

SEQ ID NO: 978209 - DNA, 33 bp, Homo sapien
actgaatatatacttacgcagaaaaactagctt

SEQ ID NO: 978210 - DNA, 33 bp, Homo sapien
actgaatatatacttatgcagaaaaactagctt

SEQ ID NO: 978211 - DNA, 33 bp, Homo sapien
agaaaaatcgattgtccccctttgtccatctca

SEQ ID NO: 978212 - DNA, 33 bp, Homo sapien
agaaaaatcgattgtctccctttgtccatctca

SEQ ID NO: 978213 - DNA, 33 bp, Homo sapien
ttcctctgagtatccagcaggttaagtcctatt

SEQ ID NO: 978214 - DNA, 33 bp, Homo sapien
ttcctctgagtatccatcaggttaagtcctatt

SEQ ID NO: 978215 - DNA, 33 bp, Homo sapien
ggcacctacctggcaaccatgtcactggttctt

SEQ ID NO: 978216 - DNA, 33 bp, Homo sapien
ggcacctacctggcaatcatgtcactggttctt

SEQ ID NO: 978217 - DNA, 33 bp, Homo sapien
atatactcctacaacactcttggaagcacaaag

SEQ ID NO: 978218 - DNA, 33 bp, Homo sapien
atatactcctacaacattcttggaagcacaaag

SEQ ID NO: 978219 - DNA, 33 bp, Homo sapien
caaaaacacaggaaaacgaagactcttaaacat

SEQ ID NO: 978220 - DNA, 33 bp, Homo sapien
caaaaacacaggaaaatgaagactcttaaacat

SEQ ID NO: 978221 - DNA, 33 bp, Homo sapien
ataagcaacagctggagcattttcttctcctag

SEQ ID NO: 978222 - DNA, 33 bp, Homo sapien
ataagcaacagctggatcattttcttctcctag

SEQ ID NO: 978223 - DNA, 33 bp, Homo sapien
gaatagcggatttgtgcagtcccggaggcacag

SEQ ID NO: 978224 - DNA, 33 bp, Homo sapien
gaatagcggatttgtgtagtcccggaggcacag

SEQ ID NO: 978225 - DNA, 33 bp, Homo sapien
ttgcggtaagtgctccaactcctgcaccttagg

SEQ ID NO: 978226 - DNA, 33 bp, Homo sapien
ttgcggtaagtgctccgactcctgcaccttagg

SEQ ID NO: 978227 - DNA, 33 bp, Homo sapien
tatggactgtctcactgaatcctcccaaccatc

SEQ ID NO: 978228 - DNA, 33 bp, Homo sapien
tatggactgtctcacttaatcctcccaaccatc

SEQ ID NO: 978229 - DNA, 33 bp, Homo sapien
gccctcattacttttacaggttcccagaactgg

SEQ ID NO: 978230 - DNA, 33 bp, Homo sapien
gccctcattacttttataggttcccagaactgg

SEQ ID NO: 978231 - DNA, 33 bp, Homo sapien
tagttgactgggtggcaattctgtcagacttgc

SEQ ID NO: 978232 - DNA, 33 bp, Homo sapien
tagttgactgggtggccattctgtcagacttgc

SEQ ID NO: 978233 - DNA, 33 bp, Homo sapien
tactgcaatattggcaggattgactctcccttc

SEQ ID NO: 978234 - DNA, 33 bp, Homo sapien
tactgcaatattggcatgattgactctcccttc

SEQ ID NO: 978235 - DNA, 33 bp, Homo sapien
gactaaaaataagagacatgctctacaatattc

SEQ ID NO: 978236 - DNA, 33 bp, Homo sapien
gactaaaaataagagatatgctctacaatattc

SEQ ID NO: 978237 - DNA, 33 bp, Homo sapien
ttcaaagaacttacaaactttttgatatgagag

SEQ ID NO: 978238 - DNA, 33 bp, Homo sapien
ttcaaagaacttacaagctttttgatatgagag

SEQ ID NO: 978239 - DNA, 33 bp, Homo sapien
tgtctcctttagtgtgcatggcttaaggtatct

SEQ ID NO: 978240 - DNA, 33 bp, Homo sapien
tgtctcctttagtgtgtatggcttaaggtatct

SEQ ID NO: 978241 - DNA, 33 bp, Homo sapien
aggcactgttctgaacactgaggatttaacagg

SEQ ID NO: 978242 - DNA, 33 bp, Homo sapien
aggcactgttctgaacgctgaggatttaacagg

SEQ ID NO: 978243 - DNA, 33 bp, Homo sapien
ttgtatgaatacatcacagtttacatttccact

SEQ ID NO: 978244 - DNA, 33 bp, Homo sapien
ttgtatgaatacatcagagtttacatttccact

SEQ ID NO: 978245 - DNA, 33 bp, Homo sapien
catgaggacagtaccacgagggaaatctgcccc

SEQ ID NO: 978246 - DNA, 33 bp, Homo sapien
catgaggacagtaccatgagggaaatctgcccc

SEQ ID NO: 978247 - DNA, 33 bp, Homo sapien
aagaagttacaagaaacagtttgagataaatgg

SEQ ID NO: 978248 - DNA, 33 bp, Homo sapien
aagaagttacaagaaatagtttgagataaatgg

SEQ ID NO: 978249 - DNA, 33 bp, Homo sapien
ttcagtaatacactgcacatctttaaaaggaat

SEQ ID NO: 978250 - DNA, 33 bp, Homo sapien
ttcagtaatacactgcgcatctttaaaaggaat

SEQ ID NO: 978251 - DNA, 33 bp, Homo sapien
tcaaatggtgttttaccaacaaagaactgcaga

SEQ ID NO: 978252 - DNA, 33 bp, Homo sapien
tcaaatggtgttttactaacaaagaactgcaga

SEQ ID NO: 978253 - DNA, 33 bp, Homo sapien
gagaaagcaaagacaacaactaatagacaattc

SEQ ID NO: 978254 - DNA, 33 bp, Homo sapien
gagaaagcaaagacaataactaatagacaattc

SEQ ID NO: 978255 - DNA, 33 bp, Homo sapien
attactggtccaaaggcataaatctagttgcac

SEQ ID NO: 978256 - DNA, 33 bp, Homo sapien
attactggtccaaaggtataaatctagttgcac

SEQ ID NO: 978257 - DNA, 33 bp, Homo sapien
atatgattagactgtaggaatcaattttattac

SEQ ID NO: 978258 - DNA, 33 bp, Homo sapien
atatgattagactgtatgaatcaattttattac

SEQ ID NO: 978259 - DNA, 33 bp, Homo sapien
tcacaactcagtcaaaatagcctctactctatg

SEQ ID NO: 978260 - DNA, 33 bp, Homo sapien
tcacaactcagtcaaagtagcctctactctatg

SEQ ID NO: 978261 - DNA, 33 bp, Homo sapien
aaagccatgttggacactgatgctcagaactgg

SEQ ID NO: 978262 - DNA, 33 bp, Homo sapien
aaagccatgttggacattgatgctcagaactgg

SEQ ID NO: 978263 - DNA, 33 bp, Homo sapien
ttgtttatgatcctccaaagctcaactctgaca

SEQ ID NO: 978264 - DNA, 33 bp, Homo sapien
ttgtttatgatcctccgaagctcaactctgaca

SEQ ID NO: 978265 - DNA, 33 bp, Homo sapien
tttttagccctgggaaaatcatatccacgttgg

SEQ ID NO: 978266 - DNA, 33 bp, Homo sapien
tttttagccctgggaagatcatatccacgttgg

SEQ ID NO: 978267 - DNA, 33 bp, Homo sapien
cagcactagttacaaaaaaaagctggaatgagc

SEQ ID NO: 978268 - DNA, 33 bp, Homo sapien
cagcactagttacaaagaaaagctggaatgagc

SEQ ID NO: 978269 - DNA, 33 bp, Homo sapien
ggttggcctaatcatacactcttcaggaattca

SEQ ID NO: 978270 - DNA, 33 bp, Homo sapien
ggttggcctaatcatatactcttcaggaattca

SEQ ID NO: 978271 - DNA, 33 bp, Homo sapien
gcataagcctcagtcccagtacaggagaaaact

SEQ ID NO: 978272 - DNA, 33 bp, Homo sapien
gcataagcctcagtcctagtacaggagaaaact

SEQ ID NO: 978273 - DNA, 33 bp, Homo sapien
ctctgtctgactgaacgaggacatcagttttct

SEQ ID NO: 978274 - DNA, 33 bp, Homo sapien
ctctgtctgactgaactaggacatcagttttct

SEQ ID NO: 978275 - DNA, 33 bp, Homo sapien
ccatccagtgtcttcaaacttattcaggggttc

SEQ ID NO: 978276 - DNA, 33 bp, Homo sapien
ccatccagtgtcttcagacttattcaggggttc

SEQ ID NO: 978277 - DNA, 33 bp, Homo sapien
tttgaaaactgtttccaagtaatctgacacgct

SEQ ID NO: 978278 - DNA, 33 bp, Homo sapien
tttgaaaactgtttccgagtaatctgacacgct

SEQ ID NO: 978279 - DNA, 33 bp, Homo sapien
cctgcttgcaataagaaccaacctaaactctgc

SEQ ID NO: 978280 - DNA, 33 bp, Homo sapien
cctgcttgcaataagagccaacctaaactctgc

SEQ ID NO: 978281 - DNA, 33 bp, Homo sapien
tctgcctatattggaccgcacttagtattctaa

SEQ ID NO: 978282 - DNA, 33 bp, Homo sapien
tctgcctatattggactgcacttagtattctaa

SEQ ID NO: 978283 - DNA, 33 bp, Homo sapien
tttagtgctataaaaaagacaaatcagagcaga

SEQ ID NO: 978284 - DNA, 33 bp, Homo sapien
tttagtgctataaaaacgacaaatcagagcaga

SEQ ID NO: 978285 - DNA, 33 bp, Homo sapien
gactcttgttgagcaaatagaataaagtatgat

SEQ ID NO: 978286 - DNA, 33 bp, Homo sapien
gactcttgttgagcaagtagaataaagtatgat

SEQ ID NO: 978287 - DNA, 33 bp, Homo sapien
ctccaccatttgtaaaccaagtagtatctgaga

SEQ ID NO: 978288 - DNA, 33 bp, Homo sapien
ctccaccatttgtaaatcaagtagtatctgaga

SEQ ID NO: 978289 - DNA, 33 bp, Homo sapien
tgtgcttttctccagaagattctgtgggcttca

SEQ ID NO: 978290 - DNA, 33 bp, Homo sapien
tgtgcttttctccagaggattctgtgggcttca

SEQ ID NO: 978291 - DNA, 33 bp, Homo sapien
tatactgaacattcccacaattcacaatagaga

SEQ ID NO: 978292 - DNA, 33 bp, Homo sapien
tatactgaacattcccgcaattcacaatagaga

SEQ ID NO: 978293 - DNA, 33 bp, Homo sapien
actctctccatccctcacaattcactgaaaaat

SEQ ID NO: 978294 - DNA, 33 bp, Homo sapien
actctctccatccctcgcaattcactgaaaaat

SEQ ID NO: 978295 - DNA, 33 bp, Homo sapien
gcatcaacacaaaatcaagtgctcaagtaattc

SEQ ID NO: 978296 - DNA, 33 bp, Homo sapien
gcatcaacacaaaatccagtgctcaagtaattc

SEQ ID NO: 978297 - DNA, 33 bp, Homo sapien
ttattccatgctacttcaaaagaaaagtaggta

SEQ ID NO: 978298 - DNA, 33 bp, Homo sapien
ttattccatgctacttgaaaagaaaagtaggta

SEQ ID NO: 978299 - DNA, 33 bp, Homo sapien
aaaacatatgcataaacctacagtaatgagaaa

SEQ ID NO: 978300 - DNA, 33 bp, Homo sapien
aaaacatatgcataaatctacagtaatgagaaa

SEQ ID NO: 978301 - DNA, 33 bp, Homo sapien
agccttaggagcaaaaggtaatgtattgctttt

SEQ ID NO: 978302 - DNA, 33 bp, Homo sapien
agccttaggagcaaaatgtaatgtattgctttt

SEQ ID NO: 978303 - DNA, 33 bp, Homo sapien
ttttcttatgttgacaaacatcccttagtgatg

SEQ ID NO: 978304 - DNA, 33 bp, Homo sapien
ttttcttatgttgacagacatcccttagtgatg

SEQ ID NO: 978305 - DNA, 33 bp, Homo sapien
aatcaagttctccatcaagtggaacatgactat

SEQ ID NO: 978306 - DNA, 33 bp, Homo sapien
aatcaagttctccatcgagtggaacatgactat

SEQ ID NO: 978307 - DNA, 33 bp, Homo sapien
ccacagccagagatcactcccatatcccatata

SEQ ID NO: 978308 - DNA, 33 bp, Homo sapien
ccacagccagagatcattcccatatcccatata

SEQ ID NO: 978309 - DNA, 33 bp, Homo sapien
aaaggctcaagttgtgaagtagttatatgggat

SEQ ID NO: 978310 - DNA, 33 bp, Homo sapien
aaaggctcaagttgtggagtagttatatgggat

SEQ ID NO: 978311 - DNA, 33 bp, Homo sapien
tggaagtataacctcaacaatcctaaatgtaga

SEQ ID NO: 978312 - DNA, 33 bp, Homo sapien
tggaagtataacctcagcaatcctaaatgtaga

SEQ ID NO: 978313 - DNA, 33 bp, Homo sapien
gagaaaaacagattcaaaactctaaatagaaaa

SEQ ID NO: 978314 - DNA, 33 bp, Homo sapien
gagaaaaacagattcagaactctaaatagaaaa

SEQ ID NO: 978315 - DNA, 33 bp, Homo sapien
catttgttattcaccaacatatcactgcttaaa

SEQ ID NO: 978316 - DNA, 33 bp, Homo sapien
catttgttattcaccagcatatcactgcttaaa

SEQ ID NO: 978317 - DNA, 33 bp, Homo sapien
tccaggtatgcaaaaaataacactccacttatg

SEQ ID NO: 978318 - DNA, 33 bp, Homo sapien
tccaggtatgcaaaaagtaacactccacttatg

SEQ ID NO: 978319 - DNA, 33 bp, Homo sapien
gtgaatattaccatccaccattggaataattta

SEQ ID NO: 978320 - DNA, 33 bp, Homo sapien
gtgaatattaccatccgccattggaataattta

SEQ ID NO: 978321 - DNA, 33 bp, Homo sapien
taatattcaccatctccaattcattggtcactg

SEQ ID NO: 978322 - DNA, 33 bp, Homo sapien
taatattcaccatctctaattcattggtcactg

SEQ ID NO: 978323 - DNA, 33 bp, Homo sapien
ggctacttttccaaagacaagaagcgaaggaag

SEQ ID NO: 978324 - DNA, 33 bp, Homo sapien
ggctacttttccaaagtcaagaagcgaaggaag

SEQ ID NO: 978325 - DNA, 33 bp, Homo sapien
gaatgttttaaccagaacatgatcaattattat

SEQ ID NO: 978326 - DNA, 33 bp, Homo sapien
gaatgttttaaccagaccatgatcaattattat

SEQ ID NO: 978327 - DNA, 33 bp, Homo sapien
gcaaaggacaatgtcaaattaaccaaagccttt

SEQ ID NO: 978328 - DNA, 33 bp, Homo sapien
gcaaaggacaatgtcagattaaccaaagccttt

SEQ ID NO: 978329 - DNA, 33 bp, Homo sapien
tatgcaaactgacttagaaagtaacatatgctg

SEQ ID NO: 978330 - DNA, 33 bp, Homo sapien
tatgcaaactgacttataaagtaacatatgctg

SEQ ID NO: 978331 - DNA, 33 bp, Homo sapien
ctccactacaatgtaaatgccttgaatagagga

SEQ ID NO: 978332 - DNA, 33 bp, Homo sapien
ctccactacaatgtaagtgccttgaatagagga

SEQ ID NO: 978333 - DNA, 33 bp, Homo sapien
gttttgtggttaaaggaacatgttagaggaaat

SEQ ID NO: 978334 - DNA, 33 bp, Homo sapien
gttttgtggttaaagggacatgttagaggaaat

SEQ ID NO: 978335 - DNA, 33 bp, Homo sapien
acacacacacagacgaaaagcatttacagacaa

SEQ ID NO: 978336 - DNA, 33 bp, Homo sapien
acacacacacagacgacaagcatttacagacaa

SEQ ID NO: 978337 - DNA, 33 bp, Homo sapien
atgaattttaagaacaactatgaaaattcaatt

SEQ ID NO: 978338 - DNA, 33 bp, Homo sapien
atgaattttaagaacacctatgaaaattcaatt

SEQ ID NO: 978339 - DNA, 33 bp, Homo sapien
aaaatacaggcttccacaggagttaatacgaag

SEQ ID NO: 978340 - DNA, 33 bp, Homo sapien
aaaatacaggcttccataggagttaatacgaag

SEQ ID NO: 978341 - DNA, 33 bp, Homo sapien
gataaaggctggataactgtaggcatcaaaaga

SEQ ID NO: 978342 - DNA, 33 bp, Homo sapien
gataaaggctggataattgtaggcatcaaaaga

SEQ ID NO: 978343 - DNA, 33 bp, Homo sapien
acttgctatggaactacactaaaagtctaagaa

SEQ ID NO: 978344 - DNA, 33 bp, Homo sapien
acttgctatggaactatactaaaagtctaagaa

SEQ ID NO: 978345 - DNA, 33 bp, Homo sapien
tgaacttcagttgccccatatacaaaatggaga

SEQ ID NO: 978346 - DNA, 33 bp, Homo sapien
tgaacttcagttgccctatatacaaaatggaga

SEQ ID NO: 978347 - DNA, 33 bp, Homo sapien
ggaagtgacaaagtccaaatcttgaaggtttta

SEQ ID NO: 978348 - DNA, 33 bp, Homo sapien
ggaagtgacaaagtccgaatcttgaaggtttta

SEQ ID NO: 978349 - DNA, 33 bp, Homo sapien
agcatactggaaaagggaatttcacagaacttc

SEQ ID NO: 978350 - DNA, 33 bp, Homo sapien
agcatactggaaaaggtaatttcacagaacttc

SEQ ID NO: 978351 - DNA, 33 bp, Homo sapien
aatattagtatatatgcatgactgcgtatgtct

SEQ ID NO: 978352 - DNA, 33 bp, Homo sapien
aatattagtatatatggatgactgcgtatgtct

SEQ ID NO: 978353 - DNA, 33 bp, Homo sapien
agcttagccacaaacacggcagttccaagattg

SEQ ID NO: 978354 - DNA, 33 bp, Homo sapien
agcttagccacaaacatggcagttccaagattg

SEQ ID NO: 978355 - DNA, 33 bp, Homo sapien
agagagaaaagttcaaaacacaacttgttctgg

SEQ ID NO: 978356 - DNA, 33 bp, Homo sapien
agagagaaaagttcaagacacaacttgttctgg

SEQ ID NO: 978357 - DNA, 33 bp, Homo sapien
ttattcccatcagcgagaagtaatatacactta

SEQ ID NO: 978358 - DNA, 33 bp, Homo sapien
ttattcccatcagcgataagtaatatacactta

SEQ ID NO: 978359 - DNA, 33 bp, Homo sapien
ctgatactgtgcttcacgacccacactggagta

SEQ ID NO: 978360 - DNA, 33 bp, Homo sapien
ctgatactgtgcttcatgacccacactggagta

SEQ ID NO: 978361 - DNA, 33 bp, Homo sapien
aagtgggccataacccaatatgtctggtgtcct

SEQ ID NO: 978362 - DNA, 33 bp, Homo sapien
aagtgggccataaccctatatgtctggtgtcct

SEQ ID NO: 978363 - DNA, 33 bp, Homo sapien
tatgaaaacccagatactacactcattggctgt

SEQ ID NO: 978364 - DNA, 33 bp, Homo sapien
tatgaaaacccagatattacactcattggctgt

SEQ ID NO: 978365 - DNA, 33 bp, Homo sapien
ctttccagaatcttcaaagagagacagagagca

SEQ ID NO: 978366 - DNA, 33 bp, Homo sapien
ctttccagaatcttcagagagagacagagagca

SEQ ID NO: 978367 - DNA, 33 bp, Homo sapien
tggcaagatagaaaacacagtctatggcaagga

SEQ ID NO: 978368 - DNA, 33 bp, Homo sapien
tggcaagatagaaaacgcagtctatggcaagga

SEQ ID NO: 978369 - DNA, 33 bp, Homo sapien
tgcataatataagccaatgcttggagtctgaaa

SEQ ID NO: 978370 - DNA, 33 bp, Homo sapien
tgcataatataagccagtgcttggagtctgaaa

SEQ ID NO: 978371 - DNA, 33 bp, Homo sapien
agattcagttttcacactgaaaatcatgctgga

SEQ ID NO: 978372 - DNA, 33 bp, Homo sapien
agattcagttttcacattgaaaatcatgctgga

SEQ ID NO: 978373 - DNA, 33 bp, Homo sapien
acacacttattgataacagaactgtgagaatta

SEQ ID NO: 978374 - DNA, 33 bp, Homo sapien
acacacttattgataatagaactgtgagaatta

SEQ ID NO: 978375 - DNA, 33 bp, Homo sapien
aagttctgaagtgtcccgaagttcttctcatgc

SEQ ID NO: 978376 - DNA, 33 bp, Homo sapien
aagttctgaagtgtcctgaagttcttctcatgc

SEQ ID NO: 978377 - DNA, 33 bp, Homo sapien
acaaaaatgcctctaacggtatgacttgggtct

SEQ ID NO: 978378 - DNA, 33 bp, Homo sapien
acaaaaatgcctctaatggtatgacttgggtct

SEQ ID NO: 978379 - DNA, 33 bp, Homo sapien
ccttaaatttgactgaagaccaaatcgatgttt

SEQ ID NO: 978380 - DNA, 33 bp, Homo sapien
ccttaaatttgactgatgaccaaatcgatgttt

SEQ ID NO: 978381 - DNA, 33 bp, Homo sapien
acttctatttctttacggctatctttggctttt

SEQ ID NO: 978382 - DNA, 33 bp, Homo sapien
acttctatttctttactgctatctttggctttt

SEQ ID NO: 978383 - DNA, 33 bp, Homo sapien
aagatccaaagcaatacaatgtagattcagagc

SEQ ID NO: 978384 - DNA, 33 bp, Homo sapien
aagatccaaagcaatataatgtagattcagagc

SEQ ID NO: 978385 - DNA, 33 bp, Homo sapien
ttgctcaatggtcaaccgtatttgctaagtgaa

SEQ ID NO: 978386 - DNA, 33 bp, Homo sapien
ttgctcaatggtcaactgtatttgctaagtgaa

SEQ ID NO: 978387 - DNA, 33 bp, Homo sapien
attagtttaatggagagtcccttgtatttcact

SEQ ID NO: 978388 - DNA, 33 bp, Homo sapien
attagtttaatggagattcccttgtatttcact

SEQ ID NO: 978389 - DNA, 33 bp, Homo sapien
tcttccaagcccttcaaattgtttgtttcagcc

SEQ ID NO: 978390 - DNA, 33 bp, Homo sapien
tcttccaagcccttcagattgtttgtttcagcc

SEQ ID NO: 978391 - DNA, 33 bp, Homo sapien
aatggaagtcaaagtcaagatctgtaaatggca

SEQ ID NO: 978392 - DNA, 33 bp, Homo sapien
aatggaagtcaaagtcgagatctgtaaatggca

SEQ ID NO: 978393 - DNA, 33 bp, Homo sapien
gttggtgaaaaagcaagtacggtttttgctttt

SEQ ID NO: 978394 - DNA, 33 bp, Homo sapien
gttggtgaaaaagcaattacggtttttgctttt

SEQ ID NO: 978395 - DNA, 33 bp, Homo sapien
tattgtgctctcacaacagtttgtttctctatt

SEQ ID NO: 978396 - DNA, 33 bp, Homo sapien
tattgtgctctcacaatagtttgtttctctatt

SEQ ID NO: 978397 - DNA, 33 bp, Homo sapien
agtggacaaaaagtggaaaaacataataatgga

SEQ ID NO: 978398 - DNA, 33 bp, Homo sapien
agtggacaaaaagtgggaaaacataataatgga

SEQ ID NO: 978399 - DNA, 33 bp, Homo sapien
agaacaatattatcaaacacttgatgtgattga

SEQ ID NO: 978400 - DNA, 33 bp, Homo sapien
agaacaatattatcaaccacttgatgtgattga

SEQ ID NO: 978401 - DNA, 33 bp, Homo sapien
ggaaggagcagaattcaagctatattttaggct

SEQ ID NO: 978402 - DNA, 33 bp, Homo sapien
ggaaggagcagaattcgagctatattttaggct

SEQ ID NO: 978403 - DNA, 33 bp, Homo sapien
ttaggatgcctgcttaccagttctattttatta

SEQ ID NO: 978404 - DNA, 33 bp, Homo sapien
ttaggatgcctgcttatcagttctattttatta

SEQ ID NO: 978405 - DNA, 33 bp, Homo sapien
agaattatgtggaggaaaagaaagtatggaaat

SEQ ID NO: 978406 - DNA, 33 bp, Homo sapien
agaattatgtggaggacaagaaagtatggaaat

SEQ ID NO: 978407 - DNA, 33 bp, Homo sapien
gagagctgggtgttaaaaatgaatagatctttt

SEQ ID NO: 978408 - DNA, 33 bp, Homo sapien
gagagctgggtgttaacaatgaatagatctttt

SEQ ID NO: 978409 - DNA, 33 bp, Homo sapien
acctcaaagccaagaccatggatattttatttt

SEQ ID NO: 978410 - DNA, 33 bp, Homo sapien
acctcaaagccaagactatggatattttatttt

SEQ ID NO: 978411 - DNA, 33 bp, Homo sapien
ttctgttccagctctacgtcttgatctttacca

SEQ ID NO: 978412 - DNA, 33 bp, Homo sapien
ttctgttccagctctatgtcttgatctttacca

SEQ ID NO: 978413 - DNA, 33 bp, Homo sapien
ttgcaccctgctactaccctatgctatcttatc

SEQ ID NO: 978414 - DNA, 33 bp, Homo sapien
ttgcaccctgctactagcctatgctatcttatc

SEQ ID NO: 978415 - DNA, 33 bp, Homo sapien
aaataaggaggtactgaaaatagtaaagttgtg

SEQ ID NO: 978416 - DNA, 33 bp, Homo sapien
aaataaggaggtactgcaaatagtaaagttgtg

SEQ ID NO: 978417 - DNA, 33 bp, Homo sapien
atcaaatgctggggtaaaatgctaaaattagat

SEQ ID NO: 978418 - DNA, 33 bp, Homo sapien
atcaaatgctggggtacaatgctaaaattagat

SEQ ID NO: 978419 - DNA, 33 bp, Homo sapien
aactaccatctggcataaacaatttagaggatt

SEQ ID NO: 978420 - DNA, 33 bp, Homo sapien
aactaccatctggcatgaacaatttagaggatt

SEQ ID NO: 978421 - DNA, 33 bp, Homo sapien
agaccatcccatagataaccctttctgatcatc

SEQ ID NO: 978422 - DNA, 33 bp, Homo sapien
agaccatcccatagatgaccctttctgatcatc

SEQ ID NO: 978423 - DNA, 33 bp, Homo sapien
aggaaactgagggaagaatgttttgtaaattta

SEQ ID NO: 978424 - DNA, 33 bp, Homo sapien
aggaaactgagggaagtatgttttgtaaattta

SEQ ID NO: 978425 - DNA, 33 bp, Homo sapien
acatctctatagccaccggttcaagttttaatt

SEQ ID NO: 978426 - DNA, 33 bp, Homo sapien
acatctctatagccactggttcaagttttaatt

SEQ ID NO: 978427 - DNA, 33 bp, Homo sapien
tcaaaccgggtccctggcaagcttcagtaagcc

SEQ ID NO: 978428 - DNA, 33 bp, Homo sapien
tcaaaccgggtccctgtcaagcttcagtaagcc

SEQ ID NO: 978429 - DNA, 33 bp, Homo sapien
agctcatcgaccgaacagactctacttcccagc

SEQ ID NO: 978430 - DNA, 33 bp, Homo sapien
agctcatcgaccgaacggactctacttcccagc

SEQ ID NO: 978431 - DNA, 33 bp, Homo sapien; identical to SEQ ID NO: 978429

SEQ ID NO: 978432 - DNA, 33 bp, Homo sapien; identical to SEQ ID NO: 978430

SEQ ID NO: 978433 - DNA, 33 bp, Homo sapien
atccatgcactgcagaatagatgttggatagca

SEQ ID NO: 978434 - DNA, 33 bp, Homo sapien
atccatgcactgcagagtagatgttggatagca

SEQ ID NO: 978435 - DNA, 33 bp, Homo sapien
ttcccaattacttggcaataataccatttacct

SEQ ID NO: 978436 - DNA, 33 bp, Homo sapien
ttcccaattacttggcgataataccatttacct

SEQ ID NO: 978437 - DNA, 33 bp, Homo sapien
tgtgaagctctgatcgcaagtctcattaccata

SEQ ID NO: 978438 - DNA, 33 bp, Homo sapien
tgtgaagctctgatcggaagtctcattaccata

SEQ ID NO: 978439 - DNA, 33 bp, Homo sapien
agaaaaggctgaagtacgcaatttaatttctaa

SEQ ID NO: 978440 - DNA, 33 bp, Homo sapien
agaaaaggctgaagtatgcaatttaatttctaa

SEQ ID NO: 978441 - DNA, 33 bp, Homo sapien
ggtaagtttttaaacacatgatcagtggttcag

SEQ ID NO: 978442 - DNA, 33 bp, Homo sapien
ggtaagtttttaaacatatgatcagtggttcag

SEQ ID NO: 978443 - DNA, 33 bp, Homo sapien
aattgctctagtgttagcagacaaagactggat

SEQ ID NO: 978444 - DNA, 33 bp, Homo sapien
aattgctctagtgttatcagacaaagactggat

SEQ ID NO: 978445 - DNA, 33 bp, Homo sapien
ataacattcaaggaaacggggaagtatgaaaaa

SEQ ID NO: 978446 - DNA, 33 bp, Homo sapien
ataacattcaaggaaatggggaagtatgaaaaa

SEQ ID NO: 978447 - DNA, 33 bp, Homo sapien
agagagagatatgtggaacccaaataattcttt

SEQ ID NO: 978448 - DNA, 33 bp, Homo sapien
agagagagatatgtggcacccaaataattcttt

SEQ ID NO: 978449 - DNA, 33 bp, Homo sapien
ccaatgataaaaatccactaaagcaatgaaatt

SEQ ID NO: 978450 - DNA, 33 bp, Homo sapien
ccaatgataaaaatccgctaaagcaatgaaatt

SEQ ID NO: 978451 - DNA, 33 bp, Homo sapien
gacaatgggccatgaaaggaggtctactgaaga

SEQ ID NO: 978452 - DNA, 33 bp, Homo sapien
gacaatgggccatgaagggaggtctactgaaga

SEQ ID NO: 978453 - DNA, 33 bp, Homo sapien
attgtaggaattttacagatatgacaagtccct

SEQ ID NO: 978454 - DNA, 33 bp, Homo sapien
attgtaggaattttacggatatgacaagtccct

SEQ ID NO: 978455 - DNA, 33 bp, Homo sapien
gcagccttgactagcactacatagaacagtgtt

SEQ ID NO: 978456 - DNA, 33 bp, Homo sapien
gcagccttgactagcattacatagaacagtgtt

SEQ ID NO: 978457 - DNA, 33 bp, Homo sapien
gtgtggacagacaatacctgtgatggcctacaa

SEQ ID NO: 978458 - DNA, 33 bp, Homo sapien
gtgtggacagacaatatctgtgatggcctacaa

SEQ ID NO: 978459 - DNA, 33 bp, Homo sapien
aacagagtaatcgttacgaattgtggtcttttt

SEQ ID NO: 978460 - DNA, 33 bp, Homo sapien
aacagagtaatcgttatgaattgtggtcttttt

SEQ ID NO: 978461 - DNA, 33 bp, Homo sapien
agttttaagctctttcaaacaagcaggtcttac

SEQ ID NO: 978462 - DNA, 33 bp, Homo sapien
agttttaagctctttcgaacaagcaggtcttac

SEQ ID NO: 978463 - DNA, 33 bp, Homo sapien
catctcactttgtattcaacccattatcgcttt

SEQ ID NO: 978464 - DNA, 33 bp, Homo sapien
catctcactttgtattgaacccattatcgcttt

SEQ ID NO: 978465 - DNA, 33 bp, Homo sapien
agaataacctatttcaagttgctaagtttcaga

SEQ ID NO: 978466 - DNA, 33 bp, Homo sapien
agaataacctatttcacgttgctaagtttcaga

SEQ ID NO: 978467 - DNA, 33 bp, Homo sapien
tattgacacaggataagcttttaatccactttt

SEQ ID NO: 978468 - DNA, 33 bp, Homo sapien
tattgacacaggataatcttttaatccactttt

SEQ ID NO: 978469 - DNA, 33 bp, Homo sapien
caaaggaaatttccaaaacatcttgaactctac

SEQ ID NO: 978470 - DNA, 33 bp, Homo sapien
caaaggaaatttccaacacatcttgaactctac

SEQ ID NO: 978471 - DNA, 33 bp, Homo sapien
tgaatgagaaataaacacaaggattttggtata

SEQ ID NO: 978472 - DNA, 33 bp, Homo sapien
tgaatgagaaataaacgcaaggattttggtata

SEQ ID NO: 978473 - DNA, 33 bp, Homo sapien
aatgtctcctgtggaaacaagagtagtaaagta

SEQ ID NO: 978474 - DNA, 33 bp, Homo sapien
aatgtctcctgtggaagcaagagtagtaaagta

SEQ ID NO: 978475 - DNA, 33 bp, Homo sapien
ttatgcaattgttttaaaaagatgagcaagccc

SEQ ID NO: 978476 - DNA, 33 bp, Homo sapien
ttatgcaattgttttagaaagatgagcaagccc

SEQ ID NO: 978477 - DNA, 33 bp, Homo sapien
ttgctggtaggctggacatttggcagcagcagt

SEQ ID NO: 978478 - DNA, 33 bp, Homo sapien
ttgctggtaggctggatatttggcagcagcagt

SEQ ID NO: 978479 - DNA, 33 bp, Homo sapien
aagaccatgactaggcaatgtgactagagaatc

SEQ ID NO: 978480 - DNA, 33 bp, Homo sapien
aagaccatgactaggcgatgtgactagagaatc

SEQ ID NO: 978481 - DNA, 33 bp, Homo sapien
gatcaaacaaaatgatcagagtaatggtcagta

SEQ ID NO: 978482 - DNA, 33 bp, Homo sapien
gatcaaacaaaatgattagagtaatggtcagta

SEQ ID NO: 978483 - DNA, 33 bp, Homo sapien
gaaagggaacctagaaacctggcaaatacaaat

SEQ ID NO: 978484 - DNA, 33 bp, Homo sapien
gaaagggaacctagaagcctggcaaatacaaat

SEQ ID NO: 978485 - DNA, 33 bp, Homo sapien
taggttcctaaaaggcaactgtgaaataacaac

SEQ ID NO: 978486 - DNA, 33 bp, Homo sapien
taggttcctaaaaggcgactgtgaaataacaac

SEQ ID NO: 978487 - DNA, 33 bp, Homo sapien
aattactgcataacccagcagttacactcctag

SEQ ID NO: 978488 - DNA, 33 bp, Homo sapien
aattactgcataacccggcagttacactcctag

SEQ ID NO: 978489 - DNA, 33 bp, Homo sapien
gtgaagcagacagtgaaataatgccaggggtaa

SEQ ID NO: 978490 - DNA, 33 bp, Homo sapien
gtgaagcagacagtgatataatgccaggggtaa

SEQ ID NO: 978491 - DNA, 33 bp, Homo sapien
gtgtatcatttagcagcctaaacataaaataag

SEQ ID NO: 978492 - DNA, 33 bp, Homo sapien
gtgtatcatttagcagtctaaacataaaataag

SEQ ID NO: 978493 - DNA, 33 bp, Homo sapien
accacagctgggaagacaagtggttttgctaga

SEQ ID NO: 978494 - DNA, 33 bp, Homo sapien
accacagctgggaagagaagtggttttgctaga

SEQ ID NO: 978495 - DNA, 33 bp, Homo sapien
tcgagttgtatgtagaagctccaggcaatttct

SEQ ID NO: 978496 - DNA, 33 bp, Homo sapien
tcgagttgtatgtagaggctccaggcaatttct

SEQ ID NO: 978497 - DNA, 33 bp, Homo sapien
ctggatggagaatgcccgacatatgtgcaaatt

SEQ ID NO: 978498 - DNA, 33 bp, Homo sapien
ctggatggagaatgcctgacatatgtgcaaatt

SEQ ID NO: 978499 - DNA, 33 bp, Homo sapien
gattacatatttcctacgtttaggcatcccatg

SEQ ID NO: 978500 - DNA, 33 bp, Homo sapien
gattacatatttcctatgtttaggcatcccatg

SEQ ID NO: 978501 - DNA, 33 bp, Homo sapien
tcaagacactgatctccatcttaaaattgtagt

SEQ ID NO: 978502 - DNA, 33 bp, Homo sapien
tcaagacactgatctctatcttaaaattgtagt

SEQ ID NO: 978503 - DNA, 33 bp, Homo sapien
ttaaatcagacaggccaacaataatacaggaaa

SEQ ID NO: 978504 - DNA, 33 bp, Homo sapien
ttaaatcagacaggccgacaataatacaggaaa

SEQ ID NO: 978505 - DNA, 33 bp, Homo sapien
ctagctgtacaaagcccaagtgcagataaattt

SEQ ID NO: 978506 - DNA, 33 bp, Homo sapien
ctagctgtacaaagcctaagtgcagataaattt

SEQ ID NO: 978507 - DNA, 33 bp, Homo sapien
ttacacactggtgtacactgattcatgccatag

SEQ ID NO: 978508 - DNA, 33 bp, Homo sapien
ttacacactggtgtaccctgattcatgccatag

SEQ ID NO: 978509 - DNA, 33 bp, Homo sapien
ctattttggacatataagcagtttctatatgta

SEQ ID NO: 978510 - DNA, 33 bp, Homo sapien
ctattttggacatataggcagtttctatatgta

SEQ ID NO: 978511 - DNA, 33 bp, Homo sapien
gatcagtcgtagtgtacctgactggtgaggaaa

SEQ ID NO: 978512 - DNA, 33 bp, Homo sapien
gatcagtcgtagtgtagctgactggtgaggaaa

SEQ ID NO: 978513 - DNA, 33 bp, Homo sapien
atgttgtttggaataccgatcctgttacccagg

SEQ ID NO: 978514 - DNA, 33 bp, Homo sapien
atgttgtttggaatactgatcctgttacccagg

SEQ ID NO: 978515 - DNA, 33 bp, Homo sapien
agcaggagggaaaatacgtttgaggtgttagga

SEQ ID NO: 978516 - DNA, 33 bp, Homo sapien
agcaggagggaaaatatgtttgaggtgttagga

SEQ ID NO: 978517 - DNA, 33 bp, Homo sapien
gatgctgtatgacttccaaacctttacctgaaa

SEQ ID NO: 978518 - DNA, 33 bp, Homo sapien
gatgctgtatgacttctaaacctttacctgaaa

SEQ ID NO: 978519 - DNA, 33 bp, Homo sapien
tttgcaaataatctaccacagtccctaagtcat

SEQ ID NO: 978520 - DNA, 33 bp, Homo sapien
tttgcaaataatctactacagtccctaagtcat

SEQ ID NO: 978521 - DNA, 33 bp, Homo sapien
ggatccatttacttgacaatgttgactataatc

SEQ ID NO: 978522 - DNA, 33 bp, Homo sapien
ggatccatttacttgataatgttgactataatc

SEQ ID NO: 978523 - DNA, 33 bp, Homo sapien
ctcacaatgccaataacgttgacataattagat

SEQ ID NO: 978524 - DNA, 33 bp, Homo sapien
ctcacaatgccaataatgttgacataattagat

SEQ ID NO: 978525 - DNA, 33 bp, Homo sapien
ttgcaattcagttgccactttagctaagtgacc

SEQ ID NO: 978526 - DNA, 33 bp, Homo sapien
ttgcaattcagttgcctctttagctaagtgacc

SEQ ID NO: 978527 - DNA, 33 bp, Homo sapien
acagcaccttaggtctaaaacattttgtgtata

SEQ ID NO: 978528 - DNA, 33 bp, Homo sapien
acagcaccttaggtctcaaacattttgtgtata

SEQ ID NO: 978529 - DNA, 33 bp, Homo sapien
gtgacagaatcaaataaaagcatgtacaggaaa

SEQ ID NO: 978530 - DNA, 33 bp, Homo sapien
gtgacagaatcaaatagaagcatgtacaggaaa

SEQ ID NO: 978531 - DNA, 33 bp, Homo sapien
tcatgacctcgtctaaacctagctacctcccaa

SEQ ID NO: 978532 - DNA, 33 bp, Homo sapien
tcatgacctcgtctaaccctagctacctcccaa

SEQ ID NO: 978533 - DNA, 33 bp, Homo sapien
aaaggccacaactccaatgatgacgttttacta

SEQ ID NO: 978534 - DNA, 33 bp, Homo sapien
aaaggccacaactccagtgatgacgttttacta

SEQ ID NO: 978535 - DNA, 33 bp, Homo sapien
ttcaattttgctaccaagagatgaaaaattgtt

SEQ ID NO: 978536 - DNA, 33 bp, Homo sapien
ttcaattttgctaccacgagatgaaaaattgtt

SEQ ID NO: 978537 - DNA, 33 bp, Homo sapien
taggaacctggggctcacgttcagtacccaaga

SEQ ID NO: 978538 - DNA, 33 bp, Homo sapien
taggaacctggggctcgcgttcagtacccaaga

SEQ ID NO: 978539 - DNA, 33 bp, Homo sapien
acagccaagaactgaacaaaaatgcctcatttt

SEQ ID NO: 978540 - DNA, 33 bp, Homo sapien
acagccaagaactgaagaaaaatgcctcatttt

SEQ ID NO: 978541 - DNA, 33 bp, Homo sapien
ttgtatcggcctaatgaaaatagtgtttagtaa

SEQ ID NO: 978542 - DNA, 33 bp, Homo sapien
ttgtatcggcctaatggaaatagtgtttagtaa

SEQ ID NO: 978543 - DNA, 33 bp, Homo sapien
taaaatgtatcaaatacctttccagcagagatg

SEQ ID NO: 978544 - DNA, 33 bp, Homo sapien
taaaatgtatcaaatatctttccagcagagatg

SEQ ID NO: 978545 - DNA, 33 bp, Homo sapien
gtgtaatagtaaagtcaaaaggaaatcagtgcc

SEQ ID NO: 978546 - DNA, 33 bp, Homo sapien
gtgtaatagtaaagtcgaaaggaaatcagtgcc

SEQ ID NO: 978547 - DNA, 33 bp, Homo sapien
tgatcctaaatttttcgagggcaacagaaatag

SEQ ID NO: 978548 - DNA, 33 bp, Homo sapien
tgatcctaaatttttctagggcaacagaaatag

SEQ ID NO: 978549 - DNA, 33 bp, Homo sapien
aggcgtttgcgagacaaaaagtcacatgacacc

SEQ ID NO: 978550 - DNA, 33 bp, Homo sapien
aggcgtttgcgagacacaaagtcacatgacacc

SEQ ID NO: 978551 - DNA, 33 bp, Homo sapien
ctaaatttcaggtttaagcacacaagtgtcttt

SEQ ID NO: 978552 - DNA, 33 bp, Homo sapien
ctaaatttcaggtttaggcacacaagtgtcttt

SEQ ID NO: 978553 - DNA, 33 bp, Homo sapien
actcttcaccttcttcaaggaatgtctgtgtct

SEQ ID NO: 978554 - DNA, 33 bp, Homo sapien
actcttcaccttcttcgaggaatgtctgtgtct

SEQ ID NO: 978555 - DNA, 33 bp, Homo sapien
ggaccagtgatgacaacagagatgattagtaat

SEQ ID NO: 978556 - DNA, 33 bp, Homo sapien
ggaccagtgatgacaagagagatgattagtaat

SEQ ID NO: 978557 - DNA, 33 bp, Homo sapien
taatagcaatgctttacggttttagagtatttg

SEQ ID NO: 978558 - DNA, 33 bp, Homo sapien
taatagcaatgctttatggttttagagtatttg

SEQ ID NO: 978559 - DNA, 33 bp, Homo sapien
cacatggccatgcacaacaatatatatacacaa

SEQ ID NO: 978560 - DNA, 33 bp, Homo sapien
cacatggccatgcacaccaatatatatacacaa

SEQ ID NO: 978561 - DNA, 33 bp, Homo sapien
tatgggcacctgccaggagaatatgggaatgtc

SEQ ID NO: 978562 - DNA, 33 bp, Homo sapien
tatgggcacctgccagtagaatatgggaatgtc

SEQ ID NO: 978563 - DNA, 33 bp, Homo sapien
acctgattaatgcaaccgcaacccaaattggtt

SEQ ID NO: 978564 - DNA, 33 bp, Homo sapien
acctgattaatgcaactgcaacccaaattggtt

SEQ ID NO: 978565 - DNA, 33 bp, Homo sapien
gcttttctaatgaaagcctgacaaagcctttag

SEQ ID NO: 978566 - DNA, 33 bp, Homo sapien
gcttttctaatgaaagtctgacaaagcctttag

SEQ ID NO: 978567 - DNA, 33 bp, Homo sapien
atgtcttctaatgacacgaaaagccaacaagta

SEQ ID NO: 978568 - DNA, 33 bp, Homo sapien
atgtcttctaatgacatgaaaagccaacaagta

SEQ ID NO: 978569 - DNA, 33 bp, Homo sapien
gccaccacggagtgacaataaagcctaaaagga

SEQ ID NO: 978570 - DNA, 33 bp, Homo sapien
gccaccacggagtgacgataaagcctaaaagga

SEQ ID NO: 978571 - DNA, 33 bp, Homo sapien
aaggaggttcttctacggctaatactccaggta

SEQ ID NO: 978572 - DNA, 33 bp, Homo sapien
aaggaggttcttctactgctaatactccaggta

SEQ ID NO: 978573 - DNA, 33 bp, Homo sapien
ttagaggataagcaggacaagaatgctttgatc

SEQ ID NO: 978574 - DNA, 33 bp, Homo sapien
ttagaggataagcagggcaagaatgctttgatc

SEQ ID NO: 978575 - DNA, 33 bp, Homo sapien
tgggacactttttccccggattatcacatagct

SEQ ID NO: 978576 - DNA, 33 bp, Homo sapien
tgggacactttttccctggattatcacatagct

SEQ ID NO: 978577 - DNA, 33 bp, Homo sapien
cgcctgagcggccagaacaatttgtcagtctcc

SEQ ID NO: 978578 - DNA, 33 bp, Homo sapien
cgcctgagcggccagaccaatttgtcagtctcc

SEQ ID NO: 978579 - DNA, 33 bp, Homo sapien
tacactttatgtaaggaaaggctgaaggagaac

SEQ ID NO: 978580 - DNA, 33 bp, Homo sapien
tacactttatgtaagggaaggctgaaggagaac

SEQ ID NO: 978581 - DNA, 33 bp, Homo sapien
aaatggaactggttgccattcaggggagtcaca

SEQ ID NO: 978582 - DNA, 33 bp, Homo sapien
aaatggaactggttgctattcaggggagtcaca

SEQ ID NO: 978583 - DNA, 33 bp, Homo sapien
gcctcctgagtttagaagaaaaatggaactggt

SEQ ID NO: 978584 - DNA, 33 bp, Homo sapien
gcctcctgagtttagaggaaaaatggaactggt

SEQ ID NO: 978585 - DNA, 33 bp, Homo sapien
cagcaacttcttgggaatagcacagtccgaagc

SEQ ID NO: 978586 - DNA, 33 bp, Homo sapien
cagcaacttcttgggagtagcacagtccgaagc

SEQ ID NO: 978587 - DNA, 33 bp, Homo sapien
gctctttctcaaagacagacgtaatgcattcct

SEQ ID NO: 978588 - DNA, 33 bp, Homo sapien
gctctttctcaaagacggacgtaatgcattcct

SEQ ID NO: 978589 - DNA, 33 bp, Homo sapien
tttctttactttctccccttactcggactcaaa

SEQ ID NO: 978590 - DNA, 33 bp, Homo sapien
tttctttactttctcctcttactcggactcaaa

SEQ ID NO: 978591 - DNA, 33 bp, Homo sapien
ttattaatacttgtaacgtgatcctatttttgc

SEQ ID NO: 978592 - DNA, 33 bp, Homo sapien
ttattaatacttgtaatgtgatcctatttttgc

SEQ ID NO: 978593 - DNA, 33 bp, Homo sapien
gtaaaatgtctggcaaacatctgattcatgtag

SEQ ID NO: 978594 - DNA, 33 bp, Homo sapien
gtaaaatgtctggcaagcatctgattcatgtag

SEQ ID NO: 978595 - DNA, 33 bp, Homo sapien
catcaggattgataaacgctcattgagtaactg

SEQ ID NO: 978596 - DNA, 33 bp, Homo sapien
catcaggattgataaatgctcattgagtaactg

SEQ ID NO: 978597 - DNA, 33 bp, Homo sapien
gtattagatcacaagcagaattaataaatgatt

SEQ ID NO: 978598 - DNA, 33 bp, Homo sapien
gtattagatcacaagcggaattaataaatgatt

SEQ ID NO: 978599 - DNA, 33 bp, Homo sapien
ttgagacaaacacagacagaaggaggtaatgtg

SEQ ID NO: 978600 - DNA, 33 bp, Homo sapien
ttgagacaaacacagagagaaggaggtaatgtg

SEQ ID NO: 978601 - DNA, 33 bp, Homo sapien
gaataatgcacctataaattcatgtttcacgta

SEQ ID NO: 978602 - DNA, 33 bp, Homo sapien
gaataatgcacctatacattcatgtttcacgta

SEQ ID NO: 978603 - DNA, 33 bp, Homo sapien
ttttttctagagcatagtacagcatgaccttag

SEQ ID NO: 978604 - DNA, 33 bp, Homo sapien
ttttttctagagcatattacagcatgaccttag

SEQ ID NO: 978605 - DNA, 33 bp, Homo sapien
caaggtgggttaaatgaagacatcgctcatctt

SEQ ID NO: 978606 - DNA, 33 bp, Homo sapien
caaggtgggttaaatgcagacatcgctcatctt

SEQ ID NO: 978607 - DNA, 33 bp, Homo sapien
tctgtggggtccagaaacacccctatctgtaga

SEQ ID NO: 978608 - DNA, 33 bp, Homo sapien
tctgtggggtccagaatcacccctatctgtaga

SEQ ID NO: 978609 - DNA, 33 bp, Homo sapien
atcttttatgatgctacctcccaaacatttgtg

SEQ ID NO: 978610 - DNA, 33 bp, Homo sapien
atcttttatgatgctagctcccaaacatttgtg

SEQ ID NO: 978611 - DNA, 33 bp, Homo sapien
atagaatgccagacttaaaggtttttgtaaaga

SEQ ID NO: 978612 - DNA, 33 bp, Homo sapien
atagaatgccagacttgaaggtttttgtaaaga

SEQ ID NO: 978613 - DNA, 33 bp, Homo sapien
agaagtctgatataggacactttgggctgaaat

SEQ ID NO: 978614 - DNA, 33 bp, Homo sapien
agaagtctgatataggtcactttgggctgaaat

SEQ ID NO: 978615 - DNA, 33 bp, Homo sapien
cttgttaacattgggaagagcattggcctacaa

SEQ ID NO: 978616 - DNA, 33 bp, Homo sapien
cttgttaacattgggaggagcattggcctacaa

SEQ ID NO: 978617 - DNA, 33 bp, Homo sapien
agagctgcattatacacaacagttgagtattct

SEQ ID NO: 978618 - DNA, 33 bp, Homo sapien
agagctgcattatacataacagttgagtattct

SEQ ID NO: 978619 - DNA, 33 bp, Homo sapien
caattacatcggcaacaaaaactcattttacaa

SEQ ID NO: 978620 - DNA, 33 bp, Homo sapien
caattacatcggcaacgaaaactcattttacaa

SEQ ID NO: 978621 - DNA, 33 bp, Homo sapien
gttgtgtaggacatcacggttctcagacacccc

SEQ ID NO: 978622 - DNA, 33 bp, Homo sapien
gttgtgtaggacatcatggttctcagacacccc

SEQ ID NO: 978623 - DNA, 33 bp, Homo sapien
gcaatgcacagtctcccaaatattccatcttca

SEQ ID NO: 978624 - DNA, 33 bp, Homo sapien
gcaatgcacagtctcctaaatattccatcttca

SEQ ID NO: 978625 - DNA, 33 bp, Homo sapien
gagggcttttagataaacacattcagtaatgat

SEQ ID NO: 978626 - DNA, 33 bp, Homo sapien
gagggcttttagataagcacattcagtaatgat

SEQ ID NO: 978627 - DNA, 33 bp, Homo sapien
taaacttggagtttctcaaaaataacttcatat

SEQ ID NO: 978628 - DNA, 33 bp, Homo sapien
taaacttggagtttctgaaaaataacttcatat

SEQ ID NO: 978629 - DNA, 33 bp, Homo sapien
tagacactttgcaataccaagctctagaatagt

SEQ ID NO: 978630 - DNA, 33 bp, Homo sapien
tagacactttgcaatatcaagctctagaatagt

SEQ ID NO: 978631 - DNA, 33 bp, Homo sapien
taagggaagccagagaataaggcctgttcacct

SEQ ID NO: 978632 - DNA, 33 bp, Homo sapien
taagggaagccagagagtaaggcctgttcacct

SEQ ID NO: 978633 - DNA, 33 bp, Homo sapien
acagacaggggcaccagaatggagttggaaaac

SEQ ID NO: 978634 - DNA, 33 bp, Homo sapien
acagacaggggcaccataatggagttggaaaac

SEQ ID NO: 978635 - DNA, 33 bp, Homo sapien
ctgagaggataatacacggtcattcataaatga

SEQ ID NO: 978636 - DNA, 33 bp, Homo sapien
ctgagaggataatacatggtcattcataaatga

SEQ ID NO: 978637 - DNA, 33 bp, Homo sapien
ctttagatagggcttgaataagtaataataata

SEQ ID NO: 978638 - DNA, 33 bp, Homo sapien
ctttagatagggcttggataagtaataataata

SEQ ID NO: 978639 - DNA, 33 bp, Homo sapien
ctcataatgtgtctgacagataaactagtaaag

SEQ ID NO: 978640 - DNA, 33 bp, Homo sapien
ctcataatgtgtctgatagataaactagtaaag

SEQ ID NO: 978641 - DNA, 33 bp, Homo sapien
aactgttacaaggaaacgctcaattttatgaat

SEQ ID NO: 978642 - DNA, 33 bp, Homo sapien
aactgttacaaggaaatgctcaattttatgaat

SEQ ID NO: 978643 - DNA, 33 bp, Homo sapien
gcaagtaccacagatacgtgcctcaaaaatctc

SEQ ID NO: 978644 - DNA, 33 bp, Homo sapien
gcaagtaccacagataggtgcctcaaaaatctc

SEQ ID NO: 978645 - DNA, 33 bp, Homo sapien
gaatagtaaagaatggaaaacccaatgagatat

SEQ ID NO: 978646 - DNA, 33 bp, Homo sapien
gaatagtaaagaatgggaaacccaatgagatat

SEQ ID NO: 978647 - DNA, 33 bp, Homo sapien
tattaggttgaaacagcatttattcatttttgc

SEQ ID NO: 978648 - DNA, 33 bp, Homo sapien
tattaggttgaaacaggatttattcatttttgc

SEQ ID NO: 978649 - DNA, 33 bp, Homo sapien
taaacaaccttttgaactggttcctcccagggt

SEQ ID NO: 978650 - DNA, 33 bp, Homo sapien
taaacaaccttttgaattggttcctcccagggt

SEQ ID NO: 978651 - DNA, 33 bp, Homo sapien
tagactttattgaggagaatctggatcattgga

SEQ ID NO: 978652 - DNA, 33 bp, Homo sapien
tagactttattgaggataatctggatcattgga

SEQ ID NO: 978653 - DNA, 33 bp, Homo sapien
tatgggtgtcttagaacaataaaaggcttgtac

SEQ ID NO: 978654 - DNA, 33 bp, Homo sapien
tatgggtgtcttagaataataaaaggcttgtac

SEQ ID NO: 978655 - DNA, 33 bp, Homo sapien
attttcacaggaccaaattgctgtctctaattt

SEQ ID NO: 978656 - DNA, 33 bp, Homo sapien
attttcacaggaccaacttgctgtctctaattt

SEQ ID NO: 978657 - DNA, 33 bp, Homo sapien
agatggggaaactgagactaaggcaaactaacg

SEQ ID NO: 978658 - DNA, 33 bp, Homo sapien
agatggggaaactgaggctaaggcaaactaacg

SEQ ID NO: 978659 - DNA, 33 bp, Homo sapien
ttaatttaaatgaacactgtgttcctgctacta

SEQ ID NO: 978660 - DNA, 33 bp, Homo sapien
ttaatttaaatgaacattgtgttcctgctacta

SEQ ID NO: 978661 - DNA, 33 bp, Homo sapien
ttttctctaatttgtagaaacctctcctgaaaa

SEQ ID NO: 978662 - DNA, 33 bp, Homo sapien
ttttctctaatttgtataaacctctcctgaaaa

SEQ ID NO: 978663 - DNA, 33 bp, Homo sapien
acagctttctcaaatcacattttctcttgaggt

SEQ ID NO: 978664 - DNA, 33 bp, Homo sapien
acagctttctcaaatcgcattttctcttgaggt

SEQ ID NO: 978665 - DNA, 33 bp, Homo sapien
tgtctagatcatatgactaacagccaagtaagc

SEQ ID NO: 978666 - DNA, 33 bp, Homo sapien
tgtctagatcatatgagtaacagccaagtaagc

SEQ ID NO: 978667 - DNA, 33 bp, Homo sapien
acagtcatttgctacaaggaaacaaccaacatc

SEQ ID NO: 978668 - DNA, 33 bp, Homo sapien
acagtcatttgctacagggaaacaaccaacatc

SEQ ID NO: 978669 - DNA, 33 bp, Homo sapien
aatgttaaccaagagaaaactaaagcagcacca

SEQ ID NO: 978670 - DNA, 33 bp, Homo sapien
aatgttaaccaagagataactaaagcagcacca

SEQ ID NO: 978671 - DNA, 33 bp, Homo sapien
tttagggcaaattaacaatatactctgagcttt

SEQ ID NO: 978672 - DNA, 33 bp, Homo sapien
tttagggcaaattaacgatatactctgagcttt

SEQ ID NO: 978673 - DNA, 33 bp, Homo sapien
atattaaatgagttgtaaatcttgtattctcta

SEQ ID NO: 978674 - DNA, 33 bp, Homo sapien
atattaaatgagttgtgaatcttgtattctcta

SEQ ID NO: 978675 - DNA, 33 bp, Homo sapien
aatgaagccagaattccaaaaaacataagctaa

SEQ ID NO: 978676 - DNA, 33 bp, Homo sapien
aatgaagccagaattctaaaaaacataagctaa

SEQ ID NO: 978677 - DNA, 33 bp, Homo sapien
tcatcactaacctattaaaagcaaattttgtgt

SEQ ID NO: 978678 - DNA, 33 bp, Homo sapien
tcatcactaacctatttaaagcaaattttgtgt

SEQ ID NO: 978679 - DNA, 33 bp, Homo sapien
agcatggaaattcaaactcatggttcaatgact

SEQ ID NO: 978680 - DNA, 33 bp, Homo sapien
agcatggaaattcaaattcatggttcaatgact

SEQ ID NO: 978681 - DNA, 33 bp, Homo sapien
gcacatggccacagaggagacaaatgttttccg

SEQ ID NO: 978682 - DNA, 33 bp, Homo sapien
gcacatggccacagagtagacaaatgttttccg

SEQ ID NO: 978683 - DNA, 33 bp, Homo sapien
acaatgcagttaagagaagtaatgccggccggg

SEQ ID NO: 978684 - DNA, 33 bp, Homo sapien
acaatgcagttaagaggagtaatgccggccggg

SEQ ID NO: 978685 - DNA, 33 bp, Homo sapien
gccagggagacaggaaccatatttttcacgtct

SEQ ID NO: 978686 - DNA, 33 bp, Homo sapien
gccagggagacaggaatcatatttttcacgtct

SEQ ID NO: 978687 - DNA, 33 bp, Homo sapien
aaataactttcgagcaactgagctataaccttg

SEQ ID NO: 978688 - DNA, 33 bp, Homo sapien
aaataactttcgagcatctgagctataaccttg

SEQ ID NO: 978689 - DNA, 33 bp, Homo sapien
tttagcactccaaaaaattctctagagttacat

SEQ ID NO: 978690 - DNA, 33 bp, Homo sapien
tttagcactccaaaaatttctctagagttacat

SEQ ID NO: 978691 - DNA, 33 bp, Homo sapien
acagacttgagctttccactcactttagtcctt

SEQ ID NO: 978692 - DNA, 33 bp, Homo sapien
acagacttgagctttctactcactttagtcctt

SEQ ID NO: 978693 - DNA, 33 bp, Homo sapien
ggcaagataggcactcaccttgagtactcgggt

SEQ ID NO: 978694 - DNA, 33 bp, Homo sapien
ggcaagataggcactcgccttgagtactcgggt

SEQ ID NO: 978695 - DNA, 33 bp, Homo sapien
gaaaaagaactttggacgaatgtttataggagt

SEQ ID NO: 978696 - DNA, 33 bp, Homo sapien
gaaaaagaactttggatgaatgtttataggagt

SEQ ID NO: 978697 - DNA, 33 bp, Homo sapien
gttgttttaggacacactgatggcagctgtggg

SEQ ID NO: 978698 - DNA, 33 bp, Homo sapien
gttgttttaggacacattgatggcagctgtggg

SEQ ID NO: 978699 - DNA, 33 bp, Homo sapien
catatgggttacattaagatttcacaacaaaat

SEQ ID NO: 978700 - DNA, 33 bp, Homo sapien
catatgggttacattacgatttcacaacaaaat

SEQ ID NO: 978701 - DNA, 33 bp, Homo sapien
tgggaaatgctgaatacgttggaatttatggca

SEQ ID NO: 978702 - DNA, 33 bp, Homo sapien
tgggaaatgctgaatatgttggaatttatggca

SEQ ID NO: 978703 - DNA, 33 bp, Homo sapien
agagctgttttattcaatacattacagccacta

SEQ ID NO: 978704 - DNA, 33 bp, Homo sapien
agagctgttttattcagtacattacagccacta

SEQ ID NO: 978705 - DNA, 33 bp, Homo sapien
agtgagtggagtgtgaagaagttgagacagaaa

SEQ ID NO: 978706 - DNA, 33 bp, Homo sapien
agtgagtggagtgtgaggaagttgagacagaaa

SEQ ID NO: 978707 - DNA, 33 bp, Homo sapien
aaataggcaagtaagccccaacttcaactctgc

SEQ ID NO: 978708 - DNA, 33 bp, Homo sapien
aaataggcaagtaagctccaacttcaactctgc

SEQ ID NO: 978709 - DNA, 33 bp, Homo sapien
tagtcttggccatataaaaataaaaaagaaatg

SEQ ID NO: 978710 - DNA, 33 bp, Homo sapien
tagtcttggccatatagaaataaaaaagaaatg

SEQ ID NO: 978711 - DNA, 33 bp, Homo sapien
tacatctttacctaaaatgattaacaagtagcc

SEQ ID NO: 978712 - DNA, 33 bp, Homo sapien
tacatctttacctaaagtgattaacaagtagcc

SEQ ID NO: 978713 - DNA, 33 bp, Homo sapien
acaaaaggactattgcaaaggttattctgcttt

SEQ ID NO: 978714 - DNA, 33 bp, Homo sapien
acaaaaggactattgcgaaggttattctgcttt

SEQ ID NO: 978715 - DNA, 33 bp, Homo sapien
aacactgaggctcacaaaagttgggtcatttat

SEQ ID NO: 978716 - DNA, 33 bp, Homo sapien
aacactgaggctcacagaagttgggtcatttat

SEQ ID NO: 978717 - DNA, 33 bp, Homo sapien
agctaggtgactgagacgcatgaaggtaagcag

SEQ ID NO: 978718 - DNA, 33 bp, Homo sapien
agctaggtgactgagatgcatgaaggtaagcag

SEQ ID NO: 978719 - DNA, 33 bp, Homo sapien
ataatgatctgtgaaactgacccattatgctgt

SEQ ID NO: 978720 - DNA, 33 bp, Homo sapien
ataatgatctgtgaaattgacccattatgctgt

SEQ ID NO: 978721 - DNA, 33 bp, Homo sapien
cccttaatttttaaaccgacacacacttcaagg

SEQ ID NO: 978722 - DNA, 33 bp, Homo sapien
cccttaatttttaaactgacacacacttcaagg

SEQ ID NO: 978723 - DNA, 33 bp, Homo sapien
attaactctgtgacccacttcattcacttgccc

SEQ ID NO: 978724 - DNA, 33 bp, Homo sapien
attaactctgtgaccctcttcattcacttgccc

SEQ ID NO: 978725 - DNA, 33 bp, Homo sapien
ttccctttgctatgccacaaccccaatgtgaaa

SEQ ID NO: 978726 - DNA, 33 bp, Homo sapien
ttccctttgctatgccgcaaccccaatgtgaaa

SEQ ID NO: 978727 - DNA, 33 bp, Homo sapien
tgctgcatcgtcaagagagttgatagtgaagtt

SEQ ID NO: 978728 - DNA, 33 bp, Homo sapien
tgctgcatcgtcaagatagttgatagtgaagtt

SEQ ID NO: 978729 - DNA, 33 bp, Homo sapien
agctcctctgagaactaaatgctcttctattta

SEQ ID NO: 978730 - DNA, 33 bp, Homo sapien
agctcctctgagaactgaatgctcttctattta

SEQ ID NO: 978731 - DNA, 33 bp, Homo sapien
tgatgataaggatcgacggaagggagctaaagg

SEQ ID NO: 978732 - DNA, 33 bp, Homo sapien
tgatgataaggatcgatggaagggagctaaagg

SEQ ID NO: 978733 - DNA, 33 bp, Homo sapien
acacaactggcgtgaacaaaagagagtccccac

SEQ ID NO: 978734 - DNA, 33 bp, Homo sapien
acacaactggcgtgaataaaagagagtccccac

SEQ ID NO: 978735 - DNA, 33 bp, Homo sapien
aaatttgaggcaaacaatatcttatagagaagg

SEQ ID NO: 978736 - DNA, 33 bp, Homo sapien
aaatttgaggcaaacagtatcttatagagaagg

SEQ ID NO: 978737 - DNA, 33 bp, Homo sapien
ctctgttgtccacaatcataactcaatcatagc

SEQ ID NO: 978738 - DNA, 33 bp, Homo sapien
ctctgttgtccacaatgataactcaatcatagc

SEQ ID NO: 978739 - DNA, 33 bp, Homo sapien
agaaaggagtagatgaaacagctggccactcat

SEQ ID NO: 978740 - DNA, 33 bp, Homo sapien
agaaaggagtagatgagacagctggccactcat

SEQ ID NO: 978741 - DNA, 33 bp, Homo sapien
tatgagtggcaaaattcaaataggattattcgg

SEQ ID NO: 978742 - DNA, 33 bp, Homo sapien
tatgagtggcaaaatttaaataggattattcgg

SEQ ID NO: 978743 - DNA, 33 bp, Homo sapien
aggcattctaaatggcaaaaattccaggtgtta

SEQ ID NO: 978744 - DNA, 33 bp, Homo sapien
aggcattctaaatggcgaaaattccaggtgtta

SEQ ID NO: 978745 - DNA, 33 bp, Homo sapien
gccatctaacaggactaacaggaaaactacaga

SEQ ID NO: 978746 - DNA, 33 bp, Homo sapien
gccatctaacaggactgacaggaaaactacaga

SEQ ID NO: 978747 - DNA, 33 bp, Homo sapien
agatctataaaagagccgattgcgtatttcatt

SEQ ID NO: 978748 - DNA, 33 bp, Homo sapien
agatctataaaagagctgattgcgtatttcatt

SEQ ID NO: 978749 - DNA, 33 bp, Homo sapien
ctttcttgtcattaaaaatcctcctgattgagg

SEQ ID NO: 978750 - DNA, 33 bp, Homo sapien
ctttcttgtcattaaatatcctcctgattgagg

SEQ ID NO: 978751 - DNA, 33 bp, Homo sapien
gagaaaatatttgaaaggataccatgcattatt

SEQ ID NO: 978752 - DNA, 33 bp, Homo sapien
gagaaaatatttgaaatgataccatgcattatt

SEQ ID NO: 978753 - DNA, 33 bp, Homo sapien
attagtttgaaaaataatatctcagtcatcaag

SEQ ID NO: 978754 - DNA, 33 bp, Homo sapien
attagtttgaaaaatagtatctcagtcatcaag

SEQ ID NO: 978755 - DNA, 33 bp, Homo sapien
aagtgcccacacccccagatttactctgtagat

SEQ ID NO: 978756 - DNA, 33 bp, Homo sapien
aagtgcccacacccccggatttactctgtagat

SEQ ID NO: 978757 - DNA, 33 bp, Homo sapien
cttggcatgggctgaaccaggaatgacaatgta

SEQ ID NO: 978758 - DNA, 33 bp, Homo sapien
cttggcatgggctgaatcaggaatgacaatgta

SEQ ID NO: 978759 - DNA, 33 bp, Homo sapien
ttgattagagcatatgaaaatcgtcctatgttc

SEQ ID NO: 978760 - DNA, 33 bp, Homo sapien
ttgattagagcatatgtaaatcgtcctatgttc

SEQ ID NO: 978761 - DNA, 33 bp, Homo sapien
cccaccaacctcaggaatccaagaaataccatc

SEQ ID NO: 978762 - DNA, 33 bp, Homo sapien
cccaccaacctcaggagtccaagaaataccatc

SEQ ID NO: 978763 - DNA, 33 bp, Homo sapien
cccaccatagtgtagacaattactgggttcagt

SEQ ID NO: 978764 - DNA, 33 bp, Homo sapien
cccaccatagtgtagagaattactgggttcagt

SEQ ID NO: 978765 - DNA, 33 bp, Homo sapien
atattaccataatagcaaaatgcattacttaca

SEQ ID NO: 978766 - DNA, 33 bp, Homo sapien
atattaccataatagcgaaatgcattacttaca

SEQ ID NO: 978767 - DNA, 33 bp, Homo sapien
caaagcacaaagaaaactattcttggctgaggc

SEQ ID NO: 978768 - DNA, 33 bp, Homo sapien
caaagcacaaagaaaagtattcttggctgaggc

SEQ ID NO: 978769 - DNA, 33 bp, Homo sapien
agagactttcctcaaccatccaacattctctta

SEQ ID NO: 978770 - DNA, 33 bp, Homo sapien
agagactttcctcaactatccaacattctctta

SEQ ID NO: 978771 - DNA, 33 bp, Homo sapien
ctctgctcttttctttcgtgatacttatctcaa

SEQ ID NO: 978772 - DNA, 33 bp, Homo sapien
ctctgctcttttcttttgtgatacttatctcaa

SEQ ID NO: 978773 - DNA, 33 bp, Homo sapien
tacagagctcatcagaatatgctaatgttatca

SEQ ID NO: 978774 - DNA, 33 bp, Homo sapien
tacagagctcatcagagtatgctaatgttatca

SEQ ID NO: 978775 - DNA, 33 bp, Homo sapien
ttgttgacatctgggaaagtcgctatcaacagc

SEQ ID NO: 978776 - DNA, 33 bp, Homo sapien
ttgttgacatctgggagagtcgctatcaacagc

SEQ ID NO: 978777 - DNA, 33 bp, Homo sapien
aaaagagagggtgagcaaatcatccatcatctc

SEQ ID NO: 978778 - DNA, 33 bp, Homo sapien
aaaagagagggtgagcgaatcatccatcatctc

SEQ ID NO: 978779 - DNA, 33 bp, Homo sapien
gaattctggagtggcactgaaaagctggaggac

SEQ ID NO: 978780 - DNA, 33 bp, Homo sapien
gaattctggagtggcattgaaaagctggaggac

SEQ ID NO: 978781 - DNA, 33 bp, Homo sapien
tggcccatgatcccagcctagtgaagattaatg

SEQ ID NO: 978782 - DNA, 33 bp, Homo sapien
tggcccatgatcccagtctagtgaagattaatg

SEQ ID NO: 978783 - DNA, 33 bp, Homo sapien
agcaactaacaagttccctaagtcagcaactat

SEQ ID NO: 978784 - DNA, 33 bp, Homo sapien
agcaactaacaagttctctaagtcagcaactat

SEQ ID NO: 978785 - DNA, 33 bp, Homo sapien
aattgtgtaatcttgaacagtatcctcttgaca

SEQ ID NO: 978786 - DNA, 33 bp, Homo sapien
aattgtgtaatcttgagcagtatcctcttgaca

SEQ ID NO: 978787 - DNA, 33 bp, Homo sapien
caacaaaatatcgtaaaccatgcaatgtaatcc

SEQ ID NO: 978788 - DNA, 33 bp, Homo sapien
caacaaaatatcgtaagccatgcaatgtaatcc

SEQ ID NO: 978789 - DNA, 33 bp, Homo sapien
caaccattattgtgtaaaaccttaagcagaact

SEQ ID NO: 978790 - DNA, 33 bp, Homo sapien
caaccattattgtgtagaaccttaagcagaact

SEQ ID NO: 978791 - DNA, 33 bp, Homo sapien
gcaggagacagtgaggaaggaacaaatactgat

SEQ ID NO: 978792 - DNA, 33 bp, Homo sapien
gcaggagacagtgagggaggaacaaatactgat

SEQ ID NO: 978793 - DNA, 33 bp, Homo sapien
attttgaaaataccccgaagtctctttagcaca

SEQ ID NO: 978794 - DNA, 33 bp, Homo sapien
attttgaaaatacccctaagtctctttagcaca

SEQ ID NO: 978795 - DNA, 33 bp, Homo sapien
gtctgcatagtcaagagctttgcatctccttcc

SEQ ID NO: 978796 - DNA, 33 bp, Homo sapien
gtctgcatagtcaagatctttgcatctccttcc

SEQ ID NO: 978797 - DNA, 33 bp, Homo sapien
cccgggtggctgaatcactgcacctgctgagtg

SEQ ID NO: 978798 - DNA, 33 bp, Homo sapien
cccgggtggctgaatcgctgcacctgctgagtg

SEQ ID NO: 978799 - DNA, 33 bp, Homo sapien
aagcctagaagtggccagaggaattggagaccc

SEQ ID NO: 978800 - DNA, 33 bp, Homo sapien
aagcctagaagtggccggaggaattggagaccc

SEQ ID NO: 978801 - DNA, 33 bp, Homo sapien
attgttctacaatgcaaacttgaagatttctct

SEQ ID NO: 978802 - DNA, 33 bp, Homo sapien
attgttctacaatgcacacttgaagatttctct

SEQ ID NO: 978803 - DNA, 33 bp, Homo sapien
cttctgtacagtgatgccaagtttattctccgt

SEQ ID NO: 978804 - DNA, 33 bp, Homo sapien
cttctgtacagtgatgtcaagtttattctccgt

SEQ ID NO: 978805 - DNA, 33 bp, Homo sapien
cgtagtaggggatcagaaagtgctagtttcttt

SEQ ID NO: 978806 - DNA, 33 bp, Homo sapien
cgtagtaggggatcagtaagtgctagtttcttt

SEQ ID NO: 978807 - DNA, 33 bp, Homo sapien
tcagtgttagatcaaacccttaccaccttccct

SEQ ID NO: 978808 - DNA, 33 bp, Homo sapien
tcagtgttagatcaaatccttaccaccttccct

SEQ ID NO: 978809 - DNA, 33 bp, Homo sapien
catatcagaattatagcagtaggaagtgactgg

SEQ ID NO: 978810 - DNA, 33 bp, Homo sapien
catatcagaattataggagtaggaagtgactgg

SEQ ID NO: 978811 - DNA, 33 bp, Homo sapien
gtgtttaacctcagtcagaccctgggcctcttg

SEQ ID NO: 978812 - DNA, 33 bp, Homo sapien
gtgtttaacctcagtctgaccctgggcctcttg

SEQ ID NO: 978813 - DNA, 33 bp, Homo sapien
gctccttcttgacacacccaattgtgcctttta

SEQ ID NO: 978814 - DNA, 33 bp, Homo sapien
gctccttcttgacacatccaattgtgcctttta

SEQ ID NO: 978815 - DNA, 33 bp, Homo sapien
ctagcagggtacctagaaaatggttggtgctca

SEQ ID NO: 978816 - DNA, 33 bp, Homo sapien
ctagcagggtacctagcaaatggttggtgctca

SEQ ID NO: 978817 - DNA, 33 bp, Homo sapien
ctcactaaattagcatcaaaatggcttacctta

SEQ ID NO: 978818 - DNA, 33 bp, Homo sapien
ctcactaaattagcatgaaaatggcttacctta

SEQ ID NO: 978819 - DNA, 33 bp, Homo sapien
cattcatcattgcccacaagtttgtatatattc

SEQ ID NO: 978820 - DNA, 33 bp, Homo sapien
cattcatcattgcccagaagtttgtatatattc

SEQ ID NO: 978821 - DNA, 33 bp, Homo sapien
ggctacaccatttctaccttatgatggattgct

SEQ ID NO: 978822 - DNA, 33 bp, Homo sapien
ggctacaccatttctatcttatgatggattgct

SEQ ID NO: 978823 - DNA, 33 bp, Homo sapien
tgaatctgctgtttcaagtctatagttaaacat

SEQ ID NO: 978824 - DNA, 33 bp, Homo sapien
tgaatctgctgtttcaggtctatagttaaacat

SEQ ID NO: 978825 - DNA, 33 bp, Homo sapien
ggcaggggctgttcacacagagctttgcaaacc

SEQ ID NO: 978826 - DNA, 33 bp, Homo sapien
ggcaggggctgttcacgcagagctttgcaaacc

SEQ ID NO: 978827 - DNA, 33 bp, Homo sapien
tttacaaaatgcttagccactataattgatttc

SEQ ID NO: 978828 - DNA, 33 bp, Homo sapien
tttacaaaatgcttagtcactataattgatttc

SEQ ID NO: 978829 - DNA, 33 bp, Homo sapien; identical to SEQ ID NO: 978827

SEQ ID NO: 978830 - DNA, 33 bp, Homo sapien; identical to SEQ ID NO: 978828

SEQ ID NO: 978831 - DNA, 33 bp, Homo sapien
ccaactacttgatcaaactcaaaacagcagtca

SEQ ID NO: 978832 - DNA, 33 bp, Homo sapien
ccaactacttgatcaagctcaaaacagcagtca

SEQ ID NO: 978833 - DNA, 33 bp, Homo sapien
gtaatatgccagctcccagttttccttccgcca

SEQ ID NO: 978834 - DNA, 33 bp, Homo sapien
gtaatatgccagctcctagttttccttccgcca

SEQ ID NO: 978835 - DNA, 33 bp, Homo sapien
gtttggggttgtcatacgaattggaggttctct

SEQ ID NO: 978836 - DNA, 33 bp, Homo sapien
gtttggggttgtcatatgaattggaggttctct

SEQ ID NO: 978837 - DNA, 33 bp, Homo sapien
gtttcatatctaagaaactcggacgcccatgag

SEQ ID NO: 978838 - DNA, 33 bp, Homo sapien
gtttcatatctaagaacctcggacgcccatgag

SEQ ID NO: 978839 - DNA, 33 bp, Homo sapien
atgagtcagtgttagccaggcaaggaagggcaa

SEQ ID NO: 978840 - DNA, 33 bp, Homo sapien
atgagtcagtgttagctaggcaaggaagggcaa

SEQ ID NO: 978841 - DNA, 33 bp, Homo sapien
gatggattagtgacaacggatttaaagacagga

SEQ ID NO: 978842 - DNA, 33 bp, Homo sapien
gatggattagtgacaatggatttaaagacagga

SEQ ID NO: 978843 - DNA, 33 bp, Homo sapien
tgtgattactctagcaagttctattagaaatat

SEQ ID NO: 978844 - DNA, 33 bp, Homo sapien
tgtgattactctagcaggttctattagaaatat

SEQ ID NO: 978845 - DNA, 33 bp, Homo sapien
taagccaaactgcccaggatctcattacaccac

SEQ ID NO: 978846 - DNA, 33 bp, Homo sapien
taagccaaactgcccatgatctcattacaccac

SEQ ID NO: 978847 - DNA, 33 bp, Homo sapien
tcctcaaagtcctcaagtctccattcggaacta

SEQ ID NO: 978848 - DNA, 33 bp, Homo sapien
tcctcaaagtcctcaattctccattcggaacta

SEQ ID NO: 978849 - DNA, 33 bp, Homo sapien
aactgtacaccttaaaatgatcacaataatacc

SEQ ID NO: 978850 - DNA, 33 bp, Homo sapien
aactgtacaccttaaagtgatcacaataatacc

SEQ ID NO: 978851 - DNA, 33 bp, Homo sapien
caacagtctatgtacactgaaagcatatttaca

SEQ ID NO: 978852 - DNA, 33 bp, Homo sapien
caacagtctatgtacattgaaagcatatttaca

SEQ ID NO: 978853 - DNA, 33 bp, Homo sapien
tatgtattcatacaaacctaagcacctatgtca

SEQ ID NO: 978854 - DNA, 33 bp, Homo sapien
tatgtattcatacaaatctaagcacctatgtca

SEQ ID NO: 978855 - DNA, 33 bp, Homo sapien
catataacatctggcaacatcctgaaatcacac

SEQ ID NO: 978856 - DNA, 33 bp, Homo sapien
catataacatctggcagcatcctgaaatcacac

SEQ ID NO: 978857 - DNA, 33 bp, Homo sapien
tttttcatttatctcacgtcaaaggaagttcat

SEQ ID NO: 978858 - DNA, 33 bp, Homo sapien
tttttcatttatctcaggtcaaaggaagttcat

SEQ ID NO: 978859 - DNA, 33 bp, Homo sapien
tgtaaattaggtgccaataacaaaccagtactg

SEQ ID NO: 978860 - DNA, 33 bp, Homo sapien
tgtaaattaggtgccagtaacaaaccagtactg

SEQ ID NO: 978861 - DNA, 33 bp, Homo sapien
aaagaggagttatctgaaatactggtaatattc

SEQ ID NO: 978862 - DNA, 33 bp, Homo sapien
aaagaggagttatctggaatactggtaatattc

SEQ ID NO: 978863 - DNA, 33 bp, Homo sapien
ccatgtgtagtttccaatgaaacaggaaggact

SEQ ID NO: 978864 - DNA, 33 bp, Homo sapien
ccatgtgtagtttccagtgaaacaggaaggact

SEQ ID NO: 978865 - DNA, 33 bp, Homo sapien
aaactgttattctatcacagagttcctcaacct

SEQ ID NO: 978866 - DNA, 33 bp, Homo sapien
aaactgttattctatcgcagagttcctcaacct

SEQ ID NO: 978867 - DNA, 33 bp, Homo sapien
ataaggtcttagcttccaaccactctatggaac

SEQ ID NO: 978868 - DNA, 33 bp, Homo sapien
ataaggtcttagcttctaaccactctatggaac

SEQ ID NO: 978869 - DNA, 33 bp, Homo sapien
cagagcgatatgtcaccaatatcacagtgtgta

SEQ ID NO: 978870 - DNA, 33 bp, Homo sapien
cagagcgatatgtcactaatatcacagtgtgta

SEQ ID NO: 978871 - DNA, 33 bp, Homo sapien
acaacttcaaaataaaattgctcactcctagat

SEQ ID NO: 978872 - DNA, 33 bp, Homo sapien
acaacttcaaaataaacttgctcactcctagat

SEQ ID NO: 978873 - DNA, 33 bp, Homo sapien
ccaattttacagatgacgccttgaggcttagag

SEQ ID NO: 978874 - DNA, 33 bp, Homo sapien
ccaattttacagatgatgccttgaggcttagag

SEQ ID NO: 978875 - DNA, 33 bp, Homo sapien
gttgaaagatgaataaaagaattcctttgctaa

SEQ ID NO: 978876 - DNA, 33 bp, Homo sapien
gttgaaagatgaataagagaattcctttgctaa

SEQ ID NO: 978877 - DNA, 33 bp, Homo sapien
cacatcaatagcttcaaattgatacaaagacaa

SEQ ID NO: 978878 - DNA, 33 bp, Homo sapien
cacatcaatagcttcacattgatacaaagacaa

SEQ ID NO: 978879 - DNA, 33 bp, Homo sapien
gcttccctctatttcactacctgtgccatttat

SEQ ID NO: 978880 - DNA, 33 bp, Homo sapien
gcttccctctatttcattacctgtgccatttat

SEQ ID NO: 978881 - DNA, 33 bp, Homo sapien
tgttttgcatgtggtacgacatggatatataac

SEQ ID NO: 978882 - DNA, 33 bp, Homo sapien
tgttttgcatgtggtatgacatggatatataac

SEQ ID NO: 978883 - DNA, 33 bp, Homo sapien
gatgtaatgactaacactaaagcatccatcttg

SEQ ID NO: 978884 - DNA, 33 bp, Homo sapien
gatgtaatgactaacagtaaagcatccatcttg

SEQ ID NO: 978885 - DNA, 33 bp, Homo sapien
aaaacttcacaatatcaagctgcaattcttttt

SEQ ID NO: 978886 - DNA, 33 bp, Homo sapien
aaaacttcacaatatcgagctgcaattcttttt

SEQ ID NO: 978887 - DNA, 33 bp, Homo sapien
aagctttgtaaagttacgaacatggaaacccta

SEQ ID NO: 978888 - DNA, 33 bp, Homo sapien
aagctttgtaaagttatgaacatggaaacccta

SEQ ID NO: 978889 - DNA, 33 bp, Homo sapien
cttggagacctgttaactctgtaaaagcaactt

SEQ ID NO: 978890 - DNA, 33 bp, Homo sapien
cttggagacctgttaattctgtaaaagcaactt

SEQ ID NO: 978891 - DNA, 33 bp, Homo sapien
cttcccactgttaatgcaggattcagctccctt

SEQ ID NO: 978892 - DNA, 33 bp, Homo sapien
cttcccactgttaatgtaggattcagctccctt

SEQ ID NO: 978893 - DNA, 33 bp, Homo sapien
gaactggagaaaaaatgaaccagaaccatgatg

SEQ ID NO: 978894 - DNA, 33 bp, Homo sapien
gaactggagaaaaaattaaccagaaccatgatg

SEQ ID NO: 978895 - DNA, 33 bp, Homo sapien
cctttttatgaggaaaccaatagccttctcaga

SEQ ID NO: 978896 - DNA, 33 bp, Homo sapien
cctttttatgaggaaatcaatagccttctcaga

SEQ ID NO: 978897 - DNA, 33 bp, Homo sapien
gcagtctcggctctggcacagtttttcatctca

SEQ ID NO: 978898 - DNA, 33 bp, Homo sapien
gcagtctcggctctggtacagtttttcatctca

SEQ ID NO: 978899 - DNA, 33 bp, Homo sapien
gttttacgatgggaaagaagtcccgaaatcata

SEQ ID NO: 978900 - DNA, 33 bp, Homo sapien
gttttacgatgggaaataagtcccgaaatcata

SEQ ID NO: 978901 - DNA, 33 bp, Homo sapien
cctgtgaactagggatcatcatagctactccgt

SEQ ID NO: 978902 - DNA, 33 bp, Homo sapien
cctgtgaactagggatgatcatagctactccgt

SEQ ID NO: 978903 - DNA, 33 bp, Homo sapien
caaactgtggaatgtacgcacagtggaatatta

SEQ ID NO: 978904 - DNA, 33 bp, Homo sapien
caaactgtggaatgtatgcacagtggaatatta

SEQ ID NO: 978905 - DNA, 33 bp, Homo sapien
ctcaattctcttattccatttcaccttcagact

SEQ ID NO: 978906 - DNA, 33 bp, Homo sapien
ctcaattctcttattctatttcaccttcagact

SEQ ID NO: 978907 - DNA, 33 bp, Homo sapien
atttcatttagtggaaaatatgtatcaagttgt

SEQ ID NO: 978908 - DNA, 33 bp, Homo sapien
atttcatttagtggaagatatgtatcaagttgt

SEQ ID NO: 978909 - DNA, 33 bp, Homo sapien
tattttggcagctgacgatcctaggcctagtga

SEQ ID NO: 978910 - DNA, 33 bp, Homo sapien
tattttggcagctgactatcctaggcctagtga

SEQ ID NO: 978911 - DNA, 33 bp, Homo sapien
atcaatcagtagaaaaatcattcttggcctatt

SEQ ID NO: 978912 - DNA, 33 bp, Homo sapien
atcaatcagtagaaaagtcattcttggcctatt

SEQ ID NO: 978913 - DNA, 33 bp, Homo sapien
ttcttttttcaaacccaagcaaggaaaatcaga

SEQ ID NO: 978914 - DNA, 33 bp, Homo sapien
ttcttttttcaaacccgagcaaggaaaatcaga

SEQ ID NO: 978915 - DNA, 33 bp, Homo sapien
gaaagacagaatccccacatagctttgctgccc

SEQ ID NO: 978916 - DNA, 33 bp, Homo sapien
gaaagacagaatccccgcatagctttgctgccc

SEQ ID NO: 978917 - DNA, 33 bp, Homo sapien
tgtttaattccaaaagcagtgtgctgaaaaatg

SEQ ID NO: 978918 - DNA, 33 bp, Homo sapien
tgtttaattccaaaagtagtgtgctgaaaaatg

SEQ ID NO: 978919 - DNA, 33 bp, Homo sapien
gtgtctgtggtgtaaactgggtcccttccgagt

SEQ ID NO: 978920 - DNA, 33 bp, Homo sapien
gtgtctgtggtgtaaattgggtcccttccgagt

SEQ ID NO: 978921 - DNA, 33 bp, Homo sapien
gctttgcacttgtagggacatttggatgacaca

SEQ ID NO: 978922 - DNA, 33 bp, Homo sapien
gctttgcacttgtaggtacatttggatgacaca

SEQ ID NO: 978923 - DNA, 33 bp, Homo sapien
aattattttcagcgcacatagtgagtgatagga

SEQ ID NO: 978924 - DNA, 33 bp, Homo sapien
aattattttcagcgcatatagtgagtgatagga

SEQ ID NO: 978925 - DNA, 33 bp, Homo sapien
tgattcctttggaatcaagaaagcctgaggcct

SEQ ID NO: 978926 - DNA, 33 bp, Homo sapien
tgattcctttggaatcgagaaagcctgaggcct

SEQ ID NO: 978927 - DNA, 33 bp, Homo sapien
gcctacttaaagactccataaagtggaagtatc

SEQ ID NO: 978928 - DNA, 33 bp, Homo sapien
gcctacttaaagactctataaagtggaagtatc

SEQ ID NO: 978929 - DNA, 33 bp, Homo sapien
ttcatctgtatagtagacataatagctctatca

SEQ ID NO: 978930 - DNA, 33 bp, Homo sapien
ttcatctgtatagtaggcataatagctctatca

SEQ ID NO: 978931 - DNA, 33 bp, Homo sapien
aattttaacaaagtgaacacgttcatgtcacca

SEQ ID NO: 978932 - DNA, 33 bp, Homo sapien
aattttaacaaagtgatcacgttcatgtcacca

SEQ ID NO: 978933 - DNA, 33 bp, Homo sapien
aagaaaagcggcttaactggatcatagctctgc

SEQ ID NO: 978934 - DNA, 33 bp, Homo sapien
aagaaaagcggcttaattggatcatagctctgc

SEQ ID NO: 978935 - DNA, 33 bp, Homo sapien
ccaaagtgtttcttctaacttgtgaatctgatc

SEQ ID NO: 978936 - DNA, 33 bp, Homo sapien
ccaaagtgtttcttctcacttgtgaatctgatc

SEQ ID NO: 978937 - DNA, 33 bp, Homo sapien
agttcttgaggttggaacattcactttcttcct

SEQ ID NO: 978938 - DNA, 33 bp, Homo sapien
agttcttgaggttggaccattcactttcttcct

SEQ ID NO: 978939 - DNA, 33 bp, Homo sapien
gctctgttacagtatcggaaagccaagtagtgg

SEQ ID NO: 978940 - DNA, 33 bp, Homo sapien
gctctgttacagtatctgaaagccaagtagtgg

SEQ ID NO: 978941 - DNA, 33 bp, Homo sapien
ccacaggctagaaaggaagtctctgagagctac

SEQ ID NO: 978942 - DNA, 33 bp, Homo sapien
ccacaggctagaaagggagtctctgagagctac

SEQ ID NO: 978943 - DNA, 33 bp, Homo sapien
gaaaagctaatcttgccagttcaaggtcattct

SEQ ID NO: 978944 - DNA, 33 bp, Homo sapien
gaaaagctaatcttgctagttcaaggtcattct

SEQ ID NO: 978945 - DNA, 33 bp, Homo sapien
tgcctagagtgatttccagaaaccagagagcaa

SEQ ID NO: 978946 - DNA, 33 bp, Homo sapien
tgcctagagtgatttcgagaaaccagagagcaa

SEQ ID NO: 978947 - DNA, 33 bp, Homo sapien
atcctctaggtttgacactagatatttacggct

SEQ ID NO: 978948 - DNA, 33 bp, Homo sapien
atcctctaggtttgaccctagatatttacggct

SEQ ID NO: 978949 - DNA, 33 bp, Homo sapien
tgagtagcatgagttcacacaataggcaacagg

SEQ ID NO: 978950 - DNA, 33 bp, Homo sapien
tgagtagcatgagttcccacaataggcaacagg

SEQ ID NO: 978951 - DNA, 33 bp, Homo sapien
cgttggctgtgggagccctggagataccaaagg

SEQ ID NO: 978952 - DNA, 33 bp, Homo sapien
cgttggctgtgggagctctggagataccaaagg

SEQ ID NO: 978953 - DNA, 33 bp, Homo sapien
ttataaatctgtatgcccttcttactttccagc

SEQ ID NO: 978954 - DNA, 33 bp, Homo sapien
ttataaatctgtatgctcttcttactttccagc

SEQ ID NO: 978955 - DNA, 33 bp, Homo sapien
atcagggtgtctgagaacttaagtgacttactg

SEQ ID NO: 978956 - DNA, 33 bp, Homo sapien
atcagggtgtctgagagcttaagtgacttactg

SEQ ID NO: 978957 - DNA, 33 bp, Homo sapien
tgcctttgggagcatcactttgatctgatttca

SEQ ID NO: 978958 - DNA, 33 bp, Homo sapien
tgcctttgggagcatcgctttgatctgatttca

SEQ ID NO: 978959 - DNA, 33 bp, Homo sapien
aatagtttcatggtcaacctagttataacggta

SEQ ID NO: 978960 - DNA, 33 bp, Homo sapien
aatagtttcatggtcagcctagttataacggta

SEQ ID NO: 978961 - DNA, 33 bp, Homo sapien
agcaagaggcctaatacgtaacaaatgcttaaa

SEQ ID NO: 978962 - DNA, 33 bp, Homo sapien
agcaagaggcctaatatgtaacaaatgcttaaa

SEQ ID NO: 978963 - DNA, 33 bp, Homo sapien
aatgttgaaagttggccagatgaagaaatgaag

SEQ ID NO: 978964 - DNA, 33 bp, Homo sapien
aatgttgaaagttggctagatgaagaaatgaag

SEQ ID NO: 978965 - DNA, 33 bp, Homo sapien
taaccttaattgcatacatgagtgtgtgtgtaa

SEQ ID NO: 978966 - DNA, 33 bp, Homo sapien
taaccttaattgcatatatgagtgtgtgtgtaa

SEQ ID NO: 978967 - DNA, 33 bp, Homo sapien
attgtctgtttctatccactggaatatgagctc

SEQ ID NO: 978968 - DNA, 33 bp, Homo sapien
attgtctgtttctatctactggaatatgagctc

SEQ ID NO: 978969 - DNA, 33 bp, Homo sapien
ggagcccgggagccgactcaatgatcaggtgtg

SEQ ID NO: 978970 - DNA, 33 bp, Homo sapien
ggagcccgggagccgattcaatgatcaggtgtg

SEQ ID NO: 978971 - DNA, 33 bp, Homo sapien
aacttgcaggaggaaagtcaagtgcttcttgaa

SEQ ID NO: 978972 - DNA, 33 bp, Homo sapien
aacttgcaggaggaaattcaagtgcttcttgaa

SEQ ID NO: 978973 - DNA, 33 bp, Homo sapien
ctggtgtccttttcaaactatgtttcacagagc

SEQ ID NO: 978974 - DNA, 33 bp, Homo sapien
ctggtgtccttttcaacctatgtttcacagagc

SEQ ID NO: 978975 - DNA, 33 bp, Homo sapien
taaactctagatccaaacatgttacctctgctt

SEQ ID NO: 978976 - DNA, 33 bp, Homo sapien
taaactctagatccaaccatgttacctctgctt

SEQ ID NO: 978977 - DNA, 33 bp, Homo sapien
ctttctgttgactccaagtttcagacagagcct

SEQ ID NO: 978978 - DNA, 33 bp, Homo sapien
ctttctgttgactccatgtttcagacagagcct

SEQ ID NO: 978979 - DNA, 33 bp, Homo sapien
aacaggaaggtgacgcccaggttctctgctcag

SEQ ID NO: 978980 - DNA, 33 bp, Homo sapien
aacaggaaggtgacgctcaggttctctgctcag

SEQ ID NO: 978981 - DNA, 33 bp, Homo sapien
tcttctgaggtactcaagttgctgcttctcctt

SEQ ID NO: 978982 - DNA, 33 bp, Homo sapien
tcttctgaggtactcacgttgctgcttctcctt

SEQ ID NO: 978983 - DNA, 33 bp, Homo sapien
cacggtcacactcacaataggcacccttcaatg

SEQ ID NO: 978984 - DNA, 33 bp, Homo sapien
cacggtcacactcacagtaggcacccttcaatg

SEQ ID NO: 978985 - DNA, 33 bp, Homo sapien
ccatcattaagctagacaaatcccagaggtcaa

SEQ ID NO: 978986 - DNA, 33 bp, Homo sapien
ccatcattaagctagataaatcccagaggtcaa

SEQ ID NO: 978987 - DNA, 33 bp, Homo sapien
atcccatactcactgaaactcattcactcactt

SEQ ID NO: 978988 - DNA, 33 bp, Homo sapien
atcccatactcactgacactcattcactcactt

SEQ ID NO: 978989 - DNA, 33 bp, Homo sapien
gagtatgggatggaccactagtactaaagccag

SEQ ID NO: 978990 - DNA, 33 bp, Homo sapien
gagtatgggatggaccgctagtactaaagccag

SEQ ID NO: 978991 - DNA, 33 bp, Homo sapien
ctcagcctttactagcaccagtgtcttgtacaa

SEQ ID NO: 978992 - DNA, 33 bp, Homo sapien
ctcagcctttactagcgccagtgtcttgtacaa

SEQ ID NO: 978993 - DNA, 33 bp, Homo sapien
agtgtgtgaaataaaaaagctggagggcaaatg

SEQ ID NO: 978994 - DNA, 33 bp, Homo sapien
agtgtgtgaaataaaagagctggagggcaaatg

SEQ ID NO: 978995 - DNA, 33 bp, Homo sapien
tgagataccacagtggaatggctaaaaccacaa

SEQ ID NO: 978996 - DNA, 33 bp, Homo sapien
tgagataccacagtgggatggctaaaaccacaa

SEQ ID NO: 978997 - DNA, 33 bp, Homo sapien
tttcattttcccatcaaattctatcctgcctcc

SEQ ID NO: 978998 - DNA, 33 bp, Homo sapien
tttcattttcccatcacattctatcctgcctcc

SEQ ID NO: 978999 - DNA, 33 bp, Homo sapien
agtttcaccacttacaagggagatttggggcaa

SEQ ID NO: 979000 - DNA, 33 bp, Homo sapien
agtttcaccacttacatgggagatttggggcaa

SEQ ID NO: 979001 - DNA, 33 bp, Homo sapien
agtcatctttgggccacgttcagctccatcctg

SEQ ID NO: 979002 - DNA, 33 bp, Homo sapien
agtcatctttgggccatgttcagctccatcctg

SEQ ID NO: 979003 - DNA, 33 bp, Homo sapien
gaagaatttcaggaagcatgaggtagctcaatg

SEQ ID NO: 979004 - DNA, 33 bp, Homo sapien
gaagaatttcaggaaggatgaggtagctcaatg

SEQ ID NO: 979005 - DNA, 33 bp, Homo sapien
gggctccatgcttcaaaaaagaaaggtaagatg

SEQ ID NO: 979006 - DNA, 33 bp, Homo sapien
gggctccatgcttcaagaaagaaaggtaagatg

SEQ ID NO: 979007 - DNA, 33 bp, Homo sapien
aaagatatatgggaaaccgctaagtcaaaccac

SEQ ID NO: 979008 - DNA, 33 bp, Homo sapien
aaagatatatgggaaatcgctaagtcaaaccac

SEQ ID NO: 979009 - DNA, 33 bp, Homo sapien
tcagcattcttaaaaaatcatgtcattgttttc

SEQ ID NO: 979010 - DNA, 33 bp, Homo sapien
tcagcattcttaaaaagtcatgtcattgttttc

SEQ ID NO: 979011 - DNA, 33 bp, Homo sapien
caggacgtacatggtaacagtacttttctgctc

SEQ ID NO: 979012 - DNA, 33 bp, Homo sapien
caggacgtacatggtagcagtacttttctgctc

SEQ ID NO: 979013 - DNA, 33 bp, Homo sapien
ctttccctcagtcagaggaacttttgcttctgt

SEQ ID NO: 979014 - DNA, 33 bp, Homo sapien
ctttccctcagtcagatgaacttttgcttctgt

SEQ ID NO: 979015 - DNA, 33 bp, Homo sapien
accggcacagacaccaactctatgcaaggctgc

SEQ ID NO: 979016 - DNA, 33 bp, Homo sapien
accggcacagacaccagctctatgcaaggctgc

SEQ ID NO: 979017 - DNA, 33 bp, Homo sapien
tgtcagagaagaaaaaagtgaggactcaggaaa

SEQ ID NO: 979018 - DNA, 33 bp, Homo sapien
tgtcagagaagaaaaacgtgaggactcaggaaa

SEQ ID NO: 979019 - DNA, 33 bp, Homo sapien
gttagatgaaaagtaacaggatgagatggttgt

SEQ ID NO: 979020 - DNA, 33 bp, Homo sapien
gttagatgaaaagtaataggatgagatggttgt

SEQ ID NO: 979021 - DNA, 33 bp, Homo sapien
taatgtccaaaactgcaattattttccaccaac

SEQ ID NO: 979022 - DNA, 33 bp, Homo sapien
taatgtccaaaactgcgattattttccaccaac

SEQ ID NO: 979023 - DNA, 33 bp, Homo sapien
gcagtttatgtagtgccctgtttttcacgtttc

SEQ ID NO: 979024 - DNA, 33 bp, Homo sapien
gcagtttatgtagtgcgctgtttttcacgtttc

SEQ ID NO: 979025 - DNA, 33 bp, Homo sapien
cccaaaagtcagtactcacaggagctttcgctt

SEQ ID NO: 979026 - DNA, 33 bp, Homo sapien
cccaaaagtcagtacttacaggagctttcgctt

SEQ ID NO: 979027 - DNA, 33 bp, Homo sapien
aatagaaaattgagagcacaaaaacactaaact

SEQ ID NO: 979028 - DNA, 33 bp, Homo sapien
aatagaaaattgagagtacaaaaacactaaact

SEQ ID NO: 979029 - DNA, 33 bp, Homo sapien
tttggtggaatggtaaatctggtccctgttact

SEQ ID NO: 979030 - DNA, 33 bp, Homo sapien
tttggtggaatggtaactctggtccctgttact

SEQ ID NO: 979031 - DNA, 33 bp, Homo sapien
gtacgtcgacgtcgcactgacagattaagtttg

SEQ ID NO: 979032 - DNA, 33 bp, Homo sapien
gtacgtcgacgtcgcattgacagattaagtttg

SEQ ID NO: 979033 - DNA, 33 bp, Homo sapien
acaactgaatcatataactcccatatgacccag

SEQ ID NO: 979034 - DNA, 33 bp, Homo sapien
acaactgaatcatatacctcccatatgacccag

SEQ ID NO: 979035 - DNA, 33 bp, Homo sapien
aagttggagttacaatcaacaggtgaacaggta

SEQ ID NO: 979036 - DNA, 33 bp, Homo sapien
aagttggagttacaattaacaggtgaacaggta

SEQ ID NO: 979037 - DNA, 33 bp, Homo sapien
ttttcttgctcatttccagtaaaccctgttttc

SEQ ID NO: 979038 - DNA, 33 bp, Homo sapien
ttttcttgctcatttctagtaaaccctgttttc

SEQ ID NO: 979039 - DNA, 33 bp, Homo sapien
tctttctgaagtagtacatgtttaaggcaagaa

SEQ ID NO: 979040 - DNA, 33 bp, Homo sapien
tctttctgaagtagtagatgtttaaggcaagaa

SEQ ID NO: 979041 - DNA, 33 bp, Homo sapien
ccttctacgtgaaaaactgtcccacagcactta

SEQ ID NO: 979042 - DNA, 33 bp, Homo sapien
ccttctacgtgaaaaattgtcccacagcactta

SEQ ID NO: 979043 - DNA, 33 bp, Homo sapien
cagcagtttaacttggccatttgtggttaatgg

SEQ ID NO: 979044 - DNA, 33 bp, Homo sapien
cagcagtttaacttggtcatttgtggttaatgg

SEQ ID NO: 979045 - DNA, 33 bp, Homo sapien
ctgctgttcaaaaaaagatgacatacgggcctt

SEQ ID NO: 979046 - DNA, 33 bp, Homo sapien
ctgctgttcaaaaaaatatgacatacgggcctt

SEQ ID NO: 979047 - DNA, 33 bp, Homo sapien
gaagtctctattttgaaggagcaagaagcctat

SEQ ID NO: 979048 - DNA, 33 bp, Homo sapien
gaagtctctattttgacggagcaagaagcctat

SEQ ID NO: 979049 - DNA, 33 bp, Homo sapien
agagagcaggcccttgaacctcaccatcatagt

SEQ ID NO: 979050 - DNA, 33 bp, Homo sapien
agagagcaggcccttggacctcaccatcatagt

SEQ ID NO: 979051 - DNA, 33 bp, Homo sapien
gggagagagaacaagaaataaaatgacaggttc

SEQ ID NO: 979052 - DNA, 33 bp, Homo sapien
gggagagagaacaagagataaaatgacaggttc

SEQ ID NO: 979053 - DNA, 33 bp, Homo sapien
accagccttaacttcaatcaatatccacttggt

SEQ ID NO: 979054 - DNA, 33 bp, Homo sapien
accagccttaacttcagtcaatatccacttggt

SEQ ID NO: 979055 - DNA, 33 bp, Homo sapien
cccactctcccataagccctacatgattttgta

SEQ ID NO: 979056 - DNA, 33 bp, Homo sapien
cccactctcccataagtcctacatgattttgta

SEQ ID NO: 979057 - DNA, 33 bp, Homo sapien
gcctggaacaagtggaactcaaactgatacagg

SEQ ID NO: 979058 - DNA, 33 bp, Homo sapien
gcctggaacaagtggagctcaaactgatacagg

SEQ ID NO: 979059 - DNA, 33 bp, Homo sapien
tgcaataagtaagcaacaccaatggaagttgac

SEQ ID NO: 979060 - DNA, 33 bp, Homo sapien
tgcaataagtaagcaataccaatggaagttgac

SEQ ID NO: 979061 - DNA, 33 bp, Homo sapien
ggctgctttcttttggaagtctgactgtgaaag

SEQ ID NO: 979062 - DNA, 33 bp, Homo sapien
ggctgctttcttttgggagtctgactgtgaaag

SEQ ID NO: 979063 - DNA, 33 bp, Homo sapien
ccaagatgtcaatacacagtgctgcattgagag

SEQ ID NO: 979064 - DNA, 33 bp, Homo sapien
ccaagatgtcaatacatagtgctgcattgagag

SEQ ID NO: 979065 - DNA, 33 bp, Homo sapien
agtccctatcaccataaaagtgaaggacatcaa

SEQ ID NO: 979066 - DNA, 33 bp, Homo sapien
agtccctatcaccatagaagtgaaggacatcaa

SEQ ID NO: 979067 - DNA, 33 bp, Homo sapien
taatgcaccctaatccaatggtcctttcctaag

SEQ ID NO: 979068 - DNA, 33 bp, Homo sapien
taatgcaccctaatcccatggtcctttcctaag

SEQ ID NO: 979069 - DNA, 33 bp, Homo sapien
ttgggaagctacaaacacttctcaccctctcca

SEQ ID NO: 979070 - DNA, 33 bp, Homo sapien
ttgggaagctacaaacgcttctcaccctctcca

SEQ ID NO: 979071 - DNA, 33 bp, Homo sapien
ttatcttcatttgaccagactcagaattcatac

SEQ ID NO: 979072 - DNA, 33 bp, Homo sapien
ttatcttcatttgaccggactcagaattcatac

SEQ ID NO: 979073 - DNA, 33 bp, Homo sapien
gaaacctcttctgttcactcactaccatcttta

SEQ ID NO: 979074 - DNA, 33 bp, Homo sapien
gaaacctcttctgttcgctcactaccatcttta

SEQ ID NO: 979075 - DNA, 33 bp, Homo sapien
catttaatcctgacaaaaactctggcagaaagt

SEQ ID NO: 979076 - DNA, 33 bp, Homo sapien
catttaatcctgacaacaactctggcagaaagt

SEQ ID NO: 979077 - DNA, 33 bp, Homo sapien
ttggaaaagaacagaagatctactcgcagtctg

SEQ ID NO: 979078 - DNA, 33 bp, Homo sapien
ttggaaaagaacagaatatctactcgcagtctg

SEQ ID NO: 979079 - DNA, 33 bp, Homo sapien
gctttattcaacagaaacactaatttactccag

SEQ ID NO: 979080 - DNA, 33 bp, Homo sapien
gctttattcaacagaagcactaatttactccag

SEQ ID NO: 979081 - DNA, 33 bp, Homo sapien
aatgtatttatttcacgaaaattccaatcactt

SEQ ID NO: 979082 - DNA, 33 bp, Homo sapien
aatgtatttatttcactaaaattccaatcactt

SEQ ID NO: 979083 - DNA, 33 bp, Homo sapien
agttaagagattcagcaagttaatatttggaat

SEQ ID NO: 979084 - DNA, 33 bp, Homo sapien
agttaagagattcagcgagttaatatttggaat

SEQ ID NO: 979085 - DNA, 33 bp, Homo sapien
gttttgactaagcaaacgtgagtggcaaaatga

SEQ ID NO: 979086 - DNA, 33 bp, Homo sapien
gttttgactaagcaaatgtgagtggcaaaatga

SEQ ID NO: 979087 - DNA, 33 bp, Homo sapien
gcttcagcctaaaacaatgactagcagaaaatt

SEQ ID NO: 979088 - DNA, 33 bp, Homo sapien
gcttcagcctaaaacagtgactagcagaaaatt

SEQ ID NO: 979089 - DNA, 33 bp, Homo sapien
aggtctttccaaactgaagttcactaaaactgg

SEQ ID NO: 979090 - DNA, 33 bp, Homo sapien
aggtctttccaaactggagttcactaaaactgg

SEQ ID NO: 979091 - DNA, 33 bp, Homo sapien
cacatgcaaaacaatgaaactggaccctgacct

SEQ ID NO: 979092 - DNA, 33 bp, Homo sapien
cacatgcaaaacaatgtaactggaccctgacct

SEQ ID NO: 979093 - DNA, 33 bp, Homo sapien
aaacctgcgatgttgaacgtggagtagtacact

SEQ ID NO: 979094 - DNA, 33 bp, Homo sapien
aaacctgcgatgttgagcgtggagtagtacact

SEQ ID NO: 979095 - DNA, 33 bp, Homo sapien
ctttgttccaggattccatctctggttagggga

SEQ ID NO: 979096 - DNA, 33 bp, Homo sapien
ctttgttccaggattctatctctggttagggga

SEQ ID NO: 979097 - DNA, 33 bp, Homo sapien
tagattattaagaacactaagaaaattctgtgg

SEQ ID NO: 979098 - DNA, 33 bp, Homo sapien
tagattattaagaacattaagaaaattctgtgg

SEQ ID NO: 979099 - DNA, 33 bp, Homo sapien
atccctcacccaaatcaagtacattgtatccac

SEQ ID NO: 979100 - DNA, 33 bp, Homo sapien
atccctcacccaaatcgagtacattgtatccac

SEQ ID NO: 979101 - DNA, 33 bp, Homo sapien
gacaagagactctacccaaccatcagtaaatca

SEQ ID NO: 979102 - DNA, 33 bp, Homo sapien
gacaagagactctacctaaccatcagtaaatca

SEQ ID NO: 979103 - DNA, 33 bp, Homo sapien
gtgactggataggagaaagccacaaaacgacaa

SEQ ID NO: 979104 - DNA, 33 bp, Homo sapien
gtgactggataggagacagccacaaaacgacaa

SEQ ID NO: 979105 - DNA, 33 bp, Homo sapien
aggtgttaatgtatgacgcttgatagcctgaga

SEQ ID NO: 979106 - DNA, 33 bp, Homo sapien
aggtgttaatgtatgatgcttgatagcctgaga

SEQ ID NO: 979107 - DNA, 33 bp, Homo sapien
ttgtaagctttacttccctactatccaaaatag

SEQ ID NO: 979108 - DNA, 33 bp, Homo sapien
ttgtaagctttacttctctactatccaaaatag

SEQ ID NO: 979109 - DNA, 33 bp, Homo sapien
cagaggtaatcttttcacctcggaattcccaca

SEQ ID NO: 979110 - DNA, 33 bp, Homo sapien
cagaggtaatcttttcgcctcggaattcccaca

SEQ ID NO: 979111 - DNA, 33 bp, Homo sapien
gccacatgaacacaaacaagaacactacttaag

SEQ ID NO: 979112 - DNA, 33 bp, Homo sapien
gccacatgaacacaaagaagaacactacttaag

SEQ ID NO: 979113 - DNA, 33 bp, Homo sapien
ctcattcccatactagccccaccttggcctacc

SEQ ID NO: 979114 - DNA, 33 bp, Homo sapien
ctcattcccatactagtcccaccttggcctacc

SEQ ID NO: 979115 - DNA, 33 bp, Homo sapien
aaaagagagaggaaagaatggctcatgccttta

SEQ ID NO: 979116 - DNA, 33 bp, Homo sapien
aaaagagagaggaaaggatggctcatgccttta

SEQ ID NO: 979117 - DNA, 33 bp, Homo sapien
aaataaagtatcaccacgttcagtcattcatgc

SEQ ID NO: 979118 - DNA, 33 bp, Homo sapien
aaataaagtatcaccatgttcagtcattcatgc

SEQ ID NO: 979119 - DNA, 33 bp, Homo sapien
tcattataattggctaaatcaaggactttgcat

SEQ ID NO: 979120 - DNA, 33 bp, Homo sapien
tcattataattggctatatcaaggactttgcat

SEQ ID NO: 979121 - DNA, 33 bp, Homo sapien
tgcatcctaccaaagccaaagagtcttgctgcc

SEQ ID NO: 979122 - DNA, 33 bp, Homo sapien
tgcatcctaccaaagctaaagagtcttgctgcc

SEQ ID NO: 979123 - DNA, 33 bp, Homo sapien
gctagatgtaacacaacgaatgagatgagggca

SEQ ID NO: 979124 - DNA, 33 bp, Homo sapien
gctagatgtaacacaatgaatgagatgagggca

SEQ ID NO: 979125 - DNA, 33 bp, Homo sapien
catatgttttgaagtacggaaagaaattggcag

SEQ ID NO: 979126 - DNA, 33 bp, Homo sapien
catatgttttgaagtatggaaagaaattggcag

SEQ ID NO: 979127 - DNA, 33 bp, Homo sapien
gacttgagacagtttccaatttttgcaacgaag

SEQ ID NO: 979128 - DNA, 33 bp, Homo sapien
gacttgagacagtttctaatttttgcaacgaag

SEQ ID NO: 979129 - DNA, 33 bp, Homo sapien
caatacaaggaaaggaggaatctatggccattt

SEQ ID NO: 979130 - DNA, 33 bp, Homo sapien
caatacaaggaaaggatgaatctatggccattt

SEQ ID NO: 979131 - DNA, 33 bp, Homo sapien
tgacttggaactcagaaccctcaaaatggctcc

SEQ ID NO: 979132 - DNA, 33 bp, Homo sapien
tgacttggaactcagagccctcaaaatggctcc

SEQ ID NO: 979133 - DNA, 33 bp, Homo sapien
gtgtcttcattattgcaaaattgactgtcactt

SEQ ID NO: 979134 - DNA, 33 bp, Homo sapien
gtgtcttcattattgcgaaattgactgtcactt

SEQ ID NO: 979135 - DNA, 33 bp, Homo sapien
tctggtacgcattgtacgaatatttcaatctac

SEQ ID NO: 979136 - DNA, 33 bp, Homo sapien
tctggtacgcattgtatgaatatttcaatctac

SEQ ID NO: 979137 - DNA, 33 bp, Homo sapien
cagcaactctgtcaagcctgggctcccgagaac

SEQ ID NO: 979138 - DNA, 33 bp, Homo sapien
cagcaactctgtcaagtctgggctcccgagaac

SEQ ID NO: 979139 - DNA, 33 bp, Homo sapien
gctcatacaaatgtgaagccattaagaaaacat

SEQ ID NO: 979140 - DNA, 33 bp, Homo sapien
gctcatacaaatgtgaggccattaagaaaacat

SEQ ID NO: 979141 - DNA, 33 bp, Homo sapien
aaagcttaatttacaaagtggctaatactgctg

SEQ ID NO: 979142 - DNA, 33 bp, Homo sapien
aaagcttaatttacaaggtggctaatactgctg

SEQ ID NO: 979143 - DNA, 33 bp, Homo sapien
gatcactttgcgaggaatcaaggtccagaaaag

SEQ ID NO: 979144 - DNA, 33 bp, Homo sapien
gatcactttgcgaggagtcaaggtccagaaaag

SEQ ID NO: 979145 - DNA, 33 bp, Homo sapien
taagagaattaacatagggcatgagagagagtg

SEQ ID NO: 979146 - DNA, 33 bp, Homo sapien
taagagaattaacatatggcatgagagagagtg

SEQ ID NO: 979147 - DNA, 33 bp, Homo sapien
catgtaacttagagaacattttacccactgatt

SEQ ID NO: 979148 - DNA, 33 bp, Homo sapien
catgtaacttagagaatattttacccactgatt

SEQ ID NO: 979149 - DNA, 33 bp, Homo sapien
tttcaaagctccccaccatacccagtatctagt

SEQ ID NO: 979150 - DNA, 33 bp, Homo sapien
tttcaaagctccccactatacccagtatctagt

SEQ ID NO: 979151 - DNA, 33 bp, Homo sapien
ttcctcatgggtaggacagagctcagtattaac

SEQ ID NO: 979152 - DNA, 33 bp, Homo sapien
ttcctcatgggtaggatagagctcagtattaac

SEQ ID NO: 979153 - DNA, 33 bp, Homo sapien
actaatggtggttttccacacacactcagtctt

SEQ ID NO: 979154 - DNA, 33 bp, Homo sapien
actaatggtggttttctacacacactcagtctt

SEQ ID NO: 979155 - DNA, 33 bp, Homo sapien
agattgctatcttacaagggcataagttatggt

SEQ ID NO: 979156 - DNA, 33 bp, Homo sapien
agattgctatcttacatgggcataagttatggt

SEQ ID NO: 979157 - DNA, 33 bp, Homo sapien
acctaggctggcctccaatgcctggcctcgagc

SEQ ID NO: 979158 - DNA, 33 bp, Homo sapien
acctaggctggcctccgatgcctggcctcgagc

SEQ ID NO: 979159 - DNA, 33 bp, Homo sapien
caaatgactgacatacgcaagggttcttgtctc

SEQ ID NO: 979160 - DNA, 33 bp, Homo sapien
caaatgactgacatactcaagggttcttgtctc

SEQ ID NO: 979161 - DNA, 33 bp, Homo sapien
tctgcttccagtgaacacagtatgagacaagaa

SEQ ID NO: 979162 - DNA, 33 bp, Homo sapien
tctgcttccagtgaacgcagtatgagacaagaa

SEQ ID NO: 979163 - DNA, 33 bp, Homo sapien
gagtatgatctaagtaactcaatgtagcttttc

SEQ ID NO: 979164 - DNA, 33 bp, Homo sapien
gagtatgatctaagtagctcaatgtagcttttc

SEQ ID NO: 979165 - DNA, 33 bp, Homo sapien
gaatcattcactaagacgataatgcccactatt

SEQ ID NO: 979166 - DNA, 33 bp, Homo sapien
gaatcattcactaagatgataatgcccactatt

SEQ ID NO: 979167 - DNA, 33 bp, Homo sapien
gtccagggagaactcaatgacttacttagggta

SEQ ID NO: 979168 - DNA, 33 bp, Homo sapien
gtccagggagaactcagtgacttacttagggta

SEQ ID NO: 979169 - DNA, 33 bp, Homo sapien
caatagctagatatccagaaaactacgcagtaa

SEQ ID NO: 979170 - DNA, 33 bp, Homo sapien
caatagctagatatccggaaaactacgcagtaa

SEQ ID NO: 979171 - DNA, 33 bp, Homo sapien
tgtgatgttaagcagtcaagacaatcaaaacct

SEQ ID NO: 979172 - DNA, 33 bp, Homo sapien
tgtgatgttaagcagttaagacaatcaaaacct

SEQ ID NO: 979173 - DNA, 33 bp, Homo sapien
tgtcaaccttttgcaaaatttgctgtttcattt

SEQ ID NO: 979174 - DNA, 33 bp, Homo sapien
tgtcaaccttttgcaagatttgctgtttcattt

SEQ ID NO: 979175 - DNA, 33 bp, Homo sapien
ttatttctatcacctccaacaagttctctcatg

SEQ ID NO: 979176 - DNA, 33 bp, Homo sapien
ttatttctatcacctctaacaagttctctcatg

SEQ ID NO: 979177 - DNA, 33 bp, Homo sapien
atataagattgtagtagggttacaggagtatat

SEQ ID NO: 979178 - DNA, 33 bp, Homo sapien
atataagattgtagtatggttacaggagtatat

SEQ ID NO: 979179 - DNA, 33 bp, Homo sapien
tctacactgtgtctgaaagtaggcactaaacca

SEQ ID NO: 979180 - DNA, 33 bp, Homo sapien
tctacactgtgtctgatagtaggcactaaacca

SEQ ID NO: 979181 - DNA, 33 bp, Homo sapien
aaaatcaggttggctacctcctaatttcttacc

SEQ ID NO: 979182 - DNA, 33 bp, Homo sapien
aaaatcaggttggctagctcctaatttcttacc

SEQ ID NO: 979183 - DNA, 33 bp, Homo sapien
ctattaatctaggagaactttgatgcctgagca

SEQ ID NO: 979184 - DNA, 33 bp, Homo sapien
ctattaatctaggagacctttgatgcctgagca

SEQ ID NO: 979185 - DNA, 33 bp, Homo sapien
tttgaaatggtacaaacacccagctaaagattc

SEQ ID NO: 979186 - DNA, 33 bp, Homo sapien
tttgaaatggtacaaatacccagctaaagattc

SEQ ID NO: 979187 - DNA, 33 bp, Homo sapien
cccttgatgatctttcccccattctgtaccccc

SEQ ID NO: 979188 - DNA, 33 bp, Homo sapien
cccttgatgatctttctcccattctgtaccccc

SEQ ID NO: 979189 - DNA, 33 bp, Homo sapien
agattttttagactcactgaattcaagcaaatg

SEQ ID NO: 979190 - DNA, 33 bp, Homo sapien
agattttttagactcattgaattcaagcaaatg

SEQ ID NO: 979191 - DNA, 33 bp, Homo sapien
gtgttagaatttgccaataactagattgcttca

SEQ ID NO: 979192 - DNA, 33 bp, Homo sapien
gtgttagaatttgccagtaactagattgcttca

SEQ ID NO: 979193 - DNA, 33 bp, Homo sapien
cgtagtttttaaaatacagtagccacattacct

SEQ ID NO: 979194 - DNA, 33 bp, Homo sapien
cgtagtttttaaaatatagtagccacattacct

SEQ ID NO: 979195 - DNA, 33 bp, Homo sapien
ttataaatgtcatcaaaatggtaggtgatacta

SEQ ID NO: 979196 - DNA, 33 bp, Homo sapien
ttataaatgtcatcaagatggtaggtgatacta

SEQ ID NO: 979197 - DNA, 33 bp, Homo sapien
gatacagctaggcatgaaagtcattgctgtttg

SEQ ID NO: 979198 - DNA, 33 bp, Homo sapien
gatacagctaggcatggaagtcattgctgtttg

SEQ ID NO: 979199 - DNA, 33 bp, Homo sapien
tcttcagtcctattaccatttaaacccaggctt

SEQ ID NO: 979200 - DNA, 33 bp, Homo sapien
tcttcagtcctattactatttaaacccaggctt

SEQ ID NO: 979201 - DNA, 33 bp, Homo sapien
cctgaattcatttggccatgcagtctaatctga

SEQ ID NO: 979202 - DNA, 33 bp, Homo sapien
cctgaattcatttggctatgcagtctaatctga

SEQ ID NO: 979203 - DNA, 33 bp, Homo sapien
atgatggactttgaccacttggtaataacagtt

SEQ ID NO: 979204 - DNA, 33 bp, Homo sapien
atgatggactttgaccccttggtaataacagtt

SEQ ID NO: 979205 - DNA, 33 bp, Homo sapien
actatatctaacattccagccgagatttagaaa

SEQ ID NO: 979206 - DNA, 33 bp, Homo sapien
actatatctaacattctagccgagatttagaaa

SEQ ID NO: 979207 - DNA, 33 bp, Homo sapien
taaagcattatgatacaatcactacccactatc

SEQ ID NO: 979208 - DNA, 33 bp, Homo sapien
taaagcattatgatacgatcactacccactatc

SEQ ID NO: 979209 - DNA, 33 bp, Homo sapien
ctcaacgaggtcattaacttgtcaaaaaataga

SEQ ID NO: 979210 - DNA, 33 bp, Homo sapien
ctcaacgaggtcattagcttgtcaaaaaataga

SEQ ID NO: 979211 - DNA, 33 bp, Homo sapien
gctatgggtatggaccagaattttagagtgtca

SEQ ID NO: 979212 - DNA, 33 bp, Homo sapien
gctatgggtatggaccggaattttagagtgtca

SEQ ID NO: 979213 - DNA, 33 bp, Homo sapien
ttgaagagttcatgaaaccagtttagtgtgaaa

SEQ ID NO: 979214 - DNA, 33 bp, Homo sapien
ttgaagagttcatgaagccagtttagtgtgaaa

SEQ ID NO: 979215 - DNA, 33 bp, Homo sapien
ataggctttgtataaaaaagatgtttgcacaac

SEQ ID NO: 979216 - DNA, 33 bp, Homo sapien
ataggctttgtataaataagatgtttgcacaac

SEQ ID NO: 979217 - DNA, 33 bp, Homo sapien
gggcagggagggaggaacgaattgtaatttgca

SEQ ID NO: 979218 - DNA, 33 bp, Homo sapien
gggcagggagggaggaccgaattgtaatttgca

SEQ ID NO: 979219 - DNA, 33 bp, Homo sapien
tttcaacaaatatgcactgcactgtgagagatc

SEQ ID NO: 979220 - DNA, 33 bp, Homo sapien
tttcaacaaatatgcattgcactgtgagagatc

SEQ ID NO: 979221 - DNA, 33 bp, Homo sapien
acaataaatgaagaagcattgatagaattggaa

SEQ ID NO: 979222 - DNA, 33 bp, Homo sapien
acaataaatgaagaaggattgatagaattggaa

SEQ ID NO: 979223 - DNA, 33 bp, Homo sapien
ttgcaactgttatgaaatgcgctacaatggaag

SEQ ID NO: 979224 - DNA, 33 bp, Homo sapien
ttgcaactgttatgaattgcgctacaatggaag

SEQ ID NO: 979225 - DNA, 33 bp, Homo sapien
tcctggagagtcatccaaattgctgcatgtatg

SEQ ID NO: 979226 - DNA, 33 bp, Homo sapien
tcctggagagtcatcccaattgctgcatgtatg

SEQ ID NO: 979227 - DNA, 33 bp, Homo sapien
atcaagtccagataccgaacagttacatcacta

SEQ ID NO: 979228 - DNA, 33 bp, Homo sapien
atcaagtccagatacctaacagttacatcacta

SEQ ID NO: 979229 - DNA, 33 bp, Homo sapien
taaatcataaagcgaaactgggtcacatcatca

SEQ ID NO: 979230 - DNA, 33 bp, Homo sapien
taaatcataaagcgaatctgggtcacatcatca

SEQ ID NO: 979231 - DNA, 33 bp, Homo sapien
atcctcttaattgtgaccctgtatggcctcttt

SEQ ID NO: 979232 - DNA, 33 bp, Homo sapien
atcctcttaattgtgatcctgtatggcctcttt

SEQ ID NO: 979233 - DNA, 33 bp, Homo sapien
acagatagggaaatgcaccattaatctgcacag

SEQ ID NO: 979234 - DNA, 33 bp, Homo sapien
acagatagggaaatgcgccattaatctgcacag

SEQ ID NO: 979235 - DNA, 33 bp, Homo sapien
cattttgggagttccaaaggatttacagacatg

SEQ ID NO: 979236 - DNA, 33 bp, Homo sapien
cattttgggagttccagaggatttacagacatg

SEQ ID NO: 979237 - DNA, 33 bp, Homo sapien
aatgctctgaaagaacagaacaattcaattcag

SEQ ID NO: 979238 - DNA, 33 bp, Homo sapien
aatgctctgaaagaacggaacaattcaattcag

SEQ ID NO: 979239 - DNA, 33 bp, Homo sapien
attccattcaaattacactttcctctcttctat

SEQ ID NO: 979240 - DNA, 33 bp, Homo sapien
attccattcaaattacgctttcctctcttctat

SEQ ID NO: 979241 - DNA, 33 bp, Homo sapien
atttttgaggttataaagaaaatcaagtagtat

SEQ ID NO: 979242 - DNA, 33 bp, Homo sapien
atttttgaggttataaggaaaatcaagtagtat

SEQ ID NO: 979243 - DNA, 33 bp, Homo sapien
aaacttcaggttgcatcataaatgctagcaagt

SEQ ID NO: 979244 - DNA, 33 bp, Homo sapien
aaacttcaggttgcatgataaatgctagcaagt

SEQ ID NO: 979245 - DNA, 33 bp, Homo sapien
gaagcaaaaagaagaacgtgctattagggaaaa

SEQ ID NO: 979246 - DNA, 33 bp, Homo sapien
gaagcaaaaagaagaatgtgctattagggaaaa

SEQ ID NO: 979247 - DNA, 33 bp, Homo sapien
tcctcaaggcacctaaaagtttgtgcatcatct

SEQ ID NO: 979248 - DNA, 33 bp, Homo sapien
tcctcaaggcacctaagagtttgtgcatcatct

SEQ ID NO: 979249 - DNA, 33 bp, Homo sapien
aatataggatcgtataatagtttttttctcttc

SEQ ID NO: 979250 - DNA, 33 bp, Homo sapien
aatataggatcgtatactagtttttttctcttc

SEQ ID NO: 979251 - DNA, 33 bp, Homo sapien
ggtgaggtggttatataaggctctcccatctgt

SEQ ID NO: 979252 - DNA, 33 bp, Homo sapien
ggtgaggtggttatatgaggctctcccatctgt

SEQ ID NO: 979253 - DNA, 33 bp, Homo sapien
catactcatcaaaaaccgtgcaaaagaccaaca

SEQ ID NO: 979254 - DNA, 33 bp, Homo sapien
catactcatcaaaaactgtgcaaaagaccaaca

SEQ ID NO: 979255 - DNA, 33 bp, Homo sapien
ctcagctcttcatgaactacacagcgtactatc

SEQ ID NO: 979256 - DNA, 33 bp, Homo sapien
ctcagctcttcatgaattacacagcgtactatc

SEQ ID NO: 979257 - DNA, 33 bp, Homo sapien
ggtatgagtcactggaaaactgaaaccctcttc

SEQ ID NO: 979258 - DNA, 33 bp, Homo sapien
ggtatgagtcactggataactgaaaccctcttc

SEQ ID NO: 979259 - DNA, 33 bp, Homo sapien
attacaagtaacatcaacttttttgtctttgtt

SEQ ID NO: 979260 - DNA, 33 bp, Homo sapien
attacaagtaacatcatcttttttgtctttgtt

SEQ ID NO: 979261 - DNA, 33 bp, Homo sapien
ccacaaaaattacctgacacttctctcatatta

SEQ ID NO: 979262 - DNA, 33 bp, Homo sapien
ccacaaaaattacctggcacttctctcatatta

SEQ ID NO: 979263 - DNA, 33 bp, Homo sapien
tcagttttcatgtaggaaacctttaaactgact

SEQ ID NO: 979264 - DNA, 33 bp, Homo sapien
tcagttttcatgtagggaacctttaaactgact

SEQ ID NO: 979265 - DNA, 33 bp, Homo sapien
gaaaccctgcagaaaaatctaattatcactgct

SEQ ID NO: 979266 - DNA, 33 bp, Homo sapien
gaaaccctgcagaaaagtctaattatcactgct

SEQ ID NO: 979267 - DNA, 33 bp, Homo sapien
aattgatctacaggtgcaatgcaatagctatca

SEQ ID NO: 979268 - DNA, 33 bp, Homo sapien
aattgatctacaggtgtaatgcaatagctatca

SEQ ID NO: 979269 - DNA, 33 bp, Homo sapien
tagcacagcagtactacagcaaatcaaagtact

SEQ ID NO: 979270 - DNA, 33 bp, Homo sapien
tagcacagcagtactatagcaaatcaaagtact

SEQ ID NO: 979271 - DNA, 33 bp, Homo sapien
caaagtgaagtgtcaaatccttgactaaaccaa

SEQ ID NO: 979272 - DNA, 33 bp, Homo sapien
caaagtgaagtgtcaagtccttgactaaaccaa

SEQ ID NO: 979273 - DNA, 33 bp, Homo sapien
tgctggcttaatgggaagttttaattttacttc

SEQ ID NO: 979274 - DNA, 33 bp, Homo sapien
tgctggcttaatgggaggttttaattttacttc

SEQ ID NO: 979275 - DNA, 33 bp, Homo sapien
tgtgtttatatatttgcagtcatgacagaataa

SEQ ID NO: 979276 - DNA, 33 bp, Homo sapien
tgtgtttatatatttggagtcatgacagaataa

SEQ ID NO: 979277 - DNA, 33 bp, Homo sapien
ctcttttggcagtagcacctgaattgaaaacaa

SEQ ID NO: 979278 - DNA, 33 bp, Homo sapien
ctcttttggcagtagctcctgaattgaaaacaa

SEQ ID NO: 979279 - DNA, 33 bp, Homo sapien
agatgcatcctaaccaatatttccatgtttttt

SEQ ID NO: 979280 - DNA, 33 bp, Homo sapien
agatgcatcctaaccagtatttccatgtttttt

SEQ ID NO: 979281 - DNA, 33 bp, Homo sapien
taaaataacatagtggaaccaatctgtattagt

SEQ ID NO: 979282 - DNA, 33 bp, Homo sapien
taaaataacatagtgggaccaatctgtattagt

SEQ ID NO: 979283 - DNA, 33 bp, Homo sapien
ttaaaacttaggaaacacctatgatgccacttt

SEQ ID NO: 979284 - DNA, 33 bp, Homo sapien
ttaaaacttaggaaacgcctatgatgccacttt

SEQ ID NO: 979285 - DNA, 33 bp, Homo sapien
aagagcgggaatatacaaaaatgaagcttcctt

SEQ ID NO: 979286 - DNA, 33 bp, Homo sapien
aagagcgggaatatacgaaaatgaagcttcctt

SEQ ID NO: 979287 - DNA, 33 bp, Homo sapien
aaaacacctgaagataaattagaagaaattgtg

SEQ ID NO: 979288 - DNA, 33 bp, Homo sapien
aaaacacctgaagatatattagaagaaattgtg

SEQ ID NO: 979289 - DNA, 33 bp, Homo sapien
aaattggcagaaggaaatggagtaagggtgatg

SEQ ID NO: 979290 - DNA, 33 bp, Homo sapien
aaattggcagaaggaagtggagtaagggtgatg

SEQ ID NO: 979291 - DNA, 33 bp, Homo sapien
aaccaatggaaaaaagcctgggctcctggaacc

SEQ ID NO: 979292 - DNA, 33 bp, Homo sapien
aaccaatggaaaaaagtctgggctcctggaacc

SEQ ID NO: 979293 - DNA, 33 bp, Homo sapien
gaattccgttttattcaaaggaagtaattcaaa

SEQ ID NO: 979294 - DNA, 33 bp, Homo sapien
gaattccgttttattccaaggaagtaattcaaa

SEQ ID NO: 979295 - DNA, 33 bp, Homo sapien
tatttcaattgtattcaatgtagtttccattta

SEQ ID NO: 979296 - DNA, 33 bp, Homo sapien
tatttcaattgtattcgatgtagtttccattta

SEQ ID NO: 979297 - DNA, 33 bp, Homo sapien
gatcatctttcaggcacatacatactaaataaa

SEQ ID NO: 979298 - DNA, 33 bp, Homo sapien
gatcatctttcaggcatatacatactaaataaa

SEQ ID NO: 979299 - DNA, 33 bp, Homo sapien
atgagcggaaaattagaatcactaagtccaacc

SEQ ID NO: 979300 - DNA, 33 bp, Homo sapien
atgagcggaaaattagtatcactaagtccaacc

SEQ ID NO: 979301 - DNA, 33 bp, Homo sapien
ttcccaagagcagcaaaagagggcaattctcaa

SEQ ID NO: 979302 - DNA, 33 bp, Homo sapien
ttcccaagagcagcaagagagggcaattctcaa

SEQ ID NO: 979303 - DNA, 33 bp, Homo sapien
gggacacagcaggtgcacaatcaataaggaaca

SEQ ID NO: 979304 - DNA, 33 bp, Homo sapien
gggacacagcaggtgcgcaatcaataaggaaca

SEQ ID NO: 979305 - DNA, 33 bp, Homo sapien
cttaaaggctaagaaaatactggtgtccataat

SEQ ID NO: 979306 - DNA, 33 bp, Homo sapien
cttaaaggctaagaaattactggtgtccataat

SEQ ID NO: 979307 - DNA, 33 bp, Homo sapien
ctttaagaaaatcagacgagggaaccgttgtgt

SEQ ID NO: 979308 - DNA, 33 bp, Homo sapien
ctttaagaaaatcagatgagggaaccgttgtgt

SEQ ID NO: 979309 - DNA, 33 bp, Homo sapien
ttcctatttgtgattaagtaatatatgagtagg

SEQ ID NO: 979310 - DNA, 33 bp, Homo sapien
ttcctatttgtgattacgtaatatatgagtagg

SEQ ID NO: 979311 - DNA, 33 bp, Homo sapien
ttctctgtaaatgagtaaatcacttcctcttcc

SEQ ID NO: 979312 - DNA, 33 bp, Homo sapien
ttctctgtaaatgagtgaatcacttcctcttcc

SEQ ID NO: 979313 - DNA, 33 bp, Homo sapien
caggccctaaagaaagcagacggactgccaaag

SEQ ID NO: 979314 - DNA, 33 bp, Homo sapien
caggccctaaagaaagtagacggactgccaaag

SEQ ID NO: 979315 - DNA, 33 bp, Homo sapien
aggttacgtccaataaataaatatgacattgat

SEQ ID NO: 979316 - DNA, 33 bp, Homo sapien
aggttacgtccaataagtaaatatgacattgat

SEQ ID NO: 979317 - DNA, 33 bp, Homo sapien
atgttctaggtataggaacattacttggaactc

SEQ ID NO: 979318 - DNA, 33 bp, Homo sapien
atgttctaggtatagggacattacttggaactc

SEQ ID NO: 979319 - DNA, 33 bp, Homo sapien
gtttattaagcagtgacattagttaaaaggctg

SEQ ID NO: 979320 - DNA, 33 bp, Homo sapien
gtttattaagcagtgagattagttaaaaggctg

SEQ ID NO: 979321 - DNA, 33 bp, Homo sapien
gaccaatgaggacaaacagaattgaagtttaat

SEQ ID NO: 979322 - DNA, 33 bp, Homo sapien
gaccaatgaggacaaagagaattgaagtttaat

SEQ ID NO: 979323 - DNA, 33 bp, Homo sapien
acactgctcttataaacgttctttccataccct

SEQ ID NO: 979324 - DNA, 33 bp, Homo sapien
acactgctcttataaatgttctttccataccct

SEQ ID NO: 979325 - DNA, 33 bp, Homo sapien
tttttttctgggagaaccttttgtggattttaa

SEQ ID NO: 979326 - DNA, 33 bp, Homo sapien
tttttttctgggagaagcttttgtggattttaa

SEQ ID NO: 979327 - DNA, 33 bp, Homo sapien
atagctgtgattatcccatatacccaaacatct

SEQ ID NO: 979328 - DNA, 33 bp, Homo sapien
atagctgtgattatccgatatacccaaacatct

SEQ ID NO: 979329 - DNA, 33 bp, Homo sapien
agggtctacacgaggaagtatcagagaaagaaa

SEQ ID NO: 979330 - DNA, 33 bp, Homo sapien
agggtctacacgaggaggtatcagagaaagaaa

SEQ ID NO: 979331 - DNA, 33 bp, Homo sapien
agtccttaaaaagggcacctgctagagtgctgc

SEQ ID NO: 979332 - DNA, 33 bp, Homo sapien
agtccttaaaaagggcgcctgctagagtgctgc

SEQ ID NO: 979333 - DNA, 33 bp, Homo sapien
ctctgtcattttcagaactaccaggaatacata

SEQ ID NO: 979334 - DNA, 33 bp, Homo sapien
ctctgtcattttcagagctaccaggaatacata

SEQ ID NO: 979335 - DNA, 33 bp, Homo sapien
tggtcaattctctatacgattccttctctactc

SEQ ID NO: 979336 - DNA, 33 bp, Homo sapien
tggtcaattctctatatgattccttctctactc

SEQ ID NO: 979337 - DNA, 33 bp, Homo sapien
gatgaatacatttttacacactaacattagcat

SEQ ID NO: 979338 - DNA, 33 bp, Homo sapien
gatgaatacatttttatacactaacattagcat

SEQ ID NO: 979339 - DNA, 33 bp, Homo sapien
cttctactatacaccactgggcctgggcagtgc

SEQ ID NO: 979340 - DNA, 33 bp, Homo sapien
cttctactatacaccattgggcctgggcagtgc

SEQ ID NO: 979341 - DNA, 33 bp, Homo sapien
cccagcctcagagccactctttaagtaccacaa

SEQ ID NO: 979342 - DNA, 33 bp, Homo sapien
cccagcctcagagccagtctttaagtaccacaa

SEQ ID NO: 979343 - DNA, 33 bp, Homo sapien
ctgtgtactgcctgtacctggggtggatcactc

SEQ ID NO: 979344 - DNA, 33 bp, Homo sapien
ctgtgtactgcctgtatctggggtggatcactc

SEQ ID NO: 979345 - DNA, 33 bp, Homo sapien
gttacgagctgaggaacgtggaagcggccaacc

SEQ ID NO: 979346 - DNA, 33 bp, Homo sapien
gttacgagctgaggaatgtggaagcggccaacc

SEQ ID NO: 979347 - DNA, 33 bp, Homo sapien
ctggcaccatgtcagaaaggccgaagaagagac

SEQ ID NO: 979348 - DNA, 33 bp, Homo sapien
ctggcaccatgtcagagaggccgaagaagagac

SEQ ID NO: 979349 - DNA, 33 bp, Homo sapien
atctgcattgtttaaactggtcctcacaacaat

SEQ ID NO: 979350 - DNA, 33 bp, Homo sapien
atctgcattgtttaaattggtcctcacaacaat

SEQ ID NO: 979351 - DNA, 33 bp, Homo sapien
gctggctatagtttccaatcctgactcactttc

SEQ ID NO: 979352 - DNA, 33 bp, Homo sapien
gctggctatagtttccgatcctgactcactttc

SEQ ID NO: 979353 - DNA, 33 bp, Homo sapien
cataatctgtaacccacgctttgctccctagta

SEQ ID NO: 979354 - DNA, 33 bp, Homo sapien
cataatctgtaacccatgctttgctccctagta

SEQ ID NO: 979355 - DNA, 33 bp, Homo sapien
atgaaaggaatggaaactggatagaccattgta

SEQ ID NO: 979356 - DNA, 33 bp, Homo sapien
atgaaaggaatggaaattggatagaccattgta

SEQ ID NO: 979357 - DNA, 33 bp, Homo sapien
cctgttagatagccaaatgaagatgttgcagaa

SEQ ID NO: 979358 - DNA, 33 bp, Homo sapien
cctgttagatagccaagtgaagatgttgcagaa

SEQ ID NO: 979359 - DNA, 33 bp, Homo sapien
catctctcctatggcactctacctcctgacagc

SEQ ID NO: 979360 - DNA, 33 bp, Homo sapien
catctctcctatggcattctacctcctgacagc

SEQ ID NO: 979361 - DNA, 33 bp, Homo sapien
agggattcagacaccaccccttgcctctagttg

SEQ ID NO: 979362 - DNA, 33 bp, Homo sapien
agggattcagacaccatcccttgcctctagttg

SEQ ID NO: 979363 - DNA, 33 bp, Homo sapien
aaatagttgattatgcaaaaagaagtttcaaat

SEQ ID NO: 979364 - DNA, 33 bp, Homo sapien
aaatagttgattatgcgaaaagaagtttcaaat

SEQ ID NO: 979365 - DNA, 33 bp, Homo sapien
gagtagatctgacctaaagaggcaaatgtattt

SEQ ID NO: 979366 - DNA, 33 bp, Homo sapien
gagtagatctgacctagagaggcaaatgtattt

SEQ ID NO: 979367 - DNA, 33 bp, Homo sapien
aaaatgtctttcttcaaaggatgtcatcattta

SEQ ID NO: 979368 - DNA, 33 bp, Homo sapien
aaaatgtctttcttcagaggatgtcatcattta

SEQ ID NO: 979369 - DNA, 33 bp, Homo sapien
atttggggttataggaagagagctctaagtttg

SEQ ID NO: 979370 - DNA, 33 bp, Homo sapien
atttggggttataggaggagagctctaagtttg

SEQ ID NO: 979371 - DNA, 33 bp, Homo sapien
aaaaaaacaataacaacgtgaggcttcagttca

SEQ ID NO: 979372 - DNA, 33 bp, Homo sapien
aaaaaaacaataacaatgtgaggcttcagttca

SEQ ID NO: 979373 - DNA, 33 bp, Homo sapien
ctactctcttcaagacgctgaatcctctcctgc

SEQ ID NO: 979374 - DNA, 33 bp, Homo sapien
ctactctcttcaagactctgaatcctctcctgc

SEQ ID NO: 979375 - DNA, 33 bp, Homo sapien
aaactataacagctctcaatacataagcctaag

SEQ ID NO: 979376 - DNA, 33 bp, Homo sapien
aaactataacagctctgaatacataagcctaag

SEQ ID NO: 979377 - DNA, 33 bp, Homo sapien
atgagaatctaatagcaagaacacttagccact

SEQ ID NO: 979378 - DNA, 33 bp, Homo sapien
atgagaatctaatagcgagaacacttagccact

SEQ ID NO: 979379 - DNA, 33 bp, Homo sapien
ttcaattaatttgctaatacctaggctcacaga

SEQ ID NO: 979380 - DNA, 33 bp, Homo sapien
ttcaattaatttgctagtacctaggctcacaga

SEQ ID NO: 979381 - DNA, 33 bp, Homo sapien
caaaagctaaatcctacgacaggtacccaagtg

SEQ ID NO: 979382 - DNA, 33 bp, Homo sapien
caaaagctaaatcctatgacaggtacccaagtg

SEQ ID NO: 979383 - DNA, 33 bp, Homo sapien
agagttctgttcctaaccaccgcctgtccaatt

SEQ ID NO: 979384 - DNA, 33 bp, Homo sapien
agagttctgttcctaatcaccgcctgtccaatt

SEQ ID NO: 979385 - DNA, 33 bp, Homo sapien
cagctaattgtggaaaattcagtccctacgcac

SEQ ID NO: 979386 - DNA, 33 bp, Homo sapien
cagctaattgtggaaacttcagtccctacgcac

SEQ ID NO: 979387 - DNA, 33 bp, Homo sapien
ggccagcatggcatccacagggtcagctagtct

SEQ ID NO: 979388 - DNA, 33 bp, Homo sapien
ggccagcatggcatccgcagggtcagctagtct

SEQ ID NO: 979389 - DNA, 33 bp, Homo sapien
ctatgcccatcctggccccctagagtcctggtg

SEQ ID NO: 979390 - DNA, 33 bp, Homo sapien
ctatgcccatcctggcgccctagagtcctggtg

SEQ ID NO: 979391 - DNA, 33 bp, Homo sapien
atgggtcaaacccaaacctatggagtccacggc

SEQ ID NO: 979392 - DNA, 33 bp, Homo sapien
atgggtcaaacccaaatctatggagtccacggc

SEQ ID NO: 979393 - DNA, 33 bp, Homo sapien
tggagtgagttgaacaaggattagcctatctca

SEQ ID NO: 979394 - DNA, 33 bp, Homo sapien
tggagtgagttgaacatggattagcctatctca

SEQ ID NO: 979395 - DNA, 33 bp, Homo sapien
ctgtgtaaggaataaacgagcaatcacaaacat

SEQ ID NO: 979396 - DNA, 33 bp, Homo sapien
ctgtgtaaggaataaatgagcaatcacaaacat

SEQ ID NO: 979397 - DNA, 33 bp, Homo sapien
atggaggaaattccaaagaaaatcaacctgttg

SEQ ID NO: 979398 - DNA, 33 bp, Homo sapien
atggaggaaattccaaggaaaatcaacctgttg

SEQ ID NO: 979399 - DNA, 33 bp, Homo sapien
ctcctgcccctcttgccatgtagattggctgct

SEQ ID NO: 979400 - DNA, 33 bp, Homo sapien
ctcctgcccctcttgctatgtagattggctgct

SEQ ID NO: 979401 - DNA, 33 bp, Homo sapien
tgataattgtatctgaataaagctattattaaa

SEQ ID NO: 979402 - DNA, 33 bp, Homo sapien
tgataattgtatctgagtaaagctattattaaa

SEQ ID NO: 979403 - DNA, 33 bp, Homo sapien
tccttggtacctttaaaaactcaataatctgta

SEQ ID NO: 979404 - DNA, 33 bp, Homo sapien
tccttggtacctttaacaactcaataatctgta

SEQ ID NO: 979405 - DNA, 33 bp, Homo sapien
tccctacctatctcaacgctacttgttagaata

SEQ ID NO: 979406 - DNA, 33 bp, Homo sapien
tccctacctatctcaatgctacttgttagaata

SEQ ID NO: 979407 - DNA, 33 bp, Homo sapien
tcctctgaggtttttacaaggtcctgagttcca

SEQ ID NO: 979408 - DNA, 33 bp, Homo sapien
tcctctgaggtttttataaggtcctgagttcca

SEQ ID NO: 979409 - DNA, 33 bp, Homo sapien
agcactggcactgccacgagaagaacagtgtga

SEQ ID NO: 979410 - DNA, 33 bp, Homo sapien
agcactggcactgccatgagaagaacagtgtga

SEQ ID NO: 979411 - DNA, 33 bp, Homo sapien
catggctgggcaagtacaagttcatggtctccg

SEQ ID NO: 979412 - DNA, 33 bp, Homo sapien
catggctgggcaagtataagttcatggtctccg

SEQ ID NO: 979413 - DNA, 33 bp, Homo sapien
taaagagatttataagacagatgcaccgtggag

SEQ ID NO: 979414 - DNA, 33 bp, Homo sapien
taaagagatttataaggcagatgcaccgtggag

SEQ ID NO: 979415 - DNA, 33 bp, Homo sapien
tgctgagaagagggagaaaacttcagaacacta

SEQ ID NO: 979416 - DNA, 33 bp, Homo sapien
tgctgagaagagggaggaaacttcagaacacta

SEQ ID NO: 979417 - DNA, 33 bp, Homo sapien
agtctgttgacggactaagacaatctcatttag

SEQ ID NO: 979418 - DNA, 33 bp, Homo sapien
agtctgttgacggactgagacaatctcatttag

SEQ ID NO: 979419 - DNA, 33 bp, Homo sapien
gtaaatggctgtaaaaacattaagacattaaca

SEQ ID NO: 979420 - DNA, 33 bp, Homo sapien
gtaaatggctgtaaaagcattaagacattaaca

SEQ ID NO: 979421 - DNA, 33 bp, Homo sapien
gcccaaacccgtagaaagtacaccaacaagaat

SEQ ID NO: 979422 - DNA, 33 bp, Homo sapien
gcccaaacccgtagaaggtacaccaacaagaat

SEQ ID NO: 979423 - DNA, 33 bp, Homo sapien
cacatctaaaatgcccacatggcagcgttttgg

SEQ ID NO: 979424 - DNA, 33 bp, Homo sapien
cacatctaaaatgcccgcatggcagcgttttgg

SEQ ID NO: 979425 - DNA, 33 bp, Homo sapien
aaagggggcattcttccagagggcttctgcgaa

SEQ ID NO: 979426 - DNA, 33 bp, Homo sapien
aaagggggcattcttctagagggcttctgcgaa

SEQ ID NO: 979427 - DNA, 33 bp, Homo sapien
cctgtaggtattatcactaggctgattttacag

SEQ ID NO: 979428 - DNA, 33 bp, Homo sapien
cctgtaggtattatcattaggctgattttacag

SEQ ID NO: 979429 - DNA, 33 bp, Homo sapien
ataataaatgccaggcacaaagctcttcactgt

SEQ ID NO: 979430 - DNA, 33 bp, Homo sapien
ataataaatgccaggcgcaaagctcttcactgt

SEQ ID NO: 979431 - DNA, 33 bp, Homo sapien
ctgaacagtctcctcgacctatgttgtcttcct

SEQ ID NO: 979432 - DNA, 33 bp, Homo sapien
ctgaacagtctcctcggcctatgttgtcttcct

SEQ ID NO: 979433 - DNA, 33 bp, Homo sapien
acatcatgaataccacaaagccattctaagaaa

SEQ ID NO: 979434 - DNA, 33 bp, Homo sapien
acatcatgaataccacgaagccattctaagaaa

SEQ ID NO: 979435 - DNA, 33 bp, Homo sapien
gcatgattgttcagcacaaatatttccagagta

SEQ ID NO: 979436 - DNA, 33 bp, Homo sapien
gcatgattgttcagcagaaatatttccagagta

SEQ ID NO: 979437 - DNA, 33 bp, Homo sapien
tcaaaggtcatgaagacatggtttcctggtctc

SEQ ID NO: 979438 - DNA, 33 bp, Homo sapien
tcaaaggtcatgaagatatggtttcctggtctc

SEQ ID NO: 979439 - DNA, 33 bp, Homo sapien
agagtcctgctttctacctaacattgctaataa

SEQ ID NO: 979440 - DNA, 33 bp, Homo sapien
agagtcctgctttctatctaacattgctaataa

SEQ ID NO: 979441 - DNA, 33 bp, Homo sapien
cactttacacagaaaaaagtaacagcctccaaa

SEQ ID NO: 979442 - DNA, 33 bp, Homo sapien
cactttacacagaaaagagtaacagcctccaaa

SEQ ID NO: 979443 - DNA, 33 bp, Homo sapien
gggaaggatggtctgaaagaagagattgtagcc

SEQ ID NO: 979444 - DNA, 33 bp, Homo sapien
gggaaggatggtctgagagaagagattgtagcc

SEQ ID NO: 979445 - DNA, 33 bp, Homo sapien
ttctacattttccttgaacatttattggttgat

SEQ ID NO: 979446 - DNA, 33 bp, Homo sapien
ttctacattttccttgcacatttattggttgat

SEQ ID NO: 979447 - DNA, 33 bp, Homo sapien
gaaggaaggcaatagaataggatttagagaggt

SEQ ID NO: 979448 - DNA, 33 bp, Homo sapien
gaaggaaggcaatagagtaggatttagagaggt

SEQ ID NO: 979449 - DNA, 33 bp, Homo sapien
tgctcactcctacccactgataaattttcaagg

SEQ ID NO: 979450 - DNA, 33 bp, Homo sapien
tgctcactcctacccagtgataaattttcaagg

SEQ ID NO: 979451 - DNA, 33 bp, Homo sapien
tctctctttaactttccattcagtgatgtcact

SEQ ID NO: 979452 - DNA, 33 bp, Homo sapien
tctctctttaactttctattcagtgatgtcact

SEQ ID NO: 979453 - DNA, 33 bp, Homo sapien
gattcagagacaataaatagagcagccctgcag

SEQ ID NO: 979454 - DNA, 33 bp, Homo sapien
gattcagagacaataactagagcagccctgcag

SEQ ID NO: 979455 - DNA, 33 bp, Homo sapien
cccaccaacaatagaagggataaattgtagtat

SEQ ID NO: 979456 - DNA, 33 bp, Homo sapien
cccaccaacaatagaatggataaattgtagtat

SEQ ID NO: 979457 - DNA, 33 bp, Homo sapien
tccctgaaccccactccaaacagttaaatcaga

SEQ ID NO: 979458 - DNA, 33 bp, Homo sapien
tccctgaaccccactctaaacagttaaatcaga

SEQ ID NO: 979459 - DNA, 33 bp, Homo sapien
cttgtaatgattcaaacactgatggatgccatg

SEQ ID NO: 979460 - DNA, 33 bp, Homo sapien
cttgtaatgattcaaatactgatggatgccatg

SEQ ID NO: 979461 - DNA, 33 bp, Homo sapien
tgattttaatgttgaacggcaaaacttagcatt

SEQ ID NO: 979462 - DNA, 33 bp, Homo sapien
tgattttaatgttgaagggcaaaacttagcatt

SEQ ID NO: 979463 - DNA, 33 bp, Homo sapien
ttattactgcctggaaattaataaaatgttgaa

SEQ ID NO: 979464 - DNA, 33 bp, Homo sapien
ttattactgcctggaagttaataaaatgttgaa

SEQ ID NO: 979465 - DNA, 33 bp, Homo sapien
gggtgcgtctgccatacgaggttgttctcagag

SEQ ID NO: 979466 - DNA, 33 bp, Homo sapien
gggtgcgtctgccatatgaggttgttctcagag

SEQ ID NO: 979467 - DNA, 33 bp, Homo sapien
caaagttcgggtgaagccaagcttttccttttc

SEQ ID NO: 979468 - DNA, 33 bp, Homo sapien
caaagttcgggtgaagtcaagcttttccttttc

SEQ ID NO: 979469 - DNA, 33 bp, Homo sapien
atttatgagtaatcaacttctcagcaagtatta

SEQ ID NO: 979470 - DNA, 33 bp, Homo sapien
atttatgagtaatcaatttctcagcaagtatta

SEQ ID NO: 979471 - DNA, 33 bp, Homo sapien
tagacatgttaataaaagatctacacttcggta

SEQ ID NO: 979472 - DNA, 33 bp, Homo sapien
tagacatgttaataaacgatctacacttcggta

SEQ ID NO: 979473 - DNA, 33 bp, Homo sapien
agaattgtggttctaacatttggaactctaaca

SEQ ID NO: 979474 - DNA, 33 bp, Homo sapien
agaattgtggttctaatatttggaactctaaca

SEQ ID NO: 979475 - DNA, 33 bp, Homo sapien
tacctaatgatctgaaacagaatatgtaaacct

SEQ ID NO: 979476 - DNA, 33 bp, Homo sapien
tacctaatgatctgaagcagaatatgtaaacct

SEQ ID NO: 979477 - DNA, 33 bp, Homo sapien
tcattcaagttttgccaatgtcccaataatgtt

SEQ ID NO: 979478 - DNA, 33 bp, Homo sapien
tcattcaagttttgcccatgtcccaataatgtt

SEQ ID NO: 979479 - DNA, 33 bp, Homo sapien
tgacactgaacacttacgtagcatcttcaggta

SEQ ID NO: 979480 - DNA, 33 bp, Homo sapien
tgacactgaacacttatgtagcatcttcaggta

SEQ ID NO: 979481 - DNA, 33 bp, Homo sapien
tgctgatgtgcaagtacataatcacagaaacca

SEQ ID NO: 979482 - DNA, 33 bp, Homo sapien
tgctgatgtgcaagtagataatcacagaaacca

SEQ ID NO: 979483 - DNA, 33 bp, Homo sapien
gatcccctacttcatcaatgctctgaaccaagt

SEQ ID NO: 979484 - DNA, 33 bp, Homo sapien
gatcccctacttcatccatgctctgaaccaagt

SEQ ID NO: 979485 - DNA, 33 bp, Homo sapien
tttagagaggcactgcggatatacaaaagtgcc

SEQ ID NO: 979486 - DNA, 33 bp, Homo sapien
tttagagaggcactgctgatatacaaaagtgcc

SEQ ID NO: 979487 - DNA, 33 bp, Homo sapien
gcaattatgtcagccaaccttcatcaggcatct

SEQ ID NO: 979488 - DNA, 33 bp, Homo sapien
gcaattatgtcagccagccttcatcaggcatct

SEQ ID NO: 979489 - DNA, 33 bp, Homo sapien
agagctgacaatgggagtaatttggctatataa

SEQ ID NO: 979490 - DNA, 33 bp, Homo sapien
agagctgacaatgggattaatttggctatataa

SEQ ID NO: 979491 - DNA, 33 bp, Homo sapien
ttaaagaaccaggaagcaacggccactgaggag

SEQ ID NO: 979492 - DNA, 33 bp, Homo sapien
ttaaagaaccaggaagtaacggccactgaggag

SEQ ID NO: 979493 - DNA, 33 bp, Homo sapien
cttatgtccactagcaatagtgttacgttggag

SEQ ID NO: 979494 - DNA, 33 bp, Homo sapien
cttatgtccactagcagtagtgttacgttggag

SEQ ID NO: 979495 - DNA, 33 bp, Homo sapien
tctgttgcacgtctcacaaatttagcataagtt

SEQ ID NO: 979496 - DNA, 33 bp, Homo sapien
tctgttgcacgtctcataaatttagcataagtt

SEQ ID NO: 979497 - DNA, 33 bp, Homo sapien
ttgggtggacacatgacgttgccacccctggtc

SEQ ID NO: 979498 - DNA, 33 bp, Homo sapien
ttgggtggacacatgaggttgccacccctggtc

SEQ ID NO: 979499 - DNA, 33 bp, Homo sapien
ccttcatgaaacttgcaacttcatatgctaaag

SEQ ID NO: 979500 - DNA, 33 bp, Homo sapien
ccttcatgaaacttgcgacttcatatgctaaag

SEQ ID NO: 979501 - DNA, 33 bp, Homo sapien
ttaggcacgtcttccacagatactctcctttct

SEQ ID NO: 979502 - DNA, 33 bp, Homo sapien
ttaggcacgtcttccatagatactctcctttct

SEQ ID NO: 979503 - DNA, 33 bp, Homo sapien
ctggggacttcgtggaacagagaaagggagaga

SEQ ID NO: 979504 - DNA, 33 bp, Homo sapien
ctggggacttcgtggaccagagaaagggagaga

SEQ ID NO: 979505 - DNA, 33 bp, Homo sapien
tattctgaaggtataaagggaaaaatggccatt

SEQ ID NO: 979506 - DNA, 33 bp, Homo sapien
tattctgaaggtataaggggaaaaatggccatt

SEQ ID NO: 979507 - DNA, 33 bp, Homo sapien
aactgcaaatgattgggacttgttttggccaat

SEQ ID NO: 979508 - DNA, 33 bp, Homo sapien
aactgcaaatgattggtacttgttttggccaat

SEQ ID NO: 979509 - DNA, 33 bp, Homo sapien
gaattcaagcaaaggcaaatgaagcttttattt

SEQ ID NO: 979510 - DNA, 33 bp, Homo sapien
gaattcaagcaaaggcgaatgaagcttttattt

SEQ ID NO: 979511 - DNA, 33 bp, Homo sapien
aaaactaatttgactacacttttgctcattgaa

SEQ ID NO: 979512 - DNA, 33 bp, Homo sapien
aaaactaatttgactatacttttgctcattgaa

SEQ ID NO: 979513 - DNA, 33 bp, Homo sapien
ggcagactaaagacaactgtgacgtattgacat

SEQ ID NO: 979514 - DNA, 33 bp, Homo sapien
ggcagactaaagacaattgtgacgtattgacat

SEQ ID NO: 979515 - DNA, 33 bp, Homo sapien
tcaggggaaaaaaggactatcgaggcttttcaa

SEQ ID NO: 979516 - DNA, 33 bp, Homo sapien
tcaggggaaaaaaggattatcgaggcttttcaa

SEQ ID NO: 979517 - DNA, 33 bp, Homo sapien
ccttccttctcctctaccctatcttttcagtcc

SEQ ID NO: 979518 - DNA, 33 bp, Homo sapien
ccttccttctcctctatcctatcttttcagtcc

SEQ ID NO: 979519 - DNA, 33 bp, Homo sapien
cccaggaatagacacaatcaaactacacaggtc

SEQ ID NO: 979520 - DNA, 33 bp, Homo sapien
cccaggaatagacacagtcaaactacacaggtc

SEQ ID NO: 979521 - DNA, 33 bp, Homo sapien
ttgtactaagatgtgcaacgtatatgtcgtcaa

SEQ ID NO: 979522 - DNA, 33 bp, Homo sapien
ttgtactaagatgtgcgacgtatatgtcgtcaa

SEQ ID NO: 979523 - DNA, 33 bp, Homo sapien
gagggtaggagtctgacattgagtcaagggtga

SEQ ID NO: 979524 - DNA, 33 bp, Homo sapien
gagggtaggagtctgatattgagtcaagggtga

SEQ ID NO: 979525 - DNA, 33 bp, Homo sapien
gagaaactgctcgaataagtggattgtcaaaaa

SEQ ID NO: 979526 - DNA, 33 bp, Homo sapien
gagaaactgctcgaatgagtggattgtcaaaaa

SEQ ID NO: 979527 - DNA, 33 bp, Homo sapien
tgcagctcaatgttaacagaacataaagaatga

SEQ ID NO: 979528 - DNA, 33 bp, Homo sapien
tgcagctcaatgttaatagaacataaagaatga

SEQ ID NO: 979529 - DNA, 33 bp, Homo sapien
ggttgtacaccttctaaagtaggaattctacca

SEQ ID NO: 979530 - DNA, 33 bp, Homo sapien
ggttgtacaccttctacagtaggaattctacca

SEQ ID NO: 979531 - DNA, 33 bp, Homo sapien
aactggaaaagctgtgaaagtagattctcccct

SEQ ID NO: 979532 - DNA, 33 bp, Homo sapien
aactggaaaagctgtggaagtagattctcccct

SEQ ID NO: 979533 - DNA, 33 bp, Homo sapien
tccctctcatttgccaagcgtccactcggaaag

SEQ ID NO: 979534 - DNA, 33 bp, Homo sapien
tccctctcatttgccaggcgtccactcggaaag

SEQ ID NO: 979535 - DNA, 33 bp, Homo sapien
ctgagaaatgactcccccggaggcctcctgcac

SEQ ID NO: 979536 - DNA, 33 bp, Homo sapien
ctgagaaatgactccctcggaggcctcctgcac

SEQ ID NO: 979537 - DNA, 33 bp, Homo sapien
aagtgcggttctgagaacatccccttcatgtgc

SEQ ID NO: 979538 - DNA, 33 bp, Homo sapien
aagtgcggttctgagaccatccccttcatgtgc

SEQ ID NO: 979539 - DNA, 33 bp, Homo sapien
ggccctggagaccaagactgccatgtggtaaga

SEQ ID NO: 979540 - DNA, 33 bp, Homo sapien
ggccctggagaccaaggctgccatgtggtaaga

SEQ ID NO: 979541 - DNA, 33 bp, Homo sapien
ttcctcgttagctatgcatggccctggagacca

SEQ ID NO: 979542 - DNA, 33 bp, Homo sapien
ttcctcgttagctatgtatggccctggagacca

SEQ ID NO: 979543 - DNA, 33 bp, Homo sapien
atgtgaatgccagacaagtgttcctcgttagct

SEQ ID NO: 979544 - DNA, 33 bp, Homo sapien
atgtgaatgccagacacgtgttcctcgttagct

SEQ ID NO: 979545 - DNA, 33 bp, Homo sapien
acgaaaaatgcaatccaaatgcttgtgtttccc

SEQ ID NO: 979546 - DNA, 33 bp, Homo sapien
acgaaaaatgcaatccgaatgcttgtgtttccc

SEQ ID NO: 979547 - DNA, 33 bp, Homo sapien
tggataatggaagtcaaaaatatgttgaacgaa

SEQ ID NO: 979548 - DNA, 33 bp, Homo sapien
tggataatggaagtcagaaatatgttgaacgaa

SEQ ID NO: 979549 - DNA, 33 bp, Homo sapien
gaggatgtgaatttagacaacctggctccatag

SEQ ID NO: 979550 - DNA, 33 bp, Homo sapien
gaggatgtgaatttaggcaacctggctccatag

SEQ ID NO: 979551 - DNA, 33 bp, Homo sapien
cttcagggtgaaaacactaaatgctaagctgag

SEQ ID NO: 979552 - DNA, 33 bp, Homo sapien
cttcagggtgaaaacagtaaatgctaagctgag

SEQ ID NO: 979553 - DNA, 33 bp, Homo sapien
ctcctaaatacccataacaggcattaatcggcc

SEQ ID NO: 979554 - DNA, 33 bp, Homo sapien
ctcctaaatacccataccaggcattaatcggcc

SEQ ID NO: 979555 - DNA, 33 bp, Homo sapien
gtgtctcactcaccaacaaggatctcagatagt

SEQ ID NO: 979556 - DNA, 33 bp, Homo sapien
gtgtctcactcaccaataaggatctcagatagt

SEQ ID NO: 979557 - DNA, 33 bp, Homo sapien
gttaaactccaaagccccttaagactcaaattg

SEQ ID NO: 979558 - DNA, 33 bp, Homo sapien
gttaaactccaaagcctcttaagactcaaattg

SEQ ID NO: 979559 - DNA, 33 bp, Homo sapien
aaaggaaaagatggtaacacaaaaaggtgaaca

SEQ ID NO: 979560 - DNA, 33 bp, Homo sapien
aaaggaaaagatggtatcacaaaaaggtgaaca

SEQ ID NO: 979561 - DNA, 33 bp, Homo sapien
atgcaaggacagcctaatacagtcatcctcctt

SEQ ID NO: 979562 - DNA, 33 bp, Homo sapien
atgcaaggacagcctattacagtcatcctcctt

SEQ ID NO: 979563 - DNA, 33 bp, Homo sapien
agaattaaccacagtacgtatatccacccaaag

SEQ ID NO: 979564 - DNA, 33 bp, Homo sapien
agaattaaccacagtatgtatatccacccaaag

SEQ ID NO: 979565 - DNA, 33 bp, Homo sapien
agttccaactcttaaaaggtggctattccatct

SEQ ID NO: 979566 - DNA, 33 bp, Homo sapien
agttccaactcttaaagggtggctattccatct

SEQ ID NO: 979567 - DNA, 33 bp, Homo sapien
acgtccttctaggagcaagtctctgtctctctc

SEQ ID NO: 979568 - DNA, 33 bp, Homo sapien
acgtccttctaggagcgagtctctgtctctctc

SEQ ID NO: 979569 - DNA, 33 bp, Homo sapien
gcttaaaatccttcaacaacagacacatactgg

SEQ ID NO: 979570 - DNA, 33 bp, Homo sapien
gcttaaaatccttcaataacagacacatactgg

SEQ ID NO: 979571 - DNA, 33 bp, Homo sapien
taggtgtgacatggccagatatgcatttgagca

SEQ ID NO: 979572 - DNA, 33 bp, Homo sapien
taggtgtgacatggccggatatgcatttgagca

SEQ ID NO: 979573 - DNA, 33 bp, Homo sapien
atgtactatctcattacaaaaaggtttgtgtgc

SEQ ID NO: 979574 - DNA, 33 bp, Homo sapien
atgtactatctcattataaaaaggtttgtgtgc

SEQ ID NO: 979575 - DNA, 33 bp, Homo sapien
tttcttggggataacacgtccagcatcctgaag

SEQ ID NO: 979576 - DNA, 33 bp, Homo sapien
tttcttggggataacatgtccagcatcctgaag

SEQ ID NO: 979577 - DNA, 33 bp, Homo sapien
cttaacctgatgagaacacttcaggatgctgga

SEQ ID NO: 979578 - DNA, 33 bp, Homo sapien
cttaacctgatgagaatacttcaggatgctgga

SEQ ID NO: 979579 - DNA, 33 bp, Homo sapien
tttttagcctcaaatccaattaatccaaaggtg

SEQ ID NO: 979580 - DNA, 33 bp, Homo sapien
tttttagcctcaaatcgaattaatccaaaggtg

SEQ ID NO: 979581 - DNA, 33 bp, Homo sapien
tattctctttccaacacggtctagttgcagccc

SEQ ID NO: 979582 - DNA, 33 bp, Homo sapien
tattctctttccaacatggtctagttgcagccc

SEQ ID NO: 979583 - DNA, 33 bp, Homo sapien
tggacaggtccaaatccaaaaacaaatcatgtg

SEQ ID NO: 979584 - DNA, 33 bp, Homo sapien
tggacaggtccaaatctaaaaacaaatcatgtg

SEQ ID NO: 979585 - DNA, 33 bp, Homo sapien
ttccagccttctgacaccttccctgtacttaaa

SEQ ID NO: 979586 - DNA, 33 bp, Homo sapien
ttccagccttctgacatcttccctgtacttaaa

SEQ ID NO: 979587 - DNA, 33 bp, Homo sapien
aaaaatattccaggaaagaaacaatgccctaaa

SEQ ID NO: 979588 - DNA, 33 bp, Homo sapien
aaaaatattccaggaaggaaacaatgccctaaa

SEQ ID NO: 979589 - DNA, 33 bp, Homo sapien
atacaggcttctatgacgggataacaaaaatgg

SEQ ID NO: 979590 - DNA, 33 bp, Homo sapien
atacaggcttctatgatgggataacaaaaatgg

SEQ ID NO: 979591 - DNA, 33 bp, Homo sapien
caggttattaaccccaatactgcagattattat

SEQ ID NO: 979592 - DNA, 33 bp, Homo sapien
caggttattaaccccattactgcagattattat

SEQ ID NO: 979593 - DNA, 33 bp, Homo sapien
aagcactgccttggtgaaactcgtatagctgac

SEQ ID NO: 979594 - DNA, 33 bp, Homo sapien
aagcactgccttggtggaactcgtatagctgac

SEQ ID NO: 979595 - DNA, 33 bp, Homo sapien
tttttcttcaaatttacctcttcacagtgtatt

SEQ ID NO: 979596 - DNA, 33 bp, Homo sapien
tttttcttcaaatttatctcttcacagtgtatt

SEQ ID NO: 979597 - DNA, 33 bp, Homo sapien
cacattttcatcttacactaggccccacaaagt

SEQ ID NO: 979598 - DNA, 33 bp, Homo sapien
cacattttcatcttactctaggccccacaaagt

SEQ ID NO: 979599 - DNA, 33 bp, Homo sapien
ctgctacataatgatacagttgtttaatattag

SEQ ID NO: 979600 - DNA, 33 bp, Homo sapien
ctgctacataatgatagagttgtttaatattag

SEQ ID NO: 979601 - DNA, 33 bp, Homo sapien
agactggtttatccaccgaaatggtttcacact

SEQ ID NO: 979602 - DNA, 33 bp, Homo sapien
agactggtttatccactgaaatggtttcacact

SEQ ID NO: 979603 - DNA, 33 bp, Homo sapien
tgtagtgcatcttttacaacttagtggaatcac

SEQ ID NO: 979604 - DNA, 33 bp, Homo sapien
tgtagtgcatcttttataacttagtggaatcac

SEQ ID NO: 979605 - DNA, 33 bp, Homo sapien
atcatcaatgcataagcaaaatgtttctctccc

SEQ ID NO: 979606 - DNA, 33 bp, Homo sapien
atcatcaatgcataagtaaaatgtttctctccc

SEQ ID NO: 979607 - DNA, 33 bp, Homo sapien
aaggtgcacaagtgacaagcggagatctgccgt

SEQ ID NO: 979608 - DNA, 33 bp, Homo sapien
aaggtgcacaagtgacgagcggagatctgccgt

SEQ ID NO: 979609 - DNA, 33 bp, Homo sapien
tggagcagagttttacagctgagttataaactc

SEQ ID NO: 979610 - DNA, 33 bp, Homo sapien
tggagcagagttttacggctgagttataaactc

SEQ ID NO: 979611 - DNA, 33 bp, Homo sapien
agaggaataataggaaacttaatacaatgcagt

SEQ ID NO: 979612 - DNA, 33 bp, Homo sapien
agaggaataataggaagcttaatacaatgcagt

SEQ ID NO: 979613 - DNA, 33 bp, Homo sapien
gtgtctgactaacttacagggtcgttactttgt

SEQ ID NO: 979614 - DNA, 33 bp, Homo sapien
gtgtctgactaacttatagggtcgttactttgt

SEQ ID NO: 979615 - DNA, 33 bp, Homo sapien
aatggcctgattcagcgattttaataaagatat

SEQ ID NO: 979616 - DNA, 33 bp, Homo sapien
aatggcctgattcagctattttaataaagatat

SEQ ID NO: 979617 - DNA, 33 bp, Homo sapien
gtcatctataaagccaaacttcattcattggaa

SEQ ID NO: 979618 - DNA, 33 bp, Homo sapien
gtcatctataaagccagacttcattcattggaa

SEQ ID NO: 979619 - DNA, 33 bp, Homo sapien
gttgatggctgggtccaaactctacttccaata

SEQ ID NO: 979620 - DNA, 33 bp, Homo sapien
gttgatggctgggtcccaactctacttccaata

SEQ ID NO: 979621 - DNA, 33 bp, Homo sapien
agctgtatggaggaaaatgttgatggctgggtc

SEQ ID NO: 979622 - DNA, 33 bp, Homo sapien
agctgtatggaggaaagtgttgatggctgggtc

SEQ ID NO: 979623 - DNA, 33 bp, Homo sapien
ctgattttctactgtgcaaggagttgacaccca

SEQ ID NO: 979624 - DNA, 33 bp, Homo sapien
ctgattttctactgtggaaggagttgacaccca

SEQ ID NO: 979625 - DNA, 33 bp, Homo sapien
atcacacatagcttcaagctactatttcatatg

SEQ ID NO: 979626 - DNA, 33 bp, Homo sapien
atcacacatagcttcaggctactatttcatatg

SEQ ID NO: 979627 - DNA, 33 bp, Homo sapien
atttacctcttactagaagatttccatcaactt

SEQ ID NO: 979628 - DNA, 33 bp, Homo sapien
atttacctcttactaggagatttccatcaactt

SEQ ID NO: 979629 - DNA, 33 bp, Homo sapien
ccccagagtttcttgaaccactatgagttagac

SEQ ID NO: 979630 - DNA, 33 bp, Homo sapien
ccccagagtttcttgagccactatgagttagac

SEQ ID NO: 979631 - DNA, 33 bp, Homo sapien
gtaccaagaatgaacacggtctctctactagtt

SEQ ID NO: 979632 - DNA, 33 bp, Homo sapien
gtaccaagaatgaacatggtctctctactagtt

SEQ ID NO: 979633 - DNA, 33 bp, Homo sapien
agattattcaggcaagaaaagtaaggagggcaa

SEQ ID NO: 979634 - DNA, 33 bp, Homo sapien
agattattcaggcaaggaaagtaaggagggcaa

SEQ ID NO: 979635 - DNA, 33 bp, Homo sapien
atgagaatcatagtcaatagttgtcagaagaaa

SEQ ID NO: 979636 - DNA, 33 bp, Homo sapien
atgagaatcatagtcagtagttgtcagaagaaa

SEQ ID NO: 979637 - DNA, 33 bp, Homo sapien
atttggtgcactgtcactagcttaaagacggag

SEQ ID NO: 979638 - DNA, 33 bp, Homo sapien
atttggtgcactgtcagtagcttaaagacggag

SEQ ID NO: 979639 - DNA, 33 bp, Homo sapien
tgattgctatgtcatacaatttgtattataaaa

SEQ ID NO: 979640 - DNA, 33 bp, Homo sapien
tgattgctatgtcatataatttgtattataaaa

SEQ ID NO: 979641 - DNA, 33 bp, Homo sapien
ctttttaaactgagcactactattttatcaatt

SEQ ID NO: 979642 - DNA, 33 bp, Homo sapien
ctttttaaactgagcattactattttatcaatt

SEQ ID NO: 979643 - DNA, 33 bp, Homo sapien
tctgagggtgtatcaccgatgcagcaaaggaaa

SEQ ID NO: 979644 - DNA, 33 bp, Homo sapien
tctgagggtgtatcactgatgcagcaaaggaaa

SEQ ID NO: 979645 - DNA, 33 bp, Homo sapien
tggctttttctacattcaagactatatggggga

SEQ ID NO: 979646 - DNA, 33 bp, Homo sapien
tggctttttctacattgaagactatatggggga

SEQ ID NO: 979647 - DNA, 33 bp, Homo sapien
ggtacacttaaaaaaaacttcatgcttcaactc

SEQ ID NO: 979648 - DNA, 33 bp, Homo sapien
ggtacacttaaaaaaatcttcatgcttcaactc

SEQ ID NO: 979649 - DNA, 33 bp, Homo sapien
ggtaaaaagttattgaccataagcataagcaaa

SEQ ID NO: 979650 - DNA, 33 bp, Homo sapien
ggtaaaaagttattgatcataagcataagcaaa

SEQ ID NO: 979651 - DNA, 33 bp, Homo sapien
ttggaaataacacaaacggctaccacaataact

SEQ ID NO: 979652 - DNA, 33 bp, Homo sapien
ttggaaataacacaaatggctaccacaataact

SEQ ID NO: 979653 - DNA, 33 bp, Homo sapien
gaatagtggacccttcaacagaaaccttacaag

SEQ ID NO: 979654 - DNA, 33 bp, Homo sapien
gaatagtggacccttcgacagaaaccttacaag

SEQ ID NO: 979655 - DNA, 33 bp, Homo sapien
gcacaatctgtcagcacggaaatcaagagcaca

SEQ ID NO: 979656 - DNA, 33 bp, Homo sapien
gcacaatctgtcagcatggaaatcaagagcaca

SEQ ID NO: 979657 - DNA, 33 bp, Homo sapien
ctcttccttcggccaaaacagccagattaggca

SEQ ID NO: 979658 - DNA, 33 bp, Homo sapien
ctcttccttcggccaatacagccagattaggca

SEQ ID NO: 979659 - DNA, 33 bp, Homo sapien
ccaaggcttgaagggacgaattccacctcagaa

SEQ ID NO: 979660 - DNA, 33 bp, Homo sapien
ccaaggcttgaagggatgaattccacctcagaa

SEQ ID NO: 979661 - DNA, 33 bp, Homo sapien
cacccacccagaggaaaaagagggctccatccc

SEQ ID NO: 979662 - DNA, 33 bp, Homo sapien
cacccacccagaggaagaagagggctccatccc

SEQ ID NO: 979663 - DNA, 33 bp, Homo sapien
ccatatctttctatcaggaattactcttgaaaa

SEQ ID NO: 979664 - DNA, 33 bp, Homo sapien
ccatatctttctatcatgaattactcttgaaaa

SEQ ID NO: 979665 - DNA, 33 bp, Homo sapien
gttcaactgcctggtaaaattaaggaaaaaaag

SEQ ID NO: 979666 - DNA, 33 bp, Homo sapien
gttcaactgcctggtagaattaaggaaaaaaag

SEQ ID NO: 979667 - DNA, 33 bp, Homo sapien
gacaattcctatgaacaagaaggcatcttataa

SEQ ID NO: 979668 - DNA, 33 bp, Homo sapien
gacaattcctatgaactagaaggcatcttataa

SEQ ID NO: 979669 - DNA, 33 bp, Homo sapien
gctagataatgctaaaacacaggaaaaaaatga

SEQ ID NO: 979670 - DNA, 33 bp, Homo sapien
gctagataatgctaaagcacaggaaaaaaatga

SEQ ID NO: 979671 - DNA, 33 bp, Homo sapien
ctgatgactggctgacaaagaagctacacagac

SEQ ID NO: 979672 - DNA, 33 bp, Homo sapien
ctgatgactggctgacgaagaagctacacagac

SEQ ID NO: 979673 - DNA, 33 bp, Homo sapien
caatcaaccagagataagtatgaacttgtttag

SEQ ID NO: 979674 - DNA, 33 bp, Homo sapien
caatcaaccagagatatgtatgaacttgtttag

SEQ ID NO: 979675 - DNA, 33 bp, Homo sapien
gtttagccattctataactctctcatatccagg

SEQ ID NO: 979676 - DNA, 33 bp, Homo sapien
gtttagccattctatagctctctcatatccagg

SEQ ID NO: 979677 - DNA, 33 bp, Homo sapien
gtgtcaagaaggaagacgggaaattgtctttgt

SEQ ID NO: 979678 - DNA, 33 bp, Homo sapien
gtgtcaagaaggaagatgggaaattgtctttgt

SEQ ID NO: 979679 - DNA, 33 bp, Homo sapien
gcacctaagattctggaaatgctctgaactatg

SEQ ID NO: 979680 - DNA, 33 bp, Homo sapien
gcacctaagattctgggaatgctctgaactatg

SEQ ID NO: 979681 - DNA, 33 bp, Homo sapien
aaaagtacttacaatacagtcaaataataatac

SEQ ID NO: 979682 - DNA, 33 bp, Homo sapien
aaaagtacttacaatagagtcaaataataatac

SEQ ID NO: 979683 - DNA, 33 bp, Homo sapien
ttatgtggaataactcacttaatcattataaca

SEQ ID NO: 979684 - DNA, 33 bp, Homo sapien
ttatgtggaataactctcttaatcattataaca

SEQ ID NO: 979685 - DNA, 33 bp, Homo sapien
gccaagtaacagtggaacaatatgtatatttta

SEQ ID NO: 979686 - DNA, 33 bp, Homo sapien
gccaagtaacagtggaccaatatgtatatttta

SEQ ID NO: 979687 - DNA, 33 bp, Homo sapien
agaaattgcctgatgacgacttgatacatttct

SEQ ID NO: 979688 - DNA, 33 bp, Homo sapien
agaaattgcctgatgatgacttgatacatttct

SEQ ID NO: 979689 - DNA, 33 bp, Homo sapien
cagccactgtgaaaagaagtctggaaatttctc

SEQ ID NO: 979690 - DNA, 33 bp, Homo sapien
cagccactgtgaaaagcagtctggaaatttctc

SEQ ID NO: 979691 - DNA, 33 bp, Homo sapien
acagtgagcacatatacacaaaaatattggaac

SEQ ID NO: 979692 - DNA, 33 bp, Homo sapien
acagtgagcacatatagacaaaaatattggaac

SEQ ID NO: 979693 - DNA, 33 bp, Homo sapien
caccctctagtaggccacagtttctagtgttcc

SEQ ID NO: 979694 - DNA, 33 bp, Homo sapien
caccctctagtaggccgcagtttctagtgttcc

SEQ ID NO: 979695 - DNA, 33 bp, Homo sapien
ttcctcagctttgctaaatgaaaacaccaagga

SEQ ID NO: 979696 - DNA, 33 bp, Homo sapien
ttcctcagctttgctagatgaaaacaccaagga

SEQ ID NO: 979697 - DNA, 33 bp, Homo sapien
aaagagcatcatgggaagaaagtggagaagata

SEQ ID NO: 979698 - DNA, 33 bp, Homo sapien
aaagagcatcatgggaggaaagtggagaagata

SEQ ID NO: 979699 - DNA, 33 bp, Homo sapien
tcacaacagagacatacactatctggttgccta

SEQ ID NO: 979700 - DNA, 33 bp, Homo sapien
tcacaacagagacatatactatctggttgccta

SEQ ID NO: 979701 - DNA, 33 bp, Homo sapien
aaatagttccttatgacaaaaggagagatgtgt

SEQ ID NO: 979702 - DNA, 33 bp, Homo sapien
aaatagttccttatgataaaaggagagatgtgt

SEQ ID NO: 979703 - DNA, 33 bp, Homo sapien
ttctatgaagtacctcacggtaagaatatgatg

SEQ ID NO: 979704 - DNA, 33 bp, Homo sapien
ttctatgaagtacctcgcggtaagaatatgatg

SEQ ID NO: 979705 - DNA, 33 bp, Homo sapien
gagccagtcccagagaaccagatttagttgatc

SEQ ID NO: 979706 - DNA, 33 bp, Homo sapien
gagccagtcccagagatccagatttagttgatc

SEQ ID NO: 979707 - DNA, 33 bp, Homo sapien
aggtggggtgtagctggaaaaacacttgtggaa

SEQ ID NO: 979708 - DNA, 33 bp, Homo sapien
aggtggggtgtagctgtaaaaacacttgtggaa

SEQ ID NO: 979709 - DNA, 33 bp, Homo sapien
ataatcctccagtgacaatagcattagtttaca

SEQ ID NO: 979710 - DNA, 33 bp, Homo sapien
ataatcctccagtgacgatagcattagtttaca

SEQ ID NO: 979711 - DNA, 33 bp, Homo sapien
tagttatatatggaggaccccagaaacttctca

SEQ ID NO: 979712 - DNA, 33 bp, Homo sapien
tagttatatatggaggcccccagaaacttctca

SEQ ID NO: 979713 - DNA, 33 bp, Homo sapien
cataaatggactaaggcatttccattgtttacc

SEQ ID NO: 979714 - DNA, 33 bp, Homo sapien
cataaatggactaaggtatttccattgtttacc

SEQ ID NO: 979715 - DNA, 33 bp, Homo sapien
aaactctaattcctaactgttagcaacccaaaa

SEQ ID NO: 979716 - DNA, 33 bp, Homo sapien
aaactctaattcctaattgttagcaacccaaaa

SEQ ID NO: 979717 - DNA, 33 bp, Homo sapien
gcaatagaaacgtgtggataccttatcaatttg

SEQ ID NO: 979718 - DNA, 33 bp, Homo sapien
gcaatagaaacgtgtgtataccttatcaatttg

SEQ ID NO: 979719 - DNA, 33 bp, Homo sapien
agagcaggagtttaaacctgggcatccatgagc

SEQ ID NO: 979720 - DNA, 33 bp, Homo sapien
agagcaggagtttaaatctgggcatccatgagc

SEQ ID NO: 979721 - DNA, 33 bp, Homo sapien
caaggaggtcatagtcacgtatggaagacaggt

SEQ ID NO: 979722 - DNA, 33 bp, Homo sapien
caaggaggtcatagtcgcgtatggaagacaggt

SEQ ID NO: 979723 - DNA, 33 bp, Homo sapien
ctattcaggtacgggacacagggttctaaacat

SEQ ID NO: 979724 - DNA, 33 bp, Homo sapien
ctattcaggtacgggatacagggttctaaacat

SEQ ID NO: 979725 - DNA, 33 bp, Homo sapien
aacatcatattctggagtcaccacaattgattc

SEQ ID NO: 979726 - DNA, 33 bp, Homo sapien
aacatcatattctggattcaccacaattgattc

SEQ ID NO: 979727 - DNA, 33 bp, Homo sapien
atcacattgtctaatacaaaatgcttgtttgaa

SEQ ID NO: 979728 - DNA, 33 bp, Homo sapien
atcacattgtctaatataaaatgcttgtttgaa

SEQ ID NO: 979729 - DNA, 33 bp, Homo sapien
ccaaactagcactgatgatagtcatttcaagct

SEQ ID NO: 979730 - DNA, 33 bp, Homo sapien
ccaaactagcactgattatagtcatttcaagct

SEQ ID NO: 979731 - DNA, 33 bp, Homo sapien
tgtatacttcccagtcaataggaaaattgctct

SEQ ID NO: 979732 - DNA, 33 bp, Homo sapien
tgtatacttcccagtccataggaaaattgctct

SEQ ID NO: 979733 - DNA, 33 bp, Homo sapien
gatgatatggacctaaactgtgtgaaaattcaa

SEQ ID NO: 979734 - DNA, 33 bp, Homo sapien
gatgatatggacctaagctgtgtgaaaattcaa

SEQ ID NO: 979735 - DNA, 33 bp, Homo sapien
gcataaaaaaatcaaacagacggcaggccttgg

SEQ ID NO: 979736 - DNA, 33 bp, Homo sapien
gcataaaaaaatcaaagagacggcaggccttgg

SEQ ID NO: 979737 - DNA, 33 bp, Homo sapien
gagatatgttacataaaccacattgaggagcat

SEQ ID NO: 979738 - DNA, 33 bp, Homo sapien
gagatatgttacataagccacattgaggagcat

SEQ ID NO: 979739 - DNA, 33 bp, Homo sapien
gggaaaagtgtgacgacggtccaacaaagagtt

SEQ ID NO: 979740 - DNA, 33 bp, Homo sapien
gggaaaagtgtgacgatggtccaacaaagagtt

SEQ ID NO: 979741 - DNA, 33 bp, Homo sapien
tgttctctctgtgtaacggcatctacttgctta

SEQ ID NO: 979742 - DNA, 33 bp, Homo sapien
tgttctctctgtgtaatggcatctacttgctta

SEQ ID NO: 979743 - DNA, 33 bp, Homo sapien
gttactgtggttaaaactgcatagacttcagag

SEQ ID NO: 979744 - DNA, 33 bp, Homo sapien
gttactgtggttaaaattgcatagacttcagag

SEQ ID NO: 979745 - DNA, 33 bp, Homo sapien
ccatgcagggccaagcacacatagaaaatgtcc

SEQ ID NO: 979746 - DNA, 33 bp, Homo sapien
ccatgcagggccaagcgcacatagaaaatgtcc

SEQ ID NO: 979747 - DNA, 33 bp, Homo sapien
tgagtcacttaaaaaaggtagatccggccaggc

SEQ ID NO: 979748 - DNA, 33 bp, Homo sapien
tgagtcacttaaaaaatgtagatccggccaggc

SEQ ID NO: 979749 - DNA, 33 bp, Homo sapien
agatcagattaacaaacgaaggcgttaaggaag

SEQ ID NO: 979750 - DNA, 33 bp, Homo sapien
agatcagattaacaaatgaaggcgttaaggaag

SEQ ID NO: 979751 - DNA, 33 bp, Homo sapien
gggatacacggtagaccaagaagtccttcagaa

SEQ ID NO: 979752 - DNA, 33 bp, Homo sapien
gggatacacggtagactaagaagtccttcagaa

SEQ ID NO: 979753 - DNA, 33 bp, Homo sapien
ggatgagtccattgtcaatgtattattttgtaa

SEQ ID NO: 979754 - DNA, 33 bp, Homo sapien
ggatgagtccattgtccatgtattattttgtaa

SEQ ID NO: 979755 - DNA, 33 bp, Homo sapien
ggagctcagcagaaaaaattgggctggagatac

SEQ ID NO: 979756 - DNA, 33 bp, Homo sapien
ggagctcagcagaaaacattgggctggagatac

SEQ ID NO: 979757 - DNA, 33 bp, Homo sapien
aggacctttacttctgaaccctacacgagaagg

SEQ ID NO: 979758 - DNA, 33 bp, Homo sapien
aggacctttacttctggaccctacacgagaagg

SEQ ID NO: 979759 - DNA, 33 bp, Homo sapien
ttgtgcaacatctggagaagtagctacaacaca

SEQ ID NO: 979760 - DNA, 33 bp, Homo sapien
ttgtgcaacatctggataagtagctacaacaca

SEQ ID NO: 979761 - DNA, 33 bp, Homo sapien
catgggtaaactgatacaagatttgattccaag

SEQ ID NO: 979762 - DNA, 33 bp, Homo sapien
catgggtaaactgatagaagatttgattccaag

SEQ ID NO: 979763 - DNA, 33 bp, Homo sapien
cttcctcttaacctacactcttctgatcaagaa

SEQ ID NO: 979764 - DNA, 33 bp, Homo sapien
cttcctcttaacctacgctcttctgatcaagaa

SEQ ID NO: 979765 - DNA, 33 bp, Homo sapien
aatgacatttttagaagagtgaggttgacaagt

SEQ ID NO: 979766 - DNA, 33 bp, Homo sapien
aatgacatttttagaatagtgaggttgacaagt

SEQ ID NO: 979767 - DNA, 33 bp, Homo sapien
gagaattaagaatacaggcgtaagcaagagaac

SEQ ID NO: 979768 - DNA, 33 bp, Homo sapien
gagaattaagaatacatgcgtaagcaagagaac

SEQ ID NO: 979769 - DNA, 33 bp, Homo sapien
ttgctaattctttcccaccactagaggtcaggg

SEQ ID NO: 979770 - DNA, 33 bp, Homo sapien
ttgctaattctttcccgccactagaggtcaggg

SEQ ID NO: 979771 - DNA, 33 bp, Homo sapien
taatgttgaacagaaaaggatacaaagaatata

SEQ ID NO: 979772 - DNA, 33 bp, Homo sapien
taatgttgaacagaaagggatacaaagaatata

SEQ ID NO: 979773 - DNA, 33 bp, Homo sapien
agatttgaacctgatacgattagaattttgtat

SEQ ID NO: 979774 - DNA, 33 bp, Homo sapien
agatttgaacctgatatgattagaattttgtat

SEQ ID NO: 979775 - DNA, 33 bp, Homo sapien
catactggctgccaggaatacaacagggaacaa

SEQ ID NO: 979776 - DNA, 33 bp, Homo sapien
catactggctgccaggcatacaacagggaacaa

SEQ ID NO: 979777 - DNA, 33 bp, Homo sapien
taagtggaaaaaccaagatttgaccaagcagtc

SEQ ID NO: 979778 - DNA, 33 bp, Homo sapien
taagtggaaaaaccaatatttgaccaagcagtc

SEQ ID NO: 979779 - DNA, 33 bp, Homo sapien
ggacttctgctaagatcaggaataagacaagta

SEQ ID NO: 979780 - DNA, 33 bp, Homo sapien
ggacttctgctaagatgaggaataagacaagta

SEQ ID NO: 979781 - DNA, 33 bp, Homo sapien
ccctaataagtctgcccatgttagctactaaat

SEQ ID NO: 979782 - DNA, 33 bp, Homo sapien
ccctaataagtctgcctatgttagctactaaat

SEQ ID NO: 979783 - DNA, 33 bp, Homo sapien
agctgagttataggaacggtggaagcattagtc

SEQ ID NO: 979784 - DNA, 33 bp, Homo sapien
agctgagttataggaatggtggaagcattagtc

SEQ ID NO: 979785 - DNA, 33 bp, Homo sapien
tgcacaaactgctaagacttacagaagcatcag

SEQ ID NO: 979786 - DNA, 33 bp, Homo sapien
tgcacaaactgctaagccttacagaagcatcag

SEQ ID NO: 979787 - DNA, 33 bp, Homo sapien
tttgaaaatgtcaaaactgagccttggggagat

SEQ ID NO: 979788 - DNA, 33 bp, Homo sapien
tttgaaaatgtcaaaattgagccttggggagat

SEQ ID NO: 979789 - DNA, 33 bp, Homo sapien
caccctcggcgtgttaccattagctgttggtct

SEQ ID NO: 979790 - DNA, 33 bp, Homo sapien
caccctcggcgtgttatcattagctgttggtct

SEQ ID NO: 979791 - DNA, 33 bp, Homo sapien
tatgaaatacaagttacgctcttatattacaaa

SEQ ID NO: 979792 - DNA, 33 bp, Homo sapien
tatgaaatacaagttatgctcttatattacaaa

SEQ ID NO: 979793 - DNA, 33 bp, Homo sapien
caagtcttccttagccactgattccttagagat

SEQ ID NO: 979794 - DNA, 33 bp, Homo sapien
caagtcttccttagccgctgattccttagagat

SEQ ID NO: 979795 - DNA, 33 bp, Homo sapien
gaggcaactgaaatcaactactttcactacttc

SEQ ID NO: 979796 - DNA, 33 bp, Homo sapien
gaggcaactgaaatcagctactttcactacttc

SEQ ID NO: 979797 - DNA, 33 bp, Homo sapien
gcacaggttcattaaaccacctgtagtgagcac

SEQ ID NO: 979798 - DNA, 33 bp, Homo sapien
gcacaggttcattaaatcacctgtagtgagcac

SEQ ID NO: 979799 - DNA, 33 bp, Homo sapien
gagtattgtggaaagaataggtaaggtatccag

SEQ ID NO: 979800 - DNA, 33 bp, Homo sapien
gagtattgtggaaagagtaggtaaggtatccag

SEQ ID NO: 979801 - DNA, 33 bp, Homo sapien
accctacaatacaccaactggcagttccatcat

SEQ ID NO: 979802 - DNA, 33 bp, Homo sapien
accctacaatacaccagctggcagttccatcat

SEQ ID NO: 979803 - DNA, 33 bp, Homo sapien
accctctccagacatacccagctatacgatctt

SEQ ID NO: 979804 - DNA, 33 bp, Homo sapien
accctctccagacatatccagctatacgatctt

SEQ ID NO: 979805 - DNA, 33 bp, Homo sapien
agactccaggtttgtaccatcaatggtgactta

SEQ ID NO: 979806 - DNA, 33 bp, Homo sapien
agactccaggtttgtagcatcaatggtgactta

SEQ ID NO: 979807 - DNA, 33 bp, Homo sapien
gcagtttcttttgctaaaactgtctgggtagat

SEQ ID NO: 979808 - DNA, 33 bp, Homo sapien
gcagtttcttttgctagaactgtctgggtagat

SEQ ID NO: 979809 - DNA, 33 bp, Homo sapien
tggagaatatgtttcaaataaagcttcaagagc

SEQ ID NO: 979810 - DNA, 33 bp, Homo sapien
tggagaatatgtttcagataaagcttcaagagc

SEQ ID NO: 979811 - DNA, 33 bp, Homo sapien
ttagctatgggaaagccgatgaaagacctgtct

SEQ ID NO: 979812 - DNA, 33 bp, Homo sapien
ttagctatgggaaagctgatgaaagacctgtct

SEQ ID NO: 979813 - DNA, 33 bp, Homo sapien
tatcaataagattaagaaaactcacaaacatac

SEQ ID NO: 979814 - DNA, 33 bp, Homo sapien
tatcaataagattaaggaaactcacaaacatac

SEQ ID NO: 979815 - DNA, 33 bp, Homo sapien
aatcatctctaaagaacctgctaatgtaatcaa

SEQ ID NO: 979816 - DNA, 33 bp, Homo sapien
aatcatctctaaagaatctgctaatgtaatcaa

SEQ ID NO: 979817 - DNA, 33 bp, Homo sapien
ggcttccctggggaccaaaagagctgacagggc

SEQ ID NO: 979818 - DNA, 33 bp, Homo sapien
ggcttccctggggaccgaaagagctgacagggc

SEQ ID NO: 979819 - DNA, 33 bp, Homo sapien
cagttctttcagccataataaagagatttaatg

SEQ ID NO: 979820 - DNA, 33 bp, Homo sapien
cagttctttcagccatgataaagagatttaatg

SEQ ID NO: 979821 - DNA, 33 bp, Homo sapien
aaaatgcatggagaaaacttattatgaagcata

SEQ ID NO: 979822 - DNA, 33 bp, Homo sapien
aaaatgcatggagaaagcttattatgaagcata

SEQ ID NO: 979823 - DNA, 33 bp, Homo sapien
ttccaagtatatgtcactctgaaaagtcaaaac

SEQ ID NO: 979824 - DNA, 33 bp, Homo sapien
ttccaagtatatgtcattctgaaaagtcaaaac

SEQ ID NO: 979825 - DNA, 33 bp, Homo sapien
aaaactccaaatttaaaagcagatgaagtagaa

SEQ ID NO: 979826 - DNA, 33 bp, Homo sapien
aaaactccaaatttaagagcagatgaagtagaa

SEQ ID NO: 979827 - DNA, 33 bp, Homo sapien
tgaatgaatagatgaagcaagggctctttaatt

SEQ ID NO: 979828 - DNA, 33 bp, Homo sapien
tgaatgaatagatgaatcaagggctctttaatt

SEQ ID NO: 979829 - DNA, 33 bp, Homo sapien
gttccttgcttctgaacgcctctgatcagtgag

SEQ ID NO: 979830 - DNA, 33 bp, Homo sapien
gttccttgcttctgaatgcctctgatcagtgag

SEQ ID NO: 979831 - DNA, 33 bp, Homo sapien
ataaactagctacccactaccatttgaaacacc

SEQ ID NO: 979832 - DNA, 33 bp, Homo sapien
ataaactagctacccagtaccatttgaaacacc

SEQ ID NO: 979833 - DNA, 33 bp, Homo sapien
ggctttccatctgagccacttttccccagtgat

SEQ ID NO: 979834 - DNA, 33 bp, Homo sapien
ggctttccatctgagctacttttccccagtgat

SEQ ID NO: 979835 - DNA, 33 bp, Homo sapien
tagaatgggaggaggagctgatcaatcaagtat

SEQ ID NO: 979836 - DNA, 33 bp, Homo sapien
tagaatgggaggaggatctgatcaatcaagtat

SEQ ID NO: 979837 - DNA, 33 bp, Homo sapien
agataaaaacatgggaatagttcatttgttcaa

SEQ ID NO: 979838 - DNA, 33 bp, Homo sapien
agataaaaacatgggagtagttcatttgttcaa

SEQ ID NO: 979839 - DNA, 33 bp, Homo sapien
tattctatgcatctgccgatacttttaccagtc

SEQ ID NO: 979840 - DNA, 33 bp, Homo sapien
tattctatgcatctgctgatacttttaccagtc

SEQ ID NO: 979841 - DNA, 33 bp, Homo sapien
gcaagcaggctaacaaatgccaacttttaaaag

SEQ ID NO: 979842 - DNA, 33 bp, Homo sapien
gcaagcaggctaacaattgccaacttttaaaag

SEQ ID NO: 979843 - DNA, 33 bp, Homo sapien
cctttcccgaatcccacataattggaactatac

SEQ ID NO: 979844 - DNA, 33 bp, Homo sapien
cctttcccgaatcccatataattggaactatac

SEQ ID NO: 979845 - DNA, 33 bp, Homo sapien
ttgatttctggcaaaacgtgaagcaatggaaat

SEQ ID NO: 979846 - DNA, 33 bp, Homo sapien
ttgatttctggcaaaatgtgaagcaatggaaat

SEQ ID NO: 979847 - DNA, 33 bp, Homo sapien
caatagcagatttcacagaagagagttgggctt

SEQ ID NO: 979848 - DNA, 33 bp, Homo sapien
caatagcagatttcacggaagagagttgggctt

SEQ ID NO: 979849 - DNA, 33 bp, Homo sapien
caatggtgtgatgttacgagctccaggaaagcc

SEQ ID NO: 979850 - DNA, 33 bp, Homo sapien
caatggtgtgatgttatgagctccaggaaagcc

SEQ ID NO: 979851 - DNA, 33 bp, Homo sapien
tcgataaggttggaaacacaattataagagaaa

SEQ ID NO: 979852 - DNA, 33 bp, Homo sapien
tcgataaggttggaaatacaattataagagaaa

SEQ ID NO: 979853 - DNA, 33 bp, Homo sapien
aagcccaagaccatacaatatggaaaatactat

SEQ ID NO: 979854 - DNA, 33 bp, Homo sapien
aagcccaagaccatacgatatggaaaatactat

SEQ ID NO: 979855 - DNA, 33 bp, Homo sapien
ttttatggaatcttaccctaatttcaagcaaca

SEQ ID NO: 979856 - DNA, 33 bp, Homo sapien
ttttatggaatcttactctaatttcaagcaaca

SEQ ID NO: 979857 - DNA, 33 bp, Homo sapien
aaatgtcagcaggagacgacttggaagtggctg

SEQ ID NO: 979858 - DNA, 33 bp, Homo sapien
aaatgtcagcaggagaggacttggaagtggctg

SEQ ID NO: 979859 - DNA, 33 bp, Homo sapien
taatttgttgatcaaacgtagtgcatagcataa

SEQ ID NO: 979860 - DNA, 33 bp, Homo sapien
taatttgttgatcaaatgtagtgcatagcataa

SEQ ID NO: 979861 - DNA, 33 bp, Homo sapien
gcctcaagtgcacatactagcattaataatagt

SEQ ID NO: 979862 - DNA, 33 bp, Homo sapien
gcctcaagtgcacatagtagcattaataatagt

SEQ ID NO: 979863 - DNA, 33 bp, Homo sapien
acttaaccatcatagcaagttttcaggtagtta

SEQ ID NO: 979864 - DNA, 33 bp, Homo sapien
acttaaccatcatagcgagttttcaggtagtta

SEQ ID NO: 979865 - DNA, 33 bp, Homo sapien
ccagagaatataggctaaattggggtcttcatc

SEQ ID NO: 979866 - DNA, 33 bp, Homo sapien
ccagagaatataggctgaattggggtcttcatc

SEQ ID NO: 979867 - DNA, 33 bp, Homo sapien
ctcagttatgacacatcaaccactatcccaata

SEQ ID NO: 979868 - DNA, 33 bp, Homo sapien
ctcagttatgacacattaaccactatcccaata

SEQ ID NO: 979869 - DNA, 33 bp, Homo sapien
actaagtttgtggaaaaggtgtttataaccaac

SEQ ID NO: 979870 - DNA, 33 bp, Homo sapien
actaagtttgtggaaacggtgtttataaccaac

SEQ ID NO: 979871 - DNA, 33 bp, Homo sapien
tcagcaacaagaataacaacaaacctatgcctt

SEQ ID NO: 979872 - DNA, 33 bp, Homo sapien
tcagcaacaagaataataacaaacctatgcctt

SEQ ID NO: 979873 - DNA, 33 bp, Homo sapien
ctcagagaagcagaaccacaggatacatttaga

SEQ ID NO: 979874 - DNA, 33 bp, Homo sapien
ctcagagaagcagaactacaggatacatttaga

SEQ ID NO: 979875 - DNA, 33 bp, Homo sapien
aatataatctttattccatggactttgaaacca

SEQ ID NO: 979876 - DNA, 33 bp, Homo sapien
aatataatctttattctatggactttgaaacca

SEQ ID NO: 979877 - DNA, 33 bp, Homo sapien
tcacactgaacattccagccaagatctaacatt

SEQ ID NO: 979878 - DNA, 33 bp, Homo sapien
tcacactgaacattccggccaagatctaacatt

SEQ ID NO: 979879 - DNA, 33 bp, Homo sapien
gtcaagtttatattccagcaaaagggcagtgtt

SEQ ID NO: 979880 - DNA, 33 bp, Homo sapien
gtcaagtttatattccggcaaaagggcagtgtt

SEQ ID NO: 979881 - DNA, 33 bp, Homo sapien
gatatgtggagagggagattgcaaggctagaga

SEQ ID NO: 979882 - DNA, 33 bp, Homo sapien
gatatgtggagagggatattgcaaggctagaga

SEQ ID NO: 979883 - DNA, 33 bp, Homo sapien
cttcatttggcagaaactgtagcagaaaattgc

SEQ ID NO: 979884 - DNA, 33 bp, Homo sapien
cttcatttggcagaaattgtagcagaaaattgc

SEQ ID NO: 979885 - DNA, 33 bp, Homo sapien
tctgaagagaatataaaagctaggcccacaaat

SEQ ID NO: 979886 - DNA, 33 bp, Homo sapien
tctgaagagaatataacagctaggcccacaaat

SEQ ID NO: 979887 - DNA, 33 bp, Homo sapien
actgctttaaggaaaacgtactgacccaattga

SEQ ID NO: 979888 - DNA, 33 bp, Homo sapien
actgctttaaggaaaatgtactgacccaattga

SEQ ID NO: 979889 - DNA, 33 bp, Homo sapien
gggctctaagaatgaaagcaagcaaagaagtcc

SEQ ID NO: 979890 - DNA, 33 bp, Homo sapien
gggctctaagaatgaaggcaagcaaagaagtcc

SEQ ID NO: 979891 - DNA, 33 bp, Homo sapien
ccactgcctactacccaatgttgagcaaaatat

SEQ ID NO: 979892 - DNA, 33 bp, Homo sapien
ccactgcctactaccctatgttgagcaaaatat

SEQ ID NO: 979893 - DNA, 33 bp, Homo sapien
atttgtattagttcaaacagtttctgagtgata

SEQ ID NO: 979894 - DNA, 33 bp, Homo sapien
atttgtattagttcaagcagtttctgagtgata

SEQ ID NO: 979895 - DNA, 33 bp, Homo sapien
ctttaccacaagtttacatctgcatctagacct

SEQ ID NO: 979896 - DNA, 33 bp, Homo sapien
ctttaccacaagtttatatctgcatctagacct

SEQ ID NO: 979897 - DNA, 33 bp, Homo sapien
aaaactcagaaattgacgttggtacagtattat

SEQ ID NO: 979898 - DNA, 33 bp, Homo sapien
aaaactcagaaattgatgttggtacagtattat

SEQ ID NO: 979899 - DNA, 33 bp, Homo sapien
catgcttcacagaatccatttcaaaccacagag

SEQ ID NO: 979900 - DNA, 33 bp, Homo sapien
catgcttcacagaatctatttcaaaccacagag

SEQ ID NO: 979901 - DNA, 33 bp, Homo sapien
aaaccacagagaattgcacctttgtgtgtcact

SEQ ID NO: 979902 - DNA, 33 bp, Homo sapien
aaaccacagagaattgtacctttgtgtgtcact

SEQ ID NO: 979903 - DNA, 33 bp, Homo sapien
tagttcctatgaaaaccggttgttgaaaacagc

SEQ ID NO: 979904 - DNA, 33 bp, Homo sapien
tagttcctatgaaaactggttgttgaaaacagc

SEQ ID NO: 979905 - DNA, 33 bp, Homo sapien
ttgtaatctgtagagacaatttgcatcaaccca

SEQ ID NO: 979906 - DNA, 33 bp, Homo sapien
ttgtaatctgtagagagaatttgcatcaaccca

SEQ ID NO: 979907 - DNA, 33 bp, Homo sapien
aaggattcagaaaacacgggtgagccagataat

SEQ ID NO: 979908 - DNA, 33 bp, Homo sapien
aaggattcagaaaacatgggtgagccagataat

SEQ ID NO: 979909 - DNA, 33 bp, Homo sapien
cacaggtgtgtcagccaaggggctttccctttc

SEQ ID NO: 979910 - DNA, 33 bp, Homo sapien
cacaggtgtgtcagccgaggggctttccctttc

SEQ ID NO: 979911 - DNA, 33 bp, Homo sapien
ttgtggcaaaacttacagaagagactgcatatg

SEQ ID NO: 979912 - DNA, 33 bp, Homo sapien
ttgtggcaaaacttacggaagagactgcatatg

SEQ ID NO: 979913 - DNA, 33 bp, Homo sapien
atctataaaaactcaacagttgataaagtaagc

SEQ ID NO: 979914 - DNA, 33 bp, Homo sapien
atctataaaaactcaatagttgataaagtaagc

SEQ ID NO: 979915 - DNA, 33 bp, Homo sapien
tggccacagttttttgcagttcttctcatcaac

SEQ ID NO: 979916 - DNA, 33 bp, Homo sapien
tggccacagttttttgtagttcttctcatcaac

SEQ ID NO: 979917 - DNA, 33 bp, Homo sapien
tgtagtgggagggtccaaattccaaatcccttg

SEQ ID NO: 979918 - DNA, 33 bp, Homo sapien
tgtagtgggagggtccgaattccaaatcccttg

SEQ ID NO: 979919 - DNA, 33 bp, Homo sapien
agccagtatctcctaaatacatgctatggtcac

SEQ ID NO: 979920 - DNA, 33 bp, Homo sapien
agccagtatctcctaagtacatgctatggtcac

SEQ ID NO: 979921 - DNA, 33 bp, Homo sapien
aattatggatgtttcccatgcatttcgcattgt

SEQ ID NO: 979922 - DNA, 33 bp, Homo sapien
aattatggatgtttcctatgcatttcgcattgt

SEQ ID NO: 979923 - DNA, 33 bp, Homo sapien
gctttctcagtaattacaacagctactcaagcc

SEQ ID NO: 979924 - DNA, 33 bp, Homo sapien
gctttctcagtaattataacagctactcaagcc

SEQ ID NO: 979925 - DNA, 33 bp, Homo sapien
ttggtcacaggcagaccaaatgaaggtgactca

SEQ ID NO: 979926 - DNA, 33 bp, Homo sapien
ttggtcacaggcagactaaatgaaggtgactca

SEQ ID NO: 979927 - DNA, 33 bp, Homo sapien
gggcctttgatttggcgaaaatagtgcagttag

SEQ ID NO: 979928 - DNA, 33 bp, Homo sapien
gggcctttgatttggctaaaatagtgcagttag

SEQ ID NO: 979929 - DNA, 33 bp, Homo sapien
actactcggactcatacacctgtggtgaagatt

SEQ ID NO: 979930 - DNA, 33 bp, Homo sapien
actactcggactcatatacctgtggtgaagatt

SEQ ID NO: 979931 - DNA, 33 bp, Homo sapien
caaacccatgtttgagaatgagaacctatccgc

SEQ ID NO: 979932 - DNA, 33 bp, Homo sapien
caaacccatgtttgaggatgagaacctatccgc

SEQ ID NO: 979933 - DNA, 33 bp, Homo sapien
agtcttttccttcacaaataactcagagataaa

SEQ ID NO: 979934 - DNA, 33 bp, Homo sapien
agtcttttccttcacatataactcagagataaa

SEQ ID NO: 979935 - DNA, 33 bp, Homo sapien
agaaagaaatttgagacgttatcccttcccaga

SEQ ID NO: 979936 - DNA, 33 bp, Homo sapien
agaaagaaatttgagatgttatcccttcccaga

SEQ ID NO: 979937 - DNA, 33 bp, Homo sapien
gcttctgggatacaacaaaggggaaataaattc

SEQ ID NO: 979938 - DNA, 33 bp, Homo sapien
gcttctgggatacaacgaaggggaaataaattc

SEQ ID NO: 979939 - DNA, 33 bp, Homo sapien
tcaagtccacgactgacacattggcagtgagga

SEQ ID NO: 979940 - DNA, 33 bp, Homo sapien
tcaagtccacgactgatacattggcagtgagga

SEQ ID NO: 979941 - DNA, 33 bp, Homo sapien
tccccatcaggtagtacctcaattctcaggtag

SEQ ID NO: 979942 - DNA, 33 bp, Homo sapien
tccccatcaggtagtatctcaattctcaggtag

SEQ ID NO: 979943 - DNA, 33 bp, Homo sapien
gtcaaaaagatgtcaccggggaaaataactgca

SEQ ID NO: 979944 - DNA, 33 bp, Homo sapien
gtcaaaaagatgtcactggggaaaataactgca

SEQ ID NO: 979945 - DNA, 33 bp, Homo sapien
attctcctctatcttaccaatcatggtacctat

SEQ ID NO: 979946 - DNA, 33 bp, Homo sapien
attctcctctatcttatcaatcatggtacctat

SEQ ID NO: 979947 - DNA, 33 bp, Homo sapien
tttgtaagagaaaacaaccagaaatacacatag

SEQ ID NO: 979948 - DNA, 33 bp, Homo sapien
tttgtaagagaaaacagccagaaatacacatag

SEQ ID NO: 979949 - DNA, 33 bp, Homo sapien
tgttactcttctgtcaactctactgttgtggct

SEQ ID NO: 979950 - DNA, 33 bp, Homo sapien
tgttactcttctgtcacctctactgttgtggct

SEQ ID NO: 979951 - DNA, 33 bp, Homo sapien
gctcaacgaaggaatcacatgtacaaagccatt

SEQ ID NO: 979952 - DNA, 33 bp, Homo sapien
gctcaacgaaggaatcgcatgtacaaagccatt

SEQ ID NO: 979953 - DNA, 33 bp, Homo sapien
tttttgaagtagactacgtcaaggtaaaacatg

SEQ ID NO: 979954 - DNA, 33 bp, Homo sapien
tttttgaagtagactatgtcaaggtaaaacatg

SEQ ID NO: 979955 - DNA, 33 bp, Homo sapien
aaattcctatctttgacgagttggcctctcctg

SEQ ID NO: 979956 - DNA, 33 bp, Homo sapien
aaattcctatctttgatgagttggcctctcctg

SEQ ID NO: 979957 - DNA, 33 bp, Homo sapien
aaaatgaaatatctgactaatgcttaactttgt

SEQ ID NO: 979958 - DNA, 33 bp, Homo sapien
aaaatgaaatatctgattaatgcttaactttgt

SEQ ID NO: 979959 - DNA, 33 bp, Homo sapien
tgggtgcttgccattacctggaggaggccagtg

SEQ ID NO: 979960 - DNA, 33 bp, Homo sapien
tgggtgcttgccattagctggaggaggccagtg

SEQ ID NO: 979961 - DNA, 33 bp, Homo sapien
tgccttctctttccagaatcatcatgttcccag

SEQ ID NO: 979962 - DNA, 33 bp, Homo sapien
tgccttctctttccaggatcatcatgttcccag

SEQ ID NO: 979963 - DNA, 33 bp, Homo sapien
tattattaacaacaacaatagcaaatgctacat

SEQ ID NO: 979964 - DNA, 33 bp, Homo sapien
tattattaacaacaaccatagcaaatgctacat

SEQ ID NO: 979965 - DNA, 33 bp, Homo sapien
tttagctaaaggcttagagactcagccaaagct

SEQ ID NO: 979966 - DNA, 33 bp, Homo sapien
tttagctaaaggcttatagactcagccaaagct

SEQ ID NO: 979967 - DNA, 33 bp, Homo sapien
cagaatagccattttcactggttccctactttt

SEQ ID NO: 979968 - DNA, 33 bp, Homo sapien
cagaatagccattttcgctggttccctactttt

SEQ ID NO: 979969 - DNA, 33 bp, Homo sapien
agtgtttgataagtaactgaatgttggataaat

SEQ ID NO: 979970 - DNA, 33 bp, Homo sapien
agtgtttgataagtaattgaatgttggataaat

SEQ ID NO: 979971 - DNA, 33 bp, Homo sapien
gtggggctagatgttacatccaggtgacatggt

SEQ ID NO: 979972 - DNA, 33 bp, Homo sapien
gtggggctagatgttatatccaggtgacatggt

SEQ ID NO: 979973 - DNA, 33 bp, Homo sapien
acaggccatctctcccacctgtcacaagagtgt

SEQ ID NO: 979974 - DNA, 33 bp, Homo sapien
acaggccatctctccctcctgtcacaagagtgt

SEQ ID NO: 979975 - DNA, 33 bp, Homo sapien
tagctgaggagaaagaaccgctgcagataaaga

SEQ ID NO: 979976 - DNA, 33 bp, Homo sapien
tagctgaggagaaagagccgctgcagataaaga

SEQ ID NO: 979977 - DNA, 33 bp, Homo sapien
attaaccaccgtataacgattcagttcttcttt

SEQ ID NO: 979978 - DNA, 33 bp, Homo sapien
attaaccaccgtataatgattcagttcttcttt

SEQ ID NO: 979979 - DNA, 33 bp, Homo sapien
aaggggaaggacttccaagcacgggcagctgga

SEQ ID NO: 979980 - DNA, 33 bp, Homo sapien
aaggggaaggacttccgagcacgggcagctgga

SEQ ID NO: 979981 - DNA, 33 bp, Homo sapien
acagcactaaagctgacgaatgatctatcttac

SEQ ID NO: 979982 - DNA, 33 bp, Homo sapien
acagcactaaagctgatgaatgatctatcttac

SEQ ID NO: 979983 - DNA, 33 bp, Homo sapien
ctatacctggccctgaccaattacaaatttagt

SEQ ID NO: 979984 - DNA, 33 bp, Homo sapien
ctatacctggccctgatcaattacaaatttagt

SEQ ID NO: 979985 - DNA, 33 bp, Homo sapien
taagcctctgcttgacaaatgtcctctgggcca

SEQ ID NO: 979986 - DNA, 33 bp, Homo sapien
taagcctctgcttgacgaatgtcctctgggcca

SEQ ID NO: 979987 - DNA, 33 bp, Homo sapien
catggaaacaatgttgcaatagtgagtgggtca

SEQ ID NO: 979988 - DNA, 33 bp, Homo sapien
catggaaacaatgttgtaatagtgagtgggtca

SEQ ID NO: 979989 - DNA, 33 bp, Homo sapien
tttctccacattataaagactgtcaccacaatc

SEQ ID NO: 979990 - DNA, 33 bp, Homo sapien
tttctccacattataacgactgtcaccacaatc

SEQ ID NO: 979991 - DNA, 33 bp, Homo sapien
aggtctcatcggattaccaaagggctccatgct

SEQ ID NO: 979992 - DNA, 33 bp, Homo sapien
aggtctcatcggattatcaaagggctccatgct

SEQ ID NO: 979993 - DNA, 33 bp, Homo sapien
tgtgaggattgcacgcaacattcaggtagagaa

SEQ ID NO: 979994 - DNA, 33 bp, Homo sapien
tgtgaggattgcacgcgacattcaggtagagaa

SEQ ID NO: 979995 - DNA, 33 bp, Homo sapien
acaatgttggagacgtaaaagttcatgatataa

SEQ ID NO: 979996 - DNA, 33 bp, Homo sapien
acaatgttggagacgtcaaagttcatgatataa

SEQ ID NO: 979997 - DNA, 33 bp, Homo sapien
agcaccctacagattaaccaaagtggtaacagc

SEQ ID NO: 979998 - DNA, 33 bp, Homo sapien
agcaccctacagattacccaaagtggtaacagc

SEQ ID NO: 979999 - DNA, 33 bp, Homo sapien
tgattggatgtgtcaaagagagtagtatagtgc

SEQ ID NO: 980000 - DNA, 33 bp, Homo sapien
tgattggatgtgtcaaggagagtagtatagtgc

SEQ ID NO: 980001 - DNA, 33 bp, Homo sapien
ctgcctaaatctaaccggagtatcaacattttt

SEQ ID NO: 980002 - DNA, 33 bp, Homo sapien
ctgcctaaatctaacctgagtatcaacattttt

SEQ ID NO: 980003 - DNA, 33 bp, Homo sapien
tacaccatagaacctaagagaaacaaatgacaa

SEQ ID NO: 980004 - DNA, 33 bp, Homo sapien
tacaccatagaacctatgagaaacaaatgacaa

SEQ ID NO: 980005 - DNA, 33 bp, Homo sapien
atttccctcaacacgtaaatcgatacaattctg

SEQ ID NO: 980006 - DNA, 33 bp, Homo sapien
atttccctcaacacgtgaatcgatacaattctg

SEQ ID NO: 980007 - DNA, 33 bp, Homo sapien
cttcttctgcttctcaagtttggctcatacacc

SEQ ID NO: 980008 - DNA, 33 bp, Homo sapien
cttcttctgcttctcatgtttggctcatacacc

SEQ ID NO: 980009 - DNA, 33 bp, Homo sapien
ttggctcggacttcgtgaataactcctatgatg

SEQ ID NO: 980010 - DNA, 33 bp, Homo sapien
ttggctcggacttcgttaataactcctatgatg

SEQ ID NO: 980011 - DNA, 33 bp, Homo sapien
tggtctcactgacatgaaaaaatatacttgggc

SEQ ID NO: 980012 - DNA, 33 bp, Homo sapien
tggtctcactgacatggaaaaatatacttgggc

SEQ ID NO: 980013 - DNA, 33 bp, Homo sapien
tgtaaagggagcattaagggtgatcctggtgag

SEQ ID NO: 980014 - DNA, 33 bp, Homo sapien
tgtaaagggagcattacgggtgatcctggtgag

SEQ ID NO: 980015 - DNA, 33 bp, Homo sapien
ctcagagatccttggaaggcagtgatgaagagc

SEQ ID NO: 980016 - DNA, 33 bp, Homo sapien
ctcagagatccttggagggcagtgatgaagagc

SEQ ID NO: 980017 - DNA, 33 bp, Homo sapien
ggcttctcctatatcccccaatctgtcgctagc

SEQ ID NO: 980018 - DNA, 33 bp, Homo sapien
ggcttctcctatatcctccaatctgtcgctagc

SEQ ID NO: 980019 - DNA, 33 bp, Homo sapien
gagtgtgaagatggcaactacagtccagagatc

SEQ ID NO: 980020 - DNA, 33 bp, Homo sapien
gagtgtgaagatggcacctacagtccagagatc

SEQ ID NO: 980021 - DNA, 33 bp, Homo sapien
gagatgtggcttacttaaactccaagcaggcaa

SEQ ID NO: 980022 - DNA, 33 bp, Homo sapien
gagatgtggcttacttgaactccaagcaggcaa

SEQ ID NO: 980023 - DNA, 33 bp, Homo sapien
cttacattgcaaaggtcaagacactgaggccca

SEQ ID NO: 980024 - DNA, 33 bp, Homo sapien
cttacattgcaaaggttaagacactgaggccca

SEQ ID NO: 980025 - DNA, 33 bp, Homo sapien
ctccttttgtgagtaaagtgaaaatctgaggga

SEQ ID NO: 980026 - DNA, 33 bp, Homo sapien
ctccttttgtgagtaacgtgaaaatctgaggga

SEQ ID NO: 980027 - DNA, 33 bp, Homo sapien
gtctagagaacttgtacgctgagaaggaaagtc

SEQ ID NO: 980028 - DNA, 33 bp, Homo sapien
gtctagagaacttgtatgctgagaaggaaagtc

SEQ ID NO: 980029 - DNA, 33 bp, Homo sapien
gtggggaaaattgggaccaataggagaattccc

SEQ ID NO: 980030 - DNA, 33 bp, Homo sapien
gtggggaaaattgggagcaataggagaattccc

SEQ ID NO: 980031 - DNA, 33 bp, Homo sapien
ctgaactgcaagatagccgacaagaaagtaagg

SEQ ID NO: 980032 - DNA, 33 bp, Homo sapien
ctgaactgcaagatagtcgacaagaaagtaagg

SEQ ID NO: 980033 - DNA, 33 bp, Homo sapien
gttagtcacacaaaaaagataagtgtgattcta

SEQ ID NO: 980034 - DNA, 33 bp, Homo sapien
gttagtcacacaaaaaggataagtgtgattcta

SEQ ID NO: 980035 - DNA, 33 bp, Homo sapien
gagaaagcccggctcaaacaggaagaaggatga

SEQ ID NO: 980036 - DNA, 33 bp, Homo sapien
gagaaagcccggctcagacaggaagaaggatga

SEQ ID NO: 980037 - DNA, 33 bp, Homo sapien
ttaatctctgctcgacactgtatgaaagcatgt

SEQ ID NO: 980038 - DNA, 33 bp, Homo sapien
ttaatctctgctcgacgctgtatgaaagcatgt

SEQ ID NO: 980039 - DNA, 33 bp, Homo sapien
tgccacaagttgaacccaattgagaatgttttc

SEQ ID NO: 980040 - DNA, 33 bp, Homo sapien
tgccacaagttgaacctaattgagaatgttttc

SEQ ID NO: 980041 - DNA, 33 bp, Homo sapien
cagattactaatgttcaaaaaccacataggttt

SEQ ID NO: 980042 - DNA, 33 bp, Homo sapien
cagattactaatgttcgaaaaccacataggttt

SEQ ID NO: 980043 - DNA, 33 bp, Homo sapien
aaccaaaggccaaagaagacttctaaataaggc

SEQ ID NO: 980044 - DNA, 33 bp, Homo sapien
aaccaaaggccaaagaggacttctaaataaggc

SEQ ID NO: 980045 - DNA, 33 bp, Homo sapien
agttgtatatgcaaagaataaatgaacttgaac

SEQ ID NO: 980046 - DNA, 33 bp, Homo sapien
agttgtatatgcaaaggataaatgaacttgaac

SEQ ID NO: 980047 - DNA, 33 bp, Homo sapien
tggtaattcacggcaaaatctgcacagagggag

SEQ ID NO: 980048 - DNA, 33 bp, Homo sapien
tggtaattcacggcaacatctgcacagagggag

SEQ ID NO: 980049 - DNA, 33 bp, Homo sapien
ctggtgacagtgaaaccaagatgtcaaggaaag

SEQ ID NO: 980050 - DNA, 33 bp, Homo sapien
ctggtgacagtgaaactaagatgtcaaggaaag

SEQ ID NO: 980051 - DNA, 33 bp, Homo sapien
aagagaaattgtggccaagtggagagctgagcc

SEQ ID NO: 980052 - DNA, 33 bp, Homo sapien
aagagaaattgtggcctagtggagagctgagcc

SEQ ID NO: 980053 - DNA, 33 bp, Homo sapien
gcagaaagacggtcccaacatgcacatctaata

SEQ ID NO: 980054 - DNA, 33 bp, Homo sapien
gcagaaagacggtcccgacatgcacatctaata

SEQ ID NO: 980055 - DNA, 33 bp, Homo sapien
tctcctgagtttccctgaataaagacagatttc

SEQ ID NO: 980056 - DNA, 33 bp, Homo sapien
tctcctgagtttcccttaataaagacagatttc

SEQ ID NO: 980057 - DNA, 33 bp, Homo sapien
ctcagggtgattcccacgtggagggtgatgcca

SEQ ID NO: 980058 - DNA, 33 bp, Homo sapien
ctcagggtgattcccatgtggagggtgatgcca

SEQ ID NO: 980059 - DNA, 33 bp, Homo sapien
cattctctgtgggataagcagaagtctttgatg

SEQ ID NO: 980060 - DNA, 33 bp, Homo sapien
cattctctgtgggataggcagaagtctttgatg

SEQ ID NO: 980061 - DNA, 33 bp, Homo sapien
ttctggtagtagcccaaaaactgtaaacaaccc

SEQ ID NO: 980062 - DNA, 33 bp, Homo sapien
ttctggtagtagcccataaactgtaaacaaccc

SEQ ID NO: 980063 - DNA, 33 bp, Homo sapien
agggggacccaacaggaatactataggaagagt

SEQ ID NO: 980064 - DNA, 33 bp, Homo sapien
agggggacccaacagggatactataggaagagt

SEQ ID NO: 980065 - DNA, 33 bp, Homo sapien
tcaactttgcttaagactccaggatatcagcaa

SEQ ID NO: 980066 - DNA, 33 bp, Homo sapien
tcaactttgcttaagattccaggatatcagcaa

SEQ ID NO: 980067 - DNA, 33 bp, Homo sapien
tccctacctacctcccagcatatctccacatca

SEQ ID NO: 980068 - DNA, 33 bp, Homo sapien
tccctacctacctcccggcatatctccacatca

SEQ ID NO: 980069 - DNA, 33 bp, Homo sapien
tcctacgctatcttcaactgtttctcagattta

SEQ ID NO: 980070 - DNA, 33 bp, Homo sapien
tcctacgctatcttcagctgtttctcagattta

SEQ ID NO: 980071 - DNA, 33 bp, Homo sapien
agtggaagcagtacgactccatggggatgcttt

SEQ ID NO: 980072 - DNA, 33 bp, Homo sapien
agtggaagcagtacgagtccatggggatgcttt

SEQ ID NO: 980073 - DNA, 33 bp, Homo sapien
ctagggaagtggacaaacatttcagaagaagtg

SEQ ID NO: 980074 - DNA, 33 bp, Homo sapien
ctagggaagtggacaagcatttcagaagaagtg

SEQ ID NO: 980075 - DNA, 33 bp, Homo sapien
tttacagacaattcataaaagaggcaccataac

SEQ ID NO: 980076 - DNA, 33 bp, Homo sapien
tttacagacaattcattaaagaggcaccataac

SEQ ID NO: 980077 - DNA, 33 bp, Homo sapien
agacagggttgtgtaaaaagttccgcctacggg

SEQ ID NO: 980078 - DNA, 33 bp, Homo sapien
agacagggttgtgtaacaagttccgcctacggg

SEQ ID NO: 980079 - DNA, 33 bp, Homo sapien
ggttgaaaatatatcacagggatcgtgagagtc

SEQ ID NO: 980080 - DNA, 33 bp, Homo sapien
ggttgaaaatatatcatagggatcgtgagagtc

SEQ ID NO: 980081 - DNA, 33 bp, Homo sapien
tcacccacaactacaactctcacttctctttta

SEQ ID NO: 980082 - DNA, 33 bp, Homo sapien
tcacccacaactacaattctcacttctctttta

SEQ ID NO: 980083 - DNA, 33 bp, Homo sapien
tgtgactaattctatcactgtgctgtggctgcc

SEQ ID NO: 980084 - DNA, 33 bp, Homo sapien
tgtgactaattctatctctgtgctgtggctgcc

SEQ ID NO: 980085 - DNA, 33 bp, Homo sapien
ccatgttctttgcaaactgctaaatccttcaac

SEQ ID NO: 980086 - DNA, 33 bp, Homo sapien
ccatgttctttgcaaattgctaaatccttcaac

SEQ ID NO: 980087 - DNA, 33 bp, Homo sapien
gagaggcttcctgttacccttacctttcaggga

SEQ ID NO: 980088 - DNA, 33 bp, Homo sapien
gagaggcttcctgttatccttacctttcaggga

SEQ ID NO: 980089 - DNA, 33 bp, Homo sapien
caaatgctctgttactgaggtacttagcctttc

SEQ ID NO: 980090 - DNA, 33 bp, Homo sapien
caaatgctctgttacttaggtacttagcctttc

SEQ ID NO: 980091 - DNA, 33 bp, Homo sapien
tttggaaatttactggaaagaccaccttgaaga

SEQ ID NO: 980092 - DNA, 33 bp, Homo sapien
tttggaaatttactgggaagaccaccttgaaga

SEQ ID NO: 980093 - DNA, 33 bp, Homo sapien
atagatgaatataggcactaactgagcccatag

SEQ ID NO: 980094 - DNA, 33 bp, Homo sapien
atagatgaatataggcgctaactgagcccatag

SEQ ID NO: 980095 - DNA, 33 bp, Homo sapien
aggcccagctcctttgcaatgaaatggaaatta

SEQ ID NO: 980096 - DNA, 33 bp, Homo sapien
aggcccagctcctttgtaatgaaatggaaatta

SEQ ID NO: 980097 - DNA, 33 bp, Homo sapien
acaaagtatgacagacaatttagagctcaagag

SEQ ID NO: 980098 - DNA, 33 bp, Homo sapien
acaaagtatgacagaccatttagagctcaagag

SEQ ID NO: 980099 - DNA, 33 bp, Homo sapien
gaagggcagaaaacaacgaacaagaagtgggca

SEQ ID NO: 980100 - DNA, 33 bp, Homo sapien
gaagggcagaaaacaatgaacaagaagtgggca

SEQ ID NO: 980101 - DNA, 33 bp, Homo sapien
aagcgctgctctctagaataaggagccattgaa

SEQ ID NO: 980102 - DNA, 33 bp, Homo sapien
aagcgctgctctctaggataaggagccattgaa

SEQ ID NO: 980103 - DNA, 33 bp, Homo sapien
tttgaccttttcaacgaatcatggatgtgagag

SEQ ID NO: 980104 - DNA, 33 bp, Homo sapien
tttgaccttttcaacggatcatggatgtgagag

SEQ ID NO: 980105 - DNA, 33 bp, Homo sapien
cagcatactgcctggaacatagcaaaccatcaa

SEQ ID NO: 980106 - DNA, 33 bp, Homo sapien
cagcatactgcctggagcatagcaaaccatcaa

SEQ ID NO: 980107 - DNA, 33 bp, Homo sapien
acagcattgaaccaacaggaaatatgttaagaa

SEQ ID NO: 980108 - DNA, 33 bp, Homo sapien
acagcattgaaccaacgggaaatatgttaagaa

SEQ ID NO: 980109 - DNA, 33 bp, Homo sapien
agggaaggagtgtcaacctttttctctaaaagc

SEQ ID NO: 980110 - DNA, 33 bp, Homo sapien
agggaaggagtgtcaatctttttctctaaaagc

SEQ ID NO: 980111 - DNA, 33 bp, Homo sapien
tctggcattgccccacagtcgatagcaggatcc

SEQ ID NO: 980112 - DNA, 33 bp, Homo sapien
tctggcattgccccacggtcgatagcaggatcc

SEQ ID NO: 980113 - DNA, 33 bp, Homo sapien
acatttgtcagtcagcaacaggctttgcagaaa

SEQ ID NO: 980114 - DNA, 33 bp, Homo sapien
acatttgtcagtcagcgacaggctttgcagaaa

SEQ ID NO: 980115 - DNA, 33 bp, Homo sapien
tgacaagcaactggcaaattgagaacatttctc

SEQ ID NO: 980116 - DNA, 33 bp, Homo sapien
tgacaagcaactggcagattgagaacatttctc

SEQ ID NO: 980117 - DNA, 33 bp, Homo sapien
gcagtgagcacatttaagcccattgaattcatc

SEQ ID NO: 980118 - DNA, 33 bp, Homo sapien
gcagtgagcacatttatgcccattgaattcatc

SEQ ID NO: 980119 - DNA, 33 bp, Homo sapien
tttattcattcattcagtcgcttaacaagcatt

SEQ ID NO: 980120 - DNA, 33 bp, Homo sapien
tttattcattcattcattcgcttaacaagcatt

SEQ ID NO: 980121 - DNA, 33 bp, Homo sapien
gaaaaacggagaatacagaaatgtgatttataa

SEQ ID NO: 980122 - DNA, 33 bp, Homo sapien
gaaaaacggagaatacggaaatgtgatttataa

SEQ ID NO: 980123 - DNA, 33 bp, Homo sapien
taaaataagagcttgacaactttgactagatta

SEQ ID NO: 980124 - DNA, 33 bp, Homo sapien
taaaataagagcttgataactttgactagatta

SEQ ID NO: 980125 - DNA, 33 bp, Homo sapien
ctagattaaaataaagaacttccgctcatcaaa

SEQ ID NO: 980126 - DNA, 33 bp, Homo sapien
ctagattaaaataaaggacttccgctcatcaaa

SEQ ID NO: 980127 - DNA, 33 bp, Homo sapien
gaaactgaactaaaccaactcattctcacattt

SEQ ID NO: 980128 - DNA, 33 bp, Homo sapien
gaaactgaactaaaccgactcattctcacattt

SEQ ID NO: 980129 - DNA, 33 bp, Homo sapien
aacttcttcaggagtgccaaccaaccccaaaat

SEQ ID NO: 980130 - DNA, 33 bp, Homo sapien
aacttcttcaggagtgtcaaccaaccccaaaat

SEQ ID NO: 980131 - DNA, 33 bp, Homo sapien
ggtagaattaatggaaactctctaaatctcagc

SEQ ID NO: 980132 - DNA, 33 bp, Homo sapien
ggtagaattaatggaacctctctaaatctcagc

SEQ ID NO: 980133 - DNA, 33 bp, Homo sapien
aagcagctgatttttcaaagttttgtttcgctt

SEQ ID NO: 980134 - DNA, 33 bp, Homo sapien
aagcagctgatttttcgaagttttgtttcgctt

SEQ ID NO: 980135 - DNA, 33 bp, Homo sapien
aggatgtaaggtgtaaaataaatctggtccatg

SEQ ID NO: 980136 - DNA, 33 bp, Homo sapien
aggatgtaaggtgtaagataaatctggtccatg

SEQ ID NO: 980137 - DNA, 33 bp, Homo sapien
catctgcatttacataccgagacccagagaggt

SEQ ID NO: 980138 - DNA, 33 bp, Homo sapien
catctgcatttacatatcgagacccagagaggt

SEQ ID NO: 980139 - DNA, 33 bp, Homo sapien
gcgtccgctctggccacgttcgagaggtgggcc

SEQ ID NO: 980140 - DNA, 33 bp, Homo sapien
gcgtccgctctggccatgttcgagaggtgggcc

SEQ ID NO: 980141 - DNA, 33 bp, Homo sapien
aacccatcagtgagaaagcaagaacagtgaggc

SEQ ID NO: 980142 - DNA, 33 bp, Homo sapien
aacccatcagtgagaaggcaagaacagtgaggc

SEQ ID NO: 980143 - DNA, 33 bp, Homo sapien
tctgattctaaaacccactggaatttgaactgt

SEQ ID NO: 980144 - DNA, 33 bp, Homo sapien
tctgattctaaaacccgctggaatttgaactgt

SEQ ID NO: 980145 - DNA, 33 bp, Homo sapien
agcttttaaagtccaacgttaagtctttctaaa

SEQ ID NO: 980146 - DNA, 33 bp, Homo sapien
agcttttaaagtccaatgttaagtctttctaaa

SEQ ID NO: 980147 - DNA, 33 bp, Homo sapien
cctgcactgaggaccacagcatcctaatccatg

SEQ ID NO: 980148 - DNA, 33 bp, Homo sapien
cctgcactgaggaccagagcatcctaatccatg

SEQ ID NO: 980149 - DNA, 33 bp, Homo sapien
ggttaaaatgatccacagcattggctttgggat

SEQ ID NO: 980150 - DNA, 33 bp, Homo sapien
ggttaaaatgatccacggcattggctttgggat

SEQ ID NO: 980151 - DNA, 33 bp, Homo sapien
tgcagaccaaggaggaagagcagagctggattt

SEQ ID NO: 980152 - DNA, 33 bp, Homo sapien
tgcagaccaaggaggaggagcagagctggattt

SEQ ID NO: 980153 - DNA, 33 bp, Homo sapien
ctgcagcttagcctaaaaggataatacagagag

SEQ ID NO: 980154 - DNA, 33 bp, Homo sapien
ctgcagcttagcctaacaggataatacagagag

SEQ ID NO: 980155 - DNA, 33 bp, Homo sapien
tcattacacattctacaaagagcttctcaatcc

SEQ ID NO: 980156 - DNA, 33 bp, Homo sapien
tcattacacattctacgaagagcttctcaatcc

SEQ ID NO: 980157 - DNA, 33 bp, Homo sapien
tgctctgctgggtccactaatcaatacatggaa

SEQ ID NO: 980158 - DNA, 33 bp, Homo sapien
tgctctgctgggtccattaatcaatacatggaa

SEQ ID NO: 980159 - DNA, 33 bp, Homo sapien
ccaccttcgcaccaacactgtccactgggctat

SEQ ID NO: 980160 - DNA, 33 bp, Homo sapien
ccaccttcgcaccaacgctgtccactgggctat

SEQ ID NO: 980161 - DNA, 33 bp, Homo sapien
taactctactcttagccaaaaaagaagtgtata

SEQ ID NO: 980162 - DNA, 33 bp, Homo sapien
taactctactcttagctaaaaaagaagtgtata

SEQ ID NO: 980163 - DNA, 33 bp, Homo sapien
cagatgagctaagagacccatctatgctgtcta

SEQ ID NO: 980164 - DNA, 33 bp, Homo sapien
cagatgagctaagagatccatctatgctgtcta

SEQ ID NO: 980165 - DNA, 33 bp, Homo sapien
tcttagagaatggagactacaagacctacttgc

SEQ ID NO: 980166 - DNA, 33 bp, Homo sapien
tcttagagaatggagattacaagacctacttgc

SEQ ID NO: 980167 - DNA, 33 bp, Homo sapien
gagattgtaaatacaccatacatagagaagaca

SEQ ID NO: 980168 - DNA, 33 bp, Homo sapien
gagattgtaaatacactatacatagagaagaca

SEQ ID NO: 980169 - DNA, 33 bp, Homo sapien
atgccacctcttttcagcattaagtcactgaaa

SEQ ID NO: 980170 - DNA, 33 bp, Homo sapien
atgccacctcttttcatcattaagtcactgaaa

SEQ ID NO: 980171 - DNA, 33 bp, Homo sapien
gaatcattcctttgtcgcattcacagtgtaatt

SEQ ID NO: 980172 - DNA, 33 bp, Homo sapien
gaatcattcctttgtctcattcacagtgtaatt

SEQ ID NO: 980173 - DNA, 33 bp, Homo sapien
acaaaggtccattaaactagagaccctttacct

SEQ ID NO: 980174 - DNA, 33 bp, Homo sapien
acaaaggtccattaaattagagaccctttacct

SEQ ID NO: 980175 - DNA, 33 bp, Homo sapien
gtgctttctgattggcaaatgtacctatgatac

SEQ ID NO: 980176 - DNA, 33 bp, Homo sapien
gtgctttctgattggcgaatgtacctatgatac

SEQ ID NO: 980177 - DNA, 33 bp, Homo sapien
tggagtcttcataaaaagaatttgtcatgagcg

SEQ ID NO: 980178 - DNA, 33 bp, Homo sapien
tggagtcttcataaaaggaatttgtcatgagcg

SEQ ID NO: 980179 - DNA, 33 bp, Homo sapien
ctagggtattgtaggaagaaaatgcagcagcca

SEQ ID NO: 980180 - DNA, 33 bp, Homo sapien
ctagggtattgtaggaggaaaatgcagcagcca

SEQ ID NO: 980181 - DNA, 33 bp, Homo sapien
tgagtatccacccccactggaaaaatctgcctg

SEQ ID NO: 980182 - DNA, 33 bp, Homo sapien
tgagtatccacccccattggaaaaatctgcctg

SEQ ID NO: 980183 - DNA, 33 bp, Homo sapien
ccataagaaaggccagccatttgctaatatgta

SEQ ID NO: 980184 - DNA, 33 bp, Homo sapien
ccataagaaaggccagtcatttgctaatatgta

SEQ ID NO: 980185 - DNA, 33 bp, Homo sapien
gcaccacagtccaaccactgatctcccttccat

SEQ ID NO: 980186 - DNA, 33 bp, Homo sapien
gcaccacagtccaaccgctgatctcccttccat

SEQ ID NO: 980187 - DNA, 33 bp, Homo sapien
attacaccatgcagtccctaagtactgaataaa

SEQ ID NO: 980188 - DNA, 33 bp, Homo sapien
attacaccatgcagtctctaagtactgaataaa

SEQ ID NO: 980189 - DNA, 33 bp, Homo sapien
ataaaaatggtctctacggtagattaaattctt

SEQ ID NO: 980190 - DNA, 33 bp, Homo sapien
ataaaaatggtctctatggtagattaaattctt

SEQ ID NO: 980191 - DNA, 33 bp, Homo sapien
aataataacacaaaaaatggctcacgctgctag

SEQ ID NO: 980192 - DNA, 33 bp, Homo sapien
aataataacacaaaaagtggctcacgctgctag

SEQ ID NO: 980193 - DNA, 33 bp, Homo sapien
cagctgcatctcacacaaaactctctgactccc

SEQ ID NO: 980194 - DNA, 33 bp, Homo sapien
cagctgcatctcacacgaaactctctgactccc

SEQ ID NO: 980195 - DNA, 33 bp, Homo sapien
ctgatagccagataacaagaataggtgagaaag

SEQ ID NO: 980196 - DNA, 33 bp, Homo sapien
ctgatagccagataaccagaataggtgagaaag

SEQ ID NO: 980197 - DNA, 33 bp, Homo sapien
atctgtacagtgggggaaaataataatgataat

SEQ ID NO: 980198 - DNA, 33 bp, Homo sapien
atctgtacagtggggggaaataataatgataat

SEQ ID NO: 980199 - DNA, 33 bp, Homo sapien
gcatcactatttcttcacatgcatttgagatta

SEQ ID NO: 980200 - DNA, 33 bp, Homo sapien
gcatcactatttcttcgcatgcatttgagatta

SEQ ID NO: 980201 - DNA, 33 bp, Homo sapien
atcctgcattcttgtccctggattacacagatg

SEQ ID NO: 980202 - DNA, 33 bp, Homo sapien
atcctgcattcttgtctctggattacacagatg

SEQ ID NO: 980203 - DNA, 33 bp, Homo sapien
gtctcttcctgacaaactgaataagatgagaaa

SEQ ID NO: 980204 - DNA, 33 bp, Homo sapien
gtctcttcctgacaaagtgaataagatgagaaa

SEQ ID NO: 980205 - DNA, 33 bp, Homo sapien
ctgtattttctatttaagttagtggcatctcaa

SEQ ID NO: 980206 - DNA, 33 bp, Homo sapien
ctgtattttctatttaggttagtggcatctcaa

SEQ ID NO: 980207 - DNA, 33 bp, Homo sapien
cactgcctcagagttaaatcataagttggatca

SEQ ID NO: 980208 - DNA, 33 bp, Homo sapien
cactgcctcagagttagatcataagttggatca

SEQ ID NO: 980209 - DNA, 33 bp, Homo sapien
caaacagtttaagaagcccatgaagctttattt

SEQ ID NO: 980210 - DNA, 33 bp, Homo sapien
caaacagtttaagaagtccatgaagctttattt

SEQ ID NO: 980211 - DNA, 33 bp, Homo sapien
tgctaaaaccagccaacgttaagagaaatagat

SEQ ID NO: 980212 - DNA, 33 bp, Homo sapien
tgctaaaaccagccaatgttaagagaaatagat

SEQ ID NO: 980213 - DNA, 33 bp, Homo sapien
tgtactgaattctctagaacgaagaccaaaaca

SEQ ID NO: 980214 - DNA, 33 bp, Homo sapien
tgtactgaattctctataacgaagaccaaaaca

SEQ ID NO: 980215 - DNA, 33 bp, Homo sapien
aataaatgagtatgcaataaagtagatacccag

SEQ ID NO: 980216 - DNA, 33 bp, Homo sapien
aataaatgagtatgcagtaaagtagatacccag

SEQ ID NO: 980217 - DNA, 33 bp, Homo sapien
agaagacctgttagaaaattattgtcctaattc

SEQ ID NO: 980218 - DNA, 33 bp, Homo sapien
agaagacctgttagaagattattgtcctaattc

SEQ ID NO: 980219 - DNA, 33 bp, Homo sapien
ttttgctatgctactcgctcttcctgtgtgagg

SEQ ID NO: 980220 - DNA, 33 bp, Homo sapien
ttttgctatgctactctctcttcctgtgtgagg

SEQ ID NO: 980221 - DNA, 33 bp, Homo sapien
ggacaagaagatctgaataaaggcctgtctgca

SEQ ID NO: 980222 - DNA, 33 bp, Homo sapien
ggacaagaagatctgagtaaaggcctgtctgca

SEQ ID NO: 980223 - DNA, 33 bp, Homo sapien
attctaaggttccttccagctctatgatacttt

SEQ ID NO: 980224 - DNA, 33 bp, Homo sapien
attctaaggttccttctagctctatgatacttt

SEQ ID NO: 980225 - DNA, 33 bp, Homo sapien
cttaagttcaccaaaaaataagttggtctgaat

SEQ ID NO: 980226 - DNA, 33 bp, Homo sapien
cttaagttcaccaaaacataagttggtctgaat

SEQ ID NO: 980227 - DNA, 33 bp, Homo sapien
tatactttaggaagtaactaattcagacagggg

SEQ ID NO: 980228 - DNA, 33 bp, Homo sapien
tatactttaggaagtatctaattcagacagggg

SEQ ID NO: 980229 - DNA, 33 bp, Homo sapien
atatatagtttctttaagtcttaccaaagtatt

SEQ ID NO: 980230 - DNA, 33 bp, Homo sapien
atatatagtttctttaggtcttaccaaagtatt

SEQ ID NO: 980231 - DNA, 33 bp, Homo sapien
atatgccttacagatcaaaattaattcaacaaa

SEQ ID NO: 980232 - DNA, 33 bp, Homo sapien
atatgccttacagatccaaattaattcaacaaa

SEQ ID NO: 980233 - DNA, 33 bp, Homo sapien
aaataaaagtataataccccatccctgatcact

SEQ ID NO: 980234 - DNA, 33 bp, Homo sapien
aaataaaagtataatatcccatccctgatcact

SEQ ID NO: 980235 - DNA, 33 bp, Homo sapien
cccctacaataatgtaagttccaagtgcctgaa

SEQ ID NO: 980236 - DNA, 33 bp, Homo sapien
cccctacaataatgtacgttccaagtgcctgaa

SEQ ID NO: 980237 - DNA, 33 bp, Homo sapien
cttctctagcaacatggaaaacaggctggctcc

SEQ ID NO: 980238 - DNA, 33 bp, Homo sapien
cttctctagcaacatgtaaaacaggctggctcc

SEQ ID NO: 980239 - DNA, 33 bp, Homo sapien
agtgaaataatgattgcaccatattcttttgga

SEQ ID NO: 980240 - DNA, 33 bp, Homo sapien
agtgaaataatgattggaccatattcttttgga

SEQ ID NO: 980241 - DNA, 33 bp, Homo sapien
gggtgatctaaaaagcagacaacagagaaatgg

SEQ ID NO: 980242 - DNA, 33 bp, Homo sapien
gggtgatctaaaaagcggacaacagagaaatgg

SEQ ID NO: 980243 - DNA, 33 bp, Homo sapien
catgtcaacctacctaccttagtcccatcacta

SEQ ID NO: 980244 - DNA, 33 bp, Homo sapien
catgtcaacctacctagcttagtcccatcacta

SEQ ID NO: 980245 - DNA, 33 bp, Homo sapien
atatgttaacacaaataaaactgtgacttcata

SEQ ID NO: 980246 - DNA, 33 bp, Homo sapien
atatgttaacacaaatgaaactgtgacttcata

SEQ ID NO: 980247 - DNA, 33 bp, Homo sapien
ttttgggggcgcatataaaacattctaaaattc

SEQ ID NO: 980248 - DNA, 33 bp, Homo sapien
ttttgggggcgcatatgaaacattctaaaattc

SEQ ID NO: 980249 - DNA, 33 bp, Homo sapien
actctcctaagagtgaagtaggatattgaggta

SEQ ID NO: 980250 - DNA, 33 bp, Homo sapien
actctcctaagagtgaggtaggatattgaggta

SEQ ID NO: 980251 - DNA, 33 bp, Homo sapien
catgcaggatatcagacgctgctgtgcaaggaa

SEQ ID NO: 980252 - DNA, 33 bp, Homo sapien
catgcaggatatcagatgctgctgtgcaaggaa

SEQ ID NO: 980253 - DNA, 33 bp, Homo sapien
cttcaatggctttccaatgcctatcaaagtaac

SEQ ID NO: 980254 - DNA, 33 bp, Homo sapien
cttcaatggctttccagtgcctatcaaagtaac

SEQ ID NO: 980255 - DNA, 33 bp, Homo sapien
tcaactgcatgtaacacaatctcaaaatctcag

SEQ ID NO: 980256 - DNA, 33 bp, Homo sapien
tcaactgcatgtaacagaatctcaaaatctcag

SEQ ID NO: 980257 - DNA, 33 bp, Homo sapien
atgagccagagaaactcacattcaaatccaact

SEQ ID NO: 980258 - DNA, 33 bp, Homo sapien
atgagccagagaaactgacattcaaatccaact

SEQ ID NO: 980259 - DNA, 33 bp, Homo sapien
gactgtgtgatgtcaaataagttctcagagcct

SEQ ID NO: 980260 - DNA, 33 bp, Homo sapien
gactgtgtgatgtcaagtaagttctcagagcct

SEQ ID NO: 980261 - DNA, 33 bp, Homo sapien
aatgcgaatagtgctacgtaccgctaccacaac

SEQ ID NO: 980262 - DNA, 33 bp, Homo sapien
aatgcgaatagtgctatgtaccgctaccacaac

SEQ ID NO: 980263 - DNA, 33 bp, Homo sapien
ttcccatgccatagcaacacacagtaatctctc

SEQ ID NO: 980264 - DNA, 33 bp, Homo sapien
ttcccatgccatagcatcacacagtaatctctc

SEQ ID NO: 980265 - DNA, 33 bp, Homo sapien
gatttagggttgataaacatgatcccctgtgct

SEQ ID NO: 980266 - DNA, 33 bp, Homo sapien
gatttagggttgataatcatgatcccctgtgct

SEQ ID NO: 980267 - DNA, 33 bp, Homo sapien
acatcatgtgtcagtccctggaattatttttgt

SEQ ID NO: 980268 - DNA, 33 bp, Homo sapien
acatcatgtgtcagtctctggaattatttttgt

SEQ ID NO: 980269 - DNA, 33 bp, Homo sapien
tatttgttctctccagcaggtctatctttataa

SEQ ID NO: 980270 - DNA, 33 bp, Homo sapien
tatttgttctctccagtaggtctatctttataa

SEQ ID NO: 980271 - DNA, 33 bp, Homo sapien
tcattaggtcataacactgggggaggtttactg

SEQ ID NO: 980272 - DNA, 33 bp, Homo sapien
tcattaggtcataacattgggggaggtttactg

SEQ ID NO: 980273 - DNA, 33 bp, Homo sapien
ttgagagccaggttccaagtcattgagtctgcc

SEQ ID NO: 980274 - DNA, 33 bp, Homo sapien
ttgagagccaggttccgagtcattgagtctgcc

SEQ ID NO: 980275 - DNA, 33 bp, Homo sapien
agagaaatagaggagtcaagcataaactgacag

SEQ ID NO: 980276 - DNA, 33 bp, Homo sapien
agagaaatagaggagttaagcataaactgacag

SEQ ID NO: 980277 - DNA, 33 bp, Homo sapien
gttacatacataccacagaataccactcagcca

SEQ ID NO: 980278 - DNA, 33 bp, Homo sapien
gttacatacataccacggaataccactcagcca

SEQ ID NO: 980279 - DNA, 33 bp, Homo sapien
ttatactacaggattacggtaatcaaaacagca

SEQ ID NO: 980280 - DNA, 33 bp, Homo sapien
ttatactacaggattatggtaatcaaaacagca

SEQ ID NO: 980281 - DNA, 33 bp, Homo sapien
acaaacaagatgactcaattctgttttcatttg

SEQ ID NO: 980282 - DNA, 33 bp, Homo sapien
acaaacaagatgactcgattctgttttcatttg

SEQ ID NO: 980283 - DNA, 33 bp, Homo sapien
ataatctgatgatttccaaaactgggataatag

SEQ ID NO: 980284 - DNA, 33 bp, Homo sapien
ataatctgatgatttctaaaactgggataatag

SEQ ID NO: 980285 - DNA, 33 bp, Homo sapien
tctcagatgatctgaaacaaaaatggggaaatt

SEQ ID NO: 980286 - DNA, 33 bp, Homo sapien
tctcagatgatctgaagcaaaaatggggaaatt

SEQ ID NO: 980287 - DNA, 33 bp, Homo sapien
tgactctcacaggcgacatcaagttctagtttg

SEQ ID NO: 980288 - DNA, 33 bp, Homo sapien
tgactctcacaggcgatatcaagttctagtttg

SEQ ID NO: 980289 - DNA, 33 bp, Homo sapien
cacaaggaagggaagcaaaaaaggaatgaaaag

SEQ ID NO: 980290 - DNA, 33 bp, Homo sapien
cacaaggaagggaagcgaaaaaggaatgaaaag

SEQ ID NO: 980291 - DNA, 33 bp, Homo sapien
ttcagtccaaaaacatgaattgaaatcccacca

SEQ ID NO: 980292 - DNA, 33 bp, Homo sapien
ttcagtccaaaaacattaattgaaatcccacca

SEQ ID NO: 980293 - DNA, 33 bp, Homo sapien
cctgctcttgcggcacggcgtctagagctgctc

SEQ ID NO: 980294 - DNA, 33 bp, Homo sapien
cctgctcttgcggcactgcgtctagagctgctc

SEQ ID NO: 980295 - DNA, 33 bp, Homo sapien
agccgagaaagagaggccagtataggaagaaaa

SEQ ID NO: 980296 - DNA, 33 bp, Homo sapien
agccgagaaagagagggcagtataggaagaaaa

SEQ ID NO: 980297 - DNA, 33 bp, Homo sapien
tctcttccaatccaggaaatgtgtgaatcagaa

SEQ ID NO: 980298 - DNA, 33 bp, Homo sapien
tctcttccaatccagggaatgtgtgaatcagaa

SEQ ID NO: 980299 - DNA, 33 bp, Homo sapien
agcaatacaaatgaacccacagaaaaaggctat

SEQ ID NO: 980300 - DNA, 33 bp, Homo sapien
agcaatacaaatgaactcacagaaaaaggctat

SEQ ID NO: 980301 - DNA, 33 bp, Homo sapien
atcatttgaccatatacgcaagggcttatttct

SEQ ID NO: 980302 - DNA, 33 bp, Homo sapien
atcatttgaccatatatgcaagggcttatttct

SEQ ID NO: 980303 - DNA, 33 bp, Homo sapien
cagttacggatgtagccgattgtttgcatggca

SEQ ID NO: 980304 - DNA, 33 bp, Homo sapien
cagttacggatgtagcggattgtttgcatggca

SEQ ID NO: 980305 - DNA, 33 bp, Homo sapien
ttcaaatctcatagtccaggcattaatactgac

SEQ ID NO: 980306 - DNA, 33 bp, Homo sapien
ttcaaatctcatagtctaggcattaatactgac

SEQ ID NO: 980307 - DNA, 33 bp, Homo sapien
ccttgtgtggcaagaccaatgagtatgctcgtg

SEQ ID NO: 980308 - DNA, 33 bp, Homo sapien
ccttgtgtggcaagactaatgagtatgctcgtg

SEQ ID NO: 980309 - DNA, 33 bp, Homo sapien
caagatataaagttcacccagaaaacatcacct

SEQ ID NO: 980310 - DNA, 33 bp, Homo sapien
caagatataaagttcatccagaaaacatcacct

SEQ ID NO: 980311 - DNA, 33 bp, Homo sapien
ttgtatctttaaacagactcttctcaacaaggt

SEQ ID NO: 980312 - DNA, 33 bp, Homo sapien
ttgtatctttaaacagtctcttctcaacaaggt

SEQ ID NO: 980313 - DNA, 33 bp, Homo sapien
ctcaaaatttaaggcaaggagaccacttaggag

SEQ ID NO: 980314 - DNA, 33 bp, Homo sapien
ctcaaaatttaaggcacggagaccacttaggag

SEQ ID NO: 980315 - DNA, 33 bp, Homo sapien
acccctctgccactgcactattcaggctactct

SEQ ID NO: 980316 - DNA, 33 bp, Homo sapien
acccctctgccactgccctattcaggctactct

SEQ ID NO: 980317 - DNA, 33 bp, Homo sapien
attgcttgggatttaacgatgaccaagtaatat

SEQ ID NO: 980318 - DNA, 33 bp, Homo sapien
attgcttgggatttaatgatgaccaagtaatat

SEQ ID NO: 980319 - DNA, 33 bp, Homo sapien
gccactaccttgaatccgacacacatccctttt

SEQ ID NO: 980320 - DNA, 33 bp, Homo sapien
gccactaccttgaatctgacacacatccctttt

SEQ ID NO: 980321 - DNA, 33 bp, Homo sapien
ctaacagacttcagagcagagaaatgtcggtaa

SEQ ID NO: 980322 - DNA, 33 bp, Homo sapien
ctaacagacttcagagtagagaaatgtcggtaa

SEQ ID NO: 980323 - DNA, 33 bp, Homo sapien
ttgagcacctactatacatcagaggcttactaa

SEQ ID NO: 980324 - DNA, 33 bp, Homo sapien
ttgagcacctactatatatcagaggcttactaa

SEQ ID NO: 980325 - DNA, 33 bp, Homo sapien
acacacttttaagcaaacagaactcatgaaaac

SEQ ID NO: 980326 - DNA, 33 bp, Homo sapien
acacacttttaagcaaccagaactcatgaaaac

SEQ ID NO: 980327 - DNA, 33 bp, Homo sapien
tggacctggccaagagcatttaaagcactgaca

SEQ ID NO: 980328 - DNA, 33 bp, Homo sapien
tggacctggccaagagtatttaaagcactgaca

SEQ ID NO: 980329 - DNA, 33 bp, Homo sapien
tgtcactggtcatcatcatccaggctgcctaag

SEQ ID NO: 980330 - DNA, 33 bp, Homo sapien
tgtcactggtcatcattatccaggctgcctaag

SEQ ID NO: 980331 - DNA, 33 bp, Homo sapien
gcagaagacttggtacacattgggtgcccaata

SEQ ID NO: 980332 - DNA, 33 bp, Homo sapien
gcagaagacttggtacgcattgggtgcccaata

SEQ ID NO: 980333 - DNA, 33 bp, Homo sapien
tttctgtcattttggacgccattcgggttggat

SEQ ID NO: 980334 - DNA, 33 bp, Homo sapien
tttctgtcattttggatgccattcgggttggat

SEQ ID NO: 980335 - DNA, 33 bp, Homo sapien
tgctgtctcaacacaaggtcactaaataggcat

SEQ ID NO: 980336 - DNA, 33 bp, Homo sapien
tgctgtctcaacacaatgtcactaaataggcat

SEQ ID NO: 980337 - DNA, 33 bp, Homo sapien
aggtctgtttatttcaatctatgtttgaccttg

SEQ ID NO: 980338 - DNA, 33 bp, Homo sapien
aggtctgtttatttcagtctatgtttgaccttg

SEQ ID NO: 980339 - DNA, 33 bp, Homo sapien
tgacttctgtgtgggcaaatcttcttaatgtgt

SEQ ID NO: 980340 - DNA, 33 bp, Homo sapien
tgacttctgtgtgggcgaatcttcttaatgtgt

SEQ ID NO: 980341 - DNA, 33 bp, Homo sapien
ttttttaccataataacgctcctaatggttcac

SEQ ID NO: 980342 - DNA, 33 bp, Homo sapien
ttttttaccataataatgctcctaatggttcac

SEQ ID NO: 980343 - DNA, 33 bp, Homo sapien
cttagataaattcagacctcatccataggtttc

SEQ ID NO: 980344 - DNA, 33 bp, Homo sapien
cttagataaattcagagctcatccataggtttc

SEQ ID NO: 980345 - DNA, 33 bp, Homo sapien
cacattttgttagctacgcctcgttagagatgg

SEQ ID NO: 980346 - DNA, 33 bp, Homo sapien
cacattttgttagctatgcctcgttagagatgg

SEQ ID NO: 980347 - DNA, 33 bp, Homo sapien
cctttggctcccacaacgccagtaaccatgaca

SEQ ID NO: 980348 - DNA, 33 bp, Homo sapien
cctttggctcccacaatgccagtaaccatgaca

SEQ ID NO: 980349 - DNA, 33 bp, Homo sapien
tatttttatgatccaaacatttcatatttacct

SEQ ID NO: 980350 - DNA, 33 bp, Homo sapien
tatttttatgatccaagcatttcatatttacct

SEQ ID NO: 980351 - DNA, 33 bp, Homo sapien
acttatcaagcttccacattctttccatccttc

SEQ ID NO: 980352 - DNA, 33 bp, Homo sapien
acttatcaagcttccagattctttccatccttc

SEQ ID NO: 980353 - DNA, 33 bp, Homo sapien
gaccatattttccacaaagtcttggaattcagg

SEQ ID NO: 980354 - DNA, 33 bp, Homo sapien
gaccatattttccacatagtcttggaattcagg

SEQ ID NO: 980355 - DNA, 33 bp, Homo sapien
tgtctctgtttttatcaggaaagaagatctttg

SEQ ID NO: 980356 - DNA, 33 bp, Homo sapien
tgtctctgtttttatcgggaaagaagatctttg

SEQ ID NO: 980357 - DNA, 33 bp, Homo sapien
tatatggcccaaaaccacactcagccctcatct

SEQ ID NO: 980358 - DNA, 33 bp, Homo sapien
tatatggcccaaaaccgcactcagccctcatct

SEQ ID NO: 980359 - DNA, 33 bp, Homo sapien
aaatacaggttctgtgcaaagaagtgtctagat

SEQ ID NO: 980360 - DNA, 33 bp, Homo sapien
aaatacaggttctgtggaaagaagtgtctagat

SEQ ID NO: 980361 - DNA, 33 bp, Homo sapien
cgtaggctatccagtcaatgatttctatcttta

SEQ ID NO: 980362 - DNA, 33 bp, Homo sapien
cgtaggctatccagtccatgatttctatcttta

SEQ ID NO: 980363 - DNA, 33 bp, Homo sapien
gtagacattggagatacagctatggacaaatac

SEQ ID NO: 980364 - DNA, 33 bp, Homo sapien
gtagacattggagatatagctatggacaaatac

SEQ ID NO: 980365 - DNA, 33 bp, Homo sapien
agacacatgatggtacagaacacatggcatact

SEQ ID NO: 980366 - DNA, 33 bp, Homo sapien
agacacatgatggtaccgaacacatggcatact

SEQ ID NO: 980367 - DNA, 33 bp, Homo sapien
ttttgagaaaatgaggaatcacttgtattaggc

SEQ ID NO: 980368 - DNA, 33 bp, Homo sapien
ttttgagaaaatgagggatcacttgtattaggc

SEQ ID NO: 980369 - DNA, 33 bp, Homo sapien
aatggctaaaccactgcaggattaacacagggc

SEQ ID NO: 980370 - DNA, 33 bp, Homo sapien
aatggctaaaccactgtaggattaacacagggc

SEQ ID NO: 980371 - DNA, 33 bp, Homo sapien
aacatatcaaaaggaacggagaaagcacaatat

SEQ ID NO: 980372 - DNA, 33 bp, Homo sapien
aacatatcaaaaggaatggagaaagcacaatat

SEQ ID NO: 980373 - DNA, 33 bp, Homo sapien
attttatggtagaccacgtcacttatttcagat

SEQ ID NO: 980374 - DNA, 33 bp, Homo sapien
attttatggtagaccatgtcacttatttcagat

SEQ ID NO: 980375 - DNA, 33 bp, Homo sapien
gagcattggtaaagacaaccttctctggacaag

SEQ ID NO: 980376 - DNA, 33 bp, Homo sapien
gagcattggtaaagaccaccttctctggacaag

SEQ ID NO: 980377 - DNA, 33 bp, Homo sapien
agattgaaagtcccaggagaatcctgacactga

SEQ ID NO: 980378 - DNA, 33 bp, Homo sapien
agattgaaagtcccagtagaatcctgacactga

SEQ ID NO: 980379 - DNA, 33 bp, Homo sapien
tcttctccctacaatacgaaggctttaccagac

SEQ ID NO: 980380 - DNA, 33 bp, Homo sapien
tcttctccctacaatatgaaggctttaccagac

SEQ ID NO: 980381 - DNA, 33 bp, Homo sapien
taaaaatgggtacaacaatatttagacaaaata

SEQ ID NO: 980382 - DNA, 33 bp, Homo sapien
taaaaatgggtacaaccatatttagacaaaata

SEQ ID NO: 980383 - DNA, 33 bp, Homo sapien
gcattctttcctcaaactaattatctgcttata

SEQ ID NO: 980384 - DNA, 33 bp, Homo sapien
gcattctttcctcaaattaattatctgcttata

SEQ ID NO: 980385 - DNA, 33 bp, Homo sapien
gtcatgaaaataaaaacagaagtgtcaactgaa

SEQ ID NO: 980386 - DNA, 33 bp, Homo sapien
gtcatgaaaataaaaatagaagtgtcaactgaa

SEQ ID NO: 980387 - DNA, 33 bp, Homo sapien
gtgaagtgacacaacactgcaaggctggagacc

SEQ ID NO: 980388 - DNA, 33 bp, Homo sapien
gtgaagtgacacaacagtgcaaggctggagacc

SEQ ID NO: 980389 - DNA, 33 bp, Homo sapien
cataacagaaaggaaacaatgctgtcttcacta

SEQ ID NO: 980390 - DNA, 33 bp, Homo sapien
cataacagaaaggaaataatgctgtcttcacta

SEQ ID NO: 980391 - DNA, 33 bp, Homo sapien
attgtctatttggtgaacatctagtcattctta

SEQ ID NO: 980392 - DNA, 33 bp, Homo sapien
attgtctatttggtgagcatctagtcattctta

SEQ ID NO: 980393 - DNA, 33 bp, Homo sapien
ttgtgttattttgtgcaactggaaggaaagtgt

SEQ ID NO: 980394 - DNA, 33 bp, Homo sapien
ttgtgttattttgtgcgactggaaggaaagtgt

SEQ ID NO: 980395 - DNA, 33 bp, Homo sapien
taaggcctgttttccccacatgacagatgaaga

SEQ ID NO: 980396 - DNA, 33 bp, Homo sapien
taaggcctgttttccctacatgacagatgaaga

SEQ ID NO: 980397 - DNA, 33 bp, Homo sapien
atgtgctatgctatgaagataaaaccataccat

SEQ ID NO: 980398 - DNA, 33 bp, Homo sapien
atgtgctatgctatgaggataaaaccataccat

SEQ ID NO: 980399 - DNA, 33 bp, Homo sapien
gtggaggaccagtcccaattgcttccactcacc

SEQ ID NO: 980400 - DNA, 33 bp, Homo sapien
gtggaggaccagtcccgattgcttccactcacc

SEQ ID NO: 980401 - DNA, 33 bp, Homo sapien
ggaagaggacacaaggacacaagaggactttca

SEQ ID NO: 980402 - DNA, 33 bp, Homo sapien
ggaagaggacacaagggcacaagaggactttca

SEQ ID NO: 980403 - DNA, 33 bp, Homo sapien
agcatcaggaagaagaactaatgcatgctgggc

SEQ ID NO: 980404 - DNA, 33 bp, Homo sapien
agcatcaggaagaagagctaatgcatgctgggc

SEQ ID NO: 980405 - DNA, 33 bp, Homo sapien
ggattccaaagtaaaactgcaaagtcagacaca

SEQ ID NO: 980406 - DNA, 33 bp, Homo sapien
ggattccaaagtaaaattgcaaagtcagacaca

SEQ ID NO: 980407 - DNA, 33 bp, Homo sapien
tagccactcctgacacaagggtttcagtcacat

SEQ ID NO: 980408 - DNA, 33 bp, Homo sapien
tagccactcctgacacgagggtttcagtcacat

SEQ ID NO: 980409 - DNA, 33 bp, Homo sapien
aaccctgttgtgtaaagagggagtgtaagaaag

SEQ ID NO: 980410 - DNA, 33 bp, Homo sapien
aaccctgttgtgtaaatagggagtgtaagaaag

SEQ ID NO: 980411 - DNA, 33 bp, Homo sapien
tagccatgcttcctacaaatctgagagctgcag

SEQ ID NO: 980412 - DNA, 33 bp, Homo sapien
tagccatgcttcctacgaatctgagagctgcag

SEQ ID NO: 980413 - DNA, 33 bp, Homo sapien
tgttgggttgttttcacggctagcaagatgaaa

SEQ ID NO: 980414 - DNA, 33 bp, Homo sapien
tgttgggttgttttcatggctagcaagatgaaa

SEQ ID NO: 980415 - DNA, 33 bp, Homo sapien
tcagagctaaaattaaatgaaccaacaacacat

SEQ ID NO: 980416 - DNA, 33 bp, Homo sapien
tcagagctaaaattaagtgaaccaacaacacat

SEQ ID NO: 980417 - DNA, 33 bp, Homo sapien
tgacgctgctatctacagacaggtgggagttag

SEQ ID NO: 980418 - DNA, 33 bp, Homo sapien
tgacgctgctatctaccgacaggtgggagttag

SEQ ID NO: 980419 - DNA, 33 bp, Homo sapien
acacctgtacactttacggaaggacacaggcct

SEQ ID NO: 980420 - DNA, 33 bp, Homo sapien
acacctgtacactttatggaaggacacaggcct

SEQ ID NO: 980421 - DNA, 33 bp, Homo sapien
taactggaaagccacacagagttattttttgca

SEQ ID NO: 980422 - DNA, 33 bp, Homo sapien
taactggaaagccacagagagttattttttgca

SEQ ID NO: 980423 - DNA, 33 bp, Homo sapien
ggcttggggttctcaacgtgataggcaaaaccc

SEQ ID NO: 980424 - DNA, 33 bp, Homo sapien
ggcttggggttctcaatgtgataggcaaaaccc

SEQ ID NO: 980425 - DNA, 33 bp, Homo sapien
tattaaaattgttaggaacagttatacagaaaa

SEQ ID NO: 980426 - DNA, 33 bp, Homo sapien
tattaaaattgttagggacagttatacagaaaa

SEQ ID NO: 980427 - DNA, 33 bp, Homo sapien
tggtattggtagcctcaccccatccatgtcatc

SEQ ID NO: 980428 - DNA, 33 bp, Homo sapien
tggtattggtagcctcgccccatccatgtcatc

SEQ ID NO: 980429 - DNA, 33 bp, Homo sapien
aaacaacaaattctacacagagcagaagaaaaa

SEQ ID NO: 980430 - DNA, 33 bp, Homo sapien
aaacaacaaattctacgcagagcagaagaaaaa

SEQ ID NO: 980431 - DNA, 33 bp, Homo sapien
gaagcaggagcctgaccgaccaattgaggcctt

SEQ ID NO: 980432 - DNA, 33 bp, Homo sapien
gaagcaggagcctgactgaccaattgaggcctt

SEQ ID NO: 980433 - DNA, 33 bp, Homo sapien
cttaaaatgatttcccacagtccctcatcagta

SEQ ID NO: 980434 - DNA, 33 bp, Homo sapien
cttaaaatgatttcccgcagtccctcatcagta

SEQ ID NO: 980435 - DNA, 33 bp, Homo sapien
ctgttcttgggtttacaggagagcatataagaa

SEQ ID NO: 980436 - DNA, 33 bp, Homo sapien
ctgttcttgggtttacgggagagcatataagaa

SEQ ID NO: 980437 - DNA, 33 bp, Homo sapien
caatttgagggctttacgatagctatgttctgc

SEQ ID NO: 980438 - DNA, 33 bp, Homo sapien
caatttgagggctttatgatagctatgttctgc

SEQ ID NO: 980439 - DNA, 33 bp, Homo sapien
aggtcctcgagccacaaggacactgaaaaaagg

SEQ ID NO: 980440 - DNA, 33 bp, Homo sapien
aggtcctcgagccacagggacactgaaaaaagg

SEQ ID NO: 980441 - DNA, 33 bp, Homo sapien
ctggtgagtttcagtcgcttgcctgagggtcgg

SEQ ID NO: 980442 - DNA, 33 bp, Homo sapien
ctggtgagtttcagtctcttgcctgagggtcgg

SEQ ID NO: 980443 - DNA, 33 bp, Homo sapien
acatgttttgacgttacaggatcatagttggaa

SEQ ID NO: 980444 - DNA, 33 bp, Homo sapien
acatgttttgacgttataggatcatagttggaa

SEQ ID NO: 980445 - DNA, 33 bp, Homo sapien
tctcaagaacctttagcagggcactggtgtttt

SEQ ID NO: 980446 - DNA, 33 bp, Homo sapien
tctcaagaacctttaggagggcactggtgtttt

SEQ ID NO: 980447 - DNA, 33 bp, Homo sapien
gatgtggagttaagaaagggaatcatgagacat

SEQ ID NO: 980448 - DNA, 33 bp, Homo sapien
gatgtggagttaagaatgggaatcatgagacat

SEQ ID NO: 980449 - DNA, 33 bp, Homo sapien
aactcaattaagtccacgtttattgattagagt

SEQ ID NO: 980450 - DNA, 33 bp, Homo sapien
aactcaattaagtccatgtttattgattagagt

SEQ ID NO: 980451 - DNA, 33 bp, Homo sapien
gtgactaaaactacaaacagcaaacacctatat

SEQ ID NO: 980452 - DNA, 33 bp, Homo sapien
gtgactaaaactacaagcagcaaacacctatat

SEQ ID NO: 980453 - DNA, 33 bp, Homo sapien
gtctcaaactgccaaccacaagtgatccacctg

SEQ ID NO: 980454 - DNA, 33 bp, Homo sapien
gtctcaaactgccaacgacaagtgatccacctg

SEQ ID NO: 980455 - DNA, 33 bp, Homo sapien
tccctgctgtttccagacctttgttgcacccac

SEQ ID NO: 980456 - DNA, 33 bp, Homo sapien
tccctgctgtttccaggcctttgttgcacccac

SEQ ID NO: 980457 - DNA, 33 bp, Homo sapien
tcctgatttcctggcccgattaagccagtgtga

SEQ ID NO: 980458 - DNA, 33 bp, Homo sapien
tcctgatttcctggcctgattaagccagtgtga

SEQ ID NO: 980459 - DNA, 33 bp, Homo sapien
gggcagcctcttcgaaaaaatgatttataagca

SEQ ID NO: 980460 - DNA, 33 bp, Homo sapien
gggcagcctcttcgaagaaatgatttataagca

SEQ ID NO: 980461 - DNA, 33 bp, Homo sapien
acattcaaaccatagcaccccattttatgaatg

SEQ ID NO: 980462 - DNA, 33 bp, Homo sapien
acattcaaaccatagcgccccattttatgaatg

SEQ ID NO: 980463 - DNA, 33 bp, Homo sapien
tgaatgcagaaaattaagctcagaaaggttagt

SEQ ID NO: 980464 - DNA, 33 bp, Homo sapien
tgaatgcagaaaattacgctcagaaaggttagt

SEQ ID NO: 980465 - DNA, 33 bp, Homo sapien
cttacagtggctcaaacaagtcaagatttaact

SEQ ID NO: 980466 - DNA, 33 bp, Homo sapien
cttacagtggctcaaataagtcaagatttaact

SEQ ID NO: 980467 - DNA, 33 bp, Homo sapien
agattagaaggaaataccaataaagccaaagtt

SEQ ID NO: 980468 - DNA, 33 bp, Homo sapien
agattagaaggaaatatcaataaagccaaagtt

SEQ ID NO: 980469 - DNA, 33 bp, Homo sapien
tgaatgaatgaagaaacgaatccataccttatc

SEQ ID NO: 980470 - DNA, 33 bp, Homo sapien
tgaatgaatgaagaaatgaatccataccttatc

SEQ ID NO: 980471 - DNA, 33 bp, Homo sapien
ctgcacactatatcaccaaaaacagttctgggt

SEQ ID NO: 980472 - DNA, 33 bp, Homo sapien
ctgcacactatatcactaaaaacagttctgggt

SEQ ID NO: 980473 - DNA, 33 bp, Homo sapien
tcaactctatatttcaaaaggttcacttcattt

SEQ ID NO: 980474 - DNA, 33 bp, Homo sapien
tcaactctatatttcataaggttcacttcattt

SEQ ID NO: 980475 - DNA, 33 bp, Homo sapien
ttccctccgtttattacatctgctcttccccag

SEQ ID NO: 980476 - DNA, 33 bp, Homo sapien
ttccctccgtttattatatctgctcttccccag

SEQ ID NO: 980477 - DNA, 33 bp, Homo sapien
caactctgtctttgaacgaaggctcttcttagg

SEQ ID NO: 980478 - DNA, 33 bp, Homo sapien
caactctgtctttgaatgaaggctcttcttagg

SEQ ID NO: 980479 - DNA, 33 bp, Homo sapien
gactgctcgagattcacgaatgatttagctttc

SEQ ID NO: 980480 - DNA, 33 bp, Homo sapien
gactgctcgagattcaggaatgatttagctttc

SEQ ID NO: 980481 - DNA, 33 bp, Homo sapien
ataagtccaatcaaccaccacattaaacattcc

SEQ ID NO: 980482 - DNA, 33 bp, Homo sapien
ataagtccaatcaaccgccacattaaacattcc

SEQ ID NO: 980483 - DNA, 33 bp, Homo sapien
gtcattttcccagaacaaaaaaatgatatttcc

SEQ ID NO: 980484 - DNA, 33 bp, Homo sapien
gtcattttcccagaacgaaaaaatgatatttcc

SEQ ID NO: 980485 - DNA, 33 bp, Homo sapien
atcagtccctttcccagacatctagtgagcaaa

SEQ ID NO: 980486 - DNA, 33 bp, Homo sapien
atcagtccctttcccatacatctagtgagcaaa

SEQ ID NO: 980487 - DNA, 33 bp, Homo sapien
ttatcccaggttgacacatttcgtaccaggtaa

SEQ ID NO: 980488 - DNA, 33 bp, Homo sapien
ttatcccaggttgacatatttcgtaccaggtaa

SEQ ID NO: 980489 - DNA, 33 bp, Homo sapien
tatttggtagggagagaaattgatcctatatgg

SEQ ID NO: 980490 - DNA, 33 bp, Homo sapien
tatttggtagggagaggaattgatcctatatgg

SEQ ID NO: 980491 - DNA, 33 bp, Homo sapien
cagcagtaattgtgtgaatctggccatcttaca

SEQ ID NO: 980492 - DNA, 33 bp, Homo sapien
cagcagtaattgtgtgcatctggccatcttaca

SEQ ID NO: 980493 - DNA, 33 bp, Homo sapien
agaggccttggtagccactttctgaagatggca

SEQ ID NO: 980494 - DNA, 33 bp, Homo sapien
agaggccttggtagccgctttctgaagatggca

SEQ ID NO: 980495 - DNA, 33 bp, Homo sapien
ggatccaagactctcaggtaatatccagattgt

SEQ ID NO: 980496 - DNA, 33 bp, Homo sapien
ggatccaagactctcatgtaatatccagattgt

SEQ ID NO: 980497 - DNA, 33 bp, Homo sapien
gaaagatacaataaaaaagaaaccgcagtctct

SEQ ID NO: 980498 - DNA, 33 bp, Homo sapien
gaaagatacaataaaagagaaaccgcagtctct

SEQ ID NO: 980499 - DNA, 33 bp, Homo sapien
agtttgtaacctttcccgaatttctccttcaca

SEQ ID NO: 980500 - DNA, 33 bp, Homo sapien
agtttgtaacctttccggaatttctccttcaca

SEQ ID NO: 980501 - DNA, 33 bp, Homo sapien
ctcatgagttaaagagacatgataaacgtggct

SEQ ID NO: 980502 - DNA, 33 bp, Homo sapien
ctcatgagttaaagaggcatgataaacgtggct

SEQ ID NO: 980503 - DNA, 33 bp, Homo sapien
tatgtccacgagcaccggatgttcagctcccac

SEQ ID NO: 980504 - DNA, 33 bp, Homo sapien
tatgtccacgagcacctgatgttcagctcccac

SEQ ID NO: 980505 - DNA, 33 bp, Homo sapien
taatacagcctcaaaagcacatcatataaagaa

SEQ ID NO: 980506 - DNA, 33 bp, Homo sapien
taatacagcctcaaaatcacatcatataaagaa

SEQ ID NO: 980507 - DNA, 33 bp, Homo sapien
cttgtgagtctataggccagctggatggttctg

SEQ ID NO: 980508 - DNA, 33 bp, Homo sapien
cttgtgagtctataggtcagctggatggttctg

SEQ ID NO: 980509 - DNA, 33 bp, Homo sapien
acatcacattgggcaacaaagaacacaaaggca

SEQ ID NO: 980510 - DNA, 33 bp, Homo sapien
acatcacattgggcaataaagaacacaaaggca

SEQ ID NO: 980511 - DNA, 33 bp, Homo sapien
gtgagaggtatgtgaactattgtggccaaaggg

SEQ ID NO: 980512 - DNA, 33 bp, Homo sapien
gtgagaggtatgtgaattattgtggccaaaggg

SEQ ID NO: 980513 - DNA, 33 bp, Homo sapien
gaaagataggcacaaccggataagctgagaaga

SEQ ID NO: 980514 - DNA, 33 bp, Homo sapien
gaaagataggcacaactggataagctgagaaga

SEQ ID NO: 980515 - DNA, 33 bp, Homo sapien
cagaaattgctaaagtcacccagtaaagaaagg

SEQ ID NO: 980516 - DNA, 33 bp, Homo sapien
cagaaattgctaaagttacccagtaaagaaagg

SEQ ID NO: 980517 - DNA, 33 bp, Homo sapien
tcgtcttcttctaatacccttgcctgttcaaag

SEQ ID NO: 980518 - DNA, 33 bp, Homo sapien
tcgtcttcttctaatatccttgcctgttcaaag

SEQ ID NO: 980519 - DNA, 33 bp, Homo sapien
tgcaataaatgattgaagagctgaaaaatggta

SEQ ID NO: 980520 - DNA, 33 bp, Homo sapien
tgcaataaatgattgaggagctgaaaaatggta

SEQ ID NO: 980521 - DNA, 33 bp, Homo sapien
ccctagctacagggaaaatggagatctagtctt

SEQ ID NO: 980522 - DNA, 33 bp, Homo sapien
ccctagctacagggaagatggagatctagtctt

SEQ ID NO: 980523 - DNA, 33 bp, Homo sapien
acagaaccatagaagcacgtatagatgttagca

SEQ ID NO: 980524 - DNA, 33 bp, Homo sapien
acagaaccatagaagcgcgtatagatgttagca

SEQ ID NO: 980525 - DNA, 33 bp, Homo sapien
ccatgctacgtcttcaacacgtgagcactctgt

SEQ ID NO: 980526 - DNA, 33 bp, Homo sapien
ccatgctacgtcttcagcacgtgagcactctgt

SEQ ID NO: 980527 - DNA, 33 bp, Homo sapien
ggcccaacaccatcccaaagcaaattggagcta

SEQ ID NO: 980528 - DNA, 33 bp, Homo sapien
ggcccaacaccatcccgaagcaaattggagcta

SEQ ID NO: 980529 - DNA, 33 bp, Homo sapien
aatagctccttaaactaaactgtgcagctaact

SEQ ID NO: 980530 - DNA, 33 bp, Homo sapien
aatagctccttaaactcaactgtgcagctaact

SEQ ID NO: 980531 - DNA, 33 bp, Homo sapien
tgataggacatcccaaaagagctgtgtatagga

SEQ ID NO: 980532 - DNA, 33 bp, Homo sapien
tgataggacatcccaagagagctgtgtatagga

SEQ ID NO: 980533 - DNA, 33 bp, Homo sapien
caatgcattgtgctgaacatgggcttatgagat

SEQ ID NO: 980534 - DNA, 33 bp, Homo sapien
caatgcattgtgctgagcatgggcttatgagat

SEQ ID NO: 980535 - DNA, 33 bp, Homo sapien
agctatgaagaacataatataaagcagtatgag

SEQ ID NO: 980536 - DNA, 33 bp, Homo sapien
agctatgaagaacatattataaagcagtatgag

SEQ ID NO: 980537 - DNA, 33 bp, Homo sapien
caaaaatattgactccacttgtaagaaattgaa

SEQ ID NO: 980538 - DNA, 33 bp, Homo sapien
caaaaatattgactccgcttgtaagaaattgaa

SEQ ID NO: 980539 - DNA, 33 bp, Homo sapien
acggtaatatctccaactccaaactctaacagt

SEQ ID NO: 980540 - DNA, 33 bp, Homo sapien
acggtaatatctccaattccaaactctaacagt

SEQ ID NO: 980541 - DNA, 33 bp, Homo sapien
ctcacgacactcccagaatgtttttgttgttat

SEQ ID NO: 980542 - DNA, 33 bp, Homo sapien
ctcacgacactcccaggatgtttttgttgttat

SEQ ID NO: 980543 - DNA, 33 bp, Homo sapien
ctgtagtggctgaagcagaaagagctagagagt

SEQ ID NO: 980544 - DNA, 33 bp, Homo sapien
ctgtagtggctgaagcggaaagagctagagagt

SEQ ID NO: 980545 - DNA, 33 bp, Homo sapien
agattgctaggtcacaacaaggacaggtaccct

SEQ ID NO: 980546 - DNA, 33 bp, Homo sapien
agattgctaggtcacagcaaggacaggtaccct

SEQ ID NO: 980547 - DNA, 33 bp, Homo sapien
ccccattaacatcttcaatttggtccaagtaag

SEQ ID NO: 980548 - DNA, 33 bp, Homo sapien
ccccattaacatcttctatttggtccaagtaag

SEQ ID NO: 980549 - DNA, 33 bp, Homo sapien
cataatccagcaaaataaaggagtctccttctc

SEQ ID NO: 980550 - DNA, 33 bp, Homo sapien
cataatccagcaaaatgaaggagtctccttctc

SEQ ID NO: 980551 - DNA, 33 bp, Homo sapien
ttagtggaaagtacaccggacctagattcagag

SEQ ID NO: 980552 - DNA, 33 bp, Homo sapien
ttagtggaaagtacactggacctagattcagag

SEQ ID NO: 980553 - DNA, 33 bp, Homo sapien
attactagttacacaacaggtctctcataatcc

SEQ ID NO: 980554 - DNA, 33 bp, Homo sapien
attactagttacacaataggtctctcataatcc

SEQ ID NO: 980555 - DNA, 33 bp, Homo sapien
aggcatgcatttcacaatatggtcctccctgat

SEQ ID NO: 980556 - DNA, 33 bp, Homo sapien
aggcatgcatttcacagtatggtcctccctgat

SEQ ID NO: 980557 - DNA, 33 bp, Homo sapien
gataggagtgactataagaaaatagcagtaagg

SEQ ID NO: 980558 - DNA, 33 bp, Homo sapien
gataggagtgactataggaaaatagcagtaagg

SEQ ID NO: 980559 - DNA, 33 bp, Homo sapien
ttcctgcttggacagaatagatgcactttttat

SEQ ID NO: 980560 - DNA, 33 bp, Homo sapien
ttcctgcttggacagagtagatgcactttttat

SEQ ID NO: 980561 - DNA, 33 bp, Homo sapien
aggttgtaacatagctaagatcagtggatatga

SEQ ID NO: 980562 - DNA, 33 bp, Homo sapien
aggttgtaacatagctgagatcagtggatatga

SEQ ID NO: 980563 - DNA, 33 bp, Homo sapien
ctggaattactttccaaaagacttagggaatgc

SEQ ID NO: 980564 - DNA, 33 bp, Homo sapien
ctggaattactttccagaagacttagggaatgc

SEQ ID NO: 980565 - DNA, 33 bp, Homo sapien
gattctgttaggaagacgagaattggataatgg

SEQ ID NO: 980566 - DNA, 33 bp, Homo sapien
gattctgttaggaagatgagaattggataatgg

SEQ ID NO: 980567 - DNA, 33 bp, Homo sapien
aaaatattatataccaaggtgattctctttcaa

SEQ ID NO: 980568 - DNA, 33 bp, Homo sapien
aaaatattatataccagggtgattctctttcaa

SEQ ID NO: 980569 - DNA, 33 bp, Homo sapien
aaaagggaagaatggccaagtgacatttttaaa

SEQ ID NO: 980570 - DNA, 33 bp, Homo sapien
aaaagggaagaatggctaagtgacatttttaaa

SEQ ID NO: 980571 - DNA, 33 bp, Homo sapien
cagaagtaatgctcctcaagactgtgtggtgga

SEQ ID NO: 980572 - DNA, 33 bp, Homo sapien
cagaagtaatgctcctgaagactgtgtggtgga

SEQ ID NO: 980573 - DNA, 33 bp, Homo sapien
acctgggtaatctggacgtgtgaccagagcagt

SEQ ID NO: 980574 - DNA, 33 bp, Homo sapien
acctgggtaatctggatgtgtgaccagagcagt

SEQ ID NO: 980575 - DNA, 33 bp, Homo sapien
agcacattacagatagaaatgtccgggcacgtc

SEQ ID NO: 980576 - DNA, 33 bp, Homo sapien
agcacattacagataggaatgtccgggcacgtc

SEQ ID NO: 980577 - DNA, 33 bp, Homo sapien
ggaacagtttgctcataacataaaaaaacagac

SEQ ID NO: 980578 - DNA, 33 bp, Homo sapien
ggaacagtttgctcatgacataaaaaaacagac

SEQ ID NO: 980579 - DNA, 33 bp, Homo sapien
ttagatacactgtgctcaaagtactgcaggatg

SEQ ID NO: 980580 - DNA, 33 bp, Homo sapien
ttagatacactgtgctgaaagtactgcaggatg

SEQ ID NO: 980581 - DNA, 33 bp, Homo sapien
ttcctgatggctctcaacatcacaaactaaggc

SEQ ID NO: 980582 - DNA, 33 bp, Homo sapien
ttcctgatggctctcagcatcacaaactaaggc

SEQ ID NO: 980583 - DNA, 33 bp, Homo sapien
gcatcttactgcaagcggcttaccttgtacgct

SEQ ID NO: 980584 - DNA, 33 bp, Homo sapien
gcatcttactgcaagctgcttaccttgtacgct

SEQ ID NO: 980585 - DNA, 33 bp, Homo sapien
aaatgtccctggatacagatcactgacgtcttt

SEQ ID NO: 980586 - DNA, 33 bp, Homo sapien
aaatgtccctggataccgatcactgacgtcttt

SEQ ID NO: 980587 - DNA, 33 bp, Homo sapien
cacataaatggtaggacgtcaaatttatactag

SEQ ID NO: 980588 - DNA, 33 bp, Homo sapien
cacataaatggtaggaggtcaaatttatactag

SEQ ID NO: 980589 - DNA, 33 bp, Homo sapien
ctcactctgaccttaccgaaataatccagcctg

SEQ ID NO: 980590 - DNA, 33 bp, Homo sapien
ctcactctgaccttactgaaataatccagcctg

SEQ ID NO: 980591 - DNA, 33 bp, Homo sapien
taagtttgaagaaccaataaagttgttacacaa

SEQ ID NO: 980592 - DNA, 33 bp, Homo sapien
taagtttgaagaaccagtaaagttgttacacaa

SEQ ID NO: 980593 - DNA, 33 bp, Homo sapien
cctccccactccaacactctgcaagtctgggcc

SEQ ID NO: 980594 - DNA, 33 bp, Homo sapien
cctccccactccaacattctgcaagtctgggcc

SEQ ID NO: 980595 - DNA, 33 bp, Homo sapien
gctgttttgtatgaacagagagattagcctgaa

SEQ ID NO: 980596 - DNA, 33 bp, Homo sapien
gctgttttgtatgaaccgagagattagcctgaa

SEQ ID NO: 980597 - DNA, 33 bp, Homo sapien
taggagtttccactgccgcaatcggaacaggag

SEQ ID NO: 980598 - DNA, 33 bp, Homo sapien
taggagtttccactgctgcaatcggaacaggag

SEQ ID NO: 980599 - DNA, 33 bp, Homo sapien
agttttatcctggagcaatgaacccagtgggga

SEQ ID NO: 980600 - DNA, 33 bp, Homo sapien
agttttatcctggagcgatgaacccagtgggga

SEQ ID NO: 980601 - DNA, 33 bp, Homo sapien
ttgaatttgcagactcggaacataggtgtgaaa

SEQ ID NO: 980602 - DNA, 33 bp, Homo sapien
ttgaatttgcagactctgaacataggtgtgaaa

SEQ ID NO: 980603 - DNA, 33 bp, Homo sapien
tagcactttatttgaaacaggatatatgggtca

SEQ ID NO: 980604 - DNA, 33 bp, Homo sapien
tagcactttatttgaagcaggatatatgggtca

SEQ ID NO: 980605 - DNA, 33 bp, Homo sapien
cttctgcattaccagcaaattatttggatctag

SEQ ID NO: 980606 - DNA, 33 bp, Homo sapien
cttctgcattaccagcgaattatttggatctag

SEQ ID NO: 980607 - DNA, 33 bp, Homo sapien
caataagaaagcaatcaaagactactagggtgg

SEQ ID NO: 980608 - DNA, 33 bp, Homo sapien
caataagaaagcaatcgaagactactagggtgg

SEQ ID NO: 980609 - DNA, 33 bp, Homo sapien
attgtctggtatgacaagatgctctaggctcat

SEQ ID NO: 980610 - DNA, 33 bp, Homo sapien
attgtctggtatgacaggatgctctaggctcat

SEQ ID NO: 980611 - DNA, 33 bp, Homo sapien
cctccctctgagactccaatgggggttggaatg

SEQ ID NO: 980612 - DNA, 33 bp, Homo sapien
cctccctctgagactctaatgggggttggaatg

SEQ ID NO: 980613 - DNA, 33 bp, Homo sapien
tgactctaaagcattacgaacagagtttgtgac

SEQ ID NO: 980614 - DNA, 33 bp, Homo sapien
tgactctaaagcattatgaacagagtttgtgac

SEQ ID NO: 980615 - DNA, 33 bp, Homo sapien
acctattaccataatcgacatcggcagtccctg

SEQ ID NO: 980616 - DNA, 33 bp, Homo sapien
acctattaccataatctacatcggcagtccctg

SEQ ID NO: 980617 - DNA, 33 bp, Homo sapien
aattctgattgcagataaaagaatcatagtctt

SEQ ID NO: 980618 - DNA, 33 bp, Homo sapien
aattctgattgcagattaaagaatcatagtctt

SEQ ID NO: 980619 - DNA, 33 bp, Homo sapien
atattgtaggctcttaaccagattaacattata

SEQ ID NO: 980620 - DNA, 33 bp, Homo sapien
atattgtaggctcttatccagattaacattata

SEQ ID NO: 980621 - DNA, 33 bp, Homo sapien
aataaattctctttgaagcacctgagattaatt

SEQ ID NO: 980622 - DNA, 33 bp, Homo sapien
aataaattctctttgaggcacctgagattaatt

SEQ ID NO: 980623 - DNA, 33 bp, Homo sapien
tgaccttgggttgtcaaaaagccacaaaacagg

SEQ ID NO: 980624 - DNA, 33 bp, Homo sapien
tgaccttgggttgtcagaaagccacaaaacagg

SEQ ID NO: 980625 - DNA, 33 bp, Homo sapien
ttcctgtgttgcaaaaaaggaaactgaggcacc

SEQ ID NO: 980626 - DNA, 33 bp, Homo sapien
ttcctgtgttgcaaaagaggaaactgaggcacc

SEQ ID NO: 980627 - DNA, 33 bp, Homo sapien
agctgctgcttgtcagaaagtgacttcagaaat

SEQ ID NO: 980628 - DNA, 33 bp, Homo sapien
agctgctgcttgtcaggaagtgacttcagaaat

SEQ ID NO: 980629 - DNA, 33 bp, Homo sapien
aatattctccagatgacgcctttggactacttt

SEQ ID NO: 980630 - DNA, 33 bp, Homo sapien
aatattctccagatgatgcctttggactacttt

SEQ ID NO: 980631 - DNA, 33 bp, Homo sapien
atctatcacagtgttccagcaaagcatatgttg

SEQ ID NO: 980632 - DNA, 33 bp, Homo sapien
atctatcacagtgttctagcaaagcatatgttg

SEQ ID NO: 980633 - DNA, 33 bp, Homo sapien
acgattggggatataacgggcttcactaacctt

SEQ ID NO: 980634 - DNA, 33 bp, Homo sapien
acgattggggatataatgggcttcactaacctt

SEQ ID NO: 980635 - DNA, 33 bp, Homo sapien
ttcttcagccattccagcatagagaacaaaacc

SEQ ID NO: 980636 - DNA, 33 bp, Homo sapien
ttcttcagccattccatcatagagaacaaaacc

SEQ ID NO: 980637 - DNA, 33 bp, Homo sapien
cttattaaaagtacacaatggacataaagcaac

SEQ ID NO: 980638 - DNA, 33 bp, Homo sapien
cttattaaaagtacacgatggacataaagcaac

SEQ ID NO: 980639 - DNA, 33 bp, Homo sapien
ccttcgttctcagagaccccatatagtgctggt

SEQ ID NO: 980640 - DNA, 33 bp, Homo sapien
ccttcgttctcagagatcccatatagtgctggt

SEQ ID NO: 980641 - DNA, 33 bp, Homo sapien
atttccaggatgccaacttatgtaaaagaggct

SEQ ID NO: 980642 - DNA, 33 bp, Homo sapien
atttccaggatgccaagttatgtaaaagaggct

SEQ ID NO: 980643 - DNA, 33 bp, Homo sapien
gttcctcacaaaactacctttgctctattgaag

SEQ ID NO: 980644 - DNA, 33 bp, Homo sapien
gttcctcacaaaactatctttgctctattgaag

SEQ ID NO: 980645 - DNA, 33 bp, Homo sapien
ctctgtggagtacctgaatgacaagatcatatt

SEQ ID NO: 980646 - DNA, 33 bp, Homo sapien
ctctgtggagtacctgcatgacaagatcatatt

SEQ ID NO: 980647 - DNA, 33 bp, Homo sapien
gataaggcaagcaatacgtgtgttgaaaaactg

SEQ ID NO: 980648 - DNA, 33 bp, Homo sapien
gataaggcaagcaataggtgtgttgaaaaactg

SEQ ID NO: 980649 - DNA, 33 bp, Homo sapien
tgtggttcaaaaatacactacattttactccat

SEQ ID NO: 980650 - DNA, 33 bp, Homo sapien
tgtggttcaaaaatacgctacattttactccat

SEQ ID NO: 980651 - DNA, 33 bp, Homo sapien
tactcaattttacccacgtctgaaaaaatgaat

SEQ ID NO: 980652 - DNA, 33 bp, Homo sapien
tactcaattttacccatgtctgaaaaaatgaat

SEQ ID NO: 980653 - DNA, 33 bp, Homo sapien
gagcctggtgctctgcaacaaagattgaagtac

SEQ ID NO: 980654 - DNA, 33 bp, Homo sapien
gagcctggtgctctgcgacaaagattgaagtac

SEQ ID NO: 980655 - DNA, 33 bp, Homo sapien
atttgttttgaagggaaagaatccagtttagca

SEQ ID NO: 980656 - DNA, 33 bp, Homo sapien
atttgttttgaagggagagaatccagtttagca

SEQ ID NO: 980657 - DNA, 33 bp, Homo sapien
taggggaacagtcaatcatgtattcctctagtg

SEQ ID NO: 980658 - DNA, 33 bp, Homo sapien
taggggaacagtcaattatgtattcctctagtg

SEQ ID NO: 980659 - DNA, 33 bp, Homo sapien
tcactaccgcctcaaacttccatctcagcttgg

SEQ ID NO: 980660 - DNA, 33 bp, Homo sapien
tcactaccgcctcaaagttccatctcagcttgg

SEQ ID NO: 980661 - DNA, 33 bp, Homo sapien
ccctttcagcggcccacatgtgcagcaccctgg

SEQ ID NO: 980662 - DNA, 33 bp, Homo sapien
ccctttcagcggcccatatgtgcagcaccctgg

SEQ ID NO: 980663 - DNA, 33 bp, Homo sapien
ataccgggatgcagtgaatagcagggcacacag

SEQ ID NO: 980664 - DNA, 33 bp, Homo sapien
ataccgggatgcagtggatagcagggcacacag

SEQ ID NO: 980665 - DNA, 33 bp, Homo sapien
cctgggagtaaccaccccctccgtgtcaatgac

SEQ ID NO: 980666 - DNA, 33 bp, Homo sapien
cctgggagtaaccacctcctccgtgtcaatgac

SEQ ID NO: 980667 - DNA, 33 bp, Homo sapien
cttgggaacagcagtaagtttctgagttccggg

SEQ ID NO: 980668 - DNA, 33 bp, Homo sapien
cttgggaacagcagtaggtttctgagttccggg

SEQ ID NO: 980669 - DNA, 33 bp, Homo sapien
tccatctttgataagcaccttctggccctcagg

SEQ ID NO: 980670 - DNA, 33 bp, Homo sapien
tccatctttgataagcgccttctggccctcagg

SEQ ID NO: 980671 - DNA, 33 bp, Homo sapien
gggaagcagaatgtacaagtttggaaaatttgc

SEQ ID NO: 980672 - DNA, 33 bp, Homo sapien
gggaagcagaatgtacgagtttggaaaatttgc

SEQ ID NO: 980673 - DNA, 33 bp, Homo sapien
gtaagagaggacattcaagagaaaaggtagagt

SEQ ID NO: 980674 - DNA, 33 bp, Homo sapien
gtaagagaggacattcgagagaaaaggtagagt

SEQ ID NO: 980675 - DNA, 33 bp, Homo sapien
ggagaaaagcaaaacaatgaataggagtagggt

SEQ ID NO: 980676 - DNA, 33 bp, Homo sapien
ggagaaaagcaaaacagtgaataggagtagggt

SEQ ID NO: 980677 - DNA, 33 bp, Homo sapien
agctctgactccacgcaagaaaatcgctgagcc

SEQ ID NO: 980678 - DNA, 33 bp, Homo sapien
agctctgactccacgcgagaaaatcgctgagcc

SEQ ID NO: 980679 - DNA, 33 bp, Homo sapien
gtatacagttaaaatcaaattgaactaaatagc

SEQ ID NO: 980680 - DNA, 33 bp, Homo sapien
gtatacagttaaaatccaattgaactaaatagc

SEQ ID NO: 980681 - DNA, 33 bp, Homo sapien
gagtgtttcattcttacgactgggcttttgcct

SEQ ID NO: 980682 - DNA, 33 bp, Homo sapien
gagtgtttcattcttatgactgggcttttgcct

SEQ ID NO: 980683 - DNA, 33 bp, Homo sapien
caactatggaaagcaacgtagagattccttaaa

SEQ ID NO: 980684 - DNA, 33 bp, Homo sapien
caactatggaaagcaatgtagagattccttaaa

SEQ ID NO: 980685 - DNA, 33 bp, Homo sapien
ctcaggcttctaataacggactccagattttta

SEQ ID NO: 980686 - DNA, 33 bp, Homo sapien
ctcaggcttctaataatggactccagattttta

SEQ ID NO: 980687 - DNA, 33 bp, Homo sapien
ggtgaccttttcccgcaacaccagtctcataaa

SEQ ID NO: 980688 - DNA, 33 bp, Homo sapien
ggtgaccttttcccgcgacaccagtctcataaa

SEQ ID NO: 980689 - DNA, 33 bp, Homo sapien
taaatcttcaggaaacaaggtgagctacaggac

SEQ ID NO: 980690 - DNA, 33 bp, Homo sapien
taaatcttcaggaaaccaggtgagctacaggac

SEQ ID NO: 980691 - DNA, 33 bp, Homo sapien
tttgctttttgtcataaatgggaaatcaaagca

SEQ ID NO: 980692 - DNA, 33 bp, Homo sapien
tttgctttttgtcatagatgggaaatcaaagca

SEQ ID NO: 980693 - DNA, 33 bp, Homo sapien
gcctatcctggcatccaaatgctgcacagctgg

SEQ ID NO: 980694 - DNA, 33 bp, Homo sapien
gcctatcctggcatccgaatgctgcacagctgg

SEQ ID NO: 980695 - DNA, 33 bp, Homo sapien
gtgtgtcctgtctccaagctttgctgggcctgc

SEQ ID NO: 980696 - DNA, 33 bp, Homo sapien
gtgtgtcctgtctccaggctttgctgggcctgc

SEQ ID NO: 980697 - DNA, 33 bp, Homo sapien
gggtgggtgtgttgaactgcatcgacattgaca

SEQ ID NO: 980698 - DNA, 33 bp, Homo sapien
gggtgggtgtgttgaattgcatcgacattgaca

SEQ ID NO: 980699 - DNA, 33 bp, Homo sapien
aggcctttctgtacacgcaaagaagcttaccct

SEQ ID NO: 980700 - DNA, 33 bp, Homo sapien
aggcctttctgtacactcaaagaagcttaccct

SEQ ID NO: 980701 - DNA, 33 bp, Homo sapien
ccctgccaagtgctctaaacttaaaattacagt

SEQ ID NO: 980702 - DNA, 33 bp, Homo sapien
ccctgccaagtgctctgaacttaaaattacagt

SEQ ID NO: 980703 - DNA, 33 bp, Homo sapien
gaagcaaagggcgatacggagttttcaccatga

SEQ ID NO: 980704 - DNA, 33 bp, Homo sapien
gaagcaaagggcgatagggagttttcaccatga

SEQ ID NO: 980705 - DNA, 33 bp, Homo sapien
ataatgttgtgaagtaaaacaatcagtactgag

SEQ ID NO: 980706 - DNA, 33 bp, Homo sapien
ataatgttgtgaagtagaacaatcagtactgag

SEQ ID NO: 980707 - DNA, 33 bp, Homo sapien
ataccacaccattttacgttaagggacttgtgc

SEQ ID NO: 980708 - DNA, 33 bp, Homo sapien
ataccacaccattttatgttaagggacttgtgc

SEQ ID NO: 980709 - DNA, 33 bp, Homo sapien
tgtgttgagcaatttacgccgcatattaggtta

SEQ ID NO: 980710 - DNA, 33 bp, Homo sapien
tgtgttgagcaatttatgccgcatattaggtta

SEQ ID NO: 980711 - DNA, 33 bp, Homo sapien
ttctcactgccccctaaacttctctaatattcc

SEQ ID NO: 980712 - DNA, 33 bp, Homo sapien
ttctcactgccccctagacttctctaatattcc

SEQ ID NO: 980713 - DNA, 33 bp, Homo sapien
ataggattgttcaatccagttcagtctctccaa

SEQ ID NO: 980714 - DNA, 33 bp, Homo sapien
ataggattgttcaatctagttcagtctctccaa

SEQ ID NO: 980715 - DNA, 33 bp, Homo sapien
caggctcagtgcctcaatgaatgtcaaccactg

SEQ ID NO: 980716 - DNA, 33 bp, Homo sapien
caggctcagtgcctcagtgaatgtcaaccactg

SEQ ID NO: 980717 - DNA, 33 bp, Homo sapien
cccccttccttacaaactcgctcaaaaacccag

SEQ ID NO: 980718 - DNA, 33 bp, Homo sapien
cccccttccttacaaattcgctcaaaaacccag

SEQ ID NO: 980719 - DNA, 33 bp, Homo sapien
gaccctaacactctccaagtcaaatccctttat

SEQ ID NO: 980720 - DNA, 33 bp, Homo sapien
gaccctaacactctcccagtcaaatccctttat

SEQ ID NO: 980721 - DNA, 33 bp, Homo sapien
tttctgtgttcttgatcatattgttctgcaaaa

SEQ ID NO: 980722 - DNA, 33 bp, Homo sapien
tttctgtgttcttgattatattgttctgcaaaa

SEQ ID NO: 980723 - DNA, 33 bp, Homo sapien
ttgtcagctgctctctaaaattacaccaattct

SEQ ID NO: 980724 - DNA, 33 bp, Homo sapien
ttgtcagctgctctctgaaattacaccaattct

SEQ ID NO: 980725 - DNA, 33 bp, Homo sapien
agaggtctgcaaacctcactaatttccagaaaa

SEQ ID NO: 980726 - DNA, 33 bp, Homo sapien
agaggtctgcaaacctgactaatttccagaaaa

SEQ ID NO: 980727 - DNA, 33 bp, Homo sapien
ttgttctccactgaaccgctaagggtgtggtgg

SEQ ID NO: 980728 - DNA, 33 bp, Homo sapien
ttgttctccactgaactgctaagggtgtggtgg

SEQ ID NO: 980729 - DNA, 33 bp, Homo sapien
ttttcatcaaactcacactgtcatcaattgtga

SEQ ID NO: 980730 - DNA, 33 bp, Homo sapien
ttttcatcaaactcaccctgtcatcaattgtga

SEQ ID NO: 980731 - DNA, 33 bp, Homo sapien
gaaaatacgtctctaacagggcttctgtgagaa

SEQ ID NO: 980732 - DNA, 33 bp, Homo sapien
gaaaatacgtctctaatagggcttctgtgagaa

SEQ ID NO: 980733 - DNA, 33 bp, Homo sapien
tgaacattcacgtaaactctttggacatatgtt

SEQ ID NO: 980734 - DNA, 33 bp, Homo sapien
tgaacattcacgtaaagtctttggacatatgtt

SEQ ID NO: 980735 - DNA, 33 bp, Homo sapien
ctttgcaaaatgcataaacacaactcacttagc

SEQ ID NO: 980736 - DNA, 33 bp, Homo sapien
ctttgcaaaatgcatatacacaactcacttagc

SEQ ID NO: 980737 - DNA, 33 bp, Homo sapien
cagcagcccaaacgacactcccttaatactata

SEQ ID NO: 980738 - DNA, 33 bp, Homo sapien
cagcagcccaaacgacgctcccttaatactata

SEQ ID NO: 980739 - DNA, 33 bp, Homo sapien
catcctgacatgattaccttgtgtgctacctac

SEQ ID NO: 980740 - DNA, 33 bp, Homo sapien
catcctgacatgattatcttgtgtgctacctac

SEQ ID NO: 980741 - DNA, 33 bp, Homo sapien
aagacttgtaagaagaagagtaagagacaggga

SEQ ID NO: 980742 - DNA, 33 bp, Homo sapien
aagacttgtaagaagacgagtaagagacaggga

SEQ ID NO: 980743 - DNA, 33 bp, Homo sapien
cttcttcccttcaaaccaaattcacaggcaatt

SEQ ID NO: 980744 - DNA, 33 bp, Homo sapien
cttcttcccttcaaacgaaattcacaggcaatt

SEQ ID NO: 980745 - DNA, 33 bp, Homo sapien
cactcattggccatacaatcatgggtaaactac

SEQ ID NO: 980746 - DNA, 33 bp, Homo sapien
cactcattggccatacgatcatgggtaaactac

SEQ ID NO: 980747 - DNA, 33 bp, Homo sapien
tcacaaccatgacaaaattatgaaggtggattc

SEQ ID NO: 980748 - DNA, 33 bp, Homo sapien
tcacaaccatgacaaagttatgaaggtggattc

SEQ ID NO: 980749 - DNA, 33 bp, Homo sapien
ccatcaaggaactacaatattcaaccagtcatt

SEQ ID NO: 980750 - DNA, 33 bp, Homo sapien
ccatcaaggaactacagtattcaaccagtcatt

SEQ ID NO: 980751 - DNA, 33 bp, Homo sapien
gctgccttcccctgcaacactatgactcttgtc

SEQ ID NO: 980752 - DNA, 33 bp, Homo sapien
gctgccttcccctgcaccactatgactcttgtc

SEQ ID NO: 980753 - DNA, 33 bp, Homo sapien
taagacagaaacttcacgtagccttgagcttag

SEQ ID NO: 980754 - DNA, 33 bp, Homo sapien
taagacagaaacttcatgtagccttgagcttag

SEQ ID NO: 980755 - DNA, 33 bp, Homo sapien
aaccactggtggcccactgctcctgaacctttc

SEQ ID NO: 980756 - DNA, 33 bp, Homo sapien
aaccactggtggcccattgctcctgaacctttc

SEQ ID NO: 980757 - DNA, 33 bp, Homo sapien
tgtgggtgttgatgccaccacagaggttaaacg

SEQ ID NO: 980758 - DNA, 33 bp, Homo sapien
tgtgggtgttgatgccgccacagaggttaaacg

SEQ ID NO: 980759 - DNA, 33 bp, Homo sapien
gctagtacttgcatgcacattgttgaatgaatg

SEQ ID NO: 980760 - DNA, 33 bp, Homo sapien
gctagtacttgcatgcgcattgttgaatgaatg

SEQ ID NO: 980761 - DNA, 33 bp, Homo sapien
tgtgcctgcatgggctcacaggtggataagagc

SEQ ID NO: 980762 - DNA, 33 bp, Homo sapien
tgtgcctgcatgggcttacaggtggataagagc

SEQ ID NO: 980763 - DNA, 33 bp, Homo sapien
tttctttctatccccaataatagcaggtattta

SEQ ID NO: 980764 - DNA, 33 bp, Homo sapien
tttctttctatccccagtaatagcaggtattta

SEQ ID NO: 980765 - DNA, 33 bp, Homo sapien
tcacccctgactgatgcatgcccacacagacca

SEQ ID NO: 980766 - DNA, 33 bp, Homo sapien
tcacccctgactgatggatgcccacacagacca

SEQ ID NO: 980767 - DNA, 33 bp, Homo sapien
ttcattaattcactcaaatataatcaatcacct

SEQ ID NO: 980768 - DNA, 33 bp, Homo sapien
ttcattaattcactcagatataatcaatcacct

SEQ ID NO: 980769 - DNA, 33 bp, Homo sapien
gttgatggcaacctagaaaaatttttgaaagga

SEQ ID NO: 980770 - DNA, 33 bp, Homo sapien
gttgatggcaacctaggaaaatttttgaaagga

SEQ ID NO: 980771 - DNA, 33 bp, Homo sapien
gggatttagagtaatacgacaggcactcacaga

SEQ ID NO: 980772 - DNA, 33 bp, Homo sapien
gggatttagagtaatatgacaggcactcacaga

SEQ ID NO: 980773 - DNA, 33 bp, Homo sapien
tctttttattgatttcacaaccattttaccaaa

SEQ ID NO: 980774 - DNA, 33 bp, Homo sapien
tctttttattgatttcgcaaccattttaccaaa

SEQ ID NO: 980775 - DNA, 33 bp, Homo sapien
tataatagggaggggcaattggcacttttacaa

SEQ ID NO: 980776 - DNA, 33 bp, Homo sapien
tataatagggaggggcgattggcacttttacaa

SEQ ID NO: 980777 - DNA, 33 bp, Homo sapien
tggaaggaatgagcagaaaggaattggctggtg

SEQ ID NO: 980778 - DNA, 33 bp, Homo sapien
tggaaggaatgagcaggaaggaattggctggtg

SEQ ID NO: 980779 - DNA, 33 bp, Homo sapien
agagcaacactcaaacccaggtgttctacatcc

SEQ ID NO: 980780 - DNA, 33 bp, Homo sapien
agagcaacactcaaactcaggtgttctacatcc

SEQ ID NO: 980781 - DNA, 33 bp, Homo sapien
aatatatacacaataacggtggctgaatattct

SEQ ID NO: 980782 - DNA, 33 bp, Homo sapien
aatatatacacaataagggtggctgaatattct

SEQ ID NO: 980783 - DNA, 33 bp, Homo sapien
tgtggtttgctttttaacagtacaataaagttg

SEQ ID NO: 980784 - DNA, 33 bp, Homo sapien
tgtggtttgctttttagcagtacaataaagttg

SEQ ID NO: 980785 - DNA, 33 bp, Homo sapien
atagtgtcacttcacacggacattgattttaat

SEQ ID NO: 980786 - DNA, 33 bp, Homo sapien
atagtgtcacttcacatggacattgattttaat

SEQ ID NO: 980787 - DNA, 33 bp, Homo sapien
ttactgcagaaatgaccgtaatggcctgtacac

SEQ ID NO: 980788 - DNA, 33 bp, Homo sapien
ttactgcagaaatgactgtaatggcctgtacac

SEQ ID NO: 980789 - DNA, 33 bp, Homo sapien
agtatttatttgcctcacatttatgtcacatga

SEQ ID NO: 980790 - DNA, 33 bp, Homo sapien
agtatttatttgcctcgcatttatgtcacatga

SEQ ID NO: 980791 - DNA, 33 bp, Homo sapien
aaactctccgatttagaacaacagcaacaaata

SEQ ID NO: 980792 - DNA, 33 bp, Homo sapien
aaactctccgatttaggacaacagcaacaaata

SEQ ID NO: 980793 - DNA, 33 bp, Homo sapien
gggatatctggtagtcgctagtcaaagagggtt

SEQ ID NO: 980794 - DNA, 33 bp, Homo sapien
gggatatctggtagtctctagtcaaagagggtt

SEQ ID NO: 980795 - DNA, 33 bp, Homo sapien
actggaactatgcttaacttattattagagaca

SEQ ID NO: 980796 - DNA, 33 bp, Homo sapien
actggaactatgcttatcttattattagagaca

SEQ ID NO: 980797 - DNA, 33 bp, Homo sapien
atgggcaactgttaaaaagtcctggttacctct

SEQ ID NO: 980798 - DNA, 33 bp, Homo sapien
atgggcaactgttaaagagtcctggttacctct

SEQ ID NO: 980799 - DNA, 33 bp, Homo sapien
tcagaggagaagacgcacactgaagactggagt

SEQ ID NO: 980800 - DNA, 33 bp, Homo sapien
tcagaggagaagacgcgcactgaagactggagt

SEQ ID NO: 980801 - DNA, 33 bp, Homo sapien
ttcttagaaagctcccggatttatcctttcaac

SEQ ID NO: 980802 - DNA, 33 bp, Homo sapien
ttcttagaaagctccctgatttatcctttcaac

SEQ ID NO: 980803 - DNA, 33 bp, Homo sapien
ggaaacttctaaaagcacattcatcattgttcc

SEQ ID NO: 980804 - DNA, 33 bp, Homo sapien
ggaaacttctaaaagcgcattcatcattgttcc

SEQ ID NO: 980805 - DNA, 33 bp, Homo sapien
attgtctataaatctaaaaggtggcactggggg

SEQ ID NO: 980806 - DNA, 33 bp, Homo sapien
attgtctataaatctagaaggtggcactggggg

SEQ ID NO: 980807 - DNA, 33 bp, Homo sapien
acctacaagcaagcctaaattttcctaaagggg

SEQ ID NO: 980808 - DNA, 33 bp, Homo sapien
acctacaagcaagcctgaattttcctaaagggg

SEQ ID NO: 980809 - DNA, 33 bp, Homo sapien
atctcttaaatatgggaaatcctgtgtataatc

SEQ ID NO: 980810 - DNA, 33 bp, Homo sapien
atctcttaaatatggggaatcctgtgtataatc

SEQ ID NO: 980811 - DNA, 33 bp, Homo sapien
ctctgagtcaacacacaaagctatgcacttctt

SEQ ID NO: 980812 - DNA, 33 bp, Homo sapien
ctctgagtcaacacacgaagctatgcacttctt

SEQ ID NO: 980813 - DNA, 33 bp, Homo sapien
ttactttaatattttacgatgcagccattttgg

SEQ ID NO: 980814 - DNA, 33 bp, Homo sapien
ttactttaatattttatgatgcagccattttgg

SEQ ID NO: 980815 - DNA, 33 bp, Homo sapien
ctgaacgtttagggacactctgacacccctgga

SEQ ID NO: 980816 - DNA, 33 bp, Homo sapien
ctgaacgtttagggaccctctgacacccctgga

SEQ ID NO: 980817 - DNA, 33 bp, Homo sapien
attatttctatccctaagcactcacccccactg

SEQ ID NO: 980818 - DNA, 33 bp, Homo sapien
attatttctatccctaggcactcacccccactg

SEQ ID NO: 980819 - DNA, 33 bp, Homo sapien
ctgaagcctaaaacgccaccattagcaactaag

SEQ ID NO: 980820 - DNA, 33 bp, Homo sapien
ctgaagcctaaaacgctaccattagcaactaag

SEQ ID NO: 980821 - DNA, 33 bp, Homo sapien
aggaccatcatctcccagctactcagcaagtgc

SEQ ID NO: 980822 - DNA, 33 bp, Homo sapien
aggaccatcatctcccggctactcagcaagtgc

SEQ ID NO: 980823 - DNA, 33 bp, Homo sapien
aatactactataatcaagatactgaactgtttc

SEQ ID NO: 980824 - DNA, 33 bp, Homo sapien
aatactactataatcaggatactgaactgtttc

SEQ ID NO: 980825 - DNA, 33 bp, Homo sapien
acacagctaagagaacaaaaagccaaactacag

SEQ ID NO: 980826 - DNA, 33 bp, Homo sapien
acacagctaagagaacgaaaagccaaactacag

SEQ ID NO: 980827 - DNA, 33 bp, Homo sapien
gaggccaaagtggaaacgtcttattatcacatg

SEQ ID NO: 980828 - DNA, 33 bp, Homo sapien
gaggccaaagtggaaatgtcttattatcacatg

SEQ ID NO: 980829 - DNA, 33 bp, Homo sapien
cttcctgtctctaacacataatccaaatagaag

SEQ ID NO: 980830 - DNA, 33 bp, Homo sapien
cttcctgtctctaacatataatccaaatagaag

SEQ ID NO: 980831 - DNA, 33 bp, Homo sapien
ctgtggcctctttatcacagagaaaggcgtttt

SEQ ID NO: 980832 - DNA, 33 bp, Homo sapien
ctgtggcctctttatcgcagagaaaggcgtttt

SEQ ID NO: 980833 - DNA, 33 bp, Homo sapien
cctgttgatgaactcacgggatttaacgctgtg

SEQ ID NO: 980834 - DNA, 33 bp, Homo sapien
cctgttgatgaactcatgggatttaacgctgtg

SEQ ID NO: 980835 - DNA, 33 bp, Homo sapien
tttggaagttgcacagccaattatatgcactcc

SEQ ID NO: 980836 - DNA, 33 bp, Homo sapien
tttggaagttgcacagtcaattatatgcactcc

SEQ ID NO: 980837 - DNA, 33 bp, Homo sapien
cagcctaacttctaaacgcctaccctgagctgg

SEQ ID NO: 980838 - DNA, 33 bp, Homo sapien
cagcctaacttctaaatgcctaccctgagctgg

SEQ ID NO: 980839 - DNA, 33 bp, Homo sapien
agtatttgagaataaagtgttgtgcgtttgagt

SEQ ID NO: 980840 - DNA, 33 bp, Homo sapien
agtatttgagaataaattgttgtgcgtttgagt

SEQ ID NO: 980841 - DNA, 33 bp, Homo sapien
tcaagcccttttatgacagcctaatcccattca

SEQ ID NO: 980842 - DNA, 33 bp, Homo sapien
tcaagcccttttatgagagcctaatcccattca

SEQ ID NO: 980843 - DNA, 33 bp, Homo sapien
aataaaagatgtcaaaactagagtcttctagtg

SEQ ID NO: 980844 - DNA, 33 bp, Homo sapien
aataaaagatgtcaaagctagagtcttctagtg

SEQ ID NO: 980845 - DNA, 33 bp, Homo sapien
acagtttctggagccaccctgttttgccttgaa

SEQ ID NO: 980846 - DNA, 33 bp, Homo sapien
acagtttctggagccatcctgttttgccttgaa

SEQ ID NO: 980847 - DNA, 33 bp, Homo sapien
gtttatttcccagtcaccgtgctgaaaagaaat

SEQ ID NO: 980848 - DNA, 33 bp, Homo sapien
gtttatttcccagtcatcgtgctgaaaagaaat

SEQ ID NO: 980849 - DNA, 33 bp, Homo sapien
attactgcccattcccaaatcgaggcacagaga

SEQ ID NO: 980850 - DNA, 33 bp, Homo sapien
attactgcccattcccgaatcgaggcacagaga

SEQ ID NO: 980851 - DNA, 33 bp, Homo sapien
ggccagcacttcagtcgctgaatatgcaacatc

SEQ ID NO: 980852 - DNA, 33 bp, Homo sapien
ggccagcacttcagtctctgaatatgcaacatc

SEQ ID NO: 980853 - DNA, 33 bp, Homo sapien
ctttaagtgacctacaactgcctagctcctgcc

SEQ ID NO: 980854 - DNA, 33 bp, Homo sapien
ctttaagtgacctacatctgcctagctcctgcc

SEQ ID NO: 980855 - DNA, 33 bp, Homo sapien
agaggtaaagtcatccaacaacagtcctaagtt

SEQ ID NO: 980856 - DNA, 33 bp, Homo sapien
agaggtaaagtcatccgacaacagtcctaagtt

SEQ ID NO: 980857 - DNA, 33 bp, Homo sapien
cagtttcggagcctctaaaataaagtggaaata

SEQ ID NO: 980858 - DNA, 33 bp, Homo sapien
cagtttcggagcctctcaaataaagtggaaata

SEQ ID NO: 980859 - DNA, 33 bp, Homo sapien
ataacagcgatgacaacatctctctataacaat

SEQ ID NO: 980860 - DNA, 33 bp, Homo sapien
ataacagcgatgacaatatctctctataacaat

SEQ ID NO: 980861 - DNA, 33 bp, Homo sapien
ctctcgatgcagaaaccgatttttccatttttg

SEQ ID NO: 980862 - DNA, 33 bp, Homo sapien
ctctcgatgcagaaactgatttttccatttttg

SEQ ID NO: 980863 - DNA, 33 bp, Homo sapien
gcatttacctaatagccgatgatgttgagcatc

SEQ ID NO: 980864 - DNA, 33 bp, Homo sapien
gcatttacctaatagctgatgatgttgagcatc

SEQ ID NO: 980865 - DNA, 33 bp, Homo sapien
acaatgttagttgggaagagctttaaggtcatt

SEQ ID NO: 980866 - DNA, 33 bp, Homo sapien
acaatgttagttgggacgagctttaaggtcatt

SEQ ID NO: 980867 - DNA, 33 bp, Homo sapien
gggtatatatccggaactgaaagccaggtcttg

SEQ ID NO: 980868 - DNA, 33 bp, Homo sapien
gggtatatatccggaattgaaagccaggtcttg

SEQ ID NO: 980869 - DNA, 33 bp, Homo sapien
cttgtaaagtctgttacgacaggaaatctaaag

SEQ ID NO: 980870 - DNA, 33 bp, Homo sapien
cttgtaaagtctgttatgacaggaaatctaaag

SEQ ID NO: 980871 - DNA, 33 bp, Homo sapien
aactgcagctataaaaaccacttatctgttcaa

SEQ ID NO: 980872 - DNA, 33 bp, Homo sapien
aactgcagctataaaagccacttatctgttcaa

SEQ ID NO: 980873 - DNA, 33 bp, Homo sapien
gatgattaaataaaaacgtaagcaaaatgcctg

SEQ ID NO: 980874 - DNA, 33 bp, Homo sapien
gatgattaaataaaaaggtaagcaaaatgcctg

SEQ ID NO: 980875 - DNA, 33 bp, Homo sapien
aatacattaagttagacggagggacagaaacag

SEQ ID NO: 980876 - DNA, 33 bp, Homo sapien
aatacattaagttagatggagggacagaaacag

SEQ ID NO: 980877 - DNA, 33 bp, Homo sapien
cagtctttgcctagtgaatttgcatccatgaag

SEQ ID NO: 980878 - DNA, 33 bp, Homo sapien
cagtctttgcctagtgtatttgcatccatgaag

SEQ ID NO: 980879 - DNA, 33 bp, Homo sapien
aattagacacaaaaaacagtattaattgtaaat

SEQ ID NO: 980880 - DNA, 33 bp, Homo sapien
aattagacacaaaaaagagtattaattgtaaat

SEQ ID NO: 980881 - DNA, 33 bp, Homo sapien
agccactagctattggaaatgtctgttttcata

SEQ ID NO: 980882 - DNA, 33 bp, Homo sapien
agccactagctattggtaatgtctgttttcata

SEQ ID NO: 980883 - DNA, 33 bp, Homo sapien
cacaaagttcccaagaccagaattcagccctcc

SEQ ID NO: 980884 - DNA, 33 bp, Homo sapien
cacaaagttcccaagagcagaattcagccctcc

SEQ ID NO: 980885 - DNA, 33 bp, Homo sapien
ctataatcagtatagcagaaggataagatgtaa

SEQ ID NO: 980886 - DNA, 33 bp, Homo sapien
ctataatcagtatagcggaaggataagatgtaa

SEQ ID NO: 980887 - DNA, 33 bp, Homo sapien
gaactggctggctcaacgtaaaactattgatat

SEQ ID NO: 980888 - DNA, 33 bp, Homo sapien
gaactggctggctcaatgtaaaactattgatat

SEQ ID NO: 980889 - DNA, 33 bp, Homo sapien
atgtacacaactgatacataggaaggacacata

SEQ ID NO: 980890 - DNA, 33 bp, Homo sapien
atgtacacaactgatatataggaaggacacata

SEQ ID NO: 980891 - DNA, 33 bp, Homo sapien
aatcatagcagttcacccttagcacctcaaaac

SEQ ID NO: 980892 - DNA, 33 bp, Homo sapien
aatcatagcagttcacgcttagcacctcaaaac

SEQ ID NO: 980893 - DNA, 33 bp, Homo sapien
tgaagaaaacacctacaactgcattttgaaact

SEQ ID NO: 980894 - DNA, 33 bp, Homo sapien
tgaagaaaacacctaccactgcattttgaaact

SEQ ID NO: 980895 - DNA, 33 bp, Homo sapien
gcaagctactcatttcgagttaaccatgaggcc

SEQ ID NO: 980896 - DNA, 33 bp, Homo sapien
gcaagctactcatttctagttaaccatgaggcc

SEQ ID NO: 980897 - DNA, 33 bp, Homo sapien
ccacaaaattcaagtcccaaataccatgcaagc

SEQ ID NO: 980898 - DNA, 33 bp, Homo sapien
ccacaaaattcaagtctcaaataccatgcaagc

SEQ ID NO: 980899 - DNA, 33 bp, Homo sapien
atccacatattccccccaagttagatcgattct

SEQ ID NO: 980900 - DNA, 33 bp, Homo sapien
atccacatattcccccgaagttagatcgattct

SEQ ID NO: 980901 - DNA, 33 bp, Homo sapien
ggacattggagaagacaatataaggcagaggaa

SEQ ID NO: 980902 - DNA, 33 bp, Homo sapien
ggacattggagaagacgatataaggcagaggaa

SEQ ID NO: 980903 - DNA, 33 bp, Homo sapien
gcttctgaagagtacactggcaagttagaagca

SEQ ID NO: 980904 - DNA, 33 bp, Homo sapien
gcttctgaagagtacattggcaagttagaagca

SEQ ID NO: 980905 - DNA, 33 bp, Homo sapien
gcattattcattatagccaaaactggacataat

SEQ ID NO: 980906 - DNA, 33 bp, Homo sapien
gcattattcattataggcaaaactggacataat

SEQ ID NO: 980907 - DNA, 33 bp, Homo sapien
actgaatgtttacatacgcagttattcttttcc

SEQ ID NO: 980908 - DNA, 33 bp, Homo sapien
actgaatgtttacatatgcagttattcttttcc

SEQ ID NO: 980909 - DNA, 33 bp, Homo sapien
agttactctacttaaacatacagcaggcatctt

SEQ ID NO: 980910 - DNA, 33 bp, Homo sapien
agttactctacttaaatatacagcaggcatctt

SEQ ID NO: 980911 - DNA, 33 bp, Homo sapien
tcttcaacaattactcaactaccatttgcattt

SEQ ID NO: 980912 - DNA, 33 bp, Homo sapien
tcttcaacaattactcgactaccatttgcattt

SEQ ID NO: 980913 - DNA, 33 bp, Homo sapien
tagaatggcaaagaaccgaagcactgacaacat

SEQ ID NO: 980914 - DNA, 33 bp, Homo sapien
tagaatggcaaagaactgaagcactgacaacat

SEQ ID NO: 980915 - DNA, 33 bp, Homo sapien
aaaagtatcaactggactagcatctggagtcag

SEQ ID NO: 980916 - DNA, 33 bp, Homo sapien
aaaagtatcaactggagtagcatctggagtcag

SEQ ID NO: 980917 - DNA, 33 bp, Homo sapien
cagagtttatgacatacgtaaaagtagaatgca

SEQ ID NO: 980918 - DNA, 33 bp, Homo sapien
cagagtttatgacatatgtaaaagtagaatgca

SEQ ID NO: 980919 - DNA, 33 bp, Homo sapien
ctggactttttgttaacgtttcagtgtttattt

SEQ ID NO: 980920 - DNA, 33 bp, Homo sapien
ctggactttttgttaatgtttcagtgtttattt

SEQ ID NO: 980921 - DNA, 33 bp, Homo sapien
ttatatagcagtatgcaaaaaaccagtttaaaa

SEQ ID NO: 980922 - DNA, 33 bp, Homo sapien
ttatatagcagtatgcgaaaaaccagtttaaaa

SEQ ID NO: 980923 - DNA, 33 bp, Homo sapien; identical to SEQ ID NO: 980921

SEQ ID NO: 980924 - DNA, 33 bp, Homo sapien; identical to SEQ ID NO: 980922

SEQ ID NO: 980925 - DNA, 33 bp, Homo sapien
aacaggagatgaacccaaagttaaggaaccaaa

SEQ ID NO: 980926 - DNA, 33 bp, Homo sapien
aacaggagatgaacccgaagttaaggaaccaaa

SEQ ID NO: 980927 - DNA, 33 bp, Homo sapien
tgaacaaacgtgcacaccatcacctctgtgaga

SEQ ID NO: 980928 - DNA, 33 bp, Homo sapien
tgaacaaacgtgcacatcatcacctctgtgaga

SEQ ID NO: 980929 - DNA, 33 bp, Homo sapien
cttgttgcgtaggctacagtttaatggcgcaat

SEQ ID NO: 980930 - DNA, 33 bp, Homo sapien
cttgttgcgtaggctagagtttaatggcgcaat

SEQ ID NO: 980931 - DNA, 33 bp, Homo sapien
aaaaggattgttttggacattgaacaacttcat

SEQ ID NO: 980932 - DNA, 33 bp, Homo sapien
aaaaggattgttttgggcattgaacaacttcat

SEQ ID NO: 980933 - DNA, 33 bp, Homo sapien
ttgggctctttctggactatagacttctaaagt

SEQ ID NO: 980934 - DNA, 33 bp, Homo sapien
ttgggctctttctggattatagacttctaaagt

SEQ ID NO: 980935 - DNA, 33 bp, Homo sapien
gagactttggatgagaaaggggaattcaggaat

SEQ ID NO: 980936 - DNA, 33 bp, Homo sapien
gagactttggatgagacaggggaattcaggaat

SEQ ID NO: 980937 - DNA, 33 bp, Homo sapien
attttgcctaacatataaaaatggattcaatgt

SEQ ID NO: 980938 - DNA, 33 bp, Homo sapien
attttgcctaacatatgaaaatggattcaatgt

SEQ ID NO: 980939 - DNA, 33 bp, Homo sapien
ttctcgtaggatgtagaaaattgcaagggaatt

SEQ ID NO: 980940 - DNA, 33 bp, Homo sapien
ttctcgtaggatgtaggaaattgcaagggaatt

SEQ ID NO: 980941 - DNA, 33 bp, Homo sapien
aaataaatttatgaccaacttctcagccaacag

SEQ ID NO: 980942 - DNA, 33 bp, Homo sapien
aaataaatttatgaccgacttctcagccaacag

SEQ ID NO: 980943 - DNA, 33 bp, Homo sapien
aatttccatgagttgacgaataaacaaaatgtg

SEQ ID NO: 980944 - DNA, 33 bp, Homo sapien
aatttccatgagttgatgaataaacaaaatgtg

SEQ ID NO: 980945 - DNA, 33 bp, Homo sapien
tatagctcctctttacccttcaaaatgaagtct

SEQ ID NO: 980946 - DNA, 33 bp, Homo sapien
tatagctcctctttactcttcaaaatgaagtct

SEQ ID NO: 980947 - DNA, 33 bp, Homo sapien
aatgccagcgagacagaccatttgctcccctgg

SEQ ID NO: 980948 - DNA, 33 bp, Homo sapien
aatgccagcgagacagtccatttgctcccctgg

SEQ ID NO: 980949 - DNA, 33 bp, Homo sapien; identical to SEQ ID NO: 980947

SEQ ID NO: 980950 - DNA, 33 bp, Homo sapien; identical to SEQ ID NO: 980948

SEQ ID NO: 980951 - DNA, 33 bp, Homo sapien
aatttcagtggttaaaataacatatcaacaatt

SEQ ID NO: 980952 - DNA, 33 bp, Homo sapien
aatttcagtggttaaagtaacatatcaacaatt

SEQ ID NO: 980953 - DNA, 33 bp, Homo sapien
ggtctagctgggaaaaagctaagtgccatggta

SEQ ID NO: 980954 - DNA, 33 bp, Homo sapien
ggtctagctgggaaaaggctaagtgccatggta

SEQ ID NO: 980955 - DNA, 33 bp, Homo sapien
ggttacttccaactctaacattattgtatgatt

SEQ ID NO: 980956 - DNA, 33 bp, Homo sapien
ggttacttccaactctgacattattgtatgatt

SEQ ID NO: 980957 - DNA, 33 bp, Homo sapien
tttggtactgcaatgagtatgttaactgatact

SEQ ID NO: 980958 - DNA, 33 bp, Homo sapien
tttggtactgcaatgattatgttaactgatact

SEQ ID NO: 980959 - DNA, 33 bp, Homo sapien
tgaagtttctagtttacgtgctatttgaaagat

SEQ ID NO: 980960 - DNA, 33 bp, Homo sapien
tgaagtttctagtttatgtgctatttgaaagat

SEQ ID NO: 980961 - DNA, 33 bp, Homo sapien
tgaaacttttaacttacgtgattgcctaattcc

SEQ ID NO: 980962 - DNA, 33 bp, Homo sapien
tgaaacttttaacttatgtgattgcctaattcc

SEQ ID NO: 980963 - DNA, 33 bp, Homo sapien
ggtaatacagcaacgaacaagagaggtatggct

SEQ ID NO: 980964 - DNA, 33 bp, Homo sapien
ggtaatacagcaacgagcaagagaggtatggct

SEQ ID NO: 980965 - DNA, 33 bp, Homo sapien
cagactcttccagtctgacagtaaaatagttct

SEQ ID NO: 980966 - DNA, 33 bp, Homo sapien
cagactcttccagtcttacagtaaaatagttct

SEQ ID NO: 980967 - DNA, 33 bp, Homo sapien
taattgtcacgtgataataaaatgtaaaacatt

SEQ ID NO: 980968 - DNA, 33 bp, Homo sapien
taattgtcacgtgatagtaaaatgtaaaacatt

SEQ ID NO: 980969 - DNA, 33 bp, Homo sapien
tgtagctttagagagacactgagctaccactaa

SEQ ID NO: 980970 - DNA, 33 bp, Homo sapien
tgtagctttagagagagactgagctaccactaa

SEQ ID NO: 980971 - DNA, 33 bp, Homo sapien
aactgagtgaaaaagaaactcatgcttcccctt

SEQ ID NO: 980972 - DNA, 33 bp, Homo sapien
aactgagtgaaaaagagactcatgcttcccctt

SEQ ID NO: 980973 - DNA, 33 bp, Homo sapien
atctcctgttaactgaaatttcccttcccagtt

SEQ ID NO: 980974 - DNA, 33 bp, Homo sapien
atctcctgttaactgagatttcccttcccagtt

SEQ ID NO: 980975 - DNA, 33 bp, Homo sapien
tctaaatctgctacaacagaaattcctacaact

SEQ ID NO: 980976 - DNA, 33 bp, Homo sapien
tctaaatctgctacaatagaaattcctacaact

SEQ ID NO: 980977 - DNA, 33 bp, Homo sapien
aagtcaaggttctaaacgtctaaaagtcactga

SEQ ID NO: 980978 - DNA, 33 bp, Homo sapien
aagtcaaggttctaaatgtctaaaagtcactga

SEQ ID NO: 980979 - DNA, 33 bp, Homo sapien
tataatcatctttcccaataatagcctgctctc

SEQ ID NO: 980980 - DNA, 33 bp, Homo sapien
tataatcatctttccccataatagcctgctctc

SEQ ID NO: 980981 - DNA, 33 bp, Homo sapien
atggcttagttagaagacacctcactgagaaag

SEQ ID NO: 980982 - DNA, 33 bp, Homo sapien
atggcttagttagaagtcacctcactgagaaag

SEQ ID NO: 980983 - DNA, 33 bp, Homo sapien
ggcattaaacgtattcccagtcattaaagttct

SEQ ID NO: 980984 - DNA, 33 bp, Homo sapien
ggcattaaacgtattctcagtcattaaagttct

SEQ ID NO: 980985 - DNA, 33 bp, Homo sapien
tttgagagtcatgtcacgttaatactaaaaaaa

SEQ ID NO: 980986 - DNA, 33 bp, Homo sapien
tttgagagtcatgtcatgttaatactaaaaaaa

SEQ ID NO: 980987 - DNA, 33 bp, Homo sapien
gactcattaagaaggactagactagttgggaag

SEQ ID NO: 980988 - DNA, 33 bp, Homo sapien
gactcattaagaaggattagactagttgggaag

SEQ ID NO: 980989 - DNA, 33 bp, Homo sapien
attgaaagagagattgaaatttattggaatgag

SEQ ID NO: 980990 - DNA, 33 bp, Homo sapien
attgaaagagagattggaatttattggaatgag

SEQ ID NO: 980991 - DNA, 33 bp, Homo sapien
ggattcagcagacctaggttctagttcaggctt

SEQ ID NO: 980992 - DNA, 33 bp, Homo sapien
ggattcagcagacctatgttctagttcaggctt

SEQ ID NO: 980993 - DNA, 33 bp, Homo sapien
ataattaatgaatcaccgcaaagaagttacagt

SEQ ID NO: 980994 - DNA, 33 bp, Homo sapien
ataattaatgaatcactgcaaagaagttacagt

SEQ ID NO: 980995 - DNA, 33 bp, Homo sapien
taaaactacagatagaagtggtagaagtgggag

SEQ ID NO: 980996 - DNA, 33 bp, Homo sapien
taaaactacagatagaggtggtagaagtgggag

SEQ ID NO: 980997 - DNA, 33 bp, Homo sapien
cagtaattatgcaaaacagcagaactaatgata

SEQ ID NO: 980998 - DNA, 33 bp, Homo sapien
cagtaattatgcaaaagagcagaactaatgata

SEQ ID NO: 980999 - DNA, 33 bp, Homo sapien
ggagtttggttaagagccatagtgtctcaggag

SEQ ID NO: 981000 - DNA, 33 bp, Homo sapien
ggagtttggttaagaggcatagtgtctcaggag

SEQ ID NO: 981001 - DNA, 33 bp, Homo sapien
aaggatgggaaaatgcactgaaatgatctaaga

SEQ ID NO: 981002 - DNA, 33 bp, Homo sapien
aaggatgggaaaatgcgctgaaatgatctaaga

SEQ ID NO: 981003 - DNA, 33 bp, Homo sapien
ctgaggcaagccagggaccacagtaatagaaaa

SEQ ID NO: 981004 - DNA, 33 bp, Homo sapien
ctgaggcaagccagggtccacagtaatagaaaa

SEQ ID NO: 981005 - DNA, 33 bp, Homo sapien
atcagtctggcttttaaaattacatcttccctc

SEQ ID NO: 981006 - DNA, 33 bp, Homo sapien
atcagtctggcttttacaattacatcttccctc

SEQ ID NO: 981007 - DNA, 33 bp, Homo sapien
tgcaaaaagcatcagaatacagttaaatgactg

SEQ ID NO: 981008 - DNA, 33 bp, Homo sapien
tgcaaaaagcatcagagtacagttaaatgactg

SEQ ID NO: 981009 - DNA, 33 bp, Homo sapien
agaagtcataccgtacaattggtcaaagtgacc

SEQ ID NO: 981010 - DNA, 33 bp, Homo sapien
agaagtcataccgtacgattggtcaaagtgacc

SEQ ID NO: 981011 - DNA, 33 bp, Homo sapien
actatcacactaagatcacaaacagataattag

SEQ ID NO: 981012 - DNA, 33 bp, Homo sapien
actatcacactaagattacaaacagataattag

SEQ ID NO: 981013 - DNA, 33 bp, Homo sapien
aacaaaaagtggagaacagatgtaactaggaca

SEQ ID NO: 981014 - DNA, 33 bp, Homo sapien
aacaaaaagtggagaatagatgtaactaggaca

SEQ ID NO: 981015 - DNA, 33 bp, Homo sapien
gtcaagcagcttttccactacatcgctggaaac

SEQ ID NO: 981016 - DNA, 33 bp, Homo sapien
gtcaagcagcttttccgctacatcgctggaaac

SEQ ID NO: 981017 - DNA, 33 bp, Homo sapien
catccatctattcccactgaaccgaaccttgct

SEQ ID NO: 981018 - DNA, 33 bp, Homo sapien
catccatctattcccattgaaccgaaccttgct

SEQ ID NO: 981019 - DNA, 33 bp, Homo sapien
gaatgcccttgaagtacgtgggcaggctctatg

SEQ ID NO: 981020 - DNA, 33 bp, Homo sapien
gaatgcccttgaagtaggtgggcaggctctatg

SEQ ID NO: 981021 - DNA, 33 bp, Homo sapien
cttagatgtggcctaccattccagtgatttctc

SEQ ID NO: 981022 - DNA, 33 bp, Homo sapien
cttagatgtggcctactattccagtgatttctc

SEQ ID NO: 981023 - DNA, 33 bp, Homo sapien
aaactgaaagggttccaaacactgctatttttc

SEQ ID NO: 981024 - DNA, 33 bp, Homo sapien
aaactgaaagggttcccaacactgctatttttc

SEQ ID NO: 981025 - DNA, 33 bp, Homo sapien
actgcaaagggaaaaaagtatctgacactttct

SEQ ID NO: 981026 - DNA, 33 bp, Homo sapien
actgcaaagggaaaaatgtatctgacactttct

SEQ ID NO: 981027 - DNA, 33 bp, Homo sapien
ttactagataagagtgaaataaacccttgaaaa

SEQ ID NO: 981028 - DNA, 33 bp, Homo sapien
ttactagataagagtgcaataaacccttgaaaa

SEQ ID NO: 981029 - DNA, 33 bp, Homo sapien
acagagagaaacctaactgcaaaacaaaatatc

SEQ ID NO: 981030 - DNA, 33 bp, Homo sapien
acagagagaaacctaattgcaaaacaaaatatc

SEQ ID NO: 981031 - DNA, 33 bp, Homo sapien
aattcccttctgaaaaaatccagtaaattctca

SEQ ID NO: 981032 - DNA, 33 bp, Homo sapien
aattcccttctgaaaagatccagtaaattctca

SEQ ID NO: 981033 - DNA, 33 bp, Homo sapien
cagccttcccattaccaggctctgagcaccagg

SEQ ID NO: 981034 - DNA, 33 bp, Homo sapien
cagccttcccattaccgggctctgagcaccagg

SEQ ID NO: 981035 - DNA, 33 bp, Homo sapien
ctgtaaaaagattctacgacatatagactgaaa

SEQ ID NO: 981036 - DNA, 33 bp, Homo sapien
ctgtaaaaagattctatgacatatagactgaaa

SEQ ID NO: 981037 - DNA, 33 bp, Homo sapien
atgacagatgttttaacggtgagtagaatgtta

SEQ ID NO: 981038 - DNA, 33 bp, Homo sapien
atgacagatgttttaatggtgagtagaatgtta

SEQ ID NO: 981039 - DNA, 33 bp, Homo sapien
atttctacagaaactacgatgtcatgaaagatt

SEQ ID NO: 981040 - DNA, 33 bp, Homo sapien
atttctacagaaactatgatgtcatgaaagatt

SEQ ID NO: 981041 - DNA, 33 bp, Homo sapien
tatcaaccctgccaacagatttctagcctccag

SEQ ID NO: 981042 - DNA, 33 bp, Homo sapien
tatcaaccctgccaacggatttctagcctccag

SEQ ID NO: 981043 - DNA, 33 bp, Homo sapien
gtttttgctctccaacccccaaatcaaaatgtt

SEQ ID NO: 981044 - DNA, 33 bp, Homo sapien
gtttttgctctccaactcccaaatcaaaatgtt

SEQ ID NO: 981045 - DNA, 33 bp, Homo sapien
tgagccagtgtgctgcaccggaattgaaatatt

SEQ ID NO: 981046 - DNA, 33 bp, Homo sapien
tgagccagtgtgctgcgccggaattgaaatatt

SEQ ID NO: 981047 - DNA, 33 bp, Homo sapien
ataattaatgcattaccagaacacttaatagaa

SEQ ID NO: 981048 - DNA, 33 bp, Homo sapien
ataattaatgcattactagaacacttaatagaa

SEQ ID NO: 981049 - DNA, 33 bp, Homo sapien
aggacaatggctgggtcaccaggtatgtacatt

SEQ ID NO: 981050 - DNA, 33 bp, Homo sapien
aggacaatggctgggttaccaggtatgtacatt

SEQ ID NO: 981051 - DNA, 33 bp, Homo sapien
ctaaaatcagacagacaattgtggtttatgtgc

SEQ ID NO: 981052 - DNA, 33 bp, Homo sapien
ctaaaatcagacagaccattgtggtttatgtgc

SEQ ID NO: 981053 - DNA, 33 bp, Homo sapien
atctctcctccagaatcaccaggtcctgcacag

SEQ ID NO: 981054 - DNA, 33 bp, Homo sapien
atctctcctccagaattaccaggtcctgcacag

SEQ ID NO: 981055 - DNA, 33 bp, Homo sapien
tccttctctcaaataaatcaaggatcttagaac

SEQ ID NO: 981056 - DNA, 33 bp, Homo sapien
tccttctctcaaataagtcaaggatcttagaac

SEQ ID NO: 981057 - DNA, 33 bp, Homo sapien
ttgctgatttcaaataaagtaatcccatggcaa

SEQ ID NO: 981058 - DNA, 33 bp, Homo sapien
ttgctgatttcaaatacagtaatcccatggcaa

SEQ ID NO: 981059 - DNA, 33 bp, Homo sapien
gtgaggttcagaatgcaatttcttatctgtcat

SEQ ID NO: 981060 - DNA, 33 bp, Homo sapien
gtgaggttcagaatgctatttcttatctgtcat

SEQ ID NO: 981061 - DNA, 33 bp, Homo sapien
aaactatacattgttacggctagagtattacag

SEQ ID NO: 981062 - DNA, 33 bp, Homo sapien
aaactatacattgttatggctagagtattacag

SEQ ID NO: 981063 - DNA, 33 bp, Homo sapien
tagttttcaaaattcaacttttctgtcaactca

SEQ ID NO: 981064 - DNA, 33 bp, Homo sapien
tagttttcaaaattcagcttttctgtcaactca

SEQ ID NO: 981065 - DNA, 33 bp, Homo sapien
gctttgcttcgggtcaaagagtgaagtgcgtgt

SEQ ID NO: 981066 - DNA, 33 bp, Homo sapien
gctttgcttcgggtcagagagtgaagtgcgtgt

SEQ ID NO: 981067 - DNA, 33 bp, Homo sapien
cagcaccttgttgacaatctcactgcttatcag

SEQ ID NO: 981068 - DNA, 33 bp, Homo sapien
cagcaccttgttgacagtctcactgcttatcag

SEQ ID NO: 981069 - DNA, 33 bp, Homo sapien
tccaaatgtcctcatgccactttgtagtcagca

SEQ ID NO: 981070 - DNA, 33 bp, Homo sapien
tccaaatgtcctcatggcactttgtagtcagca

SEQ ID NO: 981071 - DNA, 33 bp, Homo sapien
aagtggaggccccaaaaatgttcagtgatttac

SEQ ID NO: 981072 - DNA, 33 bp, Homo sapien
aagtggaggccccaaagatgttcagtgatttac

SEQ ID NO: 981073 - DNA, 33 bp, Homo sapien
agaaatgttttccagacggtctttcactttata

SEQ ID NO: 981074 - DNA, 33 bp, Homo sapien
agaaatgttttccagatggtctttcactttata

SEQ ID NO: 981075 - DNA, 33 bp, Homo sapien
agctgtgataatccaaagcaaagaatgttaact

SEQ ID NO: 981076 - DNA, 33 bp, Homo sapien
agctgtgataatccaacgcaaagaatgttaact

SEQ ID NO: 981077 - DNA, 33 bp, Homo sapien
gtgctatcaggaagacactatagcatattgcac

SEQ ID NO: 981078 - DNA, 33 bp, Homo sapien
gtgctatcaggaagacgctatagcatattgcac

SEQ ID NO: 981079 - DNA, 33 bp, Homo sapien
catagcacctggtggacgtaagtattgcctaga

SEQ ID NO: 981080 - DNA, 33 bp, Homo sapien
catagcacctggtggatgtaagtattgcctaga

SEQ ID NO: 981081 - DNA, 33 bp, Homo sapien
tgaaaaccaaaagcccacatatcagatccccac

SEQ ID NO: 981082 - DNA, 33 bp, Homo sapien
tgaaaaccaaaagcccgcatatcagatccccac

SEQ ID NO: 981083 - DNA, 33 bp, Homo sapien
agaatctggttataaactgctctcagctaaaag

SEQ ID NO: 981084 - DNA, 33 bp, Homo sapien
agaatctggttataaattgctctcagctaaaag

SEQ ID NO: 981085 - DNA, 33 bp, Homo sapien
cttaagctgaactccaatggaagcaaagactga

SEQ ID NO: 981086 - DNA, 33 bp, Homo sapien
cttaagctgaactccactggaagcaaagactga

SEQ ID NO: 981087 - DNA, 33 bp, Homo sapien
tatttggtgtatcttaagtaggataataaacag

SEQ ID NO: 981088 - DNA, 33 bp, Homo sapien
tatttggtgtatcttaggtaggataataaacag

SEQ ID NO: 981089 - DNA, 33 bp, Homo sapien
actgcacttggcttaacagcctgcttcattcac

SEQ ID NO: 981090 - DNA, 33 bp, Homo sapien
actgcacttggcttaatagcctgcttcattcac

SEQ ID NO: 981091 - DNA, 33 bp, Homo sapien
gcttatataccttctaagccatatgtccatgtg

SEQ ID NO: 981092 - DNA, 33 bp, Homo sapien
gcttatataccttctacgccatatgtccatgtg

SEQ ID NO: 981093 - DNA, 33 bp, Homo sapien
gttgctaagtagtatgaaattgtatgaatatcc

SEQ ID NO: 981094 - DNA, 33 bp, Homo sapien
gttgctaagtagtatggaattgtatgaatatcc

SEQ ID NO: 981095 - DNA, 33 bp, Homo sapien
aggtaggtatttgagaaccacatatgaatatta

SEQ ID NO: 981096 - DNA, 33 bp, Homo sapien
aggtaggtatttgagagccacatatgaatatta

SEQ ID NO: 981097 - DNA, 33 bp, Homo sapien
caaggtaagtatagaacgtgatttctcacctaa

SEQ ID NO: 981098 - DNA, 33 bp, Homo sapien
caaggtaagtatagaatgtgatttctcacctaa

SEQ ID NO: 981099 - DNA, 33 bp, Homo sapien
actcttcaatggccacagagttcacccctaatc

SEQ ID NO: 981100 - DNA, 33 bp, Homo sapien
actcttcaatggccacggagttcacccctaatc

SEQ ID NO: 981101 - DNA, 33 bp, Homo sapien
cagaaaaagtaaagaactgcatacatgatccca

SEQ ID NO: 981102 - DNA, 33 bp, Homo sapien
cagaaaaagtaaagaattgcatacatgatccca

SEQ ID NO: 981103 - DNA, 33 bp, Homo sapien
catcctttcagctcaactgtctgtttctaatcc

SEQ ID NO: 981104 - DNA, 33 bp, Homo sapien
catcctttcagctcaagtgtctgtttctaatcc

SEQ ID NO: 981105 - DNA, 33 bp, Homo sapien
ttgttttaggcctttccacagtgagggaggtca

SEQ ID NO: 981106 - DNA, 33 bp, Homo sapien
ttgttttaggcctttctacagtgagggaggtca

SEQ ID NO: 981107 - DNA, 33 bp, Homo sapien
gacagaaaaattcaaacacagctgattatactt

SEQ ID NO: 981108 - DNA, 33 bp, Homo sapien
gacagaaaaattcaaagacagctgattatactt

SEQ ID NO: 981109 - DNA, 33 bp, Homo sapien
ggccagaaccaccttacagatggagagaattaa

SEQ ID NO: 981110 - DNA, 33 bp, Homo sapien
ggccagaaccaccttagagatggagagaattaa

SEQ ID NO: 981111 - DNA, 33 bp, Homo sapien
tatctagttgaaagtactacattttctttaaac

SEQ ID NO: 981112 - DNA, 33 bp, Homo sapien
tatctagttgaaagtattacattttctttaaac

SEQ ID NO: 981113 - DNA, 33 bp, Homo sapien
actaagggaaggacaacgaagagagtaagaagt

SEQ ID NO: 981114 - DNA, 33 bp, Homo sapien
actaagggaaggacaatgaagagagtaagaagt

SEQ ID NO: 981115 - DNA, 33 bp, Homo sapien
ttgattttaacttgacaccattgtgcattgtaa

SEQ ID NO: 981116 - DNA, 33 bp, Homo sapien
ttgattttaacttgacgccattgtgcattgtaa

SEQ ID NO: 981117 - DNA, 33 bp, Homo sapien
ctagattgattggtaacgtcatcataatatata

SEQ ID NO: 981118 - DNA, 33 bp, Homo sapien
ctagattgattggtaatgtcatcataatatata

SEQ ID NO: 981119 - DNA, 33 bp, Homo sapien
atagaaatgagtaagacaggatcactgccttta

SEQ ID NO: 981120 - DNA, 33 bp, Homo sapien
atagaaatgagtaagataggatcactgccttta

SEQ ID NO: 981121 - DNA, 33 bp, Homo sapien
gattgtacatctagtaacattgctttctttcac

SEQ ID NO: 981122 - DNA, 33 bp, Homo sapien
gattgtacatctagtagcattgctttctttcac

SEQ ID NO: 981123 - DNA, 33 bp, Homo sapien
ctaaggacacattgaaataattgaaaggtattt

SEQ ID NO: 981124 - DNA, 33 bp, Homo sapien
ctaaggacacattgaagtaattgaaaggtattt

SEQ ID NO: 981125 - DNA, 33 bp, Homo sapien
ctgtaacagaaaacccaaaatctcatggtggaa

SEQ ID NO: 981126 - DNA, 33 bp, Homo sapien
ctgtaacagaaaacccgaaatctcatggtggaa

SEQ ID NO: 981127 - DNA, 33 bp, Homo sapien
acctagtattagatctcaaccaagtttacctat

SEQ ID NO: 981128 - DNA, 33 bp, Homo sapien
acctagtattagatcttaaccaagtttacctat

SEQ ID NO: 981129 - DNA, 33 bp, Homo sapien
tctgggtcatatctaaaagtgttccagcttgaa

SEQ ID NO: 981130 - DNA, 33 bp, Homo sapien
tctgggtcatatctaagagtgttccagcttgaa

SEQ ID NO: 981131 - DNA, 33 bp, Homo sapien
tagatatgacccagaaccttgataccaaataat

SEQ ID NO: 981132 - DNA, 33 bp, Homo sapien
tagatatgacccagaagcttgataccaaataat

SEQ ID NO: 981133 - DNA, 33 bp, Homo sapien
ctcaatattgcagaaaatatctgtggatgttta

SEQ ID NO: 981134 - DNA, 33 bp, Homo sapien
ctcaatattgcagaaagtatctgtggatgttta

SEQ ID NO: 981135 - DNA, 33 bp, Homo sapien
aagagcataaaacaccaggatagcagatagcat

SEQ ID NO: 981136 - DNA, 33 bp, Homo sapien
aagagcataaaacacccggatagcagatagcat

SEQ ID NO: 981137 - DNA, 33 bp, Homo sapien
ggtaaataaatcctagaaaacaggtaggctctt

SEQ ID NO: 981138 - DNA, 33 bp, Homo sapien
ggtaaataaatcctagcaaacaggtaggctctt

SEQ ID NO: 981139 - DNA, 33 bp, Homo sapien
gactcttacctcaaacacttgaagagcctacct

SEQ ID NO: 981140 - DNA, 33 bp, Homo sapien
gactcttacctcaaactcttgaagagcctacct

SEQ ID NO: 981141 - DNA, 33 bp, Homo sapien
attaggatcccttacaggaccatctaagctcta

SEQ ID NO: 981142 - DNA, 33 bp, Homo sapien
attaggatcccttacatgaccatctaagctcta

SEQ ID NO: 981143 - DNA, 33 bp, Homo sapien
ttggaacaggagttcacgaggacacaaatgaat

SEQ ID NO: 981144 - DNA, 33 bp, Homo sapien
ttggaacaggagttcatgaggacacaaatgaat

SEQ ID NO: 981145 - DNA, 33 bp, Homo sapien
aggaggtcaaacgaaaaaaggactgaaaagtct

SEQ ID NO: 981146 - DNA, 33 bp, Homo sapien
aggaggtcaaacgaaataaggactgaaaagtct

SEQ ID NO: 981147 - DNA, 33 bp, Homo sapien
ttttccaaatcttccacaccgtacaccagaact

SEQ ID NO: 981148 - DNA, 33 bp, Homo sapien
ttttccaaatcttccataccgtacaccagaact

SEQ ID NO: 981149 - DNA, 33 bp, Homo sapien
catacaagtcaaatcacggaatagcatttgtgc

SEQ ID NO: 981150 - DNA, 33 bp, Homo sapien
catacaagtcaaatcatggaatagcatttgtgc

SEQ ID NO: 981151 - DNA, 33 bp, Homo sapien
tcccatcactacctgaaaaatgggagaaagaaa

SEQ ID NO: 981152 - DNA, 33 bp, Homo sapien
tcccatcactacctgagaaatgggagaaagaaa

SEQ ID NO: 981153 - DNA, 33 bp, Homo sapien
agcccactagggatgcaagatagatgcagggct

SEQ ID NO: 981154 - DNA, 33 bp, Homo sapien
agcccactagggatgcgagatagatgcagggct

SEQ ID NO: 981155 - DNA, 33 bp, Homo sapien
tccacatcaatgactcagactttaatctttgcc

SEQ ID NO: 981156 - DNA, 33 bp, Homo sapien
tccacatcaatgactcggactttaatctttgcc

SEQ ID NO: 981157 - DNA, 33 bp, Homo sapien
catggtaagagaaagtaaatgtcctttgtctca

SEQ ID NO: 981158 - DNA, 33 bp, Homo sapien
catggtaagagaaagtgaatgtcctttgtctca

SEQ ID NO: 981159 - DNA, 33 bp, Homo sapien
aggtattttaagcaaaaaattatggtgcaaaag

SEQ ID NO: 981160 - DNA, 33 bp, Homo sapien
aggtattttaagcaaagaattatggtgcaaaag

SEQ ID NO: 981161 - DNA, 33 bp, Homo sapien
agaatttagcagcatcacaaactccctatccat

SEQ ID NO: 981162 - DNA, 33 bp, Homo sapien
agaatttagcagcatcgcaaactccctatccat

SEQ ID NO: 981163 - DNA, 33 bp, Homo sapien
actctggtccatttagaattggcttatgctctt

SEQ ID NO: 981164 - DNA, 33 bp, Homo sapien
actctggtccatttagtattggcttatgctctt

SEQ ID NO: 981165 - DNA, 33 bp, Homo sapien
attgggccatctccacagtatttcctttcctct

SEQ ID NO: 981166 - DNA, 33 bp, Homo sapien
attgggccatctccacggtatttcctttcctct

SEQ ID NO: 981167 - DNA, 33 bp, Homo sapien
aaagatgtagagaacactgacaggcagaagtgg

SEQ ID NO: 981168 - DNA, 33 bp, Homo sapien
aaagatgtagagaacattgacaggcagaagtgg

SEQ ID NO: 981169 - DNA, 33 bp, Homo sapien
ggagctttgtgcttaaaatagagatggatttcc

SEQ ID NO: 981170 - DNA, 33 bp, Homo sapien
ggagctttgtgcttaacatagagatggatttcc

SEQ ID NO: 981171 - DNA, 33 bp, Homo sapien
tgtgtggtttctttagcagagtctgggtagttg

SEQ ID NO: 981172 - DNA, 33 bp, Homo sapien
tgtgtggtttctttaggagagtctgggtagttg

SEQ ID NO: 981173 - DNA, 33 bp, Homo sapien
cttcatttagattaaactgttgcctggtgcact

SEQ ID NO: 981174 - DNA, 33 bp, Homo sapien
cttcatttagattaaattgttgcctggtgcact

SEQ ID NO: 981175 - DNA, 33 bp, Homo sapien
gagtggtagaaggacacagcagaaggtaagacc

SEQ ID NO: 981176 - DNA, 33 bp, Homo sapien
gagtggtagaaggacatagcagaaggtaagacc

SEQ ID NO: 981177 - DNA, 33 bp, Homo sapien
aaagccctagaagtagacaaaccctagcgtgta

SEQ ID NO: 981178 - DNA, 33 bp, Homo sapien
aaagccctagaagtaggcaaaccctagcgtgta

SEQ ID NO: 981179 - DNA, 33 bp, Homo sapien
aaatgtaaatcttcaaaccactgacttcataat

SEQ ID NO: 981180 - DNA, 33 bp, Homo sapien
aaatgtaaatcttcaagccactgacttcataat

SEQ ID NO: 981181 - DNA, 33 bp, Homo sapien
caccttattccacctgaaagtatgttatgtttg

SEQ ID NO: 981182 - DNA, 33 bp, Homo sapien
caccttattccacctgcaagtatgttatgtttg

SEQ ID NO: 981183 - DNA, 33 bp, Homo sapien
agcttaaccctttggtaaatcagcgttattcca

SEQ ID NO: 981184 - DNA, 33 bp, Homo sapien
agcttaaccctttggtgaatcagcgttattcca

SEQ ID NO: 981185 - DNA, 33 bp, Homo sapien
gcatgggtgttattaacgccagcttaacccttt

SEQ ID NO: 981186 - DNA, 33 bp, Homo sapien
gcatgggtgttattaatgccagcttaacccttt

SEQ ID NO: 981187 - DNA, 33 bp, Homo sapien
ctatttctcttcttccactgagtcaacgtcaaa

SEQ ID NO: 981188 - DNA, 33 bp, Homo sapien
ctatttctcttcttccgctgagtcaacgtcaaa

SEQ ID NO: 981189 - DNA, 33 bp, Homo sapien
atcctagagacaaagccgacaggcataccttat

SEQ ID NO: 981190 - DNA, 33 bp, Homo sapien
atcctagagacaaagctgacaggcataccttat

SEQ ID NO: 981191 - DNA, 33 bp, Homo sapien
gctgccctcaacaccagtagtagcacttctgaa

SEQ ID NO: 981192 - DNA, 33 bp, Homo sapien
gctgccctcaacaccattagtagcacttctgaa

SEQ ID NO: 981193 - DNA, 33 bp, Homo sapien
aaaatgcagaacaacaagaaagtaaatgtcaca

SEQ ID NO: 981194 - DNA, 33 bp, Homo sapien
aaaatgcagaacaacaggaaagtaaatgtcaca

SEQ ID NO: 981195 - DNA, 33 bp, Homo sapien
tgtaatggcagtcaaaacctcaacaacaaggtt

SEQ ID NO: 981196 - DNA, 33 bp, Homo sapien
tgtaatggcagtcaaagcctcaacaacaaggtt

SEQ ID NO: 981197 - DNA, 33 bp, Homo sapien
tgctcaggattagacaccttccttcagcaaagg

SEQ ID NO: 981198 - DNA, 33 bp, Homo sapien
tgctcaggattagacagcttccttcagcaaagg

SEQ ID NO: 981199 - DNA, 33 bp, Homo sapien
tgttgggctccacaaaactggctgagatccagt

SEQ ID NO: 981200 - DNA, 33 bp, Homo sapien
tgttgggctccacaaagctggctgagatccagt

SEQ ID NO: 981201 - DNA, 33 bp, Homo sapien
atggttgcacaataacaaaatcatcaaatgaca

SEQ ID NO: 981202 - DNA, 33 bp, Homo sapien
atggttgcacaataacgaaatcatcaaatgaca

SEQ ID NO: 981203 - DNA, 33 bp, Homo sapien
ccaatggctaccaacaactagactaccaatagc

SEQ ID NO: 981204 - DNA, 33 bp, Homo sapien
ccaatggctaccaacagctagactaccaatagc

SEQ ID NO: 981205 - DNA, 33 bp, Homo sapien
caatactgtgttcatccactcctgaataacaat

SEQ ID NO: 981206 - DNA, 33 bp, Homo sapien
caatactgtgttcatctactcctgaataacaat

SEQ ID NO: 981207 - DNA, 33 bp, Homo sapien
ttagccttgtcagaaaaaaacagatgcagcatg

SEQ ID NO: 981208 - DNA, 33 bp, Homo sapien
ttagccttgtcagaaataaacagatgcagcatg

SEQ ID NO: 981209 - DNA, 33 bp, Homo sapien
tgacaggaaagttgcaatgagcaatagatgtga

SEQ ID NO: 981210 - DNA, 33 bp, Homo sapien
tgacaggaaagttgcagtgagcaatagatgtga

SEQ ID NO: 981211 - DNA, 33 bp, Homo sapien
cgtatctgagtggggccagtaaagacatgggaa

SEQ ID NO: 981212 - DNA, 33 bp, Homo sapien
cgtatctgagtggggctagtaaagacatgggaa

SEQ ID NO: 981213 - DNA, 33 bp, Homo sapien
gactacacccttgtcaaaatcatccttctctca

SEQ ID NO: 981214 - DNA, 33 bp, Homo sapien
gactacacccttgtcacaatcatccttctctca

SEQ ID NO: 981215 - DNA, 33 bp, Homo sapien
gtggcctgttagaccaacgaccaatagggatga

SEQ ID NO: 981216 - DNA, 33 bp, Homo sapien
gtggcctgttagaccagcgaccaatagggatga

SEQ ID NO: 981217 - DNA, 33 bp, Homo sapien
accctttctgttgaagacatttatctccacatt

SEQ ID NO: 981218 - DNA, 33 bp, Homo sapien
accctttctgttgaaggcatttatctccacatt

SEQ ID NO: 981219 - DNA, 33 bp, Homo sapien
aaagtgacgaggacaccggagctggcaggcaag

SEQ ID NO: 981220 - DNA, 33 bp, Homo sapien
aaagtgacgaggacactggagctggcaggcaag

SEQ ID NO: 981221 - DNA, 33 bp, Homo sapien
aaagcctgctggagtccgaatctggtagcagcc

SEQ ID NO: 981222 - DNA, 33 bp, Homo sapien
aaagcctgctggagtctgaatctggtagcagcc

SEQ ID NO: 981223 - DNA, 33 bp, Homo sapien
ttcaagatcaaatggacgtgatttgccttgtgg

SEQ ID NO: 981224 - DNA, 33 bp, Homo sapien
ttcaagatcaaatggatgtgatttgccttgtgg

SEQ ID NO: 981225 - DNA, 33 bp, Homo sapien
tcatgattggttaaaaagtatacacttccctgt

SEQ ID NO: 981226 - DNA, 33 bp, Homo sapien
tcatgattggttaaaacgtatacacttccctgt

SEQ ID NO: 981227 - DNA, 33 bp, Homo sapien
actagccagtacaaaacgtggtaacatcatgcc

SEQ ID NO: 981228 - DNA, 33 bp, Homo sapien
actagccagtacaaaatgtggtaacatcatgcc

SEQ ID NO: 981229 - DNA, 33 bp, Homo sapien
cagaacacaatactgacacagtctatctttagg

SEQ ID NO: 981230 - DNA, 33 bp, Homo sapien
cagaacacaatactgagacagtctatctttagg

SEQ ID NO: 981231 - DNA, 33 bp, Homo sapien
atgaatcatttgaatgaagcctgaaaaatgaac

SEQ ID NO: 981232 - DNA, 33 bp, Homo sapien
atgaatcatttgaatggagcctgaaaaatgaac

SEQ ID NO: 981233 - DNA, 33 bp, Homo sapien
tggagcacaaaggaatgaacctcatcccaaagt

SEQ ID NO: 981234 - DNA, 33 bp, Homo sapien
tggagcacaaaggaattaacctcatcccaaagt

SEQ ID NO: 981235 - DNA, 33 bp, Homo sapien
aaactgagaacaaacactggaagccaggaaaca

SEQ ID NO: 981236 - DNA, 33 bp, Homo sapien
aaactgagaacaaacattggaagccaggaaaca

SEQ ID NO: 981237 - DNA, 33 bp, Homo sapien
aaaaagggcattaaaaaaacacagcaattccaa

SEQ ID NO: 981238 - DNA, 33 bp, Homo sapien
aaaaagggcattaaaagaacacagcaattccaa

SEQ ID NO: 981239 - DNA, 33 bp, Homo sapien
gagtgtaataaggatacgtaaagaattctgaat

SEQ ID NO: 981240 - DNA, 33 bp, Homo sapien
gagtgtaataaggatatgtaaagaattctgaat

SEQ ID NO: 981241 - DNA, 33 bp, Homo sapien
atgtatttcttctctcaccactggaaatgttga

SEQ ID NO: 981242 - DNA, 33 bp, Homo sapien
atgtatttcttctctcgccactggaaatgttga

SEQ ID NO: 981243 - DNA, 33 bp, Homo sapien
tggagaatctttcagaaacgggaaaagaagatg

SEQ ID NO: 981244 - DNA, 33 bp, Homo sapien
tggagaatctttcagacacgggaaaagaagatg

SEQ ID NO: 981245 - DNA, 33 bp, Homo sapien
aaaaacaattttctaaatgacttgtagatagga

SEQ ID NO: 981246 - DNA, 33 bp, Homo sapien
aaaaacaattttctaactgacttgtagatagga

SEQ ID NO: 981247 - DNA, 33 bp, Homo sapien
taatagctaccataaacctgaaagtttgccttt

SEQ ID NO: 981248 - DNA, 33 bp, Homo sapien
taatagctaccataaatctgaaagtttgccttt

SEQ ID NO: 981249 - DNA, 33 bp, Homo sapien
ctggaagtctgccttcactatttatcacttaag

SEQ ID NO: 981250 - DNA, 33 bp, Homo sapien
ctggaagtctgccttcgctatttatcacttaag

SEQ ID NO: 981251 - DNA, 33 bp, Homo sapien
cctgttgctgtagccaaattcactgttgtacga

SEQ ID NO: 981252 - DNA, 33 bp, Homo sapien
cctgttgctgtagccatattcactgttgtacga

SEQ ID NO: 981253 - DNA, 33 bp, Homo sapien
gagaaggagctgaatccaggcctaagaaatctc

SEQ ID NO: 981254 - DNA, 33 bp, Homo sapien
gagaaggagctgaatcgaggcctaagaaatctc

SEQ ID NO: 981255 - DNA, 33 bp, Homo sapien
tgtctaacctctttcaagctatcacacaagtaa

SEQ ID NO: 981256 - DNA, 33 bp, Homo sapien
tgtctaacctctttcaggctatcacacaagtaa

SEQ ID NO: 981257 - DNA, 33 bp, Homo sapien
tttccacaaattaggaacaccaagctcttctca

SEQ ID NO: 981258 - DNA, 33 bp, Homo sapien
tttccacaaattaggatcaccaagctcttctca

SEQ ID NO: 981259 - DNA, 33 bp, Homo sapien
gagctcaagctttctaagaaataggaactctat

SEQ ID NO: 981260 - DNA, 33 bp, Homo sapien
gagctcaagctttctaggaaataggaactctat

SEQ ID NO: 981261 - DNA, 33 bp, Homo sapien
ggaatttggagaaaaaaagtagcatgataagga

SEQ ID NO: 981262 - DNA, 33 bp, Homo sapien
ggaatttggagaaaaatagtagcatgataagga

SEQ ID NO: 981263 - DNA, 33 bp, Homo sapien
atgatcttagccctttcaaacgtatggaaacgt

SEQ ID NO: 981264 - DNA, 33 bp, Homo sapien
atgatcttagccctttgaaacgtatggaaacgt

SEQ ID NO: 981265 - DNA, 33 bp, Homo sapien
tcagagaaagagaaaactcagagataacttcaa

SEQ ID NO: 981266 - DNA, 33 bp, Homo sapien
tcagagaaagagaaaagtcagagataacttcaa

SEQ ID NO: 981267 - DNA, 33 bp, Homo sapien
taaggtggaaaaggacacgtctgcttcagggaa

SEQ ID NO: 981268 - DNA, 33 bp, Homo sapien
taaggtggaaaaggactcgtctgcttcagggaa

SEQ ID NO: 981269 - DNA, 33 bp, Homo sapien
gagttaccttgcttcaagaaaggatcacaagtt

SEQ ID NO: 981270 - DNA, 33 bp, Homo sapien
gagttaccttgcttcaggaaaggatcacaagtt

SEQ ID NO: 981271 - DNA, 33 bp, Homo sapien
cttctttcctgaattgcacttgatggtagagcc

SEQ ID NO: 981272 - DNA, 33 bp, Homo sapien
cttctttcctgaattgtacttgatggtagagcc

SEQ ID NO: 981273 - DNA, 33 bp, Homo sapien
attacagttgaccatcacaggaaacatcaaggc

SEQ ID NO: 981274 - DNA, 33 bp, Homo sapien
attacagttgaccatcgcaggaaacatcaaggc

SEQ ID NO: 981275 - DNA, 33 bp, Homo sapien
agaaggccccctgtgaacctggtatttgtacaa

SEQ ID NO: 981276 - DNA, 33 bp, Homo sapien
agaaggccccctgtgagcctggtatttgtacaa

SEQ ID NO: 981277 - DNA, 33 bp, Homo sapien
aggactcatcctaaacccagaagataggagacc

SEQ ID NO: 981278 - DNA, 33 bp, Homo sapien
aggactcatcctaaactcagaagataggagacc

SEQ ID NO: 981279 - DNA, 33 bp, Homo sapien
accttccaggtgtcagcatgtaaaagggaagat

SEQ ID NO: 981280 - DNA, 33 bp, Homo sapien
accttccaggtgtcaggatgtaaaagggaagat

SEQ ID NO: 981281 - DNA, 33 bp, Homo sapien
taagtttcttcaaggaggctttccttttcattg

SEQ ID NO: 981282 - DNA, 33 bp, Homo sapien
taagtttcttcaaggatgctttccttttcattg

SEQ ID NO: 981283 - DNA, 33 bp, Homo sapien
caggttcaattttcaacgcacttggcagccctt

SEQ ID NO: 981284 - DNA, 33 bp, Homo sapien
caggttcaattttcaatgcacttggcagccctt

SEQ ID NO: 981285 - DNA, 33 bp, Homo sapien
ccatgcctggccaagacataggttttaaaaagc

SEQ ID NO: 981286 - DNA, 33 bp, Homo sapien
ccatgcctggccaagatataggttttaaaaagc

SEQ ID NO: 981287 - DNA, 33 bp, Homo sapien
ctattaacattgtgccagatgatatgctttaag

SEQ ID NO: 981288 - DNA, 33 bp, Homo sapien
ctattaacattgtgccggatgatatgctttaag

SEQ ID NO: 981289 - DNA, 33 bp, Homo sapien
tactgaaaaacatggacggtgagccaggttagc

SEQ ID NO: 981290 - DNA, 33 bp, Homo sapien
tactgaaaaacatggatggtgagccaggttagc

SEQ ID NO: 981291 - DNA, 33 bp, Homo sapien
tcactttatttatacaaacccatactactgaac

SEQ ID NO: 981292 - DNA, 33 bp, Homo sapien
tcactttatttatacatacccatactactgaac

SEQ ID NO: 981293 - DNA, 33 bp, Homo sapien
gcaaattgctgctagggaatatacaaacagcct

SEQ ID NO: 981294 - DNA, 33 bp, Homo sapien
gcaaattgctgctaggtaatatacaaacagcct

SEQ ID NO: 981295 - DNA, 33 bp, Homo sapien
gcaaaactgttgttggcaagattaggctgtcac

SEQ ID NO: 981296 - DNA, 33 bp, Homo sapien
gcaaaactgttgttggtaagattaggctgtcac

SEQ ID NO: 981297 - DNA, 33 bp, Homo sapien
tataagacaaattccaagaaggatattctacaa

SEQ ID NO: 981298 - DNA, 33 bp, Homo sapien
tataagacaaattccaggaaggatattctacaa

SEQ ID NO: 981299 - DNA, 33 bp, Homo sapien
aatagaggaaactgtgcattatatggaaaccct

SEQ ID NO: 981300 - DNA, 33 bp, Homo sapien
aatagaggaaactgtggattatatggaaaccct

SEQ ID NO: 981301 - DNA, 33 bp, Homo sapien
ttatttataagcaaaacccaaatatttgaatga

SEQ ID NO: 981302 - DNA, 33 bp, Homo sapien
ttatttataagcaaaatccaaatatttgaatga

SEQ ID NO: 981303 - DNA, 33 bp, Homo sapien
cctgcagtaaacgactcagacccatgaaaaaaa

SEQ ID NO: 981304 - DNA, 33 bp, Homo sapien
cctgcagtaaacgactgagacccatgaaaaaaa

SEQ ID NO: 981305 - DNA, 33 bp, Homo sapien
ctgcaggatttcatcaagatcattgaaagtcct

SEQ ID NO: 981306 - DNA, 33 bp, Homo sapien
ctgcaggatttcatcaggatcattgaaagtcct

SEQ ID NO: 981307 - DNA, 33 bp, Homo sapien
aacacagaccaatacaagtaaagacagagaaag

SEQ ID NO: 981308 - DNA, 33 bp, Homo sapien
aacacagaccaatacaggtaaagacagagaaag

SEQ ID NO: 981309 - DNA, 33 bp, Homo sapien
gatgacatcaggaaaacaccactctatggaaat

SEQ ID NO: 981310 - DNA, 33 bp, Homo sapien
gatgacatcaggaaaataccactctatggaaat

SEQ ID NO: 981311 - DNA, 33 bp, Homo sapien
agttttctcaatcatgcagtttttcagtgagct

SEQ ID NO: 981312 - DNA, 33 bp, Homo sapien
agttttctcaatcatggagtttttcagtgagct

SEQ ID NO: 981313 - DNA, 33 bp, Homo sapien
caagcaacagctgaaactgatattgtagagggg

SEQ ID NO: 981314 - DNA, 33 bp, Homo sapien
caagcaacagctgaaattgatattgtagagggg

SEQ ID NO: 981315 - DNA, 33 bp, Homo sapien
agcaaacgcgctgcgcaaaaggtaggtttccaa

SEQ ID NO: 981316 - DNA, 33 bp, Homo sapien
agcaaacgcgctgcgcgaaaggtaggtttccaa

SEQ ID NO: 981317 - DNA, 33 bp, Homo sapien
agaaatagctcttttcccgacagtacaactgga

SEQ ID NO: 981318 - DNA, 33 bp, Homo sapien
agaaatagctcttttctcgacagtacaactgga

SEQ ID NO: 981319 - DNA, 33 bp, Homo sapien
agcctgcagcaggagcaaacatgtgagtgagtg

SEQ ID NO: 981320 - DNA, 33 bp, Homo sapien
agcctgcagcaggagcgaacatgtgagtgagtg

SEQ ID NO: 981321 - DNA, 33 bp, Homo sapien
ttagtttttatttacaaggtgctgctctctatt

SEQ ID NO: 981322 - DNA, 33 bp, Homo sapien
ttagtttttatttacatggtgctgctctctatt

SEQ ID NO: 981323 - DNA, 33 bp, Homo sapien
ctcacatgcccacttacaataaagacccactct

SEQ ID NO: 981324 - DNA, 33 bp, Homo sapien
ctcacatgcccacttagaataaagacccactct

SEQ ID NO: 981325 - DNA, 33 bp, Homo sapien
gctatgcacaaagcaccatgttagttaatacca

SEQ ID NO: 981326 - DNA, 33 bp, Homo sapien
gctatgcacaaagcactatgttagttaatacca

SEQ ID NO: 981327 - DNA, 33 bp, Homo sapien
attgttgtgtaagctaaaaagctggaggtcatc

SEQ ID NO: 981328 - DNA, 33 bp, Homo sapien
attgttgtgtaagctagaaagctggaggtcatc

SEQ ID NO: 981329 - DNA, 33 bp, Homo sapien
atgtgtggtacatggaatattttttattatgct

SEQ ID NO: 981330 - DNA, 33 bp, Homo sapien
atgtgtggtacatggagtattttttattatgct

SEQ ID NO: 981331 - DNA, 33 bp, Homo sapien
ttaaaccaaaataataagcaattttcaaagtac

SEQ ID NO: 981332 - DNA, 33 bp, Homo sapien
ttaaaccaaaataatatgcaattttcaaagtac

SEQ ID NO: 981333 - DNA, 33 bp, Homo sapien
tgactgcatcatttgacagttttgacacaaact

SEQ ID NO: 981334 - DNA, 33 bp, Homo sapien
tgactgcatcatttgagagttttgacacaaact

SEQ ID NO: 981335 - DNA, 33 bp, Homo sapien
gcatgaatgattatgacagtacagttggtctgc

SEQ ID NO: 981336 - DNA, 33 bp, Homo sapien
gcatgaatgattatgatagtacagttggtctgc

SEQ ID NO: 981337 - DNA, 33 bp, Homo sapien
tattagtatgcacatacacttcaacacaagagc

SEQ ID NO: 981338 - DNA, 33 bp, Homo sapien
tattagtatgcacatagacttcaacacaagagc

SEQ ID NO: 981339 - DNA, 33 bp, Homo sapien
atgtcaaataatcgaaatatgaagaattcattt

SEQ ID NO: 981340 - DNA, 33 bp, Homo sapien
atgtcaaataatcgaactatgaagaattcattt

SEQ ID NO: 981341 - DNA, 33 bp, Homo sapien
gacttctcaaagccaactgatctaaagacaaat

SEQ ID NO: 981342 - DNA, 33 bp, Homo sapien
gacttctcaaagccaattgatctaaagacaaat

SEQ ID NO: 981343 - DNA, 33 bp, Homo sapien
atgttctttgaatgacccatatgacaccacgct

SEQ ID NO: 981344 - DNA, 33 bp, Homo sapien
atgttctttgaatgacgcatatgacaccacgct

SEQ ID NO: 981345 - DNA, 33 bp, Homo sapien
atctcctttgctgtaacgcagcgtggtgtcata

SEQ ID NO: 981346 - DNA, 33 bp, Homo sapien
atctcctttgctgtaatgcagcgtggtgtcata

SEQ ID NO: 981347 - DNA, 33 bp, Homo sapien
ttttctccagcccttcccacgtgttcaactatc

SEQ ID NO: 981348 - DNA, 33 bp, Homo sapien
ttttctccagcccttctcacgtgttcaactatc

SEQ ID NO: 981349 - DNA, 33 bp, Homo sapien
atactttatatttgtaccactcgatacgtgttt

SEQ ID NO: 981350 - DNA, 33 bp, Homo sapien
atactttatatttgtagcactcgatacgtgttt

SEQ ID NO: 981351 - DNA, 33 bp, Homo sapien
gataatttgggagagacagcgtagaaacacgta

SEQ ID NO: 981352 - DNA, 33 bp, Homo sapien
gataatttgggagagagagcgtagaaacacgta

SEQ ID NO: 981353 - DNA, 33 bp, Homo sapien
caagcatcccacagccacgttgcctattgtctt

SEQ ID NO: 981354 - DNA, 33 bp, Homo sapien
caagcatcccacagccgcgttgcctattgtctt

SEQ ID NO: 981355 - DNA, 33 bp, Homo sapien
ggagaccactgtcttacaggattgttgtgaaaa

SEQ ID NO: 981356 - DNA, 33 bp, Homo sapien
ggagaccactgtcttagaggattgttgtgaaaa

SEQ ID NO: 981357 - DNA, 33 bp, Homo sapien
gtctttgtatcacttcacactcttatttcatga

SEQ ID NO: 981358 - DNA, 33 bp, Homo sapien
gtctttgtatcacttcgcactcttatttcatga

SEQ ID NO: 981359 - DNA, 33 bp, Homo sapien
ttggcaactgactgtaccaatggatctaattag

SEQ ID NO: 981360 - DNA, 33 bp, Homo sapien
ttggcaactgactgtatcaatggatctaattag

SEQ ID NO: 981361 - DNA, 33 bp, Homo sapien
tttctagctaattacacggtttgtgctgtgctc

SEQ ID NO: 981362 - DNA, 33 bp, Homo sapien
tttctagctaattacatggtttgtgctgtgctc

SEQ ID NO: 981363 - DNA, 33 bp, Homo sapien
agccacccaagaatccaggaatgagtataacat

SEQ ID NO: 981364 - DNA, 33 bp, Homo sapien
agccacccaagaatccgggaatgagtataacat

SEQ ID NO: 981365 - DNA, 33 bp, Homo sapien
gaacaatacaatgttccacagaaaaccataaaa

SEQ ID NO: 981366 - DNA, 33 bp, Homo sapien
gaacaatacaatgttctacagaaaaccataaaa

SEQ ID NO: 981367 - DNA, 33 bp, Homo sapien
aggatccacttaaagccgacatccaaatacatt

SEQ ID NO: 981368 - DNA, 33 bp, Homo sapien
aggatccacttaaagctgacatccaaatacatt

SEQ ID NO: 981369 - DNA, 33 bp, Homo sapien
tctgggcctctgcacacgatgtttcctctatct

SEQ ID NO: 981370 - DNA, 33 bp, Homo sapien
tctgggcctctgcacatgatgtttcctctatct

SEQ ID NO: 981371 - DNA, 33 bp, Homo sapien
catagtagacactcgacaaacgtctgttgacat

SEQ ID NO: 981372 - DNA, 33 bp, Homo sapien
catagtagacactcgataaacgtctgttgacat

SEQ ID NO: 981373 - DNA, 33 bp, Homo sapien
tgtctactatgagccccaagactgctaggcagt

SEQ ID NO: 981374 - DNA, 33 bp, Homo sapien
tgtctactatgagccctaagactgctaggcagt

SEQ ID NO: 981375 - DNA, 33 bp, Homo sapien
ggagaggggagatttaaggggagcttcaagagc

SEQ ID NO: 981376 - DNA, 33 bp, Homo sapien
ggagaggggagatttacggggagcttcaagagc

SEQ ID NO: 981377 - DNA, 33 bp, Homo sapien
ttcaatgaactcaaagccaaccttaattaatct

SEQ ID NO: 981378 - DNA, 33 bp, Homo sapien
ttcaatgaactcaaagtcaaccttaattaatct

SEQ ID NO: 981379 - DNA, 33 bp, Homo sapien
aatatgttatacaacaagaaaaaactaatacaa

SEQ ID NO: 981380 - DNA, 33 bp, Homo sapien
aatatgttatacaacaggaaaaaactaatacaa

SEQ ID NO: 981381 - DNA, 33 bp, Homo sapien
aagcaggtgcccaatacccatgtgtcctgctct

SEQ ID NO: 981382 - DNA, 33 bp, Homo sapien
aagcaggtgcccaatatccatgtgtcctgctct

SEQ ID NO: 981383 - DNA, 33 bp, Homo sapien
gtgtggcctttctagacgttactgcttgctgta

SEQ ID NO: 981384 - DNA, 33 bp, Homo sapien
gtgtggcctttctagatgttactgcttgctgta

SEQ ID NO: 981385 - DNA, 33 bp, Homo sapien
tttggtgctacaaaccaagccagattgttgcct

SEQ ID NO: 981386 - DNA, 33 bp, Homo sapien
tttggtgctacaaaccgagccagattgttgcct

SEQ ID NO: 981387 - DNA, 33 bp, Homo sapien
tagtaggctaaggaaaatttaaaaactagaagt

SEQ ID NO: 981388 - DNA, 33 bp, Homo sapien
tagtaggctaaggaaagtttaaaaactagaagt

SEQ ID NO: 981389 - DNA, 33 bp, Homo sapien
tggattgaagcattaacagtaatcatctctagg

SEQ ID NO: 981390 - DNA, 33 bp, Homo sapien
tggattgaagcattaatagtaatcatctctagg

SEQ ID NO: 981391 - DNA, 33 bp, Homo sapien
agaaggcagtgttacaaaaagcagtggctgtca

SEQ ID NO: 981392 - DNA, 33 bp, Homo sapien
agaaggcagtgttacagaaagcagtggctgtca

SEQ ID NO: 981393 - DNA, 33 bp, Homo sapien
gcatcatccaatccttcaaggacctaaatggca

SEQ ID NO: 981394 - DNA, 33 bp, Homo sapien
gcatcatccaatcctttaaggacctaaatggca

SEQ ID NO: 981395 - DNA, 33 bp, Homo sapien
ggaagaggaaggagtcaaagatttctgaccaca

SEQ ID NO: 981396 - DNA, 33 bp, Homo sapien
ggaagaggaaggagtccaagatttctgaccaca

SEQ ID NO: 981397 - DNA, 33 bp, Homo sapien
ggcccagagaaatgaactggaaggagccaggaa

SEQ ID NO: 981398 - DNA, 33 bp, Homo sapien
ggcccagagaaatgaattggaaggagccaggaa

SEQ ID NO: 981399 - DNA, 33 bp, Homo sapien
atgagggcaaggaaaacaggatgcaagatgtga

SEQ ID NO: 981400 - DNA, 33 bp, Homo sapien
atgagggcaaggaaaagaggatgcaagatgtga

SEQ ID NO: 981401 - DNA, 33 bp, Homo sapien
tcacatcagcaggaaacaaggagccattcagct

SEQ ID NO: 981402 - DNA, 33 bp, Homo sapien
tcacatcagcaggaaataaggagccattcagct

SEQ ID NO: 981403 - DNA, 33 bp, Homo sapien
gcgcccgggagtataacaatgctggctatcatc

SEQ ID NO: 981404 - DNA, 33 bp, Homo sapien
gcgcccgggagtataagaatgctggctatcatc

SEQ ID NO: 981405 - DNA, 33 bp, Homo sapien
cctgacgtgttggtaaccagcagtgtgtcactc

SEQ ID NO: 981406 - DNA, 33 bp, Homo sapien
cctgacgtgttggtaagcagcagtgtgtcactc

SEQ ID NO: 981407 - DNA, 33 bp, Homo sapien
tgtttggtcttaaggcaccttgatatcaacatg

SEQ ID NO: 981408 - DNA, 33 bp, Homo sapien
tgtttggtcttaaggcgccttgatatcaacatg

SEQ ID NO: 981409 - DNA, 33 bp, Homo sapien
tccagcaacacttaaccgcttctgggtgacagg

SEQ ID NO: 981410 - DNA, 33 bp, Homo sapien
tccagcaacacttaactgcttctgggtgacagg

SEQ ID NO: 981411 - DNA, 33 bp, Homo sapien
gacaagttctttaacccctcctggtctctgtta

SEQ ID NO: 981412 - DNA, 33 bp, Homo sapien
gacaagttctttaacctctcctggtctctgtta

SEQ ID NO: 981413 - DNA, 33 bp, Homo sapien
cacaacagtctggtgagataggaattattatta

SEQ ID NO: 981414 - DNA, 33 bp, Homo sapien
cacaacagtctggtgatataggaattattatta

SEQ ID NO: 981415 - DNA, 33 bp, Homo sapien
aggacaaagactgtagcatttcactaatatgag

SEQ ID NO: 981416 - DNA, 33 bp, Homo sapien
aggacaaagactgtaggatttcactaatatgag

SEQ ID NO: 981417 - DNA, 33 bp, Homo sapien
cagaaactacaggaacaaatttctgtctgtaag

SEQ ID NO: 981418 - DNA, 33 bp, Homo sapien
cagaaactacaggaaccaatttctgtctgtaag

SEQ ID NO: 981419 - DNA, 33 bp, Homo sapien
agagaagctgtgacgcaagcctttgcccatatg

SEQ ID NO: 981420 - DNA, 33 bp, Homo sapien
agagaagctgtgacgcgagcctttgcccatatg

SEQ ID NO: 981421 - DNA, 33 bp, Homo sapien
ttggcccatgctgaagaagctagggttgactac

SEQ ID NO: 981422 - DNA, 33 bp, Homo sapien
ttggcccatgctgaaggagctagggttgactac

SEQ ID NO: 981423 - DNA, 33 bp, Homo sapien
tcaaaagtgattctcaataagtacagcacccta

SEQ ID NO: 981424 - DNA, 33 bp, Homo sapien
tcaaaagtgattctcagtaagtacagcacccta

SEQ ID NO: 981425 - DNA, 33 bp, Homo sapien
ccatgaatggaatttcaaagattgaagaagcct

SEQ ID NO: 981426 - DNA, 33 bp, Homo sapien
ccatgaatggaatttcgaagattgaagaagcct

SEQ ID NO: 981427 - DNA, 33 bp, Homo sapien
ctgtaagttaagagacccctgcactattatagg

SEQ ID NO: 981428 - DNA, 33 bp, Homo sapien
ctgtaagttaagagactcctgcactattatagg

SEQ ID NO: 981429 - DNA, 33 bp, Homo sapien
gttctatgcaaacaaagtttcttcataaggaaa

SEQ ID NO: 981430 - DNA, 33 bp, Homo sapien
gttctatgcaaacaaattttcttcataaggaaa

SEQ ID NO: 981431 - DNA, 33 bp, Homo sapien
ctatccaagctacattcaagtgtcacatctggt

SEQ ID NO: 981432 - DNA, 33 bp, Homo sapien
ctatccaagctacatttaagtgtcacatctggt

SEQ ID NO: 981433 - DNA, 33 bp, Homo sapien
tccttagaacatgaaaagaatcctctatcctag

SEQ ID NO: 981434 - DNA, 33 bp, Homo sapien
tccttagaacatgaaaggaatcctctatcctag

SEQ ID NO: 981435 - DNA, 33 bp, Homo sapien
tctgattatgcaaataccttaaactacaaatat

SEQ ID NO: 981436 - DNA, 33 bp, Homo sapien
tctgattatgcaaatatcttaaactacaaatat

SEQ ID NO: 981437 - DNA, 33 bp, Homo sapien
acaagaacaatggtgaaaagaaaaacaaaggta

SEQ ID NO: 981438 - DNA, 33 bp, Homo sapien
acaagaacaatggtgataagaaaaacaaaggta

SEQ ID NO: 981439 - DNA, 33 bp, Homo sapien
tgtatttcttttccccaatacggtaggctatca

SEQ ID NO: 981440 - DNA, 33 bp, Homo sapien
tgtatttcttttccccgatacggtaggctatca

SEQ ID NO: 981441 - DNA, 33 bp, Homo sapien
gtgatgatttagtgcaaaccaaacgtaagtaag

SEQ ID NO: 981442 - DNA, 33 bp, Homo sapien
gtgatgatttagtgcagaccaaacgtaagtaag

SEQ ID NO: 981443 - DNA, 33 bp, Homo sapien
tgactgcagataggcacgaggaaagtttgtggg

SEQ ID NO: 981444 - DNA, 33 bp, Homo sapien
tgactgcagataggcatgaggaaagtttgtggg

SEQ ID NO: 981445 - DNA, 33 bp, Homo sapien
agtcttgcgatccaagaccatgtgccctgaaag

SEQ ID NO: 981446 - DNA, 33 bp, Homo sapien
agtcttgcgatccaaggccatgtgccctgaaag

SEQ ID NO: 981447 - DNA, 33 bp, Homo sapien
atggacggggagtaagacccaagcatctcacac

SEQ ID NO: 981448 - DNA, 33 bp, Homo sapien
atggacggggagtaaggcccaagcatctcacac

SEQ ID NO: 981449 - DNA, 33 bp, Homo sapien
agttgtttaagcatccaaataatatagagcaaa

SEQ ID NO: 981450 - DNA, 33 bp, Homo sapien
agttgtttaagcatccgaataatatagagcaaa

SEQ ID NO: 981451 - DNA, 33 bp, Homo sapien
tatgtgtattctcatcaccaaagatccaaacaa

SEQ ID NO: 981452 - DNA, 33 bp, Homo sapien
tatgtgtattctcatcgccaaagatccaaacaa

SEQ ID NO: 981453 - DNA, 33 bp, Homo sapien
ggacaaaactggcaaaagtctcagcctggccct

SEQ ID NO: 981454 - DNA, 33 bp, Homo sapien
ggacaaaactggcaaaggtctcagcctggccct

SEQ ID NO: 981455 - DNA, 33 bp, Homo sapien
ttctagacacctgatacggaaactatgttactt

SEQ ID NO: 981456 - DNA, 33 bp, Homo sapien
ttctagacacctgatatggaaactatgttactt

SEQ ID NO: 981457 - DNA, 33 bp, Homo sapien
gtggatattttgatgacggtgatctccaagcta

SEQ ID NO: 981458 - DNA, 33 bp, Homo sapien
gtggatattttgatgatggtgatctccaagcta

SEQ ID NO: 981459 - DNA, 33 bp, Homo sapien
tatttctgtttaaataactgtttaagttcatgt

SEQ ID NO: 981460 - DNA, 33 bp, Homo sapien
tatttctgtttaaatacctgtttaagttcatgt

SEQ ID NO: 981461 - DNA, 33 bp, Homo sapien
aattcttttgctttcacctttactcttagttac

SEQ ID NO: 981462 - DNA, 33 bp, Homo sapien
aattcttttgctttcatctttactcttagttac

SEQ ID NO: 981463 - DNA, 33 bp, Homo sapien
ggggctttgttcttggccattgggagctccatg

SEQ ID NO: 981464 - DNA, 33 bp, Homo sapien
ggggctttgttcttggtcattgggagctccatg

SEQ ID NO: 981465 - DNA, 33 bp, Homo sapien
cttgactttactggaactgatcacttgggagtt

SEQ ID NO: 981466 - DNA, 33 bp, Homo sapien
cttgactttactggaattgatcacttgggagtt

SEQ ID NO: 981467 - DNA, 33 bp, Homo sapien
ttatcaaagggataaactgggacaaacaatttt

SEQ ID NO: 981468 - DNA, 33 bp, Homo sapien
ttatcaaagggataaagtgggacaaacaatttt

SEQ ID NO: 981469 - DNA, 33 bp, Homo sapien
ggagtctgtttctccaacccctggaatccggga

SEQ ID NO: 981470 - DNA, 33 bp, Homo sapien
ggagtctgtttctccaccccctggaatccggga

SEQ ID NO: 981471 - DNA, 33 bp, Homo sapien
tggttacattttttaggagttttcagccagcta

SEQ ID NO: 981472 - DNA, 33 bp, Homo sapien
tggttacattttttagtagttttcagccagcta

SEQ ID NO: 981473 - DNA, 33 bp, Homo sapien
tgccttgcatcatttaccacaattagaaatcgc

SEQ ID NO: 981474 - DNA, 33 bp, Homo sapien
tgccttgcatcatttatcacaattagaaatcgc

SEQ ID NO: 981475 - DNA, 33 bp, Homo sapien
caagagtaccattaaaagagccttgtgtcaggc

SEQ ID NO: 981476 - DNA, 33 bp, Homo sapien
caagagtaccattaaaggagccttgtgtcaggc

SEQ ID NO: 981477 - DNA, 33 bp, Homo sapien
gcactgggtggtaggcagagagatgagaaagat

SEQ ID NO: 981478 - DNA, 33 bp, Homo sapien
gcactgggtggtaggcggagagatgagaaagat

SEQ ID NO: 981479 - DNA, 33 bp, Homo sapien
gtgctggccgcacacaaagctccgcccggctga

SEQ ID NO: 981480 - DNA, 33 bp, Homo sapien
gtgctggccgcacacagagctccgcccggctga

SEQ ID NO: 981481 - DNA, 33 bp, Homo sapien
tccctgggcacaaccaagttagacaagccagaa

SEQ ID NO: 981482 - DNA, 33 bp, Homo sapien
tccctgggcacaaccaggttagacaagccagaa

SEQ ID NO: 981483 - DNA, 33 bp, Homo sapien
taaggcaagagctggcacccaacttgtctgcct

SEQ ID NO: 981484 - DNA, 33 bp, Homo sapien
taaggcaagagctggcgcccaacttgtctgcct

SEQ ID NO: 981485 - DNA, 33 bp, Homo sapien
gtgaccagatgttttaggcttatgattctttat

SEQ ID NO: 981486 - DNA, 33 bp, Homo sapien
gtgaccagatgttttatgcttatgattctttat

SEQ ID NO: 981487 - DNA, 33 bp, Homo sapien
gtgagggcaactgggaagcgactgcagcaccca

SEQ ID NO: 981488 - DNA, 33 bp, Homo sapien
gtgagggcaactgggaggcgactgcagcaccca

SEQ ID NO: 981489 - DNA, 33 bp, Homo sapien
tgggttcaggggagaaaaatctagtcagaggaa

SEQ ID NO: 981490 - DNA, 33 bp, Homo sapien
tgggttcaggggagaagaatctagtcagaggaa

SEQ ID NO: 981491 - DNA, 33 bp, Homo sapien
ggatgtctttagcgaacgacaaagcccaggcca

SEQ ID NO: 981492 - DNA, 33 bp, Homo sapien
ggatgtctttagcgaatgacaaagcccaggcca

SEQ ID NO: 981493 - DNA, 33 bp, Homo sapien
aaagtcctgctttacaaatgaagtgacagaggc

SEQ ID NO: 981494 - DNA, 33 bp, Homo sapien
aaagtcctgctttacagatgaagtgacagaggc

SEQ ID NO: 981495 - DNA, 33 bp, Homo sapien
cccattttatacacaaagagctgtgcccaattc

SEQ ID NO: 981496 - DNA, 33 bp, Homo sapien
cccattttatacacaaggagctgtgcccaattc

SEQ ID NO: 981497 - DNA, 33 bp, Homo sapien
tgcacgatcggccctacgccaactcagaatact

SEQ ID NO: 981498 - DNA, 33 bp, Homo sapien
tgcacgatcggccctatgccaactcagaatact

SEQ ID NO: 981499 - DNA, 33 bp, Homo sapien
ccacctaaaatgatcaacccaatctacctctag

SEQ ID NO: 981500 - DNA, 33 bp, Homo sapien
ccacctaaaatgatcagcccaatctacctctag

SEQ ID NO: 981501 - DNA, 33 bp, Homo sapien
gggccagatgttaaaacgctcatttatggaaag

SEQ ID NO: 981502 - DNA, 33 bp, Homo sapien
gggccagatgttaaaatgctcatttatggaaag

SEQ ID NO: 981503 - DNA, 33 bp, Homo sapien
atggtagacaacctgcaatgtgtgggatggtca

SEQ ID NO: 981504 - DNA, 33 bp, Homo sapien
atggtagacaacctgcgatgtgtgggatggtca

SEQ ID NO: 981505 - DNA, 33 bp, Homo sapien
tggattatttaacagacggcttgggacagattg

SEQ ID NO: 981506 - DNA, 33 bp, Homo sapien
tggattatttaacagatggcttgggacagattg

SEQ ID NO: 981507 - DNA, 33 bp, Homo sapien
taggactgcaccaagacgaaaattgatttttct

SEQ ID NO: 981508 - DNA, 33 bp, Homo sapien
taggactgcaccaagatgaaaattgatttttct

SEQ ID NO: 981509 - DNA, 33 bp, Homo sapien
tagccagtgatagaaccaggatccagctcctgg

SEQ ID NO: 981510 - DNA, 33 bp, Homo sapien
tagccagtgatagaactaggatccagctcctgg

SEQ ID NO: 981511 - DNA, 33 bp, Homo sapien
ggggccatttcattggaaacattctctgtgctg

SEQ ID NO: 981512 - DNA, 33 bp, Homo sapien
ggggccatttcattgggaacattctctgtgctg

SEQ ID NO: 981513 - DNA, 33 bp, Homo sapien
caaagggaaacgagcacattcaataatgaagtc

SEQ ID NO: 981514 - DNA, 33 bp, Homo sapien
caaagggaaacgagcatattcaataatgaagtc

SEQ ID NO: 981515 - DNA, 33 bp, Homo sapien
gtagaagtgatgtgagcagaggctttaaatgtg

SEQ ID NO: 981516 - DNA, 33 bp, Homo sapien
gtagaagtgatgtgagtagaggctttaaatgtg

SEQ ID NO: 981517 - DNA, 33 bp, Homo sapien
attgtaaactcaacaacgatataattttccttc

SEQ ID NO: 981518 - DNA, 33 bp, Homo sapien
attgtaaactcaacaatgatataattttccttc

SEQ ID NO: 981519 - DNA, 33 bp, Homo sapien
tgagcaaattatcaaacagatgctttcatatta

SEQ ID NO: 981520 - DNA, 33 bp, Homo sapien
tgagcaaattatcaaatagatgctttcatatta

SEQ ID NO: 981521 - DNA, 33 bp, Homo sapien
gtaaatatccatcaatcatatgcacatacttcc

SEQ ID NO: 981522 - DNA, 33 bp, Homo sapien
gtaaatatccatcaattatatgcacatacttcc

SEQ ID NO: 981523 - DNA, 33 bp, Homo sapien
ctttttaatcacctggaaagtggtactgcaata

SEQ ID NO: 981524 - DNA, 33 bp, Homo sapien
ctttttaatcacctggcaagtggtactgcaata

SEQ ID NO: 981525 - DNA, 33 bp, Homo sapien
acgagccctcctcttacggcttcagtaatctaa

SEQ ID NO: 981526 - DNA, 33 bp, Homo sapien
acgagccctcctcttatggcttcagtaatctaa

SEQ ID NO: 981527 - DNA, 33 bp, Homo sapien
tactttttagaatcctcaaccttctcagtatag

SEQ ID NO: 981528 - DNA, 33 bp, Homo sapien
tactttttagaatcctgaaccttctcagtatag

SEQ ID NO: 981529 - DNA, 33 bp, Homo sapien
gaaccatcagagggacacgaactcacagagatg

SEQ ID NO: 981530 - DNA, 33 bp, Homo sapien
gaaccatcagagggacgcgaactcacagagatg

SEQ ID NO: 981531 - DNA, 33 bp, Homo sapien
gacaagaaaagtattaacaggccattagcttgg

SEQ ID NO: 981532 - DNA, 33 bp, Homo sapien
gacaagaaaagtattaccaggccattagcttgg

SEQ ID NO: 981533 - DNA, 33 bp, Homo sapien
tccacttagtgcagaaccctagaactttcctgg

SEQ ID NO: 981534 - DNA, 33 bp, Homo sapien
tccacttagtgcagaatcctagaactttcctgg

SEQ ID NO: 981535 - DNA, 33 bp, Homo sapien
aggattgctgttggacacttctgatagcacatt

SEQ ID NO: 981536 - DNA, 33 bp, Homo sapien
aggattgctgttggacgcttctgatagcacatt

SEQ ID NO: 981537 - DNA, 33 bp, Homo sapien
aaagactctgaccttaacagtggcaactgtgac

SEQ ID NO: 981538 - DNA, 33 bp, Homo sapien
aaagactctgaccttaccagtggcaactgtgac

SEQ ID NO: 981539 - DNA, 33 bp, Homo sapien
ttgccattgaaactggaactgcttgaaagagca

SEQ ID NO: 981540 - DNA, 33 bp, Homo sapien
ttgccattgaaactggtactgcttgaaagagca

SEQ ID NO: 981541 - DNA, 33 bp, Homo sapien
atatagcacacattcaataaatacttgagggag

SEQ ID NO: 981542 - DNA, 33 bp, Homo sapien
atatagcacacattcagtaaatacttgagggag

SEQ ID NO: 981543 - DNA, 33 bp, Homo sapien
tgtgtatctcattgtacctcattgctgacttac

SEQ ID NO: 981544 - DNA, 33 bp, Homo sapien
tgtgtatctcattgtatctcattgctgacttac

SEQ ID NO: 981545 - DNA, 33 bp, Homo sapien
tcctgaaattcttaaaacaccaatatttgcttg

SEQ ID NO: 981546 - DNA, 33 bp, Homo sapien
tcctgaaattcttaaagcaccaatatttgcttg

SEQ ID NO: 981547 - DNA, 33 bp, Homo sapien
caattgcttctcactacggagtcttgcacataa

SEQ ID NO: 981548 - DNA, 33 bp, Homo sapien
caattgcttctcactatggagtcttgcacataa

SEQ ID NO: 981549 - DNA, 33 bp, Homo sapien
tgactgcaatcatgtaagtgagcccaggcaaag

SEQ ID NO: 981550 - DNA, 33 bp, Homo sapien
tgactgcaatcatgtacgtgagcccaggcaaag

SEQ ID NO: 981551 - DNA, 33 bp, Homo sapien
catggcaaaagaatgtaaacaggcagacatggt

SEQ ID NO: 981552 - DNA, 33 bp, Homo sapien
catggcaaaagaatgtgaacaggcagacatggt

SEQ ID NO: 981553 - DNA, 33 bp, Homo sapien
gcagtgacctgggagaaagatggtgtggttagt

SEQ ID NO: 981554 - DNA, 33 bp, Homo sapien
gcagtgacctgggagagagatggtgtggttagt

SEQ ID NO: 981555 - DNA, 33 bp, Homo sapien
gaggttaaagactctaccacttattttctgtag

SEQ ID NO: 981556 - DNA, 33 bp, Homo sapien
gaggttaaagactctatcacttattttctgtag

SEQ ID NO: 981557 - DNA, 33 bp, Homo sapien
tcttgagcctggagggaaatcactctcatgggc

SEQ ID NO: 981558 - DNA, 33 bp, Homo sapien
tcttgagcctggaggggaatcactctcatgggc

SEQ ID NO: 981559 - DNA, 33 bp, Homo sapien
gtgatccacctgtgaagggttggaagtaaagct

SEQ ID NO: 981560 - DNA, 33 bp, Homo sapien
gtgatccacctgtgaatggttggaagtaaagct

SEQ ID NO: 981561 - DNA, 33 bp, Homo sapien
agcatccctctccttcactttatgtctgcctgc

SEQ ID NO: 981562 - DNA, 33 bp, Homo sapien
agcatccctctccttccctttatgtctgcctgc

SEQ ID NO: 981563 - DNA, 33 bp, Homo sapien
cagcttgcattacagacgcaaccagattttggg

SEQ ID NO: 981564 - DNA, 33 bp, Homo sapien
cagcttgcattacagaggcaaccagattttggg

SEQ ID NO: 981565 - DNA, 33 bp, Homo sapien
tgggatgcaaagatccactcatgcaatcaatca

SEQ ID NO: 981566 - DNA, 33 bp, Homo sapien
tgggatgcaaagatcctctcatgcaatcaatca

SEQ ID NO: 981567 - DNA, 33 bp, Homo sapien
agcttctagggtgagaagatgtttcagagcgac

SEQ ID NO: 981568 - DNA, 33 bp, Homo sapien
agcttctagggtgagaggatgtttcagagcgac

SEQ ID NO: 981569 - DNA, 33 bp, Homo sapien
aggccccggatgtacccgccaagctgggcgtca

SEQ ID NO: 981570 - DNA, 33 bp, Homo sapien
aggccccggatgtacctgccaagctgggcgtca

SEQ ID NO: 981571 - DNA, 33 bp, Homo sapien
tcattcctggaaagccacaggataatgtactgt

SEQ ID NO: 981572 - DNA, 33 bp, Homo sapien
tcattcctggaaagccgcaggataatgtactgt

SEQ ID NO: 981573 - DNA, 33 bp, Homo sapien
cgatgagttagtcaccacagatgaacttcacct

SEQ ID NO: 981574 - DNA, 33 bp, Homo sapien
cgatgagttagtcaccgcagatgaacttcacct

SEQ ID NO: 981575 - DNA, 33 bp, Homo sapien
acaccctgaattatcacctcctcccagaattcc

SEQ ID NO: 981576 - DNA, 33 bp, Homo sapien
acaccctgaattatcatctcctcccagaattcc

SEQ ID NO: 981577 - DNA, 33 bp, Homo sapien
cacctagaatccagacaccaaggatgatgcaca

SEQ ID NO: 981578 - DNA, 33 bp, Homo sapien
cacctagaatccagacgccaaggatgatgcaca

SEQ ID NO: 981579 - DNA, 33 bp, Homo sapien
caaggtccctgggataaaagccagccagttcct

SEQ ID NO: 981580 - DNA, 33 bp, Homo sapien
caaggtccctgggatagaagccagccagttcct

SEQ ID NO: 981581 - DNA, 33 bp, Homo sapien
accatcctccaaaggcagcatcccttgtttaga

SEQ ID NO: 981582 - DNA, 33 bp, Homo sapien
accatcctccaaaggccgcatcccttgtttaga

SEQ ID NO: 981583 - DNA, 33 bp, Homo sapien
agagccaggttacccacgtttacagggactctg

SEQ ID NO: 981584 - DNA, 33 bp, Homo sapien
agagccaggttacccatgtttacagggactctg

SEQ ID NO: 981585 - DNA, 33 bp, Homo sapien
tcagcaaatatttaataagaacctggtctctat

SEQ ID NO: 981586 - DNA, 33 bp, Homo sapien
tcagcaaatatttaatgagaacctggtctctat

SEQ ID NO: 981587 - DNA, 33 bp, Homo sapien
gagcagtgagaaagacacaaagagacaccagac

SEQ ID NO: 981588 - DNA, 33 bp, Homo sapien
gagcagtgagaaagacgcaaagagacaccagac

SEQ ID NO: 981589 - DNA, 33 bp, Homo sapien
aacaagtaactacccaccagggcagtggacaca

SEQ ID NO: 981590 - DNA, 33 bp, Homo sapien
aacaagtaactacccatcagggcagtggacaca

SEQ ID NO: 981591 - DNA, 33 bp, Homo sapien
aataagtagcattccacagagctcaaggtctag

SEQ ID NO: 981592 - DNA, 33 bp, Homo sapien
aataagtagcattccatagagctcaaggtctag

SEQ ID NO: 981593 - DNA, 33 bp, Homo sapien
ttttatattgtcttacaggtcactgatactcag

SEQ ID NO: 981594 - DNA, 33 bp, Homo sapien
ttttatattgtcttacgggtcactgatactcag

SEQ ID NO: 981595 - DNA, 33 bp, Homo sapien
tttccatctgttgatcccattccatgatggtca

SEQ ID NO: 981596 - DNA, 33 bp, Homo sapien
tttccatctgttgatctcattccatgatggtca

SEQ ID NO: 981597 - DNA, 33 bp, Homo sapien
gctgcaataataaacacctgcaaaaatctcaat

SEQ ID NO: 981598 - DNA, 33 bp, Homo sapien
gctgcaataataaacagctgcaaaaatctcaat

SEQ ID NO: 981599 - DNA, 33 bp, Homo sapien
gccatgaaatatgggtaaaaataatgactgcca

SEQ ID NO: 981600 - DNA, 33 bp, Homo sapien
gccatgaaatatgggtgaaaataatgactgcca

SEQ ID NO: 981601 - DNA, 33 bp, Homo sapien
tcatggagctttttcacggcagaagacaaaagc

SEQ ID NO: 981602 - DNA, 33 bp, Homo sapien
tcatggagctttttcatggcagaagacaaaagc

SEQ ID NO: 981603 - DNA, 33 bp, Homo sapien
tgatctgtaacacttacgaccatcagaggccat

SEQ ID NO: 981604 - DNA, 33 bp, Homo sapien
tgatctgtaacacttatgaccatcagaggccat

SEQ ID NO: 981605 - DNA, 33 bp, Homo sapien
actgagaggaatacaacgtcacctttgttggat

SEQ ID NO: 981606 - DNA, 33 bp, Homo sapien
actgagaggaatacaatgtcacctttgttggat

SEQ ID NO: 981607 - DNA, 33 bp, Homo sapien
gttttgggccaaatcaatagtggagccaggcac

SEQ ID NO: 981608 - DNA, 33 bp, Homo sapien
gttttgggccaaatcagtagtggagccaggcac

SEQ ID NO: 981609 - DNA, 33 bp, Homo sapien
gtatgcgtgagtgtaccgaggttggacaggtgt

SEQ ID NO: 981610 - DNA, 33 bp, Homo sapien
gtatgcgtgagtgtactgaggttggacaggtgt

SEQ ID NO: 981611 - DNA, 33 bp, Homo sapien
aatttacagcaaggacagggaattgttgtaaag

SEQ ID NO: 981612 - DNA, 33 bp, Homo sapien
aatttacagcaaggaccgggaattgttgtaaag

SEQ ID NO: 981613 - DNA, 33 bp, Homo sapien
tagaaatatcaagcaacgttagactttaagtga

SEQ ID NO: 981614 - DNA, 33 bp, Homo sapien
tagaaatatcaagcaatgttagactttaagtga

SEQ ID NO: 981615 - DNA, 33 bp, Homo sapien
gcgtacagcaaagtaaagtttacaatactttgt

SEQ ID NO: 981616 - DNA, 33 bp, Homo sapien
gcgtacagcaaagtaaggtttacaatactttgt

SEQ ID NO: 981617 - DNA, 33 bp, Homo sapien
tgttttcctacaagacaccttattccttattcc

SEQ ID NO: 981618 - DNA, 33 bp, Homo sapien
tgttttcctacaagactccttattccttattcc

SEQ ID NO: 981619 - DNA, 33 bp, Homo sapien
gttctaaaggaagggaactgggcaaaaactgaa

SEQ ID NO: 981620 - DNA, 33 bp, Homo sapien
gttctaaaggaagggatctgggcaaaaactgaa

SEQ ID NO: 981621 - DNA, 33 bp, Homo sapien
tctggactgtcaattcaagaattatttgttaaa

SEQ ID NO: 981622 - DNA, 33 bp, Homo sapien
tctggactgtcaattccagaattatttgttaaa

SEQ ID NO: 981623 - DNA, 33 bp, Homo sapien
gttgagcatgtttaccaacacacagcaccccgg

SEQ ID NO: 981624 - DNA, 33 bp, Homo sapien
gttgagcatgtttacctacacacagcaccccgg

SEQ ID NO: 981625 - DNA, 33 bp, Homo sapien
taggagcttagctctcccgactctcgggccact

SEQ ID NO: 981626 - DNA, 33 bp, Homo sapien
taggagcttagctctctcgactctcgggccact

SEQ ID NO: 981627 - DNA, 33 bp, Homo sapien
ctttgcttaccacctaacgtgggccctgcacac

SEQ ID NO: 981628 - DNA, 33 bp, Homo sapien
ctttgcttaccacctagcgtgggccctgcacac

SEQ ID NO: 981629 - DNA, 33 bp, Homo sapien
ttggtatagcggagaacgattctatacacttta

SEQ ID NO: 981630 - DNA, 33 bp, Homo sapien
ttggtatagcggagaatgattctatacacttta

SEQ ID NO: 981631 - DNA, 33 bp, Homo sapien
gtaatgactgcaggtacgaggggcctaaaggac

SEQ ID NO: 981632 - DNA, 33 bp, Homo sapien
gtaatgactgcaggtaggaggggcctaaaggac

SEQ ID NO: 981633 - DNA, 33 bp, Homo sapien
gctctggcttttacgaccagtccatatccctgg

SEQ ID NO: 981634 - DNA, 33 bp, Homo sapien
gctctggcttttacgatcagtccatatccctgg

SEQ ID NO: 981635 - DNA, 33 bp, Homo sapien
tcttggtcatggggaacgggcttagagcttccc

SEQ ID NO: 981636 - DNA, 33 bp, Homo sapien
tcttggtcatggggaatgggcttagagcttccc

SEQ ID NO: 981637 - DNA, 33 bp, Homo sapien
cttgtagaggggggctcaacttgccaggctacg

SEQ ID NO: 981638 - DNA, 33 bp, Homo sapien
cttgtagaggggggcttaacttgccaggctacg

SEQ ID NO: 981639 - DNA, 33 bp, Homo sapien
ttcaactgacagggcacctaagattttacagta

SEQ ID NO: 981640 - DNA, 33 bp, Homo sapien
ttcaactgacagggcatctaagattttacagta

SEQ ID NO: 981641 - DNA, 33 bp, Homo sapien
aaagtagagaaaggaggattttatttcataaac

SEQ ID NO: 981642 - DNA, 33 bp, Homo sapien
aaagtagagaaaggagtattttatttcataaac

SEQ ID NO: 981643 - DNA, 33 bp, Homo sapien
atgcactgatatctacaagatttccaaaccaga

SEQ ID NO: 981644 - DNA, 33 bp, Homo sapien
atgcactgatatctacgagatttccaaaccaga

SEQ ID NO: 981645 - DNA, 33 bp, Homo sapien
gtcatctagtgagcaaagtaaacatgaaataga

SEQ ID NO: 981646 - DNA, 33 bp, Homo sapien
gtcatctagtgagcaaggtaaacatgaaataga

SEQ ID NO: 981647 - DNA, 33 bp, Homo sapien
atctgctcttggctaccggatgatggggctcta

SEQ ID NO: 981648 - DNA, 33 bp, Homo sapien
atctgctcttggctactggatgatggggctcta

SEQ ID NO: 981649 - DNA, 33 bp, Homo sapien
ctataatcgtgcttcacagatataaatactcct

SEQ ID NO: 981650 - DNA, 33 bp, Homo sapien
ctataatcgtgcttcatagatataaatactcct

SEQ ID NO: 981651 - DNA, 33 bp, Homo sapien
aagaaaattacagagacgagagcagaaattaat

SEQ ID NO: 981652 - DNA, 33 bp, Homo sapien
aagaaaattacagagatgagagcagaaattaat

SEQ ID NO: 981653 - DNA, 33 bp, Homo sapien
ctgtggatagggccctcagacaacttactcatg

SEQ ID NO: 981654 - DNA, 33 bp, Homo sapien
ctgtggatagggcccttagacaacttactcatg

SEQ ID NO: 981655 - DNA, 33 bp, Homo sapien
cagaggtaagattggaaaccaaatgtcctgatc

SEQ ID NO: 981656 - DNA, 33 bp, Homo sapien
cagaggtaagattggagaccaaatgtcctgatc

SEQ ID NO: 981657 - DNA, 33 bp, Homo sapien
ctgatcatgtgactaacaacgggcggtagacat

SEQ ID NO: 981658 - DNA, 33 bp, Homo sapien
ctgatcatgtgactaagaacgggcggtagacat

SEQ ID NO: 981659 - DNA, 33 bp, Homo sapien
aatgagggattggaaaagtgaaacagcaaacgg

SEQ ID NO: 981660 - DNA, 33 bp, Homo sapien
aatgagggattggaaaggtgaaacagcaaacgg

SEQ ID NO: 981661 - DNA, 33 bp, Homo sapien
tacgtttttctggcaaacccccttgacggtgct

SEQ ID NO: 981662 - DNA, 33 bp, Homo sapien
tacgtttttctggcaatcccccttgacggtgct

SEQ ID NO: 981663 - DNA, 33 bp, Homo sapien
acaaacaaaaatcctaccttgattgccccactc

SEQ ID NO: 981664 - DNA, 33 bp, Homo sapien
acaaacaaaaatcctatcttgattgccccactc

SEQ ID NO: 981665 - DNA, 33 bp, Homo sapien
actacctttgcctatccagacaatttccctctt

SEQ ID NO: 981666 - DNA, 33 bp, Homo sapien
actacctttgcctatctagacaatttccctctt

SEQ ID NO: 981667 - DNA, 33 bp, Homo sapien
tctccaaatgtttagacatggcttaggtggtca

SEQ ID NO: 981668 - DNA, 33 bp, Homo sapien
tctccaaatgtttagagatggcttaggtggtca

SEQ ID NO: 981669 - DNA, 33 bp, Homo sapien
acctcgattcttcttacgtggaagaccgctggg

SEQ ID NO: 981670 - DNA, 33 bp, Homo sapien
acctcgattcttcttatgtggaagaccgctggg

SEQ ID NO: 981671 - DNA, 33 bp, Homo sapien
cactccgaagtttacccgagtggagcggcggca

SEQ ID NO: 981672 - DNA, 33 bp, Homo sapien
cactccgaagtttacctgagtggagcggcggca

SEQ ID NO: 981673 - DNA, 33 bp, Homo sapien
ggtaaggcccttctccaagtgcaggtaactcac

SEQ ID NO: 981674 - DNA, 33 bp, Homo sapien
ggtaaggcccttctccgagtgcaggtaactcac

SEQ ID NO: 981675 - DNA, 33 bp, Homo sapien
atttgtaacacattcacataggcgtaatagagg

SEQ ID NO: 981676 - DNA, 33 bp, Homo sapien
atttgtaacacattcagataggcgtaatagagg

SEQ ID NO: 981677 - DNA, 33 bp, Homo sapien
actgcacagcttctgcacatagagataacggtg

SEQ ID NO: 981678 - DNA, 33 bp, Homo sapien
actgcacagcttctgcgcatagagataacggtg

SEQ ID NO: 981679 - DNA, 33 bp, Homo sapien
tttcaaatattagcataaagtgattcacaaaat
